United States Patent Application Publication US 2007/0048756 A1 - sequence listing, part 3

SEQ ID NO: 71661 - DNA, 33 bp, Homo sapien
gccatgggcccaaatacgtaactggaaaaaggg

SEQ ID NO: 71662 - DNA, 33 bp, Homo sapien
gccatgggcccaaatatgtaactggaaaaaggg

SEQ ID NO: 71663 - DNA, 33 bp, Homo sapien
gtttaaaaatgcattaacctaactcccttgtca

SEQ ID NO: 71664 - DNA, 33 bp, Homo sapien
gtttaaaaatgcattagcctaactcccttgtca

SEQ ID NO: 71665 - DNA, 33 bp, Homo sapien
ccaggacatcttagtaacctgcctgtttgggtg

SEQ ID NO: 71666 - DNA, 33 bp, Homo sapien
ccaggacatcttagtagcctgcctgtttgggtg

SEQ ID NO: 71667 - DNA, 33 bp, Homo sapien
aatttaaaccaatttgaacttgataattttaat

SEQ ID NO: 71668 - DNA, 33 bp, Homo sapien
aatttaaaccaatttggacttgataattttaat

SEQ ID NO: 71669 - DNA, 33 bp, Homo sapien
attctctagtccataaacctacaacctacggca

SEQ ID NO: 71670 - DNA, 33 bp, Homo sapien
attctctagtccataagcctacaacctacggca

SEQ ID NO: 71671 - DNA, 33 bp, Homo sapien
agtagaagaggagaacaaggtattgcagctact

SEQ ID NO: 71672 - DNA, 33 bp, Homo sapien
agtagaagaggagaaccaggtattgcagctact

SEQ ID NO: 71673 - DNA, 33 bp, Homo sapien
ttcctaagacaaaaccacctgccaactgaaagc

SEQ ID NO: 71674 - DNA, 33 bp, Homo sapien
ttcctaagacaaaaccgcctgccaactgaaagc

SEQ ID NO: 71675 - DNA, 33 bp, Homo sapien
tccactttattatacacgaactgcagcaaatct

SEQ ID NO: 71676 - DNA, 33 bp, Homo sapien
tccactttattatacatgaactgcagcaaatct

SEQ ID NO: 71677 - DNA, 33 bp, Homo sapien
caaggttatatttctaacaacttagacaaactt

SEQ ID NO: 71678 - DNA, 33 bp, Homo sapien
caaggttatatttctatcaacttagacaaactt

SEQ ID NO: 71679 - DNA, 33 bp, Homo sapien
cattagtggagaaacaaagggcaacttcacaat

SEQ ID NO: 71680 - DNA, 33 bp, Homo sapien
cattagtggagaaacagagggcaacttcacaat

SEQ ID NO: 71681 - DNA, 33 bp, Homo sapien
actccatcttgtgcaacagagttaggccccaac

SEQ ID NO: 71682 - DNA, 33 bp, Homo sapien
actccatcttgtgcaatagagttaggccccaac

SEQ ID NO: 71683 - DNA, 33 bp, Homo sapien
atttttcaaatagagccgatgctgctttagagg

SEQ ID NO: 71684 - DNA, 33 bp, Homo sapien
atttttcaaatagagctgatgctgctttagagg

SEQ ID NO: 71685 - DNA, 33 bp, Homo sapien
gcccttttgggaatcaatcctctagatactcct

SEQ ID NO: 71686 - DNA, 33 bp, Homo sapien
gcccttttgggaatcagtcctctagatactcct

SEQ ID NO: 71687 - DNA, 33 bp, Homo sapien
tatcacaaagaataaaacagtgcattgccaagt

SEQ ID NO: 71688 - DNA, 33 bp, Homo sapien
tatcacaaagaataaagcagtgcattgccaagt

SEQ ID NO: 71689 - DNA, 33 bp, Homo sapien
ttctcagtgagaaggcaaaagtcaaccctggat

SEQ ID NO: 71690 - DNA, 33 bp, Homo sapien
ttctcagtgagaaggcgaaagtcaaccctggat

SEQ ID NO: 71691 - DNA, 33 bp, Homo sapien
ataaacagttaatatcaaatgtggtccaagcta

SEQ ID NO: 71692 - DNA, 33 bp, Homo sapien
ataaacagttaatatcgaatgtggtccaagcta

SEQ ID NO: 71693 - DNA, 33 bp, Homo sapien
cttacgcctcaaaagactcagtaacttttccat

SEQ ID NO: 71694 - DNA, 33 bp, Homo sapien
cttacgcctcaaaagattcagtaacttttccat

SEQ ID NO: 71695 - DNA, 33 bp, Homo sapien
gacctaggacaattacacacagcttttccttgc

SEQ ID NO: 71696 - DNA, 33 bp, Homo sapien
gacctaggacaattacccacagcttttccttgc

SEQ ID NO: 71697 - DNA, 33 bp, Homo sapien
tccttgccctcaggaacgtctcagcctcagggg

SEQ ID NO: 71698 - DNA, 33 bp, Homo sapien
tccttgccctcaggaatgtctcagcctcagggg

SEQ ID NO: 71699 - DNA, 33 bp, Homo sapien
caatgatggataagatcacagccgtgctaagaa

SEQ ID NO: 71700 - DNA, 33 bp, Homo sapien
caatgatggataagattacagccgtgctaagaa

SEQ ID NO: 71701 - DNA, 33 bp, Homo sapien
gtttgataagctgcaaattctggagttcctaag

SEQ ID NO: 71702 - DNA, 33 bp, Homo sapien
gtttgataagctgcaagttctggagttcctaag

SEQ ID NO: 71703 - DNA, 33 bp, Homo sapien
tcacttatgaagttaacacataccctacctatt

SEQ ID NO: 71704 - DNA, 33 bp, Homo sapien
tcacttatgaagttaatacataccctacctatt

SEQ ID NO: 71705 - DNA, 33 bp, Homo sapien
ggggaaattgatatgaaattcccttggtcttat

SEQ ID NO: 71706 - DNA, 33 bp, Homo sapien
ggggaaattgatatgacattcccttggtcttat

SEQ ID NO: 71707 - DNA, 33 bp, Homo sapien
tcctttgagcagttgaatatcaccaaatcctta

SEQ ID NO: 71708 - DNA, 33 bp, Homo sapien
tcctttgagcagttgagtatcaccaaatcctta

SEQ ID NO: 71709 - DNA, 33 bp, Homo sapien
cctgggcctctagagacgagatactgcatgtgg

SEQ ID NO: 71710 - DNA, 33 bp, Homo sapien
cctgggcctctagagatgagatactgcatgtgg

SEQ ID NO: 71711 - DNA, 33 bp, Homo sapien
caattttcatccagtcaactcctatttgtcttt

SEQ ID NO: 71712 - DNA, 33 bp, Homo sapien
caattttcatccagtcgactcctatttgtcttt

SEQ ID NO: 71713 - DNA, 33 bp, Homo sapien
aaggttgactccaaacacgttctgaaagacaaa

SEQ ID NO: 71714 - DNA, 33 bp, Homo sapien
aaggttgactccaaacgcgttctgaaagacaaa

SEQ ID NO: 71715 - DNA, 33 bp, Homo sapien
ttcttttgagggaagaaatacaatgtgttaaaa

SEQ ID NO: 71716 - DNA, 33 bp, Homo sapien
ttcttttgagggaagagatacaatgtgttaaaa

SEQ ID NO: 71717 - DNA, 33 bp, Homo sapien
tcatgattccagtttacggcatttttgctttat

SEQ ID NO: 71718 - DNA, 33 bp, Homo sapien
tcatgattccagtttatggcatttttgctttat

SEQ ID NO: 71719 - DNA, 33 bp, Homo sapien
ctttccatgagactggccacaagtatcttaaac

SEQ ID NO: 71720 - DNA, 33 bp, Homo sapien
ctttccatgagactggtcacaagtatcttaaac

SEQ ID NO: 71721 - DNA, 33 bp, Homo sapien
tcacatgaccgccacaatgaactcatatttaac

SEQ ID NO: 71722 - DNA, 33 bp, Homo sapien
tcacatgaccgccacagtgaactcatatttaac

SEQ ID NO: 71723 - DNA, 33 bp, Homo sapien
gagtttgtaataagcaaaaaatattccaactca

SEQ ID NO: 71724 - DNA, 33 bp, Homo sapien
gagtttgtaataagcagaaaatattccaactca

SEQ ID NO: 71725 - DNA, 33 bp, Homo sapien
tattccaactcagagcaaatagtcagttcagca

SEQ ID NO: 71726 - DNA, 33 bp, Homo sapien
tattccaactcagagcgaatagtcagttcagca

SEQ ID NO: 71727 - DNA, 33 bp, Homo sapien
taatgaaagcgtctgaaatattgtgagaaatgc

SEQ ID NO: 71728 - DNA, 33 bp, Homo sapien
taatgaaagcgtctgacatattgtgagaaatgc

SEQ ID NO: 71729 - DNA, 33 bp, Homo sapien
ctgcttttatgttatccaaagaggagtgcagga

SEQ ID NO: 71730 - DNA, 33 bp, Homo sapien
ctgcttttatgttatcgaaagaggagtgcagga

SEQ ID NO: 71731 - DNA, 33 bp, Homo sapien
ggcttagaggtaggaccgattacatttgcctgg

SEQ ID NO: 71732 - DNA, 33 bp, Homo sapien
ggcttagaggtaggactgattacatttgcctgg

SEQ ID NO: 71733 - DNA, 33 bp, Homo sapien
catggtcagtgtactacaaaatttccacataaa

SEQ ID NO: 71734 - DNA, 33 bp, Homo sapien
catggtcagtgtactataaaatttccacataaa

SEQ ID NO: 71735 - DNA, 33 bp, Homo sapien
gaatagtattatcctccattatccactgtggta

SEQ ID NO: 71736 - DNA, 33 bp, Homo sapien
gaatagtattatcctctattatccactgtggta

SEQ ID NO: 71737 - DNA, 33 bp, Homo sapien
gctactcaaaaaacagaatatgcaagcgattat

SEQ ID NO: 71738 - DNA, 33 bp, Homo sapien
gctactcaaaaaacagtatatgcaagcgattat

SEQ ID NO: 71739 - DNA, 33 bp, Homo sapien
cagtgttacagaaagaaggaaggcaattttagc

SEQ ID NO: 71740 - DNA, 33 bp, Homo sapien
cagtgttacagaaagacggaaggcaattttagc

SEQ ID NO: 71741 - DNA, 33 bp, Homo sapien
gtcatagatacctgaccaaaagtatgtgtttca

SEQ ID NO: 71742 - DNA, 33 bp, Homo sapien
gtcatagatacctgacgaaaagtatgtgtttca

SEQ ID NO: 71743 - DNA, 33 bp, Homo sapien
ttgtcaaatagatagccaacttgtgtgtgacca

SEQ ID NO: 71744 - DNA, 33 bp, Homo sapien
ttgtcaaatagatagctaacttgtgtgtgacca

SEQ ID NO: 71745 - DNA, 33 bp, Homo sapien
ctagatttacttttgccataagtgttcactaat

SEQ ID NO: 71746 - DNA, 33 bp, Homo sapien
ctagatttacttttgcgataagtgttcactaat

SEQ ID NO: 71747 - DNA, 33 bp, Homo sapien
ttagcctttctaagcccgagttgtctcatctac

SEQ ID NO: 71748 - DNA, 33 bp, Homo sapien
ttagcctttctaagcctgagttgtctcatctac

SEQ ID NO: 71749 - DNA, 33 bp, Homo sapien
gtacattgaagagtaacgttcagtttaaatttg

SEQ ID NO: 71750 - DNA, 33 bp, Homo sapien
gtacattgaagagtaatgttcagtttaaatttg

SEQ ID NO: 71751 - DNA, 33 bp, Homo sapien
acctggctagggatacaaggccattaaccaagc

SEQ ID NO: 71752 - DNA, 33 bp, Homo sapien
acctggctagggatacgaggccattaaccaagc

SEQ ID NO: 71753 - DNA, 33 bp, Homo sapien
caccgccttcagatgaaaatgaatgttgagact

SEQ ID NO: 71754 - DNA, 33 bp, Homo sapien
caccgccttcagatgagaatgaatgttgagact

SEQ ID NO: 71755 - DNA, 33 bp, Homo sapien
accttgttgctgtacacattattcagcactgct

SEQ ID NO: 71756 - DNA, 33 bp, Homo sapien
accttgttgctgtacagattattcagcactgct

SEQ ID NO: 71757 - DNA, 33 bp, Homo sapien
ccttgcaggttgactgcactcaatttcctttag

SEQ ID NO: 71758 - DNA, 33 bp, Homo sapien
ccttgcaggttgactgtactcaatttcctttag

SEQ ID NO: 71759 - DNA, 33 bp, Homo sapien
aagaaatcagtgcatcaagggcatatgatgcta

SEQ ID NO: 71760 - DNA, 33 bp, Homo sapien
aagaaatcagtgcatcgagggcatatgatgcta

SEQ ID NO: 71761 - DNA, 33 bp, Homo sapien
aactgtagtaacttgaagttggcttacagagag

SEQ ID NO: 71762 - DNA, 33 bp, Homo sapien
aactgtagtaacttgatgttggcttacagagag

SEQ ID NO: 71763 - DNA, 33 bp, Homo sapien
aaagatcttatggtgaaaggacagaatcttgaa

SEQ ID NO: 71764 - DNA, 33 bp, Homo sapien
aaagatcttatggtgagaggacagaatcttgaa

SEQ ID NO: 71765 - DNA, 33 bp, Homo sapien
tgagatttactcactacaagaacagtatggggg

SEQ ID NO: 71766 - DNA, 33 bp, Homo sapien
tgagatttactcactataagaacagtatggggg

SEQ ID NO: 71767 - DNA, 33 bp, Homo sapien
accctatcatttggtaacacttttcaaaaatgt

SEQ ID NO: 71768 - DNA, 33 bp, Homo sapien
accctatcatttggtagcacttttcaaaaatgt

SEQ ID NO: 71769 - DNA, 33 bp, Homo sapien
gggacagcagcaacaaatatttctcccacatcc

SEQ ID NO: 71770 - DNA, 33 bp, Homo sapien
gggacagcagcaacaagtatttctcccacatcc

SEQ ID NO: 71771 - DNA, 33 bp, Homo sapien
taactttgaaataggacgtaggactcgactctg

SEQ ID NO: 71772 - DNA, 33 bp, Homo sapien
taactttgaaataggatgtaggactcgactctg

SEQ ID NO: 71773 - DNA, 33 bp, Homo sapien
ttgcctgatgggggaaacccagaatttcatccc

SEQ ID NO: 71774 - DNA, 33 bp, Homo sapien
ttgcctgatgggggaatcccagaatttcatccc

SEQ ID NO: 71775 - DNA, 33 bp, Homo sapien
cagagtatcaaaaacccggaggcttagaataac

SEQ ID NO: 71776 - DNA, 33 bp, Homo sapien
cagagtatcaaaaacctggaggcttagaataac

SEQ ID NO: 71777 - DNA, 33 bp, Homo sapien
cccagtcaaaatgtcccctttttataatgactt

SEQ ID NO: 71778 - DNA, 33 bp, Homo sapien
cccagtcaaaatgtcctctttttataatgactt

SEQ ID NO: 71779 - DNA, 33 bp, Homo sapien
tgacttggtagatctgacaatattcaggtagtg

SEQ ID NO: 71780 - DNA, 33 bp, Homo sapien
tgacttggtagatctggcaatattcaggtagtg

SEQ ID NO: 71781 - DNA, 33 bp, Homo sapien
gtcatgttttctccacgagagaatgacttatca

SEQ ID NO: 71782 - DNA, 33 bp, Homo sapien
gtcatgttttctccactagagaatgacttatca

SEQ ID NO: 71783 - DNA, 33 bp, Homo sapien
tactagggagcctgtgcaatgaatctctcattg

SEQ ID NO: 71784 - DNA, 33 bp, Homo sapien
tactagggagcctgtgtaatgaatctctcattg

SEQ ID NO: 71785 - DNA, 33 bp, Homo sapien
cttcttgaagtctgaacgtgatgatgaccttta

SEQ ID NO: 71786 - DNA, 33 bp, Homo sapien
cttcttgaagtctgaatgtgatgatgaccttta

SEQ ID NO: 71787 - DNA, 33 bp, Homo sapien
ttatccttgcatgatcactttcctagtcacttc

SEQ ID NO: 71788 - DNA, 33 bp, Homo sapien
ttatccttgcatgatcgctttcctagtcacttc

SEQ ID NO: 71789 - DNA, 33 bp, Homo sapien
taattcggccattgtacgttttatctttaacaa

SEQ ID NO: 71790 - DNA, 33 bp, Homo sapien
taattcggccattgtatgttttatctttaacaa

SEQ ID NO: 71791 - DNA, 33 bp, Homo sapien
taggagacaacaaatacgtgaacaaataatgtt

SEQ ID NO: 71792 - DNA, 33 bp, Homo sapien
taggagacaacaaatatgtgaacaaataatgtt

SEQ ID NO: 71793 - DNA, 33 bp, Homo sapien
actaacttcaagcagaataaatacaaataaaat

SEQ ID NO: 71794 - DNA, 33 bp, Homo sapien
actaacttcaagcagagtaaatacaaataaaat

SEQ ID NO: 71795 - DNA, 33 bp, Homo sapien
aaatgtaggatgtctaactgggcctcaatgctg

SEQ ID NO: 71796 - DNA, 33 bp, Homo sapien
aaatgtaggatgtctagctgggcctcaatgctg

SEQ ID NO: 71797 - DNA, 33 bp, Homo sapien
tgtcctcagttaatccaagcctgtactgaggtg

SEQ ID NO: 71798 - DNA, 33 bp, Homo sapien
tgtcctcagttaatcccagcctgtactgaggtg

SEQ ID NO: 71799 - DNA, 33 bp, Homo sapien
gtgtttgcatatctagaatttctttgaactctg

SEQ ID NO: 71800 - DNA, 33 bp, Homo sapien
gtgtttgcatatctaggatttctttgaactctg

SEQ ID NO: 71801 - DNA, 33 bp, Homo sapien
ggggatctgctgttgcacctacacctgccatca

SEQ ID NO: 71802 - DNA, 33 bp, Homo sapien
ggggatctgctgttgcgcctacacctgccatca

SEQ ID NO: 71803 - DNA, 33 bp, Homo sapien
aagaaatcagtagactaaaaaatcaaattcaag

SEQ ID NO: 71804 - DNA, 33 bp, Homo sapien
aagaaatcagtagactgaaaaatcaaattcaag

SEQ ID NO: 71805 - DNA, 33 bp, Homo sapien
ggaaagtgattttgtcacacttaattcttgctg

SEQ ID NO: 71806 - DNA, 33 bp, Homo sapien
ggaaagtgattttgtcccacttaattcttgctg

SEQ ID NO: 71807 - DNA, 33 bp, Homo sapien
ttaaagaataaaaggactatccacaaaattcat

SEQ ID NO: 71808 - DNA, 33 bp, Homo sapien
ttaaagaataaaaggagtatccacaaaattcat

SEQ ID NO: 71809 - DNA, 33 bp, Homo sapien
tttgcttcatgatttcaaatggtttatacaggt

SEQ ID NO: 71810 - DNA, 33 bp, Homo sapien
tttgcttcatgatttcgaatggtttatacaggt

SEQ ID NO: 71811 - DNA, 33 bp, Homo sapien
gaaactgagtagagaacgtgaatggttttgtgc

SEQ ID NO: 71812 - DNA, 33 bp, Homo sapien
gaaactgagtagagaaggtgaatggttttgtgc

SEQ ID NO: 71813 - DNA, 33 bp, Homo sapien
cactgatcacctgttaacattgccattcctcta

SEQ ID NO: 71814 - DNA, 33 bp, Homo sapien
cactgatcacctgttagcattgccattcctcta

SEQ ID NO: 71815 - DNA, 33 bp, Homo sapien
ccgctgacaaatcatacgggaaaatgaatcaag

SEQ ID NO: 71816 - DNA, 33 bp, Homo sapien
ccgctgacaaatcatatgggaaaatgaatcaag

SEQ ID NO: 71817 - DNA, 33 bp, Homo sapien
agactgccagcaactcccaataacacaaaggtc

SEQ ID NO: 71818 - DNA, 33 bp, Homo sapien
agactgccagcaactctcaataacacaaaggtc

SEQ ID NO: 71819 - DNA, 33 bp, Homo sapien
acagtcattcaggaaccggctcttgtgtcaaca

SEQ ID NO: 71820 - DNA, 33 bp, Homo sapien
acagtcattcaggaactggctcttgtgtcaaca

SEQ ID NO: 71821 - DNA, 33 bp, Homo sapien
acagtatatagttcaaagatcgaatcacagaaa

SEQ ID NO: 71822 - DNA, 33 bp, Homo sapien
acagtatatagttcaaggatcgaatcacagaaa

SEQ ID NO: 71823 - DNA, 33 bp, Homo sapien
gcaacacaactgacacaacattttttggtagaa

SEQ ID NO: 71824 - DNA, 33 bp, Homo sapien
gcaacacaactgacacgacattttttggtagaa

SEQ ID NO: 71825 - DNA, 33 bp, Homo sapien
ctgataaagcttattacgatggcatgatgaaga

SEQ ID NO: 71826 - DNA, 33 bp, Homo sapien
ctgataaagcttattatgatggcatgatgaaga

SEQ ID NO: 71827 - DNA, 33 bp, Homo sapien
aacagacttatatgcgaaaggtaaaactgtaaa

SEQ ID NO: 71828 - DNA, 33 bp, Homo sapien
aacagacttatatgcggaaggtaaaactgtaaa

SEQ ID NO: 71829 - DNA, 33 bp, Homo sapien
actttccccattgcccagcagtaaaaaggagga

SEQ ID NO: 71830 - DNA, 33 bp, Homo sapien
actttccccattgcccggcagtaaaaaggagga

SEQ ID NO: 71831 - DNA, 33 bp, Homo sapien
ttttattgtctccttcactgatttctcttcctc

SEQ ID NO: 71832 - DNA, 33 bp, Homo sapien
ttttattgtctccttcgctgatttctcttcctc

SEQ ID NO: 71833 - DNA, 33 bp, Homo sapien
taactagatctgaacacaaaggaaacccagttg

SEQ ID NO: 71834 - DNA, 33 bp, Homo sapien
taactagatctgaacataaaggaaacccagttg

SEQ ID NO: 71835 - DNA, 33 bp, Homo sapien
aaattaatccattgcaaattgagtaactctggg

SEQ ID NO: 71836 - DNA, 33 bp, Homo sapien
aaattaatccattgcagattgagtaactctggg

SEQ ID NO: 71837 - DNA, 33 bp, Homo sapien
tgtaacagttctttacactctggatactagatc

SEQ ID NO: 71838 - DNA, 33 bp, Homo sapien
tgtaacagttctttacgctctggatactagatc

SEQ ID NO: 71839 - DNA, 33 bp, Homo sapien
ttctttaaagatcaccagagatattttttgatg

SEQ ID NO: 71840 - DNA, 33 bp, Homo sapien
ttctttaaagatcaccggagatattttttgatg

SEQ ID NO: 71841 - DNA, 33 bp, Homo sapien
tgtattctttatgaaacgttaagaagcaaggtc

SEQ ID NO: 71842 - DNA, 33 bp, Homo sapien
tgtattctttatgaaaggttaagaagcaaggtc

SEQ ID NO: 71843 - DNA, 33 bp, Homo sapien
taaagtactgtattcactcaacaatctgattta

SEQ ID NO: 71844 - DNA, 33 bp, Homo sapien
taaagtactgtattcattcaacaatctgattta

SEQ ID NO: 71845 - DNA, 33 bp, Homo sapien
tttctcccaaccatgaaccgatagttgaattgg

SEQ ID NO: 71846 - DNA, 33 bp, Homo sapien
tttctcccaaccatgagccgatagttgaattgg

SEQ ID NO: 71847 - DNA, 33 bp, Homo sapien
gcttatgcagatcagccactaaagaactttttg

SEQ ID NO: 71848 - DNA, 33 bp, Homo sapien
gcttatgcagatcagcgactaaagaactttttg

SEQ ID NO: 71849 - DNA, 33 bp, Homo sapien
caagagcaaatgattacatactgaaaacattgt

SEQ ID NO: 71850 - DNA, 33 bp, Homo sapien
caagagcaaatgattatatactgaaaacattgt

SEQ ID NO: 71851 - DNA, 33 bp, Homo sapien
actcattctacaaaaccattaacatcctgatac

SEQ ID NO: 71852 - DNA, 33 bp, Homo sapien
actcattctacaaaactattaacatcctgatac

SEQ ID NO: 71853 - DNA, 33 bp, Homo sapien
cagcaacaaaataataatagcccaggaccagac

SEQ ID NO: 71854 - DNA, 33 bp, Homo sapien
cagcaacaaaataatagtagcccaggaccagac

SEQ ID NO: 71855 - DNA, 33 bp, Homo sapien
taagtttgctaaagaaattaacatccagatata

SEQ ID NO: 71856 - DNA, 33 bp, Homo sapien
taagtttgctaaagaagttaacatccagatata

SEQ ID NO: 71857 - DNA, 33 bp, Homo sapien
atttcctttgtctgagcagggctttgtggggct

SEQ ID NO: 71858 - DNA, 33 bp, Homo sapien
atttcctttgtctgaggagggctttgtggggct

SEQ ID NO: 71859 - DNA, 33 bp, Homo sapien
cctcggagagcggcagaaccctggagatctaac

SEQ ID NO: 71860 - DNA, 33 bp, Homo sapien
cctcggagagcggcaggaccctggagatctaac

SEQ ID NO: 71861 - DNA, 33 bp, Homo sapien
ccaggcaggaaaaagacgtgcaggatcatgcac

SEQ ID NO: 71862 - DNA, 33 bp, Homo sapien
ccaggcaggaaaaagatgtgcaggatcatgcac

SEQ ID NO: 71863 - DNA, 33 bp, Homo sapien
caacccataatagtagaactgcacttttcctgc

SEQ ID NO: 71864 - DNA, 33 bp, Homo sapien
caacccataatagtaggactgcacttttcctgc

SEQ ID NO: 71865 - DNA, 33 bp, Homo sapien
ttaatttaaatgccaaacctgatttaataaatt

SEQ ID NO: 71866 - DNA, 33 bp, Homo sapien
ttaatttaaatgccaagcctgatttaataaatt

SEQ ID NO: 71867 - DNA, 33 bp, Homo sapien
cataatgcagttgcacacctaatagactacact

SEQ ID NO: 71868 - DNA, 33 bp, Homo sapien
cataatgcagttgcacgcctaatagactacact

SEQ ID NO: 71869 - DNA, 33 bp, Homo sapien
aagggatgacttttaacggcaggtagtattgga

SEQ ID NO: 71870 - DNA, 33 bp, Homo sapien
aagggatgacttttaatggcaggtagtattgga

SEQ ID NO: 71871 - DNA, 33 bp, Homo sapien
atgaggaaaccacaggaagttatttgatgatgg

SEQ ID NO: 71872 - DNA, 33 bp, Homo sapien
atgaggaaaccacaggcagttatttgatgatgg

SEQ ID NO: 71873 - DNA, 33 bp, Homo sapien
atttggggaatgctccacaagaatgtgaaaatt

SEQ ID NO: 71874 - DNA, 33 bp, Homo sapien
atttggggaatgctccgcaagaatgtgaaaatt

SEQ ID NO: 71875 - DNA, 33 bp, Homo sapien
cagtctttgggggaaggaagtatagtggaggtt

SEQ ID NO: 71876 - DNA, 33 bp, Homo sapien
cagtctttgggggaagtaagtatagtggaggtt

SEQ ID NO: 71877 - DNA, 33 bp, Homo sapien
actttgttttttggaacctctttcaccacagaa

SEQ ID NO: 71878 - DNA, 33 bp, Homo sapien
actttgttttttggaagctctttcaccacagaa

SEQ ID NO: 71879 - DNA, 33 bp, Homo sapien
aataagtcttattggccatgtctacaaaaagaa

SEQ ID NO: 71880 - DNA, 33 bp, Homo sapien
aataagtcttattggctatgtctacaaaaagaa

SEQ ID NO: 71881 - DNA, 33 bp, Homo sapien
gaatacactgaatggaacaggactggagcaggt

SEQ ID NO: 71882 - DNA, 33 bp, Homo sapien
gaatacactgaatggaccaggactggagcaggt

SEQ ID NO: 71883 - DNA, 33 bp, Homo sapien
gagtgacacatgacgacacccagagaaagtaag

SEQ ID NO: 71884 - DNA, 33 bp, Homo sapien
gagtgacacatgacgatacccagagaaagtaag

SEQ ID NO: 71885 - DNA, 33 bp, Homo sapien
atcaacctttgctaataaaataatgtggtttcc

SEQ ID NO: 71886 - DNA, 33 bp, Homo sapien
atcaacctttgctaatcaaataatgtggtttcc

SEQ ID NO: 71887 - DNA, 33 bp, Homo sapien
caaagggaggtctggaagaatccacaggaagag

SEQ ID NO: 71888 - DNA, 33 bp, Homo sapien
caaagggaggtctggaggaatccacaggaagag

SEQ ID NO: 71889 - DNA, 33 bp, Homo sapien
gaagaggaagaacagaagtgtggctgcaactta

SEQ ID NO: 71890 - DNA, 33 bp, Homo sapien
gaagaggaagaacagacgtgtggctgcaactta

SEQ ID NO: 71891 - DNA, 33 bp, Homo sapien
caggcactctcatgcactgcaggtgagaatgca

SEQ ID NO: 71892 - DNA, 33 bp, Homo sapien
caggcactctcatgcattgcaggtgagaatgca

SEQ ID NO: 71893 - DNA, 33 bp, Homo sapien
ctttttgtggactactcaaaactggcatccttc

SEQ ID NO: 71894 - DNA, 33 bp, Homo sapien
ctttttgtggactactgaaaactggcatccttc

SEQ ID NO: 71895 - DNA, 33 bp, Homo sapien
ctccttacctacctaacataaacttatggcatg

SEQ ID NO: 71896 - DNA, 33 bp, Homo sapien
ctccttacctacctaatataaacttatggcatg

SEQ ID NO: 71897 - DNA, 33 bp, Homo sapien
taatatttctgatatacacttctggtcttcaag

SEQ ID NO: 71898 - DNA, 33 bp, Homo sapien
taatatttctgatatatacttctggtcttcaag

SEQ ID NO: 71899 - DNA, 33 bp, Homo sapien
taaccagacaaatacaatctaggccaaagcagg

SEQ ID NO: 71900 - DNA, 33 bp, Homo sapien
taaccagacaaatacagtctaggccaaagcagg

SEQ ID NO: 71901 - DNA, 33 bp, Homo sapien
acagggaagacgtatgccaacaagcatcaatgg

SEQ ID NO: 71902 - DNA, 33 bp, Homo sapien
acagggaagacgtatgtcaacaagcatcaatgg

SEQ ID NO: 71903 - DNA, 33 bp, Homo sapien
ccatcctgaccttgctcaaaatcatctaggtgc

SEQ ID NO: 71904 - DNA, 33 bp, Homo sapien
ccatcctgaccttgcttaaaatcatctaggtgc

SEQ ID NO: 71905 - DNA, 33 bp, Homo sapien
agagccaaagacatctaactgagtgggaaaagt

SEQ ID NO: 71906 - DNA, 33 bp, Homo sapien
agagccaaagacatctgactgagtgggaaaagt

SEQ ID NO: 71907 - DNA, 33 bp, Homo sapien
attaaaacaaaaatcaaagcaatgcctaggatg

SEQ ID NO: 71908 - DNA, 33 bp, Homo sapien
attaaaacaaaaatcagagcaatgcctaggatg

SEQ ID NO: 71909 - DNA, 33 bp, Homo sapien
tgcctaagagttacaacgttagtttcatttcca

SEQ ID NO: 71910 - DNA, 33 bp, Homo sapien
tgcctaagagttacaatgttagtttcatttcca

SEQ ID NO: 71911 - DNA, 33 bp, Homo sapien
agtgtggctctagaaccacctgcttcagatttg

SEQ ID NO: 71912 - DNA, 33 bp, Homo sapien
agtgtggctctagaactacctgcttcagatttg

SEQ ID NO: 71913 - DNA, 33 bp, Homo sapien
aacttcccccaacaaacgctgtatatctaaaac

SEQ ID NO: 71914 - DNA, 33 bp, Homo sapien
aacttcccccaacaaatgctgtatatctaaaac

SEQ ID NO: 71915 - DNA, 33 bp, Homo sapien
agaagagagaaaatgaagggtgagaggctgatg

SEQ ID NO: 71916 - DNA, 33 bp, Homo sapien
agaagagagaaaatgaggggtgagaggctgatg

SEQ ID NO: 71917 - DNA, 33 bp, Homo sapien
tcacactcattccttcacccgctatgttcatcc

SEQ ID NO: 71918 - DNA, 33 bp, Homo sapien
tcacactcattccttcgcccgctatgttcatcc

SEQ ID NO: 71919 - DNA, 33 bp, Homo sapien
gatagctctaaattgacatcctaaccagttaga

SEQ ID NO: 71920 - DNA, 33 bp, Homo sapien
gatagctctaaattgatatcctaaccagttaga

SEQ ID NO: 71921 - DNA, 33 bp, Homo sapien
ctgttgtccttgcatccctttctccagcaagtt

SEQ ID NO: 71922 - DNA, 33 bp, Homo sapien
ctgttgtccttgcatctctttctccagcaagtt

SEQ ID NO: 71923 - DNA, 33 bp, Homo sapien
agctagtgtacttaggaccaagagaaaaggaga

SEQ ID NO: 71924 - DNA, 33 bp, Homo sapien
agctagtgtacttaggcccaagagaaaaggaga

SEQ ID NO: 71925 - DNA, 33 bp, Homo sapien
catctctaggttctctaacaccattaaaatatc

SEQ ID NO: 71926 - DNA, 33 bp, Homo sapien
catctctaggttctctgacaccattaaaatatc

SEQ ID NO: 71927 - DNA, 33 bp, Homo sapien
gaatgattacagtaaacgaagtctttctcctct

SEQ ID NO: 71928 - DNA, 33 bp, Homo sapien
gaatgattacagtaaatgaagtctttctcctct

SEQ ID NO: 71929 - DNA, 33 bp, Homo sapien
catttttttcattgaaagtgtgccttcttttga

SEQ ID NO: 71930 - DNA, 33 bp, Homo sapien
catttttttcattgaaggtgtgccttcttttga

SEQ ID NO: 71931 - DNA, 33 bp, Homo sapien
tcagtgtagctttcaaaacaaaatgatcaaata

SEQ ID NO: 71932 - DNA, 33 bp, Homo sapien
tcagtgtagctttcaagacaaaatgatcaaata

SEQ ID NO: 71933 - DNA, 33 bp, Homo sapien
aagggatttttcaaggacagctatgattataca

SEQ ID NO: 71934 - DNA, 33 bp, Homo sapien
aagggatttttcaagggcagctatgattataca

SEQ ID NO: 71935 - DNA, 33 bp, Homo sapien
tgattatacaccattacggccttaccttctgag

SEQ ID NO: 71936 - DNA, 33 bp, Homo sapien
tgattatacaccattatggccttaccttctgag

SEQ ID NO: 71937 - DNA, 33 bp, Homo sapien
gaaaggcactagaagccgaaaaaacaagattta

SEQ ID NO: 71938 - DNA, 33 bp, Homo sapien
gaaaggcactagaagctgaaaaaacaagattta

SEQ ID NO: 71939 - DNA, 33 bp, Homo sapien
ttaagcactgtgccaaatactttacctatgttt

SEQ ID NO: 71940 - DNA, 33 bp, Homo sapien
ttaagcactgtgccaactactttacctatgttt

SEQ ID NO: 71941 - DNA, 33 bp, Homo sapien
tgcagagctttgtaaaattaggtgcctttgggc

SEQ ID NO: 71942 - DNA, 33 bp, Homo sapien
tgcagagctttgtaaagttaggtgcctttgggc

SEQ ID NO: 71943 - DNA, 33 bp, Homo sapien
attattgagccatccacattttgttgtatagaa

SEQ ID NO: 71944 - DNA, 33 bp, Homo sapien
attattgagccatccatattttgttgtatagaa

SEQ ID NO: 71945 - DNA, 33 bp, Homo sapien
ggctttatttatcttacaggctttcagaaactt

SEQ ID NO: 71946 - DNA, 33 bp, Homo sapien
ggctttatttatcttataggctttcagaaactt

SEQ ID NO: 71947 - DNA, 33 bp, Homo sapien
agaattcggaagtagcaatttaattggggacct

SEQ ID NO: 71948 - DNA, 33 bp, Homo sapien
agaattcggaagtagccatttaattggggacct

SEQ ID NO: 71949 - DNA, 33 bp, Homo sapien
agaatatattctgagacaatcctccatgaattg

SEQ ID NO: 71950 - DNA, 33 bp, Homo sapien
agaatatattctgagataatcctccatgaattg

SEQ ID NO: 71951 - DNA, 33 bp, Homo sapien
ccattagggaggccacaatcatattcctcattc

SEQ ID NO: 71952 - DNA, 33 bp, Homo sapien
ccattagggaggccacgatcatattcctcattc

SEQ ID NO: 71953 - DNA, 33 bp, Homo sapien
gaatagtttcagaatcaaaatcaactcaccctc

SEQ ID NO: 71954 - DNA, 33 bp, Homo sapien
gaatagtttcagaatcgaaatcaactcaccctc

SEQ ID NO: 71955 - DNA, 33 bp, Homo sapien
catctctgtatgcacacgaaaaacccctgttac

SEQ ID NO: 71956 - DNA, 33 bp, Homo sapien
catctctgtatgcacaggaaaaacccctgttac

SEQ ID NO: 71957 - DNA, 33 bp, Homo sapien
tcgtctctagctcagaatacaaaacaaagccct

SEQ ID NO: 71958 - DNA, 33 bp, Homo sapien
tcgtctctagctcagagtacaaaacaaagccct

SEQ ID NO: 71959 - DNA, 33 bp, Homo sapien
atgaatgaacttcatcaatatttactacatcta

SEQ ID NO: 71960 - DNA, 33 bp, Homo sapien
atgaatgaacttcatcgatatttactacatcta

SEQ ID NO: 71961 - DNA, 33 bp, Homo sapien
agcggttctgttaggcaatatcaaactagattg

SEQ ID NO: 71962 - DNA, 33 bp, Homo sapien
agcggttctgttaggccatatcaaactagattg

SEQ ID NO: 71963 - DNA, 33 bp, Homo sapien
taggtaatccattcaacacaaccttcatgacat

SEQ ID NO: 71964 - DNA, 33 bp, Homo sapien
taggtaatccattcaatacaaccttcatgacat

SEQ ID NO: 71965 - DNA, 33 bp, Homo sapien
tctgccttgattttacactttgaggcacgctca

SEQ ID NO: 71966 - DNA, 33 bp, Homo sapien
tctgccttgattttacgctttgaggcacgctca

SEQ ID NO: 71967 - DNA, 33 bp, Homo sapien
cacaacaagcagaagacggaatagagatggcat

SEQ ID NO: 71968 - DNA, 33 bp, Homo sapien
cacaacaagcagaagatggaatagagatggcat

SEQ ID NO: 71969 - DNA, 33 bp, Homo sapien
attcttgagtaccaaaaacacaattaaagactt

SEQ ID NO: 71970 - DNA, 33 bp, Homo sapien
attcttgagtaccaaacacacaattaaagactt

SEQ ID NO: 71971 - DNA, 33 bp, Homo sapien
gggcaacctctatctaccttaaactggctgtcc

SEQ ID NO: 71972 - DNA, 33 bp, Homo sapien
gggcaacctctatctatcttaaactggctgtcc

SEQ ID NO: 71973 - DNA, 33 bp, Homo sapien
atgattgtagaagccacgtaaaaaagtcaaata

SEQ ID NO: 71974 - DNA, 33 bp, Homo sapien
atgattgtagaagccatgtaaaaaagtcaaata

SEQ ID NO: 71975 - DNA, 33 bp, Homo sapien
aatgttttccattcccaaaaggacaaagagatc

SEQ ID NO: 71976 - DNA, 33 bp, Homo sapien
aatgttttccattcccgaaaggacaaagagatc

SEQ ID NO: 71977 - DNA, 33 bp, Homo sapien
aactcatagaactatacgcacaaaaaatagtga

SEQ ID NO: 71978 - DNA, 33 bp, Homo sapien
aactcatagaactatatgcacaaaaaatagtga

SEQ ID NO: 71979 - DNA, 33 bp, Homo sapien
gtatacattgtggaaaagctattcaggataatt

SEQ ID NO: 71980 - DNA, 33 bp, Homo sapien
gtatacattgtggaaaggctattcaggataatt

SEQ ID NO: 71981 - DNA, 33 bp, Homo sapien
ttatggtgatggttaaataagttcagacataaa

SEQ ID NO: 71982 - DNA, 33 bp, Homo sapien
ttatggtgatggttaagtaagttcagacataaa

SEQ ID NO: 71983 - DNA, 33 bp, Homo sapien
aatattatcaaatgtcactccaacatctattaa

SEQ ID NO: 71984 - DNA, 33 bp, Homo sapien
aatattatcaaatgtccctccaacatctattaa

SEQ ID NO: 71985 - DNA, 33 bp, Homo sapien
actcaaatctacatacagaaaggcagagtttaa

SEQ ID NO: 71986 - DNA, 33 bp, Homo sapien
actcaaatctacatacggaaaggcagagtttaa

SEQ ID NO: 71987 - DNA, 33 bp, Homo sapien
ctctcccggaaggcaacaaacaacgataggaaa

SEQ ID NO: 71988 - DNA, 33 bp, Homo sapien
ctctcccggaaggcaataaacaacgataggaaa

SEQ ID NO: 71989 - DNA, 33 bp, Homo sapien
aaaatctaaatatgtgaaaatcactcccgtatt

SEQ ID NO: 71990 - DNA, 33 bp, Homo sapien
aaaatctaaatatgtgtaaatcactcccgtatt

SEQ ID NO: 71991 - DNA, 33 bp, Homo sapien
ctaagatgatcaagtcaaagttaatttcacaac

SEQ ID NO: 71992 - DNA, 33 bp, Homo sapien
ctaagatgatcaagtcgaagttaatttcacaac

SEQ ID NO: 71993 - DNA, 33 bp, Homo sapien
ttagtattgtccaaaaaccactattattatgag

SEQ ID NO: 71994 - DNA, 33 bp, Homo sapien
ttagtattgtccaaaacccactattattatgag

SEQ ID NO: 71995 - DNA, 33 bp, Homo sapien
aggttctttcactgaaaaaaagttgataatttt

SEQ ID NO: 71996 - DNA, 33 bp, Homo sapien
aggttctttcactgaacaaaagttgataatttt

SEQ ID NO: 71997 - DNA, 33 bp, Homo sapien
gagatgatgaatgtaaacacaccgaaaattaac

SEQ ID NO: 71998 - DNA, 33 bp, Homo sapien
gagatgatgaatgtaatcacaccgaaaattaac

SEQ ID NO: 71999 - DNA, 33 bp, Homo sapien
tgagcacacaactcaaatgttaaatcactaatt

SEQ ID NO: 72000 - DNA, 33 bp, Homo sapien
tgagcacacaactcaagtgttaaatcactaatt

SEQ ID NO: 72001 - DNA, 33 bp, Homo sapien
aaacaaaaaattcaaaacagtactgactgcctt

SEQ ID NO: 72002 - DNA, 33 bp, Homo sapien
aaacaaaaaattcaaaccagtactgactgcctt

SEQ ID NO: 72003 - DNA, 33 bp, Homo sapien
ttcaaaatttctgaccagcacccaacacatagt

SEQ ID NO: 72004 - DNA, 33 bp, Homo sapien
ttcaaaatttctgaccggcacccaacacatagt

SEQ ID NO: 72005 - DNA, 33 bp, Homo sapien
agtactaacagttggcagacttgctttagatag

SEQ ID NO: 72006 - DNA, 33 bp, Homo sapien
agtactaacagttggcggacttgctttagatag

SEQ ID NO: 72007 - DNA, 33 bp, Homo sapien
cacaccagaactaacacagccaattatgcaaat

SEQ ID NO: 72008 - DNA, 33 bp, Homo sapien
cacaccagaactaacatagccaattatgcaaat

SEQ ID NO: 72009 - DNA, 33 bp, Homo sapien
aaacattgtgctgaggaacaagacaacaaggtc

SEQ ID NO: 72010 - DNA, 33 bp, Homo sapien
aaacattgtgctgagggacaagacaacaaggtc

SEQ ID NO: 72011 - DNA, 33 bp, Homo sapien
tgtttttactgaggtccgaaggataaatagaac

SEQ ID NO: 72012 - DNA, 33 bp, Homo sapien
tgtttttactgaggtctgaaggataaatagaac

SEQ ID NO: 72013 - DNA, 33 bp, Homo sapien
ccataagaagaaggcacgaggtaaagtgggagt

SEQ ID NO: 72014 - DNA, 33 bp, Homo sapien
ccataagaagaaggcatgaggtaaagtgggagt

SEQ ID NO: 72015 - DNA, 33 bp, Homo sapien
gctagcaagcaagaaaagataaaagtcgtataa

SEQ ID NO: 72016 - DNA, 33 bp, Homo sapien
gctagcaagcaagaaaggataaaagtcgtataa

SEQ ID NO: 72017 - DNA, 33 bp, Homo sapien
taaatgtttgaggttaggaatatcccagtcacc

SEQ ID NO: 72018 - DNA, 33 bp, Homo sapien
taaatgtttgaggttatgaatatcccagtcacc

SEQ ID NO: 72019 - DNA, 33 bp, Homo sapien
cctttctcggttgatccattaattattctgctt

SEQ ID NO: 72020 - DNA, 33 bp, Homo sapien
cctttctcggttgatctattaattattctgctt

SEQ ID NO: 72021 - DNA, 33 bp, Homo sapien
tggattgcatatatgacggtggtccaattagat

SEQ ID NO: 72022 - DNA, 33 bp, Homo sapien
tggattgcatatatgatggtggtccaattagat

SEQ ID NO: 72023 - DNA, 33 bp, Homo sapien
cttggtcctcattctcaaaaattcttcaccaaa

SEQ ID NO: 72024 - DNA, 33 bp, Homo sapien
cttggtcctcattctcgaaaattcttcaccaaa

SEQ ID NO: 72025 - DNA, 33 bp, Homo sapien
gcaatagaacaaacaccggatctgtgacttctg

SEQ ID NO: 72026 - DNA, 33 bp, Homo sapien
gcaatagaacaaacactggatctgtgacttctg

SEQ ID NO: 72027 - DNA, 33 bp, Homo sapien
ccgaacccacggataccgaaggctgactatacc

SEQ ID NO: 72028 - DNA, 33 bp, Homo sapien
ccgaacccacggatactgaaggctgactatacc

SEQ ID NO: 72029 - DNA, 33 bp, Homo sapien
aaacagcacagtataactaccatttacacagca

SEQ ID NO: 72030 - DNA, 33 bp, Homo sapien
aaacagcacagtataagtaccatttacacagca

SEQ ID NO: 72031 - DNA, 33 bp, Homo sapien
gggcactgaatgacaaactagcagagagaggac

SEQ ID NO: 72032 - DNA, 33 bp, Homo sapien
gggcactgaatgacaacctagcagagagaggac

SEQ ID NO: 72033 - DNA, 33 bp, Homo sapien
agggatacagatgaaagacatacatagggaaag

SEQ ID NO: 72034 - DNA, 33 bp, Homo sapien
agggatacagatgaaatacatacatagggaaag

SEQ ID NO: 72035 - DNA, 33 bp, Homo sapien
gctaaatactgttacacaagagaccatacaaaa

SEQ ID NO: 72036 - DNA, 33 bp, Homo sapien
gctaaatactgttacataagagaccatacaaaa

SEQ ID NO: 72037 - DNA, 33 bp, Homo sapien
tgatctctttcaatacacaggaaaacttaagtt

SEQ ID NO: 72038 - DNA, 33 bp, Homo sapien
tgatctctttcaatacgcaggaaaacttaagtt

SEQ ID NO: 72039 - DNA, 33 bp, Homo sapien
tacctcgagactgaaaattaagactcctcattt

SEQ ID NO: 72040 - DNA, 33 bp, Homo sapien
tacctcgagactgaaagttaagactcctcattt

SEQ ID NO: 72041 - DNA, 33 bp, Homo sapien
caggctaaacttgtagaaagcaacacttttgga

SEQ ID NO: 72042 - DNA, 33 bp, Homo sapien
caggctaaacttgtagtaagcaacacttttgga

SEQ ID NO: 72043 - DNA, 33 bp, Homo sapien
atatcacatcatttaactagtgtctgtattcat

SEQ ID NO: 72044 - DNA, 33 bp, Homo sapien
atatcacatcatttaattagtgtctgtattcat

SEQ ID NO: 72045 - DNA, 33 bp, Homo sapien
tcagtccaaagtattaaacactgcaagtgatta

SEQ ID NO: 72046 - DNA, 33 bp, Homo sapien
tcagtccaaagtattacacactgcaagtgatta

SEQ ID NO: 72047 - DNA, 33 bp, Homo sapien
ttactctattttggccacagttactttagcatg

SEQ ID NO: 72048 - DNA, 33 bp, Homo sapien
ttactctattttggccgcagttactttagcatg

SEQ ID NO: 72049 - DNA, 33 bp, Homo sapien
tataaagaatggcatccataatttgacaaaaca

SEQ ID NO: 72050 - DNA, 33 bp, Homo sapien
tataaagaatggcatctataatttgacaaaaca

SEQ ID NO: 72051 - DNA, 33 bp, Homo sapien
attcctggaaccatcactccttagttacctggg

SEQ ID NO: 72052 - DNA, 33 bp, Homo sapien
attcctggaaccatcattccttagttacctggg

SEQ ID NO: 72053 - DNA, 33 bp, Homo sapien
aagtcctaaaattaaccgattgaaagacatcag

SEQ ID NO: 72054 - DNA, 33 bp, Homo sapien
aagtcctaaaattaactgattgaaagacatcag

SEQ ID NO: 72055 - DNA, 33 bp, Homo sapien
tacagaatattttgccaccttctgtgcgtggtg

SEQ ID NO: 72056 - DNA, 33 bp, Homo sapien
tacagaatattttgccgccttctgtgcgtggtg

SEQ ID NO: 72057 - DNA, 33 bp, Homo sapien
ttataggcccatcctacgcaagtataacataac

SEQ ID NO: 72058 - DNA, 33 bp, Homo sapien
ttataggcccatcctatgcaagtataacataac

SEQ ID NO: 72059 - DNA, 33 bp, Homo sapien
tgaattcctatattcaatcacatacacagagac

SEQ ID NO: 72060 - DNA, 33 bp, Homo sapien
tgaattcctatattcagtcacatacacagagac

SEQ ID NO: 72061 - DNA, 33 bp, Homo sapien
agtaattcttcctaaaaggtgagaagagagaaa

SEQ ID NO: 72062 - DNA, 33 bp, Homo sapien
agtaattcttcctaaagggtgagaagagagaaa

SEQ ID NO: 72063 - DNA, 33 bp, Homo sapien
aatgtaattccaagaaaactgaatccttaatat

SEQ ID NO: 72064 - DNA, 33 bp, Homo sapien
aatgtaattccaagaagactgaatccttaatat

SEQ ID NO: 72065 - DNA, 33 bp, Homo sapien
ttaacttgtgactctcagagaactcacaacaga

SEQ ID NO: 72066 - DNA, 33 bp, Homo sapien
ttaacttgtgactctcggagaactcacaacaga

SEQ ID NO: 72067 - DNA, 33 bp, Homo sapien
aggatcaaaacatggaatagcacagtgtggaaa

SEQ ID NO: 72068 - DNA, 33 bp, Homo sapien
aggatcaaaacatggactagcacagtgtggaaa

SEQ ID NO: 72069 - DNA, 33 bp, Homo sapien
gactagctgggtcaaacaattagcatacttttc

SEQ ID NO: 72070 - DNA, 33 bp, Homo sapien
gactagctgggtcaaagaattagcatacttttc

SEQ ID NO: 72071 - DNA, 33 bp, Homo sapien
ctaaagcaatggaaaacgattattagacaattt

SEQ ID NO: 72072 - DNA, 33 bp, Homo sapien
ctaaagcaatggaaaatgattattagacaattt

SEQ ID NO: 72073 - DNA, 33 bp, Homo sapien
aagactcagaaggtaaaatctgtgcttgcttag

SEQ ID NO: 72074 - DNA, 33 bp, Homo sapien
aagactcagaaggtaagatctgtgcttgcttag

SEQ ID NO: 72075 - DNA, 33 bp, Homo sapien
actttggtttgctgaagaaagtccaaaaacaat

SEQ ID NO: 72076 - DNA, 33 bp, Homo sapien
actttggtttgctgaataaagtccaaaaacaat

SEQ ID NO: 72077 - DNA, 33 bp, Homo sapien
tagggctctgcttaccactccagacaaattcat

SEQ ID NO: 72078 - DNA, 33 bp, Homo sapien
tagggctctgcttaccgctccagacaaattcat

SEQ ID NO: 72079 - DNA, 33 bp, Homo sapien
ggaaatgtgccacatacgaggttctaggtgctg

SEQ ID NO: 72080 - DNA, 33 bp, Homo sapien
ggaaatgtgccacatatgaggttctaggtgctg

SEQ ID NO: 72081 - DNA, 33 bp, Homo sapien
aaaattaaacacattaaacagagctgtagttgt

SEQ ID NO: 72082 - DNA, 33 bp, Homo sapien
aaaattaaacacattagacagagctgtagttgt

SEQ ID NO: 72083 - DNA, 33 bp, Homo sapien
caccagtgctgtaaaagactactccactcttct

SEQ ID NO: 72084 - DNA, 33 bp, Homo sapien
caccagtgctgtaaaatactactccactcttct

SEQ ID NO: 72085 - DNA, 33 bp, Homo sapien
agaggttgaggtggtcaagtaggacaaagaagt

SEQ ID NO: 72086 - DNA, 33 bp, Homo sapien
agaggttgaggtggtcgagtaggacaaagaagt

SEQ ID NO: 72087 - DNA, 33 bp, Homo sapien
gtggaagaaaagaaggcataggagttgaaatac

SEQ ID NO: 72088 - DNA, 33 bp, Homo sapien
gtggaagaaaagaagggataggagttgaaatac

SEQ ID NO: 72089 - DNA, 33 bp, Homo sapien
tggggaagggtgcctcgccatattagatgtgat

SEQ ID NO: 72090 - DNA, 33 bp, Homo sapien
tggggaagggtgcctctccatattagatgtgat

SEQ ID NO: 72091 - DNA, 33 bp, Homo sapien
gagtcctgccaggcaaatccttgaaattgccta

SEQ ID NO: 72092 - DNA, 33 bp, Homo sapien
gagtcctgccaggcaagtccttgaaattgccta

SEQ ID NO: 72093 - DNA, 33 bp, Homo sapien
aaaggttgcgaaagacacaaagaaatattggat

SEQ ID NO: 72094 - DNA, 33 bp, Homo sapien
aaaggttgcgaaagacgcaaagaaatattggat

SEQ ID NO: 72095 - DNA, 33 bp, Homo sapien
tttcgtgattggcttaacctgcttgtttcactt

SEQ ID NO: 72096 - DNA, 33 bp, Homo sapien
tttcgtgattggcttaccctgcttgtttcactt

SEQ ID NO: 72097 - DNA, 33 bp, Homo sapien
ttttctgatattgtggcccaaaattacattgcc

SEQ ID NO: 72098 - DNA, 33 bp, Homo sapien
ttttctgatattgtggtccaaaattacattgcc

SEQ ID NO: 72099 - DNA, 33 bp, Homo sapien
acatcaacttgtgtaacatgccagaccattcag

SEQ ID NO: 72100 - DNA, 33 bp, Homo sapien
acatcaacttgtgtaatatgccagaccattcag

SEQ ID NO: 72101 - DNA, 33 bp, Homo sapien
ctatacaattcccccaaattatgctaaggagca

SEQ ID NO: 72102 - DNA, 33 bp, Homo sapien
ctatacaattcccccagattatgctaaggagca

SEQ ID NO: 72103 - DNA, 33 bp, Homo sapien
ctcatcatttccattaaaatcagaaattccatc

SEQ ID NO: 72104 - DNA, 33 bp, Homo sapien
ctcatcatttccattacaatcagaaattccatc

SEQ ID NO: 72105 - DNA, 33 bp, Homo sapien
tgcacaagagtggttacaagatggaaactataa

SEQ ID NO: 72106 - DNA, 33 bp, Homo sapien
tgcacaagagtggttagaagatggaaactataa

SEQ ID NO: 72107 - DNA, 33 bp, Homo sapien
taatctcagatcattaactattgcttggatgaa

SEQ ID NO: 72108 - DNA, 33 bp, Homo sapien
taatctcagatcattagctattgcttggatgaa

SEQ ID NO: 72109 - DNA, 33 bp, Homo sapien
ataaacgacgataatggcagaatccagaatgtt

SEQ ID NO: 72110 - DNA, 33 bp, Homo sapien
ataaacgacgataatgtcagaatccagaatgtt

SEQ ID NO: 72111 - DNA, 33 bp, Homo sapien
atcatcgctgctcaacgctaacagaagctcctg

SEQ ID NO: 72112 - DNA, 33 bp, Homo sapien
atcatcgctgctcaactctaacagaagctcctg

SEQ ID NO: 72113 - DNA, 33 bp, Homo sapien
caaaccaaaggagaaccgatgaaggtagtttgt

SEQ ID NO: 72114 - DNA, 33 bp, Homo sapien
caaaccaaaggagaactgatgaaggtagtttgt

SEQ ID NO: 72115 - DNA, 33 bp, Homo sapien
tgttttttggactagacaaacttttctgttaca

SEQ ID NO: 72116 - DNA, 33 bp, Homo sapien
tgttttttggactagataaacttttctgttaca

SEQ ID NO: 72117 - DNA, 33 bp, Homo sapien
aacacttttggaagcacaaaatctgtgattatt

SEQ ID NO: 72118 - DNA, 33 bp, Homo sapien
aacacttttggaagcataaaatctgtgattatt

SEQ ID NO: 72119 - DNA, 33 bp, Homo sapien
cagaagggctacactaaaccaatcataattcta

SEQ ID NO: 72120 - DNA, 33 bp, Homo sapien
cagaagggctacactacaccaatcataattcta

SEQ ID NO: 72121 - DNA, 33 bp, Homo sapien
taggcattgtcttctacgtattgcataaacata

SEQ ID NO: 72122 - DNA, 33 bp, Homo sapien
taggcattgtcttctatgtattgcataaacata

SEQ ID NO: 72123 - DNA, 33 bp, Homo sapien
ttgatttacccaaccacgttatgctacagagaa

SEQ ID NO: 72124 - DNA, 33 bp, Homo sapien
ttgatttacccaaccatgttatgctacagagaa

SEQ ID NO: 72125 - DNA, 33 bp, Homo sapien
agagacaaaattttcaagtaagaacaactgtta

SEQ ID NO: 72126 - DNA, 33 bp, Homo sapien
agagacaaaattttcaggtaagaacaactgtta

SEQ ID NO: 72127 - DNA, 33 bp, Homo sapien
gcaagtgaattcttgggaaaatagtgagtgaga

SEQ ID NO: 72128 - DNA, 33 bp, Homo sapien
gcaagtgaattcttggtaaaatagtgagtgaga

SEQ ID NO: 72129 - DNA, 33 bp, Homo sapien
atgtcagagacagaaccattatcagcttctcca

SEQ ID NO: 72130 - DNA, 33 bp, Homo sapien
atgtcagagacagaacgattatcagcttctcca

SEQ ID NO: 72131 - DNA, 33 bp, Homo sapien
gccagaagtaaatgaacacaagggtggtttgta

SEQ ID NO: 72132 - DNA, 33 bp, Homo sapien
gccagaagtaaatgaatacaagggtggtttgta

SEQ ID NO: 72133 - DNA, 33 bp, Homo sapien
agaaatccgcagagacagctgttaacagtagct

SEQ ID NO: 72134 - DNA, 33 bp, Homo sapien
agaaatccgcagagacggctgttaacagtagct

SEQ ID NO: 72135 - DNA, 33 bp, Homo sapien
tctctctttaagaacactgctccagatgtcttc

SEQ ID NO: 72136 - DNA, 33 bp, Homo sapien
tctctctttaagaacattgctccagatgtcttc

SEQ ID NO: 72137 - DNA, 33 bp, Homo sapien
atttcagttaaggataaaaattggttactacag

SEQ ID NO: 72138 - DNA, 33 bp, Homo sapien
atttcagttaaggatacaaattggttactacag

SEQ ID NO: 72139 - DNA, 33 bp, Homo sapien
gaggttgagagtgatacagaatcatttggtgtc

SEQ ID NO: 72140 - DNA, 33 bp, Homo sapien
gaggttgagagtgatatagaatcatttggtgtc

SEQ ID NO: 72141 - DNA, 33 bp, Homo sapien
cactacctctagcctccactacttctgctaaga

SEQ ID NO: 72142 - DNA, 33 bp, Homo sapien
cactacctctagcctctactacttctgctaaga

SEQ ID NO: 72143 - DNA, 33 bp, Homo sapien
taatagagaagaaatgaagtggtatatagagac

SEQ ID NO: 72144 - DNA, 33 bp, Homo sapien
taatagagaagaaatggagtggtatatagagac

SEQ ID NO: 72145 - DNA, 33 bp, Homo sapien
actttataacaactcactctcatgataactaat

SEQ ID NO: 72146 - DNA, 33 bp, Homo sapien
actttataacaactcagtctcatgataactaat

SEQ ID NO: 72147 - DNA, 33 bp, Homo sapien
tagatttaagtccttcccaatcaaaatccaagc

SEQ ID NO: 72148 - DNA, 33 bp, Homo sapien
tagatttaagtccttctcaatcaaaatccaagc

SEQ ID NO: 72149 - DNA, 33 bp, Homo sapien
tgaatgtaatagaaagcatcagtgattcataaa

SEQ ID NO: 72150 - DNA, 33 bp, Homo sapien
tgaatgtaatagaaaggatcagtgattcataaa

SEQ ID NO: 72151 - DNA, 33 bp, Homo sapien
tatatttatcaggagaggaacatttattgagtg

SEQ ID NO: 72152 - DNA, 33 bp, Homo sapien
tatatttatcaggagatgaacatttattgagtg

SEQ ID NO: 72153 - DNA, 33 bp, Homo sapien
agttctttacacaatacgaagcacatggcaagc

SEQ ID NO: 72154 - DNA, 33 bp, Homo sapien
agttctttacacaatatgaagcacatggcaagc

SEQ ID NO: 72155 - DNA, 33 bp, Homo sapien
tttgtgtctgttttgaacctttaagtttgtgct

SEQ ID NO: 72156 - DNA, 33 bp, Homo sapien
tttgtgtctgttttgagcctttaagtttgtgct

SEQ ID NO: 72157 - DNA, 33 bp, Homo sapien
tgtcacaaaaacaccactgaacttcttaataag

SEQ ID NO: 72158 - DNA, 33 bp, Homo sapien
tgtcacaaaaacaccattgaacttcttaataag

SEQ ID NO: 72159 - DNA, 33 bp, Homo sapien
aagaacctgtcaacaacgttaagtgaggaacta

SEQ ID NO: 72160 - DNA, 33 bp, Homo sapien
aagaacctgtcaacaatgttaagtgaggaacta

SEQ ID NO: 72161 - DNA, 33 bp, Homo sapien
tcaaaaactatgcaaactgaggtttataaggag

SEQ ID NO: 72162 - DNA, 33 bp, Homo sapien
tcaaaaactatgcaaagtgaggtttataaggag

SEQ ID NO: 72163 - DNA, 33 bp, Homo sapien
tgtcttttgtaaaacaatgagtttgtaatgctg

SEQ ID NO: 72164 - DNA, 33 bp, Homo sapien
tgtcttttgtaaaacagtgagtttgtaatgctg

SEQ ID NO: 72165 - DNA, 33 bp, Homo sapien
aaagaagacacttgacccaaaatcatttagaaa

SEQ ID NO: 72166 - DNA, 33 bp, Homo sapien
aaagaagacacttgactcaaaatcatttagaaa

SEQ ID NO: 72167 - DNA, 33 bp, Homo sapien
gacctaactactaaaaatctgtctaatgtttct

SEQ ID NO: 72168 - DNA, 33 bp, Homo sapien
gacctaactactaaaactctgtctaatgtttct

SEQ ID NO: 72169 - DNA, 33 bp, Homo sapien
ttaggagttaacagatgagagatcttttgtaaa

SEQ ID NO: 72170 - DNA, 33 bp, Homo sapien
ttaggagttaacagattagagatcttttgtaaa

SEQ ID NO: 72171 - DNA, 33 bp, Homo sapien
agatgcataaaaccacaaatgtttcatttcaac

SEQ ID NO: 72172 - DNA, 33 bp, Homo sapien
agatgcataaaaccacgaatgtttcatttcaac

SEQ ID NO: 72173 - DNA, 33 bp, Homo sapien
gatatgataataaagaatcccttgctggccagg

SEQ ID NO: 72174 - DNA, 33 bp, Homo sapien
gatatgataataaagagtcccttgctggccagg

SEQ ID NO: 72175 - DNA, 33 bp, Homo sapien
caggaggcagtaagaacacagtcatttagagtt

SEQ ID NO: 72176 - DNA, 33 bp, Homo sapien
caggaggcagtaagaatacagtcatttagagtt

SEQ ID NO: 72177 - DNA, 33 bp, Homo sapien
ttgggtaatatattcacggtgtcaacaagaata

SEQ ID NO: 72178 - DNA, 33 bp, Homo sapien
ttgggtaatatattcagggtgtcaacaagaata

SEQ ID NO: 72179 - DNA, 33 bp, Homo sapien
gtttattaaacgaatccataatgaaatcagttt

SEQ ID NO: 72180 - DNA, 33 bp, Homo sapien
gtttattaaacgaatctataatgaaatcagttt

SEQ ID NO: 72181 - DNA, 33 bp, Homo sapien
ttaaggacactattgacgactgggtaacaatga

SEQ ID NO: 72182 - DNA, 33 bp, Homo sapien
ttaaggacactattgatgactgggtaacaatga

SEQ ID NO: 72183 - DNA, 33 bp, Homo sapien
ctgaggatacaatagaaagcaagggaggcaagg

SEQ ID NO: 72184 - DNA, 33 bp, Homo sapien
ctgaggatacaatagacagcaagggaggcaagg

SEQ ID NO: 72185 - DNA, 33 bp, Homo sapien
cattcactcttccccaatacctaagcccaaaca

SEQ ID NO: 72186 - DNA, 33 bp, Homo sapien
cattcactcttccccactacctaagcccaaaca

SEQ ID NO: 72187 - DNA, 33 bp, Homo sapien
agaaaggagctagtgcaaccaagctgggtgatg

SEQ ID NO: 72188 - DNA, 33 bp, Homo sapien
agaaaggagctagtgcgaccaagctgggtgatg

SEQ ID NO: 72189 - DNA, 33 bp, Homo sapien
ctgctcatccttttgaccttctcttgggccatt

SEQ ID NO: 72190 - DNA, 33 bp, Homo sapien
ctgctcatccttttgatcttctcttgggccatt

SEQ ID NO: 72191 - DNA, 33 bp, Homo sapien
ttaaattgtgtcacacccttgtttacaggcctt

SEQ ID NO: 72192 - DNA, 33 bp, Homo sapien
ttaaattgtgtcacactcttgtttacaggcctt

SEQ ID NO: 72193 - DNA, 33 bp, Homo sapien
gaacttctgtgtttaaagcaactcagtccatgg

SEQ ID NO: 72194 - DNA, 33 bp, Homo sapien
gaacttctgtgtttaaggcaactcagtccatgg

SEQ ID NO: 72195 - DNA, 33 bp, Homo sapien
taaatttgcaacaacaatacttcatagaaaatg

SEQ ID NO: 72196 - DNA, 33 bp, Homo sapien
taaatttgcaacaacagtacttcatagaaaatg

SEQ ID NO: 72197 - DNA, 33 bp, Homo sapien
ttagtttaaagggcaagttatatcctggtcttt

SEQ ID NO: 72198 - DNA, 33 bp, Homo sapien
ttagtttaaagggcaatttatatcctggtcttt

SEQ ID NO: 72199 - DNA, 33 bp, Homo sapien
gttttattctctaaaactgcacaatcctccaag

SEQ ID NO: 72200 - DNA, 33 bp, Homo sapien
gttttattctctaaaattgcacaatcctccaag

SEQ ID NO: 72201 - DNA, 33 bp, Homo sapien
tgtcatcatcaaggaagatagtggagtcttaac

SEQ ID NO: 72202 - DNA, 33 bp, Homo sapien
tgtcatcatcaaggaatatagtggagtcttaac

SEQ ID NO: 72203 - DNA, 33 bp, Homo sapien
taaacaaaatgatagaagttgaccttttgaagt

SEQ ID NO: 72204 - DNA, 33 bp, Homo sapien
taaacaaaatgatagacgttgaccttttgaagt

SEQ ID NO: 72205 - DNA, 33 bp, Homo sapien
tttggtgaaggaattcaaacagcagccagatgg

SEQ ID NO: 72206 - DNA, 33 bp, Homo sapien
tttggtgaaggaattcgaacagcagccagatgg

SEQ ID NO: 72207 - DNA, 33 bp, Homo sapien
tgatctggcttgtgcaactagaaagatgatagg

SEQ ID NO: 72208 - DNA, 33 bp, Homo sapien
tgatctggcttgtgcagctagaaagatgatagg

SEQ ID NO: 72209 - DNA, 33 bp, Homo sapien
gaaagatataaccaaaacctctttcttctccac

SEQ ID NO: 72210 - DNA, 33 bp, Homo sapien
gaaagatataaccaaagcctctttcttctccac

SEQ ID NO: 72211 - DNA, 33 bp, Homo sapien
ttttctacttccccaaaaagctagtataatata

SEQ ID NO: 72212 - DNA, 33 bp, Homo sapien
ttttctacttccccaacaagctagtataatata

SEQ ID NO: 72213 - DNA, 33 bp, Homo sapien
gctttgtccaattcaacagaactgaatgagcac

SEQ ID NO: 72214 - DNA, 33 bp, Homo sapien
gctttgtccaattcaatagaactgaatgagcac

SEQ ID NO: 72215 - DNA, 33 bp, Homo sapien
atatcgtggagaagtaaatgtcccatctgcact

SEQ ID NO: 72216 - DNA, 33 bp, Homo sapien
atatcgtggagaagtacatgtcccatctgcact

SEQ ID NO: 72217 - DNA, 33 bp, Homo sapien
acaaacaccctgtaaacgctgtaaaaatagaaa

SEQ ID NO: 72218 - DNA, 33 bp, Homo sapien
acaaacaccctgtaaatgctgtaaaaatagaaa

SEQ ID NO: 72219 - DNA, 33 bp, Homo sapien
atgctaattgcatgagaaaagcacatcaaattc

SEQ ID NO: 72220 - DNA, 33 bp, Homo sapien
atgctaattgcatgagtaaagcacatcaaattc

SEQ ID NO: 72221 - DNA, 33 bp, Homo sapien
tcaaacagatctcaataaaaaatgttatatggc

SEQ ID NO: 72222 - DNA, 33 bp, Homo sapien
tcaaacagatctcaatcaaaaatgttatatggc

SEQ ID NO: 72223 - DNA, 33 bp, Homo sapien
tggaaatataaaatgcacttgattctgctgtgt

SEQ ID NO: 72224 - DNA, 33 bp, Homo sapien
tggaaatataaaatgctcttgattctgctgtgt

SEQ ID NO: 72225 - DNA, 33 bp, Homo sapien
gacacggagatgcagacgttgactttgtacttg

SEQ ID NO: 72226 - DNA, 33 bp, Homo sapien
gacacggagatgcagatgttgactttgtacttg

SEQ ID NO: 72227 - DNA, 33 bp, Homo sapien
atcagagaaagcaatacccctcaaacaaaaatg

SEQ ID NO: 72228 - DNA, 33 bp, Homo sapien
atcagagaaagcaatatccctcaaacaaaaatg

SEQ ID NO: 72229 - DNA, 33 bp, Homo sapien
cttatttcccaagcgaccactggcaaattaact

SEQ ID NO: 72230 - DNA, 33 bp, Homo sapien
cttatttcccaagcgatcactggcaaattaact

SEQ ID NO: 72231 - DNA, 33 bp, Homo sapien
tccaaattactgctaacaatgaataatacagta

SEQ ID NO: 72232 - DNA, 33 bp, Homo sapien
tccaaattactgctaagaatgaataatacagta

SEQ ID NO: 72233 - DNA, 33 bp, Homo sapien
ctagaatgtgtaggtaaagctttctggttacta

SEQ ID NO: 72234 - DNA, 33 bp, Homo sapien
ctagaatgtgtaggtagagctttctggttacta

SEQ ID NO: 72235 - DNA, 33 bp, Homo sapien
gaggtaaggcagagaaagagcttatcagtgttt

SEQ ID NO: 72236 - DNA, 33 bp, Homo sapien
gaggtaaggcagagaaggagcttatcagtgttt

SEQ ID NO: 72237 - DNA, 33 bp, Homo sapien
gcctccttctcttaaaacatgtatcatactgga

SEQ ID NO: 72238 - DNA, 33 bp, Homo sapien
gcctccttctcttaaagcatgtatcatactgga

SEQ ID NO: 72239 - DNA, 33 bp, Homo sapien
agtagagtggagtggaagaattaagtggcgaag

SEQ ID NO: 72240 - DNA, 33 bp, Homo sapien
agtagagtggagtggacgaattaagtggcgaag

SEQ ID NO: 72241 - DNA, 33 bp, Homo sapien
attctcattacaaatacgcttaatcctctaatc

SEQ ID NO: 72242 - DNA, 33 bp, Homo sapien
attctcattacaaatatgcttaatcctctaatc

SEQ ID NO: 72243 - DNA, 33 bp, Homo sapien
agaaaatggacagtacaaatgctgctcaatggg

SEQ ID NO: 72244 - DNA, 33 bp, Homo sapien
agaaaatggacagtaccaatgctgctcaatggg

SEQ ID NO: 72245 - DNA, 33 bp, Homo sapien
tttgcattagcgaataagagaagatgatggctg

SEQ ID NO: 72246 - DNA, 33 bp, Homo sapien
tttgcattagcgaatatgagaagatgatggctg

SEQ ID NO: 72247 - DNA, 33 bp, Homo sapien
tttcaggctccaggacaactagtgctacagctt

SEQ ID NO: 72248 - DNA, 33 bp, Homo sapien
tttcaggctccaggacgactagtgctacagctt

SEQ ID NO: 72249 - DNA, 33 bp, Homo sapien
tcacactaccatttatcacaacaggttcaacaa

SEQ ID NO: 72250 - DNA, 33 bp, Homo sapien
tcacactaccatttattacaacaggttcaacaa

SEQ ID NO: 72251 - DNA, 33 bp, Homo sapien
aaaggaggacatttcaagtggaataacagcttg

SEQ ID NO: 72252 - DNA, 33 bp, Homo sapien
aaaggaggacatttcaggtggaataacagcttg

SEQ ID NO: 72253 - DNA, 33 bp, Homo sapien
ttacctcatcctcagaatagcactgttaggttt

SEQ ID NO: 72254 - DNA, 33 bp, Homo sapien
ttacctcatcctcagagtagcactgttaggttt

SEQ ID NO: 72255 - DNA, 33 bp, Homo sapien
attgtatatcagaccaaactatcaatcctgttg

SEQ ID NO: 72256 - DNA, 33 bp, Homo sapien
attgtatatcagaccacactatcaatcctgttg

SEQ ID NO: 72257 - DNA, 33 bp, Homo sapien
gatggctggcgggctaaggagaagaagcgggaa

SEQ ID NO: 72258 - DNA, 33 bp, Homo sapien
gatggctggcgggctagggagaagaagcgggaa

SEQ ID NO: 72259 - DNA, 33 bp, Homo sapien
tacctgtaagttgccacgtgtgtatctgatctg

SEQ ID NO: 72260 - DNA, 33 bp, Homo sapien
tacctgtaagttgccatgtgtgtatctgatctg

SEQ ID NO: 72261 - DNA, 33 bp, Homo sapien
taattttcttttggaaagtagagtggattcaaa

SEQ ID NO: 72262 - DNA, 33 bp, Homo sapien
taattttcttttggaacgtagagtggattcaaa

SEQ ID NO: 72263 - DNA, 33 bp, Homo sapien
atccaagcttcatttcgcttctctatctcatga

SEQ ID NO: 72264 - DNA, 33 bp, Homo sapien
atccaagcttcatttctcttctctatctcatga

SEQ ID NO: 72265 - DNA, 33 bp, Homo sapien
gggcaacaacagttaagtaaacaccactcagga

SEQ ID NO: 72266 - DNA, 33 bp, Homo sapien
gggcaacaacagttaattaaacaccactcagga

SEQ ID NO: 72267 - DNA, 33 bp, Homo sapien
ctctttgattatttcacgagattgcttttttcc

SEQ ID NO: 72268 - DNA, 33 bp, Homo sapien
ctctttgattatttcatgagattgcttttttcc

SEQ ID NO: 72269 - DNA, 33 bp, Homo sapien
tggtttggtagatattaaaatgctttaggtgtg

SEQ ID NO: 72270 - DNA, 33 bp, Homo sapien
tggtttggtagatattcaaatgctttaggtgtg

SEQ ID NO: 72271 - DNA, 33 bp, Homo sapien
cactgattacaactcaatatctgcaaaaattat

SEQ ID NO: 72272 - DNA, 33 bp, Homo sapien
cactgattacaactcagtatctgcaaaaattat

SEQ ID NO: 72273 - DNA, 33 bp, Homo sapien
attttttccggctagaatatctagaacaaaatg

SEQ ID NO: 72274 - DNA, 33 bp, Homo sapien
attttttccggctagagtatctagaacaaaatg

SEQ ID NO: 72275 - DNA, 33 bp, Homo sapien
tatagtaagctgtcaaatcacattgtatgagtc

SEQ ID NO: 72276 - DNA, 33 bp, Homo sapien
tatagtaagctgtcaactcacattgtatgagtc

SEQ ID NO: 72277 - DNA, 33 bp, Homo sapien
aaggatgcaggcacacagtaagtttcagagtgg

SEQ ID NO: 72278 - DNA, 33 bp, Homo sapien
aaggatgcaggcacacggtaagtttcagagtgg

SEQ ID NO: 72279 - DNA, 33 bp, Homo sapien
tagacattagtttaggcaaagactttgtgacaa

SEQ ID NO: 72280 - DNA, 33 bp, Homo sapien
tagacattagtttagggaaagactttgtgacaa

SEQ ID NO: 72281 - DNA, 33 bp, Homo sapien
gcaaatgaaaaccacaatatggtaccatcttac

SEQ ID NO: 72282 - DNA, 33 bp, Homo sapien
gcaaatgaaaaccacattatggtaccatcttac

SEQ ID NO: 72283 - DNA, 33 bp, Homo sapien
aacaatatcaggtggcactaaaatggttgattg

SEQ ID NO: 72284 - DNA, 33 bp, Homo sapien
aacaatatcaggtggcgctaaaatggttgattg

SEQ ID NO: 72285 - DNA, 33 bp, Homo sapien
agcagataaactctaaagccatctcttactcta

SEQ ID NO: 72286 - DNA, 33 bp, Homo sapien
agcagataaactctaaggccatctcttactcta

SEQ ID NO: 72287 - DNA, 33 bp, Homo sapien
atgccacagaacagcccgagttttggtaatctc

SEQ ID NO: 72288 - DNA, 33 bp, Homo sapien
atgccacagaacagcctgagttttggtaatctc

SEQ ID NO: 72289 - DNA, 33 bp, Homo sapien
aatggagaaggactgaccataattttctatctt

SEQ ID NO: 72290 - DNA, 33 bp, Homo sapien
aatggagaaggactgagcataattttctatctt

SEQ ID NO: 72291 - DNA, 33 bp, Homo sapien
gtctctctaaaaagaaccatggcaccttcaaag

SEQ ID NO: 72292 - DNA, 33 bp, Homo sapien
gtctctctaaaaagaatcatggcaccttcaaag

SEQ ID NO: 72293 - DNA, 33 bp, Homo sapien
tatttgtattttttcaatcagacagagaaagag

SEQ ID NO: 72294 - DNA, 33 bp, Homo sapien
tatttgtattttttcagtcagacagagaaagag

SEQ ID NO: 72295 - DNA, 33 bp, Homo sapien
aaaaaagttctctaccacttatgctggaacttg

SEQ ID NO: 72296 - DNA, 33 bp, Homo sapien
aaaaaagttctctaccccttatgctggaacttg

SEQ ID NO: 72297 - DNA, 33 bp, Homo sapien
agtagtgcctcttagactagtggttaaaaatat

SEQ ID NO: 72298 - DNA, 33 bp, Homo sapien
agtagtgcctcttagattagtggttaaaaatat

SEQ ID NO: 72299 - DNA, 33 bp, Homo sapien
ctagttgagtctccggaaaatctgttctgactt

SEQ ID NO: 72300 - DNA, 33 bp, Homo sapien
ctagttgagtctccggcaaatctgttctgactt

SEQ ID NO: 72301 - DNA, 33 bp, Homo sapien
tagtagagcattcatcaacgtttacccgataac

SEQ ID NO: 72302 - DNA, 33 bp, Homo sapien
tagtagagcattcatccacgtttacccgataac

SEQ ID NO: 72303 - DNA, 33 bp, Homo sapien
actggagaaaaataaaagggaatcttcagtttg

SEQ ID NO: 72304 - DNA, 33 bp, Homo sapien
actggagaaaaataaaggggaatcttcagtttg

SEQ ID NO: 72305 - DNA, 33 bp, Homo sapien
cagatgtctccttataggctacaaaatccaatg

SEQ ID NO: 72306 - DNA, 33 bp, Homo sapien
cagatgtctccttatatgctacaaaatccaatg

SEQ ID NO: 72307 - DNA, 33 bp, Homo sapien
ggcaaacttttttccaactgaacaaactgatgc

SEQ ID NO: 72308 - DNA, 33 bp, Homo sapien
ggcaaacttttttccagctgaacaaactgatgc

SEQ ID NO: 72309 - DNA, 33 bp, Homo sapien
agatatatacttgagacggttcctctgtaaaag

SEQ ID NO: 72310 - DNA, 33 bp, Homo sapien
agatatatacttgagatggttcctctgtaaaag

SEQ ID NO: 72311 - DNA, 33 bp, Homo sapien
tcatttgctacagtcacacagtaaggtgttcct

SEQ ID NO: 72312 - DNA, 33 bp, Homo sapien
tcatttgctacagtcatacagtaaggtgttcct

SEQ ID NO: 72313 - DNA, 33 bp, Homo sapien
ggctgctctcagttaccagttttgtgttgcctg

SEQ ID NO: 72314 - DNA, 33 bp, Homo sapien
ggctgctctcagttactagttttgtgttgcctg

SEQ ID NO: 72315 - DNA, 33 bp, Homo sapien
cgctatactaagaaggaatttaccatctctttc

SEQ ID NO: 72316 - DNA, 33 bp, Homo sapien
cgctatactaagaagggatttaccatctctttc

SEQ ID NO: 72317 - DNA, 33 bp, Homo sapien
cacccatgaattgagacagctctaaaataatgt

SEQ ID NO: 72318 - DNA, 33 bp, Homo sapien
cacccatgaattgagagagctctaaaataatgt

SEQ ID NO: 72319 - DNA, 33 bp, Homo sapien
ttctgcagttatatcacgaaaattcctagaaag

SEQ ID NO: 72320 - DNA, 33 bp, Homo sapien
ttctgcagttatatcatgaaaattcctagaaag

SEQ ID NO: 72321 - DNA, 33 bp, Homo sapien
atagccctttgttacaccactgcaccatacctt

SEQ ID NO: 72322 - DNA, 33 bp, Homo sapien
atagccctttgttacatcactgcaccatacctt

SEQ ID NO: 72323 - DNA, 33 bp, Homo sapien
tgtgctaaagggacaactagaatgcacatttaa

SEQ ID NO: 72324 - DNA, 33 bp, Homo sapien
tgtgctaaagggacaattagaatgcacatttaa

SEQ ID NO: 72325 - DNA, 33 bp, Homo sapien
gatgttagagggaaacagaagaatggattacac

SEQ ID NO: 72326 - DNA, 33 bp, Homo sapien
gatgttagagggaaacggaagaatggattacac

SEQ ID NO: 72327 - DNA, 33 bp, Homo sapien
gttatttgtgtactgcactggcaagcaaatgcg

SEQ ID NO: 72328 - DNA, 33 bp, Homo sapien
gttatttgtgtactgccctggcaagcaaatgcg

SEQ ID NO: 72329 - DNA, 33 bp, Homo sapien
gcatcttgtatgaatacctcattttgtcagcag

SEQ ID NO: 72330 - DNA, 33 bp, Homo sapien
gcatcttgtatgaatatctcattttgtcagcag

SEQ ID NO: 72331 - DNA, 33 bp, Homo sapien
tgacagaggccagaagcctaccacctaagtcaa

SEQ ID NO: 72332 - DNA, 33 bp, Homo sapien
tgacagaggccagaagtctaccacctaagtcaa

SEQ ID NO: 72333 - DNA, 33 bp, Homo sapien
aatgacctatagtctcgcatatcatccttaaga

SEQ ID NO: 72334 - DNA, 33 bp, Homo sapien
aatgacctatagtctctcatatcatccttaaga

SEQ ID NO: 72335 - DNA, 33 bp, Homo sapien
ggtctgggctataaaacgcttaatggcaataaa

SEQ ID NO: 72336 - DNA, 33 bp, Homo sapien
ggtctgggctataaaatgcttaatggcaataaa

SEQ ID NO: 72337 - DNA, 33 bp, Homo sapien
tcaagaaaaatgcaccaaagtgtaatgtgatgt

SEQ ID NO: 72338 - DNA, 33 bp, Homo sapien
tcaagaaaaatgcaccgaagtgtaatgtgatgt

SEQ ID NO: 72339 - DNA, 33 bp, Homo sapien
attccctcctctttacagcaatgacaacaacaa

SEQ ID NO: 72340 - DNA, 33 bp, Homo sapien
attccctcctctttacggcaatgacaacaacaa

SEQ ID NO: 72341 - DNA, 33 bp, Homo sapien
ctctaaaaagcctgtaacacttctttagccaga

SEQ ID NO: 72342 - DNA, 33 bp, Homo sapien
ctctaaaaagcctgtagcacttctttagccaga

SEQ ID NO: 72343 - DNA, 33 bp, Homo sapien
tacatccagctacaggaataacaacagattatt

SEQ ID NO: 72344 - DNA, 33 bp, Homo sapien
tacatccagctacaggcataacaacagattatt

SEQ ID NO: 72345 - DNA, 33 bp, Homo sapien
ttatcataccatattgaaatctaacacattcca

SEQ ID NO: 72346 - DNA, 33 bp, Homo sapien
ttatcataccatattgcaatctaacacattcca

SEQ ID NO: 72347 - DNA, 33 bp, Homo sapien
tgatgtcatagccaaactataaaaacattctaa

SEQ ID NO: 72348 - DNA, 33 bp, Homo sapien
tgatgtcatagccaaagtataaaaacattctaa

SEQ ID NO: 72349 - DNA, 33 bp, Homo sapien
agagatgagcattgtcaagtaaaattgaacata

SEQ ID NO: 72350 - DNA, 33 bp, Homo sapien
agagatgagcattgtctagtaaaattgaacata

SEQ ID NO: 72351 - DNA, 33 bp, Homo sapien
ttaaacaccttaaaaaccctatcattatggaaa

SEQ ID NO: 72352 - DNA, 33 bp, Homo sapien
ttaaacaccttaaaaatcctatcattatggaaa

SEQ ID NO: 72353 - DNA, 33 bp, Homo sapien
aggtatctctatttacactgaagaattgtgttt

SEQ ID NO: 72354 - DNA, 33 bp, Homo sapien
aggtatctctatttacgctgaagaattgtgttt

SEQ ID NO: 72355 - DNA, 33 bp, Homo sapien
cacagtcttttttagagtccgttgattccattt

SEQ ID NO: 72356 - DNA, 33 bp, Homo sapien
cacagtcttttttagattccgttgattccattt

SEQ ID NO: 72357 - DNA, 33 bp, Homo sapien
tgtttcataaaagttacgcaaggtttgctcaaa

SEQ ID NO: 72358 - DNA, 33 bp, Homo sapien
tgtttcataaaagttaggcaaggtttgctcaaa

SEQ ID NO: 72359 - DNA, 33 bp, Homo sapien
gcttaagatttcatcagcctggtaatctgtaga

SEQ ID NO: 72360 - DNA, 33 bp, Homo sapien
gcttaagatttcatcatcctggtaatctgtaga

SEQ ID NO: 72361 - DNA, 33 bp, Homo sapien
tgcaatctacacaatacaggtcacaaatgtatt

SEQ ID NO: 72362 - DNA, 33 bp, Homo sapien
tgcaatctacacaatataggtcacaaatgtatt

SEQ ID NO: 72363 - DNA, 33 bp, Homo sapien
tcagttatgacaaggacagaatgtttcctaagc

SEQ ID NO: 72364 - DNA, 33 bp, Homo sapien
tcagttatgacaaggagagaatgtttcctaagc

SEQ ID NO: 72365 - DNA, 33 bp, Homo sapien
atacacattgccttataacatatcttcctttct

SEQ ID NO: 72366 - DNA, 33 bp, Homo sapien
atacacattgccttatcacatatcttcctttct

SEQ ID NO: 72367 - DNA, 33 bp, Homo sapien
aagaaaaactcctaccaacagggccaatcttgg

SEQ ID NO: 72368 - DNA, 33 bp, Homo sapien
aagaaaaactcctaccgacagggccaatcttgg

SEQ ID NO: 72369 - DNA, 33 bp, Homo sapien
acaatgagagagagaaaggtcaccagagagcga

SEQ ID NO: 72370 - DNA, 33 bp, Homo sapien
acaatgagagagagaagggtcaccagagagcga

SEQ ID NO: 72371 - DNA, 33 bp, Homo sapien
cctgcaacgggacttacagtcaaatccccagct

SEQ ID NO: 72372 - DNA, 33 bp, Homo sapien
cctgcaacgggacttagagtcaaatccccagct

SEQ ID NO: 72373 - DNA, 33 bp, Homo sapien
catattatcacatatcacagtgtctgcttatca

SEQ ID NO: 72374 - DNA, 33 bp, Homo sapien
catattatcacatatcgcagtgtctgcttatca

SEQ ID NO: 72375 - DNA, 33 bp, Homo sapien
agaggcctgacagtgacgacatagcagtcagat

SEQ ID NO: 72376 - DNA, 33 bp, Homo sapien
agaggcctgacagtgatgacatagcagtcagat

SEQ ID NO: 72377 - DNA, 33 bp, Homo sapien
atgttagcaggctagagatccagggaagagtta

SEQ ID NO: 72378 - DNA, 33 bp, Homo sapien
atgttagcaggctagatatccagggaagagtta

SEQ ID NO: 72379 - DNA, 33 bp, Homo sapien
ttttcagaatgaagggaagaattaattttttca

SEQ ID NO: 72380 - DNA, 33 bp, Homo sapien
ttttcagaatgaaggggagaattaattttttca

SEQ ID NO: 72381 - DNA, 33 bp, Homo sapien
ctagtgagaaagacaacgaggttaatcaatcaa

SEQ ID NO: 72382 - DNA, 33 bp, Homo sapien
ctagtgagaaagacaatgaggttaatcaatcaa

SEQ ID NO: 72383 - DNA, 33 bp, Homo sapien
attgcttcaacatagcaaagactgagtctgtgt

SEQ ID NO: 72384 - DNA, 33 bp, Homo sapien
attgcttcaacatagcgaagactgagtctgtgt

SEQ ID NO: 72385 - DNA, 33 bp, Homo sapien
gataaagtgtcacagaagaatgttcacaggctt

SEQ ID NO: 72386 - DNA, 33 bp, Homo sapien
gataaagtgtcacagaggaatgttcacaggctt

SEQ ID NO: 72387 - DNA, 33 bp, Homo sapien
gttcaatttaactcagaaaatatttgttgagca

SEQ ID NO: 72388 - DNA, 33 bp, Homo sapien
gttcaatttaactcaggaaatatttgttgagca

SEQ ID NO: 72389 - DNA, 33 bp, Homo sapien
atttccttatttctgcaactaatagcatgggtt

SEQ ID NO: 72390 - DNA, 33 bp, Homo sapien
atttccttatttctgcgactaatagcatgggtt

SEQ ID NO: 72391 - DNA, 33 bp, Homo sapien
agctcatgactgacagccaacatggaaacaggg

SEQ ID NO: 72392 - DNA, 33 bp, Homo sapien
agctcatgactgacaggcaacatggaaacaggg

SEQ ID NO: 72393 - DNA, 33 bp, Homo sapien
tttcagaaaaaattaaatcacaccatggaagga

SEQ ID NO: 72394 - DNA, 33 bp, Homo sapien
tttcagaaaaaattaagtcacaccatggaagga

SEQ ID NO: 72395 - DNA, 33 bp, Homo sapien
aagaatcccagtgaaacgaccaaagttttataa

SEQ ID NO: 72396 - DNA, 33 bp, Homo sapien
aagaatcccagtgaaatgaccaaagttttataa

SEQ ID NO: 72397 - DNA, 33 bp, Homo sapien
tgtcatattctggggacgatttaattcaagaaa

SEQ ID NO: 72398 - DNA, 33 bp, Homo sapien
tgtcatattctggggaggatttaattcaagaaa

SEQ ID NO: 72399 - DNA, 33 bp, Homo sapien
tataataaatccctagaagtggaataactgcat

SEQ ID NO: 72400 - DNA, 33 bp, Homo sapien
tataataaatccctagcagtggaataactgcat

SEQ ID NO: 72401 - DNA, 33 bp, Homo sapien
cagtgcttttcatttaccaagaattcactaaat

SEQ ID NO: 72402 - DNA, 33 bp, Homo sapien
cagtgcttttcatttatcaagaattcactaaat

SEQ ID NO: 72403 - DNA, 33 bp, Homo sapien
cgtatggtagctggaacgtagaagtcaaaatta

SEQ ID NO: 72404 - DNA, 33 bp, Homo sapien
cgtatggtagctggaatgtagaagtcaaaatta

SEQ ID NO: 72405 - DNA, 33 bp, Homo sapien
ggttattaagttgcttaaactgccttcagcaca

SEQ ID NO: 72406 - DNA, 33 bp, Homo sapien
ggttattaagttgcttcaactgccttcagcaca

SEQ ID NO: 72407 - DNA, 33 bp, Homo sapien
aagatcaggtgtctgaataagtggttcttcata

SEQ ID NO: 72408 - DNA, 33 bp, Homo sapien
aagatcaggtgtctgagtaagtggttcttcata

SEQ ID NO: 72409 - DNA, 33 bp, Homo sapien
ctgaggctgtaggtaaggtacttgaatttgtct

SEQ ID NO: 72410 - DNA, 33 bp, Homo sapien
ctgaggctgtaggtaatgtacttgaatttgtct

SEQ ID NO: 72411 - DNA, 33 bp, Homo sapien
caatggatttggttaacgtatccgaaggagaag

SEQ ID NO: 72412 - DNA, 33 bp, Homo sapien
caatggatttggttaatgtatccgaaggagaag

SEQ ID NO: 72413 - DNA, 33 bp, Homo sapien
gcaattggaccaatacaatactttatgccagac

SEQ ID NO: 72414 - DNA, 33 bp, Homo sapien
gcaattggaccaatacgatactttatgccagac

SEQ ID NO: 72415 - DNA, 33 bp, Homo sapien
ttaatcagaccattacaaaattgaataaatggc

SEQ ID NO: 72416 - DNA, 33 bp, Homo sapien
ttaatcagaccattaccaaattgaataaatggc

SEQ ID NO: 72417 - DNA, 33 bp, Homo sapien
tatttccaagtgcacagacattgatgggtttgc

SEQ ID NO: 72418 - DNA, 33 bp, Homo sapien
tatttccaagtgcacatacattgatgggtttgc

SEQ ID NO: 72419 - DNA, 33 bp, Homo sapien
taaggctccaatctgccatgttctagacataca

SEQ ID NO: 72420 - DNA, 33 bp, Homo sapien
taaggctccaatctgcgatgttctagacataca

SEQ ID NO: 72421 - DNA, 33 bp, Homo sapien
cttagctatggatagaagtcttcagggagacag

SEQ ID NO: 72422 - DNA, 33 bp, Homo sapien
cttagctatggatagaggtcttcagggagacag

SEQ ID NO: 72423 - DNA, 33 bp, Homo sapien
aataatagatgttgaaatcgatgaggtgaacag

SEQ ID NO: 72424 - DNA, 33 bp, Homo sapien
aataatagatgttgaagtcgatgaggtgaacag

SEQ ID NO: 72425 - DNA, 33 bp, Homo sapien
acctgcaatacacacacgttaatctccgaagaa

SEQ ID NO: 72426 - DNA, 33 bp, Homo sapien
acctgcaatacacacatgttaatctccgaagaa

SEQ ID NO: 72427 - DNA, 33 bp, Homo sapien
ctgagcaacacaagaacgattcctaaccttagg

SEQ ID NO: 72428 - DNA, 33 bp, Homo sapien
ctgagcaacacaagaatgattcctaaccttagg

SEQ ID NO: 72429 - DNA, 33 bp, Homo sapien
aaactgcatacgaaccaaatgagtgattgaact

SEQ ID NO: 72430 - DNA, 33 bp, Homo sapien
aaactgcatacgaaccgaatgagtgattgaact

SEQ ID NO: 72431 - DNA, 33 bp, Homo sapien
acaatttgagcaggtacatttgagactatatag

SEQ ID NO: 72432 - DNA, 33 bp, Homo sapien
acaatttgagcaggtatatttgagactatatag

SEQ ID NO: 72433 - DNA, 33 bp, Homo sapien
ctttcagttagtttcagctcacaaacagcaagt

SEQ ID NO: 72434 - DNA, 33 bp, Homo sapien
ctttcagttagtttcatctcacaaacagcaagt

SEQ ID NO: 72435 - DNA, 33 bp, Homo sapien
ccaaatattccttatccgacactgctaaacttt

SEQ ID NO: 72436 - DNA, 33 bp, Homo sapien
ccaaatattccttatctgacactgctaaacttt

SEQ ID NO: 72437 - DNA, 33 bp, Homo sapien
atcataacttgtagaaagaaatctttgagaacc

SEQ ID NO: 72438 - DNA, 33 bp, Homo sapien
atcataacttgtagaatgaaatctttgagaacc

SEQ ID NO: 72439 - DNA, 33 bp, Homo sapien
tggaaggggaaaatcaaggtcagaaatgaaaag

SEQ ID NO: 72440 - DNA, 33 bp, Homo sapien
tggaaggggaaaatcagggtcagaaatgaaaag

SEQ ID NO: 72441 - DNA, 33 bp, Homo sapien
ttccttaccttcttcacgctctatttgttggat

SEQ ID NO: 72442 - DNA, 33 bp, Homo sapien
ttccttaccttcttcatgctctatttgttggat

SEQ ID NO: 72443 - DNA, 33 bp, Homo sapien
taataagcaaccagtcaaaaagaaaatgcatct

SEQ ID NO: 72444 - DNA, 33 bp, Homo sapien
taataagcaaccagtcgaaaagaaaatgcatct

SEQ ID NO: 72445 - DNA, 33 bp, Homo sapien
cgtatttctcatgaccagatgaagaccacaagg

SEQ ID NO: 72446 - DNA, 33 bp, Homo sapien
cgtatttctcatgaccggatgaagaccacaagg

SEQ ID NO: 72447 - DNA, 33 bp, Homo sapien
gttttatataaaatcacgctaaaattacttcta

SEQ ID NO: 72448 - DNA, 33 bp, Homo sapien
gttttatataaaatcatgctaaaattacttcta

SEQ ID NO: 72449 - DNA, 33 bp, Homo sapien
gaatgaaatggatagagagctgaatggatgaat

SEQ ID NO: 72450 - DNA, 33 bp, Homo sapien
gaatgaaatggatagatagctgaatggatgaat

SEQ ID NO: 72451 - DNA, 33 bp, Homo sapien
gtgtctagactgcgaccggaagataaaaactca

SEQ ID NO: 72452 - DNA, 33 bp, Homo sapien
gtgtctagactgcgactggaagataaaaactca

SEQ ID NO: 72453 - DNA, 33 bp, Homo sapien
tgttacatatgctggagctctttttctctttaa

SEQ ID NO: 72454 - DNA, 33 bp, Homo sapien
tgttacatatgctggatctctttttctctttaa

SEQ ID NO: 72455 - DNA, 33 bp, Homo sapien
aattagctggaattaaccattttataatgtgta

SEQ ID NO: 72456 - DNA, 33 bp, Homo sapien
aattagctggaattaatcattttataatgtgta

SEQ ID NO: 72457 - DNA, 33 bp, Homo sapien
ggatttctctccctaaatcgtggtctagaaata

SEQ ID NO: 72458 - DNA, 33 bp, Homo sapien
ggatttctctccctaagtcgtggtctagaaata

SEQ ID NO: 72459 - DNA, 33 bp, Homo sapien
cagctcctgaaaattccctctgaatgttgtcaa

SEQ ID NO: 72460 - DNA, 33 bp, Homo sapien
cagctcctgaaaattctctctgaatgttgtcaa

SEQ ID NO: 72461 - DNA, 33 bp, Homo sapien
tagctccaagctctcaacccaaataacatagag

SEQ ID NO: 72462 - DNA, 33 bp, Homo sapien
tagctccaagctctcatcccaaataacatagag

SEQ ID NO: 72463 - DNA, 33 bp, Homo sapien
atttccagagaccaataaaataagtcacataga

SEQ ID NO: 72464 - DNA, 33 bp, Homo sapien
atttccagagaccaatgaaataagtcacataga

SEQ ID NO: 72465 - DNA, 33 bp, Homo sapien
atcttcctcatgctgacgtctttgctacatgaa

SEQ ID NO: 72466 - DNA, 33 bp, Homo sapien
atcttcctcatgctgatgtctttgctacatgaa

SEQ ID NO: 72467 - DNA, 33 bp, Homo sapien
attcttcctagattcaataattcctttgcttgt

SEQ ID NO: 72468 - DNA, 33 bp, Homo sapien
attcttcctagattcagtaattcctttgcttgt

SEQ ID NO: 72469 - DNA, 33 bp, Homo sapien
tggtgggaaggttactcacaacagaaaagagta

SEQ ID NO: 72470 - DNA, 33 bp, Homo sapien
tggtgggaaggttactgacaacagaaaagagta

SEQ ID NO: 72471 - DNA, 33 bp, Homo sapien
cccatgtgcaaagcacagagccattttctgtct

SEQ ID NO: 72472 - DNA, 33 bp, Homo sapien
cccatgtgcaaagcacggagccattttctgtct

SEQ ID NO: 72473 - DNA, 33 bp, Homo sapien
ccagcagcctagttaccgctagaggatcagaat

SEQ ID NO: 72474 - DNA, 33 bp, Homo sapien
ccagcagcctagttactgctagaggatcagaat

SEQ ID NO: 72475 - DNA, 33 bp, Homo sapien
tttatgaaaaaggcaaattgaagatatactctg

SEQ ID NO: 72476 - DNA, 33 bp, Homo sapien
tttatgaaaaaggcaagttgaagatatactctg

SEQ ID NO: 72477 - DNA, 33 bp, Homo sapien
cctgcagtgcataggggactaatttatggcgct

SEQ ID NO: 72478 - DNA, 33 bp, Homo sapien
cctgcagtgcatagggtactaatttatggcgct

SEQ ID NO: 72479 - DNA, 33 bp, Homo sapien
gtttggcaaggtcactaaacataggtaaatata

SEQ ID NO: 72480 - DNA, 33 bp, Homo sapien
gtttggcaaggtcactgaacataggtaaatata

SEQ ID NO: 72481 - DNA, 33 bp, Homo sapien
ctagctttcaacctgtaaactttctacatgcct

SEQ ID NO: 72482 - DNA, 33 bp, Homo sapien
ctagctttcaacctgtcaactttctacatgcct

SEQ ID NO: 72483 - DNA, 33 bp, Homo sapien
caggtgaatgggactaagatgtagtggagtccc

SEQ ID NO: 72484 - DNA, 33 bp, Homo sapien
caggtgaatgggactaggatgtagtggagtccc

SEQ ID NO: 72485 - DNA, 33 bp, Homo sapien
ccagccatgtgaaaccaagtcaattaaacctct

SEQ ID NO: 72486 - DNA, 33 bp, Homo sapien
ccagccatgtgaaaccgagtcaattaaacctct

SEQ ID NO: 72487 - DNA, 33 bp, Homo sapien
gtgaaggcatatttaacgaggtgagaaaaatca

SEQ ID NO: 72488 - DNA, 33 bp, Homo sapien
gtgaaggcatatttaatgaggtgagaaaaatca

SEQ ID NO: 72489 - DNA, 33 bp, Homo sapien
acatgaactgagtttgcaataagattgtactgc

SEQ ID NO: 72490 - DNA, 33 bp, Homo sapien
acatgaactgagtttggaataagattgtactgc

SEQ ID NO: 72491 - DNA, 33 bp, Homo sapien
attgtaaatgacagcccagaattctatacccat

SEQ ID NO: 72492 - DNA, 33 bp, Homo sapien
attgtaaatgacagcctagaattctatacccat

SEQ ID NO: 72493 - DNA, 33 bp, Homo sapien
acaaatatcagaagagaaaacgttacccctctg

SEQ ID NO: 72494 - DNA, 33 bp, Homo sapien
acaaatatcagaagaggaaacgttacccctctg

SEQ ID NO: 72495 - DNA, 33 bp, Homo sapien
attcatatacatgtgcagactttcattttaatc

SEQ ID NO: 72496 - DNA, 33 bp, Homo sapien
attcatatacatgtgcggactttcattttaatc

SEQ ID NO: 72497 - DNA, 33 bp, Homo sapien
agtttgattacctgtgaataggaaggctttaag

SEQ ID NO: 72498 - DNA, 33 bp, Homo sapien
agtttgattacctgtgtataggaaggctttaag

SEQ ID NO: 72499 - DNA, 33 bp, Homo sapien
gacagctaaaataaaacaggtggcagaatatat

SEQ ID NO: 72500 - DNA, 33 bp, Homo sapien
gacagctaaaataaaagaggtggcagaatatat

SEQ ID NO: 72501 - DNA, 33 bp, Homo sapien
aaataggacattaaaaatactgctaactggtaa

SEQ ID NO: 72502 - DNA, 33 bp, Homo sapien
aaataggacattaaaagtactgctaactggtaa

SEQ ID NO: 72503 - DNA, 33 bp, Homo sapien
gccaaaaagccaaatgacaaatgatagatattt

SEQ ID NO: 72504 - DNA, 33 bp, Homo sapien
gccaaaaagccaaatggcaaatgatagatattt

SEQ ID NO: 72505 - DNA, 33 bp, Homo sapien
cctttccttctatccccattgcaccatgctgtc

SEQ ID NO: 72506 - DNA, 33 bp, Homo sapien
cctttccttctatccctattgcaccatgctgtc

SEQ ID NO: 72507 - DNA, 33 bp, Homo sapien
aggccatgggccagtaacggtcaatgtcctgtt

SEQ ID NO: 72508 - DNA, 33 bp, Homo sapien
aggccatgggccagtagcggtcaatgtcctgtt

SEQ ID NO: 72509 - DNA, 33 bp, Homo sapien
tagtatcatgaaccaactgttgtctcccagtat

SEQ ID NO: 72510 - DNA, 33 bp, Homo sapien
tagtatcatgaaccaattgttgtctcccagtat

SEQ ID NO: 72511 - DNA, 33 bp, Homo sapien
tctagctgaacaaagagaggtttatgcaataat

SEQ ID NO: 72512 - DNA, 33 bp, Homo sapien
tctagctgaacaaagataggtttatgcaataat

SEQ ID NO: 72513 - DNA, 33 bp, Homo sapien
caaaaggaaacttaaaacagttgcataagcaag

SEQ ID NO: 72514 - DNA, 33 bp, Homo sapien
caaaaggaaacttaaagcagttgcataagcaag

SEQ ID NO: 72515 - DNA, 33 bp, Homo sapien
tttcaagaagacctaaataaagtgtgggagata

SEQ ID NO: 72516 - DNA, 33 bp, Homo sapien
tttcaagaagacctaagtaaagtgtgggagata

SEQ ID NO: 72517 - DNA, 33 bp, Homo sapien
gtgtgtgtgtaattgacaagatgattctatatt

SEQ ID NO: 72518 - DNA, 33 bp, Homo sapien
gtgtgtgtgtaattgataagatgattctatatt

SEQ ID NO: 72519 - DNA, 33 bp, Homo sapien
ctttttagcaacttgaggtatgtgtatatgtgt

SEQ ID NO: 72520 - DNA, 33 bp, Homo sapien
ctttttagcaacttgatgtatgtgtatatgtgt

SEQ ID NO: 72521 - DNA, 33 bp, Homo sapien
actcagtatgtaaatcactggtgttgctgcaat

SEQ ID NO: 72522 - DNA, 33 bp, Homo sapien
actcagtatgtaaatctctggtgttgctgcaat

SEQ ID NO: 72523 - DNA, 33 bp, Homo sapien
gtgtgctccaaataaaccagatgacagttggga

SEQ ID NO: 72524 - DNA, 33 bp, Homo sapien
gtgtgctccaaataaatcagatgacagttggga

SEQ ID NO: 72525 - DNA, 33 bp, Homo sapien
tttcagttttatcatgcaggagatatggaaaca

SEQ ID NO: 72526 - DNA, 33 bp, Homo sapien
tttcagttttatcatgtaggagatatggaaaca

SEQ ID NO: 72527 - DNA, 33 bp, Homo sapien
gaataattttctcatgaatccaaactctcagcc

SEQ ID NO: 72528 - DNA, 33 bp, Homo sapien
gaataattttctcatggatccaaactctcagcc

SEQ ID NO: 72529 - DNA, 33 bp, Homo sapien
aactcgataataggcagggtatactaacgcatg

SEQ ID NO: 72530 - DNA, 33 bp, Homo sapien
aactcgataataggcatggtatactaacgcatg

SEQ ID NO: 72531 - DNA, 33 bp, Homo sapien
tgctcccacgaaggccacctcctgtgcttctcg

SEQ ID NO: 72532 - DNA, 33 bp, Homo sapien
tgctcccacgaaggccgcctcctgtgcttctcg

SEQ ID NO: 72533 - DNA, 33 bp, Homo sapien
agtgtttttgaactgagggatttagtggaagaa

SEQ ID NO: 72534 - DNA, 33 bp, Homo sapien
agtgtttttgaactgatggatttagtggaagaa

SEQ ID NO: 72535 - DNA, 33 bp, Homo sapien
catgggacaatcttcaaatcactgacaagaaat

SEQ ID NO: 72536 - DNA, 33 bp, Homo sapien
catgggacaatcttcagatcactgacaagaaat

SEQ ID NO: 72537 - DNA, 33 bp, Homo sapien
tgatattgcctgcagcactgtactatccatcca

SEQ ID NO: 72538 - DNA, 33 bp, Homo sapien
tgatattgcctgcagcgctgtactatccatcca

SEQ ID NO: 72539 - DNA, 33 bp, Homo sapien
gtgatactattcaggaggcaaatgttcatacag

SEQ ID NO: 72540 - DNA, 33 bp, Homo sapien
gtgatactattcaggatgcaaatgttcatacag

SEQ ID NO: 72541 - DNA, 33 bp, Homo sapien
attggggaatacggacaagcaaggaggcattta

SEQ ID NO: 72542 - DNA, 33 bp, Homo sapien
attggggaatacggacgagcaaggaggcattta

SEQ ID NO: 72543 - DNA, 33 bp, Homo sapien
gacctagcaggccaaacgattggtactgccaaa

SEQ ID NO: 72544 - DNA, 33 bp, Homo sapien
gacctagcaggccaaatgattggtactgccaaa

SEQ ID NO: 72545 - DNA, 33 bp, Homo sapien
aagttcttttccatcactgatcttacggtattt

SEQ ID NO: 72546 - DNA, 33 bp, Homo sapien
aagttcttttccatcattgatcttacggtattt

SEQ ID NO: 72547 - DNA, 33 bp, Homo sapien
ttctctaattatgctcgcctggcaactcaatat

SEQ ID NO: 72548 - DNA, 33 bp, Homo sapien
ttctctaattatgctctcctggcaactcaatat

SEQ ID NO: 72549 - DNA, 33 bp, Homo sapien
ccctgtgaaacctagcactaatatttgacagag

SEQ ID NO: 72550 - DNA, 33 bp, Homo sapien
ccctgtgaaacctagctctaatatttgacagag

SEQ ID NO: 72551 - DNA, 33 bp, Homo sapien
caccgtttaatatataactattgagccataatt

SEQ ID NO: 72552 - DNA, 33 bp, Homo sapien
caccgtttaatatatacctattgagccataatt

SEQ ID NO: 72553 - DNA, 33 bp, Homo sapien
ttccaaaaaaactggaactctggttcaattggt

SEQ ID NO: 72554 - DNA, 33 bp, Homo sapien
ttccaaaaaaactggagctctggttcaattggt

SEQ ID NO: 72555 - DNA, 33 bp, Homo sapien
atacttggttctagataaagcctgaattgtcat

SEQ ID NO: 72556 - DNA, 33 bp, Homo sapien
atacttggttctagatgaagcctgaattgtcat

SEQ ID NO: 72557 - DNA, 33 bp, Homo sapien
tcattagactctactacattccactatattcat

SEQ ID NO: 72558 - DNA, 33 bp, Homo sapien
tcattagactctactatattccactatattcat

SEQ ID NO: 72559 - DNA, 33 bp, Homo sapien
catatttgtctgtgtaaattccagttttagaat

SEQ ID NO: 72560 - DNA, 33 bp, Homo sapien
catatttgtctgtgtacattccagttttagaat

SEQ ID NO: 72561 - DNA, 33 bp, Homo sapien
aaaggcatttggctaaagatgaccagatttcat

SEQ ID NO: 72562 - DNA, 33 bp, Homo sapien
aaaggcatttggctaaggatgaccagatttcat

SEQ ID NO: 72563 - DNA, 33 bp, Homo sapien
acttataatgtaaccaaccaattgtcaaacttg

SEQ ID NO: 72564 - DNA, 33 bp, Homo sapien
acttataatgtaaccagccaattgtcaaacttg

SEQ ID NO: 72565 - DNA, 33 bp, Homo sapien
tttgtgccatctgatacaatgcgatgagatcac

SEQ ID NO: 72566 - DNA, 33 bp, Homo sapien
tttgtgccatctgatataatgcgatgagatcac

SEQ ID NO: 72567 - DNA, 33 bp, Homo sapien
tcaatttgggctattacggtgtttcttcgtgat

SEQ ID NO: 72568 - DNA, 33 bp, Homo sapien
tcaatttgggctattatggtgtttcttcgtgat

SEQ ID NO: 72569 - DNA, 33 bp, Homo sapien
gaatgcaaatgtttaacgttcacaaacagaaat

SEQ ID NO: 72570 - DNA, 33 bp, Homo sapien
gaatgcaaatgtttaatgttcacaaacagaaat

SEQ ID NO: 72571 - DNA, 33 bp, Homo sapien
ccagatcagatttggcccaagtcatattgtaga

SEQ ID NO: 72572 - DNA, 33 bp, Homo sapien
ccagatcagatttggctcaagtcatattgtaga

SEQ ID NO: 72573 - DNA, 33 bp, Homo sapien
tctttctggagaggtcaaagaaggaacttgggc

SEQ ID NO: 72574 - DNA, 33 bp, Homo sapien
tctttctggagaggtcgaagaaggaacttgggc

SEQ ID NO: 72575 - DNA, 33 bp, Homo sapien
gtccactcagccaccaaaggttccaagctaaac

SEQ ID NO: 72576 - DNA, 33 bp, Homo sapien
gtccactcagccaccagaggttccaagctaaac

SEQ ID NO: 72577 - DNA, 33 bp, Homo sapien
agttaggctgatgccgaagtgttcttgcttgtc

SEQ ID NO: 72578 - DNA, 33 bp, Homo sapien
agttaggctgatgccgcagtgttcttgcttgtc

SEQ ID NO: 72579 - DNA, 33 bp, Homo sapien
aactctgtgtttggtacatggcattgtgagaaa

SEQ ID NO: 72580 - DNA, 33 bp, Homo sapien
aactctgtgtttggtatatggcattgtgagaaa

SEQ ID NO: 72581 - DNA, 33 bp, Homo sapien
ttggaaagtaactaccccaaagctacccaaacc

SEQ ID NO: 72582 - DNA, 33 bp, Homo sapien
ttggaaagtaactacctcaaagctacccaaacc

SEQ ID NO: 72583 - DNA, 33 bp, Homo sapien
gaaatttcgagaaagaacatagacagagaaagt

SEQ ID NO: 72584 - DNA, 33 bp, Homo sapien
gaaatttcgagaaagatcatagacagagaaagt

SEQ ID NO: 72585 - DNA, 33 bp, Homo sapien
aattaatctctagatacgtttggcttaccaatc

SEQ ID NO: 72586 - DNA, 33 bp, Homo sapien
aattaatctctagatatgtttggcttaccaatc

SEQ ID NO: 72587 - DNA, 33 bp, Homo sapien
tcctagaagcagccccagatatgtatccacagt

SEQ ID NO: 72588 - DNA, 33 bp, Homo sapien
tcctagaagcagccccggatatgtatccacagt

SEQ ID NO: 72589 - DNA, 33 bp, Homo sapien
tcaaaatggagtttgaagagcaggtagacatga

SEQ ID NO: 72590 - DNA, 33 bp, Homo sapien
tcaaaatggagtttgatgagcaggtagacatga

SEQ ID NO: 72591 - DNA, 33 bp, Homo sapien
ttagatttgtcagtgacggggaaaaatgatgat

SEQ ID NO: 72592 - DNA, 33 bp, Homo sapien
ttagatttgtcagtgatggggaaaaatgatgat

SEQ ID NO: 72593 - DNA, 33 bp, Homo sapien
cactgttaatctatgactcagagaaaaagatga

SEQ ID NO: 72594 - DNA, 33 bp, Homo sapien
cactgttaatctatgagtcagagaaaaagatga

SEQ ID NO: 72595 - DNA, 33 bp, Homo sapien
tgggataactgagcagcctagagtattggactg

SEQ ID NO: 72596 - DNA, 33 bp, Homo sapien
tgggataactgagcaggctagagtattggactg

SEQ ID NO: 72597 - DNA, 33 bp, Homo sapien
tcctatggtagttccaacttcattgatatagtc

SEQ ID NO: 72598 - DNA, 33 bp, Homo sapien
tcctatggtagttccagcttcattgatatagtc

SEQ ID NO: 72599 - DNA, 33 bp, Homo sapien
ctttctgaagctaaaccagtaattttaaagctt

SEQ ID NO: 72600 - DNA, 33 bp, Homo sapien
ctttctgaagctaaacgagtaattttaaagctt

SEQ ID NO: 72601 - DNA, 33 bp, Homo sapien
ataagtgaaagtcagaaaaatacaatgtgaatt

SEQ ID NO: 72602 - DNA, 33 bp, Homo sapien
ataagtgaaagtcagagaaatacaatgtgaatt

SEQ ID NO: 72603 - DNA, 33 bp, Homo sapien
ttcccaaaggcaatgtcaactctattattctta

SEQ ID NO: 72604 - DNA, 33 bp, Homo sapien
ttcccaaaggcaatgtgaactctattattctta

SEQ ID NO: 72605 - DNA, 33 bp, Homo sapien
atggcaactaagaaacaagaagaagatccaaac

SEQ ID NO: 72606 - DNA, 33 bp, Homo sapien
atggcaactaagaaaccagaagaagatccaaac

SEQ ID NO: 72607 - DNA, 33 bp, Homo sapien
aggactgctttgatcacgtcattatgctgattt

SEQ ID NO: 72608 - DNA, 33 bp, Homo sapien
aggactgctttgatcatgtcattatgctgattt

SEQ ID NO: 72609 - DNA, 33 bp, Homo sapien
gcaaggtggaattttaaatttgtgagtggactt

SEQ ID NO: 72610 - DNA, 33 bp, Homo sapien
gcaaggtggaattttacatttgtgagtggactt

SEQ ID NO: 72611 - DNA, 33 bp, Homo sapien
caccttgcaaaaggcagaaaagtcaatggcatt

SEQ ID NO: 72612 - DNA, 33 bp, Homo sapien
caccttgcaaaaggcataaaagtcaatggcatt

SEQ ID NO: 72613 - DNA, 33 bp, Homo sapien
gtacgtttgagtaacccagacgggtcaggatag

SEQ ID NO: 72614 - DNA, 33 bp, Homo sapien
gtacgtttgagtaacctagacgggtcaggatag

SEQ ID NO: 72615 - DNA, 33 bp, Homo sapien
gagctattaatgtctaacctataaaatgttttg

SEQ ID NO: 72616 - DNA, 33 bp, Homo sapien
gagctattaatgtctagcctataaaatgttttg

SEQ ID NO: 72617 - DNA, 33 bp, Homo sapien
aagggtttcagaatcacgttttgtgaaaatatt

SEQ ID NO: 72618 - DNA, 33 bp, Homo sapien
aagggtttcagaatcatgttttgtgaaaatatt

SEQ ID NO: 72619 - DNA, 33 bp, Homo sapien
aattatgaaggctccaaataaattagtttcagt

SEQ ID NO: 72620 - DNA, 33 bp, Homo sapien
aattatgaaggctccacataaattagtttcagt

SEQ ID NO: 72621 - DNA, 33 bp, Homo sapien
ttctacaagaaggtaaacagcataagggcatga

SEQ ID NO: 72622 - DNA, 33 bp, Homo sapien
ttctacaagaaggtaatcagcataagggcatga

SEQ ID NO: 72623 - DNA, 33 bp, Homo sapien
gcacgtatttattaatcaatgttggtgatgagt

SEQ ID NO: 72624 - DNA, 33 bp, Homo sapien
gcacgtatttattaatgaatgttggtgatgagt

SEQ ID NO: 72625 - DNA, 33 bp, Homo sapien
atgctgtcacatttaaactatagagctactaaa

SEQ ID NO: 72626 - DNA, 33 bp, Homo sapien
atgctgtcacatttaacctatagagctactaaa

SEQ ID NO: 72627 - DNA, 33 bp, Homo sapien
tttctctgatcgaatacggacaggactagaata

SEQ ID NO: 72628 - DNA, 33 bp, Homo sapien
tttctctgatcgaatatggacaggactagaata

SEQ ID NO: 72629 - DNA, 33 bp, Homo sapien
tccagtgactctgtgaaaagtagcctgattttc

SEQ ID NO: 72630 - DNA, 33 bp, Homo sapien
tccagtgactctgtgagaagtagcctgattttc

SEQ ID NO: 72631 - DNA, 33 bp, Homo sapien
atcccactaaaactaacgaagaagctggacaaa

SEQ ID NO: 72632 - DNA, 33 bp, Homo sapien
atcccactaaaactaatgaagaagctggacaaa

SEQ ID NO: 72633 - DNA, 33 bp, Homo sapien
caaatttgaaatcataaaattccttgatgaaac

SEQ ID NO: 72634 - DNA, 33 bp, Homo sapien
caaatttgaaatcatagaattccttgatgaaac

SEQ ID NO: 72635 - DNA, 33 bp, Homo sapien
ggtcctatgaaatgacagaaacatcccttttat

SEQ ID NO: 72636 - DNA, 33 bp, Homo sapien
ggtcctatgaaatgacggaaacatcccttttat

SEQ ID NO: 72637 - DNA, 33 bp, Homo sapien
aaaataaacaaaggtaagactgcccgctcaagt

SEQ ID NO: 72638 - DNA, 33 bp, Homo sapien
aaaataaacaaaggtaggactgcccgctcaagt

SEQ ID NO: 72639 - DNA, 33 bp, Homo sapien
gttttgaaacatttgcgcatcagagtttgggtt

SEQ ID NO: 72640 - DNA, 33 bp, Homo sapien
gttttgaaacatttgctcatcagagtttgggtt

SEQ ID NO: 72641 - DNA, 33 bp, Homo sapien
gaatgaaggagtctggcaggataaactgtagga

SEQ ID NO: 72642 - DNA, 33 bp, Homo sapien
gaatgaaggagtctggtaggataaactgtagga

SEQ ID NO: 72643 - DNA, 33 bp, Homo sapien
gagcatggagccatgacaaattaaaagggatgg

SEQ ID NO: 72644 - DNA, 33 bp, Homo sapien
gagcatggagccatgataaattaaaagggatgg

SEQ ID NO: 72645 - DNA, 33 bp, Homo sapien
cttcagtttcttcctccataaaatgggcttaga

SEQ ID NO: 72646 - DNA, 33 bp, Homo sapien
cttcagtttcttcctctataaaatgggcttaga

SEQ ID NO: 72647 - DNA, 33 bp, Homo sapien
ttcttgaagtaaataccggcctctttagatatt

SEQ ID NO: 72648 - DNA, 33 bp, Homo sapien
ttcttgaagtaaatactggcctctttagatatt

SEQ ID NO: 72649 - DNA, 33 bp, Homo sapien
attgagaaagggttgacgtgaaatttcaggaga

SEQ ID NO: 72650 - DNA, 33 bp, Homo sapien
attgagaaagggttgatgtgaaatttcaggaga

SEQ ID NO: 72651 - DNA, 33 bp, Homo sapien
aaatgctcctggtcaaattacatgtgacggctt

SEQ ID NO: 72652 - DNA, 33 bp, Homo sapien
aaatgctcctggtcaacttacatgtgacggctt

SEQ ID NO: 72653 - DNA, 33 bp, Homo sapien
gaattctcttctattacaggtaggcacactagc

SEQ ID NO: 72654 - DNA, 33 bp, Homo sapien
gaattctcttctattagaggtaggcacactagc

SEQ ID NO: 72655 - DNA, 33 bp, Homo sapien
ttatattttgtacgtaactattcaacatttcct

SEQ ID NO: 72656 - DNA, 33 bp, Homo sapien
ttatattttgtacgtagctattcaacatttcct

SEQ ID NO: 72657 - DNA, 33 bp, Homo sapien
ttgacctttagatgtaaccatttagcatttttt

SEQ ID NO: 72658 - DNA, 33 bp, Homo sapien
ttgacctttagatgtagccatttagcatttttt

SEQ ID NO: 72659 - DNA, 33 bp, Homo sapien
gcttccatgaccatcactactttcttctttaat

SEQ ID NO: 72660 - DNA, 33 bp, Homo sapien
gcttccatgaccatcattactttcttctttaat

SEQ ID NO: 72661 - DNA, 33 bp, Homo sapien
aagacaaacgagggcaactctaggcatttttaa

SEQ ID NO: 72662 - DNA, 33 bp, Homo sapien
aagacaaacgagggcatctctaggcatttttaa

SEQ ID NO: 72663 - DNA, 33 bp, Homo sapien
tggcagtcaagcagcaatctctaattacctttc

SEQ ID NO: 72664 - DNA, 33 bp, Homo sapien
tggcagtcaagcagcagtctctaattacctttc

SEQ ID NO: 72665 - DNA, 33 bp, Homo sapien
tttatctggaatgataaatgcacatgtctcatt

SEQ ID NO: 72666 - DNA, 33 bp, Homo sapien
tttatctggaatgatagatgcacatgtctcatt

SEQ ID NO: 72667 - DNA, 33 bp, Homo sapien
ggtgacaatatgttaacggtttcctgactgggc

SEQ ID NO: 72668 - DNA, 33 bp, Homo sapien
ggtgacaatatgttaatggtttcctgactgggc

SEQ ID NO: 72669 - DNA, 33 bp, Homo sapien
aaaggtttacttgtaacattatttgctcccagc

SEQ ID NO: 72670 - DNA, 33 bp, Homo sapien
aaaggtttacttgtaatattatttgctcccagc

SEQ ID NO: 72671 - DNA, 33 bp, Homo sapien
catttggaattcagcacaaaaatgttgctatca

SEQ ID NO: 72672 - DNA, 33 bp, Homo sapien
catttggaattcagcataaaaatgttgctatca

SEQ ID NO: 72673 - DNA, 33 bp, Homo sapien
tgttgttctccataaaacctaaaattcctcaga

SEQ ID NO: 72674 - DNA, 33 bp, Homo sapien
tgttgttctccataaaccctaaaattcctcaga

SEQ ID NO: 72675 - DNA, 33 bp, Homo sapien
gatgggctggtgaagacgttgctttccgttgag

SEQ ID NO: 72676 - DNA, 33 bp, Homo sapien
gatgggctggtgaagatgttgctttccgttgag

SEQ ID NO: 72677 - DNA, 33 bp, Homo sapien
cactatgacacagctacacacctgcaaactgtt

SEQ ID NO: 72678 - DNA, 33 bp, Homo sapien
cactatgacacagctatacacctgcaaactgtt

SEQ ID NO: 72679 - DNA, 33 bp, Homo sapien
gaagcagcagggccaaatcaccactttcctgca

SEQ ID NO: 72680 - DNA, 33 bp, Homo sapien
gaagcagcagggccaagtcaccactttcctgca

SEQ ID NO: 72681 - DNA, 33 bp, Homo sapien
ccacagatggacttaaatgacttccaaacattg

SEQ ID NO: 72682 - DNA, 33 bp, Homo sapien
ccacagatggacttaattgacttccaaacattg

SEQ ID NO: 72683 - DNA, 33 bp, Homo sapien
ctgtaaagtggtgaaagagtaaaacctgccttt

SEQ ID NO: 72684 - DNA, 33 bp, Homo sapien
ctgtaaagtggtgaaatagtaaaacctgccttt

SEQ ID NO: 72685 - DNA, 33 bp, Homo sapien
tgtggcatctgattcacaataaagagattaagc

SEQ ID NO: 72686 - DNA, 33 bp, Homo sapien
tgtggcatctgattcataataaagagattaagc

SEQ ID NO: 72687 - DNA, 33 bp, Homo sapien
gccattcactggttaccgaccagatactgtgca

SEQ ID NO: 72688 - DNA, 33 bp, Homo sapien
gccattcactggttactgaccagatactgtgca

SEQ ID NO: 72689 - DNA, 33 bp, Homo sapien
gtagatagtaagggcaaaagctaggacttcaac

SEQ ID NO: 72690 - DNA, 33 bp, Homo sapien
gtagatagtaagggcagaagctaggacttcaac

SEQ ID NO: 72691 - DNA, 33 bp, Homo sapien
accagccaacttgacaatgcacaaactggtatc

SEQ ID NO: 72692 - DNA, 33 bp, Homo sapien
accagccaacttgacagtgcacaaactggtatc

SEQ ID NO: 72693 - DNA, 33 bp, Homo sapien
agcccaggaaattgtaactaatgctagtaacaa

SEQ ID NO: 72694 - DNA, 33 bp, Homo sapien
agcccaggaaattgtagctaatgctagtaacaa

SEQ ID NO: 72695 - DNA, 33 bp, Homo sapien
atctggatcttgaagaaggaccaaactacctag

SEQ ID NO: 72696 - DNA, 33 bp, Homo sapien
atctggatcttgaagagggaccaaactacctag

SEQ ID NO: 72697 - DNA, 33 bp, Homo sapien
ttgcaaaatgtgtgaactgtacaatgtttcatt

SEQ ID NO: 72698 - DNA, 33 bp, Homo sapien
ttgcaaaatgtgtgaattgtacaatgtttcatt

SEQ ID NO: 72699 - DNA, 33 bp, Homo sapien
caatgaccctccaatcaccaaaaccgctgactg

SEQ ID NO: 72700 - DNA, 33 bp, Homo sapien
caatgaccctccaatcgccaaaaccgctgactg

SEQ ID NO: 72701 - DNA, 33 bp, Homo sapien
aacattttggctaattcaaaatccttgtgcagc

SEQ ID NO: 72702 - DNA, 33 bp, Homo sapien
aacattttggctaatttaaaatccttgtgcagc

SEQ ID NO: 72703 - DNA, 33 bp, Homo sapien
ccacgaaccttgaccacagcttacagtgccatg

SEQ ID NO: 72704 - DNA, 33 bp, Homo sapien
ccacgaaccttgaccatagcttacagtgccatg

SEQ ID NO: 72705 - DNA, 33 bp, Homo sapien
tttattccaaactacaagctacatctggccctg

SEQ ID NO: 72706 - DNA, 33 bp, Homo sapien
tttattccaaactacaggctacatctggccctg

SEQ ID NO: 72707 - DNA, 33 bp, Homo sapien
ggccttacttttaccaatctgacaacaagcttc

SEQ ID NO: 72708 - DNA, 33 bp, Homo sapien
ggccttacttttaccagtctgacaacaagcttc

SEQ ID NO: 72709 - DNA, 33 bp, Homo sapien
ctaggcatagcgaatacgtttaatagcaaagat

SEQ ID NO: 72710 - DNA, 33 bp, Homo sapien
ctaggcatagcgaataggtttaatagcaaagat

SEQ ID NO: 72711 - DNA, 33 bp, Homo sapien
cagtttagagagagacaatatgcttaagaataa

SEQ ID NO: 72712 - DNA, 33 bp, Homo sapien
cagtttagagagagacgatatgcttaagaataa

SEQ ID NO: 72713 - DNA, 33 bp, Homo sapien
tgtgctcagcagtcataacaaagctagatatga

SEQ ID NO: 72714 - DNA, 33 bp, Homo sapien
tgtgctcagcagtcatcacaaagctagatatga

SEQ ID NO: 72715 - DNA, 33 bp, Homo sapien
taattgactgcacttcagaaaatatttgtctct

SEQ ID NO: 72716 - DNA, 33 bp, Homo sapien
taattgactgcacttcggaaaatatttgtctct

SEQ ID NO: 72717 - DNA, 33 bp, Homo sapien
catctctcattgacccggctaaggatcctttta

SEQ ID NO: 72718 - DNA, 33 bp, Homo sapien
catctctcattgaccctgctaaggatcctttta

SEQ ID NO: 72719 - DNA, 33 bp, Homo sapien
caaggtgagcaggacactgtataggaaattctt

SEQ ID NO: 72720 - DNA, 33 bp, Homo sapien
caaggtgagcaggacattgtataggaaattctt

SEQ ID NO: 72721 - DNA, 33 bp, Homo sapien
caattaaatcttaacacggaaagagccctggtg

SEQ ID NO: 72722 - DNA, 33 bp, Homo sapien
caattaaatcttaacatggaaagagccctggtg

SEQ ID NO: 72723 - DNA, 33 bp, Homo sapien
ctcaacttttggtcacactgagcaatcctctag

SEQ ID NO: 72724 - DNA, 33 bp, Homo sapien
ctcaacttttggtcacgctgagcaatcctctag

SEQ ID NO: 72725 - DNA, 33 bp, Homo sapien
ctatgggccgctgatacgacacttggattcaat

SEQ ID NO: 72726 - DNA, 33 bp, Homo sapien
ctatgggccgctgatatgacacttggattcaat

SEQ ID NO: 72727 - DNA, 33 bp, Homo sapien
gggcttaggtacaaagccatgttcctggcaaca

SEQ ID NO: 72728 - DNA, 33 bp, Homo sapien
gggcttaggtacaaagtcatgttcctggcaaca

SEQ ID NO: 72729 - DNA, 33 bp, Homo sapien
gaggccagctaaagtgcaaaacaaaatgctttt

SEQ ID NO: 72730 - DNA, 33 bp, Homo sapien
gaggccagctaaagtggaaaacaaaatgctttt

SEQ ID NO: 72731 - DNA, 33 bp, Homo sapien
aataaatgaagaggtacagtatcagttgaatgt

SEQ ID NO: 72732 - DNA, 33 bp, Homo sapien
aataaatgaagaggtatagtatcagttgaatgt

SEQ ID NO: 72733 - DNA, 33 bp, Homo sapien
tacacacattttattgaacagtgtagtaagtga

SEQ ID NO: 72734 - DNA, 33 bp, Homo sapien
tacacacattttattggacagtgtagtaagtga

SEQ ID NO: 72735 - DNA, 33 bp, Homo sapien
aaaatcacttgtccaaaatcttgtagaaactgt

SEQ ID NO: 72736 - DNA, 33 bp, Homo sapien
aaaatcacttgtccaacatcttgtagaaactgt

SEQ ID NO: 72737 - DNA, 33 bp, Homo sapien
gtttcctgtaagtaaacgaatagtgaaacaaat

SEQ ID NO: 72738 - DNA, 33 bp, Homo sapien
gtttcctgtaagtaaatgaatagtgaaacaaat

SEQ ID NO: 72739 - DNA, 33 bp, Homo sapien
tgcatatactggctacagcagtctacagttcta

SEQ ID NO: 72740 - DNA, 33 bp, Homo sapien
tgcatatactggctacggcagtctacagttcta

SEQ ID NO: 72741 - DNA, 33 bp, Homo sapien
agaagttaggatttcaactgtatttggaaataa

SEQ ID NO: 72742 - DNA, 33 bp, Homo sapien
agaagttaggatttcagctgtatttggaaataa

SEQ ID NO: 72743 - DNA, 33 bp, Homo sapien
gccttaagtgacttgccgatgggattctggaat

SEQ ID NO: 72744 - DNA, 33 bp, Homo sapien
gccttaagtgacttgctgatgggattctggaat

SEQ ID NO: 72745 - DNA, 33 bp, Homo sapien
actctagccctgagaacgtaaacgctttctcag

SEQ ID NO: 72746 - DNA, 33 bp, Homo sapien
actctagccctgagaatgtaaacgctttctcag

SEQ ID NO: 72747 - DNA, 33 bp, Homo sapien
ggcttattcttccagagcataagtgagccacct

SEQ ID NO: 72748 - DNA, 33 bp, Homo sapien
ggcttattcttccagatcataagtgagccacct

SEQ ID NO: 72749 - DNA, 33 bp, Homo sapien
tgctatctctatggtacgggtcctgtctaggat

SEQ ID NO: 72750 - DNA, 33 bp, Homo sapien
tgctatctctatggtatgggtcctgtctaggat

SEQ ID NO: 72751 - DNA, 33 bp, Homo sapien
ttgagtattctgccccaattataacctatgttc

SEQ ID NO: 72752 - DNA, 33 bp, Homo sapien
ttgagtattctgccccgattataacctatgttc

SEQ ID NO: 72753 - DNA, 33 bp, Homo sapien
cctctgtaaagacaacaaacttaataaagagat

SEQ ID NO: 72754 - DNA, 33 bp, Homo sapien
cctctgtaaagacaacgaacttaataaagagat

SEQ ID NO: 72755 - DNA, 33 bp, Homo sapien
gttttgttaacataggcacatcatcacagggtt

SEQ ID NO: 72756 - DNA, 33 bp, Homo sapien
gttttgttaacataggtacatcatcacagggtt

SEQ ID NO: 72757 - DNA, 33 bp, Homo sapien
gaaagaatggaaagaacgagattacaggtctga

SEQ ID NO: 72758 - DNA, 33 bp, Homo sapien
gaaagaatggaaagaatgagattacaggtctga

SEQ ID NO: 72759 - DNA, 33 bp, Homo sapien
ttgataaaacagttgccgagccggaatccctaa

SEQ ID NO: 72760 - DNA, 33 bp, Homo sapien
ttgataaaacagttgctgagccggaatccctaa

SEQ ID NO: 72761 - DNA, 33 bp, Homo sapien
ttgggcactccctaggaacaaggcaatgtgccg

SEQ ID NO: 72762 - DNA, 33 bp, Homo sapien
ttgggcactccctaggtacaaggcaatgtgccg

SEQ ID NO: 72763 - DNA, 33 bp, Homo sapien
aaaagtagaggtcgagaaaatatatgtgtgctt

SEQ ID NO: 72764 - DNA, 33 bp, Homo sapien
aaaagtagaggtcgaggaaatatatgtgtgctt

SEQ ID NO: 72765 - DNA, 33 bp, Homo sapien
tgtttcagccttaaaaataggtaacacatagca

SEQ ID NO: 72766 - DNA, 33 bp, Homo sapien
tgtttcagccttaaaagtaggtaacacatagca

SEQ ID NO: 72767 - DNA, 33 bp, Homo sapien
tccctttccaagcacaactgccatgccagtcct

SEQ ID NO: 72768 - DNA, 33 bp, Homo sapien
tccctttccaagcacagctgccatgccagtcct

SEQ ID NO: 72769 - DNA, 33 bp, Homo sapien
gggagggcaaagttgaagttaaatagaatgaat

SEQ ID NO: 72770 - DNA, 33 bp, Homo sapien
gggagggcaaagttgaggttaaatagaatgaat

SEQ ID NO: 72771 - DNA, 33 bp, Homo sapien
acttcccgataataaactgacaaaaagtaaggt

SEQ ID NO: 72772 - DNA, 33 bp, Homo sapien
acttcccgataataaattgacaaaaagtaaggt

SEQ ID NO: 72773 - DNA, 33 bp, Homo sapien
ctcataaaaaagagccaacagtgttctctgcct

SEQ ID NO: 72774 - DNA, 33 bp, Homo sapien
ctcataaaaaagagccgacagtgttctctgcct

SEQ ID NO: 72775 - DNA, 33 bp, Homo sapien
aatgaattaatatcaaccagcttcatatcaaag

SEQ ID NO: 72776 - DNA, 33 bp, Homo sapien
aatgaattaatatcaagcagcttcatatcaaag

SEQ ID NO: 72777 - DNA, 33 bp, Homo sapien
aaataaaatataggacagtcagcaaatcaggaa

SEQ ID NO: 72778 - DNA, 33 bp, Homo sapien
aaataaaatataggacggtcagcaaatcaggaa

SEQ ID NO: 72779 - DNA, 33 bp, Homo sapien
taatgatgggaaaaaaagcctgtgagcctttaa

SEQ ID NO: 72780 - DNA, 33 bp, Homo sapien
taatgatgggaaaaaacgcctgtgagcctttaa

SEQ ID NO: 72781 - DNA, 33 bp, Homo sapien
aaacctatgcaaaatcaaaaatggcccagacac

SEQ ID NO: 72782 - DNA, 33 bp, Homo sapien
aaacctatgcaaaatcgaaaatggcccagacac

SEQ ID NO: 72783 - DNA, 33 bp, Homo sapien
acataggaattgttcacgcgaacctctgttagc

SEQ ID NO: 72784 - DNA, 33 bp, Homo sapien
acataggaattgttcatgcgaacctctgttagc

SEQ ID NO: 72785 - DNA, 33 bp, Homo sapien
ttgtggttgcacagccccaaaacttcagaaaca

SEQ ID NO: 72786 - DNA, 33 bp, Homo sapien
ttgtggttgcacagcctcaaaacttcagaaaca

SEQ ID NO: 72787 - DNA, 33 bp, Homo sapien
gaatggaattgaggaaaggtccacaggtagctt

SEQ ID NO: 72788 - DNA, 33 bp, Homo sapien
gaatggaattgaggaagggtccacaggtagctt

SEQ ID NO: 72789 - DNA, 33 bp, Homo sapien
ttcaattgcttagataccttactcttctcaaaa

SEQ ID NO: 72790 - DNA, 33 bp, Homo sapien
ttcaattgcttagatagcttactcttctcaaaa

SEQ ID NO: 72791 - DNA, 33 bp, Homo sapien
gggtttgagaaagtccactacaaatattaagta

SEQ ID NO: 72792 - DNA, 33 bp, Homo sapien
gggtttgagaaagtcctctacaaatattaagta

SEQ ID NO: 72793 - DNA, 33 bp, Homo sapien
tggtattccaggatgagagaagagcatatgaaa

SEQ ID NO: 72794 - DNA, 33 bp, Homo sapien
tggtattccaggatgatagaagagcatatgaaa

SEQ ID NO: 72795 - DNA, 33 bp, Homo sapien
actactatttatccataaagtctcagctcaaat

SEQ ID NO: 72796 - DNA, 33 bp, Homo sapien
actactatttatccatgaagtctcagctcaaat

SEQ ID NO: 72797 - DNA, 33 bp, Homo sapien
aaaaagctaagcaagaatcatacaaatgtatac

SEQ ID NO: 72798 - DNA, 33 bp, Homo sapien
aaaaagctaagcaagagtcatacaaatgtatac

SEQ ID NO: 72799 - DNA, 33 bp, Homo sapien
gtacacagggccttgacaagagcttccgtagtg

SEQ ID NO: 72800 - DNA, 33 bp, Homo sapien
gtacacagggccttgagaagagcttccgtagtg

SEQ ID NO: 72801 - DNA, 33 bp, Homo sapien
gaaagccagagatcaactgtggttaaaatatct

SEQ ID NO: 72802 - DNA, 33 bp, Homo sapien
gaaagccagagatcaattgtggttaaaatatct

SEQ ID NO: 72803 - DNA, 33 bp, Homo sapien
gtgaaaataggctttcaaggattccatcaatca

SEQ ID NO: 72804 - DNA, 33 bp, Homo sapien
gtgaaaataggctttcgaggattccatcaatca

SEQ ID NO: 72805 - DNA, 33 bp, Homo sapien
tctcacttcacttgcccattttcaggaaacaca

SEQ ID NO: 72806 - DNA, 33 bp, Homo sapien
tctcacttcacttgcctattttcaggaaacaca

SEQ ID NO: 72807 - DNA, 33 bp, Homo sapien
atgattaatatgtgtgaattttgctcattgtgt

SEQ ID NO: 72808 - DNA, 33 bp, Homo sapien
atgattaatatgtgtggattttgctcattgtgt

SEQ ID NO: 72809 - DNA, 33 bp, Homo sapien
ggttcttaaatccaaccgtctctgctcccaaac

SEQ ID NO: 72810 - DNA, 33 bp, Homo sapien
ggttcttaaatccaactgtctctgctcccaaac

SEQ ID NO: 72811 - DNA, 33 bp, Homo sapien
taagcagcgaaaaaaaatcatttcaactgacaa

SEQ ID NO: 72812 - DNA, 33 bp, Homo sapien
taagcagcgaaaaaaattcatttcaactgacaa

SEQ ID NO: 72813 - DNA, 33 bp, Homo sapien
aaccatcatcttggagacattaaaggagaccct

SEQ ID NO: 72814 - DNA, 33 bp, Homo sapien
aaccatcatcttggaggcattaaaggagaccct

SEQ ID NO: 72815 - DNA, 33 bp, Homo sapien
gtcttcagggatgtcaatctggaagcttttagg

SEQ ID NO: 72816 - DNA, 33 bp, Homo sapien
gtcttcagggatgtcactctggaagcttttagg

SEQ ID NO: 72817 - DNA, 33 bp, Homo sapien
aggagaccaaaggccagtcttgacccctgcccc

SEQ ID NO: 72818 - DNA, 33 bp, Homo sapien
aggagaccaaaggccattcttgacccctgcccc

SEQ ID NO: 72819 - DNA, 33 bp, Homo sapien
ccctgatgactgaaacaacttcctcactgtccg

SEQ ID NO: 72820 - DNA, 33 bp, Homo sapien
ccctgatgactgaaacgacttcctcactgtccg

SEQ ID NO: 72821 - DNA, 33 bp, Homo sapien
cactgtccgttgcctacctgtggttttcctcca

SEQ ID NO: 72822 - DNA, 33 bp, Homo sapien
cactgtccgttgcctatctgtggttttcctcca

SEQ ID NO: 72823 - DNA, 33 bp, Homo sapien
tattatgaatatacaacgtggtagactagaatc

SEQ ID NO: 72824 - DNA, 33 bp, Homo sapien
tattatgaatatacaatgtggtagactagaatc

SEQ ID NO: 72825 - DNA, 33 bp, Homo sapien
catattattgtactcaggcccaggagagtcaca

SEQ ID NO: 72826 - DNA, 33 bp, Homo sapien
catattattgtactcatgcccaggagagtcaca

SEQ ID NO: 72827 - DNA, 33 bp, Homo sapien
gttccaattctcaaacagtatctactattattc

SEQ ID NO: 72828 - DNA, 33 bp, Homo sapien
gttccaattctcaaacggtatctactattattc

SEQ ID NO: 72829 - DNA, 33 bp, Homo sapien
ctccgtcatagcctacaaaaggaatcaaccctg

SEQ ID NO: 72830 - DNA, 33 bp, Homo sapien
ctccgtcatagcctaccaaaggaatcaaccctg

SEQ ID NO: 72831 - DNA, 33 bp, Homo sapien
caaggttaccaccaaacgccatcaactcatagt

SEQ ID NO: 72832 - DNA, 33 bp, Homo sapien
caaggttaccaccaaatgccatcaactcatagt

SEQ ID NO: 72833 - DNA, 33 bp, Homo sapien
gggaacataaaaggaaatcccaagtgaaatgag

SEQ ID NO: 72834 - DNA, 33 bp, Homo sapien
gggaacataaaaggaagtcccaagtgaaatgag

SEQ ID NO: 72835 - DNA, 33 bp, Homo sapien
tacaagctagcacgaagaaaagtgaaaacaaag

SEQ ID NO: 72836 - DNA, 33 bp, Homo sapien
tacaagctagcacgaataaaagtgaaaacaaag

SEQ ID NO: 72837 - DNA, 33 bp, Homo sapien
tgggtttctcagaagacgggccaaaagccttta

SEQ ID NO: 72838 - DNA, 33 bp, Homo sapien
tgggtttctcagaagatgggccaaaagccttta

SEQ ID NO: 72839 - DNA, 33 bp, Homo sapien
tgcttactttttgaagcatacattagcaacaca

SEQ ID NO: 72840 - DNA, 33 bp, Homo sapien
tgcttactttttgaagtatacattagcaacaca

SEQ ID NO: 72841 - DNA, 33 bp, Homo sapien
atccccaggtgggaacagctctgtcttatctta

SEQ ID NO: 72842 - DNA, 33 bp, Homo sapien
atccccaggtgggaacggctctgtcttatctta

SEQ ID NO: 72843 - DNA, 33 bp, Homo sapien
tcttcaaaactcttgccatttgcagggtcttct

SEQ ID NO: 72844 - DNA, 33 bp, Homo sapien
tcttcaaaactcttgctatttgcagggtcttct

SEQ ID NO: 72845 - DNA, 33 bp, Homo sapien
ttactgtctccagtaaccagaaaagaataaata

SEQ ID NO: 72846 - DNA, 33 bp, Homo sapien
ttactgtctccagtaatcagaaaagaataaata

SEQ ID NO: 72847 - DNA, 33 bp, Homo sapien
gcagagagccgcaaaccacaccattaaactgga

SEQ ID NO: 72848 - DNA, 33 bp, Homo sapien
gcagagagccgcaaactacaccattaaactgga

SEQ ID NO: 72849 - DNA, 33 bp, Homo sapien
agggaaatgcaaggccaaatctgtgcgccactt

SEQ ID NO: 72850 - DNA, 33 bp, Homo sapien
agggaaatgcaaggccgaatctgtgcgccactt

SEQ ID NO: 72851 - DNA, 33 bp, Homo sapien
ctagacagagccatcaatgaattctgtgctagg

SEQ ID NO: 72852 - DNA, 33 bp, Homo sapien
ctagacagagccatcagtgaattctgtgctagg

SEQ ID NO: 72853 - DNA, 33 bp, Homo sapien
gtattactgtagtacccgaactctggaaggaga

SEQ ID NO: 72854 - DNA, 33 bp, Homo sapien
gtattactgtagtaccggaactctggaaggaga

SEQ ID NO: 72855 - DNA, 33 bp, Homo sapien
agtttcttcatgctaaaccattttctcttaaga

SEQ ID NO: 72856 - DNA, 33 bp, Homo sapien
agtttcttcatgctaagccattttctcttaaga

SEQ ID NO: 72857 - DNA, 33 bp, Homo sapien
ctgtgagttcatacaggagagatggcctctgaa

SEQ ID NO: 72858 - DNA, 33 bp, Homo sapien
ctgtgagttcatacagtagagatggcctctgaa

SEQ ID NO: 72859 - DNA, 33 bp, Homo sapien
agttcagaagttaggaaggagaatttcaataat

SEQ ID NO: 72860 - DNA, 33 bp, Homo sapien
agttcagaagttaggagggagaatttcaataat

SEQ ID NO: 72861 - DNA, 33 bp, Homo sapien
aattctacattttatcaaagcagaaatacgtat

SEQ ID NO: 72862 - DNA, 33 bp, Homo sapien
aattctacattttatcgaagcagaaatacgtat

SEQ ID NO: 72863 - DNA, 33 bp, Homo sapien
atttatggctcaaaaacgatacttctttaggaa

SEQ ID NO: 72864 - DNA, 33 bp, Homo sapien
atttatggctcaaaaatgatacttctttaggaa

SEQ ID NO: 72865 - DNA, 33 bp, Homo sapien
ctcactatcccagtttataagcagccctttttt

SEQ ID NO: 72866 - DNA, 33 bp, Homo sapien
ctcactatcccagtttctaagcagccctttttt

SEQ ID NO: 72867 - DNA, 33 bp, Homo sapien
taacaggtacaaaataccagaagttgtccaaaa

SEQ ID NO: 72868 - DNA, 33 bp, Homo sapien
taacaggtacaaaatatcagaagttgtccaaaa

SEQ ID NO: 72869 - DNA, 33 bp, Homo sapien
tagcataaccagggtaaggtagagagtggaata

SEQ ID NO: 72870 - DNA, 33 bp, Homo sapien
tagcataaccagggtagggtagagagtggaata

SEQ ID NO: 72871 - DNA, 33 bp, Homo sapien
catatatatagatagcacctattagttctgtcc

SEQ ID NO: 72872 - DNA, 33 bp, Homo sapien
catatatatagatagctcctattagttctgtcc

SEQ ID NO: 72873 - DNA, 33 bp, Homo sapien
aaagcattttccaaaaccatcttcctccaggaa

SEQ ID NO: 72874 - DNA, 33 bp, Homo sapien
aaagcattttccaaaatcatcttcctccaggaa

SEQ ID NO: 72875 - DNA, 33 bp, Homo sapien
taggcaaaatccatctgacagaatctcttaact

SEQ ID NO: 72876 - DNA, 33 bp, Homo sapien
taggcaaaatccatcttacagaatctcttaact

SEQ ID NO: 72877 - DNA, 33 bp, Homo sapien
ccagatatctacgttacagagtggctcatttaa

SEQ ID NO: 72878 - DNA, 33 bp, Homo sapien
ccagatatctacgttatagagtggctcatttaa

SEQ ID NO: 72879 - DNA, 33 bp, Homo sapien
tgtttgttgttagtgcaaggactttgtgatgga

SEQ ID NO: 72880 - DNA, 33 bp, Homo sapien
tgtttgttgttagtgcgaggactttgtgatgga

SEQ ID NO: 72881 - DNA, 33 bp, Homo sapien
attgctaattatgcaccgtatctgttattttta

SEQ ID NO: 72882 - DNA, 33 bp, Homo sapien
attgctaattatgcactgtatctgttattttta

SEQ ID NO: 72883 - DNA, 33 bp, Homo sapien
gccatgtggccacaccagctaaaaatgcattct

SEQ ID NO: 72884 - DNA, 33 bp, Homo sapien
gccatgtggccacaccggctaaaaatgcattct

SEQ ID NO: 72885 - DNA, 33 bp, Homo sapien
ccatttggagtaacaacatttgtttaggaattt

SEQ ID NO: 72886 - DNA, 33 bp, Homo sapien
ccatttggagtaacaagatttgtttaggaattt

SEQ ID NO: 72887 - DNA, 33 bp, Homo sapien
ttagatgttaccagaggcatagatgtttccaaa

SEQ ID NO: 72888 - DNA, 33 bp, Homo sapien
ttagatgttaccagagtcatagatgtttccaaa

SEQ ID NO: 72889 - DNA, 33 bp, Homo sapien
agatcctttctaagcccagattctctaaatcca

SEQ ID NO: 72890 - DNA, 33 bp, Homo sapien
agatcctttctaagcctagattctctaaatcca

SEQ ID NO: 72891 - DNA, 33 bp, Homo sapien
ttattttccggcttcacccaaaatataatagtt

SEQ ID NO: 72892 - DNA, 33 bp, Homo sapien
ttattttccggcttcatccaaaatataatagtt

SEQ ID NO: 72893 - DNA, 33 bp, Homo sapien
taaggtagacggaagacatagaaggcaatgccc

SEQ ID NO: 72894 - DNA, 33 bp, Homo sapien
taaggtagacggaagatatagaaggcaatgccc

SEQ ID NO: 72895 - DNA, 33 bp, Homo sapien
ttacaaggtctaagcacgagtaaagtttagggc

SEQ ID NO: 72896 - DNA, 33 bp, Homo sapien
ttacaaggtctaagcatgagtaaagtttagggc

SEQ ID NO: 72897 - DNA, 33 bp, Homo sapien
tattagatttcatagaaactgttggaaatatct

SEQ ID NO: 72898 - DNA, 33 bp, Homo sapien
tattagatttcatagatactgttggaaatatct

SEQ ID NO: 72899 - DNA, 33 bp, Homo sapien
acaggattcagtgagacaatgtatatgcaatgt

SEQ ID NO: 72900 - DNA, 33 bp, Homo sapien
acaggattcagtgagataatgtatatgcaatgt

SEQ ID NO: 72901 - DNA, 33 bp, Homo sapien
ttagcccaggcagtacacaatggagacccaaac

SEQ ID NO: 72902 - DNA, 33 bp, Homo sapien
ttagcccaggcagtacgcaatggagacccaaac

SEQ ID NO: 72903 - DNA, 33 bp, Homo sapien
atgatggattagaaaaacattgcttggaatgta

SEQ ID NO: 72904 - DNA, 33 bp, Homo sapien
atgatggattagaaaaccattgcttggaatgta

SEQ ID NO: 72905 - DNA, 33 bp, Homo sapien
gctctgatccttgataacacataaagatacgta

SEQ ID NO: 72906 - DNA, 33 bp, Homo sapien
gctctgatccttgatatcacataaagatacgta

SEQ ID NO: 72907 - DNA, 33 bp, Homo sapien
tttgctttcttttccactcatgttttgtaactt

SEQ ID NO: 72908 - DNA, 33 bp, Homo sapien
tttgctttcttttccattcatgttttgtaactt

SEQ ID NO: 72909 - DNA, 33 bp, Homo sapien
cgtggcacagtgcctacagacacacaaacaatc

SEQ ID NO: 72910 - DNA, 33 bp, Homo sapien
cgtggcacagtgcctagagacacacaaacaatc

SEQ ID NO: 72911 - DNA, 33 bp, Homo sapien
aggtttttctttgatacgtgcagattcgtctac

SEQ ID NO: 72912 - DNA, 33 bp, Homo sapien
aggtttttctttgatatgtgcagattcgtctac

SEQ ID NO: 72913 - DNA, 33 bp, Homo sapien
gacacatcattaccaacgtccatagtttacatt

SEQ ID NO: 72914 - DNA, 33 bp, Homo sapien
gacacatcattaccaatgtccatagtttacatt

SEQ ID NO: 72915 - DNA, 33 bp, Homo sapien
ttatggaaagattttaaaaagcagcaggaccta

SEQ ID NO: 72916 - DNA, 33 bp, Homo sapien
ttatggaaagattttacaaagcagcaggaccta

SEQ ID NO: 72917 - DNA, 33 bp, Homo sapien
aaatcaactccaagaaatatttccaagacagaa

SEQ ID NO: 72918 - DNA, 33 bp, Homo sapien
aaatcaactccaagaagtatttccaagacagaa

SEQ ID NO: 72919 - DNA, 33 bp, Homo sapien
tagaagttaatatcccccctgtatgccatttgt

SEQ ID NO: 72920 - DNA, 33 bp, Homo sapien
tagaagttaatatccctcctgtatgccatttgt

SEQ ID NO: 72921 - DNA, 33 bp, Homo sapien
tgtttcccgctaggaacctttctaaaacacaag

SEQ ID NO: 72922 - DNA, 33 bp, Homo sapien
tgtttcccgctaggaatctttctaaaacacaag

SEQ ID NO: 72923 - DNA, 33 bp, Homo sapien
aaaaaattgttacatacacagtggcttcaaaga

SEQ ID NO: 72924 - DNA, 33 bp, Homo sapien
aaaaaattgttacatatacagtggcttcaaaga

SEQ ID NO: 72925 - DNA, 33 bp, Homo sapien
aatttgtgattcttaccgattcagtctgtcaaa

SEQ ID NO: 72926 - DNA, 33 bp, Homo sapien
aatttgtgattcttactgattcagtctgtcaaa

SEQ ID NO: 72927 - DNA, 33 bp, Homo sapien
aacaagtcgtcaaataccctttaatgaatagga

SEQ ID NO: 72928 - DNA, 33 bp, Homo sapien
aacaagtcgtcaaatatcctttaatgaatagga

SEQ ID NO: 72929 - DNA, 33 bp, Homo sapien
ctgactcctatattgcacaactgggtgtcagat

SEQ ID NO: 72930 - DNA, 33 bp, Homo sapien
ctgactcctatattgcgcaactgggtgtcagat

SEQ ID NO: 72931 - DNA, 33 bp, Homo sapien
tatatggaaaatgaaccgggactgcagaagtga

SEQ ID NO: 72932 - DNA, 33 bp, Homo sapien
tatatggaaaatgaactgggactgcagaagtga

SEQ ID NO: 72933 - DNA, 33 bp, Homo sapien
atagctgtatcaacctaagggactgaagagcaa

SEQ ID NO: 72934 - DNA, 33 bp, Homo sapien
atagctgtatcaacctcagggactgaagagcaa

SEQ ID NO: 72935 - DNA, 33 bp, Homo sapien
ttgcctttctgcaagaataactcttccacttgc

SEQ ID NO: 72936 - DNA, 33 bp, Homo sapien
ttgcctttctgcaagagtaactcttccacttgc

SEQ ID NO: 72937 - DNA, 33 bp, Homo sapien
agagacacagacgatcaagatatggttcctgac

SEQ ID NO: 72938 - DNA, 33 bp, Homo sapien
agagacacagacgatcgagatatggttcctgac

SEQ ID NO: 72939 - DNA, 33 bp, Homo sapien
atgatgactagctaagacttaagtaacgagaaa

SEQ ID NO: 72940 - DNA, 33 bp, Homo sapien
atgatgactagctaagccttaagtaacgagaaa

SEQ ID NO: 72941 - DNA, 33 bp, Homo sapien
tgagacatagaaactcaaattctgagcatgaac

SEQ ID NO: 72942 - DNA, 33 bp, Homo sapien
tgagacatagaaactccaattctgagcatgaac

SEQ ID NO: 72943 - DNA, 33 bp, Homo sapien
gagcagttgtcttataactaaaatgagagcatt

SEQ ID NO: 72944 - DNA, 33 bp, Homo sapien
gagcagttgtcttatatctaaaatgagagcatt

SEQ ID NO: 72945 - DNA, 33 bp, Homo sapien
ggtgaaatgtcttcaaatcttttccctttttaa

SEQ ID NO: 72946 - DNA, 33 bp, Homo sapien
ggtgaaatgtcttcaattcttttccctttttaa

SEQ ID NO: 72947 - DNA, 33 bp, Homo sapien
gttttaggtgcacacaagcaaattacagatggt

SEQ ID NO: 72948 - DNA, 33 bp, Homo sapien
gttttaggtgcacacaggcaaattacagatggt

SEQ ID NO: 72949 - DNA, 33 bp, Homo sapien
aaaagactttatgccaatcgtgcaataaaaggg

SEQ ID NO: 72950 - DNA, 33 bp, Homo sapien
aaaagactttatgccagtcgtgcaataaaaggg

SEQ ID NO: 72951 - DNA, 33 bp, Homo sapien
gctttggagtgagaaacgggctaagtgacaaaa

SEQ ID NO: 72952 - DNA, 33 bp, Homo sapien
gctttggagtgagaaatgggctaagtgacaaaa

SEQ ID NO: 72953 - DNA, 33 bp, Homo sapien
agtattcatttagctcacttccacaattgaaac

SEQ ID NO: 72954 - DNA, 33 bp, Homo sapien
agtattcatttagctcgcttccacaattgaaac

SEQ ID NO: 72955 - DNA, 33 bp, Homo sapien
tgatcatggaaaaaaaacactaattccactacc

SEQ ID NO: 72956 - DNA, 33 bp, Homo sapien
tgatcatggaaaaaaaccactaattccactacc

SEQ ID NO: 72957 - DNA, 33 bp, Homo sapien
cacattcttgtaaaacaaatctccagaattctt

SEQ ID NO: 72958 - DNA, 33 bp, Homo sapien
cacattcttgtaaaaccaatctccagaattctt

SEQ ID NO: 72959 - DNA, 33 bp, Homo sapien
agtagccttcctgcctaaaaaggacacttttgg

SEQ ID NO: 72960 - DNA, 33 bp, Homo sapien
agtagccttcctgcctcaaaaggacacttttgg

SEQ ID NO: 72961 - DNA, 33 bp, Homo sapien
atttgtattcctcagacagaccatccaaaagtg

SEQ ID NO: 72962 - DNA, 33 bp, Homo sapien
atttgtattcctcagagagaccatccaaaagtg

SEQ ID NO: 72963 - DNA, 33 bp, Homo sapien
gccttataataattaaggttctcacaggaattt

SEQ ID NO: 72964 - DNA, 33 bp, Homo sapien
gccttataataattaatgttctcacaggaattt

SEQ ID NO: 72965 - DNA, 33 bp, Homo sapien
cgtattggctgtatcactagcatgcattttgta

SEQ ID NO: 72966 - DNA, 33 bp, Homo sapien
cgtattggctgtatcattagcatgcattttgta

SEQ ID NO: 72967 - DNA, 33 bp, Homo sapien
acacctgaagtcctaacagataactcggttaag

SEQ ID NO: 72968 - DNA, 33 bp, Homo sapien
acacctgaagtcctaagagataactcggttaag

SEQ ID NO: 72969 - DNA, 33 bp, Homo sapien
aagtttatttcaatacacagagatggaattttg

SEQ ID NO: 72970 - DNA, 33 bp, Homo sapien
aagtttatttcaatacccagagatggaattttg

SEQ ID NO: 72971 - DNA, 33 bp, Homo sapien
acttagaagagtaaaaatctgtccaaatgtatt

SEQ ID NO: 72972 - DNA, 33 bp, Homo sapien
acttagaagagtaaaattctgtccaaatgtatt

SEQ ID NO: 72973 - DNA, 33 bp, Homo sapien
accacatatgtagttcaatcatcagaggtaaag

SEQ ID NO: 72974 - DNA, 33 bp, Homo sapien
accacatatgtagttcgatcatcagaggtaaag

SEQ ID NO: 72975 - DNA, 33 bp, Homo sapien
agaagtatcttgataaaccattaggtccagtgc

SEQ ID NO: 72976 - DNA, 33 bp, Homo sapien
agaagtatcttgataagccattaggtccagtgc

SEQ ID NO: 72977 - DNA, 33 bp, Homo sapien
gtaaatagtccaaccacggctgattttaagcta

SEQ ID NO: 72978 - DNA, 33 bp, Homo sapien
gtaaatagtccaaccatggctgattttaagcta

SEQ ID NO: 72979 - DNA, 33 bp, Homo sapien
gctaagcaagccccagaaaagagattcacagtg

SEQ ID NO: 72980 - DNA, 33 bp, Homo sapien
gctaagcaagccccaggaaagagattcacagtg

SEQ ID NO: 72981 - DNA, 33 bp, Homo sapien
tgagaccgaacctggacattatttccactgtga

SEQ ID NO: 72982 - DNA, 33 bp, Homo sapien
tgagaccgaacctggatattatttccactgtga

SEQ ID NO: 72983 - DNA, 33 bp, Homo sapien
gcctgggtgtacaacaaatgaagaccgtgacaa

SEQ ID NO: 72984 - DNA, 33 bp, Homo sapien
gcctgggtgtacaacacatgaagaccgtgacaa

SEQ ID NO: 72985 - DNA, 33 bp, Homo sapien
aaacgttcttatttcacgaccagtttgtggcag

SEQ ID NO: 72986 - DNA, 33 bp, Homo sapien
aaacgttcttatttcaggaccagtttgtggcag

SEQ ID NO: 72987 - DNA, 33 bp, Homo sapien
cctattgaatttaacaataatgctgtgccctac

SEQ ID NO: 72988 - DNA, 33 bp, Homo sapien
cctattgaatttaacagtaatgctgtgccctac

SEQ ID NO: 72989 - DNA, 33 bp, Homo sapien
ttatgttaaatactgactcacaggagagggccc

SEQ ID NO: 72990 - DNA, 33 bp, Homo sapien
ttatgttaaatactgagtcacaggagagggccc

SEQ ID NO: 72991 - DNA, 33 bp, Homo sapien
tctagaagggatgtaaggacatgaggacacatt

SEQ ID NO: 72992 - DNA, 33 bp, Homo sapien
tctagaagggatgtaatgacatgaggacacatt

SEQ ID NO: 72993 - DNA, 33 bp, Homo sapien
tggttgagctggcctgaaagagtgatctcatcc

SEQ ID NO: 72994 - DNA, 33 bp, Homo sapien
tggttgagctggcctggaagagtgatctcatcc

SEQ ID NO: 72995 - DNA, 33 bp, Homo sapien
taaaactgtgttagtacgtaatgacctccaaga

SEQ ID NO: 72996 - DNA, 33 bp, Homo sapien
taaaactgtgttagtatgtaatgacctccaaga

SEQ ID NO: 72997 - DNA, 33 bp, Homo sapien
tgatgctattcaaaggcaacaagtggtattaag

SEQ ID NO: 72998 - DNA, 33 bp, Homo sapien
tgatgctattcaaaggtaacaagtggtattaag

SEQ ID NO: 72999 - DNA, 33 bp, Homo sapien
atagatattttcagaaacctttgtatttaagtg

SEQ ID NO: 73000 - DNA, 33 bp, Homo sapien
atagatattttcagaagcctttgtatttaagtg

SEQ ID NO: 73001 - DNA, 33 bp, Homo sapien
ccatggtagtatctcacggcatagttatcctga

SEQ ID NO: 73002 - DNA, 33 bp, Homo sapien
ccatggtagtatctcatggcatagttatcctga

SEQ ID NO: 73003 - DNA, 33 bp, Homo sapien
tctgaaccagtgactacaagatataagtgttac

SEQ ID NO: 73004 - DNA, 33 bp, Homo sapien
tctgaaccagtgactataagatataagtgttac

SEQ ID NO: 73005 - DNA, 33 bp, Homo sapien
tatatagtctcattcacctgaattttacatgtt

SEQ ID NO: 73006 - DNA, 33 bp, Homo sapien
tatatagtctcattcatctgaattttacatgtt

SEQ ID NO: 73007 - DNA, 33 bp, Homo sapien
caggctacggaaaccacgtctaggcttagtagg

SEQ ID NO: 73008 - DNA, 33 bp, Homo sapien
caggctacggaaaccatgtctaggcttagtagg

SEQ ID NO: 73009 - DNA, 33 bp, Homo sapien
aagtccctgttatcacacaagcaattgctaact

SEQ ID NO: 73010 - DNA, 33 bp, Homo sapien
aagtccctgttatcacgcaagcaattgctaact

SEQ ID NO: 73011 - DNA, 33 bp, Homo sapien
gctatcttgagaaatcacccagtccataaattg

SEQ ID NO: 73012 - DNA, 33 bp, Homo sapien
gctatcttgagaaatcgcccagtccataaattg

SEQ ID NO: 73013 - DNA, 33 bp, Homo sapien
tttggtttatttgttgaagtttgacctatagac

SEQ ID NO: 73014 - DNA, 33 bp, Homo sapien
tttggtttatttgttggagtttgacctatagac

SEQ ID NO: 73015 - DNA, 33 bp, Homo sapien
tctgccctctgaagaagtagaaatgctagaaga

SEQ ID NO: 73016 - DNA, 33 bp, Homo sapien
tctgccctctgaagaattagaaatgctagaaga

SEQ ID NO: 73017 - DNA, 33 bp, Homo sapien
agtcctgggaaagtcaatctcttcatgcctcag

SEQ ID NO: 73018 - DNA, 33 bp, Homo sapien
agtcctgggaaagtcagtctcttcatgcctcag

SEQ ID NO: 73019 - DNA, 33 bp, Homo sapien
agtaggatattatagagaagatgtctgaggcat

SEQ ID NO: 73020 - DNA, 33 bp, Homo sapien
agtaggatattatagataagatgtctgaggcat

SEQ ID NO: 73021 - DNA, 33 bp, Homo sapien
cctcacagatctcatacacaggagtgcaaataa

SEQ ID NO: 73022 - DNA, 33 bp, Homo sapien
cctcacagatctcatatacaggagtgcaaataa

SEQ ID NO: 73023 - DNA, 33 bp, Homo sapien
catatcgaagcaacaccatggataacattgagg

SEQ ID NO: 73024 - DNA, 33 bp, Homo sapien
catatcgaagcaacactatggataacattgagg

SEQ ID NO: 73025 - DNA, 33 bp, Homo sapien
ttatggtgtgagtcaacagaattccattctgct

SEQ ID NO: 73026 - DNA, 33 bp, Homo sapien
ttatggtgtgagtcaatagaattccattctgct

SEQ ID NO: 73027 - DNA, 33 bp, Homo sapien
tctccattgctaaatacaagagacatttttcat

SEQ ID NO: 73028 - DNA, 33 bp, Homo sapien
tctccattgctaaatagaagagacatttttcat

SEQ ID NO: 73029 - DNA, 33 bp, Homo sapien
tcctttcctactgcaacgcttcatcaactcact

SEQ ID NO: 73030 - DNA, 33 bp, Homo sapien
tcctttcctactgcaatgcttcatcaactcact

SEQ ID NO: 73031 - DNA, 33 bp, Homo sapien
gctggagagtctgaacaaatttcttcaccaggg

SEQ ID NO: 73032 - DNA, 33 bp, Homo sapien
gctggagagtctgaacgaatttcttcaccaggg

SEQ ID NO: 73033 - DNA, 33 bp, Homo sapien
tcctttatgctagtaaataaaaccaatatcagt

SEQ ID NO: 73034 - DNA, 33 bp, Homo sapien
tcctttatgctagtaagtaaaaccaatatcagt

SEQ ID NO: 73035 - DNA, 33 bp, Homo sapien
aatctcattttttacacgtatactcaatcaaat

SEQ ID NO: 73036 - DNA, 33 bp, Homo sapien
aatctcattttttacaggtatactcaatcaaat

SEQ ID NO: 73037 - DNA, 33 bp, Homo sapien
taatttgtaatgaaaaatttaattggctcatcg

SEQ ID NO: 73038 - DNA, 33 bp, Homo sapien
taatttgtaatgaaaattttaattggctcatcg

SEQ ID NO: 73039 - DNA, 33 bp, Homo sapien
acaggtgatttattagaagaattggctcacata

SEQ ID NO: 73040 - DNA, 33 bp, Homo sapien
acaggtgatttattaggagaattggctcacata

SEQ ID NO: 73041 - DNA, 33 bp, Homo sapien
ctgattctgactctctaaagaaccctgacaaat

SEQ ID NO: 73042 - DNA, 33 bp, Homo sapien
ctgattctgactctctgaagaaccctgacaaat

SEQ ID NO: 73043 - DNA, 33 bp, Homo sapien
ttagatgtcaatggcaaataacgaagctgtttg

SEQ ID NO: 73044 - DNA, 33 bp, Homo sapien
ttagatgtcaatggcagataacgaagctgtttg

SEQ ID NO: 73045 - DNA, 33 bp, Homo sapien
gatgaatcacagcagacgtccttaggagtttgg

SEQ ID NO: 73046 - DNA, 33 bp, Homo sapien
gatgaatcacagcagatgtccttaggagtttgg

SEQ ID NO: 73047 - DNA, 33 bp, Homo sapien
aattagagatggatgaaagatatggacttattt

SEQ ID NO: 73048 - DNA, 33 bp, Homo sapien
aattagagatggatgagagatatggacttattt

SEQ ID NO: 73049 - DNA, 33 bp, Homo sapien
cttataaataatctaaaaattcagcaataaggg

SEQ ID NO: 73050 - DNA, 33 bp, Homo sapien
cttataaataatctaagaattcagcaataaggg

SEQ ID NO: 73051 - DNA, 33 bp, Homo sapien
acacacacatagaggaaaatactgaactctgat

SEQ ID NO: 73052 - DNA, 33 bp, Homo sapien
acacacacatagaggacaatactgaactctgat

SEQ ID NO: 73053 - DNA, 33 bp, Homo sapien
atgcaacaaccagttcaactacattgaaggagg

SEQ ID NO: 73054 - DNA, 33 bp, Homo sapien
atgcaacaaccagttccactacattgaaggagg

SEQ ID NO: 73055 - DNA, 33 bp, Homo sapien
gaagcacattttacacaggactaaaggaaaagg

SEQ ID NO: 73056 - DNA, 33 bp, Homo sapien
gaagcacattttacacgggactaaaggaaaagg

SEQ ID NO: 73057 - DNA, 33 bp, Homo sapien
tgtggagtgcatcaccactgtgaaacttctggg

SEQ ID NO: 73058 - DNA, 33 bp, Homo sapien
tgtggagtgcatcacccctgtgaaacttctggg

SEQ ID NO: 73059 - DNA, 33 bp, Homo sapien
ttattttgttttttaaaagcgatgtcatagctt

SEQ ID NO: 73060 - DNA, 33 bp, Homo sapien
ttattttgttttttaagagcgatgtcatagctt

SEQ ID NO: 73061 - DNA, 33 bp, Homo sapien
tttttaaaagttgtggcaaaatatgccttttag

SEQ ID NO: 73062 - DNA, 33 bp, Homo sapien
tttttaaaagttgtggtaaaatatgccttttag

SEQ ID NO: 73063 - DNA, 33 bp, Homo sapien
ggacttcttacagaaaagcaaaacagtttaatg

SEQ ID NO: 73064 - DNA, 33 bp, Homo sapien
ggacttcttacagaaaggcaaaacagtttaatg

SEQ ID NO: 73065 - DNA, 33 bp, Homo sapien
cagggcctgagtgttacatttcatttgatttct

SEQ ID NO: 73066 - DNA, 33 bp, Homo sapien
cagggcctgagtgttatatttcatttgatttct

SEQ ID NO: 73067 - DNA, 33 bp, Homo sapien
ggtagttcccagttgaatagtcttcagatgcag

SEQ ID NO: 73068 - DNA, 33 bp, Homo sapien
ggtagttcccagttgattagtcttcagatgcag

SEQ ID NO: 73069 - DNA, 33 bp, Homo sapien
agcatgagcttaagtacggtttatacaattaat

SEQ ID NO: 73070 - DNA, 33 bp, Homo sapien
agcatgagcttaagtagggtttatacaattaat

SEQ ID NO: 73071 - DNA, 33 bp, Homo sapien
ctgctgtagtgataaaacctgagatttcagggg

SEQ ID NO: 73072 - DNA, 33 bp, Homo sapien
ctgctgtagtgataaaccctgagatttcagggg

SEQ ID NO: 73073 - DNA, 33 bp, Homo sapien
gtagctattagtcataaaaatcattacaagtga

SEQ ID NO: 73074 - DNA, 33 bp, Homo sapien
gtagctattagtcatagaaatcattacaagtga

SEQ ID NO: 73075 - DNA, 33 bp, Homo sapien
gacattttaaatgccacctgaaacatcacttgt

SEQ ID NO: 73076 - DNA, 33 bp, Homo sapien
gacattttaaatgccatctgaaacatcacttgt

SEQ ID NO: 73077 - DNA, 33 bp, Homo sapien
tgatattttgaagagcacagatcctcggtattc

SEQ ID NO: 73078 - DNA, 33 bp, Homo sapien
tgatattttgaagagcgcagatcctcggtattc

SEQ ID NO: 73079 - DNA, 33 bp, Homo sapien
ttgctgggggactagacgaatgctatgtaaagg

SEQ ID NO: 73080 - DNA, 33 bp, Homo sapien
ttgctgggggactagatgaatgctatgtaaagg

SEQ ID NO: 73081 - DNA, 33 bp, Homo sapien
ggaacctcttatgaaactgttctttagtttaaa

SEQ ID NO: 73082 - DNA, 33 bp, Homo sapien
ggaacctcttatgaaattgttctttagtttaaa

SEQ ID NO: 73083 - DNA, 33 bp, Homo sapien
tgttcttggtgacacacctgagtgagcaggggc

SEQ ID NO: 73084 - DNA, 33 bp, Homo sapien
tgttcttggtgacacatctgagtgagcaggggc

SEQ ID NO: 73085 - DNA, 33 bp, Homo sapien
cttccatgcctagcgcaatacgtgatgatacta

SEQ ID NO: 73086 - DNA, 33 bp, Homo sapien
cttccatgcctagcgcgatacgtgatgatacta

SEQ ID NO: 73087 - DNA, 33 bp, Homo sapien
atcacaagctcatagaaaggggtgagtgtgagg

SEQ ID NO: 73088 - DNA, 33 bp, Homo sapien
atcacaagctcatagacaggggtgagtgtgagg

SEQ ID NO: 73089 - DNA, 33 bp, Homo sapien
catccatcagttctagaagctgcctatagccct

SEQ ID NO: 73090 - DNA, 33 bp, Homo sapien
catccatcagttctaggagctgcctatagccct

SEQ ID NO: 73091 - DNA, 33 bp, Homo sapien
ggattcgaacataaaacttcctgtcaggggtga

SEQ ID NO: 73092 - DNA, 33 bp, Homo sapien
ggattcgaacataaaatttcctgtcaggggtga

SEQ ID NO: 73093 - DNA, 33 bp, Homo sapien
ttgaaacattgtggaaacagcattgtactaggc

SEQ ID NO: 73094 - DNA, 33 bp, Homo sapien
ttgaaacattgtggaatcagcattgtactaggc

SEQ ID NO: 73095 - DNA, 33 bp, Homo sapien
cacaactgttacccacaggaaggtgagagctaa

SEQ ID NO: 73096 - DNA, 33 bp, Homo sapien
cacaactgttacccacgggaaggtgagagctaa

SEQ ID NO: 73097 - DNA, 33 bp, Homo sapien
atgtctataaacaagaaaggaatggttctatgg

SEQ ID NO: 73098 - DNA, 33 bp, Homo sapien
atgtctataaacaagagaggaatggttctatgg

SEQ ID NO: 73099 - DNA, 33 bp, Homo sapien
agatttgggccttagcaaatgggagctagcaga

SEQ ID NO: 73100 - DNA, 33 bp, Homo sapien
agatttgggccttagcgaatgggagctagcaga

SEQ ID NO: 73101 - DNA, 33 bp, Homo sapien
atcttaacctgaactcactttaggaatattgaa

SEQ ID NO: 73102 - DNA, 33 bp, Homo sapien
atcttaacctgaactcgctttaggaatattgaa

SEQ ID NO: 73103 - DNA, 33 bp, Homo sapien
gacaagatccagaatgcaggcaaccatcctgat

SEQ ID NO: 73104 - DNA, 33 bp, Homo sapien
gacaagatccagaatgtaggcaaccatcctgat

SEQ ID NO: 73105 - DNA, 33 bp, Homo sapien
ctacaaactctagtgaaagtgaaattcctcaag

SEQ ID NO: 73106 - DNA, 33 bp, Homo sapien
ctacaaactctagtgagagtgaaattcctcaag

SEQ ID NO: 73107 - DNA, 33 bp, Homo sapien
agcaaaagaaagtggaacagggacttggtaaaa

SEQ ID NO: 73108 - DNA, 33 bp, Homo sapien
agcaaaagaaagtggaccagggacttggtaaaa

SEQ ID NO: 73109 - DNA, 33 bp, Homo sapien
acatcacactgtgacccgaggcaaggatgctag

SEQ ID NO: 73110 - DNA, 33 bp, Homo sapien
acatcacactgtgacctgaggcaaggatgctag

SEQ ID NO: 73111 - DNA, 33 bp, Homo sapien
ttgatcttcctcttacactccaccatgcctacc

SEQ ID NO: 73112 - DNA, 33 bp, Homo sapien
ttgatcttcctcttactctccaccatgcctacc

SEQ ID NO: 73113 - DNA, 33 bp, Homo sapien
aactaaatgaacagataactctccaaatctcca

SEQ ID NO: 73114 - DNA, 33 bp, Homo sapien
aactaaatgaacagattactctccaaatctcca

SEQ ID NO: 73115 - DNA, 33 bp, Homo sapien
cgcccaccagataataccacaaaatgcacctta

SEQ ID NO: 73116 - DNA, 33 bp, Homo sapien
cgcccaccagataatagcacaaaatgcacctta

SEQ ID NO: 73117 - DNA, 33 bp, Homo sapien
ctgagaacgtaacaaccctgtggccagtgtatt

SEQ ID NO: 73118 - DNA, 33 bp, Homo sapien
ctgagaacgtaacaacgctgtggccagtgtatt

SEQ ID NO: 73119 - DNA, 33 bp, Homo sapien
attaggctatgaaaacaatgttctcctaagttt

SEQ ID NO: 73120 - DNA, 33 bp, Homo sapien
attaggctatgaaaacgatgttctcctaagttt

SEQ ID NO: 73121 - DNA, 33 bp, Homo sapien
gaacagaaatgaaccaatcaaggaaagagccaa

SEQ ID NO: 73122 - DNA, 33 bp, Homo sapien
gaacagaaatgaaccagtcaaggaaagagccaa

SEQ ID NO: 73123 - DNA, 33 bp, Homo sapien
aaatattagacgaagaatagtaacacctaccac

SEQ ID NO: 73124 - DNA, 33 bp, Homo sapien
aaatattagacgaagagtagtaacacctaccac

SEQ ID NO: 73125 - DNA, 33 bp, Homo sapien
aactcctgaaatacctcaagattcattttgttt

SEQ ID NO: 73126 - DNA, 33 bp, Homo sapien
aactcctgaaatacctgaagattcattttgttt

SEQ ID NO: 73127 - DNA, 33 bp, Homo sapien
tttatggtaaaaagcacatactgagttttcttc

SEQ ID NO: 73128 - DNA, 33 bp, Homo sapien
tttatggtaaaaagcatatactgagttttcttc

SEQ ID NO: 73129 - DNA, 33 bp, Homo sapien
tgattacagaagacccacactgcagaattcaga

SEQ ID NO: 73130 - DNA, 33 bp, Homo sapien
tgattacagaagacccgcactgcagaattcaga

SEQ ID NO: 73131 - DNA, 33 bp, Homo sapien
tttggtgaggtgtccagtcaaacttttccttat

SEQ ID NO: 73132 - DNA, 33 bp, Homo sapien
tttggtgaggtgtccattcaaacttttccttat

SEQ ID NO: 73133 - DNA, 33 bp, Homo sapien
gagaggctctggcaccagaaaaccacagtcatc

SEQ ID NO: 73134 - DNA, 33 bp, Homo sapien
gagaggctctggcaccggaaaaccacagtcatc

SEQ ID NO: 73135 - DNA, 33 bp, Homo sapien
aggcagttagagggaacctaactaaaagcacgt

SEQ ID NO: 73136 - DNA, 33 bp, Homo sapien
aggcagttagagggaagctaactaaaagcacgt

SEQ ID NO: 73137 - DNA, 33 bp, Homo sapien
tctgtaacatgacctaccagacttggcatcatg

SEQ ID NO: 73138 - DNA, 33 bp, Homo sapien
tctgtaacatgacctatcagacttggcatcatg

SEQ ID NO: 73139 - DNA, 33 bp, Homo sapien
ataatggttggataggcaacaaaggttcagaaa

SEQ ID NO: 73140 - DNA, 33 bp, Homo sapien
ataatggttggataggtaacaaaggttcagaaa

SEQ ID NO: 73141 - DNA, 33 bp, Homo sapien
accttaattgcgatggcatttccaaaaaattag

SEQ ID NO: 73142 - DNA, 33 bp, Homo sapien
accttaattgcgatgggatttccaaaaaattag

SEQ ID NO: 73143 - DNA, 33 bp, Homo sapien
atgtaaaatcatttcacctttatttgacgcttt

SEQ ID NO: 73144 - DNA, 33 bp, Homo sapien
atgtaaaatcatttcatctttatttgacgcttt

SEQ ID NO: 73145 - DNA, 33 bp, Homo sapien
aattctcacctatatacactttcttgaacacat

SEQ ID NO: 73146 - DNA, 33 bp, Homo sapien
aattctcacctatatatactttcttgaacacat

SEQ ID NO: 73147 - DNA, 33 bp, Homo sapien
tattaaaacttaattgaaccataagacatcatc

SEQ ID NO: 73148 - DNA, 33 bp, Homo sapien
tattaaaacttaattgtaccataagacatcatc

SEQ ID NO: 73149 - DNA, 33 bp, Homo sapien
ccccatgctttttcaaacttaatccttgaccat

SEQ ID NO: 73150 - DNA, 33 bp, Homo sapien
ccccatgctttttcaatcttaatccttgaccat

SEQ ID NO: 73151 - DNA, 33 bp, Homo sapien
aatgctttattttaacccctgtgaactgataca

SEQ ID NO: 73152 - DNA, 33 bp, Homo sapien
aatgctttattttaactcctgtgaactgataca

SEQ ID NO: 73153 - DNA, 33 bp, Homo sapien
ggccgacttaaaaatacggaatccacaatggga

SEQ ID NO: 73154 - DNA, 33 bp, Homo sapien
ggccgacttaaaaatatggaatccacaatggga

SEQ ID NO: 73155 - DNA, 33 bp, Homo sapien
aatccaagatttgatacgcaagctttatttaaa

SEQ ID NO: 73156 - DNA, 33 bp, Homo sapien
aatccaagatttgatatgcaagctttatttaaa

SEQ ID NO: 73157 - DNA, 33 bp, Homo sapien
cacaaagatagtcttggacttatacgcctccat

SEQ ID NO: 73158 - DNA, 33 bp, Homo sapien
cacaaagatagtcttgtacttatacgcctccat

SEQ ID NO: 73159 - DNA, 33 bp, Homo sapien
tatgctagtttagaaaatccttgactcacctat

SEQ ID NO: 73160 - DNA, 33 bp, Homo sapien
tatgctagtttagaaattccttgactcacctat

SEQ ID NO: 73161 - DNA, 33 bp, Homo sapien
ggagtttctgttaccacacaacgaaattctaaa

SEQ ID NO: 73162 - DNA, 33 bp, Homo sapien
ggagtttctgttaccatacaacgaaattctaaa

SEQ ID NO: 73163 - DNA, 33 bp, Homo sapien
cagaaagccctgtatacgtatcaaacaactgaa

SEQ ID NO: 73164 - DNA, 33 bp, Homo sapien
cagaaagccctgtatatgtatcaaacaactgaa

SEQ ID NO: 73165 - DNA, 33 bp, Homo sapien
tagtttggaatcaagacgcttttaagagggaaa

SEQ ID NO: 73166 - DNA, 33 bp, Homo sapien
tagtttggaatcaagaggcttttaagagggaaa

SEQ ID NO: 73167 - DNA, 33 bp, Homo sapien
gtcattcttttaagcaatagtaccacaaaaatg

SEQ ID NO: 73168 - DNA, 33 bp, Homo sapien
gtcattcttttaagcagtagtaccacaaaaatg

SEQ ID NO: 73169 - DNA, 33 bp, Homo sapien
atctgtgaaagcaacaatgtcaatctcttatca

SEQ ID NO: 73170 - DNA, 33 bp, Homo sapien
atctgtgaaagcaacagtgtcaatctcttatca

SEQ ID NO: 73171 - DNA, 33 bp, Homo sapien
atttagaataatttccagcacacaaaaagacat

SEQ ID NO: 73172 - DNA, 33 bp, Homo sapien
atttagaataatttccggcacacaaaaagacat

SEQ ID NO: 73173 - DNA, 33 bp, Homo sapien
gaaaaaaaaaagtcacaataccttgcagaccaa

SEQ ID NO: 73174 - DNA, 33 bp, Homo sapien
gaaaaaaaaaagtcacgataccttgcagaccaa

SEQ ID NO: 73175 - DNA, 33 bp, Homo sapien
tactgcttatacaggccatctcactgaaattaa

SEQ ID NO: 73176 - DNA, 33 bp, Homo sapien
tactgcttatacaggcgatctcactgaaattaa

SEQ ID NO: 73177 - DNA, 33 bp, Homo sapien
attctgagtgagttcacgtacaaagataaaaac

SEQ ID NO: 73178 - DNA, 33 bp, Homo sapien
attctgagtgagttcatgtacaaagataaaaac

SEQ ID NO: 73179 - DNA, 33 bp, Homo sapien
tttttttcctaagcgacagtgtcatgtagtcat

SEQ ID NO: 73180 - DNA, 33 bp, Homo sapien
tttttttcctaagcgatagtgtcatgtagtcat

SEQ ID NO: 73181 - DNA, 33 bp, Homo sapien
tactctctcaaaactactaactgataattaata

SEQ ID NO: 73182 - DNA, 33 bp, Homo sapien
tactctctcaaaactattaactgataattaata

SEQ ID NO: 73183 - DNA, 33 bp, Homo sapien
gactgcacaaaagtcaaggatcatgaaggtggg

SEQ ID NO: 73184 - DNA, 33 bp, Homo sapien
gactgcacaaaagtcagggatcatgaaggtggg

SEQ ID NO: 73185 - DNA, 33 bp, Homo sapien
atgtacttttagtatacatcatcagacaagtca

SEQ ID NO: 73186 - DNA, 33 bp, Homo sapien
atgtacttttagtatatatcatcagacaagtca

SEQ ID NO: 73187 - DNA, 33 bp, Homo sapien
acatccatcatagagaagttaagtaagacaata

SEQ ID NO: 73188 - DNA, 33 bp, Homo sapien
acatccatcatagagaggttaagtaagacaata

SEQ ID NO: 73189 - DNA, 33 bp, Homo sapien
gaaactatgttggcaggaatctcagacttccag

SEQ ID NO: 73190 - DNA, 33 bp, Homo sapien
gaaactatgttggcagtaatctcagacttccag

SEQ ID NO: 73191 - DNA, 33 bp, Homo sapien
attgaaaccatgaaagcagattgtcttagtcta

SEQ ID NO: 73192 - DNA, 33 bp, Homo sapien
attgaaaccatgaaagtagattgtcttagtcta

SEQ ID NO: 73193 - DNA, 33 bp, Homo sapien
attatacctgtttgaaactgaagcttcatttat

SEQ ID NO: 73194 - DNA, 33 bp, Homo sapien
attatacctgtttgaatctgaagcttcatttat

SEQ ID NO: 73195 - DNA, 33 bp, Homo sapien
tagagatagataaatacgccagctaattctgga

SEQ ID NO: 73196 - DNA, 33 bp, Homo sapien
tagagatagataaatatgccagctaattctgga

SEQ ID NO: 73197 - DNA, 33 bp, Homo sapien
actctctttactgtaacgctgtggtctttgtgc

SEQ ID NO: 73198 - DNA, 33 bp, Homo sapien
actctctttactgtaatgctgtggtctttgtgc

SEQ ID NO: 73199 - DNA, 33 bp, Homo sapien
tgtttttcattcgttaccctgaactttcttgaa

SEQ ID NO: 73200 - DNA, 33 bp, Homo sapien
tgtttttcattcgttatcctgaactttcttgaa

SEQ ID NO: 73201 - DNA, 33 bp, Homo sapien
gtcatcactgaacacaccatcatattaaggata

SEQ ID NO: 73202 - DNA, 33 bp, Homo sapien
gtcatcactgaacacagcatcatattaaggata

SEQ ID NO: 73203 - DNA, 33 bp, Homo sapien
gccttaaataactagagaaacagtgcagctgcc

SEQ ID NO: 73204 - DNA, 33 bp, Homo sapien
gccttaaataactagataaacagtgcagctgcc

SEQ ID NO: 73205 - DNA, 33 bp, Homo sapien
tttcaccaaatacaacaaagtgcttctgctgtt

SEQ ID NO: 73206 - DNA, 33 bp, Homo sapien
tttcaccaaatacaacgaagtgcttctgctgtt

SEQ ID NO: 73207 - DNA, 33 bp, Homo sapien
cagtcacttaccagtacattgagttgagtttat

SEQ ID NO: 73208 - DNA, 33 bp, Homo sapien
cagtcacttaccagtatattgagttgagtttat

SEQ ID NO: 73209 - DNA, 33 bp, Homo sapien
tattcttgtttgacggcaacgtatatcacaagt

SEQ ID NO: 73210 - DNA, 33 bp, Homo sapien
tattcttgtttgacggtaacgtatatcacaagt

SEQ ID NO: 73211 - DNA, 33 bp, Homo sapien
gacagatagagaaatacgtactttaggtggcct

SEQ ID NO: 73212 - DNA, 33 bp, Homo sapien
gacagatagagaaataggtactttaggtggcct

SEQ ID NO: 73213 - DNA, 33 bp, Homo sapien
gtcagcaccaggaaaccattgaaatttatggat

SEQ ID NO: 73214 - DNA, 33 bp, Homo sapien
gtcagcaccaggaaactattgaaatttatggat

SEQ ID NO: 73215 - DNA, 33 bp, Homo sapien
atgtaatctgactacactgaagtatttctctgg

SEQ ID NO: 73216 - DNA, 33 bp, Homo sapien
atgtaatctgactacattgaagtatttctctgg

SEQ ID NO: 73217 - DNA, 33 bp, Homo sapien
agtcccacagcgttaaactacatcacccaacat

SEQ ID NO: 73218 - DNA, 33 bp, Homo sapien
agtcccacagcgttaagctacatcacccaacat

SEQ ID NO: 73219 - DNA, 33 bp, Homo sapien
cgagaaagatttttaggatctgagaccattttt

SEQ ID NO: 73220 - DNA, 33 bp, Homo sapien
cgagaaagatttttagtatctgagaccattttt

SEQ ID NO: 73221 - DNA, 33 bp, Homo sapien
gaatgagaaatggcaaattcatctttagttctc

SEQ ID NO: 73222 - DNA, 33 bp, Homo sapien
gaatgagaaatggcaagttcatctttagttctc

SEQ ID NO: 73223 - DNA, 33 bp, Homo sapien
gtcattatgtgacacacgactgtggtgaaagga

SEQ ID NO: 73224 - DNA, 33 bp, Homo sapien
gtcattatgtgacacatgactgtggtgaaagga

SEQ ID NO: 73225 - DNA, 33 bp, Homo sapien
cagggtatgttggaccaaactcagggacctccg

SEQ ID NO: 73226 - DNA, 33 bp, Homo sapien
cagggtatgttggaccgaactcagggacctccg

SEQ ID NO: 73227 - DNA, 33 bp, Homo sapien
taacaatattgcctctaaattgatttgttcaag

SEQ ID NO: 73228 - DNA, 33 bp, Homo sapien
taacaatattgcctcttaattgatttgttcaag

SEQ ID NO: 73229 - DNA, 33 bp, Homo sapien
ctataagggtgtccctcagaggttcccaaatgt

SEQ ID NO: 73230 - DNA, 33 bp, Homo sapien
ctataagggtgtccctgagaggttcccaaatgt

SEQ ID NO: 73231 - DNA, 33 bp, Homo sapien
agcaggaatagaacaaaccttataagcctgagt

SEQ ID NO: 73232 - DNA, 33 bp, Homo sapien
agcaggaatagaacaatccttataagcctgagt

SEQ ID NO: 73233 - DNA, 33 bp, Homo sapien
atagttaaataaagtaagaggtggtcacatagt

SEQ ID NO: 73234 - DNA, 33 bp, Homo sapien
atagttaaataaagtaggaggtggtcacatagt

SEQ ID NO: 73235 - DNA, 33 bp, Homo sapien
tagtcctttcctaaagcctccatcccattcatt

SEQ ID NO: 73236 - DNA, 33 bp, Homo sapien
tagtcctttcctaaaggctccatcccattcatt

SEQ ID NO: 73237 - DNA, 33 bp, Homo sapien
tgagtttgaaatcgggaatacaatgataagtaa

SEQ ID NO: 73238 - DNA, 33 bp, Homo sapien
tgagtttgaaatcggggatacaatgataagtaa

SEQ ID NO: 73239 - DNA, 33 bp, Homo sapien
aacaaatggattcagactaggatattgaagaaa

SEQ ID NO: 73240 - DNA, 33 bp, Homo sapien
aacaaatggattcagattaggatattgaagaaa

SEQ ID NO: 73241 - DNA, 33 bp, Homo sapien
gtaataatctctgttaagcatatatcccatatt

SEQ ID NO: 73242 - DNA, 33 bp, Homo sapien
gtaataatctctgttaggcatatatcccatatt

SEQ ID NO: 73243 - DNA, 33 bp, Homo sapien
tatcatttctgatgaccgtacagggatatgtac

SEQ ID NO: 73244 - DNA, 33 bp, Homo sapien
tatcatttctgatgactgtacagggatatgtac

SEQ ID NO: 73245 - DNA, 33 bp, Homo sapien
attgcctataaaatcacgaaaaattcttggtgg

SEQ ID NO: 73246 - DNA, 33 bp, Homo sapien
attgcctataaaatcaggaaaaattcttggtgg

SEQ ID NO: 73247 - DNA, 33 bp, Homo sapien
gttggtcaatcgattacgtatcaacactatacc

SEQ ID NO: 73248 - DNA, 33 bp, Homo sapien
gttggtcaatcgattatgtatcaacactatacc

SEQ ID NO: 73249 - DNA, 33 bp, Homo sapien
acttacacaggcttgaagatacctatccatgaa

SEQ ID NO: 73250 - DNA, 33 bp, Homo sapien
acttacacaggcttgatgatacctatccatgaa

SEQ ID NO: 73251 - DNA, 33 bp, Homo sapien
ggagagggtgagtgacaaccttaggtgccagca

SEQ ID NO: 73252 - DNA, 33 bp, Homo sapien
ggagagggtgagtgaccaccttaggtgccagca

SEQ ID NO: 73253 - DNA, 33 bp, Homo sapien
gctcgtatgcaacagcaatgagatttgtaccat

SEQ ID NO: 73254 - DNA, 33 bp, Homo sapien
gctcgtatgcaacagcgatgagatttgtaccat

SEQ ID NO: 73255 - DNA, 33 bp, Homo sapien
tatttatgaaaatcctcagccttgagtatcatt

SEQ ID NO: 73256 - DNA, 33 bp, Homo sapien
tatttatgaaaatccttagccttgagtatcatt

SEQ ID NO: 73257 - DNA, 33 bp, Homo sapien
ccagtgacagtagcaccagcccgtccagagcag

SEQ ID NO: 73258 - DNA, 33 bp, Homo sapien
ccagtgacagtagcactagcccgtccagagcag

SEQ ID NO: 73259 - DNA, 33 bp, Homo sapien
tcagcagcatttaagaatagaaaaacagaataa

SEQ ID NO: 73260 - DNA, 33 bp, Homo sapien
tcagcagcatttaagattagaaaaacagaataa

SEQ ID NO: 73261 - DNA, 33 bp, Homo sapien
ccataaaaagctgttaaaggtctttgtgtaaaa

SEQ ID NO: 73262 - DNA, 33 bp, Homo sapien
ccataaaaagctgttataggtctttgtgtaaaa

SEQ ID NO: 73263 - DNA, 33 bp, Homo sapien
tttacttagtgaaccactgcatttttgacagtt

SEQ ID NO: 73264 - DNA, 33 bp, Homo sapien
tttacttagtgaaccattgcatttttgacagtt

SEQ ID NO: 73265 - DNA, 33 bp, Homo sapien
tttatcacctaacagaaaaaaagggcattttat

SEQ ID NO: 73266 - DNA, 33 bp, Homo sapien
tttatcacctaacagacaaaaagggcattttat

SEQ ID NO: 73267 - DNA, 33 bp, Homo sapien
cttggtcttctccataaatctattcgttctcaa

SEQ ID NO: 73268 - DNA, 33 bp, Homo sapien
cttggtcttctccatagatctattcgttctcaa

SEQ ID NO: 73269 - DNA, 33 bp, Homo sapien
tactgttacaagccacagaaatgttggagtcgt

SEQ ID NO: 73270 - DNA, 33 bp, Homo sapien
tactgttacaagccactgaaatgttggagtcgt

SEQ ID NO: 73271 - DNA, 33 bp, Homo sapien
tggtttgtataacatacgaatgatagcttgctt

SEQ ID NO: 73272 - DNA, 33 bp, Homo sapien
tggtttgtataacatatgaatgatagcttgctt

SEQ ID NO: 73273 - DNA, 33 bp, Homo sapien
aaatagaattggcgaaatggaggtaaatgagga

SEQ ID NO: 73274 - DNA, 33 bp, Homo sapien
aaatagaattggcgaagtggaggtaaatgagga

SEQ ID NO: 73275 - DNA, 33 bp, Homo sapien
tctcacattggcccacgggctgcaggattttct

SEQ ID NO: 73276 - DNA, 33 bp, Homo sapien
tctcacattggcccactggctgcaggattttct

SEQ ID NO: 73277 - DNA, 33 bp, Homo sapien
caaaattcagctgtagaccctgaagtccagctg

SEQ ID NO: 73278 - DNA, 33 bp, Homo sapien
caaaattcagctgtagtccctgaagtccagctg

SEQ ID NO: 73279 - DNA, 33 bp, Homo sapien
ctcatggctcctgaacgcttgtccagtgtccag

SEQ ID NO: 73280 - DNA, 33 bp, Homo sapien
ctcatggctcctgaactcttgtccagtgtccag

SEQ ID NO: 73281 - DNA, 33 bp, Homo sapien
acataatgttgccttcacttcaaggtctcctag

SEQ ID NO: 73282 - DNA, 33 bp, Homo sapien
acataatgttgccttcgcttcaaggtctcctag

SEQ ID NO: 73283 - DNA, 33 bp, Homo sapien
caattgattaccaatacggtttttcagaattaa

SEQ ID NO: 73284 - DNA, 33 bp, Homo sapien
caattgattaccaatatggtttttcagaattaa

SEQ ID NO: 73285 - DNA, 33 bp, Homo sapien
ttggagatgacttggcacatagaggaaagtaat

SEQ ID NO: 73286 - DNA, 33 bp, Homo sapien
ttggagatgacttggcgcatagaggaaagtaat

SEQ ID NO: 73287 - DNA, 33 bp, Homo sapien
ttctctgcgctacaaacgaaggcacaggaatat

SEQ ID NO: 73288 - DNA, 33 bp, Homo sapien
ttctctgcgctacaaatgaaggcacaggaatat

SEQ ID NO: 73289 - DNA, 33 bp, Homo sapien
aagttcagtgattacaagattagggacctggtg

SEQ ID NO: 73290 - DNA, 33 bp, Homo sapien
aagttcagtgattacaggattagggacctggtg

SEQ ID NO: 73291 - DNA, 33 bp, Homo sapien
acttacaaagaaatggaataaaagaagtacaaa

SEQ ID NO: 73292 - DNA, 33 bp, Homo sapien
acttacaaagaaatgggataaaagaagtacaaa

SEQ ID NO: 73293 - DNA, 33 bp, Homo sapien
tcagtcacataacatcaacacatcatattattc

SEQ ID NO: 73294 - DNA, 33 bp, Homo sapien
tcagtcacataacatcgacacatcatattattc

SEQ ID NO: 73295 - DNA, 33 bp, Homo sapien
tgtttacatacatatcaatgacggtttacagtt

SEQ ID NO: 73296 - DNA, 33 bp, Homo sapien
tgtttacatacatatctatgacggtttacagtt

SEQ ID NO: 73297 - DNA, 33 bp, Homo sapien
atgttttcatcagtccgcaatttccgtaatcaa

SEQ ID NO: 73298 - DNA, 33 bp, Homo sapien
atgttttcatcagtcctcaatttccgtaatcaa

SEQ ID NO: 73299 - DNA, 33 bp, Homo sapien
ggttacatcttaggaaacatttatggggaggag

SEQ ID NO: 73300 - DNA, 33 bp, Homo sapien
ggttacatcttaggaagcatttatggggaggag

SEQ ID NO: 73301 - DNA, 33 bp, Homo sapien
agctctcaccgagttggaaaaccaatggagttt

SEQ ID NO: 73302 - DNA, 33 bp, Homo sapien
agctctcaccgagttgtaaaaccaatggagttt

SEQ ID NO: 73303 - DNA, 33 bp, Homo sapien
caaattgttgataacgacattattcaagatggc

SEQ ID NO: 73304 - DNA, 33 bp, Homo sapien
caaattgttgataacggcattattcaagatggc

SEQ ID NO: 73305 - DNA, 33 bp, Homo sapien
tttactaagattttcccaatcagtcatggcagt

SEQ ID NO: 73306 - DNA, 33 bp, Homo sapien
tttactaagattttcctaatcagtcatggcagt

SEQ ID NO: 73307 - DNA, 33 bp, Homo sapien
tctatatatgatggcaaaatttggtctaataga

SEQ ID NO: 73308 - DNA, 33 bp, Homo sapien
tctatatatgatggcacaatttggtctaataga

SEQ ID NO: 73309 - DNA, 33 bp, Homo sapien
acatttgttttcagtacgcaaagaagcttggca

SEQ ID NO: 73310 - DNA, 33 bp, Homo sapien
acatttgttttcagtatgcaaagaagcttggca

SEQ ID NO: 73311 - DNA, 33 bp, Homo sapien
tagtggcaaattgatacacttttttgaggatgg

SEQ ID NO: 73312 - DNA, 33 bp, Homo sapien
tagtggcaaattgatatacttttttgaggatgg

SEQ ID NO: 73313 - DNA, 33 bp, Homo sapien
gttaagaccgctccaaaagtacaggctgtgtat

SEQ ID NO: 73314 - DNA, 33 bp, Homo sapien
gttaagaccgctccaagagtacaggctgtgtat

SEQ ID NO: 73315 - DNA, 33 bp, Homo sapien
taatgatctaactgcaaagaagagagagggagg

SEQ ID NO: 73316 - DNA, 33 bp, Homo sapien
taatgatctaactgcagagaagagagagggagg

SEQ ID NO: 73317 - DNA, 33 bp, Homo sapien
aggaaagggaaatgagaatttgaacagcagaca

SEQ ID NO: 73318 - DNA, 33 bp, Homo sapien
aggaaagggaaatgagtatttgaacagcagaca

SEQ ID NO: 73319 - DNA, 33 bp, Homo sapien
aaagactataaattgaggttacttttgtattgg

SEQ ID NO: 73320 - DNA, 33 bp, Homo sapien
aaagactataaattgatgttacttttgtattgg

SEQ ID NO: 73321 - DNA, 33 bp, Homo sapien
ttttcgaagaggtaaaagttctgcgctggcctg

SEQ ID NO: 73322 - DNA, 33 bp, Homo sapien
ttttcgaagaggtaaaggttctgcgctggcctg

SEQ ID NO: 73323 - DNA, 33 bp, Homo sapien
aaatatcctgttgaccaagaaagtcttctctga

SEQ ID NO: 73324 - DNA, 33 bp, Homo sapien
aaatatcctgttgaccgagaaagtcttctctga

SEQ ID NO: 73325 - DNA, 33 bp, Homo sapien
catgtcctcttagtcacataatcagagaagact

SEQ ID NO: 73326 - DNA, 33 bp, Homo sapien
catgtcctcttagtcatataatcagagaagact

SEQ ID NO: 73327 - DNA, 33 bp, Homo sapien
acatgggaaggaaagaacactttgtaactggtg

SEQ ID NO: 73328 - DNA, 33 bp, Homo sapien
acatgggaaggaaagaccactttgtaactggtg

SEQ ID NO: 73329 - DNA, 33 bp, Homo sapien
attgattgctcttctacgctagggcttcattaa

SEQ ID NO: 73330 - DNA, 33 bp, Homo sapien
attgattgctcttctatgctagggcttcattaa

SEQ ID NO: 73331 - DNA, 33 bp, Homo sapien
gaattccagggttctccagattgttaatgaagc

SEQ ID NO: 73332 - DNA, 33 bp, Homo sapien
gaattccagggttctctagattgttaatgaagc

SEQ ID NO: 73333 - DNA, 33 bp, Homo sapien
tgactcagttaattgacactcatcctgaagttc

SEQ ID NO: 73334 - DNA, 33 bp, Homo sapien
tgactcagttaattgatactcatcctgaagttc

SEQ ID NO: 73335 - DNA, 33 bp, Homo sapien
gtcagcacaaatgtcccgaggtgagatagtact

SEQ ID NO: 73336 - DNA, 33 bp, Homo sapien
gtcagcacaaatgtcctgaggtgagatagtact

SEQ ID NO: 73337 - DNA, 33 bp, Homo sapien
cccttttcttttgttacgcaggccagtttcctc

SEQ ID NO: 73338 - DNA, 33 bp, Homo sapien
cccttttcttttgttatgcaggccagtttcctc

SEQ ID NO: 73339 - DNA, 33 bp, Homo sapien
tttcggagtgggcaaacgataggtaaactgggg

SEQ ID NO: 73340 - DNA, 33 bp, Homo sapien
tttcggagtgggcaaaggataggtaaactgggg

SEQ ID NO: 73341 - DNA, 33 bp, Homo sapien
ctgccaattccaggacccgaaacatttcatatt

SEQ ID NO: 73342 - DNA, 33 bp, Homo sapien
ctgccaattccaggactcgaaacatttcatatt

SEQ ID NO: 73343 - DNA, 33 bp, Homo sapien
ctggtggccaattacaaatagtgtgtgtagaga

SEQ ID NO: 73344 - DNA, 33 bp, Homo sapien
ctggtggccaattacagatagtgtgtgtagaga

SEQ ID NO: 73345 - DNA, 33 bp, Homo sapien
aaagatgccagttctaccaatcaacgtgtagta

SEQ ID NO: 73346 - DNA, 33 bp, Homo sapien
aaagatgccagttctatcaatcaacgtgtagta

SEQ ID NO: 73347 - DNA, 33 bp, Homo sapien
tgctgagcaatagggccataaaatgcttaatca

SEQ ID NO: 73348 - DNA, 33 bp, Homo sapien
tgctgagcaatagggctataaaatgcttaatca

SEQ ID NO: 73349 - DNA, 33 bp, Homo sapien
aattacacaacctttccccatcccagagccatc

SEQ ID NO: 73350 - DNA, 33 bp, Homo sapien
aattacacaacctttctccatcccagagccatc

SEQ ID NO: 73351 - DNA, 33 bp, Homo sapien
ttaacaggaacattaaaggagttcttaaggcta

SEQ ID NO: 73352 - DNA, 33 bp, Homo sapien
ttaacaggaacattaacggagttcttaaggcta

SEQ ID NO: 73353 - DNA, 33 bp, Homo sapien
acatgtcacgtaggaaccaaaagggcaagtggt

SEQ ID NO: 73354 - DNA, 33 bp, Homo sapien
acatgtcacgtaggaatcaaaagggcaagtggt

SEQ ID NO: 73355 - DNA, 33 bp, Homo sapien
tttggattttatacaccatgaaggtatcatctt

SEQ ID NO: 73356 - DNA, 33 bp, Homo sapien
tttggattttatacactatgaaggtatcatctt

SEQ ID NO: 73357 - DNA, 33 bp, Homo sapien
atgacaggtgatggaacgtacagacaaggactt

SEQ ID NO: 73358 - DNA, 33 bp, Homo sapien
atgacaggtgatggaatgtacagacaaggactt

SEQ ID NO: 73359 - DNA, 33 bp, Homo sapien
aattcaaattctaccactcgccatccatttact

SEQ ID NO: 73360 - DNA, 33 bp, Homo sapien
aattcaaattctaccattcgccatccatttact

SEQ ID NO: 73361 - DNA, 33 bp, Homo sapien
atttgatagttggcaactcgcatataatctttt

SEQ ID NO: 73362 - DNA, 33 bp, Homo sapien
atttgatagttggcaattcgcatataatctttt

SEQ ID NO: 73363 - DNA, 33 bp, Homo sapien
tatttactgatcactacgctatacaaacacatg

SEQ ID NO: 73364 - DNA, 33 bp, Homo sapien
tatttactgatcactatgctatacaaacacatg

SEQ ID NO: 73365 - DNA, 33 bp, Homo sapien
ttgaaagcttcttgaaacttgactatgttcccc

SEQ ID NO: 73366 - DNA, 33 bp, Homo sapien
ttgaaagcttcttgaaccttgactatgttcccc

SEQ ID NO: 73367 - DNA, 33 bp, Homo sapien
taaacattatcaatgcagatattagtagctaaa

SEQ ID NO: 73368 - DNA, 33 bp, Homo sapien
taaacattatcaatgcggatattagtagctaaa

SEQ ID NO: 73369 - DNA, 33 bp, Homo sapien
acaaatgggtatttggcatcgtgcatcatggaa

SEQ ID NO: 73370 - DNA, 33 bp, Homo sapien
acaaatgggtatttggtatcgtgcatcatggaa

SEQ ID NO: 73371 - DNA, 33 bp, Homo sapien
gtggcctgagaaacacaagtaacatagtttcag

SEQ ID NO: 73372 - DNA, 33 bp, Homo sapien
gtggcctgagaaacacgagtaacatagtttcag

SEQ ID NO: 73373 - DNA, 33 bp, Homo sapien
agcagattttgaagaagaaaactctagagcaga

SEQ ID NO: 73374 - DNA, 33 bp, Homo sapien
agcagattttgaagaataaaactctagagcaga

SEQ ID NO: 73375 - DNA, 33 bp, Homo sapien
tagtaatggaaagtaaatgattataacatctca

SEQ ID NO: 73376 - DNA, 33 bp, Homo sapien
tagtaatggaaagtaattgattataacatctca

SEQ ID NO: 73377 - DNA, 33 bp, Homo sapien
ggaaggaaataagaggccacaaaaaatgaaaaa

SEQ ID NO: 73378 - DNA, 33 bp, Homo sapien
ggaaggaaataagaggtcacaaaaaatgaaaaa

SEQ ID NO: 73379 - DNA, 33 bp, Homo sapien
aaaaaatgaaaaattgaagatgaaatatacata

SEQ ID NO: 73380 - DNA, 33 bp, Homo sapien
aaaaaatgaaaaattgtagatgaaatatacata

SEQ ID NO: 73381 - DNA, 33 bp, Homo sapien
aatacctaccaagaacaatttcaattttaatag

SEQ ID NO: 73382 - DNA, 33 bp, Homo sapien
aatacctaccaagaactatttcaattttaatag

SEQ ID NO: 73383 - DNA, 33 bp, Homo sapien
tttaatcttcacaaccccagaagaaacggaaat

SEQ ID NO: 73384 - DNA, 33 bp, Homo sapien
tttaatcttcacaacctcagaagaaacggaaat

SEQ ID NO: 73385 - DNA, 33 bp, Homo sapien
ttaaacctctgagataaagctgaagaaactagt

SEQ ID NO: 73386 - DNA, 33 bp, Homo sapien
ttaaacctctgagatatagctgaagaaactagt

SEQ ID NO: 73387 - DNA, 33 bp, Homo sapien
ataagattgtctacaaaaatgtttacttcatca

SEQ ID NO: 73388 - DNA, 33 bp, Homo sapien
ataagattgtctacaagaatgtttacttcatca

SEQ ID NO: 73389 - DNA, 33 bp, Homo sapien
caatcccacattgttgaacttttatgttgtttg

SEQ ID NO: 73390 - DNA, 33 bp, Homo sapien
caatcccacattgttggacttttatgttgtttg

SEQ ID NO: 73391 - DNA, 33 bp, Homo sapien
gcaatcctcccattcaaagccattgttaacatc

SEQ ID NO: 73392 - DNA, 33 bp, Homo sapien
gcaatcctcccattcatagccattgttaacatc

SEQ ID NO: 73393 - DNA, 33 bp, Homo sapien
tatggagatgcagaaaagttgaagttcctagta

SEQ ID NO: 73394 - DNA, 33 bp, Homo sapien
tatggagatgcagaaaggttgaagttcctagta

SEQ ID NO: 73395 - DNA, 33 bp, Homo sapien
tgggaaggaatagccaagttaccataacagaga

SEQ ID NO: 73396 - DNA, 33 bp, Homo sapien
tgggaaggaatagccaggttaccataacagaga

SEQ ID NO: 73397 - DNA, 33 bp, Homo sapien
acaacggtggttctcaacttggaataattttta

SEQ ID NO: 73398 - DNA, 33 bp, Homo sapien
acaacggtggttctcatcttggaataattttta

SEQ ID NO: 73399 - DNA, 33 bp, Homo sapien
tgtttcttctctcatcaactggaaatgtgacag

SEQ ID NO: 73400 - DNA, 33 bp, Homo sapien
tgtttcttctctcatcgactggaaatgtgacag

SEQ ID NO: 73401 - DNA, 33 bp, Homo sapien
acctgagctgtaggtaacaagactgtggcaatc

SEQ ID NO: 73402 - DNA, 33 bp, Homo sapien
acctgagctgtaggtagcaagactgtggcaatc

SEQ ID NO: 73403 - DNA, 33 bp, Homo sapien
ctactgtctttgctataatagagatcagaagaa

SEQ ID NO: 73404 - DNA, 33 bp, Homo sapien
ctactgtctttgctattatagagatcagaagaa

SEQ ID NO: 73405 - DNA, 33 bp, Homo sapien
ttgtaaatgagctgtccgaaatctggtactctt

SEQ ID NO: 73406 - DNA, 33 bp, Homo sapien
ttgtaaatgagctgtctgaaatctggtactctt

SEQ ID NO: 73407 - DNA, 33 bp, Homo sapien
aagattttggttgatgaagggaatagtagatgg

SEQ ID NO: 73408 - DNA, 33 bp, Homo sapien
aagattttggttgatgtagggaatagtagatgg

SEQ ID NO: 73409 - DNA, 33 bp, Homo sapien
ggatttttctattcaaatactggataattccaa

SEQ ID NO: 73410 - DNA, 33 bp, Homo sapien
ggatttttctattcaagtactggataattccaa

SEQ ID NO: 73411 - DNA, 33 bp, Homo sapien
aaaagcacatttatccactaggttattatatct

SEQ ID NO: 73412 - DNA, 33 bp, Homo sapien
aaaagcacatttatccgctaggttattatatct

SEQ ID NO: 73413 - DNA, 33 bp, Homo sapien
attatcactatgcaaaccagaaaatagaactgg

SEQ ID NO: 73414 - DNA, 33 bp, Homo sapien
attatcactatgcaaatcagaaaatagaactgg

SEQ ID NO: 73415 - DNA, 33 bp, Homo sapien
tggcagcactattaacaaattcaataaaagact

SEQ ID NO: 73416 - DNA, 33 bp, Homo sapien
tggcagcactattaaccaattcaataaaagact

SEQ ID NO: 73417 - DNA, 33 bp, Homo sapien
actagaactctgagaccagaggaaatcaaagat

SEQ ID NO: 73418 - DNA, 33 bp, Homo sapien
actagaactctgagacgagaggaaatcaaagat

SEQ ID NO: 73419 - DNA, 33 bp, Homo sapien
ctgttagagagctttacgtgagagtaaaacact

SEQ ID NO: 73420 - DNA, 33 bp, Homo sapien
ctgttagagagctttatgtgagagtaaaacact

SEQ ID NO: 73421 - DNA, 33 bp, Homo sapien
gatgttgttattgtccccattatacagatgagg

SEQ ID NO: 73422 - DNA, 33 bp, Homo sapien
gatgttgttattgtccgcattatacagatgagg

SEQ ID NO: 73423 - DNA, 33 bp, Homo sapien
gatagccctttgtgggacattttataaagttca

SEQ ID NO: 73424 - DNA, 33 bp, Homo sapien
gatagccctttgtggggcattttataaagttca

SEQ ID NO: 73425 - DNA, 33 bp, Homo sapien
gcagacacttgaaggaggttagagagtaatctg

SEQ ID NO: 73426 - DNA, 33 bp, Homo sapien
gcagacacttgaaggatgttagagagtaatctg

SEQ ID NO: 73427 - DNA, 33 bp, Homo sapien
taaataaggaaactgaagtgtagtaacatcacg

SEQ ID NO: 73428 - DNA, 33 bp, Homo sapien
taaataaggaaactgaggtgtagtaacatcacg

SEQ ID NO: 73429 - DNA, 33 bp, Homo sapien
cttttggctactcatcccaaattttgaaaataa

SEQ ID NO: 73430 - DNA, 33 bp, Homo sapien
cttttggctactcatctcaaattttgaaaataa

SEQ ID NO: 73431 - DNA, 33 bp, Homo sapien
ttaaagtagctatgtacgtaggaatggagttag

SEQ ID NO: 73432 - DNA, 33 bp, Homo sapien
ttaaagtagctatgtatgtaggaatggagttag

SEQ ID NO: 73433 - DNA, 33 bp, Homo sapien
ccacatacctgctaacactttttccaccacgat

SEQ ID NO: 73434 - DNA, 33 bp, Homo sapien
ccacatacctgctaacgctttttccaccacgat

SEQ ID NO: 73435 - DNA, 33 bp, Homo sapien
aggactttagcgagaactcccattccaaagggg

SEQ ID NO: 73436 - DNA, 33 bp, Homo sapien
aggactttagcgagaattcccattccaaagggg

SEQ ID NO: 73437 - DNA, 33 bp, Homo sapien
ggtatgcatagtattacgtcagaacgaccttcc

SEQ ID NO: 73438 - DNA, 33 bp, Homo sapien
ggtatgcatagtattatgtcagaacgaccttcc

SEQ ID NO: 73439 - DNA, 33 bp, Homo sapien
actttcacaggtaactcaggagagagctcttcc

SEQ ID NO: 73440 - DNA, 33 bp, Homo sapien
actttcacaggtaacttaggagagagctcttcc

SEQ ID NO: 73441 - DNA, 33 bp, Homo sapien
agcactgcagcccttaacatcttgataaagcaa

SEQ ID NO: 73442 - DNA, 33 bp, Homo sapien
agcactgcagcccttagcatcttgataaagcaa

SEQ ID NO: 73443 - DNA, 33 bp, Homo sapien
gtagctgtctctctcacacctaaaattagaaaa

SEQ ID NO: 73444 - DNA, 33 bp, Homo sapien
gtagctgtctctctcatacctaaaattagaaaa

SEQ ID NO: 73445 - DNA, 33 bp, Homo sapien
acaagtgggttaagaaatctttggccatgaagt

SEQ ID NO: 73446 - DNA, 33 bp, Homo sapien
acaagtgggttaagaactctttggccatgaagt

SEQ ID NO: 73447 - DNA, 33 bp, Homo sapien
tctttgctgctctttgaactctttccaagtaag

SEQ ID NO: 73448 - DNA, 33 bp, Homo sapien
tctttgctgctctttggactctttccaagtaag

SEQ ID NO: 73449 - DNA, 33 bp, Homo sapien
gaacgtatacacaatgaatgttggcataaagct

SEQ ID NO: 73450 - DNA, 33 bp, Homo sapien
gaacgtatacacaatggatgttggcataaagct

SEQ ID NO: 73451 - DNA, 33 bp, Homo sapien
agggctgggtacactacgctctgggcttggcat

SEQ ID NO: 73452 - DNA, 33 bp, Homo sapien
agggctgggtacactatgctctgggcttggcat

SEQ ID NO: 73453 - DNA, 33 bp, Homo sapien
taaagaaagcagataaacatgacttgagggctg

SEQ ID NO: 73454 - DNA, 33 bp, Homo sapien
taaagaaagcagataagcatgacttgagggctg

SEQ ID NO: 73455 - DNA, 33 bp, Homo sapien
aattctcaaaggaaaacgccttagatggttgtt

SEQ ID NO: 73456 - DNA, 33 bp, Homo sapien
aattctcaaaggaaaatgccttagatggttgtt

SEQ ID NO: 73457 - DNA, 33 bp, Homo sapien
ttttccaggtcacagaaaaggaagtcagggtat

SEQ ID NO: 73458 - DNA, 33 bp, Homo sapien
ttttccaggtcacagacaaggaagtcagggtat

SEQ ID NO: 73459 - DNA, 33 bp, Homo sapien
taatgagcaaatatcacgggccaggttttaatg

SEQ ID NO: 73460 - DNA, 33 bp, Homo sapien
taatgagcaaatatcatgggccaggttttaatg

SEQ ID NO: 73461 - DNA, 33 bp, Homo sapien
tcctcctcatctattaagggagtttcttgccat

SEQ ID NO: 73462 - DNA, 33 bp, Homo sapien
tcctcctcatctattaggggagtttcttgccat

SEQ ID NO: 73463 - DNA, 33 bp, Homo sapien
agttgatatgaagtacaaaagatgatatacatg

SEQ ID NO: 73464 - DNA, 33 bp, Homo sapien
agttgatatgaagtacgaaagatgatatacatg

SEQ ID NO: 73465 - DNA, 33 bp, Homo sapien
aagatgtgtggaaaacaagttccgtgtgggaaa

SEQ ID NO: 73466 - DNA, 33 bp, Homo sapien
aagatgtgtggaaaacgagttccgtgtgggaaa

SEQ ID NO: 73467 - DNA, 33 bp, Homo sapien
aaaagatgtttcctatcaagtgtcctctttgta

SEQ ID NO: 73468 - DNA, 33 bp, Homo sapien
aaaagatgtttcctatgaagtgtcctctttgta

SEQ ID NO: 73469 - DNA, 33 bp, Homo sapien
gatgtacaacgtgcacaaattatgtagtgaacc

SEQ ID NO: 73470 - DNA, 33 bp, Homo sapien
gatgtacaacgtgcaccaattatgtagtgaacc

SEQ ID NO: 73471 - DNA, 33 bp, Homo sapien
ctctcttttgctgcaactcatatttttctggag

SEQ ID NO: 73472 - DNA, 33 bp, Homo sapien
ctctcttttgctgcaattcatatttttctggag

SEQ ID NO: 73473 - DNA, 33 bp, Homo sapien
tacagataaaatacaaaaacaacatacaaatat

SEQ ID NO: 73474 - DNA, 33 bp, Homo sapien
tacagataaaatacaagaacaacatacaaatat

SEQ ID NO: 73475 - DNA, 33 bp, Homo sapien
gtcagcaagaacaatcaagggcccgcactgtgc

SEQ ID NO: 73476 - DNA, 33 bp, Homo sapien
gtcagcaagaacaatccagggcccgcactgtgc

SEQ ID NO: 73477 - DNA, 33 bp, Homo sapien
ggtatccctttgcacaagctgatggaaacgttc

SEQ ID NO: 73478 - DNA, 33 bp, Homo sapien
ggtatccctttgcacacgctgatggaaacgttc

SEQ ID NO: 73479 - DNA, 33 bp, Homo sapien
ttcctgagaacagctacgactaattagaaataa

SEQ ID NO: 73480 - DNA, 33 bp, Homo sapien
ttcctgagaacagctaggactaattagaaataa

SEQ ID NO: 73481 - DNA, 33 bp, Homo sapien
gtcctactctggctaccagttgacataaatgag

SEQ ID NO: 73482 - DNA, 33 bp, Homo sapien
gtcctactctggctactagttgacataaatgag

SEQ ID NO: 73483 - DNA, 33 bp, Homo sapien
cacaatttaactcagccaagattaggtaattaa

SEQ ID NO: 73484 - DNA, 33 bp, Homo sapien
cacaatttaactcagctaagattaggtaattaa

SEQ ID NO: 73485 - DNA, 33 bp, Homo sapien
ttaagtgaatatttaacctacttaggagaatgt

SEQ ID NO: 73486 - DNA, 33 bp, Homo sapien
ttaagtgaatatttaagctacttaggagaatgt

SEQ ID NO: 73487 - DNA, 33 bp, Homo sapien
ctctcaccgtaatggacgcttcatgagagcagg

SEQ ID NO: 73488 - DNA, 33 bp, Homo sapien
ctctcaccgtaatggatgcttcatgagagcagg

SEQ ID NO: 73489 - DNA, 33 bp, Homo sapien
tcctgaggaaggagctaagacaaaacaaatatg

SEQ ID NO: 73490 - DNA, 33 bp, Homo sapien
tcctgaggaaggagctcagacaaaacaaatatg

SEQ ID NO: 73491 - DNA, 33 bp, Homo sapien
tcatttttctcttcttaaaagcagtatattggc

SEQ ID NO: 73492 - DNA, 33 bp, Homo sapien
tcatttttctcttcttgaaagcagtatattggc

SEQ ID NO: 73493 - DNA, 33 bp, Homo sapien
ctagtacttatataccaattgttcaaatcacta

SEQ ID NO: 73494 - DNA, 33 bp, Homo sapien
ctagtacttatataccgattgttcaaatcacta

SEQ ID NO: 73495 - DNA, 33 bp, Homo sapien
ggagaatgattcattaccaaatttcaacacgtg

SEQ ID NO: 73496 - DNA, 33 bp, Homo sapien
ggagaatgattcattatcaaatttcaacacgtg

SEQ ID NO: 73497 - DNA, 33 bp, Homo sapien
ttacttcctaagagcaaaagagtaaattatcag

SEQ ID NO: 73498 - DNA, 33 bp, Homo sapien
ttacttcctaagagcagaagagtaaattatcag

SEQ ID NO: 73499 - DNA, 33 bp, Homo sapien
tcgcaggaaagatttgaaattgtttctagttga

SEQ ID NO: 73500 - DNA, 33 bp, Homo sapien
tcgcaggaaagatttgtaattgtttctagttga

SEQ ID NO: 73501 - DNA, 33 bp, Homo sapien
gtttaaatgcccttaaagcgaaacgagatactg

SEQ ID NO: 73502 - DNA, 33 bp, Homo sapien
gtttaaatgcccttaatgcgaaacgagatactg

SEQ ID NO: 73503 - DNA, 33 bp, Homo sapien
taggagaaagatgaaaactcaccaagggccaga

SEQ ID NO: 73504 - DNA, 33 bp, Homo sapien
taggagaaagatgaaacctcaccaagggccaga

SEQ ID NO: 73505 - DNA, 33 bp, Homo sapien
acaacaagttaatttaccaggaaggagttcagc

SEQ ID NO: 73506 - DNA, 33 bp, Homo sapien
acaacaagttaatttagcaggaaggagttcagc

SEQ ID NO: 73507 - DNA, 33 bp, Homo sapien
tctaacaaagtgattaacatggtcaaatatttt

SEQ ID NO: 73508 - DNA, 33 bp, Homo sapien
tctaacaaagtgattatcatggtcaaatatttt

SEQ ID NO: 73509 - DNA, 33 bp, Homo sapien
tttgttggaagagtacagcagagagagaacatt

SEQ ID NO: 73510 - DNA, 33 bp, Homo sapien
tttgttggaagagtacggcagagagagaacatt

SEQ ID NO: 73511 - DNA, 33 bp, Homo sapien
ggctgattgagaagtacaggttgttttgtagtc

SEQ ID NO: 73512 - DNA, 33 bp, Homo sapien
ggctgattgagaagtataggttgttttgtagtc

SEQ ID NO: 73513 - DNA, 33 bp, Homo sapien
taacattttaggctgcactcttgatgttttaat

SEQ ID NO: 73514 - DNA, 33 bp, Homo sapien
taacattttaggctgcgctcttgatgttttaat

SEQ ID NO: 73515 - DNA, 33 bp, Homo sapien
ggagctgagtgactaccccccttcgtccttaca

SEQ ID NO: 73516 - DNA, 33 bp, Homo sapien
ggagctgagtgactacgccccttcgtccttaca

SEQ ID NO: 73517 - DNA, 33 bp, Homo sapien
taagagagacaatcacaaactaaattatgcttt

SEQ ID NO: 73518 - DNA, 33 bp, Homo sapien
taagagagacaatcacgaactaaattatgcttt

SEQ ID NO: 73519 - DNA, 33 bp, Homo sapien
caggaagagaaggagacaatttctagaggcatg

SEQ ID NO: 73520 - DNA, 33 bp, Homo sapien
caggaagagaaggagagaatttctagaggcatg

SEQ ID NO: 73521 - DNA, 33 bp, Homo sapien
gctactaatgaactaagtatccctaaaattctt

SEQ ID NO: 73522 - DNA, 33 bp, Homo sapien
gctactaatgaactaattatccctaaaattctt

SEQ ID NO: 73523 - DNA, 33 bp, Homo sapien
accctcaagcagtgaaagtcagtttctacccag

SEQ ID NO: 73524 - DNA, 33 bp, Homo sapien
accctcaagcagtgaatgtcagtttctacccag

SEQ ID NO: 73525 - DNA, 33 bp, Homo sapien
atgtgataccaaacaaacagtccaatccagcaa

SEQ ID NO: 73526 - DNA, 33 bp, Homo sapien
atgtgataccaaacaaccagtccaatccagcaa

SEQ ID NO: 73527 - DNA, 33 bp, Homo sapien
caaggaatcagaagaaaaagataacagccaatt

SEQ ID NO: 73528 - DNA, 33 bp, Homo sapien
caaggaatcagaagaagaagataacagccaatt

SEQ ID NO: 73529 - DNA, 33 bp, Homo sapien
cattccataaaataggataagtgtctcgatgag

SEQ ID NO: 73530 - DNA, 33 bp, Homo sapien
cattccataaaataggttaagtgtctcgatgag

SEQ ID NO: 73531 - DNA, 33 bp, Homo sapien
tttctacaatcttctccaatcacttcccagcca

SEQ ID NO: 73532 - DNA, 33 bp, Homo sapien
tttctacaatcttctctaatcacttcccagcca

SEQ ID NO: 73533 - DNA, 33 bp, Homo sapien
ccctaaatatgcattaccacctgatattcctag

SEQ ID NO: 73534 - DNA, 33 bp, Homo sapien
ccctaaatatgcattatcacctgatattcctag

SEQ ID NO: 73535 - DNA, 33 bp, Homo sapien
tggtttaggctgaaacacctgggattgcttttc

SEQ ID NO: 73536 - DNA, 33 bp, Homo sapien
tggtttaggctgaaacgcctgggattgcttttc

SEQ ID NO: 73537 - DNA, 33 bp, Homo sapien
gctataaacagatacactgaaaccttgtgctta

SEQ ID NO: 73538 - DNA, 33 bp, Homo sapien
gctataaacagatacattgaaaccttgtgctta

SEQ ID NO: 73539 - DNA, 33 bp, Homo sapien
gtaaaataggtactctcagaattatgtgtcaac

SEQ ID NO: 73540 - DNA, 33 bp, Homo sapien
gtaaaataggtactcttagaattatgtgtcaac

SEQ ID NO: 73541 - DNA, 33 bp, Homo sapien
gtaagattcagtataccagtacatacttagcca

SEQ ID NO: 73542 - DNA, 33 bp, Homo sapien
gtaagattcagtatacgagtacatacttagcca

SEQ ID NO: 73543 - DNA, 33 bp, Homo sapien
tatgatgccaaataaagttgactgatgctttcc

SEQ ID NO: 73544 - DNA, 33 bp, Homo sapien
tatgatgccaaataaatttgactgatgctttcc

SEQ ID NO: 73545 - DNA, 33 bp, Homo sapien
tcaaaggtataaatgacggattgtagcaggtaa

SEQ ID NO: 73546 - DNA, 33 bp, Homo sapien
tcaaaggtataaatgatggattgtagcaggtaa

SEQ ID NO: 73547 - DNA, 33 bp, Homo sapien
atctcctttcaaatgacgataacaacatctgct

SEQ ID NO: 73548 - DNA, 33 bp, Homo sapien
atctcctttcaaatgaggataacaacatctgct

SEQ ID NO: 73549 - DNA, 33 bp, Homo sapien
caatgaagaggatttgaatccatacctttttga

SEQ ID NO: 73550 - DNA, 33 bp, Homo sapien
caatgaagaggatttggatccatacctttttga

SEQ ID NO: 73551 - DNA, 33 bp, Homo sapien
aaattataagtgctcaatagatgtgttggaagc

SEQ ID NO: 73552 - DNA, 33 bp, Homo sapien
aaattataagtgctcagtagatgtgttggaagc

SEQ ID NO: 73553 - DNA, 33 bp, Homo sapien
tcaggaacaggaaaccaaatattgcatcttcta

SEQ ID NO: 73554 - DNA, 33 bp, Homo sapien
tcaggaacaggaaaccgaatattgcatcttcta

SEQ ID NO: 73555 - DNA, 33 bp, Homo sapien
accaaggaagaacaacacttacactacattaac

SEQ ID NO: 73556 - DNA, 33 bp, Homo sapien
accaaggaagaacaactcttacactacattaac

SEQ ID NO: 73557 - DNA, 33 bp, Homo sapien
atacactcattaccaaatcagagttgtaacaat

SEQ ID NO: 73558 - DNA, 33 bp, Homo sapien
atacactcattaccaattcagagttgtaacaat

SEQ ID NO: 73559 - DNA, 33 bp, Homo sapien
aatgggatggacatacagagagaaacaaaacta

SEQ ID NO: 73560 - DNA, 33 bp, Homo sapien
aatgggatggacatacggagagaaacaaaacta

SEQ ID NO: 73561 - DNA, 33 bp, Homo sapien
taactctcagtagtgaacattctcatcttcatg

SEQ ID NO: 73562 - DNA, 33 bp, Homo sapien
taactctcagtagtgatcattctcatcttcatg

SEQ ID NO: 73563 - DNA, 33 bp, Homo sapien
gtctggagaagaaagcacccatcaggctgtagt

SEQ ID NO: 73564 - DNA, 33 bp, Homo sapien
gtctggagaagaaagcgcccatcaggctgtagt

SEQ ID NO: 73565 - DNA, 33 bp, Homo sapien
tcccttctttgaaaacaccactctggtcaaatc

SEQ ID NO: 73566 - DNA, 33 bp, Homo sapien
tcccttctttgaaaacgccactctggtcaaatc

SEQ ID NO: 73567 - DNA, 33 bp, Homo sapien
cacacagtaatctgaaacacttagtgtcctgcc

SEQ ID NO: 73568 - DNA, 33 bp, Homo sapien
cacacagtaatctgaagcacttagtgtcctgcc

SEQ ID NO: 73569 - DNA, 33 bp, Homo sapien
ggataaagatgcaaagaaattgttaaaactgaa

SEQ ID NO: 73570 - DNA, 33 bp, Homo sapien
ggataaagatgcaaagtaattgttaaaactgaa

SEQ ID NO: 73571 - DNA, 33 bp, Homo sapien
ttcttttatgaaagaaaggtttcacaggggaaa

SEQ ID NO: 73572 - DNA, 33 bp, Homo sapien
ttcttttatgaaagaagggtttcacaggggaaa

SEQ ID NO: 73573 - DNA, 33 bp, Homo sapien
atctacagctggcaaaactcttctccctccctt

SEQ ID NO: 73574 - DNA, 33 bp, Homo sapien
atctacagctggcaaagctcttctccctccctt

SEQ ID NO: 73575 - DNA, 33 bp, Homo sapien
acatttagccagactaagtgataaaaaatgaga

SEQ ID NO: 73576 - DNA, 33 bp, Homo sapien
acatttagccagactaggtgataaaaaatgaga

SEQ ID NO: 73577 - DNA, 33 bp, Homo sapien
aaaatattttttaataagcaaaccatgaaatac

SEQ ID NO: 73578 - DNA, 33 bp, Homo sapien
aaaatattttttaataggcaaaccatgaaatac

SEQ ID NO: 73579 - DNA, 33 bp, Homo sapien
ctgagttggtcattgcaaagaacactatatcaa

SEQ ID NO: 73580 - DNA, 33 bp, Homo sapien
ctgagttggtcattgcgaagaacactatatcaa

SEQ ID NO: 73581 - DNA, 33 bp, Homo sapien
tgattttacattgtacactatccaattcccatt

SEQ ID NO: 73582 - DNA, 33 bp, Homo sapien
tgattttacattgtacgctatccaattcccatt

SEQ ID NO: 73583 - DNA, 33 bp, Homo sapien
tgaaaaatcagctacgaaaatcttactcacatg

SEQ ID NO: 73584 - DNA, 33 bp, Homo sapien
tgaaaaatcagctacggaaatcttactcacatg

SEQ ID NO: 73585 - DNA, 33 bp, Homo sapien
ttcagcaaagaagaaacggtaatgtttgagtcc

SEQ ID NO: 73586 - DNA, 33 bp, Homo sapien
ttcagcaaagaagaaatggtaatgtttgagtcc

SEQ ID NO: 73587 - DNA, 33 bp, Homo sapien
ggttacattttaatcccagttgctatatcagct

SEQ ID NO: 73588 - DNA, 33 bp, Homo sapien
ggttacattttaatcctagttgctatatcagct

SEQ ID NO: 73589 - DNA, 33 bp, Homo sapien
gtgctattttccttacaagacattcattccatt

SEQ ID NO: 73590 - DNA, 33 bp, Homo sapien
gtgctattttccttacgagacattcattccatt

SEQ ID NO: 73591 - DNA, 33 bp, Homo sapien
acccacattagggaaggcaatctgtttgatttg

SEQ ID NO: 73592 - DNA, 33 bp, Homo sapien
acccacattagggaagtcaatctgtttgatttg

SEQ ID NO: 73593 - DNA, 33 bp, Homo sapien
tttatacatactaggaacaaactattggaaatt

SEQ ID NO: 73594 - DNA, 33 bp, Homo sapien
tttatacatactaggagcaaactattggaaatt

SEQ ID NO: 73595 - DNA, 33 bp, Homo sapien
tttacaaattgctcagactaagctaattttgtt

SEQ ID NO: 73596 - DNA, 33 bp, Homo sapien
tttacaaattgctcagtctaagctaattttgtt

SEQ ID NO: 73597 - DNA, 33 bp, Homo sapien
ttaagggactgctaaaagtggaaacaaaaagct

SEQ ID NO: 73598 - DNA, 33 bp, Homo sapien
ttaagggactgctaaacgtggaaacaaaaagct

SEQ ID NO: 73599 - DNA, 33 bp, Homo sapien
ttcttagcctacatacccaggtagaacttaggc

SEQ ID NO: 73600 - DNA, 33 bp, Homo sapien
ttcttagcctacatactcaggtagaacttaggc

SEQ ID NO: 73601 - DNA, 33 bp, Homo sapien
tgaacagcaagacttccatagtatcctgacatc

SEQ ID NO: 73602 - DNA, 33 bp, Homo sapien
tgaacagcaagacttctatagtatcctgacatc

SEQ ID NO: 73603 - DNA, 33 bp, Homo sapien
agcaaacaatatgtgaactccctatgcttattc

SEQ ID NO: 73604 - DNA, 33 bp, Homo sapien
agcaaacaatatgtgagctccctatgcttattc

SEQ ID NO: 73605 - DNA, 33 bp, Homo sapien
aaacaaatgcaaaaaacgatagtttcagtcatg

SEQ ID NO: 73606 - DNA, 33 bp, Homo sapien
aaacaaatgcaaaaaaggatagtttcagtcatg

SEQ ID NO: 73607 - DNA, 33 bp, Homo sapien
aaaaccatgataataaaacaggcccattcaact

SEQ ID NO: 73608 - DNA, 33 bp, Homo sapien
aaaaccatgataataagacaggcccattcaact

SEQ ID NO: 73609 - DNA, 33 bp, Homo sapien
ttaggaagtatgctacagaggcagcattcttta

SEQ ID NO: 73610 - DNA, 33 bp, Homo sapien
ttaggaagtatgctacggaggcagcattcttta

SEQ ID NO: 73611 - DNA, 33 bp, Homo sapien
tcttgcactggctaagacaacactgtagactct

SEQ ID NO: 73612 - DNA, 33 bp, Homo sapien
tcttgcactggctaaggcaacactgtagactct

SEQ ID NO: 73613 - DNA, 33 bp, Homo sapien
tgtctacatctccaaaattctaacaaaataagt

SEQ ID NO: 73614 - DNA, 33 bp, Homo sapien
tgtctacatctccaaagttctaacaaaataagt

SEQ ID NO: 73615 - DNA, 33 bp, Homo sapien
cgtaccagtactcacaagaatgaaactataaag

SEQ ID NO: 73616 - DNA, 33 bp, Homo sapien
cgtaccagtactcacaggaatgaaactataaag

SEQ ID NO: 73617 - DNA, 33 bp, Homo sapien
aaccattttaacacacaattcatcaaatgcaaa

SEQ ID NO: 73618 - DNA, 33 bp, Homo sapien
aaccattttaacacactattcatcaaatgcaaa

SEQ ID NO: 73619 - DNA, 33 bp, Homo sapien
atggataattcaataaatggtgcttagataatg

SEQ ID NO: 73620 - DNA, 33 bp, Homo sapien
atggataattcaataagtggtgcttagataatg

SEQ ID NO: 73621 - DNA, 33 bp, Homo sapien
ttttgcacaggctcccaacaacgtgatgccatc

SEQ ID NO: 73622 - DNA, 33 bp, Homo sapien
ttttgcacaggctcccgacaacgtgatgccatc

SEQ ID NO: 73623 - DNA, 33 bp, Homo sapien
ttctattcactcttcacgataggtgatatactc

SEQ ID NO: 73624 - DNA, 33 bp, Homo sapien
ttctattcactcttcatgataggtgatatactc

SEQ ID NO: 73625 - DNA, 33 bp, Homo sapien
atgtcccaaagctccaatatctatttactttgg

SEQ ID NO: 73626 - DNA, 33 bp, Homo sapien
atgtcccaaagctccactatctatttactttgg

SEQ ID NO: 73627 - DNA, 33 bp, Homo sapien
atgtgtacatgtagaaaaagatctataaagagc

SEQ ID NO: 73628 - DNA, 33 bp, Homo sapien
atgtgtacatgtagaagaagatctataaagagc

SEQ ID NO: 73629 - DNA, 33 bp, Homo sapien
ttcatggagttccaaacgctgtctatccattca

SEQ ID NO: 73630 - DNA, 33 bp, Homo sapien
ttcatggagttccaaatgctgtctatccattca

SEQ ID NO: 73631 - DNA, 33 bp, Homo sapien
agattagaaaaagcccaaattgtcatgtgcaaa

SEQ ID NO: 73632 - DNA, 33 bp, Homo sapien
agattagaaaaagcccgaattgtcatgtgcaaa

SEQ ID NO: 73633 - DNA, 33 bp, Homo sapien
aatgcccatcttgctaataccatctagaagtgc

SEQ ID NO: 73634 - DNA, 33 bp, Homo sapien
aatgcccatcttgctattaccatctagaagtgc

SEQ ID NO: 73635 - DNA, 33 bp, Homo sapien
gatcgtcatataatcaactctgtgtatataaaa

SEQ ID NO: 73636 - DNA, 33 bp, Homo sapien
gatcgtcatataatcatctctgtgtatataaaa

SEQ ID NO: 73637 - DNA, 33 bp, Homo sapien
aacttatttaaattgccatgcctgtcattgggt

SEQ ID NO: 73638 - DNA, 33 bp, Homo sapien
aacttatttaaattgctatgcctgtcattgggt

SEQ ID NO: 73639 - DNA, 33 bp, Homo sapien
aatgagaattgttatacagatgtgtatgctggt

SEQ ID NO: 73640 - DNA, 33 bp, Homo sapien
aatgagaattgttatatagatgtgtatgctggt

SEQ ID NO: 73641 - DNA, 33 bp, Homo sapien
gtttatcttagcctgacaataagttagcattta

SEQ ID NO: 73642 - DNA, 33 bp, Homo sapien
gtttatcttagcctgataataagttagcattta

SEQ ID NO: 73643 - DNA, 33 bp, Homo sapien
atgccacgtacttaaacgctcttcaggcttcta

SEQ ID NO: 73644 - DNA, 33 bp, Homo sapien
atgccacgtacttaaatgctcttcaggcttcta

SEQ ID NO: 73645 - DNA, 33 bp, Homo sapien
ctccaccctgattgtcacaaacaaaacataatg

SEQ ID NO: 73646 - DNA, 33 bp, Homo sapien
ctccaccctgattgtcgcaaacaaaacataatg

SEQ ID NO: 73647 - DNA, 33 bp, Homo sapien
caaagaagggatttagccattactactgctcaa

SEQ ID NO: 73648 - DNA, 33 bp, Homo sapien
caaagaagggatttagtcattactactgctcaa

SEQ ID NO: 73649 - DNA, 33 bp, Homo sapien
tactgctcaaatgtccaaaaatttgcaatatag

SEQ ID NO: 73650 - DNA, 33 bp, Homo sapien
tactgctcaaatgtccgaaaatttgcaatatag

SEQ ID NO: 73651 - DNA, 33 bp, Homo sapien
aaaatgcttcaccaaacatccaaatgctctgtt

SEQ ID NO: 73652 - DNA, 33 bp, Homo sapien
aaaatgcttcaccaaatatccaaatgctctgtt

SEQ ID NO: 73653 - DNA, 33 bp, Homo sapien
tatggcttagctgaccagaaaagttagttcaat

SEQ ID NO: 73654 - DNA, 33 bp, Homo sapien
tatggcttagctgaccggaaaagttagttcaat

SEQ ID NO: 73655 - DNA, 33 bp, Homo sapien
agtacctccggagaccagaaaattgttggttgg

SEQ ID NO: 73656 - DNA, 33 bp, Homo sapien
agtacctccggagacccgaaaattgttggttgg

SEQ ID NO: 73657 - DNA, 33 bp, Homo sapien
ctgtatcccgaataccaaattccatatctggtc

SEQ ID NO: 73658 - DNA, 33 bp, Homo sapien
ctgtatcccgaataccgaattccatatctggtc

SEQ ID NO: 73659 - DNA, 33 bp, Homo sapien
gatttttacatggtagaaagctaggtctcaaag

SEQ ID NO: 73660 - DNA, 33 bp, Homo sapien
gatttttacatggtaggaagctaggtctcaaag

SEQ ID NO: 73661 - DNA, 33 bp, Homo sapien
acaacacctacaaaacagaataaagttttgtgg

SEQ ID NO: 73662 - DNA, 33 bp, Homo sapien
acaacacctacaaaacggaataaagttttgtgg

SEQ ID NO: 73663 - DNA, 33 bp, Homo sapien
tgaaattggcagtacacattgagcatcattcaa

SEQ ID NO: 73664 - DNA, 33 bp, Homo sapien
tgaaattggcagtacatattgagcatcattcaa

SEQ ID NO: 73665 - DNA, 33 bp, Homo sapien
tatgaactggaacaaaatctggagccaaactat

SEQ ID NO: 73666 - DNA, 33 bp, Homo sapien
tatgaactggaacaaagtctggagccaaactat

SEQ ID NO: 73667 - DNA, 33 bp, Homo sapien
cctacaatctattaggcccaagttacttacaaa

SEQ ID NO: 73668 - DNA, 33 bp, Homo sapien
cctacaatctattaggtccaagttacttacaaa

SEQ ID NO: 73669 - DNA, 33 bp, Homo sapien
aggcacactttacctacgctagttagtttaatc

SEQ ID NO: 73670 - DNA, 33 bp, Homo sapien
aggcacactttacctatgctagttagtttaatc

SEQ ID NO: 73671 - DNA, 33 bp, Homo sapien
cctaaagcccctgctcccaatggcagcttgaga

SEQ ID NO: 73672 - DNA, 33 bp, Homo sapien
cctaaagcccctgctcgcaatggcagcttgaga

SEQ ID NO: 73673 - DNA, 33 bp, Homo sapien
ttttctcatttatcccacatgctaagagtagaa

SEQ ID NO: 73674 - DNA, 33 bp, Homo sapien
ttttctcatttatcccgcatgctaagagtagaa

SEQ ID NO: 73675 - DNA, 33 bp, Homo sapien
atagctacaggatgctcactctgtcaatagagt

SEQ ID NO: 73676 - DNA, 33 bp, Homo sapien
atagctacaggatgcttactctgtcaatagagt

SEQ ID NO: 73677 - DNA, 33 bp, Homo sapien
ctgatcttaaacactgaaaagggatgaatattg

SEQ ID NO: 73678 - DNA, 33 bp, Homo sapien
ctgatcttaaacactggaaagggatgaatattg

SEQ ID NO: 73679 - DNA, 33 bp, Homo sapien
gggggtgtgaaactcaaaagaaaggagatgaaa

SEQ ID NO: 73680 - DNA, 33 bp, Homo sapien
gggggtgtgaaactcagaagaaaggagatgaaa

SEQ ID NO: 73681 - DNA, 33 bp, Homo sapien
ttagctcaggtgttacggacttctttgaggagt

SEQ ID NO: 73682 - DNA, 33 bp, Homo sapien
ttagctcaggtgttactgacttctttgaggagt

SEQ ID NO: 73683 - DNA, 33 bp, Homo sapien
agcaaatcacagctgcacaatgtactacagcac

SEQ ID NO: 73684 - DNA, 33 bp, Homo sapien
agcaaatcacagctgcgcaatgtactacagcac

SEQ ID NO: 73685 - DNA, 33 bp, Homo sapien
attaatggacttcagtaaccagaccctggttcc

SEQ ID NO: 73686 - DNA, 33 bp, Homo sapien
attaatggacttcagttaccagaccctggttcc

SEQ ID NO: 73687 - DNA, 33 bp, Homo sapien
gctggtagtcctgatcgctgtccaagtctggct

SEQ ID NO: 73688 - DNA, 33 bp, Homo sapien
gctggtagtcctgatctctgtccaagtctggct

SEQ ID NO: 73689 - DNA, 33 bp, Homo sapien
gcacaattcacaaaaacacgtgatagaaataca

SEQ ID NO: 73690 - DNA, 33 bp, Homo sapien
gcacaattcacaaaaatacgtgatagaaataca

SEQ ID NO: 73691 - DNA, 33 bp, Homo sapien
acaatgtatttaaccacagaaagtattgtgctt

SEQ ID NO: 73692 - DNA, 33 bp, Homo sapien
acaatgtatttaaccatagaaagtattgtgctt

SEQ ID NO: 73693 - DNA, 33 bp, Homo sapien
ctcaataaagtatggtcaataggcatttataca

SEQ ID NO: 73694 - DNA, 33 bp, Homo sapien
ctcaataaagtatggttaataggcatttataca

SEQ ID NO: 73695 - DNA, 33 bp, Homo sapien
aggtcaactatgtctccactgatttaatgcctg

SEQ ID NO: 73696 - DNA, 33 bp, Homo sapien
aggtcaactatgtctctactgatttaatgcctg

SEQ ID NO: 73697 - DNA, 33 bp, Homo sapien
tggataatgggaataccagaataagaagaaaga

SEQ ID NO: 73698 - DNA, 33 bp, Homo sapien
tggataatgggaatacgagaataagaagaaaga

SEQ ID NO: 73699 - DNA, 33 bp, Homo sapien
aggtgtgttagaaatacgatgtcttggattcat

SEQ ID NO: 73700 - DNA, 33 bp, Homo sapien
aggtgtgttagaaatatgatgtcttggattcat

SEQ ID NO: 73701 - DNA, 33 bp, Homo sapien
acctacagagaaacaaagataagaattgcatga

SEQ ID NO: 73702 - DNA, 33 bp, Homo sapien
acctacagagaaacaaggataagaattgcatga

SEQ ID NO: 73703 - DNA, 33 bp, Homo sapien
ggtggcattaacaggaactcaggttctgaccac

SEQ ID NO: 73704 - DNA, 33 bp, Homo sapien
ggtggcattaacaggagctcaggttctgaccac

SEQ ID NO: 73705 - DNA, 33 bp, Homo sapien
aggatgaatttacagacactacaggtgaagtct

SEQ ID NO: 73706 - DNA, 33 bp, Homo sapien
aggatgaatttacagatactacaggtgaagtct

SEQ ID NO: 73707 - DNA, 33 bp, Homo sapien
ccaatctctgttcagcgcattggaacactcatt

SEQ ID NO: 73708 - DNA, 33 bp, Homo sapien
ccaatctctgttcagctcattggaacactcatt

SEQ ID NO: 73709 - DNA, 33 bp, Homo sapien
gcaaagtagatgtagaaagataggaaaataaga

SEQ ID NO: 73710 - DNA, 33 bp, Homo sapien
gcaaagtagatgtagagagataggaaaataaga

SEQ ID NO: 73711 - DNA, 33 bp, Homo sapien
gatgcagaatacaaaacgaacctttgaaataac

SEQ ID NO: 73712 - DNA, 33 bp, Homo sapien
gatgcagaatacaaaatgaacctttgaaataac

SEQ ID NO: 73713 - DNA, 33 bp, Homo sapien
taattcatgctcatctaaattgtcttgttaata

SEQ ID NO: 73714 - DNA, 33 bp, Homo sapien
taattcatgctcatctgaattgtcttgttaata

SEQ ID NO: 73715 - DNA, 33 bp, Homo sapien
atggggtagctgaatacgctagaaatggaagaa

SEQ ID NO: 73716 - DNA, 33 bp, Homo sapien
atggggtagctgaatatgctagaaatggaagaa

SEQ ID NO: 73717 - DNA, 33 bp, Homo sapien
catttctctaagcaaactggttccttaatatgg

SEQ ID NO: 73718 - DNA, 33 bp, Homo sapien
catttctctaagcaaattggttccttaatatgg

SEQ ID NO: 73719 - DNA, 33 bp, Homo sapien
caggacagtatttggacgttaggcttatcagac

SEQ ID NO: 73720 - DNA, 33 bp, Homo sapien
caggacagtatttggatgttaggcttatcagac

SEQ ID NO: 73721 - DNA, 33 bp, Homo sapien
aatgactaatgatgtggaacatattttcatgta

SEQ ID NO: 73722 - DNA, 33 bp, Homo sapien
aatgactaatgatgtgtaacatattttcatgta

SEQ ID NO: 73723 - DNA, 33 bp, Homo sapien
attagtcattaagcaaattaaaaaccacaatca

SEQ ID NO: 73724 - DNA, 33 bp, Homo sapien
attagtcattaagcaatttaaaaaccacaatca

SEQ ID NO: 73725 - DNA, 33 bp, Homo sapien
cttggtattgtttgtcacttgattatggccttc

SEQ ID NO: 73726 - DNA, 33 bp, Homo sapien
cttggtattgtttgtcccttgattatggccttc

SEQ ID NO: 73727 - DNA, 33 bp, Homo sapien
ccagtgtacacaatcaccattttccaatttaac

SEQ ID NO: 73728 - DNA, 33 bp, Homo sapien
ccagtgtacacaatcatcattttccaatttaac

SEQ ID NO: 73729 - DNA, 33 bp, Homo sapien
agaaaaatcaagaggaataagccaaggaagagt

SEQ ID NO: 73730 - DNA, 33 bp, Homo sapien
agaaaaatcaagaggagtaagccaaggaagagt

SEQ ID NO: 73731 - DNA, 33 bp, Homo sapien
tagatcataaaaatccacagttcaacatgatga

SEQ ID NO: 73732 - DNA, 33 bp, Homo sapien
tagatcataaaaatccgcagttcaacatgatga

SEQ ID NO: 73733 - DNA, 33 bp, Homo sapien
ccattttggagagagaaatcttagaattgtatg

SEQ ID NO: 73734 - DNA, 33 bp, Homo sapien
ccattttggagagagacatcttagaattgtatg

SEQ ID NO: 73735 - DNA, 33 bp, Homo sapien
ccacacagcctgtaaactgtgaaaccagaattc

SEQ ID NO: 73736 - DNA, 33 bp, Homo sapien
ccacacagcctgtaaagtgtgaaaccagaattc

SEQ ID NO: 73737 - DNA, 33 bp, Homo sapien
tgagttcaacaccataataaaaagtatcccagt

SEQ ID NO: 73738 - DNA, 33 bp, Homo sapien
tgagttcaacaccatattaaaaagtatcccagt

SEQ ID NO: 73739 - DNA, 33 bp, Homo sapien
gcgacaggacctaaaccgaacctctgctttttc

SEQ ID NO: 73740 - DNA, 33 bp, Homo sapien
gcgacaggacctaaactgaacctctgctttttc

SEQ ID NO: 73741 - DNA, 33 bp, Homo sapien
tgccatgagctgggagaaagctgcagtgtgggg

SEQ ID NO: 73742 - DNA, 33 bp, Homo sapien
tgccatgagctgggaggaagctgcagtgtgggg

SEQ ID NO: 73743 - DNA, 33 bp, Homo sapien
caaatgagatcaaatacgtaaaattgcttatat

SEQ ID NO: 73744 - DNA, 33 bp, Homo sapien
caaatgagatcaaataggtaaaattgcttatat

SEQ ID NO: 73745 - DNA, 33 bp, Homo sapien
ttcagctatggaccccaaagattttcactcaga

SEQ ID NO: 73746 - DNA, 33 bp, Homo sapien
ttcagctatggaccccgaagattttcactcaga

SEQ ID NO: 73747 - DNA, 33 bp, Homo sapien
acccaacagctgagtaggtctatttagaaagcc

SEQ ID NO: 73748 - DNA, 33 bp, Homo sapien
acccaacagctgagtatgtctatttagaaagcc

SEQ ID NO: 73749 - DNA, 33 bp, Homo sapien
tgtgattggggtatacaagggatgtgagatagg

SEQ ID NO: 73750 - DNA, 33 bp, Homo sapien
tgtgattggggtatacgagggatgtgagatagg

SEQ ID NO: 73751 - DNA, 33 bp, Homo sapien
agttgcctctatcaaaggccattggctgaaaga

SEQ ID NO: 73752 - DNA, 33 bp, Homo sapien
agttgcctctatcaaatgccattggctgaaaga

SEQ ID NO: 73753 - DNA, 33 bp, Homo sapien
gattcataattttccccacgtagagtgtgattt

SEQ ID NO: 73754 - DNA, 33 bp, Homo sapien
gattcataattttccctacgtagagtgtgattt

SEQ ID NO: 73755 - DNA, 33 bp, Homo sapien
tttacttaggaagacaaaagacaggctaagatt

SEQ ID NO: 73756 - DNA, 33 bp, Homo sapien
tttacttaggaagacagaagacaggctaagatt

SEQ ID NO: 73757 - DNA, 33 bp, Homo sapien
tccagatagaagactaagacattggacatttca

SEQ ID NO: 73758 - DNA, 33 bp, Homo sapien
tccagatagaagactaggacattggacatttca

SEQ ID NO: 73759 - DNA, 33 bp, Homo sapien
ccctaaagcaatattaacagctctgtatttaga

SEQ ID NO: 73760 - DNA, 33 bp, Homo sapien
ccctaaagcaatattagcagctctgtatttaga

SEQ ID NO: 73761 - DNA, 33 bp, Homo sapien
ttaccttgttctggccacagctcatttatttca

SEQ ID NO: 73762 - DNA, 33 bp, Homo sapien
ttaccttgttctggccgcagctcatttatttca

SEQ ID NO: 73763 - DNA, 33 bp, Homo sapien
ttaagaatgagccaaaaaacaaacgggaaactg

SEQ ID NO: 73764 - DNA, 33 bp, Homo sapien
ttaagaatgagccaaacaacaaacgggaaactg

SEQ ID NO: 73765 - DNA, 33 bp, Homo sapien
tcataaattaattccaataaaactcagtactat

SEQ ID NO: 73766 - DNA, 33 bp, Homo sapien
tcataaattaattccagtaaaactcagtactat

SEQ ID NO: 73767 - DNA, 33 bp, Homo sapien
taacattacccaatcaataaattgtcagtactg

SEQ ID NO: 73768 - DNA, 33 bp, Homo sapien
taacattacccaatcagtaaattgtcagtactg

SEQ ID NO: 73769 - DNA, 33 bp, Homo sapien
taatatctaccttttaaagttgtggtagttgaa

SEQ ID NO: 73770 - DNA, 33 bp, Homo sapien
taatatctaccttttagagttgtggtagttgaa

SEQ ID NO: 73771 - DNA, 33 bp, Homo sapien
ttttctattaagaaagcagtgcatatccattgc

SEQ ID NO: 73772 - DNA, 33 bp, Homo sapien
ttttctattaagaaaggagtgcatatccattgc

SEQ ID NO: 73773 - DNA, 33 bp, Homo sapien
catgagtgaggagaaactgcagcaagaagaaag

SEQ ID NO: 73774 - DNA, 33 bp, Homo sapien
catgagtgaggagaaattgcagcaagaagaaag

SEQ ID NO: 73775 - DNA, 33 bp, Homo sapien
ttccttctggccgttacctggaatatcattgaa

SEQ ID NO: 73776 - DNA, 33 bp, Homo sapien
ttccttctggccgttatctggaatatcattgaa

SEQ ID NO: 73777 - DNA, 33 bp, Homo sapien
tttgatggatcttttaggctcgctataattctc

SEQ ID NO: 73778 - DNA, 33 bp, Homo sapien
tttgatggatcttttatgctcgctataattctc

SEQ ID NO: 73779 - DNA, 33 bp, Homo sapien
aaaagcagggtacacccatattcacagcagcat

SEQ ID NO: 73780 - DNA, 33 bp, Homo sapien
aaaagcagggtacacctatattcacagcagcat

SEQ ID NO: 73781 - DNA, 33 bp, Homo sapien
gagagggtaaggcatcaaagtgagaaagcaaaa

SEQ ID NO: 73782 - DNA, 33 bp, Homo sapien
gagagggtaaggcatcgaagtgagaaagcaaaa

SEQ ID NO: 73783 - DNA, 33 bp, Homo sapien
atgtttaccaacttggacaaaataacttcatag

SEQ ID NO: 73784 - DNA, 33 bp, Homo sapien
atgtttaccaacttgggcaaaataacttcatag

SEQ ID NO: 73785 - DNA, 33 bp, Homo sapien
aggcataaagccatcacgagaggatgaagtcta

SEQ ID NO: 73786 - DNA, 33 bp, Homo sapien
aggcataaagccatcatgagaggatgaagtcta

SEQ ID NO: 73787 - DNA, 33 bp, Homo sapien
attaactaaaacaatacgcttgaaagtgtttga

SEQ ID NO: 73788 - DNA, 33 bp, Homo sapien
attaactaaaacaatatgcttgaaagtgtttga

SEQ ID NO: 73789 - DNA, 33 bp, Homo sapien
atttgggtatggtcacaagttatgttaggggtc

SEQ ID NO: 73790 - DNA, 33 bp, Homo sapien
atttgggtatggtcacgagttatgttaggggtc

SEQ ID NO: 73791 - DNA, 33 bp, Homo sapien
tagctaagtacacatgcattgacctcaagcctt

SEQ ID NO: 73792 - DNA, 33 bp, Homo sapien
tagctaagtacacatgtattgacctcaagcctt

SEQ ID NO: 73793 - DNA, 33 bp, Homo sapien
ggcagacaggtgtgaaagacatcataggtatct

SEQ ID NO: 73794 - DNA, 33 bp, Homo sapien
ggcagacaggtgtgaatgacatcataggtatct

SEQ ID NO: 73795 - DNA, 33 bp, Homo sapien
atctctgagggaattaaaggctagtctacacaa

SEQ ID NO: 73796 - DNA, 33 bp, Homo sapien
atctctgagggaattagaggctagtctacacaa

SEQ ID NO: 73797 - DNA, 33 bp, Homo sapien
ttcatcatcactatcaactctgaactacaatac

SEQ ID NO: 73798 - DNA, 33 bp, Homo sapien
ttcatcatcactatcatctctgaactacaatac

SEQ ID NO: 73799 - DNA, 33 bp, Homo sapien
gactttgagaggccaaatccaaaatacttttgg

SEQ ID NO: 73800 - DNA, 33 bp, Homo sapien
gactttgagaggccaagtccaaaatacttttgg

SEQ ID NO: 73801 - DNA, 33 bp, Homo sapien
cagttcctggctcataaggagagagattaaata

SEQ ID NO: 73802 - DNA, 33 bp, Homo sapien
cagttcctggctcatagggagagagattaaata

SEQ ID NO: 73803 - DNA, 33 bp, Homo sapien
ctaataatacagtcacacttcaatgattcctgt

SEQ ID NO: 73804 - DNA, 33 bp, Homo sapien
ctaataatacagtcacgcttcaatgattcctgt

SEQ ID NO: 73805 - DNA, 33 bp, Homo sapien
gtaagaatcgttaagacgatgtgcaaaagcaaa

SEQ ID NO: 73806 - DNA, 33 bp, Homo sapien
gtaagaatcgttaagatgatgtgcaaaagcaaa

SEQ ID NO: 73807 - DNA, 33 bp, Homo sapien
tttcttgaaatatttacctatccacattgtctt

SEQ ID NO: 73808 - DNA, 33 bp, Homo sapien
tttcttgaaatatttagctatccacattgtctt

SEQ ID NO: 73809 - DNA, 33 bp, Homo sapien
gaaagaggagtgcggagaaaaggtttgctccct

SEQ ID NO: 73810 - DNA, 33 bp, Homo sapien
gaaagaggagtgcggataaaaggtttgctccct

SEQ ID NO: 73811 - DNA, 33 bp, Homo sapien
ggtgattaatcttgaccatcaagaagaagttgg

SEQ ID NO: 73812 - DNA, 33 bp, Homo sapien
ggtgattaatcttgacgatcaagaagaagttgg

SEQ ID NO: 73813 - DNA, 33 bp, Homo sapien
tcctctggataccaaacaggttgcggcatggga

SEQ ID NO: 73814 - DNA, 33 bp, Homo sapien
tcctctggataccaaataggttgcggcatggga

SEQ ID NO: 73815 - DNA, 33 bp, Homo sapien
tcatggtgacagatgcaaacgcaaagaatgagg

SEQ ID NO: 73816 - DNA, 33 bp, Homo sapien
tcatggtgacagatgcgaacgcaaagaatgagg

SEQ ID NO: 73817 - DNA, 33 bp, Homo sapien
aaagtataaatggggagcagaattgcagtggga

SEQ ID NO: 73818 - DNA, 33 bp, Homo sapien
aaagtataaatggggatcagaattgcagtggga

SEQ ID NO: 73819 - DNA, 33 bp, Homo sapien
gatgatgtcagtttaaaagaaatgtgaataaaa

SEQ ID NO: 73820 - DNA, 33 bp, Homo sapien
gatgatgtcagtttaagagaaatgtgaataaaa

SEQ ID NO: 73821 - DNA, 33 bp, Homo sapien
tagagatggatagagtaaagaattttaaaaggt

SEQ ID NO: 73822 - DNA, 33 bp, Homo sapien
tagagatggatagagtgaagaattttaaaaggt

SEQ ID NO: 73823 - DNA, 33 bp, Homo sapien
actactccgatgtctacgagtacgaatttcaat

SEQ ID NO: 73824 - DNA, 33 bp, Homo sapien
actactccgatgtctatgagtacgaatttcaat

SEQ ID NO: 73825 - DNA, 33 bp, Homo sapien
tctcataggaacttacactttcatatgggaggc

SEQ ID NO: 73826 - DNA, 33 bp, Homo sapien
tctcataggaacttacgctttcatatgggaggc

SEQ ID NO: 73827 - DNA, 33 bp, Homo sapien
tattctgacacccaaacatgtgaaacaacttgt

SEQ ID NO: 73828 - DNA, 33 bp, Homo sapien
tattctgacacccaaagatgtgaaacaacttgt

SEQ ID NO: 73829 - DNA, 33 bp, Homo sapien
tattttaagccttgtacgtgaatgataatgaat

SEQ ID NO: 73830 - DNA, 33 bp, Homo sapien
tattttaagccttgtatgtgaatgataatgaat

SEQ ID NO: 73831 - DNA, 33 bp, Homo sapien
aatcaaggccagtatacagtacaaacttggata

SEQ ID NO: 73832 - DNA, 33 bp, Homo sapien
aatcaaggccagtatatagtacaaacttggata

SEQ ID NO: 73833 - DNA, 33 bp, Homo sapien
gtgccagactgtgatacgaattagaactgaggt

SEQ ID NO: 73834 - DNA, 33 bp, Homo sapien
gtgccagactgtgatatgaattagaactgaggt

SEQ ID NO: 73835 - DNA, 33 bp, Homo sapien
tagaatccagatgcttaaaccattcaaagatta

SEQ ID NO: 73836 - DNA, 33 bp, Homo sapien
tagaatccagatgcttgaaccattcaaagatta

SEQ ID NO: 73837 - DNA, 33 bp, Homo sapien
tccaagcaaaaattgaaatagtatgaattatga

SEQ ID NO: 73838 - DNA, 33 bp, Homo sapien
tccaagcaaaaattgacatagtatgaattatga

SEQ ID NO: 73839 - DNA, 33 bp, Homo sapien
ttcctctttgatctgacatttgtttcttgtcat

SEQ ID NO: 73840 - DNA, 33 bp, Homo sapien
ttcctctttgatctgatatttgtttcttgtcat

SEQ ID NO: 73841 - DNA, 33 bp, Homo sapien
tatggggaaggcctgaatatgaggaaatggcca

SEQ ID NO: 73842 - DNA, 33 bp, Homo sapien
tatggggaaggcctgagtatgaggaaatggcca

SEQ ID NO: 73843 - DNA, 33 bp, Homo sapien
tgtaggctctggaatgcatcaggtgtttcagtc

SEQ ID NO: 73844 - DNA, 33 bp, Homo sapien
tgtaggctctggaatggatcaggtgtttcagtc

SEQ ID NO: 73845 - DNA, 33 bp, Homo sapien
tttgtcagttgtcccaagactttatttgtaggc

SEQ ID NO: 73846 - DNA, 33 bp, Homo sapien
tttgtcagttgtcccaggactttatttgtaggc

SEQ ID NO: 73847 - DNA, 33 bp, Homo sapien
ctcatttgtgtccctgaaagagataaggagaga

SEQ ID NO: 73848 - DNA, 33 bp, Homo sapien
ctcatttgtgtccctggaagagataaggagaga

SEQ ID NO: 73849 - DNA, 33 bp, Homo sapien
agggacacaaatgagtcacagatttggtttctt

SEQ ID NO: 73850 - DNA, 33 bp, Homo sapien
agggacacaaatgagtgacagatttggtttctt

SEQ ID NO: 73851 - DNA, 33 bp, Homo sapien
caaatctcttgtagaaagcaaaagattcttcaa

SEQ ID NO: 73852 - DNA, 33 bp, Homo sapien
caaatctcttgtagaacgcaaaagattcttcaa

SEQ ID NO: 73853 - DNA, 33 bp, Homo sapien
aaattaactacttagaaatactaggcaggatgt

SEQ ID NO: 73854 - DNA, 33 bp, Homo sapien
aaattaactacttagagatactaggcaggatgt

SEQ ID NO: 73855 - DNA, 33 bp, Homo sapien
gaccaattcaaaagtcactacagtcctttcttt

SEQ ID NO: 73856 - DNA, 33 bp, Homo sapien
gaccaattcaaaagtcgctacagtcctttcttt

SEQ ID NO: 73857 - DNA, 33 bp, Homo sapien
gtgattctgcctgtgacggtgattgatgatatt

SEQ ID NO: 73858 - DNA, 33 bp, Homo sapien
gtgattctgcctgtgatggtgattgatgatatt

SEQ ID NO: 73859 - DNA, 33 bp, Homo sapien
aattagcctgggcttacggattttaagaagaag

SEQ ID NO: 73860 - DNA, 33 bp, Homo sapien
aattagcctgggcttatggattttaagaagaag

SEQ ID NO: 73861 - DNA, 33 bp, Homo sapien
ggggaagttaaggaagaatatccaagagccagt

SEQ ID NO: 73862 - DNA, 33 bp, Homo sapien
ggggaagttaaggaagtatatccaagagccagt

SEQ ID NO: 73863 - DNA, 33 bp, Homo sapien
ttcctgcaggagagaacgcagtagctgatgaaa

SEQ ID NO: 73864 - DNA, 33 bp, Homo sapien
ttcctgcaggagagaatgcagtagctgatgaaa

SEQ ID NO: 73865 - DNA, 33 bp, Homo sapien
ctcatcctctcttcacaccttacttctagcagc

SEQ ID NO: 73866 - DNA, 33 bp, Homo sapien
ctcatcctctcttcacgccttacttctagcagc

SEQ ID NO: 73867 - DNA, 33 bp, Homo sapien
attcaactctgtgttacggttatgtgtctgtgc

SEQ ID NO: 73868 - DNA, 33 bp, Homo sapien
attcaactctgtgttatggttatgtgtctgtgc

SEQ ID NO: 73869 - DNA, 33 bp, Homo sapien
tgggcacaaataactacaatatgtggcacacag

SEQ ID NO: 73870 - DNA, 33 bp, Homo sapien
tgggcacaaataactataatatgtggcacacag

SEQ ID NO: 73871 - DNA, 33 bp, Homo sapien
aatacttttcgcaaaaatataatgtgcctaaag

SEQ ID NO: 73872 - DNA, 33 bp, Homo sapien
aatacttttcgcaaaactataatgtgcctaaag

SEQ ID NO: 73873 - DNA, 33 bp, Homo sapien
gtcaataaaggtaaggaccacggaagaagcaga

SEQ ID NO: 73874 - DNA, 33 bp, Homo sapien
gtcaataaaggtaagggccacggaagaagcaga

SEQ ID NO: 73875 - DNA, 33 bp, Homo sapien
aatctttgaagtcggaagataaaaatcaccatt

SEQ ID NO: 73876 - DNA, 33 bp, Homo sapien
aatctttgaagtcggacgataaaaatcaccatt

SEQ ID NO: 73877 - DNA, 33 bp, Homo sapien
atcccaccttaaacagaataagacagacaagtt

SEQ ID NO: 73878 - DNA, 33 bp, Homo sapien
atcccaccttaaacaggataagacagacaagtt

SEQ ID NO: 73879 - DNA, 33 bp, Homo sapien
ctgtagtattcttttacagcaggagaaagcaga

SEQ ID NO: 73880 - DNA, 33 bp, Homo sapien
ctgtagtattcttttatagcaggagaaagcaga

SEQ ID NO: 73881 - DNA, 33 bp, Homo sapien
aaggctgtctttcctacacttgcattgagaaat

SEQ ID NO: 73882 - DNA, 33 bp, Homo sapien
aaggctgtctttcctatacttgcattgagaaat

SEQ ID NO: 73883 - DNA, 33 bp, Homo sapien
caacatgaggcataaaaacactatttctgtaca

SEQ ID NO: 73884 - DNA, 33 bp, Homo sapien
caacatgaggcataaagacactatttctgtaca

SEQ ID NO: 73885 - DNA, 33 bp, Homo sapien
tgattgcaaccttgccactgggggttgttagca

SEQ ID NO: 73886 - DNA, 33 bp, Homo sapien
tgattgcaaccttgccgctgggggttgttagca

SEQ ID NO: 73887 - DNA, 33 bp, Homo sapien
actggctcaggctaataaattctctgctaacaa

SEQ ID NO: 73888 - DNA, 33 bp, Homo sapien
actggctcaggctaatcaattctctgctaacaa

SEQ ID NO: 73889 - DNA, 33 bp, Homo sapien
tccaacaatttctccacaagaataaagctgcat

SEQ ID NO: 73890 - DNA, 33 bp, Homo sapien
tccaacaatttctccagaagaataaagctgcat

SEQ ID NO: 73891 - DNA, 33 bp, Homo sapien
ctgtattgcactggaaagattgatggagaggaa

SEQ ID NO: 73892 - DNA, 33 bp, Homo sapien
ctgtattgcactggaaggattgatggagaggaa

SEQ ID NO: 73893 - DNA, 33 bp, Homo sapien
ttctcatgttcatccactggacagttggctctc

SEQ ID NO: 73894 - DNA, 33 bp, Homo sapien
ttctcatgttcatccattggacagttggctctc

SEQ ID NO: 73895 - DNA, 33 bp, Homo sapien
gctgactttacagagacatttattggaggtagg

SEQ ID NO: 73896 - DNA, 33 bp, Homo sapien
gctgactttacagagagatttattggaggtagg

SEQ ID NO: 73897 - DNA, 33 bp, Homo sapien
acatttccatcattcccaaaacctttacccttc

SEQ ID NO: 73898 - DNA, 33 bp, Homo sapien
acatttccatcattcctaaaacctttacccttc

SEQ ID NO: 73899 - DNA, 33 bp, Homo sapien
gtcctgctttctttcaatccctcatacataccg

SEQ ID NO: 73900 - DNA, 33 bp, Homo sapien
gtcctgctttctttcagtccctcatacataccg

SEQ ID NO: 73901 - DNA, 33 bp, Homo sapien
aagggtcccaatctagacacaaaagtgagatta

SEQ ID NO: 73902 - DNA, 33 bp, Homo sapien
aagggtcccaatctaggcacaaaagtgagatta

SEQ ID NO: 73903 - DNA, 33 bp, Homo sapien
gctagacagtccggtaagcttgtttcactggca

SEQ ID NO: 73904 - DNA, 33 bp, Homo sapien
gctagacagtccggtacgcttgtttcactggca

SEQ ID NO: 73905 - DNA, 33 bp, Homo sapien
cgggagaatgagagagcccaagccaattctccc

SEQ ID NO: 73906 - DNA, 33 bp, Homo sapien
cgggagaatgagagagtccaagccaattctccc

SEQ ID NO: 73907 - DNA, 33 bp, Homo sapien
ctaacaaagcttaataacaagactcaaaagaat

SEQ ID NO: 73908 - DNA, 33 bp, Homo sapien
ctaacaaagcttaatatcaagactcaaaagaat

SEQ ID NO: 73909 - DNA, 33 bp, Homo sapien
gtagaaaactgttttacgatatgcttctggggg

SEQ ID NO: 73910 - DNA, 33 bp, Homo sapien
gtagaaaactgttttatgatatgcttctggggg

SEQ ID NO: 73911 - DNA, 33 bp, Homo sapien
tgataaacgatttggaacgcagcatgatgtact

SEQ ID NO: 73912 - DNA, 33 bp, Homo sapien
tgataaacgatttggagcgcagcatgatgtact

SEQ ID NO: 73913 - DNA, 33 bp, Homo sapien
agccagaagaaaggcccattgatctccaaagta

SEQ ID NO: 73914 - DNA, 33 bp, Homo sapien
agccagaagaaaggcctattgatctccaaagta

SEQ ID NO: 73915 - DNA, 33 bp, Homo sapien
ttgaataaatgtgaaaagagagagaactcttcc

SEQ ID NO: 73916 - DNA, 33 bp, Homo sapien
ttgaataaatgtgaaaggagagagaactcttcc

SEQ ID NO: 73917 - DNA, 33 bp, Homo sapien
aggaacaagatatttgcatagtctcagagtatt

SEQ ID NO: 73918 - DNA, 33 bp, Homo sapien
aggaacaagatatttgtatagtctcagagtatt

SEQ ID NO: 73919 - DNA, 33 bp, Homo sapien
actaagccaatatataagccatctgcatagtgg

SEQ ID NO: 73920 - DNA, 33 bp, Homo sapien
actaagccaatatatacgccatctgcatagtgg

SEQ ID NO: 73921 - DNA, 33 bp, Homo sapien
cagtcacagactgccaactgatcagaccatgct

SEQ ID NO: 73922 - DNA, 33 bp, Homo sapien
cagtcacagactgccagctgatcagaccatgct

SEQ ID NO: 73923 - DNA, 33 bp, Homo sapien
tctgttttgtgggagaaaaatgaacataactat

SEQ ID NO: 73924 - DNA, 33 bp, Homo sapien
tctgttttgtgggagagaaatgaacataactat

SEQ ID NO: 73925 - DNA, 33 bp, Homo sapien
gaaaggttagcctaagaaaaaggagacagcatt

SEQ ID NO: 73926 - DNA, 33 bp, Homo sapien
gaaaggttagcctaaggaaaaggagacagcatt

SEQ ID NO: 73927 - DNA, 33 bp, Homo sapien
tttgtttaaaaatgtccacaccaacaatgaaat

SEQ ID NO: 73928 - DNA, 33 bp, Homo sapien
tttgtttaaaaatgtctacaccaacaatgaaat

SEQ ID NO: 73929 - DNA, 33 bp, Homo sapien
ttacattataactttgcagcaaggttgtggtgg

SEQ ID NO: 73930 - DNA, 33 bp, Homo sapien
ttacattataactttgtagcaaggttgtggtgg

SEQ ID NO: 73931 - DNA, 33 bp, Homo sapien
aatctgcactagcccaactctaaggccctgtgc

SEQ ID NO: 73932 - DNA, 33 bp, Homo sapien
aatctgcactagcccatctctaaggccctgtgc

SEQ ID NO: 73933 - DNA, 33 bp, Homo sapien
ctgactgggaaatagcaatttgttttgttagaa

SEQ ID NO: 73934 - DNA, 33 bp, Homo sapien
ctgactgggaaatagccatttgttttgttagaa

SEQ ID NO: 73935 - DNA, 33 bp, Homo sapien
attttgttttggcataacaggtgaggaaacaca

SEQ ID NO: 73936 - DNA, 33 bp, Homo sapien
attttgttttggcatagcaggtgaggaaacaca

SEQ ID NO: 73937 - DNA, 33 bp, Homo sapien
ttttttccataccaagaaattcaagtccctgga

SEQ ID NO: 73938 - DNA, 33 bp, Homo sapien
ttttttccataccaagcaattcaagtccctgga

SEQ ID NO: 73939 - DNA, 33 bp, Homo sapien
gaaaatgtccatattaacaaagaaaaaggagct

SEQ ID NO: 73940 - DNA, 33 bp, Homo sapien
gaaaatgtccatattagcaaagaaaaaggagct

SEQ ID NO: 73941 - DNA, 33 bp, Homo sapien
aatatggtcagcattcaacaattgtgctgatga

SEQ ID NO: 73942 - DNA, 33 bp, Homo sapien
aatatggtcagcattccacaattgtgctgatga

SEQ ID NO: 73943 - DNA, 33 bp, Homo sapien
gtatgtggatatattaaagaatcaattttctta

SEQ ID NO: 73944 - DNA, 33 bp, Homo sapien
gtatgtggatatattacagaatcaattttctta

SEQ ID NO: 73945 - DNA, 33 bp, Homo sapien
atcatacataagttaaaagagtttctgagcagc

SEQ ID NO: 73946 - DNA, 33 bp, Homo sapien
atcatacataagttaacagagtttctgagcagc

SEQ ID NO: 73947 - DNA, 33 bp, Homo sapien
ggtttctagatttccaaattgtaggttagtggg

SEQ ID NO: 73948 - DNA, 33 bp, Homo sapien
ggtttctagatttccagattgtaggttagtggg

SEQ ID NO: 73949 - DNA, 33 bp, Homo sapien
tgtgcagagttttccacagaaataaattaaaca

SEQ ID NO: 73950 - DNA, 33 bp, Homo sapien
tgtgcagagttttccagagaaataaattaaaca

SEQ ID NO: 73951 - DNA, 33 bp, Homo sapien
aactgcagaaaggtaacatcagtgtctaaaccc

SEQ ID NO: 73952 - DNA, 33 bp, Homo sapien
aactgcagaaaggtaatatcagtgtctaaaccc

SEQ ID NO: 73953 - DNA, 33 bp, Homo sapien
tcaggtgtagttaaaacagatggccaaaaaaga

SEQ ID NO: 73954 - DNA, 33 bp, Homo sapien
tcaggtgtagttaaaatagatggccaaaaaaga

SEQ ID NO: 73955 - DNA, 33 bp, Homo sapien
agttaactaagggtacacagttcataagcagtg

SEQ ID NO: 73956 - DNA, 33 bp, Homo sapien
agttaactaagggtacccagttcataagcagtg

SEQ ID NO: 73957 - DNA, 33 bp, Homo sapien
tgtcttatttctgcaactctttcaaaatctagc

SEQ ID NO: 73958 - DNA, 33 bp, Homo sapien
tgtcttatttctgcaagtctttcaaaatctagc

SEQ ID NO: 73959 - DNA, 33 bp, Homo sapien
ctcagctgcccacacaaaaaaaagcctatgcaa

SEQ ID NO: 73960 - DNA, 33 bp, Homo sapien
ctcagctgcccacacacaaaaaagcctatgcaa

SEQ ID NO: 73961 - DNA, 33 bp, Homo sapien
tatcttgcctacctaactgtctcctcttgccca

SEQ ID NO: 73962 - DNA, 33 bp, Homo sapien
tatcttgcctacctaattgtctcctcttgccca

SEQ ID NO: 73963 - DNA, 33 bp, Homo sapien
ctcacacactatgccaaggttagtctgtttgac

SEQ ID NO: 73964 - DNA, 33 bp, Homo sapien
ctcacacactatgccagggttagtctgtttgac

SEQ ID NO: 73965 - DNA, 33 bp, Homo sapien
aacttgttatttggaacgtactcataggtaaca

SEQ ID NO: 73966 - DNA, 33 bp, Homo sapien
aacttgttatttggaatgtactcataggtaaca

SEQ ID NO: 73967 - DNA, 33 bp, Homo sapien
tccagcacttggtacacaggagatgtgtaggga

SEQ ID NO: 73968 - DNA, 33 bp, Homo sapien
tccagcacttggtacataggagatgtgtaggga

SEQ ID NO: 73969 - DNA, 33 bp, Homo sapien
tgacctttttcagaaaacatttgctgacccttg

SEQ ID NO: 73970 - DNA, 33 bp, Homo sapien
tgacctttttcagaaaccatttgctgacccttg

SEQ ID NO: 73971 - DNA, 33 bp, Homo sapien
tttcatagcacacaccacttcttgacagaaaat

SEQ ID NO: 73972 - DNA, 33 bp, Homo sapien
tttcatagcacacaccgcttcttgacagaaaat

SEQ ID NO: 73973 - DNA, 33 bp, Homo sapien
ttcatcccaaacttgacggaactcctggaagtt

SEQ ID NO: 73974 - DNA, 33 bp, Homo sapien
ttcatcccaaacttgatggaactcctggaagtt

SEQ ID NO: 73975 - DNA, 33 bp, Homo sapien
ttacatttcaaagttgcatatttcaaagtacca

SEQ ID NO: 73976 - DNA, 33 bp, Homo sapien
ttacatttcaaagttgtatatttcaaagtacca

SEQ ID NO: 73977 - DNA, 33 bp, Homo sapien
ctataaatacctgacaaggacatgaaataaaaa

SEQ ID NO: 73978 - DNA, 33 bp, Homo sapien
ctataaatacctgacagggacatgaaataaaaa

SEQ ID NO: 73979 - DNA, 33 bp, Homo sapien
tgtatttggacttggcagaattaaaaatacact

SEQ ID NO: 73980 - DNA, 33 bp, Homo sapien
tgtatttggacttggcggaattaaaaatacact

SEQ ID NO: 73981 - DNA, 33 bp, Homo sapien
agagagatcagcattcctacttcaccaaaaccc

SEQ ID NO: 73982 - DNA, 33 bp, Homo sapien
agagagatcagcattcttacttcaccaaaaccc

SEQ ID NO: 73983 - DNA, 33 bp, Homo sapien
acaggatgtcaagccacggatagaaatcttaca

SEQ ID NO: 73984 - DNA, 33 bp, Homo sapien
acaggatgtcaagccatggatagaaatcttaca

SEQ ID NO: 73985 - DNA, 33 bp, Homo sapien
gcagagaaaagacaatgactgaagaccaatagc

SEQ ID NO: 73986 - DNA, 33 bp, Homo sapien
gcagagaaaagacaattactgaagaccaatagc

SEQ ID NO: 73987 - DNA, 33 bp, Homo sapien
tggcaggaaacacatacacaatttcatgacagc

SEQ ID NO: 73988 - DNA, 33 bp, Homo sapien
tggcaggaaacacatatacaatttcatgacagc

SEQ ID NO: 73989 - DNA, 33 bp, Homo sapien
ttttgtgatttgcctccatattctcctgccaaa

SEQ ID NO: 73990 - DNA, 33 bp, Homo sapien
ttttgtgatttgcctctatattctcctgccaaa

SEQ ID NO: 73991 - DNA, 33 bp, Homo sapien
tgctaatgttcccagccgatgggtagtggaaag

SEQ ID NO: 73992 - DNA, 33 bp, Homo sapien
tgctaatgttcccagctgatgggtagtggaaag

SEQ ID NO: 73993 - DNA, 33 bp, Homo sapien
tactggcagtggtagcaccataaagaacaaagg

SEQ ID NO: 73994 - DNA, 33 bp, Homo sapien
tactggcagtggtagcgccataaagaacaaagg

SEQ ID NO: 73995 - DNA, 33 bp, Homo sapien
acctactaatttcaaaagacgtatttgactggg

SEQ ID NO: 73996 - DNA, 33 bp, Homo sapien
acctactaatttcaaaggacgtatttgactggg

SEQ ID NO: 73997 - DNA, 33 bp, Homo sapien
tctttgaggactgacacgaaaatatctttaaag

SEQ ID NO: 73998 - DNA, 33 bp, Homo sapien
tctttgaggactgacatgaaaatatctttaaag

SEQ ID NO: 73999 - DNA, 33 bp, Homo sapien
tgagttggagaaagcccggctgctaattgatta

SEQ ID NO: 74000 - DNA, 33 bp, Homo sapien
tgagttggagaaagcctggctgctaattgatta

SEQ ID NO: 74001 - DNA, 33 bp, Homo sapien
agaaaccatttttcatgaataaggcacatagat

SEQ ID NO: 74002 - DNA, 33 bp, Homo sapien
agaaaccatttttcattaataaggcacatagat

SEQ ID NO: 74003 - DNA, 33 bp, Homo sapien
tgccaagcaacccaagaatgagagtgaagttga

SEQ ID NO: 74004 - DNA, 33 bp, Homo sapien
tgccaagcaacccaagcatgagagtgaagttga

SEQ ID NO: 74005 - DNA, 33 bp, Homo sapien
atgaacttttgggagacactcattttatggagt

SEQ ID NO: 74006 - DNA, 33 bp, Homo sapien
atgaacttttgggagatactcattttatggagt

SEQ ID NO: 74007 - DNA, 33 bp, Homo sapien
ggtatcttttaggtataaagtccatctaaacgg

SEQ ID NO: 74008 - DNA, 33 bp, Homo sapien
ggtatcttttaggtattaagtccatctaaacgg

SEQ ID NO: 74009 - DNA, 33 bp, Homo sapien
gttgcatatatacacaagtgcattggtggtttg

SEQ ID NO: 74010 - DNA, 33 bp, Homo sapien
gttgcatatatacacacgtgcattggtggtttg

SEQ ID NO: 74011 - DNA, 33 bp, Homo sapien
gtgatcactgctaagcaaaaacatggggtgggg

SEQ ID NO: 74012 - DNA, 33 bp, Homo sapien
gtgatcactgctaagcgaaaacatggggtgggg

SEQ ID NO: 74013 - DNA, 33 bp, Homo sapien
cttcaaactatagatacggcaaaagaaagtggt

SEQ ID NO: 74014 - DNA, 33 bp, Homo sapien
cttcaaactatagatatggcaaaagaaagtggt

SEQ ID NO: 74015 - DNA, 33 bp, Homo sapien
aattttgaatatggtaagatacctgtgtctaat

SEQ ID NO: 74016 - DNA, 33 bp, Homo sapien
aattttgaatatggtaggatacctgtgtctaat

SEQ ID NO: 74017 - DNA, 33 bp, Homo sapien
taaatgtgcatgcaacaaacaatgaagctggaa

SEQ ID NO: 74018 - DNA, 33 bp, Homo sapien
taaatgtgcatgcaaccaacaatgaagctggaa

SEQ ID NO: 74019 - DNA, 33 bp, Homo sapien
atcagagtaagtagtaaatgttgctattgttat

SEQ ID NO: 74020 - DNA, 33 bp, Homo sapien
atcagagtaagtagtagatgttgctattgttat

SEQ ID NO: 74021 - DNA, 33 bp, Homo sapien
ttgggcaagttattcaatctgtctgaaatttag

SEQ ID NO: 74022 - DNA, 33 bp, Homo sapien
ttgggcaagttattcactctgtctgaaatttag

SEQ ID NO: 74023 - DNA, 33 bp, Homo sapien
acatatttgtaaaccacgcagaagcttatctgg

SEQ ID NO: 74024 - DNA, 33 bp, Homo sapien
acatatttgtaaaccatgcagaagcttatctgg

SEQ ID NO: 74025 - DNA, 33 bp, Homo sapien
ttctgcctcccctgaaacctcagagttccctca

SEQ ID NO: 74026 - DNA, 33 bp, Homo sapien
ttctgcctcccctgaagcctcagagttccctca

SEQ ID NO: 74027 - DNA, 33 bp, Homo sapien
gaagcaaatcaccagaggaaaagaggtgaatgg

SEQ ID NO: 74028 - DNA, 33 bp, Homo sapien
gaagcaaatcaccagatgaaaagaggtgaatgg

SEQ ID NO: 74029 - DNA, 33 bp, Homo sapien
tgaagtcatttcataaactctttcctcgtgcca

SEQ ID NO: 74030 - DNA, 33 bp, Homo sapien
tgaagtcatttcataatctctttcctcgtgcca

SEQ ID NO: 74031 - DNA, 33 bp, Homo sapien
ttatgaaaatttggtgaatctgtaaaggaagtg

SEQ ID NO: 74032 - DNA, 33 bp, Homo sapien
ttatgaaaatttggtgtatctgtaaaggaagtg

SEQ ID NO: 74033 - DNA, 33 bp, Homo sapien
ctttggttaaatatgcaaagcacttaagataaa

SEQ ID NO: 74034 - DNA, 33 bp, Homo sapien
ctttggttaaatatgcgaagcacttaagataaa

SEQ ID NO: 74035 - DNA, 33 bp, Homo sapien
gcgttttcttccagaaccatacacatgagcaat

SEQ ID NO: 74036 - DNA, 33 bp, Homo sapien
gcgttttcttccagaatcatacacatgagcaat

SEQ ID NO: 74037 - DNA, 33 bp, Homo sapien
tgtgttacctgcagaacctctctgacctgcaca

SEQ ID NO: 74038 - DNA, 33 bp, Homo sapien
tgtgttacctgcagaagctctctgacctgcaca

SEQ ID NO: 74039 - DNA, 33 bp, Homo sapien
agtaaatctcacaaaacatgtgcaatacctgaa

SEQ ID NO: 74040 - DNA, 33 bp, Homo sapien
agtaaatctcacaaaatatgtgcaatacctgaa

SEQ ID NO: 74041 - DNA, 33 bp, Homo sapien
gacttcaacagaaataagcatcaatggaacacg

SEQ ID NO: 74042 - DNA, 33 bp, Homo sapien
gacttcaacagaaataggcatcaatggaacacg

SEQ ID NO: 74043 - DNA, 33 bp, Homo sapien
atgatccaggcattccacttctaggtacttacc

SEQ ID NO: 74044 - DNA, 33 bp, Homo sapien
atgatccaggcattccgcttctaggtacttacc

SEQ ID NO: 74045 - DNA, 33 bp, Homo sapien
acctcacatcccccaaatgacagcagacatcca

SEQ ID NO: 74046 - DNA, 33 bp, Homo sapien
acctcacatcccccaagtgacagcagacatcca

SEQ ID NO: 74047 - DNA, 33 bp, Homo sapien
atgggcagatgagaacagtagtttaaagtctgg

SEQ ID NO: 74048 - DNA, 33 bp, Homo sapien
atgggcagatgagaacggtagtttaaagtctgg

SEQ ID NO: 74049 - DNA, 33 bp, Homo sapien
ctatggcttctaccaaatgcctactatgtgctt

SEQ ID NO: 74050 - DNA, 33 bp, Homo sapien
ctatggcttctaccaagtgcctactatgtgctt

SEQ ID NO: 74051 - DNA, 33 bp, Homo sapien
aggaaagctggaattacagccgaggtcagctcc

SEQ ID NO: 74052 - DNA, 33 bp, Homo sapien
aggaaagctggaattagagccgaggtcagctcc

SEQ ID NO: 74053 - DNA, 33 bp, Homo sapien
atttcttcacagcctcaagatgttggcatttgt

SEQ ID NO: 74054 - DNA, 33 bp, Homo sapien
atttcttcacagcctcgagatgttggcatttgt

SEQ ID NO: 74055 - DNA, 33 bp, Homo sapien
ataaatacatgataaacagtaagcagtataaat

SEQ ID NO: 74056 - DNA, 33 bp, Homo sapien
ataaatacatgataaagagtaagcagtataaat

SEQ ID NO: 74057 - DNA, 33 bp, Homo sapien
gcaaccaactcacagcaagaatgagaaagtgaa

SEQ ID NO: 74058 - DNA, 33 bp, Homo sapien
gcaaccaactcacagcgagaatgagaaagtgaa

SEQ ID NO: 74059 - DNA, 33 bp, Homo sapien
tgacaaatctcaattgaatactccaccctgcct

SEQ ID NO: 74060 - DNA, 33 bp, Homo sapien
tgacaaatctcaattggatactccaccctgcct

SEQ ID NO: 74061 - DNA, 33 bp, Homo sapien
tccaggttaatgaggacgttgcagcagcaaaga

SEQ ID NO: 74062 - DNA, 33 bp, Homo sapien
tccaggttaatgaggatgttgcagcagcaaaga

SEQ ID NO: 74063 - DNA, 33 bp, Homo sapien
gaagatgaagaaatacagaaagtggactcatgt

SEQ ID NO: 74064 - DNA, 33 bp, Homo sapien
gaagatgaagaaatacggaaagtggactcatgt

SEQ ID NO: 74065 - DNA, 33 bp, Homo sapien
aaaggttctaactataagaggcaggttaggtta

SEQ ID NO: 74066 - DNA, 33 bp, Homo sapien
aaaggttctaactatatgaggcaggttaggtta

SEQ ID NO: 74067 - DNA, 33 bp, Homo sapien
tcaggtttctaggtaacattagaggttcagaga

SEQ ID NO: 74068 - DNA, 33 bp, Homo sapien
tcaggtttctaggtaatattagaggttcagaga

SEQ ID NO: 74069 - DNA, 33 bp, Homo sapien
ggattgctacagtgacaaggatttgattgaaca

SEQ ID NO: 74070 - DNA, 33 bp, Homo sapien
ggattgctacagtgacgaggatttgattgaaca

SEQ ID NO: 74071 - DNA, 33 bp, Homo sapien
actggcaggagaaaaaggaaattcaatgatgtt

SEQ ID NO: 74072 - DNA, 33 bp, Homo sapien
actggcaggagaaaaatgaaattcaatgatgtt

SEQ ID NO: 74073 - DNA, 33 bp, Homo sapien
tgcagtgaatttagtcacctctccagttgcttt

SEQ ID NO: 74074 - DNA, 33 bp, Homo sapien
tgcagtgaatttagtcgcctctccagttgcttt

SEQ ID NO: 74075 - DNA, 33 bp, Homo sapien; identical to SEQ ID NO: 74073

SEQ ID NO: 74076 - DNA, 33 bp, Homo sapien; identical to SEQ ID NO: 74074

SEQ ID NO: 74077 - DNA, 33 bp, Homo sapien
tcagttgtttagtcagcacagtgagagagcatg

SEQ ID NO: 74078 - DNA, 33 bp, Homo sapien
tcagttgtttagtcagtacagtgagagagcatg

SEQ ID NO: 74079 - DNA, 33 bp, Homo sapien
accctctgctaaactgaaaaattgggatcatca

SEQ ID NO: 74080 - DNA, 33 bp, Homo sapien
accctctgctaaactgcaaaattgggatcatca

SEQ ID NO: 74081 - DNA, 33 bp, Homo sapien
ggaagtggattcatcccgagacttcagaaagga

SEQ ID NO: 74082 - DNA, 33 bp, Homo sapien
ggaagtggattcatcctgagacttcagaaagga

SEQ ID NO: 74083 - DNA, 33 bp, Homo sapien
tgtctttccatttcaccaaattgatcagctgtt

SEQ ID NO: 74084 - DNA, 33 bp, Homo sapien
tgtctttccatttcactaaattgatcagctgtt

SEQ ID NO: 74085 - DNA, 33 bp, Homo sapien
attgttgttttcatctaaatcagctggcctctc

SEQ ID NO: 74086 - DNA, 33 bp, Homo sapien
attgttgttttcatctgaatcagctggcctctc

SEQ ID NO: 74087 - DNA, 33 bp, Homo sapien
attactgaaccattcaaactctagcttcctaat

SEQ ID NO: 74088 - DNA, 33 bp, Homo sapien
attactgaaccattcagactctagcttcctaat

SEQ ID NO: 74089 - DNA, 33 bp, Homo sapien
atttcagtttagaaagaacttagtgatagagta

SEQ ID NO: 74090 - DNA, 33 bp, Homo sapien
atttcagtttagaaaggacttagtgatagagta

SEQ ID NO: 74091 - DNA, 33 bp, Homo sapien
tctataaaacctgatgcatttcacaatggacca

SEQ ID NO: 74092 - DNA, 33 bp, Homo sapien
tctataaaacctgatgtatttcacaatggacca

SEQ ID NO: 74093 - DNA, 33 bp, Homo sapien
taggagaagatatgacaaataggaggaaagaaa

SEQ ID NO: 74094 - DNA, 33 bp, Homo sapien
taggagaagatatgacgaataggaggaaagaaa

SEQ ID NO: 74095 - DNA, 33 bp, Homo sapien
cagcctctttcttcaaactcaggaccaggctct

SEQ ID NO: 74096 - DNA, 33 bp, Homo sapien
cagcctctttcttcaatctcaggaccaggctct

SEQ ID NO: 74097 - DNA, 33 bp, Homo sapien
ttcaagcgtgaaaagacagaaaggccttgagtt

SEQ ID NO: 74098 - DNA, 33 bp, Homo sapien
ttcaagcgtgaaaagatagaaaggccttgagtt

SEQ ID NO: 74099 - DNA, 33 bp, Homo sapien
atatgggttttatgcaagaagctgttcacgtat

SEQ ID NO: 74100 - DNA, 33 bp, Homo sapien
atatgggttttatgcaggaagctgttcacgtat

SEQ ID NO: 74101 - DNA, 33 bp, Homo sapien
accatctactgtgaaccagatccagttggtata

SEQ ID NO: 74102 - DNA, 33 bp, Homo sapien
accatctactgtgaacgagatccagttggtata

SEQ ID NO: 74103 - DNA, 33 bp, Homo sapien
taatcagttgcaaaggaaagaggaaaatctgaa

SEQ ID NO: 74104 - DNA, 33 bp, Homo sapien
taatcagttgcaaagggaagaggaaaatctgaa

SEQ ID NO: 74105 - DNA, 33 bp, Homo sapien
atggaatacaatggaacagatgccaaaaccatt

SEQ ID NO: 74106 - DNA, 33 bp, Homo sapien
atggaatacaatggaagagatgccaaaaccatt

SEQ ID NO: 74107 - DNA, 33 bp, Homo sapien
tttttgaacagcctaccccttatgaaagcaacc

SEQ ID NO: 74108 - DNA, 33 bp, Homo sapien
tttttgaacagcctactccttatgaaagcaacc

SEQ ID NO: 74109 - DNA, 33 bp, Homo sapien
ttaagtactgagaacacactaaaaagaaaagta

SEQ ID NO: 74110 - DNA, 33 bp, Homo sapien
ttaagtactgagaacatactaaaaagaaaagta

SEQ ID NO: 74111 - DNA, 33 bp, Homo sapien
aatcagaaaaactagcaaagagtggtagtccaa

SEQ ID NO: 74112 - DNA, 33 bp, Homo sapien
aatcagaaaaactagcgaagagtggtagtccaa

SEQ ID NO: 74113 - DNA, 33 bp, Homo sapien
ttaagttcctcaaaaacacattaaaggcagcaa

SEQ ID NO: 74114 - DNA, 33 bp, Homo sapien
ttaagttcctcaaaaatacattaaaggcagcaa

SEQ ID NO: 74115 - DNA, 33 bp, Homo sapien
aatatttcagtttcctgaagtatgacacaaata

SEQ ID NO: 74116 - DNA, 33 bp, Homo sapien
aatatttcagtttccttaagtatgacacaaata

SEQ ID NO: 74117 - DNA, 33 bp, Homo sapien
tgaaacatggaactacaggagggatatggttcc

SEQ ID NO: 74118 - DNA, 33 bp, Homo sapien
tgaaacatggaactaccggagggatatggttcc

SEQ ID NO: 74119 - DNA, 33 bp, Homo sapien
gggtatgaaattcataagttcgtgttttatttt

SEQ ID NO: 74120 - DNA, 33 bp, Homo sapien
gggtatgaaattcataggttcgtgttttatttt

SEQ ID NO: 74121 - DNA, 33 bp, Homo sapien
ctgtggaaaaatctgaatacagcctgatatttg

SEQ ID NO: 74122 - DNA, 33 bp, Homo sapien
ctgtggaaaaatctgagtacagcctgatatttg

SEQ ID NO: 74123 - DNA, 33 bp, Homo sapien
gctctccaatcctctaacttagtctgcctgttg

SEQ ID NO: 74124 - DNA, 33 bp, Homo sapien
gctctccaatcctctagcttagtctgcctgttg

SEQ ID NO: 74125 - DNA, 33 bp, Homo sapien
ctttcctctgtcttccccatttctgctactggg

SEQ ID NO: 74126 - DNA, 33 bp, Homo sapien
ctttcctctgtcttcctcatttctgctactggg

SEQ ID NO: 74127 - DNA, 33 bp, Homo sapien
cctctctcctaccttacgtttaattactcagca

SEQ ID NO: 74128 - DNA, 33 bp, Homo sapien
cctctctcctaccttatgtttaattactcagca

SEQ ID NO: 74129 - DNA, 33 bp, Homo sapien
tctagtttccttttcaatccagcaaagtccttt

SEQ ID NO: 74130 - DNA, 33 bp, Homo sapien
tctagtttccttttcagtccagcaaagtccttt

SEQ ID NO: 74131 - DNA, 33 bp, Homo sapien
tttcaaagacctgatactaactagagaaagaca

SEQ ID NO: 74132 - DNA, 33 bp, Homo sapien
tttcaaagacctgatagtaactagagaaagaca

SEQ ID NO: 74133 - DNA, 33 bp, Homo sapien
agaaagtgcttcgagacctatcagtgtagggta

SEQ ID NO: 74134 - DNA, 33 bp, Homo sapien
agaaagtgcttcgagatctatcagtgtagggta

SEQ ID NO: 74135 - DNA, 33 bp, Homo sapien
tgagtcaagtgaaaaactacagaaaccagaaag

SEQ ID NO: 74136 - DNA, 33 bp, Homo sapien
tgagtcaagtgaaaaattacagaaaccagaaag

SEQ ID NO: 74137 - DNA, 33 bp, Homo sapien
tcataaacaagcgctcaagatcgtttttattct

SEQ ID NO: 74138 - DNA, 33 bp, Homo sapien
tcataaacaagcgctcgagatcgtttttattct

SEQ ID NO: 74139 - DNA, 33 bp, Homo sapien
gcattttcatctgacccactatatttcacttaa

SEQ ID NO: 74140 - DNA, 33 bp, Homo sapien
gcattttcatctgacctactatatttcacttaa

SEQ ID NO: 74141 - DNA, 33 bp, Homo sapien
aaaaaaataagccagacgttgtatgcacctgta

SEQ ID NO: 74142 - DNA, 33 bp, Homo sapien
aaaaaaataagccagatgttgtatgcacctgta

SEQ ID NO: 74143 - DNA, 33 bp, Homo sapien
catttactactattagaattcggagaaaaaata

SEQ ID NO: 74144 - DNA, 33 bp, Homo sapien
catttactactattagcattcggagaaaaaata

SEQ ID NO: 74145 - DNA, 33 bp, Homo sapien
ccctgatgagctgccaaaaattgtagaatttag

SEQ ID NO: 74146 - DNA, 33 bp, Homo sapien
ccctgatgagctgccagaaattgtagaatttag

SEQ ID NO: 74147 - DNA, 33 bp, Homo sapien
ccagggcaaaattatacctgctatgcctgccac

SEQ ID NO: 74148 - DNA, 33 bp, Homo sapien
ccagggcaaaattatatctgctatgcctgccac

SEQ ID NO: 74149 - DNA, 33 bp, Homo sapien
tgctagaagaactgaacagctacacatgaaaga

SEQ ID NO: 74150 - DNA, 33 bp, Homo sapien
tgctagaagaactgaatagctacacatgaaaga

SEQ ID NO: 74151 - DNA, 33 bp, Homo sapien
ttttatttaaatcaaaagatgtaagttggccga

SEQ ID NO: 74152 - DNA, 33 bp, Homo sapien
ttttatttaaatcaaatgatgtaagttggccga

SEQ ID NO: 74153 - DNA, 33 bp, Homo sapien
gacatcgagatactaacaatcaactagagaaca

SEQ ID NO: 74154 - DNA, 33 bp, Homo sapien
gacatcgagatactaataatcaactagagaaca

SEQ ID NO: 74155 - DNA, 33 bp, Homo sapien
gctggaagtaatcttaagggcaagctacctcat

SEQ ID NO: 74156 - DNA, 33 bp, Homo sapien
gctggaagtaatcttaggggcaagctacctcat

SEQ ID NO: 74157 - DNA, 33 bp, Homo sapien
ccttagcaggaaattacggacctttcagatttt

SEQ ID NO: 74158 - DNA, 33 bp, Homo sapien
ccttagcaggaaattatggacctttcagatttt

SEQ ID NO: 74159 - DNA, 33 bp, Homo sapien
tcatacacactagaaaagcagaaaatttactta

SEQ ID NO: 74160 - DNA, 33 bp, Homo sapien
tcatacacactagaaaggcagaaaatttactta

SEQ ID NO: 74161 - DNA, 33 bp, Homo sapien
tatttgcagattgcctcaataaatggtcataca

SEQ ID NO: 74162 - DNA, 33 bp, Homo sapien
tatttgcagattgcctgaataaatggtcataca

SEQ ID NO: 74163 - DNA, 33 bp, Homo sapien
agacatctgagaaatacctttaacgtgaaagaa

SEQ ID NO: 74164 - DNA, 33 bp, Homo sapien
agacatctgagaaatatctttaacgtgaaagaa

SEQ ID NO: 74165 - DNA, 33 bp, Homo sapien
agacagaacacgaaacaagagtaccagtccaag

SEQ ID NO: 74166 - DNA, 33 bp, Homo sapien
agacagaacacgaaacgagagtaccagtccaag

SEQ ID NO: 74167 - DNA, 33 bp, Homo sapien
tcagcaatataagcaacaggccggacacagtgg

SEQ ID NO: 74168 - DNA, 33 bp, Homo sapien
tcagcaatataagcaataggccggacacagtgg

SEQ ID NO: 74169 - DNA, 33 bp, Homo sapien
gctggcaaagttaacactggtgtacttttcatt

SEQ ID NO: 74170 - DNA, 33 bp, Homo sapien
gctggcaaagttaacattggtgtacttttcatt

SEQ ID NO: 74171 - DNA, 33 bp, Homo sapien
gtaactgcagcaacagaaagaaccaattaacaa

SEQ ID NO: 74172 - DNA, 33 bp, Homo sapien
gtaactgcagcaacagcaagaaccaattaacaa

SEQ ID NO: 74173 - DNA, 33 bp, Homo sapien
tctcatgcttaagtcccaaataatgtacaagta

SEQ ID NO: 74174 - DNA, 33 bp, Homo sapien
tctcatgcttaagtcctaaataatgtacaagta

SEQ ID NO: 74175 - DNA, 33 bp, Homo sapien
atttattgcttcctaccatgttatacattggcc

SEQ ID NO: 74176 - DNA, 33 bp, Homo sapien
atttattgcttcctactatgttatacattggcc

SEQ ID NO: 74177 - DNA, 33 bp, Homo sapien
agttgtgcttctaaagaaaatgaaatgttaaat

SEQ ID NO: 74178 - DNA, 33 bp, Homo sapien
agttgtgcttctaaagcaaatgaaatgttaaat

SEQ ID NO: 74179 - DNA, 33 bp, Homo sapien
tacagctggtaggggactaaaggttcaaactta

SEQ ID NO: 74180 - DNA, 33 bp, Homo sapien
tacagctggtaggggattaaaggttcaaactta

SEQ ID NO: 74181 - DNA, 33 bp, Homo sapien
agtgggagcttaacgacgagaacacatgaacac

SEQ ID NO: 74182 - DNA, 33 bp, Homo sapien
agtgggagcttaacgatgagaacacatgaacac

SEQ ID NO: 74183 - DNA, 33 bp, Homo sapien
aacttggaatatggagacagttcagatatcctc

SEQ ID NO: 74184 - DNA, 33 bp, Homo sapien
aacttggaatatggaggcagttcagatatcctc

SEQ ID NO: 74185 - DNA, 33 bp, Homo sapien
tatggttcagaagactcagacatataaataaag

SEQ ID NO: 74186 - DNA, 33 bp, Homo sapien
tatggttcagaagacttagacatataaataaag

SEQ ID NO: 74187 - DNA, 33 bp, Homo sapien
tctatttcattttcccaaaaagctggataaggt

SEQ ID NO: 74188 - DNA, 33 bp, Homo sapien
tctatttcattttcccgaaaagctggataaggt

SEQ ID NO: 74189 - DNA, 33 bp, Homo sapien
gaaaagtaaattaaaactggccatagttcatga

SEQ ID NO: 74190 - DNA, 33 bp, Homo sapien
gaaaagtaaattaaaattggccatagttcatga

SEQ ID NO: 74191 - DNA, 33 bp, Homo sapien
gtaaatggcgctataaataaatgtgacagcctc

SEQ ID NO: 74192 - DNA, 33 bp, Homo sapien
gtaaatggcgctataagtaaatgtgacagcctc

SEQ ID NO: 74193 - DNA, 33 bp, Homo sapien
ataaacagccagaactcagcaatattctaatat

SEQ ID NO: 74194 - DNA, 33 bp, Homo sapien
ataaacagccagaactgagcaatattctaatat

SEQ ID NO: 74195 - DNA, 33 bp, Homo sapien
cgtaacacccgactaacgcagaagaaaagttta

SEQ ID NO: 74196 - DNA, 33 bp, Homo sapien
cgtaacacccgactaatgcagaagaaaagttta

SEQ ID NO: 74197 - DNA, 33 bp, Homo sapien
tgtttgtcaagtcacaatatgagcaaatctatc

SEQ ID NO: 74198 - DNA, 33 bp, Homo sapien
tgtttgtcaagtcacagtatgagcaaatctatc

SEQ ID NO: 74199 - DNA, 33 bp, Homo sapien
tttagtatatccttgccgaaaaaagaagacatg

SEQ ID NO: 74200 - DNA, 33 bp, Homo sapien
tttagtatatccttgctgaaaaaagaagacatg

SEQ ID NO: 74201 - DNA, 33 bp, Homo sapien
tcacagcctctgaaaaaacttccttaaccaccc

SEQ ID NO: 74202 - DNA, 33 bp, Homo sapien
tcacagcctctgaaaagacttccttaaccaccc

SEQ ID NO: 74203 - DNA, 33 bp, Homo sapien
ccactctccaaatacaacattctctcttactct

SEQ ID NO: 74204 - DNA, 33 bp, Homo sapien
ccactctccaaatacagcattctctcttactct

SEQ ID NO: 74205 - DNA, 33 bp, Homo sapien
tcaagctggataaagacgcaaaaccttcaagga

SEQ ID NO: 74206 - DNA, 33 bp, Homo sapien
tcaagctggataaagaggcaaaaccttcaagga

SEQ ID NO: 74207 - DNA, 33 bp, Homo sapien
catcaactcagaagagaagtagaaatacagtcc

SEQ ID NO: 74208 - DNA, 33 bp, Homo sapien
catcaactcagaagagcagtagaaatacagtcc

SEQ ID NO: 74209 - DNA, 33 bp, Homo sapien
cctgtcaggaagtgaacgagaatctacattagg

SEQ ID NO: 74210 - DNA, 33 bp, Homo sapien
cctgtcaggaagtgaatgagaatctacattagg

SEQ ID NO: 74211 - DNA, 33 bp, Homo sapien
tgcacagaatgtgaaaccacttagtacagagac

SEQ ID NO: 74212 - DNA, 33 bp, Homo sapien
tgcacagaatgtgaaatcacttagtacagagac

SEQ ID NO: 74213 - DNA, 33 bp, Homo sapien
atccatttttaccaaccacagatgagtagaggt

SEQ ID NO: 74214 - DNA, 33 bp, Homo sapien
atccatttttaccaactacagatgagtagaggt

SEQ ID NO: 74215 - DNA, 33 bp, Homo sapien
cactcttacggattcaagtcttgcctttctcag

SEQ ID NO: 74216 - DNA, 33 bp, Homo sapien
cactcttacggattcaggtcttgcctttctcag

SEQ ID NO: 74217 - DNA, 33 bp, Homo sapien
aactgtaaaatgttaactcaaggtagaacaaaa

SEQ ID NO: 74218 - DNA, 33 bp, Homo sapien
aactgtaaaatgttaattcaaggtagaacaaaa

SEQ ID NO: 74219 - DNA, 33 bp, Homo sapien
atatttaatgtaaatacaggcagttggcttctg

SEQ ID NO: 74220 - DNA, 33 bp, Homo sapien
atatttaatgtaaatataggcagttggcttctg

SEQ ID NO: 74221 - DNA, 33 bp, Homo sapien
cattttgaactggacaacgctaaagaggttggc

SEQ ID NO: 74222 - DNA, 33 bp, Homo sapien
cattttgaactggacatcgctaaagaggttggc

SEQ ID NO: 74223 - DNA, 33 bp, Homo sapien
ccactacattatttcacagacccaagagtgttc

SEQ ID NO: 74224 - DNA, 33 bp, Homo sapien
ccactacattatttcagagacccaagagtgttc

SEQ ID NO: 74225 - DNA, 33 bp, Homo sapien
ttacgatggagttgtaaatttatacatttctag

SEQ ID NO: 74226 - DNA, 33 bp, Homo sapien
ttacgatggagttgtacatttatacatttctag

SEQ ID NO: 74227 - DNA, 33 bp, Homo sapien
cagtgtatcctcaccaacatggaatattatctt

SEQ ID NO: 74228 - DNA, 33 bp, Homo sapien
cagtgtatcctcaccagcatggaatattatctt

SEQ ID NO: 74229 - DNA, 33 bp, Homo sapien
tccaagaggtgatatgcagtaggtcattgagta

SEQ ID NO: 74230 - DNA, 33 bp, Homo sapien
tccaagaggtgatatgtagtaggtcattgagta

SEQ ID NO: 74231 - DNA, 33 bp, Homo sapien
cttatgtgtcttttgcaaccctttaaatgttga

SEQ ID NO: 74232 - DNA, 33 bp, Homo sapien
cttatgtgtcttttgcgaccctttaaatgttga

SEQ ID NO: 74233 - DNA, 33 bp, Homo sapien
tcatttatgccttgagactaaaccagaggtcca

SEQ ID NO: 74234 - DNA, 33 bp, Homo sapien
tcatttatgccttgagcctaaaccagaggtcca

SEQ ID NO: 74235 - DNA, 33 bp, Homo sapien
aaggtgttccctgttaaagaggtcagactgtac

SEQ ID NO: 74236 - DNA, 33 bp, Homo sapien
aaggtgttccctgttacagaggtcagactgtac

SEQ ID NO: 74237 - DNA, 33 bp, Homo sapien
tcctgaggaatgggacaaaaatagcaaaaaaga

SEQ ID NO: 74238 - DNA, 33 bp, Homo sapien
tcctgaggaatgggacgaaaatagcaaaaaaga

SEQ ID NO: 74239 - DNA, 33 bp, Homo sapien
caaacctggtaaatacgctctccatcccctgtg

SEQ ID NO: 74240 - DNA, 33 bp, Homo sapien
caaacctggtaaatactctctccatcccctgtg

SEQ ID NO: 74241 - DNA, 33 bp, Homo sapien
ctgctgtctctcatcagtcccacctcttgggat

SEQ ID NO: 74242 - DNA, 33 bp, Homo sapien
ctgctgtctctcatcattcccacctcttgggat

SEQ ID NO: 74243 - DNA, 33 bp, Homo sapien
ctggaaagatgcaagaagaaagggacctggtgc

SEQ ID NO: 74244 - DNA, 33 bp, Homo sapien
ctggaaagatgcaagaggaaagggacctggtgc

SEQ ID NO: 74245 - DNA, 33 bp, Homo sapien
ttgactctgccaaatcaatagaaaatctgaaag

SEQ ID NO: 74246 - DNA, 33 bp, Homo sapien
ttgactctgccaaatcgatagaaaatctgaaag

SEQ ID NO: 74247 - DNA, 33 bp, Homo sapien
tggatgaagtttggagacattacgaaagtgaaa

SEQ ID NO: 74248 - DNA, 33 bp, Homo sapien
tggatgaagtttggaggcattacgaaagtgaaa

SEQ ID NO: 74249 - DNA, 33 bp, Homo sapien
aatttcagtgactttaccaccttagtaaaacaa

SEQ ID NO: 74250 - DNA, 33 bp, Homo sapien
aatttcagtgactttatcaccttagtaaaacaa

SEQ ID NO: 74251 - DNA, 33 bp, Homo sapien
ataaaactttactgaaagcttcaattctgcaag

SEQ ID NO: 74252 - DNA, 33 bp, Homo sapien
ataaaactttactgaaggcttcaattctgcaag

SEQ ID NO: 74253 - DNA, 33 bp, Homo sapien
aatctttcatcatactaaatttcagttactcac

SEQ ID NO: 74254 - DNA, 33 bp, Homo sapien
aatctttcatcatactgaatttcagttactcac

SEQ ID NO: 74255 - DNA, 33 bp, Homo sapien
aacatgtatctctttacgaatgtgttgacatag

SEQ ID NO: 74256 - DNA, 33 bp, Homo sapien
aacatgtatctctttatgaatgtgttgacatag

SEQ ID NO: 74257 - DNA, 33 bp, Homo sapien
aacaggaaagagaacaaggcaagttagaggaat

SEQ ID NO: 74258 - DNA, 33 bp, Homo sapien
aacaggaaagagaacacggcaagttagaggaat

SEQ ID NO: 74259 - DNA, 33 bp, Homo sapien
aacctgtcagagtaagccattttgattagttct

SEQ ID NO: 74260 - DNA, 33 bp, Homo sapien
aacctgtcagagtaaggcattttgattagttct

SEQ ID NO: 74261 - DNA, 33 bp, Homo sapien
tgtctttgttttgataacttttgatcattttgg

SEQ ID NO: 74262 - DNA, 33 bp, Homo sapien
tgtctttgttttgatatcttttgatcattttgg

SEQ ID NO: 74263 - DNA, 33 bp, Homo sapien
acacacacacttgtcccgaatcttggtcctttt

SEQ ID NO: 74264 - DNA, 33 bp, Homo sapien
acacacacacttgtcctgaatcttggtcctttt

SEQ ID NO: 74265 - DNA, 33 bp, Homo sapien
tctccagcagacgtacactttagggctgcctga

SEQ ID NO: 74266 - DNA, 33 bp, Homo sapien
tctccagcagacgtacgctttagggctgcctga

SEQ ID NO: 74267 - DNA, 33 bp, Homo sapien
ggctctggagtcagacagtctagcttcaaatcc

SEQ ID NO: 74268 - DNA, 33 bp, Homo sapien
ggctctggagtcagacggtctagcttcaaatcc

SEQ ID NO: 74269 - DNA, 33 bp, Homo sapien
acattcaatccttaagacaactatatttagtag

SEQ ID NO: 74270 - DNA, 33 bp, Homo sapien
acattcaatccttaaggcaactatatttagtag

SEQ ID NO: 74271 - DNA, 33 bp, Homo sapien
aaagcacagtagccaaatcttccacatggagtc

SEQ ID NO: 74272 - DNA, 33 bp, Homo sapien
aaagcacagtagccaagtcttccacatggagtc

SEQ ID NO: 74273 - DNA, 33 bp, Homo sapien
tcagtgggaactagggaaaatgggaggatctca

SEQ ID NO: 74274 - DNA, 33 bp, Homo sapien
tcagtgggaactaggggaaatgggaggatctca

SEQ ID NO: 74275 - DNA, 33 bp, Homo sapien
aatatttgtctgttcacggttttaatttcttcc

SEQ ID NO: 74276 - DNA, 33 bp, Homo sapien
aatatttgtctgttcatggttttaatttcttcc

SEQ ID NO: 74277 - DNA, 33 bp, Homo sapien
atgatttgtaaccaagaaaggactgacagtgac

SEQ ID NO: 74278 - DNA, 33 bp, Homo sapien
atgatttgtaaccaaggaaggactgacagtgac

SEQ ID NO: 74279 - DNA, 33 bp, Homo sapien
agtctaattaggcattcaaacagagtgatgatc

SEQ ID NO: 74280 - DNA, 33 bp, Homo sapien
agtctaattaggcattgaaacagagtgatgatc

SEQ ID NO: 74281 - DNA, 33 bp, Homo sapien
gtgaaattatttttaacctctggcattttgaca

SEQ ID NO: 74282 - DNA, 33 bp, Homo sapien
gtgaaattatttttaatctctggcattttgaca

SEQ ID NO: 74283 - DNA, 33 bp, Homo sapien
gttgggtcttagggaaaaaggaggcccaaggaa

SEQ ID NO: 74284 - DNA, 33 bp, Homo sapien
gttgggtcttagggaacaaggaggcccaaggaa

SEQ ID NO: 74285 - DNA, 33 bp, Homo sapien
cagttagccacatgtacctttggtttacaagaa

SEQ ID NO: 74286 - DNA, 33 bp, Homo sapien
cagttagccacatgtatctttggtttacaagaa

SEQ ID NO: 74287 - DNA, 33 bp, Homo sapien
agtgtttgagcaactacagcggtatatctggtt

SEQ ID NO: 74288 - DNA, 33 bp, Homo sapien
agtgtttgagcaactatagcggtatatctggtt

SEQ ID NO: 74289 - DNA, 33 bp, Homo sapien
ttggcacccatttggaacattaaattcacttag

SEQ ID NO: 74290 - DNA, 33 bp, Homo sapien
ttggcacccatttggagcattaaattcacttag

SEQ ID NO: 74291 - DNA, 33 bp, Homo sapien
aagtccttcccaataaccacactcaaccagtcc

SEQ ID NO: 74292 - DNA, 33 bp, Homo sapien
aagtccttcccaataatcacactcaaccagtcc

SEQ ID NO: 74293 - DNA, 33 bp, Homo sapien
ctgaaagcaggatctcaaagggatattagcact

SEQ ID NO: 74294 - DNA, 33 bp, Homo sapien
ctgaaagcaggatctcgaagggatattagcact

SEQ ID NO: 74295 - DNA, 33 bp, Homo sapien
atatgtggtggctagaatctaataatagtaaca

SEQ ID NO: 74296 - DNA, 33 bp, Homo sapien
atatgtggtggctagagtctaataatagtaaca

SEQ ID NO: 74297 - DNA, 33 bp, Homo sapien
gaaaaagacaaaaagaaagaacatgtgttaata

SEQ ID NO: 74298 - DNA, 33 bp, Homo sapien
gaaaaagacaaaaagacagaacatgtgttaata

SEQ ID NO: 74299 - DNA, 33 bp, Homo sapien
ttctgagtgtttcaataagagtgttttgaatga

SEQ ID NO: 74300 - DNA, 33 bp, Homo sapien
ttctgagtgtttcaatgagagtgttttgaatga

SEQ ID NO: 74301 - DNA, 33 bp, Homo sapien
aattagaggcagcttaacccaacaggtactgtg

SEQ ID NO: 74302 - DNA, 33 bp, Homo sapien
aattagaggcagcttagcccaacaggtactgtg

SEQ ID NO: 74303 - DNA, 33 bp, Homo sapien
cttatatcagcttaacaaaaaaaatctacctaa

SEQ ID NO: 74304 - DNA, 33 bp, Homo sapien
cttatatcagcttaaccaaaaaaatctacctaa

SEQ ID NO: 74305 - DNA, 33 bp, Homo sapien
gcttctcaaatctgtgaattgatgcctttcatc

SEQ ID NO: 74306 - DNA, 33 bp, Homo sapien
gcttctcaaatctgtggattgatgcctttcatc

SEQ ID NO: 74307 - DNA, 33 bp, Homo sapien
tggatgaacaaatggaagaaaacaaagcaaaag

SEQ ID NO: 74308 - DNA, 33 bp, Homo sapien
tggatgaacaaatggacgaaaacaaagcaaaag

SEQ ID NO: 74309 - DNA, 33 bp, Homo sapien
atttcctcgtctgtataacaatgaggttggatt

SEQ ID NO: 74310 - DNA, 33 bp, Homo sapien
atttcctcgtctgtatgacaatgaggttggatt

SEQ ID NO: 74311 - DNA, 33 bp, Homo sapien
aatacatcaaaatgaacgttaaagctttgcttt

SEQ ID NO: 74312 - DNA, 33 bp, Homo sapien
aatacatcaaaatgaaggttaaagctttgcttt

SEQ ID NO: 74313 - DNA, 33 bp, Homo sapien
tctcactgccacaatacagcttggagtgtcact

SEQ ID NO: 74314 - DNA, 33 bp, Homo sapien
tctcactgccacaatatagcttggagtgtcact

SEQ ID NO: 74315 - DNA, 33 bp, Homo sapien
tttttaaaaacaggcaagtcttgttctccaaag

SEQ ID NO: 74316 - DNA, 33 bp, Homo sapien
tttttaaaaacaggcacgtcttgttctccaaag

SEQ ID NO: 74317 - DNA, 33 bp, Homo sapien
gaggaaggtatcaagacccttgctctaggcagc

SEQ ID NO: 74318 - DNA, 33 bp, Homo sapien
gaggaaggtatcaagatccttgctctaggcagc

SEQ ID NO: 74319 - DNA, 33 bp, Homo sapien
aatacacacagaaaacacacataccttagaggc

SEQ ID NO: 74320 - DNA, 33 bp, Homo sapien
aatacacacagaaaacgcacataccttagaggc

SEQ ID NO: 74321 - DNA, 33 bp, Homo sapien
aggtattaagatatcaagaaaagtcatataaaa

SEQ ID NO: 74322 - DNA, 33 bp, Homo sapien
aggtattaagatatcaggaaaagtcatataaaa

SEQ ID NO: 74323 - DNA, 33 bp, Homo sapien
cacgagacaatctgtagaaaagcgttccaaaca

SEQ ID NO: 74324 - DNA, 33 bp, Homo sapien
cacgagacaatctgtataaaagcgttccaaaca

SEQ ID NO: 74325 - DNA, 33 bp, Homo sapien
ttataggtgtgagatagaagaaagggtttaaag

SEQ ID NO: 74326 - DNA, 33 bp, Homo sapien
ttataggtgtgagatataagaaagggtttaaag

SEQ ID NO: 74327 - DNA, 33 bp, Homo sapien
tccctgactgaactccaatgtgataaattaaat

SEQ ID NO: 74328 - DNA, 33 bp, Homo sapien
tccctgactgaactccgatgtgataaattaaat

SEQ ID NO: 74329 - DNA, 33 bp, Homo sapien
tggccaagctgacaagcagtgggttttaatgac

SEQ ID NO: 74330 - DNA, 33 bp, Homo sapien
tggccaagctgacaaggagtgggttttaatgac

SEQ ID NO: 74331 - DNA, 33 bp, Homo sapien
atgtctaaatcaacaaatatggcctcatgggga

SEQ ID NO: 74332 - DNA, 33 bp, Homo sapien
atgtctaaatcaacaagtatggcctcatgggga

SEQ ID NO: 74333 - DNA, 33 bp, Homo sapien
ctgctcccctgctacactgatgtctaaatcaac

SEQ ID NO: 74334 - DNA, 33 bp, Homo sapien
ctgctcccctgctacattgatgtctaaatcaac

SEQ ID NO: 74335 - DNA, 33 bp, Homo sapien
catgtcccaactcttacgctggatcaaaaagcc

SEQ ID NO: 74336 - DNA, 33 bp, Homo sapien
catgtcccaactcttatgctggatcaaaaagcc

SEQ ID NO: 74337 - DNA, 33 bp, Homo sapien
tggaatggcaaactcacaatagaaagaaaattt

SEQ ID NO: 74338 - DNA, 33 bp, Homo sapien
tggaatggcaaactcagaatagaaagaaaattt

SEQ ID NO: 74339 - DNA, 33 bp, Homo sapien
cttgacaaggctagtcccagtggaatgatggag

SEQ ID NO: 74340 - DNA, 33 bp, Homo sapien
cttgacaaggctagtctcagtggaatgatggag

SEQ ID NO: 74341 - DNA, 33 bp, Homo sapien
tagccatctcacttatcagataggctgtctcgg

SEQ ID NO: 74342 - DNA, 33 bp, Homo sapien
tagccatctcacttattagataggctgtctcgg

SEQ ID NO: 74343 - DNA, 33 bp, Homo sapien
caatggatgacattgccagctttttgtttgtca

SEQ ID NO: 74344 - DNA, 33 bp, Homo sapien
caatggatgacattgcgagctttttgtttgtca

SEQ ID NO: 74345 - DNA, 33 bp, Homo sapien
aatgcaggaagaggaccgatatcaatatgtaca

SEQ ID NO: 74346 - DNA, 33 bp, Homo sapien
aatgcaggaagaggactgatatcaatatgtaca

SEQ ID NO: 74347 - DNA, 33 bp, Homo sapien
agctattgatcaggaaagtgagatcagctatcc

SEQ ID NO: 74348 - DNA, 33 bp, Homo sapien
agctattgatcaggaaggtgagatcagctatcc

SEQ ID NO: 74349 - DNA, 33 bp, Homo sapien
tttagaagttctgaagaaaaagcagatcaagtc

SEQ ID NO: 74350 - DNA, 33 bp, Homo sapien
tttagaagttctgaaggaaaagcagatcaagtc

SEQ ID NO: 74351 - DNA, 33 bp, Homo sapien
caagaaggaaacaaagacctctgaacaactaga

SEQ ID NO: 74352 - DNA, 33 bp, Homo sapien
caagaaggaaacaaaggcctctgaacaactaga

SEQ ID NO: 74353 - DNA, 33 bp, Homo sapien
tcctagcctaaactcacatatctagaattaact

SEQ ID NO: 74354 - DNA, 33 bp, Homo sapien
tcctagcctaaactcagatatctagaattaact

SEQ ID NO: 74355 - DNA, 33 bp, Homo sapien
cccatcgccgtggtgaatatcaatgtcaatata

SEQ ID NO: 74356 - DNA, 33 bp, Homo sapien
cccatcgccgtggtgattatcaatgtcaatata

SEQ ID NO: 74357 - DNA, 33 bp, Homo sapien
cacacatttttgaagtcaagtctttgttctttc

SEQ ID NO: 74358 - DNA, 33 bp, Homo sapien
cacacatttttgaagttaagtctttgttctttc

SEQ ID NO: 74359 - DNA, 33 bp, Homo sapien
aaaacaatttttaagacattggctattagtcaa

SEQ ID NO: 74360 - DNA, 33 bp, Homo sapien
aaaacaatttttaagatattggctattagtcaa

SEQ ID NO: 74361 - DNA, 33 bp, Homo sapien
caagtagaaaacaccacgaagagcctgtgaaaa

SEQ ID NO: 74362 - DNA, 33 bp, Homo sapien
caagtagaaaacaccatgaagagcctgtgaaaa

SEQ ID NO: 74363 - DNA, 33 bp, Homo sapien
atcacgctcagtgctacggagggcatggcgaga

SEQ ID NO: 74364 - DNA, 33 bp, Homo sapien
atcacgctcagtgctagggagggcatggcgaga

SEQ ID NO: 74365 - DNA, 33 bp, Homo sapien
ggactccatctgctcacgttcaaattagcaacg

SEQ ID NO: 74366 - DNA, 33 bp, Homo sapien
ggactccatctgctcatgttcaaattagcaacg

SEQ ID NO: 74367 - DNA, 33 bp, Homo sapien
atgctaagtgaagtaaacaagacccgcaagatc

SEQ ID NO: 74368 - DNA, 33 bp, Homo sapien
atgctaagtgaagtaagcaagacccgcaagatc

SEQ ID NO: 74369 - DNA, 33 bp, Homo sapien
gaacttcagctctgcccctaaccagatatatac

SEQ ID NO: 74370 - DNA, 33 bp, Homo sapien
gaacttcagctctgcctctaaccagatatatac

SEQ ID NO: 74371 - DNA, 33 bp, Homo sapien
acatatactgcctccacgtctgcgcttcttatt

SEQ ID NO: 74372 - DNA, 33 bp, Homo sapien
acatatactgcctccatgtctgcgcttcttatt

SEQ ID NO: 74373 - DNA, 33 bp, Homo sapien
ctgggctttagagcgacggatgctagttggcag

SEQ ID NO: 74374 - DNA, 33 bp, Homo sapien
ctgggctttagagcgatggatgctagttggcag

SEQ ID NO: 74375 - DNA, 33 bp, Homo sapien
ccagagcagggagggacgaatgtaccatctact

SEQ ID NO: 74376 - DNA, 33 bp, Homo sapien
ccagagcagggagggatgaatgtaccatctact

SEQ ID NO: 74377 - DNA, 33 bp, Homo sapien
ggctcaggtccaaatcaattgaattataggaca

SEQ ID NO: 74378 - DNA, 33 bp, Homo sapien
ggctcaggtccaaatcgattgaattataggaca

SEQ ID NO: 74379 - DNA, 33 bp, Homo sapien
tgttaaatgtctgagtaactaaatagatgaaag

SEQ ID NO: 74380 - DNA, 33 bp, Homo sapien
tgttaaatgtctgagtgactaaatagatgaaag

SEQ ID NO: 74381 - DNA, 33 bp, Homo sapien
atctaagaaaaactcacgtcatacctaatggtg

SEQ ID NO: 74382 - DNA, 33 bp, Homo sapien
atctaagaaaaactcatgtcatacctaatggtg

SEQ ID NO: 74383 - DNA, 33 bp, Homo sapien
ttcattaatcatcctaataatgactaggaacat

SEQ ID NO: 74384 - DNA, 33 bp, Homo sapien
ttcattaatcatcctactaatgactaggaacat

SEQ ID NO: 74385 - DNA, 33 bp, Homo sapien
acttttcacagttcaaaattcaaaaagcttaag

SEQ ID NO: 74386 - DNA, 33 bp, Homo sapien
acttttcacagttcaagattcaaaaagcttaag

SEQ ID NO: 74387 - DNA, 33 bp, Homo sapien
tcctggctggaaagtacagagcaaaggccagga

SEQ ID NO: 74388 - DNA, 33 bp, Homo sapien
tcctggctggaaagtagagagcaaaggccagga

SEQ ID NO: 74389 - DNA, 33 bp, Homo sapien
tcaaagatacctctcactcgctgttcacaatag

SEQ ID NO: 74390 - DNA, 33 bp, Homo sapien
tcaaagatacctctcattcgctgttcacaatag

SEQ ID NO: 74391 - DNA, 33 bp, Homo sapien
ccaacctagtctgcaacactaaaagccagcacc

SEQ ID NO: 74392 - DNA, 33 bp, Homo sapien
ccaacctagtctgcaatactaaaagccagcacc

SEQ ID NO: 74393 - DNA, 33 bp, Homo sapien
caagatgtcaaagcgtaaaacatgcagaaaatt

SEQ ID NO: 74394 - DNA, 33 bp, Homo sapien
caagatgtcaaagcgttaaacatgcagaaaatt

SEQ ID NO: 74395 - DNA, 33 bp, Homo sapien
cgcagagtcaacttgaaaagctctggaagctcc

SEQ ID NO: 74396 - DNA, 33 bp, Homo sapien
cgcagagtcaacttgagaagctctggaagctcc

SEQ ID NO: 74397 - DNA, 33 bp, Homo sapien
tgtggttgagatgaagacatattccttgggtgt

SEQ ID NO: 74398 - DNA, 33 bp, Homo sapien
tgtggttgagatgaaggcatattccttgggtgt

SEQ ID NO: 74399 - DNA, 33 bp, Homo sapien
aatcaaataacataaaacaacaacctcaagtta

SEQ ID NO: 74400 - DNA, 33 bp, Homo sapien
aatcaaataacataaaccaacaacctcaagtta

SEQ ID NO: 74401 - DNA, 33 bp, Homo sapien
gtaagcccatcatagcacaggaataaaatgaca

SEQ ID NO: 74402 - DNA, 33 bp, Homo sapien
gtaagcccatcatagcgcaggaataaaatgaca

SEQ ID NO: 74403 - DNA, 33 bp, Homo sapien
tgatttttctcgaacaatcctctggccacgcac

SEQ ID NO: 74404 - DNA, 33 bp, Homo sapien
tgatttttctcgaacagtcctctggccacgcac

SEQ ID NO: 74405 - DNA, 33 bp, Homo sapien
cttcatcatcatactactaaaaggtagcctgtg

SEQ ID NO: 74406 - DNA, 33 bp, Homo sapien
cttcatcatcatactattaaaaggtagcctgtg

SEQ ID NO: 74407 - DNA, 33 bp, Homo sapien
ttgaatttcacagggcaatcctctgtccaggtc

SEQ ID NO: 74408 - DNA, 33 bp, Homo sapien
ttgaatttcacagggctatcctctgtccaggtc

SEQ ID NO: 74409 - DNA, 33 bp, Homo sapien
tatagctctacatacaccccctcccgtgtgcag

SEQ ID NO: 74410 - DNA, 33 bp, Homo sapien
tatagctctacatacatcccctcccgtgtgcag

SEQ ID NO: 74411 - DNA, 33 bp, Homo sapien
aattgtaaatctgaaggcatcatgaaataacct

SEQ ID NO: 74412 - DNA, 33 bp, Homo sapien
aattgtaaatctgaagtcatcatgaaataacct

SEQ ID NO: 74413 - DNA, 33 bp, Homo sapien
tctggactactgcagaagttaatctttttccag

SEQ ID NO: 74414 - DNA, 33 bp, Homo sapien
tctggactactgcagatgttaatctttttccag

SEQ ID NO: 74415 - DNA, 33 bp, Homo sapien
tggctgagctggggataacacagactctccttg

SEQ ID NO: 74416 - DNA, 33 bp, Homo sapien
tggctgagctggggatgacacagactctccttg

SEQ ID NO: 74417 - DNA, 33 bp, Homo sapien
tggaggcggctagcttaaagaggttggttccca

SEQ ID NO: 74418 - DNA, 33 bp, Homo sapien
tggaggcggctagcttgaagaggttggttccca

SEQ ID NO: 74419 - DNA, 33 bp, Homo sapien
ttttcatctcaatctccagaaagcctgatcact

SEQ ID NO: 74420 - DNA, 33 bp, Homo sapien
ttttcatctcaatctctagaaagcctgatcact

SEQ ID NO: 74421 - DNA, 33 bp, Homo sapien
atccaacatatatctgaagaacagtttgagctc

SEQ ID NO: 74422 - DNA, 33 bp, Homo sapien
atccaacatatatctggagaacagtttgagctc

SEQ ID NO: 74423 - DNA, 33 bp, Homo sapien
ttgagtggttatgaaaccctttgaaattaagtg

SEQ ID NO: 74424 - DNA, 33 bp, Homo sapien
ttgagtggttatgaaatcctttgaaattaagtg

SEQ ID NO: 74425 - DNA, 33 bp, Homo sapien
tggcttcctgccataacggttcacacatatcct

SEQ ID NO: 74426 - DNA, 33 bp, Homo sapien
tggcttcctgccataatggttcacacatatcct

SEQ ID NO: 74427 - DNA, 33 bp, Homo sapien
acttgaggcctttcaacgagtagaatttgttct

SEQ ID NO: 74428 - DNA, 33 bp, Homo sapien
acttgaggcctttcaatgagtagaatttgttct

SEQ ID NO: 74429 - DNA, 33 bp, Homo sapien
tccatgtgcaattacagaatggaatgaaaaaaa

SEQ ID NO: 74430 - DNA, 33 bp, Homo sapien
tccatgtgcaattacataatggaatgaaaaaaa

SEQ ID NO: 74431 - DNA, 33 bp, Homo sapien
tggaatctgacatacaactgcaaactgtaaaaa

SEQ ID NO: 74432 - DNA, 33 bp, Homo sapien
tggaatctgacatacagctgcaaactgtaaaaa

SEQ ID NO: 74433 - DNA, 33 bp, Homo sapien
atgccaacttgcacaactggaatctgacataca

SEQ ID NO: 74434 - DNA, 33 bp, Homo sapien
atgccaacttgcacaattggaatctgacataca

SEQ ID NO: 74435 - DNA, 33 bp, Homo sapien
cagtatatggtactacaaaccctgcttttatga

SEQ ID NO: 74436 - DNA, 33 bp, Homo sapien
cagtatatggtactaccaaccctgcttttatga

SEQ ID NO: 74437 - DNA, 33 bp, Homo sapien
tatctgcaaggctattgaaaacttctgagtcac

SEQ ID NO: 74438 - DNA, 33 bp, Homo sapien
tatctgcaaggctatttaaaacttctgagtcac

SEQ ID NO: 74439 - DNA, 33 bp, Homo sapien
tattgtaatttcaggaagcgatgtctatgcaga

SEQ ID NO: 74440 - DNA, 33 bp, Homo sapien
tattgtaatttcaggatgcgatgtctatgcaga

SEQ ID NO: 74441 - DNA, 33 bp, Homo sapien
gcagatggaaggtggcactgcaagcatttcagg

SEQ ID NO: 74442 - DNA, 33 bp, Homo sapien
gcagatggaaggtggcgctgcaagcatttcagg

SEQ ID NO: 74443 - DNA, 33 bp, Homo sapien
ggtgcacaaatcacacaggggagaaagaaagct

SEQ ID NO: 74444 - DNA, 33 bp, Homo sapien
ggtgcacaaatcacaccggggagaaagaaagct

SEQ ID NO: 74445 - DNA, 33 bp, Homo sapien
gagtaagcattgccagaacagttaaaccaacac

SEQ ID NO: 74446 - DNA, 33 bp, Homo sapien
gagtaagcattgccagcacagttaaaccaacac

SEQ ID NO: 74447 - DNA, 33 bp, Homo sapien
ggttgttgatcaaagaagactgaatcattggcc

SEQ ID NO: 74448 - DNA, 33 bp, Homo sapien
ggttgttgatcaaagatgactgaatcattggcc

SEQ ID NO: 74449 - DNA, 33 bp, Homo sapien
gcaggacagaaatagacgattctgtgtaaatca

SEQ ID NO: 74450 - DNA, 33 bp, Homo sapien
gcaggacagaaatagatgattctgtgtaaatca

SEQ ID NO: 74451 - DNA, 33 bp, Homo sapien
cttcgctttgtctcaacctatctgtagtttcaa

SEQ ID NO: 74452 - DNA, 33 bp, Homo sapien
cttcgctttgtctcaatctatctgtagtttcaa

SEQ ID NO: 74453 - DNA, 33 bp, Homo sapien
ttagaaacttccaacccaaagacgagggcagca

SEQ ID NO: 74454 - DNA, 33 bp, Homo sapien
ttagaaacttccaaccgaaagacgagggcagca

SEQ ID NO: 74455 - DNA, 33 bp, Homo sapien
tcttagttcttaaagccatattctgctcattat

SEQ ID NO: 74456 - DNA, 33 bp, Homo sapien
tcttagttcttaaagctatattctgctcattat

SEQ ID NO: 74457 - DNA, 33 bp, Homo sapien
ccacactttgaattcactcttgccaacttattt

SEQ ID NO: 74458 - DNA, 33 bp, Homo sapien
ccacactttgaattcattcttgccaacttattt

SEQ ID NO: 74459 - DNA, 33 bp, Homo sapien
taaagaaatactggaggaacaaattctggcttt

SEQ ID NO: 74460 - DNA, 33 bp, Homo sapien
taaagaaatactggagtaacaaattctggcttt

SEQ ID NO: 74461 - DNA, 33 bp, Homo sapien
gtagaaattaagatgcactgtgtatgtaaaata

SEQ ID NO: 74462 - DNA, 33 bp, Homo sapien
gtagaaattaagatgcgctgtgtatgtaaaata

SEQ ID NO: 74463 - DNA, 33 bp, Homo sapien
gcgtaaattccagtccaaaaggtggcaggctca

SEQ ID NO: 74464 - DNA, 33 bp, Homo sapien
gcgtaaattccagtccgaaaggtggcaggctca

SEQ ID NO: 74465 - DNA, 33 bp, Homo sapien
acagtcttgggaaacaccattttaattcaacaa

SEQ ID NO: 74466 - DNA, 33 bp, Homo sapien
acagtcttgggaaacatcattttaattcaacaa

SEQ ID NO: 74467 - DNA, 33 bp, Homo sapien
ggtggtagtgggtgcacaatcagggaggtgttg

SEQ ID NO: 74468 - DNA, 33 bp, Homo sapien
ggtggtagtgggtgcagaatcagggaggtgttg

SEQ ID NO: 74469 - DNA, 33 bp, Homo sapien
tcccagcatctgctaaccaccaatttactctct

SEQ ID NO: 74470 - DNA, 33 bp, Homo sapien
tcccagcatctgctaatcaccaatttactctct

SEQ ID NO: 74471 - DNA, 33 bp, Homo sapien
gactcccacttgatcacagtgaatgttcttttt

SEQ ID NO: 74472 - DNA, 33 bp, Homo sapien
gactcccacttgatcatagtgaatgttcttttt

SEQ ID NO: 74473 - DNA, 33 bp, Homo sapien
tggtacactattgaaaattgagttaatattact

SEQ ID NO: 74474 - DNA, 33 bp, Homo sapien
tggtacactattgaaacttgagttaatattact

SEQ ID NO: 74475 - DNA, 33 bp, Homo sapien
ctttttatttttttcacgtgaattctagttacc

SEQ ID NO: 74476 - DNA, 33 bp, Homo sapien
ctttttatttttttcatgtgaattctagttacc

SEQ ID NO: 74477 - DNA, 33 bp, Homo sapien
cgggcgagccgactaacagtcagaaatctcagg

SEQ ID NO: 74478 - DNA, 33 bp, Homo sapien
cgggcgagccgactaagagtcagaaatctcagg

SEQ ID NO: 74479 - DNA, 33 bp, Homo sapien
ggactggacactgaacagccctcttgtctttct

SEQ ID NO: 74480 - DNA, 33 bp, Homo sapien
ggactggacactgaacggccctcttgtctttct

SEQ ID NO: 74481 - DNA, 33 bp, Homo sapien
atatgaatacctctgactaacatctaaaggcag

SEQ ID NO: 74482 - DNA, 33 bp, Homo sapien
atatgaatacctctgattaacatctaaaggcag

SEQ ID NO: 74483 - DNA, 33 bp, Homo sapien
aagaagagaaaatcataaaggaatgaggcatga

SEQ ID NO: 74484 - DNA, 33 bp, Homo sapien
aagaagagaaaatcatgaaggaatgaggcatga

SEQ ID NO: 74485 - DNA, 33 bp, Homo sapien
tccccataaacctatgacaggtggagatattgt

SEQ ID NO: 74486 - DNA, 33 bp, Homo sapien
tccccataaacctatggcaggtggagatattgt

SEQ ID NO: 74487 - DNA, 33 bp, Homo sapien
taatctgagtagcctacaaatgaagcaactcag

SEQ ID NO: 74488 - DNA, 33 bp, Homo sapien
taatctgagtagcctataaatgaagcaactcag

SEQ ID NO: 74489 - DNA, 33 bp, Homo sapien
atacaggtaagaggacaacaaatcataatgcga

SEQ ID NO: 74490 - DNA, 33 bp, Homo sapien
atacaggtaagaggacgacaaatcataatgcga

SEQ ID NO: 74491 - DNA, 33 bp, Homo sapien
ttcatatgtgtattaaacgttggtatttttatt

SEQ ID NO: 74492 - DNA, 33 bp, Homo sapien
ttcatatgtgtattaatcgttggtatttttatt

SEQ ID NO: 74493 - DNA, 33 bp, Homo sapien
atgggtggtaatcaaacacaagacaaattaatc

SEQ ID NO: 74494 - DNA, 33 bp, Homo sapien
atgggtggtaatcaaatacaagacaaattaatc

SEQ ID NO: 74495 - DNA, 33 bp, Homo sapien
gagaggaaaagaccaacgagtaaacttgcattt

SEQ ID NO: 74496 - DNA, 33 bp, Homo sapien
gagaggaaaagaccaatgagtaaacttgcattt

SEQ ID NO: 74497 - DNA, 33 bp, Homo sapien
acatcctcaggaaccacagtattaggtcaaaaa

SEQ ID NO: 74498 - DNA, 33 bp, Homo sapien
acatcctcaggaaccagagtattaggtcaaaaa

SEQ ID NO: 74499 - DNA, 33 bp, Homo sapien
catagacacagatgaaacatggaggtcttctac

SEQ ID NO: 74500 - DNA, 33 bp, Homo sapien
catagacacagatgaaccatggaggtcttctac

SEQ ID NO: 74501 - DNA, 33 bp, Homo sapien
agcttcaatatatacaaggtcacttagtcattt

SEQ ID NO: 74502 - DNA, 33 bp, Homo sapien
agcttcaatatatacatggtcacttagtcattt

SEQ ID NO: 74503 - DNA, 33 bp, Homo sapien
tgtactcttgttcctactaagttgggaatccat

SEQ ID NO: 74504 - DNA, 33 bp, Homo sapien
tgtactcttgttcctattaagttgggaatccat

SEQ ID NO: 74505 - DNA, 33 bp, Homo sapien
tgtttaccaaaagtcaccagcctaatgaagatt

SEQ ID NO: 74506 - DNA, 33 bp, Homo sapien
tgtttaccaaaagtcatcagcctaatgaagatt

SEQ ID NO: 74507 - DNA, 33 bp, Homo sapien
ttttgggtgaaaaagcagccattgcagtgaact

SEQ ID NO: 74508 - DNA, 33 bp, Homo sapien
ttttgggtgaaaaagcggccattgcagtgaact

SEQ ID NO: 74509 - DNA, 33 bp, Homo sapien
tgatagtggttcaaaacgtgggttgtggactca

SEQ ID NO: 74510 - DNA, 33 bp, Homo sapien
tgatagtggttcaaaatgtgggttgtggactca

SEQ ID NO: 74511 - DNA, 33 bp, Homo sapien
atcaggaacccattcccatgacagtggcattca

SEQ ID NO: 74512 - DNA, 33 bp, Homo sapien
atcaggaacccattcctatgacagtggcattca

SEQ ID NO: 74513 - DNA, 33 bp, Homo sapien
cataaccaagtggatgcatcatatttttctatc

SEQ ID NO: 74514 - DNA, 33 bp, Homo sapien
cataaccaagtggatgtatcatatttttctatc

SEQ ID NO: 74515 - DNA, 33 bp, Homo sapien
ctcacctacggaactacgagctaataaatgagt

SEQ ID NO: 74516 - DNA, 33 bp, Homo sapien
ctcacctacggaactatgagctaataaatgagt

SEQ ID NO: 74517 - DNA, 33 bp, Homo sapien
attaaaatcctttcaaaccttgcacatcctcca

SEQ ID NO: 74518 - DNA, 33 bp, Homo sapien
attaaaatcctttcaagccttgcacatcctcca

SEQ ID NO: 74519 - DNA, 33 bp, Homo sapien
ccttctctgaaacatgccacatagtcttcccta

SEQ ID NO: 74520 - DNA, 33 bp, Homo sapien
ccttctctgaaacatgtcacatagtcttcccta

SEQ ID NO: 74521 - DNA, 33 bp, Homo sapien
acgtgtcctgaggaaccagagcttgctgcttcc

SEQ ID NO: 74522 - DNA, 33 bp, Homo sapien
acgtgtcctgaggaacgagagcttgctgcttcc

SEQ ID NO: 74523 - DNA, 33 bp, Homo sapien
agtgtgggctctatcccgaaggcaaggagagaa

SEQ ID NO: 74524 - DNA, 33 bp, Homo sapien
agtgtgggctctatcctgaaggcaaggagagaa

SEQ ID NO: 74525 - DNA, 33 bp, Homo sapien
gaaaggtaggatttaagtgttaccagacagctc

SEQ ID NO: 74526 - DNA, 33 bp, Homo sapien
gaaaggtaggatttaattgttaccagacagctc

SEQ ID NO: 74527 - DNA, 33 bp, Homo sapien
gccaacagaaggtgacaaagagtctagccaggc

SEQ ID NO: 74528 - DNA, 33 bp, Homo sapien
gccaacagaaggtgacgaagagtctagccaggc

SEQ ID NO: 74529 - DNA, 33 bp, Homo sapien
tgaagagaaaatgaaacgaagtagatgctcaca

SEQ ID NO: 74530 - DNA, 33 bp, Homo sapien
tgaagagaaaatgaaatgaagtagatgctcaca

SEQ ID NO: 74531 - DNA, 33 bp, Homo sapien
caattagatctgcagaatatctgatcctgggaa

SEQ ID NO: 74532 - DNA, 33 bp, Homo sapien
caattagatctgcagagtatctgatcctgggaa

SEQ ID NO: 74533 - DNA, 33 bp, Homo sapien
gtgaggagtttgctgaaggattcatacctgccc

SEQ ID NO: 74534 - DNA, 33 bp, Homo sapien
gtgaggagtttgctgagggattcatacctgccc

SEQ ID NO: 74535 - DNA, 33 bp, Homo sapien
gttagttagaagggaagaaagatgacagattta

SEQ ID NO: 74536 - DNA, 33 bp, Homo sapien
gttagttagaagggaataaagatgacagattta

SEQ ID NO: 74537 - DNA, 33 bp, Homo sapien
gttgtggttaattgcactcattaggataagaca

SEQ ID NO: 74538 - DNA, 33 bp, Homo sapien
gttgtggttaattgcagtcattaggataagaca

SEQ ID NO: 74539 - DNA, 33 bp, Homo sapien
ctgttgtgggtactgaacctgattgtattcact

SEQ ID NO: 74540 - DNA, 33 bp, Homo sapien
ctgttgtgggtactgaccctgattgtattcact

SEQ ID NO: 74541 - DNA, 33 bp, Homo sapien
accacaaatggagtaaactgttctgttgatctt

SEQ ID NO: 74542 - DNA, 33 bp, Homo sapien
accacaaatggagtaatctgttctgttgatctt

SEQ ID NO: 74543 - DNA, 33 bp, Homo sapien
gcagagcactgagggaatagagacaggagaaac

SEQ ID NO: 74544 - DNA, 33 bp, Homo sapien
gcagagcactgagggagtagagacaggagaaac

SEQ ID NO: 74545 - DNA, 33 bp, Homo sapien
tgaggaagctgggaaacagttttgcttacttga

SEQ ID NO: 74546 - DNA, 33 bp, Homo sapien
tgaggaagctgggaaagagttttgcttacttga

SEQ ID NO: 74547 - DNA, 33 bp, Homo sapien
tgttgctgttgttcaacgttagctgtaagacaa

SEQ ID NO: 74548 - DNA, 33 bp, Homo sapien
tgttgctgttgttcaatgttagctgtaagacaa

SEQ ID NO: 74549 - DNA, 33 bp, Homo sapien
tggctatattctgtcacggaatggggaattacc

SEQ ID NO: 74550 - DNA, 33 bp, Homo sapien
tggctatattctgtcatggaatggggaattacc

SEQ ID NO: 74551 - DNA, 33 bp, Homo sapien
agaccttcatcacttgaattttattagcctccc

SEQ ID NO: 74552 - DNA, 33 bp, Homo sapien
agaccttcatcacttgcattttattagcctccc

SEQ ID NO: 74553 - DNA, 33 bp, Homo sapien
gcaatctggtggcatgaacaaatcttggtgtca

SEQ ID NO: 74554 - DNA, 33 bp, Homo sapien
gcaatctggtggcatggacaaatcttggtgtca

SEQ ID NO: 74555 - DNA, 33 bp, Homo sapien
tcatttttagagtaagccaacctttggtgcatc

SEQ ID NO: 74556 - DNA, 33 bp, Homo sapien
tcatttttagagtaagtcaacctttggtgcatc

SEQ ID NO: 74557 - DNA, 33 bp, Homo sapien
tcccccagccagataacgccagaacagggaaac

SEQ ID NO: 74558 - DNA, 33 bp, Homo sapien
tcccccagccagataatgccagaacagggaaac

SEQ ID NO: 74559 - DNA, 33 bp, Homo sapien
gggaaacaggcctgacactatggggagattttg

SEQ ID NO: 74560 - DNA, 33 bp, Homo sapien
gggaaacaggcctgacgctatggggagattttg

SEQ ID NO: 74561 - DNA, 33 bp, Homo sapien
tccttcttctcttcataacttcgcttgcaactt

SEQ ID NO: 74562 - DNA, 33 bp, Homo sapien
tccttcttctcttcatgacttcgcttgcaactt

SEQ ID NO: 74563 - DNA, 33 bp, Homo sapien
cactagacatatttccactagtaagaagagcca

SEQ ID NO: 74564 - DNA, 33 bp, Homo sapien
cactagacatatttcctctagtaagaagagcca

SEQ ID NO: 74565 - DNA, 33 bp, Homo sapien
tctcagatgtctgttaacttcactaaaccactg

SEQ ID NO: 74566 - DNA, 33 bp, Homo sapien
tctcagatgtctgttagcttcactaaaccactg

SEQ ID NO: 74567 - DNA, 33 bp, Homo sapien
gtaggtttcaaaaatacgaatgcccagatttga

SEQ ID NO: 74568 - DNA, 33 bp, Homo sapien
gtaggtttcaaaaatatgaatgcccagatttga

SEQ ID NO: 74569 - DNA, 33 bp, Homo sapien
accacttcttactcaccctcgttagccaacatg

SEQ ID NO: 74570 - DNA, 33 bp, Homo sapien
accacttcttactcactctcgttagccaacatg

SEQ ID NO: 74571 - DNA, 33 bp, Homo sapien
cactaaaaggtgatagaataatgttgactcaaa

SEQ ID NO: 74572 - DNA, 33 bp, Homo sapien
cactaaaaggtgatagcataatgttgactcaaa

SEQ ID NO: 74573 - DNA, 33 bp, Homo sapien
caccttgcaaaaatcccgagaaatcccattcct

SEQ ID NO: 74574 - DNA, 33 bp, Homo sapien
caccttgcaaaaatcctgagaaatcccattcct

SEQ ID NO: 74575 - DNA, 33 bp, Homo sapien
tccatatggtgaccctcaaatcatactgtatga

SEQ ID NO: 74576 - DNA, 33 bp, Homo sapien
tccatatggtgaccctgaaatcatactgtatga

SEQ ID NO: 74577 - DNA, 33 bp, Homo sapien
agcaggagggagaacaagttcttaataggaaga

SEQ ID NO: 74578 - DNA, 33 bp, Homo sapien
agcaggagggagaacaggttcttaataggaaga

SEQ ID NO: 74579 - DNA, 33 bp, Homo sapien
ctctttgaactttgaaacctgtcttctcaactc

SEQ ID NO: 74580 - DNA, 33 bp, Homo sapien
ctctttgaactttgaaccctgtcttctcaactc

SEQ ID NO: 74581 - DNA, 33 bp, Homo sapien
cattcttcctctgttaacttctagaagagctgg

SEQ ID NO: 74582 - DNA, 33 bp, Homo sapien
cattcttcctctgttatcttctagaagagctgg

SEQ ID NO: 74583 - DNA, 33 bp, Homo sapien
aggtatggaatcatatcagcaatgagggacaat

SEQ ID NO: 74584 - DNA, 33 bp, Homo sapien
aggtatggaatcatattagcaatgagggacaat

SEQ ID NO: 74585 - DNA, 33 bp, Homo sapien
ttttgttatgtgactaaggtactgtgtgattcc

SEQ ID NO: 74586 - DNA, 33 bp, Homo sapien
ttttgttatgtgactatggtactgtgtgattcc

SEQ ID NO: 74587 - DNA, 33 bp, Homo sapien
gaaaatgttcttggaaaagcattgaattatttt

SEQ ID NO: 74588 - DNA, 33 bp, Homo sapien
gaaaatgttcttggaatagcattgaattatttt

SEQ ID NO: 74589 - DNA, 33 bp, Homo sapien
ttttcaagcaagaaagacatcagaatagtctta

SEQ ID NO: 74590 - DNA, 33 bp, Homo sapien
ttttcaagcaagaaagtcatcagaatagtctta

SEQ ID NO: 74591 - DNA, 33 bp, Homo sapien
cctcagggtgttcccaaagtctgttggttggtt

SEQ ID NO: 74592 - DNA, 33 bp, Homo sapien
cctcagggtgttcccacagtctgttggttggtt

SEQ ID NO: 74593 - DNA, 33 bp, Homo sapien
gttaggtagtggggagacaaaggtagcttagac

SEQ ID NO: 74594 - DNA, 33 bp, Homo sapien
gttaggtagtggggagtcaaaggtagcttagac

SEQ ID NO: 74595 - DNA, 33 bp, Homo sapien
ggagaatgagaccacacgtttagagtgccttca

SEQ ID NO: 74596 - DNA, 33 bp, Homo sapien
ggagaatgagaccacatgtttagagtgccttca

SEQ ID NO: 74597 - DNA, 33 bp, Homo sapien
tggtgattgtggtctacgatattcagatctact

SEQ ID NO: 74598 - DNA, 33 bp, Homo sapien
tggtgattgtggtctaggatattcagatctact

SEQ ID NO: 74599 - DNA, 33 bp, Homo sapien
gctgaatgagttccctcaagacggtttatatat

SEQ ID NO: 74600 - DNA, 33 bp, Homo sapien
gctgaatgagttccctgaagacggtttatatat

SEQ ID NO: 74601 - DNA, 33 bp, Homo sapien
ttgtggaagttccacaatgagaaatgcacaagt

SEQ ID NO: 74602 - DNA, 33 bp, Homo sapien
ttgtggaagttccacagtgagaaatgcacaagt

SEQ ID NO: 74603 - DNA, 33 bp, Homo sapien
ggaagcttcttgagaacaggatttttgccttca

SEQ ID NO: 74604 - DNA, 33 bp, Homo sapien
ggaagcttcttgagaataggatttttgccttca

SEQ ID NO: 74605 - DNA, 33 bp, Homo sapien
aatcttcctgggacaacaattttgtgagcatca

SEQ ID NO: 74606 - DNA, 33 bp, Homo sapien
aatcttcctgggacaataattttgtgagcatca

SEQ ID NO: 74607 - DNA, 33 bp, Homo sapien
catttaatgatgaaagactggatgtttctctcc

SEQ ID NO: 74608 - DNA, 33 bp, Homo sapien
catttaatgatgaaaggctggatgtttctctcc

SEQ ID NO: 74609 - DNA, 33 bp, Homo sapien
caaccaaatggtcacgaacttgacaaaattcca

SEQ ID NO: 74610 - DNA, 33 bp, Homo sapien
caaccaaatggtcacggacttgacaaaattcca

SEQ ID NO: 74611 - DNA, 33 bp, Homo sapien
ctacctggtagaagccaattatattgaaccctt

SEQ ID NO: 74612 - DNA, 33 bp, Homo sapien
ctacctggtagaagccgattatattgaaccctt

SEQ ID NO: 74613 - DNA, 33 bp, Homo sapien
cacagccaccctagacactagtgaaccccactt

SEQ ID NO: 74614 - DNA, 33 bp, Homo sapien
cacagccaccctagacgctagtgaaccccactt

SEQ ID NO: 74615 - DNA, 33 bp, Homo sapien
tagacagaagtccactcagtaatacaatttacg

SEQ ID NO: 74616 - DNA, 33 bp, Homo sapien
tagacagaagtccacttagtaatacaatttacg

SEQ ID NO: 74617 - DNA, 33 bp, Homo sapien
ggttgtttataaggaccaattactttgttatag

SEQ ID NO: 74618 - DNA, 33 bp, Homo sapien
ggttgtttataaggacgaattactttgttatag

SEQ ID NO: 74619 - DNA, 33 bp, Homo sapien
cctggcctccaagctagaggtttcttatccctt

SEQ ID NO: 74620 - DNA, 33 bp, Homo sapien
cctggcctccaagctataggtttcttatccctt

SEQ ID NO: 74621 - DNA, 33 bp, Homo sapien
gagttggctggttcatcactgtgctggccttat

SEQ ID NO: 74622 - DNA, 33 bp, Homo sapien
gagttggctggttcatgactgtgctggccttat

SEQ ID NO: 74623 - DNA, 33 bp, Homo sapien
atttctaagctgctgaactgttgtggctaccct

SEQ ID NO: 74624 - DNA, 33 bp, Homo sapien
atttctaagctgctgatctgttgtggctaccct

SEQ ID NO: 74625 - DNA, 33 bp, Homo sapien
gataggaggagggagacgatcgggaaaaataac

SEQ ID NO: 74626 - DNA, 33 bp, Homo sapien
gataggaggagggagatgatcgggaaaaataac

SEQ ID NO: 74627 - DNA, 33 bp, Homo sapien
aggaattactttgacccgaacctgttaatttca

SEQ ID NO: 74628 - DNA, 33 bp, Homo sapien
aggaattactttgacctgaacctgttaatttca

SEQ ID NO: 74629 - DNA, 33 bp, Homo sapien
aggtctattcactaacagggtgaccaagattca

SEQ ID NO: 74630 - DNA, 33 bp, Homo sapien
aggtctattcactaacggggtgaccaagattca

SEQ ID NO: 74631 - DNA, 33 bp, Homo sapien
tttgttgtccaagaaacgctctgaaccttgttc

SEQ ID NO: 74632 - DNA, 33 bp, Homo sapien
tttgttgtccaagaaatgctctgaaccttgttc

SEQ ID NO: 74633 - DNA, 33 bp, Homo sapien
gaaaaggcacggttaccagtgtcccagaatttg

SEQ ID NO: 74634 - DNA, 33 bp, Homo sapien
gaaaaggcacggttactagtgtcccagaatttg

SEQ ID NO: 74635 - DNA, 33 bp, Homo sapien
cagagtaaagattgccggactccagtctctgtt

SEQ ID NO: 74636 - DNA, 33 bp, Homo sapien
cagagtaaagattgcctgactccagtctctgtt

SEQ ID NO: 74637 - DNA, 33 bp, Homo sapien
atgattctctagtatgacaataacaggcagagg

SEQ ID NO: 74638 - DNA, 33 bp, Homo sapien
atgattctctagtatgtcaataacaggcagagg

SEQ ID NO: 74639 - DNA, 33 bp, Homo sapien
catggataaagtaatcagacatcatagcagatt

SEQ ID NO: 74640 - DNA, 33 bp, Homo sapien
catggataaagtaatcggacatcatagcagatt

SEQ ID NO: 74641 - DNA, 33 bp, Homo sapien
tctcccagaaattgacagctccagaagacaaaa

SEQ ID NO: 74642 - DNA, 33 bp, Homo sapien
tctcccagaaattgacggctccagaagacaaaa

SEQ ID NO: 74643 - DNA, 33 bp, Homo sapien
atgagaaagaggtataagggtgaatgctcaagg

SEQ ID NO: 74644 - DNA, 33 bp, Homo sapien
atgagaaagaggtataggggtgaatgctcaagg

SEQ ID NO: 74645 - DNA, 33 bp, Homo sapien
taattctactatctggaattaaccatagtaaat

SEQ ID NO: 74646 - DNA, 33 bp, Homo sapien
taattctactatctgggattaaccatagtaaat

SEQ ID NO: 74647 - DNA, 33 bp, Homo sapien
ttatagtttgagatagaacctcttatttaaata

SEQ ID NO: 74648 - DNA, 33 bp, Homo sapien
ttatagtttgagataggacctcttatttaaata

SEQ ID NO: 74649 - DNA, 33 bp, Homo sapien
caaaatccagacagccgggagagttctgatgtc

SEQ ID NO: 74650 - DNA, 33 bp, Homo sapien
caaaatccagacagcctggagagttctgatgtc

SEQ ID NO: 74651 - DNA, 33 bp, Homo sapien
tctggagagccctgataatacagttaccttaac

SEQ ID NO: 74652 - DNA, 33 bp, Homo sapien
tctggagagccctgatgatacagttaccttaac

SEQ ID NO: 74653 - DNA, 33 bp, Homo sapien
ccaaatacttgacatcaacttcctcttggaatg

SEQ ID NO: 74654 - DNA, 33 bp, Homo sapien
ccaaatacttgacatcgacttcctcttggaatg

SEQ ID NO: 74655 - DNA, 33 bp, Homo sapien
aaatcatagttacagacgctcaagggtgatgac

SEQ ID NO: 74656 - DNA, 33 bp, Homo sapien
aaatcatagttacagaggctcaagggtgatgac

SEQ ID NO: 74657 - DNA, 33 bp, Homo sapien
gagcacagttttaaagaaagtgtgataatctac

SEQ ID NO: 74658 - DNA, 33 bp, Homo sapien
gagcacagttttaaaggaagtgtgataatctac

SEQ ID NO: 74659 - DNA, 33 bp, Homo sapien
ggcaggccgtaagcaacggggcgacatgaaatt

SEQ ID NO: 74660 - DNA, 33 bp, Homo sapien
ggcaggccgtaagcaatggggcgacatgaaatt

SEQ ID NO: 74661 - DNA, 33 bp, Homo sapien
aatactgataataagaaaatggaagaagcagta

SEQ ID NO: 74662 - DNA, 33 bp, Homo sapien
aatactgataataagacaatggaagaagcagta

SEQ ID NO: 74663 - DNA, 33 bp, Homo sapien
tcttattttttcttcacagcaagcctatgagat

SEQ ID NO: 74664 - DNA, 33 bp, Homo sapien
tcttattttttcttcagagcaagcctatgagat

SEQ ID NO: 74665 - DNA, 33 bp, Homo sapien
acactgaaggtagaaacaggaattctgtgtagg

SEQ ID NO: 74666 - DNA, 33 bp, Homo sapien
acactgaaggtagaaataggaattctgtgtagg

SEQ ID NO: 74667 - DNA, 33 bp, Homo sapien
gattcccctggtgaaaaattaaggcattttgcc

SEQ ID NO: 74668 - DNA, 33 bp, Homo sapien
gattcccctggtgaaagattaaggcattttgcc

SEQ ID NO: 74669 - DNA, 33 bp, Homo sapien
ttggaaaatgaagaacaacacaaagagaaaaat

SEQ ID NO: 74670 - DNA, 33 bp, Homo sapien
ttggaaaatgaagaaccacacaaagagaaaaat

SEQ ID NO: 74671 - DNA, 33 bp, Homo sapien
tgtctgcctaggaaagaaagtgttttggaatgt

SEQ ID NO: 74672 - DNA, 33 bp, Homo sapien
tgtctgcctaggaaaggaagtgttttggaatgt

SEQ ID NO: 74673 - DNA, 33 bp, Homo sapien
tttaggataaagcataactcatttaaaacctgt

SEQ ID NO: 74674 - DNA, 33 bp, Homo sapien
tttaggataaagcatagctcatttaaaacctgt

SEQ ID NO: 74675 - DNA, 33 bp, Homo sapien
taatgcctctctcacaaggttttagctaagacc

SEQ ID NO: 74676 - DNA, 33 bp, Homo sapien
taatgcctctctcacagggttttagctaagacc

SEQ ID NO: 74677 - DNA, 33 bp, Homo sapien
tgtcttttaatcatgaccggtctgggaacagct

SEQ ID NO: 74678 - DNA, 33 bp, Homo sapien
tgtcttttaatcatgatcggtctgggaacagct

SEQ ID NO: 74679 - DNA, 33 bp, Homo sapien
ttacaaagcttgtaagaactgtttcagccataa

SEQ ID NO: 74680 - DNA, 33 bp, Homo sapien
ttacaaagcttgtaaggactgtttcagccataa

SEQ ID NO: 74681 - DNA, 33 bp, Homo sapien
acctagaggtaagagaagtatcttgattaaaac

SEQ ID NO: 74682 - DNA, 33 bp, Homo sapien
acctagaggtaagagaggtatcttgattaaaac

SEQ ID NO: 74683 - DNA, 33 bp, Homo sapien
aagaaactctataaacaggaagatggatgtttt

SEQ ID NO: 74684 - DNA, 33 bp, Homo sapien
aagaaactctataaacgggaagatggatgtttt

SEQ ID NO: 74685 - DNA, 33 bp, Homo sapien
tattcttggctgaataaaatcaatcaacacacc

SEQ ID NO: 74686 - DNA, 33 bp, Homo sapien
tattcttggctgaatacaatcaatcaacacacc

SEQ ID NO: 74687 - DNA, 33 bp, Homo sapien
actgtgaaagccaacccggtagatattttaagg

SEQ ID NO: 74688 - DNA, 33 bp, Homo sapien
actgtgaaagccaacctggtagatattttaagg

SEQ ID NO: 74689 - DNA, 33 bp, Homo sapien
ccagttgctgatgaaaagtcagaaagcttgata

SEQ ID NO: 74690 - DNA, 33 bp, Homo sapien
ccagttgctgatgaaaggtcagaaagcttgata

SEQ ID NO: 74691 - DNA, 33 bp, Homo sapien
taaaactaggttacgaaaattcttgatagcatt

SEQ ID NO: 74692 - DNA, 33 bp, Homo sapien
taaaactaggttacgataattcttgatagcatt

SEQ ID NO: 74693 - DNA, 33 bp, Homo sapien
aacctaagcatttagaagttttccttccagatt

SEQ ID NO: 74694 - DNA, 33 bp, Homo sapien
aacctaagcatttagaggttttccttccagatt

SEQ ID NO: 74695 - DNA, 33 bp, Homo sapien
gtcaaactgactaatacgaaaaactatctttaa

SEQ ID NO: 74696 - DNA, 33 bp, Homo sapien
gtcaaactgactaatatgaaaaactatctttaa

SEQ ID NO: 74697 - DNA, 33 bp, Homo sapien
gaaaatgacaagaataactaaagaatgctaact

SEQ ID NO: 74698 - DNA, 33 bp, Homo sapien
gaaaatgacaagaatagctaaagaatgctaact

SEQ ID NO: 74699 - DNA, 33 bp, Homo sapien
ccaagggattagtaagacaattgcgtgtgagaa

SEQ ID NO: 74700 - DNA, 33 bp, Homo sapien
ccaagggattagtaagccaattgcgtgtgagaa

SEQ ID NO: 74701 - DNA, 33 bp, Homo sapien
taggttctgcttctaaatgactttgcatactgc

SEQ ID NO: 74702 - DNA, 33 bp, Homo sapien
taggttctgcttctaagtgactttgcatactgc

SEQ ID NO: 74703 - DNA, 33 bp, Homo sapien
gacgtgggaaatacaactaaacacacattctaa

SEQ ID NO: 74704 - DNA, 33 bp, Homo sapien
gacgtgggaaatacaattaaacacacattctaa

SEQ ID NO: 74705 - DNA, 33 bp, Homo sapien
ctgtcagccttacaccaaacgctaattttcctt

SEQ ID NO: 74706 - DNA, 33 bp, Homo sapien
ctgtcagccttacaccgaacgctaattttcctt

SEQ ID NO: 74707 - DNA, 33 bp, Homo sapien
agaatcccttgtacaacggaaaactaactacaa

SEQ ID NO: 74708 - DNA, 33 bp, Homo sapien
agaatcccttgtacaatggaaaactaactacaa

SEQ ID NO: 74709 - DNA, 33 bp, Homo sapien
ctgttctggaatgtgaaaaaggtttgaaactga

SEQ ID NO: 74710 - DNA, 33 bp, Homo sapien
ctgttctggaatgtgacaaaggtttgaaactga

SEQ ID NO: 74711 - DNA, 33 bp, Homo sapien
agtgcctttggtcttcccaaaacatttggaata

SEQ ID NO: 74712 - DNA, 33 bp, Homo sapien
agtgcctttggtcttctcaaaacatttggaata

SEQ ID NO: 74713 - DNA, 33 bp, Homo sapien
tttccagggatataaactgcaaagagaatagct

SEQ ID NO: 74714 - DNA, 33 bp, Homo sapien
tttccagggatataaattgcaaagagaatagct

SEQ ID NO: 74715 - DNA, 33 bp, Homo sapien
cttgaagctatatccaccaaagccctctattta

SEQ ID NO: 74716 - DNA, 33 bp, Homo sapien
cttgaagctatatccatcaaagccctctattta

SEQ ID NO: 74717 - DNA, 33 bp, Homo sapien
atcacaacttctctgagaaatgacaacaggact

SEQ ID NO: 74718 - DNA, 33 bp, Homo sapien
atcacaacttctctgataaatgacaacaggact

SEQ ID NO: 74719 - DNA, 33 bp, Homo sapien
gcacaaagaagcagaaatcacaaggcaaacaag

SEQ ID NO: 74720 - DNA, 33 bp, Homo sapien
gcacaaagaagcagaagtcacaaggcaaacaag

SEQ ID NO: 74721 - DNA, 33 bp, Homo sapien
ccttctctctttttgcactgattagtattgtca

SEQ ID NO: 74722 - DNA, 33 bp, Homo sapien
ccttctctctttttgcgctgattagtattgtca

SEQ ID NO: 74723 - DNA, 33 bp, Homo sapien
ctgcttgtatggactaccaacttgaggtgccac

SEQ ID NO: 74724 - DNA, 33 bp, Homo sapien
ctgcttgtatggactagcaacttgaggtgccac

SEQ ID NO: 74725 - DNA, 33 bp, Homo sapien
agcatggtaatggtacaaaaggagacaggtaga

SEQ ID NO: 74726 - DNA, 33 bp, Homo sapien
agcatggtaatggtaccaaaggagacaggtaga

SEQ ID NO: 74727 - DNA, 33 bp, Homo sapien
tggttgcatgtatatacgtgtttcaaaaccatc

SEQ ID NO: 74728 - DNA, 33 bp, Homo sapien
tggttgcatgtatatatgtgtttcaaaaccatc

SEQ ID NO: 74729 - DNA, 33 bp, Homo sapien
attaattttttgtaccacaagtgaatgttacct

SEQ ID NO: 74730 - DNA, 33 bp, Homo sapien
attaattttttgtaccgcaagtgaatgttacct

SEQ ID NO: 74731 - DNA, 33 bp, Homo sapien
gatatagataaattaacctactcttgaagctaa

SEQ ID NO: 74732 - DNA, 33 bp, Homo sapien
gatatagataaattaagctactcttgaagctaa

SEQ ID NO: 74733 - DNA, 33 bp, Homo sapien
tgagcagtggctttaacgtcaaaattgaagaga

SEQ ID NO: 74734 - DNA, 33 bp, Homo sapien
tgagcagtggctttaatgtcaaaattgaagaga

SEQ ID NO: 74735 - DNA, 33 bp, Homo sapien
agaatagaaattgagagaacagaattcacttcc

SEQ ID NO: 74736 - DNA, 33 bp, Homo sapien
agaatagaaattgagataacagaattcacttcc

SEQ ID NO: 74737 - DNA, 33 bp, Homo sapien
gtgagggacttacagacggctttgctggcaggg

SEQ ID NO: 74738 - DNA, 33 bp, Homo sapien
gtgagggacttacagatggctttgctggcaggg

SEQ ID NO: 74739 - DNA, 33 bp, Homo sapien
ggctttcaacaaaagagaggtataacaaaaagc

SEQ ID NO: 74740 - DNA, 33 bp, Homo sapien
ggctttcaacaaaagataggtataacaaaaagc

SEQ ID NO: 74741 - DNA, 33 bp, Homo sapien
tcagtttattctctgggaatgaccaatctgatt

SEQ ID NO: 74742 - DNA, 33 bp, Homo sapien
tcagtttattctctggtaatgaccaatctgatt

SEQ ID NO: 74743 - DNA, 33 bp, Homo sapien
aaaagagagtaagaatcagaataacacctctac

SEQ ID NO: 74744 - DNA, 33 bp, Homo sapien
aaaagagagtaagaatgagaataacacctctac

SEQ ID NO: 74745 - DNA, 33 bp, Homo sapien
tagaaaattattgttgaaagggtacagagtttt

SEQ ID NO: 74746 - DNA, 33 bp, Homo sapien
tagaaaattattgttggaagggtacagagtttt

SEQ ID NO: 74747 - DNA, 33 bp, Homo sapien
agaaaccaagcagaataagtttcaagtaaactc

SEQ ID NO: 74748 - DNA, 33 bp, Homo sapien
agaaaccaagcagaatgagtttcaagtaaactc

SEQ ID NO: 74749 - DNA, 33 bp, Homo sapien
taccataaggaccgaacctcttacccattacaa

SEQ ID NO: 74750 - DNA, 33 bp, Homo sapien
taccataaggaccgaatctcttacccattacaa

SEQ ID NO: 74751 - DNA, 33 bp, Homo sapien
tttggcacattctgtacacaaacaattgcagag

SEQ ID NO: 74752 - DNA, 33 bp, Homo sapien
tttggcacattctgtatacaaacaattgcagag

SEQ ID NO: 74753 - DNA, 33 bp, Homo sapien
ataacctgtcaccaaaaaacatatggttaactt

SEQ ID NO: 74754 - DNA, 33 bp, Homo sapien
ataacctgtcaccaaagaacatatggttaactt

SEQ ID NO: 74755 - DNA, 33 bp, Homo sapien
gggcacatgacccagacgttttggtccaaaggc

SEQ ID NO: 74756 - DNA, 33 bp, Homo sapien
gggcacatgacccagatgttttggtccaaaggc

SEQ ID NO: 74757 - DNA, 33 bp, Homo sapien
gaactcacaaaatacccgaacgatctttaaaat

SEQ ID NO: 74758 - DNA, 33 bp, Homo sapien
gaactcacaaaatacctgaacgatctttaaaat

SEQ ID NO: 74759 - DNA, 33 bp, Homo sapien
acgcctaatgtcaaagaccatattgcacttttt

SEQ ID NO: 74760 - DNA, 33 bp, Homo sapien
acgcctaatgtcaaagcccatattgcacttttt

SEQ ID NO: 74761 - DNA, 33 bp, Homo sapien
gggagtaaagaagcaaaagtgatcccggcatgg

SEQ ID NO: 74762 - DNA, 33 bp, Homo sapien
gggagtaaagaagcaacagtgatcccggcatgg

SEQ ID NO: 74763 - DNA, 33 bp, Homo sapien
tgaaacccattctcccacatcatacataaggaa

SEQ ID NO: 74764 - DNA, 33 bp, Homo sapien
tgaaacccattctcccgcatcatacataaggaa

SEQ ID NO: 74765 - DNA, 33 bp, Homo sapien
taggcaatgactacagaaagaggtaaggcctca

SEQ ID NO: 74766 - DNA, 33 bp, Homo sapien
taggcaatgactacagtaagaggtaaggcctca

SEQ ID NO: 74767 - DNA, 33 bp, Homo sapien
gataaggatgacagccaatttttgtcagtagtc

SEQ ID NO: 74768 - DNA, 33 bp, Homo sapien
gataaggatgacagccgatttttgtcagtagtc

SEQ ID NO: 74769 - DNA, 33 bp, Homo sapien
tagtgaaaggctatcaagtagatctctaaatat

SEQ ID NO: 74770 - DNA, 33 bp, Homo sapien
tagtgaaaggctatcaggtagatctctaaatat

SEQ ID NO: 74771 - DNA, 33 bp, Homo sapien
tattctctatcttaacaatgaaagactttcaga

SEQ ID NO: 74772 - DNA, 33 bp, Homo sapien
tattctctatcttaacgatgaaagactttcaga

SEQ ID NO: 74773 - DNA, 33 bp, Homo sapien
accagcagcacctctgcatgtttcaaatactta

SEQ ID NO: 74774 - DNA, 33 bp, Homo sapien
accagcagcacctctgtatgtttcaaatactta

SEQ ID NO: 74775 - DNA, 33 bp, Homo sapien
gtttcccttgcttagagccaatacttttcgtag

SEQ ID NO: 74776 - DNA, 33 bp, Homo sapien
gtttcccttgcttagatccaatacttttcgtag

SEQ ID NO: 74777 - DNA, 33 bp, Homo sapien
ataaattgctgactaaaaaggacattctggcag

SEQ ID NO: 74778 - DNA, 33 bp, Homo sapien
ataaattgctgactaagaaggacattctggcag

SEQ ID NO: 74779 - DNA, 33 bp, Homo sapien
tggacaagaatatggaaatcttaaaacgtgtca

SEQ ID NO: 74780 - DNA, 33 bp, Homo sapien
tggacaagaatatggagatcttaaaacgtgtca

SEQ ID NO: 74781 - DNA, 33 bp, Homo sapien
ctgcttccttcagttcacttcttgaatgtcatc

SEQ ID NO: 74782 - DNA, 33 bp, Homo sapien
ctgcttccttcagttcgcttcttgaatgtcatc

SEQ ID NO: 74783 - DNA, 33 bp, Homo sapien
taagttttgggccagaatcattttgataatgga

SEQ ID NO: 74784 - DNA, 33 bp, Homo sapien
taagttttgggccagagtcattttgataatgga

SEQ ID NO: 74785 - DNA, 33 bp, Homo sapien
tttgataatggagaaggcgatgatgccaagtct

SEQ ID NO: 74786 - DNA, 33 bp, Homo sapien
tttgataatggagaagtcgatgatgccaagtct

SEQ ID NO: 74787 - DNA, 33 bp, Homo sapien
acaaattcttagcaaaataggatagatgaacgt

SEQ ID NO: 74788 - DNA, 33 bp, Homo sapien
acaaattcttagcaaactaggatagatgaacgt

SEQ ID NO: 74789 - DNA, 33 bp, Homo sapien
tatgaacagagataaccgagtttgtgcaatagc

SEQ ID NO: 74790 - DNA, 33 bp, Homo sapien
tatgaacagagataactgagtttgtgcaatagc

SEQ ID NO: 74791 - DNA, 33 bp, Homo sapien
cctgctgatctatttccatgtatttctgcaccc

SEQ ID NO: 74792 - DNA, 33 bp, Homo sapien
cctgctgatctatttctatgtatttctgcaccc

SEQ ID NO: 74793 - DNA, 33 bp, Homo sapien
ccattaactattgctgaacaatcctaacttaaa

SEQ ID NO: 74794 - DNA, 33 bp, Homo sapien
ccattaactattgctgtacaatcctaacttaaa

SEQ ID NO: 74795 - DNA, 33 bp, Homo sapien
cttgctcgcccttcaaattccacggtgactgca

SEQ ID NO: 74796 - DNA, 33 bp, Homo sapien
cttgctcgcccttcaacttccacggtgactgca

SEQ ID NO: 74797 - DNA, 33 bp, Homo sapien
caatagacacagaatacgcacttgacaaaatat

SEQ ID NO: 74798 - DNA, 33 bp, Homo sapien
caatagacacagaataggcacttgacaaaatat

SEQ ID NO: 74799 - DNA, 33 bp, Homo sapien
tacagaaagcaacaatcataaaaccgtgttgat

SEQ ID NO: 74800 - DNA, 33 bp, Homo sapien
tacagaaagcaacaattataaaaccgtgttgat

SEQ ID NO: 74801 - DNA, 33 bp, Homo sapien
atttataatttggggacgctctcttgcataaga

SEQ ID NO: 74802 - DNA, 33 bp, Homo sapien
atttataatttggggatgctctcttgcataaga

SEQ ID NO: 74803 - DNA, 33 bp, Homo sapien
caattgcatcggtaaacagacaattaaattggc

SEQ ID NO: 74804 - DNA, 33 bp, Homo sapien
caattgcatcggtaaatagacaattaaattggc

SEQ ID NO: 74805 - DNA, 33 bp, Homo sapien
aggcctaacttagaaaatggctcaaaaatattg

SEQ ID NO: 74806 - DNA, 33 bp, Homo sapien
aggcctaacttagaaagtggctcaaaaatattg

SEQ ID NO: 74807 - DNA, 33 bp, Homo sapien
acatttagcttgacaaattcccaatatttaaag

SEQ ID NO: 74808 - DNA, 33 bp, Homo sapien
acatttagcttgacaagttcccaatatttaaag

SEQ ID NO: 74809 - DNA, 33 bp, Homo sapien
agcccctgttcaaggacacaaagtggaattagg

SEQ ID NO: 74810 - DNA, 33 bp, Homo sapien
agcccctgttcaaggatacaaagtggaattagg

SEQ ID NO: 74811 - DNA, 33 bp, Homo sapien
agaggtcatttgagagcataatcctacaaatat

SEQ ID NO: 74812 - DNA, 33 bp, Homo sapien
agaggtcatttgagagtataatcctacaaatat

SEQ ID NO: 74813 - DNA, 33 bp, Homo sapien
actttaggagtctacactgagagttgcagcaag

SEQ ID NO: 74814 - DNA, 33 bp, Homo sapien
actttaggagtctacattgagagttgcagcaag

SEQ ID NO: 74815 - DNA, 33 bp, Homo sapien
ccactgaaagatatcaatgaaacacatgtttgt

SEQ ID NO: 74816 - DNA, 33 bp, Homo sapien
ccactgaaagatatcagtgaaacacatgtttgt

SEQ ID NO: 74817 - DNA, 33 bp, Homo sapien
gttttaggcaggttcaatagggacagttcatct

SEQ ID NO: 74818 - DNA, 33 bp, Homo sapien
gttttaggcaggttcagtagggacagttcatct

SEQ ID NO: 74819 - DNA, 33 bp, Homo sapien
caagattcctgcctaacagagacatttttagca

SEQ ID NO: 74820 - DNA, 33 bp, Homo sapien
caagattcctgcctaatagagacatttttagca

SEQ ID NO: 74821 - DNA, 33 bp, Homo sapien
ttctggtatcatccaaaaccgaatgactaaatc

SEQ ID NO: 74822 - DNA, 33 bp, Homo sapien
ttctggtatcatccaacaccgaatgactaaatc

SEQ ID NO: 74823 - DNA, 33 bp, Homo sapien
tcaagatcatatcttacactctcaagtcttgta

SEQ ID NO: 74824 - DNA, 33 bp, Homo sapien
tcaagatcatatcttatactctcaagtcttgta

SEQ ID NO: 74825 - DNA, 33 bp, Homo sapien
ctcctgatttagccaagttgatactgtagaaag

SEQ ID NO: 74826 - DNA, 33 bp, Homo sapien
ctcctgatttagccaatttgatactgtagaaag

SEQ ID NO: 74827 - DNA, 33 bp, Homo sapien
ttatgggtctagtataaaaagcttataaactgt

SEQ ID NO: 74828 - DNA, 33 bp, Homo sapien
ttatgggtctagtatagaaagcttataaactgt

SEQ ID NO: 74829 - DNA, 33 bp, Homo sapien
atgccttttctttctgcaagttgatcctttagt

SEQ ID NO: 74830 - DNA, 33 bp, Homo sapien
atgccttttctttctggaagttgatcctttagt

SEQ ID NO: 74831 - DNA, 33 bp, Homo sapien
gttcaatcacaaggccaataatttaattatgcc

SEQ ID NO: 74832 - DNA, 33 bp, Homo sapien
gttcaatcacaaggccgataatttaattatgcc

SEQ ID NO: 74833 - DNA, 33 bp, Homo sapien
ctgagtcatcgcattaacataaacacaggtgtg

SEQ ID NO: 74834 - DNA, 33 bp, Homo sapien
ctgagtcatcgcattaccataaacacaggtgtg

SEQ ID NO: 74835 - DNA, 33 bp, Homo sapien
aatagtattaaatctacctgcagcgtccaatat

SEQ ID NO: 74836 - DNA, 33 bp, Homo sapien
aatagtattaaatctatctgcagcgtccaatat

SEQ ID NO: 74837 - DNA, 33 bp, Homo sapien
ccaaatcaagtagccacgacaatagctttgaat

SEQ ID NO: 74838 - DNA, 33 bp, Homo sapien
ccaaatcaagtagccatgacaatagctttgaat

SEQ ID NO: 74839 - DNA, 33 bp, Homo sapien
caccaaagaggtccaaaatctgcaatatgtgcc

SEQ ID NO: 74840 - DNA, 33 bp, Homo sapien
caccaaagaggtccaagatctgcaatatgtgcc

SEQ ID NO: 74841 - DNA, 33 bp, Homo sapien
tgatattgattgaaagaaaatgatagtgccagt

SEQ ID NO: 74842 - DNA, 33 bp, Homo sapien
tgatattgattgaaaggaaatgatagtgccagt

SEQ ID NO: 74843 - DNA, 33 bp, Homo sapien
gtcctctttacggaatcagtactcttgaagggg

SEQ ID NO: 74844 - DNA, 33 bp, Homo sapien
gtcctctttacggaatgagtactcttgaagggg

SEQ ID NO: 74845 - DNA, 33 bp, Homo sapien
ctcctatgtaagactaccggatgtgtacgtgat

SEQ ID NO: 74846 - DNA, 33 bp, Homo sapien
ctcctatgtaagactatcggatgtgtacgtgat

SEQ ID NO: 74847 - DNA, 33 bp, Homo sapien
gaccaaggaaagggcacattccagttgttcaaa

SEQ ID NO: 74848 - DNA, 33 bp, Homo sapien
gaccaaggaaagggcagattccagttgttcaaa

SEQ ID NO: 74849 - DNA, 33 bp, Homo sapien
atcaggatgatggggccaaaaggctaatcttca

SEQ ID NO: 74850 - DNA, 33 bp, Homo sapien
atcaggatgatggggctaaaaggctaatcttca

SEQ ID NO: 74851 - DNA, 33 bp, Homo sapien
tcatttgcctttcctacaaaaagagggagaagg

SEQ ID NO: 74852 - DNA, 33 bp, Homo sapien
tcatttgcctttcctataaaaagagggagaagg

SEQ ID NO: 74853 - DNA, 33 bp, Homo sapien
tgttttctcttactgaacaaagcacactgttga

SEQ ID NO: 74854 - DNA, 33 bp, Homo sapien
tgttttctcttactgagcaaagcacactgttga

SEQ ID NO: 74855 - DNA, 33 bp, Homo sapien
agacctagaccacctacgagtataaaaagcaac

SEQ ID NO: 74856 - DNA, 33 bp, Homo sapien
agacctagaccacctatgagtataaaaagcaac

SEQ ID NO: 74857 - DNA, 33 bp, Homo sapien
atgctaaagtctatgcaagttgacacataaaac

SEQ ID NO: 74858 - DNA, 33 bp, Homo sapien
atgctaaagtctatgcgagttgacacataaaac

SEQ ID NO: 74859 - DNA, 33 bp, Homo sapien
aaatatcaagattttcaaaacatagtcaatcga

SEQ ID NO: 74860 - DNA, 33 bp, Homo sapien
aaatatcaagattttcgaaacatagtcaatcga

SEQ ID NO: 74861 - DNA, 33 bp, Homo sapien
tggcttttcgtctaaacggaataatacataatg

SEQ ID NO: 74862 - DNA, 33 bp, Homo sapien
tggcttttcgtctaaatggaataatacataatg

SEQ ID NO: 74863 - DNA, 33 bp, Homo sapien
gtttgcttgcacactcgcagtgttctcttccct

SEQ ID NO: 74864 - DNA, 33 bp, Homo sapien
gtttgcttgcacactctcagtgttctcttccct

SEQ ID NO: 74865 - DNA, 33 bp, Homo sapien
cgtgggcagccctggacctcctaaggacacaag

SEQ ID NO: 74866 - DNA, 33 bp, Homo sapien
cgtgggcagccctggatctcctaaggacacaag

SEQ ID NO: 74867 - DNA, 33 bp, Homo sapien
cctaaggacacaaggcaaaaccaaccacctagc

SEQ ID NO: 74868 - DNA, 33 bp, Homo sapien
cctaaggacacaaggcgaaaccaaccacctagc

SEQ ID NO: 74869 - DNA, 33 bp, Homo sapien
agctgtctaccatagcagagaaggtgctatttg

SEQ ID NO: 74870 - DNA, 33 bp, Homo sapien
agctgtctaccatagcggagaaggtgctatttg

SEQ ID NO: 74871 - DNA, 33 bp, Homo sapien
aggctaggacttactacactctgaacatctggg

SEQ ID NO: 74872 - DNA, 33 bp, Homo sapien
aggctaggacttactatactctgaacatctggg

SEQ ID NO: 74873 - DNA, 33 bp, Homo sapien
cattggtttagtctcaaaatggactgtcagatt

SEQ ID NO: 74874 - DNA, 33 bp, Homo sapien
cattggtttagtctcacaatggactgtcagatt

SEQ ID NO: 74875 - DNA, 33 bp, Homo sapien
aactgcactctgttcacctgattgttatgactt

SEQ ID NO: 74876 - DNA, 33 bp, Homo sapien
aactgcactctgttcatctgattgttatgactt

SEQ ID NO: 74877 - DNA, 33 bp, Homo sapien
tggtccagaaagcaaccggtgaaactagaacag

SEQ ID NO: 74878 - DNA, 33 bp, Homo sapien
tggtccagaaagcaactggtgaaactagaacag

SEQ ID NO: 74879 - DNA, 33 bp, Homo sapien
gtgacaagcccaattacagtctggctaaaaagg

SEQ ID NO: 74880 - DNA, 33 bp, Homo sapien
gtgacaagcccaattagagtctggctaaaaagg

SEQ ID NO: 74881 - DNA, 33 bp, Homo sapien
acccacctaagaaatacgcttcagctataggga

SEQ ID NO: 74882 - DNA, 33 bp, Homo sapien
acccacctaagaaatatgcttcagctataggga

SEQ ID NO: 74883 - DNA, 33 bp, Homo sapien
tcctctttctatctctcaccaccagtcaattaa

SEQ ID NO: 74884 - DNA, 33 bp, Homo sapien
tcctctttctatctctgaccaccagtcaattaa

SEQ ID NO: 74885 - DNA, 33 bp, Homo sapien
ttcagaaactgttcaccgcttgagatttctagc

SEQ ID NO: 74886 - DNA, 33 bp, Homo sapien
ttcagaaactgttcactgcttgagatttctagc

SEQ ID NO: 74887 - DNA, 33 bp, Homo sapien
aagacatctggttaatcaagtgaactttctcct

SEQ ID NO: 74888 - DNA, 33 bp, Homo sapien
aagacatctggttaattaagtgaactttctcct

SEQ ID NO: 74889 - DNA, 33 bp, Homo sapien
gaattttctccaacacagtctccttgcaccatt

SEQ ID NO: 74890 - DNA, 33 bp, Homo sapien
gaattttctccaacacggtctccttgcaccatt

SEQ ID NO: 74891 - DNA, 33 bp, Homo sapien
cacctttaccatgatccatgttgccacaatcac

SEQ ID NO: 74892 - DNA, 33 bp, Homo sapien
cacctttaccatgatctatgttgccacaatcac

SEQ ID NO: 74893 - DNA, 33 bp, Homo sapien
gaaagaggtcaatgtcacagtataatccatcgc

SEQ ID NO: 74894 - DNA, 33 bp, Homo sapien
gaaagaggtcaatgtcgcagtataatccatcgc

SEQ ID NO: 74895 - DNA, 33 bp, Homo sapien
gtggccaagaaaatccccatgatggagactggg

SEQ ID NO: 74896 - DNA, 33 bp, Homo sapien
gtggccaagaaaatcctcatgatggagactggg

SEQ ID NO: 74897 - DNA, 33 bp, Homo sapien
tttttctcataccctcactgtgcattagaagct

SEQ ID NO: 74898 - DNA, 33 bp, Homo sapien
tttttctcataccctcgctgtgcattagaagct

SEQ ID NO: 74899 - DNA, 33 bp, Homo sapien
tatacatttctgcacacagtaaaatcaccgaag

SEQ ID NO: 74900 - DNA, 33 bp, Homo sapien
tatacatttctgcacatagtaaaatcaccgaag

SEQ ID NO: 74901 - DNA, 33 bp, Homo sapien
gggagaggttgtaaaccgaatacctgcacatct

SEQ ID NO: 74902 - DNA, 33 bp, Homo sapien
gggagaggttgtaaactgaatacctgcacatct

SEQ ID NO: 74903 - DNA, 33 bp, Homo sapien
acctaagagaagccccacatgattttcccaata

SEQ ID NO: 74904 - DNA, 33 bp, Homo sapien
acctaagagaagccccgcatgattttcccaata

SEQ ID NO: 74905 - DNA, 33 bp, Homo sapien
aaaagaaaatgagaacgctaggctgtgctgccc

SEQ ID NO: 74906 - DNA, 33 bp, Homo sapien
aaaagaaaatgagaactctaggctgtgctgccc

SEQ ID NO: 74907 - DNA, 33 bp, Homo sapien
aaatggaagatcctatcacgggaaatccaggga

SEQ ID NO: 74908 - DNA, 33 bp, Homo sapien
aaatggaagatcctattacgggaaatccaggga

SEQ ID NO: 74909 - DNA, 33 bp, Homo sapien
agaaatatgattggagaacaaaaaggtgtgatc

SEQ ID NO: 74910 - DNA, 33 bp, Homo sapien
agaaatatgattggaggacaaaaaggtgtgatc

SEQ ID NO: 74911 - DNA, 33 bp, Homo sapien
tttctatgacttgtgaggtcttcctcctactcc

SEQ ID NO: 74912 - DNA, 33 bp, Homo sapien
tttctatgacttgtgatgtcttcctcctactcc

SEQ ID NO: 74913 - DNA, 33 bp, Homo sapien
gccacaggctgtgaggccatcttttcaccactc

SEQ ID NO: 74914 - DNA, 33 bp, Homo sapien
gccacaggctgtgaggtcatcttttcaccactc

SEQ ID NO: 74915 - DNA, 33 bp, Homo sapien
tatctgtctggcatacgggctttcaaattcatt

SEQ ID NO: 74916 - DNA, 33 bp, Homo sapien
tatctgtctggcatactggctttcaaattcatt

SEQ ID NO: 74917 - DNA, 33 bp, Homo sapien
cttatttctgataataaattgtttttcgccagt

SEQ ID NO: 74918 - DNA, 33 bp, Homo sapien
cttatttctgataatacattgtttttcgccagt

SEQ ID NO: 74919 - DNA, 33 bp, Homo sapien
cctaatgatacatcccaacaatgtctctaacat

SEQ ID NO: 74920 - DNA, 33 bp, Homo sapien
cctaatgatacatcccgacaatgtctctaacat

SEQ ID NO: 74921 - DNA, 33 bp, Homo sapien
agtgctgagtaggcaacgcctgcttgtgtttct

SEQ ID NO: 74922 - DNA, 33 bp, Homo sapien
agtgctgagtaggcaatgcctgcttgtgtttct

SEQ ID NO: 74923 - DNA, 33 bp, Homo sapien
aagtcatggaaatgtaaaagtctcacaatattc

SEQ ID NO: 74924 - DNA, 33 bp, Homo sapien
aagtcatggaaatgtataagtctcacaatattc

SEQ ID NO: 74925 - DNA, 33 bp, Homo sapien
tgcagatagaagatgacagtgcccattctctgt

SEQ ID NO: 74926 - DNA, 33 bp, Homo sapien
tgcagatagaagatgatagtgcccattctctgt

SEQ ID NO: 74927 - DNA, 33 bp, Homo sapien
atctgaaagtttaaaaagtggaccgactgactc

SEQ ID NO: 74928 - DNA, 33 bp, Homo sapien
atctgaaagtttaaaaggtggaccgactgactc

SEQ ID NO: 74929 - DNA, 33 bp, Homo sapien
ttgattttgaatgctaaatttttttctctgtct

SEQ ID NO: 74930 - DNA, 33 bp, Homo sapien
ttgattttgaatgctacatttttttctctgtct

SEQ ID NO: 74931 - DNA, 33 bp, Homo sapien
tgctggctaaagaggacatgtattttaagatga

SEQ ID NO: 74932 - DNA, 33 bp, Homo sapien
tgctggctaaagaggatatgtattttaagatga

SEQ ID NO: 74933 - DNA, 33 bp, Homo sapien
gtaaattttgcatacagaagctctttgcatggt

SEQ ID NO: 74934 - DNA, 33 bp, Homo sapien
gtaaattttgcatacataagctctttgcatggt

SEQ ID NO: 74935 - DNA, 33 bp, Homo sapien
gcaatcatattcataaacttacaactagatcaa

SEQ ID NO: 74936 - DNA, 33 bp, Homo sapien
gcaatcatattcataagcttacaactagatcaa

SEQ ID NO: 74937 - DNA, 33 bp, Homo sapien
gatattgaatgtcttgcagcaacaaaatgccac

SEQ ID NO: 74938 - DNA, 33 bp, Homo sapien
gatattgaatgtcttgtagcaacaaaatgccac

SEQ ID NO: 74939 - DNA, 33 bp, Homo sapien
attttaaatttatttcgaactcaacagtctctg

SEQ ID NO: 74940 - DNA, 33 bp, Homo sapien
attttaaatttatttctaactcaacagtctctg

SEQ ID NO: 74941 - DNA, 33 bp, Homo sapien
atatattagtgcagacacggtggtttaaaacat

SEQ ID NO: 74942 - DNA, 33 bp, Homo sapien
atatattagtgcagacgcggtggtttaaaacat

SEQ ID NO: 74943 - DNA, 33 bp, Homo sapien
aggatatataccattgaatgacaagaggttaat

SEQ ID NO: 74944 - DNA, 33 bp, Homo sapien
aggatatataccattggatgacaagaggttaat

SEQ ID NO: 74945 - DNA, 33 bp, Homo sapien
gcaaacatttcagtgagcattcaccagtcaggg

SEQ ID NO: 74946 - DNA, 33 bp, Homo sapien
gcaaacatttcagtgatcattcaccagtcaggg

SEQ ID NO: 74947 - DNA, 33 bp, Homo sapien
atactatatctttgcacagcattaggtcgggaa

SEQ ID NO: 74948 - DNA, 33 bp, Homo sapien
atactatatctttgcatagcattaggtcgggaa

SEQ ID NO: 74949 - DNA, 33 bp, Homo sapien
tagcaacatagaccaacgcagggaatactctgc

SEQ ID NO: 74950 - DNA, 33 bp, Homo sapien
tagcaacatagaccaatgcagggaatactctgc

SEQ ID NO: 74951 - DNA, 33 bp, Homo sapien
gagagtgctttagccaaaatgattccctccttg

SEQ ID NO: 74952 - DNA, 33 bp, Homo sapien
gagagtgctttagccacaatgattccctccttg

SEQ ID NO: 74953 - DNA, 33 bp, Homo sapien
agaaaagatattcaacactacacaaaaaattga

SEQ ID NO: 74954 - DNA, 33 bp, Homo sapien
agaaaagatattcaacgctacacaaaaaattga

SEQ ID NO: 74955 - DNA, 33 bp, Homo sapien
gatttggcatagcgtaactgtccatcaggaagg

SEQ ID NO: 74956 - DNA, 33 bp, Homo sapien
gatttggcatagcgtacctgtccatcaggaagg

SEQ ID NO: 74957 - DNA, 33 bp, Homo sapien
gagcaagtgcactttcacttaacagaaagatat

SEQ ID NO: 74958 - DNA, 33 bp, Homo sapien
gagcaagtgcactttcgcttaacagaaagatat

SEQ ID NO: 74959 - DNA, 33 bp, Homo sapien
ggcaggaaaaatgtccacttcactgtgtaattt

SEQ ID NO: 74960 - DNA, 33 bp, Homo sapien
ggcaggaaaaatgtccgcttcactgtgtaattt

SEQ ID NO: 74961 - DNA, 33 bp, Homo sapien
cctaagcaaaccttgcaacatataccatcttcc

SEQ ID NO: 74962 - DNA, 33 bp, Homo sapien
cctaagcaaaccttgccacatataccatcttcc

SEQ ID NO: 74963 - DNA, 33 bp, Homo sapien
taaaaaaagagaatgcaatagaggaggtggagc

SEQ ID NO: 74964 - DNA, 33 bp, Homo sapien
taaaaaaagagaatgcgatagaggaggtggagc

SEQ ID NO: 74965 - DNA, 33 bp, Homo sapien
ctattttactgtgactcagctggcacccaagac

SEQ ID NO: 74966 - DNA, 33 bp, Homo sapien
ctattttactgtgacttagctggcacccaagac

SEQ ID NO: 74967 - DNA, 33 bp, Homo sapien
gttgggtaacaagtgcacagatatttggtcaaa

SEQ ID NO: 74968 - DNA, 33 bp, Homo sapien
gttgggtaacaagtgcgcagatatttggtcaaa

SEQ ID NO: 74969 - DNA, 33 bp, Homo sapien
atgctagggacaaagacgaggaatgagtggccc

SEQ ID NO: 74970 - DNA, 33 bp, Homo sapien
atgctagggacaaagatgaggaatgagtggccc

SEQ ID NO: 74971 - DNA, 33 bp, Homo sapien
gaacataaggcaccaagatttagtgaatgaaag

SEQ ID NO: 74972 - DNA, 33 bp, Homo sapien
gaacataaggcaccaatatttagtgaatgaaag

SEQ ID NO: 74973 - DNA, 33 bp, Homo sapien
aaacaatctgaacgcaacaactatgcagactaa

SEQ ID NO: 74974 - DNA, 33 bp, Homo sapien
aaacaatctgaacgcagcaactatgcagactaa

SEQ ID NO: 74975 - DNA, 33 bp, Homo sapien
actgatgtcataaaccactacgagagctagttg

SEQ ID NO: 74976 - DNA, 33 bp, Homo sapien
actgatgtcataaacccctacgagagctagttg

SEQ ID NO: 74977 - DNA, 33 bp, Homo sapien
gttcaattctgagcaaaattccggtgaaaatgc

SEQ ID NO: 74978 - DNA, 33 bp, Homo sapien
gttcaattctgagcaacattccggtgaaaatgc

SEQ ID NO: 74979 - DNA, 33 bp, Homo sapien
atcttttgactgttgcaaataatgctgttatga

SEQ ID NO: 74980 - DNA, 33 bp, Homo sapien
atcttttgactgttgcgaataatgctgttatga

SEQ ID NO: 74981 - DNA, 33 bp, Homo sapien
actgttattaaataggacattgtctttctggtc

SEQ ID NO: 74982 - DNA, 33 bp, Homo sapien
actgttattaaatagggcattgtctttctggtc

SEQ ID NO: 74983 - DNA, 33 bp, Homo sapien
cctcccattacttagacgggcgacaaggttaat

SEQ ID NO: 74984 - DNA, 33 bp, Homo sapien
cctcccattacttagatgggcgacaaggttaat

SEQ ID NO: 74985 - DNA, 33 bp, Homo sapien
catttctcattatcacagacgacaaagacccaa

SEQ ID NO: 74986 - DNA, 33 bp, Homo sapien
catttctcattatcacggacgacaaagacccaa

SEQ ID NO: 74987 - DNA, 33 bp, Homo sapien
gttaaagcctctaaaacctacctgaaaaacaag

SEQ ID NO: 74988 - DNA, 33 bp, Homo sapien
gttaaagcctctaaaatctacctgaaaaacaag

SEQ ID NO: 74989 - DNA, 33 bp, Homo sapien
aagtacacaatagccaactaacagcttcaacca

SEQ ID NO: 74990 - DNA, 33 bp, Homo sapien
aagtacacaatagccagctaacagcttcaacca

SEQ ID NO: 74991 - DNA, 33 bp, Homo sapien
gtactttagcaaggaaaaaaactatgctgctca

SEQ ID NO: 74992 - DNA, 33 bp, Homo sapien
gtactttagcaaggaagaaaactatgctgctca

SEQ ID NO: 74993 - DNA, 33 bp, Homo sapien
gagaaaaaatgcttagcaggaaccctctgtcct

SEQ ID NO: 74994 - DNA, 33 bp, Homo sapien
gagaaaaaatgcttagtaggaaccctctgtcct

SEQ ID NO: 74995 - DNA, 33 bp, Homo sapien
gccattggcacgataacgatttgtctggaaaaa

SEQ ID NO: 74996 - DNA, 33 bp, Homo sapien
gccattggcacgataaggatttgtctggaaaaa

SEQ ID NO: 74997 - DNA, 33 bp, Homo sapien
gataagaaagaagtccaagcacactgaattccc

SEQ ID NO: 74998 - DNA, 33 bp, Homo sapien
gataagaaagaagtccgagcacactgaattccc

SEQ ID NO: 74999 - DNA, 33 bp, Homo sapien
aaaatggacatagtgaggaccctgtattatgaa

SEQ ID NO: 75000 - DNA, 33 bp, Homo sapien
aaaatggacatagtgatgaccctgtattatgaa

SEQ ID NO: 75001 - DNA, 33 bp, Homo sapien
tctttagctatctcctcaaagccacagcttttg

SEQ ID NO: 75002 - DNA, 33 bp, Homo sapien
tctttagctatctcctgaaagccacagcttttg

SEQ ID NO: 75003 - DNA, 33 bp, Homo sapien
taagtatctccaaatccgaactgaatctcagga

SEQ ID NO: 75004 - DNA, 33 bp, Homo sapien
taagtatctccaaatctgaactgaatctcagga

SEQ ID NO: 75005 - DNA, 33 bp, Homo sapien
ccctgctagcatcaacaacaaagacttgggtct

SEQ ID NO: 75006 - DNA, 33 bp, Homo sapien
ccctgctagcatcaacgacaaagacttgggtct

SEQ ID NO: 75007 - DNA, 33 bp, Homo sapien
gcctgcatgaacagaacctgctgtgttccaagt

SEQ ID NO: 75008 - DNA, 33 bp, Homo sapien
gcctgcatgaacagaatctgctgtgttccaagt

SEQ ID NO: 75009 - DNA, 33 bp, Homo sapien
aaaattggtagaatgtaaaatccttgacagcct

SEQ ID NO: 75010 - DNA, 33 bp, Homo sapien
aaaattggtagaatgttaaatccttgacagcct

SEQ ID NO: 75011 - DNA, 33 bp, Homo sapien
ccccgttacttgcaacaaaactgctcagctgtt

SEQ ID NO: 75012 - DNA, 33 bp, Homo sapien
ccccgttacttgcaacgaaactgctcagctgtt

SEQ ID NO: 75013 - DNA, 33 bp, Homo sapien
atagaacaattccacaacacaaaagttatattg

SEQ ID NO: 75014 - DNA, 33 bp, Homo sapien
atagaacaattccacatcacaaaagttatattg

SEQ ID NO: 75015 - DNA, 33 bp, Homo sapien
gatgacaactcaaaaactcagtgtcctcagaca

SEQ ID NO: 75016 - DNA, 33 bp, Homo sapien
gatgacaactcaaaaattcagtgtcctcagaca

SEQ ID NO: 75017 - DNA, 33 bp, Homo sapien
gactaaatgccgtgtgaagagagttgaaatgtc

SEQ ID NO: 75018 - DNA, 33 bp, Homo sapien
gactaaatgccgtgtggagagagttgaaatgtc

SEQ ID NO: 75019 - DNA, 33 bp, Homo sapien
cttatcacagaccgaacaagcaaatgaataggc

SEQ ID NO: 75020 - DNA, 33 bp, Homo sapien
cttatcacagaccgaataagcaaatgaataggc

SEQ ID NO: 75021 - DNA, 33 bp, Homo sapien
ctctcaccctctgggaccaaccaggcattagtt

SEQ ID NO: 75022 - DNA, 33 bp, Homo sapien
ctctcaccctctgggatcaaccaggcattagtt

SEQ ID NO: 75023 - DNA, 33 bp, Homo sapien
ttgtttcagtcatatccacagtgaataatttga

SEQ ID NO: 75024 - DNA, 33 bp, Homo sapien
ttgtttcagtcatatctacagtgaataatttga

SEQ ID NO: 75025 - DNA, 33 bp, Homo sapien
ttgtcagatttttgaacgcagagtcaaggatcc

SEQ ID NO: 75026 - DNA, 33 bp, Homo sapien
ttgtcagatttttgaatgcagagtcaaggatcc

SEQ ID NO: 75027 - DNA, 33 bp, Homo sapien
taaacgagacaaggtaagtggacatcctcagcc

SEQ ID NO: 75028 - DNA, 33 bp, Homo sapien
taaacgagacaaggtaggtggacatcctcagcc

SEQ ID NO: 75029 - DNA, 33 bp, Homo sapien
gggcatttcagggagaaaaacacccaaaggcac

SEQ ID NO: 75030 - DNA, 33 bp, Homo sapien
gggcatttcagggagagaaacacccaaaggcac

SEQ ID NO: 75031 - DNA, 33 bp, Homo sapien
ttcagttagtttgtaccgaaagagccattcata

SEQ ID NO: 75032 - DNA, 33 bp, Homo sapien
ttcagttagtttgtactgaaagagccattcata

SEQ ID NO: 75033 - DNA, 33 bp, Homo sapien
actcaggggttattcaaataatgccatcaactg

SEQ ID NO: 75034 - DNA, 33 bp, Homo sapien
actcaggggttattcagataatgccatcaactg

SEQ ID NO: 75035 - DNA, 33 bp, Homo sapien
atgtttaaacctgaaaatccaagctacagccct

SEQ ID NO: 75036 - DNA, 33 bp, Homo sapien
atgtttaaacctgaaactccaagctacagccct

SEQ ID NO: 75037 - DNA, 33 bp, Homo sapien
gagctcacagccttgacgaatgaagaaacaaac

SEQ ID NO: 75038 - DNA, 33 bp, Homo sapien
gagctcacagccttgatgaatgaagaaacaaac

SEQ ID NO: 75039 - DNA, 33 bp, Homo sapien
acttgaccattcatacagcagagaaagacgtga

SEQ ID NO: 75040 - DNA, 33 bp, Homo sapien
acttgaccattcatacggcagagaaagacgtga

SEQ ID NO: 75041 - DNA, 33 bp, Homo sapien
atggaaacgaatttcacgccaaatgacgataca

SEQ ID NO: 75042 - DNA, 33 bp, Homo sapien
atggaaacgaatttcaggccaaatgacgataca

SEQ ID NO: 75043 - DNA, 33 bp, Homo sapien
tagaagatataaactaggtagagtgctagtcta

SEQ ID NO: 75044 - DNA, 33 bp, Homo sapien
tagaagatataaactatgtagagtgctagtcta

SEQ ID NO: 75045 - DNA, 33 bp, Homo sapien
ttcacagactaagttacgccgttactccaggat

SEQ ID NO: 75046 - DNA, 33 bp, Homo sapien
ttcacagactaagttatgccgttactccaggat

SEQ ID NO: 75047 - DNA, 33 bp, Homo sapien
gctctgttccagattaaccagacaagggcaggg

SEQ ID NO: 75048 - DNA, 33 bp, Homo sapien
gctctgttccagattacccagacaagggcaggg

SEQ ID NO: 75049 - DNA, 33 bp, Homo sapien
accatcattatccacaatcatttattaagtaca

SEQ ID NO: 75050 - DNA, 33 bp, Homo sapien
accatcattatccacagtcatttattaagtaca

SEQ ID NO: 75051 - DNA, 33 bp, Homo sapien
ctgaatacaacagccaacttcaagtatttaaga

SEQ ID NO: 75052 - DNA, 33 bp, Homo sapien
ctgaatacaacagccagcttcaagtatttaaga

SEQ ID NO: 75053 - DNA, 33 bp, Homo sapien
aaatgaaacaagaaagaaaatcctaagaaagaa

SEQ ID NO: 75054 - DNA, 33 bp, Homo sapien
aaatgaaacaagaaaggaaatcctaagaaagaa

SEQ ID NO: 75055 - DNA, 33 bp, Homo sapien
gtctttgagcagtcaagatctttttatatgcaa

SEQ ID NO: 75056 - DNA, 33 bp, Homo sapien
gtctttgagcagtcaatatctttttatatgcaa

SEQ ID NO: 75057 - DNA, 33 bp, Homo sapien
aaggaagagttgcaccacagtaactttaaatca

SEQ ID NO: 75058 - DNA, 33 bp, Homo sapien
aaggaagagttgcacctcagtaactttaaatca

SEQ ID NO: 75059 - DNA, 33 bp, Homo sapien
tagggccacttgaatgcattatttagatttatg

SEQ ID NO: 75060 - DNA, 33 bp, Homo sapien
tagggccacttgaatgtattatttagatttatg

SEQ ID NO: 75061 - DNA, 33 bp, Homo sapien
cagacatgaaatgtacaacagtgcttgcaatca

SEQ ID NO: 75062 - DNA, 33 bp, Homo sapien
cagacatgaaatgtaccacagtgcttgcaatca

SEQ ID NO: 75063 - DNA, 33 bp, Homo sapien
ttgtctttttgcttcacggttgaattcaaaatc

SEQ ID NO: 75064 - DNA, 33 bp, Homo sapien
ttgtctttttgcttcatggttgaattcaaaatc

SEQ ID NO: 75065 - DNA, 33 bp, Homo sapien
aatattagttatgatccattgtgcctaaactcc

SEQ ID NO: 75066 - DNA, 33 bp, Homo sapien
aatattagttatgatctattgtgcctaaactcc

SEQ ID NO: 75067 - DNA, 33 bp, Homo sapien
gagtgcttagttgttacgtaaaatgaataatgt

SEQ ID NO: 75068 - DNA, 33 bp, Homo sapien
gagtgcttagttgttatgtaaaatgaataatgt

SEQ ID NO: 75069 - DNA, 33 bp, Homo sapien; identical to SEQ ID NO: 75067

SEQ ID NO: 75070 - DNA, 33 bp, Homo sapien; identical to SEQ ID NO: 75068

SEQ ID NO: 75071 - DNA, 33 bp, Homo sapien
cccacactaggctttacctcttcaactctcagt

SEQ ID NO: 75072 - DNA, 33 bp, Homo sapien
cccacactaggctttatctcttcaactctcagt

SEQ ID NO: 75073 - DNA, 33 bp, Homo sapien; identical to SEQ ID NO: 75071

SEQ ID NO: 75074 - DNA, 33 bp, Homo sapien; identical to SEQ ID NO: 75072

SEQ ID NO: 75075 - DNA, 33 bp, Homo sapien
gaacaattggttttaactacaatgtcaattgaa

SEQ ID NO: 75076 - DNA, 33 bp, Homo sapien
gaacaattggttttaattacaatgtcaattgaa

SEQ ID NO: 75077 - DNA, 33 bp, Homo sapien
agtatctggcatctccactagtgaaagctatcc

SEQ ID NO: 75078 - DNA, 33 bp, Homo sapien
agtatctggcatctcctctagtgaaagctatcc

SEQ ID NO: 75079 - DNA, 33 bp, Homo sapien
ataatctctggctaacaatgcctgtttctaatc

SEQ ID NO: 75080 - DNA, 33 bp, Homo sapien
ataatctctggctaacgatgcctgtttctaatc

SEQ ID NO: 75081 - DNA, 33 bp, Homo sapien
aagaaaaaatatcatccataatctcacctcact

SEQ ID NO: 75082 - DNA, 33 bp, Homo sapien
aagaaaaaatatcatctataatctcacctcact

SEQ ID NO: 75083 - DNA, 33 bp, Homo sapien
tgtggtcctcaccaaaatggtatctgggtgtgt

SEQ ID NO: 75084 - DNA, 33 bp, Homo sapien
tgtggtcctcaccaaagtggtatctgggtgtgt

SEQ ID NO: 75085 - DNA, 33 bp, Homo sapien
ttcatctaaaaaacaacgatagacaaatcaaca

SEQ ID NO: 75086 - DNA, 33 bp, Homo sapien
ttcatctaaaaaacaaggatagacaaatcaaca

SEQ ID NO: 75087 - DNA, 33 bp, Homo sapien
cattttgtttgttcaactggtttggcatttggg

SEQ ID NO: 75088 - DNA, 33 bp, Homo sapien
cattttgtttgttcaattggtttggcatttggg

SEQ ID NO: 75089 - DNA, 33 bp, Homo sapien
agattagacattttcacggaatctaagttttgc

SEQ ID NO: 75090 - DNA, 33 bp, Homo sapien
agattagacattttcatggaatctaagttttgc

SEQ ID NO: 75091 - DNA, 33 bp, Homo sapien; identical to SEQ ID NO: 75089

SEQ ID NO: 75092 - DNA, 33 bp, Homo sapien; identical to SEQ ID NO: 75090

SEQ ID NO: 75093 - DNA, 33 bp, Homo sapien
ctcaggaaaatttaaaactcccaccaggtgcag

SEQ ID NO: 75094 - DNA, 33 bp, Homo sapien
ctcaggaaaatttaaagctcccaccaggtgcag

SEQ ID NO: 75095 - DNA, 33 bp, Homo sapien
gctctaacagaaaataacacctgtattagttta

SEQ ID NO: 75096 - DNA, 33 bp, Homo sapien
gctctaacagaaaatagcacctgtattagttta

SEQ ID NO: 75097 - DNA, 33 bp, Homo sapien
ggtgggttatatagacaggtttgcagatgtaaa

SEQ ID NO: 75098 - DNA, 33 bp, Homo sapien
ggtgggttatatagacgggtttgcagatgtaaa

SEQ ID NO: 75099 - DNA, 33 bp, Homo sapien
gatggactatagcaggaagcagacacagggaag

SEQ ID NO: 75100 - DNA, 33 bp, Homo sapien
gatggactatagcagggagcagacacagggaag

SEQ ID NO: 75101 - DNA, 33 bp, Homo sapien
ccagatatcttggtaacgaaaatctctgtgtag

SEQ ID NO: 75102 - DNA, 33 bp, Homo sapien
ccagatatcttggtaatgaaaatctctgtgtag

SEQ ID NO: 75103 - DNA, 33 bp, Homo sapien
tagaggaaggaaacccactagggatagttcaat

SEQ ID NO: 75104 - DNA, 33 bp, Homo sapien
tagaggaaggaaacccgctagggatagttcaat

SEQ ID NO: 75105 - DNA, 33 bp, Homo sapien
tccttcctctagcaaaacatcccactcaatagg

SEQ ID NO: 75106 - DNA, 33 bp, Homo sapien
tccttcctctagcaaatcatcccactcaatagg

SEQ ID NO: 75107 - DNA, 33 bp, Homo sapien
ggaattgcagactacgaaagagggataaataat

SEQ ID NO: 75108 - DNA, 33 bp, Homo sapien
ggaattgcagactacggaagagggataaataat

SEQ ID NO: 75109 - DNA, 33 bp, Homo sapien
tttcttaatctggtgcaaagtatggtttcagtg

SEQ ID NO: 75110 - DNA, 33 bp, Homo sapien
tttcttaatctggtgcgaagtatggtttcagtg

SEQ ID NO: 75111 - DNA, 33 bp, Homo sapien
tcaaaactataactcacgatagacactgaaacc

SEQ ID NO: 75112 - DNA, 33 bp, Homo sapien
tcaaaactataactcaggatagacactgaaacc

SEQ ID NO: 75113 - DNA, 33 bp, Homo sapien
cattttaaaggcagcaaattcaaaactataact

SEQ ID NO: 75114 - DNA, 33 bp, Homo sapien
cattttaaaggcagcagattcaaaactataact

SEQ ID NO: 75115 - DNA, 33 bp, Homo sapien
atgtcattgcaaacaagttgcgccgtgtgtccc

SEQ ID NO: 75116 - DNA, 33 bp, Homo sapien
atgtcattgcaaacaatttgcgccgtgtgtccc

SEQ ID NO: 75117 - DNA, 33 bp, Homo sapien
agagcaaactgctaaggctgaggccctcaaact

SEQ ID NO: 75118 - DNA, 33 bp, Homo sapien
agagcaaactgctaagtctgaggccctcaaact

SEQ ID NO: 75119 - DNA, 33 bp, Homo sapien
aaaagtcatagcaacactgtctataatagctaa

SEQ ID NO: 75120 - DNA, 33 bp, Homo sapien
aaaagtcatagcaacattgtctataatagctaa

SEQ ID NO: 75121 - DNA, 33 bp, Homo sapien
caccctgtggaatgcaccaactcatagaactcc

SEQ ID NO: 75122 - DNA, 33 bp, Homo sapien
caccctgtggaatgcatcaactcatagaactcc

SEQ ID NO: 75123 - DNA, 33 bp, Homo sapien
ctcatttccatcagatcagctgtggcattaggt

SEQ ID NO: 75124 - DNA, 33 bp, Homo sapien
ctcatttccatcagattagctgtggcattaggt

SEQ ID NO: 75125 - DNA, 33 bp, Homo sapien
tggttagtcaaaacacaatgactggtacagcca

SEQ ID NO: 75126 - DNA, 33 bp, Homo sapien
tggttagtcaaaacacgatgactggtacagcca

SEQ ID NO: 75127 - DNA, 33 bp, Homo sapien
atcaaactggcagtagacataaagatttggtta

SEQ ID NO: 75128 - DNA, 33 bp, Homo sapien
atcaaactggcagtagtcataaagatttggtta

SEQ ID NO: 75129 - DNA, 33 bp, Homo sapien
gcagagctaagagaggaatgaagagagtgttca

SEQ ID NO: 75130 - DNA, 33 bp, Homo sapien
gcagagctaagagagggatgaagagagtgttca

SEQ ID NO: 75131 - DNA, 33 bp, Homo sapien
atcatttagcagttggacactaatcgtcagggc

SEQ ID NO: 75132 - DNA, 33 bp, Homo sapien
atcatttagcagttgggcactaatcgtcagggc

SEQ ID NO: 75133 - DNA, 33 bp, Homo sapien
aaggaaaacagatgaacgatttcagtaggattc

SEQ ID NO: 75134 - DNA, 33 bp, Homo sapien
aaggaaaacagatgaatgatttcagtaggattc

SEQ ID NO: 75135 - DNA, 33 bp, Homo sapien
atggtaaaactggaaccagatcactgaacagca

SEQ ID NO: 75136 - DNA, 33 bp, Homo sapien
atggtaaaactggaacgagatcactgaacagca

SEQ ID NO: 75137 - DNA, 33 bp, Homo sapien
tcagcccaagtgaacactgtagaaaatccactg

SEQ ID NO: 75138 - DNA, 33 bp, Homo sapien
tcagcccaagtgaacattgtagaaaatccactg

SEQ ID NO: 75139 - DNA, 33 bp, Homo sapien; identical to SEQ ID NO: 75137

SEQ ID NO: 75140 - DNA, 33 bp, Homo sapien; identical to SEQ ID NO: 75138

SEQ ID NO: 75141 - DNA, 33 bp, Homo sapien
taccatcattataaccggctattggatacaaac

SEQ ID NO: 75142 - DNA, 33 bp, Homo sapien
taccatcattataacctgctattggatacaaac

SEQ ID NO: 75143 - DNA, 33 bp, Homo sapien
gggtcaagaaatagaaaccaaggctgagtacct

SEQ ID NO: 75144 - DNA, 33 bp, Homo sapien
gggtcaagaaatagaacccaaggctgagtacct

SEQ ID NO: 75145 - DNA, 33 bp, Homo sapien
tttaggattaacccagacaacttcggccatttt

SEQ ID NO: 75146 - DNA, 33 bp, Homo sapien
tttaggattaacccagccaacttcggccatttt

SEQ ID NO: 75147 - DNA, 33 bp, Homo sapien
agattaggtgacttgaaaaataatcattgctac

SEQ ID NO: 75148 - DNA, 33 bp, Homo sapien
agattaggtgacttgagaaataatcattgctac

SEQ ID NO: 75149 - DNA, 33 bp, Homo sapien; identical to SEQ ID NO: 75147

SEQ ID NO: 75150 - DNA, 33 bp, Homo sapien; identical to SEQ ID NO: 75148

SEQ ID NO: 75151 - DNA, 33 bp, Homo sapien
aaggcaaggtatggagccaaatagatacaggaa

SEQ ID NO: 75152 - DNA, 33 bp, Homo sapien
aaggcaaggtatggagtcaaatagatacaggaa

SEQ ID NO: 75153 - DNA, 33 bp, Homo sapien
caaagtgttgcatgtacgtctgcaggaaggatt

SEQ ID NO: 75154 - DNA, 33 bp, Homo sapien
caaagtgttgcatgtatgtctgcaggaaggatt

SEQ ID NO: 75155 - DNA, 33 bp, Homo sapien
gtcacatgctaaatgcaaattaagaaaagagag

SEQ ID NO: 75156 - DNA, 33 bp, Homo sapien
gtcacatgctaaatgcgaattaagaaaagagag

SEQ ID NO: 75157 - DNA, 33 bp, Homo sapien
ctcttcacttacagtcactcctatgatgttatt

SEQ ID NO: 75158 - DNA, 33 bp, Homo sapien
ctcttcacttacagtcgctcctatgatgttatt

SEQ ID NO: 75159 - DNA, 33 bp, Homo sapien
gcacacagtgctttgacggtccataagtggacc

SEQ ID NO: 75160 - DNA, 33 bp, Homo sapien
gcacacagtgctttgatggtccataagtggacc

SEQ ID NO: 75161 - DNA, 33 bp, Homo sapien
ctgtgagtgaggtctcaaagaactatgatgtgg

SEQ ID NO: 75162 - DNA, 33 bp, Homo sapien
ctgtgagtgaggtctcgaagaactatgatgtgg

SEQ ID NO: 75163 - DNA, 33 bp, Homo sapien
ctaagacccgttgctgcagttatttgcaattac

SEQ ID NO: 75164 - DNA, 33 bp, Homo sapien
ctaagacccgttgctgtagttatttgcaattac

SEQ ID NO: 75165 - DNA, 33 bp, Homo sapien
ggcatgggaggcattaaccagagagaggatgca

SEQ ID NO: 75166 - DNA, 33 bp, Homo sapien
ggcatgggaggcattagccagagagaggatgca

SEQ ID NO: 75167 - DNA, 33 bp, Homo sapien
tactgaccacttgctcaacagcggccacgttca

SEQ ID NO: 75168 - DNA, 33 bp, Homo sapien
tactgaccacttgctctacagcggccacgttca

SEQ ID NO: 75169 - DNA, 33 bp, Homo sapien
ctctgaagatgcaaccagaaaatcaaggttacc

SEQ ID NO: 75170 - DNA, 33 bp, Homo sapien
ctctgaagatgcaaccggaaaatcaaggttacc

SEQ ID NO: 75171 - DNA, 33 bp, Homo sapien
atctgtagcatccaaccgatatttttaatatac

SEQ ID NO: 75172 - DNA, 33 bp, Homo sapien
atctgtagcatccaactgatatttttaatatac

SEQ ID NO: 75173 - DNA, 33 bp, Homo sapien
aggaatagcataagtaccacagggtataggtag

SEQ ID NO: 75174 - DNA, 33 bp, Homo sapien
aggaatagcataagtatcacagggtataggtag

SEQ ID NO: 75175 - DNA, 33 bp, Homo sapien
tctgtgattttctacccagttaatgctcctaga

SEQ ID NO: 75176 - DNA, 33 bp, Homo sapien
tctgtgattttctacctagttaatgctcctaga

SEQ ID NO: 75177 - DNA, 33 bp, Homo sapien
gcaagcccacctggcccaacaagaatatgaggc

SEQ ID NO: 75178 - DNA, 33 bp, Homo sapien
gcaagcccacctggcctaacaagaatatgaggc

SEQ ID NO: 75179 - DNA, 33 bp, Homo sapien
tgcttagccaaaagtgcagtggtgtcaatggca

SEQ ID NO: 75180 - DNA, 33 bp, Homo sapien
tgcttagccaaaagtgtagtggtgtcaatggca

SEQ ID NO: 75181 - DNA, 33 bp, Homo sapien
cttatttatctttacagggacttgaaacattag

SEQ ID NO: 75182 - DNA, 33 bp, Homo sapien
cttatttatctttacatggacttgaaacattag

SEQ ID NO: 75183 - DNA, 33 bp, Homo sapien
cagggtaattgtttagaaagctgatgcggtaat

SEQ ID NO: 75184 - DNA, 33 bp, Homo sapien
cagggtaattgtttagcaagctgatgcggtaat

SEQ ID NO: 75185 - DNA, 33 bp, Homo sapien
gagtaaaccttctaaaatcaaagcatgtggcta

SEQ ID NO: 75186 - DNA, 33 bp, Homo sapien
gagtaaaccttctaaattcaaagcatgtggcta

SEQ ID NO: 75187 - DNA, 33 bp, Homo sapien; identical to SEQ ID NO: 75185

SEQ ID NO: 75188 - DNA, 33 bp, Homo sapien; identical to SEQ ID NO: 75186

SEQ ID NO: 75189 - DNA, 33 bp, Homo sapien
cttttgctgagaaggcaaaggaaattctcgccc

SEQ ID NO: 75190 - DNA, 33 bp, Homo sapien
cttttgctgagaaggctaaggaaattctcgccc

SEQ ID NO: 75191 - DNA, 33 bp, Homo sapien
cattgcttcttctgcaatctctaacatacaatt

SEQ ID NO: 75192 - DNA, 33 bp, Homo sapien
cattgcttcttctgcagtctctaacatacaatt

SEQ ID NO: 75193 - DNA, 33 bp, Homo sapien; identical to SEQ ID NO: 75191

SEQ ID NO: 75194 - DNA, 33 bp, Homo sapien; identical to SEQ ID NO: 75192

SEQ ID NO: 75195 - DNA, 33 bp, Homo sapien
ataagtctgtaaaaaagcaaaatgttgtttctc

SEQ ID NO: 75196 - DNA, 33 bp, Homo sapien
ataagtctgtaaaaaatcaaaatgttgtttctc

SEQ ID NO: 75197 - DNA, 33 bp, Homo sapien
gtaccctgctatcagacctggcaatcaatgact

SEQ ID NO: 75198 - DNA, 33 bp, Homo sapien
gtaccctgctatcagagctggcaatcaatgact

SEQ ID NO: 75199 - DNA, 33 bp, Homo sapien
gagaaatacccatcccaactatgaaagttttca

SEQ ID NO: 75200 - DNA, 33 bp, Homo sapien
gagaaatacccatcccgactatgaaagttttca

SEQ ID NO: 75201 - DNA, 33 bp, Homo sapien
attgtgttcaataaaaccctttcataattttac

SEQ ID NO: 75202 - DNA, 33 bp, Homo sapien
attgtgttcaataaaatcctttcataattttac

SEQ ID NO: 75203 - DNA, 33 bp, Homo sapien
atccatggttacagagaagttatctgacgactg

SEQ ID NO: 75204 - DNA, 33 bp, Homo sapien
atccatggttacagagcagttatctgacgactg

SEQ ID NO: 75205 - DNA, 33 bp, Homo sapien
tataaagctctagtaagtaagacagcagatgaa

SEQ ID NO: 75206 - DNA, 33 bp, Homo sapien
tataaagctctagtaattaagacagcagatgaa

SEQ ID NO: 75207 - DNA, 33 bp, Homo sapien
gaggaaatggaagtatcatacactgctgatggg

SEQ ID NO: 75208 - DNA, 33 bp, Homo sapien
gaggaaatggaagtattatacactgctgatggg

SEQ ID NO: 75209 - DNA, 33 bp, Homo sapien
gcactatgacaaaaaagaacttctcagcataac

SEQ ID NO: 75210 - DNA, 33 bp, Homo sapien
gcactatgacaaaaaataacttctcagcataac

SEQ ID NO: 75211 - DNA, 33 bp, Homo sapien
gctttgcaatgcagcaatgaagctgattgagta

SEQ ID NO: 75212 - DNA, 33 bp, Homo sapien
gctttgcaatgcagcagtgaagctgattgagta

SEQ ID NO: 75213 - DNA, 33 bp, Homo sapien
gtccagcaatcagtacaactctccctcctacag

SEQ ID NO: 75214 - DNA, 33 bp, Homo sapien
gtccagcaatcagtaccactctccctcctacag

SEQ ID NO: 75215 - DNA, 33 bp, Homo sapien
cgttttaacgtgcaaacttatagaaaatgcaaa

SEQ ID NO: 75216 - DNA, 33 bp, Homo sapien
cgttttaacgtgcaaagttatagaaaatgcaaa

SEQ ID NO: 75217 - DNA, 33 bp, Homo sapien
atcactgctgttcaaactgtagatcaccttctg

SEQ ID NO: 75218 - DNA, 33 bp, Homo sapien
atcactgctgttcaaattgtagatcaccttctg

SEQ ID NO: 75219 - DNA, 33 bp, Homo sapien; identical to SEQ ID NO: 75217

SEQ ID NO: 75220 - DNA, 33 bp, Homo sapien; identical to SEQ ID NO: 75218

SEQ ID NO: 75221 - DNA, 33 bp, Homo sapien
agtcagaggaatcagaaagtcctataattcagg

SEQ ID NO: 75222 - DNA, 33 bp, Homo sapien
agtcagaggaatcagacagtcctataattcagg

SEQ ID NO: 75223 - DNA, 33 bp, Homo sapien
aacagaacatgtcagaagaagacctaagactga

SEQ ID NO: 75224 - DNA, 33 bp, Homo sapien
aacagaacatgtcagatgaagacctaagactga

SEQ ID NO: 75225 - DNA, 33 bp, Homo sapien
cactgtctatgaaataactttgtccctgatcat

SEQ ID NO: 75226 - DNA, 33 bp, Homo sapien
cactgtctatgaaatagctttgtccctgatcat

SEQ ID NO: 75227 - DNA, 33 bp, Homo sapien
tagtcaatttataggaaccttctgacagatatg

SEQ ID NO: 75228 - DNA, 33 bp, Homo sapien
tagtcaatttataggagccttctgacagatatg

SEQ ID NO: 75229 - DNA, 33 bp, Homo sapien; identical to SEQ ID NO: 75227

SEQ ID NO: 75230 - DNA, 33 bp, Homo sapien; identical to SEQ ID NO: 75228

SEQ ID NO: 75231 - DNA, 33 bp, Homo sapien
atgcccaatggagagcagaatcttatctatcca

SEQ ID NO: 75232 - DNA, 33 bp, Homo sapien
atgcccaatggagagcggaatcttatctatcca

SEQ ID NO: 75233 - DNA, 33 bp, Homo sapien
cattggctttaaaagacgggccgattttcatag

SEQ ID NO: 75234 - DNA, 33 bp, Homo sapien
cattggctttaaaagatgggccgattttcatag

SEQ ID NO: 75235 - DNA, 33 bp, Homo sapien
gaatagactaattgaaactaatcaataagtgtg

SEQ ID NO: 75236 - DNA, 33 bp, Homo sapien
gaatagactaattgaagctaatcaataagtgtg

SEQ ID NO: 75237 - DNA, 33 bp, Homo sapien
ggttggtcactgaaacccctctgaaataattgc

SEQ ID NO: 75238 - DNA, 33 bp, Homo sapien
ggttggtcactgaaacgcctctgaaataattgc

SEQ ID NO: 75239 - DNA, 33 bp, Homo sapien
tttcctactcagaaccaccagttatctttccag

SEQ ID NO: 75240 - DNA, 33 bp, Homo sapien
tttcctactcagaaccgccagttatctttccag

SEQ ID NO: 75241 - DNA, 33 bp, Homo sapien
gtggttttcctaaggccaaatagttcagtagtc

SEQ ID NO: 75242 - DNA, 33 bp, Homo sapien
gtggttttcctaaggctaaatagttcagtagtc

SEQ ID NO: 75243 - DNA, 33 bp, Homo sapien
gatagttcttccaatacagacactgtacatatt

SEQ ID NO: 75244 - DNA, 33 bp, Homo sapien
gatagttcttccaatagagacactgtacatatt

SEQ ID NO: 75245 - DNA, 33 bp, Homo sapien
gtaatgtgtctataaaagcaaggtccaatgtta

SEQ ID NO: 75246 - DNA, 33 bp, Homo sapien
gtaatgtgtctataaatgcaaggtccaatgtta

SEQ ID NO: 75247 - DNA, 33 bp, Homo sapien
aaatacagtgggaaaaaaaaagtgtagcagttg

SEQ ID NO: 75248 - DNA, 33 bp, Homo sapien
aaatacagtgggaaaagaaaagtgtagcagttg

SEQ ID NO: 75249 - DNA, 33 bp, Homo sapien
cactgccttcaagttcagaaaaggaaaattaaa

SEQ ID NO: 75250 - DNA, 33 bp, Homo sapien
cactgccttcaagttcggaaaaggaaaattaaa

SEQ ID NO: 75251 - DNA, 33 bp, Homo sapien
tcagcctttcagaaaaacaggtcgcaaaattat

SEQ ID NO: 75252 - DNA, 33 bp, Homo sapien
tcagcctttcagaaaaccaggtcgcaaaattat

SEQ ID NO: 75253 - DNA, 33 bp, Homo sapien
ggttaaaataacttcacgttagatgtgtgcaca

SEQ ID NO: 75254 - DNA, 33 bp, Homo sapien
ggttaaaataacttcatgttagatgtgtgcaca

SEQ ID NO: 75255 - DNA, 33 bp, Homo sapien
ccaggtactcaagccaagatcattacacttttg

SEQ ID NO: 75256 - DNA, 33 bp, Homo sapien
ccaggtactcaagccaggatcattacacttttg

SEQ ID NO: 75257 - DNA, 33 bp, Homo sapien
ttactgctgatttatacgggccccacaatatgt

SEQ ID NO: 75258 - DNA, 33 bp, Homo sapien
ttactgctgatttatatgggccccacaatatgt

SEQ ID NO: 75259 - DNA, 33 bp, Homo sapien
actattttgtctcaaccaaaatcacaaaatggg

SEQ ID NO: 75260 - DNA, 33 bp, Homo sapien
actattttgtctcaactaaaatcacaaaatggg

SEQ ID NO: 75261 - DNA, 33 bp, Homo sapien
ccagacattgaggatgaactttttcttgagtgt

SEQ ID NO: 75262 - DNA, 33 bp, Homo sapien
ccagacattgaggatgtactttttcttgagtgt

SEQ ID NO: 75263 - DNA, 33 bp, Homo sapien
tccccatcaactgttaaaattgtacacctcttg

SEQ ID NO: 75264 - DNA, 33 bp, Homo sapien
tccccatcaactgttacaattgtacacctcttg

SEQ ID NO: 75265 - DNA, 33 bp, Homo sapien
ctcaaggtctagcagaaattcctaaccagtttg

SEQ ID NO: 75266 - DNA, 33 bp, Homo sapien
ctcaaggtctagcagatattcctaaccagtttg

SEQ ID NO: 75267 - DNA, 33 bp, Homo sapien
tgtggcatgaacctgagcattgacgcagatccc

SEQ ID NO: 75268 - DNA, 33 bp, Homo sapien
tgtggcatgaacctgatcattgacgcagatccc

SEQ ID NO: 75269 - DNA, 33 bp, Homo sapien
tagtcagtgaaagaccagaggattaaatgggcc

SEQ ID NO: 75270 - DNA, 33 bp, Homo sapien
tagtcagtgaaagaccggaggattaaatgggcc

SEQ ID NO: 75271 - DNA, 33 bp, Homo sapien
ctagtagagacagctcaagtggctagtcaggag

SEQ ID NO: 75272 - DNA, 33 bp, Homo sapien
ctagtagagacagctcgagtggctagtcaggag

SEQ ID NO: 75273 - DNA, 33 bp, Homo sapien
atttaacttgtggaccactactctcaaattctc

SEQ ID NO: 75274 - DNA, 33 bp, Homo sapien
atttaacttgtggaccgctactctcaaattctc

SEQ ID NO: 75275 - DNA, 33 bp, Homo sapien
agctgactaaactgaacgttttctaaaattcaa

SEQ ID NO: 75276 - DNA, 33 bp, Homo sapien
agctgactaaactgaatgttttctaaaattcaa

SEQ ID NO: 75277 - DNA, 33 bp, Homo sapien
ctcgaactcccgaactcaggtgaccataccgcc

SEQ ID NO: 75278 - DNA, 33 bp, Homo sapien
ctcgaactcccgaacttaggtgaccataccgcc

SEQ ID NO: 75279 - DNA, 33 bp, Homo sapien
tatctcttctaagcaccctgttaaaaattttgt

SEQ ID NO: 75280 - DNA, 33 bp, Homo sapien
tatctcttctaagcacgctgttaaaaattttgt

SEQ ID NO: 75281 - DNA, 33 bp, Homo sapien
aaatggggcgcaaccaagcaatagcaagcagaa

SEQ ID NO: 75282 - DNA, 33 bp, Homo sapien
aaatggggcgcaaccaggcaatagcaagcagaa

SEQ ID NO: 75283 - DNA, 33 bp, Homo sapien
ctggtaattagtataagatctcagtgagaccag

SEQ ID NO: 75284 - DNA, 33 bp, Homo sapien
ctggtaattagtataatatctcagtgagaccag

SEQ ID NO: 75285 - DNA, 33 bp, Homo sapien
gagttagtggaagcaacttcttatacctctcat

SEQ ID NO: 75286 - DNA, 33 bp, Homo sapien
gagttagtggaagcaatttcttatacctctcat

SEQ ID NO: 75287 - DNA, 33 bp, Homo sapien
gcactattttgtgcgaccacatctcttcattca

SEQ ID NO: 75288 - DNA, 33 bp, Homo sapien
gcactattttgtgcgatcacatctcttcattca

SEQ ID NO: 75289 - DNA, 33 bp, Homo sapien
atcaggatcataggagcactgtctgaggatcag

SEQ ID NO: 75290 - DNA, 33 bp, Homo sapien
atcaggatcataggaggactgtctgaggatcag

SEQ ID NO: 75291 - DNA, 33 bp, Homo sapien
actcagccctgaatgacggacttttatggaaca

SEQ ID NO: 75292 - DNA, 33 bp, Homo sapien
actcagccctgaatgatggacttttatggaaca

SEQ ID NO: 75293 - DNA, 33 bp, Homo sapien
ctatcaacctgggatacagtagggagccagaga

SEQ ID NO: 75294 - DNA, 33 bp, Homo sapien
ctatcaacctgggatagagtagggagccagaga

SEQ ID NO: 75295 - DNA, 33 bp, Homo sapien
ctatgtattctttccacctacatagtttgtgat

SEQ ID NO: 75296 - DNA, 33 bp, Homo sapien
ctatgtattctttccatctacatagtttgtgat

SEQ ID NO: 75297 - DNA, 33 bp, Homo sapien; identical to SEQ ID NO: 75295

SEQ ID NO: 75298 - DNA, 33 bp, Homo sapien; identical to SEQ ID NO: 75296

SEQ ID NO: 75299 - DNA, 33 bp, Homo sapien
aaatacaaggtcattacctctgaggcccatttg

SEQ ID NO: 75300 - DNA, 33 bp, Homo sapien
aaatacaaggtcattagctctgaggcccatttg

SEQ ID NO: 75301 - DNA, 33 bp, Homo sapien; identical to SEQ ID NO: 75299

SEQ ID NO: 75302 - DNA, 33 bp, Homo sapien; identical to SEQ ID NO: 75300

SEQ ID NO: 75303 - DNA, 33 bp, Homo sapien
tgagagagtttctccaaattcacacaggtataa

SEQ ID NO: 75304 - DNA, 33 bp, Homo sapien
tgagagagtttctccacattcacacaggtataa

SEQ ID NO: 75305 - DNA, 33 bp, Homo sapien; identical to SEQ ID NO: 75303

SEQ ID NO: 75306 - DNA, 33 bp, Homo sapien; identical to SEQ ID NO: 75304

SEQ ID NO: 75307 - DNA, 33 bp, Homo sapien
aatggaagcatttttaaatccttgttaactctg

SEQ ID NO: 75308 - DNA, 33 bp, Homo sapien
aatggaagcatttttacatccttgttaactctg

SEQ ID NO: 75309 - DNA, 33 bp, Homo sapien
cgatgaaaaaaatggaaccacatatatcctagc

SEQ ID NO: 75310 - DNA, 33 bp, Homo sapien
cgatgaaaaaaatggatccacatatatcctagc

SEQ ID NO: 75311 - DNA, 33 bp, Homo sapien
acataagctcctctgacggtaatttcttgaggg

SEQ ID NO: 75312 - DNA, 33 bp, Homo sapien
acataagctcctctgagggtaatttcttgaggg

SEQ ID NO: 75313 - DNA, 33 bp, Homo sapien
tcgggttaccactgaaggcactcttgtgcctgt

SEQ ID NO: 75314 - DNA, 33 bp, Homo sapien
tcgggttaccactgaatgcactcttgtgcctgt

SEQ ID NO: 75315 - DNA, 33 bp, Homo sapien
ttcatctcatctggccagcaaccatagaaatca

SEQ ID NO: 75316 - DNA, 33 bp, Homo sapien
ttcatctcatctggccggcaaccatagaaatca

SEQ ID NO: 75317 - DNA, 33 bp, Homo sapien
cacaaggagattcataaaagaaagaggctgggt

SEQ ID NO: 75318 - DNA, 33 bp, Homo sapien
cacaaggagattcatagaagaaagaggctgggt

SEQ ID NO: 75319 - DNA, 33 bp, Homo sapien
cagtttaacttgtgaaagcaaatgtggtcactg

SEQ ID NO: 75320 - DNA, 33 bp, Homo sapien
cagtttaacttgtgaaggcaaatgtggtcactg

SEQ ID NO: 75321 - DNA, 33 bp, Homo sapien
ttcagttgactctagaacatttcctttttaaca

SEQ ID NO: 75322 - DNA, 33 bp, Homo sapien
ttcagttgactctagatcatttcctttttaaca

SEQ ID NO: 75323 - DNA, 33 bp, Homo sapien
tttttgcgtagtactcagagacatataagtgga

SEQ ID NO: 75324 - DNA, 33 bp, Homo sapien
tttttgcgtagtactcggagacatataagtgga

SEQ ID NO: 75325 - DNA, 33 bp, Homo sapien
ttccccaaatgagccacattccttcattcgtct

SEQ ID NO: 75326 - DNA, 33 bp, Homo sapien
ttccccaaatgagccatattccttcattcgtct

SEQ ID NO: 75327 - DNA, 33 bp, Homo sapien
cttccagggctttcaaattacatgacacatcag

SEQ ID NO: 75328 - DNA, 33 bp, Homo sapien
cttccagggctttcaagttacatgacacatcag

SEQ ID NO: 75329 - DNA, 33 bp, Homo sapien
gaaagccctggaagaaactatgggtgactctgg

SEQ ID NO: 75330 - DNA, 33 bp, Homo sapien
gaaagccctggaagaacctatgggtgactctgg

SEQ ID NO: 75331 - DNA, 33 bp, Homo sapien
gggccagttggctgcactccacggaaaaggaac

SEQ ID NO: 75332 - DNA, 33 bp, Homo sapien
gggccagttggctgcattccacggaaaaggaac

SEQ ID NO: 75333 - DNA, 33 bp, Homo sapien
cctggcccgctagaaaatctgaagaatgcacaa

SEQ ID NO: 75334 - DNA, 33 bp, Homo sapien
cctggcccgctagaaagtctgaagaatgcacaa

SEQ ID NO: 75335 - DNA, 33 bp, Homo sapien
gcctctgttaatataaacttccatctaagacat

SEQ ID NO: 75336 - DNA, 33 bp, Homo sapien
gcctctgttaatataatcttccatctaagacat

SEQ ID NO: 75337 - DNA, 33 bp, Homo sapien
gctaatgacatcataactgcttcttggcatttt

SEQ ID NO: 75338 - DNA, 33 bp, Homo sapien
gctaatgacatcataattgcttcttggcatttt

SEQ ID NO: 75339 - DNA, 33 bp, Homo sapien
agcttttcactgtgaaaaattatcaagcaaaaa

SEQ ID NO: 75340 - DNA, 33 bp, Homo sapien
agcttttcactgtgaacaattatcaagcaaaaa

SEQ ID NO: 75341 - DNA, 33 bp, Homo sapien
aattccttgatattaaatccagaccacactcag

SEQ ID NO: 75342 - DNA, 33 bp, Homo sapien
aattccttgatattaactccagaccacactcag

SEQ ID NO: 75343 - DNA, 33 bp, Homo sapien
tcattctaggttaagaaactacaaaggcaaaac

SEQ ID NO: 75344 - DNA, 33 bp, Homo sapien
tcattctaggttaagagactacaaaggcaaaac

SEQ ID NO: 75345 - DNA, 33 bp, Homo sapien
tttcagttccacaataaagagtatctgaaataa

SEQ ID NO: 75346 - DNA, 33 bp, Homo sapien
tttcagttccacaatatagagtatctgaaataa

SEQ ID NO: 75347 - DNA, 33 bp, Homo sapien
ctcattgcaaatggctaagaaaatttttgttta

SEQ ID NO: 75348 - DNA, 33 bp, Homo sapien
ctcattgcaaatggctgagaaaatttttgttta

SEQ ID NO: 75349 - DNA, 33 bp, Homo sapien
tatgtaggctttcactcaggacaggtagatttt

SEQ ID NO: 75350 - DNA, 33 bp, Homo sapien
tatgtaggctttcactgaggacaggtagatttt

SEQ ID NO: 75351 - DNA, 33 bp, Homo sapien
ccaccccagctcagccaacacgtgactctttct

SEQ ID NO: 75352 - DNA, 33 bp, Homo sapien
ccaccccagctcagccgacacgtgactctttct

SEQ ID NO: 75353 - DNA, 33 bp, Homo sapien
cagagtgagctcatgcactgaaacatctgcaga

SEQ ID NO: 75354 - DNA, 33 bp, Homo sapien
cagagtgagctcatgccctgaaacatctgcaga

SEQ ID NO: 75355 - DNA, 33 bp, Homo sapien
tgctgccactcatctacaatgttttcatcttgc

SEQ ID NO: 75356 - DNA, 33 bp, Homo sapien
tgctgccactcatctataatgttttcatcttgc

SEQ ID NO: 75357 - DNA, 33 bp, Homo sapien
tcacaggaatcacagaactatacagagatgggc

SEQ ID NO: 75358 - DNA, 33 bp, Homo sapien
tcacaggaatcacagatctatacagagatgggc

SEQ ID NO: 75359 - DNA, 33 bp, Homo sapien
cccgttctaaagcccacgctctctcatgatttt

SEQ ID NO: 75360 - DNA, 33 bp, Homo sapien
cccgttctaaagcccatgctctctcatgatttt

SEQ ID NO: 75361 - DNA, 33 bp, Homo sapien
gctcacccctcacctacgatgctggacatggag

SEQ ID NO: 75362 - DNA, 33 bp, Homo sapien
gctcacccctcacctaggatgctggacatggag

SEQ ID NO: 75363 - DNA, 33 bp, Homo sapien
tagcaacacaagtggactaagacactgtgctac

SEQ ID NO: 75364 - DNA, 33 bp, Homo sapien
tagcaacacaagtggagtaagacactgtgctac

SEQ ID NO: 75365 - DNA, 33 bp, Homo sapien
gtggtctctgagacaacctccatttagaaggtg

SEQ ID NO: 75366 - DNA, 33 bp, Homo sapien
gtggtctctgagacaatctccatttagaaggtg

SEQ ID NO: 75367 - DNA, 33 bp, Homo sapien
tggcggtgagcctgcgcagcttgaacggggtag

SEQ ID NO: 75368 - DNA, 33 bp, Homo sapien
tggcggtgagcctgcgtagcttgaacggggtag

SEQ ID NO: 75369 - DNA, 33 bp, Homo sapien
cagttctgaataaacccgctggccagaggcgtg

SEQ ID NO: 75370 - DNA, 33 bp, Homo sapien
cagttctgaataaacctgctggccagaggcgtg

SEQ ID NO: 75371 - DNA, 33 bp, Homo sapien
aagaaaatgcctataaaagtatcaaattgcttt

SEQ ID NO: 75372 - DNA, 33 bp, Homo sapien
aagaaaatgcctataagagtatcaaattgcttt

SEQ ID NO: 75373 - DNA, 33 bp, Homo sapien
gttttatgcctatccaatcatattctctagtct

SEQ ID NO: 75374 - DNA, 33 bp, Homo sapien
gttttatgcctatccagtcatattctctagtct

SEQ ID NO: 75375 - DNA, 33 bp, Homo sapien
tacttcatactactgactagtggtctttcgtga

SEQ ID NO: 75376 - DNA, 33 bp, Homo sapien
tacttcatactactgattagtggtctttcgtga

SEQ ID NO: 75377 - DNA, 33 bp, Homo sapien
aaaatagagtcacttgaagtgggtctcaggcac

SEQ ID NO: 75378 - DNA, 33 bp, Homo sapien
aaaatagagtcacttgtagtgggtctcaggcac

SEQ ID NO: 75379 - DNA, 33 bp, Homo sapien
agaaagggatctgtgcacacccaagagaacagc

SEQ ID NO: 75380 - DNA, 33 bp, Homo sapien
agaaagggatctgtgcgcacccaagagaacagc

SEQ ID NO: 75381 - DNA, 33 bp, Homo sapien
agaaatcacgtaattcaagccctcattccgatt

SEQ ID NO: 75382 - DNA, 33 bp, Homo sapien
agaaatcacgtaattccagccctcattccgatt

SEQ ID NO: 75383 - DNA, 33 bp, Homo sapien
tccctgaaacaaacacggatgtcataagccaca

SEQ ID NO: 75384 - DNA, 33 bp, Homo sapien
tccctgaaacaaacactgatgtcataagccaca

SEQ ID NO: 75385 - DNA, 33 bp, Homo sapien
aatattcatgatggtacgaagtggaaaaactag

SEQ ID NO: 75386 - DNA, 33 bp, Homo sapien
aatattcatgatggtatgaagtggaaaaactag

SEQ ID NO: 75387 - DNA, 33 bp, Homo sapien
gctgctcttggacagccagtctagcacttgtct

SEQ ID NO: 75388 - DNA, 33 bp, Homo sapien
gctgctcttggacagcgagtctagcacttgtct

SEQ ID NO: 75389 - DNA, 33 bp, Homo sapien
tgcttagtcaagcaacaagattagggctctggg

SEQ ID NO: 75390 - DNA, 33 bp, Homo sapien
tgcttagtcaagcaacgagattagggctctggg

SEQ ID NO: 75391 - DNA, 33 bp, Homo sapien
acttacatcatatgtaacatttccttttatcct

SEQ ID NO: 75392 - DNA, 33 bp, Homo sapien
acttacatcatatgtagcatttccttttatcct

SEQ ID NO: 75393 - DNA, 33 bp, Homo sapien
catcactgtgttcctacgctggaaatgacctag

SEQ ID NO: 75394 - DNA, 33 bp, Homo sapien
catcactgtgttcctatgctggaaatgacctag

SEQ ID NO: 75395 - DNA, 33 bp, Homo sapien
taaactatcaaggttcaccatgaataataagat

SEQ ID NO: 75396 - DNA, 33 bp, Homo sapien
taaactatcaaggttcgccatgaataataagat

SEQ ID NO: 75397 - DNA, 33 bp, Homo sapien
aaaatgggtgtgtgaaagtgagccccagctcag

SEQ ID NO: 75398 - DNA, 33 bp, Homo sapien
aaaatgggtgtgtgaatgtgagccccagctcag

SEQ ID NO: 75399 - DNA, 33 bp, Homo sapien
cccacggcattgtgataaggattagaagtgctc

SEQ ID NO: 75400 - DNA, 33 bp, Homo sapien
cccacggcattgtgatgaggattagaagtgctc

SEQ ID NO: 75401 - DNA, 33 bp, Homo sapien
cactctctgaaagaaacgctgacactgcacagc

SEQ ID NO: 75402 - DNA, 33 bp, Homo sapien
cactctctgaaagaaatgctgacactgcacagc

SEQ ID NO: 75403 - DNA, 33 bp, Homo sapien
ggatttgggatgctcaatcggtaactatactgt

SEQ ID NO: 75404 - DNA, 33 bp, Homo sapien
ggatttgggatgctcagtcggtaactatactgt

SEQ ID NO: 75405 - DNA, 33 bp, Homo sapien
cagatattttcgtatcacccacagttgttataa

SEQ ID NO: 75406 - DNA, 33 bp, Homo sapien
cagatattttcgtatcgcccacagttgttataa

SEQ ID NO: 75407 - DNA, 33 bp, Homo sapien
ctgctatgaggacatcaaggcttcctctactcc

SEQ ID NO: 75408 - DNA, 33 bp, Homo sapien
ctgctatgaggacatcgaggcttcctctactcc

SEQ ID NO: 75409 - DNA, 33 bp, Homo sapien
ggcttttcatgtggcaatgaaacctcacatcca

SEQ ID NO: 75410 - DNA, 33 bp, Homo sapien
ggcttttcatgtggcagtgaaacctcacatcca

SEQ ID NO: 75411 - DNA, 33 bp, Homo sapien
ttgtagtataatttgaagtctggtaatgttatg

SEQ ID NO: 75412 - DNA, 33 bp, Homo sapien
ttgtagtataatttgaggtctggtaatgttatg

SEQ ID NO: 75413 - DNA, 33 bp, Homo sapien
ttggcctggagttttacgactattagcaccatt

SEQ ID NO: 75414 - DNA, 33 bp, Homo sapien
ttggcctggagttttatgactattagcaccatt

SEQ ID NO: 75415 - DNA, 33 bp, Homo sapien
taaaatttgggattatcaatggccttcatttct

SEQ ID NO: 75416 - DNA, 33 bp, Homo sapien
taaaatttgggattattaatggccttcatttct

SEQ ID NO: 75417 - DNA, 33 bp, Homo sapien
cagtaggagaaaacaagttaacgacaaagtatg

SEQ ID NO: 75418 - DNA, 33 bp, Homo sapien
cagtaggagaaaacaatttaacgacaaagtatg

SEQ ID NO: 75419 - DNA, 33 bp, Homo sapien
atctttgaaaaactcaaggacagcgctgccaaa

SEQ ID NO: 75420 - DNA, 33 bp, Homo sapien
atctttgaaaaactcagggacagcgctgccaaa

SEQ ID NO: 75421 - DNA, 33 bp, Homo sapien
actgcacttctgctgcaactacagacacgtgcc

SEQ ID NO: 75422 - DNA, 33 bp, Homo sapien
actgcacttctgctgcgactacagacacgtgcc

SEQ ID NO: 75423 - DNA, 33 bp, Homo sapien
tctcccagaattaccaccgtggaagtggagatg

SEQ ID NO: 75424 - DNA, 33 bp, Homo sapien
tctcccagaattaccagcgtggaagtggagatg

SEQ ID NO: 75425 - DNA, 33 bp, Homo sapien
aactatgttcctgatacagctactaaatcatcc

SEQ ID NO: 75426 - DNA, 33 bp, Homo sapien
aactatgttcctgatagagctactaaatcatcc

SEQ ID NO: 75427 - DNA, 33 bp, Homo sapien; identical to SEQ ID NO: 75425

SEQ ID NO: 75428 - DNA, 33 bp, Homo sapien; identical to SEQ ID NO: 75426

SEQ ID NO: 75429 - DNA, 33 bp, Homo sapien
tcctatagcacaggtcccaaaagttctctccag

SEQ ID NO: 75430 - DNA, 33 bp, Homo sapien
tcctatagcacaggtctcaaaagttctctccag

SEQ ID NO: 75431 - DNA, 33 bp, Homo sapien
ggagatttcttatgaccggtactttatacttca

SEQ ID NO: 75432 - DNA, 33 bp, Homo sapien
ggagatttcttatgacgggtactttatacttca

SEQ ID NO: 75433 - DNA, 33 bp, Homo sapien
ttcaagtgctattagaagggaaatgggtctagt

SEQ ID NO: 75434 - DNA, 33 bp, Homo sapien
ttcaagtgctattagaggggaaatgggtctagt

SEQ ID NO: 75435 - DNA, 33 bp, Homo sapien
catatctcttcattctcaaagacaggtgcactg

SEQ ID NO: 75436 - DNA, 33 bp, Homo sapien
catatctcttcattcttaaagacaggtgcactg

SEQ ID NO: 75437 - DNA, 33 bp, Homo sapien
atcacatcaaatcaagcccagtgcacctgtctt

SEQ ID NO: 75438 - DNA, 33 bp, Homo sapien
atcacatcaaatcaagtccagtgcacctgtctt

SEQ ID NO: 75439 - DNA, 33 bp, Homo sapien
agcaatgttcattatacgtattctggaaacaca

SEQ ID NO: 75440 - DNA, 33 bp, Homo sapien
agcaatgttcattatatgtattctggaaacaca

SEQ ID NO: 75441 - DNA, 33 bp, Homo sapien
tccttgatccctcagcaagagtaaacttgtcta

SEQ ID NO: 75442 - DNA, 33 bp, Homo sapien
tccttgatccctcagcgagagtaaacttgtcta

SEQ ID NO: 75443 - DNA, 33 bp, Homo sapien
tttccttagactctaccatgagctgagccttgt

SEQ ID NO: 75444 - DNA, 33 bp, Homo sapien
tttccttagactctacgatgagctgagccttgt

SEQ ID NO: 75445 - DNA, 33 bp, Homo sapien
tagacaaacacaaaggacattctctgtaacaca

SEQ ID NO: 75446 - DNA, 33 bp, Homo sapien
tagacaaacacaaaggccattctctgtaacaca

SEQ ID NO: 75447 - DNA, 33 bp, Homo sapien
acacagtcccgaacaactctttgataggaagac

SEQ ID NO: 75448 - DNA, 33 bp, Homo sapien
acacagtcccgaacaattctttgataggaagac

SEQ ID NO: 75449 - DNA, 33 bp, Homo sapien
gtcaatgactgagcaaagtggaggtgctaaagc

SEQ ID NO: 75450 - DNA, 33 bp, Homo sapien
gtcaatgactgagcaaggtggaggtgctaaagc

SEQ ID NO: 75451 - DNA, 33 bp, Homo sapien
cagccagagaggcacacgggagaagctgacgca

SEQ ID NO: 75452 - DNA, 33 bp, Homo sapien
cagccagagaggcacatgggagaagctgacgca

SEQ ID NO: 75453 - DNA, 33 bp, Homo sapien
aggctgcctggctgaaatcttggaggaagccat

SEQ ID NO: 75454 - DNA, 33 bp, Homo sapien
aggctgcctggctgaagtcttggaggaagccat

SEQ ID NO: 75455 - DNA, 33 bp, Homo sapien
attcatacattccactccaaatattaatgtgtt

SEQ ID NO: 75456 - DNA, 33 bp, Homo sapien
attcatacattccactgcaaatattaatgtgtt

SEQ ID NO: 75457 - DNA, 33 bp, Homo sapien
caggcatggtttaatcaagaggttcgaagttat

SEQ ID NO: 75458 - DNA, 33 bp, Homo sapien
caggcatggtttaatcgagaggttcgaagttat

SEQ ID NO: 75459 - DNA, 33 bp, Homo sapien
ttcaatgagtgttggtggatccaagtctattcc

SEQ ID NO: 75460 - DNA, 33 bp, Homo sapien
ttcaatgagtgttggttgatccaagtctattcc

SEQ ID NO: 75461 - DNA, 33 bp, Homo sapien
aatgagaatggcctaacgtaccacccaaagtct

SEQ ID NO: 75462 - DNA, 33 bp, Homo sapien
aatgagaatggcctaatgtaccacccaaagtct

SEQ ID NO: 75463 - DNA, 33 bp, Homo sapien
gtctaaagacataaaagttctgaatcaagccaa

SEQ ID NO: 75464 - DNA, 33 bp, Homo sapien
gtctaaagacataaaatttctgaatcaagccaa

SEQ ID NO: 75465 - DNA, 33 bp, Homo sapien
tgggactgcctttgtacgggtccccaagccttt

SEQ ID NO: 75466 - DNA, 33 bp, Homo sapien
tgggactgcctttgtatgggtccccaagccttt

SEQ ID NO: 75467 - DNA, 33 bp, Homo sapien
gaatcaaaggtaaccaagagtcaatgtgtgcac

SEQ ID NO: 75468 - DNA, 33 bp, Homo sapien
gaatcaaaggtaaccaggagtcaatgtgtgcac

SEQ ID NO: 75469 - DNA, 33 bp, Homo sapien
cacaatgaacattagaagaccggattggtagaa

SEQ ID NO: 75470 - DNA, 33 bp, Homo sapien
cacaatgaacattagatgaccggattggtagaa

SEQ ID NO: 75471 - DNA, 33 bp, Homo sapien
tattttttttctttccagagctcttaagtgtga

SEQ ID NO: 75472 - DNA, 33 bp, Homo sapien
tattttttttctttccggagctcttaagtgtga

SEQ ID NO: 75473 - DNA, 33 bp, Homo sapien
ccaaaaaagaacgaggaagtttgtaggtcttta

SEQ ID NO: 75474 - DNA, 33 bp, Homo sapien
ccaaaaaagaacgagggagtttgtaggtcttta

SEQ ID NO: 75475 - DNA, 33 bp, Homo sapien
taggtactgaattgcaccacacaccagtataac

SEQ ID NO: 75476 - DNA, 33 bp, Homo sapien
taggtactgaattgcagcacacaccagtataac

SEQ ID NO: 75477 - DNA, 33 bp, Homo sapien
aaaaattgttgaaaaaagctgatattagcgatg

SEQ ID NO: 75478 - DNA, 33 bp, Homo sapien
aaaaattgttgaaaaacgctgatattagcgatg

SEQ ID NO: 75479 - DNA, 33 bp, Homo sapien
agaaccaaatgatagcaacaacccaaatgccca

SEQ ID NO: 75480 - DNA, 33 bp, Homo sapien
agaaccaaatgatagcgacaacccaaatgccca

SEQ ID NO: 75481 - DNA, 33 bp, Homo sapien
tataattcatgtacaaaataattcacccatttg

SEQ ID NO: 75482 - DNA, 33 bp, Homo sapien
tataattcatgtacaacataattcacccatttg

SEQ ID NO: 75483 - DNA, 33 bp, Homo sapien
gtaagaaatgccaggaagtacatgaacaactca

SEQ ID NO: 75484 - DNA, 33 bp, Homo sapien
gtaagaaatgccaggaggtacatgaacaactca

SEQ ID NO: 75485 - DNA, 33 bp, Homo sapien
tttcaatgtgagggcaaccccttccttgtcctc

SEQ ID NO: 75486 - DNA, 33 bp, Homo sapien
tttcaatgtgagggcacccccttccttgtcctc

SEQ ID NO: 75487 - DNA, 33 bp, Homo sapien
tctgcctctgcacaccaccttcgtctgctctgt

SEQ ID NO: 75488 - DNA, 33 bp, Homo sapien
tctgcctctgcacaccgccttcgtctgctctgt

SEQ ID NO: 75489 - DNA, 33 bp, Homo sapien
ttggtaccttatggccacagagacgtgcgatta

SEQ ID NO: 75490 - DNA, 33 bp, Homo sapien
ttggtaccttatggccgcagagacgtgcgatta

SEQ ID NO: 75491 - DNA, 33 bp, Homo sapien
atctggtttacaaatacagctacatctatatga

SEQ ID NO: 75492 - DNA, 33 bp, Homo sapien
atctggtttacaaatatagctacatctatatga

SEQ ID NO: 75493 - DNA, 33 bp, Homo sapien
aataattagtagtcagaccttcagaaattcatt

SEQ ID NO: 75494 - DNA, 33 bp, Homo sapien
aataattagtagtcaggccttcagaaattcatt

SEQ ID NO: 75495 - DNA, 33 bp, Homo sapien
cttagtattattagtacggatttagtgctgact

SEQ ID NO: 75496 - DNA, 33 bp, Homo sapien
cttagtattattagtatggatttagtgctgact

SEQ ID NO: 75497 - DNA, 33 bp, Homo sapien
gataccagtcgtgctgcattagagcccacccta

SEQ ID NO: 75498 - DNA, 33 bp, Homo sapien
gataccagtcgtgctggattagagcccacccta

SEQ ID NO: 75499 - DNA, 33 bp, Homo sapien
attactgcagctatccacagaagaaagtccaaa

SEQ ID NO: 75500 - DNA, 33 bp, Homo sapien
attactgcagctatccgcagaagaaagtccaaa

SEQ ID NO: 75501 - DNA, 33 bp, Homo sapien
tctggctagaagtaagacctactatggcttgtt

SEQ ID NO: 75502 - DNA, 33 bp, Homo sapien
tctggctagaagtaaggcctactatggcttgtt

SEQ ID NO: 75503 - DNA, 33 bp, Homo sapien
aaatccttcccaaaacaaatgtaactcacatgt

SEQ ID NO: 75504 - DNA, 33 bp, Homo sapien
aaatccttcccaaaacgaatgtaactcacatgt

SEQ ID NO: 75505 - DNA, 33 bp, Homo sapien
cctctgtcttctgtccaaaactcctatactcag

SEQ ID NO: 75506 - DNA, 33 bp, Homo sapien
cctctgtcttctgtccgaaactcctatactcag

SEQ ID NO: 75507 - DNA, 33 bp, Homo sapien
tgagtggagcagtctaagcagcaaggcgtggtg

SEQ ID NO: 75508 - DNA, 33 bp, Homo sapien
tgagtggagcagtctaggcagcaaggcgtggtg

SEQ ID NO: 75509 - DNA, 33 bp, Homo sapien
tccccacctccacttggaaatggccacagtgcc

SEQ ID NO: 75510 - DNA, 33 bp, Homo sapien
tccccacctccacttgtaaatggccacagtgcc

SEQ ID NO: 75511 - DNA, 33 bp, Homo sapien
actgctttcctagcaccccataagattcagaaa

SEQ ID NO: 75512 - DNA, 33 bp, Homo sapien
actgctttcctagcactccataagattcagaaa

SEQ ID NO: 75513 - DNA, 33 bp, Homo sapien
aatgaatgcacctgaacgaatgaaaataatgaa

SEQ ID NO: 75514 - DNA, 33 bp, Homo sapien
aatgaatgcacctgaatgaatgaaaataatgaa

SEQ ID NO: 75515 - DNA, 33 bp, Homo sapien
cttgaggtagcttcaacctgaagatggcaacaa

SEQ ID NO: 75516 - DNA, 33 bp, Homo sapien
cttgaggtagcttcaatctgaagatggcaacaa

SEQ ID NO: 75517 - DNA, 33 bp, Homo sapien
tctttgctttaatcacccccatgtaaaaccaaa

SEQ ID NO: 75518 - DNA, 33 bp, Homo sapien
tctttgctttaatcactcccatgtaaaaccaaa

SEQ ID NO: 75519 - DNA, 33 bp, Homo sapien
agggactggctgggtcactgaagtttcctgagt

SEQ ID NO: 75520 - DNA, 33 bp, Homo sapien
agggactggctgggtcgctgaagtttcctgagt

SEQ ID NO: 75521 - DNA, 33 bp, Homo sapien
gagccaggtgcagactaagcctttgccagtaga

SEQ ID NO: 75522 - DNA, 33 bp, Homo sapien
gagccaggtgcagactgagcctttgccagtaga

SEQ ID NO: 75523 - DNA, 33 bp, Homo sapien
ccaaaaagcggcctgaacgttaccatggtgagt

SEQ ID NO: 75524 - DNA, 33 bp, Homo sapien
ccaaaaagcggcctgagcgttaccatggtgagt

SEQ ID NO: 75525 - DNA, 33 bp, Homo sapien
acaaatcctgcttactgaaaatcagcaaaacaa

SEQ ID NO: 75526 - DNA, 33 bp, Homo sapien
acaaatcctgcttacttaaaatcagcaaaacaa

SEQ ID NO: 75527 - DNA, 33 bp, Homo sapien
agattccatctcactacgatgcccaaagaactt

SEQ ID NO: 75528 - DNA, 33 bp, Homo sapien
agattccatctcactatgatgcccaaagaactt

SEQ ID NO: 75529 - DNA, 33 bp, Homo sapien
atttgcttcaagctgcacaataagccttctcat

SEQ ID NO: 75530 - DNA, 33 bp, Homo sapien
atttgcttcaagctgctcaataagccttctcat

SEQ ID NO: 75531 - DNA, 33 bp, Homo sapien
aggaggcccctgtaacgacttgccttcttcctg

SEQ ID NO: 75532 - DNA, 33 bp, Homo sapien
aggaggcccctgtaactacttgccttcttcctg

SEQ ID NO: 75533 - DNA, 33 bp, Homo sapien
ctattagagtcagccccacttcccaatccttgg

SEQ ID NO: 75534 - DNA, 33 bp, Homo sapien
ctattagagtcagccctacttcccaatccttgg

SEQ ID NO: 75535 - DNA, 33 bp, Homo sapien
ataatgagtagttcaacgaggccagcggacagc

SEQ ID NO: 75536 - DNA, 33 bp, Homo sapien
ataatgagtagttcaatgaggccagcggacagc

SEQ ID NO: 75537 - DNA, 33 bp, Homo sapien
ttagcaccactctgaactctgacttttctagag

SEQ ID NO: 75538 - DNA, 33 bp, Homo sapien
ttagcaccactctgaattctgacttttctagag

SEQ ID NO: 75539 - DNA, 33 bp, Homo sapien
aaggtatgatgcaatacggaaaaggagggaaga

SEQ ID NO: 75540 - DNA, 33 bp, Homo sapien
aaggtatgatgcaatatggaaaaggagggaaga

SEQ ID NO: 75541 - DNA, 33 bp, Homo sapien
tagtaattataggcccacatttattatgagtaa

SEQ ID NO: 75542 - DNA, 33 bp, Homo sapien
tagtaattataggcccgcatttattatgagtaa

SEQ ID NO: 75543 - DNA, 33 bp, Homo sapien
atcagtagcaaaatcaatcaactagagttgtac

SEQ ID NO: 75544 - DNA, 33 bp, Homo sapien
atcagtagcaaaatcagtcaactagagttgtac

SEQ ID NO: 75545 - DNA, 33 bp, Homo sapien
catttcttttcttctcaccccacaaaagacaga

SEQ ID NO: 75546 - DNA, 33 bp, Homo sapien
catttcttttcttctcgccccacaaaagacaga

SEQ ID NO: 75547 - DNA, 33 bp, Homo sapien
cctaacatctgcttcaaagtttaacaacacctt

SEQ ID NO: 75548 - DNA, 33 bp, Homo sapien
cctaacatctgcttcagagtttaacaacacctt

SEQ ID NO: 75549 - DNA, 33 bp, Homo sapien
tctcccatcttccccaataagcctgctttcagt

SEQ ID NO: 75550 - DNA, 33 bp, Homo sapien
tctcccatcttccccagtaagcctgctttcagt

SEQ ID NO: 75551 - DNA, 33 bp, Homo sapien
tctggcagggagtacaatcgcaggaagtaagta

SEQ ID NO: 75552 - DNA, 33 bp, Homo sapien
tctggcagggagtacagtcgcaggaagtaagta

SEQ ID NO: 75553 - DNA, 33 bp, Homo sapien
ttatttctcatttaccggcataaaaggaggaga

SEQ ID NO: 75554 - DNA, 33 bp, Homo sapien
ttatttctcatttacctgcataaaaggaggaga

SEQ ID NO: 75555 - DNA, 33 bp, Homo sapien
cggctgaatgcacaaaaagcagctccccgtcct

SEQ ID NO: 75556 - DNA, 33 bp, Homo sapien
cggctgaatgcacaaagagcagctccccgtcct

SEQ ID NO: 75557 - DNA, 33 bp, Homo sapien
atgcagggtgcctggccgcactgtacgctgata

SEQ ID NO: 75558 - DNA, 33 bp, Homo sapien
atgcagggtgcctggctgcactgtacgctgata

SEQ ID NO: 75559 - DNA, 33 bp, Homo sapien
ggccctcctctatgcccatcatgccagggcccc

SEQ ID NO: 75560 - DNA, 33 bp, Homo sapien
ggccctcctctatgcctatcatgccagggcccc

SEQ ID NO: 75561 - DNA, 33 bp, Homo sapien
aactatgctctggttacgtgtccacaggatgcg

SEQ ID NO: 75562 - DNA, 33 bp, Homo sapien
aactatgctctggttatgtgtccacaggatgcg

SEQ ID NO: 75563 - DNA, 33 bp, Homo sapien
ctttttgttatgtccccgaaagaggttagagcc

SEQ ID NO: 75564 - DNA, 33 bp, Homo sapien
ctttttgttatgtccctgaaagaggttagagcc

SEQ ID NO: 75565 - DNA, 33 bp, Homo sapien
gaaattcctgacaataggcccatcacttctttg

SEQ ID NO: 75566 - DNA, 33 bp, Homo sapien
gaaattcctgacaatatgcccatcacttctttg

SEQ ID NO: 75567 - DNA, 33 bp, Homo sapien
ttcatagcctgtgagcacagctaaatggaacaa

SEQ ID NO: 75568 - DNA, 33 bp, Homo sapien
ttcatagcctgtgagcgcagctaaatggaacaa

SEQ ID NO: 75569 - DNA, 33 bp, Homo sapien
aaacctgaagttacatcaacaaacaaactcatt

SEQ ID NO: 75570 - DNA, 33 bp, Homo sapien
aaacctgaagttacatgaacaaacaaactcatt

SEQ ID NO: 75571 - DNA, 33 bp, Homo sapien
gggccaggcctgtaaccggttgtaagatcccac

SEQ ID NO: 75572 - DNA, 33 bp, Homo sapien
gggccaggcctgtaactggttgtaagatcccac

SEQ ID NO: 75573 - DNA, 33 bp, Homo sapien
aaaaagcaaagcgtaaaatgttctcgtgtcatc

SEQ ID NO: 75574 - DNA, 33 bp, Homo sapien
aaaaagcaaagcgtaagatgttctcgtgtcatc

SEQ ID NO: 75575 - DNA, 33 bp, Homo sapien
catggctcatccttgcaaagactacgagaagcg

SEQ ID NO: 75576 - DNA, 33 bp, Homo sapien
catggctcatccttgcgaagactacgagaagcg

SEQ ID NO: 75577 - DNA, 33 bp, Homo sapien
aaattctagcaaggaaagtagatgaaagaacat

SEQ ID NO: 75578 - DNA, 33 bp, Homo sapien
aaattctagcaaggaaggtagatgaaagaacat

SEQ ID NO: 75579 - DNA, 33 bp, Homo sapien
attgaaactaagctacagtaccagtaattagat

SEQ ID NO: 75580 - DNA, 33 bp, Homo sapien
attgaaactaagctacggtaccagtaattagat

SEQ ID NO: 75581 - DNA, 33 bp, Homo sapien
aatgagtacacagtcacgcggtagagtaatacg

SEQ ID NO: 75582 - DNA, 33 bp, Homo sapien
aatgagtacacagtcatgcggtagagtaatacg

SEQ ID NO: 75583 - DNA, 33 bp, Homo sapien
aaagaattatgtggagcacatatatcacacctc

SEQ ID NO: 75584 - DNA, 33 bp, Homo sapien
aaagaattatgtggagtacatatatcacacctc

SEQ ID NO: 75585 - DNA, 33 bp, Homo sapien
tcttccactttactcaagcaatttaaaattagt

SEQ ID NO: 75586 - DNA, 33 bp, Homo sapien
tcttccactttactcaggcaatttaaaattagt

SEQ ID NO: 75587 - DNA, 33 bp, Homo sapien
caaatataactctttccacaataaaatccagac

SEQ ID NO: 75588 - DNA, 33 bp, Homo sapien
caaatataactctttctacaataaaatccagac

SEQ ID NO: 75589 - DNA, 33 bp, Homo sapien
acattaaacatattggaagattaaaagtgaaaa

SEQ ID NO: 75590 - DNA, 33 bp, Homo sapien
acattaaacatattgggagattaaaagtgaaaa

SEQ ID NO: 75591 - DNA, 33 bp, Homo sapien
gaaatgcagaagctcaaacctcaactcacctac

SEQ ID NO: 75592 - DNA, 33 bp, Homo sapien
gaaatgcagaagctcacacctcaactcacctac

SEQ ID NO: 75593 - DNA, 33 bp, Homo sapien
gtttcagtgtcagtaaagtgagaaatataatct

SEQ ID NO: 75594 - DNA, 33 bp, Homo sapien
gtttcagtgtcagtaatgtgagaaatataatct

SEQ ID NO: 75595 - DNA, 33 bp, Homo sapien
acctgatttattttcacggtcagttttgtttca

SEQ ID NO: 75596 - DNA, 33 bp, Homo sapien
acctgatttattttcatggtcagttttgtttca

SEQ ID NO: 75597 - DNA, 33 bp, Homo sapien
gggaaaatggtgttgacaggaaactaactatag

SEQ ID NO: 75598 - DNA, 33 bp, Homo sapien
gggaaaatggtgttgataggaaactaactatag

SEQ ID NO: 75599 - DNA, 33 bp, Homo sapien
aaataatgtttttaaactatctgtcataacttt

SEQ ID NO: 75600 - DNA, 33 bp, Homo sapien
aaataatgtttttaaattatctgtcataacttt

SEQ ID NO: 75601 - DNA, 33 bp, Homo sapien
ctaatctctctacaagaataatcgcctggctat

SEQ ID NO: 75602 - DNA, 33 bp, Homo sapien
ctaatctctctacaagcataatcgcctggctat

SEQ ID NO: 75603 - DNA, 33 bp, Homo sapien
gcaacaagaacatgacaaagaggatgttcacat

SEQ ID NO: 75604 - DNA, 33 bp, Homo sapien
gcaacaagaacatgacgaagaggatgttcacat

SEQ ID NO: 75605 - DNA, 33 bp, Homo sapien
tctagggagagaaacactgtgtataaagacaca

SEQ ID NO: 75606 - DNA, 33 bp, Homo sapien
tctagggagagaaacattgtgtataaagacaca

SEQ ID NO: 75607 - DNA, 33 bp, Homo sapien
aatgcaaaaatcactaaccacatatagctgttg

SEQ ID NO: 75608 - DNA, 33 bp, Homo sapien
aatgcaaaaatcactagccacatatagctgttg

SEQ ID NO: 75609 - DNA, 33 bp, Homo sapien
atgaaatactacagaacctgcaaggaatgaagt

SEQ ID NO: 75610 - DNA, 33 bp, Homo sapien
atgaaatactacagaatctgcaaggaatgaagt

SEQ ID NO: 75611 - DNA, 33 bp, Homo sapien
catgttctttcctaaccgggcacaagagtttag

SEQ ID NO: 75612 - DNA, 33 bp, Homo sapien
catgttctttcctaactgggcacaagagtttag

SEQ ID NO: 75613 - DNA, 33 bp, Homo sapien
acagatgcgcaagacaatactaacaccaatatt

SEQ ID NO: 75614 - DNA, 33 bp, Homo sapien
acagatgcgcaagacagtactaacaccaatatt

SEQ ID NO: 75615 - DNA, 33 bp, Homo sapien
gatgggcacagtaatacgtcagtactggcagaa

SEQ ID NO: 75616 - DNA, 33 bp, Homo sapien
gatgggcacagtaatatgtcagtactggcagaa

SEQ ID NO: 75617 - DNA, 33 bp, Homo sapien
acctcgctgagggtaccaataataattctatca

SEQ ID NO: 75618 - DNA, 33 bp, Homo sapien
acctcgctgagggtactaataataattctatca

SEQ ID NO: 75619 - DNA, 33 bp, Homo sapien
tgggcatttctgctcaggtaagctccctgactc

SEQ ID NO: 75620 - DNA, 33 bp, Homo sapien
tgggcatttctgctcatgtaagctccctgactc

SEQ ID NO: 75621 - DNA, 33 bp, Homo sapien
ctcagtggcctcatcacagcttacagagcattt

SEQ ID NO: 75622 - DNA, 33 bp, Homo sapien
ctcagtggcctcatcatagcttacagagcattt

SEQ ID NO: 75623 - DNA, 33 bp, Homo sapien
tgtagtcactacagagaaacactgctcaccaat

SEQ ID NO: 75624 - DNA, 33 bp, Homo sapien
tgtagtcactacagagcaacactgctcaccaat

SEQ ID NO: 75625 - DNA, 33 bp, Homo sapien
aggtaaagggtagtcacgatgatgcattttcat

SEQ ID NO: 75626 - DNA, 33 bp, Homo sapien
aggtaaagggtagtcatgatgatgcattttcat

SEQ ID NO: 75627 - DNA, 33 bp, Homo sapien
ggggaaaacaatttcacgcttgggagataggta

SEQ ID NO: 75628 - DNA, 33 bp, Homo sapien
ggggaaaacaatttcatgcttgggagataggta

SEQ ID NO: 75629 - DNA, 33 bp, Homo sapien
catttaaggaaaaaaccgcatggtaatactcat

SEQ ID NO: 75630 - DNA, 33 bp, Homo sapien
catttaaggaaaaaactgcatggtaatactcat

SEQ ID NO: 75631 - DNA, 33 bp, Homo sapien
aaccatacaaatgttcacaaatgatttgccata

SEQ ID NO: 75632 - DNA, 33 bp, Homo sapien
aaccatacaaatgttctcaaatgatttgccata

SEQ ID NO: 75633 - DNA, 33 bp, Homo sapien
tgatgatctgagacagaacagtttcaccctgaa

SEQ ID NO: 75634 - DNA, 33 bp, Homo sapien
tgatgatctgagacaggacagtttcaccctgaa

SEQ ID NO: 75635 - DNA, 33 bp, Homo sapien
ttatttccagcccaaaattcacatattaattaa

SEQ ID NO: 75636 - DNA, 33 bp, Homo sapien
ttatttccagcccaaatttcacatattaattaa

SEQ ID NO: 75637 - DNA, 33 bp, Homo sapien
atgatagaatatgtgacgagcttgaaactgttg

SEQ ID NO: 75638 - DNA, 33 bp, Homo sapien
atgatagaatatgtgatgagcttgaaactgttg

SEQ ID NO: 75639 - DNA, 33 bp, Homo sapien
ttgggggaattcctgaccatgttaagggaaaaa

SEQ ID NO: 75640 - DNA, 33 bp, Homo sapien
ttgggggaattcctgatcatgttaagggaaaaa

SEQ ID NO: 75641 - DNA, 33 bp, Homo sapien
aacagaaattgtatcacgagctgaagtgatttg

SEQ ID NO: 75642 - DNA, 33 bp, Homo sapien
aacagaaattgtatcatgagctgaagtgatttg

SEQ ID NO: 75643 - DNA, 33 bp, Homo sapien
ttcctgtcctgaccataatactcacacgttaca

SEQ ID NO: 75644 - DNA, 33 bp, Homo sapien
ttcctgtcctgaccatgatactcacacgttaca

SEQ ID NO: 75645 - DNA, 33 bp, Homo sapien
agcgtcagattagcatcagttggcattgcagta

SEQ ID NO: 75646 - DNA, 33 bp, Homo sapien
agcgtcagattagcattagttggcattgcagta

SEQ ID NO: 75647 - DNA, 33 bp, Homo sapien
aaataaaatgctaagcaccccagctgactgaat

SEQ ID NO: 75648 - DNA, 33 bp, Homo sapien
aaataaaatgctaagcgccccagctgactgaat

SEQ ID NO: 75649 - DNA, 33 bp, Homo sapien
tttaacaaaactctagcacaaataaatctaatc

SEQ ID NO: 75650 - DNA, 33 bp, Homo sapien
tttaacaaaactctaggacaaataaatctaatc

SEQ ID NO: 75651 - DNA, 33 bp, Homo sapien
tctgctcgggttctgaaattcttgaggcattat

SEQ ID NO: 75652 - DNA, 33 bp, Homo sapien
tctgctcgggttctgagattcttgaggcattat

SEQ ID NO: 75653 - DNA, 33 bp, Homo sapien
ttgctgtatccccaaccgagctccattaaactg

SEQ ID NO: 75654 - DNA, 33 bp, Homo sapien
ttgctgtatccccaactgagctccattaaactg

SEQ ID NO: 75655 - DNA, 33 bp, Homo sapien
tcccatcttaggaaaacatctcttcgcttcatc

SEQ ID NO: 75656 - DNA, 33 bp, Homo sapien
tcccatcttaggaaaatatctcttcgcttcatc

SEQ ID NO: 75657 - DNA, 33 bp, Homo sapien
tattagtggttcagaaaatgaatttgactaaag

SEQ ID NO: 75658 - DNA, 33 bp, Homo sapien
tattagtggttcagaacatgaatttgactaaag

SEQ ID NO: 75659 - DNA, 33 bp, Homo sapien
catgctacaacaagaacgaacctggaaaactat

SEQ ID NO: 75660 - DNA, 33 bp, Homo sapien
catgctacaacaagaatgaacctggaaaactat

SEQ ID NO: 75661 - DNA, 33 bp, Homo sapien
tgggtcataatttaaccgtaatgatgaatgaat

SEQ ID NO: 75662 - DNA, 33 bp, Homo sapien
tgggtcataatttaactgtaatgatgaatgaat

SEQ ID NO: 75663 - DNA, 33 bp, Homo sapien
ttaagtaagagtatcccagcttttaggaaatac

SEQ ID NO: 75664 - DNA, 33 bp, Homo sapien
ttaagtaagagtatcctagcttttaggaaatac

SEQ ID NO: 75665 - DNA, 33 bp, Homo sapien
gcatttatgaggttcaatattctagcaggagct

SEQ ID NO: 75666 - DNA, 33 bp, Homo sapien
gcatttatgaggttcagtattctagcaggagct

SEQ ID NO: 75667 - DNA, 33 bp, Homo sapien
gggctgaggtggtgtacgtaggcagatgcaatg

SEQ ID NO: 75668 - DNA, 33 bp, Homo sapien
gggctgaggtggtgtatgtaggcagatgcaatg

SEQ ID NO: 75669 - DNA, 33 bp, Homo sapien
tcctatgaccggaaaaacagactagtagaggcc

SEQ ID NO: 75670 - DNA, 33 bp, Homo sapien
tcctatgaccggaaaagcagactagtagaggcc

SEQ ID NO: 75671 - DNA, 33 bp, Homo sapien
gtcagttctagctgatcataataatctgcggtt

SEQ ID NO: 75672 - DNA, 33 bp, Homo sapien
gtcagttctagctgatgataataatctgcggtt

SEQ ID NO: 75673 - DNA, 33 bp, Homo sapien
tctcttttcaagactacgtccagttccaaaact

SEQ ID NO: 75674 - DNA, 33 bp, Homo sapien
tctcttttcaagactatgtccagttccaaaact

SEQ ID NO: 75675 - DNA, 33 bp, Homo sapien
cgtaaaaatctaagaaaggtctcagttaattta

SEQ ID NO: 75676 - DNA, 33 bp, Homo sapien
cgtaaaaatctaagaagggtctcagttaattta

SEQ ID NO: 75677 - DNA, 33 bp, Homo sapien
atccgaagtgtccccacgagcaaccttcaacca

SEQ ID NO: 75678 - DNA, 33 bp, Homo sapien
atccgaagtgtccccatgagcaaccttcaacca

SEQ ID NO: 75679 - DNA, 33 bp, Homo sapien
gatatgctaagaatagaaagctgacaattgctc

SEQ ID NO: 75680 - DNA, 33 bp, Homo sapien
gatatgctaagaataggaagctgacaattgctc

SEQ ID NO: 75681 - DNA, 33 bp, Homo sapien
agctgtggatgtagaaagaatctgaatatattg

SEQ ID NO: 75682 - DNA, 33 bp, Homo sapien
agctgtggatgtagaaggaatctgaatatattg

SEQ ID NO: 75683 - DNA, 33 bp, Homo sapien
ctggaaataatgatacaaacggcgatccattac

SEQ ID NO: 75684 - DNA, 33 bp, Homo sapien
ctggaaataatgataccaacggcgatccattac

SEQ ID NO: 75685 - DNA, 33 bp, Homo sapien
tatgtatgttgctgtcaaaatctgtaatacttt

SEQ ID NO: 75686 - DNA, 33 bp, Homo sapien
tatgtatgttgctgtcgaaatctgtaatacttt

SEQ ID NO: 75687 - DNA, 33 bp, Homo sapien
aattcatggcataatacgtggtaataaaagacc

SEQ ID NO: 75688 - DNA, 33 bp, Homo sapien
aattcatggcataataggtggtaataaaagacc

SEQ ID NO: 75689 - DNA, 33 bp, Homo sapien; identical to SEQ ID NO: 75687

SEQ ID NO: 75690 - DNA, 33 bp, Homo sapien; identical to SEQ ID NO: 75688

SEQ ID NO: 75691 - DNA, 33 bp, Homo sapien
atcatccttatgacaacgtttgcaaaagacgcc

SEQ ID NO: 75692 - DNA, 33 bp, Homo sapien
atcatccttatgacaatgtttgcaaaagacgcc

SEQ ID NO: 75693 - DNA, 33 bp, Homo sapien
gtcactgtatgttacactgcattttgtagaatt

SEQ ID NO: 75694 - DNA, 33 bp, Homo sapien
gtcactgtatgttacattgcattttgtagaatt

SEQ ID NO: 75695 - DNA, 33 bp, Homo sapien
gggcctctaaaatgtaagataactacgtgggaa

SEQ ID NO: 75696 - DNA, 33 bp, Homo sapien
gggcctctaaaatgtaggataactacgtgggaa

SEQ ID NO: 75697 - DNA, 33 bp, Homo sapien
ttccccacaagcctaaagcgcagagcagagact

SEQ ID NO: 75698 - DNA, 33 bp, Homo sapien
ttccccacaagcctaaggcgcagagcagagact

SEQ ID NO: 75699 - DNA, 33 bp, Homo sapien
tatagtacaaatgtagacaatgctcagtaattt

SEQ ID NO: 75700 - DNA, 33 bp, Homo sapien
tatagtacaaatgtagtcaatgctcagtaattt

SEQ ID NO: 75701 - DNA, 33 bp, Homo sapien
gccctgtgtgactgcacaggtcacatacccatg

SEQ ID NO: 75702 - DNA, 33 bp, Homo sapien
gccctgtgtgactgcagaggtcacatacccatg

SEQ ID NO: 75703 - DNA, 33 bp, Homo sapien
cagaaatctgaaataacggtggttgaaacaaca

SEQ ID NO: 75704 - DNA, 33 bp, Homo sapien
cagaaatctgaaataatggtggttgaaacaaca

SEQ ID NO: 75705 - DNA, 33 bp, Homo sapien
ttcctgaataagaacccggtatcattaacattt

SEQ ID NO: 75706 - DNA, 33 bp, Homo sapien
ttcctgaataagaacctggtatcattaacattt

SEQ ID NO: 75707 - DNA, 33 bp, Homo sapien
ataaaagaaaacctaaataggtcagatgcagtg

SEQ ID NO: 75708 - DNA, 33 bp, Homo sapien
ataaaagaaaacctaactaggtcagatgcagtg

SEQ ID NO: 75709 - DNA, 33 bp, Homo sapien
gaggcccagttgtatacagaggcttgatgtgtt

SEQ ID NO: 75710 - DNA, 33 bp, Homo sapien
gaggcccagttgtatatagaggcttgatgtgtt

SEQ ID NO: 75711 - DNA, 33 bp, Homo sapien
tagattggctgtcagacattggaagccttatat

SEQ ID NO: 75712 - DNA, 33 bp, Homo sapien
tagattggctgtcagatattggaagccttatat

SEQ ID NO: 75713 - DNA, 33 bp, Homo sapien
ccactggactatgagcaactcttgagatgaaag

SEQ ID NO: 75714 - DNA, 33 bp, Homo sapien
ccactggactatgagccactcttgagatgaaag

SEQ ID NO: 75715 - DNA, 33 bp, Homo sapien
aaaaaagatctctaccacctttaagtagcttat

SEQ ID NO: 75716 - DNA, 33 bp, Homo sapien
aaaaaagatctctaccgcctttaagtagcttat

SEQ ID NO: 75717 - DNA, 33 bp, Homo sapien
cgcctggccatgtagaggacttttgaccaaaat

SEQ ID NO: 75718 - DNA, 33 bp, Homo sapien
cgcctggccatgtagatgacttttgaccaaaat

SEQ ID NO: 75719 - DNA, 33 bp, Homo sapien
ggagtgcactggcgcaatcgtggtacactgcag

SEQ ID NO: 75720 - DNA, 33 bp, Homo sapien
ggagtgcactggcgcattcgtggtacactgcag

SEQ ID NO: 75721 - DNA, 33 bp, Homo sapien
gtctcctgaatttcaactgtcatttccttctgt

SEQ ID NO: 75722 - DNA, 33 bp, Homo sapien
gtctcctgaatttcaagtgtcatttccttctgt

SEQ ID NO: 75723 - DNA, 33 bp, Homo sapien
agaagggcattcggagaaactaaccacattaat

SEQ ID NO: 75724 - DNA, 33 bp, Homo sapien
agaagggcattcggaggaactaaccacattaat

SEQ ID NO: 75725 - DNA, 33 bp, Homo sapien
acagttaaataatgtacgtgaaatgcttagctt

SEQ ID NO: 75726 - DNA, 33 bp, Homo sapien
acagttaaataatgtatgtgaaatgcttagctt

SEQ ID NO: 75727 - DNA, 33 bp, Homo sapien
tcccccatagctgaagaatatcagtttgtgtcc

SEQ ID NO: 75728 - DNA, 33 bp, Homo sapien
tcccccatagctgaaggatatcagtttgtgtcc

SEQ ID NO: 75729 - DNA, 33 bp, Homo sapien
cagatctggaataaaactgatttcactgcaact

SEQ ID NO: 75730 - DNA, 33 bp, Homo sapien
cagatctggaataaaagtgatttcactgcaact

SEQ ID NO: 75731 - DNA, 33 bp, Homo sapien
tatcacatcgttcaagaatctttgttgttggtt

SEQ ID NO: 75732 - DNA, 33 bp, Homo sapien
tatcacatcgttcaagcatctttgttgttggtt

SEQ ID NO: 75733 - DNA, 33 bp, Homo sapien
ttaaaattaaccttgaaatagttagcagaatag

SEQ ID NO: 75734 - DNA, 33 bp, Homo sapien
ttaaaattaaccttgagatagttagcagaatag

SEQ ID NO: 75735 - DNA, 33 bp, Homo sapien
gatcataaagtgcacaagaggtttacctttaag

SEQ ID NO: 75736 - DNA, 33 bp, Homo sapien
gatcataaagtgcacatgaggtttacctttaag

SEQ ID NO: 75737 - DNA, 33 bp, Homo sapien
tatatcaagggcaaagaattttgtgatttatga

SEQ ID NO: 75738 - DNA, 33 bp, Homo sapien
tatatcaagggcaaagcattttgtgatttatga

SEQ ID NO: 75739 - DNA, 33 bp, Homo sapien
catctttgaacagagacagtttttccttttcaa

SEQ ID NO: 75740 - DNA, 33 bp, Homo sapien
catctttgaacagagatagtttttccttttcaa

SEQ ID NO: 75741 - DNA, 33 bp, Homo sapien
gcttaaagtgagataaaagttggaacccttttc

SEQ ID NO: 75742 - DNA, 33 bp, Homo sapien
gcttaaagtgagataacagttggaacccttttc

SEQ ID NO: 75743 - DNA, 33 bp, Homo sapien
cagacgactctgaacacggcttcatattggcct

SEQ ID NO: 75744 - DNA, 33 bp, Homo sapien
cagacgactctgaacatggcttcatattggcct

SEQ ID NO: 75745 - DNA, 33 bp, Homo sapien
ggaatttatagagaaacgctactgttatgtgtg

SEQ ID NO: 75746 - DNA, 33 bp, Homo sapien
ggaatttatagagaaaggctactgttatgtgtg

SEQ ID NO: 75747 - DNA, 33 bp, Homo sapien
aacttttgccagttaaaacataaagatatgtga

SEQ ID NO: 75748 - DNA, 33 bp, Homo sapien
aacttttgccagttaagacataaagatatgtga

SEQ ID NO: 75749 - DNA, 33 bp, Homo sapien
tgatgtactagagatcaatactttttttctctc

SEQ ID NO: 75750 - DNA, 33 bp, Homo sapien
tgatgtactagagatccatactttttttctctc

SEQ ID NO: 75751 - DNA, 33 bp, Homo sapien
gatacctgcactggcaaaccaggagagtgaagc

SEQ ID NO: 75752 - DNA, 33 bp, Homo sapien
gatacctgcactggcagaccaggagagtgaagc

SEQ ID NO: 75753 - DNA, 33 bp, Homo sapien
cctagtttaccaccaccatctcttactcacttc

SEQ ID NO: 75754 - DNA, 33 bp, Homo sapien
cctagtttaccaccactatctcttactcacttc

SEQ ID NO: 75755 - DNA, 33 bp, Homo sapien
attgggaatggaaaacagtacaagcactttgta

SEQ ID NO: 75756 - DNA, 33 bp, Homo sapien
attgggaatggaaaacggtacaagcactttgta

SEQ ID NO: 75757 - DNA, 33 bp, Homo sapien
aaattaataaggaaggacactggacacagaatc

SEQ ID NO: 75758 - DNA, 33 bp, Homo sapien
aaattaataaggaaggtcactggacacagaatc

SEQ ID NO: 75759 - DNA, 33 bp, Homo sapien
cctagtgaagttgtgaaaatagggccgctgtcc

SEQ ID NO: 75760 - DNA, 33 bp, Homo sapien
cctagtgaagttgtgagaatagggccgctgtcc

SEQ ID NO: 75761 - DNA, 33 bp, Homo sapien
ctcccccaaaactaggcagtacagctcacagct

SEQ ID NO: 75762 - DNA, 33 bp, Homo sapien
ctcccccaaaactaggtagtacagctcacagct

SEQ ID NO: 75763 - DNA, 33 bp, Homo sapien
atattgttggtgattacagtaaaatagccaaag

SEQ ID NO: 75764 - DNA, 33 bp, Homo sapien
atattgttggtgattatagtaaaatagccaaag

SEQ ID NO: 75765 - DNA, 33 bp, Homo sapien
acaaacagcaacacataaaaaaagttgctttag

SEQ ID NO: 75766 - DNA, 33 bp, Homo sapien
acaaacagcaacacattaaaaaagttgctttag

SEQ ID NO: 75767 - DNA, 33 bp, Homo sapien
catgttgatacgtttaaaagaactggtggctgg

SEQ ID NO: 75768 - DNA, 33 bp, Homo sapien
catgttgatacgtttataagaactggtggctgg

SEQ ID NO: 75769 - DNA, 33 bp, Homo sapien
ttagaacagacgaatacgataaccatagtagta

SEQ ID NO: 75770 - DNA, 33 bp, Homo sapien
ttagaacagacgaatatgataaccatagtagta

SEQ ID NO: 75771 - DNA, 33 bp, Homo sapien
gccttcagactaggacagaactacaccaccagc

SEQ ID NO: 75772 - DNA, 33 bp, Homo sapien
gccttcagactaggacggaactacaccaccagc

SEQ ID NO: 75773 - DNA, 33 bp, Homo sapien
aattttgagaactcccacaatcatagaggctaa

SEQ ID NO: 75774 - DNA, 33 bp, Homo sapien
aattttgagaactcccgcaatcatagaggctaa

SEQ ID NO: 75775 - DNA, 33 bp, Homo sapien
gtagaggtgtgggatcacttatatcgacaaagc

SEQ ID NO: 75776 - DNA, 33 bp, Homo sapien
gtagaggtgtgggatcgcttatatcgacaaagc

SEQ ID NO: 75777 - DNA, 33 bp, Homo sapien
agcaggagttcagtcaaccatccttccttaaga

SEQ ID NO: 75778 - DNA, 33 bp, Homo sapien
agcaggagttcagtcagccatccttccttaaga

SEQ ID NO: 75779 - DNA, 33 bp, Homo sapien
gcttgttcagaatgcaatatgtataaagccatt

SEQ ID NO: 75780 - DNA, 33 bp, Homo sapien
gcttgttcagaatgcagtatgtataaagccatt

SEQ ID NO: 75781 - DNA, 33 bp, Homo sapien
tagctggtcgcaattacaagattctcagttgaa

SEQ ID NO: 75782 - DNA, 33 bp, Homo sapien
tagctggtcgcaattataagattctcagttgaa

SEQ ID NO: 75783 - DNA, 33 bp, Homo sapien
cagacagttatggtgcaaaaaactaccacattc

SEQ ID NO: 75784 - DNA, 33 bp, Homo sapien
cagacagttatggtgccaaaaactaccacattc

SEQ ID NO: 75785 - DNA, 33 bp, Homo sapien
aaatagatggaatttaagtagccaaggaggaaa

SEQ ID NO: 75786 - DNA, 33 bp, Homo sapien
aaatagatggaatttaggtagccaaggaggaaa

SEQ ID NO: 75787 - DNA, 33 bp, Homo sapien
cactgcagctactatacggaggggttgacgaga

SEQ ID NO: 75788 - DNA, 33 bp, Homo sapien
cactgcagctactatatggaggggttgacgaga

SEQ ID NO: 75789 - DNA, 33 bp, Homo sapien
tattatacaatagcagaagaatatcataatctg

SEQ ID NO: 75790 - DNA, 33 bp, Homo sapien
tattatacaatagcaggagaatatcataatctg

SEQ ID NO: 75791 - DNA, 33 bp, Homo sapien
agcagcaatagcaacaacaatagtgacagcagt

SEQ ID NO: 75792 - DNA, 33 bp, Homo sapien
agcagcaatagcaacagcaatagtgacagcagt

SEQ ID NO: 75793 - DNA, 33 bp, Homo sapien
acagcaaaagctacacagtcattgcctttgggg

SEQ ID NO: 75794 - DNA, 33 bp, Homo sapien
acagcaaaagctacacggtcattgcctttgggg

SEQ ID NO: 75795 - DNA, 33 bp, Homo sapien
gcagagctgtttgaagccgttcattggttcaac

SEQ ID NO: 75796 - DNA, 33 bp, Homo sapien
gcagagctgtttgaagtcgttcattggttcaac

SEQ ID NO: 75797 - DNA, 33 bp, Homo sapien
aaaaatgcaaagacatcataaccatgaagacca

SEQ ID NO: 75798 - DNA, 33 bp, Homo sapien
aaaaatgcaaagacatgataaccatgaagacca

SEQ ID NO: 75799 - DNA, 33 bp, Homo sapien
aaatgggaattcttacacagacatcatcattgg

SEQ ID NO: 75800 - DNA, 33 bp, Homo sapien
aaatgggaattcttacgcagacatcatcattgg

SEQ ID NO: 75801 - DNA, 33 bp, Homo sapien
agaaaacctgcaatgcacgagttgaaactttct

SEQ ID NO: 75802 - DNA, 33 bp, Homo sapien
agaaaacctgcaatgcgcgagttgaaactttct

SEQ ID NO: 75803 - DNA, 33 bp, Homo sapien
caaaatcagttttgcccgcacatagaaaagtac

SEQ ID NO: 75804 - DNA, 33 bp, Homo sapien
caaaatcagttttgcctgcacatagaaaagtac

SEQ ID NO: 75805 - DNA, 33 bp, Homo sapien
ataatccacagtcagacaaggtagatcagagaa

SEQ ID NO: 75806 - DNA, 33 bp, Homo sapien
ataatccacagtcagataaggtagatcagagaa

SEQ ID NO: 75807 - DNA, 33 bp, Homo sapien
aaagttgaagcatttaataaatagaaacaactt

SEQ ID NO: 75808 - DNA, 33 bp, Homo sapien
aaagttgaagcatttagtaaatagaaacaactt

SEQ ID NO: 75809 - DNA, 33 bp, Homo sapien
ctcttgacgttcagtcacttctcttctctcctt

SEQ ID NO: 75810 - DNA, 33 bp, Homo sapien
ctcttgacgttcagtctcttctcttctctcctt

SEQ ID NO: 75811 - DNA, 33 bp, Homo sapien
acagatctaagatgtacgcacaagaaaaggaat

SEQ ID NO: 75812 - DNA, 33 bp, Homo sapien
acagatctaagatgtatgcacaagaaaaggaat

SEQ ID NO: 75813 - DNA, 33 bp, Homo sapien
tggctactgcaaactgaaagcctttagagcagg

SEQ ID NO: 75814 - DNA, 33 bp, Homo sapien
tggctactgcaaactggaagcctttagagcagg

SEQ ID NO: 75815 - DNA, 33 bp, Homo sapien
tctgctcaacacagaacagatgcagggtaactg

SEQ ID NO: 75816 - DNA, 33 bp, Homo sapien
tctgctcaacacagaatagatgcagggtaactg

SEQ ID NO: 75817 - DNA, 33 bp, Homo sapien
ttctgctgaccgccaagattataccctttctgc

SEQ ID NO: 75818 - DNA, 33 bp, Homo sapien
ttctgctgaccgccaatattataccctttctgc

SEQ ID NO: 75819 - DNA, 33 bp, Homo sapien
accccaagattatagacaaagcctggcttcctt

SEQ ID NO: 75820 - DNA, 33 bp, Homo sapien
accccaagattatagagaaagcctggcttcctt

SEQ ID NO: 75821 - DNA, 33 bp, Homo sapien
tcacacagccacagaaaattacactcagagaca

SEQ ID NO: 75822 - DNA, 33 bp, Homo sapien
tcacacagccacagaagattacactcagagaca

SEQ ID NO: 75823 - DNA, 33 bp, Homo sapien
ttgtcctaccaggaagaaatagttactaatctg

SEQ ID NO: 75824 - DNA, 33 bp, Homo sapien
ttgtcctaccaggaaggaatagttactaatctg

SEQ ID NO: 75825 - DNA, 33 bp, Homo sapien
gtgacctcagtagacaatgattttagccactgt

SEQ ID NO: 75826 - DNA, 33 bp, Homo sapien
gtgacctcagtagacactgattttagccactgt

SEQ ID NO: 75827 - DNA, 33 bp, Homo sapien
caatgacttgtgaaaaccgaggagtctaactag

SEQ ID NO: 75828 - DNA, 33 bp, Homo sapien
caatgacttgtgaaaagcgaggagtctaactag

SEQ ID NO: 75829 - DNA, 33 bp, Homo sapien
acctgcagaaacccacaaactggcgattgaggg

SEQ ID NO: 75830 - DNA, 33 bp, Homo sapien
acctgcagaaacccacgaactggcgattgaggg

SEQ ID NO: 75831 - DNA, 33 bp, Homo sapien
ttttggtgctacctgaaaatgttagcatgaaag

SEQ ID NO: 75832 - DNA, 33 bp, Homo sapien
ttttggtgctacctgagaatgttagcatgaaag

SEQ ID NO: 75833 - DNA, 33 bp, Homo sapien
aatcctaataaacacactatcgtcaatacccac

SEQ ID NO: 75834 - DNA, 33 bp, Homo sapien
aatcctaataaacacagtatcgtcaatacccac

SEQ ID NO: 75835 - DNA, 33 bp, Homo sapien
ctatcctctccactacagtagcctctagccaca

SEQ ID NO: 75836 - DNA, 33 bp, Homo sapien
ctatcctctccactacggtagcctctagccaca

SEQ ID NO: 75837 - DNA, 33 bp, Homo sapien
agaagttcgagtctgtcaaggcctggctcactg

SEQ ID NO: 75838 - DNA, 33 bp, Homo sapien
agaagttcgagtctgtgaaggcctggctcactg

SEQ ID NO: 75839 - DNA, 33 bp, Homo sapien
agactttgtagataaaagaacagaaatccgtgc

SEQ ID NO: 75840 - DNA, 33 bp, Homo sapien
agactttgtagataaaggaacagaaatccgtgc

SEQ ID NO: 75841 - DNA, 33 bp, Homo sapien
cctctggttggagttacaagctctttatctttg

SEQ ID NO: 75842 - DNA, 33 bp, Homo sapien
cctctggttggagttataagctctttatctttg

SEQ ID NO: 75843 - DNA, 33 bp, Homo sapien
atgtaaggctcaaaaaatccttttgggctgaca

SEQ ID NO: 75844 - DNA, 33 bp, Homo sapien
atgtaaggctcaaaaactccttttgggctgaca

SEQ ID NO: 75845 - DNA, 33 bp, Homo sapien
gcctaagtgacatcaaatggatcaagacaaaac

SEQ ID NO: 75846 - DNA, 33 bp, Homo sapien
gcctaagtgacatcaattggatcaagacaaaac

SEQ ID NO: 75847 - DNA, 33 bp, Homo sapien
cggtattttccacgaccatgagtagcaactgca

SEQ ID NO: 75848 - DNA, 33 bp, Homo sapien
cggtattttccacgacgatgagtagcaactgca

SEQ ID NO: 75849 - DNA, 33 bp, Homo sapien
cggggagaaaaggtagacatcagaggacatgag

SEQ ID NO: 75850 - DNA, 33 bp, Homo sapien
cggggagaaaaggtaggcatcagaggacatgag

SEQ ID NO: 75851 - DNA, 33 bp, Homo sapien
aataaataaagttgtaagtacatggcttatttc

SEQ ID NO: 75852 - DNA, 33 bp, Homo sapien
aataaataaagttgtaggtacatggcttatttc

SEQ ID NO: 75853 - DNA, 33 bp, Homo sapien
gctggtggtcctggtacgaagctggtggtcctg

SEQ ID NO: 75854 - DNA, 33 bp, Homo sapien
gctggtggtcctggtatgaagctggtggtcctg

SEQ ID NO: 75855 - DNA, 33 bp, Homo sapien
ccactcgctaaacttgaagatgcaacaggagtc

SEQ ID NO: 75856 - DNA, 33 bp, Homo sapien
ccactcgctaaacttgcagatgcaacaggagtc

SEQ ID NO: 75857 - DNA, 33 bp, Homo sapien
cactgttgatgggtccaagtggattcttttaag

SEQ ID NO: 75858 - DNA, 33 bp, Homo sapien
cactgttgatgggtccgagtggattcttttaag

SEQ ID NO: 75859 - DNA, 33 bp, Homo sapien
taatttttttgcatatcaagatcacctctggag

SEQ ID NO: 75860 - DNA, 33 bp, Homo sapien
taatttttttgcatatgaagatcacctctggag

SEQ ID NO: 75861 - DNA, 33 bp, Homo sapien
tggggattcctaagcaatgccaggatggctccc

SEQ ID NO: 75862 - DNA, 33 bp, Homo sapien
tggggattcctaagcagtgccaggatggctccc

SEQ ID NO: 75863 - DNA, 33 bp, Homo sapien
acccagagaagttgacagcagacagatgttgcc

SEQ ID NO: 75864 - DNA, 33 bp, Homo sapien
acccagagaagttgacggcagacagatgttgcc

SEQ ID NO: 75865 - DNA, 33 bp, Homo sapien
ctgagacacaacagaaagttggttttgagatga

SEQ ID NO: 75866 - DNA, 33 bp, Homo sapien
ctgagacacaacagaaggttggttttgagatga

SEQ ID NO: 75867 - DNA, 33 bp, Homo sapien
atcaatccagattcaacgtgaggaacagccagg

SEQ ID NO: 75868 - DNA, 33 bp, Homo sapien
atcaatccagattcaatgtgaggaacagccagg

SEQ ID NO: 75869 - DNA, 33 bp, Homo sapien
taaacatacgactccgaaaggtagattcctatc

SEQ ID NO: 75870 - DNA, 33 bp, Homo sapien
taaacatacgactccgcaaggtagattcctatc

SEQ ID NO: 75871 - DNA, 33 bp, Homo sapien
ggtaggcggggaacacgcagcaagaacagctct

SEQ ID NO: 75872 - DNA, 33 bp, Homo sapien
ggtaggcggggaacactcagcaagaacagctct

SEQ ID NO: 75873 - DNA, 33 bp, Homo sapien
agttccgcaagtgaacaagattcacaattagtg

SEQ ID NO: 75874 - DNA, 33 bp, Homo sapien
agttccgcaagtgaaccagattcacaattagtg

SEQ ID NO: 75875 - DNA, 33 bp, Homo sapien
gccagacaagataaccacagggcccagtggaag

SEQ ID NO: 75876 - DNA, 33 bp, Homo sapien
gccagacaagataaccgcagggcccagtggaag

SEQ ID NO: 75877 - DNA, 33 bp, Homo sapien
gccctattattgccaaaaccctattaacctcac

SEQ ID NO: 75878 - DNA, 33 bp, Homo sapien
gccctattattgccaagaccctattaacctcac

SEQ ID NO: 75879 - DNA, 33 bp, Homo sapien
gtcccctggacctagacggttggctcaacacat

SEQ ID NO: 75880 - DNA, 33 bp, Homo sapien
gtcccctggacctagatggttggctcaacacat

SEQ ID NO: 75881 - DNA, 33 bp, Homo sapien
aggtgccacttgctgaatagggccaaagtcatg

SEQ ID NO: 75882 - DNA, 33 bp, Homo sapien
aggtgccacttgctgagtagggccaaagtcatg

SEQ ID NO: 75883 - DNA, 33 bp, Homo sapien
catgaagcctgcttagcagaggggctcaaactt

SEQ ID NO: 75884 - DNA, 33 bp, Homo sapien
catgaagcctgcttagtagaggggctcaaactt

SEQ ID NO: 75885 - DNA, 33 bp, Homo sapien
cgaagcactcgggaaacagaatccacagaaaga

SEQ ID NO: 75886 - DNA, 33 bp, Homo sapien
cgaagcactcgggaaatagaatccacagaaaga

SEQ ID NO: 75887 - DNA, 33 bp, Homo sapien
agtaatacctcggatcacgtttaatttatatgt

SEQ ID NO: 75888 - DNA, 33 bp, Homo sapien
agtaatacctcggatcgcgtttaatttatatgt

SEQ ID NO: 75889 - DNA, 33 bp, Homo sapien
ggaagctacaggtgcactgattatgatttcaat

SEQ ID NO: 75890 - DNA, 33 bp, Homo sapien
ggaagctacaggtgcattgattatgatttcaat

SEQ ID NO: 75891 - DNA, 33 bp, Homo sapien
gagaagttggtcccaaaaagctgattctcagtg

SEQ ID NO: 75892 - DNA, 33 bp, Homo sapien
gagaagttggtcccaacaagctgattctcagtg

SEQ ID NO: 75893 - DNA, 33 bp, Homo sapien
tggctggtcccttacaggtgagtacagttggtc

SEQ ID NO: 75894 - DNA, 33 bp, Homo sapien
tggctggtcccttacatgtgagtacagttggtc

SEQ ID NO: 75895 - DNA, 33 bp, Homo sapien
tgtggctggttgctgaggtgtcaggcacagcta

SEQ ID NO: 75896 - DNA, 33 bp, Homo sapien
tgtggctggttgctgatgtgtcaggcacagcta

SEQ ID NO: 75897 - DNA, 33 bp, Homo sapien
agggaccactcaagtcaacccaacccaagtccc

SEQ ID NO: 75898 - DNA, 33 bp, Homo sapien
agggaccactcaagtcgacccaacccaagtccc

SEQ ID NO: 75899 - DNA, 33 bp, Homo sapien
ccctgtgaatctcaaccacctggcaggaggggg

SEQ ID NO: 75900 - DNA, 33 bp, Homo sapien
ccctgtgaatctcaactacctggcaggaggggg

SEQ ID NO: 75901 - DNA, 33 bp, Homo sapien
tcagaacatcctaactaagcagatagctataaa

SEQ ID NO: 75902 - DNA, 33 bp, Homo sapien
tcagaacatcctaactgagcagatagctataaa

SEQ ID NO: 75903 - DNA, 33 bp, Homo sapien
gttaactcggctcccaactgctgcgtgattcca

SEQ ID NO: 75904 - DNA, 33 bp, Homo sapien
gttaactcggctcccagctgctgcgtgattcca

SEQ ID NO: 75905 - DNA, 33 bp, Homo sapien
cagttttgttctcctacataagagatgaatgca

SEQ ID NO: 75906 - DNA, 33 bp, Homo sapien
cagttttgttctcctatataagagatgaatgca

SEQ ID NO: 75907 - DNA, 33 bp, Homo sapien
ggtgctatgaacttgacctcttagctaccacat

SEQ ID NO: 75908 - DNA, 33 bp, Homo sapien
ggtgctatgaacttgatctcttagctaccacat

SEQ ID NO: 75909 - DNA, 33 bp, Homo sapien
aataatcactctgcgactccggagagccagttg

SEQ ID NO: 75910 - DNA, 33 bp, Homo sapien
aataatcactctgcgattccggagagccagttg

SEQ ID NO: 75911 - DNA, 33 bp, Homo sapien
ctcatttcagccgacaagttaactcaggcccac

SEQ ID NO: 75912 - DNA, 33 bp, Homo sapien
ctcatttcagccgacaggttaactcaggcccac

SEQ ID NO: 75913 - DNA, 33 bp, Homo sapien
tgacacatagtcatgccgagtcttaaaacttta

SEQ ID NO: 75914 - DNA, 33 bp, Homo sapien
tgacacatagtcatgctgagtcttaaaacttta

SEQ ID NO: 75915 - DNA, 33 bp, Homo sapien
gactatttacacttggacagaacaagacgtagg

SEQ ID NO: 75916 - DNA, 33 bp, Homo sapien
gactatttacacttgggcagaacaagacgtagg

SEQ ID NO: 75917 - DNA, 33 bp, Homo sapien
aggagggtgtcagagaatcatcttccaaagtaa

SEQ ID NO: 75918 - DNA, 33 bp, Homo sapien
aggagggtgtcagagagtcatcttccaaagtaa

SEQ ID NO: 75919 - DNA, 33 bp, Homo sapien
tcctaaattagttataccgtcttctttatttgc

SEQ ID NO: 75920 - DNA, 33 bp, Homo sapien
tcctaaattagttatatcgtcttctttatttgc

SEQ ID NO: 75921 - DNA, 33 bp, Homo sapien
aaataaagattagtggaacaaactacagcttcc

SEQ ID NO: 75922 - DNA, 33 bp, Homo sapien
aaataaagattagtgggacaaactacagcttcc

SEQ ID NO: 75923 - DNA, 33 bp, Homo sapien
agaagcggagtcaccaacttggcagaggaaatt

SEQ ID NO: 75924 - DNA, 33 bp, Homo sapien
agaagcggagtcaccatcttggcagaggaaatt

SEQ ID NO: 75925 - DNA, 33 bp, Homo sapien
tcctaagcaaaccggcaaaagagctactaaatt

SEQ ID NO: 75926 - DNA, 33 bp, Homo sapien
tcctaagcaaaccggccaaagagctactaaatt

SEQ ID NO: 75927 - DNA, 33 bp, Homo sapien
gaacagtgggaactgacaggttgcctgatcaca

SEQ ID NO: 75928 - DNA, 33 bp, Homo sapien
gaacagtgggaactgataggttgcctgatcaca

SEQ ID NO: 75929 - DNA, 33 bp, Homo sapien
taataagaatttgatgaaaaaaatgtaatacaa

SEQ ID NO: 75930 - DNA, 33 bp, Homo sapien
taataagaatttgatggaaaaaatgtaatacaa

SEQ ID NO: 75931 - DNA, 33 bp, Homo sapien
atagatataattggtacctggccccttcctccc

SEQ ID NO: 75932 - DNA, 33 bp, Homo sapien
atagatataattggtatctggccccttcctccc

SEQ ID NO: 75933 - DNA, 33 bp, Homo sapien
ttgatgactgtctacacaaagtaccttcataag

SEQ ID NO: 75934 - DNA, 33 bp, Homo sapien
ttgatgactgtctacagaaagtaccttcataag

SEQ ID NO: 75935 - DNA, 33 bp, Homo sapien
catagagcctctaaagcataaacataagccatg

SEQ ID NO: 75936 - DNA, 33 bp, Homo sapien
catagagcctctaaagtataaacataagccatg

SEQ ID NO: 75937 - DNA, 33 bp, Homo sapien
cagattgggatttgaacaaaccagtggctttca

SEQ ID NO: 75938 - DNA, 33 bp, Homo sapien
cagattgggatttgaataaaccagtggctttca

SEQ ID NO: 75939 - DNA, 33 bp, Homo sapien
ttattatattctcagtcaattgtgtacaaaaat

SEQ ID NO: 75940 - DNA, 33 bp, Homo sapien
ttattatattctcagttaattgtgtacaaaaat

SEQ ID NO: 75941 - DNA, 33 bp, Homo sapien
ggagagagtttagaagaaaacagaaaagtagag

SEQ ID NO: 75942 - DNA, 33 bp, Homo sapien
ggagagagtttagaaggaaacagaaaagtagag

SEQ ID NO: 75943 - DNA, 33 bp, Homo sapien
gttaagggtgcatatcaacatcactcaccagtg

SEQ ID NO: 75944 - DNA, 33 bp, Homo sapien
gttaagggtgcatatcgacatcactcaccagtg

SEQ ID NO: 75945 - DNA, 33 bp, Homo sapien
ccagtccatgctctgacagggatggttcccggt

SEQ ID NO: 75946 - DNA, 33 bp, Homo sapien
ccagtccatgctctgatagggatggttcccggt

SEQ ID NO: 75947 - DNA, 33 bp, Homo sapien
ttgttctgacattgtaagtgacatgatttttca

SEQ ID NO: 75948 - DNA, 33 bp, Homo sapien
ttgttctgacattgtaggtgacatgatttttca

SEQ ID NO: 75949 - DNA, 33 bp, Homo sapien
tgaagacttgcttttcactactctcctccatct

SEQ ID NO: 75950 - DNA, 33 bp, Homo sapien
tgaagacttgcttttcgctactctcctccatct

SEQ ID NO: 75951 - DNA, 33 bp, Homo sapien
tccattctagttccaaaacgtcctggagaagca

SEQ ID NO: 75952 - DNA, 33 bp, Homo sapien
tccattctagttccaagacgtcctggagaagca

SEQ ID NO: 75953 - DNA, 33 bp, Homo sapien
gattggtccagaaaacagaatttagaggatggg

SEQ ID NO: 75954 - DNA, 33 bp, Homo sapien
gattggtccagaaaaccgaatttagaggatggg

SEQ ID NO: 75955 - DNA, 33 bp, Homo sapien
ggagtgagagtttgccagcagagggaacccagt

SEQ ID NO: 75956 - DNA, 33 bp, Homo sapien
ggagtgagagtttgcccgcagagggaacccagt

SEQ ID NO: 75957 - DNA, 33 bp, Homo sapien
tcaaaagaagatgtgcaaacaggcaacaaacat

SEQ ID NO: 75958 - DNA, 33 bp, Homo sapien
tcaaaagaagatgtgcgaacaggcaacaaacat

SEQ ID NO: 75959 - DNA, 33 bp, Homo sapien
gtggtgactgatgagcaactggcaagagctgca

SEQ ID NO: 75960 - DNA, 33 bp, Homo sapien
gtggtgactgatgagcgactggcaagagctgca

SEQ ID NO: 75961 - DNA, 33 bp, Homo sapien
tgagtctgagaaaggagtcagtgaagagtggtg

SEQ ID NO: 75962 - DNA, 33 bp, Homo sapien
tgagtctgagaaaggattcagtgaagagtggtg

SEQ ID NO: 75963 - DNA, 33 bp, Homo sapien
tgagcaccggcactaaccaggattattcagtag

SEQ ID NO: 75964 - DNA, 33 bp, Homo sapien
tgagcaccggcactaatcaggattattcagtag

SEQ ID NO: 75965 - DNA, 33 bp, Homo sapien
ctggcaaccctgcagacgtagcctaagaattct

SEQ ID NO: 75966 - DNA, 33 bp, Homo sapien
ctggcaaccctgcagatgtagcctaagaattct

SEQ ID NO: 75967 - DNA, 33 bp, Homo sapien
aggagagagattctggcagcagctcgcagtggg

SEQ ID NO: 75968 - DNA, 33 bp, Homo sapien
aggagagagattctggtagcagctcgcagtggg

SEQ ID NO: 75969 - DNA, 33 bp, Homo sapien
gataaaagttagcaaaatagtctaaacctatcc

SEQ ID NO: 75970 - DNA, 33 bp, Homo sapien
gataaaagttagcaaagtagtctaaacctatcc

SEQ ID NO: 75971 - DNA, 33 bp, Homo sapien
attttccagacataaaccttcagtttcataaag

SEQ ID NO: 75972 - DNA, 33 bp, Homo sapien
attttccagacataaatcttcagtttcataaag

SEQ ID NO: 75973 - DNA, 33 bp, Homo sapien
acagtaggcctatgagaaaaatagtgttctttt

SEQ ID NO: 75974 - DNA, 33 bp, Homo sapien
acagtaggcctatgagcaaaatagtgttctttt

SEQ ID NO: 75975 - DNA, 33 bp, Homo sapien
aaggtctgtacctcaaaaaaaatgacatgatat

SEQ ID NO: 75976 - DNA, 33 bp, Homo sapien
aaggtctgtacctcaagaaaaatgacatgatat

SEQ ID NO: 75977 - DNA, 33 bp, Homo sapien
actcttgccaatatccgaaactcccactttctg

SEQ ID NO: 75978 - DNA, 33 bp, Homo sapien
actcttgccaatatcctaaactcccactttctg

SEQ ID NO: 75979 - DNA, 33 bp, Homo sapien
tgattctgtcatgaaccaacctaactctctttt

SEQ ID NO: 75980 - DNA, 33 bp, Homo sapien
tgattctgtcatgaactaacctaactctctttt

SEQ ID NO: 75981 - DNA, 33 bp, Homo sapien
tttccattttttagtgcaatttggcagattcaa

SEQ ID NO: 75982 - DNA, 33 bp, Homo sapien
tttccattttttagtgtaatttggcagattcaa

SEQ ID NO: 75983 - DNA, 33 bp, Homo sapien
tttcaaggtcaaaacacgaaagctcaagaggtt

SEQ ID NO: 75984 - DNA, 33 bp, Homo sapien
tttcaaggtcaaaacatgaaagctcaagaggtt

SEQ ID NO: 75985 - DNA, 33 bp, Homo sapien
attggcatttcttcataagttacagaggaaatg

SEQ ID NO: 75986 - DNA, 33 bp, Homo sapien
attggcatttcttcatgagttacagaggaaatg

SEQ ID NO: 75987 - DNA, 33 bp, Homo sapien
atccaagcagttcaaacagcatcccatgatatc

SEQ ID NO: 75988 - DNA, 33 bp, Homo sapien
atccaagcagttcaaagagcatcccatgatatc

SEQ ID NO: 75989 - DNA, 33 bp, Homo sapien
gtcatttagggctacaaaccttcctcttagtac

SEQ ID NO: 75990 - DNA, 33 bp, Homo sapien
gtcatttagggctacagaccttcctcttagtac

SEQ ID NO: 75991 - DNA, 33 bp, Homo sapien
attgtccctatttacacataaccaatattctat

SEQ ID NO: 75992 - DNA, 33 bp, Homo sapien
attgtccctatttacagataaccaatattctat

SEQ ID NO: 75993 - DNA, 33 bp, Homo sapien
gaatactgtaggactacaatggtaacgtgtaaa

SEQ ID NO: 75994 - DNA, 33 bp, Homo sapien
gaatactgtaggactataatggtaacgtgtaaa

SEQ ID NO: 75995 - DNA, 33 bp, Homo sapien
agctaaacaacttttcaaccaagtggatctaag

SEQ ID NO: 75996 - DNA, 33 bp, Homo sapien
agctaaacaacttttctaccaagtggatctaag

SEQ ID NO: 75997 - DNA, 33 bp, Homo sapien
aaaatgtcaaacaaaacctgaactgaaaggaaa

SEQ ID NO: 75998 - DNA, 33 bp, Homo sapien
aaaatgtcaaacaaaagctgaactgaaaggaaa

SEQ ID NO: 75999 - DNA, 33 bp, Homo sapien
acagaataaagacaaaataatccacaccaaaaa

SEQ ID NO: 76000 - DNA, 33 bp, Homo sapien
acagaataaagacaaagtaatccacaccaaaaa

SEQ ID NO: 76001 - DNA, 33 bp, Homo sapien
caaaaaccgaaatcaaacagaagtgtctatgct

SEQ ID NO: 76002 - DNA, 33 bp, Homo sapien
caaaaaccgaaatcaagcagaagtgtctatgct

SEQ ID NO: 76003 - DNA, 33 bp, Homo sapien
tagtagagctgatatacaaaggagagaggcaaa

SEQ ID NO: 76004 - DNA, 33 bp, Homo sapien
tagtagagctgatatataaaggagagaggcaaa

SEQ ID NO: 76005 - DNA, 33 bp, Homo sapien
gcttcagcacatataaatagtcttctttttgtc

SEQ ID NO: 76006 - DNA, 33 bp, Homo sapien
gcttcagcacatataagtagtcttctttttgtc

SEQ ID NO: 76007 - DNA, 33 bp, Homo sapien
ttctagtttgtatgcaaagaggtgtttatagta

SEQ ID NO: 76008 - DNA, 33 bp, Homo sapien
ttctagtttgtatgcagagaggtgtttatagta

SEQ ID NO: 76009 - DNA, 33 bp, Homo sapien
ctcccttcctctagaccgtaaactacattagag

SEQ ID NO: 76010 - DNA, 33 bp, Homo sapien
ctcccttcctctagactgtaaactacattagag

SEQ ID NO: 76011 - DNA, 33 bp, Homo sapien
cagcaggaattctcaaacatagatttacttcaa

SEQ ID NO: 76012 - DNA, 33 bp, Homo sapien
cagcaggaattctcaagcatagatttacttcaa

SEQ ID NO: 76013 - DNA, 33 bp, Homo sapien
gttcaatcaatgacagaccacatggtagtccca

SEQ ID NO: 76014 - DNA, 33 bp, Homo sapien
gttcaatcaatgacaggccacatggtagtccca

SEQ ID NO: 76015 - DNA, 33 bp, Homo sapien
gcatttcctcatgccaataaaatgagatctcaa

SEQ ID NO: 76016 - DNA, 33 bp, Homo sapien
gcatttcctcatgccagtaaaatgagatctcaa

SEQ ID NO: 76017 - DNA, 33 bp, Homo sapien
taaccttaaatgtaaacggactaagtgtcccaa

SEQ ID NO: 76018 - DNA, 33 bp, Homo sapien
taaccttaaatgtaaatggactaagtgtcccaa

SEQ ID NO: 76019 - DNA, 33 bp, Homo sapien
agagaaacttattttcaatcccagcctcagtat

SEQ ID NO: 76020 - DNA, 33 bp, Homo sapien
agagaaacttattttcgatcccagcctcagtat

SEQ ID NO: 76021 - DNA, 33 bp, Homo sapien
aaaataaaatgctccacaaattcttctatttca

SEQ ID NO: 76022 - DNA, 33 bp, Homo sapien
aaaataaaatgctccagaaattcttctatttca

SEQ ID NO: 76023 - DNA, 33 bp, Homo sapien
tctgttgcaaagcatcaccagatccatatttca

SEQ ID NO: 76024 - DNA, 33 bp, Homo sapien
tctgttgcaaagcatcgccagatccatatttca

SEQ ID NO: 76025 - DNA, 33 bp, Homo sapien
tttttacctctgggagacatttcacaaagtctg

SEQ ID NO: 76026 - DNA, 33 bp, Homo sapien
tttttacctctgggagtcatttcacaaagtctg

SEQ ID NO: 76027 - DNA, 33 bp, Homo sapien
caaccaaaatagcaaactagtcacataaaaaca

SEQ ID NO: 76028 - DNA, 33 bp, Homo sapien
caaccaaaatagcaaagtagtcacataaaaaca

SEQ ID NO: 76029 - DNA, 33 bp, Homo sapien
ggtcagcacgttttaaatattccatatacttat

SEQ ID NO: 76030 - DNA, 33 bp, Homo sapien
ggtcagcacgttttaagtattccatatacttat

SEQ ID NO: 76031 - DNA, 33 bp, Homo sapien
ccatttaatgaccaagcatgacgaggtcacagg

SEQ ID NO: 76032 - DNA, 33 bp, Homo sapien
ccatttaatgaccaaggatgacgaggtcacagg

SEQ ID NO: 76033 - DNA, 33 bp, Homo sapien
ctcatgatgagcagatcaaaaggatgctagaga

SEQ ID NO: 76034 - DNA, 33 bp, Homo sapien
ctcatgatgagcagattaaaaggatgctagaga

SEQ ID NO: 76035 - DNA, 33 bp, Homo sapien
gagcatacaggatgagaaacttgttatatcaac

SEQ ID NO: 76036 - DNA, 33 bp, Homo sapien
gagcatacaggatgaggaacttgttatatcaac

SEQ ID NO: 76037 - DNA, 33 bp, Homo sapien
cctgacctgattaggcccttttgatagttacat

SEQ ID NO: 76038 - DNA, 33 bp, Homo sapien
cctgacctgattaggctcttttgatagttacat

SEQ ID NO: 76039 - DNA, 33 bp, Homo sapien
attctgcagttagcataaaagtccttattttag

SEQ ID NO: 76040 - DNA, 33 bp, Homo sapien
attctgcagttagcatgaaagtccttattttag

SEQ ID NO: 76041 - DNA, 33 bp, Homo sapien
ttcacctgaataaaagcatcgtatatgtttaaa

SEQ ID NO: 76042 - DNA, 33 bp, Homo sapien
ttcacctgaataaaagtatcgtatatgtttaaa

SEQ ID NO: 76043 - DNA, 33 bp, Homo sapien
gaaaaaaatcagggatcaccaatatgtctggta

SEQ ID NO: 76044 - DNA, 33 bp, Homo sapien
gaaaaaaatcagggatgaccaatatgtctggta

SEQ ID NO: 76045 - DNA, 33 bp, Homo sapien
atctgtcttgaaaaaaatattaaaaggccattg

SEQ ID NO: 76046 - DNA, 33 bp, Homo sapien
atctgtcttgaaaaaagtattaaaaggccattg

SEQ ID NO: 76047 - DNA, 33 bp, Homo sapien
gcctttagttcagtaaaatggacagccccagtt

SEQ ID NO: 76048 - DNA, 33 bp, Homo sapien
gcctttagttcagtaatatggacagccccagtt

SEQ ID NO: 76049 - DNA, 33 bp, Homo sapien
tgtgtatccgataaaaatctaatatctggaatc

SEQ ID NO: 76050 - DNA, 33 bp, Homo sapien
tgtgtatccgataaaagtctaatatctggaatc

SEQ ID NO: 76051 - DNA, 33 bp, Homo sapien
aaatggtacaggaacaaaatattaccagtcaaa

SEQ ID NO: 76052 - DNA, 33 bp, Homo sapien
aaatggtacaggaacataatattaccagtcaaa

SEQ ID NO: 76053 - DNA, 33 bp, Homo sapien
taaaggtagaaataaacaatgatgtgataagca

SEQ ID NO: 76054 - DNA, 33 bp, Homo sapien
taaaggtagaaataaataatgatgtgataagca

SEQ ID NO: 76055 - DNA, 33 bp, Homo sapien
tacatattttgtcccactggcacatagtaaagt

SEQ ID NO: 76056 - DNA, 33 bp, Homo sapien
tacatattttgtcccattggcacatagtaaagt

SEQ ID NO: 76057 - DNA, 33 bp, Homo sapien
aacattcaagtgactacgaccaaatatggtact

SEQ ID NO: 76058 - DNA, 33 bp, Homo sapien
aacattcaagtgactatgaccaaatatggtact

SEQ ID NO: 76059 - DNA, 33 bp, Homo sapien
ttagaatgccataatcaagacgtagataagtga

SEQ ID NO: 76060 - DNA, 33 bp, Homo sapien
ttagaatgccataatcgagacgtagataagtga

SEQ ID NO: 76061 - DNA, 33 bp, Homo sapien
gaagtggcagccagagaaagtaatgttctagat

SEQ ID NO: 76062 - DNA, 33 bp, Homo sapien
gaagtggcagccagaggaagtaatgttctagat

SEQ ID NO: 76063 - DNA, 33 bp, Homo sapien
tggttatgtgaccagactagatctagacagcgg

SEQ ID NO: 76064 - DNA, 33 bp, Homo sapien
tggttatgtgaccagattagatctagacagcgg

SEQ ID NO: 76065 - DNA, 33 bp, Homo sapien
gtctacctgtatgccaactgggaccaaggtaat

SEQ ID NO: 76066 - DNA, 33 bp, Homo sapien
gtctacctgtatgccagctgggaccaaggtaat

SEQ ID NO: 76067 - DNA, 33 bp, Homo sapien
tactttgagatacatgaaaacaaacaaaaacat

SEQ ID NO: 76068 - DNA, 33 bp, Homo sapien
tactttgagatacatggaaacaaacaaaaacat

SEQ ID NO: 76069 - DNA, 33 bp, Homo sapien
attagtctgtcttggacctttcctcattttctc

SEQ ID NO: 76070 - DNA, 33 bp, Homo sapien
attagtctgtcttggatctttcctcattttctc

SEQ ID NO: 76071 - DNA, 33 bp, Homo sapien
agaagtgagagctccaataaggaacctttcctc

SEQ ID NO: 76072 - DNA, 33 bp, Homo sapien
agaagtgagagctccagtaaggaacctttcctc

SEQ ID NO: 76073 - DNA, 33 bp, Homo sapien
gttccactgcctctcaatctatacacttgactc

SEQ ID NO: 76074 - DNA, 33 bp, Homo sapien
gttccactgcctctcagtctatacacttgactc

SEQ ID NO: 76075 - DNA, 33 bp, Homo sapien
aggagtcagtccgtcaaaattcctgggaagaag

SEQ ID NO: 76076 - DNA, 33 bp, Homo sapien
aggagtcagtccgtcagaattcctgggaagaag

SEQ ID NO: 76077 - DNA, 33 bp, Homo sapien
gtaaagctacatggatgaattgtatggtggtga

SEQ ID NO: 76078 - DNA, 33 bp, Homo sapien
gtaaagctacatggattaattgtatggtggtga

SEQ ID NO: 76079 - DNA, 33 bp, Homo sapien
agagttatggcatcaaaggaaatactctccagt

SEQ ID NO: 76080 - DNA, 33 bp, Homo sapien
agagttatggcatcaagggaaatactctccagt

SEQ ID NO: 76081 - DNA, 33 bp, Homo sapien
gtaagatttgtcttagaacttataccagttaca

SEQ ID NO: 76082 - DNA, 33 bp, Homo sapien
gtaagatttgtcttagtacttataccagttaca

SEQ ID NO: 76083 - DNA, 33 bp, Homo sapien
ctaagacaaatcttacagaatctagttagttcc

SEQ ID NO: 76084 - DNA, 33 bp, Homo sapien
ctaagacaaatcttacggaatctagttagttcc

SEQ ID NO: 76085 - DNA, 33 bp, Homo sapien
cagtatctggtaacaaatggacttgcctttcag

SEQ ID NO: 76086 - DNA, 33 bp, Homo sapien
cagtatctggtaacaagtggacttgcctttcag

SEQ ID NO: 76087 - DNA, 33 bp, Homo sapien
aaaacatggaagataacgtaaaattaaaagcca

SEQ ID NO: 76088 - DNA, 33 bp, Homo sapien
aaaacatggaagataaggtaaaattaaaagcca

SEQ ID NO: 76089 - DNA, 33 bp, Homo sapien
agactcatgggttttccaaaggttgccattaag

SEQ ID NO: 76090 - DNA, 33 bp, Homo sapien
agactcatgggttttctaaaggttgccattaag

SEQ ID NO: 76091 - DNA, 33 bp, Homo sapien
ttgtgcagttaagatgcaagggagcgttaataa

SEQ ID NO: 76092 - DNA, 33 bp, Homo sapien
ttgtgcagttaagatggaagggagcgttaataa

SEQ ID NO: 76093 - DNA, 33 bp, Homo sapien
accttattaccagggcaaaacaacattatctta

SEQ ID NO: 76094 - DNA, 33 bp, Homo sapien
accttattaccagggcgaaacaacattatctta

SEQ ID NO: 76095 - DNA, 33 bp, Homo sapien
ggatttaaagacagtcacatcattttttttctt

SEQ ID NO: 76096 - DNA, 33 bp, Homo sapien
ggatttaaagacagtcgcatcattttttttctt

SEQ ID NO: 76097 - DNA, 33 bp, Homo sapien
aatgtgtgaattaagcaagggagggattcttat

SEQ ID NO: 76098 - DNA, 33 bp, Homo sapien
aatgtgtgaattaagcgagggagggattcttat

SEQ ID NO: 76099 - DNA, 33 bp, Homo sapien
cttccacaaacctacacggcatagcctactgct

SEQ ID NO: 76100 - DNA, 33 bp, Homo sapien
cttccacaaacctacatggcatagcctactgct

SEQ ID NO: 76101 - DNA, 33 bp, Homo sapien
tatgaaagcaccggaaaacaagaagtatcccca

SEQ ID NO: 76102 - DNA, 33 bp, Homo sapien
tatgaaagcaccggaagacaagaagtatcccca

SEQ ID NO: 76103 - DNA, 33 bp, Homo sapien
agacacctgagaggtcaagaattttggcaacta

SEQ ID NO: 76104 - DNA, 33 bp, Homo sapien
agacacctgagaggtcgagaattttggcaacta

SEQ ID NO: 76105 - DNA, 33 bp, Homo sapien
tagccaggcatgatgaagcacctttagtcccag

SEQ ID NO: 76106 - DNA, 33 bp, Homo sapien
tagccaggcatgatgaggcacctttagtcccag

SEQ ID NO: 76107 - DNA, 33 bp, Homo sapien
gccacatctcactgtccctttatcatggcaatg

SEQ ID NO: 76108 - DNA, 33 bp, Homo sapien
gccacatctcactgtctctttatcatggcaatg

SEQ ID NO: 76109 - DNA, 33 bp, Homo sapien
cattttgacaaagtaacctcatatctatcgaat

SEQ ID NO: 76110 - DNA, 33 bp, Homo sapien
cattttgacaaagtaatctcatatctatcgaat

SEQ ID NO: 76111 - DNA, 33 bp, Homo sapien
aaaataaagacatacaaaatagacgactcacag

SEQ ID NO: 76112 - DNA, 33 bp, Homo sapien
aaaataaagacatacacaatagacgactcacag

SEQ ID NO: 76113 - DNA, 33 bp, Homo sapien
actgaaaaatctaacccgctggattaatcttaa

SEQ ID NO: 76114 - DNA, 33 bp, Homo sapien
actgaaaaatctaacctgctggattaatcttaa

SEQ ID NO: 76115 - DNA, 33 bp, Homo sapien
ggcgaccggaagtcaagggctaagggagctaag

SEQ ID NO: 76116 - DNA, 33 bp, Homo sapien
ggcgaccggaagtcaatggctaagggagctaag

SEQ ID NO: 76117 - DNA, 33 bp, Homo sapien
taaactgtaagcactacgagagcaagtcttttc

SEQ ID NO: 76118 - DNA, 33 bp, Homo sapien
taaactgtaagcactatgagagcaagtcttttc

SEQ ID NO: 76119 - DNA, 33 bp, Homo sapien
actgccccatcttcaaaatgaacaagtgcttct

SEQ ID NO: 76120 - DNA, 33 bp, Homo sapien
actgccccatcttcaacatgaacaagtgcttct

SEQ ID NO: 76121 - DNA, 33 bp, Homo sapien
cttgcttgctaatccccgacacgtgacctctgt

SEQ ID NO: 76122 - DNA, 33 bp, Homo sapien
cttgcttgctaatccctgacacgtgacctctgt

SEQ ID NO: 76123 - DNA, 33 bp, Homo sapien
taatcaaaatgaagtcagaatgttttaagtgcc

SEQ ID NO: 76124 - DNA, 33 bp, Homo sapien
taatcaaaatgaagtctgaatgttttaagtgcc

SEQ ID NO: 76125 - DNA, 33 bp, Homo sapien
ccgcatgtcagaacacacctcttcctgctcaag

SEQ ID NO: 76126 - DNA, 33 bp, Homo sapien
ccgcatgtcagaacacgcctcttcctgctcaag

SEQ ID NO: 76127 - DNA, 33 bp, Homo sapien
ggctttccagaactccactttccctagccttgc

SEQ ID NO: 76128 - DNA, 33 bp, Homo sapien
ggctttccagaactccgctttccctagccttgc

SEQ ID NO: 76129 - DNA, 33 bp, Homo sapien
cctgcctgagaagaaccgaagggatgcacaagg

SEQ ID NO: 76130 - DNA, 33 bp, Homo sapien
cctgcctgagaagaacggaagggatgcacaagg

SEQ ID NO: 76131 - DNA, 33 bp, Homo sapien
agggccaggtgtgaccaagctgcaagttcccct

SEQ ID NO: 76132 - DNA, 33 bp, Homo sapien
agggccaggtgtgaccgagctgcaagttcccct

SEQ ID NO: 76133 - DNA, 33 bp, Homo sapien
cttctgtattcttggaagttttcattctaggct

SEQ ID NO: 76134 - DNA, 33 bp, Homo sapien
cttctgtattcttggatgttttcattctaggct

SEQ ID NO: 76135 - DNA, 33 bp, Homo sapien
gtgatccttttaatggccacacttttctgtatg

SEQ ID NO: 76136 - DNA, 33 bp, Homo sapien
gtgatccttttaatggtcacacttttctgtatg

SEQ ID NO: 76137 - DNA, 33 bp, Homo sapien
agctaagaatatctggaagtctgtggtttgtga

SEQ ID NO: 76138 - DNA, 33 bp, Homo sapien
agctaagaatatctgggagtctgtggtttgtga

SEQ ID NO: 76139 - DNA, 33 bp, Homo sapien
cgttcatttaccaacaagctgttcactggcttt

SEQ ID NO: 76140 - DNA, 33 bp, Homo sapien
cgttcatttaccaacaggctgttcactggcttt

SEQ ID NO: 76141 - DNA, 33 bp, Homo sapien
gagggtaggatcagaccgcacctgatttttgga

SEQ ID NO: 76142 - DNA, 33 bp, Homo sapien
gagggtaggatcagactgcacctgatttttgga

SEQ ID NO: 76143 - DNA, 33 bp, Homo sapien
aagtgtttctaacaaaactgaatgagctagaaa

SEQ ID NO: 76144 - DNA, 33 bp, Homo sapien
aagtgtttctaacaaagctgaatgagctagaaa

SEQ ID NO: 76145 - DNA, 33 bp, Homo sapien
atataaacattttgtgaagatttaactggctga

SEQ ID NO: 76146 - DNA, 33 bp, Homo sapien
atataaacattttgtggagatttaactggctga

SEQ ID NO: 76147 - DNA, 33 bp, Homo sapien
gcagactctggccaaactcttacttgctaaaat

SEQ ID NO: 76148 - DNA, 33 bp, Homo sapien
gcagactctggccaaattcttacttgctaaaat

SEQ ID NO: 76149 - DNA, 33 bp, Homo sapien
acaagcagaaaacatcaattgttaaaagaagca

SEQ ID NO: 76150 - DNA, 33 bp, Homo sapien
acaagcagaaaacatcgattgttaaaagaagca

SEQ ID NO: 76151 - DNA, 33 bp, Homo sapien
cctcaatctaccaacccgaataagagtccagac

SEQ ID NO: 76152 - DNA, 33 bp, Homo sapien
cctcaatctaccaacctgaataagagtccagac

SEQ ID NO: 76153 - DNA, 33 bp, Homo sapien
aatattattctcttgcccaactggcgtgcctct

SEQ ID NO: 76154 - DNA, 33 bp, Homo sapien
aatattattctcttgctcaactggcgtgcctct

SEQ ID NO: 76155 - DNA, 33 bp, Homo sapien
aactccaggctaaaataacttgctatgagacat

SEQ ID NO: 76156 - DNA, 33 bp, Homo sapien
aactccaggctaaaattacttgctatgagacat

SEQ ID NO: 76157 - DNA, 33 bp, Homo sapien
gaaaataaaaattcaaaaactacttcaaatata

SEQ ID NO: 76158 - DNA, 33 bp, Homo sapien
gaaaataaaaattcaagaactacttcaaatata

SEQ ID NO: 76159 - DNA, 33 bp, Homo sapien
aagaaagaaaatacaaataaaccatgggcacct

SEQ ID NO: 76160 - DNA, 33 bp, Homo sapien
aagaaagaaaatacaagtaaaccatgggcacct

SEQ ID NO: 76161 - DNA, 33 bp, Homo sapien
actttctaagaaatccagagcgaggaattagta

SEQ ID NO: 76162 - DNA, 33 bp, Homo sapien
actttctaagaaatccggagcgaggaattagta

SEQ ID NO: 76163 - DNA, 33 bp, Homo sapien
ctaggagtcagtcaacaatcagtgctgttattg

SEQ ID NO: 76164 - DNA, 33 bp, Homo sapien
ctaggagtcagtcaacgatcagtgctgttattg

SEQ ID NO: 76165 - DNA, 33 bp, Homo sapien
aactgtgtaataaatacgtgacgttttaagcca

SEQ ID NO: 76166 - DNA, 33 bp, Homo sapien
aactgtgtaataaatatgtgacgttttaagcca

SEQ ID NO: 76167 - DNA, 33 bp, Homo sapien
attcatgtcagatttacgtttcgtagatttttt

SEQ ID NO: 76168 - DNA, 33 bp, Homo sapien
attcatgtcagatttatgtttcgtagatttttt

SEQ ID NO: 76169 - DNA, 33 bp, Homo sapien
caagttctcaacagtacaaacagaaggttccaa

SEQ ID NO: 76170 - DNA, 33 bp, Homo sapien
caagttctcaacagtagaaacagaaggttccaa

SEQ ID NO: 76171 - DNA, 33 bp, Homo sapien
cttgtcagaatttccaatcatcatgtagttcag

SEQ ID NO: 76172 - DNA, 33 bp, Homo sapien
cttgtcagaatttccagtcatcatgtagttcag

SEQ ID NO: 76173 - DNA, 33 bp, Homo sapien
aagtgctgacctcagaccaacaaatgcaaatgc

SEQ ID NO: 76174 - DNA, 33 bp, Homo sapien
aagtgctgacctcagatcaacaaatgcaaatgc

SEQ ID NO: 76175 - DNA, 33 bp, Homo sapien
atgaaaggataatgtacagggcctggaagtaca

SEQ ID NO: 76176 - DNA, 33 bp, Homo sapien
atgaaaggataatgtatagggcctggaagtaca

SEQ ID NO: 76177 - DNA, 33 bp, Homo sapien
catgtagcaggtgggaaatgtttgtatttgatg

SEQ ID NO: 76178 - DNA, 33 bp, Homo sapien
catgtagcaggtgggatatgtttgtatttgatg

SEQ ID NO: 76179 - DNA, 33 bp, Homo sapien
ctttatcttgttttaaatgattgcttataccct

SEQ ID NO: 76180 - DNA, 33 bp, Homo sapien
ctttatcttgttttaagtgattgcttataccct

SEQ ID NO: 76181 - DNA, 33 bp, Homo sapien
ggatgtggggtcaagcagaaaaggtgaggaaga

SEQ ID NO: 76182 - DNA, 33 bp, Homo sapien
ggatgtggggtcaagccgaaaaggtgaggaaga

SEQ ID NO: 76183 - DNA, 33 bp, Homo sapien
cctggaggaaagaagacagttactggtaatgtt

SEQ ID NO: 76184 - DNA, 33 bp, Homo sapien
cctggaggaaagaagagagttactggtaatgtt

SEQ ID NO: 76185 - DNA, 33 bp, Homo sapien
agatccaagtggagacaaacttttcctttctct

SEQ ID NO: 76186 - DNA, 33 bp, Homo sapien
agatccaagtggagaccaacttttcctttctct

SEQ ID NO: 76187 - DNA, 33 bp, Homo sapien
agaaatgctactctgaactttgtcaccttcgaa

SEQ ID NO: 76188 - DNA, 33 bp, Homo sapien
agaaatgctactctgagctttgtcaccttcgaa

SEQ ID NO: 76189 - DNA, 33 bp, Homo sapien
aacagctggaagcttaagatgagaaatgctact

SEQ ID NO: 76190 - DNA, 33 bp, Homo sapien
aacagctggaagcttaggatgagaaatgctact

SEQ ID NO: 76191 - DNA, 33 bp, Homo sapien
acttagcctcagtgacagtagggtttctctcct

SEQ ID NO: 76192 - DNA, 33 bp, Homo sapien
acttagcctcagtgacggtagggtttctctcct

SEQ ID NO: 76193 - DNA, 33 bp, Homo sapien
gcgaagggtaggtggcaaagaagagaaaagacc

SEQ ID NO: 76194 - DNA, 33 bp, Homo sapien
gcgaagggtaggtggcgaagaagagaaaagacc

SEQ ID NO: 76195 - DNA, 33 bp, Homo sapien
tgccgcaggataaaacacagactctaggcaggt

SEQ ID NO: 76196 - DNA, 33 bp, Homo sapien
tgccgcaggataaaacgcagactctaggcaggt

SEQ ID NO: 76197 - DNA, 33 bp, Homo sapien
gtccttgtggtaattccccccatatttctcaac

SEQ ID NO: 76198 - DNA, 33 bp, Homo sapien
gtccttgtggtaattctccccatatttctcaac

SEQ ID NO: 76199 - DNA, 33 bp, Homo sapien
ggaagatcacaatttgaaatcttaatacgaggt

SEQ ID NO: 76200 - DNA, 33 bp, Homo sapien
ggaagatcacaatttggaatcttaatacgaggt

SEQ ID NO: 76201 - DNA, 33 bp, Homo sapien
ctctgttgctaaagccagcatgtacctgaaatg

SEQ ID NO: 76202 - DNA, 33 bp, Homo sapien
ctctgttgctaaagccggcatgtacctgaaatg

SEQ ID NO: 76203 - DNA, 33 bp, Homo sapien
actattccaggatatacgttacaccatagagct

SEQ ID NO: 76204 - DNA, 33 bp, Homo sapien
actattccaggatatatgttacaccatagagct

SEQ ID NO: 76205 - DNA, 33 bp, Homo sapien
tgctatacttgccttagcgctctctttttcttt

SEQ ID NO: 76206 - DNA, 33 bp, Homo sapien
tgctatacttgccttatcgctctctttttcttt

SEQ ID NO: 76207 - DNA, 33 bp, Homo sapien
ctggctctgtcaaatacgagcctcccagggtct

SEQ ID NO: 76208 - DNA, 33 bp, Homo sapien
ctggctctgtcaaatatgagcctcccagggtct

SEQ ID NO: 76209 - DNA, 33 bp, Homo sapien
gacacctaattggttacgatttcaccccccctc

SEQ ID NO: 76210 - DNA, 33 bp, Homo sapien
gacacctaattggttatgatttcaccccccctc

SEQ ID NO: 76211 - DNA, 33 bp, Homo sapien
gagataatggaggacacgtttacaagtaagaag

SEQ ID NO: 76212 - DNA, 33 bp, Homo sapien
gagataatggaggacatgtttacaagtaagaag

SEQ ID NO: 76213 - DNA, 33 bp, Homo sapien
gaattcatcaaagcagaaggaaagctcatctcc

SEQ ID NO: 76214 - DNA, 33 bp, Homo sapien
gaattcatcaaagcaggaggaaagctcatctcc

SEQ ID NO: 76215 - DNA, 33 bp, Homo sapien
agtgctctctgttctagattggatcctggccca

SEQ ID NO: 76216 - DNA, 33 bp, Homo sapien
agtgctctctgttctatattggatcctggccca

SEQ ID NO: 76217 - DNA, 33 bp, Homo sapien
cctgattaagggggacaaaagagctgcgaaacc

SEQ ID NO: 76218 - DNA, 33 bp, Homo sapien
cctgattaagggggacgaaagagctgcgaaacc

SEQ ID NO: 76219 - DNA, 33 bp, Homo sapien
ggacaggctttctaacaatgaggggctggggat

SEQ ID NO: 76220 - DNA, 33 bp, Homo sapien
ggacaggctttctaacgatgaggggctggggat

SEQ ID NO: 76221 - DNA, 33 bp, Homo sapien
tggctgtcttgctgagcagttattttctgtgga

SEQ ID NO: 76222 - DNA, 33 bp, Homo sapien
tggctgtcttgctgagtagttattttctgtgga

SEQ ID NO: 76223 - DNA, 33 bp, Homo sapien
caaatgtgagctcgacaaaggctaggactgaga

SEQ ID NO: 76224 - DNA, 33 bp, Homo sapien
caaatgtgagctcgacgaaggctaggactgaga

SEQ ID NO: 76225 - DNA, 33 bp, Homo sapien
aaaagagtgagctaagaaaatatacttggggac

SEQ ID NO: 76226 - DNA, 33 bp, Homo sapien
aaaagagtgagctaaggaaatatacttggggac

SEQ ID NO: 76227 - DNA, 33 bp, Homo sapien
attttatgcactagaaactagtaagacacattt

SEQ ID NO: 76228 - DNA, 33 bp, Homo sapien
attttatgcactagaagctagtaagacacattt

SEQ ID NO: 76229 - DNA, 33 bp, Homo sapien
attggtggagctcttcactgtgctgggccagtc

SEQ ID NO: 76230 - DNA, 33 bp, Homo sapien
attggtggagctcttcgctgtgctgggccagtc

SEQ ID NO: 76231 - DNA, 33 bp, Homo sapien
cacccttgaacttccaatctatctccctctctg

SEQ ID NO: 76232 - DNA, 33 bp, Homo sapien
cacccttgaacttccactctatctccctctctg

SEQ ID NO: 76233 - DNA, 33 bp, Homo sapien
gcagttaggacccagaaggaggagaaagcatcg

SEQ ID NO: 76234 - DNA, 33 bp, Homo sapien
gcagttaggacccagacggaggagaaagcatcg

SEQ ID NO: 76235 - DNA, 33 bp, Homo sapien
ctactttctgtgtccacagtgttgcctgttaca

SEQ ID NO: 76236 - DNA, 33 bp, Homo sapien
ctactttctgtgtccatagtgttgcctgttaca

SEQ ID NO: 76237 - DNA, 33 bp, Homo sapien
atacccttcagctgtcactcccctactgccctc

SEQ ID NO: 76238 - DNA, 33 bp, Homo sapien
atacccttcagctgtcgctcccctactgccctc

SEQ ID NO: 76239 - DNA, 33 bp, Homo sapien
gacaggaggatccaagccaacgtgcctcaggca

SEQ ID NO: 76240 - DNA, 33 bp, Homo sapien
gacaggaggatccaagtcaacgtgcctcaggca

SEQ ID NO: 76241 - DNA, 33 bp, Homo sapien
ataccttctccttgacagggtacagcagctcca

SEQ ID NO: 76242 - DNA, 33 bp, Homo sapien
ataccttctccttgacggggtacagcagctcca

SEQ ID NO: 76243 - DNA, 33 bp, Homo sapien
ctcacctcttcagggccgagtgcatgagtctgc

SEQ ID NO: 76244 - DNA, 33 bp, Homo sapien
ctcacctcttcagggctgagtgcatgagtctgc

SEQ ID NO: 76245 - DNA, 33 bp, Homo sapien
tgggatgctcaacataactgtgtgagtctcatt

SEQ ID NO: 76246 - DNA, 33 bp, Homo sapien
tgggatgctcaacatatctgtgtgagtctcatt

SEQ ID NO: 76247 - DNA, 33 bp, Homo sapien
actgatctctgtgaacaaacaccctccaaacac

SEQ ID NO: 76248 - DNA, 33 bp, Homo sapien
actgatctctgtgaacgaacaccctccaaacac

SEQ ID NO: 76249 - DNA, 33 bp, Homo sapien
aagaaaacaccccaagaaggagacgtgcccacg

SEQ ID NO: 76250 - DNA, 33 bp, Homo sapien
aagaaaacaccccaagcaggagacgtgcccacg

SEQ ID NO: 76251 - DNA, 33 bp, Homo sapien
tgagcccctgctaagccgatgaggtaggcagtg

SEQ ID NO: 76252 - DNA, 33 bp, Homo sapien
tgagcccctgctaagctgatgaggtaggcagtg

SEQ ID NO: 76253 - DNA, 33 bp, Homo sapien
catgcaaacctgcctaggagagcgtccattgac

SEQ ID NO: 76254 - DNA, 33 bp, Homo sapien
catgcaaacctgcctatgagagcgtccattgac

SEQ ID NO: 76255 - DNA, 33 bp, Homo sapien
tagtccgtactctccagtcacatgtctcaaccc

SEQ ID NO: 76256 - DNA, 33 bp, Homo sapien
tagtccgtactctccattcacatgtctcaaccc

SEQ ID NO: 76257 - DNA, 33 bp, Homo sapien
aaggccagaatactcacatagctatgcctgtga

SEQ ID NO: 76258 - DNA, 33 bp, Homo sapien
aaggccagaatactcatatagctatgcctgtga

SEQ ID NO: 76259 - DNA, 33 bp, Homo sapien
agaaggttgagaaagtcacttggctgtctgtgg

SEQ ID NO: 76260 - DNA, 33 bp, Homo sapien
agaaggttgagaaagtgacttggctgtctgtgg

SEQ ID NO: 76261 - DNA, 33 bp, Homo sapien
aaactttgtcaaaccaccctgggaagcctattt

SEQ ID NO: 76262 - DNA, 33 bp, Homo sapien
aaactttgtcaaaccatcctgggaagcctattt

SEQ ID NO: 76263 - DNA, 33 bp, Homo sapien
actatcagcctgagacagaggtaaggtcaggtg

SEQ ID NO: 76264 - DNA, 33 bp, Homo sapien
actatcagcctgagacggaggtaaggtcaggtg

SEQ ID NO: 76265 - DNA, 33 bp, Homo sapien
ctgtgtaggtttatcaaatttaacaactgtacc

SEQ ID NO: 76266 - DNA, 33 bp, Homo sapien
ctgtgtaggtttatcagatttaacaactgtacc

SEQ ID NO: 76267 - DNA, 33 bp, Homo sapien
ctggcaactccagttacgagactcagtgagcag

SEQ ID NO: 76268 - DNA, 33 bp, Homo sapien
ctggcaactccagttatgagactcagtgagcag

SEQ ID NO: 76269 - DNA, 33 bp, Homo sapien
tgtataactttctccacagacaagcataaggaa

SEQ ID NO: 76270 - DNA, 33 bp, Homo sapien
tgtataactttctccatagacaagcataaggaa

SEQ ID NO: 76271 - DNA, 33 bp, Homo sapien
ttaatatttttggaataagagttgtgtgagaaa

SEQ ID NO: 76272 - DNA, 33 bp, Homo sapien
ttaatatttttggaatgagagttgtgtgagaaa

SEQ ID NO: 76273 - DNA, 33 bp, Homo sapien
tccagcttttagaacacagtgagagctggatca

SEQ ID NO: 76274 - DNA, 33 bp, Homo sapien
tccagcttttagaacatagtgagagctggatca

SEQ ID NO: 76275 - DNA, 33 bp, Homo sapien
ttgggctagtcagacaacagttttatgctcagt

SEQ ID NO: 76276 - DNA, 33 bp, Homo sapien
ttgggctagtcagacagcagttttatgctcagt

SEQ ID NO: 76277 - DNA, 33 bp, Homo sapien
acacgatccgagtcttcaacattttccatctag

SEQ ID NO: 76278 - DNA, 33 bp, Homo sapien
acacgatccgagtctttaacattttccatctag

SEQ ID NO: 76279 - DNA, 33 bp, Homo sapien
ttctctagatctagaactgatggaatatctaca

SEQ ID NO: 76280 - DNA, 33 bp, Homo sapien
ttctctagatctagaagtgatggaatatctaca

SEQ ID NO: 76281 - DNA, 33 bp, Homo sapien
gaccgctaggttcaaccaagacctccttggctt

SEQ ID NO: 76282 - DNA, 33 bp, Homo sapien
gaccgctaggttcaacgaagacctccttggctt

SEQ ID NO: 76283 - DNA, 33 bp, Homo sapien
aaaagagaaatctgtgaattgtccaaatagaag

SEQ ID NO: 76284 - DNA, 33 bp, Homo sapien
aaaagagaaatctgtggattgtccaaatagaag

SEQ ID NO: 76285 - DNA, 33 bp, Homo sapien
cagctgggaccctccactctccctagaactggg

SEQ ID NO: 76286 - DNA, 33 bp, Homo sapien
cagctgggaccctccattctccctagaactggg

SEQ ID NO: 76287 - DNA, 33 bp, Homo sapien
ctcagtgtttagttaacaggatgatagtggaca

SEQ ID NO: 76288 - DNA, 33 bp, Homo sapien
ctcagtgtttagttaagaggatgatagtggaca

SEQ ID NO: 76289 - DNA, 33 bp, Homo sapien
aacaatgccaccttccactgattaaggctgttt

SEQ ID NO: 76290 - DNA, 33 bp, Homo sapien
aacaatgccaccttccgctgattaaggctgttt

SEQ ID NO: 76291 - DNA, 33 bp, Homo sapien
cttaagatgtgttctacaggggcactgcctaat

SEQ ID NO: 76292 - DNA, 33 bp, Homo sapien
cttaagatgtgttctagaggggcactgcctaat

SEQ ID NO: 76293 - DNA, 33 bp, Homo sapien
cagtttaatctccacaataagtcattaaaatga

SEQ ID NO: 76294 - DNA, 33 bp, Homo sapien
cagtttaatctccacagtaagtcattaaaatga

SEQ ID NO: 76295 - DNA, 33 bp, Homo sapien
aaatcaggttaagtaaataaaagaattcataag

SEQ ID NO: 76296 - DNA, 33 bp, Homo sapien
aaatcaggttaagtaagtaaaagaattcataag

SEQ ID NO: 76297 - DNA, 33 bp, Homo sapien
tagtgatctccctgaaaccaaatataattatgt

SEQ ID NO: 76298 - DNA, 33 bp, Homo sapien
tagtgatctccctgaagccaaatataattatgt

SEQ ID NO: 76299 - DNA, 33 bp, Homo sapien
gcaatgtcaggaaacaccacacatttccctaac

SEQ ID NO: 76300 - DNA, 33 bp, Homo sapien
gcaatgtcaggaaacagcacacatttccctaac

SEQ ID NO: 76301 - DNA, 33 bp, Homo sapien
ctgtcataacaaacaaaggaaggataaatatca

SEQ ID NO: 76302 - DNA, 33 bp, Homo sapien
ctgtcataacaaacaagggaaggataaatatca

SEQ ID NO: 76303 - DNA, 33 bp, Homo sapien
tggattaagggatactcagctggtgaagcatta

SEQ ID NO: 76304 - DNA, 33 bp, Homo sapien
tggattaagggatactgagctggtgaagcatta

SEQ ID NO: 76305 - DNA, 33 bp, Homo sapien
gtaggaaaataaaatgacatggccactctagca

SEQ ID NO: 76306 - DNA, 33 bp, Homo sapien
gtaggaaaataaaatggcatggccactctagca

SEQ ID NO: 76307 - DNA, 33 bp, Homo sapien
agtttaagcagggttcaatgaagagcccaccca

SEQ ID NO: 76308 - DNA, 33 bp, Homo sapien
agtttaagcagggttcgatgaagagcccaccca

SEQ ID NO: 76309 - DNA, 33 bp, Homo sapien
tagaatgatgacactaccaacagagaagtttcc

SEQ ID NO: 76310 - DNA, 33 bp, Homo sapien
tagaatgatgacactatcaacagagaagtttcc

SEQ ID NO: 76311 - DNA, 33 bp, Homo sapien
atttattaatagtgcaaaagtataaacaaatag

SEQ ID NO: 76312 - DNA, 33 bp, Homo sapien
atttattaatagtgcagaagtataaacaaatag

SEQ ID NO: 76313 - DNA, 33 bp, Homo sapien
ataaatagggctttgaggaatttcttgctaaga

SEQ ID NO: 76314 - DNA, 33 bp, Homo sapien
ataaatagggctttgatgaatttcttgctaaga

SEQ ID NO: 76315 - DNA, 33 bp, Homo sapien
aggtcctgaagaaacacataggtagagagagct

SEQ ID NO: 76316 - DNA, 33 bp, Homo sapien
aggtcctgaagaaacatataggtagagagagct

SEQ ID NO: 76317 - DNA, 33 bp, Homo sapien
ctttccttctctctcaataagtctcacgtctca

SEQ ID NO: 76318 - DNA, 33 bp, Homo sapien
ctttccttctctctcactaagtctcacgtctca

SEQ ID NO: 76319 - DNA, 33 bp, Homo sapien
ggaggagtccagaggaaagtaacagtggatgga

SEQ ID NO: 76320 - DNA, 33 bp, Homo sapien
ggaggagtccagaggagagtaacagtggatgga

SEQ ID NO: 76321 - DNA, 33 bp, Homo sapien
acactggatgaaatctaaactactcactgactc

SEQ ID NO: 76322 - DNA, 33 bp, Homo sapien
acactggatgaaatctgaactactcactgactc

SEQ ID NO: 76323 - DNA, 33 bp, Homo sapien
gtctggagaatagaccaaaggcaataagggtag

SEQ ID NO: 76324 - DNA, 33 bp, Homo sapien
gtctggagaatagaccgaaggcaataagggtag

SEQ ID NO: 76325 - DNA, 33 bp, Homo sapien
actgaagttcctgaaaccttccttggaaaaatc

SEQ ID NO: 76326 - DNA, 33 bp, Homo sapien
actgaagttcctgaaatcttccttggaaaaatc

SEQ ID NO: 76327 - DNA, 33 bp, Homo sapien
ctctgtaattcctaccgctgggctttttatgta

SEQ ID NO: 76328 - DNA, 33 bp, Homo sapien
ctctgtaattcctacctctgggctttttatgta

SEQ ID NO: 76329 - DNA, 33 bp, Homo sapien
ataggtacaacagggaaagcagaattcttgggc

SEQ ID NO: 76330 - DNA, 33 bp, Homo sapien
ataggtacaacagggagagcagaattcttgggc

SEQ ID NO: 76331 - DNA, 33 bp, Homo sapien
tcatagcaacaggacactaataatacagtgaac

SEQ ID NO: 76332 - DNA, 33 bp, Homo sapien
tcatagcaacaggacattaataatacagtgaac

SEQ ID NO: 76333 - DNA, 33 bp, Homo sapien
ttaattgtgttattaacctatattagcagcaaa

SEQ ID NO: 76334 - DNA, 33 bp, Homo sapien
ttaattgtgttattaatctatattagcagcaaa

SEQ ID NO: 76335 - DNA, 33 bp, Homo sapien
taccctttgccaacataatcctcattaaattca

SEQ ID NO: 76336 - DNA, 33 bp, Homo sapien
taccctttgccaacattatcctcattaaattca

SEQ ID NO: 76337 - DNA, 33 bp, Homo sapien
actaagactgattcaaaaatttaaggacattta

SEQ ID NO: 76338 - DNA, 33 bp, Homo sapien
actaagactgattcaagaatttaaggacattta

SEQ ID NO: 76339 - DNA, 33 bp, Homo sapien
tctgaaaactcatcaaactacacacttagtatt

SEQ ID NO: 76340 - DNA, 33 bp, Homo sapien
tctgaaaactcatcaagctacacacttagtatt

SEQ ID NO: 76341 - DNA, 33 bp, Homo sapien
tacttggctcactccacattccataattcttct

SEQ ID NO: 76342 - DNA, 33 bp, Homo sapien
tacttggctcactccatattccataattcttct

SEQ ID NO: 76343 - DNA, 33 bp, Homo sapien
aagacccgaagtcttacgagattgtccaaaaca

SEQ ID NO: 76344 - DNA, 33 bp, Homo sapien
aagacccgaagtcttatgagattgtccaaaaca

SEQ ID NO: 76345 - DNA, 33 bp, Homo sapien
ttgtaggctttcctacaatacagcttctaataa

SEQ ID NO: 76346 - DNA, 33 bp, Homo sapien
ttgtaggctttcctacgatacagcttctaataa

SEQ ID NO: 76347 - DNA, 33 bp, Homo sapien
ggaggtaagctgtatacggaccttgatcttcca

SEQ ID NO: 76348 - DNA, 33 bp, Homo sapien
ggaggtaagctgtatatggaccttgatcttcca

SEQ ID NO: 76349 - DNA, 33 bp, Homo sapien
acctggtgcgatatgacggacagtgagggcctg

SEQ ID NO: 76350 - DNA, 33 bp, Homo sapien
acctggtgcgatatgatggacagtgagggcctg

SEQ ID NO: 76351 - DNA, 33 bp, Homo sapien
gaagatgagtctctcactgactggggaagctct

SEQ ID NO: 76352 - DNA, 33 bp, Homo sapien
gaagatgagtctctcagtgactggggaagctct

SEQ ID NO: 76353 - DNA, 33 bp, Homo sapien
gttgttgatgtagttggattatcatatagtaat

SEQ ID NO: 76354 - DNA, 33 bp, Homo sapien
gttgttgatgtagttgtattatcatatagtaat

SEQ ID NO: 76355 - DNA, 33 bp, Homo sapien
gacatcagtatttgcaaagccaagttattaaag

SEQ ID NO: 76356 - DNA, 33 bp, Homo sapien
gacatcagtatttgcatagccaagttattaaag

SEQ ID NO: 76357 - DNA, 33 bp, Homo sapien
cttttccttttcaagaccctgctctagtttcag

SEQ ID NO: 76358 - DNA, 33 bp, Homo sapien
cttttccttttcaagatcctgctctagtttcag

SEQ ID NO: 76359 - DNA, 33 bp, Homo sapien
atactaggggttatgaaaagacagcagaattga

SEQ ID NO: 76360 - DNA, 33 bp, Homo sapien
atactaggggttatgagaagacagcagaattga

SEQ ID NO: 76361 - DNA, 33 bp, Homo sapien
cgtagatgacttcaacagaccgagagaaagaag

SEQ ID NO: 76362 - DNA, 33 bp, Homo sapien
cgtagatgacttcaacggaccgagagaaagaag

SEQ ID NO: 76363 - DNA, 33 bp, Homo sapien
ctaattttttttaccactgaggggcaggagttg

SEQ ID NO: 76364 - DNA, 33 bp, Homo sapien
ctaattttttttaccattgaggggcaggagttg

SEQ ID NO: 76365 - DNA, 33 bp, Homo sapien
gctcttccttagggtacgttcatcagcttttca

SEQ ID NO: 76366 - DNA, 33 bp, Homo sapien
gctcttccttagggtatgttcatcagcttttca

SEQ ID NO: 76367 - DNA, 33 bp, Homo sapien
tgcatagcctggcttacagggtatgagccttcc

SEQ ID NO: 76368 - DNA, 33 bp, Homo sapien
tgcatagcctggcttatagggtatgagccttcc

SEQ ID NO: 76369 - DNA, 33 bp, Homo sapien
gttgtcaagcatttccaccttggcctggaggag

SEQ ID NO: 76370 - DNA, 33 bp, Homo sapien
gttgtcaagcatttccgccttggcctggaggag

SEQ ID NO: 76371 - DNA, 33 bp, Homo sapien
cagcacccacctgctaaaagagaaagcctggcc

SEQ ID NO: 76372 - DNA, 33 bp, Homo sapien
cagcacccacctgctagaagagaaagcctggcc

SEQ ID NO: 76373 - DNA, 33 bp, Homo sapien
ttagagtaaaagaaaaatgctgtgacgcttgat

SEQ ID NO: 76374 - DNA, 33 bp, Homo sapien
ttagagtaaaagaaaattgctgtgacgcttgat

SEQ ID NO: 76375 - DNA, 33 bp, Homo sapien
gagattttaattctaaatctttgaggcctagca

SEQ ID NO: 76376 - DNA, 33 bp, Homo sapien
gagattttaattctaagtctttgaggcctagca

SEQ ID NO: 76377 - DNA, 33 bp, Homo sapien
tactaccaaatgttgaaaggagaataatagtcc

SEQ ID NO: 76378 - DNA, 33 bp, Homo sapien
tactaccaaatgttgagaggagaataatagtcc

SEQ ID NO: 76379 - DNA, 33 bp, Homo sapien
gatgatgatgttaagacccagtttttcagcgct

SEQ ID NO: 76380 - DNA, 33 bp, Homo sapien
gatgatgatgttaagatccagtttttcagcgct

SEQ ID NO: 76381 - DNA, 33 bp, Homo sapien
gtgattgtgctggccactgctttgagggactat

SEQ ID NO: 76382 - DNA, 33 bp, Homo sapien
gtgattgtgctggccagtgctttgagggactat

SEQ ID NO: 76383 - DNA, 33 bp, Homo sapien
tgtagaagaacaagcaactcttactctgggagg

SEQ ID NO: 76384 - DNA, 33 bp, Homo sapien
tgtagaagaacaagcagctcttactctgggagg

SEQ ID NO: 76385 - DNA, 33 bp, Homo sapien
gtcacagattgcttccaacacacacagaccacc

SEQ ID NO: 76386 - DNA, 33 bp, Homo sapien
gtcacagattgcttccgacacacacagaccacc

SEQ ID NO: 76387 - DNA, 33 bp, Homo sapien
gcgatactaggagatacgtgaaccctggatcca

SEQ ID NO: 76388 - DNA, 33 bp, Homo sapien
gcgatactaggagatatgtgaaccctggatcca

SEQ ID NO: 76389 - DNA, 33 bp, Homo sapien
tcttggaccgagtagccgatggcatggtgttcg

SEQ ID NO: 76390 - DNA, 33 bp, Homo sapien
tcttggaccgagtagctgatggcatggtgttcg

SEQ ID NO: 76391 - DNA, 33 bp, Homo sapien; identical to SEQ ID NO: 76389

SEQ ID NO: 76392 - DNA, 33 bp, Homo sapien; identical to SEQ ID NO: 76390

SEQ ID NO: 76393 - DNA, 33 bp, Homo sapien
agccagtggagaaacacgtcagagggcaaatgc

SEQ ID NO: 76394 - DNA, 33 bp, Homo sapien
agccagtggagaaacatgtcagagggcaaatgc

SEQ ID NO: 76395 - DNA, 33 bp, Homo sapien
ctctgtgttttagctcaaaaggcctagctccct

SEQ ID NO: 76396 - DNA, 33 bp, Homo sapien
ctctgtgttttagctcgaaaggcctagctccct

SEQ ID NO: 76397 - DNA, 33 bp, Homo sapien
agctgatgaactccaacacctatatcacatgct

SEQ ID NO: 76398 - DNA, 33 bp, Homo sapien
agctgatgaactccaatacctatatcacatgct

SEQ ID NO: 76399 - DNA, 33 bp, Homo sapien
tctttatcctctgtagcaaggaggctgaagccc

SEQ ID NO: 76400 - DNA, 33 bp, Homo sapien
tctttatcctctgtagtaaggaggctgaagccc

SEQ ID NO: 76401 - DNA, 33 bp, Homo sapien
tcatggactgttaagacgtcaattatctgcaat

SEQ ID NO: 76402 - DNA, 33 bp, Homo sapien
tcatggactgttaagatgtcaattatctgcaat

SEQ ID NO: 76403 - DNA, 33 bp, Homo sapien
tactggcaaaaggataagtagatcagtgggaca

SEQ ID NO: 76404 - DNA, 33 bp, Homo sapien
tactggcaaaaggatacgtagatcagtgggaca

SEQ ID NO: 76405 - DNA, 33 bp, Homo sapien
ggctacattccaagcacctggaaaaacaaaata

SEQ ID NO: 76406 - DNA, 33 bp, Homo sapien
ggctacattccaagcatctggaaaaacaaaata

SEQ ID NO: 76407 - DNA, 33 bp, Homo sapien
atgaggcagctcaccactaaatgtagcagtgtg

SEQ ID NO: 76408 - DNA, 33 bp, Homo sapien
atgaggcagctcaccattaaatgtagcagtgtg

SEQ ID NO: 76409 - DNA, 33 bp, Homo sapien
gcagggcttcctgatacataggtccactgcaga

SEQ ID NO: 76410 - DNA, 33 bp, Homo sapien
gcagggcttcctgatatataggtccactgcaga

SEQ ID NO: 76411 - DNA, 33 bp, Homo sapien
atatcagtttcggttacatgtttatttgggagt

SEQ ID NO: 76412 - DNA, 33 bp, Homo sapien
atatcagtttcggttagatgtttatttgggagt

SEQ ID NO: 76413 - DNA, 33 bp, Homo sapien
ttccatggcccttgctcacactataggcagacc

SEQ ID NO: 76414 - DNA, 33 bp, Homo sapien
ttccatggcccttgcttacactataggcagacc

SEQ ID NO: 76415 - DNA, 33 bp, Homo sapien
tggtgcccattaacagacagcttctttggggcc

SEQ ID NO: 76416 - DNA, 33 bp, Homo sapien
tggtgcccattaacaggcagcttctttggggcc

SEQ ID NO: 76417 - DNA, 33 bp, Homo sapien
cacacttggcccccaaacactgctatttcccat

SEQ ID NO: 76418 - DNA, 33 bp, Homo sapien
cacacttggcccccaagcactgctatttcccat

SEQ ID NO: 76419 - DNA, 33 bp, Homo sapien
ctttcagagcttacaaagtgcagaggaaaaaac

SEQ ID NO: 76420 - DNA, 33 bp, Homo sapien
ctttcagagcttacaacgtgcagaggaaaaaac

SEQ ID NO: 76421 - DNA, 33 bp, Homo sapien
gtttcatggttacaaaaattagacgatcatggt

SEQ ID NO: 76422 - DNA, 33 bp, Homo sapien
gtttcatggttacaaacattagacgatcatggt

SEQ ID NO: 76423 - DNA, 33 bp, Homo sapien
ttgctttaaattcaccaagaggcttaaattaat

SEQ ID NO: 76424 - DNA, 33 bp, Homo sapien
ttgctttaaattcaccgagaggcttaaattaat

SEQ ID NO: 76425 - DNA, 33 bp, Homo sapien
tgggccaggatttgacaaatgatgccagtactg

SEQ ID NO: 76426 - DNA, 33 bp, Homo sapien
tgggccaggatttgaccaatgatgccagtactg

SEQ ID NO: 76427 - DNA, 33 bp, Homo sapien
ctctgtaagtgttgcactaatttataccaccac

SEQ ID NO: 76428 - DNA, 33 bp, Homo sapien
ctctgtaagtgttgcattaatttataccaccac

SEQ ID NO: 76429 - DNA, 33 bp, Homo sapien
catggcagttggcaagaataagcaccttaagaa

SEQ ID NO: 76430 - DNA, 33 bp, Homo sapien
catggcagttggcaaggataagcaccttaagaa

SEQ ID NO: 76431 - DNA, 33 bp, Homo sapien
atagagattacaagacagacagaagaggctctt

SEQ ID NO: 76432 - DNA, 33 bp, Homo sapien
atagagattacaagacggacagaagaggctctt

SEQ ID NO: 76433 - DNA, 33 bp, Homo sapien
ggtaagaagactgtgcaagagacatttggacat

SEQ ID NO: 76434 - DNA, 33 bp, Homo sapien
ggtaagaagactgtgcgagagacatttggacat

SEQ ID NO: 76435 - DNA, 33 bp, Homo sapien
gctaagctaattcgaacgggtccaggccatagg

SEQ ID NO: 76436 - DNA, 33 bp, Homo sapien
gctaagctaattcgaatgggtccaggccatagg

SEQ ID NO: 76437 - DNA, 33 bp, Homo sapien
tgtgtgaacatgagaaaatatggaaatagcatg

SEQ ID NO: 76438 - DNA, 33 bp, Homo sapien
tgtgtgaacatgagaacatatggaaatagcatg

SEQ ID NO: 76439 - DNA, 33 bp, Homo sapien
agagctgtctgcatcccaaggaagggtatctca

SEQ ID NO: 76440 - DNA, 33 bp, Homo sapien
agagctgtctgcatcctaaggaagggtatctca

SEQ ID NO: 76441 - DNA, 33 bp, Homo sapien
aggggtcctgctgttcacacccttgctatcatg

SEQ ID NO: 76442 - DNA, 33 bp, Homo sapien
aggggtcctgctgttcgcacccttgctatcatg

SEQ ID NO: 76443 - DNA, 33 bp, Homo sapien
ctttgttgccgaaggaagtttctgaatagcaga

SEQ ID NO: 76444 - DNA, 33 bp, Homo sapien
ctttgttgccgaaggacgtttctgaatagcaga

SEQ ID NO: 76445 - DNA, 33 bp, Homo sapien
agacttcatgttaaacaaggtcagctctgggat

SEQ ID NO: 76446 - DNA, 33 bp, Homo sapien
agacttcatgttaaacgaggtcagctctgggat

SEQ ID NO: 76447 - DNA, 33 bp, Homo sapien
cagatcagtggttacccgaggatgggaacacag

SEQ ID NO: 76448 - DNA, 33 bp, Homo sapien
cagatcagtggttacctgaggatgggaacacag

SEQ ID NO: 76449 - DNA, 33 bp, Homo sapien
tgtctcaagtcctacaaccaagctgaataaatg

SEQ ID NO: 76450 - DNA, 33 bp, Homo sapien
tgtctcaagtcctacagccaagctgaataaatg

SEQ ID NO: 76451 - DNA, 33 bp, Homo sapien
cactttacaggcataacctcatggagtcctcac

SEQ ID NO: 76452 - DNA, 33 bp, Homo sapien
cactttacaggcataatctcatggagtcctcac

SEQ ID NO: 76453 - DNA, 33 bp, Homo sapien
tccccttttcttcggacgaggagctacggctcc

SEQ ID NO: 76454 - DNA, 33 bp, Homo sapien
tccccttttcttcggatgaggagctacggctcc

SEQ ID NO: 76455 - DNA, 33 bp, Homo sapien
gacacagattgggaaacgaataccaccagctac

SEQ ID NO: 76456 - DNA, 33 bp, Homo sapien
gacacagattgggaaatgaataccaccagctac

SEQ ID NO: 76457 - DNA, 33 bp, Homo sapien
atgttgcaagaagctacgcaaacagattgttaa

SEQ ID NO: 76458 - DNA, 33 bp, Homo sapien
atgttgcaagaagctatgcaaacagattgttaa

SEQ ID NO: 76459 - DNA, 33 bp, Homo sapien
ggaactcaagtacacacaactggactgagtatt

SEQ ID NO: 76460 - DNA, 33 bp, Homo sapien
ggaactcaagtacacagaactggactgagtatt

SEQ ID NO: 76461 - DNA, 33 bp, Homo sapien
aacatgcgaggtggtccaacactatggttcacg

SEQ ID NO: 76462 - DNA, 33 bp, Homo sapien
aacatgcgaggtggtctaacactatggttcacg

SEQ ID NO: 76463 - DNA, 33 bp, Homo sapien
ttatccctgagctggcaagactcccaagccagg

SEQ ID NO: 76464 - DNA, 33 bp, Homo sapien
ttatccctgagctggcgagactcccaagccagg

SEQ ID NO: 76465 - DNA, 33 bp, Homo sapien
gaagtcgtggaacttacactaaaaggaatgcag

SEQ ID NO: 76466 - DNA, 33 bp, Homo sapien
gaagtcgtggaacttatactaaaaggaatgcag

SEQ ID NO: 76467 - DNA, 33 bp, Homo sapien
agtcagaagagagggacgaagggtagcagaaac

SEQ ID NO: 76468 - DNA, 33 bp, Homo sapien
agtcagaagagagggatgaagggtagcagaaac

SEQ ID NO: 76469 - DNA, 33 bp, Homo sapien
attcatctgataacaacgtaagtccagtgctac

SEQ ID NO: 76470 - DNA, 33 bp, Homo sapien
attcatctgataacaatgtaagtccagtgctac

SEQ ID NO: 76471 - DNA, 33 bp, Homo sapien; identical to SEQ ID NO: 76469

SEQ ID NO: 76472 - DNA, 33 bp, Homo sapien; identical to SEQ ID NO: 76470

SEQ ID NO: 76473 - DNA, 33 bp, Homo sapien
taatcgaaagaatgaacgggttattgaaaaaac

SEQ ID NO: 76474 - DNA, 33 bp, Homo sapien
taatcgaaagaatgaatgggttattgaaaaaac

SEQ ID NO: 76475 - DNA, 33 bp, Homo sapien
ggaaaggtctcatggagcttcagcacggcctgg

SEQ ID NO: 76476 - DNA, 33 bp, Homo sapien
ggaaaggtctcatggatcttcagcacggcctgg

SEQ ID NO: 76477 - DNA, 33 bp, Homo sapien
gccaacgtatggttccaagttcccaagagcaga

SEQ ID NO: 76478 - DNA, 33 bp, Homo sapien
gccaacgtatggttccgagttcccaagagcaga

SEQ ID NO: 76479 - DNA, 33 bp, Homo sapien
catcggctgcagggcaccgtccattccgctgac

SEQ ID NO: 76480 - DNA, 33 bp, Homo sapien
catcggctgcagggcatcgtccattccgctgac

SEQ ID NO: 76481 - DNA, 33 bp, Homo sapien
gcctcaattttcctcaacagtctatgacatcct

SEQ ID NO: 76482 - DNA, 33 bp, Homo sapien
gcctcaattttcctcagcagtctatgacatcct

SEQ ID NO: 76483 - DNA, 33 bp, Homo sapien
agtagccatgaaaagcaaccctgggatgaaatt

SEQ ID NO: 76484 - DNA, 33 bp, Homo sapien
agtagccatgaaaagccaccctgggatgaaatt

SEQ ID NO: 76485 - DNA, 33 bp, Homo sapien
gtggccaaaccgggtaccagtggacaggggagg

SEQ ID NO: 76486 - DNA, 33 bp, Homo sapien
gtggccaaaccgggtatcagtggacaggggagg

SEQ ID NO: 76487 - DNA, 33 bp, Homo sapien
tcctaccacgtcgaagcctctgacccacaattt

SEQ ID NO: 76488 - DNA, 33 bp, Homo sapien
tcctaccacgtcgaaggctctgacccacaattt

SEQ ID NO: 76489 - DNA, 33 bp, Homo sapien
aaaccaatgcaacatccccaaccagggccacaa

SEQ ID NO: 76490 - DNA, 33 bp, Homo sapien
aaaccaatgcaacatctccaaccagggccacaa

SEQ ID NO: 76491 - DNA, 33 bp, Homo sapien
atctgtcctagcaacaactctcctctgttccag

SEQ ID NO: 76492 - DNA, 33 bp, Homo sapien
atctgtcctagcaacatctctcctctgttccag

SEQ ID NO: 76493 - DNA, 33 bp, Homo sapien
cagagaatgagctatacaaagagatcgagggag

SEQ ID NO: 76494 - DNA, 33 bp, Homo sapien
cagagaatgagctatataaagagatcgagggag

SEQ ID NO: 76495 - DNA, 33 bp, Homo sapien
aacctcactactctagaagcacaaactctttct

SEQ ID NO: 76496 - DNA, 33 bp, Homo sapien
aacctcactactctaggagcacaaactctttct

SEQ ID NO: 76497 - DNA, 33 bp, Homo sapien
ttattctcctacttcgcacttctgagtgcctgg

SEQ ID NO: 76498 - DNA, 33 bp, Homo sapien
ttattctcctacttcggacttctgagtgcctgg

SEQ ID NO: 76499 - DNA, 33 bp, Homo sapien
aaagttgttaaatgaacgtagtaggtattagaa

SEQ ID NO: 76500 - DNA, 33 bp, Homo sapien
aaagttgttaaatgaatgtagtaggtattagaa

SEQ ID NO: 76501 - DNA, 33 bp, Homo sapien
actccggaaagttggacgaaaacaacaacaaac

SEQ ID NO: 76502 - DNA, 33 bp, Homo sapien
actccggaaagttggatgaaaacaacaacaaac

SEQ ID NO: 76503 - DNA, 33 bp, Homo sapien
tatgcgcactgtttccagaagaggaactgatgc

SEQ ID NO: 76504 - DNA, 33 bp, Homo sapien
tatgcgcactgtttccggaagaggaactgatgc

SEQ ID NO: 76505 - DNA, 33 bp, Homo sapien
gaggttaagaagaccaacaccaatgctgaagcc

SEQ ID NO: 76506 - DNA, 33 bp, Homo sapien
gaggttaagaagaccagcaccaatgctgaagcc

SEQ ID NO: 76507 - DNA, 33 bp, Homo sapien
atcttctgtgggtaggaatttagataggacaca

SEQ ID NO: 76508 - DNA, 33 bp, Homo sapien
atcttctgtgggtagggatttagataggacaca

SEQ ID NO: 76509 - DNA, 33 bp, Homo sapien
gtgtgtgtgagctcaaatgttccaggcaccagt

SEQ ID NO: 76510 - DNA, 33 bp, Homo sapien
gtgtgtgtgagctcaagtgttccaggcaccagt

SEQ ID NO: 76511 - DNA, 33 bp, Homo sapien
gaaaatgatggtaatgaactgtattgtcaacca

SEQ ID NO: 76512 - DNA, 33 bp, Homo sapien
gaaaatgatggtaatggactgtattgtcaacca

SEQ ID NO: 76513 - DNA, 33 bp, Homo sapien
agagctcagtggtacacagactggactcagagg

SEQ ID NO: 76514 - DNA, 33 bp, Homo sapien
agagctcagtggtacatagactggactcagagg

SEQ ID NO: 76515 - DNA, 33 bp, Homo sapien
ttctgtttggccgtagaaggaaagacttcacag

SEQ ID NO: 76516 - DNA, 33 bp, Homo sapien
ttctgtttggccgtagcaggaaagacttcacag

SEQ ID NO: 76517 - DNA, 33 bp, Homo sapien
agagtagctgactaataaaagcctaatgtgtat

SEQ ID NO: 76518 - DNA, 33 bp, Homo sapien
agagtagctgactaatgaaagcctaatgtgtat

SEQ ID NO: 76519 - DNA, 33 bp, Homo sapien
agacccagggcacacacaaatggcaggaccagg

SEQ ID NO: 76520 - DNA, 33 bp, Homo sapien
agacccagggcacacagaaatggcaggaccagg

SEQ ID NO: 76521 - DNA, 33 bp, Homo sapien
gatttgagaaagacaacgcgatccatttatcgt

SEQ ID NO: 76522 - DNA, 33 bp, Homo sapien
gatttgagaaagacaatgcgatccatttatcgt

SEQ ID NO: 76523 - DNA, 33 bp, Homo sapien
actccttcagttgccaaaagaccatgggcctct

SEQ ID NO: 76524 - DNA, 33 bp, Homo sapien
actccttcagttgccagaagaccatgggcctct

SEQ ID NO: 76525 - DNA, 33 bp, Homo sapien
aagatacagaggcttccaaacaggagagaagaa

SEQ ID NO: 76526 - DNA, 33 bp, Homo sapien
aagatacagaggcttcgaaacaggagagaagaa

SEQ ID NO: 76527 - DNA, 33 bp, Homo sapien
aagcgctaacccagaaaacggtgaatggaacct

SEQ ID NO: 76528 - DNA, 33 bp, Homo sapien
aagcgctaacccagaagacggtgaatggaacct

SEQ ID NO: 76529 - DNA, 33 bp, Homo sapien
atacattctcctaaccactcttacccagactct

SEQ ID NO: 76530 - DNA, 33 bp, Homo sapien
atacattctcctaaccgctcttacccagactct

SEQ ID NO: 76531 - DNA, 33 bp, Homo sapien
tcatcccattatgagtaaaggcattggctgggt

SEQ ID NO: 76532 - DNA, 33 bp, Homo sapien
tcatcccattatgagtgaaggcattggctgggt

SEQ ID NO: 76533 - DNA, 33 bp, Homo sapien
gaatcccaaaatctcccgacgggcagaggcaat

SEQ ID NO: 76534 - DNA, 33 bp, Homo sapien
gaatcccaaaatctcctgacgggcagaggcaat

SEQ ID NO: 76535 - DNA, 33 bp, Homo sapien
agctcagtgttcttcacggcatgctggggctga

SEQ ID NO: 76536 - DNA, 33 bp, Homo sapien
agctcagtgttcttcatggcatgctggggctga

SEQ ID NO: 76537 - DNA, 33 bp, Homo sapien
gcagcaactgaaatcaacctcaggcacagatgc

SEQ ID NO: 76538 - DNA, 33 bp, Homo sapien
gcagcaactgaaatcatcctcaggcacagatgc

SEQ ID NO: 76539 - DNA, 33 bp, Homo sapien
ggctgtgacaaacatgaaggcatctgctccccg

SEQ ID NO: 76540 - DNA, 33 bp, Homo sapien
ggctgtgacaaacatgtaggcatctgctccccg

SEQ ID NO: 76541 - DNA, 33 bp, Homo sapien
acaatgatgtgacacacggattgctgagatatt

SEQ ID NO: 76542 - DNA, 33 bp, Homo sapien
acaatgatgtgacacagggattgctgagatatt

SEQ ID NO: 76543 - DNA, 33 bp, Homo sapien
gctccataaacagcaagttactgcccctgccca

SEQ ID NO: 76544 - DNA, 33 bp, Homo sapien
gctccataaacagcaatttactgcccctgccca

SEQ ID NO: 76545 - DNA, 33 bp, Homo sapien
agctcctttattctcaacttctctcccctaccc

SEQ ID NO: 76546 - DNA, 33 bp, Homo sapien
agctcctttattctcagcttctctcccctaccc

SEQ ID NO: 76547 - DNA, 33 bp, Homo sapien
agtggtcagtcttcccagagggtgtgatttctg

SEQ ID NO: 76548 - DNA, 33 bp, Homo sapien
agtggtcagtcttcccggagggtgtgatttctg

SEQ ID NO: 76549 - DNA, 33 bp, Homo sapien
gactaaggagtcaatcacacttgctgccaagca

SEQ ID NO: 76550 - DNA, 33 bp, Homo sapien
gactaaggagtcaatcgcacttgctgccaagca

SEQ ID NO: 76551 - DNA, 33 bp, Homo sapien
ttctttcacagatggaataaggataacttttgg

SEQ ID NO: 76552 - DNA, 33 bp, Homo sapien
ttctttcacagatggagtaaggataacttttgg

SEQ ID NO: 76553 - DNA, 33 bp, Homo sapien
tacattcccttccataacagactcactggcttt

SEQ ID NO: 76554 - DNA, 33 bp, Homo sapien
tacattcccttccatatcagactcactggcttt

SEQ ID NO: 76555 - DNA, 33 bp, Homo sapien
ctgaaacaagccttaccgcctggagggcttaga

SEQ ID NO: 76556 - DNA, 33 bp, Homo sapien
ctgaaacaagccttactgcctggagggcttaga

SEQ ID NO: 76557 - DNA, 33 bp, Homo sapien
ccctgtgagtgatggcaagagaacacaacagtc

SEQ ID NO: 76558 - DNA, 33 bp, Homo sapien
ccctgtgagtgatggcgagagaacacaacagtc

SEQ ID NO: 76559 - DNA, 33 bp, Homo sapien
taaggtgctcagtccacagcagggacatagaca

SEQ ID NO: 76560 - DNA, 33 bp, Homo sapien
taaggtgctcagtccatagcagggacatagaca

SEQ ID NO: 76561 - DNA, 33 bp, Homo sapien
gccatcagtctttataacttacctgccatttgt

SEQ ID NO: 76562 - DNA, 33 bp, Homo sapien
gccatcagtctttatagcttacctgccatttgt

SEQ ID NO: 76563 - DNA, 33 bp, Homo sapien
tcttattgaatacaacaggaagagagacagaaa

SEQ ID NO: 76564 - DNA, 33 bp, Homo sapien
tcttattgaatacaacgggaagagagacagaaa

SEQ ID NO: 76565 - DNA, 33 bp, Homo sapien
agtaactgcttgcccaagaaggctccacaccca

SEQ ID NO: 76566 - DNA, 33 bp, Homo sapien
agtaactgcttgcccaggaaggctccacaccca

SEQ ID NO: 76567 - DNA, 33 bp, Homo sapien
gacttctctgagccccaaaaagagagccacagg

SEQ ID NO: 76568 - DNA, 33 bp, Homo sapien
gacttctctgagccccgaaaagagagccacagg

SEQ ID NO: 76569 - DNA, 33 bp, Homo sapien
ggaacaagtcaggtgaaaaagaggctaagaaga

SEQ ID NO: 76570 - DNA, 33 bp, Homo sapien
ggaacaagtcaggtgagaaagaggctaagaaga

SEQ ID NO: 76571 - DNA, 33 bp, Homo sapien
ttttgtctcagccaacaggattactgggctccc

SEQ ID NO: 76572 - DNA, 33 bp, Homo sapien
ttttgtctcagccaacgggattactgggctccc

SEQ ID NO: 76573 - DNA, 33 bp, Homo sapien
tcagaaaagacccgagcaaggctttatttcatc

SEQ ID NO: 76574 - DNA, 33 bp, Homo sapien
tcagaaaagacccgagtaaggctttatttcatc

SEQ ID NO: 76575 - DNA, 33 bp, Homo sapien
gcaggctggatggcacagaacatcctccacagc

SEQ ID NO: 76576 - DNA, 33 bp, Homo sapien
gcaggctggatggcaccgaacatcctccacagc

SEQ ID NO: 76577 - DNA, 33 bp, Homo sapien
gccttcagcccgaccacgtctacgcactgcaaa

SEQ ID NO: 76578 - DNA, 33 bp, Homo sapien
gccttcagcccgaccaggtctacgcactgcaaa

SEQ ID NO: 76579 - DNA, 33 bp, Homo sapien
ggattcacagagcagccattctttcaatgagca

SEQ ID NO: 76580 - DNA, 33 bp, Homo sapien
ggattcacagagcagctattctttcaatgagca

SEQ ID NO: 76581 - DNA, 33 bp, Homo sapien
ccaaatgttctgtttacgtctccccatcatgtc

SEQ ID NO: 76582 - DNA, 33 bp, Homo sapien
ccaaatgttctgtttatgtctccccatcatgtc

SEQ ID NO: 76583 - DNA, 33 bp, Homo sapien
gagccacttctggtcaacttcggtgagcagaca

SEQ ID NO: 76584 - DNA, 33 bp, Homo sapien
gagccacttctggtcatcttcggtgagcagaca

SEQ ID NO: 76585 - DNA, 33 bp, Homo sapien
atagtgacagccaaaaactcagaagcagaacac

SEQ ID NO: 76586 - DNA, 33 bp, Homo sapien
atagtgacagccaaaagctcagaagcagaacac

SEQ ID NO: 76587 - DNA, 33 bp, Homo sapien
ctagggggatgagaaaactctcttaaatcagag

SEQ ID NO: 76588 - DNA, 33 bp, Homo sapien
ctagggggatgagaaacctctcttaaatcagag

SEQ ID NO: 76589 - DNA, 33 bp, Homo sapien
gaggacggcagtagacacttaagagtggccaga

SEQ ID NO: 76590 - DNA, 33 bp, Homo sapien
gaggacggcagtagacgcttaagagtggccaga

SEQ ID NO: 76591 - DNA, 33 bp, Homo sapien
agcaggaaacacaggaccagataatttaagagg

SEQ ID NO: 76592 - DNA, 33 bp, Homo sapien
agcaggaaacacaggatcagataatttaagagg

SEQ ID NO: 76593 - DNA, 33 bp, Homo sapien
gtagagcaatttttgacagaagatgatttgggt

SEQ ID NO: 76594 - DNA, 33 bp, Homo sapien
gtagagcaatttttgatagaagatgatttgggt

SEQ ID NO: 76595 - DNA, 33 bp, Homo sapien
atgctattgtatcgagaatttagtatgtccaga

SEQ ID NO: 76596 - DNA, 33 bp, Homo sapien
atgctattgtatcgagcatttagtatgtccaga

SEQ ID NO: 76597 - DNA, 33 bp, Homo sapien
tttcagtttcctgctaacagattcaggttagat

SEQ ID NO: 76598 - DNA, 33 bp, Homo sapien
tttcagtttcctgctagcagattcaggttagat

SEQ ID NO: 76599 - DNA, 33 bp, Homo sapien
tcaatcaattggtctcaagcaaaagcacaaaag

SEQ ID NO: 76600 - DNA, 33 bp, Homo sapien
tcaatcaattggtctcgagcaaaagcacaaaag

SEQ ID NO: 76601 - DNA, 33 bp, Homo sapien
tttttggcatttgcaaacatcagccttggctaa

SEQ ID NO: 76602 - DNA, 33 bp, Homo sapien
tttttggcatttgcaaccatcagccttggctaa

SEQ ID NO: 76603 - DNA, 33 bp, Homo sapien
ggtggtccaaggttggccatgagggtattctgt

SEQ ID NO: 76604 - DNA, 33 bp, Homo sapien
ggtggtccaaggttggtcatgagggtattctgt

SEQ ID NO: 76605 - DNA, 33 bp, Homo sapien
ccattgcattcacactaagaataagaacttgtt

SEQ ID NO: 76606 - DNA, 33 bp, Homo sapien
ccattgcattcacactgagaataagaacttgtt

SEQ ID NO: 76607 - DNA, 33 bp, Homo sapien
ggcactttggtttgtacgtcagtctctataagc

SEQ ID NO: 76608 - DNA, 33 bp, Homo sapien
ggcactttggtttgtatgtcagtctctataagc

SEQ ID NO: 76609 - DNA, 33 bp, Homo sapien
tgaatttgtgtaaggaaacagtagggcatagag

SEQ ID NO: 76610 - DNA, 33 bp, Homo sapien
tgaatttgtgtaaggagacagtagggcatagag

SEQ ID NO: 76611 - DNA, 33 bp, Homo sapien
aataaagctggtgttaagggtatactatattta

SEQ ID NO: 76612 - DNA, 33 bp, Homo sapien
aataaagctggtgttaggggtatactatattta

SEQ ID NO: 76613 - DNA, 33 bp, Homo sapien
tactgtaaagccattgaagagctttaaatgagg

SEQ ID NO: 76614 - DNA, 33 bp, Homo sapien
tactgtaaagccattggagagctttaaatgagg

SEQ ID NO: 76615 - DNA, 33 bp, Homo sapien
aaagctgaggtcaacgaatttaggaatcagtca

SEQ ID NO: 76616 - DNA, 33 bp, Homo sapien
aaagctgaggtcaacggatttaggaatcagtca

SEQ ID NO: 76617 - DNA, 33 bp, Homo sapien
taataaaattgataaactccagtaaggccgatt

SEQ ID NO: 76618 - DNA, 33 bp, Homo sapien
taataaaattgataaattccagtaaggccgatt

SEQ ID NO: 76619 - DNA, 33 bp, Homo sapien
tgcagtagcccttcaacgaccttctttccccaa

SEQ ID NO: 76620 - DNA, 33 bp, Homo sapien
tgcagtagcccttcaatgaccttctttccccaa

SEQ ID NO: 76621 - DNA, 33 bp, Homo sapien
gctgcctatagctgccaagtagccccagggagt

SEQ ID NO: 76622 - DNA, 33 bp, Homo sapien
gctgcctatagctgccgagtagccccagggagt

SEQ ID NO: 76623 - DNA, 33 bp, Homo sapien
ggtggtctagataaaacgcagtagtcactgagc

SEQ ID NO: 76624 - DNA, 33 bp, Homo sapien
ggtggtctagataaaatgcagtagtcactgagc

SEQ ID NO: 76625 - DNA, 33 bp, Homo sapien
ttagcaccgcctgagacgtgaaccttttctcct

SEQ ID NO: 76626 - DNA, 33 bp, Homo sapien
ttagcaccgcctgagatgtgaaccttttctcct

SEQ ID NO: 76627 - DNA, 33 bp, Homo sapien
cattatgtgtatctggccacgttaactgactac

SEQ ID NO: 76628 - DNA, 33 bp, Homo sapien
cattatgtgtatctggtcacgttaactgactac

SEQ ID NO: 76629 - DNA, 33 bp, Homo sapien
ttcactaaggggcagacgccaagcgcacggctc

SEQ ID NO: 76630 - DNA, 33 bp, Homo sapien
ttcactaaggggcagatgccaagcgcacggctc

SEQ ID NO: 76631 - DNA, 33 bp, Homo sapien
tgatggttagggtgaaatgttaagactgagaaa

SEQ ID NO: 76632 - DNA, 33 bp, Homo sapien
tgatggttagggtgaagtgttaagactgagaaa

SEQ ID NO: 76633 - DNA, 33 bp, Homo sapien
gactggggccacatacaaacaggacttcagaac

SEQ ID NO: 76634 - DNA, 33 bp, Homo sapien
gactggggccacatacgaacaggacttcagaac

SEQ ID NO: 76635 - DNA, 33 bp, Homo sapien
aaataaatgaactggaactacatttatacatgc

SEQ ID NO: 76636 - DNA, 33 bp, Homo sapien
aaataaatgaactggagctacatttatacatgc

SEQ ID NO: 76637 - DNA, 33 bp, Homo sapien
caggaaatcaggttccaagtcttgccagcaagg

SEQ ID NO: 76638 - DNA, 33 bp, Homo sapien
caggaaatcaggttccgagtcttgccagcaagg

SEQ ID NO: 76639 - DNA, 33 bp, Homo sapien
gtgtttaacacccccaaaaagcttgtctaagta

SEQ ID NO: 76640 - DNA, 33 bp, Homo sapien
gtgtttaacacccccagaaagcttgtctaagta

SEQ ID NO: 76641 - DNA, 33 bp, Homo sapien
gctttgtattggaacaagattttgaggctaggg

SEQ ID NO: 76642 - DNA, 33 bp, Homo sapien
gctttgtattggaacaggattttgaggctaggg

SEQ ID NO: 76643 - DNA, 33 bp, Homo sapien
ctgtctaggtttaaggcactgtaagagatataa

SEQ ID NO: 76644 - DNA, 33 bp, Homo sapien
ctgtctaggtttaaggtactgtaagagatataa

SEQ ID NO: 76645 - DNA, 33 bp, Homo sapien
gtggcctctgcctgcacgtgaaagtcagactgg

SEQ ID NO: 76646 - DNA, 33 bp, Homo sapien
gtggcctctgcctgcatgtgaaagtcagactgg

SEQ ID NO: 76647 - DNA, 33 bp, Homo sapien
tatttttaagatcatcaaacaggtattctggag

SEQ ID NO: 76648 - DNA, 33 bp, Homo sapien
tatttttaagatcatcgaacaggtattctggag

SEQ ID NO: 76649 - DNA, 33 bp, Homo sapien
gctacacatcctacaacgtataggccaggtctc

SEQ ID NO: 76650 - DNA, 33 bp, Homo sapien
gctacacatcctacaatgtataggccaggtctc

SEQ ID NO: 76651 - DNA, 33 bp, Homo sapien
cctctgggttaaaagacggaaataatgaaaggg

SEQ ID NO: 76652 - DNA, 33 bp, Homo sapien
cctctgggttaaaagatggaaataatgaaaggg

SEQ ID NO: 76653 - DNA, 33 bp, Homo sapien
agaagccgggagttgcccgagatgtttgagtga

SEQ ID NO: 76654 - DNA, 33 bp, Homo sapien
agaagccgggagttgctcgagatgtttgagtga

SEQ ID NO: 76655 - DNA, 33 bp, Homo sapien
ccatggcatcttgtcactccactcatgagccgc

SEQ ID NO: 76656 - DNA, 33 bp, Homo sapien
ccatggcatcttgtcattccactcatgagccgc

SEQ ID NO: 76657 - DNA, 33 bp, Homo sapien
tccattaattatatcacctggagaacctactga

SEQ ID NO: 76658 - DNA, 33 bp, Homo sapien
tccattaattatatcatctggagaacctactga

SEQ ID NO: 76659 - DNA, 33 bp, Homo sapien
gcatgaagtggaactcaaacagctccctcaggc

SEQ ID NO: 76660 - DNA, 33 bp, Homo sapien
gcatgaagtggaactcgaacagctccctcaggc

SEQ ID NO: 76661 - DNA, 33 bp, Homo sapien
ccccactgtcaagcagcaagcggaaaatgccac

SEQ ID NO: 76662 - DNA, 33 bp, Homo sapien
ccccactgtcaagcaggaagcggaaaatgccac

SEQ ID NO: 76663 - DNA, 33 bp, Homo sapien
tgctactgactcctctaaatggtcattatgttt

SEQ ID NO: 76664 - DNA, 33 bp, Homo sapien
tgctactgactcctctgaatggtcattatgttt

SEQ ID NO: 76665 - DNA, 33 bp, Homo sapien
taatcgggaattttcacgtaacagctttgacat

SEQ ID NO: 76666 - DNA, 33 bp, Homo sapien
taatcgggaattttcatgtaacagctttgacat

SEQ ID NO: 76667 - DNA, 33 bp, Homo sapien
atcagaggtgacagaaccgtgtatttctacatt

SEQ ID NO: 76668 - DNA, 33 bp, Homo sapien
atcagaggtgacagaatcgtgtatttctacatt

SEQ ID NO: 76669 - DNA, 33 bp, Homo sapien
gttggtatctaatggaacctcaaacatgtgtac

SEQ ID NO: 76670 - DNA, 33 bp, Homo sapien
gttggtatctaatggaccctcaaacatgtgtac

SEQ ID NO: 76671 - DNA, 33 bp, Homo sapien
tacatgccatctacatcaatttggttcatctac

SEQ ID NO: 76672 - DNA, 33 bp, Homo sapien
tacatgccatctacatgaatttggttcatctac

SEQ ID NO: 76673 - DNA, 33 bp, Homo sapien
agccactggtagcaaaaatacaagctgaatgga

SEQ ID NO: 76674 - DNA, 33 bp, Homo sapien
agccactggtagcaaagatacaagctgaatgga

SEQ ID NO: 76675 - DNA, 33 bp, Homo sapien
atattgataagcaaaacaagtgaagatagcatt

SEQ ID NO: 76676 - DNA, 33 bp, Homo sapien
atattgataagcaaaagaagtgaagatagcatt

SEQ ID NO: 76677 - DNA, 33 bp, Homo sapien
gtcatcatgtatcttacacatattgtggtatac

SEQ ID NO: 76678 - DNA, 33 bp, Homo sapien
gtcatcatgtatcttagacatattgtggtatac

SEQ ID NO: 76679 - DNA, 33 bp, Homo sapien
caagatcagaagaggaaaaatagcgacagattc

SEQ ID NO: 76680 - DNA, 33 bp, Homo sapien
caagatcagaagaggagaaatagcgacagattc

SEQ ID NO: 76681 - DNA, 33 bp, Homo sapien
atagacaacttttccacgtagttccctagggtt

SEQ ID NO: 76682 - DNA, 33 bp, Homo sapien
atagacaacttttccatgtagttccctagggtt

SEQ ID NO: 76683 - DNA, 33 bp, Homo sapien
acctttccagaagttacggtttgacacccttta

SEQ ID NO: 76684 - DNA, 33 bp, Homo sapien
acctttccagaagttatggtttgacacccttta

SEQ ID NO: 76685 - DNA, 33 bp, Homo sapien
ttttatctttatgtcaacttagatcatgggaaa

SEQ ID NO: 76686 - DNA, 33 bp, Homo sapien
ttttatctttatgtcagcttagatcatgggaaa

SEQ ID NO: 76687 - DNA, 33 bp, Homo sapien
ttctctttatttcacccagcatttagtttttcc

SEQ ID NO: 76688 - DNA, 33 bp, Homo sapien
ttctctttatttcaccgagcatttagtttttcc

SEQ ID NO: 76689 - DNA, 33 bp, Homo sapien
tgaaggtttatcattacacaaacaacactatca

SEQ ID NO: 76690 - DNA, 33 bp, Homo sapien
tgaaggtttatcattatacaaacaacactatca

SEQ ID NO: 76691 - DNA, 33 bp, Homo sapien
tcttctgctgttagaacgggaagggaccttaaa

SEQ ID NO: 76692 - DNA, 33 bp, Homo sapien
tcttctgctgttagaatgggaagggaccttaaa

SEQ ID NO: 76693 - DNA, 33 bp, Homo sapien
attccaaagagataaaatctacatttgcttacc

SEQ ID NO: 76694 - DNA, 33 bp, Homo sapien
attccaaagagataaagtctacatttgcttacc

SEQ ID NO: 76695 - DNA, 33 bp, Homo sapien
atcagtagaaaaaccagcacttatattcagtcg

SEQ ID NO: 76696 - DNA, 33 bp, Homo sapien
atcagtagaaaaaccatcacttatattcagtcg

SEQ ID NO: 76697 - DNA, 33 bp, Homo sapien
gttgtacagcaaaacaatgtttagatcagaaat

SEQ ID NO: 76698 - DNA, 33 bp, Homo sapien
gttgtacagcaaaacagtgtttagatcagaaat

SEQ ID NO: 76699 - DNA, 33 bp, Homo sapien
tttagttaaaatggaactgagaagcaaagcaga

SEQ ID NO: 76700 - DNA, 33 bp, Homo sapien
tttagttaaaatggaagtgagaagcaaagcaga

SEQ ID NO: 76701 - DNA, 33 bp, Homo sapien
gcaatcacaggcaaaacgatgagagaggggtaa

SEQ ID NO: 76702 - DNA, 33 bp, Homo sapien
gcaatcacaggcaaaaggatgagagaggggtaa

SEQ ID NO: 76703 - DNA, 33 bp, Homo sapien
ttaataggttgaatggaaatgcctttctcaaga

SEQ ID NO: 76704 - DNA, 33 bp, Homo sapien
ttaataggttgaatgggaatgcctttctcaaga

SEQ ID NO: 76705 - DNA, 33 bp, Homo sapien
agacctgttagcctggacacttaaaggataata

SEQ ID NO: 76706 - DNA, 33 bp, Homo sapien
agacctgttagcctgggcacttaaaggataata

SEQ ID NO: 76707 - DNA, 33 bp, Homo sapien
cgtatggagtgtaacaatgaaagagggaaaatg

SEQ ID NO: 76708 - DNA, 33 bp, Homo sapien
cgtatggagtgtaacagtgaaagagggaaaatg

SEQ ID NO: 76709 - DNA, 33 bp, Homo sapien
tctgttaaaactcaaccacagaaggccaactta

SEQ ID NO: 76710 - DNA, 33 bp, Homo sapien
tctgttaaaactcaactacagaaggccaactta

SEQ ID NO: 76711 - DNA, 33 bp, Homo sapien
caatatgcccaatgcaatagtatttaataagta

SEQ ID NO: 76712 - DNA, 33 bp, Homo sapien
caatatgcccaatgcagtagtatttaataagta

SEQ ID NO: 76713 - DNA, 33 bp, Homo sapien
cataaacactcttcaaatattgcactgccacca

SEQ ID NO: 76714 - DNA, 33 bp, Homo sapien
cataaacactcttcaagtattgcactgccacca

SEQ ID NO: 76715 - DNA, 33 bp, Homo sapien
gtgtgatttgttcaagaaagtagacatatgaag

SEQ ID NO: 76716 - DNA, 33 bp, Homo sapien
gtgtgatttgttcaaggaagtagacatatgaag

SEQ ID NO: 76717 - DNA, 33 bp, Homo sapien
tagccaccctctcccaaatactttttgcattgc

SEQ ID NO: 76718 - DNA, 33 bp, Homo sapien
tagccaccctctcccagatactttttgcattgc

SEQ ID NO: 76719 - DNA, 33 bp, Homo sapien
cgtacatcaaggttgacaatggaccaaaatgaa

SEQ ID NO: 76720 - DNA, 33 bp, Homo sapien
cgtacatcaaggttgataatggaccaaaatgaa

SEQ ID NO: 76721 - DNA, 33 bp, Homo sapien
tgcttcgtgattatggcagagtgtccttgactt

SEQ ID NO: 76722 - DNA, 33 bp, Homo sapien
tgcttcgtgattatggtagagtgtccttgactt

SEQ ID NO: 76723 - DNA, 33 bp, Homo sapien
ttcaagttatccctacaatgtctccttttctta

SEQ ID NO: 76724 - DNA, 33 bp, Homo sapien
ttcaagttatccctaccatgtctccttttctta

SEQ ID NO: 76725 - DNA, 33 bp, Homo sapien
ggatcaaaagagactggaaggagagcagttaga

SEQ ID NO: 76726 - DNA, 33 bp, Homo sapien
ggatcaaaagagactgtaaggagagcagttaga

SEQ ID NO: 76727 - DNA, 33 bp, Homo sapien
acataacaggtactcaataagtatttactgtat

SEQ ID NO: 76728 - DNA, 33 bp, Homo sapien
acataacaggtactcagtaagtatttactgtat

SEQ ID NO: 76729 - DNA, 33 bp, Homo sapien
atgctacaacatggctaaatctcgaaaacgtac

SEQ ID NO: 76730 - DNA, 33 bp, Homo sapien
atgctacaacatggctgaatctcgaaaacgtac

SEQ ID NO: 76731 - DNA, 33 bp, Homo sapien
aaaaatcatctgtacacgttcggtacaaatgca

SEQ ID NO: 76732 - DNA, 33 bp, Homo sapien
aaaaatcatctgtacatgttcggtacaaatgca

SEQ ID NO: 76733 - DNA, 33 bp, Homo sapien
aaaggcagataccacactcagactattacttag

SEQ ID NO: 76734 - DNA, 33 bp, Homo sapien
aaaggcagataccacattcagactattacttag

SEQ ID NO: 76735 - DNA, 33 bp, Homo sapien
ggtatttctcttggggcaagacttggcacagaa

SEQ ID NO: 76736 - DNA, 33 bp, Homo sapien
ggtatttctcttggggtaagacttggcacagaa

SEQ ID NO: 76737 - DNA, 33 bp, Homo sapien
gcacagaagggagccacgtagttattctttgct

SEQ ID NO: 76738 - DNA, 33 bp, Homo sapien
gcacagaagggagccatgtagttattctttgct

SEQ ID NO: 76739 - DNA, 33 bp, Homo sapien
acaaatatttattgaccgccaaacatataggga

SEQ ID NO: 76740 - DNA, 33 bp, Homo sapien
acaaatatttattgactgccaaacatataggga

SEQ ID NO: 76741 - DNA, 33 bp, Homo sapien
ctctgatattaacaagccagggaaatcaggagg

SEQ ID NO: 76742 - DNA, 33 bp, Homo sapien
ctctgatattaacaagtcagggaaatcaggagg

SEQ ID NO: 76743 - DNA, 33 bp, Homo sapien
ttaaataatatagacaatctattaggcagttgt

SEQ ID NO: 76744 - DNA, 33 bp, Homo sapien
ttaaataatatagacagtctattaggcagttgt

SEQ ID NO: 76745 - DNA, 33 bp, Homo sapien
cgtaatcatgctagcaaagttgaagatgtccat

SEQ ID NO: 76746 - DNA, 33 bp, Homo sapien
cgtaatcatgctagcacagttgaagatgtccat

SEQ ID NO: 76747 - DNA, 33 bp, Homo sapien
tatctaataccacatacgtcataaatttagtgg

SEQ ID NO: 76748 - DNA, 33 bp, Homo sapien
tatctaataccacataggtcataaatttagtgg

SEQ ID NO: 76749 - DNA, 33 bp, Homo sapien
tccaggagcctagcgaccatcttccagtagctg

SEQ ID NO: 76750 - DNA, 33 bp, Homo sapien
tccaggagcctagcgatcatcttccagtagctg

SEQ ID NO: 76751 - DNA, 33 bp, Homo sapien
caaggcatactaaaaacgggacagagactggac

SEQ ID NO: 76752 - DNA, 33 bp, Homo sapien
caaggcatactaaaaatgggacagagactggac

SEQ ID NO: 76753 - DNA, 33 bp, Homo sapien
caatctgaaaagtctacaaactgtacgattcca

SEQ ID NO: 76754 - DNA, 33 bp, Homo sapien
caatctgaaaagtctataaactgtacgattcca

SEQ ID NO: 76755 - DNA, 33 bp, Homo sapien
aaatgttcattcttctaaaatcttggaaagctg

SEQ ID NO: 76756 - DNA, 33 bp, Homo sapien
aaatgttcattcttctgaaatcttggaaagctg

SEQ ID NO: 76757 - DNA, 33 bp, Homo sapien
aagagctccagtccaaggaaacaatgctaaaac

SEQ ID NO: 76758 - DNA, 33 bp, Homo sapien
aagagctccagtccaatgaaacaatgctaaaac

SEQ ID NO: 76759 - DNA, 33 bp, Homo sapien
ccaaaatgagcatttcaaggaacagatataatt

SEQ ID NO: 76760 - DNA, 33 bp, Homo sapien
ccaaaatgagcatttcgaggaacagatataatt

SEQ ID NO: 76761 - DNA, 33 bp, Homo sapien
aattaagtgcatttcacacagggtaagttgttc

SEQ ID NO: 76762 - DNA, 33 bp, Homo sapien
aattaagtgcatttcatacagggtaagttgttc

SEQ ID NO: 76763 - DNA, 33 bp, Homo sapien
ctccaaactgtgaacccattctcttccctttct

SEQ ID NO: 76764 - DNA, 33 bp, Homo sapien
ctccaaactgtgaaccgattctcttccctttct

SEQ ID NO: 76765 - DNA, 33 bp, Homo sapien
atctgaagtcagtggacagtccaattatatgac

SEQ ID NO: 76766 - DNA, 33 bp, Homo sapien
atctgaagtcagtggatagtccaattatatgac

SEQ ID NO: 76767 - DNA, 33 bp, Homo sapien
ctaacttgtgtttcaacataggcattcctgttc

SEQ ID NO: 76768 - DNA, 33 bp, Homo sapien
ctaacttgtgtttcaagataggcattcctgttc

SEQ ID NO: 76769 - DNA, 33 bp, Homo sapien
atactgctcatcaaaactgcacagatacttgga

SEQ ID NO: 76770 - DNA, 33 bp, Homo sapien
atactgctcatcaaaattgcacagatacttgga

SEQ ID NO: 76771 - DNA, 33 bp, Homo sapien
taatttggtaacatccacaactgccaagtgtgt

SEQ ID NO: 76772 - DNA, 33 bp, Homo sapien
taatttggtaacatccgcaactgccaagtgtgt

SEQ ID NO: 76773 - DNA, 33 bp, Homo sapien
cacaggagaacagggaaaagtgagtctattcca

SEQ ID NO: 76774 - DNA, 33 bp, Homo sapien
cacaggagaacagggagaagtgagtctattcca

SEQ ID NO: 76775 - DNA, 33 bp, Homo sapien
ggagataggatttgtaaagttgtcccatcagcc

SEQ ID NO: 76776 - DNA, 33 bp, Homo sapien
ggagataggatttgtacagttgtcccatcagcc

SEQ ID NO: 76777 - DNA, 33 bp, Homo sapien
tcccaatagcaaagtcacagactcaatcttgct

SEQ ID NO: 76778 - DNA, 33 bp, Homo sapien
tcccaatagcaaagtcgcagactcaatcttgct

SEQ ID NO: 76779 - DNA, 33 bp, Homo sapien
tacaaagtgactgcataatcagcattaaacaga

SEQ ID NO: 76780 - DNA, 33 bp, Homo sapien
tacaaagtgactgcatgatcagcattaaacaga

SEQ ID NO: 76781 - DNA, 33 bp, Homo sapien
gaaaacacaatgactactactagtggccttaaa

SEQ ID NO: 76782 - DNA, 33 bp, Homo sapien
gaaaacacaatgactagtactagtggccttaaa

SEQ ID NO: 76783 - DNA, 33 bp, Homo sapien
agcaattctactccgacatgtgtacaaacgcaa

SEQ ID NO: 76784 - DNA, 33 bp, Homo sapien
agcaattctactccgagatgtgtacaaacgcaa

SEQ ID NO: 76785 - DNA, 33 bp, Homo sapien
tttggctattctggaactctcaaatttctacat

SEQ ID NO: 76786 - DNA, 33 bp, Homo sapien
tttggctattctggaattctcaaatttctacat

SEQ ID NO: 76787 - DNA, 33 bp, Homo sapien
ttgagtctccataatgccaacatgagctatgca

SEQ ID NO: 76788 - DNA, 33 bp, Homo sapien
ttgagtctccataatgtcaacatgagctatgca

SEQ ID NO: 76789 - DNA, 33 bp, Homo sapien
cagaaggaaggagtcactctggttcctgtgagc

SEQ ID NO: 76790 - DNA, 33 bp, Homo sapien
cagaaggaaggagtcagtctggttcctgtgagc

SEQ ID NO: 76791 - DNA, 33 bp, Homo sapien
tgttattggcctttgaacccaagtcccttcaaa

SEQ ID NO: 76792 - DNA, 33 bp, Homo sapien
tgttattggcctttgagcccaagtcccttcaaa

SEQ ID NO: 76793 - DNA, 33 bp, Homo sapien
gttattccattgcagacaagggagaagaagaat

SEQ ID NO: 76794 - DNA, 33 bp, Homo sapien
gttattccattgcagataagggagaagaagaat

SEQ ID NO: 76795 - DNA, 33 bp, Homo sapien
atcactatttctacaacttcatcaccccacaca

SEQ ID NO: 76796 - DNA, 33 bp, Homo sapien
atcactatttctacaatttcatcaccccacaca

SEQ ID NO: 76797 - DNA, 33 bp, Homo sapien
ggcaaaaatattaatccacttggcacatcattc

SEQ ID NO: 76798 - DNA, 33 bp, Homo sapien
ggcaaaaatattaatctacttggcacatcattc

SEQ ID NO: 76799 - DNA, 33 bp, Homo sapien
aataaggctgaaattaagagcttagtaaattca

SEQ ID NO: 76800 - DNA, 33 bp, Homo sapien
aataaggctgaaattacgagcttagtaaattca

SEQ ID NO: 76801 - DNA, 33 bp, Homo sapien
ctggcaaacataatccaaaaaatatcctaatca

SEQ ID NO: 76802 - DNA, 33 bp, Homo sapien
ctggcaaacataatccgaaaaatatcctaatca

SEQ ID NO: 76803 - DNA, 33 bp, Homo sapien
gaatgataaaaacttaaaaatggactgcattct

SEQ ID NO: 76804 - DNA, 33 bp, Homo sapien
gaatgataaaaacttacaaatggactgcattct

SEQ ID NO: 76805 - DNA, 33 bp, Homo sapien
ccagagcagccaatcaagagaaagcgttctaat

SEQ ID NO: 76806 - DNA, 33 bp, Homo sapien
ccagagcagccaatcacgagaaagcgttctaat

SEQ ID NO: 76807 - DNA, 33 bp, Homo sapien
agatcagcactgcccaaagactcaggagtcctg

SEQ ID NO: 76808 - DNA, 33 bp, Homo sapien
agatcagcactgcccagagactcaggagtcctg

SEQ ID NO: 76809 - DNA, 33 bp, Homo sapien
gaacacattggaattaacagggaagcattttaa

SEQ ID NO: 76810 - DNA, 33 bp, Homo sapien
gaacacattggaattaccagggaagcattttaa

SEQ ID NO: 76811 - DNA, 33 bp, Homo sapien
ttaaaaactcacatacactgacttccatcctga

SEQ ID NO: 76812 - DNA, 33 bp, Homo sapien
ttaaaaactcacataccctgacttccatcctga

SEQ ID NO: 76813 - DNA, 33 bp, Homo sapien
ctgtttctctgtctcacgctagtgtaaaaaaag

SEQ ID NO: 76814 - DNA, 33 bp, Homo sapien
ctgtttctctgtctcatgctagtgtaaaaaaag

SEQ ID NO: 76815 - DNA, 33 bp, Homo sapien
tatatgatttgaagtaagtatccaacttcattc

SEQ ID NO: 76816 - DNA, 33 bp, Homo sapien
tatatgatttgaagtaggtatccaacttcattc

SEQ ID NO: 76817 - DNA, 33 bp, Homo sapien
aattattaaggaagtaaatcaaagccacaatga

SEQ ID NO: 76818 - DNA, 33 bp, Homo sapien
aattattaaggaagtagatcaaagccacaatga

SEQ ID NO: 76819 - DNA, 33 bp, Homo sapien
tgtttaatacagagaaatcaactgagccagatg

SEQ ID NO: 76820 - DNA, 33 bp, Homo sapien
tgtttaatacagagaagtcaactgagccagatg

SEQ ID NO: 76821 - DNA, 33 bp, Homo sapien
ttctgttctaaaccaacatactggaaaagagca

SEQ ID NO: 76822 - DNA, 33 bp, Homo sapien
ttctgttctaaaccaatatactggaaaagagca

SEQ ID NO: 76823 - DNA, 33 bp, Homo sapien
aaaaacaggcagccgcgaggacagttccggagg

SEQ ID NO: 76824 - DNA, 33 bp, Homo sapien
aaaaacaggcagccgctaggacagttccggagg

SEQ ID NO: 76825 - DNA, 33 bp, Homo sapien
tttatgaaatctacaacgtctacacttgcctgg

SEQ ID NO: 76826 - DNA, 33 bp, Homo sapien
tttatgaaatctacaaggtctacacttgcctgg

SEQ ID NO: 76827 - DNA, 33 bp, Homo sapien
tttctcagtctccttcactggatgatccttatc

SEQ ID NO: 76828 - DNA, 33 bp, Homo sapien
tttctcagtctccttcgctggatgatccttatc

SEQ ID NO: 76829 - DNA, 33 bp, Homo sapien
atttaggcctcagatacgtcagagagcttccag

SEQ ID NO: 76830 - DNA, 33 bp, Homo sapien
atttaggcctcagatatgtcagagagcttccag

SEQ ID NO: 76831 - DNA, 33 bp, Homo sapien
agttggcgcagtctaacggggtagttgggaaat

SEQ ID NO: 76832 - DNA, 33 bp, Homo sapien
agttggcgcagtctaagggggtagttgggaaat

SEQ ID NO: 76833 - DNA, 33 bp, Homo sapien
tcagccttttgagagccattggatagagggcac

SEQ ID NO: 76834 - DNA, 33 bp, Homo sapien
tcagccttttgagagctattggatagagggcac

SEQ ID NO: 76835 - DNA, 33 bp, Homo sapien
gatgtccttgctagtacgtgaaactcctcatcg

SEQ ID NO: 76836 - DNA, 33 bp, Homo sapien
gatgtccttgctagtatgtgaaactcctcatcg

SEQ ID NO: 76837 - DNA, 33 bp, Homo sapien
ccatcaaagttgtgcaatcattatccgttgtag

SEQ ID NO: 76838 - DNA, 33 bp, Homo sapien
ccatcaaagttgtgcattcattatccgttgtag

SEQ ID NO: 76839 - DNA, 33 bp, Homo sapien
gatcagtggagaaaaacgtgatacagctgaggt

SEQ ID NO: 76840 - DNA, 33 bp, Homo sapien
gatcagtggagaaaaatgtgatacagctgaggt

SEQ ID NO: 76841 - DNA, 33 bp, Homo sapien
cagcttggtgtgtggacgcaacatgaaaatggt

SEQ ID NO: 76842 - DNA, 33 bp, Homo sapien
cagcttggtgtgtggatgcaacatgaaaatggt

SEQ ID NO: 76843 - DNA, 33 bp, Homo sapien
cctacagctgtggatacgtcttttgtggattgt

SEQ ID NO: 76844 - DNA, 33 bp, Homo sapien
cctacagctgtggatatgtcttttgtggattgt

SEQ ID NO: 76845 - DNA, 33 bp, Homo sapien
aggcaggcctgttagaaggtctgataattcttc

SEQ ID NO: 76846 - DNA, 33 bp, Homo sapien
aggcaggcctgttagagggtctgataattcttc

SEQ ID NO: 76847 - DNA, 33 bp, Homo sapien
gagagagaaagactataacatctagctggttac

SEQ ID NO: 76848 - DNA, 33 bp, Homo sapien
gagagagaaagactatgacatctagctggttac

SEQ ID NO: 76849 - DNA, 33 bp, Homo sapien
aacaccttgggcatagcaacttgttctgcctcc

SEQ ID NO: 76850 - DNA, 33 bp, Homo sapien
aacaccttgggcatagtaacttgttctgcctcc

SEQ ID NO: 76851 - DNA, 33 bp, Homo sapien
aaaagtagataaaaaaattaactgtggctgggc

SEQ ID NO: 76852 - DNA, 33 bp, Homo sapien
aaaagtagataaaaaagttaactgtggctgggc

SEQ ID NO: 76853 - DNA, 33 bp, Homo sapien
catgaaaactttctgacgagaccagagagcaga

SEQ ID NO: 76854 - DNA, 33 bp, Homo sapien
catgaaaactttctgatgagaccagagagcaga

SEQ ID NO: 76855 - DNA, 33 bp, Homo sapien
tggttgctaacttccacagtggaaatactccca

SEQ ID NO: 76856 - DNA, 33 bp, Homo sapien
tggttgctaacttccatagtggaaatactccca

SEQ ID NO: 76857 - DNA, 33 bp, Homo sapien
cctccccgacaatgatcaatgattttttactgt

SEQ ID NO: 76858 - DNA, 33 bp, Homo sapien
cctccccgacaatgatgaatgattttttactgt

SEQ ID NO: 76859 - DNA, 33 bp, Homo sapien
ccatcgaccccccacaatcaatttcatcatttt

SEQ ID NO: 76860 - DNA, 33 bp, Homo sapien
ccatcgaccccccacagtcaatttcatcatttt

SEQ ID NO: 76861 - DNA, 33 bp, Homo sapien
ttgctccagggtcaaccgtagattaatggttgc

SEQ ID NO: 76862 - DNA, 33 bp, Homo sapien
ttgctccagggtcaactgtagattaatggttgc

SEQ ID NO: 76863 - DNA, 33 bp, Homo sapien
ccatcccgtctaacaccgtgaaagcctgtctgt

SEQ ID NO: 76864 - DNA, 33 bp, Homo sapien
ccatcccgtctaacacggtgaaagcctgtctgt

SEQ ID NO: 76865 - DNA, 33 bp, Homo sapien
gaagcgggtggtgtcactctcagtgtgaagtca

SEQ ID NO: 76866 - DNA, 33 bp, Homo sapien
gaagcgggtggtgtcattctcagtgtgaagtca

SEQ ID NO: 76867 - DNA, 33 bp, Homo sapien
gctctgtttccatgctaaaatgaagaaatgatc

SEQ ID NO: 76868 - DNA, 33 bp, Homo sapien
gctctgtttccatgctgaaatgaagaaatgatc

SEQ ID NO: 76869 - DNA, 33 bp, Homo sapien
gagacctcaagtgtcacgcagagctccagccct

SEQ ID NO: 76870 - DNA, 33 bp, Homo sapien
gagacctcaagtgtcatgcagagctccagccct

SEQ ID NO: 76871 - DNA, 33 bp, Homo sapien
tggacgaggatcaggagtatgcctcccagaaat

SEQ ID NO: 76872 - DNA, 33 bp, Homo sapien
tggacgaggatcaggattatgcctcccagaaat

SEQ ID NO: 76873 - DNA, 33 bp, Homo sapien
cactgaggatgaggtgcaacgtgtgatcaccat

SEQ ID NO: 76874 - DNA, 33 bp, Homo sapien
cactgaggatgaggtggaacgtgtgatcaccat

SEQ ID NO: 76875 - DNA, 33 bp, Homo sapien
caacaagttctgtgaccacctggagtgattgaa

SEQ ID NO: 76876 - DNA, 33 bp, Homo sapien
caacaagttctgtgacgacctggagtgattgaa

SEQ ID NO: 76877 - DNA, 33 bp, Homo sapien; identical to SEQ ID NO: 76875

SEQ ID NO: 76878 - DNA, 33 bp, Homo sapien; identical to SEQ ID NO: 76876

SEQ ID NO: 76879 - DNA, 33 bp, Homo sapien
tcatcaaaattctccacgatacctggaacttca

SEQ ID NO: 76880 - DNA, 33 bp, Homo sapien
tcatcaaaattctccatgatacctggaacttca

SEQ ID NO: 76881 - DNA, 33 bp, Homo sapien; identical to SEQ ID NO: 76879

SEQ ID NO: 76882 - DNA, 33 bp, Homo sapien; identical to SEQ ID NO: 76880

SEQ ID NO: 76883 - DNA, 33 bp, Homo sapien
aggataaaaatgaagccatcaccctctacagag

SEQ ID NO: 76884 - DNA, 33 bp, Homo sapien
aggataaaaatgaagctatcaccctctacagag

SEQ ID NO: 76885 - DNA, 33 bp, Homo sapien
gcagcaagcctcgatgaactgtggaccagctgg

SEQ ID NO: 76886 - DNA, 33 bp, Homo sapien
gcagcaagcctcgatgcactgtggaccagctgg

SEQ ID NO: 76887 - DNA, 33 bp, Homo sapien
acacacacgagcttgacaactgttccaaatgca

SEQ ID NO: 76888 - DNA, 33 bp, Homo sapien
acacacacgagcttgagaactgttccaaatgca

SEQ ID NO: 76889 - DNA, 33 bp, Homo sapien
tactagtgatattgcagctacagcttcggggga

SEQ ID NO: 76890 - DNA, 33 bp, Homo sapien
tactagtgatattgcatctacagcttcggggga

SEQ ID NO: 76891 - DNA, 33 bp, Homo sapien
cctgtatgaatttgtcaccagtaactcggatac

SEQ ID NO: 76892 - DNA, 33 bp, Homo sapien
cctgtatgaatttgtcgccagtaactcggatac

SEQ ID NO: 76893 - DNA, 33 bp, Homo sapien
ggggacatgaaagaggacagcctggtacctatg

SEQ ID NO: 76894 - DNA, 33 bp, Homo sapien
ggggacatgaaagaggtcagcctggtacctatg

SEQ ID NO: 76895 - DNA, 33 bp, Homo sapien
gaagcaactaggatgacacaggtgagcagtgaa

SEQ ID NO: 76896 - DNA, 33 bp, Homo sapien
gaagcaactaggatgatacaggtgagcagtgaa

SEQ ID NO: 76897 - DNA, 33 bp, Homo sapien
aatatgcagcctaccaatgaaagtagacatagc

SEQ ID NO: 76898 - DNA, 33 bp, Homo sapien
aatatgcagcctaccagtgaaagtagacatagc

SEQ ID NO: 76899 - DNA, 33 bp, Homo sapien
gcagaacagcatgacacgttcaggtctttgggg

SEQ ID NO: 76900 - DNA, 33 bp, Homo sapien
gcagaacagcatgacaggttcaggtctttgggg

SEQ ID NO: 76901 - DNA, 33 bp, Homo sapien
tcttctccttttcacaataactaatccttctgt

SEQ ID NO: 76902 - DNA, 33 bp, Homo sapien
tcttctccttttcacagtaactaatccttctgt

SEQ ID NO: 76903 - DNA, 33 bp, Homo sapien
gtatcatgaagacagaaggagtcattaccttca

SEQ ID NO: 76904 - DNA, 33 bp, Homo sapien
gtatcatgaagacagatggagtcattaccttca

SEQ ID NO: 76905 - DNA, 33 bp, Homo sapien
acttttcaatttctcaagcagattactgcaaca

SEQ ID NO: 76906 - DNA, 33 bp, Homo sapien
acttttcaatttctcaggcagattactgcaaca

SEQ ID NO: 76907 - DNA, 33 bp, Homo sapien
attctcgcagcttgaaagggcagcacacaccac

SEQ ID NO: 76908 - DNA, 33 bp, Homo sapien
attctcgcagcttgaaggggcagcacacaccac

SEQ ID NO: 76909 - DNA, 33 bp, Homo sapien
agaggtggaagtcgtaactttggggtcaggccc

SEQ ID NO: 76910 - DNA, 33 bp, Homo sapien
agaggtggaagtcgtacctttggggtcaggccc

SEQ ID NO: 76911 - DNA, 33 bp, Homo sapien
actagttggcaggaatcaagcccactgtgtact

SEQ ID NO: 76912 - DNA, 33 bp, Homo sapien
actagttggcaggaatgaagcccactgtgtact

SEQ ID NO: 76913 - DNA, 33 bp, Homo sapien
ccgcatactatgaaaaagctttaaaacacaaca

SEQ ID NO: 76914 - DNA, 33 bp, Homo sapien
ccgcatactatgaaaaggctttaaaacacaaca

SEQ ID NO: 76915 - DNA, 33 bp, Homo sapien
caagagcaacatgaacaacctgctgtctgagta

SEQ ID NO: 76916 - DNA, 33 bp, Homo sapien
caagagcaacatgaacgacctgctgtctgagta

SEQ ID NO: 76917 - DNA, 33 bp, Homo sapien
tctctgactcacctcaaatgttttcctgcacaa

SEQ ID NO: 76918 - DNA, 33 bp, Homo sapien
tctctgactcacctcagatgttttcctgcacaa

SEQ ID NO: 76919 - DNA, 33 bp, Homo sapien; identical to SEQ ID NO: 76917

SEQ ID NO: 76920 - DNA, 33 bp, Homo sapien; identical to SEQ ID NO: 76918

SEQ ID NO: 76921 - DNA, 33 bp, Homo sapien
tagcccattttctcacagctatgacaaaactga

SEQ ID NO: 76922 - DNA, 33 bp, Homo sapien
tagcccattttctcactgctatgacaaaactga

SEQ ID NO: 76923 - DNA, 33 bp, Homo sapien
gaatgcactgtgcttccaagagagccatcatca

SEQ ID NO: 76924 - DNA, 33 bp, Homo sapien
gaatgcactgtgcttctaagagagccatcatca

SEQ ID NO: 76925 - DNA, 33 bp, Homo sapien
aaaaggctttaaaatgcaacagaaggagatgtg

SEQ ID NO: 76926 - DNA, 33 bp, Homo sapien
aaaaggctttaaaatgtaacagaaggagatgtg

SEQ ID NO: 76927 - DNA, 33 bp, Homo sapien
acgggaccaggactgaaaagtgcgtgggagggc

SEQ ID NO: 76928 - DNA, 33 bp, Homo sapien
acgggaccaggactgagaagtgcgtgggagggc

SEQ ID NO: 76929 - DNA, 33 bp, Homo sapien
cagataagttaattcaagtagaacaatcaagga

SEQ ID NO: 76930 - DNA, 33 bp, Homo sapien
cagataagttaattcatgtagaacaatcaagga

SEQ ID NO: 76931 - DNA, 33 bp, Homo sapien
gtaggccataggcatacgacctttgagcctatt

SEQ ID NO: 76932 - DNA, 33 bp, Homo sapien
gtaggccataggcataggacctttgagcctatt

SEQ ID NO: 76933 - DNA, 33 bp, Homo sapien
ctataaaacattgtcacaactcagagttaaaac

SEQ ID NO: 76934 - DNA, 33 bp, Homo sapien
ctataaaacattgtcagaactcagagttaaaac

SEQ ID NO: 76935 - DNA, 33 bp, Homo sapien
ctaccattataacatcaagtgtttttcttaatt

SEQ ID NO: 76936 - DNA, 33 bp, Homo sapien
ctaccattataacatcgagtgtttttcttaatt

SEQ ID NO: 76937 - DNA, 33 bp, Homo sapien
taatatgacagaacaacgctcttctataccccc

SEQ ID NO: 76938 - DNA, 33 bp, Homo sapien
taatatgacagaacaaggctcttctataccccc

SEQ ID NO: 76939 - DNA, 33 bp, Homo sapien
acatattgcaaaacaacgtatctggtgaattat

SEQ ID NO: 76940 - DNA, 33 bp, Homo sapien
acatattgcaaaacaatgtatctggtgaattat

SEQ ID NO: 76941 - DNA, 33 bp, Homo sapien
cacccaaatgctgttaaaacccaacaaaggatg

SEQ ID NO: 76942 - DNA, 33 bp, Homo sapien
cacccaaatgctgttagaacccaacaaaggatg

SEQ ID NO: 76943 - DNA, 33 bp, Homo sapien
tcccctttctctgtgacggggctggattgggtt

SEQ ID NO: 76944 - DNA, 33 bp, Homo sapien
tcccctttctctgtgagggggctggattgggtt

SEQ ID NO: 76945 - DNA, 33 bp, Homo sapien
tgcagcttatctggaaatgccatgcaacaacca

SEQ ID NO: 76946 - DNA, 33 bp, Homo sapien
tgcagcttatctggaagtgccatgcaacaacca

SEQ ID NO: 76947 - DNA, 33 bp, Homo sapien
caacacaccatctgtccccaaattgtaactgtc

SEQ ID NO: 76948 - DNA, 33 bp, Homo sapien
caacacaccatctgtcgccaaattgtaactgtc

SEQ ID NO: 76949 - DNA, 33 bp, Homo sapien
aacaactaatgaaacacaggtatcagtgagcac

SEQ ID NO: 76950 - DNA, 33 bp, Homo sapien
aacaactaatgaaacataggtatcagtgagcac

SEQ ID NO: 76951 - DNA, 33 bp, Homo sapien
gtcacatgcatttctacgtcgattttaacataa

SEQ ID NO: 76952 - DNA, 33 bp, Homo sapien
gtcacatgcatttctatgtcgattttaacataa

SEQ ID NO: 76953 - DNA, 33 bp, Homo sapien
aaatgccttactaaatcatgcttactaaaatta

SEQ ID NO: 76954 - DNA, 33 bp, Homo sapien
aaatgccttactaaattatgcttactaaaatta

SEQ ID NO: 76955 - DNA, 33 bp, Homo sapien
acccctataaactttaccattctaaagccaggc

SEQ ID NO: 76956 - DNA, 33 bp, Homo sapien
acccctataaactttatcattctaaagccaggc

SEQ ID NO: 76957 - DNA, 33 bp, Homo sapien
caggggcttgtgtactcagaacaattaggccat

SEQ ID NO: 76958 - DNA, 33 bp, Homo sapien
caggggcttgtgtacttagaacaattaggccat

SEQ ID NO: 76959 - DNA, 33 bp, Homo sapien
gggtttcgctagttacccatgtttgtggaactc

SEQ ID NO: 76960 - DNA, 33 bp, Homo sapien
gggtttcgctagttactcatgtttgtggaactc

SEQ ID NO: 76961 - DNA, 33 bp, Homo sapien
tttaggaggggcataaagaggaattatttgttg

SEQ ID NO: 76962 - DNA, 33 bp, Homo sapien
tttaggaggggcataaggaggaattatttgttg

SEQ ID NO: 76963 - DNA, 33 bp, Homo sapien
aaactgccacttgaaactataatcactgtctgt

SEQ ID NO: 76964 - DNA, 33 bp, Homo sapien
aaactgccacttgaaagtataatcactgtctgt

SEQ ID NO: 76965 - DNA, 33 bp, Homo sapien
ggaaaaattaaaggaaacatggattactagaaa

SEQ ID NO: 76966 - DNA, 33 bp, Homo sapien
ggaaaaattaaaggaagcatggattactagaaa

SEQ ID NO: 76967 - DNA, 33 bp, Homo sapien
tatttactaaaatccacgaattttcttgtgttt

SEQ ID NO: 76968 - DNA, 33 bp, Homo sapien
tatttactaaaatccatgaattttcttgtgttt

SEQ ID NO: 76969 - DNA, 33 bp, Homo sapien; identical to SEQ ID NO: 76967

SEQ ID NO: 76970 - DNA, 33 bp, Homo sapien; identical to SEQ ID NO: 76968

SEQ ID NO: 76971 - DNA, 33 bp, Homo sapien
ctcattctatggtagtaaaacaagtaacacagt

SEQ ID NO: 76972 - DNA, 33 bp, Homo sapien
ctcattctatggtagtgaaacaagtaacacagt

SEQ ID NO: 76973 - DNA, 33 bp, Homo sapien
tccagcccctatcatcactaagttagtcaataa

SEQ ID NO: 76974 - DNA, 33 bp, Homo sapien
tccagcccctatcatcgctaagttagtcaataa

SEQ ID NO: 76975 - DNA, 33 bp, Homo sapien
ttgcctagtgatcctacataagtcaataccact

SEQ ID NO: 76976 - DNA, 33 bp, Homo sapien
ttgcctagtgatcctatataagtcaataccact

SEQ ID NO: 76977 - DNA, 33 bp, Homo sapien
ttgggggagtagagcaccttacacaatgggaga

SEQ ID NO: 76978 - DNA, 33 bp, Homo sapien
ttgggggagtagagcatcttacacaatgggaga

SEQ ID NO: 76979 - DNA, 33 bp, Homo sapien
catcttgggaactctaagaacaaagacccgccg

SEQ ID NO: 76980 - DNA, 33 bp, Homo sapien
catcttgggaactctaggaacaaagacccgccg

SEQ ID NO: 76981 - DNA, 33 bp, Homo sapien
ggtctctaggttggcaagactgtccacagaatg

SEQ ID NO: 76982 - DNA, 33 bp, Homo sapien
ggtctctaggttggcaggactgtccacagaatg

SEQ ID NO: 76983 - DNA, 33 bp, Homo sapien
tacagcctttcttccaccccaatacagcatggt

SEQ ID NO: 76984 - DNA, 33 bp, Homo sapien
tacagcctttcttccatcccaatacagcatggt

SEQ ID NO: 76985 - DNA, 33 bp, Homo sapien
gatgtacactgggaagacttcataattcacaaa

SEQ ID NO: 76986 - DNA, 33 bp, Homo sapien
gatgtacactgggaaggcttcataattcacaaa

SEQ ID NO: 76987 - DNA, 33 bp, Homo sapien
agtgttggatggagaaggaagaatcccttatgg

SEQ ID NO: 76988 - DNA, 33 bp, Homo sapien
agtgttggatggagaatgaagaatcccttatgg

SEQ ID NO: 76989 - DNA, 33 bp, Homo sapien
ttcccaaccacctttacctatgactctggagtc

SEQ ID NO: 76990 - DNA, 33 bp, Homo sapien
ttcccaaccacctttagctatgactctggagtc

SEQ ID NO: 76991 - DNA, 33 bp, Homo sapien
acttactagcagctgaaagagaagtctgtaaaa

SEQ ID NO: 76992 - DNA, 33 bp, Homo sapien
acttactagcagctgagagagaagtctgtaaaa

SEQ ID NO: 76993 - DNA, 33 bp, Homo sapien; identical to SEQ ID NO: 76991

SEQ ID NO: 76994 - DNA, 33 bp, Homo sapien; identical to SEQ ID NO: 76992

SEQ ID NO: 76995 - DNA, 33 bp, Homo sapien; identical to SEQ ID NO: 76991

SEQ ID NO: 76996 - DNA, 33 bp, Homo sapien; identical to SEQ ID NO: 76992

SEQ ID NO: 76997 - DNA, 33 bp, Homo sapien
agcatatacaagtatcaatagcccaatcaatca

SEQ ID NO: 76998 - DNA, 33 bp, Homo sapien
agcatatacaagtatcgatagcccaatcaatca

SEQ ID NO: 76999 - DNA, 33 bp, Homo sapien
gagggacaaaggagaaaaagatatagcaggacg

SEQ ID NO: 77000 - DNA, 33 bp, Homo sapien
gagggacaaaggagaagaagatatagcaggacg

SEQ ID NO: 77001 - DNA, 33 bp, Homo sapien
aattaagtttatgttcaagtgtgatttctttgt

SEQ ID NO: 77002 - DNA, 33 bp, Homo sapien
aattaagtttatgttcgagtgtgatttctttgt

SEQ ID NO: 77003 - DNA, 33 bp, Homo sapien
atgttttctgaagaggccatatatgcaaagtga

SEQ ID NO: 77004 - DNA, 33 bp, Homo sapien
atgttttctgaagaggtcatatatgcaaagtga

SEQ ID NO: 77005 - DNA, 33 bp, Homo sapien
cacagtgaacccagagcaagtagacccagggac

SEQ ID NO: 77006 - DNA, 33 bp, Homo sapien
cacagtgaacccagaggaagtagacccagggac

SEQ ID NO: 77007 - DNA, 33 bp, Homo sapien
tatgtatattatacacaatggagaaagagactg

SEQ ID NO: 77008 - DNA, 33 bp, Homo sapien
tatgtatattatacacgatggagaaagagactg

SEQ ID NO: 77009 - DNA, 33 bp, Homo sapien
taagatacgagacttacaaataataaaaatgtc

SEQ ID NO: 77010 - DNA, 33 bp, Homo sapien
taagatacgagacttagaaataataaaaatgtc

SEQ ID NO: 77011 - DNA, 33 bp, Homo sapien
gttttacatagctgcaagcaatgaaggtgtcct

SEQ ID NO: 77012 - DNA, 33 bp, Homo sapien
gttttacatagctgcaggcaatgaaggtgtcct

SEQ ID NO: 77013 - DNA, 33 bp, Homo sapien
gaaggtcctgttttcccaaggcatttttaataa

SEQ ID NO: 77014 - DNA, 33 bp, Homo sapien
gaaggtcctgttttcctaaggcatttttaataa

SEQ ID NO: 77015 - DNA, 33 bp, Homo sapien
ggccaaggttgttatgaagattaggtcttatag

SEQ ID NO: 77016 - DNA, 33 bp, Homo sapien
ggccaaggttgttatggagattaggtcttatag

SEQ ID NO: 77017 - DNA, 33 bp, Homo sapien
actaggctttcaacaactgtatatagtcagaag

SEQ ID NO: 77018 - DNA, 33 bp, Homo sapien
actaggctttcaacaattgtatatagtcagaag

SEQ ID NO: 77019 - DNA, 33 bp, Homo sapien
aaagcatggtaccaaccgctttggaattcacgc

SEQ ID NO: 77020 - DNA, 33 bp, Homo sapien
aaagcatggtaccaactgctttggaattcacgc

SEQ ID NO: 77021 - DNA, 33 bp, Homo sapien
tttaaaggctagcaaacgtgtcaaaatgaacag

SEQ ID NO: 77022 - DNA, 33 bp, Homo sapien
tttaaaggctagcaaatgtgtcaaaatgaacag

SEQ ID NO: 77023 - DNA, 33 bp, Homo sapien
gtcatcctgccaaagacactccagtcagagagc

SEQ ID NO: 77024 - DNA, 33 bp, Homo sapien
gtcatcctgccaaagagactccagtcagagagc

SEQ ID NO: 77025 - DNA, 33 bp, Homo sapien
agaccaatggataagaaagtatatacacattca

SEQ ID NO: 77026 - DNA, 33 bp, Homo sapien
agaccaatggataagagagtatatacacattca

SEQ ID NO: 77027 - DNA, 33 bp, Homo sapien
aaatgccccagagctcagagcctactgtgctgg

SEQ ID NO: 77028 - DNA, 33 bp, Homo sapien
aaatgccccagagctcggagcctactgtgctgg

SEQ ID NO: 77029 - DNA, 33 bp, Homo sapien
aaagatgctctaaaagaaaaagtatgaatgtac

SEQ ID NO: 77030 - DNA, 33 bp, Homo sapien
aaagatgctctaaaaggaaaagtatgaatgtac

SEQ ID NO: 77031 - DNA, 33 bp, Homo sapien
ggtaatttctcatcccccatcaccttcccatcc

SEQ ID NO: 77032 - DNA, 33 bp, Homo sapien
ggtaatttctcatccctcatcaccttcccatcc

SEQ ID NO: 77033 - DNA, 33 bp, Homo sapien
gagactcagcaaggtaagaggatgggaaggtga

SEQ ID NO: 77034 - DNA, 33 bp, Homo sapien
gagactcagcaaggtaggaggatgggaaggtga

SEQ ID NO: 77035 - DNA, 33 bp, Homo sapien
atgaagaagggtcctcaacaaaggagcacagct

SEQ ID NO: 77036 - DNA, 33 bp, Homo sapien
atgaagaagggtcctcgacaaaggagcacagct

SEQ ID NO: 77037 - DNA, 33 bp, Homo sapien
attgaaagctagtgttcaaacaagtacatgtac

SEQ ID NO: 77038 - DNA, 33 bp, Homo sapien
attgaaagctagtgttgaaacaagtacatgtac

SEQ ID NO: 77039 - DNA, 33 bp, Homo sapien
aaaagctaattggcccactttagatggtgaaaa

SEQ ID NO: 77040 - DNA, 33 bp, Homo sapien
aaaagctaattggcccgctttagatggtgaaaa

SEQ ID NO: 77041 - DNA, 33 bp, Homo sapien
gactgcaaacagctcaaatgttttggtatggcc

SEQ ID NO: 77042 - DNA, 33 bp, Homo sapien
gactgcaaacagctcagatgttttggtatggcc

SEQ ID NO: 77043 - DNA, 33 bp, Homo sapien
tataagtacttggctccctttttctttgaataa

SEQ ID NO: 77044 - DNA, 33 bp, Homo sapien
tataagtacttggctctctttttctttgaataa

SEQ ID NO: 77045 - DNA, 33 bp, Homo sapien
ttcccttttcataccccccatggtagaagttca

SEQ ID NO: 77046 - DNA, 33 bp, Homo sapien
ttcccttttcatacccgccatggtagaagttca

SEQ ID NO: 77047 - DNA, 33 bp, Homo sapien
gtggtggtcttagtaagaaagcttctgctttga

SEQ ID NO: 77048 - DNA, 33 bp, Homo sapien
gtggtggtcttagtaataaagcttctgctttga

SEQ ID NO: 77049 - DNA, 33 bp, Homo sapien
cacctagggccaccaaactgttcattttgaaat

SEQ ID NO: 77050 - DNA, 33 bp, Homo sapien
cacctagggccaccaagctgttcattttgaaat

SEQ ID NO: 77051 - DNA, 33 bp, Homo sapien
tgcacagataagtacccgaaaagaggtgtggcc

SEQ ID NO: 77052 - DNA, 33 bp, Homo sapien
tgcacagataagtacctgaaaagaggtgtggcc

SEQ ID NO: 77053 - DNA, 33 bp, Homo sapien
agcctggaactgggccaagaaattgaaagttac

SEQ ID NO: 77054 - DNA, 33 bp, Homo sapien
agcctggaactgggcctagaaattgaaagttac

SEQ ID NO: 77055 - DNA, 33 bp, Homo sapien
tgtggggaccgcagccagaggcccaggagtggg

SEQ ID NO: 77056 - DNA, 33 bp, Homo sapien
tgtggggaccgcagccggaggcccaggagtggg

SEQ ID NO: 77057 - DNA, 33 bp, Homo sapien
ttgttttgcacagagactcacacaggctggctg

SEQ ID NO: 77058 - DNA, 33 bp, Homo sapien
ttgttttgcacagagattcacacaggctggctg

SEQ ID NO: 77059 - DNA, 33 bp, Homo sapien
aggagaatgccgattcacgtacggtaccagatg

SEQ ID NO: 77060 - DNA, 33 bp, Homo sapien
aggagaatgccgattcgcgtacggtaccagatg

SEQ ID NO: 77061 - DNA, 33 bp, Homo sapien
cctgttcatattctccgcaaggcttccagtcag

SEQ ID NO: 77062 - DNA, 33 bp, Homo sapien
cctgttcatattctcctcaaggcttccagtcag

SEQ ID NO: 77063 - DNA, 33 bp, Homo sapien
ttgtcttcctggactcaacctggccaggacggg

SEQ ID NO: 77064 - DNA, 33 bp, Homo sapien
ttgtcttcctggactctacctggccaggacggg

SEQ ID NO: 77065 - DNA, 33 bp, Homo sapien
ttattgcgatgatctgaaaccaaagctacaaca

SEQ ID NO: 77066 - DNA, 33 bp, Homo sapien
ttattgcgatgatctggaaccaaagctacaaca

SEQ ID NO: 77067 - DNA, 33 bp, Homo sapien
aatgttcataatggcagcaggtatgaaagctgg

SEQ ID NO: 77068 - DNA, 33 bp, Homo sapien
aatgttcataatggcatcaggtatgaaagctgg

SEQ ID NO: 77069 - DNA, 33 bp, Homo sapien
acaaaaacaggagaaaacaattaatagattcat

SEQ ID NO: 77070 - DNA, 33 bp, Homo sapien
acaaaaacaggagaaagcaattaatagattcat

SEQ ID NO: 77071 - DNA, 33 bp, Homo sapien
tgagtggatcgaaggacgttagagctgcttctg

SEQ ID NO: 77072 - DNA, 33 bp, Homo sapien
tgagtggatcgaaggatgttagagctgcttctg

SEQ ID NO: 77073 - DNA, 33 bp, Homo sapien
cagaaatagctccatccgactatccacagctga

SEQ ID NO: 77074 - DNA, 33 bp, Homo sapien
cagaaatagctccatctgactatccacagctga

SEQ ID NO: 77075 - DNA, 33 bp, Homo sapien
aacaaacaaatagcagaaaccaaataaccactc

SEQ ID NO: 77076 - DNA, 33 bp, Homo sapien
aacaaacaaatagcaggaaccaaataaccactc

SEQ ID NO: 77077 - DNA, 33 bp, Homo sapien
gcttgaactaggaaaacgtaagcccaccttgga

SEQ ID NO: 77078 - DNA, 33 bp, Homo sapien
gcttgaactaggaaaatgtaagcccaccttgga

SEQ ID NO: 77079 - DNA, 33 bp, Homo sapien
ttaaaattcaatactaagttcctcagttgcatt

SEQ ID NO: 77080 - DNA, 33 bp, Homo sapien
ttaaaattcaatactaggttcctcagttgcatt

SEQ ID NO: 77081 - DNA, 33 bp, Homo sapien
ggttcctcagtgtatccacctgagtgctggcca

SEQ ID NO: 77082 - DNA, 33 bp, Homo sapien
ggttcctcagtgtatctacctgagtgctggcca

SEQ ID NO: 77083 - DNA, 33 bp, Homo sapien
ccccttcaactacccaccttagagttccatttt

SEQ ID NO: 77084 - DNA, 33 bp, Homo sapien
ccccttcaactacccatcttagagttccatttt

SEQ ID NO: 77085 - DNA, 33 bp, Homo sapien
cagaaaggcaagctcacgaggaccggctcgtgt

SEQ ID NO: 77086 - DNA, 33 bp, Homo sapien
cagaaaggcaagctcatgaggaccggctcgtgt

SEQ ID NO: 77087 - DNA, 33 bp, Homo sapien
gagaaagagcaaacaaacaagcgagtaacaggg

SEQ ID NO: 77088 - DNA, 33 bp, Homo sapien
gagaaagagcaaacaagcaagcgagtaacaggg

SEQ ID NO: 77089 - DNA, 33 bp, Homo sapien
tgtagttggtgttatcaatgtacctgtaactga

SEQ ID NO: 77090 - DNA, 33 bp, Homo sapien
tgtagttggtgttatccatgtacctgtaactga

SEQ ID NO: 77091 - DNA, 33 bp, Homo sapien
cagacccccagggtagaagttaggagctgaaac

SEQ ID NO: 77092 - DNA, 33 bp, Homo sapien
cagacccccagggtaggagttaggagctgaaac

SEQ ID NO: 77093 - DNA, 33 bp, Homo sapien
cccagctttgggacgaacaccaccttgccaccc

SEQ ID NO: 77094 - DNA, 33 bp, Homo sapien
cccagctttgggacgagcaccaccttgccaccc

SEQ ID NO: 77095 - DNA, 33 bp, Homo sapien
cagagaaatcaaaagcaaagtgcaacaatggga

SEQ ID NO: 77096 - DNA, 33 bp, Homo sapien
cagagaaatcaaaagcgaagtgcaacaatggga

SEQ ID NO: 77097 - DNA, 33 bp, Homo sapien
gggagagtacttcaacaagccccgtccccaggg

SEQ ID NO: 77098 - DNA, 33 bp, Homo sapien
gggagagtacttcaaccagccccgtccccaggg

SEQ ID NO: 77099 - DNA, 33 bp, Homo sapien
aaagtggggttcagcaacaggccgatggaggga

SEQ ID NO: 77100 - DNA, 33 bp, Homo sapien
aaagtggggttcagcagcaggccgatggaggga

SEQ ID NO: 77101 - DNA, 33 bp, Homo sapien
ggggacaagggcttatcacaggtgcagccccct

SEQ ID NO: 77102 - DNA, 33 bp, Homo sapien
ggggacaagggcttattacaggtgcagccccct

SEQ ID NO: 77103 - DNA, 33 bp, Homo sapien
tatctatctattaggacacagctttccctggca

SEQ ID NO: 77104 - DNA, 33 bp, Homo sapien
tatctatctattaggagacagctttccctggca

SEQ ID NO: 77105 - DNA, 33 bp, Homo sapien
agggaggggtcatttaactctctttaacttata

SEQ ID NO: 77106 - DNA, 33 bp, Homo sapien
agggaggggtcatttatctctctttaacttata

SEQ ID NO: 77107 - DNA, 33 bp, Homo sapien
gttacaaggcttatcaaagttttcagataatct

SEQ ID NO: 77108 - DNA, 33 bp, Homo sapien
gttacaaggcttatcagagttttcagataatct

SEQ ID NO: 77109 - DNA, 33 bp, Homo sapien
aacacagttacattccaagtccctggggatgat

SEQ ID NO: 77110 - DNA, 33 bp, Homo sapien
aacacagttacattccgagtccctggggatgat

SEQ ID NO: 77111 - DNA, 33 bp, Homo sapien
gccggtcgaggcagcactgaagacacgtgggtt

SEQ ID NO: 77112 - DNA, 33 bp, Homo sapien
gccggtcgaggcagcattgaagacacgtgggtt

SEQ ID NO: 77113 - DNA, 33 bp, Homo sapien
aatgatgcttcacaagccaaaaaccacaggcag

SEQ ID NO: 77114 - DNA, 33 bp, Homo sapien
aatgatgcttcacaagtcaaaaaccacaggcag

SEQ ID NO: 77115 - DNA, 33 bp, Homo sapien
ggcacaggtaggatttaaaaatgaggcatagac

SEQ ID NO: 77116 - DNA, 33 bp, Homo sapien
ggcacaggtaggattttaaaatgaggcatagac

SEQ ID NO: 77117 - DNA, 33 bp, Homo sapien
tggacacgggccatcacgtggaccaagacagag

SEQ ID NO: 77118 - DNA, 33 bp, Homo sapien
tggacacgggccatcatgtggaccaagacagag

SEQ ID NO: 77119 - DNA, 33 bp, Homo sapien
gagagtacagctgtgaagccaggggacagaggg

SEQ ID NO: 77120 - DNA, 33 bp, Homo sapien
gagagtacagctgtgaggccaggggacagaggg

SEQ ID NO: 77121 - DNA, 33 bp, Homo sapien
ctggaatctccggagacgctcttcttagcgtgc

SEQ ID NO: 77122 - DNA, 33 bp, Homo sapien
ctggaatctccggagatgctcttcttagcgtgc

SEQ ID NO: 77123 - DNA, 33 bp, Homo sapien
gttatcctagttaagacgtagcataagagattt

SEQ ID NO: 77124 - DNA, 33 bp, Homo sapien
gttatcctagttaagaggtagcataagagattt

SEQ ID NO: 77125 - DNA, 33 bp, Homo sapien
aggagcagctggcacgcaggaagctgcaggcag

SEQ ID NO: 77126 - DNA, 33 bp, Homo sapien
aggagcagctggcacgtaggaagctgcaggcag

SEQ ID NO: 77127 - DNA, 33 bp, Homo sapien
agctgagctccagctcaaaagtgtgcatggagg

SEQ ID NO: 77128 - DNA, 33 bp, Homo sapien
agctgagctccagctcgaaagtgtgcatggagg

SEQ ID NO: 77129 - DNA, 33 bp, Homo sapien
agataattaactgaaacaggccctcaggaggcc

SEQ ID NO: 77130 - DNA, 33 bp, Homo sapien
agataattaactgaaataggccctcaggaggcc

SEQ ID NO: 77131 - DNA, 33 bp, Homo sapien
cttgacacaagggagactacccattactggcct

SEQ ID NO: 77132 - DNA, 33 bp, Homo sapien
cttgacacaagggagattacccattactggcct

SEQ ID NO: 77133 - DNA, 33 bp, Homo sapien
gaggagcctttaggaagcacttgggtcatgaat

SEQ ID NO: 77134 - DNA, 33 bp, Homo sapien
gaggagcctttaggaatcacttgggtcatgaat

SEQ ID NO: 77135 - DNA, 33 bp, Homo sapien
caaactgttcccctacaaataatgtgttggtct

SEQ ID NO: 77136 - DNA, 33 bp, Homo sapien
caaactgttcccctacgaataatgtgttggtct

SEQ ID NO: 77137 - DNA, 33 bp, Homo sapien
ttggaagaagacataaaccagattagatgaatt

SEQ ID NO: 77138 - DNA, 33 bp, Homo sapien
ttggaagaagacataacccagattagatgaatt

SEQ ID NO: 77139 - DNA, 33 bp, Homo sapien
caggacagatcaaaccacacaggctttgaagac

SEQ ID NO: 77140 - DNA, 33 bp, Homo sapien
caggacagatcaaaccgcacaggctttgaagac

SEQ ID NO: 77141 - DNA, 33 bp, Homo sapien
aacccatttcacaggcactgaagattcgggatt

SEQ ID NO: 77142 - DNA, 33 bp, Homo sapien
aacccatttcacaggcgctgaagattcgggatt

SEQ ID NO: 77143 - DNA, 33 bp, Homo sapien; identical to SEQ ID NO: 77141

SEQ ID NO: 77144 - DNA, 33 bp, Homo sapien; identical to SEQ ID NO: 77142

SEQ ID NO: 77145 - DNA, 33 bp, Homo sapien
aaacaatttgcgaggaagaactctgattattct

SEQ ID NO: 77146 - DNA, 33 bp, Homo sapien
aaacaatttgcgaggaggaactctgattattct

SEQ ID NO: 77147 - DNA, 33 bp, Homo sapien
tacctctgttgtttccaaccctcccaattctta

SEQ ID NO: 77148 - DNA, 33 bp, Homo sapien
tacctctgttgtttcctaccctcccaattctta

SEQ ID NO: 77149 - DNA, 33 bp, Homo sapien
agcttccatgtccataaaaaggaggggagaagg

SEQ ID NO: 77150 - DNA, 33 bp, Homo sapien
agcttccatgtccatacaaaggaggggagaagg

SEQ ID NO: 77151 - DNA, 33 bp, Homo sapien
taaaaacaatggaaaacaagagttgttcttgga

SEQ ID NO: 77152 - DNA, 33 bp, Homo sapien
taaaaacaatggaaaagaagagttgttcttgga

SEQ ID NO: 77153 - DNA, 33 bp, Homo sapien
atccacataacactgaggctgatgtaataccaa

SEQ ID NO: 77154 - DNA, 33 bp, Homo sapien
atccacataacactgatgctgatgtaataccaa

SEQ ID NO: 77155 - DNA, 33 bp, Homo sapien
agtgacacaaaaataaatagataactctagtag

SEQ ID NO: 77156 - DNA, 33 bp, Homo sapien
agtgacacaaaaataagtagataactctagtag

SEQ ID NO: 77157 - DNA, 33 bp, Homo sapien
catcttttgctatgagaagatggttttcatggt

SEQ ID NO: 77158 - DNA, 33 bp, Homo sapien
catcttttgctatgagcagatggttttcatggt

SEQ ID NO: 77159 - DNA, 33 bp, Homo sapien
taaaaacttcagggaaaggaaagatttcttaaa

SEQ ID NO: 77160 - DNA, 33 bp, Homo sapien
taaaaacttcagggaacggaaagatttcttaaa

SEQ ID NO: 77161 - DNA, 33 bp, Homo sapien
ttacacagctcccttcaaggatatgctagggtc

SEQ ID NO: 77162 - DNA, 33 bp, Homo sapien
ttacacagctcccttcgaggatatgctagggtc

SEQ ID NO: 77163 - DNA, 33 bp, Homo sapien
gtaggagggcctagacaagaaagtaggagaaac

SEQ ID NO: 77164 - DNA, 33 bp, Homo sapien
gtaggagggcctagacgagaaagtaggagaaac

SEQ ID NO: 77165 - DNA, 33 bp, Homo sapien
aagtgaattgacagaagatacggtttacctaga

SEQ ID NO: 77166 - DNA, 33 bp, Homo sapien
aagtgaattgacagaatatacggtttacctaga

SEQ ID NO: 77167 - DNA, 33 bp, Homo sapien
caccccatgtgctctccctgcatctgcgccacc

SEQ ID NO: 77168 - DNA, 33 bp, Homo sapien
caccccatgtgctctctctgcatctgcgccacc

SEQ ID NO: 77169 - DNA, 33 bp, Homo sapien
gtagatactctggtcacattggattgggccctt

SEQ ID NO: 77170 - DNA, 33 bp, Homo sapien
gtagatactctggtcatattggattgggccctt

SEQ ID NO: 77171 - DNA, 33 bp, Homo sapien
catcacgaagtaaccacgaaggagccccttcgt

SEQ ID NO: 77172 - DNA, 33 bp, Homo sapien
catcacgaagtaaccatgaaggagccccttcgt

SEQ ID NO: 77173 - DNA, 33 bp, Homo sapien
ggggtaggctggtagaagtagtcttgagaaatt

SEQ ID NO: 77174 - DNA, 33 bp, Homo sapien
ggggtaggctggtagaggtagtcttgagaaatt

SEQ ID NO: 77175 - DNA, 33 bp, Homo sapien
aagggaggtaaagcaaagataaagactgtgtgg

SEQ ID NO: 77176 - DNA, 33 bp, Homo sapien
aagggaggtaaagcaacgataaagactgtgtgg

SEQ ID NO: 77177 - DNA, 33 bp, Homo sapien
gccacaaaccattcaccatgcccttgagcttct

SEQ ID NO: 77178 - DNA, 33 bp, Homo sapien
gccacaaaccattcactatgcccttgagcttct

SEQ ID NO: 77179 - DNA, 33 bp, Homo sapien
atttatgcatttatcacgtggcatttatccatt

SEQ ID NO: 77180 - DNA, 33 bp, Homo sapien
atttatgcatttatcaggtggcatttatccatt

SEQ ID NO: 77181 - DNA, 33 bp, Homo sapien
catgaagaaatgatctcacctactttgtttggc

SEQ ID NO: 77182 - DNA, 33 bp, Homo sapien
catgaagaaatgatctgacctactttgtttggc

SEQ ID NO: 77183 - DNA, 33 bp, Homo sapien
ctggggctgttcttggaaggacttctgtggctt

SEQ ID NO: 77184 - DNA, 33 bp, Homo sapien
ctggggctgttcttggtaggacttctgtggctt

SEQ ID NO: 77185 - DNA, 33 bp, Homo sapien
ctgtctctggcccactaaggaaagcaggtctca

SEQ ID NO: 77186 - DNA, 33 bp, Homo sapien
ctgtctctggcccactgaggaaagcaggtctca

SEQ ID NO: 77187 - DNA, 33 bp, Homo sapien
tcttcagtgcactgcaaggatttaacccacact

SEQ ID NO: 77188 - DNA, 33 bp, Homo sapien
tcttcagtgcactgcagggatttaacccacact

SEQ ID NO: 77189 - DNA, 33 bp, Homo sapien
tgatgtaaatgctcacactaacggcctatgttc

SEQ ID NO: 77190 - DNA, 33 bp, Homo sapien
tgatgtaaatgctcacgctaacggcctatgttc

SEQ ID NO: 77191 - DNA, 33 bp, Homo sapien
tgacctagaagcgcccgccctgcttcaaattgt

SEQ ID NO: 77192 - DNA, 33 bp, Homo sapien
tgacctagaagcgccctccctgcttcaaattgt

SEQ ID NO: 77193 - DNA, 33 bp, Homo sapien
tcaatttattttatccaaactttgctatttact

SEQ ID NO: 77194 - DNA, 33 bp, Homo sapien
tcaatttattttatccgaactttgctatttact

SEQ ID NO: 77195 - DNA, 33 bp, Homo sapien
ggtcagaaggccctgcacttggacctttgcaga

SEQ ID NO: 77196 - DNA, 33 bp, Homo sapien
ggtcagaaggccctgcgcttggacctttgcaga

SEQ ID NO: 77197 - DNA, 33 bp, Homo sapien
ttctcttaccaaagcaagcagcactggataatt

SEQ ID NO: 77198 - DNA, 33 bp, Homo sapien
ttctcttaccaaagcaggcagcactggataatt

SEQ ID NO: 77199 - DNA, 33 bp, Homo sapien
ctggcctcataaagtaaatccattttcttgggt

SEQ ID NO: 77200 - DNA, 33 bp, Homo sapien
ctggcctcataaagtatatccattttcttgggt

SEQ ID NO: 77201 - DNA, 33 bp, Homo sapien
acccaccctctaagcaaaaacgttgcctggaat

SEQ ID NO: 77202 - DNA, 33 bp, Homo sapien
acccaccctctaagcagaaacgttgcctggaat

SEQ ID NO: 77203 - DNA, 33 bp, Homo sapien
agggttaccgatacacagcttttctccagcctt

SEQ ID NO: 77204 - DNA, 33 bp, Homo sapien
agggttaccgatacaccgcttttctccagcctt

SEQ ID NO: 77205 - DNA, 33 bp, Homo sapien
taggaggaaaggcttacacatctattaacatgc

SEQ ID NO: 77206 - DNA, 33 bp, Homo sapien
taggaggaaaggcttatacatctattaacatgc

SEQ ID NO: 77207 - DNA, 33 bp, Homo sapien
atcagccttcaacaaacagcattcacacttgcc

SEQ ID NO: 77208 - DNA, 33 bp, Homo sapien
atcagccttcaacaaatagcattcacacttgcc

SEQ ID NO: 77209 - DNA, 33 bp, Homo sapien
ggatttattgcatgacaccactgaggtttggga

SEQ ID NO: 77210 - DNA, 33 bp, Homo sapien
ggatttattgcatgacgccactgaggtttggga

SEQ ID NO: 77211 - DNA, 33 bp, Homo sapien
aaggctatagttgtcactcatttcgttactttt

SEQ ID NO: 77212 - DNA, 33 bp, Homo sapien
aaggctatagttgtcattcatttcgttactttt

SEQ ID NO: 77213 - DNA, 33 bp, Homo sapien
tcccattgtactaaacaagaccaaattgtaggt

SEQ ID NO: 77214 - DNA, 33 bp, Homo sapien
tcccattgtactaaacgagaccaaattgtaggt

SEQ ID NO: 77215 - DNA, 33 bp, Homo sapien
caagaagtgacacccacaggtcaaaggtcacca

SEQ ID NO: 77216 - DNA, 33 bp, Homo sapien
caagaagtgacacccagaggtcaaaggtcacca

SEQ ID NO: 77217 - DNA, 33 bp, Homo sapien
gtcactgtggagtcaccggggttggccaggtat

SEQ ID NO: 77218 - DNA, 33 bp, Homo sapien
gtcactgtggagtcactggggttggccaggtat

SEQ ID NO: 77219 - DNA, 33 bp, Homo sapien
ttccattagaattccaggtgtcatactggtgtc

SEQ ID NO: 77220 - DNA, 33 bp, Homo sapien
ttccattagaattccatgtgtcatactggtgtc

SEQ ID NO: 77221 - DNA, 33 bp, Homo sapien
atagaaacacctgggcaaccgctgactttctaa

SEQ ID NO: 77222 - DNA, 33 bp, Homo sapien
atagaaacacctgggcgaccgctgactttctaa

SEQ ID NO: 77223 - DNA, 33 bp, Homo sapien; identical to SEQ ID NO: 77221

SEQ ID NO: 77224 - DNA, 33 bp, Homo sapien; identical to SEQ ID NO: 77222

SEQ ID NO: 77225 - DNA, 33 bp, Homo sapien
ggaagagactctggcccctgcctagttgttcca

SEQ ID NO: 77226 - DNA, 33 bp, Homo sapien
ggaagagactctggcctctgcctagttgttcca

SEQ ID NO: 77227 - DNA, 33 bp, Homo sapien
ttgatctttgtagccaatgataatgatttcaaa

SEQ ID NO: 77228 - DNA, 33 bp, Homo sapien
ttgatctttgtagccactgataatgatttcaaa

SEQ ID NO: 77229 - DNA, 33 bp, Homo sapien
tattttcaactttaacaccgtgatttctaacca

SEQ ID NO: 77230 - DNA, 33 bp, Homo sapien
tattttcaactttaactccgtgatttctaacca

SEQ ID NO: 77231 - DNA, 33 bp, Homo sapien
acaactgcaaaaacatgaatgaatctcaccaaa

SEQ ID NO: 77232 - DNA, 33 bp, Homo sapien
acaactgcaaaaacattaatgaatctcaccaaa

SEQ ID NO: 77233 - DNA, 33 bp, Homo sapien
caattcagttctaacaacatccacctggagata

SEQ ID NO: 77234 - DNA, 33 bp, Homo sapien
caattcagttctaacagcatccacctggagata

SEQ ID NO: 77235 - DNA, 33 bp, Homo sapien
tccatgccctccattaacacattggaccagcag

SEQ ID NO: 77236 - DNA, 33 bp, Homo sapien
tccatgccctccattagcacattggaccagcag

SEQ ID NO: 77237 - DNA, 33 bp, Homo sapien
gggaaataatagcacaagtttagattttgtgag

SEQ ID NO: 77238 - DNA, 33 bp, Homo sapien
gggaaataatagcacaggtttagattttgtgag

SEQ ID NO: 77239 - DNA, 33 bp, Homo sapien
gatagggacaagcacaaatatatccacataagg

SEQ ID NO: 77240 - DNA, 33 bp, Homo sapien
gatagggacaagcacagatatatccacataagg

SEQ ID NO: 77241 - DNA, 33 bp, Homo sapien
aaagtgactggtttgaagttttgtaggcagagg

SEQ ID NO: 77242 - DNA, 33 bp, Homo sapien
aaagtgactggtttgaggttttgtaggcagagg

SEQ ID NO: 77243 - DNA, 33 bp, Homo sapien
acagaaaacatcccacagactgtatggcactct

SEQ ID NO: 77244 - DNA, 33 bp, Homo sapien
acagaaaacatcccactgactgtatggcactct

SEQ ID NO: 77245 - DNA, 33 bp, Homo sapien
tttccttttttgactacagagtgccatacagtc

SEQ ID NO: 77246 - DNA, 33 bp, Homo sapien
tttccttttttgactatagagtgccatacagtc

SEQ ID NO: 77247 - DNA, 33 bp, Homo sapien
attttttcttaagtcgaccaagatgtacttctc

SEQ ID NO: 77248 - DNA, 33 bp, Homo sapien
attttttcttaagtcggccaagatgtacttctc

SEQ ID NO: 77249 - DNA, 33 bp, Homo sapien
tgattttgactgataccgctcttctgacatgcc

SEQ ID NO: 77250 - DNA, 33 bp, Homo sapien
tgattttgactgatactgctcttctgacatgcc

SEQ ID NO: 77251 - DNA, 33 bp, Homo sapien
ttgagagtgatatacactggggaaacttcctca

SEQ ID NO: 77252 - DNA, 33 bp, Homo sapien
ttgagagtgatatacattggggaaacttcctca

SEQ ID NO: 77253 - DNA, 33 bp, Homo sapien
cttgtccaagttcaacaaatggctagaaaaatg

SEQ ID NO: 77254 - DNA, 33 bp, Homo sapien
cttgtccaagttcaactaatggctagaaaaatg

SEQ ID NO: 77255 - DNA, 33 bp, Homo sapien
ttaatatataagtaaagctgccagaacaccggc

SEQ ID NO: 77256 - DNA, 33 bp, Homo sapien
ttaatatataagtaaatctgccagaacaccggc

SEQ ID NO: 77257 - DNA, 33 bp, Homo sapien
ggcacttacatagcaccatgagccggtgttctg

SEQ ID NO: 77258 - DNA, 33 bp, Homo sapien
ggcacttacatagcactatgagccggtgttctg

SEQ ID NO: 77259 - DNA, 33 bp, Homo sapien
tcatcacatcccattaagatcctgctaccaata

SEQ ID NO: 77260 - DNA, 33 bp, Homo sapien
tcatcacatcccattaggatcctgctaccaata

SEQ ID NO: 77261 - DNA, 33 bp, Homo sapien
acggagttaaaatcacaactagattctgccaca

SEQ ID NO: 77262 - DNA, 33 bp, Homo sapien
acggagttaaaatcacgactagattctgccaca

SEQ ID NO: 77263 - DNA, 33 bp, Homo sapien
gcatgatcatacctcacgggtctcaaactcctg

SEQ ID NO: 77264 - DNA, 33 bp, Homo sapien
gcatgatcatacctcatgggtctcaaactcctg

SEQ ID NO: 77265 - DNA, 33 bp, Homo sapien
ctttctagctgataaactgcttagctccctgtc

SEQ ID NO: 77266 - DNA, 33 bp, Homo sapien
ctttctagctgataaattgcttagctccctgtc

SEQ ID NO: 77267 - DNA, 33 bp, Homo sapien
gttgaacagagtaaaacaagagatagatcagtc

SEQ ID NO: 77268 - DNA, 33 bp, Homo sapien
gttgaacagagtaaaataagagatagatcagtc

SEQ ID NO: 77269 - DNA, 33 bp, Homo sapien
gttatcagaagtaaataaggttcagtccctgcc

SEQ ID NO: 77270 - DNA, 33 bp, Homo sapien
gttatcagaagtaaatcaggttcagtccctgcc

SEQ ID NO: 77271 - DNA, 33 bp, Homo sapien
gggttttcatgatgcaagtcttcaccagagtgc

SEQ ID NO: 77272 - DNA, 33 bp, Homo sapien
gggttttcatgatgcaggtcttcaccagagtgc

SEQ ID NO: 77273 - DNA, 33 bp, Homo sapien
acagcaagagagaaaacaggaaagccagttagg

SEQ ID NO: 77274 - DNA, 33 bp, Homo sapien
acagcaagagagaaaagaggaaagccagttagg

SEQ ID NO: 77275 - DNA, 33 bp, Homo sapien
ctctttgtcattgtcaactgtggatcttctgat

SEQ ID NO: 77276 - DNA, 33 bp, Homo sapien
ctctttgtcattgtcagctgtggatcttctgat

SEQ ID NO: 77277 - DNA, 33 bp, Homo sapien
ggagttttcttgtgaacggcttcttaggaggtg

SEQ ID NO: 77278 - DNA, 33 bp, Homo sapien
ggagttttcttgtgaatggcttcttaggaggtg

SEQ ID NO: 77279 - DNA, 33 bp, Homo sapien
aatatttgtatgtttacatcttgtaactttgct

SEQ ID NO: 77280 - DNA, 33 bp, Homo sapien
aatatttgtatgtttatatcttgtaactttgct

SEQ ID NO: 77281 - DNA, 33 bp, Homo sapien
cttcatctttctgagacgtctgcttacttttaa

SEQ ID NO: 77282 - DNA, 33 bp, Homo sapien
cttcatctttctgagatgtctgcttacttttaa

SEQ ID NO: 77283 - DNA, 33 bp, Homo sapien
gtactgaagtcaaacacgaggatgatgagtaac

SEQ ID NO: 77284 - DNA, 33 bp, Homo sapien
gtactgaagtcaaacatgaggatgatgagtaac

SEQ ID NO: 77285 - DNA, 33 bp, Homo sapien
ttgttatataatggacagtcatttccaatcagt

SEQ ID NO: 77286 - DNA, 33 bp, Homo sapien
ttgttatataatggacggtcatttccaatcagt

SEQ ID NO: 77287 - DNA, 33 bp, Homo sapien
ggctgtaagaacaaaactaacgtgtcatttggg

SEQ ID NO: 77288 - DNA, 33 bp, Homo sapien
ggctgtaagaacaaaattaacgtgtcatttggg

SEQ ID NO: 77289 - DNA, 33 bp, Homo sapien
caacataataacctgaggagtccttaaacggag

SEQ ID NO: 77290 - DNA, 33 bp, Homo sapien
caacataataacctgatgagtccttaaacggag

SEQ ID NO: 77291 - DNA, 33 bp, Homo sapien
aatgacacaaaacttacagaattttggcctcat

SEQ ID NO: 77292 - DNA, 33 bp, Homo sapien
aatgacacaaaacttatagaattttggcctcat

SEQ ID NO: 77293 - DNA, 33 bp, Homo sapien
ctgaaggttgagctgaacatcaatggccaatga

SEQ ID NO: 77294 - DNA, 33 bp, Homo sapien
ctgaaggttgagctgatcatcaatggccaatga

SEQ ID NO: 77295 - DNA, 33 bp, Homo sapien
agccacctcgtggaaactgggagagaagaaatg

SEQ ID NO: 77296 - DNA, 33 bp, Homo sapien
agccacctcgtggaaattgggagagaagaaatg

SEQ ID NO: 77297 - DNA, 33 bp, Homo sapien
tggaccaagggatcaactgctttctgggtggga

SEQ ID NO: 77298 - DNA, 33 bp, Homo sapien
tggaccaagggatcaattgctttctgggtggga

SEQ ID NO: 77299 - DNA, 33 bp, Homo sapien
tcctggcattgagcccagcccattgcacctgct

SEQ ID NO: 77300 - DNA, 33 bp, Homo sapien
tcctggcattgagcccggcccattgcacctgct

SEQ ID NO: 77301 - DNA, 33 bp, Homo sapien
agcagtggtccctaaaatggatacccaccacca

SEQ ID NO: 77302 - DNA, 33 bp, Homo sapien
agcagtggtccctaaagtggatacccaccacca

SEQ ID NO: 77303 - DNA, 33 bp, Homo sapien
catttccttcacgtctaaattcctatctttaaa

SEQ ID NO: 77304 - DNA, 33 bp, Homo sapien
catttccttcacgtcttaattcctatctttaaa

SEQ ID NO: 77305 - DNA, 33 bp, Homo sapien
gctgcagattttatggaagagaaagaagtcgac

SEQ ID NO: 77306 - DNA, 33 bp, Homo sapien
gctgcagattttatgggagagaaagaagtcgac

SEQ ID NO: 77307 - DNA, 33 bp, Homo sapien
gaaagacgaactccaaacaccaaagaaaagaat

SEQ ID NO: 77308 - DNA, 33 bp, Homo sapien
gaaagacgaactccaagcaccaaagaaaagaat

SEQ ID NO: 77309 - DNA, 33 bp, Homo sapien
ttgtcttcactactcaacattcaaaactttgaa

SEQ ID NO: 77310 - DNA, 33 bp, Homo sapien
ttgtcttcactactcagcattcaaaactttgaa

SEQ ID NO: 77311 - DNA, 33 bp, Homo sapien
ttctgaggggagacaaattcaaggacacaggca

SEQ ID NO: 77312 - DNA, 33 bp, Homo sapien
ttctgaggggagacaagttcaaggacacaggca

SEQ ID NO: 77313 - DNA, 33 bp, Homo sapien
aagaccagggacgagtaacaggctatacgagct

SEQ ID NO: 77314 - DNA, 33 bp, Homo sapien
aagaccagggacgagttacaggctatacgagct

SEQ ID NO: 77315 - DNA, 33 bp, Homo sapien
gtcagacgatgcatccaaagtcacatggctgag

SEQ ID NO: 77316 - DNA, 33 bp, Homo sapien
gtcagacgatgcatccgaagtcacatggctgag

SEQ ID NO: 77317 - DNA, 33 bp, Homo sapien
tgcaagtggatacgaacattttgctcctaacac

SEQ ID NO: 77318 - DNA, 33 bp, Homo sapien
tgcaagtggatacgaatattttgctcctaacac

SEQ ID NO: 77319 - DNA, 33 bp, Homo sapien
atctacctacctatcccatcatatctatctcta

SEQ ID NO: 77320 - DNA, 33 bp, Homo sapien
atctacctacctatcctatcatatctatctcta

SEQ ID NO: 77321 - DNA, 33 bp, Homo sapien
taatgtgaataataaacgagtttgccaactttt

SEQ ID NO: 77322 - DNA, 33 bp, Homo sapien
taatgtgaataataaaggagtttgccaactttt

SEQ ID NO: 77323 - DNA, 33 bp, Homo sapien
acagataaccactgtcacttatataggttctct

SEQ ID NO: 77324 - DNA, 33 bp, Homo sapien
acagataaccactgtcgcttatataggttctct

SEQ ID NO: 77325 - DNA, 33 bp, Homo sapien
aggtaggagcaagataaaaacctggacaccagt

SEQ ID NO: 77326 - DNA, 33 bp, Homo sapien
aggtaggagcaagatagaaacctggacaccagt

SEQ ID NO: 77327 - DNA, 33 bp, Homo sapien
agctgagtactggtgacgttagaataaccatgt

SEQ ID NO: 77328 - DNA, 33 bp, Homo sapien
agctgagtactggtgatgttagaataaccatgt

SEQ ID NO: 77329 - DNA, 33 bp, Homo sapien
taaaatctaaggcccacgtaaccagtcgtttca

SEQ ID NO: 77330 - DNA, 33 bp, Homo sapien
taaaatctaaggcccatgtaaccagtcgtttca

SEQ ID NO: 77331 - DNA, 33 bp, Homo sapien
gccaaagactgaggccaactcccaggacagggc

SEQ ID NO: 77332 - DNA, 33 bp, Homo sapien
gccaaagactgaggccgactcccaggacagggc

SEQ ID NO: 77333 - DNA, 33 bp, Homo sapien
tgctgaagatgaccaccgcaggagggaaaggaa

SEQ ID NO: 77334 - DNA, 33 bp, Homo sapien
tgctgaagatgaccactgcaggagggaaaggaa

SEQ ID NO: 77335 - DNA, 33 bp, Homo sapien
ggcaggctggcttcaccgctagagttgctgaag

SEQ ID NO: 77336 - DNA, 33 bp, Homo sapien
ggcaggctggcttcacggctagagttgctgaag

SEQ ID NO: 77337 - DNA, 33 bp, Homo sapien
gggggaacagcccacaatgcaagccacgactac

SEQ ID NO: 77338 - DNA, 33 bp, Homo sapien
gggggaacagcccacagtgcaagccacgactac

SEQ ID NO: 77339 - DNA, 33 bp, Homo sapien
cctagaaagctgtagacggatacaggatgtgat

SEQ ID NO: 77340 - DNA, 33 bp, Homo sapien
cctagaaagctgtagatggatacaggatgtgat

SEQ ID NO: 77341 - DNA, 33 bp, Homo sapien
gagaattccaatgtgaagtatgagctacagggt

SEQ ID NO: 77342 - DNA, 33 bp, Homo sapien
gagaattccaatgtgaggtatgagctacagggt

SEQ ID NO: 77343 - DNA, 33 bp, Homo sapien
ctggggcttagtggtggaaatactttgcctgcc

SEQ ID NO: 77344 - DNA, 33 bp, Homo sapien
ctggggcttagtggtgtaaatactttgcctgcc

SEQ ID NO: 77345 - DNA, 33 bp, Homo sapien
gctggggaaatgccaaaacatggtcaatgagac

SEQ ID NO: 77346 - DNA, 33 bp, Homo sapien
gctggggaaatgccaagacatggtcaatgagac

SEQ ID NO: 77347 - DNA, 33 bp, Homo sapien
tgatgtaagcagttaaatgactaagtaaggatt

SEQ ID NO: 77348 - DNA, 33 bp, Homo sapien
tgatgtaagcagttaagtgactaagtaaggatt

SEQ ID NO: 77349 - DNA, 33 bp, Homo sapien
atgtaataattctggagaagccagggtacataa

SEQ ID NO: 77350 - DNA, 33 bp, Homo sapien
atgtaataattctggataagccagggtacataa

SEQ ID NO: 77351 - DNA, 33 bp, Homo sapien
ggagccttaaaaaatggcaactgctcaggagtg

SEQ ID NO: 77352 - DNA, 33 bp, Homo sapien
ggagccttaaaaaatgtcaactgctcaggagtg

SEQ ID NO: 77353 - DNA, 33 bp, Homo sapien
gcaaggaggtcggcgacatcacgcatccacagt

SEQ ID NO: 77354 - DNA, 33 bp, Homo sapien
gcaaggaggtcggcgatatcacgcatccacagt

SEQ ID NO: 77355 - DNA, 33 bp, Homo sapien
ccagaggcttgctggcgctgaagtcaccgtgga

SEQ ID NO: 77356 - DNA, 33 bp, Homo sapien
ccagaggcttgctggctctgaagtcaccgtgga

SEQ ID NO: 77357 - DNA, 33 bp, Homo sapien
ctggcatcaagagagcacttagaagttcttcct

SEQ ID NO: 77358 - DNA, 33 bp, Homo sapien
ctggcatcaagagagcgcttagaagttcttcct

SEQ ID NO: 77359 - DNA, 33 bp, Homo sapien
gaagagctttccttacccggggaaagagtggag

SEQ ID NO: 77360 - DNA, 33 bp, Homo sapien
gaagagctttccttactcggggaaagagtggag

SEQ ID NO: 77361 - DNA, 33 bp, Homo sapien
ctgtgtgttatatgagaagcacattaatttgga

SEQ ID NO: 77362 - DNA, 33 bp, Homo sapien
ctgtgtgttatatgaggagcacattaatttgga

SEQ ID NO: 77363 - DNA, 33 bp, Homo sapien
gcaattgagcagataaagtacttccaaattaat

SEQ ID NO: 77364 - DNA, 33 bp, Homo sapien
gcaattgagcagataaggtacttccaaattaat

SEQ ID NO: 77365 - DNA, 33 bp, Homo sapien
ggctggagtcctaaccccacatacctcataatt

SEQ ID NO: 77366 - DNA, 33 bp, Homo sapien
ggctggagtcctaacctcacatacctcataatt

SEQ ID NO: 77367 - DNA, 33 bp, Homo sapien
gtttataattaacctcccctacaagaatgaaag

SEQ ID NO: 77368 - DNA, 33 bp, Homo sapien
gtttataattaacctctcctacaagaatgaaag

SEQ ID NO: 77369 - DNA, 33 bp, Homo sapien
gggctcacagctacgcacagggatatgacgttc

SEQ ID NO: 77370 - DNA, 33 bp, Homo sapien
gggctcacagctacgcccagggatatgacgttc

SEQ ID NO: 77371 - DNA, 33 bp, Homo sapien
gaactctggggatccccaaaatacagtctggta

SEQ ID NO: 77372 - DNA, 33 bp, Homo sapien
gaactctggggatccctaaaatacagtctggta

SEQ ID NO: 77373 - DNA, 33 bp, Homo sapien
gtcctcctaccagcgaactcagctaacaatgtg

SEQ ID NO: 77374 - DNA, 33 bp, Homo sapien
gtcctcctaccagcgagctcagctaacaatgtg

SEQ ID NO: 77375 - DNA, 33 bp, Homo sapien
cccactccccgctccactcttggctgtggtggt

SEQ ID NO: 77376 - DNA, 33 bp, Homo sapien
cccactccccgctccattcttggctgtggtggt

SEQ ID NO: 77377 - DNA, 33 bp, Homo sapien
actgcttctgtcttaaatcccctttgctgactg

SEQ ID NO: 77378 - DNA, 33 bp, Homo sapien
actgcttctgtcttaagtcccctttgctgactg

SEQ ID NO: 77379 - DNA, 33 bp, Homo sapien
atacatacctacatacacacacgtatatacagt

SEQ ID NO: 77380 - DNA, 33 bp, Homo sapien
atacatacctacatacgcacacgtatatacagt

SEQ ID NO: 77381 - DNA, 33 bp, Homo sapien
gggttcagctctcagacagtcagtgtgtgctgg

SEQ ID NO: 77382 - DNA, 33 bp, Homo sapien
gggttcagctctcagatagtcagtgtgtgctgg

SEQ ID NO: 77383 - DNA, 33 bp, Homo sapien
ttaccagcacaatggcaatctatgaaaagcact

SEQ ID NO: 77384 - DNA, 33 bp, Homo sapien
ttaccagcacaatggcgatctatgaaaagcact

SEQ ID NO: 77385 - DNA, 33 bp, Homo sapien
ctcctgattgtcctctaaatgtgctagctagct

SEQ ID NO: 77386 - DNA, 33 bp, Homo sapien
ctcctgattgtcctctcaatgtgctagctagct

SEQ ID NO: 77387 - DNA, 33 bp, Homo sapien
tgtggcctgggccgaccgagtatctgtatcagc

SEQ ID NO: 77388 - DNA, 33 bp, Homo sapien
tgtggcctgggccgactgagtatctgtatcagc

SEQ ID NO: 77389 - DNA, 33 bp, Homo sapien
cctcgcatcagggaagacccgcgatgccctttc

SEQ ID NO: 77390 - DNA, 33 bp, Homo sapien
cctcgcatcagggaaggcccgcgatgccctttc

SEQ ID NO: 77391 - DNA, 33 bp, Homo sapien
tgacactgaatttcaaacccttggtactagaaa

SEQ ID NO: 77392 - DNA, 33 bp, Homo sapien
tgacactgaatttcaagcccttggtactagaaa

SEQ ID NO: 77393 - DNA, 33 bp, Homo sapien
aatgcaatagcttagagagttaattgcttgtcc

SEQ ID NO: 77394 - DNA, 33 bp, Homo sapien
aatgcaatagcttagatagttaattgcttgtcc

SEQ ID NO: 77395 - DNA, 33 bp, Homo sapien
aggagaacgaagtagaaaatgtatgatttatga

SEQ ID NO: 77396 - DNA, 33 bp, Homo sapien
aggagaacgaagtagagaatgtatgatttatga

SEQ ID NO: 77397 - DNA, 33 bp, Homo sapien
ttcctggagcctatggccagaagagtcctgaga

SEQ ID NO: 77398 - DNA, 33 bp, Homo sapien
ttcctggagcctatggtcagaagagtcctgaga

SEQ ID NO: 77399 - DNA, 33 bp, Homo sapien; identical to SEQ ID NO: 77397

SEQ ID NO: 77400 - DNA, 33 bp, Homo sapien; identical to SEQ ID NO: 77398

SEQ ID NO: 77401 - DNA, 33 bp, Homo sapien
ctttcagttggagatgaactagctcttggacca

SEQ ID NO: 77402 - DNA, 33 bp, Homo sapien
ctttcagttggagatgcactagctcttggacca

SEQ ID NO: 77403 - DNA, 33 bp, Homo sapien
aattcatgagtgattacacagctagttaggtac

SEQ ID NO: 77404 - DNA, 33 bp, Homo sapien
aattcatgagtgattatacagctagttaggtac

SEQ ID NO: 77405 - DNA, 33 bp, Homo sapien
ggagtgtaaattttcccaagtgacgtttgtgct

SEQ ID NO: 77406 - DNA, 33 bp, Homo sapien
ggagtgtaaattttcctaagtgacgtttgtgct

SEQ ID NO: 77407 - DNA, 33 bp, Homo sapien
tttcctgtaaaggaccagattgtaagtatttta

SEQ ID NO: 77408 - DNA, 33 bp, Homo sapien
tttcctgtaaaggacctgattgtaagtatttta

SEQ ID NO: 77409 - DNA, 33 bp, Homo sapien
cctctgtttcaactacgccgctctgccgctaca

SEQ ID NO: 77410 - DNA, 33 bp, Homo sapien
cctctgtttcaactactccgctctgccgctaca

SEQ ID NO: 77411 - DNA, 33 bp, Homo sapien
gcttctcatgctcctacctatggccttcctatc

SEQ ID NO: 77412 - DNA, 33 bp, Homo sapien
gcttctcatgctcctagctatggccttcctatc

SEQ ID NO: 77413 - DNA, 33 bp, Homo sapien
gggctgggtgacgcacaaatcttgagtcaacag

SEQ ID NO: 77414 - DNA, 33 bp, Homo sapien
gggctgggtgacgcacgaatcttgagtcaacag

SEQ ID NO: 77415 - DNA, 33 bp, Homo sapien
ctttctgctggaaacaaaggtgcatcccttccc

SEQ ID NO: 77416 - DNA, 33 bp, Homo sapien
ctttctgctggaaacacaggtgcatcccttccc

SEQ ID NO: 77417 - DNA, 33 bp, Homo sapien
agccaccgcgccccgaaaagaattctctggagt

SEQ ID NO: 77418 - DNA, 33 bp, Homo sapien
agccaccgcgccccgacaagaattctctggagt

SEQ ID NO: 77419 - DNA, 33 bp, Homo sapien
attccagcaggtctagaacaaagggatgggaat

SEQ ID NO: 77420 - DNA, 33 bp, Homo sapien
attccagcaggtctaggacaaagggatgggaat

SEQ ID NO: 77421 - DNA, 33 bp, Homo sapien
tgaacaaagaagagaacggctcccagcacctag

SEQ ID NO: 77422 - DNA, 33 bp, Homo sapien
tgaacaaagaagagaatggctcccagcacctag

SEQ ID NO: 77423 - DNA, 33 bp, Homo sapien
agagtttactagaagaatatctccaaggccaat

SEQ ID NO: 77424 - DNA, 33 bp, Homo sapien
agagtttactagaagattatctccaaggccaat

SEQ ID NO: 77425 - DNA, 33 bp, Homo sapien
tttgtacagtgtaccacgcaaagagtgagccct

SEQ ID NO: 77426 - DNA, 33 bp, Homo sapien
tttgtacagtgtaccatgcaaagagtgagccct

SEQ ID NO: 77427 - DNA, 33 bp, Homo sapien
tcagtgtcttcaattccgaacaacttttgcata

SEQ ID NO: 77428 - DNA, 33 bp, Homo sapien
tcagtgtcttcaattctgaacaacttttgcata

SEQ ID NO: 77429 - DNA, 33 bp, Homo sapien
catagaagcagtcatacaatctgctcctgtaac

SEQ ID NO: 77430 - DNA, 33 bp, Homo sapien
catagaagcagtcatataatctgctcctgtaac

SEQ ID NO: 77431 - DNA, 33 bp, Homo sapien
tagtaatatagtccaacgtttctcagccactgt

SEQ ID NO: 77432 - DNA, 33 bp, Homo sapien
tagtaatatagtccaatgtttctcagccactgt

SEQ ID NO: 77433 - DNA, 33 bp, Homo sapien
tcactttcagatgcaacgataacaggaaagatg

SEQ ID NO: 77434 - DNA, 33 bp, Homo sapien
tcactttcagatgcaatgataacaggaaagatg

SEQ ID NO: 77435 - DNA, 33 bp, Homo sapien
gctgagctttcccatacgcagttctgattaaag

SEQ ID NO: 77436 - DNA, 33 bp, Homo sapien
gctgagctttcccatatgcagttctgattaaag

SEQ ID NO: 77437 - DNA, 33 bp, Homo sapien
tcctgcatctttgtcagaggcccactgcatggt

SEQ ID NO: 77438 - DNA, 33 bp, Homo sapien
tcctgcatctttgtcataggcccactgcatggt

SEQ ID NO: 77439 - DNA, 33 bp, Homo sapien
gcgcgcaagctctctcaccacatgttcttggag

SEQ ID NO: 77440 - DNA, 33 bp, Homo sapien
gcgcgcaagctctctcgccacatgttcttggag

SEQ ID NO: 77441 - DNA, 33 bp, Homo sapien
cctaaacagaaatagcagaggcttgttttcaga

SEQ ID NO: 77442 - DNA, 33 bp, Homo sapien
cctaaacagaaatagcggaggcttgttttcaga

SEQ ID NO: 77443 - DNA, 33 bp, Homo sapien
agccatgcgagtctaactgtagcccagaagggt

SEQ ID NO: 77444 - DNA, 33 bp, Homo sapien
agccatgcgagtctaattgtagcccagaagggt

SEQ ID NO: 77445 - DNA, 33 bp, Homo sapien
tcaggattctgcgctccgaaacttggactctgt

SEQ ID NO: 77446 - DNA, 33 bp, Homo sapien
tcaggattctgcgctctgaaacttggactctgt

SEQ ID NO: 77447 - DNA, 33 bp, Homo sapien
atcatcggtgccgaacagagtggccaaaatagt

SEQ ID NO: 77448 - DNA, 33 bp, Homo sapien
atcatcggtgccgaacggagtggccaaaatagt

SEQ ID NO: 77449 - DNA, 33 bp, Homo sapien
ttcacttcctctgggaactcctctctggattac

SEQ ID NO: 77450 - DNA, 33 bp, Homo sapien
ttcacttcctctgggatctcctctctggattac

SEQ ID NO: 77451 - DNA, 33 bp, Homo sapien
aaaagtgaaaccctgaaactgtaacaagaatat

SEQ ID NO: 77452 - DNA, 33 bp, Homo sapien
aaaagtgaaaccctgagactgtaacaagaatat

SEQ ID NO: 77453 - DNA, 33 bp, Homo sapien
gggtagagacagagcagctaatcatgggacatc

SEQ ID NO: 77454 - DNA, 33 bp, Homo sapien
gggtagagacagagcatctaatcatgggacatc

SEQ ID NO: 77455 - DNA, 33 bp, Homo sapien
agggaatctacagcgacggcagaggcggggcac

SEQ ID NO: 77456 - DNA, 33 bp, Homo sapien
agggaatctacagcgatggcagaggcggggcac

SEQ ID NO: 77457 - DNA, 33 bp, Homo sapien
ctgaattcctgtcacactcatatccaagaccac

SEQ ID NO: 77458 - DNA, 33 bp, Homo sapien
ctgaattcctgtcacattcatatccaagaccac

SEQ ID NO: 77459 - DNA, 33 bp, Homo sapien
atagaaggaagttaaaatatcagcattaacagg

SEQ ID NO: 77460 - DNA, 33 bp, Homo sapien
atagaaggaagttaaactatcagcattaacagg

SEQ ID NO: 77461 - DNA, 33 bp, Homo sapien
gaaagcaactgactgaccatggatcccccctca

SEQ ID NO: 77462 - DNA, 33 bp, Homo sapien
gaaagcaactgactgagcatggatcccccctca

SEQ ID NO: 77463 - DNA, 33 bp, Homo sapien
agtaacactgtgataaggtgaacagaattgagt

SEQ ID NO: 77464 - DNA, 33 bp, Homo sapien
agtaacactgtgataatgtgaacagaattgagt

SEQ ID NO: 77465 - DNA, 33 bp, Homo sapien
ctttaaactgagcatgaaatggtaaacctacaa

SEQ ID NO: 77466 - DNA, 33 bp, Homo sapien
ctttaaactgagcatgcaatggtaaacctacaa

SEQ ID NO: 77467 - DNA, 33 bp, Homo sapien
tttgcaccgagcagaccggtggccaatggagga

SEQ ID NO: 77468 - DNA, 33 bp, Homo sapien
tttgcaccgagcagactggtggccaatggagga

SEQ ID NO: 77469 - DNA, 33 bp, Homo sapien
gcagaatgtgaaactcccatgtggaaggtgtct

SEQ ID NO: 77470 - DNA, 33 bp, Homo sapien
gcagaatgtgaaactctcatgtggaaggtgtct

SEQ ID NO: 77471 - DNA, 33 bp, Homo sapien
gagacctcaaacttaacgtagaacaagttacat

SEQ ID NO: 77472 - DNA, 33 bp, Homo sapien
gagacctcaaacttaatgtagaacaagttacat

SEQ ID NO: 77473 - DNA, 33 bp, Homo sapien
gaacaaaatgagcacacctctctcttgtcccct

SEQ ID NO: 77474 - DNA, 33 bp, Homo sapien
gaacaaaatgagcacatctctctcttgtcccct

SEQ ID NO: 77475 - DNA, 33 bp, Homo sapien
ctaagagtgacgctgcaacaagccttccctatt

SEQ ID NO: 77476 - DNA, 33 bp, Homo sapien
ctaagagtgacgctgcgacaagccttccctatt

SEQ ID NO: 77477 - DNA, 33 bp, Homo sapien
actgctaaacgcactcacttacctgtacaaggc

SEQ ID NO: 77478 - DNA, 33 bp, Homo sapien
actgctaaacgcactctcttacctgtacaaggc

SEQ ID NO: 77479 - DNA, 33 bp, Homo sapien
aaccctcttttgatccagactgatgatttaagg

SEQ ID NO: 77480 - DNA, 33 bp, Homo sapien
aaccctcttttgatccggactgatgatttaagg

SEQ ID NO: 77481 - DNA, 33 bp, Homo sapien
aaattcattcttctccagaccttagttaatagt

SEQ ID NO: 77482 - DNA, 33 bp, Homo sapien
aaattcattcttctcctgaccttagttaatagt

SEQ ID NO: 77483 - DNA, 33 bp, Homo sapien
aaggttcattgttgacaaagggcctgttctgtg

SEQ ID NO: 77484 - DNA, 33 bp, Homo sapien
aaggttcattgttgacgaagggcctgttctgtg

SEQ ID NO: 77485 - DNA, 33 bp, Homo sapien
caaatagaggtcaaaaatattgggagaataaac

SEQ ID NO: 77486 - DNA, 33 bp, Homo sapien
caaatagaggtcaaaagtattgggagaataaac

SEQ ID NO: 77487 - DNA, 33 bp, Homo sapien
aaaaatacttatcctcaatgatgtatcgttgtt

SEQ ID NO: 77488 - DNA, 33 bp, Homo sapien
aaaaatacttatcctcgatgatgtatcgttgtt

SEQ ID NO: 77489 - DNA, 33 bp, Homo sapien
atcctgtttccaggaactgaaacctaacaccat

SEQ ID NO: 77490 - DNA, 33 bp, Homo sapien
atcctgtttccaggaagtgaaacctaacaccat

SEQ ID NO: 77491 - DNA, 33 bp, Homo sapien
ctgaccctttacagacacgtttgctgacttgtg

SEQ ID NO: 77492 - DNA, 33 bp, Homo sapien
ctgaccctttacagacccgtttgctgacttgtg

SEQ ID NO: 77493 - DNA, 33 bp, Homo sapien
tcactaaatgcatgacaaatgaatgtaggaggg

SEQ ID NO: 77494 - DNA, 33 bp, Homo sapien
tcactaaatgcatgacgaatgaatgtaggaggg

SEQ ID NO: 77495 - DNA, 33 bp, Homo sapien
gaatagcaatagacaggagaaggcaaaatgcag

SEQ ID NO: 77496 - DNA, 33 bp, Homo sapien
gaatagcaatagacagtagaaggcaaaatgcag

SEQ ID NO: 77497 - DNA, 33 bp, Homo sapien
tgcagcattaatgtccagaaaatatttactgtt

SEQ ID NO: 77498 - DNA, 33 bp, Homo sapien
tgcagcattaatgtccggaaaatatttactgtt

SEQ ID NO: 77499 - DNA, 33 bp, Homo sapien
tgggggtaataaaaacaacagcaggaatctctg

SEQ ID NO: 77500 - DNA, 33 bp, Homo sapien
tgggggtaataaaaacgacagcaggaatctctg

SEQ ID NO: 77501 - DNA, 33 bp, Homo sapien
ccaaggtagactggctaaatgagcagcaagtct

SEQ ID NO: 77502 - DNA, 33 bp, Homo sapien
ccaaggtagactggctgaatgagcagcaagtct

SEQ ID NO: 77503 - DNA, 33 bp, Homo sapien
tttctgctgcagagaacaacaacacacagtgca

SEQ ID NO: 77504 - DNA, 33 bp, Homo sapien
tttctgctgcagagaataacaacacacagtgca

SEQ ID NO: 77505 - DNA, 33 bp, Homo sapien
tagatgggagggaaagactgttcttctgtggca

SEQ ID NO: 77506 - DNA, 33 bp, Homo sapien
tagatgggagggaaaggctgttcttctgtggca

SEQ ID NO: 77507 - DNA, 33 bp, Homo sapien
gtcctctccttgaccaagataattcaattctgt

SEQ ID NO: 77508 - DNA, 33 bp, Homo sapien
gtcctctccttgaccaggataattcaattctgt

SEQ ID NO: 77509 - DNA, 33 bp, Homo sapien
agattctaccatgtcacctacaagtccttccta

SEQ ID NO: 77510 - DNA, 33 bp, Homo sapien
agattctaccatgtcatctacaagtccttccta

SEQ ID NO: 77511 - DNA, 33 bp, Homo sapien
ttttgcttgcagatgacgtgatgtctgtgtaga

SEQ ID NO: 77512 - DNA, 33 bp, Homo sapien
ttttgcttgcagatgatgtgatgtctgtgtaga

SEQ ID NO: 77513 - DNA, 33 bp, Homo sapien
tgacgtgggcttcaagcctctttttaagtcaag

SEQ ID NO: 77514 - DNA, 33 bp, Homo sapien
tgacgtgggcttcaaggctctttttaagtcaag

SEQ ID NO: 77515 - DNA, 33 bp, Homo sapien
ccaatgggaaaaccaagttggaaatgacagggc

SEQ ID NO: 77516 - DNA, 33 bp, Homo sapien
ccaatgggaaaaccaatttggaaatgacagggc

SEQ ID NO: 77517 - DNA, 33 bp, Homo sapien
attatgactgacattaaaaaaattagaatagat

SEQ ID NO: 77518 - DNA, 33 bp, Homo sapien
attatgactgacattataaaaattagaatagat

SEQ ID NO: 77519 - DNA, 33 bp, Homo sapien
tattgaaacagctacactgattttacaattctc

SEQ ID NO: 77520 - DNA, 33 bp, Homo sapien
tattgaaacagctacattgattttacaattctc

SEQ ID NO: 77521 - DNA, 33 bp, Homo sapien
actcgtaagcaacagaactgaaagtccaagctg

SEQ ID NO: 77522 - DNA, 33 bp, Homo sapien
actcgtaagcaacagacctgaaagtccaagctg

SEQ ID NO: 77523 - DNA, 33 bp, Homo sapien
ttgtgtatatgttgtacgtgtctttgtgcatat

SEQ ID NO: 77524 - DNA, 33 bp, Homo sapien
ttgtgtatatgttgtatgtgtctttgtgcatat

SEQ ID NO: 77525 - DNA, 33 bp, Homo sapien
gcttgacgtttcatggacaattcacagcaatgg

SEQ ID NO: 77526 - DNA, 33 bp, Homo sapien
gcttgacgtttcatggccaattcacagcaatgg

SEQ ID NO: 77527 - DNA, 33 bp, Homo sapien
cctatcactatcaaagaaggaatggatggatat

SEQ ID NO: 77528 - DNA, 33 bp, Homo sapien
cctatcactatcaaaggaggaatggatggatat

SEQ ID NO: 77529 - DNA, 33 bp, Homo sapien
ttgaaaaacctagcctcagaattttccgggagg

SEQ ID NO: 77530 - DNA, 33 bp, Homo sapien
ttgaaaaacctagcctgagaattttccgggagg

SEQ ID NO: 77531 - DNA, 33 bp, Homo sapien
tccttccgtggacacacgcattcattttgtttt

SEQ ID NO: 77532 - DNA, 33 bp, Homo sapien
tccttccgtggacacatgcattcattttgtttt

SEQ ID NO: 77533 - DNA, 33 bp, Homo sapien
ttggccattcaaaaccaaagtgaatggatccag

SEQ ID NO: 77534 - DNA, 33 bp, Homo sapien
ttggccattcaaaaccgaagtgaatggatccag

SEQ ID NO: 77535 - DNA, 33 bp, Homo sapien
tttttgagatgctttcgctctttcttttctttt

SEQ ID NO: 77536 - DNA, 33 bp, Homo sapien
tttttgagatgctttctctctttcttttctttt

SEQ ID NO: 77537 - DNA, 33 bp, Homo sapien
ctatatgatggttacaatagggcaggtattatc

SEQ ID NO: 77538 - DNA, 33 bp, Homo sapien
ctatatgatggttacagtagggcaggtattatc

SEQ ID NO: 77539 - DNA, 33 bp, Homo sapien
ctactgtcatctcttaagcaactgaacttccta

SEQ ID NO: 77540 - DNA, 33 bp, Homo sapien
ctactgtcatctcttatgcaactgaacttccta

SEQ ID NO: 77541 - DNA, 33 bp, Homo sapien
tcaatgtcgtctgccacgtgaaggatgcagaaa

SEQ ID NO: 77542 - DNA, 33 bp, Homo sapien
tcaatgtcgtctgccatgtgaaggatgcagaaa

SEQ ID NO: 77543 - DNA, 33 bp, Homo sapien
ccgtggaatatgtgaaggagcactggaaagtca

SEQ ID NO: 77544 - DNA, 33 bp, Homo sapien
ccgtggaatatgtgaatgagcactggaaagtca

SEQ ID NO: 77545 - DNA, 33 bp, Homo sapien
gagatttcagtgtaccagggatttcagggccca

SEQ ID NO: 77546 - DNA, 33 bp, Homo sapien
gagatttcagtgtacccgggatttcagggccca

SEQ ID NO: 77547 - DNA, 33 bp, Homo sapien
aagaaattcacagcaccattttgaagttatttt

SEQ ID NO: 77548 - DNA, 33 bp, Homo sapien
aagaaattcacagcactattttgaagttatttt

SEQ ID NO: 77549 - DNA, 33 bp, Homo sapien
cagggaagagaatgggaccaaagggacaggtac

SEQ ID NO: 77550 - DNA, 33 bp, Homo sapien
cagggaagagaatggggccaaagggacaggtac

SEQ ID NO: 77551 - DNA, 33 bp, Homo sapien
agcatcatgtcaagaaatgtaatgtaatagcat

SEQ ID NO: 77552 - DNA, 33 bp, Homo sapien
agcatcatgtcaagaagtgtaatgtaatagcat

SEQ ID NO: 77553 - DNA, 33 bp, Homo sapien
ggctcagcctgctaaaatgtgaagtcatcaatc

SEQ ID NO: 77554 - DNA, 33 bp, Homo sapien
ggctcagcctgctaaagtgtgaagtcatcaatc

SEQ ID NO: 77555 - DNA, 33 bp, Homo sapien
ctgacctggatgaagaagctttaaaatcaacag

SEQ ID NO: 77556 - DNA, 33 bp, Homo sapien
ctgacctggatgaagaggctttaaaatcaacag

SEQ ID NO: 77557 - DNA, 33 bp, Homo sapien
ccataaatctcttttaaaaagttgtgcatttta

SEQ ID NO: 77558 - DNA, 33 bp, Homo sapien
ccataaatctcttttacaaagttgtgcatttta

SEQ ID NO: 77559 - DNA, 33 bp, Homo sapien
ctgttaacccacaataaaatacacagtacagca

SEQ ID NO: 77560 - DNA, 33 bp, Homo sapien
ctgttaacccacaatacaatacacagtacagca

SEQ ID NO: 77561 - DNA, 33 bp, Homo sapien
agtgttcaccttctcaagcggctttgattttta

SEQ ID NO: 77562 - DNA, 33 bp, Homo sapien
agtgttcaccttctcatgcggctttgattttta

SEQ ID NO: 77563 - DNA, 33 bp, Homo sapien
aaggtttctgtattccaagcatatttaagtgac

SEQ ID NO: 77564 - DNA, 33 bp, Homo sapien
aaggtttctgtattccgagcatatttaagtgac

SEQ ID NO: 77565 - DNA, 33 bp, Homo sapien
tcatgtcacagatggacaaaagagagtgcagtg

SEQ ID NO: 77566 - DNA, 33 bp, Homo sapien
tcatgtcacagatggataaaagagagtgcagtg

SEQ ID NO: 77567 - DNA, 33 bp, Homo sapien
aaggtcctctcatctgaaatgtttccgggtctt

SEQ ID NO: 77568 - DNA, 33 bp, Homo sapien
aaggtcctctcatctgcaatgtttccgggtctt

SEQ ID NO: 77569 - DNA, 33 bp, Homo sapien
agcatctggaatgttaaaagatagacagcacca

SEQ ID NO: 77570 - DNA, 33 bp, Homo sapien
agcatctggaatgttagaagatagacagcacca

SEQ ID NO: 77571 - DNA, 33 bp, Homo sapien
agagtcacaactgaaaataatggcaaaattctg

SEQ ID NO: 77572 - DNA, 33 bp, Homo sapien
agagtcacaactgaaagtaatggcaaaattctg

SEQ ID NO: 77573 - DNA, 33 bp, Homo sapien
caaatgcttagtaataaatgtaatggtttgcta

SEQ ID NO: 77574 - DNA, 33 bp, Homo sapien
caaatgcttagtaatatatgtaatggtttgcta

SEQ ID NO: 77575 - DNA, 33 bp, Homo sapien
atcatcaggaccaagactaaagggaaagagaag

SEQ ID NO: 77576 - DNA, 33 bp, Homo sapien
atcatcaggaccaagagtaaagggaaagagaag

SEQ ID NO: 77577 - DNA, 33 bp, Homo sapien
tcttctgactataatacggacgtgctctgttga

SEQ ID NO: 77578 - DNA, 33 bp, Homo sapien
tcttctgactataatatggacgtgctctgttga

SEQ ID NO: 77579 - DNA, 33 bp, Homo sapien
aaactattctactgtgaaacccaagttttcttc

SEQ ID NO: 77580 - DNA, 33 bp, Homo sapien
aaactattctactgtggaacccaagttttcttc

SEQ ID NO: 77581 - DNA, 33 bp, Homo sapien
tgggcagcacaaactgaaccctggctccgctac

SEQ ID NO: 77582 - DNA, 33 bp, Homo sapien
tgggcagcacaaactggaccctggctccgctac

SEQ ID NO: 77583 - DNA, 33 bp, Homo sapien
aatgccattctgactcacattctagtaaccttt

SEQ ID NO: 77584 - DNA, 33 bp, Homo sapien
aatgccattctgactcgcattctagtaaccttt

SEQ ID NO: 77585 - DNA, 33 bp, Homo sapien
gttaataatctctgaacgaaatttacggttcac

SEQ ID NO: 77586 - DNA, 33 bp, Homo sapien
gttaataatctctgaatgaaatttacggttcac

SEQ ID NO: 77587 - DNA, 33 bp, Homo sapien
ggactctccacaaataagagtccttggttatct

SEQ ID NO: 77588 - DNA, 33 bp, Homo sapien
ggactctccacaaataggagtccttggttatct

SEQ ID NO: 77589 - DNA, 33 bp, Homo sapien
cctgggctgatttgccccttcttgggatgagcc

SEQ ID NO: 77590 - DNA, 33 bp, Homo sapien
cctgggctgatttgcctcttcttgggatgagcc

SEQ ID NO: 77591 - DNA, 33 bp, Homo sapien
ccaggactttatgatcaaccatcagccttgttt

SEQ ID NO: 77592 - DNA, 33 bp, Homo sapien
ccaggactttatgatccaccatcagccttgttt

SEQ ID NO: 77593 - DNA, 33 bp, Homo sapien
taagacatctaaaatcaagttgacattattctt

SEQ ID NO: 77594 - DNA, 33 bp, Homo sapien
taagacatctaaaatcgagttgacattattctt

SEQ ID NO: 77595 - DNA, 33 bp, Homo sapien
gaaatagctcttgtccagagagtgtttgcttat

SEQ ID NO: 77596 - DNA, 33 bp, Homo sapien
gaaatagctcttgtccggagagtgtttgcttat

SEQ ID NO: 77597 - DNA, 33 bp, Homo sapien
tttctgaagtttttcaataagccagaagatgag

SEQ ID NO: 77598 - DNA, 33 bp, Homo sapien
tttctgaagtttttcagtaagccagaagatgag

SEQ ID NO: 77599 - DNA, 33 bp, Homo sapien
gctggctgaatccccacactgaaagattagaac

SEQ ID NO: 77600 - DNA, 33 bp, Homo sapien
gctggctgaatccccatactgaaagattagaac

SEQ ID NO: 77601 - DNA, 33 bp, Homo sapien
cctgaacatcctgtcaagaacaaattttaaaat

SEQ ID NO: 77602 - DNA, 33 bp, Homo sapien
cctgaacatcctgtcaggaacaaattttaaaat

SEQ ID NO: 77603 - DNA, 33 bp, Homo sapien
aatgcataaaagcaaagaattcacactaaacac

SEQ ID NO: 77604 - DNA, 33 bp, Homo sapien
aatgcataaaagcaaataattcacactaaacac

SEQ ID NO: 77605 - DNA, 33 bp, Homo sapien
agttttaatctagagccattgcttcactgtcag

SEQ ID NO: 77606 - DNA, 33 bp, Homo sapien
agttttaatctagagctattgcttcactgtcag

SEQ ID NO: 77607 - DNA, 33 bp, Homo sapien
ggcacacatgaagaaacgagggatactgagaag

SEQ ID NO: 77608 - DNA, 33 bp, Homo sapien
ggcacacatgaagaaatgagggatactgagaag

SEQ ID NO: 77609 - DNA, 33 bp, Homo sapien
aggtttgctcttacacaactcatcacagtgtat

SEQ ID NO: 77610 - DNA, 33 bp, Homo sapien
aggtttgctcttacacgactcatcacagtgtat

SEQ ID NO: 77611 - DNA, 33 bp, Homo sapien
tgatccagggattggcaaagtacagccctccag

SEQ ID NO: 77612 - DNA, 33 bp, Homo sapien
tgatccagggattggcgaagtacagccctccag

SEQ ID NO: 77613 - DNA, 33 bp, Homo sapien
gcgtatggttgccttccaacaaaacttcattta

SEQ ID NO: 77614 - DNA, 33 bp, Homo sapien
gcgtatggttgccttcgaacaaaacttcattta

SEQ ID NO: 77615 - DNA, 33 bp, Homo sapien
tcactgaaattataagaccagattgtagctctg

SEQ ID NO: 77616 - DNA, 33 bp, Homo sapien
tcactgaaattataagcccagattgtagctctg

SEQ ID NO: 77617 - DNA, 33 bp, Homo sapien
gaagagtttggaaaaaataagttgatgtttata

SEQ ID NO: 77618 - DNA, 33 bp, Homo sapien
gaagagtttggaaaaagtaagttgatgtttata

SEQ ID NO: 77619 - DNA, 33 bp, Homo sapien
gaaatactgtatatgcaaaattcagtcctgttt

SEQ ID NO: 77620 - DNA, 33 bp, Homo sapien
gaaatactgtatatgcgaaattcagtcctgttt

SEQ ID NO: 77621 - DNA, 33 bp, Homo sapien
acctttaggcaggacaatatgagattttatcac

SEQ ID NO: 77622 - DNA, 33 bp, Homo sapien
acctttaggcaggacagtatgagattttatcac

SEQ ID NO: 77623 - DNA, 33 bp, Homo sapien
tactaagtgacaaacaactggatagtctcaggg

SEQ ID NO: 77624 - DNA, 33 bp, Homo sapien
tactaagtgacaaacagctggatagtctcaggg

SEQ ID NO: 77625 - DNA, 33 bp, Homo sapien
ctttgaattagtaaacagtacatctgtgacaat

SEQ ID NO: 77626 - DNA, 33 bp, Homo sapien
ctttgaattagtaaacggtacatctgtgacaat

SEQ ID NO: 77627 - DNA, 33 bp, Homo sapien
catttgaagttagaccacagaaaatataaaaca

SEQ ID NO: 77628 - DNA, 33 bp, Homo sapien
catttgaagttagaccgcagaaaatataaaaca

SEQ ID NO: 77629 - DNA, 33 bp, Homo sapien
attgtttgtctctggaatcactttcttgattca

SEQ ID NO: 77630 - DNA, 33 bp, Homo sapien
attgtttgtctctggagtcactttcttgattca

SEQ ID NO: 77631 - DNA, 33 bp, Homo sapien
tgtgttttcttcattcaacagactgggctctcc

SEQ ID NO: 77632 - DNA, 33 bp, Homo sapien
tgtgttttcttcattcgacagactgggctctcc

SEQ ID NO: 77633 - DNA, 33 bp, Homo sapien
tgtatcctcccaaagacagtcaatgaacacatg

SEQ ID NO: 77634 - DNA, 33 bp, Homo sapien
tgtatcctcccaaagatagtcaatgaacacatg

SEQ ID NO: 77635 - DNA, 33 bp, Homo sapien
gcttttctttctacacaacacacatacccaggt

SEQ ID NO: 77636 - DNA, 33 bp, Homo sapien
gcttttctttctacacgacacacatacccaggt

SEQ ID NO: 77637 - DNA, 33 bp, Homo sapien
cctggcctctggttccactaagctgcagtccag

SEQ ID NO: 77638 - DNA, 33 bp, Homo sapien
cctggcctctggttccgctaagctgcagtccag

SEQ ID NO: 77639 - DNA, 33 bp, Homo sapien
ggaaggtcgggaaggacagcaaaatcccagaga

SEQ ID NO: 77640 - DNA, 33 bp, Homo sapien
ggaaggtcgggaaggagagcaaaatcccagaga

SEQ ID NO: 77641 - DNA, 33 bp, Homo sapien
aatcccagagaggacccagtcaagcccggcagg

SEQ ID NO: 77642 - DNA, 33 bp, Homo sapien
aatcccagagaggaccgagtcaagcccggcagg

SEQ ID NO: 77643 - DNA, 33 bp, Homo sapien
tatgaaactatgaggcactaaaaagagtatccc

SEQ ID NO: 77644 - DNA, 33 bp, Homo sapien
tatgaaactatgaggcgctaaaaagagtatccc

SEQ ID NO: 77645 - DNA, 33 bp, Homo sapien
tacctcagagctcacactcacgtttcccccaga

SEQ ID NO: 77646 - DNA, 33 bp, Homo sapien
tacctcagagctcacattcacgtttcccccaga

SEQ ID NO: 77647 - DNA, 33 bp, Homo sapien
gaggcccatccttgacgcgcttaatgctctcct

SEQ ID NO: 77648 - DNA, 33 bp, Homo sapien
gaggcccatccttgactcgcttaatgctctcct

SEQ ID NO: 77649 - DNA, 33 bp, Homo sapien
tcacccatgaattcaagctgtacaccttttaaa

SEQ ID NO: 77650 - DNA, 33 bp, Homo sapien
tcacccatgaattcaatctgtacaccttttaaa

SEQ ID NO: 77651 - DNA, 33 bp, Homo sapien
aaacaaggctggagtcccaatattcagtatgta

SEQ ID NO: 77652 - DNA, 33 bp, Homo sapien
aaacaaggctggagtctcaatattcagtatgta

SEQ ID NO: 77653 - DNA, 33 bp, Homo sapien
aaactagttaaaagacacagtccagtgagaagt

SEQ ID NO: 77654 - DNA, 33 bp, Homo sapien
aaactagttaaaagacgcagtccagtgagaagt

SEQ ID NO: 77655 - DNA, 33 bp, Homo sapien
ttgaggttttcctctacagtgaaggatgattaa

SEQ ID NO: 77656 - DNA, 33 bp, Homo sapien
ttgaggttttcctctatagtgaaggatgattaa

SEQ ID NO: 77657 - DNA, 33 bp, Homo sapien
cacgcctggttgaaagaatgtacagccacatcg

SEQ ID NO: 77658 - DNA, 33 bp, Homo sapien
cacgcctggttgaaaggatgtacagccacatcg

SEQ ID NO: 77659 - DNA, 33 bp, Homo sapien
tctccaccttgtcatcaactttgagtgtctgag

SEQ ID NO: 77660 - DNA, 33 bp, Homo sapien
tctccaccttgtcatcgactttgagtgtctgag

SEQ ID NO: 77661 - DNA, 33 bp, Homo sapien
gtagagggacattgtaaatttgctctacaggta

SEQ ID NO: 77662 - DNA, 33 bp, Homo sapien
gtagagggacattgtagatttgctctacaggta

SEQ ID NO: 77663 - DNA, 33 bp, Homo sapien
gcccagaccggaagctaactgtctccaaggcct

SEQ ID NO: 77664 - DNA, 33 bp, Homo sapien
gcccagaccggaagctcactgtctccaaggcct

SEQ ID NO: 77665 - DNA, 33 bp, Homo sapien
taacatccattagagaaacacgagagacataca

SEQ ID NO: 77666 - DNA, 33 bp, Homo sapien
taacatccattagagagacacgagagacataca

SEQ ID NO: 77667 - DNA, 33 bp, Homo sapien
atttaaaacggattccaagatgagagagggtat

SEQ ID NO: 77668 - DNA, 33 bp, Homo sapien
atttaaaacggattccgagatgagagagggtat

SEQ ID NO: 77669 - DNA, 33 bp, Homo sapien
cagagtctcacagttacgaagtggtttctgcta

SEQ ID NO: 77670 - DNA, 33 bp, Homo sapien
cagagtctcacagttatgaagtggtttctgcta

SEQ ID NO: 77671 - DNA, 33 bp, Homo sapien
aatagtatgtagggctcagataagacaattcca

SEQ ID NO: 77672 - DNA, 33 bp, Homo sapien
aatagtatgtagggctgagataagacaattcca

SEQ ID NO: 77673 - DNA, 33 bp, Homo sapien
cctggcttaaacttcaatatactggaagaagag

SEQ ID NO: 77674 - DNA, 33 bp, Homo sapien
cctggcttaaacttcattatactggaagaagag

SEQ ID NO: 77675 - DNA, 33 bp, Homo sapien
tgatagacagtagagaacacagggacagccagt

SEQ ID NO: 77676 - DNA, 33 bp, Homo sapien
tgatagacagtagagaccacagggacagccagt

SEQ ID NO: 77677 - DNA, 33 bp, Homo sapien
tgccgtacttgacatacagtactcaataaatgt

SEQ ID NO: 77678 - DNA, 33 bp, Homo sapien
tgccgtacttgacatatagtactcaataaatgt

SEQ ID NO: 77679 - DNA, 33 bp, Homo sapien
ccagtgagagaacagacggtaggcaaacaattt

SEQ ID NO: 77680 - DNA, 33 bp, Homo sapien
ccagtgagagaacagatggtaggcaaacaattt

SEQ ID NO: 77681 - DNA, 33 bp, Homo sapien
agcaaagcaaggattccaccccattaaagcctt

SEQ ID NO: 77682 - DNA, 33 bp, Homo sapien
agcaaagcaaggattcgaccccattaaagcctt

SEQ ID NO: 77683 - DNA, 33 bp, Homo sapien
gctgaaaatacctcgcactaggaagactgtctt

SEQ ID NO: 77684 - DNA, 33 bp, Homo sapien
gctgaaaatacctcgcgctaggaagactgtctt

SEQ ID NO: 77685 - DNA, 33 bp, Homo sapien
gaaaaaagagatgtcaaagaggaagcagttggc

SEQ ID NO: 77686 - DNA, 33 bp, Homo sapien
gaaaaaagagatgtcagagaggaagcagttggc

SEQ ID NO: 77687 - DNA, 33 bp, Homo sapien
actgtacacctacaaccaccagatctttaataa

SEQ ID NO: 77688 - DNA, 33 bp, Homo sapien
actgtacacctacaacgaccagatctttaataa

SEQ ID NO: 77689 - DNA, 33 bp, Homo sapien
aaaacattcctcttcaaatcccttcatggtctc

SEQ ID NO: 77690 - DNA, 33 bp, Homo sapien
aaaacattcctcttcatatcccttcatggtctc

SEQ ID NO: 77691 - DNA, 33 bp, Homo sapien
cccttcatggtctcaggaaaagtatgtgtgtgg

SEQ ID NO: 77692 - DNA, 33 bp, Homo sapien
cccttcatggtctcagtaaaagtatgtgtgtgg

SEQ ID NO: 77693 - DNA, 33 bp, Homo sapien
gaatctaaagctactgaataataaaaactcatg

SEQ ID NO: 77694 - DNA, 33 bp, Homo sapien
gaatctaaagctactgcataataaaaactcatg

SEQ ID NO: 77695 - DNA, 33 bp, Homo sapien
tcataaattagataggacatcaggaaaatatga

SEQ ID NO: 77696 - DNA, 33 bp, Homo sapien
tcataaattagataggccatcaggaaaatatga

SEQ ID NO: 77697 - DNA, 33 bp, Homo sapien
tggaagccaaagggtcactgatgatttgcgttg

SEQ ID NO: 77698 - DNA, 33 bp, Homo sapien
tggaagccaaagggtcgctgatgatttgcgttg

SEQ ID NO: 77699 - DNA, 33 bp, Homo sapien
tccaaaagtactttcggattcctggcctgtaca

SEQ ID NO: 77700 - DNA, 33 bp, Homo sapien
tccaaaagtactttcgtattcctggcctgtaca

SEQ ID NO: 77701 - DNA, 33 bp, Homo sapien
tcaggtcttgtgtaaactgatagagcaagaatt

SEQ ID NO: 77702 - DNA, 33 bp, Homo sapien
tcaggtcttgtgtaaattgatagagcaagaatt

SEQ ID NO: 77703 - DNA, 33 bp, Homo sapien
aagatttgtaagtttacagcacattaaaggatg

SEQ ID NO: 77704 - DNA, 33 bp, Homo sapien
aagatttgtaagtttatagcacattaaaggatg

SEQ ID NO: 77705 - DNA, 33 bp, Homo sapien
ggatttcttttttcatcaatgagtaaaaaccca

SEQ ID NO: 77706 - DNA, 33 bp, Homo sapien
ggatttcttttttcatgaatgagtaaaaaccca

SEQ ID NO: 77707 - DNA, 33 bp, Homo sapien
agtcaggagccagtaactccacacaggcagggt

SEQ ID NO: 77708 - DNA, 33 bp, Homo sapien
agtcaggagccagtaattccacacaggcagggt

SEQ ID NO: 77709 - DNA, 33 bp, Homo sapien
tgcataccactagaaacgagtgggcttcaaatg

SEQ ID NO: 77710 - DNA, 33 bp, Homo sapien
tgcataccactagaaaggagtgggcttcaaatg

SEQ ID NO: 77711 - DNA, 33 bp, Homo sapien
tgagacatgtgccaggaagttaggaaataggaa

SEQ ID NO: 77712 - DNA, 33 bp, Homo sapien
tgagacatgtgccaggcagttaggaaataggaa

SEQ ID NO: 77713 - DNA, 33 bp, Homo sapien
gcccacattaaatcacccaaagacttatattgg

SEQ ID NO: 77714 - DNA, 33 bp, Homo sapien
gcccacattaaatcactcaaagacttatattgg

SEQ ID NO: 77715 - DNA, 33 bp, Homo sapien
tgatctagggagaaagccactcaagaaaagcag

SEQ ID NO: 77716 - DNA, 33 bp, Homo sapien
tgatctagggagaaagtcactcaagaaaagcag

SEQ ID NO: 77717 - DNA, 33 bp, Homo sapien
aataccattgaataccccacaaggacatctagg

SEQ ID NO: 77718 - DNA, 33 bp, Homo sapien
aataccattgaatacctcacaaggacatctagg

SEQ ID NO: 77719 - DNA, 33 bp, Homo sapien
gatagatttttgactcaccataaaaaagatagc

SEQ ID NO: 77720 - DNA, 33 bp, Homo sapien
gatagatttttgactcgccataaaaaagatagc

SEQ ID NO: 77721 - DNA, 33 bp, Homo sapien
caaaacccagtttccccatgacttgcacctccg

SEQ ID NO: 77722 - DNA, 33 bp, Homo sapien
caaaacccagtttccctatgacttgcacctccg

SEQ ID NO: 77723 - DNA, 33 bp, Homo sapien
cacctgggaatgccaaagtatacagttgaagat

SEQ ID NO: 77724 - DNA, 33 bp, Homo sapien
cacctgggaatgccaaggtatacagttgaagat

SEQ ID NO: 77725 - DNA, 33 bp, Homo sapien
ctttcaaatgccacagaaccccattaatgtgaa

SEQ ID NO: 77726 - DNA, 33 bp, Homo sapien
ctttcaaatgccacagtaccccattaatgtgaa

SEQ ID NO: 77727 - DNA, 33 bp, Homo sapien
tgataacggttagaacagtactttcacgaatga

SEQ ID NO: 77728 - DNA, 33 bp, Homo sapien
tgataacggttagaacggtactttcacgaatga

SEQ ID NO: 77729 - DNA, 33 bp, Homo sapien
aatgctaggcatttccaacatggaccctagacc

SEQ ID NO: 77730 - DNA, 33 bp, Homo sapien
aatgctaggcatttccgacatggaccctagacc

SEQ ID NO: 77731 - DNA, 33 bp, Homo sapien
agctcagaaatttcccacagatctgggctgagt

SEQ ID NO: 77732 - DNA, 33 bp, Homo sapien
agctcagaaatttcccgcagatctgggctgagt

SEQ ID NO: 77733 - DNA, 33 bp, Homo sapien
aaaatgaaaaaattaaacaaccaggtgtggtgg

SEQ ID NO: 77734 - DNA, 33 bp, Homo sapien
aaaatgaaaaaattaaccaaccaggtgtggtgg

SEQ ID NO: 77735 - DNA, 33 bp, Homo sapien
tttagattgggggttacgtgggtatattgtgtt

SEQ ID NO: 77736 - DNA, 33 bp, Homo sapien
tttagattgggggttatgtgggtatattgtgtt

SEQ ID NO: 77737 - DNA, 33 bp, Homo sapien
ttcactggttgcataacggagaagagtaaaggc

SEQ ID NO: 77738 - DNA, 33 bp, Homo sapien
ttcactggttgcataatggagaagagtaaaggc

SEQ ID NO: 77739 - DNA, 33 bp, Homo sapien
tgaaatatcagaaagcagatgaagaacaatgca

SEQ ID NO: 77740 - DNA, 33 bp, Homo sapien
tgaaatatcagaaagcggatgaagaacaatgca

SEQ ID NO: 77741 - DNA, 33 bp, Homo sapien
acctttgtacaaagtacggttttggcaaaattt

SEQ ID NO: 77742 - DNA, 33 bp, Homo sapien
acctttgtacaaagtatggttttggcaaaattt

SEQ ID NO: 77743 - DNA, 33 bp, Homo sapien
gattaatgaaacaatcaatgtaatacacttcat

SEQ ID NO: 77744 - DNA, 33 bp, Homo sapien
gattaatgaaacaatcgatgtaatacacttcat

SEQ ID NO: 77745 - DNA, 33 bp, Homo sapien
aacagatttgccttggccattctgctgctcctg

SEQ ID NO: 77746 - DNA, 33 bp, Homo sapien
aacagatttgccttggtcattctgctgctcctg

SEQ ID NO: 77747 - DNA, 33 bp, Homo sapien
aaaaaggaaggttcaaagaggcatgaccttcca

SEQ ID NO: 77748 - DNA, 33 bp, Homo sapien
aaaaaggaaggttcaacgaggcatgaccttcca

SEQ ID NO: 77749 - DNA, 33 bp, Homo sapien
tggttaggacaacttagatggagaacttggaga

SEQ ID NO: 77750 - DNA, 33 bp, Homo sapien
tggttaggacaacttatatggagaacttggaga

SEQ ID NO: 77751 - DNA, 33 bp, Homo sapien
tagccctggctctgtcacacttgccggaggacc

SEQ ID NO: 77752 - DNA, 33 bp, Homo sapien
tagccctggctctgtcgcacttgccggaggacc

SEQ ID NO: 77753 - DNA, 33 bp, Homo sapien
ttcttttcctattttaaaagtctcagattctga

SEQ ID NO: 77754 - DNA, 33 bp, Homo sapien
ttcttttcctattttagaagtctcagattctga

SEQ ID NO: 77755 - DNA, 33 bp, Homo sapien
ttatgtttaatgcttccagctaaactgacttgt

SEQ ID NO: 77756 - DNA, 33 bp, Homo sapien
ttatgtttaatgcttctagctaaactgacttgt

SEQ ID NO: 77757 - DNA, 33 bp, Homo sapien
attttcagtgctaaacagagcttctgagtcgga

SEQ ID NO: 77758 - DNA, 33 bp, Homo sapien
attttcagtgctaaaccgagcttctgagtcgga

SEQ ID NO: 77759 - DNA, 33 bp, Homo sapien
ttatactgtaggttccaagacctggagaatcga

SEQ ID NO: 77760 - DNA, 33 bp, Homo sapien
ttatactgtaggttcccagacctggagaatcga

SEQ ID NO: 77761 - DNA, 33 bp, Homo sapien
atctttgaatcctgcacggaaacactgaagctt

SEQ ID NO: 77762 - DNA, 33 bp, Homo sapien
atctttgaatcctgcatggaaacactgaagctt

SEQ ID NO: 77763 - DNA, 33 bp, Homo sapien
tggcaaacactgtacaaaccacaaagcctaaat

SEQ ID NO: 77764 - DNA, 33 bp, Homo sapien
tggcaaacactgtacagaccacaaagcctaaat

SEQ ID NO: 77765 - DNA, 33 bp, Homo sapien
gccgaacccaatcaaaaagtgtggcagccaagt

SEQ ID NO: 77766 - DNA, 33 bp, Homo sapien
gccgaacccaatcaaagagtgtggcagccaagt

SEQ ID NO: 77767 - DNA, 33 bp, Homo sapien
ggtttgtggtctaaaagatagggttgatgtgaa

SEQ ID NO: 77768 - DNA, 33 bp, Homo sapien
ggtttgtggtctaaaatatagggttgatgtgaa

SEQ ID NO: 77769 - DNA, 33 bp, Homo sapien
ctgaatggttaatgaactctgactaagatgcta

SEQ ID NO: 77770 - DNA, 33 bp, Homo sapien
ctgaatggttaatgaagtctgactaagatgcta

SEQ ID NO: 77771 - DNA, 33 bp, Homo sapien
gaattcatctttgataacatgggtttcttttaa

SEQ ID NO: 77772 - DNA, 33 bp, Homo sapien
gaattcatctttgatatcatgggtttcttttaa

SEQ ID NO: 77773 - DNA, 33 bp, Homo sapien
tttaccaaatgagagccgatgaagggtgtttca

SEQ ID NO: 77774 - DNA, 33 bp, Homo sapien
tttaccaaatgagagctgatgaagggtgtttca

SEQ ID NO: 77775 - DNA, 33 bp, Homo sapien
tgagcctgtaaatccaagattagccctgcttgt

SEQ ID NO: 77776 - DNA, 33 bp, Homo sapien
tgagcctgtaaatccaggattagccctgcttgt

SEQ ID NO: 77777 - DNA, 33 bp, Homo sapien
atagcgggcactggggaaacaattggaattccc

SEQ ID NO: 77778 - DNA, 33 bp, Homo sapien
atagcgggcactggggcaacaattggaattccc

SEQ ID NO: 77779 - DNA, 33 bp, Homo sapien
ttcctgatatgtaaaacaagattggacttgaat

SEQ ID NO: 77780 - DNA, 33 bp, Homo sapien
ttcctgatatgtaaaataagattggacttgaat

SEQ ID NO: 77781 - DNA, 33 bp, Homo sapien
gaggctctcatagataaggacattgtcttcttc

SEQ ID NO: 77782 - DNA, 33 bp, Homo sapien
gaggctctcatagatatggacattgtcttcttc

SEQ ID NO: 77783 - DNA, 33 bp, Homo sapien
tatatgcatatgtgcaaaaggaattaccaaaaa

SEQ ID NO: 77784 - DNA, 33 bp, Homo sapien
tatatgcatatgtgcagaaggaattaccaaaaa

SEQ ID NO: 77785 - DNA, 33 bp, Homo sapien
gtaactcttctgtgttaaaatcaaacaacaaca

SEQ ID NO: 77786 - DNA, 33 bp, Homo sapien
gtaactcttctgtgttcaaatcaaacaacaaca

SEQ ID NO: 77787 - DNA, 33 bp, Homo sapien
aaactcatttcaaaggacaagttttaaaatagg

SEQ ID NO: 77788 - DNA, 33 bp, Homo sapien
aaactcatttcaaaggccaagttttaaaatagg

SEQ ID NO: 77789 - DNA, 33 bp, Homo sapien
gacagctcaatgcagacgagaccagaaagggca

SEQ ID NO: 77790 - DNA, 33 bp, Homo sapien
gacagctcaatgcagaggagaccagaaagggca

SEQ ID NO: 77791 - DNA, 33 bp, Homo sapien
tgggaatgttaataccactacttgttgtaaggt

SEQ ID NO: 77792 - DNA, 33 bp, Homo sapien
tgggaatgttaataccgctacttgttgtaaggt

SEQ ID NO: 77793 - DNA, 33 bp, Homo sapien
gccataattctttaacaaaaacattcagacctt

SEQ ID NO: 77794 - DNA, 33 bp, Homo sapien
gccataattctttaacgaaaacattcagacctt

SEQ ID NO: 77795 - DNA, 33 bp, Homo sapien
gcacctgcacaggtaacgagactcacccaacat

SEQ ID NO: 77796 - DNA, 33 bp, Homo sapien
gcacctgcacaggtaatgagactcacccaacat

SEQ ID NO: 77797 - DNA, 33 bp, Homo sapien
ttatgattctaaacaccccctgtgtcagccagc

SEQ ID NO: 77798 - DNA, 33 bp, Homo sapien
ttatgattctaaacactccctgtgtcagccagc

SEQ ID NO: 77799 - DNA, 33 bp, Homo sapien
tgctgccaacttctacaccacagtttcccaggc

SEQ ID NO: 77800 - DNA, 33 bp, Homo sapien
tgctgccaacttctacgccacagtttcccaggc

SEQ ID NO: 77801 - DNA, 33 bp, Homo sapien
ctctgcagatgtattgcaagacctgagatcaga

SEQ ID NO: 77802 - DNA, 33 bp, Homo sapien
ctctgcagatgtattgtaagacctgagatcaga

SEQ ID NO: 77803 - DNA, 33 bp, Homo sapien
gattggataaacaataagcagtacatatacaac

SEQ ID NO: 77804 - DNA, 33 bp, Homo sapien
gattggataaacaataggcagtacatatacaac

SEQ ID NO: 77805 - DNA, 33 bp, Homo sapien
gggatgccaaagagaaagacaatgacataggac

SEQ ID NO: 77806 - DNA, 33 bp, Homo sapien
gggatgccaaagagaatgacaatgacataggac

SEQ ID NO: 77807 - DNA, 33 bp, Homo sapien
atggtagctggggtcacgaaggtagacaagaaa

SEQ ID NO: 77808 - DNA, 33 bp, Homo sapien
atggtagctggggtcatgaaggtagacaagaaa

SEQ ID NO: 77809 - DNA, 33 bp, Homo sapien
atagagagaaatacagcctcaatgaataaaatt

SEQ ID NO: 77810 - DNA, 33 bp, Homo sapien
atagagagaaatacaggctcaatgaataaaatt

SEQ ID NO: 77811 - DNA, 33 bp, Homo sapien
aaggaggtttgagaaacgtgatgaagtctggaa

SEQ ID NO: 77812 - DNA, 33 bp, Homo sapien
aaggaggtttgagaaatgtgatgaagtctggaa

SEQ ID NO: 77813 - DNA, 33 bp, Homo sapien
gggatgttgctagaaaaggctgttggctggatg

SEQ ID NO: 77814 - DNA, 33 bp, Homo sapien
gggatgttgctagaaatggctgttggctggatg

SEQ ID NO: 77815 - DNA, 33 bp, Homo sapien
ctctcctcttacttcaccgagctcttctcagaa

SEQ ID NO: 77816 - DNA, 33 bp, Homo sapien
ctctcctcttacttcatcgagctcttctcagaa

SEQ ID NO: 77817 - DNA, 33 bp, Homo sapien
caaggcatagatgttacatttattgagacgaat

SEQ ID NO: 77818 - DNA, 33 bp, Homo sapien
caaggcatagatgttatatttattgagacgaat

SEQ ID NO: 77819 - DNA, 33 bp, Homo sapien
gcctgttaaggacagacggtcactgtgatgatt

SEQ ID NO: 77820 - DNA, 33 bp, Homo sapien
gcctgttaaggacagatggtcactgtgatgatt

SEQ ID NO: 77821 - DNA, 33 bp, Homo sapien
gatatataaaaagagaagtatgatgagggaccg

SEQ ID NO: 77822 - DNA, 33 bp, Homo sapien
gatatataaaaagagatgtatgatgagggaccg

SEQ ID NO: 77823 - DNA, 33 bp, Homo sapien
aggctcactaaagccaatataaatgaatgtcat

SEQ ID NO: 77824 - DNA, 33 bp, Homo sapien
aggctcactaaagccagtataaatgaatgtcat

SEQ ID NO: 77825 - DNA, 33 bp, Homo sapien
atagggcaagtacaggaaagttggtcaggttcc

SEQ ID NO: 77826 - DNA, 33 bp, Homo sapien
atagggcaagtacaggcaagttggtcaggttcc

SEQ ID NO: 77827 - DNA, 33 bp, Homo sapien
aagatagaagtaaaaaggttcagagagaagagg

SEQ ID NO: 77828 - DNA, 33 bp, Homo sapien
aagatagaagtaaaaatgttcagagagaagagg

SEQ ID NO: 77829 - DNA, 33 bp, Homo sapien
aagtgtagtgaaccagaaatcttaagttcacgg

SEQ ID NO: 77830 - DNA, 33 bp, Homo sapien
aagtgtagtgaaccaggaatcttaagttcacgg

SEQ ID NO: 77831 - DNA, 33 bp, Homo sapien
tctttaaactccaaacggatgataggtggcaag

SEQ ID NO: 77832 - DNA, 33 bp, Homo sapien
tctttaaactccaaactgatgataggtggcaag

SEQ ID NO: 77833 - DNA, 33 bp, Homo sapien
tcaaatgagagtttgaagttgacacagggagga

SEQ ID NO: 77834 - DNA, 33 bp, Homo sapien
tcaaatgagagtttgaggttgacacagggagga

SEQ ID NO: 77835 - DNA, 33 bp, Homo sapien
tgcctgtcctgaaggccgcaatcctcagctgcc

SEQ ID NO: 77836 - DNA, 33 bp, Homo sapien
tgcctgtcctgaaggctgcaatcctcagctgcc

SEQ ID NO: 77837 - DNA, 33 bp, Homo sapien
tgttgtagcagacacgaaatccttgtggtcttg

SEQ ID NO: 77838 - DNA, 33 bp, Homo sapien
tgttgtagcagacacggaatccttgtggtcttg

SEQ ID NO: 77839 - DNA, 33 bp, Homo sapien
gacatgaagtcagttacgtcgtgtgcagaaagg

SEQ ID NO: 77840 - DNA, 33 bp, Homo sapien
gacatgaagtcagttatgtcgtgtgcagaaagg

SEQ ID NO: 77841 - DNA, 33 bp, Homo sapien
aagtacactggacgcacggtgcctaaccatccc

SEQ ID NO: 77842 - DNA, 33 bp, Homo sapien
aagtacactggacgcatggtgcctaaccatccc

SEQ ID NO: 77843 - DNA, 33 bp, Homo sapien
ctccctcacctagcaacgtctcggtgctgagcc

SEQ ID NO: 77844 - DNA, 33 bp, Homo sapien
ctccctcacctagcaatgtctcggtgctgagcc

SEQ ID NO: 77845 - DNA, 33 bp, Homo sapien
tcctggatcaacttaccacattcctaagttctg

SEQ ID NO: 77846 - DNA, 33 bp, Homo sapien
tcctggatcaacttactacattcctaagttctg

SEQ ID NO: 77847 - DNA, 33 bp, Homo sapien
ttcattaattgatgagaactgtgcctcgctgag

SEQ ID NO: 77848 - DNA, 33 bp, Homo sapien
ttcattaattgatgagtactgtgcctcgctgag

SEQ ID NO: 77849 - DNA, 33 bp, Homo sapien
aaggccgatgcatcaacattcctcagacagatg

SEQ ID NO: 77850 - DNA, 33 bp, Homo sapien
aaggccgatgcatcaagattcctcagacagatg

SEQ ID NO: 77851 - DNA, 33 bp, Homo sapien
gggatttttgaaaaatcaatctccatcactacc

SEQ ID NO: 77852 - DNA, 33 bp, Homo sapien
gggatttttgaaaaatgaatctccatcactacc

SEQ ID NO: 77853 - DNA, 33 bp, Homo sapien
tctttttagagatatacgttgcttaaacacgta

SEQ ID NO: 77854 - DNA, 33 bp, Homo sapien
tctttttagagatatatgttgcttaaacacgta

SEQ ID NO: 77855 - DNA, 33 bp, Homo sapien
tcttataagcggcctcaaatctttttagagata

SEQ ID NO: 77856 - DNA, 33 bp, Homo sapien
tcttataagcggcctcgaatctttttagagata

SEQ ID NO: 77857 - DNA, 33 bp, Homo sapien
attttcttgagagagagaaacattttcttagcc

SEQ ID NO: 77858 - DNA, 33 bp, Homo sapien
attttcttgagagagataaacattttcttagcc

SEQ ID NO: 77859 - DNA, 33 bp, Homo sapien
ggattcacagcacttaggaaaaccttccccgta

SEQ ID NO: 77860 - DNA, 33 bp, Homo sapien
ggattcacagcacttatgaaaaccttccccgta

SEQ ID NO: 77861 - DNA, 33 bp, Homo sapien
aaatcacgtaagcaaacgactaagctgcagtga

SEQ ID NO: 77862 - DNA, 33 bp, Homo sapien
aaatcacgtaagcaaatgactaagctgcagtga

SEQ ID NO: 77863 - DNA, 33 bp, Homo sapien
aatcatagaaatagtgcagcagcctgtgtaagc

SEQ ID NO: 77864 - DNA, 33 bp, Homo sapien
aatcatagaaatagtgtagcagcctgtgtaagc

SEQ ID NO: 77865 - DNA, 33 bp, Homo sapien
tctcagtttgtcaagacagataaacaaatacct

SEQ ID NO: 77866 - DNA, 33 bp, Homo sapien
tctcagtttgtcaagatagataaacaaatacct

SEQ ID NO: 77867 - DNA, 33 bp, Homo sapien
gccctctctttcatcaagaaacgtataagatgg

SEQ ID NO: 77868 - DNA, 33 bp, Homo sapien
gccctctctttcatcatgaaacgtataagatgg

SEQ ID NO: 77869 - DNA, 33 bp, Homo sapien
cccttggcctaatgtacagtttttcattctgtg

SEQ ID NO: 77870 - DNA, 33 bp, Homo sapien
cccttggcctaatgtagagtttttcattctgtg

SEQ ID NO: 77871 - DNA, 33 bp, Homo sapien
aatctgtttccatcaacggctatgaaaaaacag

SEQ ID NO: 77872 - DNA, 33 bp, Homo sapien
aatctgtttccatcaatggctatgaaaaaacag

SEQ ID NO: 77873 - DNA, 33 bp, Homo sapien
gtggaaaggttgaagacgtccagtagttgtggc

SEQ ID NO: 77874 - DNA, 33 bp, Homo sapien
gtggaaaggttgaagatgtccagtagttgtggc

SEQ ID NO: 77875 - DNA, 33 bp, Homo sapien
taagagactcctataactctatcaaatttgcat

SEQ ID NO: 77876 - DNA, 33 bp, Homo sapien
taagagactcctataattctatcaaatttgcat

SEQ ID NO: 77877 - DNA, 33 bp, Homo sapien
cactttcgaatgctgacatttatgcaactccca

SEQ ID NO: 77878 - DNA, 33 bp, Homo sapien
cactttcgaatgctgatatttatgcaactccca

SEQ ID NO: 77879 - DNA, 33 bp, Homo sapien
actgtggggcttcagaaaacgtgagcacctgtg

SEQ ID NO: 77880 - DNA, 33 bp, Homo sapien
actgtggggcttcagagaacgtgagcacctgtg

SEQ ID NO: 77881 - DNA, 33 bp, Homo sapien
aaacattatcatccagactaaggcacctgtgag

SEQ ID NO: 77882 - DNA, 33 bp, Homo sapien
aaacattatcatccaggctaaggcacctgtgag

SEQ ID NO: 77883 - DNA, 33 bp, Homo sapien
ctcctgcaaggaggaaatcaccatctggattca

SEQ ID NO: 77884 - DNA, 33 bp, Homo sapien
ctcctgcaaggaggaagtcaccatctggattca

SEQ ID NO: 77885 - DNA, 33 bp, Homo sapien
aagggatgctgggcaccgtaaacacagaaggag

SEQ ID NO: 77886 - DNA, 33 bp, Homo sapien
aagggatgctgggcacggtaaacacagaaggag

SEQ ID NO: 77887 - DNA, 33 bp, Homo sapien
atttcaggtccaaagccctagattttgtattct

SEQ ID NO: 77888 - DNA, 33 bp, Homo sapien
atttcaggtccaaagctctagattttgtattct

SEQ ID NO: 77889 - DNA, 33 bp, Homo sapien
acctctgccacagttacgaggtcactggtccac

SEQ ID NO: 77890 - DNA, 33 bp, Homo sapien
acctctgccacagttatgaggtcactggtccac

SEQ ID NO: 77891 - DNA, 33 bp, Homo sapien
atccactcaggctccaatgaaaagcactatttg

SEQ ID NO: 77892 - DNA, 33 bp, Homo sapien
atccactcaggctccagtgaaaagcactatttg

SEQ ID NO: 77893 - DNA, 33 bp, Homo sapien
acccctttccagtaacacttgggcaatggcaga

SEQ ID NO: 77894 - DNA, 33 bp, Homo sapien
acccctttccagtaacgcttgggcaatggcaga

SEQ ID NO: 77895 - DNA, 33 bp, Homo sapien
cttcctcccagggctacgcaattctgtgagtct

SEQ ID NO: 77896 - DNA, 33 bp, Homo sapien
cttcctcccagggctatgcaattctgtgagtct

SEQ ID NO: 77897 - DNA, 33 bp, Homo sapien
caagatgagctggtgaccgctgagcagggcgac

SEQ ID NO: 77898 - DNA, 33 bp, Homo sapien
caagatgagctggtgatcgctgagcagggcgac

SEQ ID NO: 77899 - DNA, 33 bp, Homo sapien
ttgtccacgtagtgccgccaggaagctcaggat

SEQ ID NO: 77900 - DNA, 33 bp, Homo sapien
ttgtccacgtagtgcctccaggaagctcaggat

SEQ ID NO: 77901 - DNA, 33 bp, Homo sapien
gaaagagtgattataaacccaaaactgggctcc

SEQ ID NO: 77902 - DNA, 33 bp, Homo sapien
gaaagagtgattataaccccaaaactgggctcc

SEQ ID NO: 77903 - DNA, 33 bp, Homo sapien
ttagatacaagtggaacaccacgtagacctggc

SEQ ID NO: 77904 - DNA, 33 bp, Homo sapien
ttagatacaagtggaataccacgtagacctggc

SEQ ID NO: 77905 - DNA, 33 bp, Homo sapien
caacaaagaggattgaaccttggacctagtgtg

SEQ ID NO: 77906 - DNA, 33 bp, Homo sapien
caacaaagaggattgagccttggacctagtgtg

SEQ ID NO: 77907 - DNA, 33 bp, Homo sapien
gaaaggacgctgtacccctgccctattggctgc

SEQ ID NO: 77908 - DNA, 33 bp, Homo sapien
gaaaggacgctgtacctctgccctattggctgc

SEQ ID NO: 77909 - DNA, 33 bp, Homo sapien
tgacagggttttggtcaatgattgctcctttct

SEQ ID NO: 77910 - DNA, 33 bp, Homo sapien
tgacagggttttggtccatgattgctcctttct

SEQ ID NO: 77911 - DNA, 33 bp, Homo sapien
tcatggcccaaacttacagcaaagtgaccgtcc

SEQ ID NO: 77912 - DNA, 33 bp, Homo sapien
tcatggcccaaacttagagcaaagtgaccgtcc

SEQ ID NO: 77913 - DNA, 33 bp, Homo sapien
cttctgggactgccaaaagttgccaaggggagt

SEQ ID NO: 77914 - DNA, 33 bp, Homo sapien
cttctgggactgccaagagttgccaaggggagt

SEQ ID NO: 77915 - DNA, 33 bp, Homo sapien
gcagaaactaaggacaatggcctaggagtgggg

SEQ ID NO: 77916 - DNA, 33 bp, Homo sapien
gcagaaactaaggacattggcctaggagtgggg

SEQ ID NO: 77917 - DNA, 33 bp, Homo sapien
ttggtcatttctgcaaccaccatgttccatttc

SEQ ID NO: 77918 - DNA, 33 bp, Homo sapien
ttggtcatttctgcaatcaccatgttccatttc

SEQ ID NO: 77919 - DNA, 33 bp, Homo sapien
acatggaaataacagcaacagtgatgccaccct

SEQ ID NO: 77920 - DNA, 33 bp, Homo sapien
acatggaaataacagcgacagtgatgccaccct

SEQ ID NO: 77921 - DNA, 33 bp, Homo sapien
tgcactgtcagcacccaagttccctgtacacat

SEQ ID NO: 77922 - DNA, 33 bp, Homo sapien
tgcactgtcagcacccgagttccctgtacacat

SEQ ID NO: 77923 - DNA, 33 bp, Homo sapien
cccttggaattagaaaaagggctgagaggccag

SEQ ID NO: 77924 - DNA, 33 bp, Homo sapien
cccttggaattagaaagagggctgagaggccag

SEQ ID NO: 77925 - DNA, 33 bp, Homo sapien
cgaaatctttgcagccccattagaaatcgtggg

SEQ ID NO: 77926 - DNA, 33 bp, Homo sapien
cgaaatctttgcagcctcattagaaatcgtggg

SEQ ID NO: 77927 - DNA, 33 bp, Homo sapien
attatgtatcctaaaacctcaaaatatgtatct

SEQ ID NO: 77928 - DNA, 33 bp, Homo sapien
attatgtatcctaaaagctcaaaatatgtatct

SEQ ID NO: 77929 - DNA, 33 bp, Homo sapien
ccccagatggtagtgactattgttattagacat

SEQ ID NO: 77930 - DNA, 33 bp, Homo sapien
ccccagatggtagtgattattgttattagacat

SEQ ID NO: 77931 - DNA, 33 bp, Homo sapien
catctgggccagagaaagagaactctaagtctt

SEQ ID NO: 77932 - DNA, 33 bp, Homo sapien
catctgggccagagaatgagaactctaagtctt

SEQ ID NO: 77933 - DNA, 33 bp, Homo sapien
gggcctgggccaaatgacacattttttccaaat

SEQ ID NO: 77934 - DNA, 33 bp, Homo sapien
gggcctgggccaaatggcacattttttccaaat

SEQ ID NO: 77935 - DNA, 33 bp, Homo sapien
gtaagtcctagaaaaagcttggtggccctaccc

SEQ ID NO: 77936 - DNA, 33 bp, Homo sapien
gtaagtcctagaaaaatcttggtggccctaccc

SEQ ID NO: 77937 - DNA, 33 bp, Homo sapien
cacataagaagaaataaacaatttgaactggtc

SEQ ID NO: 77938 - DNA, 33 bp, Homo sapien
cacataagaagaaatagacaatttgaactggtc

SEQ ID NO: 77939 - DNA, 33 bp, Homo sapien
ttagctgtgttcctcacgcttagggaaaatgta

SEQ ID NO: 77940 - DNA, 33 bp, Homo sapien
ttagctgtgttcctcatgcttagggaaaatgta

SEQ ID NO: 77941 - DNA, 33 bp, Homo sapien
aagtcatggaatggggacaagaacaataacctg

SEQ ID NO: 77942 - DNA, 33 bp, Homo sapien
aagtcatggaatgggggcaagaacaataacctg

SEQ ID NO: 77943 - DNA, 33 bp, Homo sapien
tttttacagcatgtaaaagaaaataaaattggt

SEQ ID NO: 77944 - DNA, 33 bp, Homo sapien
tttttacagcatgtaagagaaaataaaattggt

SEQ ID NO: 77945 - DNA, 33 bp, Homo sapien
tgcccatagaaaaaggccccgtttcaggagaga

SEQ ID NO: 77946 - DNA, 33 bp, Homo sapien
tgcccatagaaaaaggtcccgtttcaggagaga

SEQ ID NO: 77947 - DNA, 33 bp, Homo sapien
aatgaatagcgtatccaagatcatataggtggc

SEQ ID NO: 77948 - DNA, 33 bp, Homo sapien
aatgaatagcgtatccgagatcatataggtggc

SEQ ID NO: 77949 - DNA, 33 bp, Homo sapien
gtccagtgactcagaacggaggacaagggactg

SEQ ID NO: 77950 - DNA, 33 bp, Homo sapien
gtccagtgactcagaagggaggacaagggactg

SEQ ID NO: 77951 - DNA, 33 bp, Homo sapien
tctgcattctgcaacgcataggagtcggaagca

SEQ ID NO: 77952 - DNA, 33 bp, Homo sapien
tctgcattctgcaacgtataggagtcggaagca

SEQ ID NO: 77953 - DNA, 33 bp, Homo sapien
taattgagctaattcaaatctcctgttgaccag

SEQ ID NO: 77954 - DNA, 33 bp, Homo sapien
taattgagctaattcagatctcctgttgaccag

SEQ ID NO: 77955 - DNA, 33 bp, Homo sapien
aatacacatagtaacaatgaagcaccaaattca

SEQ ID NO: 77956 - DNA, 33 bp, Homo sapien
aatacacatagtaacagtgaagcaccaaattca

SEQ ID NO: 77957 - DNA, 33 bp, Homo sapien
cgtttggttatttcatcaatgtcttgatcaagc

SEQ ID NO: 77958 - DNA, 33 bp, Homo sapien
cgtttggttatttcatgaatgtcttgatcaagc

SEQ ID NO: 77959 - DNA, 33 bp, Homo sapien
ctggggtagaaaattcccatatgttggtcctaa

SEQ ID NO: 77960 - DNA, 33 bp, Homo sapien
ctggggtagaaaattctcatatgttggtcctaa

SEQ ID NO: 77961 - DNA, 33 bp, Homo sapien
ctgtcaaacttgaatcccggttattttatcaga

SEQ ID NO: 77962 - DNA, 33 bp, Homo sapien
ctgtcaaacttgaatctcggttattttatcaga

SEQ ID NO: 77963 - DNA, 33 bp, Homo sapien
tgtccaagggctgtaaagatgtgaggaaaaaga

SEQ ID NO: 77964 - DNA, 33 bp, Homo sapien
tgtccaagggctgtaaggatgtgaggaaaaaga

SEQ ID NO: 77965 - DNA, 33 bp, Homo sapien
tgaataccaagttccaatcaaaacctgccagcc

SEQ ID NO: 77966 - DNA, 33 bp, Homo sapien
tgaataccaagttccagtcaaaacctgccagcc

SEQ ID NO: 77967 - DNA, 33 bp, Homo sapien
agtgggattacatgacacctgagcagagaaggt

SEQ ID NO: 77968 - DNA, 33 bp, Homo sapien
agtgggattacatgacgcctgagcagagaaggt

SEQ ID NO: 77969 - DNA, 33 bp, Homo sapien
aaatggccacctacacaatacgctgccctactg

SEQ ID NO: 77970 - DNA, 33 bp, Homo sapien
aaatggccacctacacgatacgctgccctactg

SEQ ID NO: 77971 - DNA, 33 bp, Homo sapien
tgcttaaatgacataaagacttacatgattagg

SEQ ID NO: 77972 - DNA, 33 bp, Homo sapien
tgcttaaatgacataaggacttacatgattagg

SEQ ID NO: 77973 - DNA, 33 bp, Homo sapien
aagcaactctcttgtactaatagaaaatgtatg

SEQ ID NO: 77974 - DNA, 33 bp, Homo sapien
aagcaactctcttgtagtaatagaaaatgtatg

SEQ ID NO: 77975 - DNA, 33 bp, Homo sapien
ttttctaactcatcaaagccaagtatcttctat

SEQ ID NO: 77976 - DNA, 33 bp, Homo sapien
ttttctaactcatcaacgccaagtatcttctat

SEQ ID NO: 77977 - DNA, 33 bp, Homo sapien
ggctcgttttaaaatcacgttttctgacgaatc

SEQ ID NO: 77978 - DNA, 33 bp, Homo sapien
ggctcgttttaaaatcgcgttttctgacgaatc

SEQ ID NO: 77979 - DNA, 33 bp, Homo sapien
tgattacatgggattacaaagaagtctaattat

SEQ ID NO: 77980 - DNA, 33 bp, Homo sapien
tgattacatgggattataaagaagtctaattat

SEQ ID NO: 77981 - DNA, 33 bp, Homo sapien
ccagctgtgatttctcaatataaatgcaaatca

SEQ ID NO: 77982 - DNA, 33 bp, Homo sapien
ccagctgtgatttctccatataaatgcaaatca

SEQ ID NO: 77983 - DNA, 33 bp, Homo sapien
atgggaaggaagtgggaagaagactgctcggca

SEQ ID NO: 77984 - DNA, 33 bp, Homo sapien
atgggaaggaagtgggcagaagactgctcggca

SEQ ID NO: 77985 - DNA, 33 bp, Homo sapien
ccagctccaaacctcacggcacagggtacacac

SEQ ID NO: 77986 - DNA, 33 bp, Homo sapien
ccagctccaaacctcatggcacagggtacacac

SEQ ID NO: 77987 - DNA, 33 bp, Homo sapien
acatgttgggagtgtcagaaggaggacccaggt

SEQ ID NO: 77988 - DNA, 33 bp, Homo sapien
acatgttgggagtgtcggaaggaggacccaggt

SEQ ID NO: 77989 - DNA, 33 bp, Homo sapien
gattctcagggcagtgcagggttagttagtagt

SEQ ID NO: 77990 - DNA, 33 bp, Homo sapien
gattctcagggcagtgtagggttagttagtagt

SEQ ID NO: 77991 - DNA, 33 bp, Homo sapien
tatggtgatgattacacaacctcataaatatac

SEQ ID NO: 77992 - DNA, 33 bp, Homo sapien
tatggtgatgattacagaacctcataaatatac

SEQ ID NO: 77993 - DNA, 33 bp, Homo sapien
ccagtgggtagaccacagaaggaatgaacaggg

SEQ ID NO: 77994 - DNA, 33 bp, Homo sapien
ccagtgggtagaccacggaaggaatgaacaggg

SEQ ID NO: 77995 - DNA, 33 bp, Homo sapien
cagatgaggatttttcactttttgactagttct

SEQ ID NO: 77996 - DNA, 33 bp, Homo sapien
cagatgaggatttttcgctttttgactagttct

SEQ ID NO: 77997 - DNA, 33 bp, Homo sapien
ctctacaagcagataccattcttcaggtttttt

SEQ ID NO: 77998 - DNA, 33 bp, Homo sapien
ctctacaagcagatactattcttcaggtttttt

SEQ ID NO: 77999 - DNA, 33 bp, Homo sapien
gctgagaaatattctcaaagatgagacacacag

SEQ ID NO: 78000 - DNA, 33 bp, Homo sapien
gctgagaaatattctcgaagatgagacacacag

SEQ ID NO: 78001 - DNA, 33 bp, Homo sapien
ccatctccatctaggaaaagaaaaggacccagg

SEQ ID NO: 78002 - DNA, 33 bp, Homo sapien
ccatctccatctaggacaagaaaaggacccagg

SEQ ID NO: 78003 - DNA, 33 bp, Homo sapien
agcctcaggcctcactcactgcactgtcttctc

SEQ ID NO: 78004 - DNA, 33 bp, Homo sapien
agcctcaggcctcacttactgcactgtcttctc

SEQ ID NO: 78005 - DNA, 33 bp, Homo sapien
ccaggtgtttgtgtgcagatttgtgctctcaca

SEQ ID NO: 78006 - DNA, 33 bp, Homo sapien
ccaggtgtttgtgtgcggatttgtgctctcaca

SEQ ID NO: 78007 - DNA, 33 bp, Homo sapien
tcaagacaaatgacgacgaatgaggtagaaaac

SEQ ID NO: 78008 - DNA, 33 bp, Homo sapien
tcaagacaaatgacgatgaatgaggtagaaaac

SEQ ID NO: 78009 - DNA, 33 bp, Homo sapien
agtaccgtacagtgaaatcatcactaaaccact

SEQ ID NO: 78010 - DNA, 33 bp, Homo sapien
agtaccgtacagtgaagtcatcactaaaccact

SEQ ID NO: 78011 - DNA, 33 bp, Homo sapien
tcacagaatcccagacaacaaagtgaaatgcca

SEQ ID NO: 78012 - DNA, 33 bp, Homo sapien
tcacagaatcccagacgacaaagtgaaatgcca

SEQ ID NO: 78013 - DNA, 33 bp, Homo sapien
gcacattagagaagaacaactgagactcgagaa

SEQ ID NO: 78014 - DNA, 33 bp, Homo sapien
gcacattagagaagaagaactgagactcgagaa

SEQ ID NO: 78015 - DNA, 33 bp, Homo sapien
tggcccagaccaatgcaatctgtgtcctgagga

SEQ ID NO: 78016 - DNA, 33 bp, Homo sapien
tggcccagaccaatgcgatctgtgtcctgagga

SEQ ID NO: 78017 - DNA, 33 bp, Homo sapien
gggacaggcactgagccaaaggcactgagccag

SEQ ID NO: 78018 - DNA, 33 bp, Homo sapien
gggacaggcactgagctaaaggcactgagccag

SEQ ID NO: 78019 - DNA, 33 bp, Homo sapien
caatggtggaagctacactgcttttgactggga

SEQ ID NO: 78020 - DNA, 33 bp, Homo sapien
caatggtggaagctacgctgcttttgactggga

SEQ ID NO: 78021 - DNA, 33 bp, Homo sapien
gacaccctgtgccacacgggttctggagagcag

SEQ ID NO: 78022 - DNA, 33 bp, Homo sapien
gacaccctgtgccacatgggttctggagagcag

SEQ ID NO: 78023 - DNA, 33 bp, Homo sapien
ttatgagagcttcccaagtattacccatgtaat

SEQ ID NO: 78024 - DNA, 33 bp, Homo sapien
ttatgagagcttcccaggtattacccatgtaat

SEQ ID NO: 78025 - DNA, 33 bp, Homo sapien
agcccaatgtaccaacgatttaaaggcagctaa

SEQ ID NO: 78026 - DNA, 33 bp, Homo sapien
agcccaatgtaccaactatttaaaggcagctaa

SEQ ID NO: 78027 - DNA, 33 bp, Homo sapien
atgtcatgtggatgaacgactctttggatgttg

SEQ ID NO: 78028 - DNA, 33 bp, Homo sapien
atgtcatgtggatgaatgactctttggatgttg

SEQ ID NO: 78029 - DNA, 33 bp, Homo sapien
ctggcccaggcattaccgaccctgtccctgtgt

SEQ ID NO: 78030 - DNA, 33 bp, Homo sapien
ctggcccaggcattacggaccctgtccctgtgt

SEQ ID NO: 78031 - DNA, 33 bp, Homo sapien
ctcacaaggagagttacgttgatgacagagacg

SEQ ID NO: 78032 - DNA, 33 bp, Homo sapien
ctcacaaggagagttaggttgatgacagagacg

SEQ ID NO: 78033 - DNA, 33 bp, Homo sapien
atggctaagagctgaaagagaactctatggaaa

SEQ ID NO: 78034 - DNA, 33 bp, Homo sapien
atggctaagagctgaaggagaactctatggaaa

SEQ ID NO: 78035 - DNA, 33 bp, Homo sapien
catgtattagatagaacgaaagccctcaggcac

SEQ ID NO: 78036 - DNA, 33 bp, Homo sapien
catgtattagatagaatgaaagccctcaggcac

SEQ ID NO: 78037 - DNA, 33 bp, Homo sapien
cctgagggcacaccagaaaatgtgattcagcca

SEQ ID NO: 78038 - DNA, 33 bp, Homo sapien
cctgagggcacaccaggaaatgtgattcagcca

SEQ ID NO: 78039 - DNA, 33 bp, Homo sapien
gatgctgccctaccgcagaagctcgccacctca

SEQ ID NO: 78040 - DNA, 33 bp, Homo sapien
gatgctgccctaccgcggaagctcgccacctca

SEQ ID NO: 78041 - DNA, 33 bp, Homo sapien
caaaagctgaaatgcacgaattgtaaccctact

SEQ ID NO: 78042 - DNA, 33 bp, Homo sapien
caaaagctgaaatgcatgaattgtaaccctact

SEQ ID NO: 78043 - DNA, 33 bp, Homo sapien
gagtccttcctttctacgcaggcacagttccaa

SEQ ID NO: 78044 - DNA, 33 bp, Homo sapien
gagtccttcctttctatgcaggcacagttccaa

SEQ ID NO: 78045 - DNA, 33 bp, Homo sapien
gtgatgaggattttaaactaccacatgggacct

SEQ ID NO: 78046 - DNA, 33 bp, Homo sapien
gtgatgaggattttaagctaccacatgggacct

SEQ ID NO: 78047 - DNA, 33 bp, Homo sapien
gaactcacttccacaaacgatgctatttatgtg

SEQ ID NO: 78048 - DNA, 33 bp, Homo sapien
gaactcacttccacaagcgatgctatttatgtg

SEQ ID NO: 78049 - DNA, 33 bp, Homo sapien
ggaaatgttcaagcccagaataaggttgtatta

SEQ ID NO: 78050 - DNA, 33 bp, Homo sapien
ggaaatgttcaagcccggaataaggttgtatta

SEQ ID NO: 78051 - DNA, 33 bp, Homo sapien
aagcttttgcctcctgcagtaaaacaatttcca

SEQ ID NO: 78052 - DNA, 33 bp, Homo sapien
aagcttttgcctcctgtagtaaaacaatttcca

SEQ ID NO: 78053 - DNA, 33 bp, Homo sapien
cttaataattataaagcctctgctatttattgg

SEQ ID NO: 78054 - DNA, 33 bp, Homo sapien
cttaataattataaagtctctgctatttattgg

SEQ ID NO: 78055 - DNA, 33 bp, Homo sapien
atccaaattctacctacggctcctcagagaacg

SEQ ID NO: 78056 - DNA, 33 bp, Homo sapien
atccaaattctacctatggctcctcagagaacg

SEQ ID NO: 78057 - DNA, 33 bp, Homo sapien
agaagtggtagcagatgaaatcaaagaggaagt

SEQ ID NO: 78058 - DNA, 33 bp, Homo sapien
agaagtggtagcagattaaatcaaagaggaagt

SEQ ID NO: 78059 - DNA, 33 bp, Homo sapien
ctgcgtgttgctggtcactctggatggagacgg

SEQ ID NO: 78060 - DNA, 33 bp, Homo sapien
ctgcgtgttgctggtcgctctggatggagacgg

SEQ ID NO: 78061 - DNA, 33 bp, Homo sapien
tcacagatgctcctacaatttgtacttttttcc

SEQ ID NO: 78062 - DNA, 33 bp, Homo sapien
tcacagatgctcctacgatttgtacttttttcc

SEQ ID NO: 78063 - DNA, 33 bp, Homo sapien
taaacctctaatcaaccgagccctgactcagtc

SEQ ID NO: 78064 - DNA, 33 bp, Homo sapien
taaacctctaatcaacggagccctgactcagtc

SEQ ID NO: 78065 - DNA, 33 bp, Homo sapien
agtctcactgtaaggacgatggaggaacagaaa

SEQ ID NO: 78066 - DNA, 33 bp, Homo sapien
agtctcactgtaaggatgatggaggaacagaaa

SEQ ID NO: 78067 - DNA, 33 bp, Homo sapien
agaggctaaaatgataagctatagcacagtact

SEQ ID NO: 78068 - DNA, 33 bp, Homo sapien
agaggctaaaatgataggctatagcacagtact

SEQ ID NO: 78069 - DNA, 33 bp, Homo sapien
ggctcctctatttaaacgttagagtattcttgg

SEQ ID NO: 78070 - DNA, 33 bp, Homo sapien
ggctcctctatttaaatgttagagtattcttgg

SEQ ID NO: 78071 - DNA, 33 bp, Homo sapien
aatgaacataccaaaaatttaagaagccatgta

SEQ ID NO: 78072 - DNA, 33 bp, Homo sapien
aatgaacataccaaaagtttaagaagccatgta

SEQ ID NO: 78073 - DNA, 33 bp, Homo sapien
tccccctacttcttcaactattacttcttggtt

SEQ ID NO: 78074 - DNA, 33 bp, Homo sapien
tccccctacttcttcagctattacttcttggtt

SEQ ID NO: 78075 - DNA, 33 bp, Homo sapien
ggaaccaatatgtaaccgctcggaacacaattt

SEQ ID NO: 78076 - DNA, 33 bp, Homo sapien
ggaaccaatatgtaactgctcggaacacaattt

SEQ ID NO: 78077 - DNA, 33 bp, Homo sapien
aggtgcacagtcctagaacaacatactggtact

SEQ ID NO: 78078 - DNA, 33 bp, Homo sapien
aggtgcacagtcctagcacaacatactggtact

SEQ ID NO: 78079 - DNA, 33 bp, Homo sapien
gtagcggataagaaacaacttggtgaaaaactg

SEQ ID NO: 78080 - DNA, 33 bp, Homo sapien
gtagcggataagaaactacttggtgaaaaactg

SEQ ID NO: 78081 - DNA, 33 bp, Homo sapien
gtcctcagccttcacaacacaacttaccgctgt

SEQ ID NO: 78082 - DNA, 33 bp, Homo sapien
gtcctcagccttcacatcacaacttaccgctgt

SEQ ID NO: 78083 - DNA, 33 bp, Homo sapien
ctgaggcccagaatgacgagagttcctgtctat

SEQ ID NO: 78084 - DNA, 33 bp, Homo sapien
ctgaggcccagaatgatgagagttcctgtctat

SEQ ID NO: 78085 - DNA, 33 bp, Homo sapien
ccctgctcatctcaaacgaatgaatgaataaat

SEQ ID NO: 78086 - DNA, 33 bp, Homo sapien
ccctgctcatctcaaatgaatgaatgaataaat

SEQ ID NO: 78087 - DNA, 33 bp, Homo sapien
ccagagaaataacagagatactctaagaatacc

SEQ ID NO: 78088 - DNA, 33 bp, Homo sapien
ccagagaaataacagatatactctaagaatacc

SEQ ID NO: 78089 - DNA, 33 bp, Homo sapien
gggcttgtaatgaataacaaaacatactcctat

SEQ ID NO: 78090 - DNA, 33 bp, Homo sapien
gggcttgtaatgaatagcaaaacatactcctat

SEQ ID NO: 78091 - DNA, 33 bp, Homo sapien
ttagtgatttgaggaaccttctacctctgtgaa

SEQ ID NO: 78092 - DNA, 33 bp, Homo sapien
ttagtgatttgaggaagcttctacctctgtgaa

SEQ ID NO: 78093 - DNA, 33 bp, Homo sapien
gagttagtatgctgagcccccttgccatgtgat

SEQ ID NO: 78094 - DNA, 33 bp, Homo sapien
gagttagtatgctgagtccccttgccatgtgat

SEQ ID NO: 78095 - DNA, 33 bp, Homo sapien
cctgcctcaggattgcaatggatgcgtgtcaaa

SEQ ID NO: 78096 - DNA, 33 bp, Homo sapien
cctgcctcaggattgccatggatgcgtgtcaaa

SEQ ID NO: 78097 - DNA, 33 bp, Homo sapien
gcaatatcaaaatcccagaggaaagaaggtgtg

SEQ ID NO: 78098 - DNA, 33 bp, Homo sapien
gcaatatcaaaatcccggaggaaagaaggtgtg

SEQ ID NO: 78099 - DNA, 33 bp, Homo sapien
aggaatttctacatccaagttaatccttacaaa

SEQ ID NO: 78100 - DNA, 33 bp, Homo sapien
aggaatttctacatcccagttaatccttacaaa

SEQ ID NO: 78101 - DNA, 33 bp, Homo sapien
ttggttaaggtaaccagatttgatttctgttga

SEQ ID NO: 78102 - DNA, 33 bp, Homo sapien
ttggttaaggtaaccatatttgatttctgttga

SEQ ID NO: 78103 - DNA, 33 bp, Homo sapien
ctgggttggctttccaatagaaaggatagcatg

SEQ ID NO: 78104 - DNA, 33 bp, Homo sapien
ctgggttggctttccagtagaaaggatagcatg

SEQ ID NO: 78105 - DNA, 33 bp, Homo sapien
caggagctaggagagcacgcatggaatggaatc

SEQ ID NO: 78106 - DNA, 33 bp, Homo sapien
caggagctaggagagcccgcatggaatggaatc

SEQ ID NO: 78107 - DNA, 33 bp, Homo sapien
agaacaactgctccaagactttggttggtctta

SEQ ID NO: 78108 - DNA, 33 bp, Homo sapien
agaacaactgctccaatactttggttggtctta

SEQ ID NO: 78109 - DNA, 33 bp, Homo sapien
gctgagggtgattcccagggaaagacacagcta

SEQ ID NO: 78110 - DNA, 33 bp, Homo sapien
gctgagggtgattcccggggaaagacacagcta

SEQ ID NO: 78111 - DNA, 33 bp, Homo sapien
gagcccctggctaccacgtttctactgcctgtt

SEQ ID NO: 78112 - DNA, 33 bp, Homo sapien
gagcccctggctaccatgtttctactgcctgtt

SEQ ID NO: 78113 - DNA, 33 bp, Homo sapien
aaaaatgtgatctgcacaggataaagacacttg

SEQ ID NO: 78114 - DNA, 33 bp, Homo sapien
aaaaatgtgatctgcataggataaagacacttg

SEQ ID NO: 78115 - DNA, 33 bp, Homo sapien
attacaagggtttagacactttgtaccagaaat

SEQ ID NO: 78116 - DNA, 33 bp, Homo sapien
attacaagggtttagatactttgtaccagaaat

SEQ ID NO: 78117 - DNA, 33 bp, Homo sapien
agttattcttcaatagcatgagggttggtgcta

SEQ ID NO: 78118 - DNA, 33 bp, Homo sapien
agttattcttcaataggatgagggttggtgcta

SEQ ID NO: 78119 - DNA, 33 bp, Homo sapien
tacactgaaaagagaactcaggctcaaaagcct

SEQ ID NO: 78120 - DNA, 33 bp, Homo sapien
tacactgaaaagagaattcaggctcaaaagcct

SEQ ID NO: 78121 - DNA, 33 bp, Homo sapien
tttctagaaagagtgcaatgtgacagtccaagt

SEQ ID NO: 78122 - DNA, 33 bp, Homo sapien
tttctagaaagagtgcgatgtgacagtccaagt

SEQ ID NO: 78123 - DNA, 33 bp, Homo sapien
tgtaggcatacataaaactgacatgtaaactcc

SEQ ID NO: 78124 - DNA, 33 bp, Homo sapien
tgtaggcatacataaagctgacatgtaaactcc

SEQ ID NO: 78125 - DNA, 33 bp, Homo sapien
tagagtgaggattaacagagagccaggtgcctg

SEQ ID NO: 78126 - DNA, 33 bp, Homo sapien
tagagtgaggattaacggagagccaggtgcctg

SEQ ID NO: 78127 - DNA, 33 bp, Homo sapien
gaacacaagacctctccagttgtgcatgagccc

SEQ ID NO: 78128 - DNA, 33 bp, Homo sapien
gaacacaagacctctctagttgtgcatgagccc

SEQ ID NO: 78129 - DNA, 33 bp, Homo sapien
aaggtttctgcccttccctgaaagcaatttctc

SEQ ID NO: 78130 - DNA, 33 bp, Homo sapien
aaggtttctgcccttctctgaaagcaatttctc

SEQ ID NO: 78131 - DNA, 33 bp, Homo sapien
gtgaaattgtctgccacaaaagtcttaagtttt

SEQ ID NO: 78132 - DNA, 33 bp, Homo sapien
gtgaaattgtctgccataaaagtcttaagtttt

SEQ ID NO: 78133 - DNA, 33 bp, Homo sapien
tgactctcaaaggcacaccctagtgtaatctct

SEQ ID NO: 78134 - DNA, 33 bp, Homo sapien
tgactctcaaaggcacgccctagtgtaatctct

SEQ ID NO: 78135 - DNA, 33 bp, Homo sapien
attgtgtaaaattccaaatcactgaagagatta

SEQ ID NO: 78136 - DNA, 33 bp, Homo sapien
attgtgtaaaattccagatcactgaagagatta

SEQ ID NO: 78137 - DNA, 33 bp, Homo sapien
agacaggctcatagtacgaagaaaagaaaaaga

SEQ ID NO: 78138 - DNA, 33 bp, Homo sapien
agacaggctcatagtaggaagaaaagaaaaaga

SEQ ID NO: 78139 - DNA, 33 bp, Homo sapien
aagtctgaccacttcaaagtaatccaatgtgac

SEQ ID NO: 78140 - DNA, 33 bp, Homo sapien
aagtctgaccacttcagagtaatccaatgtgac

SEQ ID NO: 78141 - DNA, 33 bp, Homo sapien
cacactgcagtcaaagccctgaagcacagtgtc

SEQ ID NO: 78142 - DNA, 33 bp, Homo sapien
cacactgcagtcaaaggcctgaagcacagtgtc

SEQ ID NO: 78143 - DNA, 33 bp, Homo sapien
tctttatatcttggggaaaggtgagagttcctc

SEQ ID NO: 78144 - DNA, 33 bp, Homo sapien
tctttatatcttgggggaaggtgagagttcctc

SEQ ID NO: 78145 - DNA, 33 bp, Homo sapien
ataggtaatacagttccagtgcaaatattttgt

SEQ ID NO: 78146 - DNA, 33 bp, Homo sapien
ataggtaatacagttctagtgcaaatattttgt

SEQ ID NO: 78147 - DNA, 33 bp, Homo sapien
cacaattctgcataacagtgctttccattacaa

SEQ ID NO: 78148 - DNA, 33 bp, Homo sapien
cacaattctgcataacggtgctttccattacaa

SEQ ID NO: 78149 - DNA, 33 bp, Homo sapien
caagtagctcacagaaaaatataataaacattt

SEQ ID NO: 78150 - DNA, 33 bp, Homo sapien
caagtagctcacagaagaatataataaacattt

SEQ ID NO: 78151 - DNA, 33 bp, Homo sapien
tggcaatatggcaatcgagttagccaaatcatc

SEQ ID NO: 78152 - DNA, 33 bp, Homo sapien
tggcaatatggcaatctagttagccaaatcatc

SEQ ID NO: 78153 - DNA, 33 bp, Homo sapien
taagattcacgtaagaagattgaaatacctgtt

SEQ ID NO: 78154 - DNA, 33 bp, Homo sapien
taagattcacgtaagatgattgaaatacctgtt

SEQ ID NO: 78155 - DNA, 33 bp, Homo sapien
atgcttccttggaaagaagatgctcactcaggt

SEQ ID NO: 78156 - DNA, 33 bp, Homo sapien
atgcttccttggaaaggagatgctcactcaggt

SEQ ID NO: 78157 - DNA, 33 bp, Homo sapien
gaacctttgtgagagactaaatggctatgggaa

SEQ ID NO: 78158 - DNA, 33 bp, Homo sapien
gaacctttgtgagagagtaaatggctatgggaa

SEQ ID NO: 78159 - DNA, 33 bp, Homo sapien
caataaagtcaaaataccttagcttggctggca

SEQ ID NO: 78160 - DNA, 33 bp, Homo sapien
caataaagtcaaaatatcttagcttggctggca

SEQ ID NO: 78161 - DNA, 33 bp, Homo sapien
ctctgtagtcccataacactgttaatgattcca

SEQ ID NO: 78162 - DNA, 33 bp, Homo sapien
ctctgtagtcccataatactgttaatgattcca

SEQ ID NO: 78163 - DNA, 33 bp, Homo sapien
cccaagacatatggaaaacagactcttggaaac

SEQ ID NO: 78164 - DNA, 33 bp, Homo sapien
cccaagacatatggaagacagactcttggaaac

SEQ ID NO: 78165 - DNA, 33 bp, Homo sapien
aaacccacctcctcatcataggcaagacttcct

SEQ ID NO: 78166 - DNA, 33 bp, Homo sapien
aaacccacctcctcatgataggcaagacttcct

SEQ ID NO: 78167 - DNA, 33 bp, Homo sapien
gaaaagacggctggtgccaaatgaacgggattt

SEQ ID NO: 78168 - DNA, 33 bp, Homo sapien
gaaaagacggctggtggcaaatgaacgggattt

SEQ ID NO: 78169 - DNA, 33 bp, Homo sapien
aattatctggccttaaatgtcaatggtgcagag

SEQ ID NO: 78170 - DNA, 33 bp, Homo sapien
aattatctggccttaattgtcaatggtgcagag

SEQ ID NO: 78171 - DNA, 33 bp, Homo sapien
tctccccacttcccaacaaagagcatacttaag

SEQ ID NO: 78172 - DNA, 33 bp, Homo sapien
tctccccacttcccaataaagagcatacttaag

SEQ ID NO: 78173 - DNA, 33 bp, Homo sapien
atttcaaatcataaaccgtgataggatcctcat

SEQ ID NO: 78174 - DNA, 33 bp, Homo sapien
atttcaaatcataaactgtgataggatcctcat

SEQ ID NO: 78175 - DNA, 33 bp, Homo sapien
gtttccatttttaaacagatcatgtgcttgacc

SEQ ID NO: 78176 - DNA, 33 bp, Homo sapien
gtttccatttttaaacggatcatgtgcttgacc

SEQ ID NO: 78177 - DNA, 33 bp, Homo sapien
catggccctgggtttccactcagagctgatgtt

SEQ ID NO: 78178 - DNA, 33 bp, Homo sapien
catggccctgggtttctactcagagctgatgtt

SEQ ID NO: 78179 - DNA, 33 bp, Homo sapien
tcaagagatggacaaactgagattattctgtac

SEQ ID NO: 78180 - DNA, 33 bp, Homo sapien
tcaagagatggacaaattgagattattctgtac

SEQ ID NO: 78181 - DNA, 33 bp, Homo sapien
gcactacaaaatgtaccgcatattcacagagcc

SEQ ID NO: 78182 - DNA, 33 bp, Homo sapien
gcactacaaaatgtacggcatattcacagagcc

SEQ ID NO: 78183 - DNA, 33 bp, Homo sapien
tatgttgtcacttttacaagcactacaaaatgt

SEQ ID NO: 78184 - DNA, 33 bp, Homo sapien
tatgttgtcacttttataagcactacaaaatgt

SEQ ID NO: 78185 - DNA, 33 bp, Homo sapien
ggaggaaggaaagacccctacaccagcgtcccc

SEQ ID NO: 78186 - DNA, 33 bp, Homo sapien
ggaggaaggaaagacctctacaccagcgtcccc

SEQ ID NO: 78187 - DNA, 33 bp, Homo sapien
ggtaatcagctgctaacgaaaacaaccagtctg

SEQ ID NO: 78188 - DNA, 33 bp, Homo sapien
ggtaatcagctgctaatgaaaacaaccagtctg

SEQ ID NO: 78189 - DNA, 33 bp, Homo sapien
gtccattgaatatatcgcaggttccataagcat

SEQ ID NO: 78190 - DNA, 33 bp, Homo sapien
gtccattgaatatatctcaggttccataagcat

SEQ ID NO: 78191 - DNA, 33 bp, Homo sapien
acaatggtacaggataaccttagtgtcttcagt

SEQ ID NO: 78192 - DNA, 33 bp, Homo sapien
acaatggtacaggatagccttagtgtcttcagt

SEQ ID NO: 78193 - DNA, 33 bp, Homo sapien
atgactttgtgaaaggcaaatgtgttatatagt

SEQ ID NO: 78194 - DNA, 33 bp, Homo sapien
atgactttgtgaaaggtaaatgtgttatatagt

SEQ ID NO: 78195 - DNA, 33 bp, Homo sapien
aagtggccagttaaaaatagaactcactgcttg

SEQ ID NO: 78196 - DNA, 33 bp, Homo sapien
aagtggccagttaaaactagaactcactgcttg

SEQ ID NO: 78197 - DNA, 33 bp, Homo sapien
tttttgtagggtattaataagtcatcagagcat

SEQ ID NO: 78198 - DNA, 33 bp, Homo sapien
tttttgtagggtattagtaagtcatcagagcat

SEQ ID NO: 78199 - DNA, 33 bp, Homo sapien
taggtcattcggggacccaggctgactggaagt

SEQ ID NO: 78200 - DNA, 33 bp, Homo sapien
taggtcattcggggactcaggctgactggaagt

SEQ ID NO: 78201 - DNA, 33 bp, Homo sapien
ttctgttgtttccagccaccacacttgtggtaa

SEQ ID NO: 78202 - DNA, 33 bp, Homo sapien
ttctgttgtttccagctaccacacttgtggtaa

SEQ ID NO: 78203 - DNA, 33 bp, Homo sapien
accaatggaagtgtccagagaaaagcatcacct

SEQ ID NO: 78204 - DNA, 33 bp, Homo sapien
accaatggaagtgtccggagaaaagcatcacct

SEQ ID NO: 78205 - DNA, 33 bp, Homo sapien
tgtttggctgctaaataaaagataaaatttttg

SEQ ID NO: 78206 - DNA, 33 bp, Homo sapien
tgtttggctgctaaatgaaagataaaatttttg

SEQ ID NO: 78207 - DNA, 33 bp, Homo sapien
tgtttgaatgcggaacaatagctggttatttct

SEQ ID NO: 78208 - DNA, 33 bp, Homo sapien
tgtttgaatgcggaaccatagctggttatttct

SEQ ID NO: 78209 - DNA, 33 bp, Homo sapien
ggtcctggggagatgacgcacagttaggaaggc

SEQ ID NO: 78210 - DNA, 33 bp, Homo sapien
ggtcctggggagatgatgcacagttaggaaggc

SEQ ID NO: 78211 - DNA, 33 bp, Homo sapien
caacactcatgccaagccaaccgccccatcctc

SEQ ID NO: 78212 - DNA, 33 bp, Homo sapien
caacactcatgccaagtcaaccgccccatcctc

SEQ ID NO: 78213 - DNA, 33 bp, Homo sapien
ttgaggacttcaacacaggcattatggccgttg

SEQ ID NO: 78214 - DNA, 33 bp, Homo sapien
ttgaggacttcaacacgggcattatggccgttg

SEQ ID NO: 78215 - DNA, 33 bp, Homo sapien
tgtttctctaggaagaaaacttacagctgcagg

SEQ ID NO: 78216 - DNA, 33 bp, Homo sapien
tgtttctctaggaagagaacttacagctgcagg

SEQ ID NO: 78217 - DNA, 33 bp, Homo sapien
tagcatggcttgcccaatgatagttggattcct

SEQ ID NO: 78218 - DNA, 33 bp, Homo sapien
tagcatggcttgcccagtgatagttggattcct

SEQ ID NO: 78219 - DNA, 33 bp, Homo sapien
tagtctgtgctgggacaacgtataaaaaaaaaa

SEQ ID NO: 78220 - DNA, 33 bp, Homo sapien
tagtctgtgctgggaccacgtataaaaaaaaaa

SEQ ID NO: 78221 - DNA, 33 bp, Homo sapien
gcatttgactccatccactgttctcaggaagag

SEQ ID NO: 78222 - DNA, 33 bp, Homo sapien
gcatttgactccatccgctgttctcaggaagag

SEQ ID NO: 78223 - DNA, 33 bp, Homo sapien
tcatgccctgttataacgactacaaaagcaagt

SEQ ID NO: 78224 - DNA, 33 bp, Homo sapien
tcatgccctgttataatgactacaaaagcaagt

SEQ ID NO: 78225 - DNA, 33 bp, Homo sapien
tcactgactgaacaataaacaaacacacaaata

SEQ ID NO: 78226 - DNA, 33 bp, Homo sapien
tcactgactgaacaatcaacaaacacacaaata

SEQ ID NO: 78227 - DNA, 33 bp, Homo sapien
ctcttcctgctttccaataaatgatgttcaggg

SEQ ID NO: 78228 - DNA, 33 bp, Homo sapien
ctcttcctgctttccagtaaatgatgttcaggg

SEQ ID NO: 78229 - DNA, 33 bp, Homo sapien
atccttttagacatcacctgatacctcgggcag

SEQ ID NO: 78230 - DNA, 33 bp, Homo sapien
atccttttagacatcatctgatacctcgggcag

SEQ ID NO: 78231 - DNA, 33 bp, Homo sapien
tgagctggaggaaaacagtcatataagataaag

SEQ ID NO: 78232 - DNA, 33 bp, Homo sapien
tgagctggaggaaaacggtcatataagataaag

SEQ ID NO: 78233 - DNA, 33 bp, Homo sapien
atctcacaagcagagggagtttcagcatttgag

SEQ ID NO: 78234 - DNA, 33 bp, Homo sapien
atctcacaagcagaggtagtttcagcatttgag

SEQ ID NO: 78235 - DNA, 33 bp, Homo sapien
atttcagtggtaataacctgttggaggctgact

SEQ ID NO: 78236 - DNA, 33 bp, Homo sapien
atttcagtggtaataatctgttggaggctgact

SEQ ID NO: 78237 - DNA, 33 bp, Homo sapien
ctcaaagcttcctaagacacaaatcttgctgtt

SEQ ID NO: 78238 - DNA, 33 bp, Homo sapien
ctcaaagcttcctaaggcacaaatcttgctgtt

SEQ ID NO: 78239 - DNA, 33 bp, Homo sapien
cactatagagaagataagggtggtgcagtggaa

SEQ ID NO: 78240 - DNA, 33 bp, Homo sapien
cactatagagaagataggggtggtgcagtggaa

SEQ ID NO: 78241 - DNA, 33 bp, Homo sapien
tctgtacataaaccagcacataagtaatataat

SEQ ID NO: 78242 - DNA, 33 bp, Homo sapien
tctgtacataaaccaggacataagtaatataat

SEQ ID NO: 78243 - DNA, 33 bp, Homo sapien
ctggtttatgtacagaaagcattattttttgtt

SEQ ID NO: 78244 - DNA, 33 bp, Homo sapien
ctggtttatgtacagagagcattattttttgtt

SEQ ID NO: 78245 - DNA, 33 bp, Homo sapien
acagtgagcatttggagggttgatcttcttcat

SEQ ID NO: 78246 - DNA, 33 bp, Homo sapien
acagtgagcatttggatggttgatcttcttcat

SEQ ID NO: 78247 - DNA, 33 bp, Homo sapien
aagagatcccagcttggaggcgcataggctcgt

SEQ ID NO: 78248 - DNA, 33 bp, Homo sapien
aagagatcccagcttgtaggcgcataggctcgt

SEQ ID NO: 78249 - DNA, 33 bp, Homo sapien
tatttaggggagttagaagctttacatcatatc

SEQ ID NO: 78250 - DNA, 33 bp, Homo sapien
tatttaggggagttaggagctttacatcatatc

SEQ ID NO: 78251 - DNA, 33 bp, Homo sapien
tgaggaagcagaggccaaagcagtgttgttccc

SEQ ID NO: 78252 - DNA, 33 bp, Homo sapien
tgaggaagcagaggccgaagcagtgttgttccc

SEQ ID NO: 78253 - DNA, 33 bp, Homo sapien
ctgactctagaggaacagaggtgcaggggcttg

SEQ ID NO: 78254 - DNA, 33 bp, Homo sapien
ctgactctagaggaacggaggtgcaggggcttg

SEQ ID NO: 78255 - DNA, 33 bp, Homo sapien
cacctgggctttgtccaccaagttacaagctga

SEQ ID NO: 78256 - DNA, 33 bp, Homo sapien
cacctgggctttgtcctccaagttacaagctga

SEQ ID NO: 78257 - DNA, 33 bp, Homo sapien
aggttatgccaaaaggacacaagagcatactga

SEQ ID NO: 78258 - DNA, 33 bp, Homo sapien
aggttatgccaaaagggcacaagagcatactga

SEQ ID NO: 78259 - DNA, 33 bp, Homo sapien
gtctaaaacatggaaaaagcagagtcacaccca

SEQ ID NO: 78260 - DNA, 33 bp, Homo sapien
gtctaaaacatggaaagagcagagtcacaccca

SEQ ID NO: 78261 - DNA, 33 bp, Homo sapien
gttaattggttctttacgttatcgataagactt

SEQ ID NO: 78262 - DNA, 33 bp, Homo sapien
gttaattggttctttatgttatcgataagactt

SEQ ID NO: 78263 - DNA, 33 bp, Homo sapien
acaaaaacagcttttacgtcttctagacccaat

SEQ ID NO: 78264 - DNA, 33 bp, Homo sapien
acaaaaacagcttttatgtcttctagacccaat

SEQ ID NO: 78265 - DNA, 33 bp, Homo sapien
tactctttaccattcactctgctagatgctgaa

SEQ ID NO: 78266 - DNA, 33 bp, Homo sapien
tactctttaccattcattctgctagatgctgaa

SEQ ID NO: 78267 - DNA, 33 bp, Homo sapien
gtgactatcccaagataatcttccatgtcggtg

SEQ ID NO: 78268 - DNA, 33 bp, Homo sapien
gtgactatcccaagatgatcttccatgtcggtg

SEQ ID NO: 78269 - DNA, 33 bp, Homo sapien
gtccagctgagcagaaacgtctgtgtcacactg

SEQ ID NO: 78270 - DNA, 33 bp, Homo sapien
gtccagctgagcagaagcgtctgtgtcacactg

SEQ ID NO: 78271 - DNA, 33 bp, Homo sapien
gctctgccatcttctaaggtcacgtcatcatct

SEQ ID NO: 78272 - DNA, 33 bp, Homo sapien
gctctgccatcttctagggtcacgtcatcatct

SEQ ID NO: 78273 - DNA, 33 bp, Homo sapien
ccaagactgcaccccactccttccatttgggag

SEQ ID NO: 78274 - DNA, 33 bp, Homo sapien
ccaagactgcaccccattccttccatttgggag

SEQ ID NO: 78275 - DNA, 33 bp, Homo sapien
ctttccattcttcaccagctctaggatgtacct

SEQ ID NO: 78276 - DNA, 33 bp, Homo sapien
ctttccattcttcaccggctctaggatgtacct

SEQ ID NO: 78277 - DNA, 33 bp, Homo sapien
cacttgtgtccccaaaatctgttctcaacacag

SEQ ID NO: 78278 - DNA, 33 bp, Homo sapien
cacttgtgtccccaaagtctgttctcaacacag

SEQ ID NO: 78279 - DNA, 33 bp, Homo sapien
tatattccagctttaactcatatctttgctccc

SEQ ID NO: 78280 - DNA, 33 bp, Homo sapien
tatattccagctttaagtcatatctttgctccc

SEQ ID NO: 78281 - DNA, 33 bp, Homo sapien
accacctgcagagcttcaaaatagtcccgcatc

SEQ ID NO: 78282 - DNA, 33 bp, Homo sapien
accacctgcagagctttaaaatagtcccgcatc

SEQ ID NO: 78283 - DNA, 33 bp, Homo sapien
tgcttccacccaagacaaaaaggaagacaaaag

SEQ ID NO: 78284 - DNA, 33 bp, Homo sapien
tgcttccacccaagacgaaaaggaagacaaaag

SEQ ID NO: 78285 - DNA, 33 bp, Homo sapien
caaccgtagtttccacaagcgctctgcagacct

SEQ ID NO: 78286 - DNA, 33 bp, Homo sapien
caaccgtagtttccacgagcgctctgcagacct

SEQ ID NO: 78287 - DNA, 33 bp, Homo sapien
tcaacttcagcatgtaagacacatgtaataact

SEQ ID NO: 78288 - DNA, 33 bp, Homo sapien
tcaacttcagcatgtaggacacatgtaataact

SEQ ID NO: 78289 - DNA, 33 bp, Homo sapien
agggggctgttgaaacggtgccccaaatagtta

SEQ ID NO: 78290 - DNA, 33 bp, Homo sapien
agggggctgttgaaactgtgccccaaatagtta

SEQ ID NO: 78291 - DNA, 33 bp, Homo sapien
agggcttgtctaaccacgctagaggtaaccagg

SEQ ID NO: 78292 - DNA, 33 bp, Homo sapien
agggcttgtctaaccatgctagaggtaaccagg

SEQ ID NO: 78293 - DNA, 33 bp, Homo sapien
aacttctagagatgaaaaccacaagggcttaga

SEQ ID NO: 78294 - DNA, 33 bp, Homo sapien
aacttctagagatgaagaccacaagggcttaga

SEQ ID NO: 78295 - DNA, 33 bp, Homo sapien
agaattttgtttctcaaactgcctctctcaccc

SEQ ID NO: 78296 - DNA, 33 bp, Homo sapien
agaattttgtttctcagactgcctctctcaccc

SEQ ID NO: 78297 - DNA, 33 bp, Homo sapien
tctttcaaagacaacaatagaattcctgaattt

SEQ ID NO: 78298 - DNA, 33 bp, Homo sapien
tctttcaaagacaacattagaattcctgaattt

SEQ ID NO: 78299 - DNA, 33 bp, Homo sapien
agagaaaacggtcccactaacacaagtgagtaa

SEQ ID NO: 78300 - DNA, 33 bp, Homo sapien
agagaaaacggtcccattaacacaagtgagtaa

SEQ ID NO: 78301 - DNA, 33 bp, Homo sapien
taaattcaaatcaccacctccaaaatctcacga

SEQ ID NO: 78302 - DNA, 33 bp, Homo sapien
taaattcaaatcaccagctccaaaatctcacga

SEQ ID NO: 78303 - DNA, 33 bp, Homo sapien
ctaccaagtcagccaccaggatatggagataga

SEQ ID NO: 78304 - DNA, 33 bp, Homo sapien
ctaccaagtcagccacgaggatatggagataga

SEQ ID NO: 78305 - DNA, 33 bp, Homo sapien
gcatcccgttactggggcatctggtccgacttt

SEQ ID NO: 78306 - DNA, 33 bp, Homo sapien
gcatcccgttactgggtcatctggtccgacttt

SEQ ID NO: 78307 - DNA, 33 bp, Homo sapien
ggctctgggtgtctccaaggatggatgctagct

SEQ ID NO: 78308 - DNA, 33 bp, Homo sapien
ggctctgggtgtctccgaggatggatgctagct

SEQ ID NO: 78309 - DNA, 33 bp, Homo sapien
tttatcagcagttgcacaatgaatcgggggaag

SEQ ID NO: 78310 - DNA, 33 bp, Homo sapien
tttatcagcagttgcataatgaatcgggggaag

SEQ ID NO: 78311 - DNA, 33 bp, Homo sapien
tcagtctgtgcaactcaaagtccattcttaatc

SEQ ID NO: 78312 - DNA, 33 bp, Homo sapien
tcagtctgtgcaactcgaagtccattcttaatc

SEQ ID NO: 78313 - DNA, 33 bp, Homo sapien
gggctctcaccagagacgctagaagggccatgc

SEQ ID NO: 78314 - DNA, 33 bp, Homo sapien
gggctctcaccagagatgctagaagggccatgc

SEQ ID NO: 78315 - DNA, 33 bp, Homo sapien
tcatgcaataaaatcacagacaataatgtgtga

SEQ ID NO: 78316 - DNA, 33 bp, Homo sapien
tcatgcaataaaatcatagacaataatgtgtga

SEQ ID NO: 78317 - DNA, 33 bp, Homo sapien
actggcaggtgtcgcaaagattaaggcttcagg

SEQ ID NO: 78318 - DNA, 33 bp, Homo sapien
actggcaggtgtcgcagagattaaggcttcagg

SEQ ID NO: 78319 - DNA, 33 bp, Homo sapien
agaccagtcctaaagaacagaccattgcctcta

SEQ ID NO: 78320 - DNA, 33 bp, Homo sapien
agaccagtcctaaagagcagaccattgcctcta

SEQ ID NO: 78321 - DNA, 33 bp, Homo sapien
ttgttgttataattaaagttgccataaacatct

SEQ ID NO: 78322 - DNA, 33 bp, Homo sapien
ttgttgttataattaaggttgccataaacatct

SEQ ID NO: 78323 - DNA, 33 bp, Homo sapien
aagacatctagccgtcagaagctggacttttag

SEQ ID NO: 78324 - DNA, 33 bp, Homo sapien
aagacatctagccgtcggaagctggacttttag

SEQ ID NO: 78325 - DNA, 33 bp, Homo sapien
cgactctgctcagctccaaaaactccaggaact

SEQ ID NO: 78326 - DNA, 33 bp, Homo sapien
cgactctgctcagctctaaaaactccaggaact

SEQ ID NO: 78327 - DNA, 33 bp, Homo sapien
gtaggcttccgttcccacacacggatctctcca

SEQ ID NO: 78328 - DNA, 33 bp, Homo sapien
gtaggcttccgttcccgcacacggatctctcca

SEQ ID NO: 78329 - DNA, 33 bp, Homo sapien
cgtagtgattgttctacagggctctttctgtcc

SEQ ID NO: 78330 - DNA, 33 bp, Homo sapien
cgtagtgattgttctatagggctctttctgtcc

SEQ ID NO: 78331 - DNA, 33 bp, Homo sapien
acaacactctgaggaacgaagacttagcccaga

SEQ ID NO: 78332 - DNA, 33 bp, Homo sapien
acaacactctgaggaatgaagacttagcccaga

SEQ ID NO: 78333 - DNA, 33 bp, Homo sapien
aaaaagaaaaggccagactactaaagggaaagg

SEQ ID NO: 78334 - DNA, 33 bp, Homo sapien
aaaaagaaaaggccagtctactaaagggaaagg

SEQ ID NO: 78335 - DNA, 33 bp, Homo sapien
gataacactgagggaccgtacatgcacgtagac

SEQ ID NO: 78336 - DNA, 33 bp, Homo sapien
gataacactgagggactgtacatgcacgtagac

SEQ ID NO: 78337 - DNA, 33 bp, Homo sapien
gaggctcccagaagacaatgactcaggcctgca

SEQ ID NO: 78338 - DNA, 33 bp, Homo sapien
gaggctcccagaagacgatgactcaggcctgca

SEQ ID NO: 78339 - DNA, 33 bp, Homo sapien
gccaagagttattctcactcaaaaaacctgaac

SEQ ID NO: 78340 - DNA, 33 bp, Homo sapien
gccaagagttattctctctcaaaaaacctgaac

SEQ ID NO: 78341 - DNA, 33 bp, Homo sapien
agaggcagcttctgacgcaatgtggaccctcaa

SEQ ID NO: 78342 - DNA, 33 bp, Homo sapien
agaggcagcttctgactcaatgtggaccctcaa

SEQ ID NO: 78343 - DNA, 33 bp, Homo sapien
gcttcttgctttctgaagtagagaattccggtg

SEQ ID NO: 78344 - DNA, 33 bp, Homo sapien
gcttcttgctttctgaggtagagaattccggtg

SEQ ID NO: 78345 - DNA, 33 bp, Homo sapien
ataattacaatgggacagcaggcataaatcagg

SEQ ID NO: 78346 - DNA, 33 bp, Homo sapien
ataattacaatgggacggcaggcataaatcagg

SEQ ID NO: 78347 - DNA, 33 bp, Homo sapien
attctttttaatccataactcatgatagagcac

SEQ ID NO: 78348 - DNA, 33 bp, Homo sapien
attctttttaatccattactcatgatagagcac

SEQ ID NO: 78349 - DNA, 33 bp, Homo sapien
tcaactaaaaatctctaacttccgtcttcccta

SEQ ID NO: 78350 - DNA, 33 bp, Homo sapien
tcaactaaaaatctctgacttccgtcttcccta

SEQ ID NO: 78351 - DNA, 33 bp, Homo sapien
tcccagcttcctcaacagcaaattacaggagct

SEQ ID NO: 78352 - DNA, 33 bp, Homo sapien
tcccagcttcctcaacggcaaattacaggagct

SEQ ID NO: 78353 - DNA, 33 bp, Homo sapien
caatggacttcaatccaccaactgctcatcttt

SEQ ID NO: 78354 - DNA, 33 bp, Homo sapien
caatggacttcaatccgccaactgctcatcttt

SEQ ID NO: 78355 - DNA, 33 bp, Homo sapien
cctcacaataaactccacgaggtaggtctggcc

SEQ ID NO: 78356 - DNA, 33 bp, Homo sapien
cctcacaataaactccgcgaggtaggtctggcc

SEQ ID NO: 78357 - DNA, 33 bp, Homo sapien
gaaggggtgcctgataaagccttctggtgctac

SEQ ID NO: 78358 - DNA, 33 bp, Homo sapien
gaaggggtgcctgatacagccttctggtgctac

SEQ ID NO: 78359 - DNA, 33 bp, Homo sapien
gcaacagctagtccatcatatctaaaaacgtga

SEQ ID NO: 78360 - DNA, 33 bp, Homo sapien
gcaacagctagtccattatatctaaaaacgtga

SEQ ID NO: 78361 - DNA, 33 bp, Homo sapien
ctacgagaaaggaataccgagaagagttagtac

SEQ ID NO: 78362 - DNA, 33 bp, Homo sapien
ctacgagaaaggaatatcgagaagagttagtac

SEQ ID NO: 78363 - DNA, 33 bp, Homo sapien
tgctattgctgtagtacaaactagaatataggt

SEQ ID NO: 78364 - DNA, 33 bp, Homo sapien
tgctattgctgtagtataaactagaatataggt

SEQ ID NO: 78365 - DNA, 33 bp, Homo sapien
catgccatcatagagagtcccttttaagctgag

SEQ ID NO: 78366 - DNA, 33 bp, Homo sapien
catgccatcatagagattcccttttaagctgag

SEQ ID NO: 78367 - DNA, 33 bp, Homo sapien
tttacaaaacaaaaccagcagagggaagaggca

SEQ ID NO: 78368 - DNA, 33 bp, Homo sapien
tttacaaaacaaaaccggcagagggaagaggca

SEQ ID NO: 78369 - DNA, 33 bp, Homo sapien
catttaaaattgaaccaagagacaaaaaagaaa

SEQ ID NO: 78370 - DNA, 33 bp, Homo sapien
catttaaaattgaaccgagagacaaaaaagaaa

SEQ ID NO: 78371 - DNA, 33 bp, Homo sapien
agtgagaactgctaagcaggcactatcctttgg

SEQ ID NO: 78372 - DNA, 33 bp, Homo sapien
agtgagaactgctaagtaggcactatcctttgg

SEQ ID NO: 78373 - DNA, 33 bp, Homo sapien
atcatgatctctaatcactttaatgcaaaagac

SEQ ID NO: 78374 - DNA, 33 bp, Homo sapien
atcatgatctctaatcgctttaatgcaaaagac

SEQ ID NO: 78375 - DNA, 33 bp, Homo sapien
ttttgcaaaagcagtaaaattctaattcttttc

SEQ ID NO: 78376 - DNA, 33 bp, Homo sapien
ttttgcaaaagcagtacaattctaattcttttc

SEQ ID NO: 78377 - DNA, 33 bp, Homo sapien
atgttataatttagccagaaaattcagtatgta

SEQ ID NO: 78378 - DNA, 33 bp, Homo sapien
atgttataatttagccggaaaattcagtatgta

SEQ ID NO: 78379 - DNA, 33 bp, Homo sapien
gggaagagagtctgtaaaaaggcattctgtttt

SEQ ID NO: 78380 - DNA, 33 bp, Homo sapien
gggaagagagtctgtacaaaggcattctgtttt

SEQ ID NO: 78381 - DNA, 33 bp, Homo sapien
cctcgcttcctccgacagcctcagcaaacactc

SEQ ID NO: 78382 - DNA, 33 bp, Homo sapien
cctcgcttcctccgacggcctcagcaaacactc

SEQ ID NO: 78383 - DNA, 33 bp, Homo sapien
tcaggaatatcactcaatccatagttttctatt

SEQ ID NO: 78384 - DNA, 33 bp, Homo sapien
tcaggaatatcactcagtccatagttttctatt

SEQ ID NO: 78385 - DNA, 33 bp, Homo sapien
caaatgttaaagagaacgtacctaaacttctta

SEQ ID NO: 78386 - DNA, 33 bp, Homo sapien
caaatgttaaagagaatgtacctaaacttctta

SEQ ID NO: 78387 - DNA, 33 bp, Homo sapien
tactcagagcatcaataaatgaccaggttgaag

SEQ ID NO: 78388 - DNA, 33 bp, Homo sapien
tactcagagcatcaatgaatgaccaggttgaag

SEQ ID NO: 78389 - DNA, 33 bp, Homo sapien
cattctcagtcctctacgtctcaaagtatacaa

SEQ ID NO: 78390 - DNA, 33 bp, Homo sapien
cattctcagtcctctatgtctcaaagtatacaa

SEQ ID NO: 78391 - DNA, 33 bp, Homo sapien
ccaataggccagcacaaggttagtataatatta

SEQ ID NO: 78392 - DNA, 33 bp, Homo sapien
ccaataggccagcacagggttagtataatatta

SEQ ID NO: 78393 - DNA, 33 bp, Homo sapien
acacttgcaaattaaaagttctatgtccagaat

SEQ ID NO: 78394 - DNA, 33 bp, Homo sapien
acacttgcaaattaaaggttctatgtccagaat

SEQ ID NO: 78395 - DNA, 33 bp, Homo sapien
catggaagttcaaaaaagatgactctgaaaggc

SEQ ID NO: 78396 - DNA, 33 bp, Homo sapien
catggaagttcaaaaaggatgactctgaaaggc

SEQ ID NO: 78397 - DNA, 33 bp, Homo sapien
gtacatatggggtagacggtgatattttgattc

SEQ ID NO: 78398 - DNA, 33 bp, Homo sapien
gtacatatggggtagagggtgatattttgattc

SEQ ID NO: 78399 - DNA, 33 bp, Homo sapien
accagcacatggtaaaacctttgtccaactgcc

SEQ ID NO: 78400 - DNA, 33 bp, Homo sapien
accagcacatggtaaatcctttgtccaactgcc

SEQ ID NO: 78401 - DNA, 33 bp, Homo sapien
gtttaatgctaagaagaaagggaataaatgaac

SEQ ID NO: 78402 - DNA, 33 bp, Homo sapien
gtttaatgctaagaaggaagggaataaatgaac

SEQ ID NO: 78403 - DNA, 33 bp, Homo sapien
taatcacttgactcaaacccaaagttagctctt

SEQ ID NO: 78404 - DNA, 33 bp, Homo sapien
taatcacttgactcaagcccaaagttagctctt

SEQ ID NO: 78405 - DNA, 33 bp, Homo sapien
cttaaaataagccaagccctatagcaaataaaa

SEQ ID NO: 78406 - DNA, 33 bp, Homo sapien
cttaaaataagccaagtcctatagcaaataaaa

SEQ ID NO: 78407 - DNA, 33 bp, Homo sapien
agcaggtgattcaaacacactcacctcgtaggt

SEQ ID NO: 78408 - DNA, 33 bp, Homo sapien
agcaggtgattcaaacccactcacctcgtaggt

SEQ ID NO: 78409 - DNA, 33 bp, Homo sapien
acgtgcatcttcatcacaggaacgaggaatgtg

SEQ ID NO: 78410 - DNA, 33 bp, Homo sapien
acgtgcatcttcatcataggaacgaggaatgtg

SEQ ID NO: 78411 - DNA, 33 bp, Homo sapien
aggggacgaggacttacgagtagtgcagaattt

SEQ ID NO: 78412 - DNA, 33 bp, Homo sapien
aggggacgaggacttatgagtagtgcagaattt

SEQ ID NO: 78413 - DNA, 33 bp, Homo sapien
gtcttcctactctgtaactggcattgaagtgat

SEQ ID NO: 78414 - DNA, 33 bp, Homo sapien
gtcttcctactctgtagctggcattgaagtgat

SEQ ID NO: 78415 - DNA, 33 bp, Homo sapien
cctctctaagcctccacagctaagtgcttcacc

SEQ ID NO: 78416 - DNA, 33 bp, Homo sapien
cctctctaagcctccatagctaagtgcttcacc

SEQ ID NO: 78417 - DNA, 33 bp, Homo sapien
acttagtcaaaatatgccacataggccaggtgc

SEQ ID NO: 78418 - DNA, 33 bp, Homo sapien
acttagtcaaaatatgtcacataggccaggtgc

SEQ ID NO: 78419 - DNA, 33 bp, Homo sapien
ttcttgagcgcaacaccatcccagccatcagtg

SEQ ID NO: 78420 - DNA, 33 bp, Homo sapien
ttcttgagcgcaacactatcccagccatcagtg

SEQ ID NO: 78421 - DNA, 33 bp, Homo sapien
agccttgcacatgctaatagaggatcaattcct

SEQ ID NO: 78422 - DNA, 33 bp, Homo sapien
agccttgcacatgctagtagaggatcaattcct

SEQ ID NO: 78423 - DNA, 33 bp, Homo sapien
catagaaatgcatgaagaagaccatttaatggg

SEQ ID NO: 78424 - DNA, 33 bp, Homo sapien
catagaaatgcatgaataagaccatttaatggg

SEQ ID NO: 78425 - DNA, 33 bp, Homo sapien
ctttcttccgaaagaaacttaatctcaccatga

SEQ ID NO: 78426 - DNA, 33 bp, Homo sapien
ctttcttccgaaagaaccttaatctcaccatga

SEQ ID NO: 78427 - DNA, 33 bp, Homo sapien
tctttcggaagaaagcagaaggaaatttaattt

SEQ ID NO: 78428 - DNA, 33 bp, Homo sapien
tctttcggaagaaagcggaaggaaatttaattt

SEQ ID NO: 78429 - DNA, 33 bp, Homo sapien
aaacaaatcaaaaagacgagagcaagcaaatta

SEQ ID NO: 78430 - DNA, 33 bp, Homo sapien
aaacaaatcaaaaagaggagagcaagcaaatta

SEQ ID NO: 78431 - DNA, 33 bp, Homo sapien
tgactgcagtaggaaaagacacctccatcatgg

SEQ ID NO: 78432 - DNA, 33 bp, Homo sapien
tgactgcagtaggaaacgacacctccatcatgg

SEQ ID NO: 78433 - DNA, 33 bp, Homo sapien
agctcaggcaccttacacttataatcccaccac

SEQ ID NO: 78434 - DNA, 33 bp, Homo sapien
agctcaggcaccttacgcttataatcccaccac

SEQ ID NO: 78435 - DNA, 33 bp, Homo sapien
cgtcccttccagacaaagaggttagatgcctgg

SEQ ID NO: 78436 - DNA, 33 bp, Homo sapien
cgtcccttccagacaacgaggttagatgcctgg

SEQ ID NO: 78437 - DNA, 33 bp, Homo sapien
tctacttccaccaaaacggcaccaccttcctgt

SEQ ID NO: 78438 - DNA, 33 bp, Homo sapien
tctacttccaccaaaatggcaccaccttcctgt

SEQ ID NO: 78439 - DNA, 33 bp, Homo sapien
aaggcctctaacggaagggaaggaagtaacatt

SEQ ID NO: 78440 - DNA, 33 bp, Homo sapien
aaggcctctaacggaatggaaggaagtaacatt

SEQ ID NO: 78441 - DNA, 33 bp, Homo sapien
aactactctgcaaacaaatcaaaacagacgcag

SEQ ID NO: 78442 - DNA, 33 bp, Homo sapien
aactactctgcaaacagatcaaaacagacgcag

SEQ ID NO: 78443 - DNA, 33 bp, Homo sapien
attcaggatagaaggacgcttatggaatcttta

SEQ ID NO: 78444 - DNA, 33 bp, Homo sapien
attcaggatagaaggatgcttatggaatcttta

SEQ ID NO: 78445 - DNA, 33 bp, Homo sapien
acctgtgagataaacacctattgccaaatcttt

SEQ ID NO: 78446 - DNA, 33 bp, Homo sapien
acctgtgagataaacatctattgccaaatcttt

SEQ ID NO: 78447 - DNA, 33 bp, Homo sapien
gcacccttgaccctagaagaaccaattcattga

SEQ ID NO: 78448 - DNA, 33 bp, Homo sapien
gcacccttgaccctaggagaaccaattcattga

SEQ ID NO: 78449 - DNA, 33 bp, Homo sapien
ctggctgagacattggcaccagctgttctaaca

SEQ ID NO: 78450 - DNA, 33 bp, Homo sapien
ctggctgagacattggtaccagctgttctaaca

SEQ ID NO: 78451 - DNA, 33 bp, Homo sapien
aatcctcagacagagcccaggtaaagaggatgt

SEQ ID NO: 78452 - DNA, 33 bp, Homo sapien
aatcctcagacagagctcaggtaaagaggatgt

SEQ ID NO: 78453 - DNA, 33 bp, Homo sapien
aaccctatgtagaaaacgcttccaaaagtacaa

SEQ ID NO: 78454 - DNA, 33 bp, Homo sapien
aaccctatgtagaaaaggcttccaaaagtacaa

SEQ ID NO: 78455 - DNA, 33 bp, Homo sapien
gcaactcacccttcaacctgctccatggtcttg

SEQ ID NO: 78456 - DNA, 33 bp, Homo sapien
gcaactcacccttcaatctgctccatggtcttg

SEQ ID NO: 78457 - DNA, 33 bp, Homo sapien
ggtcctccaactcctaaatcctatctactgcct

SEQ ID NO: 78458 - DNA, 33 bp, Homo sapien
ggtcctccaactcctagatcctatctactgcct

SEQ ID NO: 78459 - DNA, 33 bp, Homo sapien
atcaccagaactagaactgggacagcaacattt

SEQ ID NO: 78460 - DNA, 33 bp, Homo sapien
atcaccagaactagaattgggacagcaacattt

SEQ ID NO: 78461 - DNA, 33 bp, Homo sapien
atcactaatcagaaggcaagctgcagtaacacc

SEQ ID NO: 78462 - DNA, 33 bp, Homo sapien
atcactaatcagaaggtaagctgcagtaacacc

SEQ ID NO: 78463 - DNA, 33 bp, Homo sapien
atggaaagccacaagacgacatttctccttcac

SEQ ID NO: 78464 - DNA, 33 bp, Homo sapien
atggaaagccacaagatgacatttctccttcac

SEQ ID NO: 78465 - DNA, 33 bp, Homo sapien
tcacgattattattgaacgtcaaggctgagaat

SEQ ID NO: 78466 - DNA, 33 bp, Homo sapien
tcacgattattattgagcgtcaaggctgagaat

SEQ ID NO: 78467 - DNA, 33 bp, Homo sapien
agtgtcagcaagaagtaaacgtttgtggttgga

SEQ ID NO: 78468 - DNA, 33 bp, Homo sapien
agtgtcagcaagaagtgaacgtttgtggttgga

SEQ ID NO: 78469 - DNA, 33 bp, Homo sapien
atacacgattacagtacaacagaaagagatcca

SEQ ID NO: 78470 - DNA, 33 bp, Homo sapien
atacacgattacagtagaacagaaagagatcca

SEQ ID NO: 78471 - DNA, 33 bp, Homo sapien
agaacttaatgctgaaatcaaaataaaaagagg

SEQ ID NO: 78472 - DNA, 33 bp, Homo sapien
agaacttaatgctgaagtcaaaataaaaagagg

SEQ ID NO: 78473 - DNA, 33 bp, Homo sapien
tagttggaacaggacaaatcgggcctgacctgg

SEQ ID NO: 78474 - DNA, 33 bp, Homo sapien
tagttggaacaggacagatcgggcctgacctgg

SEQ ID NO: 78475 - DNA, 33 bp, Homo sapien
gctgtgttgcttaggcaagtctagaactcctgg

SEQ ID NO: 78476 - DNA, 33 bp, Homo sapien
gctgtgttgcttaggctagtctagaactcctgg

SEQ ID NO: 78477 - DNA, 33 bp, Homo sapien
tctccatacaatcagccaccagcttcttggctg

SEQ ID NO: 78478 - DNA, 33 bp, Homo sapien
tctccatacaatcagcgaccagcttcttggctg

SEQ ID NO: 78479 - DNA, 33 bp, Homo sapien
cttctggaatcattgaacaaaggagaatctact

SEQ ID NO: 78480 - DNA, 33 bp, Homo sapien
cttctggaatcattgagcaaaggagaatctact

SEQ ID NO: 78481 - DNA, 33 bp, Homo sapien
aaggaaagtgaagccggaccagaaagaaaacta

SEQ ID NO: 78482 - DNA, 33 bp, Homo sapien
aaggaaagtgaagccgtaccagaaagaaaacta

SEQ ID NO: 78483 - DNA, 33 bp, Homo sapien
cattatcaatctggaaagacaaacatggttttc

SEQ ID NO: 78484 - DNA, 33 bp, Homo sapien
cattatcaatctggaaggacaaacatggttttc

SEQ ID NO: 78485 - DNA, 33 bp, Homo sapien
agatcgttcttaacacacatttcacagactgct

SEQ ID NO: 78486 - DNA, 33 bp, Homo sapien
agatcgttcttaacacgcatttcacagactgct

SEQ ID NO: 78487 - DNA, 33 bp, Homo sapien
agttattattcctgtacgctgtcattacagagc

SEQ ID NO: 78488 - DNA, 33 bp, Homo sapien
agttattattcctgtatgctgtcattacagagc

SEQ ID NO: 78489 - DNA, 33 bp, Homo sapien
atacaccatctctcacaacatctttctcctgtt

SEQ ID NO: 78490 - DNA, 33 bp, Homo sapien
atacaccatctctcacgacatctttctcctgtt

SEQ ID NO: 78491 - DNA, 33 bp, Homo sapien
cactgatacgatggtaagtatggggatatgtat

SEQ ID NO: 78492 - DNA, 33 bp, Homo sapien
cactgatacgatggtacgtatggggatatgtat

SEQ ID NO: 78493 - DNA, 33 bp, Homo sapien
aagaaaaccgaggagaccactgatggtttctaa

SEQ ID NO: 78494 - DNA, 33 bp, Homo sapien
aagaaaaccgaggagatcactgatggtttctaa

SEQ ID NO: 78495 - DNA, 33 bp, Homo sapien
agcagagcgtcaagaactgtcggagaactggga

SEQ ID NO: 78496 - DNA, 33 bp, Homo sapien
agcagagcgtcaagaagtgtcggagaactggga

SEQ ID NO: 78497 - DNA, 33 bp, Homo sapien
ttattgtaccttttccacaaatcattttggagg

SEQ ID NO: 78498 - DNA, 33 bp, Homo sapien
ttattgtaccttttccgcaaatcattttggagg

SEQ ID NO: 78499 - DNA, 33 bp, Homo sapien
gaatgctcagatacaaatgccatagtttttcac

SEQ ID NO: 78500 - DNA, 33 bp, Homo sapien
gaatgctcagatacaactgccatagtttttcac

SEQ ID NO: 78501 - DNA, 33 bp, Homo sapien
tcagagaggaagttgcagaacaaatatggtata

SEQ ID NO: 78502 - DNA, 33 bp, Homo sapien
tcagagaggaagttgcggaacaaatatggtata

SEQ ID NO: 78503 - DNA, 33 bp, Homo sapien
agactttttatctccaactgtccagttctctgc

SEQ ID NO: 78504 - DNA, 33 bp, Homo sapien
agactttttatctccagctgtccagttctctgc

SEQ ID NO: 78505 - DNA, 33 bp, Homo sapien
ctctaaatacacctaacaaagtaccatgcccta

SEQ ID NO: 78506 - DNA, 33 bp, Homo sapien
ctctaaatacacctaagaaagtaccatgcccta

SEQ ID NO: 78507 - DNA, 33 bp, Homo sapien
tcatccacagtacccacgcttgcaatgtccaca

SEQ ID NO: 78508 - DNA, 33 bp, Homo sapien
tcatccacagtacccatgcttgcaatgtccaca

SEQ ID NO: 78509 - DNA, 33 bp, Homo sapien
ccagctgactttatgcacttgaccatttaagcc

SEQ ID NO: 78510 - DNA, 33 bp, Homo sapien
ccagctgactttatgcgcttgaccatttaagcc

SEQ ID NO: 78511 - DNA, 33 bp, Homo sapien
ctaactcagaaggtaaagtccaggcggtaagtc

SEQ ID NO: 78512 - DNA, 33 bp, Homo sapien
ctaactcagaaggtaatgtccaggcggtaagtc

SEQ ID NO: 78513 - DNA, 33 bp, Homo sapien
ctacgttgatttacacaaaagtttagaaaatgt

SEQ ID NO: 78514 - DNA, 33 bp, Homo sapien
ctacgttgatttacacgaaagtttagaaaatgt

SEQ ID NO: 78515 - DNA, 33 bp, Homo sapien
tcctaacttctccacacggcagatctctctcca

SEQ ID NO: 78516 - DNA, 33 bp, Homo sapien
tcctaacttctccacatggcagatctctctcca

SEQ ID NO: 78517 - DNA, 33 bp, Homo sapien
tccccattatttgtatcagaaagtatgtctttt

SEQ ID NO: 78518 - DNA, 33 bp, Homo sapien
tccccattatttgtatgagaaagtatgtctttt

SEQ ID NO: 78519 - DNA, 33 bp, Homo sapien
ataggaagtgaaagtacgctacaaatcaccagt

SEQ ID NO: 78520 - DNA, 33 bp, Homo sapien
ataggaagtgaaagtatgctacaaatcaccagt

SEQ ID NO: 78521 - DNA, 33 bp, Homo sapien
caattttaaaagtatacgcactgatgcaaggac

SEQ ID NO: 78522 - DNA, 33 bp, Homo sapien
caattttaaaagtatatgcactgatgcaaggac

SEQ ID NO: 78523 - DNA, 33 bp, Homo sapien
cacttctaatggtaaaccttgaaataaatgtga

SEQ ID NO: 78524 - DNA, 33 bp, Homo sapien
cacttctaatggtaaatcttgaaataaatgtga

SEQ ID NO: 78525 - DNA, 33 bp, Homo sapien
aaaatggtgccactcaatcacctaccgaagtga

SEQ ID NO: 78526 - DNA, 33 bp, Homo sapien
aaaatggtgccactcagtcacctaccgaagtga

SEQ ID NO: 78527 - DNA, 33 bp, Homo sapien
ctatggtgaggataaaaaatagaatacatgtaa

SEQ ID NO: 78528 - DNA, 33 bp, Homo sapien
ctatggtgaggataaacaatagaatacatgtaa

SEQ ID NO: 78529 - DNA, 33 bp, Homo sapien
cctaaaatatagtagagcttagaagggcatgga

SEQ ID NO: 78530 - DNA, 33 bp, Homo sapien
cctaaaatatagtagatcttagaagggcatgga

SEQ ID NO: 78531 - DNA, 33 bp, Homo sapien
aattctacccctgccaaatattagctgtatgac

SEQ ID NO: 78532 - DNA, 33 bp, Homo sapien
aattctacccctgccacatattagctgtatgac

SEQ ID NO: 78533 - DNA, 33 bp, Homo sapien
ctacctgtgggcactacgaaatggttaaggaga

SEQ ID NO: 78534 - DNA, 33 bp, Homo sapien
ctacctgtgggcactatgaaatggttaaggaga

SEQ ID NO: 78535 - DNA, 33 bp, Homo sapien
gaaattttgggctaaaagtcatgtgtgataata

SEQ ID NO: 78536 - DNA, 33 bp, Homo sapien
gaaattttgggctaaaggtcatgtgtgataata

SEQ ID NO: 78537 - DNA, 33 bp, Homo sapien
acacatcaactcactacacaaaatgttttcaca

SEQ ID NO: 78538 - DNA, 33 bp, Homo sapien
acacatcaactcactatacaaaatgttttcaca

SEQ ID NO: 78539 - DNA, 33 bp, Homo sapien
attgtagccactgatacaaccaagctcctgttt

SEQ ID NO: 78540 - DNA, 33 bp, Homo sapien
attgtagccactgatataaccaagctcctgttt

SEQ ID NO: 78541 - DNA, 33 bp, Homo sapien
gcattctggggatccaatcaagtgaaagaggat

SEQ ID NO: 78542 - DNA, 33 bp, Homo sapien
gcattctggggatccagtcaagtgaaagaggat

SEQ ID NO: 78543 - DNA, 33 bp, Homo sapien
ttcatcctggtcaatgaagggcaagcttatatt

SEQ ID NO: 78544 - DNA, 33 bp, Homo sapien
ttcatcctggtcaatgtagggcaagcttatatt

SEQ ID NO: 78545 - DNA, 33 bp, Homo sapien
cgctgcctacaagagactcattttaccttaaag

SEQ ID NO: 78546 - DNA, 33 bp, Homo sapien
cgctgcctacaagagattcattttaccttaaag

SEQ ID NO: 78547 - DNA, 33 bp, Homo sapien
gaaggagaggaaggcaatagaaagaactagaca

SEQ ID NO: 78548 - DNA, 33 bp, Homo sapien
gaaggagaggaaggcattagaaagaactagaca

SEQ ID NO: 78549 - DNA, 33 bp, Homo sapien
ttggtctgacatacaaatgaccttccccatctc

SEQ ID NO: 78550 - DNA, 33 bp, Homo sapien
ttggtctgacatacaactgaccttccccatctc

SEQ ID NO: 78551 - DNA, 33 bp, Homo sapien
attaacgaacttggagaaacttaaatataacct

SEQ ID NO: 78552 - DNA, 33 bp, Homo sapien
attaacgaacttggaggaacttaaatataacct

SEQ ID NO: 78553 - DNA, 33 bp, Homo sapien
catcctccagggtacagcttgcctttacagcat

SEQ ID NO: 78554 - DNA, 33 bp, Homo sapien
catcctccagggtacatcttgcctttacagcat

SEQ ID NO: 78555 - DNA, 33 bp, Homo sapien
cacacagatgtcagaactgatagtagaaataca

SEQ ID NO: 78556 - DNA, 33 bp, Homo sapien
cacacagatgtcagaattgatagtagaaataca

SEQ ID NO: 78557 - DNA, 33 bp, Homo sapien
caagctgcatatgaacaaaattggagctttact

SEQ ID NO: 78558 - DNA, 33 bp, Homo sapien
caagctgcatatgaactaaattggagctttact

SEQ ID NO: 78559 - DNA, 33 bp, Homo sapien
caagtggactggaagaagaccttagtttggacc

SEQ ID NO: 78560 - DNA, 33 bp, Homo sapien
caagtggactggaagacgaccttagtttggacc

SEQ ID NO: 78561 - DNA, 33 bp, Homo sapien
cttggaattggtgttacatagtggtaaatgatt

SEQ ID NO: 78562 - DNA, 33 bp, Homo sapien
cttggaattggtgttatatagtggtaaatgatt

SEQ ID NO: 78563 - DNA, 33 bp, Homo sapien
ggccctattcatttcaatccaagaaggaccact

SEQ ID NO: 78564 - DNA, 33 bp, Homo sapien
ggccctattcatttcactccaagaaggaccact

SEQ ID NO: 78565 - DNA, 33 bp, Homo sapien
atatgtagctgttgataagaccacaaacacttt

SEQ ID NO: 78566 - DNA, 33 bp, Homo sapien
atatgtagctgttgattagaccacaaacacttt

SEQ ID NO: 78567 - DNA, 33 bp, Homo sapien
cctacttagcctgagtaaaataagcatctgcat

SEQ ID NO: 78568 - DNA, 33 bp, Homo sapien
cctacttagcctgagttaaataagcatctgcat

SEQ ID NO: 78569 - DNA, 33 bp, Homo sapien
caaataaagaaaggagactcaaatattaataga

SEQ ID NO: 78570 - DNA, 33 bp, Homo sapien
caaataaagaaaggaggctcaaatattaataga

SEQ ID NO: 78571 - DNA, 33 bp, Homo sapien
gagtaaaataattccaaatggtttctatgcgaa

SEQ ID NO: 78572 - DNA, 33 bp, Homo sapien
gagtaaaataattccacatggtttctatgcgaa

SEQ ID NO: 78573 - DNA, 33 bp, Homo sapien
gagacctatgtccctaacctagctgtttcttgg

SEQ ID NO: 78574 - DNA, 33 bp, Homo sapien
gagacctatgtccctatcctagctgtttcttgg

SEQ ID NO: 78575 - DNA, 33 bp, Homo sapien
caccatcagcactgtacctatctaaataaagtc

SEQ ID NO: 78576 - DNA, 33 bp, Homo sapien
caccatcagcactgtatctatctaaataaagtc

SEQ ID NO: 78577 - DNA, 33 bp, Homo sapien
atagtcctgaagtctgaaattttagtgtaccca

SEQ ID NO: 78578 - DNA, 33 bp, Homo sapien
atagtcctgaagtctggaattttagtgtaccca

SEQ ID NO: 78579 - DNA, 33 bp, Homo sapien
ctattttgtacaccaacataaagacatctaagg

SEQ ID NO: 78580 - DNA, 33 bp, Homo sapien
ctattttgtacaccaatataaagacatctaagg

SEQ ID NO: 78581 - DNA, 33 bp, Homo sapien
aaaggctttggtaaaccaggaagtgctatacaa

SEQ ID NO: 78582 - DNA, 33 bp, Homo sapien
aaaggctttggtaaacgaggaagtgctatacaa

SEQ ID NO: 78583 - DNA, 33 bp, Homo sapien
actgaaatccaaagaaaaaagaatgaatcctga

SEQ ID NO: 78584 - DNA, 33 bp, Homo sapien
actgaaatccaaagaagaaagaatgaatcctga

SEQ ID NO: 78585 - DNA, 33 bp, Homo sapien
ttcacacactctaaacactcaaaatcagttttt

SEQ ID NO: 78586 - DNA, 33 bp, Homo sapien
ttcacacactctaaacgctcaaaatcagttttt

SEQ ID NO: 78587 - DNA, 33 bp, Homo sapien
agaagggttatctggacgactggtatttacata

SEQ ID NO: 78588 - DNA, 33 bp, Homo sapien
agaagggttatctggatgactggtatttacata

SEQ ID NO: 78589 - DNA, 33 bp, Homo sapien
ttttaaaccacagacaatataggtttcactgga

SEQ ID NO: 78590 - DNA, 33 bp, Homo sapien
ttttaaaccacagacagtataggtttcactgga

SEQ ID NO: 78591 - DNA, 33 bp, Homo sapien
gggtacaaagaattccagaagcttgcaaggaag

SEQ ID NO: 78592 - DNA, 33 bp, Homo sapien
gggtacaaagaattccggaagcttgcaaggaag

SEQ ID NO: 78593 - DNA, 33 bp, Homo sapien
attgcggggagctccaaaagggctattgctgcc

SEQ ID NO: 78594 - DNA, 33 bp, Homo sapien
attgcggggagctccagaagggctattgctgcc

SEQ ID NO: 78595 - DNA, 33 bp, Homo sapien
accatgtgaatcaatcagacccgaaactatagc

SEQ ID NO: 78596 - DNA, 33 bp, Homo sapien
accatgtgaatcaatccgacccgaaactatagc

SEQ ID NO: 78597 - DNA, 33 bp, Homo sapien
agatgatggccatacactgcggcacagccagct

SEQ ID NO: 78598 - DNA, 33 bp, Homo sapien
agatgatggccatacattgcggcacagccagct

SEQ ID NO: 78599 - DNA, 33 bp, Homo sapien
aagcatagtgctaatgccatctagtgctcctaa

SEQ ID NO: 78600 - DNA, 33 bp, Homo sapien
aagcatagtgctaatgtcatctagtgctcctaa

SEQ ID NO: 78601 - DNA, 33 bp, Homo sapien
gctgaagcatttgatcactcttgtaggactccc

SEQ ID NO: 78602 - DNA, 33 bp, Homo sapien
gctgaagcatttgatcgctcttgtaggactccc

SEQ ID NO: 78603 - DNA, 33 bp, Homo sapien
cgtgattactgtgggaagaattgtcactatcat

SEQ ID NO: 78604 - DNA, 33 bp, Homo sapien
cgtgattactgtgggacgaattgtcactatcat

SEQ ID NO: 78605 - DNA, 33 bp, Homo sapien
ataaagctcccggaaaaacagccacagtcagag

SEQ ID NO: 78606 - DNA, 33 bp, Homo sapien
ataaagctcccggaaagacagccacagtcagag

SEQ ID NO: 78607 - DNA, 33 bp, Homo sapien
aagagtaaggtcgtagccagtgcacctgatctc

SEQ ID NO: 78608 - DNA, 33 bp, Homo sapien
aagagtaaggtcgtagtcagtgcacctgatctc

SEQ ID NO: 78609 - DNA, 33 bp, Homo sapien
gcccagtctgatcttgaatttctgagctcaagt

SEQ ID NO: 78610 - DNA, 33 bp, Homo sapien
gcccagtctgatcttgtatttctgagctcaagt

SEQ ID NO: 78611 - DNA, 33 bp, Homo sapien
tggtcttaaaccttgaactataaactgaaatca

SEQ ID NO: 78612 - DNA, 33 bp, Homo sapien
tggtcttaaaccttgagctataaactgaaatca

SEQ ID NO: 78613 - DNA, 33 bp, Homo sapien
catggaagacagagaacgattgagtactaacga

SEQ ID NO: 78614 - DNA, 33 bp, Homo sapien
catggaagacagagaatgattgagtactaacga

SEQ ID NO: 78615 - DNA, 33 bp, Homo sapien
caagctgataaacaaaatgcaaaaacatctgct

SEQ ID NO: 78616 - DNA, 33 bp, Homo sapien
caagctgataaacaaagtgcaaaaacatctgct

SEQ ID NO: 78617 - DNA, 33 bp, Homo sapien
ggtaggtaggcagtgaacttgatttaagacttg

SEQ ID NO: 78618 - DNA, 33 bp, Homo sapien
ggtaggtaggcagtgagcttgatttaagacttg

SEQ ID NO: 78619 - DNA, 33 bp, Homo sapien
ataagaaacaaaggtgaaatatatgtaatgggt

SEQ ID NO: 78620 - DNA, 33 bp, Homo sapien
ataagaaacaaaggtggaatatatgtaatgggt

SEQ ID NO: 78621 - DNA, 33 bp, Homo sapien
gggacttcttattgcacggaaaagataaacaga

SEQ ID NO: 78622 - DNA, 33 bp, Homo sapien
gggacttcttattgcatggaaaagataaacaga

SEQ ID NO: 78623 - DNA, 33 bp, Homo sapien
tgttcttaaaaatcacaatttaattcagctttt

SEQ ID NO: 78624 - DNA, 33 bp, Homo sapien
tgttcttaaaaatcacgatttaattcagctttt

SEQ ID NO: 78625 - DNA, 33 bp, Homo sapien
tgggggtgccctgcaacaaggaagactgacatc

SEQ ID NO: 78626 - DNA, 33 bp, Homo sapien
tgggggtgccctgcaagaaggaagactgacatc

SEQ ID NO: 78627 - DNA, 33 bp, Homo sapien
cactggatcttcaccaatatgtacgtgaaaact

SEQ ID NO: 78628 - DNA, 33 bp, Homo sapien
cactggatcttcaccagtatgtacgtgaaaact

SEQ ID NO: 78629 - DNA, 33 bp, Homo sapien
aactatggggaacaaactgacttgataaatgac

SEQ ID NO: 78630 - DNA, 33 bp, Homo sapien
aactatggggaacaaattgacttgataaatgac

SEQ ID NO: 78631 - DNA, 33 bp, Homo sapien
atcacatggatgaaccaaggtagtacatagaaa

SEQ ID NO: 78632 - DNA, 33 bp, Homo sapien
atcacatggatgaaccgaggtagtacatagaaa

SEQ ID NO: 78633 - DNA, 33 bp, Homo sapien
gactgagagcattagaaatcatctggagaaaga

SEQ ID NO: 78634 - DNA, 33 bp, Homo sapien
gactgagagcattagacatcatctggagaaaga

SEQ ID NO: 78635 - DNA, 33 bp, Homo sapien
agttgcctttggatcacgtaacagaataagcct

SEQ ID NO: 78636 - DNA, 33 bp, Homo sapien
agttgcctttggatcatgtaacagaataagcct

SEQ ID NO: 78637 - DNA, 33 bp, Homo sapien
tctcaagagccttagaacatacttaaatccaca

SEQ ID NO: 78638 - DNA, 33 bp, Homo sapien
tctcaagagccttagagcatacttaaatccaca

SEQ ID NO: 78639 - DNA, 33 bp, Homo sapien
taattcccaaggcaaccgtgtcgagaggcggga

SEQ ID NO: 78640 - DNA, 33 bp, Homo sapien
taattcccaaggcaactgtgtcgagaggcggga

SEQ ID NO: 78641 - DNA, 33 bp, Homo sapien
gggctgtcgtaataaactaccatggacagggtg

SEQ ID NO: 78642 - DNA, 33 bp, Homo sapien
gggctgtcgtaataaagtaccatggacagggtg

SEQ ID NO: 78643 - DNA, 33 bp, Homo sapien
atgccagaaaatgtaacagatgctagaagagga

SEQ ID NO: 78644 - DNA, 33 bp, Homo sapien
atgccagaaaatgtaatagatgctagaagagga

SEQ ID NO: 78645 - DNA, 33 bp, Homo sapien
ataaatctaactggaccaaatggttctcacagg

SEQ ID NO: 78646 - DNA, 33 bp, Homo sapien
ataaatctaactggactaaatggttctcacagg

SEQ ID NO: 78647 - DNA, 33 bp, Homo sapien
ggtattgaaacaggagaaaacagaaatagcatt

SEQ ID NO: 78648 - DNA, 33 bp, Homo sapien
ggtattgaaacaggaggaaacagaaatagcatt

SEQ ID NO: 78649 - DNA, 33 bp, Homo sapien
tttcaattgtggcaaccaaatttgccattccca

SEQ ID NO: 78650 - DNA, 33 bp, Homo sapien
tttcaattgtggcaacgaaatttgccattccca

SEQ ID NO: 78651 - DNA, 33 bp, Homo sapien
cagagcttgctaaccagtgatggaggatccagg

SEQ ID NO: 78652 - DNA, 33 bp, Homo sapien
cagagcttgctaaccattgatggaggatccagg

SEQ ID NO: 78653 - DNA, 33 bp, Homo sapien
ggaacagaaaatcgtcacattctcttgcttcta

SEQ ID NO: 78654 - DNA, 33 bp, Homo sapien
ggaacagaaaatcgtcgcattctcttgcttcta

SEQ ID NO: 78655 - DNA, 33 bp, Homo sapien
agttctgcccaatcccagagtcttttttcaaca

SEQ ID NO: 78656 - DNA, 33 bp, Homo sapien
agttctgcccaatcccggagtcttttttcaaca

SEQ ID NO: 78657 - DNA, 33 bp, Homo sapien
agatgggtgttaatgccccctttcttccctgtc

SEQ ID NO: 78658 - DNA, 33 bp, Homo sapien
agatgggtgttaatgctccctttcttccctgtc

SEQ ID NO: 78659 - DNA, 33 bp, Homo sapien
ctctatgtgcaagacaatgcagagtatgaatat

SEQ ID NO: 78660 - DNA, 33 bp, Homo sapien
ctctatgtgcaagacactgcagagtatgaatat

SEQ ID NO: 78661 - DNA, 33 bp, Homo sapien
tcacaacaatcctgcaaggtggaattattatcc

SEQ ID NO: 78662 - DNA, 33 bp, Homo sapien
tcacaacaatcctgcagggtggaattattatcc

SEQ ID NO: 78663 - DNA, 33 bp, Homo sapien
cctgaagagaaaccaacgtgttatggtggtgag

SEQ ID NO: 78664 - DNA, 33 bp, Homo sapien
cctgaagagaaaccaatgtgttatggtggtgag

SEQ ID NO: 78665 - DNA, 33 bp, Homo sapien
agtctataggagaaaccgcatatgtgctcatga

SEQ ID NO: 78666 - DNA, 33 bp, Homo sapien
agtctataggagaaactgcatatgtgctcatga

SEQ ID NO: 78667 - DNA, 33 bp, Homo sapien
caaaccactgaatgcaataaggatcgaagacac

SEQ ID NO: 78668 - DNA, 33 bp, Homo sapien
caaaccactgaatgcagtaaggatcgaagacac

SEQ ID NO: 78669 - DNA, 33 bp, Homo sapien
actctgtacattaaaacgcttccatagcactca

SEQ ID NO: 78670 - DNA, 33 bp, Homo sapien
actctgtacattaaaatgcttccatagcactca

SEQ ID NO: 78671 - DNA, 33 bp, Homo sapien
caactctgcgagaggacgctcagtaggtacagg

SEQ ID NO: 78672 - DNA, 33 bp, Homo sapien
caactctgcgagaggatgctcagtaggtacagg

SEQ ID NO: 78673 - DNA, 33 bp, Homo sapien
ctggtgtttaatcccacgctacccctcgctggc

SEQ ID NO: 78674 - DNA, 33 bp, Homo sapien
ctggtgtttaatcccatgctacccctcgctggc

SEQ ID NO: 78675 - DNA, 33 bp, Homo sapien
agctgcaatttaacccaggcctatagcggcaag

SEQ ID NO: 78676 - DNA, 33 bp, Homo sapien
agctgcaatttaacccgggcctatagcggcaag

SEQ ID NO: 78677 - DNA, 33 bp, Homo sapien
gctccaagtttcagcacgtgcatagtttgtaat

SEQ ID NO: 78678 - DNA, 33 bp, Homo sapien
gctccaagtttcagcatgtgcatagtttgtaat

SEQ ID NO: 78679 - DNA, 33 bp, Homo sapien
tgacttatgggtaacaagacaataacaaatggg

SEQ ID NO: 78680 - DNA, 33 bp, Homo sapien
tgacttatgggtaacacgacaataacaaatggg

SEQ ID NO: 78681 - DNA, 33 bp, Homo sapien
atacatagtgctccaactgtttcctaaccaggg

SEQ ID NO: 78682 - DNA, 33 bp, Homo sapien
atacatagtgctccaattgtttcctaaccaggg

SEQ ID NO: 78683 - DNA, 33 bp, Homo sapien
gtcaaagagagaacccacttagcactatgggca

SEQ ID NO: 78684 - DNA, 33 bp, Homo sapien
gtcaaagagagaacccgcttagcactatgggca

SEQ ID NO: 78685 - DNA, 33 bp, Homo sapien
gggactctccagtctccgaaggtgaatctagcg

SEQ ID NO: 78686 - DNA, 33 bp, Homo sapien
gggactctccagtctctgaaggtgaatctagcg

SEQ ID NO: 78687 - DNA, 33 bp, Homo sapien
ccccaacaatagatcacgtatggaaaatgagtt

SEQ ID NO: 78688 - DNA, 33 bp, Homo sapien
ccccaacaatagatcatgtatggaaaatgagtt

SEQ ID NO: 78689 - DNA, 33 bp, Homo sapien
aaaattaaaactgaaaatgtatgtcaaagccaa

SEQ ID NO: 78690 - DNA, 33 bp, Homo sapien
aaaattaaaactgaaagtgtatgtcaaagccaa

SEQ ID NO: 78691 - DNA, 33 bp, Homo sapien
gtcggtgcttgtgagactaggccctggaggtga

SEQ ID NO: 78692 - DNA, 33 bp, Homo sapien
gtcggtgcttgtgagattaggccctggaggtga

SEQ ID NO: 78693 - DNA, 33 bp, Homo sapien
atggccactttacagcagaagttcttgtcggaa

SEQ ID NO: 78694 - DNA, 33 bp, Homo sapien
atggccactttacagcggaagttcttgtcggaa

SEQ ID NO: 78695 - DNA, 33 bp, Homo sapien
agctgtaatgtttggaatagatgatccaggatg

SEQ ID NO: 78696 - DNA, 33 bp, Homo sapien
agctgtaatgtttggagtagatgatccaggatg

SEQ ID NO: 78697 - DNA, 33 bp, Homo sapien
tttagcactatcccccacattgtactgtcctca

SEQ ID NO: 78698 - DNA, 33 bp, Homo sapien
tttagcactatcccccgcattgtactgtcctca

SEQ ID NO: 78699 - DNA, 33 bp, Homo sapien
taaatatgggcatagcaattgttaacggctaac

SEQ ID NO: 78700 - DNA, 33 bp, Homo sapien
taaatatgggcatagcgattgttaacggctaac

SEQ ID NO: 78701 - DNA, 33 bp, Homo sapien
acatatattcaagcccaatgtagcctgttcgaa

SEQ ID NO: 78702 - DNA, 33 bp, Homo sapien
acatatattcaagcccgatgtagcctgttcgaa

SEQ ID NO: 78703 - DNA, 33 bp, Homo sapien
tgtagtgtaactacaaaccatttagcctccctc

SEQ ID NO: 78704 - DNA, 33 bp, Homo sapien
tgtagtgtaactacaagccatttagcctccctc

SEQ ID NO: 78705 - DNA, 33 bp, Homo sapien
agtctatcctctgtaacctcacatgaaattcca

SEQ ID NO: 78706 - DNA, 33 bp, Homo sapien
agtctatcctctgtaatctcacatgaaattcca

SEQ ID NO: 78707 - DNA, 33 bp, Homo sapien
gagtaatatggagtccacaattcttgaagcatt

SEQ ID NO: 78708 - DNA, 33 bp, Homo sapien
gagtaatatggagtccgcaattcttgaagcatt

SEQ ID NO: 78709 - DNA, 33 bp, Homo sapien
gcttctttcgtattaacgaccaccaggaaatca

SEQ ID NO: 78710 - DNA, 33 bp, Homo sapien
gcttctttcgtattaatgaccaccaggaaatca

SEQ ID NO: 78711 - DNA, 33 bp, Homo sapien
ccacctaaggttagagaaattcctgccaagccc

SEQ ID NO: 78712 - DNA, 33 bp, Homo sapien
ccacctaaggttagagcaattcctgccaagccc

SEQ ID NO: 78713 - DNA, 33 bp, Homo sapien
gaggcagtgggaatgacggaaagaggatggcta

SEQ ID NO: 78714 - DNA, 33 bp, Homo sapien
gaggcagtgggaatgatggaaagaggatggcta

SEQ ID NO: 78715 - DNA, 33 bp, Homo sapien
aaaggctgtcagtgtaagtggttaaaagcaagg

SEQ ID NO: 78716 - DNA, 33 bp, Homo sapien
aaaggctgtcagtgtaggtggttaaaagcaagg

SEQ ID NO: 78717 - DNA, 33 bp, Homo sapien
aagcactaaatgcctacggaaaatctattctcc

SEQ ID NO: 78718 - DNA, 33 bp, Homo sapien
aagcactaaatgcctatggaaaatctattctcc

SEQ ID NO: 78719 - DNA, 33 bp, Homo sapien
ttaatacaataaaacacatatgtgctgacattc

SEQ ID NO: 78720 - DNA, 33 bp, Homo sapien
ttaatacaataaaacatatatgtgctgacattc

SEQ ID NO: 78721 - DNA, 33 bp, Homo sapien
tggatatttgtaaaaacgcttagagcagttcct

SEQ ID NO: 78722 - DNA, 33 bp, Homo sapien
tggatatttgtaaaaatgcttagagcagttcct

SEQ ID NO: 78723 - DNA, 33 bp, Homo sapien
cagcagtctgtgttataaggctcccagacagca

SEQ ID NO: 78724 - DNA, 33 bp, Homo sapien
cagcagtctgtgttatgaggctcccagacagca

SEQ ID NO: 78725 - DNA, 33 bp, Homo sapien
aatggcgcgttgcgtacgatcagcaagggcttc

SEQ ID NO: 78726 - DNA, 33 bp, Homo sapien
aatggcgcgttgcgtatgatcagcaagggcttc

SEQ ID NO: 78727 - DNA, 33 bp, Homo sapien
gaaataaacataaacacgggattctgccagtaa

SEQ ID NO: 78728 - DNA, 33 bp, Homo sapien
gaaataaacataaacatgggattctgccagtaa

SEQ ID NO: 78729 - DNA, 33 bp, Homo sapien
gctatcagttgggaaaagtaagagatagagcac

SEQ ID NO: 78730 - DNA, 33 bp, Homo sapien
gctatcagttgggaaaggtaagagatagagcac

SEQ ID NO: 78731 - DNA, 33 bp, Homo sapien
aataaatcattgcaagcacattactcagtcttg

SEQ ID NO: 78732 - DNA, 33 bp, Homo sapien
aataaatcattgcaagtacattactcagtcttg

SEQ ID NO: 78733 - DNA, 33 bp, Homo sapien
atgcaggaaatagcagaaggccagaaaggcttt

SEQ ID NO: 78734 - DNA, 33 bp, Homo sapien
atgcaggaaatagcaggaggccagaaaggcttt

SEQ ID NO: 78735 - DNA, 33 bp, Homo sapien
gtgtataaatccgacaatgaatattttatggag

SEQ ID NO: 78736 - DNA, 33 bp, Homo sapien
gtgtataaatccgacagtgaatattttatggag

SEQ ID NO: 78737 - DNA, 33 bp, Homo sapien
cctggtcaatgtgacaatcaaggagcagtatgg

SEQ ID NO: 78738 - DNA, 33 bp, Homo sapien
cctggtcaatgtgacagtcaaggagcagtatgg

SEQ ID NO: 78739 - DNA, 33 bp, Homo sapien
tttggtgatggcataaagataacgcaatgcagg

SEQ ID NO: 78740 - DNA, 33 bp, Homo sapien
tttggtgatggcataaggataacgcaatgcagg

SEQ ID NO: 78741 - DNA, 33 bp, Homo sapien
aaccaaatggagaaaactggaatcagccacact

SEQ ID NO: 78742 - DNA, 33 bp, Homo sapien
aaccaaatggagaaaattggaatcagccacact

SEQ ID NO: 78743 - DNA, 33 bp, Homo sapien
ttaaaacagcaaactacacaactctcagacctt

SEQ ID NO: 78744 - DNA, 33 bp, Homo sapien
ttaaaacagcaaactatacaactctcagacctt

SEQ ID NO: 78745 - DNA, 33 bp, Homo sapien
agagagtgaaccaaataaaggctagaaatcttg

SEQ ID NO: 78746 - DNA, 33 bp, Homo sapien
agagagtgaaccaaatgaaggctagaaatcttg

SEQ ID NO: 78747 - DNA, 33 bp, Homo sapien
tttccaagactcgacactagaagcacaatcaag

SEQ ID NO: 78748 - DNA, 33 bp, Homo sapien
tttccaagactcgacattagaagcacaatcaag

SEQ ID NO: 78749 - DNA, 33 bp, Homo sapien
gctctgtaaagattcacgtgaagaagatgaaaa

SEQ ID NO: 78750 - DNA, 33 bp, Homo sapien
gctctgtaaagattcatgtgaagaagatgaaaa

SEQ ID NO: 78751 - DNA, 33 bp, Homo sapien
tagccagatagtgaaactgacaggtgcttataa

SEQ ID NO: 78752 - DNA, 33 bp, Homo sapien
tagccagatagtgaaattgacaggtgcttataa

SEQ ID NO: 78753 - DNA, 33 bp, Homo sapien
agatcctctccaccaactgaaatgctgaggata

SEQ ID NO: 78754 - DNA, 33 bp, Homo sapien
agatcctctccaccaattgaaatgctgaggata

SEQ ID NO: 78755 - DNA, 33 bp, Homo sapien
tttagaggggaccttacagcttttgctggcttt

SEQ ID NO: 78756 - DNA, 33 bp, Homo sapien
tttagaggggaccttatagcttttgctggcttt

SEQ ID NO: 78757 - DNA, 33 bp, Homo sapien
ataaatccagcactgcaatacaggaacagggaa

SEQ ID NO: 78758 - DNA, 33 bp, Homo sapien
ataaatccagcactgcgatacaggaacagggaa

SEQ ID NO: 78759 - DNA, 33 bp, Homo sapien
ggcactcatgaattcaaagaacggctgccctct

SEQ ID NO: 78760 - DNA, 33 bp, Homo sapien
ggcactcatgaattcagagaacggctgccctct

SEQ ID NO: 78761 - DNA, 33 bp, Homo sapien
acaccaaaagtggaaactgttaatgatgcatga

SEQ ID NO: 78762 - DNA, 33 bp, Homo sapien
acaccaaaagtggaaattgttaatgatgcatga

SEQ ID NO: 78763 - DNA, 33 bp, Homo sapien
taagcagttgagtcacagcaaagagtaccgtat

SEQ ID NO: 78764 - DNA, 33 bp, Homo sapien
taagcagttgagtcacggcaaagagtaccgtat

SEQ ID NO: 78765 - DNA, 33 bp, Homo sapien
aagcttccacacctaacagagcatacatttgca

SEQ ID NO: 78766 - DNA, 33 bp, Homo sapien
aagcttccacacctaatagagcatacatttgca

SEQ ID NO: 78767 - DNA, 33 bp, Homo sapien
ttatgggaactataacagagtaaaaatgtcctt

SEQ ID NO: 78768 - DNA, 33 bp, Homo sapien
ttatgggaactataactgagtaaaaatgtcctt

SEQ ID NO: 78769 - DNA, 33 bp, Homo sapien
gcctgacaagacaaatgactggagagtcttcaa

SEQ ID NO: 78770 - DNA, 33 bp, Homo sapien
gcctgacaagacaaattactggagagtcttcaa

SEQ ID NO: 78771 - DNA, 33 bp, Homo sapien
tgatgtttatatgttacggtcacacaggatggc

SEQ ID NO: 78772 - DNA, 33 bp, Homo sapien
tgatgtttatatgttatggtcacacaggatggc

SEQ ID NO: 78773 - DNA, 33 bp, Homo sapien
catgcactccaaataaccagagaaacagaattc

SEQ ID NO: 78774 - DNA, 33 bp, Homo sapien
catgcactccaaataagcagagaaacagaattc

SEQ ID NO: 78775 - DNA, 33 bp, Homo sapien
tgctaagccctttacagtcatatcctataatcc

SEQ ID NO: 78776 - DNA, 33 bp, Homo sapien
tgctaagccctttacattcatatcctataatcc

SEQ ID NO: 78777 - DNA, 33 bp, Homo sapien
acgcttgtccttaaaaatcaaaactctgcctag

SEQ ID NO: 78778 - DNA, 33 bp, Homo sapien
acgcttgtccttaaaagtcaaaactctgcctag

SEQ ID NO: 78779 - DNA, 33 bp, Homo sapien
aaggagtgcattggaacacaaaagaaacaagtt

SEQ ID NO: 78780 - DNA, 33 bp, Homo sapien
aaggagtgcattggaatacaaaagaaacaagtt

SEQ ID NO: 78781 - DNA, 33 bp, Homo sapien
acactggctctaacaacgccttcaagagcttaa

SEQ ID NO: 78782 - DNA, 33 bp, Homo sapien
acactggctctaacaatgccttcaagagcttaa

SEQ ID NO: 78783 - DNA, 33 bp, Homo sapien
aaccaggctggctggaaccactttacgccctcc

SEQ ID NO: 78784 - DNA, 33 bp, Homo sapien
aaccaggctggctggagccactttacgccctcc

SEQ ID NO: 78785 - DNA, 33 bp, Homo sapien; identical to SEQ ID NO: 78783

SEQ ID NO: 78786 - DNA, 33 bp, Homo sapien; identical to SEQ ID NO: 78784

SEQ ID NO: 78787 - DNA, 33 bp, Homo sapien
cacattgcaagcactacctggaagagtctgctc

SEQ ID NO: 78788 - DNA, 33 bp, Homo sapien
cacattgcaagcactagctggaagagtctgctc

SEQ ID NO: 78789 - DNA, 33 bp, Homo sapien
caaacaggtatcataaatgtaaaggaaacaaga

SEQ ID NO: 78790 - DNA, 33 bp, Homo sapien
caaacaggtatcataactgtaaaggaaacaaga

SEQ ID NO: 78791 - DNA, 33 bp, Homo sapien
ttaatggctacttcacaaaatatggtaccaaat

SEQ ID NO: 78792 - DNA, 33 bp, Homo sapien
ttaatggctacttcaccaaatatggtaccaaat

SEQ ID NO: 78793 - DNA, 33 bp, Homo sapien
gtactgtaagccatgaataactaatatgagttt

SEQ ID NO: 78794 - DNA, 33 bp, Homo sapien
gtactgtaagccatgagtaactaatatgagttt

SEQ ID NO: 78795 - DNA, 33 bp, Homo sapien
ctaacttcaaaaactacctcaaatgcgcctctt

SEQ ID NO: 78796 - DNA, 33 bp, Homo sapien
ctaacttcaaaaactatctcaaatgcgcctctt

SEQ ID NO: 78797 - DNA, 33 bp, Homo sapien
accctgtcctcttcaccactactcttgtccctc

SEQ ID NO: 78798 - DNA, 33 bp, Homo sapien
accctgtcctcttcactactactcttgtccctc

SEQ ID NO: 78799 - DNA, 33 bp, Homo sapien
tctgataccagaaactaaaaagagcagatcatt

SEQ ID NO: 78800 - DNA, 33 bp, Homo sapien
tctgataccagaaactgaaaagagcagatcatt

SEQ ID NO: 78801 - DNA, 33 bp, Homo sapien
gaaaaaaatgtccttacagggatacagagtgat

SEQ ID NO: 78802 - DNA, 33 bp, Homo sapien
gaaaaaaatgtccttagagggatacagagtgat

SEQ ID NO: 78803 - DNA, 33 bp, Homo sapien
gatgggacaaataagcaattaagagatgtgggc

SEQ ID NO: 78804 - DNA, 33 bp, Homo sapien
gatgggacaaataagcgattaagagatgtgggc

SEQ ID NO: 78805 - DNA, 33 bp, Homo sapien
caaggaagacagtagacatctgtgtcaggggct

SEQ ID NO: 78806 - DNA, 33 bp, Homo sapien
caaggaagacagtagatatctgtgtcaggggct

SEQ ID NO: 78807 - DNA, 33 bp, Homo sapien
acattgtctccctgccaaggtgtaagctccatg

SEQ ID NO: 78808 - DNA, 33 bp, Homo sapien
acattgtctccctgccgaggtgtaagctccatg

SEQ ID NO: 78809 - DNA, 33 bp, Homo sapien
agtacagacagcagaaagtagagaacaaatagg

SEQ ID NO: 78810 - DNA, 33 bp, Homo sapien
agtacagacagcagaacgtagagaacaaatagg

SEQ ID NO: 78811 - DNA, 33 bp, Homo sapien
gctttttgttgacccactagaagaaatatcacc

SEQ ID NO: 78812 - DNA, 33 bp, Homo sapien
gctttttgttgacccagtagaagaaatatcacc

SEQ ID NO: 78813 - DNA, 33 bp, Homo sapien
ctcaaagaactcacagacaagtattgaagtcag

SEQ ID NO: 78814 - DNA, 33 bp, Homo sapien
ctcaaagaactcacaggcaagtattgaagtcag

SEQ ID NO: 78815 - DNA, 33 bp, Homo sapien
taaatgtcgatgggccacatttttatgccacaa

SEQ ID NO: 78816 - DNA, 33 bp, Homo sapien
taaatgtcgatgggccgcatttttatgccacaa

SEQ ID NO: 78817 - DNA, 33 bp, Homo sapien
aataatccactgaaaaagctactgatgctaatg

SEQ ID NO: 78818 - DNA, 33 bp, Homo sapien
aataatccactgaaaaggctactgatgctaatg

SEQ ID NO: 78819 - DNA, 33 bp, Homo sapien
tctatagctcctagaaatgcatagagaattatt

SEQ ID NO: 78820 - DNA, 33 bp, Homo sapien
tctatagctcctagaagtgcatagagaattatt

SEQ ID NO: 78821 - DNA, 33 bp, Homo sapien
acattatgctgattcactcttggaaaataagaa

SEQ ID NO: 78822 - DNA, 33 bp, Homo sapien
acattatgctgattcattcttggaaaataagaa

SEQ ID NO: 78823 - DNA, 33 bp, Homo sapien
tgcttcgggccttaaaaccagactgctgacctc

SEQ ID NO: 78824 - DNA, 33 bp, Homo sapien
tgcttcgggccttaaatccagactgctgacctc

SEQ ID NO: 78825 - DNA, 33 bp, Homo sapien
ctcgaataccagcccaagaaagaaacattacat

SEQ ID NO: 78826 - DNA, 33 bp, Homo sapien
ctcgaataccagcccaggaaagaaacattacat

SEQ ID NO: 78827 - DNA, 33 bp, Homo sapien
gacagggctggttttgcaaatctgaagatcaca

SEQ ID NO: 78828 - DNA, 33 bp, Homo sapien
gacagggctggttttgtaaatctgaagatcaca

SEQ ID NO: 78829 - DNA, 33 bp, Homo sapien
tgattttaaattagacaattgaaggatcagaaa

SEQ ID NO: 78830 - DNA, 33 bp, Homo sapien
tgattttaaattagactattgaaggatcagaaa

SEQ ID NO: 78831 - DNA, 33 bp, Homo sapien
taagttttttaagttgcagcaaaatgcacataa

SEQ ID NO: 78832 - DNA, 33 bp, Homo sapien
taagttttttaagttgtagcaaaatgcacataa

SEQ ID NO: 78833 - DNA, 33 bp, Homo sapien
agaagtgccgtgcaacaattataaaggcaattg

SEQ ID NO: 78834 - DNA, 33 bp, Homo sapien
agaagtgccgtgcaaccattataaaggcaattg

SEQ ID NO: 78835 - DNA, 33 bp, Homo sapien
agtctgagtcaagacaccagtatcagtctgcac

SEQ ID NO: 78836 - DNA, 33 bp, Homo sapien
agtctgagtcaagacagcagtatcagtctgcac

SEQ ID NO: 78837 - DNA, 33 bp, Homo sapien
tgatgccatattaggacgtagcacactcagggc

SEQ ID NO: 78838 - DNA, 33 bp, Homo sapien
tgatgccatattaggatgtagcacactcagggc

SEQ ID NO: 78839 - DNA, 33 bp, Homo sapien
atagaatgtacaaaacacatagaacatacgaca

SEQ ID NO: 78840 - DNA, 33 bp, Homo sapien
atagaatgtacaaaacgcatagaacatacgaca

SEQ ID NO: 78841 - DNA, 33 bp, Homo sapien
tctgtaacaggtggtcaagctaggattaggatt

SEQ ID NO: 78842 - DNA, 33 bp, Homo sapien
tctgtaacaggtggtcgagctaggattaggatt

SEQ ID NO: 78843 - DNA, 33 bp, Homo sapien
ttattagctaacacatcatgattttagcaaggt

SEQ ID NO: 78844 - DNA, 33 bp, Homo sapien
ttattagctaacacattatgattttagcaaggt

SEQ ID NO: 78845 - DNA, 33 bp, Homo sapien
catccatcttagttgacaaggtggtattcactg

SEQ ID NO: 78846 - DNA, 33 bp, Homo sapien
catccatcttagttgataaggtggtattcactg

SEQ ID NO: 78847 - DNA, 33 bp, Homo sapien
ttctaccctcttactcagaacattatattagaa

SEQ ID NO: 78848 - DNA, 33 bp, Homo sapien
ttctaccctcttactcggaacattatattagaa

SEQ ID NO: 78849 - DNA, 33 bp, Homo sapien
cccatttttggtgtaacgtcgagcttctttgct

SEQ ID NO: 78850 - DNA, 33 bp, Homo sapien
cccatttttggtgtaatgtcgagcttctttgct

SEQ ID NO: 78851 - DNA, 33 bp, Homo sapien
gaaaaaccaccctcaacgatgttggccattgtc

SEQ ID NO: 78852 - DNA, 33 bp, Homo sapien
gaaaaaccaccctcaatgatgttggccattgtc

SEQ ID NO: 78853 - DNA, 33 bp, Homo sapien
gagcagacctgtttcacgtggaaatgttgctgg

SEQ ID NO: 78854 - DNA, 33 bp, Homo sapien
gagcagacctgtttcaggtggaaatgttgctgg

SEQ ID NO: 78855 - DNA, 33 bp, Homo sapien
tgctatcatctgggtaagatcaacccaactcat

SEQ ID NO: 78856 - DNA, 33 bp, Homo sapien
tgctatcatctgggtaggatcaacccaactcat

SEQ ID NO: 78857 - DNA, 33 bp, Homo sapien
caaatgctggtaactagatctgtttgcatttta

SEQ ID NO: 78858 - DNA, 33 bp, Homo sapien
caaatgctggtaactatatctgtttgcatttta

SEQ ID NO: 78859 - DNA, 33 bp, Homo sapien
atactgaagtgaaaacaggtccacaaataaatc

SEQ ID NO: 78860 - DNA, 33 bp, Homo sapien
atactgaagtgaaaacgggtccacaaataaatc

SEQ ID NO: 78861 - DNA, 33 bp, Homo sapien
ctgggcagtgtgcttacggaaagttatgaccag

SEQ ID NO: 78862 - DNA, 33 bp, Homo sapien
ctgggcagtgtgcttatggaaagttatgaccag

SEQ ID NO: 78863 - DNA, 33 bp, Homo sapien
tatctttaccctgccacgattactatcttagaa

SEQ ID NO: 78864 - DNA, 33 bp, Homo sapien
tatctttaccctgccatgattactatcttagaa

SEQ ID NO: 78865 - DNA, 33 bp, Homo sapien
caacttaggctgttgaataaattgagtcaacta

SEQ ID NO: 78866 - DNA, 33 bp, Homo sapien
caacttaggctgttgagtaaattgagtcaacta

SEQ ID NO: 78867 - DNA, 33 bp, Homo sapien
gagtgaataagaacaaaaaaaaagtcacatttg

SEQ ID NO: 78868 - DNA, 33 bp, Homo sapien
gagtgaataagaacaacaaaaaagtcacatttg

SEQ ID NO: 78869 - DNA, 33 bp, Homo sapien
atcactgttactgtcaagtcaattccacgtcaa

SEQ ID NO: 78870 - DNA, 33 bp, Homo sapien
atcactgttactgtcaggtcaattccacgtcaa

SEQ ID NO: 78871 - DNA, 33 bp, Homo sapien
catctgaatcttacaaagcctttgcaaccataa

SEQ ID NO: 78872 - DNA, 33 bp, Homo sapien
catctgaatcttacaaggcctttgcaaccataa

SEQ ID NO: 78873 - DNA, 33 bp, Homo sapien
tttgtggaatttgaaccaagagactcacgtaat

SEQ ID NO: 78874 - DNA, 33 bp, Homo sapien
tttgtggaatttgaacgaagagactcacgtaat

SEQ ID NO: 78875 - DNA, 33 bp, Homo sapien
gcatcccaggtaagtgaattccagcgacccttc

SEQ ID NO: 78876 - DNA, 33 bp, Homo sapien
gcatcccaggtaagtggattccagcgacccttc

SEQ ID NO: 78877 - DNA, 33 bp, Homo sapien
acatcagttcagccacacaggtgatccaaccgg

SEQ ID NO: 78878 - DNA, 33 bp, Homo sapien
acatcagttcagccacgcaggtgatccaaccgg

SEQ ID NO: 78879 - DNA, 33 bp, Homo sapien
ttcatgacaaaccccccatcttaagtcagggtc

SEQ ID NO: 78880 - DNA, 33 bp, Homo sapien
ttcatgacaaacccccgatcttaagtcagggtc

SEQ ID NO: 78881 - DNA, 33 bp, Homo sapien
gagggactgagacctacaaactcaatagccctt

SEQ ID NO: 78882 - DNA, 33 bp, Homo sapien
gagggactgagacctagaaactcaatagccctt

SEQ ID NO: 78883 - DNA, 33 bp, Homo sapien
cctggcccatagcaagcactatcccgtataagc

SEQ ID NO: 78884 - DNA, 33 bp, Homo sapien
cctggcccatagcaagtactatcccgtataagc

SEQ ID NO: 78885 - DNA, 33 bp, Homo sapien
atcgagctgaaattgaagaagatgttgcagtgt

SEQ ID NO: 78886 - DNA, 33 bp, Homo sapien
atcgagctgaaattgaggaagatgttgcagtgt

SEQ ID NO: 78887 - DNA, 33 bp, Homo sapien
acataacctctttttaccttgtgtccccacctc

SEQ ID NO: 78888 - DNA, 33 bp, Homo sapien
acataacctctttttatcttgtgtccccacctc

SEQ ID NO: 78889 - DNA, 33 bp, Homo sapien
agccttcacaagattaagtgattggtctgtctg

SEQ ID NO: 78890 - DNA, 33 bp, Homo sapien
agccttcacaagattaggtgattggtctgtctg

SEQ ID NO: 78891 - DNA, 33 bp, Homo sapien
tggaagggtatatacactgaaggagttcaggaa

SEQ ID NO: 78892 - DNA, 33 bp, Homo sapien
tggaagggtatatacattgaaggagttcaggaa

SEQ ID NO: 78893 - DNA, 33 bp, Homo sapien
taattaataggttgtacggaaaaagaatacggt

SEQ ID NO: 78894 - DNA, 33 bp, Homo sapien
taattaataggttgtatggaaaaagaatacggt

SEQ ID NO: 78895 - DNA, 33 bp, Homo sapien
aggtctactataccaaaaatagggcacttctgg

SEQ ID NO: 78896 - DNA, 33 bp, Homo sapien
aggtctactataccaagaatagggcacttctgg

SEQ ID NO: 78897 - DNA, 33 bp, Homo sapien
attgggtcctgagatacgggaaggggacatctt

SEQ ID NO: 78898 - DNA, 33 bp, Homo sapien
attgggtcctgagatatgggaaggggacatctt

SEQ ID NO: 78899 - DNA, 33 bp, Homo sapien
acctcccctcctggccaccagaacgataactag

SEQ ID NO: 78900 - DNA, 33 bp, Homo sapien
acctcccctcctggccgccagaacgataactag

SEQ ID NO: 78901 - DNA, 33 bp, Homo sapien
ccgctagaccttttcaagactgagcactaccag

SEQ ID NO: 78902 - DNA, 33 bp, Homo sapien
ccgctagaccttttcaggactgagcactaccag

SEQ ID NO: 78903 - DNA, 33 bp, Homo sapien
tggaagatgaggatgacctggaaaccagcttta

SEQ ID NO: 78904 - DNA, 33 bp, Homo sapien
tggaagatgaggatgatctggaaaccagcttta

SEQ ID NO: 78905 - DNA, 33 bp, Homo sapien
catggtgagcttgcaaataaattgttaaatgtt

SEQ ID NO: 78906 - DNA, 33 bp, Homo sapien
catggtgagcttgcaagtaaattgttaaatgtt

SEQ ID NO: 78907 - DNA, 33 bp, Homo sapien
aaggatgatttttggacaaagaaccctcactaa

SEQ ID NO: 78908 - DNA, 33 bp, Homo sapien
aaggatgatttttggataaagaaccctcactaa

SEQ ID NO: 78909 - DNA, 33 bp, Homo sapien
agatgaagagggataaggaagcccactgaagac

SEQ ID NO: 78910 - DNA, 33 bp, Homo sapien
agatgaagagggataatgaagcccactgaagac

SEQ ID NO: 78911 - DNA, 33 bp, Homo sapien
attgaaaaaatttcctaaattcagtttgagatt

SEQ ID NO: 78912 - DNA, 33 bp, Homo sapien
attgaaaaaatttcctgaattcagtttgagatt

SEQ ID NO: 78913 - DNA, 33 bp, Homo sapien
tggagaaaaaatgggtaaagaaatgtagcaccg

SEQ ID NO: 78914 - DNA, 33 bp, Homo sapien
tggagaaaaaatgggtgaagaaatgtagcaccg

SEQ ID NO: 78915 - DNA, 33 bp, Homo sapien
actaagtgtccccctcaaaagtttgccaactct

SEQ ID NO: 78916 - DNA, 33 bp, Homo sapien
actaagtgtccccctcgaaagtttgccaactct

SEQ ID NO: 78917 - DNA, 33 bp, Homo sapien
gtctcaggggccataactctaccaaaagcaagg

SEQ ID NO: 78918 - DNA, 33 bp, Homo sapien
gtctcaggggccataattctaccaaaagcaagg

SEQ ID NO: 78919 - DNA, 33 bp, Homo sapien
caaagaattttacccaatggacctctgatcgat

SEQ ID NO: 78920 - DNA, 33 bp, Homo sapien
caaagaattttacccagtggacctctgatcgat

SEQ ID NO: 78921 - DNA, 33 bp, Homo sapien
gcaaggcttgtgtctgaaaaatactctcaaata

SEQ ID NO: 78922 - DNA, 33 bp, Homo sapien
gcaaggcttgtgtctggaaaatactctcaaata

SEQ ID NO: 78923 - DNA, 33 bp, Homo sapien
tgataatagccaaagccaagccagaagtctggg

SEQ ID NO: 78924 - DNA, 33 bp, Homo sapien
tgataatagccaaagcgaagccagaagtctggg

SEQ ID NO: 78925 - DNA, 33 bp, Homo sapien
gaaatgtgggtacaacacagggatgttgccaac

SEQ ID NO: 78926 - DNA, 33 bp, Homo sapien
gaaatgtgggtacaactcagggatgttgccaac

SEQ ID NO: 78927 - DNA, 33 bp, Homo sapien
acaaggtaaaatgacaaacttcctaggttcact

SEQ ID NO: 78928 - DNA, 33 bp, Homo sapien
acaaggtaaaatgacagacttcctaggttcact

SEQ ID NO: 78929 - DNA, 33 bp, Homo sapien
tgttgtggaaatcaagcaccaccagaatttagc

SEQ ID NO: 78930 - DNA, 33 bp, Homo sapien
tgttgtggaaatcaaggaccaccagaatttagc

SEQ ID NO: 78931 - DNA, 33 bp, Homo sapien
ctgagacgcacggagtcaagcctgcagccaggt

SEQ ID NO: 78932 - DNA, 33 bp, Homo sapien
ctgagacgcacggagttaagcctgcagccaggt

SEQ ID NO: 78933 - DNA, 33 bp, Homo sapien
ggtagaagaaatggcacatacagagatgcagaa

SEQ ID NO: 78934 - DNA, 33 bp, Homo sapien
ggtagaagaaatggcatatacagagatgcagaa

SEQ ID NO: 78935 - DNA, 33 bp, Homo sapien
gaggtgaggccttcaaaaagtgattaggccagt

SEQ ID NO: 78936 - DNA, 33 bp, Homo sapien
gaggtgaggccttcaagaagtgattaggccagt

SEQ ID NO: 78937 - DNA, 33 bp, Homo sapien
cacgaacaaaccatcaatcattgcctggatttc

SEQ ID NO: 78938 - DNA, 33 bp, Homo sapien
cacgaacaaaccatcagtcattgcctggatttc

SEQ ID NO: 78939 - DNA, 33 bp, Homo sapien
gccaaactcacaaagaccttgaaagtctctctc

SEQ ID NO: 78940 - DNA, 33 bp, Homo sapien
gccaaactcacaaagagcttgaaagtctctctc

SEQ ID NO: 78941 - DNA, 33 bp, Homo sapien
tctagcgcaggtgctaccaacagagcccatctc

SEQ ID NO: 78942 - DNA, 33 bp, Homo sapien
tctagcgcaggtgctatcaacagagcccatctc

SEQ ID NO: 78943 - DNA, 33 bp, Homo sapien
gcttgggagagatatgcaaagagctctgagatt

SEQ ID NO: 78944 - DNA, 33 bp, Homo sapien
gcttgggagagatatgtaaagagctctgagatt

SEQ ID NO: 78945 - DNA, 33 bp, Homo sapien
aagtaaaggttccttacggagtcaagctcattg

SEQ ID NO: 78946 - DNA, 33 bp, Homo sapien
aagtaaaggttccttatggagtcaagctcattg

SEQ ID NO: 78947 - DNA, 33 bp, Homo sapien
aagaattctgagaacaaggaatggctacttgga

SEQ ID NO: 78948 - DNA, 33 bp, Homo sapien
aagaattctgagaacatggaatggctacttgga

SEQ ID NO: 78949 - DNA, 33 bp, Homo sapien
aagtagaagttggagagctaggaacagcatgag

SEQ ID NO: 78950 - DNA, 33 bp, Homo sapien
aagtagaagttggagatctaggaacagcatgag

SEQ ID NO: 78951 - DNA, 33 bp, Homo sapien
ttgcaaagatgaagggaactggtattggtctca

SEQ ID NO: 78952 - DNA, 33 bp, Homo sapien
ttgcaaagatgaagggtactggtattggtctca

SEQ ID NO: 78953 - DNA, 33 bp, Homo sapien
cttttcaagaccccaaatatgcaggctcttccc

SEQ ID NO: 78954 - DNA, 33 bp, Homo sapien
cttttcaagaccccaactatgcaggctcttccc

SEQ ID NO: 78955 - DNA, 33 bp, Homo sapien
ctttcataggaccacaacatagagattgacact

SEQ ID NO: 78956 - DNA, 33 bp, Homo sapien
ctttcataggaccacatcatagagattgacact

SEQ ID NO: 78957 - DNA, 33 bp, Homo sapien
gtcaaagtttgaactgacacattgaactaaaca

SEQ ID NO: 78958 - DNA, 33 bp, Homo sapien
gtcaaagtttgaactgtcacattgaactaaaca

SEQ ID NO: 78959 - DNA, 33 bp, Homo sapien
gcctcttagctgttcccaacccacattgtctca

SEQ ID NO: 78960 - DNA, 33 bp, Homo sapien
gcctcttagctgttcctaacccacattgtctca

SEQ ID NO: 78961 - DNA, 33 bp, Homo sapien
aacaacaataaaagtccctgattaaggtgactg

SEQ ID NO: 78962 - DNA, 33 bp, Homo sapien
aacaacaataaaagtctctgattaaggtgactg

SEQ ID NO: 78963 - DNA, 33 bp, Homo sapien
cacttcagtacaaaaaatctgaaccaggagagc

SEQ ID NO: 78964 - DNA, 33 bp, Homo sapien
cacttcagtacaaaaagtctgaaccaggagagc

SEQ ID NO: 78965 - DNA, 33 bp, Homo sapien
agataaccgttctttgcaggaagtactagagtg

SEQ ID NO: 78966 - DNA, 33 bp, Homo sapien
agataaccgttctttgtaggaagtactagagtg

SEQ ID NO: 78967 - DNA, 33 bp, Homo sapien
gattagccaaataggacaatgaatccatgcatc

SEQ ID NO: 78968 - DNA, 33 bp, Homo sapien
gattagccaaataggagaatgaatccatgcatc

SEQ ID NO: 78969 - DNA, 33 bp, Homo sapien
tcactacctttctccaatgctatggctctccat

SEQ ID NO: 78970 - DNA, 33 bp, Homo sapien
tcactacctttctccagtgctatggctctccat

SEQ ID NO: 78971 - DNA, 33 bp, Homo sapien
ttctgctgaggatgaaattagagactgtatttc

SEQ ID NO: 78972 - DNA, 33 bp, Homo sapien
ttctgctgaggatgaagttagagactgtatttc

SEQ ID NO: 78973 - DNA, 33 bp, Homo sapien
agggcttgaaagaaaggatgaaagctggaggac

SEQ ID NO: 78974 - DNA, 33 bp, Homo sapien
agggcttgaaagaaagtatgaaagctggaggac

SEQ ID NO: 78975 - DNA, 33 bp, Homo sapien
cctggcaaataaaagcaatctgtgggcctgtgc

SEQ ID NO: 78976 - DNA, 33 bp, Homo sapien
cctggcaaataaaagcgatctgtgggcctgtgc

SEQ ID NO: 78977 - DNA, 33 bp, Homo sapien
tatgggcttcacatgacaggcatattgaacaat

SEQ ID NO: 78978 - DNA, 33 bp, Homo sapien
tatgggcttcacatgagaggcatattgaacaat

SEQ ID NO: 78979 - DNA, 33 bp, Homo sapien
ccttcacacctggatccatgttttgtgtcttct

SEQ ID NO: 78980 - DNA, 33 bp, Homo sapien
ccttcacacctggatctatgttttgtgtcttct

SEQ ID NO: 78981 - DNA, 33 bp, Homo sapien
tgacaaatgcacaaaactttctaagtagaaaat

SEQ ID NO: 78982 - DNA, 33 bp, Homo sapien
tgacaaatgcacaaaattttctaagtagaaaat

SEQ ID NO: 78983 - DNA, 33 bp, Homo sapien
ttggcgcaactgataactcactgaactaaaaaa

SEQ ID NO: 78984 - DNA, 33 bp, Homo sapien
ttggcgcaactgataagtcactgaactaaaaaa

SEQ ID NO: 78985 - DNA, 33 bp, Homo sapien
tccatgaactctttgccactgcctggatctaca

SEQ ID NO: 78986 - DNA, 33 bp, Homo sapien
tccatgaactctttgctactgcctggatctaca

SEQ ID NO: 78987 - DNA, 33 bp, Homo sapien
ctttgttctgtcagtcaagtcattatccaacta

SEQ ID NO: 78988 - DNA, 33 bp, Homo sapien
ctttgttctgtcagtcgagtcattatccaacta

SEQ ID NO: 78989 - DNA, 33 bp, Homo sapien
cagacgtgcagacacaagaaatatacagaaaag

SEQ ID NO: 78990 - DNA, 33 bp, Homo sapien
cagacgtgcagacacatgaaatatacagaaaag

SEQ ID NO: 78991 - DNA, 33 bp, Homo sapien
ctcagtatgtatagcaatagcaccaatgatcag

SEQ ID NO: 78992 - DNA, 33 bp, Homo sapien
ctcagtatgtatagcagtagcaccaatgatcag

SEQ ID NO: 78993 - DNA, 33 bp, Homo sapien
cctcttaaaacattgaatattaagttcctagtg

SEQ ID NO: 78994 - DNA, 33 bp, Homo sapien
cctcttaaaacattgagtattaagttcctagtg

SEQ ID NO: 78995 - DNA, 33 bp, Homo sapien
taagtacagacaccaaactactttataaaatag

SEQ ID NO: 78996 - DNA, 33 bp, Homo sapien
taagtacagacaccaagctactttataaaatag

SEQ ID NO: 78997 - DNA, 33 bp, Homo sapien
ttagccagatctgctcacacaggaaagaaaacc

SEQ ID NO: 78998 - DNA, 33 bp, Homo sapien
ttagccagatctgctcgcacaggaaagaaaacc

SEQ ID NO: 78999 - DNA, 33 bp, Homo sapien
gatacatgccagatggaacatccaagtacgagg

SEQ ID NO: 79000 - DNA, 33 bp, Homo sapien
gatacatgccagatgggacatccaagtacgagg

SEQ ID NO: 79001 - DNA, 33 bp, Homo sapien
attgcattggcctgaaaccatttcaatttactt

SEQ ID NO: 79002 - DNA, 33 bp, Homo sapien
attgcattggcctgaatccatttcaatttactt

SEQ ID NO: 79003 - DNA, 33 bp, Homo sapien
gaatttttggaaaatacggttatgtggagcatt

SEQ ID NO: 79004 - DNA, 33 bp, Homo sapien
gaatttttggaaaatatggttatgtggagcatt

SEQ ID NO: 79005 - DNA, 33 bp, Homo sapien
tggaatccagagtctaagatcactagttggtga

SEQ ID NO: 79006 - DNA, 33 bp, Homo sapien
tggaatccagagtctaggatcactagttggtga

SEQ ID NO: 79007 - DNA, 33 bp, Homo sapien
ttaaacatggtaatggaaacaaacccgaccaga

SEQ ID NO: 79008 - DNA, 33 bp, Homo sapien
ttaaacatggtaatgggaacaaacccgaccaga

SEQ ID NO: 79009 - DNA, 33 bp, Homo sapien
agatttctgtctgagcccttaatttttcttcaa

SEQ ID NO: 79010 - DNA, 33 bp, Homo sapien
agatttctgtctgagctcttaatttttcttcaa

SEQ ID NO: 79011 - DNA, 33 bp, Homo sapien
tgtaagaagtattggaacaatctccatcctgat

SEQ ID NO: 79012 - DNA, 33 bp, Homo sapien
tgtaagaagtattggagcaatctccatcctgat

SEQ ID NO: 79013 - DNA, 33 bp, Homo sapien
tgtgtgctttgtatataaaatagcatcctcaat

SEQ ID NO: 79014 - DNA, 33 bp, Homo sapien
tgtgtgctttgtatatcaaatagcatcctcaat

SEQ ID NO: 79015 - DNA, 33 bp, Homo sapien
agtgagtagaaaacaaaagtaactgaatttact

SEQ ID NO: 79016 - DNA, 33 bp, Homo sapien
agtgagtagaaaacaatagtaactgaatttact

SEQ ID NO: 79017 - DNA, 33 bp, Homo sapien
ctatagttctgacctacgcacatcacaaagaat

SEQ ID NO: 79018 - DNA, 33 bp, Homo sapien
ctatagttctgacctatgcacatcacaaagaat

SEQ ID NO: 79019 - DNA, 33 bp, Homo sapien
ggaaggaacacacacaataggaatatttttaga

SEQ ID NO: 79020 - DNA, 33 bp, Homo sapien
ggaaggaacacacacagtaggaatatttttaga

SEQ ID NO: 79021 - DNA, 33 bp, Homo sapien
tcagttgtgctctccaaaagtttcacatagacc

SEQ ID NO: 79022 - DNA, 33 bp, Homo sapien
tcagttgtgctctccagaagtttcacatagacc

SEQ ID NO: 79023 - DNA, 33 bp, Homo sapien
tacaacttgcacgtgaataaccttagcctacgt

SEQ ID NO: 79024 - DNA, 33 bp, Homo sapien
tacaacttgcacgtgagtaaccttagcctacgt

SEQ ID NO: 79025 - DNA, 33 bp, Homo sapien
gtgggtctcgggaagacgctgcactgcctctac

SEQ ID NO: 79026 - DNA, 33 bp, Homo sapien
gtgggtctcgggaagatgctgcactgcctctac

SEQ ID NO: 79027 - DNA, 33 bp, Homo sapien
tctctgaaccatctgagaattagctgcaagcct

SEQ ID NO: 79028 - DNA, 33 bp, Homo sapien
tctctgaaccatctgataattagctgcaagcct

SEQ ID NO: 79029 - DNA, 33 bp, Homo sapien
tgttgagtgaaaggcaagtgactcattagagga

SEQ ID NO: 79030 - DNA, 33 bp, Homo sapien
tgttgagtgaaaggcaggtgactcattagagga

SEQ ID NO: 79031 - DNA, 33 bp, Homo sapien
tgccttcactttcaaacactaggcaaaggacaa

SEQ ID NO: 79032 - DNA, 33 bp, Homo sapien
tgccttcactttcaaagactaggcaaaggacaa

SEQ ID NO: 79033 - DNA, 33 bp, Homo sapien
taaacatctacacttacagtacttagaatccag

SEQ ID NO: 79034 - DNA, 33 bp, Homo sapien
taaacatctacacttagagtacttagaatccag

SEQ ID NO: 79035 - DNA, 33 bp, Homo sapien
gaatccagttcctttacacttagctagtcttta

SEQ ID NO: 79036 - DNA, 33 bp, Homo sapien
gaatccagttcctttatacttagctagtcttta

SEQ ID NO: 79037 - DNA, 33 bp, Homo sapien
gtcttaccaatggataggtcacaaaagtataca

SEQ ID NO: 79038 - DNA, 33 bp, Homo sapien
gtcttaccaatggatatgtcacaaaagtataca

SEQ ID NO: 79039 - DNA, 33 bp, Homo sapien
ggaaaaataaactaagaatcggtgatgcccagg

SEQ ID NO: 79040 - DNA, 33 bp, Homo sapien
ggaaaaataaactaagtatcggtgatgcccagg

SEQ ID NO: 79041 - DNA, 33 bp, Homo sapien
tgcaaaggatggcaagccatggtacaatttaaa

SEQ ID NO: 79042 - DNA, 33 bp, Homo sapien
tgcaaaggatggcaagtcatggtacaatttaaa

SEQ ID NO: 79043 - DNA, 33 bp, Homo sapien
aatttttaaaaaaagaaggctcacttgagtcca

SEQ ID NO: 79044 - DNA, 33 bp, Homo sapien
aatttttaaaaaaagacggctcacttgagtcca

SEQ ID NO: 79045 - DNA, 33 bp, Homo sapien
gtatgcagagaggagaatatggaaatagaagga

SEQ ID NO: 79046 - DNA, 33 bp, Homo sapien
gtatgcagagaggagagtatggaaatagaagga

SEQ ID NO: 79047 - DNA, 33 bp, Homo sapien
cctggtcattcaactcactgaagtatgcagaga

SEQ ID NO: 79048 - DNA, 33 bp, Homo sapien
cctggtcattcaactccctgaagtatgcagaga

SEQ ID NO: 79049 - DNA, 33 bp, Homo sapien
tattacgtacatgaaccgtagtgcaacttagga

SEQ ID NO: 79050 - DNA, 33 bp, Homo sapien
tattacgtacatgaactgtagtgcaacttagga

SEQ ID NO: 79051 - DNA, 33 bp, Homo sapien
gtgctggcttaaaggaggaagaaaggaaacaga

SEQ ID NO: 79052 - DNA, 33 bp, Homo sapien
gtgctggcttaaaggatgaagaaaggaaacaga

SEQ ID NO: 79053 - DNA, 33 bp, Homo sapien
atgggctcattaagtaacacccgatgactatga

SEQ ID NO: 79054 - DNA, 33 bp, Homo sapien
atgggctcattaagtatcacccgatgactatga

SEQ ID NO: 79055 - DNA, 33 bp, Homo sapien
tgttttagaatattgacgtttctaaagtcatga

SEQ ID NO: 79056 - DNA, 33 bp, Homo sapien
tgttttagaatattgatgtttctaaagtcatga

SEQ ID NO: 79057 - DNA, 33 bp, Homo sapien
ctaaaacttgaagaagcagttctgtaataggca

SEQ ID NO: 79058 - DNA, 33 bp, Homo sapien
ctaaaacttgaagaagtagttctgtaataggca

SEQ ID NO: 79059 - DNA, 33 bp, Homo sapien
ttctttcaaatatcaaggcgattatcaggtgaa

SEQ ID NO: 79060 - DNA, 33 bp, Homo sapien
ttctttcaaatatcaatgcgattatcaggtgaa

SEQ ID NO: 79061 - DNA, 33 bp, Homo sapien
ccaaaggacaataaagaaaggtgtgaggagcaa

SEQ ID NO: 79062 - DNA, 33 bp, Homo sapien
ccaaaggacaataaagtaaggtgtgaggagcaa

SEQ ID NO: 79063 - DNA, 33 bp, Homo sapien
cagtaacggaatgagaaaagtcttggtagctaa

SEQ ID NO: 79064 - DNA, 33 bp, Homo sapien
cagtaacggaatgagagaagtcttggtagctaa

SEQ ID NO: 79065 - DNA, 33 bp, Homo sapien
atgttaagctgtcaggcatttatgtttttatgt

SEQ ID NO: 79066 - DNA, 33 bp, Homo sapien
atgttaagctgtcagggatttatgtttttatgt

SEQ ID NO: 79067 - DNA, 33 bp, Homo sapien
tagtttaagctctagaagacaaagtccaagaga

SEQ ID NO: 79068 - DNA, 33 bp, Homo sapien
tagtttaagctctagacgacaaagtccaagaga

SEQ ID NO: 79069 - DNA, 33 bp, Homo sapien
tcccatttcatctgaaagaaacttcctatttcc

SEQ ID NO: 79070 - DNA, 33 bp, Homo sapien
tcccatttcatctgaaggaaacttcctatttcc

SEQ ID NO: 79071 - DNA, 33 bp, Homo sapien
aagggcaacatatacaccttaccacataaatac

SEQ ID NO: 79072 - DNA, 33 bp, Homo sapien
aagggcaacatatacatcttaccacataaatac

SEQ ID NO: 79073 - DNA, 33 bp, Homo sapien
gactactttgaagaaaaaatttcgttgccaaag

SEQ ID NO: 79074 - DNA, 33 bp, Homo sapien
gactactttgaagaaagaatttcgttgccaaag

SEQ ID NO: 79075 - DNA, 33 bp, Homo sapien
ctacagattttgattacgcttcaatgaaagggg

SEQ ID NO: 79076 - DNA, 33 bp, Homo sapien
ctacagattttgattatgcttcaatgaaagggg

SEQ ID NO: 79077 - DNA, 33 bp, Homo sapien
tttctgatctgtgtcacctgtaaaactacaacg

SEQ ID NO: 79078 - DNA, 33 bp, Homo sapien
tttctgatctgtgtcatctgtaaaactacaacg

SEQ ID NO: 79079 - DNA, 33 bp, Homo sapien
ttccgacttagaagataaccctaattactatat

SEQ ID NO: 79080 - DNA, 33 bp, Homo sapien
ttccgacttagaagattaccctaattactatat

SEQ ID NO: 79081 - DNA, 33 bp, Homo sapien
agtaactctggcttacaattacattcatttgtt

SEQ ID NO: 79082 - DNA, 33 bp, Homo sapien
agtaactctggcttacgattacattcatttgtt

SEQ ID NO: 79083 - DNA, 33 bp, Homo sapien
aagaggaactgcttctaactcatgcaatcagag

SEQ ID NO: 79084 - DNA, 33 bp, Homo sapien
aagaggaactgcttctcactcatgcaatcagag

SEQ ID NO: 79085 - DNA, 33 bp, Homo sapien
attccgatcttgactaagtgctatgagaaggct

SEQ ID NO: 79086 - DNA, 33 bp, Homo sapien
attccgatcttgactacgtgctatgagaaggct

SEQ ID NO: 79087 - DNA, 33 bp, Homo sapien
tctctccagtgactcacagtaaagaattgtggc

SEQ ID NO: 79088 - DNA, 33 bp, Homo sapien
tctctccagtgactcagagtaaagaattgtggc

SEQ ID NO: 79089 - DNA, 33 bp, Homo sapien
ttattgcacactcaaagatatgctcgagacaat

SEQ ID NO: 79090 - DNA, 33 bp, Homo sapien
ttattgcacactcaaatatatgctcgagacaat

SEQ ID NO: 79091 - DNA, 33 bp, Homo sapien
ctacttgttctaagcacgtaatctcatttattt

SEQ ID NO: 79092 - DNA, 33 bp, Homo sapien
ctacttgttctaagcatgtaatctcatttattt

SEQ ID NO: 79093 - DNA, 33 bp, Homo sapien
actttgtttacagtcaacctctataattttatg

SEQ ID NO: 79094 - DNA, 33 bp, Homo sapien
actttgtttacagtcatcctctataattttatg

SEQ ID NO: 79095 - DNA, 33 bp, Homo sapien
ctcagtggttacatgacaaaccaggatggactg

SEQ ID NO: 79096 - DNA, 33 bp, Homo sapien
ctcagtggttacatgataaaccaggatggactg

SEQ ID NO: 79097 - DNA, 33 bp, Homo sapien
gacagtaagactaagaacagaaaggcctctcca

SEQ ID NO: 79098 - DNA, 33 bp, Homo sapien
gacagtaagactaagagcagaaaggcctctcca

SEQ ID NO: 79099 - DNA, 33 bp, Homo sapien
agcaggaggtgtgttacactataatggcatcat

SEQ ID NO: 79100 - DNA, 33 bp, Homo sapien
agcaggaggtgtgttatactataatggcatcat

SEQ ID NO: 79101 - DNA, 33 bp, Homo sapien
atgactgccatcaccccagctcctggtgttagt

SEQ ID NO: 79102 - DNA, 33 bp, Homo sapien
atgactgccatcaccctagctcctggtgttagt

SEQ ID NO: 79103 - DNA, 33 bp, Homo sapien
atttgatacacaaactaagagatatccatcctg

SEQ ID NO: 79104 - DNA, 33 bp, Homo sapien
atttgatacacaaactgagagatatccatcctg

SEQ ID NO: 79105 - DNA, 33 bp, Homo sapien
taatgtatctaatccacataacaccatcattga

SEQ ID NO: 79106 - DNA, 33 bp, Homo sapien
taatgtatctaatccatataacaccatcattga

SEQ ID NO: 79107 - DNA, 33 bp, Homo sapien
ctttacagtttgactcacatggcgtttaactga

SEQ ID NO: 79108 - DNA, 33 bp, Homo sapien
ctttacagtttgactcgcatggcgtttaactga

SEQ ID NO: 79109 - DNA, 33 bp, Homo sapien
ccccagctgtgcccaaaatgggtgtgagagcaa

SEQ ID NO: 79110 - DNA, 33 bp, Homo sapien
ccccagctgtgcccaagatgggtgtgagagcaa

SEQ ID NO: 79111 - DNA, 33 bp, Homo sapien
atgtcccacagcaaaacggtcaatacaagacat

SEQ ID NO: 79112 - DNA, 33 bp, Homo sapien
atgtcccacagcaaaatggtcaatacaagacat

SEQ ID NO: 79113 - DNA, 33 bp, Homo sapien
cgtggcagtcaagatgaagaaattgacatggat

SEQ ID NO: 79114 - DNA, 33 bp, Homo sapien
cgtggcagtcaagatggagaaattgacatggat

SEQ ID NO: 79115 - DNA, 33 bp, Homo sapien
agggacatagaatttacacttgacacagtggag

SEQ ID NO: 79116 - DNA, 33 bp, Homo sapien
agggacatagaatttagacttgacacagtggag

SEQ ID NO: 79117 - DNA, 33 bp, Homo sapien
gcccattcattagccaaagctgccagttcaatc

SEQ ID NO: 79118 - DNA, 33 bp, Homo sapien
gcccattcattagccagagctgccagttcaatc

SEQ ID NO: 79119 - DNA, 33 bp, Homo sapien
acattacacaagcatacggtatgattaaaccat

SEQ ID NO: 79120 - DNA, 33 bp, Homo sapien
acattacacaagcatatggtatgattaaaccat

SEQ ID NO: 79121 - DNA, 33 bp, Homo sapien
tggactgcagctatcactgacctgaaactggag

SEQ ID NO: 79122 - DNA, 33 bp, Homo sapien
tggactgcagctatcattgacctgaaactggag

SEQ ID NO: 79123 - DNA, 33 bp, Homo sapien
tgagttgaatatactgaatgagatggtggatat

SEQ ID NO: 79124 - DNA, 33 bp, Homo sapien
tgagttgaatatactgtatgagatggtggatat

SEQ ID NO: 79125 - DNA, 33 bp, Homo sapien
ttggaccttcagctaacggcatatacaaaaatt

SEQ ID NO: 79126 - DNA, 33 bp, Homo sapien
ttggaccttcagctaatggcatatacaaaaatt

SEQ ID NO: 79127 - DNA, 33 bp, Homo sapien
taactaaaaatggatcaaaggcctaagcataat

SEQ ID NO: 79128 - DNA, 33 bp, Homo sapien
taactaaaaatggatcgaaggcctaagcataat

SEQ ID NO: 79129 - DNA, 33 bp, Homo sapien
aaaggttatatgtagacagtttaaggatcatga

SEQ ID NO: 79130 - DNA, 33 bp, Homo sapien
aaaggttatatgtagatagtttaaggatcatga

SEQ ID NO: 79131 - DNA, 33 bp, Homo sapien
ctatttgcagacacacagagaggagtatatatg

SEQ ID NO: 79132 - DNA, 33 bp, Homo sapien
ctatttgcagacacacggagaggagtatatatg

SEQ ID NO: 79133 - DNA, 33 bp, Homo sapien
actggtatttgcacataacaaaaatcaggcttt

SEQ ID NO: 79134 - DNA, 33 bp, Homo sapien
actggtatttgcacatgacaaaaatcaggcttt

SEQ ID NO: 79135 - DNA, 33 bp, Homo sapien
acttatccatatttgaagccgtatttactcgct

SEQ ID NO: 79136 - DNA, 33 bp, Homo sapien
acttatccatatttgatgccgtatttactcgct

SEQ ID NO: 79137 - DNA, 33 bp, Homo sapien
agcacatatctttatgcagatcatccccaaact

SEQ ID NO: 79138 - DNA, 33 bp, Homo sapien
agcacatatctttatgtagatcatccccaaact

SEQ ID NO: 79139 - DNA, 33 bp, Homo sapien
gcagcccttccccgtcaagagtttgtaatctaa

SEQ ID NO: 79140 - DNA, 33 bp, Homo sapien
gcagcccttccccgtccagagtttgtaatctaa

SEQ ID NO: 79141 - DNA, 33 bp, Homo sapien
tcaggtaacacagaaaggtataaaatggagcat

SEQ ID NO: 79142 - DNA, 33 bp, Homo sapien
tcaggtaacacagaaatgtataaaatggagcat

SEQ ID NO: 79143 - DNA, 33 bp, Homo sapien
tgtatacacctgactaaggaaaattcagaaagt

SEQ ID NO: 79144 - DNA, 33 bp, Homo sapien
tgtatacacctgactacggaaaattcagaaagt

SEQ ID NO: 79145 - DNA, 33 bp, Homo sapien
atatatatgtatttgacgataaacatttaaact

SEQ ID NO: 79146 - DNA, 33 bp, Homo sapien
atatatatgtatttgaggataaacatttaaact

SEQ ID NO: 79147 - DNA, 33 bp, Homo sapien
aaggcttctctccccgaataggatgtgccctgg

SEQ ID NO: 79148 - DNA, 33 bp, Homo sapien
aaggcttctctccccgtataggatgtgccctgg

SEQ ID NO: 79149 - DNA, 33 bp, Homo sapien
gagttgcctagtttcaaagcctctggaggcttt

SEQ ID NO: 79150 - DNA, 33 bp, Homo sapien
gagttgcctagtttcagagcctctggaggcttt

SEQ ID NO: 79151 - DNA, 33 bp, Homo sapien
aagtaatgagcagaatgatattgctttatactt

SEQ ID NO: 79152 - DNA, 33 bp, Homo sapien
aagtaatgagcagaattatattgctttatactt

SEQ ID NO: 79153 - DNA, 33 bp, Homo sapien
caaacaagatatataaggaagactcgttggaaa

SEQ ID NO: 79154 - DNA, 33 bp, Homo sapien
caaacaagatatataatgaagactcgttggaaa

SEQ ID NO: 79155 - DNA, 33 bp, Homo sapien
ccttgctggagcacatcatggaacagacagtcc

SEQ ID NO: 79156 - DNA, 33 bp, Homo sapien
ccttgctggagcacatgatggaacagacagtcc

SEQ ID NO: 79157 - DNA, 33 bp, Homo sapien
gaatctcactgcgcaactggtgacacacacctt

SEQ ID NO: 79158 - DNA, 33 bp, Homo sapien
gaatctcactgcgcaattggtgacacacacctt

SEQ ID NO: 79159 - DNA, 33 bp, Homo sapien
aagcagagggtatggaggagaaacacagtggac

SEQ ID NO: 79160 - DNA, 33 bp, Homo sapien
aagcagagggtatggatgagaaacacagtggac

SEQ ID NO: 79161 - DNA, 33 bp, Homo sapien
caaagtcagtcatatcaaacagtgaattcttta

SEQ ID NO: 79162 - DNA, 33 bp, Homo sapien
caaagtcagtcatatcgaacagtgaattcttta

SEQ ID NO: 79163 - DNA, 33 bp, Homo sapien
aacaatgacaaaacagccaaaaagcatttaaat

SEQ ID NO: 79164 - DNA, 33 bp, Homo sapien
aacaatgacaaaacaggcaaaaagcatttaaat

SEQ ID NO: 79165 - DNA, 33 bp, Homo sapien
actgtgctgcccattacctgttctacaccaaac

SEQ ID NO: 79166 - DNA, 33 bp, Homo sapien
actgtgctgcccattatctgttctacaccaaac

SEQ ID NO: 79167 - DNA, 33 bp, Homo sapien
gcatcatcttctgtacactatcaaatcaaaatg

SEQ ID NO: 79168 - DNA, 33 bp, Homo sapien
gcatcatcttctgtacgctatcaaatcaaaatg

SEQ ID NO: 79169 - DNA, 33 bp, Homo sapien
gttcattcctctttcacgcctgttaatgcttct

SEQ ID NO: 79170 - DNA, 33 bp, Homo sapien
gttcattcctctttcatgcctgttaatgcttct

SEQ ID NO: 79171 - DNA, 33 bp, Homo sapien
ccaaagggccggcaatcatactgctaaaaagac

SEQ ID NO: 79172 - DNA, 33 bp, Homo sapien
ccaaagggccggcaattatactgctaaaaagac

SEQ ID NO: 79173 - DNA, 33 bp, Homo sapien
ttgatctaactgattaagttccacactgctctt

SEQ ID NO: 79174 - DNA, 33 bp, Homo sapien
ttgatctaactgattaggttccacactgctctt

SEQ ID NO: 79175 - DNA, 33 bp, Homo sapien
ctaatgcttgcagggacgacaaggaaagcaagt

SEQ ID NO: 79176 - DNA, 33 bp, Homo sapien
ctaatgcttgcagggatgacaaggaaagcaagt

SEQ ID NO: 79177 - DNA, 33 bp, Homo sapien
tatatgaattttatgacgaggagaagaacttga

SEQ ID NO: 79178 - DNA, 33 bp, Homo sapien
tatatgaattttatgatgaggagaagaacttga

SEQ ID NO: 79179 - DNA, 33 bp, Homo sapien
ggagtctggagagttacattttttgatgtattg

SEQ ID NO: 79180 - DNA, 33 bp, Homo sapien
ggagtctggagagttatattttttgatgtattg

SEQ ID NO: 79181 - DNA, 33 bp, Homo sapien
catagctgtattatcaaccctcttctctaatta

SEQ ID NO: 79182 - DNA, 33 bp, Homo sapien
catagctgtattatcatccctcttctctaatta

SEQ ID NO: 79183 - DNA, 33 bp, Homo sapien
catatctaagcaagacaccaccactaacgggtt

SEQ ID NO: 79184 - DNA, 33 bp, Homo sapien
catatctaagcaagacgccaccactaacgggtt

SEQ ID NO: 79185 - DNA, 33 bp, Homo sapien
gtgattttctgctgtcaactgttggctcagact

SEQ ID NO: 79186 - DNA, 33 bp, Homo sapien
gtgattttctgctgtcgactgttggctcagact

SEQ ID NO: 79187 - DNA, 33 bp, Homo sapien
ctcttaaaatctagttaaaaaaatgtgagtttt

SEQ ID NO: 79188 - DNA, 33 bp, Homo sapien
ctcttaaaatctagtttaaaaaatgtgagtttt

SEQ ID NO: 79189 - DNA, 33 bp, Homo sapien
ggactgtagacgggcccaattcggtgtactgat

SEQ ID NO: 79190 - DNA, 33 bp, Homo sapien
ggactgtagacgggcctaattcggtgtactgat

SEQ ID NO: 79191 - DNA, 33 bp, Homo sapien
atacatggtttagcaacgaacagtgtcataggc

SEQ ID NO: 79192 - DNA, 33 bp, Homo sapien
atacatggtttagcaatgaacagtgtcataggc

SEQ ID NO: 79193 - DNA, 33 bp, Homo sapien
tatgtatttccaatgaacttctttatctaaatg

SEQ ID NO: 79194 - DNA, 33 bp, Homo sapien
tatgtatttccaatgagcttctttatctaaatg

SEQ ID NO: 79195 - DNA, 33 bp, Homo sapien
tagcacctgagggacacaatcaagctcttattc

SEQ ID NO: 79196 - DNA, 33 bp, Homo sapien
tagcacctgagggacataatcaagctcttattc

SEQ ID NO: 79197 - DNA, 33 bp, Homo sapien
ttctatttctctaaaaagtcataaaaatgtaat

SEQ ID NO: 79198 - DNA, 33 bp, Homo sapien
ttctatttctctaaaatgtcataaaaatgtaat

SEQ ID NO: 79199 - DNA, 33 bp, Homo sapien
accccatctctgctaacggaatgaccatctcag

SEQ ID NO: 79200 - DNA, 33 bp, Homo sapien
accccatctctgctaagggaatgaccatctcag

SEQ ID NO: 79201 - DNA, 33 bp, Homo sapien
gcttctatgcataaccaaatcttgcttttccat

SEQ ID NO: 79202 - DNA, 33 bp, Homo sapien
gcttctatgcataaccgaatcttgcttttccat

SEQ ID NO: 79203 - DNA, 33 bp, Homo sapien
tttcaaatcccaagcacgtgcacctgatgactc

SEQ ID NO: 79204 - DNA, 33 bp, Homo sapien
tttcaaatcccaagcatgtgcacctgatgactc

SEQ ID NO: 79205 - DNA, 33 bp, Homo sapien
cagcagtccaggtagcagaaagagcaggagcca

SEQ ID NO: 79206 - DNA, 33 bp, Homo sapien
cagcagtccaggtagcggaaagagcaggagcca

SEQ ID NO: 79207 - DNA, 33 bp, Homo sapien
gtcaggtgatgactcacgctttgcagctcattt

SEQ ID NO: 79208 - DNA, 33 bp, Homo sapien
gtcaggtgatgactcatgctttgcagctcattt

SEQ ID NO: 79209 - DNA, 33 bp, Homo sapien
atttatcactattttaaaaggagagaatttggc

SEQ ID NO: 79210 - DNA, 33 bp, Homo sapien
atttatcactattttataaggagagaatttggc

SEQ ID NO: 79211 - DNA, 33 bp, Homo sapien
cattttactaatgatacctatgacaacagagaa

SEQ ID NO: 79212 - DNA, 33 bp, Homo sapien
cattttactaatgatatctatgacaacagagaa

SEQ ID NO: 79213 - DNA, 33 bp, Homo sapien
tgaagttagaagcccccggaactgataagaccc

SEQ ID NO: 79214 - DNA, 33 bp, Homo sapien
tgaagttagaagcccctggaactgataagaccc

SEQ ID NO: 79215 - DNA, 33 bp, Homo sapien
cagttgtcaacacataaccctatcttcgtgacc

SEQ ID NO: 79216 - DNA, 33 bp, Homo sapien
cagttgtcaacacatagccctatcttcgtgacc

SEQ ID NO: 79217 - DNA, 33 bp, Homo sapien
ttcatatttgcaaagacgcttttattcaaataa

SEQ ID NO: 79218 - DNA, 33 bp, Homo sapien
ttcatatttgcaaagatgcttttattcaaataa

SEQ ID NO: 79219 - DNA, 33 bp, Homo sapien
tagctgtagcagtagacatattggtgccagatt

SEQ ID NO: 79220 - DNA, 33 bp, Homo sapien
tagctgtagcagtagatatattggtgccagatt

SEQ ID NO: 79221 - DNA, 33 bp, Homo sapien
aaaagcattgcttatgaaccaaatagaccttgc

SEQ ID NO: 79222 - DNA, 33 bp, Homo sapien
aaaagcattgcttatggaccaaatagaccttgc

SEQ ID NO: 79223 - DNA, 33 bp, Homo sapien
cctgagcccggtaagcaaaggaggcagtgtggt

SEQ ID NO: 79224 - DNA, 33 bp, Homo sapien
cctgagcccggtaagcgaaggaggcagtgtggt

SEQ ID NO: 79225 - DNA, 33 bp, Homo sapien
taagaatttcgatgacaacataattctaatttc

SEQ ID NO: 79226 - DNA, 33 bp, Homo sapien
taagaatttcgatgacgacataattctaatttc

SEQ ID NO: 79227 - DNA, 33 bp, Homo sapien
tgaaggagtaacatagacatacatgaggggagt

SEQ ID NO: 79228 - DNA, 33 bp, Homo sapien
tgaaggagtaacatagccatacatgaggggagt

SEQ ID NO: 79229 - DNA, 33 bp, Homo sapien
ttgtcagaaacatatgaaagaacagtaagactt

SEQ ID NO: 79230 - DNA, 33 bp, Homo sapien
ttgtcagaaacatatgtaagaacagtaagactt

SEQ ID NO: 79231 - DNA, 33 bp, Homo sapien
ccctgagcagctaaaccgagtgatttatatagc

SEQ ID NO: 79232 - DNA, 33 bp, Homo sapien
ccctgagcagctaaactgagtgatttatatagc

SEQ ID NO: 79233 - DNA, 33 bp, Homo sapien
gtctgtttttgcaacaatgtcaaccaaaatcag

SEQ ID NO: 79234 - DNA, 33 bp, Homo sapien
gtctgtttttgcaacagtgtcaaccaaaatcag

SEQ ID NO: 79235 - DNA, 33 bp, Homo sapien
ttgaaactggaatggaataagactgagtgtgtt

SEQ ID NO: 79236 - DNA, 33 bp, Homo sapien
ttgaaactggaatggactaagactgagtgtgtt

SEQ ID NO: 79237 - DNA, 33 bp, Homo sapien
ggcttcgtcttataaacaaacatagtgaaagac

SEQ ID NO: 79238 - DNA, 33 bp, Homo sapien
ggcttcgtcttataaagaaacatagtgaaagac

SEQ ID NO: 79239 - DNA, 33 bp, Homo sapien
tcagtaggctcgaaagacgaaacacaaaaattt

SEQ ID NO: 79240 - DNA, 33 bp, Homo sapien
tcagtaggctcgaaaggcgaaacacaaaaattt

SEQ ID NO: 79241 - DNA, 33 bp, Homo sapien
tgccaatcataaaaaccgaatccaaactagctg

SEQ ID NO: 79242 - DNA, 33 bp, Homo sapien
tgccaatcataaaaactgaatccaaactagctg

SEQ ID NO: 79243 - DNA, 33 bp, Homo sapien
aatcacaactgtatcaaccatactattaaagtt

SEQ ID NO: 79244 - DNA, 33 bp, Homo sapien
aatcacaactgtatcatccatactattaaagtt

SEQ ID NO: 79245 - DNA, 33 bp, Homo sapien
agcagcatattagccactataccagtggttccc

SEQ ID NO: 79246 - DNA, 33 bp, Homo sapien
agcagcatattagccagtataccagtggttccc

SEQ ID NO: 79247 - DNA, 33 bp, Homo sapien
atttatcatgaggaaaactataatgcattttca

SEQ ID NO: 79248 - DNA, 33 bp, Homo sapien
atttatcatgaggaaagctataatgcattttca

SEQ ID NO: 79249 - DNA, 33 bp, Homo sapien
aatcatgaaatcaaaaatcaaaacaggtcgggt

SEQ ID NO: 79250 - DNA, 33 bp, Homo sapien
aatcatgaaatcaaaagtcaaaacaggtcgggt

SEQ ID NO: 79251 - DNA, 33 bp, Homo sapien
gcttctctgtggtttcaataaaacacattctac

SEQ ID NO: 79252 - DNA, 33 bp, Homo sapien
gcttctctgtggtttcgataaaacacattctac

SEQ ID NO: 79253 - DNA, 33 bp, Homo sapien
ttcaagtcctgagataaagcataactctttcaa

SEQ ID NO: 79254 - DNA, 33 bp, Homo sapien
ttcaagtcctgagatagagcataactctttcaa

SEQ ID NO: 79255 - DNA, 33 bp, Homo sapien
ggcaattagaaatgtaccatagtggaggccggg

SEQ ID NO: 79256 - DNA, 33 bp, Homo sapien
ggcaattagaaatgtatcatagtggaggccggg

SEQ ID NO: 79257 - DNA, 33 bp, Homo sapien
aattcttcattttctaccattggtatctgacca

SEQ ID NO: 79258 - DNA, 33 bp, Homo sapien
aattcttcattttctatcattggtatctgacca

SEQ ID NO: 79259 - DNA, 33 bp, Homo sapien
cacacaggagttgtctaaagcatccaagttctg

SEQ ID NO: 79260 - DNA, 33 bp, Homo sapien
cacacaggagttgtctgaagcatccaagttctg

SEQ ID NO: 79261 - DNA, 33 bp, Homo sapien
gccaggaattgtgctaaatacaaaaatgcactg

SEQ ID NO: 79262 - DNA, 33 bp, Homo sapien
gccaggaattgtgctagatacaaaaatgcactg

SEQ ID NO: 79263 - DNA, 33 bp, Homo sapien
agtccatgttttttcacagtaggtacacaaaaa

SEQ ID NO: 79264 - DNA, 33 bp, Homo sapien
agtccatgttttttcatagtaggtacacaaaaa

SEQ ID NO: 79265 - DNA, 33 bp, Homo sapien
ggtcttcagtaaagaaaagctgaacgagaaatc

SEQ ID NO: 79266 - DNA, 33 bp, Homo sapien
ggtcttcagtaaagaagagctgaacgagaaatc

SEQ ID NO: 79267 - DNA, 33 bp, Homo sapien
aatgtctggaactccagtgatattctttccttt

SEQ ID NO: 79268 - DNA, 33 bp, Homo sapien
aatgtctggaactccattgatattctttccttt

SEQ ID NO: 79269 - DNA, 33 bp, Homo sapien
tcttcatcacttggtaacttacttctccaagac

SEQ ID NO: 79270 - DNA, 33 bp, Homo sapien
tcttcatcacttggtatcttacttctccaagac

SEQ ID NO: 79271 - DNA, 33 bp, Homo sapien
gtgggtttgaatcatcagagagggagaaagtct

SEQ ID NO: 79272 - DNA, 33 bp, Homo sapien
gtgggtttgaatcatccgagagggagaaagtct

SEQ ID NO: 79273 - DNA, 33 bp, Homo sapien
tatggaatgagaattaagcttctttctgacaac

SEQ ID NO: 79274 - DNA, 33 bp, Homo sapien
tatggaatgagaattaggcttctttctgacaac

SEQ ID NO: 79275 - DNA, 33 bp, Homo sapien
atacaaatatagatagacacttaaataggtatc

SEQ ID NO: 79276 - DNA, 33 bp, Homo sapien
atacaaatatagatagccacttaaataggtatc

SEQ ID NO: 79277 - DNA, 33 bp, Homo sapien
actctatctaaggctacgctttcatgagccttt

SEQ ID NO: 79278 - DNA, 33 bp, Homo sapien
actctatctaaggctatgctttcatgagccttt

SEQ ID NO: 79279 - DNA, 33 bp, Homo sapien
caaaacctcaatcttccatgcacaggttttatt

SEQ ID NO: 79280 - DNA, 33 bp, Homo sapien
caaaacctcaatcttctatgcacaggttttatt

SEQ ID NO: 79281 - DNA, 33 bp, Homo sapien
ttgtttaaccatgttacaatttgacaaaagtat

SEQ ID NO: 79282 - DNA, 33 bp, Homo sapien
ttgtttaaccatgttataatttgacaaaagtat

SEQ ID NO: 79283 - DNA, 33 bp, Homo sapien
agtactgctgctctggccagtctcaaaagacaa

SEQ ID NO: 79284 - DNA, 33 bp, Homo sapien
agtactgctgctctggtcagtctcaaaagacaa

SEQ ID NO: 79285 - DNA, 33 bp, Homo sapien
gggacatcttttttaaatggcatagaagacagg

SEQ ID NO: 79286 - DNA, 33 bp, Homo sapien
gggacatcttttttaagtggcatagaagacagg

SEQ ID NO: 79287 - DNA, 33 bp, Homo sapien
cactgagtttctctccagacaaagttgtgaaga

SEQ ID NO: 79288 - DNA, 33 bp, Homo sapien
cactgagtttctctccggacaaagttgtgaaga

SEQ ID NO: 79289 - DNA, 33 bp, Homo sapien
catgttgggtgctaaaaaggacaagcataacac

SEQ ID NO: 79290 - DNA, 33 bp, Homo sapien
catgttgggtgctaaagaggacaagcataacac

SEQ ID NO: 79291 - DNA, 33 bp, Homo sapien
ctgcctaagatttcaccggggaaaaagaattct

SEQ ID NO: 79292 - DNA, 33 bp, Homo sapien
ctgcctaagatttcactggggaaaaagaattct

SEQ ID NO: 79293 - DNA, 33 bp, Homo sapien
aagaagtaagtgactaaaggttttcaagctatt

SEQ ID NO: 79294 - DNA, 33 bp, Homo sapien
aagaagtaagtgactacaggttttcaagctatt

SEQ ID NO: 79295 - DNA, 33 bp, Homo sapien
tcattagatggggagcaaaatggcagagaatgt

SEQ ID NO: 79296 - DNA, 33 bp, Homo sapien
tcattagatggggagcgaaatggcagagaatgt

SEQ ID NO: 79297 - DNA, 33 bp, Homo sapien
cttcacagctgaaactaaacctacttaacactt

SEQ ID NO: 79298 - DNA, 33 bp, Homo sapien
cttcacagctgaaactgaacctacttaacactt

SEQ ID NO: 79299 - DNA, 33 bp, Homo sapien
ggctcagatggagtgccacctaagtccctggcc

SEQ ID NO: 79300 - DNA, 33 bp, Homo sapien
ggctcagatggagtgctacctaagtccctggcc

SEQ ID NO: 79301 - DNA, 33 bp, Homo sapien
gggattccagtgagccaacattccaataatctt

SEQ ID NO: 79302 - DNA, 33 bp, Homo sapien
gggattccagtgagcccacattccaataatctt

SEQ ID NO: 79303 - DNA, 33 bp, Homo sapien
tagcctacagtctatacactgagattgcccaga

SEQ ID NO: 79304 - DNA, 33 bp, Homo sapien
tagcctacagtctatatactgagattgcccaga

SEQ ID NO: 79305 - DNA, 33 bp, Homo sapien
aaacatattcctctcccaaaaaagcattatgca

SEQ ID NO: 79306 - DNA, 33 bp, Homo sapien
aaacatattcctctccgaaaaaagcattatgca

SEQ ID NO: 79307 - DNA, 33 bp, Homo sapien
atgtgtaacttgcacaatgctctacctgatagt

SEQ ID NO: 79308 - DNA, 33 bp, Homo sapien
atgtgtaacttgcacagtgctctacctgatagt

SEQ ID NO: 79309 - DNA, 33 bp, Homo sapien
ctaaagctacttaaaaggactttgaacagtaat

SEQ ID NO: 79310 - DNA, 33 bp, Homo sapien
ctaaagctacttaaaatgactttgaacagtaat

SEQ ID NO: 79311 - DNA, 33 bp, Homo sapien
gcatgtttctaaaaacacttcaggaatccagag

SEQ ID NO: 79312 - DNA, 33 bp, Homo sapien
gcatgtttctaaaaacgcttcaggaatccagag

SEQ ID NO: 79313 - DNA, 33 bp, Homo sapien
gaacagagtggcacccacaagcttggagatgcc

SEQ ID NO: 79314 - DNA, 33 bp, Homo sapien
gaacagagtggcacccgcaagcttggagatgcc

SEQ ID NO: 79315 - DNA, 33 bp, Homo sapien
cagagctgataaagtgacaaaatagaacaagtc

SEQ ID NO: 79316 - DNA, 33 bp, Homo sapien
cagagctgataaagtggcaaaatagaacaagtc

SEQ ID NO: 79317 - DNA, 33 bp, Homo sapien
cccgtggaatttcttaacaagcatagagttaga

SEQ ID NO: 79318 - DNA, 33 bp, Homo sapien
cccgtggaatttcttagcaagcatagagttaga

SEQ ID NO: 79319 - DNA, 33 bp, Homo sapien
ctaggtattcatcatcagaatggagttggattg

SEQ ID NO: 79320 - DNA, 33 bp, Homo sapien
ctaggtattcatcatcggaatggagttggattg

SEQ ID NO: 79321 - DNA, 33 bp, Homo sapien
gcaatcaattctgcagcagttatcagcacgttg

SEQ ID NO: 79322 - DNA, 33 bp, Homo sapien
gcaatcaattctgcagtagttatcagcacgttg

SEQ ID NO: 79323 - DNA, 33 bp, Homo sapien
ttaatgagggtgacacagggaaatggaaggaac

SEQ ID NO: 79324 - DNA, 33 bp, Homo sapien
ttaatgagggtgacacggggaaatggaaggaac

SEQ ID NO: 79325 - DNA, 33 bp, Homo sapien
tccatggagacctccaacttgcacccttctgcc

SEQ ID NO: 79326 - DNA, 33 bp, Homo sapien
tccatggagacctccatcttgcacccttctgcc

SEQ ID NO: 79327 - DNA, 33 bp, Homo sapien
tctcttgttgaagcacccggtatataagttaat

SEQ ID NO: 79328 - DNA, 33 bp, Homo sapien
tctcttgttgaagcactcggtatataagttaat

SEQ ID NO: 79329 - DNA, 33 bp, Homo sapien
caaagagtacaaacacaagcttcttgagaaagc

SEQ ID NO: 79330 - DNA, 33 bp, Homo sapien
caaagagtacaaacacgagcttcttgagaaagc

SEQ ID NO: 79331 - DNA, 33 bp, Homo sapien
ataataaaatgtcataaattgagtggcttaaac

SEQ ID NO: 79332 - DNA, 33 bp, Homo sapien
ataataaaatgtcatagattgagtggcttaaac

SEQ ID NO: 79333 - DNA, 33 bp, Homo sapien
ctttactgcaagttcacgataaagtgccatctt

SEQ ID NO: 79334 - DNA, 33 bp, Homo sapien
ctttactgcaagttcatgataaagtgccatctt

SEQ ID NO: 79335 - DNA, 33 bp, Homo sapien
agaccgccagcttccagagactgaaacggtaga

SEQ ID NO: 79336 - DNA, 33 bp, Homo sapien
agaccgccagcttccatagactgaaacggtaga

SEQ ID NO: 79337 - DNA, 33 bp, Homo sapien
ctcaaagtaattttcaccttgatctcatctata

SEQ ID NO: 79338 - DNA, 33 bp, Homo sapien
ctcaaagtaattttcatcttgatctcatctata

SEQ ID NO: 79339 - DNA, 33 bp, Homo sapien
aggatgagactgaaaactcttcgcttcattcat

SEQ ID NO: 79340 - DNA, 33 bp, Homo sapien
aggatgagactgaaaattcttcgcttcattcat

SEQ ID NO: 79341 - DNA, 33 bp, Homo sapien
atcagatgtcacagaaatgttaggtcattccaa

SEQ ID NO: 79342 - DNA, 33 bp, Homo sapien
atcagatgtcacagaagtgttaggtcattccaa

SEQ ID NO: 79343 - DNA, 33 bp, Homo sapien
gaagggccatttacacaagagagtaggaaggcc

SEQ ID NO: 79344 - DNA, 33 bp, Homo sapien
gaagggccatttacacgagagagtaggaaggcc

SEQ ID NO: 79345 - DNA, 33 bp, Homo sapien
tgaataattgttgcaaccattttgtgaaaagca

SEQ ID NO: 79346 - DNA, 33 bp, Homo sapien
tgaataattgttgcaatcattttgtgaaaagca

SEQ ID NO: 79347 - DNA, 33 bp, Homo sapien
aatgaaatcaaatcaaattatgcattagaacag

SEQ ID NO: 79348 - DNA, 33 bp, Homo sapien
aatgaaatcaaatcaagttatgcattagaacag

SEQ ID NO: 79349 - DNA, 33 bp, Homo sapien
ttgccaaggactctaacgatactgagactttat

SEQ ID NO: 79350 - DNA, 33 bp, Homo sapien
ttgccaaggactctaatgatactgagactttat

SEQ ID NO: 79351 - DNA, 33 bp, Homo sapien
aacctctctttacaaacgtcacctgaagttata

SEQ ID NO: 79352 - DNA, 33 bp, Homo sapien
aacctctctttacaaaggtcacctgaagttata

SEQ ID NO: 79353 - DNA, 33 bp, Homo sapien
gcacatgagtgaataaatgaattatatccccat

SEQ ID NO: 79354 - DNA, 33 bp, Homo sapien
gcacatgagtgaataagtgaattatatccccat

SEQ ID NO: 79355 - DNA, 33 bp, Homo sapien
tacggaacctgaatgcccaacactgagggagta

SEQ ID NO: 79356 - DNA, 33 bp, Homo sapien
tacggaacctgaatgctcaacactgagggagta

SEQ ID NO: 79357 - DNA, 33 bp, Homo sapien
cttgattctatagttcactccagctctaccact

SEQ ID NO: 79358 - DNA, 33 bp, Homo sapien
cttgattctatagttctctccagctctaccact

SEQ ID NO: 79359 - DNA, 33 bp, Homo sapien
aaatgtcacctccttgaagagaccttccctgat

SEQ ID NO: 79360 - DNA, 33 bp, Homo sapien
aaatgtcacctccttgtagagaccttccctgat

SEQ ID NO: 79361 - DNA, 33 bp, Homo sapien
caagagctcaggcccacgggtttgcataagagc

SEQ ID NO: 79362 - DNA, 33 bp, Homo sapien
caagagctcaggcccatgggtttgcataagagc

SEQ ID NO: 79363 - DNA, 33 bp, Homo sapien
aaccaaccaataccgcaatccatgagggactcc

SEQ ID NO: 79364 - DNA, 33 bp, Homo sapien
aaccaaccaataccgcgatccatgagggactcc

SEQ ID NO: 79365 - DNA, 33 bp, Homo sapien
aacagcactaaggaagaaaaccatgctaaatgc

SEQ ID NO: 79366 - DNA, 33 bp, Homo sapien
aacagcactaaggaagcaaaccatgctaaatgc

SEQ ID NO: 79367 - DNA, 33 bp, Homo sapien
cccttcagggatgtgaagataactggatttgat

SEQ ID NO: 79368 - DNA, 33 bp, Homo sapien
cccttcagggatgtgaggataactggatttgat

SEQ ID NO: 79369 - DNA, 33 bp, Homo sapien
ttatggaaggttgagacggaagcccattcatcc

SEQ ID NO: 79370 - DNA, 33 bp, Homo sapien
ttatggaaggttgagatggaagcccattcatcc

SEQ ID NO: 79371 - DNA, 33 bp, Homo sapien
tcacgctttcagatgacgatgaggagctaacac

SEQ ID NO: 79372 - DNA, 33 bp, Homo sapien
tcacgctttcagatgatgatgaggagctaacac

SEQ ID NO: 79373 - DNA, 33 bp, Homo sapien
ttctcagtgtagcacccgaactctagaggaagt

SEQ ID NO: 79374 - DNA, 33 bp, Homo sapien
ttctcagtgtagcacctgaactctagaggaagt

SEQ ID NO: 79375 - DNA, 33 bp, Homo sapien
ctccacatcaagcggaccaactactattgtctg

SEQ ID NO: 79376 - DNA, 33 bp, Homo sapien
ctccacatcaagcggatcaactactattgtctg

SEQ ID NO: 79377 - DNA, 33 bp, Homo sapien
ccaggcaggtcttaaacatatgcttcacttgac

SEQ ID NO: 79378 - DNA, 33 bp, Homo sapien
ccaggcaggtcttaaagatatgcttcacttgac

SEQ ID NO: 79379 - DNA, 33 bp, Homo sapien
tcagtattctagggaaacacttgactatttggg

SEQ ID NO: 79380 - DNA, 33 bp, Homo sapien
tcagtattctagggaagcacttgactatttggg

SEQ ID NO: 79381 - DNA, 33 bp, Homo sapien
gaacaagactgaaaaagcttttgaaaatgcctt

SEQ ID NO: 79382 - DNA, 33 bp, Homo sapien
gaacaagactgaaaaatcttttgaaaatgcctt

SEQ ID NO: 79383 - DNA, 33 bp, Homo sapien
atgccttagatatgaaatgagataatatttgca

SEQ ID NO: 79384 - DNA, 33 bp, Homo sapien
atgccttagatatgaactgagataatatttgca

SEQ ID NO: 79385 - DNA, 33 bp, Homo sapien
gttcatgtaggcccaacataatttattatgaaa

SEQ ID NO: 79386 - DNA, 33 bp, Homo sapien
gttcatgtaggcccaatataatttattatgaaa

SEQ ID NO: 79387 - DNA, 33 bp, Homo sapien
tcctctttttgtaaaccgtcataattcttgatt

SEQ ID NO: 79388 - DNA, 33 bp, Homo sapien
tcctctttttgtaaactgtcataattcttgatt

SEQ ID NO: 79389 - DNA, 33 bp, Homo sapien
gccaaacgctggcttacatctcgattttaaacc

SEQ ID NO: 79390 - DNA, 33 bp, Homo sapien
gccaaacgctggcttatatctcgattttaaacc

SEQ ID NO: 79391 - DNA, 33 bp, Homo sapien
atgttagagaagggacaaagctcaaaccaccca

SEQ ID NO: 79392 - DNA, 33 bp, Homo sapien
atgttagagaagggacgaagctcaaaccaccca

SEQ ID NO: 79393 - DNA, 33 bp, Homo sapien
cacaggctaagctctacctatgtctaagaatgt

SEQ ID NO: 79394 - DNA, 33 bp, Homo sapien
cacaggctaagctctatctatgtctaagaatgt

SEQ ID NO: 79395 - DNA, 33 bp, Homo sapien
gacaaaagtaggttcgaataatttataacttgt

SEQ ID NO: 79396 - DNA, 33 bp, Homo sapien
gacaaaagtaggttcggataatttataacttgt

SEQ ID NO: 79397 - DNA, 33 bp, Homo sapien
tttttattactgcagacgatgaaaaattaacta

SEQ ID NO: 79398 - DNA, 33 bp, Homo sapien
tttttattactgcagatgatgaaaaattaacta

SEQ ID NO: 79399 - DNA, 33 bp, Homo sapien
cagtatttccttgtgagacgtgatacggcattt

SEQ ID NO: 79400 - DNA, 33 bp, Homo sapien
cagtatttccttgtgatacgtgatacggcattt

SEQ ID NO: 79401 - DNA, 33 bp, Homo sapien
ttgaggcaactgaaacaaagttgatctaggcat

SEQ ID NO: 79402 - DNA, 33 bp, Homo sapien
ttgaggcaactgaaacgaagttgatctaggcat

SEQ ID NO: 79403 - DNA, 33 bp, Homo sapien
ttccatctctgtaacaactgcccctacctgcat

SEQ ID NO: 79404 - DNA, 33 bp, Homo sapien
ttccatctctgtaacatctgcccctacctgcat

SEQ ID NO: 79405 - DNA, 33 bp, Homo sapien
tgtgtaatttataggcaataagcagcatcgatt

SEQ ID NO: 79406 - DNA, 33 bp, Homo sapien
tgtgtaatttataggccataagcagcatcgatt

SEQ ID NO: 79407 - DNA, 33 bp, Homo sapien
gtattccatcattccaacttctttgctgcttcc

SEQ ID NO: 79408 - DNA, 33 bp, Homo sapien
gtattccatcattccatcttctttgctgcttcc

SEQ ID NO: 79409 - DNA, 33 bp, Homo sapien
accaggctttctacaactgtcagtgggaccttc

SEQ ID NO: 79410 - DNA, 33 bp, Homo sapien
accaggctttctacaattgtcagtgggaccttc

SEQ ID NO: 79411 - DNA, 33 bp, Homo sapien
agaaaccagaaaagcactgagggaatgtaaaca

SEQ ID NO: 79412 - DNA, 33 bp, Homo sapien
agaaaccagaaaagcattgagggaatgtaaaca

SEQ ID NO: 79413 - DNA, 33 bp, Homo sapien
caaaatcctgggacccaccaaatggcaggtgtg

SEQ ID NO: 79414 - DNA, 33 bp, Homo sapien
caaaatcctgggacccgccaaatggcaggtgtg

SEQ ID NO: 79415 - DNA, 33 bp, Homo sapien
ttcctaaaagctggacaaactaaggatcctcct

SEQ ID NO: 79416 - DNA, 33 bp, Homo sapien
ttcctaaaagctggacgaactaaggatcctcct

SEQ ID NO: 79417 - DNA, 33 bp, Homo sapien
ctacctgaatcactcacaaagcctcgctcctgg

SEQ ID NO: 79418 - DNA, 33 bp, Homo sapien
ctacctgaatcactcataaagcctcgctcctgg

SEQ ID NO: 79419 - DNA, 33 bp, Homo sapien
gagtaaaattatgcacaacagcacaatgcataa

SEQ ID NO: 79420 - DNA, 33 bp, Homo sapien
gagtaaaattatgcaccacagcacaatgcataa

SEQ ID NO: 79421 - DNA, 33 bp, Homo sapien
tttgctgacggatgaaaaaactcttgcatgtaa

SEQ ID NO: 79422 - DNA, 33 bp, Homo sapien
tttgctgacggatgaagaaactcttgcatgtaa

SEQ ID NO: 79423 - DNA, 33 bp, Homo sapien
cattcttttgagctataaatgttttgtggtcca

SEQ ID NO: 79424 - DNA, 33 bp, Homo sapien
cattcttttgagctatgaatgttttgtggtcca

SEQ ID NO: 79425 - DNA, 33 bp, Homo sapien
tgtagtagaatgatccaagtcctaataccctag

SEQ ID NO: 79426 - DNA, 33 bp, Homo sapien
tgtagtagaatgatcccagtcctaataccctag

SEQ ID NO: 79427 - DNA, 33 bp, Homo sapien
aatcagtaatattgaactcacctaacaaggcat

SEQ ID NO: 79428 - DNA, 33 bp, Homo sapien
aatcagtaatattgaattcacctaacaaggcat

SEQ ID NO: 79429 - DNA, 33 bp, Homo sapien
ggtatacaaggctgaacggcatcgcagaaactg

SEQ ID NO: 79430 - DNA, 33 bp, Homo sapien
ggtatacaaggctgaatggcatcgcagaaactg

SEQ ID NO: 79431 - DNA, 33 bp, Homo sapien
tagtgtatccataaacacaaatgaagtcgacat

SEQ ID NO: 79432 - DNA, 33 bp, Homo sapien
tagtgtatccataaacgcaaatgaagtcgacat

SEQ ID NO: 79433 - DNA, 33 bp, Homo sapien
tgaaacagcttctccacctttgagttgtattct

SEQ ID NO: 79434 - DNA, 33 bp, Homo sapien
tgaaacagcttctccatctttgagttgtattct

SEQ ID NO: 79435 - DNA, 33 bp, Homo sapien
tgtgagtgttttagaaccatagaccgccgggat

SEQ ID NO: 79436 - DNA, 33 bp, Homo sapien
tgtgagtgttttagaagcatagaccgccgggat

SEQ ID NO: 79437 - DNA, 33 bp, Homo sapien
taaggagctcagcaaaacaggcaaagaaatacc

SEQ ID NO: 79438 - DNA, 33 bp, Homo sapien
taaggagctcagcaaatcaggcaaagaaatacc

SEQ ID NO: 79439 - DNA, 33 bp, Homo sapien
ttcaagtaagatttctaaatgccaagtctctct

SEQ ID NO: 79440 - DNA, 33 bp, Homo sapien
ttcaagtaagatttctgaatgccaagtctctct

SEQ ID NO: 79441 - DNA, 33 bp, Homo sapien
ttcaatcctggacccaatgagtcagaaattctg

SEQ ID NO: 79442 - DNA, 33 bp, Homo sapien
ttcaatcctggacccagtgagtcagaaattctg

SEQ ID NO: 79443 - DNA, 33 bp, Homo sapien
actggtgcctaaggtagactgagctccatgtca

SEQ ID NO: 79444 - DNA, 33 bp, Homo sapien
actggtgcctaaggtatactgagctccatgtca

SEQ ID NO: 79445 - DNA, 33 bp, Homo sapien
aatcagcagcattagacagcagttataatctat

SEQ ID NO: 79446 - DNA, 33 bp, Homo sapien
aatcagcagcattagatagcagttataatctat

SEQ ID NO: 79447 - DNA, 33 bp, Homo sapien
aataaaagaacatagtaaaagtgtttccaccat

SEQ ID NO: 79448 - DNA, 33 bp, Homo sapien
aataaaagaacatagtgaaagtgtttccaccat

SEQ ID NO: 79449 - DNA, 33 bp, Homo sapien
tattcagggttgccacaaagggtaaagtgtggg

SEQ ID NO: 79450 - DNA, 33 bp, Homo sapien
tattcagggttgccacgaagggtaaagtgtggg

SEQ ID NO: 79451 - DNA, 33 bp, Homo sapien
atttctcctccttcaaccatctgatgtttcctt

SEQ ID NO: 79452 - DNA, 33 bp, Homo sapien
atttctcctccttcaatcatctgatgtttcctt

SEQ ID NO: 79453 - DNA, 33 bp, Homo sapien
gcctgagccagtggtacgagataagtcaggtgg

SEQ ID NO: 79454 - DNA, 33 bp, Homo sapien
gcctgagccagtggtatgagataagtcaggtgg

SEQ ID NO: 79455 - DNA, 33 bp, Homo sapien
tgggaaaatgtggtaaagcagtaacatggtgat

SEQ ID NO: 79456 - DNA, 33 bp, Homo sapien
tgggaaaatgtggtaaggcagtaacatggtgat

SEQ ID NO: 79457 - DNA, 33 bp, Homo sapien
tatggcccgtatgccactgctctaggttggagt

SEQ ID NO: 79458 - DNA, 33 bp, Homo sapien
tatggcccgtatgccagtgctctaggttggagt

SEQ ID NO: 79459 - DNA, 33 bp, Homo sapien
gtaggccaccatggataagcaaaggggcagcag

SEQ ID NO: 79460 - DNA, 33 bp, Homo sapien
gtaggccaccatggatgagcaaaggggcagcag

SEQ ID NO: 79461 - DNA, 33 bp, Homo sapien
agtgttctttgtataccggatgacaatccttcg

SEQ ID NO: 79462 - DNA, 33 bp, Homo sapien
agtgttctttgtatactggatgacaatccttcg

SEQ ID NO: 79463 - DNA, 33 bp, Homo sapien
aagtattttgttcaatcagtgaaaacatgaatg

SEQ ID NO: 79464 - DNA, 33 bp, Homo sapien
aagtattttgttcaatgagtgaaaacatgaatg

SEQ ID NO: 79465 - DNA, 33 bp, Homo sapien
cattggtacagatggaaagaagaggattgtaga

SEQ ID NO: 79466 - DNA, 33 bp, Homo sapien
cattggtacagatggagagaagaggattgtaga

SEQ ID NO: 79467 - DNA, 33 bp, Homo sapien
aactcctatgcttttacgcaaatggtatattaa

SEQ ID NO: 79468 - DNA, 33 bp, Homo sapien
aactcctatgcttttatgcaaatggtatattaa

SEQ ID NO: 79469 - DNA, 33 bp, Homo sapien
tgagggttgagtattccagacaaggcatgggca

SEQ ID NO: 79470 - DNA, 33 bp, Homo sapien
tgagggttgagtattctagacaaggcatgggca

SEQ ID NO: 79471 - DNA, 33 bp, Homo sapien
ccacaaaaatcactgaaacggacaggtggacag

SEQ ID NO: 79472 - DNA, 33 bp, Homo sapien
ccacaaaaatcactgacacggacaggtggacag

SEQ ID NO: 79473 - DNA, 33 bp, Homo sapien
taaagtgaaagcgttaagtttcaagagacattt

SEQ ID NO: 79474 - DNA, 33 bp, Homo sapien
taaagtgaaagcgttacgtttcaagagacattt

SEQ ID NO: 79475 - DNA, 33 bp, Homo sapien
cccgttctctggtgaaactttggtaaactagtt

SEQ ID NO: 79476 - DNA, 33 bp, Homo sapien
cccgttctctggtgaatctttggtaaactagtt

SEQ ID NO: 79477 - DNA, 33 bp, Homo sapien
attaatctggcttttacggtgtcataagcaatc

SEQ ID NO: 79478 - DNA, 33 bp, Homo sapien
attaatctggcttttatggtgtcataagcaatc

SEQ ID NO: 79479 - DNA, 33 bp, Homo sapien
atataaaactgtcacacggtaacaaggctcaac

SEQ ID NO: 79480 - DNA, 33 bp, Homo sapien
atataaaactgtcacatggtaacaaggctcaac

SEQ ID NO: 79481 - DNA, 33 bp, Homo sapien
acttaaaatctaattgcattaaaagccaaggac

SEQ ID NO: 79482 - DNA, 33 bp, Homo sapien
acttaaaatctaattgtattaaaagccaaggac

SEQ ID NO: 79483 - DNA, 33 bp, Homo sapien
agaggaaaggcttccacctggccaaaagtctct

SEQ ID NO: 79484 - DNA, 33 bp, Homo sapien
agaggaaaggcttccatctggccaaaagtctct

SEQ ID NO: 79485 - DNA, 33 bp, Homo sapien
ccagaagatcgtctgaaggacataggactgact

SEQ ID NO: 79486 - DNA, 33 bp, Homo sapien
ccagaagatcgtctgacggacataggactgact

SEQ ID NO: 79487 - DNA, 33 bp, Homo sapien
cgtgctcaggaaaaacaagtcagtcctatgtcc

SEQ ID NO: 79488 - DNA, 33 bp, Homo sapien
cgtgctcaggaaaaacgagtcagtcctatgtcc

SEQ ID NO: 79489 - DNA, 33 bp, Homo sapien
agatgagagaagacacaagatctagggtaacga

SEQ ID NO: 79490 - DNA, 33 bp, Homo sapien
agatgagagaagacacgagatctagggtaacga

SEQ ID NO: 79491 - DNA, 33 bp, Homo sapien
gagcaggagagcgatgaaaatggcaaaactagg

SEQ ID NO: 79492 - DNA, 33 bp, Homo sapien
gagcaggagagcgatggaaatggcaaaactagg

SEQ ID NO: 79493 - DNA, 33 bp, Homo sapien
gttctttaaggctctgcatatatggccttattc

SEQ ID NO: 79494 - DNA, 33 bp, Homo sapien
gttctttaaggctctggatatatggccttattc

SEQ ID NO: 79495 - DNA, 33 bp, Homo sapien
caagttcaaagttcaaaggataagggatatagg

SEQ ID NO: 79496 - DNA, 33 bp, Homo sapien
caagttcaaagttcaacggataagggatatagg

SEQ ID NO: 79497 - DNA, 33 bp, Homo sapien
tttgtctattgccctgaaaacttaacacatata

SEQ ID NO: 79498 - DNA, 33 bp, Homo sapien
tttgtctattgccctggaaacttaacacatata

SEQ ID NO: 79499 - DNA, 33 bp, Homo sapien
tgggaacagttatctgaaaaacattgctttact

SEQ ID NO: 79500 - DNA, 33 bp, Homo sapien
tgggaacagttatctggaaaacattgctttact

SEQ ID NO: 79501 - DNA, 33 bp, Homo sapien
ttcagtctctctggagccctttcacttccattg

SEQ ID NO: 79502 - DNA, 33 bp, Homo sapien
ttcagtctctctggagtcctttcacttccattg

SEQ ID NO: 79503 - DNA, 33 bp, Homo sapien
atgtggacattcaaccaagacaactgtactgtg

SEQ ID NO: 79504 - DNA, 33 bp, Homo sapien
atgtggacattcaaccgagacaactgtactgtg

SEQ ID NO: 79505 - DNA, 33 bp, Homo sapien
aatggagctcaacaaagttaatctagaaaaaag

SEQ ID NO: 79506 - DNA, 33 bp, Homo sapien
aatggagctcaacaaatttaatctagaaaaaag

SEQ ID NO: 79507 - DNA, 33 bp, Homo sapien
tcgttttgtttcttgaagggattgcatagaatt

SEQ ID NO: 79508 - DNA, 33 bp, Homo sapien
tcgttttgtttcttgaggggattgcatagaatt

SEQ ID NO: 79509 - DNA, 33 bp, Homo sapien
accaactaagcagttacagttcttcccattgga

SEQ ID NO: 79510 - DNA, 33 bp, Homo sapien
accaactaagcagttatagttcttcccattgga

SEQ ID NO: 79511 - DNA, 33 bp, Homo sapien
ctccagcctgatgactaagcgagactgtctcca

SEQ ID NO: 79512 - DNA, 33 bp, Homo sapien
ctccagcctgatgactgagcgagactgtctcca

SEQ ID NO: 79513 - DNA, 33 bp, Homo sapien
ttgtttggttatgccaccaatctatcaaggttc

SEQ ID NO: 79514 - DNA, 33 bp, Homo sapien
ttgtttggttatgccatcaatctatcaaggttc

SEQ ID NO: 79515 - DNA, 33 bp, Homo sapien
caggcatgaataacacagtgatcattgttacca

SEQ ID NO: 79516 - DNA, 33 bp, Homo sapien
caggcatgaataacaccgtgatcattgttacca

SEQ ID NO: 79517 - DNA, 33 bp, Homo sapien
tgaggacttggtcttcacaagcaaaattgtggg

SEQ ID NO: 79518 - DNA, 33 bp, Homo sapien
tgaggacttggtcttcccaagcaaaattgtggg

SEQ ID NO: 79519 - DNA, 33 bp, Homo sapien
caaacacaagatctaaatcaagctactcaataa

SEQ ID NO: 79520 - DNA, 33 bp, Homo sapien
caaacacaagatctaagtcaagctactcaataa

SEQ ID NO: 79521 - DNA, 33 bp, Homo sapien
ggtttctgaggagtggaattataggtggaaaat

SEQ ID NO: 79522 - DNA, 33 bp, Homo sapien
ggtttctgaggagtgggattataggtggaaaat

SEQ ID NO: 79523 - DNA, 33 bp, Homo sapien
agttcttcagatcttaccctaggcaatggacaa

SEQ ID NO: 79524 - DNA, 33 bp, Homo sapien
agttcttcagatcttatcctaggcaatggacaa

SEQ ID NO: 79525 - DNA, 33 bp, Homo sapien
aatgtcccagaaaaaaatgaagccaagagggct

SEQ ID NO: 79526 - DNA, 33 bp, Homo sapien
aatgtcccagaaaaaagtgaagccaagagggct

SEQ ID NO: 79527 - DNA, 33 bp, Homo sapien
gtgtcaagtgccatagaagaggccaagtacaaa

SEQ ID NO: 79528 - DNA, 33 bp, Homo sapien
gtgtcaagtgccataggagaggccaagtacaaa

SEQ ID NO: 79529 - DNA, 33 bp, Homo sapien
atcttgttcattatggaaaggctcaatattgaa

SEQ ID NO: 79530 - DNA, 33 bp, Homo sapien
atcttgttcattatgggaaggctcaatattgaa

SEQ ID NO: 79531 - DNA, 33 bp, Homo sapien
tccttcagtacatccccctgtcaattacaactc

SEQ ID NO: 79532 - DNA, 33 bp, Homo sapien
tccttcagtacatccctctgtcaattacaactc

SEQ ID NO: 79533 - DNA, 33 bp, Homo sapien
tttccatgaaagaagcagatatttgtgtgtatt

SEQ ID NO: 79534 - DNA, 33 bp, Homo sapien
tttccatgaaagaagcggatatttgtgtgtatt

SEQ ID NO: 79535 - DNA, 33 bp, Homo sapien
gatggaatgtattgataactataattgcagtag

SEQ ID NO: 79536 - DNA, 33 bp, Homo sapien
gatggaatgtattgatgactataattgcagtag

SEQ ID NO: 79537 - DNA, 33 bp, Homo sapien
taggaaaaaatgtgcaatctcactcacaataag

SEQ ID NO: 79538 - DNA, 33 bp, Homo sapien
taggaaaaaatgtgcagtctcactcacaataag

SEQ ID NO: 79539 - DNA, 33 bp, Homo sapien
gaaacctcagggggcagtctggcctttcaatac

SEQ ID NO: 79540 - DNA, 33 bp, Homo sapien
gaaacctcagggggcattctggcctttcaatac

SEQ ID NO: 79541 - DNA, 33 bp, Homo sapien
gaagtgcaagattgaaataagattatgtggcat

SEQ ID NO: 79542 - DNA, 33 bp, Homo sapien
gaagtgcaagattgaagtaagattatgtggcat

SEQ ID NO: 79543 - DNA, 33 bp, Homo sapien
gaaaatgtaatctccaaataagatgtttaaata

SEQ ID NO: 79544 - DNA, 33 bp, Homo sapien
gaaaatgtaatctccagataagatgtttaaata

SEQ ID NO: 79545 - DNA, 33 bp, Homo sapien
ggaagctactaatttcactattatcagttgtaa

SEQ ID NO: 79546 - DNA, 33 bp, Homo sapien
ggaagctactaatttcgctattatcagttgtaa

SEQ ID NO: 79547 - DNA, 33 bp, Homo sapien
ctctcttctgttcttacactcaggacatgtagc

SEQ ID NO: 79548 - DNA, 33 bp, Homo sapien
ctctcttctgttcttatactcaggacatgtagc

SEQ ID NO: 79549 - DNA, 33 bp, Homo sapien
cctctgtctcctttaccctgctttgatatactt

SEQ ID NO: 79550 - DNA, 33 bp, Homo sapien
cctctgtctcctttactctgctttgatatactt

SEQ ID NO: 79551 - DNA, 33 bp, Homo sapien
ctagcatttaagtgctaaacctaccagaatagt

SEQ ID NO: 79552 - DNA, 33 bp, Homo sapien
ctagcatttaagtgctcaacctaccagaatagt

SEQ ID NO: 79553 - DNA, 33 bp, Homo sapien
gaaatcaagacaatcaatctcaatgaagttata

SEQ ID NO: 79554 - DNA, 33 bp, Homo sapien
gaaatcaagacaatcagtctcaatgaagttata

SEQ ID NO: 79555 - DNA, 33 bp, Homo sapien
tttcattctagttacaactaactactcattgtt

SEQ ID NO: 79556 - DNA, 33 bp, Homo sapien
tttcattctagttacacctaactactcattgtt

SEQ ID NO: 79557 - DNA, 33 bp, Homo sapien
ccatttctaaaatctaaagcattgcctttttct

SEQ ID NO: 79558 - DNA, 33 bp, Homo sapien
ccatttctaaaatctacagcattgcctttttct

SEQ ID NO: 79559 - DNA, 33 bp, Homo sapien
tttagaaatggcacacagaattgttagaatata

SEQ ID NO: 79560 - DNA, 33 bp, Homo sapien
tttagaaatggcacacggaattgttagaatata

SEQ ID NO: 79561 - DNA, 33 bp, Homo sapien
cagcaactggatgaccactgtgtttactttttg

SEQ ID NO: 79562 - DNA, 33 bp, Homo sapien
cagcaactggatgaccgctgtgtttactttttg

SEQ ID NO: 79563 - DNA, 33 bp, Homo sapien
gtgaatcatatctcaacgaagctgttaaaaaca

SEQ ID NO: 79564 - DNA, 33 bp, Homo sapien
gtgaatcatatctcaaggaagctgttaaaaaca

SEQ ID NO: 79565 - DNA, 33 bp, Homo sapien
tagagaggcaggaagagaaacagtttcaaaaaa

SEQ ID NO: 79566 - DNA, 33 bp, Homo sapien
tagagaggcaggaagataaacagtttcaaaaaa

SEQ ID NO: 79567 - DNA, 33 bp, Homo sapien
tatacataaataagtcactgataaaactggatt

SEQ ID NO: 79568 - DNA, 33 bp, Homo sapien
tatacataaataagtcgctgataaaactggatt

SEQ ID NO: 79569 - DNA, 33 bp, Homo sapien
tggctgttatcaaagacacgaaaaatagtaaat

SEQ ID NO: 79570 - DNA, 33 bp, Homo sapien
tggctgttatcaaagagacgaaaaatagtaaat

SEQ ID NO: 79571 - DNA, 33 bp, Homo sapien
agccctcctgtcaataacagaagaaagccaaga

SEQ ID NO: 79572 - DNA, 33 bp, Homo sapien
agccctcctgtcaatagcagaagaaagccaaga

SEQ ID NO: 79573 - DNA, 33 bp, Homo sapien
taaatgttcagctagccacctgattgttacaac

SEQ ID NO: 79574 - DNA, 33 bp, Homo sapien
taaatgttcagctagctacctgattgttacaac

SEQ ID NO: 79575 - DNA, 33 bp, Homo sapien
gtatttggtaaattcccatatcacgtctcaatt

SEQ ID NO: 79576 - DNA, 33 bp, Homo sapien
gtatttggtaaattcctatatcacgtctcaatt

SEQ ID NO: 79577 - DNA, 33 bp, Homo sapien
gtacagccatgagctcagaatggtttttacact

SEQ ID NO: 79578 - DNA, 33 bp, Homo sapien
gtacagccatgagctcggaatggtttttacact

SEQ ID NO: 79579 - DNA, 33 bp, Homo sapien
actaagaggccggaaacggatggtgaaatctac

SEQ ID NO: 79580 - DNA, 33 bp, Homo sapien
actaagaggccggaaatggatggtgaaatctac

SEQ ID NO: 79581 - DNA, 33 bp, Homo sapien
tgccttagcaagacacaatgtaaatgtattgaa

SEQ ID NO: 79582 - DNA, 33 bp, Homo sapien
tgccttagcaagacactatgtaaatgtattgaa

SEQ ID NO: 79583 - DNA, 33 bp, Homo sapien
tcacaaaagtgacagcacataattaaacaacaa

SEQ ID NO: 79584 - DNA, 33 bp, Homo sapien
tcacaaaagtgacagcgcataattaaacaacaa

SEQ ID NO: 79585 - DNA, 33 bp, Homo sapien
accgatgccagaaggacggtgcacccatacaga

SEQ ID NO: 79586 - DNA, 33 bp, Homo sapien
accgatgccagaaggatggtgcacccatacaga

SEQ ID NO: 79587 - DNA, 33 bp, Homo sapien
tccgtctgtgatgtgacggtctatgttttgaag

SEQ ID NO: 79588 - DNA, 33 bp, Homo sapien
tccgtctgtgatgtgatggtctatgttttgaag

SEQ ID NO: 79589 - DNA, 33 bp, Homo sapien
aggcataaatgagaacaaaaacattaacattgt

SEQ ID NO: 79590 - DNA, 33 bp, Homo sapien
aggcataaatgagaacgaaaacattaacattgt

SEQ ID NO: 79591 - DNA, 33 bp, Homo sapien
aggccttaaatctctgcagtgagagtaccttaa

SEQ ID NO: 79592 - DNA, 33 bp, Homo sapien
aggccttaaatctctgtagtgagagtaccttaa

SEQ ID NO: 79593 - DNA, 33 bp, Homo sapien
atagtcacaataatcaagagaggatcaaagcta

SEQ ID NO: 79594 - DNA, 33 bp, Homo sapien
atagtcacaataatcaggagaggatcaaagcta

SEQ ID NO: 79595 - DNA, 33 bp, Homo sapien
agctggacttgcaaaacgctcaccatgaaatat

SEQ ID NO: 79596 - DNA, 33 bp, Homo sapien
agctggacttgcaaaatgctcaccatgaaatat

SEQ ID NO: 79597 - DNA, 33 bp, Homo sapien
acactaaatttgaactaaagaatcagagtttga

SEQ ID NO: 79598 - DNA, 33 bp, Homo sapien
acactaaatttgaactcaagaatcagagtttga

SEQ ID NO: 79599 - DNA, 33 bp, Homo sapien
attaaatcattgaccactggcaaccaacttaac

SEQ ID NO: 79600 - DNA, 33 bp, Homo sapien
attaaatcattgaccattggcaaccaacttaac

SEQ ID NO: 79601 - DNA, 33 bp, Homo sapien
ctatggctcacatgataaaatgtaagtaaaaaa

SEQ ID NO: 79602 - DNA, 33 bp, Homo sapien
ctatggctcacatgatcaaatgtaagtaaaaaa

SEQ ID NO: 79603 - DNA, 33 bp, Homo sapien
gaaccttatctttaacaagagcatgagccatgc

SEQ ID NO: 79604 - DNA, 33 bp, Homo sapien
gaaccttatctttaacgagagcatgagccatgc

SEQ ID NO: 79605 - DNA, 33 bp, Homo sapien
atctcagggctatgctcactcatattccatgtg

SEQ ID NO: 79606 - DNA, 33 bp, Homo sapien
atctcagggctatgctgactcatattccatgtg

SEQ ID NO: 79607 - DNA, 33 bp, Homo sapien
atactccagacctagaaatgaagaagccagcaa

SEQ ID NO: 79608 - DNA, 33 bp, Homo sapien
atactccagacctagagatgaagaagccagcaa

SEQ ID NO: 79609 - DNA, 33 bp, Homo sapien
ctgattccgagcccacacaagtggttgttggcg

SEQ ID NO: 79610 - DNA, 33 bp, Homo sapien
ctgattccgagcccacgcaagtggttgttggcg

SEQ ID NO: 79611 - DNA, 33 bp, Homo sapien
agcacagatttccaggaattagagactagtgat

SEQ ID NO: 79612 - DNA, 33 bp, Homo sapien
agcacagatttccagggattagagactagtgat

SEQ ID NO: 79613 - DNA, 33 bp, Homo sapien
aaactttctaataaaacgctttgcagatgatct

SEQ ID NO: 79614 - DNA, 33 bp, Homo sapien
aaactttctaataaaaggctttgcagatgatct

SEQ ID NO: 79615 - DNA, 33 bp, Homo sapien
aagttaatcaacatgaagacgtaactgcccaga

SEQ ID NO: 79616 - DNA, 33 bp, Homo sapien
aagttaatcaacatgacgacgtaactgcccaga

SEQ ID NO: 79617 - DNA, 33 bp, Homo sapien
ttcctaatgtggtaaaactggagtcaggtttct

SEQ ID NO: 79618 - DNA, 33 bp, Homo sapien
ttcctaatgtggtaaagctggagtcaggtttct

SEQ ID NO: 79619 - DNA, 33 bp, Homo sapien
gggaaaagcaaacacactcttgaaatgatagct

SEQ ID NO: 79620 - DNA, 33 bp, Homo sapien
gggaaaagcaaacacattcttgaaatgatagct

SEQ ID NO: 79621 - DNA, 33 bp, Homo sapien
cacatattttgcaaagcctgtttaaaaaataaa

SEQ ID NO: 79622 - DNA, 33 bp, Homo sapien
cacatattttgcaaaggctgtttaaaaaataaa

SEQ ID NO: 79623 - DNA, 33 bp, Homo sapien
gtaaatacaaataaccgcaaacagctgcagtaa

SEQ ID NO: 79624 - DNA, 33 bp, Homo sapien
gtaaatacaaataacctcaaacagctgcagtaa

SEQ ID NO: 79625 - DNA, 33 bp, Homo sapien
ggttatttgtatttacaaggccatgtgaacatt

SEQ ID NO: 79626 - DNA, 33 bp, Homo sapien
ggttatttgtatttacgaggccatgtgaacatt

SEQ ID NO: 79627 - DNA, 33 bp, Homo sapien
actaaagatttcctaaaactcacctatgccttg

SEQ ID NO: 79628 - DNA, 33 bp, Homo sapien
actaaagatttcctaagactcacctatgccttg

SEQ ID NO: 79629 - DNA, 33 bp, Homo sapien
ttatgtctccctaaaaccaagctgcagccagac

SEQ ID NO: 79630 - DNA, 33 bp, Homo sapien
ttatgtctccctaaaatcaagctgcagccagac

SEQ ID NO: 79631 - DNA, 33 bp, Homo sapien
catacaaacccacatacgtacgtagactaactt

SEQ ID NO: 79632 - DNA, 33 bp, Homo sapien
catacaaacccacatatgtacgtagactaactt

SEQ ID NO: 79633 - DNA, 33 bp, Homo sapien
ccttgatctcttaaagaatcatctctcatacta

SEQ ID NO: 79634 - DNA, 33 bp, Homo sapien
ccttgatctcttaaaggatcatctctcatacta

SEQ ID NO: 79635 - DNA, 33 bp, Homo sapien
gaatccaagacctttgcaaaatggaatagactc

SEQ ID NO: 79636 - DNA, 33 bp, Homo sapien
gaatccaagacctttgtaaaatggaatagactc

SEQ ID NO: 79637 - DNA, 33 bp, Homo sapien
ccatatttttttctcacgggttctcatactctg

SEQ ID NO: 79638 - DNA, 33 bp, Homo sapien
ccatatttttttctcatgggttctcatactctg

SEQ ID NO: 79639 - DNA, 33 bp, Homo sapien
gtggcacttttgaaaacgatttgtctaattgga

SEQ ID NO: 79640 - DNA, 33 bp, Homo sapien
gtggcacttttgaaaatgatttgtctaattgga

SEQ ID NO: 79641 - DNA, 33 bp, Homo sapien
aggggaagatgcataaaatgttgctgaaatgtt

SEQ ID NO: 79642 - DNA, 33 bp, Homo sapien
aggggaagatgcataagatgttgctgaaatgtt

SEQ ID NO: 79643 - DNA, 33 bp, Homo sapien
gagcagtaagccaagaagcaggcttgtattagt

SEQ ID NO: 79644 - DNA, 33 bp, Homo sapien
gagcagtaagccaagacgcaggcttgtattagt

SEQ ID NO: 79645 - DNA, 33 bp, Homo sapien
agagcaaaaataataaaagaggtgacagaagca

SEQ ID NO: 79646 - DNA, 33 bp, Homo sapien
agagcaaaaataataagagaggtgacagaagca

SEQ ID NO: 79647 - DNA, 33 bp, Homo sapien
gtatatggcctgatgaacctaggcactacttag

SEQ ID NO: 79648 - DNA, 33 bp, Homo sapien
gtatatggcctgatgagcctaggcactacttag

SEQ ID NO: 79649 - DNA, 33 bp, Homo sapien
tcttggcttctcttaactggaacacagtggcca

SEQ ID NO: 79650 - DNA, 33 bp, Homo sapien
tcttggcttctcttaattggaacacagtggcca

SEQ ID NO: 79651 - DNA, 33 bp, Homo sapien
agggttgatgggaggcacagcttctcctacttt

SEQ ID NO: 79652 - DNA, 33 bp, Homo sapien
agggttgatgggaggctcagcttctcctacttt

SEQ ID NO: 79653 - DNA, 33 bp, Homo sapien
acaaaccaaaggcatgccaatctctaatctcag

SEQ ID NO: 79654 - DNA, 33 bp, Homo sapien
acaaaccaaaggcatgtcaatctctaatctcag

SEQ ID NO: 79655 - DNA, 33 bp, Homo sapien
agccttgataaaataaccagtctctccaaatgc

SEQ ID NO: 79656 - DNA, 33 bp, Homo sapien
agccttgataaaataagcagtctctccaaatgc

SEQ ID NO: 79657 - DNA, 33 bp, Homo sapien
gatctttatagatcaaggtattagtttccattt

SEQ ID NO: 79658 - DNA, 33 bp, Homo sapien
gatctttatagatcaatgtattagtttccattt

SEQ ID NO: 79659 - DNA, 33 bp, Homo sapien
gaataataggccccccaaagagatccatgtctt

SEQ ID NO: 79660 - DNA, 33 bp, Homo sapien
gaataataggccccccgaagagatccatgtctt

SEQ ID NO: 79661 - DNA, 33 bp, Homo sapien
attcatggctatgtaactgaccacaggttcttg

SEQ ID NO: 79662 - DNA, 33 bp, Homo sapien
attcatggctatgtaattgaccacaggttcttg

SEQ ID NO: 79663 - DNA, 33 bp, Homo sapien
aatgaccaatcctttaacttagcttcattataa

SEQ ID NO: 79664 - DNA, 33 bp, Homo sapien
aatgaccaatcctttaccttagcttcattataa

SEQ ID NO: 79665 - DNA, 33 bp, Homo sapien
tgcatgcgtacaagacaagaagaatgaccaatc

SEQ ID NO: 79666 - DNA, 33 bp, Homo sapien
tgcatgcgtacaagaccagaagaatgaccaatc

SEQ ID NO: 79667 - DNA, 33 bp, Homo sapien
gcattcctaattcatacgtccttcctgaatcaa

SEQ ID NO: 79668 - DNA, 33 bp, Homo sapien
gcattcctaattcatatgtccttcctgaatcaa

SEQ ID NO: 79669 - DNA, 33 bp, Homo sapien
ccagggaaggcatcccagaaatggtacacctat

SEQ ID NO: 79670 - DNA, 33 bp, Homo sapien
ccagggaaggcatcccggaaatggtacacctat

SEQ ID NO: 79671 - DNA, 33 bp, Homo sapien
taaataactttgtatcaataaattcaatagctt

SEQ ID NO: 79672 - DNA, 33 bp, Homo sapien
taaataactttgtatcgataaattcaatagctt

SEQ ID NO: 79673 - DNA, 33 bp, Homo sapien
gctatcggaatatgaaagtaagggatgctgggc

SEQ ID NO: 79674 - DNA, 33 bp, Homo sapien
gctatcggaatatgaacgtaagggatgctgggc

SEQ ID NO: 79675 - DNA, 33 bp, Homo sapien
atcttggtgaaacaaacgatcatcccacttgct

SEQ ID NO: 79676 - DNA, 33 bp, Homo sapien
atcttggtgaaacaaatgatcatcccacttgct

SEQ ID NO: 79677 - DNA, 33 bp, Homo sapien
tttcacccacttgtagacatagctgtggggcac

SEQ ID NO: 79678 - DNA, 33 bp, Homo sapien
tttcacccacttgtaggcatagctgtggggcac

SEQ ID NO: 79679 - DNA, 33 bp, Homo sapien
gaacaaggatttggagaaagaaagtgccttcaa

SEQ ID NO: 79680 - DNA, 33 bp, Homo sapien
gaacaaggatttggaggaagaaagtgccttcaa

SEQ ID NO: 79681 - DNA, 33 bp, Homo sapien
tcattgttagggatacagagagtatggggacca

SEQ ID NO: 79682 - DNA, 33 bp, Homo sapien
tcattgttagggataccgagagtatggggacca

SEQ ID NO: 79683 - DNA, 33 bp, Homo sapien
ttttgtttaagctgccaatgaattattgatttc

SEQ ID NO: 79684 - DNA, 33 bp, Homo sapien
ttttgtttaagctgccgatgaattattgatttc

SEQ ID NO: 79685 - DNA, 33 bp, Homo sapien
atttgccaaagtatttaaaaaagtgcttgtaac

SEQ ID NO: 79686 - DNA, 33 bp, Homo sapien
atttgccaaagtattttaaaaagtgcttgtaac

SEQ ID NO: 79687 - DNA, 33 bp, Homo sapien
ttttcagtgtgttgccaatgaaggggatgaatg

SEQ ID NO: 79688 - DNA, 33 bp, Homo sapien
ttttcagtgtgttgccgatgaaggggatgaatg

SEQ ID NO: 79689 - DNA, 33 bp, Homo sapien
agacattcagattggacgtttattggttgctct

SEQ ID NO: 79690 - DNA, 33 bp, Homo sapien
agacattcagattggatgtttattggttgctct

SEQ ID NO: 79691 - DNA, 33 bp, Homo sapien
gctctactgtgactaaacatttttctttactgt

SEQ ID NO: 79692 - DNA, 33 bp, Homo sapien
gctctactgtgactaatcatttttctttactgt

SEQ ID NO: 79693 - DNA, 33 bp, Homo sapien
gtgatctgttctaataataaccttgactcacag

SEQ ID NO: 79694 - DNA, 33 bp, Homo sapien
gtgatctgttctaatactaaccttgactcacag

SEQ ID NO: 79695 - DNA, 33 bp, Homo sapien
tttctctacctaatagaactcataagtgaatgg

SEQ ID NO: 79696 - DNA, 33 bp, Homo sapien
tttctctacctaatagtactcataagtgaatgg

SEQ ID NO: 79697 - DNA, 33 bp, Homo sapien
aaatgtgaattaaaaccacaatgagttatcact

SEQ ID NO: 79698 - DNA, 33 bp, Homo sapien
aaatgtgaattaaaacgacaatgagttatcact

SEQ ID NO: 79699 - DNA, 33 bp, Homo sapien
tctcacaacttgagaccgaaaattaagctggga

SEQ ID NO: 79700 - DNA, 33 bp, Homo sapien
tctcacaacttgagactgaaaattaagctggga

SEQ ID NO: 79701 - DNA, 33 bp, Homo sapien
ggcaaaaatgaacacacggtactggatgaaatt

SEQ ID NO: 79702 - DNA, 33 bp, Homo sapien
ggcaaaaatgaacacatggtactggatgaaatt

SEQ ID NO: 79703 - DNA, 33 bp, Homo sapien
cttggagtctgttaataaggaatttttggaggt

SEQ ID NO: 79704 - DNA, 33 bp, Homo sapien
cttggagtctgttaatgaggaatttttggaggt

SEQ ID NO: 79705 - DNA, 33 bp, Homo sapien
actgaaaataatatgacgggacttgtgcaggat

SEQ ID NO: 79706 - DNA, 33 bp, Homo sapien
actgaaaataatatgatgggacttgtgcaggat

SEQ ID NO: 79707 - DNA, 33 bp, Homo sapien
tgcccaatatggcataccttagagcaatgggta

SEQ ID NO: 79708 - DNA, 33 bp, Homo sapien
tgcccaatatggcatatcttagagcaatgggta

SEQ ID NO: 79709 - DNA, 33 bp, Homo sapien
tcaatcgattgtcaaaagtggaatgccaaaatc

SEQ ID NO: 79710 - DNA, 33 bp, Homo sapien
tcaatcgattgtcaaaggtggaatgccaaaatc

SEQ ID NO: 79711 - DNA, 33 bp, Homo sapien
gttggtgtttggtttacggtgacattattcctg

SEQ ID NO: 79712 - DNA, 33 bp, Homo sapien
gttggtgtttggtttatggtgacattattcctg

SEQ ID NO: 79713 - DNA, 33 bp, Homo sapien
actgtggtagcttgaaagaagtgcagctgaggc

SEQ ID NO: 79714 - DNA, 33 bp, Homo sapien
actgtggtagcttgaatgaagtgcagctgaggc

SEQ ID NO: 79715 - DNA, 33 bp, Homo sapien
cacctacgcctacacaaaataccttctacctct

SEQ ID NO: 79716 - DNA, 33 bp, Homo sapien
cacctacgcctacacagaataccttctacctct

SEQ ID NO: 79717 - DNA, 33 bp, Homo sapien
caacaggaggtggctacacaatttttaactgca

SEQ ID NO: 79718 - DNA, 33 bp, Homo sapien
caacaggaggtggctatacaatttttaactgca

SEQ ID NO: 79719 - DNA, 33 bp, Homo sapien
tttcagagaactgcagcaatttgaaaaatctca

SEQ ID NO: 79720 - DNA, 33 bp, Homo sapien
tttcagagaactgcaggaatttgaaaaatctca

SEQ ID NO: 79721 - DNA, 33 bp, Homo sapien
tgtgcaggtccacttacacatagatatttttca

SEQ ID NO: 79722 - DNA, 33 bp, Homo sapien
tgtgcaggtccacttatacatagatatttttca

SEQ ID NO: 79723 - DNA, 33 bp, Homo sapien
ttcagcatcaaactaccctctgctggcaagctt

SEQ ID NO: 79724 - DNA, 33 bp, Homo sapien
ttcagcatcaaactactctctgctggcaagctt

SEQ ID NO: 79725 - DNA, 33 bp, Homo sapien
ggataatatgatttaaaaatatttggtatcctt

SEQ ID NO: 79726 - DNA, 33 bp, Homo sapien
ggataatatgatttaacaatatttggtatcctt

SEQ ID NO: 79727 - DNA, 33 bp, Homo sapien
agcttgtaaaacaataaattagttggagcccaa

SEQ ID NO: 79728 - DNA, 33 bp, Homo sapien
agcttgtaaaacaatacattagttggagcccaa

SEQ ID NO: 79729 - DNA, 33 bp, Homo sapien
tgttcttaagaatgaacgacactgtccaaagtt

SEQ ID NO: 79730 - DNA, 33 bp, Homo sapien
tgttcttaagaatgaatgacactgtccaaagtt

SEQ ID NO: 79731 - DNA, 33 bp, Homo sapien
ttccacgttattgataatagtagcagtatcttc

SEQ ID NO: 79732 - DNA, 33 bp, Homo sapien
ttccacgttattgatagtagtagcagtatcttc

SEQ ID NO: 79733 - DNA, 33 bp, Homo sapien
actgtcattttatagcccccggaagatactgct

SEQ ID NO: 79734 - DNA, 33 bp, Homo sapien
actgtcattttatagctcccggaagatactgct

SEQ ID NO: 79735 - DNA, 33 bp, Homo sapien
cagaaaatgataacccaaaatcaaggtcccaga

SEQ ID NO: 79736 - DNA, 33 bp, Homo sapien
cagaaaatgataaccccaaatcaaggtcccaga

SEQ ID NO: 79737 - DNA, 33 bp, Homo sapien
aacagtaaagcaacaacgcagtaaaaatgaaaa

SEQ ID NO: 79738 - DNA, 33 bp, Homo sapien
aacagtaaagcaacaatgcagtaaaaatgaaaa

SEQ ID NO: 79739 - DNA, 33 bp, Homo sapien
agccagagatgaggcacggtcttttccttgtca

SEQ ID NO: 79740 - DNA, 33 bp, Homo sapien
agccagagatgaggcatggtcttttccttgtca

SEQ ID NO: 79741 - DNA, 33 bp, Homo sapien
cccaacagttaaacacacattaggggttcagtg

SEQ ID NO: 79742 - DNA, 33 bp, Homo sapien
cccaacagttaaacacgcattaggggttcagtg

SEQ ID NO: 79743 - DNA, 33 bp, Homo sapien
acttgcttaaaaaaaaacagaatctatcagcat

SEQ ID NO: 79744 - DNA, 33 bp, Homo sapien
acttgcttaaaaaaaaccagaatctatcagcat

SEQ ID NO: 79745 - DNA, 33 bp, Homo sapien
ctttgacaatttcatacctgtcagaagaaggca

SEQ ID NO: 79746 - DNA, 33 bp, Homo sapien
ctttgacaatttcatagctgtcagaagaaggca

SEQ ID NO: 79747 - DNA, 33 bp, Homo sapien
acaatgccacgttcacaagatgaccaattgcct

SEQ ID NO: 79748 - DNA, 33 bp, Homo sapien
acaatgccacgttcacgagatgaccaattgcct

SEQ ID NO: 79749 - DNA, 33 bp, Homo sapien
attcaaggcaagtgacaggacaaaggaaaagga

SEQ ID NO: 79750 - DNA, 33 bp, Homo sapien
attcaaggcaagtgacgggacaaaggaaaagga

SEQ ID NO: 79751 - DNA, 33 bp, Homo sapien
tgtgaagagcattccaatgaaaaaatgaaagga

SEQ ID NO: 79752 - DNA, 33 bp, Homo sapien
tgtgaagagcattccagtgaaaaaatgaaagga

SEQ ID NO: 79753 - DNA, 33 bp, Homo sapien
gattcaaactagctaaacctaaacctgcttatg

SEQ ID NO: 79754 - DNA, 33 bp, Homo sapien
gattcaaactagctaaccctaaacctgcttatg

SEQ ID NO: 79755 - DNA, 33 bp, Homo sapien
tctttgcactctaccaatccagatatattatat

SEQ ID NO: 79756 - DNA, 33 bp, Homo sapien
tctttgcactctaccactccagatatattatat

SEQ ID NO: 79757 - DNA, 33 bp, Homo sapien
aagtcatacaaataacaagttgagcccataatc

SEQ ID NO: 79758 - DNA, 33 bp, Homo sapien
aagtcatacaaataaccagttgagcccataatc

SEQ ID NO: 79759 - DNA, 33 bp, Homo sapien
ttgagatattggacaaacactctgtaattcttt

SEQ ID NO: 79760 - DNA, 33 bp, Homo sapien
ttgagatattggacaatcactctgtaattcttt

SEQ ID NO: 79761 - DNA, 33 bp, Homo sapien
gaggaaatatgcttacagggcagcacacttgga

SEQ ID NO: 79762 - DNA, 33 bp, Homo sapien
gaggaaatatgcttacggggcagcacacttgga

SEQ ID NO: 79763 - DNA, 33 bp, Homo sapien
ccagacttagtcaaaaattgctttcagtaagac

SEQ ID NO: 79764 - DNA, 33 bp, Homo sapien
ccagacttagtcaaaagttgctttcagtaagac

SEQ ID NO: 79765 - DNA, 33 bp, Homo sapien
gatgctgatatgacagaaggccctgaaagcaat

SEQ ID NO: 79766 - DNA, 33 bp, Homo sapien
gatgctgatatgacagcaggccctgaaagcaat

SEQ ID NO: 79767 - DNA, 33 bp, Homo sapien
tacattccatgtgtaaatgcaaacatacatatt

SEQ ID NO: 79768 - DNA, 33 bp, Homo sapien
tacattccatgtgtaattgcaaacatacatatt

SEQ ID NO: 79769 - DNA, 33 bp, Homo sapien
taagttatgggctgtcactcccagttcctttgc

SEQ ID NO: 79770 - DNA, 33 bp, Homo sapien
taagttatgggctgtcgctcccagttcctttgc

SEQ ID NO: 79771 - DNA, 33 bp, Homo sapien
agaagaaaagcatacaaaattattcgatcatag

SEQ ID NO: 79772 - DNA, 33 bp, Homo sapien
agaagaaaagcatacacaattattcgatcatag

SEQ ID NO: 79773 - DNA, 33 bp, Homo sapien
ccaacattaccatgaaacaaacttcccttccct

SEQ ID NO: 79774 - DNA, 33 bp, Homo sapien
ccaacattaccatgaagcaaacttcccttccct

SEQ ID NO: 79775 - DNA, 33 bp, Homo sapien
tttctatgagattccaatatactgccgagggga

SEQ ID NO: 79776 - DNA, 33 bp, Homo sapien
tttctatgagattccagtatactgccgagggga

SEQ ID NO: 79777 - DNA, 33 bp, Homo sapien
ccaaagcttaaccaaaatgtagcccaagagaag

SEQ ID NO: 79778 - DNA, 33 bp, Homo sapien
ccaaagcttaaccaaagtgtagcccaagagaag

SEQ ID NO: 79779 - DNA, 33 bp, Homo sapien
ggctttgattcagcaaccagttttcctgacttt

SEQ ID NO: 79780 - DNA, 33 bp, Homo sapien
ggctttgattcagcaagcagttttcctgacttt

SEQ ID NO: 79781 - DNA, 33 bp, Homo sapien
ctgtcttcctgcttgacgattttgcaataaagc

SEQ ID NO: 79782 - DNA, 33 bp, Homo sapien
ctgtcttcctgcttgatgattttgcaataaagc

SEQ ID NO: 79783 - DNA, 33 bp, Homo sapien
aagctttgacctctgacaatgtccgtaaccagc

SEQ ID NO: 79784 - DNA, 33 bp, Homo sapien
aagctttgacctctgataatgtccgtaaccagc

SEQ ID NO: 79785 - DNA, 33 bp, Homo sapien
taggtaggaaagatgaagatatcatgttcgaac

SEQ ID NO: 79786 - DNA, 33 bp, Homo sapien
taggtaggaaagatgaggatatcatgttcgaac

SEQ ID NO: 79787 - DNA, 33 bp, Homo sapien
ctaccttttgtctctacaagaaacagtcaaacc

SEQ ID NO: 79788 - DNA, 33 bp, Homo sapien
ctaccttttgtctctataagaaacagtcaaacc

SEQ ID NO: 79789 - DNA, 33 bp, Homo sapien
tcatctataagttttccagcttcatgtttaagc

SEQ ID NO: 79790 - DNA, 33 bp, Homo sapien
tcatctataagttttcgagcttcatgtttaagc

SEQ ID NO: 79791 - DNA, 33 bp, Homo sapien
aaagaactcagtagaacttactccaattgattt

SEQ ID NO: 79792 - DNA, 33 bp, Homo sapien
aaagaactcagtagaatttactccaattgattt

SEQ ID NO: 79793 - DNA, 33 bp, Homo sapien
ccataacttctattcaagagtggaatgggatcc

SEQ ID NO: 79794 - DNA, 33 bp, Homo sapien
ccataacttctattcatgagtggaatgggatcc

SEQ ID NO: 79795 - DNA, 33 bp, Homo sapien
catgcctgtgcatctaataagtgtgccacaaag

SEQ ID NO: 79796 - DNA, 33 bp, Homo sapien
catgcctgtgcatctagtaagtgtgccacaaag

SEQ ID NO: 79797 - DNA, 33 bp, Homo sapien
tatcagtgtactaatacgtgcacttagggaaaa

SEQ ID NO: 79798 - DNA, 33 bp, Homo sapien
tatcagtgtactaatatgtgcacttagggaaaa

SEQ ID NO: 79799 - DNA, 33 bp, Homo sapien
tagctacttctctgaccgaattccagaatgtga

SEQ ID NO: 79800 - DNA, 33 bp, Homo sapien
tagctacttctctgactgaattccagaatgtga

SEQ ID NO: 79801 - DNA, 33 bp, Homo sapien
ctgcccttgagataaacggtattgtataaatgc

SEQ ID NO: 79802 - DNA, 33 bp, Homo sapien
ctgcccttgagataaatggtattgtataaatgc

SEQ ID NO: 79803 - DNA, 33 bp, Homo sapien
aatgaattcttccataaatcttttcctcctgaa

SEQ ID NO: 79804 - DNA, 33 bp, Homo sapien
aatgaattcttccatagatcttttcctcctgaa

SEQ ID NO: 79805 - DNA, 33 bp, Homo sapien
ggcttcacaactaatcaagttcctgggctggaa

SEQ ID NO: 79806 - DNA, 33 bp, Homo sapien
ggcttcacaactaatcgagttcctgggctggaa

SEQ ID NO: 79807 - DNA, 33 bp, Homo sapien
gggtcagcggttcaaaatgccatattacttgta

SEQ ID NO: 79808 - DNA, 33 bp, Homo sapien
gggtcagcggttcaaattgccatattacttgta

SEQ ID NO: 79809 - DNA, 33 bp, Homo sapien
acacaatttagtcccaaagttcctaaacatgag

SEQ ID NO: 79810 - DNA, 33 bp, Homo sapien
acacaatttagtcccagagttcctaaacatgag

SEQ ID NO: 79811 - DNA, 33 bp, Homo sapien
gctccatatactgtgcaccgcttgctcctttta

SEQ ID NO: 79812 - DNA, 33 bp, Homo sapien
gctccatatactgtgcgccgcttgctcctttta

SEQ ID NO: 79813 - DNA, 33 bp, Homo sapien
gacttagaacataaggaaatgtggctgttgtca

SEQ ID NO: 79814 - DNA, 33 bp, Homo sapien
gacttagaacataagggaatgtggctgttgtca

SEQ ID NO: 79815 - DNA, 33 bp, Homo sapien
cctgggtgtaggttcaagtttcttggagggaat

SEQ ID NO: 79816 - DNA, 33 bp, Homo sapien
cctgggtgtaggttcaggtttcttggagggaat

SEQ ID NO: 79817 - DNA, 33 bp, Homo sapien
gttcattaccagaggaagtagcagaattggtct

SEQ ID NO: 79818 - DNA, 33 bp, Homo sapien
gttcattaccagaggaggtagcagaattggtct

SEQ ID NO: 79819 - DNA, 33 bp, Homo sapien
tcaacactgaatatggcccagatttcaaggtta

SEQ ID NO: 79820 - DNA, 33 bp, Homo sapien
tcaacactgaatatggtccagatttcaaggtta

SEQ ID NO: 79821 - DNA, 33 bp, Homo sapien
cacagagctggtgacacgcaatgagaatgagag

SEQ ID NO: 79822 - DNA, 33 bp, Homo sapien
cacagagctggtgacatgcaatgagaatgagag

SEQ ID NO: 79823 - DNA, 33 bp, Homo sapien
cccttcatgtctcagaccactctcattctcatt

SEQ ID NO: 79824 - DNA, 33 bp, Homo sapien
cccttcatgtctcagagcactctcattctcatt

SEQ ID NO: 79825 - DNA, 33 bp, Homo sapien
gcaacaacttcttagaacaccaaagacaaaatc

SEQ ID NO: 79826 - DNA, 33 bp, Homo sapien
gcaacaacttcttagagcaccaaagacaaaatc

SEQ ID NO: 79827 - DNA, 33 bp, Homo sapien
atactacacacttaccagaatggccaaaatcca

SEQ ID NO: 79828 - DNA, 33 bp, Homo sapien
atactacacacttacctgaatggccaaaatcca

SEQ ID NO: 79829 - DNA, 33 bp, Homo sapien
ttgcttatactgatcaataatttctgcaggaaa

SEQ ID NO: 79830 - DNA, 33 bp, Homo sapien
ttgcttatactgatcagtaatttctgcaggaaa

SEQ ID NO: 79831 - DNA, 33 bp, Homo sapien
ggtttcattatgggccactggaatcttataaaa

SEQ ID NO: 79832 - DNA, 33 bp, Homo sapien
ggtttcattatgggccgctggaatcttataaaa

SEQ ID NO: 79833 - DNA, 33 bp, Homo sapien
tttgttcttacttctcaagactgttctggctat

SEQ ID NO: 79834 - DNA, 33 bp, Homo sapien
tttgttcttacttctcgagactgttctggctat

SEQ ID NO: 79835 - DNA, 33 bp, Homo sapien
gttatatctttctggtaaattgattctcttgtc

SEQ ID NO: 79836 - DNA, 33 bp, Homo sapien
gttatatctttctggtgaattgattctcttgtc

SEQ ID NO: 79837 - DNA, 33 bp, Homo sapien
aggtatagaggaataaccagggcaaagtaacat

SEQ ID NO: 79838 - DNA, 33 bp, Homo sapien
aggtatagaggaataatcagggcaaagtaacat

SEQ ID NO: 79839 - DNA, 33 bp, Homo sapien
taaattctcttttctccctgtgcagcttctatc

SEQ ID NO: 79840 - DNA, 33 bp, Homo sapien
taaattctcttttctctctgtgcagcttctatc

SEQ ID NO: 79841 - DNA, 33 bp, Homo sapien
ggcatgcttgcctatagaagagaaaggtcaggg

SEQ ID NO: 79842 - DNA, 33 bp, Homo sapien
ggcatgcttgcctatataagagaaaggtcaggg

SEQ ID NO: 79843 - DNA, 33 bp, Homo sapien
agcctgtaatacaacactgctagtctgttgacc

SEQ ID NO: 79844 - DNA, 33 bp, Homo sapien
agcctgtaatacaacattgctagtctgttgacc

SEQ ID NO: 79845 - DNA, 33 bp, Homo sapien
ttatagagagctcctcaaatgacttgtgtatgt

SEQ ID NO: 79846 - DNA, 33 bp, Homo sapien
ttatagagagctcctcgaatgacttgtgtatgt

SEQ ID NO: 79847 - DNA, 33 bp, Homo sapien
gtgcatgaatgtaatacgtgttttattttatta

SEQ ID NO: 79848 - DNA, 33 bp, Homo sapien
gtgcatgaatgtaatatgtgttttattttatta

SEQ ID NO: 79849 - DNA, 33 bp, Homo sapien
tctcattcaactttcagaagctcactgtgaaat

SEQ ID NO: 79850 - DNA, 33 bp, Homo sapien
tctcattcaactttcataagctcactgtgaaat

SEQ ID NO: 79851 - DNA, 33 bp, Homo sapien
tcacaaagcagataaaatgcacgtgtaggtgat

SEQ ID NO: 79852 - DNA, 33 bp, Homo sapien
tcacaaagcagataaagtgcacgtgtaggtgat

SEQ ID NO: 79853 - DNA, 33 bp, Homo sapien
agagctgccttggagaaccacctaatcaggaac

SEQ ID NO: 79854 - DNA, 33 bp, Homo sapien
agagctgccttggagagccacctaatcaggaac

SEQ ID NO: 79855 - DNA, 33 bp, Homo sapien
gagcatataagctcaaatagtgataaaatgaat

SEQ ID NO: 79856 - DNA, 33 bp, Homo sapien
gagcatataagctcaagtagtgataaaatgaat

SEQ ID NO: 79857 - DNA, 33 bp, Homo sapien
atgttattgcaaatgacgggattgtcttttctt

SEQ ID NO: 79858 - DNA, 33 bp, Homo sapien
atgttattgcaaatgatgggattgtcttttctt

SEQ ID NO: 79859 - DNA, 33 bp, Homo sapien
aatttagaaagcagaaataaaacttgagcgttc

SEQ ID NO: 79860 - DNA, 33 bp, Homo sapien
aatttagaaagcagaagtaaaacttgagcgttc

SEQ ID NO: 79861 - DNA, 33 bp, Homo sapien
agaagaccaagtacacaaaatgcaatctgcact

SEQ ID NO: 79862 - DNA, 33 bp, Homo sapien
agaagaccaagtacacgaaatgcaatctgcact

SEQ ID NO: 79863 - DNA, 33 bp, Homo sapien
ctcctggatgtgtatgcagaaatgagtgcttcc

SEQ ID NO: 79864 - DNA, 33 bp, Homo sapien
ctcctggatgtgtatgtagaaatgagtgcttcc

SEQ ID NO: 79865 - DNA, 33 bp, Homo sapien
cttcagaacttctctcaccctcttttcagcctt

SEQ ID NO: 79866 - DNA, 33 bp, Homo sapien
cttcagaacttctctctccctcttttcagcctt

SEQ ID NO: 79867 - DNA, 33 bp, Homo sapien
actgtaatggtgaataaacgtcattagatattt

SEQ ID NO: 79868 - DNA, 33 bp, Homo sapien
actgtaatggtgaatacacgtcattagatattt

SEQ ID NO: 79869 - DNA, 33 bp, Homo sapien
cacactatgggttctggaagaggtaatttatca

SEQ ID NO: 79870 - DNA, 33 bp, Homo sapien
cacactatgggttctgtaagaggtaatttatca

SEQ ID NO: 79871 - DNA, 33 bp, Homo sapien
ctatattctctctcagcagatttaggttatgtg

SEQ ID NO: 79872 - DNA, 33 bp, Homo sapien
ctatattctctctcagtagatttaggttatgtg

SEQ ID NO: 79873 - DNA, 33 bp, Homo sapien
tagaactgtcattttacggaaaaggaaaaagga

SEQ ID NO: 79874 - DNA, 33 bp, Homo sapien
tagaactgtcattttatggaaaaggaaaaagga

SEQ ID NO: 79875 - DNA, 33 bp, Homo sapien
acctgcataatatgccaactctataaagttcaa

SEQ ID NO: 79876 - DNA, 33 bp, Homo sapien
acctgcataatatgccgactctataaagttcaa

SEQ ID NO: 79877 - DNA, 33 bp, Homo sapien
tattcaggctatgaaccggatgcatattttatc

SEQ ID NO: 79878 - DNA, 33 bp, Homo sapien
tattcaggctatgaactggatgcatattttatc

SEQ ID NO: 79879 - DNA, 33 bp, Homo sapien
actttcaactaattaacggacatcactacctga

SEQ ID NO: 79880 - DNA, 33 bp, Homo sapien
actttcaactaattaatggacatcactacctga

SEQ ID NO: 79881 - DNA, 33 bp, Homo sapien
ccaacagagctatgacggagagttgacaaagat

SEQ ID NO: 79882 - DNA, 33 bp, Homo sapien
ccaacagagctatgactgagagttgacaaagat

SEQ ID NO: 79883 - DNA, 33 bp, Homo sapien
caattctagagcaataagagaagtcacactcaa

SEQ ID NO: 79884 - DNA, 33 bp, Homo sapien
caattctagagcaataggagaagtcacactcaa

SEQ ID NO: 79885 - DNA, 33 bp, Homo sapien
ttgtgagtaccatgaacgtcagtcaggttttaa

SEQ ID NO: 79886 - DNA, 33 bp, Homo sapien
ttgtgagtaccatgaatgtcagtcaggttttaa

SEQ ID NO: 79887 - DNA, 33 bp, Homo sapien
cccacatttgcacttaaagttggctcttctcag

SEQ ID NO: 79888 - DNA, 33 bp, Homo sapien
cccacatttgcacttatagttggctcttctcag

SEQ ID NO: 79889 - DNA, 33 bp, Homo sapien
tggcaggttctacgtacggctgtgtgcattttg

SEQ ID NO: 79890 - DNA, 33 bp, Homo sapien
tggcaggttctacgtatggctgtgtgcattttg

SEQ ID NO: 79891 - DNA, 33 bp, Homo sapien
ggagaaagaaatacagaattaggtcttctaagc

SEQ ID NO: 79892 - DNA, 33 bp, Homo sapien
ggagaaagaaatacaggattaggtcttctaagc

SEQ ID NO: 79893 - DNA, 33 bp, Homo sapien
acctcaaagaaataaacgctgccaataactgga

SEQ ID NO: 79894 - DNA, 33 bp, Homo sapien
acctcaaagaaataaatgctgccaataactgga

SEQ ID NO: 79895 - DNA, 33 bp, Homo sapien
gtgtccagattcctaacacctcaaaactgtgaa

SEQ ID NO: 79896 - DNA, 33 bp, Homo sapien
gtgtccagattcctaatacctcaaaactgtgaa

SEQ ID NO: 79897 - DNA, 33 bp, Homo sapien
gcccttgaaggatgagaaggactttggtgttgg

SEQ ID NO: 79898 - DNA, 33 bp, Homo sapien
gcccttgaaggatgaggaggactttggtgttgg

SEQ ID NO: 79899 - DNA, 33 bp, Homo sapien
tattttttcagctttacggatgtgtaattgaca

SEQ ID NO: 79900 - DNA, 33 bp, Homo sapien
tattttttcagctttatggatgtgtaattgaca

SEQ ID NO: 79901 - DNA, 33 bp, Homo sapien
tggctttctggagtaccacctgcaagatgctgg

SEQ ID NO: 79902 - DNA, 33 bp, Homo sapien
tggctttctggagtactacctgcaagatgctgg

SEQ ID NO: 79903 - DNA, 33 bp, Homo sapien
aatacttagctcatcaaatcctgcaaactaact

SEQ ID NO: 79904 - DNA, 33 bp, Homo sapien
aatacttagctcatcagatcctgcaaactaact

SEQ ID NO: 79905 - DNA, 33 bp, Homo sapien
tctgatgacttcacgcagaggcttttcttggac

SEQ ID NO: 79906 - DNA, 33 bp, Homo sapien
tctgatgacttcacgcggaggcttttcttggac

SEQ ID NO: 79907 - DNA, 33 bp, Homo sapien
tagtccacaggctcaccgacttttgaaggctgc

SEQ ID NO: 79908 - DNA, 33 bp, Homo sapien
tagtccacaggctcactgacttttgaaggctgc

SEQ ID NO: 79909 - DNA, 33 bp, Homo sapien
catagattcaaccaatcaagaattgaaaatatt

SEQ ID NO: 79910 - DNA, 33 bp, Homo sapien
catagattcaaccaatgaagaattgaaaatatt

SEQ ID NO: 79911 - DNA, 33 bp, Homo sapien
tcagtacagacacaatgaaccgttttttcctga

SEQ ID NO: 79912 - DNA, 33 bp, Homo sapien
tcagtacagacacaattaaccgttttttcctga

SEQ ID NO: 79913 - DNA, 33 bp, Homo sapien
ccatgctacttatctacgggaatggagcatcct

SEQ ID NO: 79914 - DNA, 33 bp, Homo sapien
ccatgctacttatctatgggaatggagcatcct

SEQ ID NO: 79915 - DNA, 33 bp, Homo sapien
cacatagggtgtgtccaagggtattccactcta

SEQ ID NO: 79916 - DNA, 33 bp, Homo sapien
cacatagggtgtgtccgagggtattccactcta

SEQ ID NO: 79917 - DNA, 33 bp, Homo sapien
actcgcgttgcttccacatcctggctcttctga

SEQ ID NO: 79918 - DNA, 33 bp, Homo sapien
actcgcgttgcttccatatcctggctcttctga

SEQ ID NO: 79919 - DNA, 33 bp, Homo sapien
gcagagaaataggataagagtggtgctttgggg

SEQ ID NO: 79920 - DNA, 33 bp, Homo sapien
gcagagaaataggatacgagtggtgctttgggg

SEQ ID NO: 79921 - DNA, 33 bp, Homo sapien
ctgccttccctgaattcaataccagcaatcatg

SEQ ID NO: 79922 - DNA, 33 bp, Homo sapien
ctgccttccctgaatttaataccagcaatcatg

SEQ ID NO: 79923 - DNA, 33 bp, Homo sapien
atgtaattaaaattcaagtctcagaaataacac

SEQ ID NO: 79924 - DNA, 33 bp, Homo sapien
atgtaattaaaattcaggtctcagaaataacac

SEQ ID NO: 79925 - DNA, 33 bp, Homo sapien
gtccttaagctctttcccaagtttcaacagcct

SEQ ID NO: 79926 - DNA, 33 bp, Homo sapien
gtccttaagctctttctcaagtttcaacagcct

SEQ ID NO: 79927 - DNA, 33 bp, Homo sapien
gggcatttctgaaaagcaagtccagggatgata

SEQ ID NO: 79928 - DNA, 33 bp, Homo sapien
gggcatttctgaaaaggaagtccagggatgata

SEQ ID NO: 79929 - DNA, 33 bp, Homo sapien
gtattgagccttgccacgttggctattcttatt

SEQ ID NO: 79930 - DNA, 33 bp, Homo sapien
gtattgagccttgccatgttggctattcttatt

SEQ ID NO: 79931 - DNA, 33 bp, Homo sapien
aaactggtcagaggcacgattggcatagcatgg

SEQ ID NO: 79932 - DNA, 33 bp, Homo sapien
aaactggtcagaggcaggattggcatagcatgg

SEQ ID NO: 79933 - DNA, 33 bp, Homo sapien
actcaaacaaaacaaaccattgatgagggtatg

SEQ ID NO: 79934 - DNA, 33 bp, Homo sapien
actcaaacaaaacaaagcattgatgagggtatg

SEQ ID NO: 79935 - DNA, 33 bp, Homo sapien
tcagcgtgacttaccaccatgatgtggaccctg

SEQ ID NO: 79936 - DNA, 33 bp, Homo sapien
tcagcgtgacttaccagcatgatgtggaccctg

SEQ ID NO: 79937 - DNA, 33 bp, Homo sapien
aaagcaggccaacctgcagactgaagtgtgttc

SEQ ID NO: 79938 - DNA, 33 bp, Homo sapien
aaagcaggccaacctgtagactgaagtgtgttc

SEQ ID NO: 79939 - DNA, 33 bp, Homo sapien
cctaatggtagagctacgtagaccacacagtgg

SEQ ID NO: 79940 - DNA, 33 bp, Homo sapien
cctaatggtagagctatgtagaccacacagtgg

SEQ ID NO: 79941 - DNA, 33 bp, Homo sapien
agtcaatgtgcacaaacgagtagcactgctaaa

SEQ ID NO: 79942 - DNA, 33 bp, Homo sapien
agtcaatgtgcacaaatgagtagcactgctaaa

SEQ ID NO: 79943 - DNA, 33 bp, Homo sapien
aaaaccttaaaatgaacgtggcacaataatagg

SEQ ID NO: 79944 - DNA, 33 bp, Homo sapien
aaaaccttaaaatgaatgtggcacaataatagg

SEQ ID NO: 79945 - DNA, 33 bp, Homo sapien
ggaaaacactttgcagcatattatccaggagaa

SEQ ID NO: 79946 - DNA, 33 bp, Homo sapien
ggaaaacactttgcaggatattatccaggagaa

SEQ ID NO: 79947 - DNA, 33 bp, Homo sapien
aattacgagcattgaacttacaaacaagcctaa

SEQ ID NO: 79948 - DNA, 33 bp, Homo sapien
aattacgagcattgaagttacaaacaagcctaa

SEQ ID NO: 79949 - DNA, 33 bp, Homo sapien
agatgtttcaagaaaaagcattatagccatgcc

SEQ ID NO: 79950 - DNA, 33 bp, Homo sapien
agatgtttcaagaaaaggcattatagccatgcc

SEQ ID NO: 79951 - DNA, 33 bp, Homo sapien
atgtagttgtggttaaaggcctatggaactgac

SEQ ID NO: 79952 - DNA, 33 bp, Homo sapien
atgtagttgtggttaatggcctatggaactgac

SEQ ID NO: 79953 - DNA, 33 bp, Homo sapien
gttaagggatttgtgaatcaagactaatctgtt

SEQ ID NO: 79954 - DNA, 33 bp, Homo sapien
gttaagggatttgtgagtcaagactaatctgtt

SEQ ID NO: 79955 - DNA, 33 bp, Homo sapien
gaacacaagtggagaacagcaaaaacagattag

SEQ ID NO: 79956 - DNA, 33 bp, Homo sapien
gaacacaagtggagaatagcaaaaacagattag

SEQ ID NO: 79957 - DNA, 33 bp, Homo sapien
attccagtgttttccaagttctgggaggcaaag

SEQ ID NO: 79958 - DNA, 33 bp, Homo sapien
attccagtgttttccaggttctgggaggcaaag

SEQ ID NO: 79959 - DNA, 33 bp, Homo sapien
tctaatcggtattcccactaagcttcacccaca

SEQ ID NO: 79960 - DNA, 33 bp, Homo sapien
tctaatcggtattcccgctaagcttcacccaca

SEQ ID NO: 79961 - DNA, 33 bp, Homo sapien
attaagaccataaggaagagtaagatctagaaa

SEQ ID NO: 79962 - DNA, 33 bp, Homo sapien
attaagaccataaggaggagtaagatctagaaa

SEQ ID NO: 79963 - DNA, 33 bp, Homo sapien
agatctagaaaggtcacgaactgaatatattga

SEQ ID NO: 79964 - DNA, 33 bp, Homo sapien
agatctagaaaggtcatgaactgaatatattga

SEQ ID NO: 79965 - DNA, 33 bp, Homo sapien
tcctacatcatagcaccaaggaactactataat

SEQ ID NO: 79966 - DNA, 33 bp, Homo sapien
tcctacatcatagcactaaggaactactataat

SEQ ID NO: 79967 - DNA, 33 bp, Homo sapien
atgtctggagagcaagaactttccatcacattt

SEQ ID NO: 79968 - DNA, 33 bp, Homo sapien
atgtctggagagcaagcactttccatcacattt

SEQ ID NO: 79969 - DNA, 33 bp, Homo sapien
gtgtccccgattttccaacagagtgaaagaaat

SEQ ID NO: 79970 - DNA, 33 bp, Homo sapien
gtgtccccgattttccgacagagtgaaagaaat

SEQ ID NO: 79971 - DNA, 33 bp, Homo sapien
tgattaaaattgcccacagttaaaatgcctgat

SEQ ID NO: 79972 - DNA, 33 bp, Homo sapien
tgattaaaattgcccatagttaaaatgcctgat

SEQ ID NO: 79973 - DNA, 33 bp, Homo sapien
atatgtcagagaagtacatgaaaatagcaagat

SEQ ID NO: 79974 - DNA, 33 bp, Homo sapien
atatgtcagagaagtatatgaaaatagcaagat

SEQ ID NO: 79975 - DNA, 33 bp, Homo sapien
tacagataggtggaaaagctatacagtgaacag

SEQ ID NO: 79976 - DNA, 33 bp, Homo sapien
tacagataggtggaaaggctatacagtgaacag

SEQ ID NO: 79977 - DNA, 33 bp, Homo sapien
ttggctttgaatgaaaggaaagagagagagaca

SEQ ID NO: 79978 - DNA, 33 bp, Homo sapien
ttggctttgaatgaaatgaaagagagagagaca

SEQ ID NO: 79979 - DNA, 33 bp, Homo sapien
accacaatcaaggtacgaaacatgtccaccacc

SEQ ID NO: 79980 - DNA, 33 bp, Homo sapien
accacaatcaaggtactaaacatgtccaccacc

SEQ ID NO: 79981 - DNA, 33 bp, Homo sapien
aggtagccaagagagcacaagaaagaaggtgtc

SEQ ID NO: 79982 - DNA, 33 bp, Homo sapien
aggtagccaagagagcccaagaaagaaggtgtc

SEQ ID NO: 79983 - DNA, 33 bp, Homo sapien
gattttttttctttcacgagtttctgattcact

SEQ ID NO: 79984 - DNA, 33 bp, Homo sapien
gattttttttctttcatgagtttctgattcact

SEQ ID NO: 79985 - DNA, 33 bp, Homo sapien
ctgtctattggacacccctctatccttatactt

SEQ ID NO: 79986 - DNA, 33 bp, Homo sapien
ctgtctattggacacctctctatccttatactt

SEQ ID NO: 79987 - DNA, 33 bp, Homo sapien
tggaacctcagggtgacaccagttttgaagttt

SEQ ID NO: 79988 - DNA, 33 bp, Homo sapien
tggaacctcagggtgataccagttttgaagttt

SEQ ID NO: 79989 - DNA, 33 bp, Homo sapien
gttttgaagtttttaccgcactgtcccgctgtg

SEQ ID NO: 79990 - DNA, 33 bp, Homo sapien
gttttgaagtttttactgcactgtcccgctgtg

SEQ ID NO: 79991 - DNA, 33 bp, Homo sapien
gcaaacctctcatccacaagatctcagtttttt

SEQ ID NO: 79992 - DNA, 33 bp, Homo sapien
gcaaacctctcatccataagatctcagtttttt

SEQ ID NO: 79993 - DNA, 33 bp, Homo sapien
ttctcttaaggcacgacgctacgtttatatgct

SEQ ID NO: 79994 - DNA, 33 bp, Homo sapien
ttctcttaaggcacgatgctacgtttatatgct

SEQ ID NO: 79995 - DNA, 33 bp, Homo sapien
cagaatgtgagttttcaaagacaccaggaaaac

SEQ ID NO: 79996 - DNA, 33 bp, Homo sapien
cagaatgtgagttttcgaagacaccaggaaaac

SEQ ID NO: 79997 - DNA, 33 bp, Homo sapien
ggtgtattgactcttaacttgtttcacagccat

SEQ ID NO: 79998 - DNA, 33 bp, Homo sapien
ggtgtattgactcttagcttgtttcacagccat

SEQ ID NO: 79999 - DNA, 33 bp, Homo sapien
tcatgacctaggtcccactctgcccatgtctgt

SEQ ID NO: 80000 - DNA, 33 bp, Homo sapien
tcatgacctaggtcccgctctgcccatgtctgt

SEQ ID NO: 80001 - DNA, 33 bp, Homo sapien
atagtggatctcaaaacgtttggtcttagaacc

SEQ ID NO: 80002 - DNA, 33 bp, Homo sapien
atagtggatctcaaaatgtttggtcttagaacc

SEQ ID NO: 80003 - DNA, 33 bp, Homo sapien
gatgtcagcttgtcaaattccaatccatatgtt

SEQ ID NO: 80004 - DNA, 33 bp, Homo sapien
gatgtcagcttgtcaagttccaatccatatgtt

SEQ ID NO: 80005 - DNA, 33 bp, Homo sapien
atctggttaggagagaccatgtcgctaaattta

SEQ ID NO: 80006 - DNA, 33 bp, Homo sapien
atctggttaggagagatcatgtcgctaaattta

SEQ ID NO: 80007 - DNA, 33 bp, Homo sapien
ttaaaaatattcagtcccatagcaaaatatcat

SEQ ID NO: 80008 - DNA, 33 bp, Homo sapien
ttaaaaatattcagtcgcatagcaaaatatcat

SEQ ID NO: 80009 - DNA, 33 bp, Homo sapien
tgggcaggaaattttcaaggctatgagacctga

SEQ ID NO: 80010 - DNA, 33 bp, Homo sapien
tgggcaggaaattttcgaggctatgagacctga

SEQ ID NO: 80011 - DNA, 33 bp, Homo sapien
ttagagaaatgcaagacgtactggaaagtctca

SEQ ID NO: 80012 - DNA, 33 bp, Homo sapien
ttagagaaatgcaagatgtactggaaagtctca

SEQ ID NO: 80013 - DNA, 33 bp, Homo sapien; identical to SEQ ID NO: 80011

SEQ ID NO: 80014 - DNA, 33 bp, Homo sapien; identical to SEQ ID NO: 80012

SEQ ID NO: 80015 - DNA, 33 bp, Homo sapien
gcagctttactgtggacaccccaagacacttct

SEQ ID NO: 80016 - DNA, 33 bp, Homo sapien
gcagctttactgtggataccccaagacacttct

SEQ ID NO: 80017 - DNA, 33 bp, Homo sapien
aaccagttgcacccggaaagcaaatcagcaagt

SEQ ID NO: 80018 - DNA, 33 bp, Homo sapien
aaccagttgcacccgggaagcaaatcagcaagt

SEQ ID NO: 80019 - DNA, 33 bp, Homo sapien
aatcagcaagtggaaaataacccaaggacacgt

SEQ ID NO: 80020 - DNA, 33 bp, Homo sapien
aatcagcaagtggaaagtaacccaaggacacgt

SEQ ID NO: 80021 - DNA, 33 bp, Homo sapien
ctttgagccacagaacaatctgagtacggcatt

SEQ ID NO: 80022 - DNA, 33 bp, Homo sapien
ctttgagccacagaaccatctgagtacggcatt

SEQ ID NO: 80023 - DNA, 33 bp, Homo sapien
agtcaaaggggacacaatgaaaaggagcttgat

SEQ ID NO: 80024 - DNA, 33 bp, Homo sapien
agtcaaaggggacacagtgaaaaggagcttgat

SEQ ID NO: 80025 - DNA, 33 bp, Homo sapien
acagacacatcaaccaatggaacaggatataaa

SEQ ID NO: 80026 - DNA, 33 bp, Homo sapien
acagacacatcaaccagtggaacaggatataaa

SEQ ID NO: 80027 - DNA, 33 bp, Homo sapien
gacttggtggccactgaaggttggctgcttctt

SEQ ID NO: 80028 - DNA, 33 bp, Homo sapien
gacttggtggccactgcaggttggctgcttctt

SEQ ID NO: 80029 - DNA, 33 bp, Homo sapien
ttgccctgagggtcacaatttcaatacagcccc

SEQ ID NO: 80030 - DNA, 33 bp, Homo sapien
ttgccctgagggtcacgatttcaatacagcccc

SEQ ID NO: 80031 - DNA, 33 bp, Homo sapien
tgtctcaaagttaaaacttcattgtattatgtc

SEQ ID NO: 80032 - DNA, 33 bp, Homo sapien
tgtctcaaagttaaaatttcattgtattatgtc

SEQ ID NO: 80033 - DNA, 33 bp, Homo sapien
ttagatgaaaatgagcagaacagagcaaaatta

SEQ ID NO: 80034 - DNA, 33 bp, Homo sapien
ttagatgaaaatgagcggaacagagcaaaatta

SEQ ID NO: 80035 - DNA, 33 bp, Homo sapien
ttgtttttaaacacaacttcacaactctcatgt

SEQ ID NO: 80036 - DNA, 33 bp, Homo sapien
ttgtttttaaacacaatttcacaactctcatgt

SEQ ID NO: 80037 - DNA, 33 bp, Homo sapien
tgagggaaaagttctacctgccttgtaccgcaa

SEQ ID NO: 80038 - DNA, 33 bp, Homo sapien
tgagggaaaagttctatctgccttgtaccgcaa

SEQ ID NO: 80039 - DNA, 33 bp, Homo sapien
catgctgtgtaaacgcaaggaacaagtactgtg

SEQ ID NO: 80040 - DNA, 33 bp, Homo sapien
catgctgtgtaaacgcgaggaacaagtactgtg

SEQ ID NO: 80041 - DNA, 33 bp, Homo sapien
tcagatactgttgtcaagaattagatgtgaatg

SEQ ID NO: 80042 - DNA, 33 bp, Homo sapien
tcagatactgttgtcaggaattagatgtgaatg

SEQ ID NO: 80043 - DNA, 33 bp, Homo sapien
aagtatgcatggtagaagatgtaggctctcaga

SEQ ID NO: 80044 - DNA, 33 bp, Homo sapien
aagtatgcatggtagaggatgtaggctctcaga

SEQ ID NO: 80045 - DNA, 33 bp, Homo sapien
aatttcacaagttcctaaagctcactgagtcct

SEQ ID NO: 80046 - DNA, 33 bp, Homo sapien
aatttcacaagttccttaagctcactgagtcct

SEQ ID NO: 80047 - DNA, 33 bp, Homo sapien
cacctgcaaaatctaccccctctggatttgctg

SEQ ID NO: 80048 - DNA, 33 bp, Homo sapien
cacctgcaaaatctactccctctggatttgctg

SEQ ID NO: 80049 - DNA, 33 bp, Homo sapien
atctcccattaggccccgcatcgaataatgggg

SEQ ID NO: 80050 - DNA, 33 bp, Homo sapien
atctcccattaggccctgcatcgaataatgggg

SEQ ID NO: 80051 - DNA, 33 bp, Homo sapien
agaattctgcatttcaaggactctatttctgtc

SEQ ID NO: 80052 - DNA, 33 bp, Homo sapien
agaattctgcatttcagggactctatttctgtc

SEQ ID NO: 80053 - DNA, 33 bp, Homo sapien
atcctatctgaaaccaaactgatagttccagta

SEQ ID NO: 80054 - DNA, 33 bp, Homo sapien
atcctatctgaaaccatactgatagttccagta

SEQ ID NO: 80055 - DNA, 33 bp, Homo sapien
ggacaatgttggaagacgtaaaagagaaagcaa

SEQ ID NO: 80056 - DNA, 33 bp, Homo sapien
ggacaatgttggaagatgtaaaagagaaagcaa

SEQ ID NO: 80057 - DNA, 33 bp, Homo sapien
atttctggaacatctacagtctgatttctgcga

SEQ ID NO: 80058 - DNA, 33 bp, Homo sapien
atttctggaacatctatagtctgatttctgcga

SEQ ID NO: 80059 - DNA, 33 bp, Homo sapien
cctatccctgacatccaactccaggacatgggg

SEQ ID NO: 80060 - DNA, 33 bp, Homo sapien
cctatccctgacatccgactccaggacatgggg

SEQ ID NO: 80061 - DNA, 33 bp, Homo sapien
gcttaagcaaaaaggcaatttactagaaagata

SEQ ID NO: 80062 - DNA, 33 bp, Homo sapien
gcttaagcaaaaaggcgatttactagaaagata

SEQ ID NO: 80063 - DNA, 33 bp, Homo sapien
ggctcttcactggagacgtgaaaaagccaaagg

SEQ ID NO: 80064 - DNA, 33 bp, Homo sapien
ggctcttcactggagatgtgaaaaagccaaagg

SEQ ID NO: 80065 - DNA, 33 bp, Homo sapien
ttctggaaggcaagatgaccctaattagcgtaa

SEQ ID NO: 80066 - DNA, 33 bp, Homo sapien
ttctggaaggcaagattaccctaattagcgtaa

SEQ ID NO: 80067 - DNA, 33 bp, Homo sapien
tgccctttttgggaaccggataatgagtcttag

SEQ ID NO: 80068 - DNA, 33 bp, Homo sapien
tgccctttttgggaactggataatgagtcttag

SEQ ID NO: 80069 - DNA, 33 bp, Homo sapien
agggcaagaatgcttaaggatggggtcaactcc

SEQ ID NO: 80070 - DNA, 33 bp, Homo sapien
agggcaagaatgcttatggatggggtcaactcc

SEQ ID NO: 80071 - DNA, 33 bp, Homo sapien
catttctcaaaaaaaaactgtctttattgaggt

SEQ ID NO: 80072 - DNA, 33 bp, Homo sapien
catttctcaaaaaaaacctgtctttattgaggt

SEQ ID NO: 80073 - DNA, 33 bp, Homo sapien
tttaaacataaatcagaccatgttattttcttg

SEQ ID NO: 80074 - DNA, 33 bp, Homo sapien
tttaaacataaatcaggccatgttattttcttg

SEQ ID NO: 80075 - DNA, 33 bp, Homo sapien
aatggtgcagtttatacgtgggatgcattcttg

SEQ ID NO: 80076 - DNA, 33 bp, Homo sapien
aatggtgcagtttatatgtgggatgcattcttg

SEQ ID NO: 80077 - DNA, 33 bp, Homo sapien
gtttggctccgctactaacatctgtttgaactt

SEQ ID NO: 80078 - DNA, 33 bp, Homo sapien
gtttggctccgctactgacatctgtttgaactt

SEQ ID NO: 80079 - DNA, 33 bp, Homo sapien
attttggctatgatacaaatagtgttaactcgt

SEQ ID NO: 80080 - DNA, 33 bp, Homo sapien
attttggctatgatacgaatagtgttaactcgt

SEQ ID NO: 80081 - DNA, 33 bp, Homo sapien
aatggtatcttttctcaatggcattattcttat

SEQ ID NO: 80082 - DNA, 33 bp, Homo sapien
aatggtatcttttctccatggcattattcttat

SEQ ID NO: 80083 - DNA, 33 bp, Homo sapien
ctcattgactcaaggaatactggagtttggagg

SEQ ID NO: 80084 - DNA, 33 bp, Homo sapien
ctcattgactcaaggattactggagtttggagg

SEQ ID NO: 80085 - DNA, 33 bp, Homo sapien
tgtgcaaatctaaaaagcttccaaatggggttc

SEQ ID NO: 80086 - DNA, 33 bp, Homo sapien
tgtgcaaatctaaaaatcttccaaatggggttc

SEQ ID NO: 80087 - DNA, 33 bp, Homo sapien
gagccctagtctcaacagtgattagacctcacc

SEQ ID NO: 80088 - DNA, 33 bp, Homo sapien
gagccctagtctcaacggtgattagacctcacc

SEQ ID NO: 80089 - DNA, 33 bp, Homo sapien
ttatgaatcattcaaaatcaacttcagctgtct

SEQ ID NO: 80090 - DNA, 33 bp, Homo sapien
ttatgaatcattcaaagtcaacttcagctgtct

SEQ ID NO: 80091 - DNA, 33 bp, Homo sapien
gcagccaccactgctccctatgaatccatatgc

SEQ ID NO: 80092 - DNA, 33 bp, Homo sapien
gcagccaccactgctcgctatgaatccatatgc

SEQ ID NO: 80093 - DNA, 33 bp, Homo sapien
cttttcctggctcgcacggataggaattttgga

SEQ ID NO: 80094 - DNA, 33 bp, Homo sapien
cttttcctggctcgcatggataggaattttgga

SEQ ID NO: 80095 - DNA, 33 bp, Homo sapien
aaggaatcccaggccactcttgattggaagaga

SEQ ID NO: 80096 - DNA, 33 bp, Homo sapien
aaggaatcccaggccattcttgattggaagaga

SEQ ID NO: 80097 - DNA, 33 bp, Homo sapien
atttatgtgattaaaaaaagtgaatgaagggca

SEQ ID NO: 80098 - DNA, 33 bp, Homo sapien
atttatgtgattaaaacaagtgaatgaagggca

SEQ ID NO: 80099 - DNA, 33 bp, Homo sapien
aatgggagaataagataaatctaccctaaggca

SEQ ID NO: 80100 - DNA, 33 bp, Homo sapien
aatgggagaataagatgaatctaccctaaggca

SEQ ID NO: 80101 - DNA, 33 bp, Homo sapien
ggatcccatgtggaataaaccatgttaccagga

SEQ ID NO: 80102 - DNA, 33 bp, Homo sapien
ggatcccatgtggaatgaaccatgttaccagga

SEQ ID NO: 80103 - DNA, 33 bp, Homo sapien
gaaagtgttatcaaacagccaagaatagagatg

SEQ ID NO: 80104 - DNA, 33 bp, Homo sapien
gaaagtgttatcaaacggccaagaatagagatg

SEQ ID NO: 80105 - DNA, 33 bp, Homo sapien
gaaatgcctaattcaccattttgcagatggcag

SEQ ID NO: 80106 - DNA, 33 bp, Homo sapien
gaaatgcctaattcactattttgcagatggcag

SEQ ID NO: 80107 - DNA, 33 bp, Homo sapien
aaaaagcagtctctcaaacaaattgtattagga

SEQ ID NO: 80108 - DNA, 33 bp, Homo sapien
aaaaagcagtctctcagacaaattgtattagga

SEQ ID NO: 80109 - DNA, 33 bp, Homo sapien
tgatagggagaccgacagagacaggtgaaagca

SEQ ID NO: 80110 - DNA, 33 bp, Homo sapien
tgatagggagaccgacggagacaggtgaaagca

SEQ ID NO: 80111 - DNA, 33 bp, Homo sapien
ttgatgataagaatgacattttccttctgctat

SEQ ID NO: 80112 - DNA, 33 bp, Homo sapien
ttgatgataagaatgatattttccttctgctat

SEQ ID NO: 80113 - DNA, 33 bp, Homo sapien
tttgaggcgcagagaaaaccttgcctggtaatt

SEQ ID NO: 80114 - DNA, 33 bp, Homo sapien
tttgaggcgcagagaagaccttgcctggtaatt

SEQ ID NO: 80115 - DNA, 33 bp, Homo sapien
tacatggtatattttgcagcagcataagacagt

SEQ ID NO: 80116 - DNA, 33 bp, Homo sapien
tacatggtatattttggagcagcataagacagt

SEQ ID NO: 80117 - DNA, 33 bp, Homo sapien
agtcaccgctaacatgaattgagtacatcctct

SEQ ID NO: 80118 - DNA, 33 bp, Homo sapien
agtcaccgctaacatggattgagtacatcctct

SEQ ID NO: 80119 - DNA, 33 bp, Homo sapien
ctctgctactcactcgaccaaggcaatcctgtt

SEQ ID NO: 80120 - DNA, 33 bp, Homo sapien
ctctgctactcactcgtccaaggcaatcctgtt

SEQ ID NO: 80121 - DNA, 33 bp, Homo sapien
ctataggctttattcaaatctcccattttccac

SEQ ID NO: 80122 - DNA, 33 bp, Homo sapien
ctataggctttattcagatctcccattttccac

SEQ ID NO: 80123 - DNA, 33 bp, Homo sapien
aaacacgactgttccacgggataatcttcttct

SEQ ID NO: 80124 - DNA, 33 bp, Homo sapien
aaacacgactgttccatgggataatcttcttct

SEQ ID NO: 80125 - DNA, 33 bp, Homo sapien
cttggttatctgcttcaaccaaattagtacctg

SEQ ID NO: 80126 - DNA, 33 bp, Homo sapien
cttggttatctgcttcgaccaaattagtacctg

SEQ ID NO: 80127 - DNA, 33 bp, Homo sapien
ctgaaattgagacacaccttagaatccagagta

SEQ ID NO: 80128 - DNA, 33 bp, Homo sapien
ctgaaattgagacacatcttagaatccagagta

SEQ ID NO: 80129 - DNA, 33 bp, Homo sapien
aaagtaaatagcatgaaataaaacaggggagta

SEQ ID NO: 80130 - DNA, 33 bp, Homo sapien
aaagtaaatagcatgagataaaacaggggagta

SEQ ID NO: 80131 - DNA, 33 bp, Homo sapien
tttctgtggatatttacactggatgttttctcg

SEQ ID NO: 80132 - DNA, 33 bp, Homo sapien
tttctgtggatatttatactggatgttttctcg

SEQ ID NO: 80133 - DNA, 33 bp, Homo sapien
ctccaattttgctacaacctcaccaatgctcat

SEQ ID NO: 80134 - DNA, 33 bp, Homo sapien
ctccaattttgctacatcctcaccaatgctcat

SEQ ID NO: 80135 - DNA, 33 bp, Homo sapien
tcctcgcttggtctccagacagcatcctctcca

SEQ ID NO: 80136 - DNA, 33 bp, Homo sapien
tcctcgcttggtctccggacagcatcctctcca

SEQ ID NO: 80137 - DNA, 33 bp, Homo sapien
tagcctggattagttacactgattgagttcaac

SEQ ID NO: 80138 - DNA, 33 bp, Homo sapien
tagcctggattagttagactgattgagttcaac

SEQ ID NO: 80139 - DNA, 33 bp, Homo sapien
actatgaatgagctaaatagtgtaagtattcag

SEQ ID NO: 80140 - DNA, 33 bp, Homo sapien
actatgaatgagctaagtagtgtaagtattcag

SEQ ID NO: 80141 - DNA, 33 bp, Homo sapien
gcagttctttggtacaaaacacaccagatattc

SEQ ID NO: 80142 - DNA, 33 bp, Homo sapien
gcagttctttggtacacaacacaccagatattc

SEQ ID NO: 80143 - DNA, 33 bp, Homo sapien
aattccacttccaagagaattgaaagcagggac

SEQ ID NO: 80144 - DNA, 33 bp, Homo sapien
aattccacttccaagataattgaaagcagggac

SEQ ID NO: 80145 - DNA, 33 bp, Homo sapien
gaggaatatctatatacgcgctaaaaatccttt

SEQ ID NO: 80146 - DNA, 33 bp, Homo sapien
gaggaatatctatatatgcgctaaaaatccttt

SEQ ID NO: 80147 - DNA, 33 bp, Homo sapien
tatagtaaccaacacacggaaaccactagaatg

SEQ ID NO: 80148 - DNA, 33 bp, Homo sapien
tatagtaaccaacacatggaaaccactagaatg

SEQ ID NO: 80149 - DNA, 33 bp, Homo sapien
atgtaggcattggtaccaaacttcataagcaca

SEQ ID NO: 80150 - DNA, 33 bp, Homo sapien
atgtaggcattggtactaaacttcataagcaca

SEQ ID NO: 80151 - DNA, 33 bp, Homo sapien
tgagtgttccctaaaacgtgaccagaaatgaga

SEQ ID NO: 80152 - DNA, 33 bp, Homo sapien
tgagtgttccctaaaatgtgaccagaaatgaga

SEQ ID NO: 80153 - DNA, 33 bp, Homo sapien
tttcaaaagacacaaaatccgcgtaatatcctt

SEQ ID NO: 80154 - DNA, 33 bp, Homo sapien
tttcaaaagacacaaagtccgcgtaatatcctt

SEQ ID NO: 80155 - DNA, 33 bp, Homo sapien
ttttgaaaaattaccactgccaaagagttgaac

SEQ ID NO: 80156 - DNA, 33 bp, Homo sapien
ttttgaaaaattaccattgccaaagagttgaac

SEQ ID NO: 80157 - DNA, 33 bp, Homo sapien
ccacattttgcccacaactcttgagaaaccaaa

SEQ ID NO: 80158 - DNA, 33 bp, Homo sapien
ccacattttgcccacagctcttgagaaaccaaa

SEQ ID NO: 80159 - DNA, 33 bp, Homo sapien
taaaaagctctcataacatagtgatcaagggct

SEQ ID NO: 80160 - DNA, 33 bp, Homo sapien
taaaaagctctcataatatagtgatcaagggct

SEQ ID NO: 80161 - DNA, 33 bp, Homo sapien
cagggatgatcacacccatctgtggactgttca

SEQ ID NO: 80162 - DNA, 33 bp, Homo sapien
cagggatgatcacacctatctgtggactgttca

SEQ ID NO: 80163 - DNA, 33 bp, Homo sapien
tgaaaatataacctcacaacttcagccaaacaa

SEQ ID NO: 80164 - DNA, 33 bp, Homo sapien
tgaaaatataacctcataacttcagccaaacaa

SEQ ID NO: 80165 - DNA, 33 bp, Homo sapien
aaaagaaagaacaggacaaagtcatcgatgaaa

SEQ ID NO: 80166 - DNA, 33 bp, Homo sapien
aaaagaaagaacaggataaagtcatcgatgaaa

SEQ ID NO: 80167 - DNA, 33 bp, Homo sapien
gggatgaagggaatgaagttagatttgtaaaag

SEQ ID NO: 80168 - DNA, 33 bp, Homo sapien
gggatgaagggaatgaggttagatttgtaaaag

SEQ ID NO: 80169 - DNA, 33 bp, Homo sapien
agctcaggtggtaagacaatctaaggccgctgc

SEQ ID NO: 80170 - DNA, 33 bp, Homo sapien
agctcaggtggtaagagaatctaaggccgctgc

SEQ ID NO: 80171 - DNA, 33 bp, Homo sapien
catgcgttcatggtccagaatgcacaggcagtt

SEQ ID NO: 80172 - DNA, 33 bp, Homo sapien
catgcgttcatggtccggaatgcacaggcagtt

SEQ ID NO: 80173 - DNA, 33 bp, Homo sapien
agatcggtaagaacaacgtgagatccagcagat

SEQ ID NO: 80174 - DNA, 33 bp, Homo sapien
agatcggtaagaacaatgtgagatccagcagat

SEQ ID NO: 80175 - DNA, 33 bp, Homo sapien
cttcggaaatcatcacccatccattgaaatgtg

SEQ ID NO: 80176 - DNA, 33 bp, Homo sapien
cttcggaaatcatcactcatccattgaaatgtg

SEQ ID NO: 80177 - DNA, 33 bp, Homo sapien
gtgagaaggccaacaacgcacctaaggaatgag

SEQ ID NO: 80178 - DNA, 33 bp, Homo sapien
gtgagaaggccaacaatgcacctaaggaatgag

SEQ ID NO: 80179 - DNA, 33 bp, Homo sapien
tttctgaaaatgctaaacaataagacatttctc

SEQ ID NO: 80180 - DNA, 33 bp, Homo sapien
tttctgaaaatgctaagcaataagacatttctc

SEQ ID NO: 80181 - DNA, 33 bp, Homo sapien
aggtaaggacgacataccttccatttccccagg

SEQ ID NO: 80182 - DNA, 33 bp, Homo sapien
aggtaaggacgacatatcttccatttccccagg

SEQ ID NO: 80183 - DNA, 33 bp, Homo sapien
taggcagggctttaataatctctgcagggtagc

SEQ ID NO: 80184 - DNA, 33 bp, Homo sapien
taggcagggctttaatgatctctgcagggtagc

SEQ ID NO: 80185 - DNA, 33 bp, Homo sapien
gtgataaggtgggaagccatgagcaatcaatat

SEQ ID NO: 80186 - DNA, 33 bp, Homo sapien
gtgataaggtgggaaggcatgagcaatcaatat

SEQ ID NO: 80187 - DNA, 33 bp, Homo sapien
tgtgggcactcagctaaggggaaaaaattgagc

SEQ ID NO: 80188 - DNA, 33 bp, Homo sapien
tgtgggcactcagctagggggaaaaaattgagc

SEQ ID NO: 80189 - DNA, 33 bp, Homo sapien
ttttttttgtacgatgcataggtttgcagaaca

SEQ ID NO: 80190 - DNA, 33 bp, Homo sapien
ttttttttgtacgatgtataggtttgcagaaca

SEQ ID NO: 80191 - DNA, 33 bp, Homo sapien
agcagttcttagccaactcacattttttagcag

SEQ ID NO: 80192 - DNA, 33 bp, Homo sapien
agcagttcttagccaattcacattttttagcag

SEQ ID NO: 80193 - DNA, 33 bp, Homo sapien
gtgaatagtaaagtaacgcggggctggtatcta

SEQ ID NO: 80194 - DNA, 33 bp, Homo sapien
gtgaatagtaaagtaatgcggggctggtatcta

SEQ ID NO: 80195 - DNA, 33 bp, Homo sapien
ggatgaattagcgcccaataagcacggagaaag

SEQ ID NO: 80196 - DNA, 33 bp, Homo sapien
ggatgaattagcgcccgataagcacggagaaag

SEQ ID NO: 80197 - DNA, 33 bp, Homo sapien
agtctttctggtgctgaaatctgaggtcacaca

SEQ ID NO: 80198 - DNA, 33 bp, Homo sapien
agtctttctggtgctgcaatctgaggtcacaca

SEQ ID NO: 80199 - DNA, 33 bp, Homo sapien
tggatgaagctgaggacaaataaatgtcaataa

SEQ ID NO: 80200 - DNA, 33 bp, Homo sapien
tggatgaagctgaggataaataaatgtcaataa

SEQ ID NO: 80201 - DNA, 33 bp, Homo sapien
gatttgctgccctggaccagccacgaggcccat

SEQ ID NO: 80202 - DNA, 33 bp, Homo sapien
gatttgctgccctggatcagccacgaggcccat

SEQ ID NO: 80203 - DNA, 33 bp, Homo sapien
gctgatgagatgctcacaggtgttacccaagca

SEQ ID NO: 80204 - DNA, 33 bp, Homo sapien
gctgatgagatgctcataggtgttacccaagca

SEQ ID NO: 80205 - DNA, 33 bp, Homo sapien
accatttatcaatggcgctaacaactgcaacac

SEQ ID NO: 80206 - DNA, 33 bp, Homo sapien
accatttatcaatggctctaacaactgcaacac

SEQ ID NO: 80207 - DNA, 33 bp, Homo sapien
ccctcttcttcttcaacgaagagatggcatcag

SEQ ID NO: 80208 - DNA, 33 bp, Homo sapien
ccctcttcttcttcaatgaagagatggcatcag

SEQ ID NO: 80209 - DNA, 33 bp, Homo sapien
tctgggcaccaatccccgagccaagtgattctt

SEQ ID NO: 80210 - DNA, 33 bp, Homo sapien
tctgggcaccaatccctgagccaagtgattctt

SEQ ID NO: 80211 - DNA, 33 bp, Homo sapien
tctatttatgaaactacactgcatttgtgtact

SEQ ID NO: 80212 - DNA, 33 bp, Homo sapien
tctatttatgaaactatactgcatttgtgtact

SEQ ID NO: 80213 - DNA, 33 bp, Homo sapien
tgagttaaaataaaaacgacacatgccaagagg

SEQ ID NO: 80214 - DNA, 33 bp, Homo sapien
tgagttaaaataaaaatgacacatgccaagagg

SEQ ID NO: 80215 - DNA, 33 bp, Homo sapien
aagacttttccgtttgcagaatttgtatgaaag

SEQ ID NO: 80216 - DNA, 33 bp, Homo sapien
aagacttttccgtttgtagaatttgtatgaaag

SEQ ID NO: 80217 - DNA, 33 bp, Homo sapien
tagtaccagtctcataaggactttgtacatatt

SEQ ID NO: 80218 - DNA, 33 bp, Homo sapien
tagtaccagtctcatagggactttgtacatatt

SEQ ID NO: 80219 - DNA, 33 bp, Homo sapien
gttcaagtctccaccaccagggaaagttcttct

SEQ ID NO: 80220 - DNA, 33 bp, Homo sapien
gttcaagtctccaccatcagggaaagttcttct

SEQ ID NO: 80221 - DNA, 33 bp, Homo sapien
gattttattagttcccagagccattaagttccc

SEQ ID NO: 80222 - DNA, 33 bp, Homo sapien
gattttattagttccccgagccattaagttccc

SEQ ID NO: 80223 - DNA, 33 bp, Homo sapien
atccccagacaatgacacctctaccagttgcga

SEQ ID NO: 80224 - DNA, 33 bp, Homo sapien
atccccagacaatgacgcctctaccagttgcga

SEQ ID NO: 80225 - DNA, 33 bp, Homo sapien
cctgaagaagaaggaacgggacctcaagtttac

SEQ ID NO: 80226 - DNA, 33 bp, Homo sapien
cctgaagaagaaggaatgggacctcaagtttac

SEQ ID NO: 80227 - DNA, 33 bp, Homo sapien
ggcacaacataaaacaatccatacaacccacag

SEQ ID NO: 80228 - DNA, 33 bp, Homo sapien
ggcacaacataaaacagtccatacaacccacag

SEQ ID NO: 80229 - DNA, 33 bp, Homo sapien
cacaaattaggtcaaacgactgatcaagttgta

SEQ ID NO: 80230 - DNA, 33 bp, Homo sapien
cacaaattaggtcaaatgactgatcaagttgta

SEQ ID NO: 80231 - DNA, 33 bp, Homo sapien
agactcccagcccttcaagcaaattcctgagtg

SEQ ID NO: 80232 - DNA, 33 bp, Homo sapien
agactcccagcccttcgagcaaattcctgagtg

SEQ ID NO: 80233 - DNA, 33 bp, Homo sapien
tattttcattaccagacagagaagggcctacag

SEQ ID NO: 80234 - DNA, 33 bp, Homo sapien
tattttcattaccagagagagaagggcctacag

SEQ ID NO: 80235 - DNA, 33 bp, Homo sapien
gaatacatgaacttcaactggattggtgtcctt

SEQ ID NO: 80236 - DNA, 33 bp, Homo sapien
gaatacatgaacttcagctggattggtgtcctt

SEQ ID NO: 80237 - DNA, 33 bp, Homo sapien
tgtcggctgagccagcaatgagatacacaggtg

SEQ ID NO: 80238 - DNA, 33 bp, Homo sapien
tgtcggctgagccagcgatgagatacacaggtg

SEQ ID NO: 80239 - DNA, 33 bp, Homo sapien
agtcattaatgaaccaaccacaagcttgtctcc

SEQ ID NO: 80240 - DNA, 33 bp, Homo sapien
agtcattaatgaaccagccacaagcttgtctcc

SEQ ID NO: 80241 - DNA, 33 bp, Homo sapien
ccacagtgggaggaacaacgtgagcagagcttt

SEQ ID NO: 80242 - DNA, 33 bp, Homo sapien
ccacagtgggaggaaccacgtgagcagagcttt

SEQ ID NO: 80243 - DNA, 33 bp, Homo sapien
cacttccactcactaacggccagaactcaaaca

SEQ ID NO: 80244 - DNA, 33 bp, Homo sapien
cacttccactcactaatggccagaactcaaaca

SEQ ID NO: 80245 - DNA, 33 bp, Homo sapien
acccaggtttcttctaacttgtgcctctttcac

SEQ ID NO: 80246 - DNA, 33 bp, Homo sapien
acccaggtttcttctatcttgtgcctctttcac

SEQ ID NO: 80247 - DNA, 33 bp, Homo sapien
gattcaaatcttaaaacggtcacttttgctcct

SEQ ID NO: 80248 - DNA, 33 bp, Homo sapien
gattcaaatcttaaaatggtcacttttgctcct

SEQ ID NO: 80249 - DNA, 33 bp, Homo sapien
ctgagtgatttttgaacagagagcaaataatca

SEQ ID NO: 80250 - DNA, 33 bp, Homo sapien
ctgagtgatttttgaagagagagcaaataatca

SEQ ID NO: 80251 - DNA, 33 bp, Homo sapien
gccgcttcactggaacaaggagaaaaagacatt

SEQ ID NO: 80252 - DNA, 33 bp, Homo sapien
gccgcttcactggaaccaggagaaaaagacatt

SEQ ID NO: 80253 - DNA, 33 bp, Homo sapien
aactcacactggttaaagatatgtgtgcaataa

SEQ ID NO: 80254 - DNA, 33 bp, Homo sapien
aactcacactggttaaggatatgtgtgcaataa

SEQ ID NO: 80255 - DNA, 33 bp, Homo sapien
gctgtcacacactgaaaaatcacgcggtacact

SEQ ID NO: 80256 - DNA, 33 bp, Homo sapien
gctgtcacacactgaacaatcacgcggtacact

SEQ ID NO: 80257 - DNA, 33 bp, Homo sapien
ttggcaaatgttaaaaacctctccggaaatggt

SEQ ID NO: 80258 - DNA, 33 bp, Homo sapien
ttggcaaatgttaaaatcctctccggaaatggt

SEQ ID NO: 80259 - DNA, 33 bp, Homo sapien
catatagtagctagcaaattatgaccatgtagt

SEQ ID NO: 80260 - DNA, 33 bp, Homo sapien
catatagtagctagcacattatgaccatgtagt

SEQ ID NO: 80261 - DNA, 33 bp, Homo sapien
agatattcatctcacaacgcctgtcatgtagga

SEQ ID NO: 80262 - DNA, 33 bp, Homo sapien
agatattcatctcacagcgcctgtcatgtagga

SEQ ID NO: 80263 - DNA, 33 bp, Homo sapien
catacttggtgttagtaaatttcataaatgtaa

SEQ ID NO: 80264 - DNA, 33 bp, Homo sapien
catacttggtgttagtgaatttcataaatgtaa

SEQ ID NO: 80265 - DNA, 33 bp, Homo sapien
aagagaggtttggctgcaactgggtcccagttg

SEQ ID NO: 80266 - DNA, 33 bp, Homo sapien
aagagaggtttggctgtaactgggtcccagttg

SEQ ID NO: 80267 - DNA, 33 bp, Homo sapien
ggcctcagagtgaggaaaatgtgttccactggc

SEQ ID NO: 80268 - DNA, 33 bp, Homo sapien
ggcctcagagtgaggacaatgtgttccactggc

SEQ ID NO: 80269 - DNA, 33 bp, Homo sapien
cactctgcagcagccaagactggagtccactca

SEQ ID NO: 80270 - DNA, 33 bp, Homo sapien
cactctgcagcagccaggactggagtccactca

SEQ ID NO: 80271 - DNA, 33 bp, Homo sapien
gatcataccaatcaccactgagaagcccaatca

SEQ ID NO: 80272 - DNA, 33 bp, Homo sapien
gatcataccaatcacctctgagaagcccaatca

SEQ ID NO: 80273 - DNA, 33 bp, Homo sapien
tttttcaaagactgggaacacttaaaaatatct

SEQ ID NO: 80274 - DNA, 33 bp, Homo sapien
tttttcaaagactggggacacttaaaaatatct

SEQ ID NO: 80275 - DNA, 33 bp, Homo sapien
ttggctctagttcaaacgtgactggtatccttc

SEQ ID NO: 80276 - DNA, 33 bp, Homo sapien
ttggctctagttcaaatgtgactggtatccttc

SEQ ID NO: 80277 - DNA, 33 bp, Homo sapien
ttagcaaactagttaacagctcctggcccttca

SEQ ID NO: 80278 - DNA, 33 bp, Homo sapien
ttagcaaactagttaatagctcctggcccttca

SEQ ID NO: 80279 - DNA, 33 bp, Homo sapien
tgtttcctgattttaacgagaacatctttatta

SEQ ID NO: 80280 - DNA, 33 bp, Homo sapien
tgtttcctgattttaatgagaacatctttatta

SEQ ID NO: 80281 - DNA, 33 bp, Homo sapien
catcctatgaagcaagaattgtatcacccccat

SEQ ID NO: 80282 - DNA, 33 bp, Homo sapien
catcctatgaagcaagtattgtatcacccccat

SEQ ID NO: 80283 - DNA, 33 bp, Homo sapien
aagtaaaacaatttaccgaaggcctactctgta

SEQ ID NO: 80284 - DNA, 33 bp, Homo sapien
aagtaaaacaatttactgaaggcctactctgta

SEQ ID NO: 80285 - DNA, 33 bp, Homo sapien
tgtatctgacctttcacaatgggttcataccag

SEQ ID NO: 80286 - DNA, 33 bp, Homo sapien
tgtatctgacctttcataatgggttcataccag

SEQ ID NO: 80287 - DNA, 33 bp, Homo sapien
acagttacccaggatgaaccaactgcaaaaagc

SEQ ID NO: 80288 - DNA, 33 bp, Homo sapien
acagttacccaggatgtaccaactgcaaaaagc

SEQ ID NO: 80289 - DNA, 33 bp, Homo sapien
atgcaaagccaggtgacgtttctgggacaggat

SEQ ID NO: 80290 - DNA, 33 bp, Homo sapien
atgcaaagccaggtgatgtttctgggacaggat

SEQ ID NO: 80291 - DNA, 33 bp, Homo sapien
catgatggtcctgatccgagacggtgtgggagg

SEQ ID NO: 80292 - DNA, 33 bp, Homo sapien
catgatggtcctgatctgagacggtgtgggagg

SEQ ID NO: 80293 - DNA, 33 bp, Homo sapien
agggaggcacaggacacagaaatagcccattca

SEQ ID NO: 80294 - DNA, 33 bp, Homo sapien
agggaggcacaggacagagaaatagcccattca

SEQ ID NO: 80295 - DNA, 33 bp, Homo sapien
gaaatcttgacaaagcactttctataaaccact

SEQ ID NO: 80296 - DNA, 33 bp, Homo sapien
gaaatcttgacaaagcgctttctataaaccact

SEQ ID NO: 80297 - DNA, 33 bp, Homo sapien
gtctgaacttgcctaccaatatgctatcatatg

SEQ ID NO: 80298 - DNA, 33 bp, Homo sapien
gtctgaacttgcctactaatatgctatcatatg

SEQ ID NO: 80299 - DNA, 33 bp, Homo sapien
tactgcctgtaacaccaagacgagctctccaga

SEQ ID NO: 80300 - DNA, 33 bp, Homo sapien
tactgcctgtaacaccgagacgagctctccaga

SEQ ID NO: 80301 - DNA, 33 bp, Homo sapien
cctgctaataaagaagactcttgccctctcata

SEQ ID NO: 80302 - DNA, 33 bp, Homo sapien
cctgctaataaagaagtctcttgccctctcata

SEQ ID NO: 80303 - DNA, 33 bp, Homo sapien
gaagagcagtcaaagacgaggcggggaagcaag

SEQ ID NO: 80304 - DNA, 33 bp, Homo sapien
gaagagcagtcaaagatgaggcggggaagcaag

SEQ ID NO: 80305 - DNA, 33 bp, Homo sapien
tgtcccagtgccctgcacagttgctaggagaca

SEQ ID NO: 80306 - DNA, 33 bp, Homo sapien
tgtcccagtgccctgcgcagttgctaggagaca

SEQ ID NO: 80307 - DNA, 33 bp, Homo sapien
tttccatctccagcaaagacctctttccagagt

SEQ ID NO: 80308 - DNA, 33 bp, Homo sapien
tttccatctccagcaaggacctctttccagagt

SEQ ID NO: 80309 - DNA, 33 bp, Homo sapien
tcagaggccctgatccaagtaactttcctaata

SEQ ID NO: 80310 - DNA, 33 bp, Homo sapien
tcagaggccctgatccgagtaactttcctaata

SEQ ID NO: 80311 - DNA, 33 bp, Homo sapien
ctcgccttaattaaaagttgcaatgtgattttt

SEQ ID NO: 80312 - DNA, 33 bp, Homo sapien
ctcgccttaattaaaatttgcaatgtgattttt

SEQ ID NO: 80313 - DNA, 33 bp, Homo sapien
atgggaagatgttgcaaacgccagttggatgga

SEQ ID NO: 80314 - DNA, 33 bp, Homo sapien
atgggaagatgttgcagacgccagttggatgga

SEQ ID NO: 80315 - DNA, 33 bp, Homo sapien
ttcagcttaattatcaactctccctcgccccaa

SEQ ID NO: 80316 - DNA, 33 bp, Homo sapien
ttcagcttaattatcatctctccctcgccccaa

SEQ ID NO: 80317 - DNA, 33 bp, Homo sapien
agagagcgcacccaggaaagaatgttgagggca

SEQ ID NO: 80318 - DNA, 33 bp, Homo sapien
agagagcgcacccagggaagaatgttgagggca

SEQ ID NO: 80319 - DNA, 33 bp, Homo sapien
accataaacttaaccacgttcttggcctggcag

SEQ ID NO: 80320 - DNA, 33 bp, Homo sapien
accataaacttaaccaggttcttggcctggcag

SEQ ID NO: 80321 - DNA, 33 bp, Homo sapien
tgctattgccgttgtacatgacaatacctgctg

SEQ ID NO: 80322 - DNA, 33 bp, Homo sapien
tgctattgccgttgtatatgacaatacctgctg

SEQ ID NO: 80323 - DNA, 33 bp, Homo sapien
gctactgaaaagcaggaactatgttttatattt

SEQ ID NO: 80324 - DNA, 33 bp, Homo sapien
gctactgaaaagcagggactatgttttatattt

SEQ ID NO: 80325 - DNA, 33 bp, Homo sapien
cctttcacaacatgtgcatatttcaagaggaga

SEQ ID NO: 80326 - DNA, 33 bp, Homo sapien
cctttcacaacatgtgtatatttcaagaggaga

SEQ ID NO: 80327 - DNA, 33 bp, Homo sapien
cttccggcagaattctcactccttagtcttcaa

SEQ ID NO: 80328 - DNA, 33 bp, Homo sapien
cttccggcagaattcttactccttagtcttcaa

SEQ ID NO: 80329 - DNA, 33 bp, Homo sapien
tcacaagagccgattacgtctatctcttcccag

SEQ ID NO: 80330 - DNA, 33 bp, Homo sapien
tcacaagagccgattatgtctatctcttcccag

SEQ ID NO: 80331 - DNA, 33 bp, Homo sapien
aactcaacaatattaccgctccatctccattat

SEQ ID NO: 80332 - DNA, 33 bp, Homo sapien
aactcaacaatattactgctccatctccattat

SEQ ID NO: 80333 - DNA, 33 bp, Homo sapien
tacccaagtttagtaacgatagctacgtttatt

SEQ ID NO: 80334 - DNA, 33 bp, Homo sapien
tacccaagtttagtaatgatagctacgtttatt

SEQ ID NO: 80335 - DNA, 33 bp, Homo sapien
cagagagcttaagcaacttatcaggggccacac

SEQ ID NO: 80336 - DNA, 33 bp, Homo sapien
cagagagcttaagcaatttatcaggggccacac

SEQ ID NO: 80337 - DNA, 33 bp, Homo sapien
tggaggctggttgtaaagtcatgggaaactata

SEQ ID NO: 80338 - DNA, 33 bp, Homo sapien
tggaggctggttgtaaggtcatgggaaactata

SEQ ID NO: 80339 - DNA, 33 bp, Homo sapien
tcagcagctatctgccacaaatcaggattctct

SEQ ID NO: 80340 - DNA, 33 bp, Homo sapien
tcagcagctatctgccgcaaatcaggattctct

SEQ ID NO: 80341 - DNA, 33 bp, Homo sapien
cctggtaggacagtgacgggtgtggagcgtagt

SEQ ID NO: 80342 - DNA, 33 bp, Homo sapien
cctggtaggacagtgatgggtgtggagcgtagt

SEQ ID NO: 80343 - DNA, 33 bp, Homo sapien
ggtgaaatttaagagagagtgatagattagtta

SEQ ID NO: 80344 - DNA, 33 bp, Homo sapien
ggtgaaatttaagagatagtgatagattagtta

SEQ ID NO: 80345 - DNA, 33 bp, Homo sapien
tactaactactgagtaaattttagttctctccc

SEQ ID NO: 80346 - DNA, 33 bp, Homo sapien
tactaactactgagtacattttagttctctccc

SEQ ID NO: 80347 - DNA, 33 bp, Homo sapien
ggttttttccccctcacgcattcagtttttact

SEQ ID NO: 80348 - DNA, 33 bp, Homo sapien
ggttttttccccctcatgcattcagtttttact

SEQ ID NO: 80349 - DNA, 33 bp, Homo sapien
cggtgctgggagagcaaaatgcctaaacccagt

SEQ ID NO: 80350 - DNA, 33 bp, Homo sapien
cggtgctgggagagcagaatgcctaaacccagt

SEQ ID NO: 80351 - DNA, 33 bp, Homo sapien
agggagagtttgaacacctttagattcttttct

SEQ ID NO: 80352 - DNA, 33 bp, Homo sapien
agggagagtttgaacatctttagattcttttct

SEQ ID NO: 80353 - DNA, 33 bp, Homo sapien
actgtaggatgggatgcaagcttctatacctca

SEQ ID NO: 80354 - DNA, 33 bp, Homo sapien
actgtaggatgggatgtaagcttctatacctca

SEQ ID NO: 80355 - DNA, 33 bp, Homo sapien
ttcttctggtgagccacatgcaaggtgtctcgc

SEQ ID NO: 80356 - DNA, 33 bp, Homo sapien
ttcttctggtgagccatatgcaaggtgtctcgc

SEQ ID NO: 80357 - DNA, 33 bp, Homo sapien
tttccaactgactttacataagggtacaaaggc

SEQ ID NO: 80358 - DNA, 33 bp, Homo sapien
tttccaactgactttagataagggtacaaaggc

SEQ ID NO: 80359 - DNA, 33 bp, Homo sapien
ttaaaataatacaagacgccaaactgggctatg

SEQ ID NO: 80360 - DNA, 33 bp, Homo sapien
ttaaaataatacaagatgccaaactgggctatg

SEQ ID NO: 80361 - DNA, 33 bp, Homo sapien
tccttgagcctatgaaacccctcctgcatctcc

SEQ ID NO: 80362 - DNA, 33 bp, Homo sapien
tccttgagcctatgaaccccctcctgcatctcc

SEQ ID NO: 80363 - DNA, 33 bp, Homo sapien
tcataggctcaaggaaacagtattgaaatgggt

SEQ ID NO: 80364 - DNA, 33 bp, Homo sapien
tcataggctcaaggaagcagtattgaaatgggt

SEQ ID NO: 80365 - DNA, 33 bp, Homo sapien
taataaataaatgctacataaacctgatttctc

SEQ ID NO: 80366 - DNA, 33 bp, Homo sapien
taataaataaatgctagataaacctgatttctc

SEQ ID NO: 80367 - DNA, 33 bp, Homo sapien
gaccctatttgatacagtctgcttttagccagg

SEQ ID NO: 80368 - DNA, 33 bp, Homo sapien
gaccctatttgatacattctgcttttagccagg

SEQ ID NO: 80369 - DNA, 33 bp, Homo sapien
ggtggaaactgaagccaggaaggacaagcagcc

SEQ ID NO: 80370 - DNA, 33 bp, Homo sapien
ggtggaaactgaagccgggaaggacaagcagcc

SEQ ID NO: 80371 - DNA, 33 bp, Homo sapien
gtataaaagcagcacaaaataatagtaggaaac

SEQ ID NO: 80372 - DNA, 33 bp, Homo sapien
gtataaaagcagcacataataatagtaggaaac

SEQ ID NO: 80373 - DNA, 33 bp, Homo sapien
ccacctccacgcagaagtctccagggccttagg

SEQ ID NO: 80374 - DNA, 33 bp, Homo sapien
ccacctccacgcagaattctccagggccttagg

SEQ ID NO: 80375 - DNA, 33 bp, Homo sapien
agcagtaacaaataaacgctcaaatttcagagc

SEQ ID NO: 80376 - DNA, 33 bp, Homo sapien
agcagtaacaaataaatgctcaaatttcagagc

SEQ ID NO: 80377 - DNA, 33 bp, Homo sapien
ccaaaccatactataaatctactgtttacctat

SEQ ID NO: 80378 - DNA, 33 bp, Homo sapien
ccaaaccatactataagtctactgtttacctat

SEQ ID NO: 80379 - DNA, 33 bp, Homo sapien
gcctaaatatgctgtacaaaaataataagtgtg

SEQ ID NO: 80380 - DNA, 33 bp, Homo sapien
gcctaaatatgctgtagaaaaataataagtgtg

SEQ ID NO: 80381 - DNA, 33 bp, Homo sapien
tatcagaaggaggatacgaattgttgttaacat

SEQ ID NO: 80382 - DNA, 33 bp, Homo sapien
tatcagaaggaggatatgaattgttgttaacat

SEQ ID NO: 80383 - DNA, 33 bp, Homo sapien
aaaccacttcctggatgatcaattctctctttg

SEQ ID NO: 80384 - DNA, 33 bp, Homo sapien
aaaccacttcctggattatcaattctctctttg

SEQ ID NO: 80385 - DNA, 33 bp, Homo sapien
aataagcatttggaaacagactatttggatata

SEQ ID NO: 80386 - DNA, 33 bp, Homo sapien
aataagcatttggaaagagactatttggatata

SEQ ID NO: 80387 - DNA, 33 bp, Homo sapien
tgcatctttaggcaagccctgatacttaatgtc

SEQ ID NO: 80388 - DNA, 33 bp, Homo sapien
tgcatctttaggcaagtcctgatacttaatgtc

SEQ ID NO: 80389 - DNA, 33 bp, Homo sapien
aggcaggaaggcccaaccctctttgactggggc

SEQ ID NO: 80390 - DNA, 33 bp, Homo sapien
aggcaggaaggcccaatcctctttgactggggc

SEQ ID NO: 80391 - DNA, 33 bp, Homo sapien
aggattccaaatggacaactgctctattgtttc

SEQ ID NO: 80392 - DNA, 33 bp, Homo sapien
aggattccaaatggacgactgctctattgtttc

SEQ ID NO: 80393 - DNA, 33 bp, Homo sapien
tggatcactgaaggaaccttggatgcttttttc

SEQ ID NO: 80394 - DNA, 33 bp, Homo sapien
tggatcactgaaggaatcttggatgcttttttc

SEQ ID NO: 80395 - DNA, 33 bp, Homo sapien
aaccctgcaggacctcacggctaattggatgtg

SEQ ID NO: 80396 - DNA, 33 bp, Homo sapien
aaccctgcaggacctcgcggctaattggatgtg

SEQ ID NO: 80397 - DNA, 33 bp, Homo sapien
aacaagcaaggcaaaggactccacagatgccag

SEQ ID NO: 80398 - DNA, 33 bp, Homo sapien
aacaagcaaggcaaagtactccacagatgccag

SEQ ID NO: 80399 - DNA, 33 bp, Homo sapien
atcatgtggggaagaacatccggaggttaaaat

SEQ ID NO: 80400 - DNA, 33 bp, Homo sapien
atcatgtggggaagaatatccggaggttaaaat

SEQ ID NO: 80401 - DNA, 33 bp, Homo sapien
atatatattaaattccaccttgaagtttaacat

SEQ ID NO: 80402 - DNA, 33 bp, Homo sapien
atatatattaaattccgccttgaagtttaacat

SEQ ID NO: 80403 - DNA, 33 bp, Homo sapien
cccttttgatccacagcctgattctgagtcttc

SEQ ID NO: 80404 - DNA, 33 bp, Homo sapien
cccttttgatccacaggctgattctgagtcttc

SEQ ID NO: 80405 - DNA, 33 bp, Homo sapien
ctgttcaggatgctgacgggagcaatgactctc

SEQ ID NO: 80406 - DNA, 33 bp, Homo sapien
ctgttcaggatgctgatgggagcaatgactctc

SEQ ID NO: 80407 - DNA, 33 bp, Homo sapien
ctgctgtgccgcagcccgaggcatttcactgtt

SEQ ID NO: 80408 - DNA, 33 bp, Homo sapien
ctgctgtgccgcagcctgaggcatttcactgtt

SEQ ID NO: 80409 - DNA, 33 bp, Homo sapien
catgcttacttaaacacggcattgtatgtcact

SEQ ID NO: 80410 - DNA, 33 bp, Homo sapien
catgcttacttaaacatggcattgtatgtcact

SEQ ID NO: 80411 - DNA, 33 bp, Homo sapien
ggtcctctggtctcaacaaaagtttcaatagaa

SEQ ID NO: 80412 - DNA, 33 bp, Homo sapien
ggtcctctggtctcaagaaaagtttcaatagaa

SEQ ID NO: 80413 - DNA, 33 bp, Homo sapien
ctcaccaggaggtacaccttgtgatggatgttg

SEQ ID NO: 80414 - DNA, 33 bp, Homo sapien
ctcaccaggaggtacatcttgtgatggatgttg

SEQ ID NO: 80415 - DNA, 33 bp, Homo sapien
agaactagaaagcagacgtccttccagcaatgt

SEQ ID NO: 80416 - DNA, 33 bp, Homo sapien
agaactagaaagcagaggtccttccagcaatgt

SEQ ID NO: 80417 - DNA, 33 bp, Homo sapien
cggacccctttctctcaaattcaggcaaaccaa

SEQ ID NO: 80418 - DNA, 33 bp, Homo sapien
cggacccctttctctcgaattcaggcaaaccaa

SEQ ID NO: 80419 - DNA, 33 bp, Homo sapien
tgctgatcaggtgtccacactaggttcagcatc

SEQ ID NO: 80420 - DNA, 33 bp, Homo sapien
tgctgatcaggtgtccgcactaggttcagcatc

SEQ ID NO: 80421 - DNA, 33 bp, Homo sapien
ctgcggaaagtaacggaaagtaatttggagaac

SEQ ID NO: 80422 - DNA, 33 bp, Homo sapien
ctgcggaaagtaacgggaagtaatttggagaac

SEQ ID NO: 80423 - DNA, 33 bp, Homo sapien
gaccacgaggatgaggaatggctttgtagacag

SEQ ID NO: 80424 - DNA, 33 bp, Homo sapien
gaccacgaggatgaggcatggctttgtagacag

SEQ ID NO: 80425 - DNA, 33 bp, Homo sapien
taggacattcttttcacgagcaaattccaaagt

SEQ ID NO: 80426 - DNA, 33 bp, Homo sapien
taggacattcttttcatgagcaaattccaaagt

SEQ ID NO: 80427 - DNA, 33 bp, Homo sapien
gtagctgagctggcaaagagaaaaaaattcttg

SEQ ID NO: 80428 - DNA, 33 bp, Homo sapien
gtagctgagctggcaaggagaaaaaaattcttg

SEQ ID NO: 80429 - DNA, 33 bp, Homo sapien
cctgccactccatgaacgtccgtccctcatacc

SEQ ID NO: 80430 - DNA, 33 bp, Homo sapien
cctgccactccatgaatgtccgtccctcatacc

SEQ ID NO: 80431 - DNA, 33 bp, Homo sapien
ttctgaatttgcgaacaagccggtgggggtctt

SEQ ID NO: 80432 - DNA, 33 bp, Homo sapien
ttctgaatttgcgaacgagccggtgggggtctt

SEQ ID NO: 80433 - DNA, 33 bp, Homo sapien
tttatgaacacatttacgaagcctgagatgaat

SEQ ID NO: 80434 - DNA, 33 bp, Homo sapien
tttatgaacacatttatgaagcctgagatgaat

SEQ ID NO: 80435 - DNA, 33 bp, Homo sapien
agcgattctcccccaaagaggaggacacacctg

SEQ ID NO: 80436 - DNA, 33 bp, Homo sapien
agcgattctcccccaacgaggaggacacacctg

SEQ ID NO: 80437 - DNA, 33 bp, Homo sapien
ttagaaaaagaaatggcagaatgacctagatta

SEQ ID NO: 80438 - DNA, 33 bp, Homo sapien
ttagaaaaagaaatggtagaatgacctagatta

SEQ ID NO: 80439 - DNA, 33 bp, Homo sapien
atatgctaattacactcacttgatcactatacg

SEQ ID NO: 80440 - DNA, 33 bp, Homo sapien
atatgctaattacactgacttgatcactatacg

SEQ ID NO: 80441 - DNA, 33 bp, Homo sapien
ctgaaacagggatccaaccctgggcttgacctc

SEQ ID NO: 80442 - DNA, 33 bp, Homo sapien
ctgaaacagggatccagccctgggcttgacctc

SEQ ID NO: 80443 - DNA, 33 bp, Homo sapien
gggtggcaagtcacccaaaggaagtatctctaa

SEQ ID NO: 80444 - DNA, 33 bp, Homo sapien
gggtggcaagtcacccgaaggaagtatctctaa

SEQ ID NO: 80445 - DNA, 33 bp, Homo sapien
tgagagagtagatgtgcaagagagaagagctaa

SEQ ID NO: 80446 - DNA, 33 bp, Homo sapien
tgagagagtagatgtggaagagagaagagctaa

SEQ ID NO: 80447 - DNA, 33 bp, Homo sapien
agttgaacaaaatgcacaaacaaagcagcaaaa

SEQ ID NO: 80448 - DNA, 33 bp, Homo sapien
agttgaacaaaatgcagaaacaaagcagcaaaa

SEQ ID NO: 80449 - DNA, 33 bp, Homo sapien
atggcttcctggacccaagaggctattcaccaa

SEQ ID NO: 80450 - DNA, 33 bp, Homo sapien
atggcttcctggacccgagaggctattcaccaa

SEQ ID NO: 80451 - DNA, 33 bp, Homo sapien
agatgcaagaaggaaaatattacattaaaaaca

SEQ ID NO: 80452 - DNA, 33 bp, Homo sapien
agatgcaagaaggaaagtattacattaaaaaca

SEQ ID NO: 80453 - DNA, 33 bp, Homo sapien
actcatactctttccaatctgattcctcgtttc

SEQ ID NO: 80454 - DNA, 33 bp, Homo sapien
actcatactctttccagtctgattcctcgtttc

SEQ ID NO: 80455 - DNA, 33 bp, Homo sapien
catgttgagagcctgagggaaactcaagtgcct

SEQ ID NO: 80456 - DNA, 33 bp, Homo sapien
catgttgagagcctgatggaaactcaagtgcct

SEQ ID NO: 80457 - DNA, 33 bp, Homo sapien
aaaagacgcatgggtgaacataagcaatggtag

SEQ ID NO: 80458 - DNA, 33 bp, Homo sapien
aaaagacgcatgggtgcacataagcaatggtag

SEQ ID NO: 80459 - DNA, 33 bp, Homo sapien
aatgacactcggtaacaagcttgaacacttgcc

SEQ ID NO: 80460 - DNA, 33 bp, Homo sapien
aatgacactcggtaacgagcttgaacacttgcc

SEQ ID NO: 80461 - DNA, 33 bp, Homo sapien
cagaaggcttacccaacgtgaagcaaggtcata

SEQ ID NO: 80462 - DNA, 33 bp, Homo sapien
cagaaggcttacccaatgtgaagcaaggtcata

SEQ ID NO: 80463 - DNA, 33 bp, Homo sapien
tggaaaaacagcttagaacccacgaccttctgg

SEQ ID NO: 80464 - DNA, 33 bp, Homo sapien
tggaaaaacagcttaggacccacgaccttctgg

SEQ ID NO: 80465 - DNA, 33 bp, Homo sapien
aatacatgactgcctaaggatctttctggcttt

SEQ ID NO: 80466 - DNA, 33 bp, Homo sapien
aatacatgactgcctacggatctttctggcttt

SEQ ID NO: 80467 - DNA, 33 bp, Homo sapien
tctaatgtaatagaaaagaagttgatcggatcc

SEQ ID NO: 80468 - DNA, 33 bp, Homo sapien
tctaatgtaatagaaaggaagttgatcggatcc

SEQ ID NO: 80469 - DNA, 33 bp, Homo sapien
ccctgcctctgggcccagcattcctggcatatt

SEQ ID NO: 80470 - DNA, 33 bp, Homo sapien
ccctgcctctgggcccggcattcctggcatatt

SEQ ID NO: 80471 - DNA, 33 bp, Homo sapien
tgctaactcctcagaacgagtggatgccggaga

SEQ ID NO: 80472 - DNA, 33 bp, Homo sapien
tgctaactcctcagaatgagtggatgccggaga

SEQ ID NO: 80473 - DNA, 33 bp, Homo sapien
ccagaactggtacaaaagtcttcagttgaaatg

SEQ ID NO: 80474 - DNA, 33 bp, Homo sapien
ccagaactggtacaaaggtcttcagttgaaatg

SEQ ID NO: 80475 - DNA, 33 bp, Homo sapien
tgagtgtacagacaaaatcaaaatagtgtacta

SEQ ID NO: 80476 - DNA, 33 bp, Homo sapien
tgagtgtacagacaaagtcaaaatagtgtacta

SEQ ID NO: 80477 - DNA, 33 bp, Homo sapien
cacaaatctttacattaaaattgctcactaggt

SEQ ID NO: 80478 - DNA, 33 bp, Homo sapien
cacaaatctttacattgaaattgctcactaggt

SEQ ID NO: 80479 - DNA, 33 bp, Homo sapien
cactgcgaatgtgtcacatattctttttatttt

SEQ ID NO: 80480 - DNA, 33 bp, Homo sapien
cactgcgaatgtgtcagatattctttttatttt

SEQ ID NO: 80481 - DNA, 33 bp, Homo sapien
acctgctgcttaagaacgaaacaaagtaaaaca

SEQ ID NO: 80482 - DNA, 33 bp, Homo sapien
acctgctgcttaagaatgaaacaaagtaaaaca

SEQ ID NO: 80483 - DNA, 33 bp, Homo sapien
gtgcctggctgtaatacggtgcttttctattac

SEQ ID NO: 80484 - DNA, 33 bp, Homo sapien
gtgcctggctgtaatatggtgcttttctattac

SEQ ID NO: 80485 - DNA, 33 bp, Homo sapien
tctcactcttcactaaacttactctgaataggg

SEQ ID NO: 80486 - DNA, 33 bp, Homo sapien
tctcactcttcactaagcttactctgaataggg

SEQ ID NO: 80487 - DNA, 33 bp, Homo sapien
ctgtacaaaagccataaagttttctttttagaa

SEQ ID NO: 80488 - DNA, 33 bp, Homo sapien
ctgtacaaaagccatagagttttctttttagaa

SEQ ID NO: 80489 - DNA, 33 bp, Homo sapien
gaaatccaacacactcaactagtttacggcatg

SEQ ID NO: 80490 - DNA, 33 bp, Homo sapien
gaaatccaacacactcgactagtttacggcatg

SEQ ID NO: 80491 - DNA, 33 bp, Homo sapien
agtcgtgtcgtaaatacgggattgatttttgaa

SEQ ID NO: 80492 - DNA, 33 bp, Homo sapien
agtcgtgtcgtaaatatgggattgatttttgaa

SEQ ID NO: 80493 - DNA, 33 bp, Homo sapien
caagcacttgagttctcagaaatagatggcaac

SEQ ID NO: 80494 - DNA, 33 bp, Homo sapien
caagcacttgagttcttagaaatagatggcaac

SEQ ID NO: 80495 - DNA, 33 bp, Homo sapien
tgctattttcttccaaacatcagaatggatcgg

SEQ ID NO: 80496 - DNA, 33 bp, Homo sapien
tgctattttcttccaagcatcagaatggatcgg

SEQ ID NO: 80497 - DNA, 33 bp, Homo sapien
taagtacagacatacaagacagcaaataaaacc

SEQ ID NO: 80498 - DNA, 33 bp, Homo sapien
taagtacagacatacaggacagcaaataaaacc

SEQ ID NO: 80499 - DNA, 33 bp, Homo sapien
atcttcagtatttttacctagaaagcaggatga

SEQ ID NO: 80500 - DNA, 33 bp, Homo sapien
atcttcagtatttttatctagaaagcaggatga

SEQ ID NO: 80501 - DNA, 33 bp, Homo sapien
tagcgcctgtcacgtaacaagtagaatgaggaa

SEQ ID NO: 80502 - DNA, 33 bp, Homo sapien
tagcgcctgtcacgtatcaagtagaatgaggaa

SEQ ID NO: 80503 - DNA, 33 bp, Homo sapien
catactttgagtattacacaaaagtagattcat

SEQ ID NO: 80504 - DNA, 33 bp, Homo sapien
catactttgagtattatacaaaagtagattcat

SEQ ID NO: 80505 - DNA, 33 bp, Homo sapien
gggaaaagagttcttacagggattgaatcatta

SEQ ID NO: 80506 - DNA, 33 bp, Homo sapien
gggaaaagagttcttatagggattgaatcatta

SEQ ID NO: 80507 - DNA, 33 bp, Homo sapien
aagtggcacctaaaaaacactgaattccatggg

SEQ ID NO: 80508 - DNA, 33 bp, Homo sapien
aagtggcacctaaaaaccactgaattccatggg

SEQ ID NO: 80509 - DNA, 33 bp, Homo sapien
atatagtgttacatcaatgagtatttagcataa

SEQ ID NO: 80510 - DNA, 33 bp, Homo sapien
atatagtgttacatcagtgagtatttagcataa

SEQ ID NO: 80511 - DNA, 33 bp, Homo sapien
gccagaaaatggctaccataggctgcatcacat

SEQ ID NO: 80512 - DNA, 33 bp, Homo sapien
gccagaaaatggctactataggctgcatcacat

SEQ ID NO: 80513 - DNA, 33 bp, Homo sapien
tattagtcatgtttacagctgcgatttattaca

SEQ ID NO: 80514 - DNA, 33 bp, Homo sapien
tattagtcatgtttacggctgcgatttattaca

SEQ ID NO: 80515 - DNA, 33 bp, Homo sapien
gagtaagagtaatacaaatgttttagacttgaa

SEQ ID NO: 80516 - DNA, 33 bp, Homo sapien
gagtaagagtaatacagatgttttagacttgaa

SEQ ID NO: 80517 - DNA, 33 bp, Homo sapien
accaagtgggctctgcacgtggctgatggcagc

SEQ ID NO: 80518 - DNA, 33 bp, Homo sapien
accaagtgggctctgcgcgtggctgatggcagc

SEQ ID NO: 80519 - DNA, 33 bp, Homo sapien
tattcttaaccaatgacgctgtactatcttcca

SEQ ID NO: 80520 - DNA, 33 bp, Homo sapien
tattcttaaccaatgaggctgtactatcttcca

SEQ ID NO: 80521 - DNA, 33 bp, Homo sapien
aaaagctgaacaagcccgaacacggaggagcca

SEQ ID NO: 80522 - DNA, 33 bp, Homo sapien
aaaagctgaacaagcctgaacacggaggagcca

SEQ ID NO: 80523 - DNA, 33 bp, Homo sapien
atctcacacattttaaaggtataaacctactgc

SEQ ID NO: 80524 - DNA, 33 bp, Homo sapien
atctcacacattttaatggtataaacctactgc

SEQ ID NO: 80525 - DNA, 33 bp, Homo sapien
agcacaaaatttgccaagttatggatcttaaat

SEQ ID NO: 80526 - DNA, 33 bp, Homo sapien
agcacaaaatttgccatgttatggatcttaaat

SEQ ID NO: 80527 - DNA, 33 bp, Homo sapien
cttttaccttctacaaacacaagtattacaaat

SEQ ID NO: 80528 - DNA, 33 bp, Homo sapien
cttttaccttctacaaccacaagtattacaaat

SEQ ID NO: 80529 - DNA, 33 bp, Homo sapien
tggctctcaaaggaaccagtagtatatgaaatg

SEQ ID NO: 80530 - DNA, 33 bp, Homo sapien
tggctctcaaaggaactagtagtatatgaaatg

SEQ ID NO: 80531 - DNA, 33 bp, Homo sapien
ttcattcatcttttgagagccatttgaattgtt

SEQ ID NO: 80532 - DNA, 33 bp, Homo sapien
ttcattcatcttttgatagccatttgaattgtt

SEQ ID NO: 80533 - DNA, 33 bp, Homo sapien
agtcatctgtgctgatcgttgtagtgtgaggaa

SEQ ID NO: 80534 - DNA, 33 bp, Homo sapien
agtcatctgtgctgattgttgtagtgtgaggaa

SEQ ID NO: 80535 - DNA, 33 bp, Homo sapien
ttttcattatgaatcagcacggtcatttagtca

SEQ ID NO: 80536 - DNA, 33 bp, Homo sapien
ttttcattatgaatcatcacggtcatttagtca

SEQ ID NO: 80537 - DNA, 33 bp, Homo sapien
atttaatggtggctcaacattccactattcaga

SEQ ID NO: 80538 - DNA, 33 bp, Homo sapien
atttaatggtggctcagcattccactattcaga

SEQ ID NO: 80539 - DNA, 33 bp, Homo sapien
tctctggcacaggtataaaatccatagtcagat

SEQ ID NO: 80540 - DNA, 33 bp, Homo sapien
tctctggcacaggtatcaaatccatagtcagat

SEQ ID NO: 80541 - DNA, 33 bp, Homo sapien
tcggggagagacgatcacgacacaggggcctca

SEQ ID NO: 80542 - DNA, 33 bp, Homo sapien
tcggggagagacgatcgcgacacaggggcctca

SEQ ID NO: 80543 - DNA, 33 bp, Homo sapien
ccttaatgtcaggtataaactcttggttgctga

SEQ ID NO: 80544 - DNA, 33 bp, Homo sapien
ccttaatgtcaggtatgaactcttggttgctga

SEQ ID NO: 80545 - DNA, 33 bp, Homo sapien
agcggtacgttcatgccacttttgcagaagttt

SEQ ID NO: 80546 - DNA, 33 bp, Homo sapien
agcggtacgttcatgctacttttgcagaagttt

SEQ ID NO: 80547 - DNA, 33 bp, Homo sapien
tgctggcgataatgagcagtcgcgccgtctctg

SEQ ID NO: 80548 - DNA, 33 bp, Homo sapien
tgctggcgataatgagtagtcgcgccgtctctg

SEQ ID NO: 80549 - DNA, 33 bp, Homo sapien
tctagtctaaaaaatagctagtcatgacgccag

SEQ ID NO: 80550 - DNA, 33 bp, Homo sapien
tctagtctaaaaaatatctagtcatgacgccag

SEQ ID NO: 80551 - DNA, 33 bp, Homo sapien
atggtcacttcccaacaaaaaatacatcccttg

SEQ ID NO: 80552 - DNA, 33 bp, Homo sapien
atggtcacttcccaactaaaaatacatcccttg

SEQ ID NO: 80553 - DNA, 33 bp, Homo sapien
tggtgtgatgagtgtaaacgtaggtgggaaatc

SEQ ID NO: 80554 - DNA, 33 bp, Homo sapien
tggtgtgatgagtgtatacgtaggtgggaaatc

SEQ ID NO: 80555 - DNA, 33 bp, Homo sapien
gattctaaaactcttacgtggctggcttactaa

SEQ ID NO: 80556 - DNA, 33 bp, Homo sapien
gattctaaaactcttatgtggctggcttactaa

SEQ ID NO: 80557 - DNA, 33 bp, Homo sapien
gagactggaagtataaagtggatattcagtaga

SEQ ID NO: 80558 - DNA, 33 bp, Homo sapien
gagactggaagtataaggtggatattcagtaga

SEQ ID NO: 80559 - DNA, 33 bp, Homo sapien
acataaatttggatgaaagacattttagtctat

SEQ ID NO: 80560 - DNA, 33 bp, Homo sapien
acataaatttggatgacagacattttagtctat

SEQ ID NO: 80561 - DNA, 33 bp, Homo sapien
gataagagtttagagccagattggtaaagggag

SEQ ID NO: 80562 - DNA, 33 bp, Homo sapien
gataagagtttagagctagattggtaaagggag

SEQ ID NO: 80563 - DNA, 33 bp, Homo sapien
agagtcttaaaaatcacaccaaaattccactct

SEQ ID NO: 80564 - DNA, 33 bp, Homo sapien
agagtcttaaaaatcagaccaaaattccactct

SEQ ID NO: 80565 - DNA, 33 bp, Homo sapien
gatgtcttcatattcacgtttagggaaaagaat

SEQ ID NO: 80566 - DNA, 33 bp, Homo sapien
gatgtcttcatattcatgtttagggaaaagaat

SEQ ID NO: 80567 - DNA, 33 bp, Homo sapien
acaagtatcaaaaatacaatgttgagcaagaag

SEQ ID NO: 80568 - DNA, 33 bp, Homo sapien
acaagtatcaaaaatataatgttgagcaagaag

SEQ ID NO: 80569 - DNA, 33 bp, Homo sapien
tcacaggttctgcaaccaggatgagtttatatg

SEQ ID NO: 80570 - DNA, 33 bp, Homo sapien
tcacaggttctgcaacgaggatgagtttatatg

SEQ ID NO: 80571 - DNA, 33 bp, Homo sapien
tgatcaaatccttatacagagcttaccaggtgc

SEQ ID NO: 80572 - DNA, 33 bp, Homo sapien
tgatcaaatccttatatagagcttaccaggtgc

SEQ ID NO: 80573 - DNA, 33 bp, Homo sapien
tatttgttactatttacgttgcgattgaaatta

SEQ ID NO: 80574 - DNA, 33 bp, Homo sapien
tatttgttactatttatgttgcgattgaaatta

SEQ ID NO: 80575 - DNA, 33 bp, Homo sapien; identical to SEQ ID NO: 80573

SEQ ID NO: 80576 - DNA, 33 bp, Homo sapien; identical to SEQ ID NO: 80574

SEQ ID NO: 80577 - DNA, 33 bp, Homo sapien
tgagttgggggttgtacggtgaattgtgactga

SEQ ID NO: 80578 - DNA, 33 bp, Homo sapien
tgagttgggggttgtatggtgaattgtgactga

SEQ ID NO: 80579 - DNA, 33 bp, Homo sapien
ccatgagcccttcaaacaaccaacctgacacta

SEQ ID NO: 80580 - DNA, 33 bp, Homo sapien
ccatgagcccttcaaataaccaacctgacacta

SEQ ID NO: 80581 - DNA, 33 bp, Homo sapien
gatccaatgatagcgtaaagtccgtgaaagcct

SEQ ID NO: 80582 - DNA, 33 bp, Homo sapien
gatccaatgatagcgtgaagtccgtgaaagcct

SEQ ID NO: 80583 - DNA, 33 bp, Homo sapien
tctctttactctctccaatggaaactacggctc

SEQ ID NO: 80584 - DNA, 33 bp, Homo sapien
tctctttactctctccgatggaaactacggctc

SEQ ID NO: 80585 - DNA, 33 bp, Homo sapien
aactgcaaccatgacaagggtctcaaaggagag

SEQ ID NO: 80586 - DNA, 33 bp, Homo sapien
aactgcaaccatgacacgggtctcaaaggagag

SEQ ID NO: 80587 - DNA, 33 bp, Homo sapien
ggattgctatcatccacgttcttctcagtgtta

SEQ ID NO: 80588 - DNA, 33 bp, Homo sapien
ggattgctatcatccatgttcttctcagtgtta

SEQ ID NO: 80589 - DNA, 33 bp, Homo sapien
ttcagaggtgtcatagaagagccccctggggcc

SEQ ID NO: 80590 - DNA, 33 bp, Homo sapien
ttcagaggtgtcataggagagccccctggggcc

SEQ ID NO: 80591 - DNA, 33 bp, Homo sapien
cctgtgaacaagatgcacaaatgctgtggaaat

SEQ ID NO: 80592 - DNA, 33 bp, Homo sapien
cctgtgaacaagatgcgcaaatgctgtggaaat

SEQ ID NO: 80593 - DNA, 33 bp, Homo sapien
gcatctcacaggggaaagtaaggaagagaggag

SEQ ID NO: 80594 - DNA, 33 bp, Homo sapien
gcatctcacaggggaaggtaaggaagagaggag

SEQ ID NO: 80595 - DNA, 33 bp, Homo sapien
gcacatcagagaagccaagaaagcggggccgta

SEQ ID NO: 80596 - DNA, 33 bp, Homo sapien
gcacatcagagaagccgagaaagcggggccgta

SEQ ID NO: 80597 - DNA, 33 bp, Homo sapien
attggtctggaaattacatttgcctctttgcag

SEQ ID NO: 80598 - DNA, 33 bp, Homo sapien
attggtctggaaattatatttgcctctttgcag

SEQ ID NO: 80599 - DNA, 33 bp, Homo sapien
aagatcaacctgaaggccctacctaaaccaaac

SEQ ID NO: 80600 - DNA, 33 bp, Homo sapien
aagatcaacctgaaggtcctacctaaaccaaac

SEQ ID NO: 80601 - DNA, 33 bp, Homo sapien
gggaataaagaacaaccacaatgggctggtgca

SEQ ID NO: 80602 - DNA, 33 bp, Homo sapien
gggaataaagaacaactacaatgggctggtgca

SEQ ID NO: 80603 - DNA, 33 bp, Homo sapien
ctgtaaattcgaaaaaatcattcagccagacca

SEQ ID NO: 80604 - DNA, 33 bp, Homo sapien
ctgtaaattcgaaaaagtcattcagccagacca

SEQ ID NO: 80605 - DNA, 33 bp, Homo sapien
tatattgatctgtcaacactcagcaaataaagc

SEQ ID NO: 80606 - DNA, 33 bp, Homo sapien
tatattgatctgtcaatactcagcaaataaagc

SEQ ID NO: 80607 - DNA, 33 bp, Homo sapien
ataatggaaacgtgaaagcaagattcctcaggg

SEQ ID NO: 80608 - DNA, 33 bp, Homo sapien
ataatggaaacgtgaacgcaagattcctcaggg

SEQ ID NO: 80609 - DNA, 33 bp, Homo sapien
tacatctcatacataccgataccaactgcaaat

SEQ ID NO: 80610 - DNA, 33 bp, Homo sapien
tacatctcatacatactgataccaactgcaaat

SEQ ID NO: 80611 - DNA, 33 bp, Homo sapien
agcaaggaaggaatccagcgtgatgtaagtcag

SEQ ID NO: 80612 - DNA, 33 bp, Homo sapien
agcaaggaaggaatccggcgtgatgtaagtcag

SEQ ID NO: 80613 - DNA, 33 bp, Homo sapien
gaggcagaaaatatgcacggaaagttacatgag

SEQ ID NO: 80614 - DNA, 33 bp, Homo sapien
gaggcagaaaatatgcgcggaaagttacatgag

SEQ ID NO: 80615 - DNA, 33 bp, Homo sapien
aactctattacagtcaacgagcgtcatgctcac

SEQ ID NO: 80616 - DNA, 33 bp, Homo sapien
aactctattacagtcagcgagcgtcatgctcac

SEQ ID NO: 80617 - DNA, 33 bp, Homo sapien
ctgattctggcccgtaccaaaggagagcaccac

SEQ ID NO: 80618 - DNA, 33 bp, Homo sapien
ctgattctggcccgtatcaaaggagagcaccac

SEQ ID NO: 80619 - DNA, 33 bp, Homo sapien
tgcatatgaatcacctcaggattttaaaatgca

SEQ ID NO: 80620 - DNA, 33 bp, Homo sapien
tgcatatgaatcacctgaggattttaaaatgca

SEQ ID NO: 80621 - DNA, 33 bp, Homo sapien
tgattgctagaagaaaatgatgctgtgaggacc

SEQ ID NO: 80622 - DNA, 33 bp, Homo sapien
tgattgctagaagaaagtgatgctgtgaggacc

SEQ ID NO: 80623 - DNA, 33 bp, Homo sapien
cagtgagtagatttgaccattggttggatgtat

SEQ ID NO: 80624 - DNA, 33 bp, Homo sapien
cagtgagtagatttgatcattggttggatgtat

SEQ ID NO: 80625 - DNA, 33 bp, Homo sapien
tcgaaactgagacccacaatggttggtaatttg

SEQ ID NO: 80626 - DNA, 33 bp, Homo sapien
tcgaaactgagacccagaatggttggtaatttg

SEQ ID NO: 80627 - DNA, 33 bp, Homo sapien
tgacagtcacatagagaagatcgtatccccaca

SEQ ID NO: 80628 - DNA, 33 bp, Homo sapien
tgacagtcacatagaggagatcgtatccccaca

SEQ ID NO: 80629 - DNA, 33 bp, Homo sapien
cttttgtattctgagtaacagcatttatcagat

SEQ ID NO: 80630 - DNA, 33 bp, Homo sapien
cttttgtattctgagtgacagcatttatcagat

SEQ ID NO: 80631 - DNA, 33 bp, Homo sapien
cttctctctcagatgcgcctatcttcctcttat

SEQ ID NO: 80632 - DNA, 33 bp, Homo sapien
cttctctctcagatgctcctatcttcctcttat

SEQ ID NO: 80633 - DNA, 33 bp, Homo sapien
ttgcagatgtgattaacggaaagatcctgagat

SEQ ID NO: 80634 - DNA, 33 bp, Homo sapien
ttgcagatgtgattaatggaaagatcctgagat

SEQ ID NO: 80635 - DNA, 33 bp, Homo sapien
atgaaggcccaaagagaagaaatgagcttagat

SEQ ID NO: 80636 - DNA, 33 bp, Homo sapien
atgaaggcccaaagaggagaaatgagcttagat

SEQ ID NO: 80637 - DNA, 33 bp, Homo sapien
ttcttcctattttatcaccctgcctctctttct

SEQ ID NO: 80638 - DNA, 33 bp, Homo sapien
ttcttcctattttatcgccctgcctctctttct

SEQ ID NO: 80639 - DNA, 33 bp, Homo sapien
tttcgaaactcatagacgttcacaagagaaaga

SEQ ID NO: 80640 - DNA, 33 bp, Homo sapien
tttcgaaactcatagatgttcacaagagaaaga

SEQ ID NO: 80641 - DNA, 33 bp, Homo sapien
attgtactccttctcaagataacactccatgta

SEQ ID NO: 80642 - DNA, 33 bp, Homo sapien
attgtactccttctcaggataacactccatgta

SEQ ID NO: 80643 - DNA, 33 bp, Homo sapien
ctgtctcacatcttggacagctatattattttt

SEQ ID NO: 80644 - DNA, 33 bp, Homo sapien
ctgtctcacatcttggtcagctatattattttt

SEQ ID NO: 80645 - DNA, 33 bp, Homo sapien
tatttgttaaaaatcacgtggaaggaaatgtaa

SEQ ID NO: 80646 - DNA, 33 bp, Homo sapien
tatttgttaaaaatcatgtggaaggaaatgtaa

SEQ ID NO: 80647 - DNA, 33 bp, Homo sapien
ggttggtgaacacaacaatgtcagaaataataa

SEQ ID NO: 80648 - DNA, 33 bp, Homo sapien
ggttggtgaacacaactatgtcagaaataataa

SEQ ID NO: 80649 - DNA, 33 bp, Homo sapien
tttcggtgtgctcttacgatcggtcggtcggac

SEQ ID NO: 80650 - DNA, 33 bp, Homo sapien
tttcggtgtgctcttatgatcggtcggtcggac

SEQ ID NO: 80651 - DNA, 33 bp, Homo sapien
gtatttagatctggcaaggacctgagagaatgg

SEQ ID NO: 80652 - DNA, 33 bp, Homo sapien
gtatttagatctggcagggacctgagagaatgg

SEQ ID NO: 80653 - DNA, 33 bp, Homo sapien
taacagcgcattcggccagtggttactcctagg

SEQ ID NO: 80654 - DNA, 33 bp, Homo sapien
taacagcgcattcggctagtggttactcctagg

SEQ ID NO: 80655 - DNA, 33 bp, Homo sapien
tacactcaacactagacccagcaaggaacagtc

SEQ ID NO: 80656 - DNA, 33 bp, Homo sapien
tacactcaacactagatccagcaaggaacagtc

SEQ ID NO: 80657 - DNA, 33 bp, Homo sapien
tgcatttaacctgatagaaacagatgagtgccc

SEQ ID NO: 80658 - DNA, 33 bp, Homo sapien
tgcatttaacctgatataaacagatgagtgccc

SEQ ID NO: 80659 - DNA, 33 bp, Homo sapien
acacagaaagatacaagggcaactgttttatat

SEQ ID NO: 80660 - DNA, 33 bp, Homo sapien
acacagaaagatacaatggcaactgttttatat

SEQ ID NO: 80661 - DNA, 33 bp, Homo sapien
cttctgcaaacccttacagtgcttacaattcac

SEQ ID NO: 80662 - DNA, 33 bp, Homo sapien
cttctgcaaacccttatagtgcttacaattcac

SEQ ID NO: 80663 - DNA, 33 bp, Homo sapien
tatgagtatagttacagtggcccatgagcactt

SEQ ID NO: 80664 - DNA, 33 bp, Homo sapien
tatgagtatagttacattggcccatgagcactt

SEQ ID NO: 80665 - DNA, 33 bp, Homo sapien
atatactgtataattcaaactatatgacatttt

SEQ ID NO: 80666 - DNA, 33 bp, Homo sapien
atatactgtataattcgaactatatgacatttt

SEQ ID NO: 80667 - DNA, 33 bp, Homo sapien
gaagagtctgagtccacctgtcgaatatgttgg

SEQ ID NO: 80668 - DNA, 33 bp, Homo sapien
gaagagtctgagtccatctgtcgaatatgttgg

SEQ ID NO: 80669 - DNA, 33 bp, Homo sapien
tggagttaaacacaaactgagtagaatttttaa

SEQ ID NO: 80670 - DNA, 33 bp, Homo sapien
tggagttaaacacaaattgagtagaatttttaa

SEQ ID NO: 80671 - DNA, 33 bp, Homo sapien
tatctaaagagagagactaaagactgctagaga

SEQ ID NO: 80672 - DNA, 33 bp, Homo sapien
tatctaaagagagagattaaagactgctagaga

SEQ ID NO: 80673 - DNA, 33 bp, Homo sapien
attcaaatgatagtgaagtggtccaaggtaaat

SEQ ID NO: 80674 - DNA, 33 bp, Homo sapien
attcaaatgatagtgaggtggtccaaggtaaat

SEQ ID NO: 80675 - DNA, 33 bp, Homo sapien
aaatctgtgatagtaacccagttgagagatgat

SEQ ID NO: 80676 - DNA, 33 bp, Homo sapien
aaatctgtgatagtaatccagttgagagatgat

SEQ ID NO: 80677 - DNA, 33 bp, Homo sapien
gcttaatttgtacttacgatgaagccttgccct

SEQ ID NO: 80678 - DNA, 33 bp, Homo sapien
gcttaatttgtacttaggatgaagccttgccct

SEQ ID NO: 80679 - DNA, 33 bp, Homo sapien
tagcttataaagtgacaaagatactagagaacc

SEQ ID NO: 80680 - DNA, 33 bp, Homo sapien
tagcttataaagtgacgaagatactagagaacc

SEQ ID NO: 80681 - DNA, 33 bp, Homo sapien
gatgctgagccttccgaagattttcagctctag

SEQ ID NO: 80682 - DNA, 33 bp, Homo sapien
gatgctgagccttccgtagattttcagctctag

SEQ ID NO: 80683 - DNA, 33 bp, Homo sapien
caaagccctggagataccagtgttagaagttta

SEQ ID NO: 80684 - DNA, 33 bp, Homo sapien
caaagccctggagatatcagtgttagaagttta

SEQ ID NO: 80685 - DNA, 33 bp, Homo sapien
aagcagaaacacttatcagaaggagtgagtcta

SEQ ID NO: 80686 - DNA, 33 bp, Homo sapien
aagcagaaacacttatgagaaggagtgagtcta

SEQ ID NO: 80687 - DNA, 33 bp, Homo sapien
tttggaaatatcagcaagagtgtgctaaatact

SEQ ID NO: 80688 - DNA, 33 bp, Homo sapien
tttggaaatatcagcaggagtgtgctaaatact

SEQ ID NO: 80689 - DNA, 33 bp, Homo sapien
cattgcaagaattcctcacctatgaagaaacag

SEQ ID NO: 80690 - DNA, 33 bp, Homo sapien
cattgcaagaattccttacctatgaagaaacag

SEQ ID NO: 80691 - DNA, 33 bp, Homo sapien
gtaggaggaataataacaattttggtcagagaa

SEQ ID NO: 80692 - DNA, 33 bp, Homo sapien
gtaggaggaataataataattttggtcagagaa

SEQ ID NO: 80693 - DNA, 33 bp, Homo sapien
ctaaggagaagcatgaagtatttcaccattaaa

SEQ ID NO: 80694 - DNA, 33 bp, Homo sapien
ctaaggagaagcatgaggtatttcaccattaaa

SEQ ID NO: 80695 - DNA, 33 bp, Homo sapien
tattctgtttgctgtaccttatttcccttaatc

SEQ ID NO: 80696 - DNA, 33 bp, Homo sapien
tattctgtttgctgtagcttatttcccttaatc

SEQ ID NO: 80697 - DNA, 33 bp, Homo sapien
accatctggctcctcaaaacttcgtctctttct

SEQ ID NO: 80698 - DNA, 33 bp, Homo sapien
accatctggctcctcataacttcgtctctttct

SEQ ID NO: 80699 - DNA, 33 bp, Homo sapien
agttctgagacaattgcatcgcttagcagtgta

SEQ ID NO: 80700 - DNA, 33 bp, Homo sapien
agttctgagacaattgtatcgcttagcagtgta

SEQ ID NO: 80701 - DNA, 33 bp, Homo sapien
attgtcagatacttccaaatagatcatacattt

SEQ ID NO: 80702 - DNA, 33 bp, Homo sapien
attgtcagatacttccgaatagatcatacattt

SEQ ID NO: 80703 - DNA, 33 bp, Homo sapien
cgagtaataaatcaacacaggatccttgactta

SEQ ID NO: 80704 - DNA, 33 bp, Homo sapien
cgagtaataaatcaacgcaggatccttgactta

SEQ ID NO: 80705 - DNA, 33 bp, Homo sapien
agcatcaaggatgaaaactgactgcagccattg

SEQ ID NO: 80706 - DNA, 33 bp, Homo sapien
agcatcaaggatgaaagctgactgcagccattg

SEQ ID NO: 80707 - DNA, 33 bp, Homo sapien
accaccctctcacccaaacgaaggcagctggcc

SEQ ID NO: 80708 - DNA, 33 bp, Homo sapien
accaccctctcacccacacgaaggcagctggcc

SEQ ID NO: 80709 - DNA, 33 bp, Homo sapien
tttattagttttattaagccacaattctaaatc

SEQ ID NO: 80710 - DNA, 33 bp, Homo sapien
tttattagttttattacgccacaattctaaatc

SEQ ID NO: 80711 - DNA, 33 bp, Homo sapien
tagtcaaagaagactcaagaactgagcataatt

SEQ ID NO: 80712 - DNA, 33 bp, Homo sapien
tagtcaaagaagactcgagaactgagcataatt

SEQ ID NO: 80713 - DNA, 33 bp, Homo sapien
ctctttcaatttctgcacctataaaatgcatga

SEQ ID NO: 80714 - DNA, 33 bp, Homo sapien
ctctttcaatttctgcgcctataaaatgcatga

SEQ ID NO: 80715 - DNA, 33 bp, Homo sapien
cacagctcatggtatacggaatgcaagggaaga

SEQ ID NO: 80716 - DNA, 33 bp, Homo sapien
cacagctcatggtatatggaatgcaagggaaga

SEQ ID NO: 80717 - DNA, 33 bp, Homo sapien
tcaaaaggaaacagacaaagccatattgtagag

SEQ ID NO: 80718 - DNA, 33 bp, Homo sapien
tcaaaaggaaacagacgaagccatattgtagag

SEQ ID NO: 80719 - DNA, 33 bp, Homo sapien
gaactggctgatgagcagcagaggaggcagggt

SEQ ID NO: 80720 - DNA, 33 bp, Homo sapien
gaactggctgatgagccgcagaggaggcagggt

SEQ ID NO: 80721 - DNA, 33 bp, Homo sapien
gtccaataagactcacaccaggagcttgctcaa

SEQ ID NO: 80722 - DNA, 33 bp, Homo sapien
gtccaataagactcacgccaggagcttgctcaa

SEQ ID NO: 80723 - DNA, 33 bp, Homo sapien
ggatctgtgcttttaacgtgtctgtgataagtt

SEQ ID NO: 80724 - DNA, 33 bp, Homo sapien
ggatctgtgcttttaatgtgtctgtgataagtt

SEQ ID NO: 80725 - DNA, 33 bp, Homo sapien
catacgttctgtaattcaagccacccagttggt

SEQ ID NO: 80726 - DNA, 33 bp, Homo sapien
catacgttctgtaattgaagccacccagttggt

SEQ ID NO: 80727 - DNA, 33 bp, Homo sapien
atggtagcaactcagacctgcggaatctgagtc

SEQ ID NO: 80728 - DNA, 33 bp, Homo sapien
atggtagcaactcagagctgcggaatctgagtc

SEQ ID NO: 80729 - DNA, 33 bp, Homo sapien
catttgatgaaattaaacatccctttatgataa

SEQ ID NO: 80730 - DNA, 33 bp, Homo sapien
catttgatgaaattaagcatccctttatgataa

SEQ ID NO: 80731 - DNA, 33 bp, Homo sapien
ttgcatctatatttatcagtgatattggtctgt

SEQ ID NO: 80732 - DNA, 33 bp, Homo sapien
ttgcatctatatttatgagtgatattggtctgt

SEQ ID NO: 80733 - DNA, 33 bp, Homo sapien
ccttgaccaagaggacagtccgttcagtcattt

SEQ ID NO: 80734 - DNA, 33 bp, Homo sapien
ccttgaccaagaggacggtccgttcagtcattt

SEQ ID NO: 80735 - DNA, 33 bp, Homo sapien
tctggctataaaaccaatggtaccatgtcttca

SEQ ID NO: 80736 - DNA, 33 bp, Homo sapien
tctggctataaaaccagtggtaccatgtcttca

SEQ ID NO: 80737 - DNA, 33 bp, Homo sapien
ccgggagcatgaagaaagtgctttacagaaggc

SEQ ID NO: 80738 - DNA, 33 bp, Homo sapien
ccgggagcatgaagaaggtgctttacagaaggc

SEQ ID NO: 80739 - DNA, 33 bp, Homo sapien
acaggagggtgagaaccgagtgtaagtgcatct

SEQ ID NO: 80740 - DNA, 33 bp, Homo sapien
acaggagggtgagaactgagtgtaagtgcatct

SEQ ID NO: 80741 - DNA, 33 bp, Homo sapien
gcattataaatgacaacgtaggccaagcatggt

SEQ ID NO: 80742 - DNA, 33 bp, Homo sapien
gcattataaatgacaatgtaggccaagcatggt

SEQ ID NO: 80743 - DNA, 33 bp, Homo sapien
gttgactgtatcgaacagaaatgaagacaagag

SEQ ID NO: 80744 - DNA, 33 bp, Homo sapien
gttgactgtatcgaacggaaatgaagacaagag

SEQ ID NO: 80745 - DNA, 33 bp, Homo sapien
gctataatcaaaagtgaatctagcaaggatgca

SEQ ID NO: 80746 - DNA, 33 bp, Homo sapien
gctataatcaaaagtgcatctagcaaggatgca

SEQ ID NO: 80747 - DNA, 33 bp, Homo sapien
ctttagagaagttaagcaactcagtgttctttc

SEQ ID NO: 80748 - DNA, 33 bp, Homo sapien
ctttagagaagttaagtaactcagtgttctttc

SEQ ID NO: 80749 - DNA, 33 bp, Homo sapien
cactgaccccctctgcaatgcaggtctgagtac

SEQ ID NO: 80750 - DNA, 33 bp, Homo sapien
cactgaccccctctgccatgcaggtctgagtac

SEQ ID NO: 80751 - DNA, 33 bp, Homo sapien
catctcagaaaaaaaaacacaggagtctgagac

SEQ ID NO: 80752 - DNA, 33 bp, Homo sapien
catctcagaaaaaaaagcacaggagtctgagac

SEQ ID NO: 80753 - DNA, 33 bp, Homo sapien
agtcagtgggaggtgacgagacaaggcacacag

SEQ ID NO: 80754 - DNA, 33 bp, Homo sapien
agtcagtgggaggtgatgagacaaggcacacag

SEQ ID NO: 80755 - DNA, 33 bp, Homo sapien
cccttgagattttctacgctgaccaaatacttt

SEQ ID NO: 80756 - DNA, 33 bp, Homo sapien
cccttgagattttctatgctgaccaaatacttt

SEQ ID NO: 80757 - DNA, 33 bp, Homo sapien
agaggaaaatgaaacacagtgtaaaccaaaaat

SEQ ID NO: 80758 - DNA, 33 bp, Homo sapien
agaggaaaatgaaacagagtgtaaaccaaaaat

SEQ ID NO: 80759 - DNA, 33 bp, Homo sapien
cacatgaacagtaaaacgtctccaccctggagg

SEQ ID NO: 80760 - DNA, 33 bp, Homo sapien
cacatgaacagtaaaatgtctccaccctggagg

SEQ ID NO: 80761 - DNA, 33 bp, Homo sapien
ttggctggcattcatccacatctgtaaaacagc

SEQ ID NO: 80762 - DNA, 33 bp, Homo sapien
ttggctggcattcatctacatctgtaaaacagc

SEQ ID NO: 80763 - DNA, 33 bp, Homo sapien
cttgacagctcctgaggcacctccaagagctcc

SEQ ID NO: 80764 - DNA, 33 bp, Homo sapien
cttgacagctcctgagtcacctccaagagctcc

SEQ ID NO: 80765 - DNA, 33 bp, Homo sapien
gatagtaataaggtgcagaagtaacccagtctg

SEQ ID NO: 80766 - DNA, 33 bp, Homo sapien
gatagtaataaggtgcggaagtaacccagtctg

SEQ ID NO: 80767 - DNA, 33 bp, Homo sapien
tctacccctgcttgacagagatataagaatctg

SEQ ID NO: 80768 - DNA, 33 bp, Homo sapien
tctacccctgcttgacggagatataagaatctg

SEQ ID NO: 80769 - DNA, 33 bp, Homo sapien
gaacctgctatggtacagcctttgattctgact

SEQ ID NO: 80770 - DNA, 33 bp, Homo sapien
gaacctgctatggtacggcctttgattctgact

SEQ ID NO: 80771 - DNA, 33 bp, Homo sapien
gggaaggccaccacaaaaccaaggaaacatccc

SEQ ID NO: 80772 - DNA, 33 bp, Homo sapien
gggaaggccaccacaacaccaaggaaacatccc

SEQ ID NO: 80773 - DNA, 33 bp, Homo sapien
gaagtcttaggaagcccagatatccttggagtt

SEQ ID NO: 80774 - DNA, 33 bp, Homo sapien
gaagtcttaggaagcctagatatccttggagtt

SEQ ID NO: 80775 - DNA, 33 bp, Homo sapien
catctctgatgctcaactgtaaccacgctatga

SEQ ID NO: 80776 - DNA, 33 bp, Homo sapien
catctctgatgctcaattgtaaccacgctatga

SEQ ID NO: 80777 - DNA, 33 bp, Homo sapien
tcagcctctactttcccaagctcttatctttac

SEQ ID NO: 80778 - DNA, 33 bp, Homo sapien
tcagcctctactttcctaagctcttatctttac

SEQ ID NO: 80779 - DNA, 33 bp, Homo sapien
acaaaccaccatgtaacgctcacaactgacatc

SEQ ID NO: 80780 - DNA, 33 bp, Homo sapien
acaaaccaccatgtaatgctcacaactgacatc

SEQ ID NO: 80781 - DNA, 33 bp, Homo sapien
gcctttggaatttctgaagtgataagagtgtct

SEQ ID NO: 80782 - DNA, 33 bp, Homo sapien
gcctttggaatttctggagtgataagagtgtct

SEQ ID NO: 80783 - DNA, 33 bp, Homo sapien
gatacaactctggaacaaccaaatggaagagag

SEQ ID NO: 80784 - DNA, 33 bp, Homo sapien
gatacaactctggaacgaccaaatggaagagag

SEQ ID NO: 80785 - DNA, 33 bp, Homo sapien
catttgcagtgctgcacgacatttgtcctaaaa

SEQ ID NO: 80786 - DNA, 33 bp, Homo sapien
catttgcagtgctgcatgacatttgtcctaaaa

SEQ ID NO: 80787 - DNA, 33 bp, Homo sapien
tcaccctagtgccaaagtaacgatcaaccgatt

SEQ ID NO: 80788 - DNA, 33 bp, Homo sapien
tcaccctagtgccaaattaacgatcaaccgatt

SEQ ID NO: 80789 - DNA, 33 bp, Homo sapien
taaatgttatttctgacggcgaatgaattcaaa

SEQ ID NO: 80790 - DNA, 33 bp, Homo sapien
taaatgttatttctgatggcgaatgaattcaaa

SEQ ID NO: 80791 - DNA, 33 bp, Homo sapien
tcatttactatttatagccctgcactcgcctca

SEQ ID NO: 80792 - DNA, 33 bp, Homo sapien
tcatttactatttatatccctgcactcgcctca

SEQ ID NO: 80793 - DNA, 33 bp, Homo sapien
tgtttggaactactaagtctaaaggagtgacag

SEQ ID NO: 80794 - DNA, 33 bp, Homo sapien
tgtttggaactactaattctaaaggagtgacag

SEQ ID NO: 80795 - DNA, 33 bp, Homo sapien
tccttcctttgccttcaccctattataccaatg

SEQ ID NO: 80796 - DNA, 33 bp, Homo sapien
tccttcctttgccttcgccctattataccaatg

SEQ ID NO: 80797 - DNA, 33 bp, Homo sapien
tatgcaggaacaaagggatgaggataaacaaaa

SEQ ID NO: 80798 - DNA, 33 bp, Homo sapien
tatgcaggaacaaaggtatgaggataaacaaaa

SEQ ID NO: 80799 - DNA, 33 bp, Homo sapien
tagccatgtggtgttacgtgcgatcccccaaac

SEQ ID NO: 80800 - DNA, 33 bp, Homo sapien
tagccatgtggtgttatgtgcgatcccccaaac

SEQ ID NO: 80801 - DNA, 33 bp, Homo sapien
aaataaggtagatactaaaatgagcctatgagt

SEQ ID NO: 80802 - DNA, 33 bp, Homo sapien
aaataaggtagatactcaaatgagcctatgagt

SEQ ID NO: 80803 - DNA, 33 bp, Homo sapien
atgcatacagtgacaacgttcccttgctcctct

SEQ ID NO: 80804 - DNA, 33 bp, Homo sapien
atgcatacagtgacaatgttcccttgctcctct

SEQ ID NO: 80805 - DNA, 33 bp, Homo sapien
aacctgcttgctctcaatcctcgcagctcacac

SEQ ID NO: 80806 - DNA, 33 bp, Homo sapien
aacctgcttgctctcagtcctcgcagctcacac

SEQ ID NO: 80807 - DNA, 33 bp, Homo sapien
aaatgaaataaaataacgcatgtaagtgcctag

SEQ ID NO: 80808 - DNA, 33 bp, Homo sapien
aaatgaaataaaataatgcatgtaagtgcctag

SEQ ID NO: 80809 - DNA, 33 bp, Homo sapien
gtgggaaaacagcaggcattgcaatttcaaaag

SEQ ID NO: 80810 - DNA, 33 bp, Homo sapien
gtgggaaaacagcagggattgcaatttcaaaag

SEQ ID NO: 80811 - DNA, 33 bp, Homo sapien
cggggcctctgctggccaaatcctactagccaa

SEQ ID NO: 80812 - DNA, 33 bp, Homo sapien
cggggcctctgctggctaaatcctactagccaa

SEQ ID NO: 80813 - DNA, 33 bp, Homo sapien
cagtcataaaatacaaatcagatcttaattcaa

SEQ ID NO: 80814 - DNA, 33 bp, Homo sapien
cagtcataaaatacaagtcagatcttaattcaa

SEQ ID NO: 80815 - DNA, 33 bp, Homo sapien
ttcctggattcctgagcagtatagaggcagggt

SEQ ID NO: 80816 - DNA, 33 bp, Homo sapien
ttcctggattcctgagtagtatagaggcagggt

SEQ ID NO: 80817 - DNA, 33 bp, Homo sapien
atgagctcccaacaccaactatgagcccctacc

SEQ ID NO: 80818 - DNA, 33 bp, Homo sapien
atgagctcccaacaccgactatgagcccctacc

SEQ ID NO: 80819 - DNA, 33 bp, Homo sapien
cttgactaaactgaccaccaagagccacagccg

SEQ ID NO: 80820 - DNA, 33 bp, Homo sapien
cttgactaaactgaccgccaagagccacagccg

SEQ ID NO: 80821 - DNA, 33 bp, Homo sapien
acctaggtgcacacacaactctggctggccatg

SEQ ID NO: 80822 - DNA, 33 bp, Homo sapien
acctaggtgcacacacgactctggctggccatg

SEQ ID NO: 80823 - DNA, 33 bp, Homo sapien
ggtggcagggtctccacgaagaaggtttaagag

SEQ ID NO: 80824 - DNA, 33 bp, Homo sapien
ggtggcagggtctccatgaagaaggtttaagag

SEQ ID NO: 80825 - DNA, 33 bp, Homo sapien
gttcttttttgattccacacaagtaagtcatac

SEQ ID NO: 80826 - DNA, 33 bp, Homo sapien
gttcttttttgattccgcacaagtaagtcatac

SEQ ID NO: 80827 - DNA, 33 bp, Homo sapien
ttacttatgtgaaacactcaggaatgagaaagg

SEQ ID NO: 80828 - DNA, 33 bp, Homo sapien
ttacttatgtgaaacattcaggaatgagaaagg

SEQ ID NO: 80829 - DNA, 33 bp, Homo sapien
tcgcgctaacctacaaaagtccctccagtctct

SEQ ID NO: 80830 - DNA, 33 bp, Homo sapien
tcgcgctaacctacaacagtccctccagtctct

SEQ ID NO: 80831 - DNA, 33 bp, Homo sapien
acagtgctccttgaacagattaactgcattaat

SEQ ID NO: 80832 - DNA, 33 bp, Homo sapien
acagtgctccttgaacggattaactgcattaat

SEQ ID NO: 80833 - DNA, 33 bp, Homo sapien
ttgaattagaatttagaaataggcagatccaag

SEQ ID NO: 80834 - DNA, 33 bp, Homo sapien
ttgaattagaatttaggaataggcagatccaag

SEQ ID NO: 80835 - DNA, 33 bp, Homo sapien
tttaataaaaagcttgcactcagtggaaaaaat

SEQ ID NO: 80836 - DNA, 33 bp, Homo sapien
tttaataaaaagcttggactcagtggaaaaaat

SEQ ID NO: 80837 - DNA, 33 bp, Homo sapien
acttttaaaattgaaccgcatttggctaaacga

SEQ ID NO: 80838 - DNA, 33 bp, Homo sapien
acttttaaaattgaactgcatttggctaaacga

SEQ ID NO: 80839 - DNA, 33 bp, Homo sapien
atttggctaaacgataagtaagttttgatgctt

SEQ ID NO: 80840 - DNA, 33 bp, Homo sapien
atttggctaaacgataggtaagttttgatgctt

SEQ ID NO: 80841 - DNA, 33 bp, Homo sapien
tgcttataggcagaagaatttccccagtgtagg

SEQ ID NO: 80842 - DNA, 33 bp, Homo sapien
tgcttataggcagaagcatttccccagtgtagg

SEQ ID NO: 80843 - DNA, 33 bp, Homo sapien
agttctttgcagcagacggaaaagggacatagg

SEQ ID NO: 80844 - DNA, 33 bp, Homo sapien
agttctttgcagcagatggaaaagggacatagg

SEQ ID NO: 80845 - DNA, 33 bp, Homo sapien
aattctgcttggtatgaattttttatattttgc

SEQ ID NO: 80846 - DNA, 33 bp, Homo sapien
aattctgcttggtatggattttttatattttgc

SEQ ID NO: 80847 - DNA, 33 bp, Homo sapien
acctaaactggtgtaacaatatagcagatattc

SEQ ID NO: 80848 - DNA, 33 bp, Homo sapien
acctaaactggtgtaagaatatagcagatattc

SEQ ID NO: 80849 - DNA, 33 bp, Homo sapien
ttttcttagtttaaaagcagtgtatattgtcgt

SEQ ID NO: 80850 - DNA, 33 bp, Homo sapien
ttttcttagtttaaaatcagtgtatattgtcgt

SEQ ID NO: 80851 - DNA, 33 bp, Homo sapien
ttctttctctttccccaactcagaagaaggtta

SEQ ID NO: 80852 - DNA, 33 bp, Homo sapien
ttctttctctttcccccactcagaagaaggtta

SEQ ID NO: 80853 - DNA, 33 bp, Homo sapien
cactcagatgagctgaataaggagtctagggat

SEQ ID NO: 80854 - DNA, 33 bp, Homo sapien
cactcagatgagctgagtaaggagtctagggat

SEQ ID NO: 80855 - DNA, 33 bp, Homo sapien
tattccaggttggaaacagtaatgttcagagag

SEQ ID NO: 80856 - DNA, 33 bp, Homo sapien
tattccaggttggaaatagtaatgttcagagag

SEQ ID NO: 80857 - DNA, 33 bp, Homo sapien
ttccaagaattacctgacacttttgtttttgag

SEQ ID NO: 80858 - DNA, 33 bp, Homo sapien
ttccaagaattacctggcacttttgtttttgag

SEQ ID NO: 80859 - DNA, 33 bp, Homo sapien
gaggtataatgaaatacgatacactgcatataa

SEQ ID NO: 80860 - DNA, 33 bp, Homo sapien
gaggtataatgaaatatgatacactgcatataa

SEQ ID NO: 80861 - DNA, 33 bp, Homo sapien
ggaggagcaagtctgagacaaagttatagtcaa

SEQ ID NO: 80862 - DNA, 33 bp, Homo sapien
ggaggagcaagtctgatacaaagttatagtcaa

SEQ ID NO: 80863 - DNA, 33 bp, Homo sapien
ttcaataggacttgcacattgcccatgccaaaa

SEQ ID NO: 80864 - DNA, 33 bp, Homo sapien
ttcaataggacttgcagattgcccatgccaaaa

SEQ ID NO: 80865 - DNA, 33 bp, Homo sapien
gtagttgctgtatggaaatagaagtagaagcag

SEQ ID NO: 80866 - DNA, 33 bp, Homo sapien
gtagttgctgtatggacatagaagtagaagcag

SEQ ID NO: 80867 - DNA, 33 bp, Homo sapien
acacagactgaaaagacagaaaaagatgttcta

SEQ ID NO: 80868 - DNA, 33 bp, Homo sapien
acacagactgaaaagatagaaaaagatgttcta

SEQ ID NO: 80869 - DNA, 33 bp, Homo sapien
taagggggtcaatttaccaagaagttacaaaaa

SEQ ID NO: 80870 - DNA, 33 bp, Homo sapien
taagggggtcaatttatcaagaagttacaaaaa

SEQ ID NO: 80871 - DNA, 33 bp, Homo sapien
cttttctggtaatgcagccctaaacaatatgct

SEQ ID NO: 80872 - DNA, 33 bp, Homo sapien
cttttctggtaatgcatccctaaacaatatgct

SEQ ID NO: 80873 - DNA, 33 bp, Homo sapien
atccaccgttgatgggcacttgactacgtgatg

SEQ ID NO: 80874 - DNA, 33 bp, Homo sapien
atccaccgttgatgggtacttgactacgtgatg

SEQ ID NO: 80875 - DNA, 33 bp, Homo sapien
atattgtttagggatgcattaccagaaaaggaa

SEQ ID NO: 80876 - DNA, 33 bp, Homo sapien
atattgtttagggatgtattaccagaaaaggaa

SEQ ID NO: 80877 - DNA, 33 bp, Homo sapien
atagatgccataataaagtgttaacaaaagagg

SEQ ID NO: 80878 - DNA, 33 bp, Homo sapien
atagatgccataataacgtgttaacaaaagagg

SEQ ID NO: 80879 - DNA, 33 bp, Homo sapien
ctagaagcttgaaaagaagcctccagaaggaaa

SEQ ID NO: 80880 - DNA, 33 bp, Homo sapien
ctagaagcttgaaaaggagcctccagaaggaaa

SEQ ID NO: 80881 - DNA, 33 bp, Homo sapien
atactttcagcggttccattcctaagcatataa

SEQ ID NO: 80882 - DNA, 33 bp, Homo sapien
atactttcagcggttctattcctaagcatataa

SEQ ID NO: 80883 - DNA, 33 bp, Homo sapien
cagttttaccaatttaccagcccctcaacaatg

SEQ ID NO: 80884 - DNA, 33 bp, Homo sapien
cagttttaccaatttatcagcccctcaacaatg

SEQ ID NO: 80885 - DNA, 33 bp, Homo sapien
gaatgaacaaagtacaaaatgtcagatggtaat

SEQ ID NO: 80886 - DNA, 33 bp, Homo sapien
gaatgaacaaagtacagaatgtcagatggtaat

SEQ ID NO: 80887 - DNA, 33 bp, Homo sapien
ttattcctcaaaaacacggggcaagcttactgc

SEQ ID NO: 80888 - DNA, 33 bp, Homo sapien
ttattcctcaaaaacatggggcaagcttactgc

SEQ ID NO: 80889 - DNA, 33 bp, Homo sapien
tgaaaaggtgatggagaattaaggagaaagaaa

SEQ ID NO: 80890 - DNA, 33 bp, Homo sapien
tgaaaaggtgatggaggattaaggagaaagaaa

SEQ ID NO: 80891 - DNA, 33 bp, Homo sapien
aaaatgtgaagcttaaggaagataaacccaaat

SEQ ID NO: 80892 - DNA, 33 bp, Homo sapien
aaaatgtgaagcttaatgaagataaacccaaat

SEQ ID NO: 80893 - DNA, 33 bp, Homo sapien
aaacattaaaaatgcaagcaagacagctaacaa

SEQ ID NO: 80894 - DNA, 33 bp, Homo sapien
aaacattaaaaatgcaggcaagacagctaacaa

SEQ ID NO: 80895 - DNA, 33 bp, Homo sapien
catacttgaaccctcaactgaaggattacgtct

SEQ ID NO: 80896 - DNA, 33 bp, Homo sapien
catacttgaaccctcacctgaaggattacgtct

SEQ ID NO: 80897 - DNA, 33 bp, Homo sapien
cagtaaaagaaaagaacagtgatgctacttact

SEQ ID NO: 80898 - DNA, 33 bp, Homo sapien
cagtaaaagaaaagaatagtgatgctacttact

SEQ ID NO: 80899 - DNA, 33 bp, Homo sapien
tttggccttcttgggacgtagtgaggggacatg

SEQ ID NO: 80900 - DNA, 33 bp, Homo sapien
tttggccttcttgggatgtagtgaggggacatg

SEQ ID NO: 80901 - DNA, 33 bp, Homo sapien
tgtgacaaggaagacccaattagcagtataatt

SEQ ID NO: 80902 - DNA, 33 bp, Homo sapien
tgtgacaaggaagacctaattagcagtataatt

SEQ ID NO: 80903 - DNA, 33 bp, Homo sapien
taagatcacgtgtttaaagcctttgtctagtaa

SEQ ID NO: 80904 - DNA, 33 bp, Homo sapien
taagatcacgtgtttacagcctttgtctagtaa

SEQ ID NO: 80905 - DNA, 33 bp, Homo sapien
gagaacaaccactacaacaaaagatttaaatta

SEQ ID NO: 80906 - DNA, 33 bp, Homo sapien
gagaacaaccactacagcaaaagatttaaatta

SEQ ID NO: 80907 - DNA, 33 bp, Homo sapien
cctataaagaaatggcagattcaaggtctagat

SEQ ID NO: 80908 - DNA, 33 bp, Homo sapien
cctataaagaaatggcggattcaaggtctagat

SEQ ID NO: 80909 - DNA, 33 bp, Homo sapien
gtaatagacaagattcacaaagcaggtctgggg

SEQ ID NO: 80910 - DNA, 33 bp, Homo sapien
gtaatagacaagattcgcaaagcaggtctgggg

SEQ ID NO: 80911 - DNA, 33 bp, Homo sapien
gccagttcttaggacaactctgttttaatgagc

SEQ ID NO: 80912 - DNA, 33 bp, Homo sapien
gccagttcttaggacagctctgttttaatgagc

SEQ ID NO: 80913 - DNA, 33 bp, Homo sapien
ttccgtctcaatgcccactaaaactggcctttt

SEQ ID NO: 80914 - DNA, 33 bp, Homo sapien
ttccgtctcaatgcccgctaaaactggcctttt

SEQ ID NO: 80915 - DNA, 33 bp, Homo sapien
atgaggtgactgcttacacaaggagatgttaca

SEQ ID NO: 80916 - DNA, 33 bp, Homo sapien
atgaggtgactgcttatacaaggagatgttaca

SEQ ID NO: 80917 - DNA, 33 bp, Homo sapien
gaggtccagaagagaaagagtgagccaggagtg

SEQ ID NO: 80918 - DNA, 33 bp, Homo sapien
gaggtccagaagagaatgagtgagccaggagtg

SEQ ID NO: 80919 - DNA, 33 bp, Homo sapien
ccatgaccggttctaaagctcctgtcagtggat

SEQ ID NO: 80920 - DNA, 33 bp, Homo sapien
ccatgaccggttctaaggctcctgtcagtggat

SEQ ID NO: 80921 - DNA, 33 bp, Homo sapien
tcaatgagcaatcaaaatagcctcctatcagag

SEQ ID NO: 80922 - DNA, 33 bp, Homo sapien
tcaatgagcaatcaaagtagcctcctatcagag

SEQ ID NO: 80923 - DNA, 33 bp, Homo sapien
cactttgttgtgtgtcaactgtatgtcaataca

SEQ ID NO: 80924 - DNA, 33 bp, Homo sapien
cactttgttgtgtgtcgactgtatgtcaataca

SEQ ID NO: 80925 - DNA, 33 bp, Homo sapien
gaaacattaccatattcaagacagtgaacaagt

SEQ ID NO: 80926 - DNA, 33 bp, Homo sapien
gaaacattaccatattgaagacagtgaacaagt

SEQ ID NO: 80927 - DNA, 33 bp, Homo sapien
tagctctaagttgtcccacagttaactagggct

SEQ ID NO: 80928 - DNA, 33 bp, Homo sapien
tagctctaagttgtcctacagttaactagggct

SEQ ID NO: 80929 - DNA, 33 bp, Homo sapien
acccagcacttacataccaaagagaagtggtgg

SEQ ID NO: 80930 - DNA, 33 bp, Homo sapien
acccagcacttacatatcaaagagaagtggtgg

SEQ ID NO: 80931 - DNA, 33 bp, Homo sapien
aggtcagaaactcagagtacataaagaaaggaa

SEQ ID NO: 80932 - DNA, 33 bp, Homo sapien
aggtcagaaactcagattacataaagaaaggaa

SEQ ID NO: 80933 - DNA, 33 bp, Homo sapien
gctcaaggacaaagctaaagaggaggtatagga

SEQ ID NO: 80934 - DNA, 33 bp, Homo sapien
gctcaaggacaaagctcaagaggaggtatagga

SEQ ID NO: 80935 - DNA, 33 bp, Homo sapien
aggcacggttccctctaaagttcccacatggtt

SEQ ID NO: 80936 - DNA, 33 bp, Homo sapien
aggcacggttccctctgaagttcccacatggtt

SEQ ID NO: 80937 - DNA, 33 bp, Homo sapien
agtgtcctttctctgcactgcaacttagaaatc

SEQ ID NO: 80938 - DNA, 33 bp, Homo sapien
agtgtcctttctctgcgctgcaacttagaaatc

SEQ ID NO: 80939 - DNA, 33 bp, Homo sapien
tactgttttgctatagaactggagaaatgaaag

SEQ ID NO: 80940 - DNA, 33 bp, Homo sapien
tactgttttgctatagtactggagaaatgaaag

SEQ ID NO: 80941 - DNA, 33 bp, Homo sapien
tggtgtggtctgatcacagctccctgaggtctg

SEQ ID NO: 80942 - DNA, 33 bp, Homo sapien
tggtgtggtctgatcatagctccctgaggtctg

SEQ ID NO: 80943 - DNA, 33 bp, Homo sapien
tagtcctgggtactgcacccaatgccacaggag

SEQ ID NO: 80944 - DNA, 33 bp, Homo sapien
tagtcctgggtactgcgcccaatgccacaggag

SEQ ID NO: 80945 - DNA, 33 bp, Homo sapien
aaggcagctgctagaactaaacgctgtaactga

SEQ ID NO: 80946 - DNA, 33 bp, Homo sapien
aaggcagctgctagaattaaacgctgtaactga

SEQ ID NO: 80947 - DNA, 33 bp, Homo sapien
atggtcatgtgctaacaagtgagagaacggagt

SEQ ID NO: 80948 - DNA, 33 bp, Homo sapien
atggtcatgtgctaacgagtgagagaacggagt

SEQ ID NO: 80949 - DNA, 33 bp, Homo sapien
gccttattctgtttcacgttccagcattaacct

SEQ ID NO: 80950 - DNA, 33 bp, Homo sapien
gccttattctgtttcatgttccagcattaacct

SEQ ID NO: 80951 - DNA, 33 bp, Homo sapien
ggttgccagtgaaaagcaaaggaacttgaaatt

SEQ ID NO: 80952 - DNA, 33 bp, Homo sapien
ggttgccagtgaaaagtaaaggaacttgaaatt

SEQ ID NO: 80953 - DNA, 33 bp, Homo sapien
tggccctgcatgacgcacagtgtcctcccctcc

SEQ ID NO: 80954 - DNA, 33 bp, Homo sapien
tggccctgcatgacgcgcagtgtcctcccctcc

SEQ ID NO: 80955 - DNA, 33 bp, Homo sapien
tcaccatgttaacctaacctctaactggtctct

SEQ ID NO: 80956 - DNA, 33 bp, Homo sapien
tcaccatgttaacctatcctctaactggtctct

SEQ ID NO: 80957 - DNA, 33 bp, Homo sapien
ttcattaaggcctgtgacaatagtgacacccag

SEQ ID NO: 80958 - DNA, 33 bp, Homo sapien
ttcattaaggcctgtggcaatagtgacacccag

SEQ ID NO: 80959 - DNA, 33 bp, Homo sapien
ttctaagaacatacaacgccaggctcttaagcc

SEQ ID NO: 80960 - DNA, 33 bp, Homo sapien
ttctaagaacatacaatgccaggctcttaagcc

SEQ ID NO: 80961 - DNA, 33 bp, Homo sapien
ttagcaaaactggccaaacttcaggcagtcatc

SEQ ID NO: 80962 - DNA, 33 bp, Homo sapien
ttagcaaaactggccagacttcaggcagtcatc

SEQ ID NO: 80963 - DNA, 33 bp, Homo sapien
ctaatctcttgataagcagcattgtttagctgg

SEQ ID NO: 80964 - DNA, 33 bp, Homo sapien
ctaatctcttgataaggagcattgtttagctgg

SEQ ID NO: 80965 - DNA, 33 bp, Homo sapien
gaatttgtagtccagcccttctgattttaccag

SEQ ID NO: 80966 - DNA, 33 bp, Homo sapien
gaatttgtagtccagctcttctgattttaccag

SEQ ID NO: 80967 - DNA, 33 bp, Homo sapien
tcctttctaactcaccagcattgattttctgtt

SEQ ID NO: 80968 - DNA, 33 bp, Homo sapien
tcctttctaactcacctgcattgattttctgtt

SEQ ID NO: 80969 - DNA, 33 bp, Homo sapien
ttttttagatatcagaagtcaaactttaacata

SEQ ID NO: 80970 - DNA, 33 bp, Homo sapien
ttttttagatatcagatgtcaaactttaacata

SEQ ID NO: 80971 - DNA, 33 bp, Homo sapien
tatagaaggagcagaactgaatcagcctatttg

SEQ ID NO: 80972 - DNA, 33 bp, Homo sapien
tatagaaggagcagaattgaatcagcctatttg

SEQ ID NO: 80973 - DNA, 33 bp, Homo sapien
acttctctttcttacagaggtgatttgactacc

SEQ ID NO: 80974 - DNA, 33 bp, Homo sapien
acttctctttcttacataggtgatttgactacc

SEQ ID NO: 80975 - DNA, 33 bp, Homo sapien
aaaaggaagctcaaataaatccttagtagaagc

SEQ ID NO: 80976 - DNA, 33 bp, Homo sapien
aaaaggaagctcaaattaatccttagtagaagc

SEQ ID NO: 80977 - DNA, 33 bp, Homo sapien
ttaaggtcatcggctgcattaacccttaacaag

SEQ ID NO: 80978 - DNA, 33 bp, Homo sapien
ttaaggtcatcggctggattaacccttaacaag

SEQ ID NO: 80979 - DNA, 33 bp, Homo sapien
taagcccattaatccacgaacagattaatccat

SEQ ID NO: 80980 - DNA, 33 bp, Homo sapien
taagcccattaatccatgaacagattaatccat

SEQ ID NO: 80981 - DNA, 33 bp, Homo sapien
tatgatactgtagtaaatgaagaaagcaagaca

SEQ ID NO: 80982 - DNA, 33 bp, Homo sapien
tatgatactgtagtaagtgaagaaagcaagaca

SEQ ID NO: 80983 - DNA, 33 bp, Homo sapien
atggtacattctgcataaggtcattttgaaaac

SEQ ID NO: 80984 - DNA, 33 bp, Homo sapien
atggtacattctgcatgaggtcattttgaaaac

SEQ ID NO: 80985 - DNA, 33 bp, Homo sapien
caatcaaaactcctataacactaaagacatccc

SEQ ID NO: 80986 - DNA, 33 bp, Homo sapien
caatcaaaactcctatgacactaaagacatccc

SEQ ID NO: 80987 - DNA, 33 bp, Homo sapien
ttctaaattgtcaagactagcaaagccgagtca

SEQ ID NO: 80988 - DNA, 33 bp, Homo sapien
ttctaaattgtcaagattagcaaagccgagtca

SEQ ID NO: 80989 - DNA, 33 bp, Homo sapien
ctctattttgaatgccacactgtgaaccttgca

SEQ ID NO: 80990 - DNA, 33 bp, Homo sapien
ctctattttgaatgccgcactgtgaaccttgca

SEQ ID NO: 80991 - DNA, 33 bp, Homo sapien
attggcttttaataacaattcatgaaccaggca

SEQ ID NO: 80992 - DNA, 33 bp, Homo sapien
attggcttttaataacgattcatgaaccaggca

SEQ ID NO: 80993 - DNA, 33 bp, Homo sapien
cttggccacttaggtaaccaaaggagccctcct

SEQ ID NO: 80994 - DNA, 33 bp, Homo sapien
cttggccacttaggtagccaaaggagccctcct

SEQ ID NO: 80995 - DNA, 33 bp, Homo sapien
agcctccaaatctgacaatgtataaccacctgg

SEQ ID NO: 80996 - DNA, 33 bp, Homo sapien
agcctccaaatctgaccatgtataaccacctgg

SEQ ID NO: 80997 - DNA, 33 bp, Homo sapien
taaaatggtaaagaaacgttttgctttactgag

SEQ ID NO: 80998 - DNA, 33 bp, Homo sapien
taaaatggtaaagaaaggttttgctttactgag

SEQ ID NO: 80999 - DNA, 33 bp, Homo sapien
tattcaggaaccaagaaactcgctggaaagaag

SEQ ID NO: 81000 - DNA, 33 bp, Homo sapien
tattcaggaaccaagagactcgctggaaagaag

SEQ ID NO: 81001 - DNA, 33 bp, Homo sapien
caagaaacatccactacgctgggctgaaaatct

SEQ ID NO: 81002 - DNA, 33 bp, Homo sapien
caagaaacatccactatgctgggctgaaaatct

SEQ ID NO: 81003 - DNA, 33 bp, Homo sapien
acatttaagttgggaacattgtcgaaactctgc

SEQ ID NO: 81004 - DNA, 33 bp, Homo sapien
acatttaagttgggaatattgtcgaaactctgc

SEQ ID NO: 81005 - DNA, 33 bp, Homo sapien
aattttatcgaatcgaaactgaagctgttaggt

SEQ ID NO: 81006 - DNA, 33 bp, Homo sapien
aattttatcgaatcgagactgaagctgttaggt

SEQ ID NO: 81007 - DNA, 33 bp, Homo sapien
atctcacctaatattacatgggccagtggtctt

SEQ ID NO: 81008 - DNA, 33 bp, Homo sapien
atctcacctaatattatatgggccagtggtctt

SEQ ID NO: 81009 - DNA, 33 bp, Homo sapien
tcaccaggcttacctccgaagttctacaggatc

SEQ ID NO: 81010 - DNA, 33 bp, Homo sapien
tcaccaggcttacctctgaagttctacaggatc

SEQ ID NO: 81011 - DNA, 33 bp, Homo sapien
ataatcggaagaggtaaaagacaccgtccatga

SEQ ID NO: 81012 - DNA, 33 bp, Homo sapien
ataatcggaagaggtagaagacaccgtccatga

SEQ ID NO: 81013 - DNA, 33 bp, Homo sapien
tgtacactatagcaccagatataatcgcaaaaa

SEQ ID NO: 81014 - DNA, 33 bp, Homo sapien
tgtacactatagcaccggatataatcgcaaaaa

SEQ ID NO: 81015 - DNA, 33 bp, Homo sapien
agctaattgggcctcaaagtatcaaatggtctc

SEQ ID NO: 81016 - DNA, 33 bp, Homo sapien
agctaattgggcctcagagtatcaaatggtctc

SEQ ID NO: 81017 - DNA, 33 bp, Homo sapien
tggatgtggtgacttaaacatacttttccagca

SEQ ID NO: 81018 - DNA, 33 bp, Homo sapien
tggatgtggtgacttacacatacttttccagca

SEQ ID NO: 81019 - DNA, 33 bp, Homo sapien
ggtcagatgacagggacagtctagttttagtct

SEQ ID NO: 81020 - DNA, 33 bp, Homo sapien
ggtcagatgacagggagagtctagttttagtct

SEQ ID NO: 81021 - DNA, 33 bp, Homo sapien
gacattcccacagcatcacagatctagttcaga

SEQ ID NO: 81022 - DNA, 33 bp, Homo sapien
gacattcccacagcattacagatctagttcaga

SEQ ID NO: 81023 - DNA, 33 bp, Homo sapien
gcttgtatccaaagcaagtattcagtaaaacca

SEQ ID NO: 81024 - DNA, 33 bp, Homo sapien
gcttgtatccaaagcaggtattcagtaaaacca

SEQ ID NO: 81025 - DNA, 33 bp, Homo sapien
agaacacccagcaggacctaatggtgcacaagc

SEQ ID NO: 81026 - DNA, 33 bp, Homo sapien
agaacacccagcaggatctaatggtgcacaagc

SEQ ID NO: 81027 - DNA, 33 bp, Homo sapien
tcagtccttgccatgaagtatggtggtgtctag

SEQ ID NO: 81028 - DNA, 33 bp, Homo sapien
tcagtccttgccatgacgtatggtggtgtctag

SEQ ID NO: 81029 - DNA, 33 bp, Homo sapien
cacccgaagacactaacttacagaagacacaac

SEQ ID NO: 81030 - DNA, 33 bp, Homo sapien
cacccgaagacactaatttacagaagacacaac

SEQ ID NO: 81031 - DNA, 33 bp, Homo sapien
ctggcccctcatacaactatagtggtgaccagt

SEQ ID NO: 81032 - DNA, 33 bp, Homo sapien
ctggcccctcatacaattatagtggtgaccagt

SEQ ID NO: 81033 - DNA, 33 bp, Homo sapien
cagccaggtctcaacactcttgagcatcttcaa

SEQ ID NO: 81034 - DNA, 33 bp, Homo sapien
cagccaggtctcaacattcttgagcatcttcaa

SEQ ID NO: 81035 - DNA, 33 bp, Homo sapien
tatgaaaaaaaccagcaaactgtgcctattaca

SEQ ID NO: 81036 - DNA, 33 bp, Homo sapien
tatgaaaaaaaccagctaactgtgcctattaca

SEQ ID NO: 81037 - DNA, 33 bp, Homo sapien
gctttttaggctatgaagcagatagcgatgtaa

SEQ ID NO: 81038 - DNA, 33 bp, Homo sapien
gctttttaggctatgaggcagatagcgatgtaa

SEQ ID NO: 81039 - DNA, 33 bp, Homo sapien
cccagtgctaacagtacggacacaacagtaatt

SEQ ID NO: 81040 - DNA, 33 bp, Homo sapien
cccagtgctaacagtatggacacaacagtaatt

SEQ ID NO: 81041 - DNA, 33 bp, Homo sapien
ggactgtgcaactgcactgatatagccgagaac

SEQ ID NO: 81042 - DNA, 33 bp, Homo sapien
ggactgtgcaactgcattgatatagccgagaac

SEQ ID NO: 81043 - DNA, 33 bp, Homo sapien
tatctgtttagtgtctcaatctggccctgattt

SEQ ID NO: 81044 - DNA, 33 bp, Homo sapien
tatctgtttagtgtcttaatctggccctgattt

SEQ ID NO: 81045 - DNA, 33 bp, Homo sapien
catgcggtgtaaaggacagtgttgggataatta

SEQ ID NO: 81046 - DNA, 33 bp, Homo sapien
catgcggtgtaaaggagagtgttgggataatta

SEQ ID NO: 81047 - DNA, 33 bp, Homo sapien
cgtcattagaacggtagggaagtcaataataaa

SEQ ID NO: 81048 - DNA, 33 bp, Homo sapien
cgtcattagaacggtatggaagtcaataataaa

SEQ ID NO: 81049 - DNA, 33 bp, Homo sapien
tttaatcaggttcatagcatcttcattatactg

SEQ ID NO: 81050 - DNA, 33 bp, Homo sapien
tttaatcaggttcatatcatcttcattatactg

SEQ ID NO: 81051 - DNA, 33 bp, Homo sapien
atagatctcaaaaatacgtttccagaaaaacat

SEQ ID NO: 81052 - DNA, 33 bp, Homo sapien
atagatctcaaaaatatgtttccagaaaaacat

SEQ ID NO: 81053 - DNA, 33 bp, Homo sapien
tgaatgaataaaccaacgtctacctgtctcaac

SEQ ID NO: 81054 - DNA, 33 bp, Homo sapien
tgaatgaataaaccaatgtctacctgtctcaac

SEQ ID NO: 81055 - DNA, 33 bp, Homo sapien
tcaaccctctgctctccatcaatcaatcaccat

SEQ ID NO: 81056 - DNA, 33 bp, Homo sapien
tcaaccctctgctctctatcaatcaatcaccat

SEQ ID NO: 81057 - DNA, 33 bp, Homo sapien
gcctttctgaaatgctcaagtacattgccctta

SEQ ID NO: 81058 - DNA, 33 bp, Homo sapien
gcctttctgaaatgctgaagtacattgccctta

SEQ ID NO: 81059 - DNA, 33 bp, Homo sapien
cattttccatttcaacaattcattacaactcac

SEQ ID NO: 81060 - DNA, 33 bp, Homo sapien
cattttccatttcaacgattcattacaactcac

SEQ ID NO: 81061 - DNA, 33 bp, Homo sapien
aatctgtttttgtgcaagtgtgtatatgtctta

SEQ ID NO: 81062 - DNA, 33 bp, Homo sapien
aatctgtttttgtgcatgtgtgtatatgtctta

SEQ ID NO: 81063 - DNA, 33 bp, Homo sapien
atagttgttttctttgaatcagaatccaaagat

SEQ ID NO: 81064 - DNA, 33 bp, Homo sapien
atagttgttttctttgtatcagaatccaaagat

SEQ ID NO: 81065 - DNA, 33 bp, Homo sapien
atgttaaaattctgagaactgctgaatctagat

SEQ ID NO: 81066 - DNA, 33 bp, Homo sapien
atgttaaaattctgaggactgctgaatctagat

SEQ ID NO: 81067 - DNA, 33 bp, Homo sapien
ctttcagaaactaaggcatagcatgttcaagca

SEQ ID NO: 81068 - DNA, 33 bp, Homo sapien
ctttcagaaactaagggatagcatgttcaagca

SEQ ID NO: 81069 - DNA, 33 bp, Homo sapien
gatgtctcaactctaccggaaatcaggttcact

SEQ ID NO: 81070 - DNA, 33 bp, Homo sapien
gatgtctcaactctactggaaatcaggttcact

SEQ ID NO: 81071 - DNA, 33 bp, Homo sapien
gaaaatcgttctcagaataaaacacacacactg

SEQ ID NO: 81072 - DNA, 33 bp, Homo sapien
gaaaatcgttctcagagtaaaacacacacactg

SEQ ID NO: 81073 - DNA, 33 bp, Homo sapien
cagacccttcctgttacacaagcatccttttct

SEQ ID NO: 81074 - DNA, 33 bp, Homo sapien
cagacccttcctgttatacaagcatccttttct

SEQ ID NO: 81075 - DNA, 33 bp, Homo sapien
catcatttttatttcccgacttccaattgaaac

SEQ ID NO: 81076 - DNA, 33 bp, Homo sapien
catcatttttatttcctgacttccaattgaaac

SEQ ID NO: 81077 - DNA, 33 bp, Homo sapien
atagttatttctgtaaatctattagctacctgt

SEQ ID NO: 81078 - DNA, 33 bp, Homo sapien
atagttatttctgtaattctattagctacctgt

SEQ ID NO: 81079 - DNA, 33 bp, Homo sapien
atacctctactcataaacatttcaagcaccaag

SEQ ID NO: 81080 - DNA, 33 bp, Homo sapien
atacctctactcataagcatttcaagcaccaag

SEQ ID NO: 81081 - DNA, 33 bp, Homo sapien
tggactgagggtcacagtatctttctagctgga

SEQ ID NO: 81082 - DNA, 33 bp, Homo sapien
tggactgagggtcacattatctttctagctgga

SEQ ID NO: 81083 - DNA, 33 bp, Homo sapien
cagcaagaataaggcaagagacaccttcaacat

SEQ ID NO: 81084 - DNA, 33 bp, Homo sapien
cagcaagaataaggcaggagacaccttcaacat

SEQ ID NO: 81085 - DNA, 33 bp, Homo sapien
caaactgagggaagaacgattaaacagaatgga

SEQ ID NO: 81086 - DNA, 33 bp, Homo sapien
caaactgagggaagaatgattaaacagaatgga

SEQ ID NO: 81087 - DNA, 33 bp, Homo sapien
aaggtatgaagataaacctgaggatgctactgt

SEQ ID NO: 81088 - DNA, 33 bp, Homo sapien
aaggtatgaagataaagctgaggatgctactgt

SEQ ID NO: 81089 - DNA, 33 bp, Homo sapien
agggcagactgtggcagattgattctaaaaatg

SEQ ID NO: 81090 - DNA, 33 bp, Homo sapien
agggcagactgtggcatattgattctaaaaatg

SEQ ID NO: 81091 - DNA, 33 bp, Homo sapien
aggaggcagggattacagaggtcatttttagaa

SEQ ID NO: 81092 - DNA, 33 bp, Homo sapien
aggaggcagggattacggaggtcatttttagaa

SEQ ID NO: 81093 - DNA, 33 bp, Homo sapien
tggattgaatcaagtcacaggtcccacctacac

SEQ ID NO: 81094 - DNA, 33 bp, Homo sapien
tggattgaatcaagtcgcaggtcccacctacac

SEQ ID NO: 81095 - DNA, 33 bp, Homo sapien
ggcctctgagatccacaataccaaattagcaca

SEQ ID NO: 81096 - DNA, 33 bp, Homo sapien
ggcctctgagatccacgataccaaattagcaca

SEQ ID NO: 81097 - DNA, 33 bp, Homo sapien
ccctattgctttctgcccttcttataacagcta

SEQ ID NO: 81098 - DNA, 33 bp, Homo sapien
ccctattgctttctgctcttcttataacagcta

SEQ ID NO: 81099 - DNA, 33 bp, Homo sapien
tgtatgacagtttcacaatgtatatgtttattc

SEQ ID NO: 81100 - DNA, 33 bp, Homo sapien
tgtatgacagtttcacgatgtatatgtttattc

SEQ ID NO: 81101 - DNA, 33 bp, Homo sapien
aactacctatctctgccgcacaaattattccct

SEQ ID NO: 81102 - DNA, 33 bp, Homo sapien
aactacctatctctgctgcacaaattattccct

SEQ ID NO: 81103 - DNA, 33 bp, Homo sapien
catgggatcagcagtacgaagcatcttggcatg

SEQ ID NO: 81104 - DNA, 33 bp, Homo sapien
catgggatcagcagtaggaagcatcttggcatg

SEQ ID NO: 81105 - DNA, 33 bp, Homo sapien
cccgctccctttggtcaaaagcagaaccaggtg

SEQ ID NO: 81106 - DNA, 33 bp, Homo sapien
cccgctccctttggtcgaaagcagaaccaggtg

SEQ ID NO: 81107 - DNA, 33 bp, Homo sapien
gtaattcgcaggtatcaagagccagaggcctca

SEQ ID NO: 81108 - DNA, 33 bp, Homo sapien
gtaattcgcaggtatcgagagccagaggcctca

SEQ ID NO: 81109 - DNA, 33 bp, Homo sapien
acccggctagactcagacatgatattacgcagt

SEQ ID NO: 81110 - DNA, 33 bp, Homo sapien
acccggctagactcaggcatgatattacgcagt

SEQ ID NO: 81111 - DNA, 33 bp, Homo sapien
tctggaatcctgccccggctttcagaattctgg

SEQ ID NO: 81112 - DNA, 33 bp, Homo sapien
tctggaatcctgcccctgctttcagaattctgg

SEQ ID NO: 81113 - DNA, 33 bp, Homo sapien
cactgaactacaaccacacagatataaaaagat

SEQ ID NO: 81114 - DNA, 33 bp, Homo sapien
cactgaactacaaccagacagatataaaaagat

SEQ ID NO: 81115 - DNA, 33 bp, Homo sapien
ctggtctgctggggtcacaaattttcaagatgc

SEQ ID NO: 81116 - DNA, 33 bp, Homo sapien
ctggtctgctggggtcgcaaattttcaagatgc

SEQ ID NO: 81117 - DNA, 33 bp, Homo sapien
agtttatgcgtttaaaagatgaatatgttttag

SEQ ID NO: 81118 - DNA, 33 bp, Homo sapien
agtttatgcgtttaaaggatgaatatgttttag

SEQ ID NO: 81119 - DNA, 33 bp, Homo sapien
aactgtattctcttccagagcacatttccaaca

SEQ ID NO: 81120 - DNA, 33 bp, Homo sapien
aactgtattctcttccggagcacatttccaaca

SEQ ID NO: 81121 - DNA, 33 bp, Homo sapien
tgacatacgacttcataacattctctgtccgtg

SEQ ID NO: 81122 - DNA, 33 bp, Homo sapien
tgacatacgacttcatgacattctctgtccgtg

SEQ ID NO: 81123 - DNA, 33 bp, Homo sapien
gcacatcacattttcccgagagtaagtgataat

SEQ ID NO: 81124 - DNA, 33 bp, Homo sapien
gcacatcacattttcctgagagtaagtgataat

SEQ ID NO: 81125 - DNA, 33 bp, Homo sapien
ccagcatgtggagttcaaaaaaagtccccgagt

SEQ ID NO: 81126 - DNA, 33 bp, Homo sapien
ccagcatgtggagttcgaaaaaagtccccgagt

SEQ ID NO: 81127 - DNA, 33 bp, Homo sapien
cagggaagatcacacaaaggagatgtcagaagt

SEQ ID NO: 81128 - DNA, 33 bp, Homo sapien
cagggaagatcacacagaggagatgtcagaagt

SEQ ID NO: 81129 - DNA, 33 bp, Homo sapien
gaaatgaacaacaaacccatgacatgtgaacat

SEQ ID NO: 81130 - DNA, 33 bp, Homo sapien
gaaatgaacaacaaacgcatgacatgtgaacat

SEQ ID NO: 81131 - DNA, 33 bp, Homo sapien
ataactaatgagttaacgtttactaggcttaat

SEQ ID NO: 81132 - DNA, 33 bp, Homo sapien
ataactaatgagttaatgtttactaggcttaat

SEQ ID NO: 81133 - DNA, 33 bp, Homo sapien
ctttaacaaatcaccacagtctggattgcttaa

SEQ ID NO: 81134 - DNA, 33 bp, Homo sapien
ctttaacaaatcaccatagtctggattgcttaa

SEQ ID NO: 81135 - DNA, 33 bp, Homo sapien
ggtttttcaaatgcacaaaggtcattttagaaa

SEQ ID NO: 81136 - DNA, 33 bp, Homo sapien
ggtttttcaaatgcacgaaggtcattttagaaa

SEQ ID NO: 81137 - DNA, 33 bp, Homo sapien
ccaatctgtgttttaacgagatcacctccaggt

SEQ ID NO: 81138 - DNA, 33 bp, Homo sapien
ccaatctgtgttttaatgagatcacctccaggt

SEQ ID NO: 81139 - DNA, 33 bp, Homo sapien
ctcatagtcagcttaccggtaaagacagctcat

SEQ ID NO: 81140 - DNA, 33 bp, Homo sapien
ctcatagtcagcttactggtaaagacagctcat

SEQ ID NO: 81141 - DNA, 33 bp, Homo sapien
aacattcaaagaaagcacggtgttctaaataag

SEQ ID NO: 81142 - DNA, 33 bp, Homo sapien
aacattcaaagaaagcgcggtgttctaaataag

SEQ ID NO: 81143 - DNA, 33 bp, Homo sapien
tactaatggcaataacccaggcctgaaaaggaa

SEQ ID NO: 81144 - DNA, 33 bp, Homo sapien
tactaatggcaataactcaggcctgaaaaggaa

SEQ ID NO: 81145 - DNA, 33 bp, Homo sapien
tactcaagaacagacaatctaaatagcctgatt

SEQ ID NO: 81146 - DNA, 33 bp, Homo sapien
tactcaagaacagacactctaaatagcctgatt

SEQ ID NO: 81147 - DNA, 33 bp, Homo sapien
tctttcaccttccagacgtctttcatgcccatt

SEQ ID NO: 81148 - DNA, 33 bp, Homo sapien
tctttcaccttccagatgtctttcatgcccatt

SEQ ID NO: 81149 - DNA, 33 bp, Homo sapien
aatgatctttctaacacggtaatccaaccgtgt

SEQ ID NO: 81150 - DNA, 33 bp, Homo sapien
aatgatctttctaacatggtaatccaaccgtgt

SEQ ID NO: 81151 - DNA, 33 bp, Homo sapien
atatgtgaaagacaagcagaagtttcccaggtt

SEQ ID NO: 81152 - DNA, 33 bp, Homo sapien
atatgtgaaagacaagtagaagtttcccaggtt

SEQ ID NO: 81153 - DNA, 33 bp, Homo sapien
ctcacatttgcacacactcccgttaatgctctt

SEQ ID NO: 81154 - DNA, 33 bp, Homo sapien
ctcacatttgcacacattcccgttaatgctctt

SEQ ID NO: 81155 - DNA, 33 bp, Homo sapien
cccgttaatgctcttaaatgattgcactagagc

SEQ ID NO: 81156 - DNA, 33 bp, Homo sapien
cccgttaatgctcttagatgattgcactagagc

SEQ ID NO: 81157 - DNA, 33 bp, Homo sapien
tagagacatgaatgaacgatattgatatatatc

SEQ ID NO: 81158 - DNA, 33 bp, Homo sapien
tagagacatgaatgaatgatattgatatatatc

SEQ ID NO: 81159 - DNA, 33 bp, Homo sapien
catttttcaaaagtccaaattacatctccctac

SEQ ID NO: 81160 - DNA, 33 bp, Homo sapien
catttttcaaaagtccgaattacatctccctac

SEQ ID NO: 81161 - DNA, 33 bp, Homo sapien
ctgagacagacttgataaatctgagtttgggtt

SEQ ID NO: 81162 - DNA, 33 bp, Homo sapien
ctgagacagacttgatgaatctgagtttgggtt

SEQ ID NO: 81163 - DNA, 33 bp, Homo sapien
aatatccatctgggccaattgtttgattcaggc

SEQ ID NO: 81164 - DNA, 33 bp, Homo sapien
aatatccatctgggccgattgtttgattcaggc

SEQ ID NO: 81165 - DNA, 33 bp, Homo sapien
gtttatcaaaatggaacggaagtaaagtcaggt

SEQ ID NO: 81166 - DNA, 33 bp, Homo sapien
gtttatcaaaatggaatggaagtaaagtcaggt

SEQ ID NO: 81167 - DNA, 33 bp, Homo sapien
tggagagctgtttagacggctaagttcttcatt

SEQ ID NO: 81168 - DNA, 33 bp, Homo sapien
tggagagctgtttagatggctaagttcttcatt

SEQ ID NO: 81169 - DNA, 33 bp, Homo sapien
gctaataaacttctgaaactccttgccatctga

SEQ ID NO: 81170 - DNA, 33 bp, Homo sapien
gctaataaacttctgatactccttgccatctga

SEQ ID NO: 81171 - DNA, 33 bp, Homo sapien
gaatcagtgctgaaaaagccaaggatgtcttct

SEQ ID NO: 81172 - DNA, 33 bp, Homo sapien
gaatcagtgctgaaaatgccaaggatgtcttct

SEQ ID NO: 81173 - DNA, 33 bp, Homo sapien
atgtgtaggggactgactaatgattatgaaaca

SEQ ID NO: 81174 - DNA, 33 bp, Homo sapien
atgtgtaggggactgattaatgattatgaaaca

SEQ ID NO: 81175 - DNA, 33 bp, Homo sapien
ttccacagctatgtcacattgccttcttaattt

SEQ ID NO: 81176 - DNA, 33 bp, Homo sapien
ttccacagctatgtcatattgccttcttaattt

SEQ ID NO: 81177 - DNA, 33 bp, Homo sapien
cccacccagtacaggaatcaactaaagaacact

SEQ ID NO: 81178 - DNA, 33 bp, Homo sapien
cccacccagtacaggagtcaactaaagaacact

SEQ ID NO: 81179 - DNA, 33 bp, Homo sapien
acacgaaatatgtgtcaatacgtaaagggtcct

SEQ ID NO: 81180 - DNA, 33 bp, Homo sapien
acacgaaatatgtgtcgatacgtaaagggtcct

SEQ ID NO: 81181 - DNA, 33 bp, Homo sapien
agccacagacatatccaatacagagctaggctt

SEQ ID NO: 81182 - DNA, 33 bp, Homo sapien
agccacagacatatccgatacagagctaggctt

SEQ ID NO: 81183 - DNA, 33 bp, Homo sapien
tttcattcatttggcaaacatttttgtagtcct

SEQ ID NO: 81184 - DNA, 33 bp, Homo sapien
tttcattcatttggcacacatttttgtagtcct

SEQ ID NO: 81185 - DNA, 33 bp, Homo sapien
ctaaagtgagctaagaatagaggactcctagag

SEQ ID NO: 81186 - DNA, 33 bp, Homo sapien
ctaaagtgagctaagactagaggactcctagag

SEQ ID NO: 81187 - DNA, 33 bp, Homo sapien
gactctcagaagtggcccagtttagactacaaa

SEQ ID NO: 81188 - DNA, 33 bp, Homo sapien
gactctcagaagtggctcagtttagactacaaa

SEQ ID NO: 81189 - DNA, 33 bp, Homo sapien
ttcccaaactattttaaggctagaagcatatgt

SEQ ID NO: 81190 - DNA, 33 bp, Homo sapien
ttcccaaactattttagggctagaagcatatgt

SEQ ID NO: 81191 - DNA, 33 bp, Homo sapien
ctgggctggcttctgtaaaactatctgttcaac

SEQ ID NO: 81192 - DNA, 33 bp, Homo sapien
ctgggctggcttctgtgaaactatctgttcaac

SEQ ID NO: 81193 - DNA, 33 bp, Homo sapien
tctagtccaaagtctaaatcagccaactgaaat

SEQ ID NO: 81194 - DNA, 33 bp, Homo sapien
tctagtccaaagtctacatcagccaactgaaat

SEQ ID NO: 81195 - DNA, 33 bp, Homo sapien
ctcccgggtggttttcactgataatacatatgc

SEQ ID NO: 81196 - DNA, 33 bp, Homo sapien
ctcccgggtggttttcgctgataatacatatgc

SEQ ID NO: 81197 - DNA, 33 bp, Homo sapien
aaattgttgatggcaacgtgaaaatgaccctgg

SEQ ID NO: 81198 - DNA, 33 bp, Homo sapien
aaattgttgatggcaatgtgaaaatgaccctgg

SEQ ID NO: 81199 - DNA, 33 bp, Homo sapien
ctcaggcaaggaagtcaaaaggagaggagtacc

SEQ ID NO: 81200 - DNA, 33 bp, Homo sapien
ctcaggcaaggaagtcgaaaggagaggagtacc

SEQ ID NO: 81201 - DNA, 33 bp, Homo sapien
ggcctcacagagtatacagcgatttcagtaaaa

SEQ ID NO: 81202 - DNA, 33 bp, Homo sapien
ggcctcacagagtatatagcgatttcagtaaaa

SEQ ID NO: 81203 - DNA, 33 bp, Homo sapien
ttactacacacatggaaggcccaggggtccaca

SEQ ID NO: 81204 - DNA, 33 bp, Homo sapien
ttactacacacatggagggcccaggggtccaca

SEQ ID NO: 81205 - DNA, 33 bp, Homo sapien
atttctaagcagagaacaaggccgggttggaaa

SEQ ID NO: 81206 - DNA, 33 bp, Homo sapien
atttctaagcagagaataaggccgggttggaaa

SEQ ID NO: 81207 - DNA, 33 bp, Homo sapien
taagtgaaatagtggaagggataacagagttgg

SEQ ID NO: 81208 - DNA, 33 bp, Homo sapien
taagtgaaatagtggaggggataacagagttgg

SEQ ID NO: 81209 - DNA, 33 bp, Homo sapien
gccttgatttccaaagactaatgttattcaggg

SEQ ID NO: 81210 - DNA, 33 bp, Homo sapien
gccttgatttccaaaggctaatgttattcaggg

SEQ ID NO: 81211 - DNA, 33 bp, Homo sapien
acatttttgtaagacacgactttacgtgctcac

SEQ ID NO: 81212 - DNA, 33 bp, Homo sapien
acatttttgtaagacatgactttacgtgctcac

SEQ ID NO: 81213 - DNA, 33 bp, Homo sapien
tggttacagggccaaaatgatattcacacaact

SEQ ID NO: 81214 - DNA, 33 bp, Homo sapien
tggttacagggccaaagtgatattcacacaact

SEQ ID NO: 81215 - DNA, 33 bp, Homo sapien
accaagaatgttcttgccaaagtcaatggcatt

SEQ ID NO: 81216 - DNA, 33 bp, Homo sapien
accaagaatgttcttgtcaaagtcaatggcatt

SEQ ID NO: 81217 - DNA, 33 bp, Homo sapien
tgtaacagagacagcacaaaacattttagaaca

SEQ ID NO: 81218 - DNA, 33 bp, Homo sapien
tgtaacagagacagcagaaaacattttagaaca

SEQ ID NO: 81219 - DNA, 33 bp, Homo sapien
tgttagtaaagaagcacatacatgacaataact

SEQ ID NO: 81220 - DNA, 33 bp, Homo sapien
tgttagtaaagaagcatatacatgacaataact

SEQ ID NO: 81221 - DNA, 33 bp, Homo sapien
aagacttggacatctgcagttttttaaaactcc

SEQ ID NO: 81222 - DNA, 33 bp, Homo sapien
aagacttggacatctgtagttttttaaaactcc

SEQ ID NO: 81223 - DNA, 33 bp, Homo sapien
tttggatgagactatccctgggacataatttcc

SEQ ID NO: 81224 - DNA, 33 bp, Homo sapien
tttggatgagactatctctgggacataatttcc

SEQ ID NO: 81225 - DNA, 33 bp, Homo sapien
aagccttactgataaaaaagcatccaattaaca

SEQ ID NO: 81226 - DNA, 33 bp, Homo sapien
aagccttactgataaataagcatccaattaaca

SEQ ID NO: 81227 - DNA, 33 bp, Homo sapien
caactggtatctataacggagattgggtccctc

SEQ ID NO: 81228 - DNA, 33 bp, Homo sapien
caactggtatctataatggagattgggtccctc

SEQ ID NO: 81229 - DNA, 33 bp, Homo sapien
ttttcttctttcactcaactgttagaagacatt

SEQ ID NO: 81230 - DNA, 33 bp, Homo sapien
ttttcttctttcactcgactgttagaagacatt

SEQ ID NO: 81231 - DNA, 33 bp, Homo sapien
ggtattatagcacagcaaggactgaagctctaa

SEQ ID NO: 81232 - DNA, 33 bp, Homo sapien
ggtattatagcacagcgaggactgaagctctaa

SEQ ID NO: 81233 - DNA, 33 bp, Homo sapien
acaataacaaacatccgaaatatctacccatag

SEQ ID NO: 81234 - DNA, 33 bp, Homo sapien
acaataacaaacatcctaaatatctacccatag

SEQ ID NO: 81235 - DNA, 33 bp, Homo sapien
acgtttgtggttgatacgttaggcctaccggat

SEQ ID NO: 81236 - DNA, 33 bp, Homo sapien
acgtttgtggttgatatgttaggcctaccggat

SEQ ID NO: 81237 - DNA, 33 bp, Homo sapien
ctcctgctgttaaacactggatttatctaacac

SEQ ID NO: 81238 - DNA, 33 bp, Homo sapien
ctcctgctgttaaacattggatttatctaacac

SEQ ID NO: 81239 - DNA, 33 bp, Homo sapien
caacctcaggcttctcccacttcggcttcctga

SEQ ID NO: 81240 - DNA, 33 bp, Homo sapien
caacctcaggcttctctcacttcggcttcctga

SEQ ID NO: 81241 - DNA, 33 bp, Homo sapien
aaagaggatgttaaaactcatctgtttctacat

SEQ ID NO: 81242 - DNA, 33 bp, Homo sapien
aaagaggatgttaaaagtcatctgtttctacat

SEQ ID NO: 81243 - DNA, 33 bp, Homo sapien
aagtaaaatggaaataggttcccagtacactgc

SEQ ID NO: 81244 - DNA, 33 bp, Homo sapien
aagtaaaatggaaatatgttcccagtacactgc

SEQ ID NO: 81245 - DNA, 33 bp, Homo sapien
aaagttctgcagttcaaggcttaggtctgtgca

SEQ ID NO: 81246 - DNA, 33 bp, Homo sapien
aaagttctgcagttcacggcttaggtctgtgca

SEQ ID NO: 81247 - DNA, 33 bp, Homo sapien
gttgacagcagggacacagcttagcaggtaatt

SEQ ID NO: 81248 - DNA, 33 bp, Homo sapien
gttgacagcagggacagagcttagcaggtaatt

SEQ ID NO: 81249 - DNA, 33 bp, Homo sapien
gctaaaaaaaaaatgcgaatgatcatctgggtc

SEQ ID NO: 81250 - DNA, 33 bp, Homo sapien
gctaaaaaaaaaatgctaatgatcatctgggtc

SEQ ID NO: 81251 - DNA, 33 bp, Homo sapien
ccaacctctcttctgaacactttaaaacaaata

SEQ ID NO: 81252 - DNA, 33 bp, Homo sapien
ccaacctctcttctgagcactttaaaacaaata

SEQ ID NO: 81253 - DNA, 33 bp, Homo sapien
taaaattcaactaaaaagcatcagtatgatggc

SEQ ID NO: 81254 - DNA, 33 bp, Homo sapien
taaaattcaactaaaacgcatcagtatgatggc

SEQ ID NO: 81255 - DNA, 33 bp, Homo sapien
acatcagccttgttacaatagttgtttggtttt

SEQ ID NO: 81256 - DNA, 33 bp, Homo sapien
acatcagccttgttacgatagttgtttggtttt

SEQ ID NO: 81257 - DNA, 33 bp, Homo sapien
gtattccattgtataacgtgctgtgacttattt

SEQ ID NO: 81258 - DNA, 33 bp, Homo sapien
gtattccattgtataatgtgctgtgacttattt

SEQ ID NO: 81259 - DNA, 33 bp, Homo sapien
gaagatattagacaggaccattatgagtctctc

SEQ ID NO: 81260 - DNA, 33 bp, Homo sapien
gaagatattagacagggccattatgagtctctc

SEQ ID NO: 81261 - DNA, 33 bp, Homo sapien
ttgggaacttaagacaatgaagacctctgattt

SEQ ID NO: 81262 - DNA, 33 bp, Homo sapien
ttgggaacttaagacactgaagacctctgattt

SEQ ID NO: 81263 - DNA, 33 bp, Homo sapien
gggaaacgcctttgcagtcacacatctttaaaa

SEQ ID NO: 81264 - DNA, 33 bp, Homo sapien
gggaaacgcctttgcattcacacatctttaaaa

SEQ ID NO: 81265 - DNA, 33 bp, Homo sapien
tgtttggattaattcaaacatccaaaacgtatt

SEQ ID NO: 81266 - DNA, 33 bp, Homo sapien
tgtttggattaattcagacatccaaaacgtatt

SEQ ID NO: 81267 - DNA, 33 bp, Homo sapien
tgccagaggttaaagcagccactaaaaaagcat

SEQ ID NO: 81268 - DNA, 33 bp, Homo sapien
tgccagaggttaaagcggccactaaaaaagcat

SEQ ID NO: 81269 - DNA, 33 bp, Homo sapien
ccagcttaagacataacctaccatctgattttt

SEQ ID NO: 81270 - DNA, 33 bp, Homo sapien
ccagcttaagacataatctaccatctgattttt

SEQ ID NO: 81271 - DNA, 33 bp, Homo sapien
ggaactgcaaggagcccattgtgcttggagcat

SEQ ID NO: 81272 - DNA, 33 bp, Homo sapien
ggaactgcaaggagcctattgtgcttggagcat

SEQ ID NO: 81273 - DNA, 33 bp, Homo sapien
cagcacactaagaagccccttgctcatcaccac

SEQ ID NO: 81274 - DNA, 33 bp, Homo sapien
cagcacactaagaagctccttgctcatcaccac

SEQ ID NO: 81275 - DNA, 33 bp, Homo sapien
tggcgccttctctcccccgtcctcacagatggc

SEQ ID NO: 81276 - DNA, 33 bp, Homo sapien
tggcgccttctctccctcgtcctcacagatggc

SEQ ID NO: 81277 - DNA, 33 bp, Homo sapien
tgggggggatgagagacaagttgctgagaagag

SEQ ID NO: 81278 - DNA, 33 bp, Homo sapien
tgggggggatgagagagaagttgctgagaagag

SEQ ID NO: 81279 - DNA, 33 bp, Homo sapien
gaagaattaaacaaggacagctacatccttacc

SEQ ID NO: 81280 - DNA, 33 bp, Homo sapien
gaagaattaaacaagggcagctacatccttacc

SEQ ID NO: 81281 - DNA, 33 bp, Homo sapien
gaaccccagtgccttaaattctgtggcgtccga

SEQ ID NO: 81282 - DNA, 33 bp, Homo sapien
gaaccccagtgccttatattctgtggcgtccga

SEQ ID NO: 81283 - DNA, 33 bp, Homo sapien
actgctcgatgtctgcaagtctccacatggtga

SEQ ID NO: 81284 - DNA, 33 bp, Homo sapien
actgctcgatgtctgcgagtctccacatggtga

SEQ ID NO: 81285 - DNA, 33 bp, Homo sapien
aaagtgacattactgaaggacaaaggtcggtct

SEQ ID NO: 81286 - DNA, 33 bp, Homo sapien
aaagtgacattactgagggacaaaggtcggtct

SEQ ID NO: 81287 - DNA, 33 bp, Homo sapien
tgtggattgattctaaaagctgaaaatgacaag

SEQ ID NO: 81288 - DNA, 33 bp, Homo sapien
tgtggattgattctaatagctgaaaatgacaag

SEQ ID NO: 81289 - DNA, 33 bp, Homo sapien
acaggcctgggaaagactctacactcccacctc

SEQ ID NO: 81290 - DNA, 33 bp, Homo sapien
acaggcctgggaaagattctacactcccacctc

SEQ ID NO: 81291 - DNA, 33 bp, Homo sapien
ctaatgcctagagggagcaacacagggaaaatg

SEQ ID NO: 81292 - DNA, 33 bp, Homo sapien
ctaatgcctagagggatcaacacagggaaaatg

SEQ ID NO: 81293 - DNA, 33 bp, Homo sapien
caagccacatataatgaaacagctagcttacct

SEQ ID NO: 81294 - DNA, 33 bp, Homo sapien
caagccacatataatgcaacagctagcttacct

SEQ ID NO: 81295 - DNA, 33 bp, Homo sapien
ctatctagcgcgtaaaatcgccagggcttgaga

SEQ ID NO: 81296 - DNA, 33 bp, Homo sapien
ctatctagcgcgtaaagtcgccagggcttgaga

SEQ ID NO: 81297 - DNA, 33 bp, Homo sapien
ccacttatatgaggtacgtagtcaaattcacag

SEQ ID NO: 81298 - DNA, 33 bp, Homo sapien
ccacttatatgaggtatgtagtcaaattcacag

SEQ ID NO: 81299 - DNA, 33 bp, Homo sapien
gtttgttgggcaaaaacgtgctgtgcctccctt

SEQ ID NO: 81300 - DNA, 33 bp, Homo sapien
gtttgttgggcaaaaatgtgctgtgcctccctt

SEQ ID NO: 81301 - DNA, 33 bp, Homo sapien
ggcagaaaacctaagggcattgaacacttatgg

SEQ ID NO: 81302 - DNA, 33 bp, Homo sapien
ggcagaaaacctaaggtcattgaacacttatgg

SEQ ID NO: 81303 - DNA, 33 bp, Homo sapien
acacttccagtgacagaagactcactactgtcg

SEQ ID NO: 81304 - DNA, 33 bp, Homo sapien
acacttccagtgacaggagactcactactgtcg

SEQ ID NO: 81305 - DNA, 33 bp, Homo sapien
tttattctaccagtctcaaggtctgcgttggtg

SEQ ID NO: 81306 - DNA, 33 bp, Homo sapien
tttattctaccagtcttaaggtctgcgttggtg

SEQ ID NO: 81307 - DNA, 33 bp, Homo sapien
tgtctctaaatatgaacggtaagtgtgggagcc

SEQ ID NO: 81308 - DNA, 33 bp, Homo sapien
tgtctctaaatatgaatggtaagtgtgggagcc

SEQ ID NO: 81309 - DNA, 33 bp, Homo sapien
tgttagcagtagtagcagaaggacagtctggac

SEQ ID NO: 81310 - DNA, 33 bp, Homo sapien
tgttagcagtagtagcggaaggacagtctggac

SEQ ID NO: 81311 - DNA, 33 bp, Homo sapien
aattctatatctagccaaatgaacatttaagag

SEQ ID NO: 81312 - DNA, 33 bp, Homo sapien
aattctatatctagccgaatgaacatttaagag

SEQ ID NO: 81313 - DNA, 33 bp, Homo sapien
gctccacccttgtgacaaagttaccttccaaag

SEQ ID NO: 81314 - DNA, 33 bp, Homo sapien
gctccacccttgtgaccaagttaccttccaaag

SEQ ID NO: 81315 - DNA, 33 bp, Homo sapien
ctcctagaagctcacaaattattttcaagaact

SEQ ID NO: 81316 - DNA, 33 bp, Homo sapien
ctcctagaagctcacagattattttcaagaact

SEQ ID NO: 81317 - DNA, 33 bp, Homo sapien
catctgacttggaaaacgagaatgattttaata

SEQ ID NO: 81318 - DNA, 33 bp, Homo sapien
catctgacttggaaaatgagaatgattttaata

SEQ ID NO: 81319 - DNA, 33 bp, Homo sapien
tcactgtgatctgatacggtatagtcttacatg

SEQ ID NO: 81320 - DNA, 33 bp, Homo sapien
tcactgtgatctgatatggtatagtcttacatg

SEQ ID NO: 81321 - DNA, 33 bp, Homo sapien
tggattggattggaagaaagatacagagaaagg

SEQ ID NO: 81322 - DNA, 33 bp, Homo sapien
tggattggattggaaggaagatacagagaaagg

SEQ ID NO: 81323 - DNA, 33 bp, Homo sapien
gtaaatggaaacaaacaaacaacagtctttggc

SEQ ID NO: 81324 - DNA, 33 bp, Homo sapien
gtaaatggaaacaaacgaacaacagtctttggc

SEQ ID NO: 81325 - DNA, 33 bp, Homo sapien
ggaccacttttccccacaggcagatgcaaattc

SEQ ID NO: 81326 - DNA, 33 bp, Homo sapien
ggaccacttttccccagaggcagatgcaaattc

SEQ ID NO: 81327 - DNA, 33 bp, Homo sapien
ttatggatctctacccaatagagtagtaaatac

SEQ ID NO: 81328 - DNA, 33 bp, Homo sapien
ttatggatctctacccgatagagtagtaaatac

SEQ ID NO: 81329 - DNA, 33 bp, Homo sapien
cagaggaccccccacacagtaaggctttcaaca

SEQ ID NO: 81330 - DNA, 33 bp, Homo sapien
cagaggaccccccacatagtaaggctttcaaca

SEQ ID NO: 81331 - DNA, 33 bp, Homo sapien
accaatttgtagtacaaggcaggatagattcca

SEQ ID NO: 81332 - DNA, 33 bp, Homo sapien
accaatttgtagtacagggcaggatagattcca

SEQ ID NO: 81333 - DNA, 33 bp, Homo sapien
ccccaagaactcttaaatgattttatgagatgg

SEQ ID NO: 81334 - DNA, 33 bp, Homo sapien
ccccaagaactcttaagtgattttatgagatgg

SEQ ID NO: 81335 - DNA, 33 bp, Homo sapien
catttatccctcatctaaaggtcctcaaccaca

SEQ ID NO: 81336 - DNA, 33 bp, Homo sapien
catttatccctcatctcaaggtcctcaaccaca

SEQ ID NO: 81337 - DNA, 33 bp, Homo sapien
tttttccaataaggtaacatgcaaaagttccag

SEQ ID NO: 81338 - DNA, 33 bp, Homo sapien
tttttccaataaggtatcatgcaaaagttccag

SEQ ID NO: 81339 - DNA, 33 bp, Homo sapien
tcagtgctatggtttaaatgttgtgggcttcaa

SEQ ID NO: 81340 - DNA, 33 bp, Homo sapien
tcagtgctatggtttacatgttgtgggcttcaa

SEQ ID NO: 81341 - DNA, 33 bp, Homo sapien
ttccctcctgtgataacgcactaatccattaac

SEQ ID NO: 81342 - DNA, 33 bp, Homo sapien
ttccctcctgtgataatgcactaatccattaac

SEQ ID NO: 81343 - DNA, 33 bp, Homo sapien
gaggctgaggtgagaggagttcgcttgagtcca

SEQ ID NO: 81344 - DNA, 33 bp, Homo sapien
gaggctgaggtgagagtagttcgcttgagtcca

SEQ ID NO: 81345 - DNA, 33 bp, Homo sapien
ttctgtgagtacaagacggtctttgcaggtggc

SEQ ID NO: 81346 - DNA, 33 bp, Homo sapien
ttctgtgagtacaagatggtctttgcaggtggc

SEQ ID NO: 81347 - DNA, 33 bp, Homo sapien
aaagccttgtgttggaagtagagatgcagcacc

SEQ ID NO: 81348 - DNA, 33 bp, Homo sapien
aaagccttgtgttggaggtagagatgcagcacc

SEQ ID NO: 81349 - DNA, 33 bp, Homo sapien
gaagtgtgtatgcagaaaggaaggccacatcca

SEQ ID NO: 81350 - DNA, 33 bp, Homo sapien
gaagtgtgtatgcagacaggaaggccacatcca

SEQ ID NO: 81351 - DNA, 33 bp, Homo sapien
ggaaggaaaaaaatccaaagttgtttgcatggt

SEQ ID NO: 81352 - DNA, 33 bp, Homo sapien
ggaaggaaaaaaatccgaagttgtttgcatggt

SEQ ID NO: 81353 - DNA, 33 bp, Homo sapien
tctacccaggcccccaactgactggatggtgct

SEQ ID NO: 81354 - DNA, 33 bp, Homo sapien
tctacccaggcccccagctgactggatggtgct

SEQ ID NO: 81355 - DNA, 33 bp, Homo sapien
ttctctcttgtagtagcagcaagcttactccag

SEQ ID NO: 81356 - DNA, 33 bp, Homo sapien
ttctctcttgtagtaggagcaagcttactccag

SEQ ID NO: 81357 - DNA, 33 bp, Homo sapien
acaagaactgaatcccaaacagtggtggccagg

SEQ ID NO: 81358 - DNA, 33 bp, Homo sapien
acaagaactgaatcccgaacagtggtggccagg

SEQ ID NO: 81359 - DNA, 33 bp, Homo sapien
ctgtactctggttaaaatgataaaatttatgtc

SEQ ID NO: 81360 - DNA, 33 bp, Homo sapien
ctgtactctggttaaagtgataaaatttatgtc

SEQ ID NO: 81361 - DNA, 33 bp, Homo sapien
ttgccatgagactttacagcattaaaaattgta

SEQ ID NO: 81362 - DNA, 33 bp, Homo sapien
ttgccatgagactttagagcattaaaaattgta

SEQ ID NO: 81363 - DNA, 33 bp, Homo sapien
ggatggggagcagagactaacttgtcaatggtt

SEQ ID NO: 81364 - DNA, 33 bp, Homo sapien
ggatggggagcagagattaacttgtcaatggtt

SEQ ID NO: 81365 - DNA, 33 bp, Homo sapien
gctgcaggaattaagaactagtgctaaaaaaga

SEQ ID NO: 81366 - DNA, 33 bp, Homo sapien
gctgcaggaattaagatctagtgctaaaaaaga

SEQ ID NO: 81367 - DNA, 33 bp, Homo sapien
aggaactaattaacctaaatgagtgcatagtgg

SEQ ID NO: 81368 - DNA, 33 bp, Homo sapien
aggaactaattaacctgaatgagtgcatagtgg

SEQ ID NO: 81369 - DNA, 33 bp, Homo sapien
gctcagcaagcaaatacatgagacagttttggg

SEQ ID NO: 81370 - DNA, 33 bp, Homo sapien
gctcagcaagcaaatagatgagacagttttggg

SEQ ID NO: 81371 - DNA, 33 bp, Homo sapien
gtttcagccagcatccaaatagtgacaaggcac

SEQ ID NO: 81372 - DNA, 33 bp, Homo sapien
gtttcagccagcatccgaatagtgacaaggcac

SEQ ID NO: 81373 - DNA, 33 bp, Homo sapien
ttcaggaaccacacaaagtctgactgaaaaaag

SEQ ID NO: 81374 - DNA, 33 bp, Homo sapien
ttcaggaaccacacaacgtctgactgaaaaaag

SEQ ID NO: 81375 - DNA, 33 bp, Homo sapien
acattccagcatggagccaagactgctcgtgac

SEQ ID NO: 81376 - DNA, 33 bp, Homo sapien
acattccagcatggagtcaagactgctcgtgac

SEQ ID NO: 81377 - DNA, 33 bp, Homo sapien
gagatcatttctctcacgtaactttaagtctaa

SEQ ID NO: 81378 - DNA, 33 bp, Homo sapien
gagatcatttctctcatgtaactttaagtctaa

SEQ ID NO: 81379 - DNA, 33 bp, Homo sapien
taaacaaatggacttacgttcacctgctcccag

SEQ ID NO: 81380 - DNA, 33 bp, Homo sapien
taaacaaatggacttatgttcacctgctcccag

SEQ ID NO: 81381 - DNA, 33 bp, Homo sapien
aggaagggcaagatctaaaacgcttagggcact

SEQ ID NO: 81382 - DNA, 33 bp, Homo sapien
aggaagggcaagatctgaaacgcttagggcact

SEQ ID NO: 81383 - DNA, 33 bp, Homo sapien
ataagtgtttttatcacggctgaattacccaag

SEQ ID NO: 81384 - DNA, 33 bp, Homo sapien
ataagtgtttttatcatggctgaattacccaag

SEQ ID NO: 81385 - DNA, 33 bp, Homo sapien
cttccttcatggtgataagatgtgtgggcctgt

SEQ ID NO: 81386 - DNA, 33 bp, Homo sapien
cttccttcatggtgatgagatgtgtgggcctgt

SEQ ID NO: 81387 - DNA, 33 bp, Homo sapien
atgtgaatttcttacactaccagagccttgcag

SEQ ID NO: 81388 - DNA, 33 bp, Homo sapien
atgtgaatttcttacattaccagagccttgcag

SEQ ID NO: 81389 - DNA, 33 bp, Homo sapien
ctccaaaactcacggaataaatggccaatggtg

SEQ ID NO: 81390 - DNA, 33 bp, Homo sapien
ctccaaaactcacggagtaaatggccaatggtg

SEQ ID NO: 81391 - DNA, 33 bp, Homo sapien
ttgaaggatgattaagacacttgaaaaatgtaa

SEQ ID NO: 81392 - DNA, 33 bp, Homo sapien
ttgaaggatgattaaggcacttgaaaaatgtaa

SEQ ID NO: 81393 - DNA, 33 bp, Homo sapien
aggaaagagaaacaaacgtaaatgtgatacatg

SEQ ID NO: 81394 - DNA, 33 bp, Homo sapien
aggaaagagaaacaaatgtaaatgtgatacatg

SEQ ID NO: 81395 - DNA, 33 bp, Homo sapien
ttaataattaagtccaatacaaaagtcctctct

SEQ ID NO: 81396 - DNA, 33 bp, Homo sapien
ttaataattaagtccagtacaaaagtcctctct

SEQ ID NO: 81397 - DNA, 33 bp, Homo sapien
agttaactccacattaggtcgggacccaagtca

SEQ ID NO: 81398 - DNA, 33 bp, Homo sapien
agttaactccacattatgtcgggacccaagtca

SEQ ID NO: 81399 - DNA, 33 bp, Homo sapien
tggatgcactctactacgtaagcctatagagaa

SEQ ID NO: 81400 - DNA, 33 bp, Homo sapien
tggatgcactctactatgtaagcctatagagaa

SEQ ID NO: 81401 - DNA, 33 bp, Homo sapien
ggtagattttattttacgcaacagggaagggac

SEQ ID NO: 81402 - DNA, 33 bp, Homo sapien
ggtagattttattttatgcaacagggaagggac

SEQ ID NO: 81403 - DNA, 33 bp, Homo sapien
tgagatgttggcagaactggtgcccctcttggt

SEQ ID NO: 81404 - DNA, 33 bp, Homo sapien
tgagatgttggcagaattggtgcccctcttggt

SEQ ID NO: 81405 - DNA, 33 bp, Homo sapien
ccagagactagaaatgaacggtacccaacccta

SEQ ID NO: 81406 - DNA, 33 bp, Homo sapien
ccagagactagaaatgtacggtacccaacccta

SEQ ID NO: 81407 - DNA, 33 bp, Homo sapien
gctatacaaagccaaaaggttatttatcataat

SEQ ID NO: 81408 - DNA, 33 bp, Homo sapien
gctatacaaagccaaagggttatttatcataat

SEQ ID NO: 81409 - DNA, 33 bp, Homo sapien
tttcatcttatgaaacagaaactccacgaaaaa

SEQ ID NO: 81410 - DNA, 33 bp, Homo sapien
tttcatcttatgaaacggaaactccacgaaaaa

SEQ ID NO: 81411 - DNA, 33 bp, Homo sapien
cgtgagtcatggcatcacctacaacggaagctg

SEQ ID NO: 81412 - DNA, 33 bp, Homo sapien
cgtgagtcatggcatcgcctacaacggaagctg

SEQ ID NO: 81413 - DNA, 33 bp, Homo sapien
cttcacaattgacctcacagggttgtggtagag

SEQ ID NO: 81414 - DNA, 33 bp, Homo sapien
cttcacaattgacctcgcagggttgtggtagag

SEQ ID NO: 81415 - DNA, 33 bp, Homo sapien
ctccctgcactagaaccctcaaggagcagaatc

SEQ ID NO: 81416 - DNA, 33 bp, Homo sapien
ctccctgcactagaactctcaaggagcagaatc

SEQ ID NO: 81417 - DNA, 33 bp, Homo sapien
tctatccctttgcttggaaaattctggttctta

SEQ ID NO: 81418 - DNA, 33 bp, Homo sapien
tctatccctttgcttgtaaaattctggttctta

SEQ ID NO: 81419 - DNA, 33 bp, Homo sapien
tggttagtcattttcacggggattagagagtag

SEQ ID NO: 81420 - DNA, 33 bp, Homo sapien
tggttagtcattttcatggggattagagagtag

SEQ ID NO: 81421 - DNA, 33 bp, Homo sapien
ggttctttgacttttccctactctctaatcccc

SEQ ID NO: 81422 - DNA, 33 bp, Homo sapien
ggttctttgacttttctctactctctaatcccc

SEQ ID NO: 81423 - DNA, 33 bp, Homo sapien
tgtttcctttgcaaccaccttgattactccttt

SEQ ID NO: 81424 - DNA, 33 bp, Homo sapien
tgtttcctttgcaaccgccttgattactccttt

SEQ ID NO: 81425 - DNA, 33 bp, Homo sapien
tagattagcatgtgaactggtgaactcagtaaa

SEQ ID NO: 81426 - DNA, 33 bp, Homo sapien
tagattagcatgtgaattggtgaactcagtaaa

SEQ ID NO: 81427 - DNA, 33 bp, Homo sapien
gaaatgggtcagaatcccttagcgtaatggaga

SEQ ID NO: 81428 - DNA, 33 bp, Homo sapien
gaaatgggtcagaatctcttagcgtaatggaga

SEQ ID NO: 81429 - DNA, 33 bp, Homo sapien
tggtacttggttaagacggtcagagcaaactgc

SEQ ID NO: 81430 - DNA, 33 bp, Homo sapien
tggtacttggttaagatggtcagagcaaactgc

SEQ ID NO: 81431 - DNA, 33 bp, Homo sapien
aggtgcaccaagatgacagcatacgcacacaca

SEQ ID NO: 81432 - DNA, 33 bp, Homo sapien
aggtgcaccaagatgagagcatacgcacacaca

SEQ ID NO: 81433 - DNA, 33 bp, Homo sapien
ggcactcttcagcctaccaaatataaatgcaga

SEQ ID NO: 81434 - DNA, 33 bp, Homo sapien
ggcactcttcagcctatcaaatataaatgcaga

SEQ ID NO: 81435 - DNA, 33 bp, Homo sapien
gacagacttaacagaagtacaatgtttcctttg

SEQ ID NO: 81436 - DNA, 33 bp, Homo sapien
gacagacttaacagaattacaatgtttcctttg

SEQ ID NO: 81437 - DNA, 33 bp, Homo sapien
tgtttcctttgcaaaagatgagtgttaaaaggg

SEQ ID NO: 81438 - DNA, 33 bp, Homo sapien
tgtttcctttgcaaaatatgagtgttaaaaggg

SEQ ID NO: 81439 - DNA, 33 bp, Homo sapien
ctccaataaccaccaacggaaacgtggacaacc

SEQ ID NO: 81440 - DNA, 33 bp, Homo sapien
ctccaataaccaccaatggaaacgtggacaacc

SEQ ID NO: 81441 - DNA, 33 bp, Homo sapien
agtgttcatggaaccccgaagcaccgttgcaga

SEQ ID NO: 81442 - DNA, 33 bp, Homo sapien
agtgttcatggaaccctgaagcaccgttgcaga

SEQ ID NO: 81443 - DNA, 33 bp, Homo sapien
atttgcatggccttataaaaagtttccattatg

SEQ ID NO: 81444 - DNA, 33 bp, Homo sapien
atttgcatggccttatgaaaagtttccattatg

SEQ ID NO: 81445 - DNA, 33 bp, Homo sapien
tttccagatgtgtaaagagagtgaaatcaggca

SEQ ID NO: 81446 - DNA, 33 bp, Homo sapien
tttccagatgtgtaaatagagtgaaatcaggca

SEQ ID NO: 81447 - DNA, 33 bp, Homo sapien
tgggaacagaagtgaaaacaaaaatgtatgaac

SEQ ID NO: 81448 - DNA, 33 bp, Homo sapien
tgggaacagaagtgaacacaaaaatgtatgaac

SEQ ID NO: 81449 - DNA, 33 bp, Homo sapien
tgactgctgaaggagcagaggaggacctttaca

SEQ ID NO: 81450 - DNA, 33 bp, Homo sapien
tgactgctgaaggagcggaggaggacctttaca

SEQ ID NO: 81451 - DNA, 33 bp, Homo sapien
aaatagctgcaagatcaatgtccatgccacacc

SEQ ID NO: 81452 - DNA, 33 bp, Homo sapien
aaatagctgcaagatcgatgtccatgccacacc

SEQ ID NO: 81453 - DNA, 33 bp, Homo sapien
catgtgtgggaacttaaaaattgatctcacgga

SEQ ID NO: 81454 - DNA, 33 bp, Homo sapien
catgtgtgggaacttagaaattgatctcacgga

SEQ ID NO: 81455 - DNA, 33 bp, Homo sapien
ggtgtttagagtgagaagactttcagctgtggg

SEQ ID NO: 81456 - DNA, 33 bp, Homo sapien
ggtgtttagagtgagatgactttcagctgtggg

SEQ ID NO: 81457 - DNA, 33 bp, Homo sapien
gtctcaaaatgctacaactgaagatgggaaggg

SEQ ID NO: 81458 - DNA, 33 bp, Homo sapien
gtctcaaaatgctacagctgaagatgggaaggg

SEQ ID NO: 81459 - DNA, 33 bp, Homo sapien
ttaacaggctaagtacacttccactttacaata

SEQ ID NO: 81460 - DNA, 33 bp, Homo sapien
ttaacaggctaagtactcttccactttacaata

SEQ ID NO: 81461 - DNA, 33 bp, Homo sapien
tactctttatggactacagacggagaggttgaa

SEQ ID NO: 81462 - DNA, 33 bp, Homo sapien
tactctttatggactagagacggagaggttgaa

SEQ ID NO: 81463 - DNA, 33 bp, Homo sapien
gattttgggaatccacagtgatctctaagatac

SEQ ID NO: 81464 - DNA, 33 bp, Homo sapien
gattttgggaatccaccgtgatctctaagatac

SEQ ID NO: 81465 - DNA, 33 bp, Homo sapien
ggccttttccaagacacactgtgatagcccaag

SEQ ID NO: 81466 - DNA, 33 bp, Homo sapien
ggccttttccaagacatactgtgatagcccaag

SEQ ID NO: 81467 - DNA, 33 bp, Homo sapien
agatctaaagatgaaaccaattgtcattaataa

SEQ ID NO: 81468 - DNA, 33 bp, Homo sapien
agatctaaagatgaaagcaattgtcattaataa

SEQ ID NO: 81469 - DNA, 33 bp, Homo sapien
ttgctgtgtcaagacccgaaatttgatcagaaa

SEQ ID NO: 81470 - DNA, 33 bp, Homo sapien
ttgctgtgtcaagacctgaaatttgatcagaaa

SEQ ID NO: 81471 - DNA, 33 bp, Homo sapien
tgtttcaccagataaacgggatactctgaaaga

SEQ ID NO: 81472 - DNA, 33 bp, Homo sapien
tgtttcaccagataaatgggatactctgaaaga

SEQ ID NO: 81473 - DNA, 33 bp, Homo sapien
aaggcagtggctggcacgattaaataaaggcta

SEQ ID NO: 81474 - DNA, 33 bp, Homo sapien
aaggcagtggctggcaggattaaataaaggcta

SEQ ID NO: 81475 - DNA, 33 bp, Homo sapien
tgaatacgtcatattaacatttcaatactcttt

SEQ ID NO: 81476 - DNA, 33 bp, Homo sapien
tgaatacgtcatattaccatttcaatactcttt

SEQ ID NO: 81477 - DNA, 33 bp, Homo sapien
gcctaatcaagaaacacagagatgactaagtga

SEQ ID NO: 81478 - DNA, 33 bp, Homo sapien
gcctaatcaagaaacagagagatgactaagtga

SEQ ID NO: 81479 - DNA, 33 bp, Homo sapien
agttttggtataaaggacctctatgtagccggg

SEQ ID NO: 81480 - DNA, 33 bp, Homo sapien
agttttggtataaagggcctctatgtagccggg

SEQ ID NO: 81481 - DNA, 33 bp, Homo sapien
gaggtcagctttttgccaactctgaaagtcaaa

SEQ ID NO: 81482 - DNA, 33 bp, Homo sapien
gaggtcagctttttgcgaactctgaaagtcaaa

SEQ ID NO: 81483 - DNA, 33 bp, Homo sapien
gtaaatgtatttctccaaaggtggttttctagc

SEQ ID NO: 81484 - DNA, 33 bp, Homo sapien
gtaaatgtatttctcctaaggtggttttctagc

SEQ ID NO: 81485 - DNA, 33 bp, Homo sapien
ctattcttaagattccccactttacctatgaag

SEQ ID NO: 81486 - DNA, 33 bp, Homo sapien
ctattcttaagattcctcactttacctatgaag

SEQ ID NO: 81487 - DNA, 33 bp, Homo sapien
gtgaataggtatgttaagatttttccaaactct

SEQ ID NO: 81488 - DNA, 33 bp, Homo sapien
gtgaataggtatgttaggatttttccaaactct

SEQ ID NO: 81489 - DNA, 33 bp, Homo sapien
ttaaagtgaaaattaaatgacccaatatctcgg

SEQ ID NO: 81490 - DNA, 33 bp, Homo sapien
ttaaagtgaaaattaattgacccaatatctcgg

SEQ ID NO: 81491 - DNA, 33 bp, Homo sapien
tatcttacactcctaacgctatctatccaactt

SEQ ID NO: 81492 - DNA, 33 bp, Homo sapien
tatcttacactcctaatgctatctatccaactt

SEQ ID NO: 81493 - DNA, 33 bp, Homo sapien
gctttgtactctgtgaagctgtcaaacatgtaa

SEQ ID NO: 81494 - DNA, 33 bp, Homo sapien
gctttgtactctgtgatgctgtcaaacatgtaa

SEQ ID NO: 81495 - DNA, 33 bp, Homo sapien
taggtatcctacttataaaccatcctcaggagt

SEQ ID NO: 81496 - DNA, 33 bp, Homo sapien
taggtatcctacttatcaaccatcctcaggagt

SEQ ID NO: 81497 - DNA, 33 bp, Homo sapien
gcggtggtggtgataacacgtgtatgagttcca

SEQ ID NO: 81498 - DNA, 33 bp, Homo sapien
gcggtggtggtgataatacgtgtatgagttcca

SEQ ID NO: 81499 - DNA, 33 bp, Homo sapien
tctgaataccacagcaataagcccttcgagcaa

SEQ ID NO: 81500 - DNA, 33 bp, Homo sapien
tctgaataccacagcagtaagcccttcgagcaa

SEQ ID NO: 81501 - DNA, 33 bp, Homo sapien
acatatcccattccgacgtgtcaatgtctggag

SEQ ID NO: 81502 - DNA, 33 bp, Homo sapien
acatatcccattccgatgtgtcaatgtctggag

SEQ ID NO: 81503 - DNA, 33 bp, Homo sapien
aaaagccaaagaaaccagactgggatgtccaaa

SEQ ID NO: 81504 - DNA, 33 bp, Homo sapien
aaaagccaaagaaaccggactgggatgtccaaa

SEQ ID NO: 81505 - DNA, 33 bp, Homo sapien
tttattaatgaaagagccaggtagactttgaca

SEQ ID NO: 81506 - DNA, 33 bp, Homo sapien
tttattaatgaaagaggcaggtagactttgaca

SEQ ID NO: 81507 - DNA, 33 bp, Homo sapien
gcatcatacaccagtcagactctgttctcactc

SEQ ID NO: 81508 - DNA, 33 bp, Homo sapien
gcatcatacaccagtcggactctgttctcactc

SEQ ID NO: 81509 - DNA, 33 bp, Homo sapien
ttttgagggattatggaatattcagtgctccag

SEQ ID NO: 81510 - DNA, 33 bp, Homo sapien
ttttgagggattatgggatattcagtgctccag

SEQ ID NO: 81511 - DNA, 33 bp, Homo sapien
agtttggcatttgaataactcttggtcaggtta

SEQ ID NO: 81512 - DNA, 33 bp, Homo sapien
agtttggcatttgaattactcttggtcaggtta

SEQ ID NO: 81513 - DNA, 33 bp, Homo sapien
ggataacttccagacactgtcatggcctttgta

SEQ ID NO: 81514 - DNA, 33 bp, Homo sapien
ggataacttccagacattgtcatggcctttgta

SEQ ID NO: 81515 - DNA, 33 bp, Homo sapien
tgtgattttattgcccaaaacctggcaaacaaa

SEQ ID NO: 81516 - DNA, 33 bp, Homo sapien
tgtgattttattgccccaaacctggcaaacaaa

SEQ ID NO: 81517 - DNA, 33 bp, Homo sapien
gaatccttggactttaggaaataaacacacttt

SEQ ID NO: 81518 - DNA, 33 bp, Homo sapien
gaatccttggactttatgaaataaacacacttt

SEQ ID NO: 81519 - DNA, 33 bp, Homo sapien
aggcttaagggttttcacagaatctgagtagaa

SEQ ID NO: 81520 - DNA, 33 bp, Homo sapien
aggcttaagggttttcgcagaatctgagtagaa

SEQ ID NO: 81521 - DNA, 33 bp, Homo sapien
catcagtctactcttcgatttacagagtggttt

SEQ ID NO: 81522 - DNA, 33 bp, Homo sapien
catcagtctactcttctatttacagagtggttt

SEQ ID NO: 81523 - DNA, 33 bp, Homo sapien
ttttagaatactcaacacagcatgtccaacttg

SEQ ID NO: 81524 - DNA, 33 bp, Homo sapien
ttttagaatactcaactcagcatgtccaacttg

SEQ ID NO: 81525 - DNA, 33 bp, Homo sapien
agatttcagagaggaaaaacattgcaatcccag

SEQ ID NO: 81526 - DNA, 33 bp, Homo sapien
agatttcagagaggaagaacattgcaatcccag

SEQ ID NO: 81527 - DNA, 33 bp, Homo sapien
gtaaactaagcagttacagagtgtgatgcatgt

SEQ ID NO: 81528 - DNA, 33 bp, Homo sapien
gtaaactaagcagttatagagtgtgatgcatgt

SEQ ID NO: 81529 - DNA, 33 bp, Homo sapien
cacatgtttactgtataagcctatctgtagcct

SEQ ID NO: 81530 - DNA, 33 bp, Homo sapien
cacatgtttactgtatgagcctatctgtagcct

SEQ ID NO: 81531 - DNA, 33 bp, Homo sapien
cagtcctcacattttaaggttctgtgaaaaggg

SEQ ID NO: 81532 - DNA, 33 bp, Homo sapien
cagtcctcacattttacggttctgtgaaaaggg

SEQ ID NO: 81533 - DNA, 33 bp, Homo sapien
ttttaggcccttgccacgtagaacctgtgtttt

SEQ ID NO: 81534 - DNA, 33 bp, Homo sapien
ttttaggcccttgccatgtagaacctgtgtttt

SEQ ID NO: 81535 - DNA, 33 bp, Homo sapien
cctgggttgcttaaaaatgtatggagagacaat

SEQ ID NO: 81536 - DNA, 33 bp, Homo sapien
cctgggttgcttaaaagtgtatggagagacaat

SEQ ID NO: 81537 - DNA, 33 bp, Homo sapien
ctctagctggcctttgcaacaatttgaatgggg

SEQ ID NO: 81538 - DNA, 33 bp, Homo sapien
ctctagctggcctttgtaacaatttgaatgggg

SEQ ID NO: 81539 - DNA, 33 bp, Homo sapien
cttgggtaaataaccacgagtaggccactatgt

SEQ ID NO: 81540 - DNA, 33 bp, Homo sapien
cttgggtaaataaccatgagtaggccactatgt

SEQ ID NO: 81541 - DNA, 33 bp, Homo sapien
caaaactcagacaacaaccaatgctggtgggga

SEQ ID NO: 81542 - DNA, 33 bp, Homo sapien
caaaactcagacaacacccaatgctggtgggga

SEQ ID NO: 81543 - DNA, 33 bp, Homo sapien
ttgtacagtaaaagtacgtttagctatgaaaat

SEQ ID NO: 81544 - DNA, 33 bp, Homo sapien
ttgtacagtaaaagtatgtttagctatgaaaat

SEQ ID NO: 81545 - DNA, 33 bp, Homo sapien
ccaacattcctattcaccagcttaactaccttc

SEQ ID NO: 81546 - DNA, 33 bp, Homo sapien
ccaacattcctattcatcagcttaactaccttc

SEQ ID NO: 81547 - DNA, 33 bp, Homo sapien
gttgacttgattaccaatggccaatgatggaat

SEQ ID NO: 81548 - DNA, 33 bp, Homo sapien
gttgacttgattaccagtggccaatgatggaat

SEQ ID NO: 81549 - DNA, 33 bp, Homo sapien
tcaggtgacttgtaccaattcaaacaaaaagtg

SEQ ID NO: 81550 - DNA, 33 bp, Homo sapien
tcaggtgacttgtaccgattcaaacaaaaagtg

SEQ ID NO: 81551 - DNA, 33 bp, Homo sapien
ggtttatcatctgtaaagattaataggactctg

SEQ ID NO: 81552 - DNA, 33 bp, Homo sapien
ggtttatcatctgtaaggattaataggactctg

SEQ ID NO: 81553 - DNA, 33 bp, Homo sapien
gatggaatggttcatcaaatgagtgtaccttct

SEQ ID NO: 81554 - DNA, 33 bp, Homo sapien
gatggaatggttcatccaatgagtgtaccttct

SEQ ID NO: 81555 - DNA, 33 bp, Homo sapien
tcaactcattcgttcaggtcagctttttgaaag

SEQ ID NO: 81556 - DNA, 33 bp, Homo sapien
tcaactcattcgttcatgtcagctttttgaaag

SEQ ID NO: 81557 - DNA, 33 bp, Homo sapien
tcaactagattgttctcacttccatttgatctt

SEQ ID NO: 81558 - DNA, 33 bp, Homo sapien
tcaactagattgttctgacttccatttgatctt

SEQ ID NO: 81559 - DNA, 33 bp, Homo sapien
agaactacagaaatctcacctagagcttggatc

SEQ ID NO: 81560 - DNA, 33 bp, Homo sapien
agaactacagaaatctgacctagagcttggatc

SEQ ID NO: 81561 - DNA, 33 bp, Homo sapien
gaaccaagcaaacacaaaacagggcaaagagaa

SEQ ID NO: 81562 - DNA, 33 bp, Homo sapien
gaaccaagcaaacacagaacagggcaaagagaa

SEQ ID NO: 81563 - DNA, 33 bp, Homo sapien
atcaatttggtccttgaaccacaatctacttcc

SEQ ID NO: 81564 - DNA, 33 bp, Homo sapien
atcaatttggtccttgcaccacaatctacttcc

SEQ ID NO: 81565 - DNA, 33 bp, Homo sapien
ctatggagaaaagataccatagagacactagtt

SEQ ID NO: 81566 - DNA, 33 bp, Homo sapien
ctatggagaaaagatatcatagagacactagtt

SEQ ID NO: 81567 - DNA, 33 bp, Homo sapien
aatgtggtaggaactcaaagtacactaccatca

SEQ ID NO: 81568 - DNA, 33 bp, Homo sapien
aatgtggtaggaactcgaagtacactaccatca

SEQ ID NO: 81569 - DNA, 33 bp, Homo sapien
cattacctcttctacaaggcaagtgaaacaaaa

SEQ ID NO: 81570 - DNA, 33 bp, Homo sapien
cattacctcttctacacggcaagtgaaacaaaa

SEQ ID NO: 81571 - DNA, 33 bp, Homo sapien
agggtcttaagctctaaaaatggttgtaaacgc

SEQ ID NO: 81572 - DNA, 33 bp, Homo sapien
agggtcttaagctctagaaatggttgtaaacgc

SEQ ID NO: 81573 - DNA, 33 bp, Homo sapien
gagtttacagcagtaacaaaataggtgacggag

SEQ ID NO: 81574 - DNA, 33 bp, Homo sapien
gagtttacagcagtaataaaataggtgacggag

SEQ ID NO: 81575 - DNA, 33 bp, Homo sapien
tatttcagagtgaaatcataagcgtttcagttg

SEQ ID NO: 81576 - DNA, 33 bp, Homo sapien
tatttcagagtgaaattataagcgtttcagttg

SEQ ID NO: 81577 - DNA, 33 bp, Homo sapien
ttgatatgatggattacactatggttcagtgat

SEQ ID NO: 81578 - DNA, 33 bp, Homo sapien
ttgatatgatggattatactatggttcagtgat

SEQ ID NO: 81579 - DNA, 33 bp, Homo sapien
acttcatttatccaaactcaactttcaatgaat

SEQ ID NO: 81580 - DNA, 33 bp, Homo sapien
acttcatttatccaaattcaactttcaatgaat

SEQ ID NO: 81581 - DNA, 33 bp, Homo sapien
tcacaggtaaactttgaacacttttaatctgca

SEQ ID NO: 81582 - DNA, 33 bp, Homo sapien
tcacaggtaaactttggacacttttaatctgca

SEQ ID NO: 81583 - DNA, 33 bp, Homo sapien
gaggattctacctcaccgaagacttgagagccg

SEQ ID NO: 81584 - DNA, 33 bp, Homo sapien
gaggattctacctcactgaagacttgagagccg

SEQ ID NO: 81585 - DNA, 33 bp, Homo sapien
ctaaacaggtagggaaaggcaggtgagaatggt

SEQ ID NO: 81586 - DNA, 33 bp, Homo sapien
ctaaacaggtagggaacggcaggtgagaatggt

SEQ ID NO: 81587 - DNA, 33 bp, Homo sapien
gcactcttcaataccacgcaatatccttttttg

SEQ ID NO: 81588 - DNA, 33 bp, Homo sapien
gcactcttcaataccatgcaatatccttttttg

SEQ ID NO: 81589 - DNA, 33 bp, Homo sapien
tctgtgttcctagcccggccacttggtcaagtg

SEQ ID NO: 81590 - DNA, 33 bp, Homo sapien
tctgtgttcctagccctgccacttggtcaagtg

SEQ ID NO: 81591 - DNA, 33 bp, Homo sapien
tagagaaattcagttacagttgtatgctggtct

SEQ ID NO: 81592 - DNA, 33 bp, Homo sapien
tagagaaattcagttatagttgtatgctggtct

SEQ ID NO: 81593 - DNA, 33 bp, Homo sapien
gaggctggactcaaaactaaatctctctgtccc

SEQ ID NO: 81594 - DNA, 33 bp, Homo sapien
gaggctggactcaaaattaaatctctctgtccc

SEQ ID NO: 81595 - DNA, 33 bp, Homo sapien
aagtgaacggtactaaactagaatccagaagac

SEQ ID NO: 81596 - DNA, 33 bp, Homo sapien
aagtgaacggtactaagctagaatccagaagac

SEQ ID NO: 81597 - DNA, 33 bp, Homo sapien
attctcaaggtgaacacctaatgttgtcgaaat

SEQ ID NO: 81598 - DNA, 33 bp, Homo sapien
attctcaaggtgaacagctaatgttgtcgaaat

SEQ ID NO: 81599 - DNA, 33 bp, Homo sapien
cttcccacccagaaaactctaaaggcaagatcc

SEQ ID NO: 81600 - DNA, 33 bp, Homo sapien
cttcccacccagaaaattctaaaggcaagatcc

SEQ ID NO: 81601 - DNA, 33 bp, Homo sapien
caggacacagagaggaaagggctcacaagaggg

SEQ ID NO: 81602 - DNA, 33 bp, Homo sapien
caggacacagagaggagagggctcacaagaggg

SEQ ID NO: 81603 - DNA, 33 bp, Homo sapien
tataccaattatatatcaacagaattcacctac

SEQ ID NO: 81604 - DNA, 33 bp, Homo sapien
tataccaattatatatgaacagaattcacctac

SEQ ID NO: 81605 - DNA, 33 bp, Homo sapien
tctagccttggaagaaagatatattactggcat

SEQ ID NO: 81606 - DNA, 33 bp, Homo sapien
tctagccttggaagaaggatatattactggcat

SEQ ID NO: 81607 - DNA, 33 bp, Homo sapien
gaagatgaagcctgaaaccttaaagtgtgtagt

SEQ ID NO: 81608 - DNA, 33 bp, Homo sapien
gaagatgaagcctgaagccttaaagtgtgtagt

SEQ ID NO: 81609 - DNA, 33 bp, Homo sapien
ctttccaatgaaaatcaactggtttctgaacat

SEQ ID NO: 81610 - DNA, 33 bp, Homo sapien
ctttccaatgaaaatccactggtttctgaacat

SEQ ID NO: 81611 - DNA, 33 bp, Homo sapien
tgttgctatgaacccaatcatgcttcttaccca

SEQ ID NO: 81612 - DNA, 33 bp, Homo sapien
tgttgctatgaacccagtcatgcttcttaccca

SEQ ID NO: 81613 - DNA, 33 bp, Homo sapien
tgttatagtgagcatcaatttcatgaccagaaa

SEQ ID NO: 81614 - DNA, 33 bp, Homo sapien
tgttatagtgagcatcgatttcatgaccagaaa

SEQ ID NO: 81615 - DNA, 33 bp, Homo sapien
ctccttcccgttattccaaataggtagaccata

SEQ ID NO: 81616 - DNA, 33 bp, Homo sapien
ctccttcccgttattcgaaataggtagaccata

SEQ ID NO: 81617 - DNA, 33 bp, Homo sapien
aaaatgagtattcatacgaaagtttgcccagcg

SEQ ID NO: 81618 - DNA, 33 bp, Homo sapien
aaaatgagtattcataggaaagtttgcccagcg

SEQ ID NO: 81619 - DNA, 33 bp, Homo sapien
gaatcaactgcacagcaaaatgcttaactggaa

SEQ ID NO: 81620 - DNA, 33 bp, Homo sapien
gaatcaactgcacagcgaaatgcttaactggaa

SEQ ID NO: 81621 - DNA, 33 bp, Homo sapien
agggcttcccttttcagtaggaatgcctgcaat

SEQ ID NO: 81622 - DNA, 33 bp, Homo sapien
agggcttcccttttcattaggaatgcctgcaat

SEQ ID NO: 81623 - DNA, 33 bp, Homo sapien
cctagcatcagacttgaaatatgaccatgatac

SEQ ID NO: 81624 - DNA, 33 bp, Homo sapien
cctagcatcagacttgcaatatgaccatgatac

SEQ ID NO: 81625 - DNA, 33 bp, Homo sapien
aaaaacaagagctacaaagtatcatggtcatat

SEQ ID NO: 81626 - DNA, 33 bp, Homo sapien
aaaaacaagagctacagagtatcatggtcatat

SEQ ID NO: 81627 - DNA, 33 bp, Homo sapien
aaatatattttgctgaacaattttttctactgt

SEQ ID NO: 81628 - DNA, 33 bp, Homo sapien
aaatatattttgctgagcaattttttctactgt

SEQ ID NO: 81629 - DNA, 33 bp, Homo sapien
tgcactttgtaaagagcaaagcacaattgaaat

SEQ ID NO: 81630 - DNA, 33 bp, Homo sapien
tgcactttgtaaagaggaaagcacaattgaaat

SEQ ID NO: 81631 - DNA, 33 bp, Homo sapien
tctgtaataagtctgacgttgctgaacacacac

SEQ ID NO: 81632 - DNA, 33 bp, Homo sapien
tctgtaataagtctgatgttgctgaacacacac

SEQ ID NO: 81633 - DNA, 33 bp, Homo sapien
taaacagcggtgtacacatttctacagcctatg

SEQ ID NO: 81634 - DNA, 33 bp, Homo sapien
taaacagcggtgtacatatttctacagcctatg

SEQ ID NO: 81635 - DNA, 33 bp, Homo sapien
tattctctacccatcacagcacttggccacagc

SEQ ID NO: 81636 - DNA, 33 bp, Homo sapien
tattctctacccatcatagcacttggccacagc

SEQ ID NO: 81637 - DNA, 33 bp, Homo sapien
aactccattaattctaaaagtctgctctgagtg

SEQ ID NO: 81638 - DNA, 33 bp, Homo sapien
aactccattaattctagaagtctgctctgagtg

SEQ ID NO: 81639 - DNA, 33 bp, Homo sapien
gtagtacacagagaaaaccagcttcactgtgaa

SEQ ID NO: 81640 - DNA, 33 bp, Homo sapien
gtagtacacagagaaagccagcttcactgtgaa

SEQ ID NO: 81641 - DNA, 33 bp, Homo sapien
actgaattgcctttaccctggctaatgaatgct

SEQ ID NO: 81642 - DNA, 33 bp, Homo sapien
actgaattgcctttactctggctaatgaatgct

SEQ ID NO: 81643 - DNA, 33 bp, Homo sapien
tggcccagttggtgtaagagcttggggatgatt

SEQ ID NO: 81644 - DNA, 33 bp, Homo sapien
tggcccagttggtgtaggagcttggggatgatt

SEQ ID NO: 81645 - DNA, 33 bp, Homo sapien
tatcatacaaatgaaaatattaccatggttttg

SEQ ID NO: 81646 - DNA, 33 bp, Homo sapien
tatcatacaaatgaaagtattaccatggttttg

SEQ ID NO: 81647 - DNA, 33 bp, Homo sapien
tagcggagagttcttgcagttgctaaatgcctt

SEQ ID NO: 81648 - DNA, 33 bp, Homo sapien
tagcggagagttcttgtagttgctaaatgcctt

SEQ ID NO: 81649 - DNA, 33 bp, Homo sapien
cctcttgcaacactgcactactgaaaggtcatg

SEQ ID NO: 81650 - DNA, 33 bp, Homo sapien
cctcttgcaacactgcgctactgaaaggtcatg

SEQ ID NO: 81651 - DNA, 33 bp, Homo sapien
attcataatgatgaccagaaagaaaggaataaa

SEQ ID NO: 81652 - DNA, 33 bp, Homo sapien
attcataatgatgaccggaaagaaaggaataaa

SEQ ID NO: 81653 - DNA, 33 bp, Homo sapien
aataaagaatgcataacgagccctgtgtcctga

SEQ ID NO: 81654 - DNA, 33 bp, Homo sapien
aataaagaatgcataatgagccctgtgtcctga

SEQ ID NO: 81655 - DNA, 33 bp, Homo sapien
acaaatatggctgtaaatatgtagctttatttc

SEQ ID NO: 81656 - DNA, 33 bp, Homo sapien
acaaatatggctgtaagtatgtagctttatttc

SEQ ID NO: 81657 - DNA, 33 bp, Homo sapien
acctaaagatgccacaaaaaactcttatttgat

SEQ ID NO: 81658 - DNA, 33 bp, Homo sapien
acctaaagatgccacagaaaactcttatttgat

SEQ ID NO: 81659 - DNA, 33 bp, Homo sapien
gggagacagagtttgccataagccgggattgtg

SEQ ID NO: 81660 - DNA, 33 bp, Homo sapien
gggagacagagtttgcgataagccgggattgtg

SEQ ID NO: 81661 - DNA, 33 bp, Homo sapien
ctactagattaagcagcagggattggtaatgta

SEQ ID NO: 81662 - DNA, 33 bp, Homo sapien
ctactagattaagcagtagggattggtaatgta

SEQ ID NO: 81663 - DNA, 33 bp, Homo sapien
agtccagaccgagagacaaagtcacatggtgta

SEQ ID NO: 81664 - DNA, 33 bp, Homo sapien
agtccagaccgagagagaaagtcacatggtgta

SEQ ID NO: 81665 - DNA, 33 bp, Homo sapien
tattatcactgcaaatcagtacctcagtgtgac

SEQ ID NO: 81666 - DNA, 33 bp, Homo sapien
tattatcactgcaaattagtacctcagtgtgac

SEQ ID NO: 81667 - DNA, 33 bp, Homo sapien
gaaatattgtgggctacgaaaaggttattctgc

SEQ ID NO: 81668 - DNA, 33 bp, Homo sapien
gaaatattgtgggctatgaaaaggttattctgc

SEQ ID NO: 81669 - DNA, 33 bp, Homo sapien
gggaagatgcgtgaaactaagaatagatgataa

SEQ ID NO: 81670 - DNA, 33 bp, Homo sapien
gggaagatgcgtgaaattaagaatagatgataa

SEQ ID NO: 81671 - DNA, 33 bp, Homo sapien
tctagtctcacctttaagtcttgattccaatgt

SEQ ID NO: 81672 - DNA, 33 bp, Homo sapien
tctagtctcacctttaggtcttgattccaatgt

SEQ ID NO: 81673 - DNA, 33 bp, Homo sapien
aaaacaacaacattgacagtaatcaaataccta

SEQ ID NO: 81674 - DNA, 33 bp, Homo sapien
aaaacaacaacattgagagtaatcaaataccta

SEQ ID NO: 81675 - DNA, 33 bp, Homo sapien
gtttatggaagaacagcaatgaggtagggccag

SEQ ID NO: 81676 - DNA, 33 bp, Homo sapien
gtttatggaagaacagtaatgaggtagggccag

SEQ ID NO: 81677 - DNA, 33 bp, Homo sapien
tcaaactcaccccatcacaagaagcaatggtgg

SEQ ID NO: 81678 - DNA, 33 bp, Homo sapien
tcaaactcaccccatcgcaagaagcaatggtgg

SEQ ID NO: 81679 - DNA, 33 bp, Homo sapien
taaagtgataataaaacgggttcaccatccctt

SEQ ID NO: 81680 - DNA, 33 bp, Homo sapien
taaagtgataataaaatgggttcaccatccctt

SEQ ID NO: 81681 - DNA, 33 bp, Homo sapien
cggcaatgccaggggcactaaaatgactatgaa

SEQ ID NO: 81682 - DNA, 33 bp, Homo sapien
cggcaatgccaggggctctaaaatgactatgaa

SEQ ID NO: 81683 - DNA, 33 bp, Homo sapien
ctgtgcaacaaatgaaacttgatcttaagctta

SEQ ID NO: 81684 - DNA, 33 bp, Homo sapien
ctgtgcaacaaatgaaccttgatcttaagctta

SEQ ID NO: 81685 - DNA, 33 bp, Homo sapien
agctttgtgaggcagcaataacagctgaggcaa

SEQ ID NO: 81686 - DNA, 33 bp, Homo sapien
agctttgtgaggcagcgataacagctgaggcaa

SEQ ID NO: 81687 - DNA, 33 bp, Homo sapien
tattgaaaaccaaaggaccctcaatcatagtga

SEQ ID NO: 81688 - DNA, 33 bp, Homo sapien
tattgaaaaccaaaggcccctcaatcatagtga

SEQ ID NO: 81689 - DNA, 33 bp, Homo sapien
ctaataagggcaagaaagtatggaaagttatat

SEQ ID NO: 81690 - DNA, 33 bp, Homo sapien
ctaataagggcaagaaggtatggaaagttatat

SEQ ID NO: 81691 - DNA, 33 bp, Homo sapien
tgtatagtgcactcaaataatgcaaactaattt

SEQ ID NO: 81692 - DNA, 33 bp, Homo sapien
tgtatagtgcactcaagtaatgcaaactaattt

SEQ ID NO: 81693 - DNA, 33 bp, Homo sapien
attttcagggaagaaaaaatgatcaggtagtta

SEQ ID NO: 81694 - DNA, 33 bp, Homo sapien
attttcagggaagaaagaatgatcaggtagtta

SEQ ID NO: 81695 - DNA, 33 bp, Homo sapien
tagcatttaaccagtaactagtaactctgtgcg

SEQ ID NO: 81696 - DNA, 33 bp, Homo sapien
tagcatttaaccagtatctagtaactctgtgcg

SEQ ID NO: 81697 - DNA, 33 bp, Homo sapien
atgagtgttcattgaactgatatctcaaagaag

SEQ ID NO: 81698 - DNA, 33 bp, Homo sapien
atgagtgttcattgaattgatatctcaaagaag

SEQ ID NO: 81699 - DNA, 33 bp, Homo sapien
attttcaggagggaacaacctttctgtagaaca

SEQ ID NO: 81700 - DNA, 33 bp, Homo sapien
attttcaggagggaacgacctttctgtagaaca

SEQ ID NO: 81701 - DNA, 33 bp, Homo sapien
ggaacagcagaggagacgagcctccagcacgta

SEQ ID NO: 81702 - DNA, 33 bp, Homo sapien
ggaacagcagaggagatgagcctccagcacgta

SEQ ID NO: 81703 - DNA, 33 bp, Homo sapien
cacgtttgtgctgtggaaaacactggtactgtg

SEQ ID NO: 81704 - DNA, 33 bp, Homo sapien
cacgtttgtgctgtgggaaacactggtactgtg

SEQ ID NO: 81705 - DNA, 33 bp, Homo sapien
agggttttgagactacaaggacaaaagctttcc

SEQ ID NO: 81706 - DNA, 33 bp, Homo sapien
agggttttgagactacgaggacaaaagctttcc

SEQ ID NO: 81707 - DNA, 33 bp, Homo sapien
tttagctagcttttgaacaggtatgaacatcat

SEQ ID NO: 81708 - DNA, 33 bp, Homo sapien
tttagctagcttttgagcaggtatgaacatcat

SEQ ID NO: 81709 - DNA, 33 bp, Homo sapien
gtgactatggtcagtaataattcaatcatacat

SEQ ID NO: 81710 - DNA, 33 bp, Homo sapien
gtgactatggtcagtagtaattcaatcatacat

SEQ ID NO: 81711 - DNA, 33 bp, Homo sapien
aaaaatggcttctgatgaggtaaccgcgtatga

SEQ ID NO: 81712 - DNA, 33 bp, Homo sapien
aaaaatggcttctgattaggtaaccgcgtatga

SEQ ID NO: 81713 - DNA, 33 bp, Homo sapien
gtgggtaaaagctgaaatgtcaactaagttatt

SEQ ID NO: 81714 - DNA, 33 bp, Homo sapien
gtgggtaaaagctgaagtgtcaactaagttatt

SEQ ID NO: 81715 - DNA, 33 bp, Homo sapien
cagagcacttataaaacctttcagtactttagc

SEQ ID NO: 81716 - DNA, 33 bp, Homo sapien
cagagcacttataaaatctttcagtactttagc

SEQ ID NO: 81717 - DNA, 33 bp, Homo sapien
ttggagtaaaagggacaaatttatcatcattcg

SEQ ID NO: 81718 - DNA, 33 bp, Homo sapien
ttggagtaaaagggacgaatttatcatcattcg

SEQ ID NO: 81719 - DNA, 33 bp, Homo sapien
ctccatgtggccaggaccatcttaagccattca

SEQ ID NO: 81720 - DNA, 33 bp, Homo sapien
ctccatgtggccaggagcatcttaagccattca

SEQ ID NO: 81721 - DNA, 33 bp, Homo sapien
gctctcttccttgccacgtgaggataatttact

SEQ ID NO: 81722 - DNA, 33 bp, Homo sapien
gctctcttccttgccatgtgaggataatttact

SEQ ID NO: 81723 - DNA, 33 bp, Homo sapien
actatgtgatagttaaaaacaagctttggtaga

SEQ ID NO: 81724 - DNA, 33 bp, Homo sapien
actatgtgatagttaagaacaagctttggtaga

SEQ ID NO: 81725 - DNA, 33 bp, Homo sapien
tcttgccaatcaattccaaagagctcaaaaaaa

SEQ ID NO: 81726 - DNA, 33 bp, Homo sapien
tcttgccaatcaattcgaaagagctcaaaaaaa

SEQ ID NO: 81727 - DNA, 33 bp, Homo sapien
atgcatgaatgaggtacatttataatgcacaaa

SEQ ID NO: 81728 - DNA, 33 bp, Homo sapien
atgcatgaatgaggtatatttataatgcacaaa

SEQ ID NO: 81729 - DNA, 33 bp, Homo sapien
gatcaaaagcaactatcagtagatggaaaactt

SEQ ID NO: 81730 - DNA, 33 bp, Homo sapien
gatcaaaagcaactattagtagatggaaaactt

SEQ ID NO: 81731 - DNA, 33 bp, Homo sapien
ccatgtgaaaaggttaacatctattacatagac

SEQ ID NO: 81732 - DNA, 33 bp, Homo sapien
ccatgtgaaaaggttagcatctattacatagac

SEQ ID NO: 81733 - DNA, 33 bp, Homo sapien
tgacagaagctgttaaagagggcagtcttcatg

SEQ ID NO: 81734 - DNA, 33 bp, Homo sapien
tgacagaagctgttaaggagggcagtcttcatg

SEQ ID NO: 81735 - DNA, 33 bp, Homo sapien
ggtagcagcatgataaagatggatggtctccat

SEQ ID NO: 81736 - DNA, 33 bp, Homo sapien
ggtagcagcatgataaggatggatggtctccat

SEQ ID NO: 81737 - DNA, 33 bp, Homo sapien
aagatctttggtatctcaagtttggcacacaca

SEQ ID NO: 81738 - DNA, 33 bp, Homo sapien
aagatctttggtatctgaagtttggcacacaca

SEQ ID NO: 81739 - DNA, 33 bp, Homo sapien
aaaaatgtgcaatggaactgaatagacatttca

SEQ ID NO: 81740 - DNA, 33 bp, Homo sapien
aaaaatgtgcaatggacctgaatagacatttca

SEQ ID NO: 81741 - DNA, 33 bp, Homo sapien
tctgtttacctcattacagggcgtgaaactcaa

SEQ ID NO: 81742 - DNA, 33 bp, Homo sapien
tctgtttacctcattatagggcgtgaaactcaa

SEQ ID NO: 81743 - DNA, 33 bp, Homo sapien
aatctgaattaccctgcactaactgaactctct

SEQ ID NO: 81744 - DNA, 33 bp, Homo sapien
aatctgaattaccctggactaactgaactctct

SEQ ID NO: 81745 - DNA, 33 bp, Homo sapien
aatgtttattaataacgacaatcaacctctata

SEQ ID NO: 81746 - DNA, 33 bp, Homo sapien
aatgtttattaataactacaatcaacctctata

SEQ ID NO: 81747 - DNA, 33 bp, Homo sapien
accacaaacttacccaggtaggaatgtgaatat

SEQ ID NO: 81748 - DNA, 33 bp, Homo sapien
accacaaacttacccatgtaggaatgtgaatat

SEQ ID NO: 81749 - DNA, 33 bp, Homo sapien
aatcgtctagaaatcactgatatcaccacataa

SEQ ID NO: 81750 - DNA, 33 bp, Homo sapien
aatcgtctagaaatcattgatatcaccacataa

SEQ ID NO: 81751 - DNA, 33 bp, Homo sapien
tgagggttgattcttacgaaagagtagggtgtt

SEQ ID NO: 81752 - DNA, 33 bp, Homo sapien
tgagggttgattcttaggaaagagtagggtgtt

SEQ ID NO: 81753 - DNA, 33 bp, Homo sapien
attttatgacttttagcattagaattgtcttgc

SEQ ID NO: 81754 - DNA, 33 bp, Homo sapien
attttatgacttttaggattagaattgtcttgc

SEQ ID NO: 81755 - DNA, 33 bp, Homo sapien
ataagaaacacattccaaaagtttcattctaat

SEQ ID NO: 81756 - DNA, 33 bp, Homo sapien
ataagaaacacattccgaaagtttcattctaat

SEQ ID NO: 81757 - DNA, 33 bp, Homo sapien
atcagtgatgaaatggaaaaaaatctctgctgt

SEQ ID NO: 81758 - DNA, 33 bp, Homo sapien
atcagtgatgaaatgggaaaaaatctctgctgt

SEQ ID NO: 81759 - DNA, 33 bp, Homo sapien
actggtaatgtatcacacaggaaaaatggtaat

SEQ ID NO: 81760 - DNA, 33 bp, Homo sapien
actggtaatgtatcacgcaggaaaaatggtaat

SEQ ID NO: 81761 - DNA, 33 bp, Homo sapien
gttttgttggatttcggattaactatactcact

SEQ ID NO: 81762 - DNA, 33 bp, Homo sapien
gttttgttggatttcgtattaactatactcact

SEQ ID NO: 81763 - DNA, 33 bp, Homo sapien
atgaaatgccactgaaaggttggaaagatgagt

SEQ ID NO: 81764 - DNA, 33 bp, Homo sapien
atgaaatgccactgaacggttggaaagatgagt

SEQ ID NO: 81765 - DNA, 33 bp, Homo sapien
aggtacacccactccactgacctccaaaagtca

SEQ ID NO: 81766 - DNA, 33 bp, Homo sapien
aggtacacccactccattgacctccaaaagtca

SEQ ID NO: 81767 - DNA, 33 bp, Homo sapien
ttctgggttcatcagagtcacctgtgtagcttt

SEQ ID NO: 81768 - DNA, 33 bp, Homo sapien
ttctgggttcatcagattcacctgtgtagcttt

SEQ ID NO: 81769 - DNA, 33 bp, Homo sapien
agacttccttaagcagacctcactactatgcca

SEQ ID NO: 81770 - DNA, 33 bp, Homo sapien
agacttccttaagcaggcctcactactatgcca

SEQ ID NO: 81771 - DNA, 33 bp, Homo sapien
ataactatgaggtccacatcatactatacccgc

SEQ ID NO: 81772 - DNA, 33 bp, Homo sapien
ataactatgaggtccatatcatactatacccgc

SEQ ID NO: 81773 - DNA, 33 bp, Homo sapien
ttttgcctgtgttttccaggaaatctgagctaa

SEQ ID NO: 81774 - DNA, 33 bp, Homo sapien
ttttgcctgtgttttctaggaaatctgagctaa

SEQ ID NO: 81775 - DNA, 33 bp, Homo sapien
aatgtctttcagaaaccactttgaattactaat

SEQ ID NO: 81776 - DNA, 33 bp, Homo sapien
aatgtctttcagaaactactttgaattactaat

SEQ ID NO: 81777 - DNA, 33 bp, Homo sapien
tccatctggaaatgctaaaataaggttcctctt

SEQ ID NO: 81778 - DNA, 33 bp, Homo sapien
tccatctggaaatgctgaaataaggttcctctt

SEQ ID NO: 81779 - DNA, 33 bp, Homo sapien
tttctttttctcatgacgtatgtacctgcaaca

SEQ ID NO: 81780 - DNA, 33 bp, Homo sapien
tttctttttctcatgatgtatgtacctgcaaca

SEQ ID NO: 81781 - DNA, 33 bp, Homo sapien
tggtaaagaaatggtcaacaaagcaagtctgaa

SEQ ID NO: 81782 - DNA, 33 bp, Homo sapien
tggtaaagaaatggtcgacaaagcaagtctgaa

SEQ ID NO: 81783 - DNA, 33 bp, Homo sapien
tgagcctaaattattacggtattgcactatatc

SEQ ID NO: 81784 - DNA, 33 bp, Homo sapien
tgagcctaaattattatggtattgcactatatc

SEQ ID NO: 81785 - DNA, 33 bp, Homo sapien
gtcaatttttgatttcccaagggctaaaaaaca

SEQ ID NO: 81786 - DNA, 33 bp, Homo sapien
gtcaatttttgatttctcaagggctaaaaaaca

SEQ ID NO: 81787 - DNA, 33 bp, Homo sapien
tgtgcagagacaacagaacatgtgaaccctgac

SEQ ID NO: 81788 - DNA, 33 bp, Homo sapien
tgtgcagagacaacaggacatgtgaaccctgac

SEQ ID NO: 81789 - DNA, 33 bp, Homo sapien
caatatgtaggtttcacgttattgatattctgc

SEQ ID NO: 81790 - DNA, 33 bp, Homo sapien
caatatgtaggtttcatgttattgatattctgc

SEQ ID NO: 81791 - DNA, 33 bp, Homo sapien
ccatgaaagcagtatacaaagagtgtttcattt

SEQ ID NO: 81792 - DNA, 33 bp, Homo sapien
ccatgaaagcagtatataaagagtgtttcattt

SEQ ID NO: 81793 - DNA, 33 bp, Homo sapien
gcttgctgcacagtaaaatttgaatgagagaga

SEQ ID NO: 81794 - DNA, 33 bp, Homo sapien
gcttgctgcacagtaacatttgaatgagagaga

SEQ ID NO: 81795 - DNA, 33 bp, Homo sapien
gtgaaacacctcagaaaggcaatcgtgacagga

SEQ ID NO: 81796 - DNA, 33 bp, Homo sapien
gtgaaacacctcagaacggcaatcgtgacagga

SEQ ID NO: 81797 - DNA, 33 bp, Homo sapien
agtacccagtctaataactgatgcatagtcagt

SEQ ID NO: 81798 - DNA, 33 bp, Homo sapien
agtacccagtctaatacctgatgcatagtcagt

SEQ ID NO: 81799 - DNA, 33 bp, Homo sapien
aattcaagccaggataaatgtgttaagcggaaa

SEQ ID NO: 81800 - DNA, 33 bp, Homo sapien
aattcaagccaggatacatgtgttaagcggaaa

SEQ ID NO: 81801 - DNA, 33 bp, Homo sapien
gctttactcccataaaagactcaccacactgct

SEQ ID NO: 81802 - DNA, 33 bp, Homo sapien
gctttactcccataaaggactcaccacactgct

SEQ ID NO: 81803 - DNA, 33 bp, Homo sapien
tgatgatgaggctggaaaggaataccagtgaat

SEQ ID NO: 81804 - DNA, 33 bp, Homo sapien
tgatgatgaggctggagaggaataccagtgaat

SEQ ID NO: 81805 - DNA, 33 bp, Homo sapien
atgtgatgatctttgacgtgtattgagtgaacc

SEQ ID NO: 81806 - DNA, 33 bp, Homo sapien
atgtgatgatctttgatgtgtattgagtgaacc

SEQ ID NO: 81807 - DNA, 33 bp, Homo sapien
ttaaacagtgaggcacagaattactttcagata

SEQ ID NO: 81808 - DNA, 33 bp, Homo sapien
ttaaacagtgaggcacggaattactttcagata

SEQ ID NO: 81809 - DNA, 33 bp, Homo sapien
aataagcttttactaaatgaaaatgctggattt

SEQ ID NO: 81810 - DNA, 33 bp, Homo sapien
aataagcttttactaactgaaaatgctggattt

SEQ ID NO: 81811 - DNA, 33 bp, Homo sapien
aagaagaatcaactgtaaataatcgggccatga

SEQ ID NO: 81812 - DNA, 33 bp, Homo sapien
aagaagaatcaactgtcaataatcgggccatga

SEQ ID NO: 81813 - DNA, 33 bp, Homo sapien
cctagctatataagggaatccaaagggcccaac

SEQ ID NO: 81814 - DNA, 33 bp, Homo sapien
cctagctatataaggggatccaaagggcccaac

SEQ ID NO: 81815 - DNA, 33 bp, Homo sapien
ttactttttgagccaacagtccttctgtgtaac

SEQ ID NO: 81816 - DNA, 33 bp, Homo sapien
ttactttttgagccaatagtccttctgtgtaac

SEQ ID NO: 81817 - DNA, 33 bp, Homo sapien
gatgcattggcaagaacgtaagaagtagttgag

SEQ ID NO: 81818 - DNA, 33 bp, Homo sapien
gatgcattggcaagaatgtaagaagtagttgag

SEQ ID NO: 81819 - DNA, 33 bp, Homo sapien
acagtggagcgaaagaagtcagatgtaacaaaa

SEQ ID NO: 81820 - DNA, 33 bp, Homo sapien
acagtggagcgaaagatgtcagatgtaacaaaa

SEQ ID NO: 81821 - DNA, 33 bp, Homo sapien
tcaatgtggtgcaacacggttgtataataatta

SEQ ID NO: 81822 - DNA, 33 bp, Homo sapien
tcaatgtggtgcaacatggttgtataataatta

SEQ ID NO: 81823 - DNA, 33 bp, Homo sapien
tcatctcctataagcacaattttctcccccacc

SEQ ID NO: 81824 - DNA, 33 bp, Homo sapien
tcatctcctataagcataattttctcccccacc

SEQ ID NO: 81825 - DNA, 33 bp, Homo sapien
ttcaagcccattgtgaagacagctagaatgtaa

SEQ ID NO: 81826 - DNA, 33 bp, Homo sapien
ttcaagcccattgtgaggacagctagaatgtaa

SEQ ID NO: 81827 - DNA, 33 bp, Homo sapien
tgcctatagtttattaagttactagctcctatt

SEQ ID NO: 81828 - DNA, 33 bp, Homo sapien
tgcctatagtttattaggttactagctcctatt

SEQ ID NO: 81829 - DNA, 33 bp, Homo sapien
ccttatttccacataggccgatcggttagctgc

SEQ ID NO: 81830 - DNA, 33 bp, Homo sapien
ccttatttccacatagtccgatcggttagctgc

SEQ ID NO: 81831 - DNA, 33 bp, Homo sapien
ccaattacagacttcacgggaaattagagttgc

SEQ ID NO: 81832 - DNA, 33 bp, Homo sapien
ccaattacagacttcatgggaaattagagttgc

SEQ ID NO: 81833 - DNA, 33 bp, Homo sapien
tgccactttcagatccagaagctttacagatcc

SEQ ID NO: 81834 - DNA, 33 bp, Homo sapien
tgccactttcagatccggaagctttacagatcc

SEQ ID NO: 81835 - DNA, 33 bp, Homo sapien
actatgccagaagatcaatacctattatcgtag

SEQ ID NO: 81836 - DNA, 33 bp, Homo sapien
actatgccagaagatcgatacctattatcgtag

SEQ ID NO: 81837 - DNA, 33 bp, Homo sapien
atgtagatgccacttaataaatacattttgggc

SEQ ID NO: 81838 - DNA, 33 bp, Homo sapien
atgtagatgccacttagtaaatacattttgggc

SEQ ID NO: 81839 - DNA, 33 bp, Homo sapien
atcattttaaagatgacatggaagctattttga

SEQ ID NO: 81840 - DNA, 33 bp, Homo sapien
atcattttaaagatgagatggaagctattttga

SEQ ID NO: 81841 - DNA, 33 bp, Homo sapien
aaaccaaaaatgccacaaactgtgttagaccaa

SEQ ID NO: 81842 - DNA, 33 bp, Homo sapien
aaaccaaaaatgccacgaactgtgttagaccaa

SEQ ID NO: 81843 - DNA, 33 bp, Homo sapien
ggtgaagttttcaaaagaagctgtacttcaaaa

SEQ ID NO: 81844 - DNA, 33 bp, Homo sapien
ggtgaagttttcaaaataagctgtacttcaaaa

SEQ ID NO: 81845 - DNA, 33 bp, Homo sapien
tgggatattggaacaaccaaattacatcaatac

SEQ ID NO: 81846 - DNA, 33 bp, Homo sapien
tgggatattggaacaatcaaattacatcaatac

SEQ ID NO: 81847 - DNA, 33 bp, Homo sapien
ttgctaatgtgaaagacactgtggtagacattg

SEQ ID NO: 81848 - DNA, 33 bp, Homo sapien
ttgctaatgtgaaagagactgtggtagacattg

SEQ ID NO: 81849 - DNA, 33 bp, Homo sapien
ttcacagcatgaaaaccgagcaagaaatcatgg

SEQ ID NO: 81850 - DNA, 33 bp, Homo sapien
ttcacagcatgaaaactgagcaagaaatcatgg

SEQ ID NO: 81851 - DNA, 33 bp, Homo sapien
atcgagagaagttggaagtctgctggtcaccaa

SEQ ID NO: 81852 - DNA, 33 bp, Homo sapien
atcgagagaagttggaggtctgctggtcaccaa

SEQ ID NO: 81853 - DNA, 33 bp, Homo sapien
ataaagcttggttctacgccttacaaaaacctc

SEQ ID NO: 81854 - DNA, 33 bp, Homo sapien
ataaagcttggttctatgccttacaaaaacctc

SEQ ID NO: 81855 - DNA, 33 bp, Homo sapien
gagcaacccttgttaccaattacatgagtgaca

SEQ ID NO: 81856 - DNA, 33 bp, Homo sapien
gagcaacccttgttactaattacatgagtgaca

SEQ ID NO: 81857 - DNA, 33 bp, Homo sapien
catacacctgtgctgaaattctcaaagaagccc

SEQ ID NO: 81858 - DNA, 33 bp, Homo sapien
catacacctgtgctgagattctcaaagaagccc

SEQ ID NO: 81859 - DNA, 33 bp, Homo sapien
cccaccttatggcagacgggaagtcattctggc

SEQ ID NO: 81860 - DNA, 33 bp, Homo sapien
cccaccttatggcagatgggaagtcattctggc

SEQ ID NO: 81861 - DNA, 33 bp, Homo sapien
cagtatatgaaaatgaactggtggcaactaggg

SEQ ID NO: 81862 - DNA, 33 bp, Homo sapien
cagtatatgaaaatgagctggtggcaactaggg

SEQ ID NO: 81863 - DNA, 33 bp, Homo sapien
gactgagctgggattcaaagaactctcccagaa

SEQ ID NO: 81864 - DNA, 33 bp, Homo sapien
gactgagctgggattctaagaactctcccagaa

SEQ ID NO: 81865 - DNA, 33 bp, Homo sapien
aacatagtgctgcaaacactactgctggccagg

SEQ ID NO: 81866 - DNA, 33 bp, Homo sapien
aacatagtgctgcaaatactactgctggccagg

SEQ ID NO: 81867 - DNA, 33 bp, Homo sapien
atgtgcaatcacatgacatttacttgaaggaaa

SEQ ID NO: 81868 - DNA, 33 bp, Homo sapien
atgtgcaatcacatgatatttacttgaaggaaa

SEQ ID NO: 81869 - DNA, 33 bp, Homo sapien
aggataccctactgaacgggtagtcggactttg

SEQ ID NO: 81870 - DNA, 33 bp, Homo sapien
aggataccctactgaatgggtagtcggactttg

SEQ ID NO: 81871 - DNA, 33 bp, Homo sapien
cattgttcaagggtcaaccatactgacatccct

SEQ ID NO: 81872 - DNA, 33 bp, Homo sapien
cattgttcaagggtcatccatactgacatccct

SEQ ID NO: 81873 - DNA, 33 bp, Homo sapien
aacgtctgtgtagaaacggacccacaaggttca

SEQ ID NO: 81874 - DNA, 33 bp, Homo sapien
aacgtctgtgtagaaatggacccacaaggttca

SEQ ID NO: 81875 - DNA, 33 bp, Homo sapien
gcatgagaagccatcaataagttgttaaaataa

SEQ ID NO: 81876 - DNA, 33 bp, Homo sapien
gcatgagaagccatcagtaagttgttaaaataa

SEQ ID NO: 81877 - DNA, 33 bp, Homo sapien
ctgttttcactgacaagcaattgccactgagtt

SEQ ID NO: 81878 - DNA, 33 bp, Homo sapien
ctgttttcactgacaatcaattgccactgagtt

SEQ ID NO: 81879 - DNA, 33 bp, Homo sapien
atagagatgccctccaggtgtggtgaccagtac

SEQ ID NO: 81880 - DNA, 33 bp, Homo sapien
atagagatgccctccatgtgtggtgaccagtac

SEQ ID NO: 81881 - DNA, 33 bp, Homo sapien
ttgtgaggtattggaaagattaaataaagtgat

SEQ ID NO: 81882 - DNA, 33 bp, Homo sapien
ttgtgaggtattggaaggattaaataaagtgat

SEQ ID NO: 81883 - DNA, 33 bp, Homo sapien
aaaacctttattgctcaaggtgcctcaaattgg

SEQ ID NO: 81884 - DNA, 33 bp, Homo sapien
aaaacctttattgctccaggtgcctcaaattgg

SEQ ID NO: 81885 - DNA, 33 bp, Homo sapien
tgacttggaaaaaatgccatcatgttctgtccg

SEQ ID NO: 81886 - DNA, 33 bp, Homo sapien
tgacttggaaaaaatggcatcatgttctgtccg

SEQ ID NO: 81887 - DNA, 33 bp, Homo sapien
gtttgtggtttaggaaagccttgagcggttttc

SEQ ID NO: 81888 - DNA, 33 bp, Homo sapien
gtttgtggtttaggaacgccttgagcggttttc

SEQ ID NO: 81889 - DNA, 33 bp, Homo sapien
ctcctattattgtgacacttggatggccccatc

SEQ ID NO: 81890 - DNA, 33 bp, Homo sapien
ctcctattattgtgacccttggatggccccatc

SEQ ID NO: 81891 - DNA, 33 bp, Homo sapien
aatgctgtagagggacacttgagactatggttt

SEQ ID NO: 81892 - DNA, 33 bp, Homo sapien
aatgctgtagagggacccttgagactatggttt

SEQ ID NO: 81893 - DNA, 33 bp, Homo sapien
gcaagaatgcaagtgacgcaaaagattcgtgag

SEQ ID NO: 81894 - DNA, 33 bp, Homo sapien
gcaagaatgcaagtgatgcaaaagattcgtgag

SEQ ID NO: 81895 - DNA, 33 bp, Homo sapien
gggatcctttcagaaagacatagcaagagattg

SEQ ID NO: 81896 - DNA, 33 bp, Homo sapien
gggatcctttcagaaatacatagcaagagattg

SEQ ID NO: 81897 - DNA, 33 bp, Homo sapien
aatattgtcattgagacggaacaaattaggcgt

SEQ ID NO: 81898 - DNA, 33 bp, Homo sapien
aatattgtcattgagatggaacaaattaggcgt

SEQ ID NO: 81899 - DNA, 33 bp, Homo sapien
agaatttagcaggaaaccaagagtagagtgctt

SEQ ID NO: 81900 - DNA, 33 bp, Homo sapien
agaatttagcaggaaatcaagagtagagtgctt

SEQ ID NO: 81901 - DNA, 33 bp, Homo sapien
aaacactctttacaccaagttctattagcttgg

SEQ ID NO: 81902 - DNA, 33 bp, Homo sapien
aaacactctttacaccgagttctattagcttgg

SEQ ID NO: 81903 - DNA, 33 bp, Homo sapien
aaactcattacgcctagaattcctctaacagct

SEQ ID NO: 81904 - DNA, 33 bp, Homo sapien
aaactcattacgcctataattcctctaacagct

SEQ ID NO: 81905 - DNA, 33 bp, Homo sapien
atattactctaactcaataagctaggtctaagt

SEQ ID NO: 81906 - DNA, 33 bp, Homo sapien
atattactctaactcagtaagctaggtctaagt

SEQ ID NO: 81907 - DNA, 33 bp, Homo sapien
agcaaaagtgaaagatcagtgatttgagccagt

SEQ ID NO: 81908 - DNA, 33 bp, Homo sapien
agcaaaagtgaaagattagtgatttgagccagt

SEQ ID NO: 81909 - DNA, 33 bp, Homo sapien
aaggtatgtcactacaatgaaatagtgtaggga

SEQ ID NO: 81910 - DNA, 33 bp, Homo sapien
aaggtatgtcactacagtgaaatagtgtaggga

SEQ ID NO: 81911 - DNA, 33 bp, Homo sapien
ggggcagaataaccaaatcagtctatattgatc

SEQ ID NO: 81912 - DNA, 33 bp, Homo sapien
ggggcagaataaccaagtcagtctatattgatc

SEQ ID NO: 81913 - DNA, 33 bp, Homo sapien
caactctggttccctcccagtctaactcggaat

SEQ ID NO: 81914 - DNA, 33 bp, Homo sapien
caactctggttccctcgcagtctaactcggaat

SEQ ID NO: 81915 - DNA, 33 bp, Homo sapien
ccttcccctagaaaataattcagttacttcaga

SEQ ID NO: 81916 - DNA, 33 bp, Homo sapien
ccttcccctagaaaatcattcagttacttcaga

SEQ ID NO: 81917 - DNA, 33 bp, Homo sapien
gaaggtgggaatggcacaagtgatcaaaagcag

SEQ ID NO: 81918 - DNA, 33 bp, Homo sapien
gaaggtgggaatggcagaagtgatcaaaagcag

SEQ ID NO: 81919 - DNA, 33 bp, Homo sapien
gtcactgctcaacaacaaaaacaacaacaacaa

SEQ ID NO: 81920 - DNA, 33 bp, Homo sapien
gtcactgctcaacaacgaaaacaacaacaacaa

SEQ ID NO: 81921 - DNA, 33 bp, Homo sapien
ttctactagttgcccacgtgaagaagattaaag

SEQ ID NO: 81922 - DNA, 33 bp, Homo sapien
ttctactagttgcccatgtgaagaagattaaag

SEQ ID NO: 81923 - DNA, 33 bp, Homo sapien
catgagcagtgagactaaagtgtttgagttgaa

SEQ ID NO: 81924 - DNA, 33 bp, Homo sapien
catgagcagtgagactgaagtgtttgagttgaa

SEQ ID NO: 81925 - DNA, 33 bp, Homo sapien
tacatagcaggtattcaataaatttaggtgttt

SEQ ID NO: 81926 - DNA, 33 bp, Homo sapien
tacatagcaggtattcgataaatttaggtgttt

SEQ ID NO: 81927 - DNA, 33 bp, Homo sapien
tcatgcctgtggtgaccagactgactcaggagg

SEQ ID NO: 81928 - DNA, 33 bp, Homo sapien
tcatgcctgtggtgactagactgactcaggagg

SEQ ID NO: 81929 - DNA, 33 bp, Homo sapien
aacaagccaaataggcggcaagctacaaaatcc

SEQ ID NO: 81930 - DNA, 33 bp, Homo sapien
aacaagccaaataggctgcaagctacaaaatcc

SEQ ID NO: 81931 - DNA, 33 bp, Homo sapien
ggcaatcagtgacatacagtttggaaaggaaaa

SEQ ID NO: 81932 - DNA, 33 bp, Homo sapien
ggcaatcagtgacatagagtttggaaaggaaaa

SEQ ID NO: 81933 - DNA, 33 bp, Homo sapien
gaggtgattactcttaccttgtgtcccactaag

SEQ ID NO: 81934 - DNA, 33 bp, Homo sapien
gaggtgattactcttatcttgtgtcccactaag

SEQ ID NO: 81935 - DNA, 33 bp, Homo sapien
cgaaaaaacaatgagacagctatttgtgaatga

SEQ ID NO: 81936 - DNA, 33 bp, Homo sapien
cgaaaaaacaatgagagagctatttgtgaatga

SEQ ID NO: 81937 - DNA, 33 bp, Homo sapien
agtaatgtcatgtaaaactaatgctaatagcat

SEQ ID NO: 81938 - DNA, 33 bp, Homo sapien
agtaatgtcatgtaaacctaatgctaatagcat

SEQ ID NO: 81939 - DNA, 33 bp, Homo sapien
accacaaaagctttaccggttactgccttgctg

SEQ ID NO: 81940 - DNA, 33 bp, Homo sapien
accacaaaagctttactggttactgccttgctg

SEQ ID NO: 81941 - DNA, 33 bp, Homo sapien
taaggccacacctaaaacataggcatctattga

SEQ ID NO: 81942 - DNA, 33 bp, Homo sapien
taaggccacacctaaaccataggcatctattga

SEQ ID NO: 81943 - DNA, 33 bp, Homo sapien
aacaaggtagaccagggaagtctgactgtttac

SEQ ID NO: 81944 - DNA, 33 bp, Homo sapien
aacaaggtagaccaggtaagtctgactgtttac

SEQ ID NO: 81945 - DNA, 33 bp, Homo sapien
tgcttccagagaaagacagcttttcaagtgacc

SEQ ID NO: 81946 - DNA, 33 bp, Homo sapien
tgcttccagagaaagatagcttttcaagtgacc

SEQ ID NO: 81947 - DNA, 33 bp, Homo sapien
tttaatataaacttagcactggagcagtttcag

SEQ ID NO: 81948 - DNA, 33 bp, Homo sapien
tttaatataaacttagtactggagcagtttcag

SEQ ID NO: 81949 - DNA, 33 bp, Homo sapien
gcctctactatggggaaaatcaagactgtgctt

SEQ ID NO: 81950 - DNA, 33 bp, Homo sapien
gcctctactatggggacaatcaagactgtgctt

SEQ ID NO: 81951 - DNA, 33 bp, Homo sapien
tcctgaccacttgcccgatgaatttcagacttg

SEQ ID NO: 81952 - DNA, 33 bp, Homo sapien
tcctgaccacttgccctatgaatttcagacttg

SEQ ID NO: 81953 - DNA, 33 bp, Homo sapien
gcacttagagttttaccatgactttaatattcc

SEQ ID NO: 81954 - DNA, 33 bp, Homo sapien
gcacttagagttttacgatgactttaatattcc

SEQ ID NO: 81955 - DNA, 33 bp, Homo sapien
ggtaattctggctttccaaatttatctttaaac

SEQ ID NO: 81956 - DNA, 33 bp, Homo sapien
ggtaattctggctttctaaatttatctttaaac

SEQ ID NO: 81957 - DNA, 33 bp, Homo sapien; identical to SEQ ID NO: 81955

SEQ ID NO: 81958 - DNA, 33 bp, Homo sapien; identical to SEQ ID NO: 81956

SEQ ID NO: 81959 - DNA, 33 bp, Homo sapien
tcacatttaatgtgcccggagataaaacacagg

SEQ ID NO: 81960 - DNA, 33 bp, Homo sapien
tcacatttaatgtgcctggagataaaacacagg

SEQ ID NO: 81961 - DNA, 33 bp, Homo sapien
aagagtaccctgaataaaaaacattgttccaag

SEQ ID NO: 81962 - DNA, 33 bp, Homo sapien
aagagtaccctgaatacaaaacattgttccaag

SEQ ID NO: 81963 - DNA, 33 bp, Homo sapien
gtctattagatgaacaactacaagtctcttcta

SEQ ID NO: 81964 - DNA, 33 bp, Homo sapien
gtctattagatgaacagctacaagtctcttcta

SEQ ID NO: 81965 - DNA, 33 bp, Homo sapien
atctactaggaaatccaggaataatgtccaaca

SEQ ID NO: 81966 - DNA, 33 bp, Homo sapien
atctactaggaaatccgggaataatgtccaaca

SEQ ID NO: 81967 - DNA, 33 bp, Homo sapien
ttatttttttgctgtgacaatgcaccatatcat

SEQ ID NO: 81968 - DNA, 33 bp, Homo sapien
ttatttttttgctgtggcaatgcaccatatcat

SEQ ID NO: 81969 - DNA, 33 bp, Homo sapien
tgtatcagcaaataacaatatgcactttttggg

SEQ ID NO: 81970 - DNA, 33 bp, Homo sapien
tgtatcagcaaataaccatatgcactttttggg

SEQ ID NO: 81971 - DNA, 33 bp, Homo sapien
tctgctctgctatcaccatggcttgcactgtat

SEQ ID NO: 81972 - DNA, 33 bp, Homo sapien
tctgctctgctatcactatggcttgcactgtat

SEQ ID NO: 81973 - DNA, 33 bp, Homo sapien
caaaacacaccaagacacttttatgtcttttac

SEQ ID NO: 81974 - DNA, 33 bp, Homo sapien
caaaacacaccaagacccttttatgtcttttac

SEQ ID NO: 81975 - DNA, 33 bp, Homo sapien
ctgaaattgtaagttacgacccatctgataatt

SEQ ID NO: 81976 - DNA, 33 bp, Homo sapien
ctgaaattgtaagttatgacccatctgataatt

SEQ ID NO: 81977 - DNA, 33 bp, Homo sapien
atttcttgcagttatcaatttttttaccatact

SEQ ID NO: 81978 - DNA, 33 bp, Homo sapien
atttcttgcagttatcgatttttttaccatact

SEQ ID NO: 81979 - DNA, 33 bp, Homo sapien
agggaagacaggacgaaaaaggaaggaagtttt

SEQ ID NO: 81980 - DNA, 33 bp, Homo sapien
agggaagacaggacgagaaaggaaggaagtttt

SEQ ID NO: 81981 - DNA, 33 bp, Homo sapien
tcaataatgattgaaaaaggattgtttgtagtt

SEQ ID NO: 81982 - DNA, 33 bp, Homo sapien
tcaataatgattgaaagaggattgtttgtagtt

SEQ ID NO: 81983 - DNA, 33 bp, Homo sapien
ttaccagtagagttcacggttatataaggattt

SEQ ID NO: 81984 - DNA, 33 bp, Homo sapien
ttaccagtagagttcatggttatataaggattt

SEQ ID NO: 81985 - DNA, 33 bp, Homo sapien
gggcattttctgaaccacagattaaactcagtc

SEQ ID NO: 81986 - DNA, 33 bp, Homo sapien
gggcattttctgaaccgcagattaaactcagtc

SEQ ID NO: 81987 - DNA, 33 bp, Homo sapien
tcagtgattttgcaccaactctagtcttggact

SEQ ID NO: 81988 - DNA, 33 bp, Homo sapien
tcagtgattttgcaccgactctagtcttggact

SEQ ID NO: 81989 - DNA, 33 bp, Homo sapien
ggacattcagtcacttgaagggtgtcctcacag

SEQ ID NO: 81990 - DNA, 33 bp, Homo sapien
ggacattcagtcactttaagggtgtcctcacag

SEQ ID NO: 81991 - DNA, 33 bp, Homo sapien
atcctgtgtatcctggaaatcactcatcatttc

SEQ ID NO: 81992 - DNA, 33 bp, Homo sapien
atcctgtgtatcctgggaatcactcatcatttc

SEQ ID NO: 81993 - DNA, 33 bp, Homo sapien
caaatacttctgtaatgaatggccttcttcata

SEQ ID NO: 81994 - DNA, 33 bp, Homo sapien
caaatacttctgtaattaatggccttcttcata

SEQ ID NO: 81995 - DNA, 33 bp, Homo sapien
agtcataaatatcctcaaagaagaaaacagaca

SEQ ID NO: 81996 - DNA, 33 bp, Homo sapien
agtcataaatatcctcgaagaagaaaacagaca

SEQ ID NO: 81997 - DNA, 33 bp, Homo sapien
aatttgttctggtctacgaatttttttacacaa

SEQ ID NO: 81998 - DNA, 33 bp, Homo sapien
aatttgttctggtctatgaatttttttacacaa

SEQ ID NO: 81999 - DNA, 33 bp, Homo sapien
ccctataagatagagaaccctatggtaacatcc

SEQ ID NO: 82000 - DNA, 33 bp, Homo sapien
ccctataagatagagagccctatggtaacatcc

SEQ ID NO: 82001 - DNA, 33 bp, Homo sapien
acataatatagagcagaattagactcttcaaat

SEQ ID NO: 82002 - DNA, 33 bp, Homo sapien
acataatatagagcaggattagactcttcaaat

SEQ ID NO: 82003 - DNA, 33 bp, Homo sapien
tgaaatgtatggttcaaatgttaaatgctgtag

SEQ ID NO: 82004 - DNA, 33 bp, Homo sapien
tgaaatgtatggttcagatgttaaatgctgtag

SEQ ID NO: 82005 - DNA, 33 bp, Homo sapien
agggccctattctcaccgctttaaagagatctt

SEQ ID NO: 82006 - DNA, 33 bp, Homo sapien
agggccctattctcactgctttaaagagatctt

SEQ ID NO: 82007 - DNA, 33 bp, Homo sapien
atttacctcttaaaaaatatagtgacttgggca

SEQ ID NO: 82008 - DNA, 33 bp, Homo sapien
atttacctcttaaaaactatagtgacttgggca

SEQ ID NO: 82009 - DNA, 33 bp, Homo sapien
ttctgtatctttccatcataaaactttgttatt

SEQ ID NO: 82010 - DNA, 33 bp, Homo sapien
ttctgtatctttccattataaaactttgttatt

SEQ ID NO: 82011 - DNA, 33 bp, Homo sapien
ctgcctgagaagttcaaggtaagtcctcctgct

SEQ ID NO: 82012 - DNA, 33 bp, Homo sapien
ctgcctgagaagttcagggtaagtcctcctgct

SEQ ID NO: 82013 - DNA, 33 bp, Homo sapien
gtctaaaagtttgccactccttgatattttatt

SEQ ID NO: 82014 - DNA, 33 bp, Homo sapien
gtctaaaagtttgccagtccttgatattttatt

SEQ ID NO: 82015 - DNA, 33 bp, Homo sapien
ctatagtagtaacaagaaaaagagatttagaca

SEQ ID NO: 82016 - DNA, 33 bp, Homo sapien
ctatagtagtaacaaggaaaagagatttagaca

SEQ ID NO: 82017 - DNA, 33 bp, Homo sapien
agaaggaaagagtgggcaatcctgctttatgaa

SEQ ID NO: 82018 - DNA, 33 bp, Homo sapien
agaaggaaagagtgggtaatcctgctttatgaa

SEQ ID NO: 82019 - DNA, 33 bp, Homo sapien
aatgcaatcactcaatgacaattctgctacgtg

SEQ ID NO: 82020 - DNA, 33 bp, Homo sapien
aatgcaatcactcaattacaattctgctacgtg

SEQ ID NO: 82021 - DNA, 33 bp, Homo sapien
aacttcctgagtcctacgaaaattgaagcctac

SEQ ID NO: 82022 - DNA, 33 bp, Homo sapien
aacttcctgagtcctaggaaaattgaagcctac

SEQ ID NO: 82023 - DNA, 33 bp, Homo sapien
aatggaatctagttgacctcttcaacttttgct

SEQ ID NO: 82024 - DNA, 33 bp, Homo sapien
aatggaatctagttgatctcttcaacttttgct

SEQ ID NO: 82025 - DNA, 33 bp, Homo sapien
caaaggtctttgccacacagtcatgtaagaagt

SEQ ID NO: 82026 - DNA, 33 bp, Homo sapien
caaaggtctttgccacgcagtcatgtaagaagt

SEQ ID NO: 82027 - DNA, 33 bp, Homo sapien
gaatacaaccaaatcaataagtaatagacctca

SEQ ID NO: 82028 - DNA, 33 bp, Homo sapien
gaatacaaccaaatcagtaagtaatagacctca

SEQ ID NO: 82029 - DNA, 33 bp, Homo sapien
cttctggagaggtacaatcttgccagagcccta

SEQ ID NO: 82030 - DNA, 33 bp, Homo sapien
cttctggagaggtacagtcttgccagagcccta

SEQ ID NO: 82031 - DNA, 33 bp, Homo sapien
tacaaaaacataataacccatgccatacagttt

SEQ ID NO: 82032 - DNA, 33 bp, Homo sapien
tacaaaaacataataatccatgccatacagttt

SEQ ID NO: 82033 - DNA, 33 bp, Homo sapien
aacctcatgctatttcaaaagcataaaatctgg

SEQ ID NO: 82034 - DNA, 33 bp, Homo sapien
aacctcatgctatttcgaaagcataaaatctgg

SEQ ID NO: 82035 - DNA, 33 bp, Homo sapien
gactgtagctcctctcaaatcccttcccggata

SEQ ID NO: 82036 - DNA, 33 bp, Homo sapien
gactgtagctcctctcgaatcccttcccggata

SEQ ID NO: 82037 - DNA, 33 bp, Homo sapien
cacacatttttgccaccgaacttcctttgggaa

SEQ ID NO: 82038 - DNA, 33 bp, Homo sapien
cacacatttttgccactgaacttcctttgggaa

SEQ ID NO: 82039 - DNA, 33 bp, Homo sapien
aacccagccagtttcacgtaagaatgtcctgaa

SEQ ID NO: 82040 - DNA, 33 bp, Homo sapien
aacccagccagtttcatgtaagaatgtcctgaa

SEQ ID NO: 82041 - DNA, 33 bp, Homo sapien
gtaaaactacagattcaagatgctctagtgaaa

SEQ ID NO: 82042 - DNA, 33 bp, Homo sapien
gtaaaactacagattcgagatgctctagtgaaa

SEQ ID NO: 82043 - DNA, 33 bp, Homo sapien
aaaggtaggctaaaaacgaatgaaaggaaaacg

SEQ ID NO: 82044 - DNA, 33 bp, Homo sapien
aaaggtaggctaaaaatgaatgaaaggaaaacg

SEQ ID NO: 82045 - DNA, 33 bp, Homo sapien
gttaaagaagaaataaaccgtggaatgaccaac

SEQ ID NO: 82046 - DNA, 33 bp, Homo sapien
gttaaagaagaaataagccgtggaatgaccaac

SEQ ID NO: 82047 - DNA, 33 bp, Homo sapien
tattgaacttgtccagaagcgatcatcctacca

SEQ ID NO: 82048 - DNA, 33 bp, Homo sapien
tattgaacttgtccaggagcgatcatcctacca

SEQ ID NO: 82049 - DNA, 33 bp, Homo sapien
aatatattttagtataagtatgacctgtgcaat

SEQ ID NO: 82050 - DNA, 33 bp, Homo sapien
aatatattttagtatacgtatgacctgtgcaat

SEQ ID NO: 82051 - DNA, 33 bp, Homo sapien
cactgtattaatctagaacattcgtgtggcacc

SEQ ID NO: 82052 - DNA, 33 bp, Homo sapien
cactgtattaatctagcacattcgtgtggcacc

SEQ ID NO: 82053 - DNA, 33 bp, Homo sapien
attctttttgctgcaacagtcataatgatttca

SEQ ID NO: 82054 - DNA, 33 bp, Homo sapien
attctttttgctgcaatagtcataatgatttca

SEQ ID NO: 82055 - DNA, 33 bp, Homo sapien
tgccttattttgtaaacgtcacaagtatataaa

SEQ ID NO: 82056 - DNA, 33 bp, Homo sapien
tgccttattttgtaaatgtcacaagtatataaa

SEQ ID NO: 82057 - DNA, 33 bp, Homo sapien
aggatagagctagaaaagatatatcacactggc

SEQ ID NO: 82058 - DNA, 33 bp, Homo sapien
aggatagagctagaaaggatatatcacactggc

SEQ ID NO: 82059 - DNA, 33 bp, Homo sapien
agtagcaatttctgaacgaattagaagcctaca

SEQ ID NO: 82060 - DNA, 33 bp, Homo sapien
agtagcaatttctgaatgaattagaagcctaca

SEQ ID NO: 82061 - DNA, 33 bp, Homo sapien
agtccttcatttctaccgctatggtaaactgcc

SEQ ID NO: 82062 - DNA, 33 bp, Homo sapien
agtccttcatttctactgctatggtaaactgcc

SEQ ID NO: 82063 - DNA, 33 bp, Homo sapien
gtttgaatgttttgaactgagactgtcacagga

SEQ ID NO: 82064 - DNA, 33 bp, Homo sapien
gtttgaatgttttgaattgagactgtcacagga

SEQ ID NO: 82065 - DNA, 33 bp, Homo sapien
gccaggacattcttaaactgtataaacatatat

SEQ ID NO: 82066 - DNA, 33 bp, Homo sapien
gccaggacattcttaacctgtataaacatatat

SEQ ID NO: 82067 - DNA, 33 bp, Homo sapien
gaaccaggttcaataaggcaactagtcaattgg

SEQ ID NO: 82068 - DNA, 33 bp, Homo sapien
gaaccaggttcaataatgcaactagtcaattgg

SEQ ID NO: 82069 - DNA, 33 bp, Homo sapien
tccccttcactctcaaaaagaaatgttaaattc

SEQ ID NO: 82070 - DNA, 33 bp, Homo sapien
tccccttcactctcaacaagaaatgttaaattc

SEQ ID NO: 82071 - DNA, 33 bp, Homo sapien
cttttctctcaatcagcaaagaccaaaggcttg

SEQ ID NO: 82072 - DNA, 33 bp, Homo sapien
cttttctctcaatcagtaaagaccaaaggcttg

SEQ ID NO: 82073 - DNA, 33 bp, Homo sapien
ttctaattgtgcaccactgggcaaatctcttca

SEQ ID NO: 82074 - DNA, 33 bp, Homo sapien
ttctaattgtgcaccattgggcaaatctcttca

SEQ ID NO: 82075 - DNA, 33 bp, Homo sapien
tctcaaatctcaaatcagatgttgccgctatcc

SEQ ID NO: 82076 - DNA, 33 bp, Homo sapien
tctcaaatctcaaatcggatgttgccgctatcc

SEQ ID NO: 82077 - DNA, 33 bp, Homo sapien
caaactctcctttccccccttcctagcttataa

SEQ ID NO: 82078 - DNA, 33 bp, Homo sapien
caaactctcctttccctccttcctagcttataa

SEQ ID NO: 82079 - DNA, 33 bp, Homo sapien
ggtagtttcaattgacgcccaacccctgccaaa

SEQ ID NO: 82080 - DNA, 33 bp, Homo sapien
ggtagtttcaattgactcccaacccctgccaaa

SEQ ID NO: 82081 - DNA, 33 bp, Homo sapien
ctgtctatcatccatacctctcatgtcacatag

SEQ ID NO: 82082 - DNA, 33 bp, Homo sapien
ctgtctatcatccatagctctcatgtcacatag

SEQ ID NO: 82083 - DNA, 33 bp, Homo sapien
ctaatgcctaaaccaacgatattttgatgttaa

SEQ ID NO: 82084 - DNA, 33 bp, Homo sapien
ctaatgcctaaaccaatgatattttgatgttaa

SEQ ID NO: 82085 - DNA, 33 bp, Homo sapien
catatgtctgtttttacagaaaatatctcacat

SEQ ID NO: 82086 - DNA, 33 bp, Homo sapien
catatgtctgtttttatagaaaatatctcacat

SEQ ID NO: 82087 - DNA, 33 bp, Homo sapien
tgtaatgacatgagaaagtttgaaaatgaggta

SEQ ID NO: 82088 - DNA, 33 bp, Homo sapien
tgtaatgacatgagaaggtttgaaaatgaggta

SEQ ID NO: 82089 - DNA, 33 bp, Homo sapien
catactgaaaaccacacactcatgatacaataa

SEQ ID NO: 82090 - DNA, 33 bp, Homo sapien
catactgaaaaccacatactcatgatacaataa

SEQ ID NO: 82091 - DNA, 33 bp, Homo sapien
ctcataaacttagatcaaaactttgcaaatatc

SEQ ID NO: 82092 - DNA, 33 bp, Homo sapien
ctcataaacttagatcgaaactttgcaaatatc

SEQ ID NO: 82093 - DNA, 33 bp, Homo sapien
aatgataccatttaaagtctgtcgccattttca

SEQ ID NO: 82094 - DNA, 33 bp, Homo sapien
aatgataccatttaaattctgtcgccattttca

SEQ ID NO: 82095 - DNA, 33 bp, Homo sapien
taacagagggaacaagaaatcttaaaacagcaa

SEQ ID NO: 82096 - DNA, 33 bp, Homo sapien
taacagagggaacaagtaatcttaaaacagcaa

SEQ ID NO: 82097 - DNA, 33 bp, Homo sapien
cgttaaaggctgactaacattctattctgtata

SEQ ID NO: 82098 - DNA, 33 bp, Homo sapien
cgttaaaggctgactagcattctattctgtata

SEQ ID NO: 82099 - DNA, 33 bp, Homo sapien
gaacatggaaaatcaccgacaatatgcaggaaa

SEQ ID NO: 82100 - DNA, 33 bp, Homo sapien
gaacatggaaaatcactgacaatatgcaggaaa

SEQ ID NO: 82101 - DNA, 33 bp, Homo sapien
taaatttgctacctaacgatacagaggaagtaa

SEQ ID NO: 82102 - DNA, 33 bp, Homo sapien
taaatttgctacctaatgatacagaggaagtaa

SEQ ID NO: 82103 - DNA, 33 bp, Homo sapien
ctagttatgcaaagtactaccactggggaaagc

SEQ ID NO: 82104 - DNA, 33 bp, Homo sapien
ctagttatgcaaagtattaccactggggaaagc

SEQ ID NO: 82105 - DNA, 33 bp, Homo sapien
cttacgacctgcaggtaaagctacaattatcac

SEQ ID NO: 82106 - DNA, 33 bp, Homo sapien
cttacgacctgcaggtgaagctacaattatcac

SEQ ID NO: 82107 - DNA, 33 bp, Homo sapien
agtaagaaatctcatacgtaccaggttattcat

SEQ ID NO: 82108 - DNA, 33 bp, Homo sapien
agtaagaaatctcatatgtaccaggttattcat

SEQ ID NO: 82109 - DNA, 33 bp, Homo sapien
gtttgccacaactgaggatctataaaaaacagc

SEQ ID NO: 82110 - DNA, 33 bp, Homo sapien
gtttgccacaactgagtatctataaaaaacagc

SEQ ID NO: 82111 - DNA, 33 bp, Homo sapien
ccttaccattcatttaacaaagcaatagggatg

SEQ ID NO: 82112 - DNA, 33 bp, Homo sapien
ccttaccattcatttagcaaagcaatagggatg

SEQ ID NO: 82113 - DNA, 33 bp, Homo sapien
ggatgacccaaatcgccgatactggagccctca

SEQ ID NO: 82114 - DNA, 33 bp, Homo sapien
ggatgacccaaatcgctgatactggagccctca

SEQ ID NO: 82115 - DNA, 33 bp, Homo sapien
tggagttggataagtgcataagtgtataatgac

SEQ ID NO: 82116 - DNA, 33 bp, Homo sapien
tggagttggataagtgtataagtgtataatgac

SEQ ID NO: 82117 - DNA, 33 bp, Homo sapien
aaactgttctaaacaccaaagtcaattaaatag

SEQ ID NO: 82118 - DNA, 33 bp, Homo sapien
aaactgttctaaacactaaagtcaattaaatag

SEQ ID NO: 82119 - DNA, 33 bp, Homo sapien
cttcacttggtgccagaaataaacatctggaaa

SEQ ID NO: 82120 - DNA, 33 bp, Homo sapien
cttcacttggtgccaggaataaacatctggaaa

SEQ ID NO: 82121 - DNA, 33 bp, Homo sapien
aaaccagcaacagaaaacatgaaggaacagcaa

SEQ ID NO: 82122 - DNA, 33 bp, Homo sapien
aaaccagcaacagaaaccatgaaggaacagcaa

SEQ ID NO: 82123 - DNA, 33 bp, Homo sapien
ctaaaaaatgttacaagaatctattccttcctc

SEQ ID NO: 82124 - DNA, 33 bp, Homo sapien
ctaaaaaatgttacaataatctattccttcctc

SEQ ID NO: 82125 - DNA, 33 bp, Homo sapien
ttatccttttatctgactaaaatgttttgcaaa

SEQ ID NO: 82126 - DNA, 33 bp, Homo sapien
ttatccttttatctgattaaaatgttttgcaaa

SEQ ID NO: 82127 - DNA, 33 bp, Homo sapien
taatatactcatatgaacatcagttttctaatt

SEQ ID NO: 82128 - DNA, 33 bp, Homo sapien
taatatactcatatgagcatcagttttctaatt

SEQ ID NO: 82129 - DNA, 33 bp, Homo sapien
tgtgcaggttcacttacatggggattttttttt

SEQ ID NO: 82130 - DNA, 33 bp, Homo sapien
tgtgcaggttcacttatatggggattttttttt

SEQ ID NO: 82131 - DNA, 33 bp, Homo sapien
attcaattggaaaggcaatcagattttattcag

SEQ ID NO: 82132 - DNA, 33 bp, Homo sapien
attcaattggaaaggcgatcagattttattcag

SEQ ID NO: 82133 - DNA, 33 bp, Homo sapien
ttattccatttttccacccccgagacaaaataa

SEQ ID NO: 82134 - DNA, 33 bp, Homo sapien
ttattccatttttccatccccgagacaaaataa

SEQ ID NO: 82135 - DNA, 33 bp, Homo sapien
gcattgaaaaagtacactcattaaccaactgaa

SEQ ID NO: 82136 - DNA, 33 bp, Homo sapien
gcattgaaaaagtacattcattaaccaactgaa

SEQ ID NO: 82137 - DNA, 33 bp, Homo sapien
catattttacaaacagacattatcttctctatt

SEQ ID NO: 82138 - DNA, 33 bp, Homo sapien
catattttacaaacaggcattatcttctctatt

SEQ ID NO: 82139 - DNA, 33 bp, Homo sapien
cttttttctctaaagcactaccatttatcaagg

SEQ ID NO: 82140 - DNA, 33 bp, Homo sapien
cttttttctctaaagcgctaccatttatcaagg

SEQ ID NO: 82141 - DNA, 33 bp, Homo sapien
acatcttcgtgaagaacaataaggaagagaagc

SEQ ID NO: 82142 - DNA, 33 bp, Homo sapien
acatcttcgtgaagaataataaggaagagaagc

SEQ ID NO: 82143 - DNA, 33 bp, Homo sapien
gcatatggtgacttaaactttcttcagctcagg

SEQ ID NO: 82144 - DNA, 33 bp, Homo sapien
gcatatggtgacttaacctttcttcagctcagg

SEQ ID NO: 82145 - DNA, 33 bp, Homo sapien
taaataatatctacaacaagtgcagggaaagtg

SEQ ID NO: 82146 - DNA, 33 bp, Homo sapien
taaataatatctacaataagtgcagggaaagtg

SEQ ID NO: 82147 - DNA, 33 bp, Homo sapien
gatctgggggcatctacctccacagtcaatcca

SEQ ID NO: 82148 - DNA, 33 bp, Homo sapien
gatctgggggcatctatctccacagtcaatcca

SEQ ID NO: 82149 - DNA, 33 bp, Homo sapien
agctacttcaggatgcaaaactattttcatcct

SEQ ID NO: 82150 - DNA, 33 bp, Homo sapien
agctacttcaggatgcgaaactattttcatcct

SEQ ID NO: 82151 - DNA, 33 bp, Homo sapien
gaatttttacaatttcaaaaagaatgggggagg

SEQ ID NO: 82152 - DNA, 33 bp, Homo sapien
gaatttttacaatttcgaaaagaatgggggagg

SEQ ID NO: 82153 - DNA, 33 bp, Homo sapien
ctcatatttgttcacactaagtgcccttgaatt

SEQ ID NO: 82154 - DNA, 33 bp, Homo sapien
ctcatatttgttcacagtaagtgcccttgaatt

SEQ ID NO: 82155 - DNA, 33 bp, Homo sapien
aacactcctctgagtaagctttatccaaagaga

SEQ ID NO: 82156 - DNA, 33 bp, Homo sapien
aacactcctctgagtaggctttatccaaagaga

SEQ ID NO: 82157 - DNA, 33 bp, Homo sapien
ctctagtcattttccacagataatgcttgcaaa

SEQ ID NO: 82158 - DNA, 33 bp, Homo sapien
ctctagtcattttccatagataatgcttgcaaa

SEQ ID NO: 82159 - DNA, 33 bp, Homo sapien
gaggagatcgatggaaaatgtactactggtctt

SEQ ID NO: 82160 - DNA, 33 bp, Homo sapien
gaggagatcgatggaacatgtactactggtctt

SEQ ID NO: 82161 - DNA, 33 bp, Homo sapien
catcgtatccttctaactgaatctgaagccagc

SEQ ID NO: 82162 - DNA, 33 bp, Homo sapien
catcgtatccttctaagtgaatctgaagccagc

SEQ ID NO: 82163 - DNA, 33 bp, Homo sapien
tgcttaatcttttccacgtagctgacagatcag

SEQ ID NO: 82164 - DNA, 33 bp, Homo sapien
tgcttaatcttttccatgtagctgacagatcag

SEQ ID NO: 82165 - DNA, 33 bp, Homo sapien
gaaatataaccactgacatagtagcatacacta

SEQ ID NO: 82166 - DNA, 33 bp, Homo sapien
gaaatataaccactgatatagtagcatacacta

SEQ ID NO: 82167 - DNA, 33 bp, Homo sapien
ttctgctacaggcaccagcatctggatttgggg

SEQ ID NO: 82168 - DNA, 33 bp, Homo sapien
ttctgctacaggcaccggcatctggatttgggg

SEQ ID NO: 82169 - DNA, 33 bp, Homo sapien
gaccagaagcttggagacgtcagaaactgcaga

SEQ ID NO: 82170 - DNA, 33 bp, Homo sapien
gaccagaagcttggagtcgtcagaaactgcaga

SEQ ID NO: 82171 - DNA, 33 bp, Homo sapien
agctactatggagagagatgtacttcataaatg

SEQ ID NO: 82172 - DNA, 33 bp, Homo sapien
agctactatggagagatatgtacttcataaatg

SEQ ID NO: 82173 - DNA, 33 bp, Homo sapien
ttaaggatattttcctaaagacctgaagaaaac

SEQ ID NO: 82174 - DNA, 33 bp, Homo sapien
ttaaggatattttcctgaagacctgaagaaaac

SEQ ID NO: 82175 - DNA, 33 bp, Homo sapien
taaaatcctcttgagacgtaagataacacaaac

SEQ ID NO: 82176 - DNA, 33 bp, Homo sapien
taaaatcctcttgagatgtaagataacacaaac

SEQ ID NO: 82177 - DNA, 33 bp, Homo sapien
gtgaactgtgttgaagaccctcagcaattttat

SEQ ID NO: 82178 - DNA, 33 bp, Homo sapien
gtgaactgtgttgaaggccctcagcaattttat

SEQ ID NO: 82179 - DNA, 33 bp, Homo sapien
cgtaaaagctttccccacagtctccttgacttc

SEQ ID NO: 82180 - DNA, 33 bp, Homo sapien
cgtaaaagctttccccgcagtctccttgacttc

SEQ ID NO: 82181 - DNA, 33 bp, Homo sapien
tagcaactatagtacaactagattctggaaaat

SEQ ID NO: 82182 - DNA, 33 bp, Homo sapien
tagcaactatagtacagctagattctggaaaat

SEQ ID NO: 82183 - DNA, 33 bp, Homo sapien
ctctcaggtaaaggccgcattccttcacacaca

SEQ ID NO: 82184 - DNA, 33 bp, Homo sapien
ctctcaggtaaaggcctcattccttcacacaca

SEQ ID NO: 82185 - DNA, 33 bp, Homo sapien
tgaattacccactccaagctatttctttatagc

SEQ ID NO: 82186 - DNA, 33 bp, Homo sapien
tgaattacccactccaggctatttctttatagc

SEQ ID NO: 82187 - DNA, 33 bp, Homo sapien
atgataccctttccataaagtgagatcctatca

SEQ ID NO: 82188 - DNA, 33 bp, Homo sapien
atgataccctttccattaagtgagatcctatca

SEQ ID NO: 82189 - DNA, 33 bp, Homo sapien
ttttgtgtatatgtacaaaagccatcttaaatc

SEQ ID NO: 82190 - DNA, 33 bp, Homo sapien
ttttgtgtatatgtacgaaagccatcttaaatc

SEQ ID NO: 82191 - DNA, 33 bp, Homo sapien
tagttcttcttccccactgagctttgtctctca

SEQ ID NO: 82192 - DNA, 33 bp, Homo sapien
tagttcttcttccccattgagctttgtctctca

SEQ ID NO: 82193 - DNA, 33 bp, Homo sapien
tctcactgcaccagtaagtcatagttttgtcag

SEQ ID NO: 82194 - DNA, 33 bp, Homo sapien
tctcactgcaccagtaggtcatagttttgtcag

SEQ ID NO: 82195 - DNA, 33 bp, Homo sapien
catgtttgtccccgaacctgccaatgtcatcag

SEQ ID NO: 82196 - DNA, 33 bp, Homo sapien
catgtttgtccccgaatctgccaatgtcatcag

SEQ ID NO: 82197 - DNA, 33 bp, Homo sapien
gtcctgaattgactgaataatgcactttttcac

SEQ ID NO: 82198 - DNA, 33 bp, Homo sapien
gtcctgaattgactgactaatgcactttttcac

SEQ ID NO: 82199 - DNA, 33 bp, Homo sapien
atgcaggctgaatgcaaaggccacttagtaggg

SEQ ID NO: 82200 - DNA, 33 bp, Homo sapien
atgcaggctgaatgcagaggccacttagtaggg

SEQ ID NO: 82201 - DNA, 33 bp, Homo sapien
atttggttaattgggggccaagactgagaaatg

SEQ ID NO: 82202 - DNA, 33 bp, Homo sapien
atttggttaattggggtccaagactgagaaatg

SEQ ID NO: 82203 - DNA, 33 bp, Homo sapien
tttctaataatcctacaacctaaacaacattat

SEQ ID NO: 82204 - DNA, 33 bp, Homo sapien
tttctaataatcctaccacctaaacaacattat

SEQ ID NO: 82205 - DNA, 33 bp, Homo sapien
ggtatccatatttatccatctagtttacagagg

SEQ ID NO: 82206 - DNA, 33 bp, Homo sapien
ggtatccatatttatctatctagtttacagagg

SEQ ID NO: 82207 - DNA, 33 bp, Homo sapien
gtaatcctgagaatcacaaatgctgtagacctc

SEQ ID NO: 82208 - DNA, 33 bp, Homo sapien
gtaatcctgagaatcagaaatgctgtagacctc

SEQ ID NO: 82209 - DNA, 33 bp, Homo sapien
cacatttaggatcttacgtttctctggtgtatt

SEQ ID NO: 82210 - DNA, 33 bp, Homo sapien
cacatttaggatcttatgtttctctggtgtatt

SEQ ID NO: 82211 - DNA, 33 bp, Homo sapien
tgagagagatgagaatgaatctggagactgaaa

SEQ ID NO: 82212 - DNA, 33 bp, Homo sapien
tgagagagatgagaattaatctggagactgaaa

SEQ ID NO: 82213 - DNA, 33 bp, Homo sapien
ttctacatttcacttaagttcaaccaatgtgtg

SEQ ID NO: 82214 - DNA, 33 bp, Homo sapien
ttctacatttcacttaggttcaaccaatgtgtg

SEQ ID NO: 82215 - DNA, 33 bp, Homo sapien
aaataatatttccatcagagcataaaattcaat

SEQ ID NO: 82216 - DNA, 33 bp, Homo sapien
aaataatatttccatccgagcataaaattcaat

SEQ ID NO: 82217 - DNA, 33 bp, Homo sapien
caggaacagtgacctcaaagatataataaaaat

SEQ ID NO: 82218 - DNA, 33 bp, Homo sapien
caggaacagtgacctcgaagatataataaaaat

SEQ ID NO: 82219 - DNA, 33 bp, Homo sapien
taatagtgcctttaaaatccttgttttctgatc

SEQ ID NO: 82220 - DNA, 33 bp, Homo sapien
taatagtgcctttaaagtccttgttttctgatc

SEQ ID NO: 82221 - DNA, 33 bp, Homo sapien
acaagccctgttacttgaagaagataatgtgta

SEQ ID NO: 82222 - DNA, 33 bp, Homo sapien
acaagccctgttactttaagaagataatgtgta

SEQ ID NO: 82223 - DNA, 33 bp, Homo sapien
ttctgcaccaaaaaggaaagttcaggtgctgac

SEQ ID NO: 82224 - DNA, 33 bp, Homo sapien
ttctgcaccaaaaagggaagttcaggtgctgac

SEQ ID NO: 82225 - DNA, 33 bp, Homo sapien
tgcataatcaggtcaaagaagctacaagcccct

SEQ ID NO: 82226 - DNA, 33 bp, Homo sapien
tgcataatcaggtcaaggaagctacaagcccct

SEQ ID NO: 82227 - DNA, 33 bp, Homo sapien; identical to SEQ ID NO: 82225

SEQ ID NO: 82228 - DNA, 33 bp, Homo sapien; identical to SEQ ID NO: 82226

SEQ ID NO: 82229 - DNA, 33 bp, Homo sapien
gttaatcttatgctccaaaatgtaagacaggaa

SEQ ID NO: 82230 - DNA, 33 bp, Homo sapien
gttaatcttatgctccgaaatgtaagacaggaa

SEQ ID NO: 82231 - DNA, 33 bp, Homo sapien
aaaaatcagtaagaaaaatgtgcaggtaaagaa

SEQ ID NO: 82232 - DNA, 33 bp, Homo sapien
aaaaatcagtaagaaatatgtgcaggtaaagaa

SEQ ID NO: 82233 - DNA, 33 bp, Homo sapien
caaatcacaaagccacaatgaccgagtgataag

SEQ ID NO: 82234 - DNA, 33 bp, Homo sapien
caaatcacaaagccacgatgaccgagtgataag

SEQ ID NO: 82235 - DNA, 33 bp, Homo sapien
caatgcaacacacgtcacttttacctggatacc

SEQ ID NO: 82236 - DNA, 33 bp, Homo sapien
caatgcaacacacgtcccttttacctggatacc

SEQ ID NO: 82237 - DNA, 33 bp, Homo sapien
tattactgaaattacccactactatggatttga

SEQ ID NO: 82238 - DNA, 33 bp, Homo sapien
tattactgaaattacctactactatggatttga

SEQ ID NO: 82239 - DNA, 33 bp, Homo sapien
tctaagataaacacaaagatggggagaaaaagc

SEQ ID NO: 82240 - DNA, 33 bp, Homo sapien
tctaagataaacacaacgatggggagaaaaagc

SEQ ID NO: 82241 - DNA, 33 bp, Homo sapien
ctgccccctaaatcggaaactctggaggtgctt

SEQ ID NO: 82242 - DNA, 33 bp, Homo sapien
ctgccccctaaatcggcaactctggaggtgctt

SEQ ID NO: 82243 - DNA, 33 bp, Homo sapien
aagactagatgaggaaacgaatttgatgaagaa

SEQ ID NO: 82244 - DNA, 33 bp, Homo sapien
aagactagatgaggaagcgaatttgatgaagaa

SEQ ID NO: 82245 - DNA, 33 bp, Homo sapien
atagtattgtaaataccaggcaataggaatttt

SEQ ID NO: 82246 - DNA, 33 bp, Homo sapien
atagtattgtaaatacgaggcaataggaatttt

SEQ ID NO: 82247 - DNA, 33 bp, Homo sapien
tgagtcttcaaaaggacgttatactgttctatc

SEQ ID NO: 82248 - DNA, 33 bp, Homo sapien
tgagtcttcaaaaggatgttatactgttctatc

SEQ ID NO: 82249 - DNA, 33 bp, Homo sapien
cctccagaagccatacaaaatgattatattaca

SEQ ID NO: 82250 - DNA, 33 bp, Homo sapien
cctccagaagccatacgaaatgattatattaca

SEQ ID NO: 82251 - DNA, 33 bp, Homo sapien
atttgagagtattagacgctcattatttagtgt

SEQ ID NO: 82252 - DNA, 33 bp, Homo sapien
atttgagagtattagatgctcattatttagtgt

SEQ ID NO: 82253 - DNA, 33 bp, Homo sapien
tactcagtattacgaccaaatagcagtagtatt

SEQ ID NO: 82254 - DNA, 33 bp, Homo sapien
tactcagtattacgacgaaatagcagtagtatt

SEQ ID NO: 82255 - DNA, 33 bp, Homo sapien
tgaaagcttatgcttcaaacttatacttttaag

SEQ ID NO: 82256 - DNA, 33 bp, Homo sapien
tgaaagcttatgcttcgaacttatacttttaag

SEQ ID NO: 82257 - DNA, 33 bp, Homo sapien
acatatgagagttaataaagacaagaggatgct

SEQ ID NO: 82258 - DNA, 33 bp, Homo sapien
acatatgagagttaatgaagacaagaggatgct

SEQ ID NO: 82259 - DNA, 33 bp, Homo sapien
gtatccactatggaaccgtctaaaagaattaaa

SEQ ID NO: 82260 - DNA, 33 bp, Homo sapien
gtatccactatggaacggtctaaaagaattaaa

SEQ ID NO: 82261 - DNA, 33 bp, Homo sapien
taatttattaagataccggaaacagcaagagct

SEQ ID NO: 82262 - DNA, 33 bp, Homo sapien
taatttattaagatactggaaacagcaagagct

SEQ ID NO: 82263 - DNA, 33 bp, Homo sapien
ccaaggtttacagtacaatatctgaaccttcct

SEQ ID NO: 82264 - DNA, 33 bp, Homo sapien
ccaaggtttacagtacgatatctgaaccttcct

SEQ ID NO: 82265 - DNA, 33 bp, Homo sapien
atgccacctcaatgtagcctccagtttatgttg

SEQ ID NO: 82266 - DNA, 33 bp, Homo sapien
atgccacctcaatgtatcctccagtttatgttg

SEQ ID NO: 82267 - DNA, 33 bp, Homo sapien
gaatttagcattagcccacactatgtgtccttg

SEQ ID NO: 82268 - DNA, 33 bp, Homo sapien
gaatttagcattagcctacactatgtgtccttg

SEQ ID NO: 82269 - DNA, 33 bp, Homo sapien
atcactcagcaagcaaagtccttttacaagaaa

SEQ ID NO: 82270 - DNA, 33 bp, Homo sapien
atcactcagcaagcaacgtccttttacaagaaa

SEQ ID NO: 82271 - DNA, 33 bp, Homo sapien
tgttactagtggatgaaatttttttaagtggct

SEQ ID NO: 82272 - DNA, 33 bp, Homo sapien
tgttactagtggatgagatttttttaagtggct

SEQ ID NO: 82273 - DNA, 33 bp, Homo sapien
gggtcaaataggaaaacagtgatctagaaccag

SEQ ID NO: 82274 - DNA, 33 bp, Homo sapien
gggtcaaataggaaaagagtgatctagaaccag

SEQ ID NO: 82275 - DNA, 33 bp, Homo sapien
atgatcattttgtcataagcccattgagcaatc

SEQ ID NO: 82276 - DNA, 33 bp, Homo sapien
atgatcattttgtcatgagcccattgagcaatc

SEQ ID NO: 82277 - DNA, 33 bp, Homo sapien
ttatgcttctggatagaaagaatcaatatgact

SEQ ID NO: 82278 - DNA, 33 bp, Homo sapien
ttatgcttctggataggaagaatcaatatgact

SEQ ID NO: 82279 - DNA, 33 bp, Homo sapien
agcacattaaaaaaaccactcaatatcgctgat

SEQ ID NO: 82280 - DNA, 33 bp, Homo sapien
agcacattaaaaaaactactcaatatcgctgat

SEQ ID NO: 82281 - DNA, 33 bp, Homo sapien
taaatgtgtttcataacttagactcaaagtatt

SEQ ID NO: 82282 - DNA, 33 bp, Homo sapien
taaatgtgtttcataatttagactcaaagtatt

SEQ ID NO: 82283 - DNA, 33 bp, Homo sapien
gagcaagtcgcagtataaaatgacttgaacaaa

SEQ ID NO: 82284 - DNA, 33 bp, Homo sapien
gagcaagtcgcagtatgaaatgacttgaacaaa

SEQ ID NO: 82285 - DNA, 33 bp, Homo sapien
atttttgtgtggattacagaaagtcttgccact

SEQ ID NO: 82286 - DNA, 33 bp, Homo sapien
atttttgtgtggattatagaaagtcttgccact

SEQ ID NO: 82287 - DNA, 33 bp, Homo sapien
ccaggcccgtgattaaacagaaagctattgacc

SEQ ID NO: 82288 - DNA, 33 bp, Homo sapien
ccaggcccgtgattaagcagaaagctattgacc

SEQ ID NO: 82289 - DNA, 33 bp, Homo sapien
aacagggataatagaacaagagtgtcaattgac

SEQ ID NO: 82290 - DNA, 33 bp, Homo sapien
aacagggataatagaataagagtgtcaattgac

SEQ ID NO: 82291 - DNA, 33 bp, Homo sapien
tcttgtacagtctatacgatgttaggtgattat

SEQ ID NO: 82292 - DNA, 33 bp, Homo sapien
tcttgtacagtctatatgatgttaggtgattat

SEQ ID NO: 82293 - DNA, 33 bp, Homo sapien
tatgttgtatctatagcacccaatagtcagctg

SEQ ID NO: 82294 - DNA, 33 bp, Homo sapien
tatgttgtatctataggacccaatagtcagctg

SEQ ID NO: 82295 - DNA, 33 bp, Homo sapien
aactctagttcgtgaaaatggagtagccccatt

SEQ ID NO: 82296 - DNA, 33 bp, Homo sapien
aactctagttcgtgaagatggagtagccccatt

SEQ ID NO: 82297 - DNA, 33 bp, Homo sapien
ttgaaaatgattttggaatatgctgtagaaggc

SEQ ID NO: 82298 - DNA, 33 bp, Homo sapien
ttgaaaatgattttgggatatgctgtagaaggc

SEQ ID NO: 82299 - DNA, 33 bp, Homo sapien
aatgaagcaggaacacaggatcataaccaggag

SEQ ID NO: 82300 - DNA, 33 bp, Homo sapien
aatgaagcaggaacacgggatcataaccaggag

SEQ ID NO: 82301 - DNA, 33 bp, Homo sapien
tctatgggtaggcctcaaaaaagcatgatttga

SEQ ID NO: 82302 - DNA, 33 bp, Homo sapien
tctatgggtaggcctcgaaaaagcatgatttga

SEQ ID NO: 82303 - DNA, 33 bp, Homo sapien
ttttttttgcacccaccatgcagtgagttctga

SEQ ID NO: 82304 - DNA, 33 bp, Homo sapien
ttttttttgcacccacgatgcagtgagttctga

SEQ ID NO: 82305 - DNA, 33 bp, Homo sapien
cttccaaaggactagaagtaagcctcccaatta

SEQ ID NO: 82306 - DNA, 33 bp, Homo sapien
cttccaaaggactagaggtaagcctcccaatta

SEQ ID NO: 82307 - DNA, 33 bp, Homo sapien
aaaaagagttgcaacaaaataagaaatgtctca

SEQ ID NO: 82308 - DNA, 33 bp, Homo sapien
aaaaagagttgcaacagaataagaaatgtctca

SEQ ID NO: 82309 - DNA, 33 bp, Homo sapien
tctgtcagcaaaaaaaacagagaaaaatgtgat

SEQ ID NO: 82310 - DNA, 33 bp, Homo sapien
tctgtcagcaaaaaaaccagagaaaaatgtgat

SEQ ID NO: 82311 - DNA, 33 bp, Homo sapien
ttttaaatagatgaaaagtgatcaaattaagaa

SEQ ID NO: 82312 - DNA, 33 bp, Homo sapien
ttttaaatagatgaaatgtgatcaaattaagaa

SEQ ID NO: 82313 - DNA, 33 bp, Homo sapien
ttggtttacaatgaagccataaacatatctgat

SEQ ID NO: 82314 - DNA, 33 bp, Homo sapien
ttggtttacaatgaaggcataaacatatctgat

SEQ ID NO: 82315 - DNA, 33 bp, Homo sapien
gtcttctccctttctacggtctgatcttgcata

SEQ ID NO: 82316 - DNA, 33 bp, Homo sapien
gtcttctccctttctatggtctgatcttgcata

SEQ ID NO: 82317 - DNA, 33 bp, Homo sapien
acattcagaaatatacggcactcttcccacagt

SEQ ID NO: 82318 - DNA, 33 bp, Homo sapien
acattcagaaatatactgcactcttcccacagt

SEQ ID NO: 82319 - DNA, 33 bp, Homo sapien
gcagatactcaaacaaaatatttcatgcacaaa

SEQ ID NO: 82320 - DNA, 33 bp, Homo sapien
gcagatactcaaacaagatatttcatgcacaaa

SEQ ID NO: 82321 - DNA, 33 bp, Homo sapien
gtaaaagatgcatttgaaagtcttgaatttttg

SEQ ID NO: 82322 - DNA, 33 bp, Homo sapien
gtaaaagatgcatttggaagtcttgaatttttg

SEQ ID NO: 82323 - DNA, 33 bp, Homo sapien
ttttgagtaactgtcacgcatctcgtaaactaa

SEQ ID NO: 82324 - DNA, 33 bp, Homo sapien
ttttgagtaactgtcatgcatctcgtaaactaa

SEQ ID NO: 82325 - DNA, 33 bp, Homo sapien
acagacaaagagaaaactgacctgtgttcaggt

SEQ ID NO: 82326 - DNA, 33 bp, Homo sapien
acagacaaagagaaaattgacctgtgttcaggt

SEQ ID NO: 82327 - DNA, 33 bp, Homo sapien
taccagttctgatatacccatatttctgtgtgt

SEQ ID NO: 82328 - DNA, 33 bp, Homo sapien
taccagttctgatatagccatatttctgtgtgt

SEQ ID NO: 82329 - DNA, 33 bp, Homo sapien
tgtacttaatacattgcattataattcaaaaca

SEQ ID NO: 82330 - DNA, 33 bp, Homo sapien
tgtacttaatacattggattataattcaaaaca

SEQ ID NO: 82331 - DNA, 33 bp, Homo sapien
agtatatgcccctttccagttttagttcatctt

SEQ ID NO: 82332 - DNA, 33 bp, Homo sapien
agtatatgcccctttcgagttttagttcatctt

SEQ ID NO: 82333 - DNA, 33 bp, Homo sapien
actgtttgaataggaacctagctgtatctaaca

SEQ ID NO: 82334 - DNA, 33 bp, Homo sapien
actgtttgaataggaatctagctgtatctaaca

SEQ ID NO: 82335 - DNA, 33 bp, Homo sapien
gtacttcatttttagacggatttctatgaagaa

SEQ ID NO: 82336 - DNA, 33 bp, Homo sapien
gtacttcatttttagatggatttctatgaagaa

SEQ ID NO: 82337 - DNA, 33 bp, Homo sapien
atagctctgaaattcaatatctagcttgcatat

SEQ ID NO: 82338 - DNA, 33 bp, Homo sapien
atagctctgaaattcagtatctagcttgcatat

SEQ ID NO: 82339 - DNA, 33 bp, Homo sapien
taacatggacacaaaaatttgctttcaatatat

SEQ ID NO: 82340 - DNA, 33 bp, Homo sapien
taacatggacacaaaagtttgctttcaatatat

SEQ ID NO: 82341 - DNA, 33 bp, Homo sapien
taaacccataagaacacaagcagttcctctggg

SEQ ID NO: 82342 - DNA, 33 bp, Homo sapien
taaacccataagaacagaagcagttcctctggg

SEQ ID NO: 82343 - DNA, 33 bp, Homo sapien
cttgtggcagcatcaaagagtatataggccagg

SEQ ID NO: 82344 - DNA, 33 bp, Homo sapien
cttgtggcagcatcaacgagtatataggccagg

SEQ ID NO: 82345 - DNA, 33 bp, Homo sapien
atgtcaacagtgaaaaatctggaaaagaaataa

SEQ ID NO: 82346 - DNA, 33 bp, Homo sapien
atgtcaacagtgaaaagtctggaaaagaaataa

SEQ ID NO: 82347 - DNA, 33 bp, Homo sapien
atatatggtagcaagaaaagtggatcttatgaa

SEQ ID NO: 82348 - DNA, 33 bp, Homo sapien
atatatggtagcaagagaagtggatcttatgaa

SEQ ID NO: 82349 - DNA, 33 bp, Homo sapien
ctagcactgttcacaactggcaattatgtattc

SEQ ID NO: 82350 - DNA, 33 bp, Homo sapien
ctagcactgttcacaattggcaattatgtattc

SEQ ID NO: 82351 - DNA, 33 bp, Homo sapien
ttatcaggaatttacaatatgttacaaaatgta

SEQ ID NO: 82352 - DNA, 33 bp, Homo sapien
ttatcaggaatttacagtatgttacaaaatgta

SEQ ID NO: 82353 - DNA, 33 bp, Homo sapien
ttttcactgtcatgcaaagtcattatagctaac

SEQ ID NO: 82354 - DNA, 33 bp, Homo sapien
ttttcactgtcatgcagagtcattatagctaac

SEQ ID NO: 82355 - DNA, 33 bp, Homo sapien
gtatatggttttagatcaagggctctcaatctg

SEQ ID NO: 82356 - DNA, 33 bp, Homo sapien
gtatatggttttagatgaagggctctcaatctg

SEQ ID NO: 82357 - DNA, 33 bp, Homo sapien
gccaagtggatgtgtacagtctagctttcacag

SEQ ID NO: 82358 - DNA, 33 bp, Homo sapien
gccaagtggatgtgtatagtctagctttcacag

SEQ ID NO: 82359 - DNA, 33 bp, Homo sapien
aaataagaatgagatcaaaatcccaaaactgaa

SEQ ID NO: 82360 - DNA, 33 bp, Homo sapien
aaataagaatgagatccaaatcccaaaactgaa

SEQ ID NO: 82361 - DNA, 33 bp, Homo sapien
cttgctctagaaaagggactatggcattgattg

SEQ ID NO: 82362 - DNA, 33 bp, Homo sapien
cttgctctagaaaaggtactatggcattgattg

SEQ ID NO: 82363 - DNA, 33 bp, Homo sapien
tctattctcttcttagcagcagccagagttttt

SEQ ID NO: 82364 - DNA, 33 bp, Homo sapien
tctattctcttcttaggagcagccagagttttt

SEQ ID NO: 82365 - DNA, 33 bp, Homo sapien
ttctgtatgttgaaagcctcaagaatcctcagc

SEQ ID NO: 82366 - DNA, 33 bp, Homo sapien
ttctgtatgttgaaagtctcaagaatcctcagc

SEQ ID NO: 82367 - DNA, 33 bp, Homo sapien
ttagaatatagataaccgctaggaaatataatt

SEQ ID NO: 82368 - DNA, 33 bp, Homo sapien
ttagaatatagataactgctaggaaatataatt

SEQ ID NO: 82369 - DNA, 33 bp, Homo sapien
ttagtcagtctctagaatagcattgtccagtac

SEQ ID NO: 82370 - DNA, 33 bp, Homo sapien
ttagtcagtctctagagtagcattgtccagtac

SEQ ID NO: 82371 - DNA, 33 bp, Homo sapien
cctgagttctggcatcaagaagacaaatcaaaa

SEQ ID NO: 82372 - DNA, 33 bp, Homo sapien
cctgagttctggcatcgagaagacaaatcaaaa

SEQ ID NO: 82373 - DNA, 33 bp, Homo sapien
gagctacagtttaagaagttagagtactccaag

SEQ ID NO: 82374 - DNA, 33 bp, Homo sapien
gagctacagtttaagatgttagagtactccaag

SEQ ID NO: 82375 - DNA, 33 bp, Homo sapien
gagatgtgtcattgaccgaaattgtaatggtag

SEQ ID NO: 82376 - DNA, 33 bp, Homo sapien
gagatgtgtcattgactgaaattgtaatggtag

SEQ ID NO: 82377 - DNA, 33 bp, Homo sapien
ggcataagaaattttacatactaggcacaaaag

SEQ ID NO: 82378 - DNA, 33 bp, Homo sapien
ggcataagaaattttatatactaggcacaaaag

SEQ ID NO: 82379 - DNA, 33 bp, Homo sapien
atttacatggcttttagaatatgctttaatatt

SEQ ID NO: 82380 - DNA, 33 bp, Homo sapien
atttacatggcttttataatatgctttaatatt

SEQ ID NO: 82381 - DNA, 33 bp, Homo sapien
tctcatttttttctagacctcatacagatttgt

SEQ ID NO: 82382 - DNA, 33 bp, Homo sapien
tctcatttttttctagtcctcatacagatttgt

SEQ ID NO: 82383 - DNA, 33 bp, Homo sapien
cattgaaagaaaatacagagactccttgaagag

SEQ ID NO: 82384 - DNA, 33 bp, Homo sapien
cattgaaagaaaatacggagactccttgaagag

SEQ ID NO: 82385 - DNA, 33 bp, Homo sapien
tgatttaaattgaatacccaagatacctttgct

SEQ ID NO: 82386 - DNA, 33 bp, Homo sapien
tgatttaaattgaatatccaagatacctttgct

SEQ ID NO: 82387 - DNA, 33 bp, Homo sapien
acgatgactaacatcaaaataaaccttggggac

SEQ ID NO: 82388 - DNA, 33 bp, Homo sapien
acgatgactaacatcagaataaaccttggggac

SEQ ID NO: 82389 - DNA, 33 bp, Homo sapien
cacgaatgcagtaaacactggcttaatgaacag

SEQ ID NO: 82390 - DNA, 33 bp, Homo sapien
cacgaatgcagtaaaccctggcttaatgaacag

SEQ ID NO: 82391 - DNA, 33 bp, Homo sapien
aaacaaatagcagttcaatgatgtttccacaaa

SEQ ID NO: 82392 - DNA, 33 bp, Homo sapien
aaacaaatagcagttcgatgatgtttccacaaa

SEQ ID NO: 82393 - DNA, 33 bp, Homo sapien
attctagtgatggataagatagcttgatttaag

SEQ ID NO: 82394 - DNA, 33 bp, Homo sapien
attctagtgatggataggatagcttgatttaag

SEQ ID NO: 82395 - DNA, 33 bp, Homo sapien
tatataggtaatggagaaaaccataaataaaaa

SEQ ID NO: 82396 - DNA, 33 bp, Homo sapien
tatataggtaatggaggaaaccataaataaaaa

SEQ ID NO: 82397 - DNA, 33 bp, Homo sapien
acattggcaatgacgacggaatccactgaatgt

SEQ ID NO: 82398 - DNA, 33 bp, Homo sapien
acattggcaatgacgatggaatccactgaatgt

SEQ ID NO: 82399 - DNA, 33 bp, Homo sapien
tacaatgattaaaacaatgaacaataaattgat

SEQ ID NO: 82400 - DNA, 33 bp, Homo sapien
tacaatgattaaaacagtgaacaataaattgat

SEQ ID NO: 82401 - DNA, 33 bp, Homo sapien
acccatcagagttgaccaaattcacaaacttta

SEQ ID NO: 82402 - DNA, 33 bp, Homo sapien
acccatcagagttgactaaattcacaaacttta

SEQ ID NO: 82403 - DNA, 33 bp, Homo sapien
acatggtcgcttactacgatttgaactttaaaa

SEQ ID NO: 82404 - DNA, 33 bp, Homo sapien
acatggtcgcttactatgatttgaactttaaaa

SEQ ID NO: 82405 - DNA, 33 bp, Homo sapien
ccctgatcatggcgagaaacagcattaatgtgt

SEQ ID NO: 82406 - DNA, 33 bp, Homo sapien
ccctgatcatggcgagtaacagcattaatgtgt

SEQ ID NO: 82407 - DNA, 33 bp, Homo sapien
ttagtttgcctgagaaaaagacagcagaggaaa

SEQ ID NO: 82408 - DNA, 33 bp, Homo sapien
ttagtttgcctgagaacaagacagcagaggaaa

SEQ ID NO: 82409 - DNA, 33 bp, Homo sapien
cttccatataattttgaatagaaacggtaaaag

SEQ ID NO: 82410 - DNA, 33 bp, Homo sapien
cttccatataattttgtatagaaacggtaaaag

SEQ ID NO: 82411 - DNA, 33 bp, Homo sapien
ttagtttcggtatctacgaactgagaatgacaa

SEQ ID NO: 82412 - DNA, 33 bp, Homo sapien
ttagtttcggtatctatgaactgagaatgacaa

SEQ ID NO: 82413 - DNA, 33 bp, Homo sapien
tgcaactgtgtatgtacgcattgtttcattaaa

SEQ ID NO: 82414 - DNA, 33 bp, Homo sapien
tgcaactgtgtatgtatgcattgtttcattaaa

SEQ ID NO: 82415 - DNA, 33 bp, Homo sapien
atagaattctgaatgaaatgtgcttccaaaaaa

SEQ ID NO: 82416 - DNA, 33 bp, Homo sapien
atagaattctgaatgacatgtgcttccaaaaaa

SEQ ID NO: 82417 - DNA, 33 bp, Homo sapien
cagaattcacaaaagccgagcaggtgccattca

SEQ ID NO: 82418 - DNA, 33 bp, Homo sapien
cagaattcacaaaagctgagcaggtgccattca

SEQ ID NO: 82419 - DNA, 33 bp, Homo sapien
gctttggaatgaaatacgctggactcaagttag

SEQ ID NO: 82420 - DNA, 33 bp, Homo sapien
gctttggaatgaaatatgctggactcaagttag

SEQ ID NO: 82421 - DNA, 33 bp, Homo sapien
ttctaatctgagttaacattcataaaaccatta

SEQ ID NO: 82422 - DNA, 33 bp, Homo sapien
ttctaatctgagttaatattcataaaaccatta

SEQ ID NO: 82423 - DNA, 33 bp, Homo sapien
ctttcgaatattgacacgtagctttcaaagaat

SEQ ID NO: 82424 - DNA, 33 bp, Homo sapien
ctttcgaatattgacatgtagctttcaaagaat

SEQ ID NO: 82425 - DNA, 33 bp, Homo sapien
aaactcttgataccataagataagtaaacattt

SEQ ID NO: 82426 - DNA, 33 bp, Homo sapien
aaactcttgataccatgagataagtaaacattt

SEQ ID NO: 82427 - DNA, 33 bp, Homo sapien
agcagattcagaaccacgccttctaaaactctg

SEQ ID NO: 82428 - DNA, 33 bp, Homo sapien
agcagattcagaaccatgccttctaaaactctg

SEQ ID NO: 82429 - DNA, 33 bp, Homo sapien
gccaaagagaaattgacagtaggcagaactagt

SEQ ID NO: 82430 - DNA, 33 bp, Homo sapien
gccaaagagaaattgatagtaggcagaactagt

SEQ ID NO: 82431 - DNA, 33 bp, Homo sapien
gtggaattaggactaagaggtgaaacgctttca

SEQ ID NO: 82432 - DNA, 33 bp, Homo sapien
gtggaattaggactaataggtgaaacgctttca

SEQ ID NO: 82433 - DNA, 33 bp, Homo sapien
ttggacttttgaaaaacctttgaggccttccta

SEQ ID NO: 82434 - DNA, 33 bp, Homo sapien
ttggacttttgaaaaatctttgaggccttccta

SEQ ID NO: 82435 - DNA, 33 bp, Homo sapien
agaatacagacatatcaacacatgaatcaacgt

SEQ ID NO: 82436 - DNA, 33 bp, Homo sapien
agaatacagacatatcgacacatgaatcaacgt

SEQ ID NO: 82437 - DNA, 33 bp, Homo sapien
tggcagaaagtttggcaaagttttcatcccaat

SEQ ID NO: 82438 - DNA, 33 bp, Homo sapien
tggcagaaagtttggcgaagttttcatcccaat

SEQ ID NO: 82439 - DNA, 33 bp, Homo sapien
gggtggacgtttctgccatgtgcgtaatgttct

SEQ ID NO: 82440 - DNA, 33 bp, Homo sapien
gggtggacgtttctgctatgtgcgtaatgttct

SEQ ID NO: 82441 - DNA, 33 bp, Homo sapien
ttaaaaataacttttccatggtctacaatactt

SEQ ID NO: 82442 - DNA, 33 bp, Homo sapien
ttaaaaataacttttctatggtctacaatactt

SEQ ID NO: 82443 - DNA, 33 bp, Homo sapien
aatactagacataaaaaaactagttgtaatgaa

SEQ ID NO: 82444 - DNA, 33 bp, Homo sapien
aatactagacataaaagaactagttgtaatgaa

SEQ ID NO: 82445 - DNA, 33 bp, Homo sapien
tggaacagctgcttcactctgcgggagagaaaa

SEQ ID NO: 82446 - DNA, 33 bp, Homo sapien
tggaacagctgcttcattctgcgggagagaaaa

SEQ ID NO: 82447 - DNA, 33 bp, Homo sapien
attactattactactaaggcccattgagtgaag

SEQ ID NO: 82448 - DNA, 33 bp, Homo sapien
attactattactactatggcccattgagtgaag

SEQ ID NO: 82449 - DNA, 33 bp, Homo sapien
gaatgttgcttcattgccaagagttagatgcca

SEQ ID NO: 82450 - DNA, 33 bp, Homo sapien
gaatgttgcttcattgtcaagagttagatgcca

SEQ ID NO: 82451 - DNA, 33 bp, Homo sapien
tcactactccggatggccatcaacctaacagac

SEQ ID NO: 82452 - DNA, 33 bp, Homo sapien
tcactactccggatgggcatcaacctaacagac

SEQ ID NO: 82453 - DNA, 33 bp, Homo sapien
atagataaaatatcccagaggaatgaggagaac

SEQ ID NO: 82454 - DNA, 33 bp, Homo sapien
atagataaaatatccccgaggaatgaggagaac

SEQ ID NO: 82455 - DNA, 33 bp, Homo sapien
atcaatgtacataccaccagaaatgtatgagaa

SEQ ID NO: 82456 - DNA, 33 bp, Homo sapien
atcaatgtacataccatcagaaatgtatgagaa

SEQ ID NO: 82457 - DNA, 33 bp, Homo sapien
tgtaagagacttgcaacgcctagagaaaaggtc

SEQ ID NO: 82458 - DNA, 33 bp, Homo sapien
tgtaagagacttgcaatgcctagagaaaaggtc

SEQ ID NO: 82459 - DNA, 33 bp, Homo sapien
aactttaagctagacaataaaaatttgtgagat

SEQ ID NO: 82460 - DNA, 33 bp, Homo sapien
aactttaagctagacagtaaaaatttgtgagat

SEQ ID NO: 82461 - DNA, 33 bp, Homo sapien
gcattaattatagcgcacccttagatgctactg

SEQ ID NO: 82462 - DNA, 33 bp, Homo sapien
gcattaattatagcgcgcccttagatgctactg

SEQ ID NO: 82463 - DNA, 33 bp, Homo sapien
ggtttgctgttgtgcacgaggaaaatttaggac

SEQ ID NO: 82464 - DNA, 33 bp, Homo sapien
ggtttgctgttgtgcatgaggaaaatttaggac

SEQ ID NO: 82465 - DNA, 33 bp, Homo sapien
ctttcttgtgtagttgaacttgaggtcaccaga

SEQ ID NO: 82466 - DNA, 33 bp, Homo sapien
ctttcttgtgtagttgtacttgaggtcaccaga

SEQ ID NO: 82467 - DNA, 33 bp, Homo sapien
taataggtttctgtgcaagccatgaattagaag

SEQ ID NO: 82468 - DNA, 33 bp, Homo sapien
taataggtttctgtgcgagccatgaattagaag

SEQ ID NO: 82469 - DNA, 33 bp, Homo sapien
tacatttgtgtctgtaaagaaagaagcaacaca

SEQ ID NO: 82470 - DNA, 33 bp, Homo sapien
tacatttgtgtctgtagagaaagaagcaacaca

SEQ ID NO: 82471 - DNA, 33 bp, Homo sapien
caaataagctggtgagcatattgcagtactgcc

SEQ ID NO: 82472 - DNA, 33 bp, Homo sapien
caaataagctggtgagtatattgcagtactgcc

SEQ ID NO: 82473 - DNA, 33 bp, Homo sapien
aataaacttgataacaacgaaacacagggcagt

SEQ ID NO: 82474 - DNA, 33 bp, Homo sapien
aataaacttgataacagcgaaacacagggcagt

SEQ ID NO: 82475 - DNA, 33 bp, Homo sapien
tgtcttcatatgcccacatctgctaatcaatgg

SEQ ID NO: 82476 - DNA, 33 bp, Homo sapien
tgtcttcatatgcccatatctgctaatcaatgg

SEQ ID NO: 82477 - DNA, 33 bp, Homo sapien
aagtggctgcaagggcaccgatattaaacacca

SEQ ID NO: 82478 - DNA, 33 bp, Homo sapien
aagtggctgcaagggctccgatattaaacacca

SEQ ID NO: 82479 - DNA, 33 bp, Homo sapien
gaactagctggtaagcaaagtggctgcaagggc

SEQ ID NO: 82480 - DNA, 33 bp, Homo sapien
gaactagctggtaagcgaagtggctgcaagggc

SEQ ID NO: 82481 - DNA, 33 bp, Homo sapien
cacaatagaacatggacgcaagcagaatttatt

SEQ ID NO: 82482 - DNA, 33 bp, Homo sapien
cacaatagaacatggatgcaagcagaatttatt

SEQ ID NO: 82483 - DNA, 33 bp, Homo sapien
atccaaatatccaaacacaacagaatggataaa

SEQ ID NO: 82484 - DNA, 33 bp, Homo sapien
atccaaatatccaaacgcaacagaatggataaa

SEQ ID NO: 82485 - DNA, 33 bp, Homo sapien
tatcaaggtgattttcccaatctagtgagcaca

SEQ ID NO: 82486 - DNA, 33 bp, Homo sapien
tatcaaggtgattttctcaatctagtgagcaca

SEQ ID NO: 82487 - DNA, 33 bp, Homo sapien
aacaatcaaaatttcaagaaatgatggatgcac

SEQ ID NO: 82488 - DNA, 33 bp, Homo sapien
aacaatcaaaatttcaggaaatgatggatgcac

SEQ ID NO: 82489 - DNA, 33 bp, Homo sapien
cattgtataaatgcaagaagcgatttcaattga

SEQ ID NO: 82490 - DNA, 33 bp, Homo sapien
cattgtataaatgcaataagcgatttcaattga

SEQ ID NO: 82491 - DNA, 33 bp, Homo sapien
gaagttcaccacatacaagaagggaaagtttat

SEQ ID NO: 82492 - DNA, 33 bp, Homo sapien
gaagttcaccacataccagaagggaaagtttat

SEQ ID NO: 82493 - DNA, 33 bp, Homo sapien
ctcaccaccaagtttcccagatgctgcatttga

SEQ ID NO: 82494 - DNA, 33 bp, Homo sapien
ctcaccaccaagtttctcagatgctgcatttga

SEQ ID NO: 82495 - DNA, 33 bp, Homo sapien
acctggttggtatctacgacatattttacgggg

SEQ ID NO: 82496 - DNA, 33 bp, Homo sapien
acctggttggtatctatgacatattttacgggg

SEQ ID NO: 82497 - DNA, 33 bp, Homo sapien
ataactacaattctaacatctgtacctgctcta

SEQ ID NO: 82498 - DNA, 33 bp, Homo sapien
ataactacaattctaatatctgtacctgctcta

SEQ ID NO: 82499 - DNA, 33 bp, Homo sapien
taaccaaagattttgaagcccatagcttttctt

SEQ ID NO: 82500 - DNA, 33 bp, Homo sapien
taaccaaagattttgaggcccatagcttttctt

SEQ ID NO: 82501 - DNA, 33 bp, Homo sapien
tctagtcacttcaaaacgttagcatctatcttc

SEQ ID NO: 82502 - DNA, 33 bp, Homo sapien
tctagtcacttcaaaatgttagcatctatcttc

SEQ ID NO: 82503 - DNA, 33 bp, Homo sapien
aaaacctagattaagcacataaaaaataaaaat

SEQ ID NO: 82504 - DNA, 33 bp, Homo sapien
aaaacctagattaagcgcataaaaaataaaaat

SEQ ID NO: 82505 - DNA, 33 bp, Homo sapien
cgataataatctcagaaatagcttcttatgtgt

SEQ ID NO: 82506 - DNA, 33 bp, Homo sapien
cgataataatctcagagatagcttcttatgtgt

SEQ ID NO: 82507 - DNA, 33 bp, Homo sapien
tagtgttaaccctgcgaaataagttcagcatat

SEQ ID NO: 82508 - DNA, 33 bp, Homo sapien
tagtgttaaccctgcggaataagttcagcatat

SEQ ID NO: 82509 - DNA, 33 bp, Homo sapien
caaggtgtctaagctaacatggcctttaccgct

SEQ ID NO: 82510 - DNA, 33 bp, Homo sapien
caaggtgtctaagctatcatggcctttaccgct

SEQ ID NO: 82511 - DNA, 33 bp, Homo sapien
caaaaaaaagtgacagaaaagtgacctcatccc

SEQ ID NO: 82512 - DNA, 33 bp, Homo sapien
caaaaaaaagtgacaggaaagtgacctcatccc

SEQ ID NO: 82513 - DNA, 33 bp, Homo sapien
gagcaaaaattatccaagtgctttacgaactga

SEQ ID NO: 82514 - DNA, 33 bp, Homo sapien
gagcaaaaattatccaggtgctttacgaactga

SEQ ID NO: 82515 - DNA, 33 bp, Homo sapien
ttgcagtatggtgaaaatattatccatctgcca

SEQ ID NO: 82516 - DNA, 33 bp, Homo sapien
ttgcagtatggtgaaagtattatccatctgcca

SEQ ID NO: 82517 - DNA, 33 bp, Homo sapien
tcatcacttagaattacggaaaaagtagtagag

SEQ ID NO: 82518 - DNA, 33 bp, Homo sapien
tcatcacttagaattatggaaaaagtagtagag

SEQ ID NO: 82519 - DNA, 33 bp, Homo sapien
gaggaactttgaatcaaggcatagtaatagttt

SEQ ID NO: 82520 - DNA, 33 bp, Homo sapien
gaggaactttgaatcagggcatagtaatagttt

SEQ ID NO: 82521 - DNA, 33 bp, Homo sapien
gttgccaactggctagcagagtgttgaaagcat

SEQ ID NO: 82522 - DNA, 33 bp, Homo sapien
gttgccaactggctagtagagtgttgaaagcat

SEQ ID NO: 82523 - DNA, 33 bp, Homo sapien
tttaggaagtcatgtaccatggaggagagaaat

SEQ ID NO: 82524 - DNA, 33 bp, Homo sapien
tttaggaagtcatgtatcatggaggagagaaat

SEQ ID NO: 82525 - DNA, 33 bp, Homo sapien
tattacaaaaccacatgactttagacatataca

SEQ ID NO: 82526 - DNA, 33 bp, Homo sapien
tattacaaaaccacattactttagacatataca

SEQ ID NO: 82527 - DNA, 33 bp, Homo sapien
ctattgagattgtaaacggggaaaaattgttgg

SEQ ID NO: 82528 - DNA, 33 bp, Homo sapien
ctattgagattgtaaatggggaaaaattgttgg

SEQ ID NO: 82529 - DNA, 33 bp, Homo sapien
tgtcttggtagaagtaccaccagctattgtgaa

SEQ ID NO: 82530 - DNA, 33 bp, Homo sapien
tgtcttggtagaagtatcaccagctattgtgaa

SEQ ID NO: 82531 - DNA, 33 bp, Homo sapien
acttcaagacttcccaaatttattatgccaaga

SEQ ID NO: 82532 - DNA, 33 bp, Homo sapien
acttcaagacttcccacatttattatgccaaga

SEQ ID NO: 82533 - DNA, 33 bp, Homo sapien
aatgtctacatggcaaatcttcttcaatatgtt

SEQ ID NO: 82534 - DNA, 33 bp, Homo sapien
aatgtctacatggcaagtcttcttcaatatgtt

SEQ ID NO: 82535 - DNA, 33 bp, Homo sapien
ataaaatagctcacacaaatgaaggtagaggag

SEQ ID NO: 82536 - DNA, 33 bp, Homo sapien
ataaaatagctcacaccaatgaaggtagaggag

SEQ ID NO: 82537 - DNA, 33 bp, Homo sapien
atatttcaaattgaatcaaggaaacattattta

SEQ ID NO: 82538 - DNA, 33 bp, Homo sapien
atatttcaaattgaattaaggaaacattattta

SEQ ID NO: 82539 - DNA, 33 bp, Homo sapien
tcatcaaaatagcttcaaactaaaaatcatcaa

SEQ ID NO: 82540 - DNA, 33 bp, Homo sapien
tcatcaaaatagcttccaactaaaaatcatcaa

SEQ ID NO: 82541 - DNA, 33 bp, Homo sapien
aggcccctaccgataacatggaaagcaatctgc

SEQ ID NO: 82542 - DNA, 33 bp, Homo sapien
aggcccctaccgataatatggaaagcaatctgc

SEQ ID NO: 82543 - DNA, 33 bp, Homo sapien
aaattccatataggtcaattagtccaaatcttt

SEQ ID NO: 82544 - DNA, 33 bp, Homo sapien
aaattccatataggtccattagtccaaatcttt

SEQ ID NO: 82545 - DNA, 33 bp, Homo sapien
tcttatgaacatacaacgcaggtgttcaacaaa

SEQ ID NO: 82546 - DNA, 33 bp, Homo sapien
tcttatgaacatacaatgcaggtgttcaacaaa

SEQ ID NO: 82547 - DNA, 33 bp, Homo sapien
gccaacttgagattcgaccactgaagtaacaaa

SEQ ID NO: 82548 - DNA, 33 bp, Homo sapien
gccaacttgagattcggccactgaagtaacaaa

SEQ ID NO: 82549 - DNA, 33 bp, Homo sapien
gggtctcctgtcggaaaccagaactgctgcatt

SEQ ID NO: 82550 - DNA, 33 bp, Homo sapien
gggtctcctgtcggaagccagaactgctgcatt

SEQ ID NO: 82551 - DNA, 33 bp, Homo sapien
ggctgaggtccctgtcactgtgcaccatctgct

SEQ ID NO: 82552 - DNA, 33 bp, Homo sapien
ggctgaggtccctgtcgctgtgcaccatctgct

SEQ ID NO: 82553 - DNA, 33 bp, Homo sapien
cagaacaatcaaaggaagaaacaatttagccaa

SEQ ID NO: 82554 - DNA, 33 bp, Homo sapien
cagaacaatcaaaggaggaaacaatttagccaa

SEQ ID NO: 82555 - DNA, 33 bp, Homo sapien
tattaatcttctcaagaaatagcagcacatctg

SEQ ID NO: 82556 - DNA, 33 bp, Homo sapien
tattaatcttctcaagcaatagcagcacatctg

SEQ ID NO: 82557 - DNA, 33 bp, Homo sapien
ttttcttgagcctccaatctaaaagagagcctg

SEQ ID NO: 82558 - DNA, 33 bp, Homo sapien
ttttcttgagcctccattctaaaagagagcctg

SEQ ID NO: 82559 - DNA, 33 bp, Homo sapien
tttcaaagactattgcacatgaggtctatgttg

SEQ ID NO: 82560 - DNA, 33 bp, Homo sapien
tttcaaagactattgcgcatgaggtctatgttg

SEQ ID NO: 82561 - DNA, 33 bp, Homo sapien
acagggccttttggacaatctttttgacatgaa

SEQ ID NO: 82562 - DNA, 33 bp, Homo sapien
acagggccttttggactatctttttgacatgaa

SEQ ID NO: 82563 - DNA, 33 bp, Homo sapien
tgtaaaattataggaactgtgcctgactctctt

SEQ ID NO: 82564 - DNA, 33 bp, Homo sapien
tgtaaaattataggaagtgtgcctgactctctt

SEQ ID NO: 82565 - DNA, 33 bp, Homo sapien
aatgtaaaagcagaaaatcagatagaaaataca

SEQ ID NO: 82566 - DNA, 33 bp, Homo sapien
aatgtaaaagcagaaattcagatagaaaataca

SEQ ID NO: 82567 - DNA, 33 bp, Homo sapien
agaaaggacttaagtacgtcatcacaatttatt

SEQ ID NO: 82568 - DNA, 33 bp, Homo sapien
agaaaggacttaagtatgtcatcacaatttatt

SEQ ID NO: 82569 - DNA, 33 bp, Homo sapien
ttccctgccggaaactcagtgcaacactggagg

SEQ ID NO: 82570 - DNA, 33 bp, Homo sapien
ttccctgccggaaacttagtgcaacactggagg

SEQ ID NO: 82571 - DNA, 33 bp, Homo sapien
tacggatttctgcatacgtaagaggctttttgg

SEQ ID NO: 82572 - DNA, 33 bp, Homo sapien
tacggatttctgcatatgtaagaggctttttgg

SEQ ID NO: 82573 - DNA, 33 bp, Homo sapien
tggaagaaatactgcaacagccagagggagtca

SEQ ID NO: 82574 - DNA, 33 bp, Homo sapien
tggaagaaatactgcagcagccagagggagtca

SEQ ID NO: 82575 - DNA, 33 bp, Homo sapien
tgggctacaaaggaacacacttgggcttgagcc

SEQ ID NO: 82576 - DNA, 33 bp, Homo sapien
tgggctacaaaggaacccacttgggcttgagcc

SEQ ID NO: 82577 - DNA, 33 bp, Homo sapien
actcttgcctccaatggatatgataatgttatg

SEQ ID NO: 82578 - DNA, 33 bp, Homo sapien
actcttgcctccaatgtatatgataatgttatg

SEQ ID NO: 82579 - DNA, 33 bp, Homo sapien
agaactgtcagctcctaacttgacatgccttaa

SEQ ID NO: 82580 - DNA, 33 bp, Homo sapien
agaactgtcagctcctcacttgacatgccttaa

SEQ ID NO: 82581 - DNA, 33 bp, Homo sapien
tcagtggcatctaattgaatgtaattgctcttg

SEQ ID NO: 82582 - DNA, 33 bp, Homo sapien
tcagtggcatctaatttaatgtaattgctcttg

SEQ ID NO: 82583 - DNA, 33 bp, Homo sapien
gtgttgtgtgtttatacgtctgtgtgtacacac

SEQ ID NO: 82584 - DNA, 33 bp, Homo sapien
gtgttgtgtgtttatatgtctgtgtgtacacac

SEQ ID NO: 82585 - DNA, 33 bp, Homo sapien
atgaaagtttgtaagacagaaaatctaagtcat

SEQ ID NO: 82586 - DNA, 33 bp, Homo sapien
atgaaagtttgtaagagagaaaatctaagtcat

SEQ ID NO: 82587 - DNA, 33 bp, Homo sapien
agaatgtgttttctcaaaaatatttaaggcagt

SEQ ID NO: 82588 - DNA, 33 bp, Homo sapien
agaatgtgttttctcacaaatatttaaggcagt

SEQ ID NO: 82589 - DNA, 33 bp, Homo sapien
gtacactaaaaattcaacaattctgggagaaaa

SEQ ID NO: 82590 - DNA, 33 bp, Homo sapien
gtacactaaaaattcagcaattctgggagaaaa

SEQ ID NO: 82591 - DNA, 33 bp, Homo sapien
cccagagcattcaataccatggtctaacttctt

SEQ ID NO: 82592 - DNA, 33 bp, Homo sapien
cccagagcattcaatatcatggtctaacttctt

SEQ ID NO: 82593 - DNA, 33 bp, Homo sapien
agacagtgcaattggtcaaatggagctcgcata

SEQ ID NO: 82594 - DNA, 33 bp, Homo sapien
agacagtgcaattggttaaatggagctcgcata

SEQ ID NO: 82595 - DNA, 33 bp, Homo sapien
agctatactgtcctaaataagcctcatctaaga

SEQ ID NO: 82596 - DNA, 33 bp, Homo sapien
agctatactgtcctaagtaagcctcatctaaga

SEQ ID NO: 82597 - DNA, 33 bp, Homo sapien
tttcctctaactatggaacgtttgacttgactt

SEQ ID NO: 82598 - DNA, 33 bp, Homo sapien
tttcctctaactatggcacgtttgacttgactt

SEQ ID NO: 82599 - DNA, 33 bp, Homo sapien
atgattatgatgtatacgatcctgggccacaca

SEQ ID NO: 82600 - DNA, 33 bp, Homo sapien
atgattatgatgtatatgatcctgggccacaca

SEQ ID NO: 82601 - DNA, 33 bp, Homo sapien
gcactacagtctaagcaatctgaaacttagctt

SEQ ID NO: 82602 - DNA, 33 bp, Homo sapien
gcactacagtctaagcgatctgaaacttagctt

SEQ ID NO: 82603 - DNA, 33 bp, Homo sapien
cttatgctaaaaagctaacaaggaaacactata

SEQ ID NO: 82604 - DNA, 33 bp, Homo sapien
cttatgctaaaaagctgacaaggaaacactata

SEQ ID NO: 82605 - DNA, 33 bp, Homo sapien
aaagtaatatggagaacgcttatgctaaaaagc

SEQ ID NO: 82606 - DNA, 33 bp, Homo sapien
aaagtaatatggagaatgcttatgctaaaaagc

SEQ ID NO: 82607 - DNA, 33 bp, Homo sapien
aaattactagattttcacaggcaaaagagttgt

SEQ ID NO: 82608 - DNA, 33 bp, Homo sapien
aaattactagattttcgcaggcaaaagagttgt

SEQ ID NO: 82609 - DNA, 33 bp, Homo sapien
gatttactctataaaactatagctgtagtactg

SEQ ID NO: 82610 - DNA, 33 bp, Homo sapien
gatttactctataaaagtatagctgtagtactg

SEQ ID NO: 82611 - DNA, 33 bp, Homo sapien
cttctctattaggagacaaatttgctaccaaac

SEQ ID NO: 82612 - DNA, 33 bp, Homo sapien
cttctctattaggagataaatttgctaccaaac

SEQ ID NO: 82613 - DNA, 33 bp, Homo sapien
aaggagaatgaggatgcaatattgtcaggaaag

SEQ ID NO: 82614 - DNA, 33 bp, Homo sapien
aaggagaatgaggatggaatattgtcaggaaag

SEQ ID NO: 82615 - DNA, 33 bp, Homo sapien
actgtaacttcagagaccataaatcccactgca

SEQ ID NO: 82616 - DNA, 33 bp, Homo sapien
actgtaacttcagagagcataaatcccactgca

SEQ ID NO: 82617 - DNA, 33 bp, Homo sapien
gtcttctgtagatccaactgcccttgagaacgc

SEQ ID NO: 82618 - DNA, 33 bp, Homo sapien
gtcttctgtagatccagctgcccttgagaacgc

SEQ ID NO: 82619 - DNA, 33 bp, Homo sapien
tctagatgaccttggacatggcaattgcttttt

SEQ ID NO: 82620 - DNA, 33 bp, Homo sapien
tctagatgaccttggatatggcaattgcttttt

SEQ ID NO: 82621 - DNA, 33 bp, Homo sapien
ccagctctgaaaagttcaaaattttgctacacc

SEQ ID NO: 82622 - DNA, 33 bp, Homo sapien
ccagctctgaaaagtttaaaattttgctacacc

SEQ ID NO: 82623 - DNA, 33 bp, Homo sapien
tcttatgcagagatgacggcaagtcacagtagt

SEQ ID NO: 82624 - DNA, 33 bp, Homo sapien
tcttatgcagagatgatggcaagtcacagtagt

SEQ ID NO: 82625 - DNA, 33 bp, Homo sapien
cccttatctttgctccagactaacctgtggctg

SEQ ID NO: 82626 - DNA, 33 bp, Homo sapien
cccttatctttgctccggactaacctgtggctg

SEQ ID NO: 82627 - DNA, 33 bp, Homo sapien
gattgcttaccttaaaatctaacctcagctttg

SEQ ID NO: 82628 - DNA, 33 bp, Homo sapien
gattgcttaccttaaattctaacctcagctttg

SEQ ID NO: 82629 - DNA, 33 bp, Homo sapien
agactcaaagatagagaccaaaaaagtgacact

SEQ ID NO: 82630 - DNA, 33 bp, Homo sapien
agactcaaagatagagcccaaaaaagtgacact

SEQ ID NO: 82631 - DNA, 33 bp, Homo sapien
caaaagttagggcaaacggccaacagagagaaa

SEQ ID NO: 82632 - DNA, 33 bp, Homo sapien
caaaagttagggcaaagggccaacagagagaaa

SEQ ID NO: 82633 - DNA, 33 bp, Homo sapien
ggcggctgtaacacaacaggaaacatctgtgta

SEQ ID NO: 82634 - DNA, 33 bp, Homo sapien
ggcggctgtaacacaataggaaacatctgtgta

SEQ ID NO: 82635 - DNA, 33 bp, Homo sapien
tattatgtatgtagcaaattcttctctataacc

SEQ ID NO: 82636 - DNA, 33 bp, Homo sapien
tattatgtatgtagcagattcttctctataacc

SEQ ID NO: 82637 - DNA, 33 bp, Homo sapien
attcaatccacagtccactgagtgactcataac

SEQ ID NO: 82638 - DNA, 33 bp, Homo sapien
attcaatccacagtcctctgagtgactcataac

SEQ ID NO: 82639 - DNA, 33 bp, Homo sapien
taaaaggaaaaaagcaaggttatgcggttggaa

SEQ ID NO: 82640 - DNA, 33 bp, Homo sapien
taaaaggaaaaaagcagggttatgcggttggaa

SEQ ID NO: 82641 - DNA, 33 bp, Homo sapien
gtacatctaagcacaaagaagctcctgggatca

SEQ ID NO: 82642 - DNA, 33 bp, Homo sapien
gtacatctaagcacaaggaagctcctgggatca

SEQ ID NO: 82643 - DNA, 33 bp, Homo sapien
gtagttggtacatcaaaaaagcattgcaaaaga

SEQ ID NO: 82644 - DNA, 33 bp, Homo sapien
gtagttggtacatcaacaaagcattgcaaaaga

SEQ ID NO: 82645 - DNA, 33 bp, Homo sapien
attttccttgttgggacaaataacatagttgag

SEQ ID NO: 82646 - DNA, 33 bp, Homo sapien
attttccttgttgggataaataacatagttgag

SEQ ID NO: 82647 - DNA, 33 bp, Homo sapien
gtaaattctgtaaggaaaggcactttgtctata

SEQ ID NO: 82648 - DNA, 33 bp, Homo sapien
gtaaattctgtaaggacaggcactttgtctata

SEQ ID NO: 82649 - DNA, 33 bp, Homo sapien
caggagcaatgcaatcacgttgccttgatcaac

SEQ ID NO: 82650 - DNA, 33 bp, Homo sapien
caggagcaatgcaatcgcgttgccttgatcaac

SEQ ID NO: 82651 - DNA, 33 bp, Homo sapien
ctactaatgaggctaaaacattttgaaatttaa

SEQ ID NO: 82652 - DNA, 33 bp, Homo sapien
ctactaatgaggctaacacattttgaaatttaa

SEQ ID NO: 82653 - DNA, 33 bp, Homo sapien
gtgaagatgtgatgcacgaatggagcagaacat

SEQ ID NO: 82654 - DNA, 33 bp, Homo sapien
gtgaagatgtgatgcatgaatggagcagaacat

SEQ ID NO: 82655 - DNA, 33 bp, Homo sapien
ggagagtagtagtatacctgccaagcatttatt

SEQ ID NO: 82656 - DNA, 33 bp, Homo sapien
ggagagtagtagtatatctgccaagcatttatt

SEQ ID NO: 82657 - DNA, 33 bp, Homo sapien
caagcatgggaaggaacaggcttgaggagttag

SEQ ID NO: 82658 - DNA, 33 bp, Homo sapien
caagcatgggaaggaataggcttgaggagttag

SEQ ID NO: 82659 - DNA, 33 bp, Homo sapien
aagagttgacttcagcactacctcacacattct

SEQ ID NO: 82660 - DNA, 33 bp, Homo sapien
aagagttgacttcagcgctacctcacacattct

SEQ ID NO: 82661 - DNA, 33 bp, Homo sapien
caaatccaccgataagcaagttcatcatttact

SEQ ID NO: 82662 - DNA, 33 bp, Homo sapien
caaatccaccgataaggaagttcatcatttact

SEQ ID NO: 82663 - DNA, 33 bp, Homo sapien
caatgcttctcataaaaacaaacagcttgcaaa

SEQ ID NO: 82664 - DNA, 33 bp, Homo sapien
caatgcttctcataaacacaaacagcttgcaaa

SEQ ID NO: 82665 - DNA, 33 bp, Homo sapien
cttaatgatgaggatccagtctaagaaatgtgc

SEQ ID NO: 82666 - DNA, 33 bp, Homo sapien
cttaatgatgaggatctagtctaagaaatgtgc

SEQ ID NO: 82667 - DNA, 33 bp, Homo sapien
aaaatgaagtgaataacacaattttaatagatt

SEQ ID NO: 82668 - DNA, 33 bp, Homo sapien
aaaatgaagtgaataagacaattttaatagatt

SEQ ID NO: 82669 - DNA, 33 bp, Homo sapien
gtgatgacagtctgtacgtaagatgaccactgt

SEQ ID NO: 82670 - DNA, 33 bp, Homo sapien
gtgatgacagtctgtatgtaagatgaccactgt

SEQ ID NO: 82671 - DNA, 33 bp, Homo sapien
gtgcttctcaaactgaagaaggagcaattactc

SEQ ID NO: 82672 - DNA, 33 bp, Homo sapien
gtgcttctcaaactgatgaaggagcaattactc

SEQ ID NO: 82673 - DNA, 33 bp, Homo sapien
aatgggaaatgctttgcaagaacttgaggatga

SEQ ID NO: 82674 - DNA, 33 bp, Homo sapien
aatgggaaatgctttggaagaacttgaggatga

SEQ ID NO: 82675 - DNA, 33 bp, Homo sapien
tgtttaatgggaattgcagaaactcaggaattt

SEQ ID NO: 82676 - DNA, 33 bp, Homo sapien
tgtttaatgggaattgtagaaactcaggaattt

SEQ ID NO: 82677 - DNA, 33 bp, Homo sapien
ttagatttccattgtacaaaatttacgaggaca

SEQ ID NO: 82678 - DNA, 33 bp, Homo sapien
ttagatttccattgtataaaatttacgaggaca

SEQ ID NO: 82679 - DNA, 33 bp, Homo sapien
acaccatcggtctctgaaaaaaaatggtccctt

SEQ ID NO: 82680 - DNA, 33 bp, Homo sapien
acaccatcggtctctggaaaaaaatggtccctt

SEQ ID NO: 82681 - DNA, 33 bp, Homo sapien
gtcttgtctcctgctgacaaaaggaagcctttt

SEQ ID NO: 82682 - DNA, 33 bp, Homo sapien
gtcttgtctcctgctgtcaaaaggaagcctttt

SEQ ID NO: 82683 - DNA, 33 bp, Homo sapien
gcaaatgatttcgggacgagtttcaaattctga

SEQ ID NO: 82684 - DNA, 33 bp, Homo sapien
gcaaatgatttcgggatgagtttcaaattctga

SEQ ID NO: 82685 - DNA, 33 bp, Homo sapien
attattttcatcagcaaagctaaagtgtgtttg

SEQ ID NO: 82686 - DNA, 33 bp, Homo sapien
attattttcatcagcatagctaaagtgtgtttg

SEQ ID NO: 82687 - DNA, 33 bp, Homo sapien
gctgtaatgaggtcacagattcctttcaagcca

SEQ ID NO: 82688 - DNA, 33 bp, Homo sapien
gctgtaatgaggtcaccgattcctttcaagcca

SEQ ID NO: 82689 - DNA, 33 bp, Homo sapien
attttgagttgattgtaaaggtttgtattattt

SEQ ID NO: 82690 - DNA, 33 bp, Homo sapien
attttgagttgattgttaaggtttgtattattt

SEQ ID NO: 82691 - DNA, 33 bp, Homo sapien
ttagagttcatttaaaattatgagtggctgttt

SEQ ID NO: 82692 - DNA, 33 bp, Homo sapien
ttagagttcatttaaatttatgagtggctgttt

SEQ ID NO: 82693 - DNA, 33 bp, Homo sapien
aggtttgtatcgatcacctaattctttatgaat

SEQ ID NO: 82694 - DNA, 33 bp, Homo sapien
aggtttgtatcgatcatctaattctttatgaat

SEQ ID NO: 82695 - DNA, 33 bp, Homo sapien
cataggacagctatcactatttccatcttaatg

SEQ ID NO: 82696 - DNA, 33 bp, Homo sapien
cataggacagctatcattatttccatcttaatg

SEQ ID NO: 82697 - DNA, 33 bp, Homo sapien
gtatacaggtgccatccctccacatgaccagga

SEQ ID NO: 82698 - DNA, 33 bp, Homo sapien
gtatacaggtgccatctctccacatgaccagga

SEQ ID NO: 82699 - DNA, 33 bp, Homo sapien
aatattattaaaatcacggtgagaaaaacttag

SEQ ID NO: 82700 - DNA, 33 bp, Homo sapien
aatattattaaaatcatggtgagaaaaacttag

SEQ ID NO: 82701 - DNA, 33 bp, Homo sapien
agttagctcataattcagaacattgaggtttgc

SEQ ID NO: 82702 - DNA, 33 bp, Homo sapien
agttagctcataattcggaacattgaggtttgc

SEQ ID NO: 82703 - DNA, 33 bp, Homo sapien
atgatgttaatacggcagatttctttcatatca

SEQ ID NO: 82704 - DNA, 33 bp, Homo sapien
atgatgttaatacggcggatttctttcatatca

SEQ ID NO: 82705 - DNA, 33 bp, Homo sapien
aagaatgctcaggggaagtttcttcttggaagg

SEQ ID NO: 82706 - DNA, 33 bp, Homo sapien
aagaatgctcaggggacgtttcttcttggaagg

SEQ ID NO: 82707 - DNA, 33 bp, Homo sapien
atcttgtgccactctccataaactgacatggca

SEQ ID NO: 82708 - DNA, 33 bp, Homo sapien
atcttgtgccactctctataaactgacatggca

SEQ ID NO: 82709 - DNA, 33 bp, Homo sapien
gtcacaactcctataggcaatgatattaagact

SEQ ID NO: 82710 - DNA, 33 bp, Homo sapien
gtcacaactcctatagtcaatgatattaagact

SEQ ID NO: 82711 - DNA, 33 bp, Homo sapien
ggaatgttgtgaagtaagtgtttgttaagagtg

SEQ ID NO: 82712 - DNA, 33 bp, Homo sapien
ggaatgttgtgaagtatgtgtttgttaagagtg

SEQ ID NO: 82713 - DNA, 33 bp, Homo sapien
ttctggcattgcactgacagcattgtgttgtta

SEQ ID NO: 82714 - DNA, 33 bp, Homo sapien
ttctggcattgcactggcagcattgtgttgtta

SEQ ID NO: 82715 - DNA, 33 bp, Homo sapien
gaagatggtgaatactaaggtttcccacccact

SEQ ID NO: 82716 - DNA, 33 bp, Homo sapien
gaagatggtgaatactgaggtttcccacccact

SEQ ID NO: 82717 - DNA, 33 bp, Homo sapien
caagagatgagtagaaactggaactatacgatg

SEQ ID NO: 82718 - DNA, 33 bp, Homo sapien
caagagatgagtagaagctggaactatacgatg

SEQ ID NO: 82719 - DNA, 33 bp, Homo sapien
aattttgccattaaaacggaagtcactggctgg

SEQ ID NO: 82720 - DNA, 33 bp, Homo sapien
aattttgccattaaaatggaagtcactggctgg

SEQ ID NO: 82721 - DNA, 33 bp, Homo sapien
catcacctctcagtgacgctttccctgaaattc

SEQ ID NO: 82722 - DNA, 33 bp, Homo sapien
catcacctctcagtgaggctttccctgaaattc

SEQ ID NO: 82723 - DNA, 33 bp, Homo sapien
agctagccagttaatacgaaggtcaagttatct

SEQ ID NO: 82724 - DNA, 33 bp, Homo sapien
agctagccagttaatatgaaggtcaagttatct

SEQ ID NO: 82725 - DNA, 33 bp, Homo sapien
tctacaatcaaacggaaatgagctctgtcacac

SEQ ID NO: 82726 - DNA, 33 bp, Homo sapien
tctacaatcaaacggagatgagctctgtcacac

SEQ ID NO: 82727 - DNA, 33 bp, Homo sapien
acacagttaaaaagcaagcctagaaaagactga

SEQ ID NO: 82728 - DNA, 33 bp, Homo sapien
acacagttaaaaagcaggcctagaaaagactga

SEQ ID NO: 82729 - DNA, 33 bp, Homo sapien
agacatctgtccggtgcaactgatcaatgtgag

SEQ ID NO: 82730 - DNA, 33 bp, Homo sapien
agacatctgtccggtgtaactgatcaatgtgag

SEQ ID NO: 82731 - DNA, 33 bp, Homo sapien
tatattcccagtgcccaaatgtgaaaaataatt

SEQ ID NO: 82732 - DNA, 33 bp, Homo sapien
tatattcccagtgcccgaatgtgaaaaataatt

SEQ ID NO: 82733 - DNA, 33 bp, Homo sapien
ctacttatttccttacacacaaaaaatggcttt

SEQ ID NO: 82734 - DNA, 33 bp, Homo sapien
ctacttatttccttacgcacaaaaaatggcttt

SEQ ID NO: 82735 - DNA, 33 bp, Homo sapien
agacagatatcctgtgaacttcgtttgtatttt

SEQ ID NO: 82736 - DNA, 33 bp, Homo sapien
agacagatatcctgtggacttcgtttgtatttt

SEQ ID NO: 82737 - DNA, 33 bp, Homo sapien
gaattattgagaatgacaattggatgaaatgaa

SEQ ID NO: 82738 - DNA, 33 bp, Homo sapien
gaattattgagaatgataattggatgaaatgaa

SEQ ID NO: 82739 - DNA, 33 bp, Homo sapien
agtgtgcgtaaaattgaaaagtccagaggaata

SEQ ID NO: 82740 - DNA, 33 bp, Homo sapien
agtgtgcgtaaaattggaaagtccagaggaata

SEQ ID NO: 82741 - DNA, 33 bp, Homo sapien
tctcctctctcgattaggatttagtaatttgaa

SEQ ID NO: 82742 - DNA, 33 bp, Homo sapien
tctcctctctcgattatgatttagtaatttgaa

SEQ ID NO: 82743 - DNA, 33 bp, Homo sapien
gtaattctgtaccttaaatgcttctgatgatca

SEQ ID NO: 82744 - DNA, 33 bp, Homo sapien
gtaattctgtaccttagatgcttctgatgatca

SEQ ID NO: 82745 - DNA, 33 bp, Homo sapien
taaaatgtgttcaaataaagttataggacctta

SEQ ID NO: 82746 - DNA, 33 bp, Homo sapien
taaaatgtgttcaaatgaagttataggacctta

SEQ ID NO: 82747 - DNA, 33 bp, Homo sapien
aaattggtaaagttcaaagtacctggttcttgc

SEQ ID NO: 82748 - DNA, 33 bp, Homo sapien
aaattggtaaagttcagagtacctggttcttgc

SEQ ID NO: 82749 - DNA, 33 bp, Homo sapien
atcttgagaaaaacaaactttaaggatcgtcaa

SEQ ID NO: 82750 - DNA, 33 bp, Homo sapien
atcttgagaaaaacaacctttaaggatcgtcaa

SEQ ID NO: 82751 - DNA, 33 bp, Homo sapien
gtaagcctctgactaacgtaactcttaagtttt

SEQ ID NO: 82752 - DNA, 33 bp, Homo sapien
gtaagcctctgactaatgtaactcttaagtttt

SEQ ID NO: 82753 - DNA, 33 bp, Homo sapien
aacatttctgaaaatcaccatctgtaagaataa

SEQ ID NO: 82754 - DNA, 33 bp, Homo sapien
aacatttctgaaaatcgccatctgtaagaataa

SEQ ID NO: 82755 - DNA, 33 bp, Homo sapien
agttttttctggaatgcagaacagcaagggcac

SEQ ID NO: 82756 - DNA, 33 bp, Homo sapien
agttttttctggaatgtagaacagcaagggcac

SEQ ID NO: 82757 - DNA, 33 bp, Homo sapien
ttgcttatctttctctcacactgacaaaaagag

SEQ ID NO: 82758 - DNA, 33 bp, Homo sapien
ttgcttatctttctcttacactgacaaaaagag

SEQ ID NO: 82759 - DNA, 33 bp, Homo sapien
tacctgttcatatcataagtaattctaaagctc

SEQ ID NO: 82760 - DNA, 33 bp, Homo sapien
tacctgttcatatcatgagtaattctaaagctc

SEQ ID NO: 82761 - DNA, 33 bp, Homo sapien
gtttaagattctcaacagttccatcagtctgtt

SEQ ID NO: 82762 - DNA, 33 bp, Homo sapien
gtttaagattctcaaccgttccatcagtctgtt

SEQ ID NO: 82763 - DNA, 33 bp, Homo sapien
tttactgaaagaccatcacacttttgcctcagt

SEQ ID NO: 82764 - DNA, 33 bp, Homo sapien
tttactgaaagaccatgacacttttgcctcagt

SEQ ID NO: 82765 - DNA, 33 bp, Homo sapien
ttgaataatagcaatacggtatgtgttagagga

SEQ ID NO: 82766 - DNA, 33 bp, Homo sapien
ttgaataatagcaatatggtatgtgttagagga

SEQ ID NO: 82767 - DNA, 33 bp, Homo sapien
tcctaggtgtgaacatcaagcaagttatttaac

SEQ ID NO: 82768 - DNA, 33 bp, Homo sapien
tcctaggtgtgaacattaagcaagttatttaac

SEQ ID NO: 82769 - DNA, 33 bp, Homo sapien
cctatcatctcgtagaactgggcttctcaaagc

SEQ ID NO: 82770 - DNA, 33 bp, Homo sapien
cctatcatctcgtagacctgggcttctcaaagc

SEQ ID NO: 82771 - DNA, 33 bp, Homo sapien
cataataaggctgttaaatcactgcaaacttta

SEQ ID NO: 82772 - DNA, 33 bp, Homo sapien
cataataaggctgttacatcactgcaaacttta

SEQ ID NO: 82773 - DNA, 33 bp, Homo sapien
gaactgattgtcagcccaacccaaagagagaga

SEQ ID NO: 82774 - DNA, 33 bp, Homo sapien
gaactgattgtcagcctaacccaaagagagaga

SEQ ID NO: 82775 - DNA, 33 bp, Homo sapien
cctcctgtcactaaaactcagagggtgaggccc

SEQ ID NO: 82776 - DNA, 33 bp, Homo sapien
cctcctgtcactaaaattcagagggtgaggccc

SEQ ID NO: 82777 - DNA, 33 bp, Homo sapien
ctgcccatttttggaccgtactccggacctcct

SEQ ID NO: 82778 - DNA, 33 bp, Homo sapien
ctgcccatttttggactgtactccggacctcct

SEQ ID NO: 82779 - DNA, 33 bp, Homo sapien
taaacaccacaataaccatcaagaccacgactt

SEQ ID NO: 82780 - DNA, 33 bp, Homo sapien
taaacaccacaataactatcaagaccacgactt

SEQ ID NO: 82781 - DNA, 33 bp, Homo sapien
ctatttgcataggggtaaatttctggtagcccc

SEQ ID NO: 82782 - DNA, 33 bp, Homo sapien
ctatttgcataggggtcaatttctggtagcccc

SEQ ID NO: 82783 - DNA, 33 bp, Homo sapien
tttgcaatcaggtgtacatggttctaaattgtc

SEQ ID NO: 82784 - DNA, 33 bp, Homo sapien
tttgcaatcaggtgtatatggttctaaattgtc

SEQ ID NO: 82785 - DNA, 33 bp, Homo sapien
aaccaaagccgtctgacccaagattttacaccc

SEQ ID NO: 82786 - DNA, 33 bp, Homo sapien
aaccaaagccgtctgatccaagattttacaccc

SEQ ID NO: 82787 - DNA, 33 bp, Homo sapien
gcaacagcagagtgtaaggcaagattccaagcc

SEQ ID NO: 82788 - DNA, 33 bp, Homo sapien
gcaacagcagagtgtagggcaagattccaagcc

SEQ ID NO: 82789 - DNA, 33 bp, Homo sapien
tcctgtctcaaagaggcaatatagtgtgaattg

SEQ ID NO: 82790 - DNA, 33 bp, Homo sapien
tcctgtctcaaagaggtaatatagtgtgaattg

SEQ ID NO: 82791 - DNA, 33 bp, Homo sapien
ttgaattattctttcaatctatgtagcctccta

SEQ ID NO: 82792 - DNA, 33 bp, Homo sapien
ttgaattattctttcactctatgtagcctccta

SEQ ID NO: 82793 - DNA, 33 bp, Homo sapien
aattctctccattctccgaatcaaagcctctct

SEQ ID NO: 82794 - DNA, 33 bp, Homo sapien
aattctctccattctctgaatcaaagcctctct

SEQ ID NO: 82795 - DNA, 33 bp, Homo sapien
tccgagacctctgtcaataaatgcacgacatga

SEQ ID NO: 82796 - DNA, 33 bp, Homo sapien
tccgagacctctgtcactaaatgcacgacatga

SEQ ID NO: 82797 - DNA, 33 bp, Homo sapien
tgtgataatacagaaacaggaaaatctgcaagt

SEQ ID NO: 82798 - DNA, 33 bp, Homo sapien
tgtgataatacagaaagaggaaaatctgcaagt

SEQ ID NO: 82799 - DNA, 33 bp, Homo sapien
gaacaagtaggcaaaaccagtatggatgtgaaa

SEQ ID NO: 82800 - DNA, 33 bp, Homo sapien
gaacaagtaggcaaaatcagtatggatgtgaaa

SEQ ID NO: 82801 - DNA, 33 bp, Homo sapien
tattggtcacttattaagattttttgtttctgt

SEQ ID NO: 82802 - DNA, 33 bp, Homo sapien
tattggtcacttattatgattttttgtttctgt

SEQ ID NO: 82803 - DNA, 33 bp, Homo sapien
gggcagtcctggcaacactctatcctggctatt

SEQ ID NO: 82804 - DNA, 33 bp, Homo sapien
gggcagtcctggcaacgctctatcctggctatt

SEQ ID NO: 82805 - DNA, 33 bp, Homo sapien
aaatgtacaattccataagtcttgaaatatatt

SEQ ID NO: 82806 - DNA, 33 bp, Homo sapien
aaatgtacaattccatgagtcttgaaatatatt

SEQ ID NO: 82807 - DNA, 33 bp, Homo sapien
tgaaggctctaacagacggtctttgccttattc

SEQ ID NO: 82808 - DNA, 33 bp, Homo sapien
tgaaggctctaacagatggtctttgccttattc

SEQ ID NO: 82809 - DNA, 33 bp, Homo sapien
tttctctggaacttagacctgtctgcatgagag

SEQ ID NO: 82810 - DNA, 33 bp, Homo sapien
tttctctggaacttagtcctgtctgcatgagag

SEQ ID NO: 82811 - DNA, 33 bp, Homo sapien
agagagctctcatttaaaaagctgctgcattcg

SEQ ID NO: 82812 - DNA, 33 bp, Homo sapien
agagagctctcatttagaaagctgctgcattcg

SEQ ID NO: 82813 - DNA, 33 bp, Homo sapien
gacaaatgacagctcaataatgtgttcaggaga

SEQ ID NO: 82814 - DNA, 33 bp, Homo sapien
gacaaatgacagctcagtaatgtgttcaggaga

SEQ ID NO: 82815 - DNA, 33 bp, Homo sapien
cagctctgtcctggaaaatataactgccttgtc

SEQ ID NO: 82816 - DNA, 33 bp, Homo sapien
cagctctgtcctggaagatataactgccttgtc

SEQ ID NO: 82817 - DNA, 33 bp, Homo sapien
ttcaatatgcaactaaaatggactaaaatggat

SEQ ID NO: 82818 - DNA, 33 bp, Homo sapien
ttcaatatgcaactaagatggactaaaatggat

SEQ ID NO: 82819 - DNA, 33 bp, Homo sapien
cctcctaatcatttcacggtattcattacaccg

SEQ ID NO: 82820 - DNA, 33 bp, Homo sapien
cctcctaatcatttcagggtattcattacaccg

SEQ ID NO: 82821 - DNA, 33 bp, Homo sapien
tgctataagcacctaacgaaacattgcattatt

SEQ ID NO: 82822 - DNA, 33 bp, Homo sapien
tgctataagcacctaatgaaacattgcattatt

SEQ ID NO: 82823 - DNA, 33 bp, Homo sapien
tttttatgtctggtggccaatctcaatcaaagg

SEQ ID NO: 82824 - DNA, 33 bp, Homo sapien
tttttatgtctggtggtcaatctcaatcaaagg

SEQ ID NO: 82825 - DNA, 33 bp, Homo sapien
aacacagagtaggccaatgaaggaggccaatgt

SEQ ID NO: 82826 - DNA, 33 bp, Homo sapien
aacacagagtaggccagtgaaggaggccaatgt

SEQ ID NO: 82827 - DNA, 33 bp, Homo sapien
ctctgacagaaggacaagattcattataccatg

SEQ ID NO: 82828 - DNA, 33 bp, Homo sapien
ctctgacagaaggacaggattcattataccatg

SEQ ID NO: 82829 - DNA, 33 bp, Homo sapien
tagcagcaccttgcgccagaagaagctctcagt

SEQ ID NO: 82830 - DNA, 33 bp, Homo sapien
tagcagcaccttgcgctagaagaagctctcagt

SEQ ID NO: 82831 - DNA, 33 bp, Homo sapien
agaaatgtccacaggaggattttatgggcctgg

SEQ ID NO: 82832 - DNA, 33 bp, Homo sapien
agaaatgtccacaggatgattttatgggcctgg

SEQ ID NO: 82833 - DNA, 33 bp, Homo sapien
atattactggaggtcaaaataaaactggtagtc

SEQ ID NO: 82834 - DNA, 33 bp, Homo sapien
atattactggaggtcataataaaactggtagtc

SEQ ID NO: 82835 - DNA, 33 bp, Homo sapien
cagaggctctggactcacagaagacaggtaaat

SEQ ID NO: 82836 - DNA, 33 bp, Homo sapien
cagaggctctggactcgcagaagacaggtaaat

SEQ ID NO: 82837 - DNA, 33 bp, Homo sapien
ctcagtttcctgggtaagttagtctgtaaattt

SEQ ID NO: 82838 - DNA, 33 bp, Homo sapien
ctcagtttcctgggtatgttagtctgtaaattt

SEQ ID NO: 82839 - DNA, 33 bp, Homo sapien
tggagcccttcaaggcagcaatgtcgtctcagg

SEQ ID NO: 82840 - DNA, 33 bp, Homo sapien
tggagcccttcaaggccgcaatgtcgtctcagg

SEQ ID NO: 82841 - DNA, 33 bp, Homo sapien
cagacaggatattctccaaattctcctcctaaa

SEQ ID NO: 82842 - DNA, 33 bp, Homo sapien
cagacaggatattctctaaattctcctcctaaa

SEQ ID NO: 82843 - DNA, 33 bp, Homo sapien
aagaaccacccagtagaacacaagggagaccaa

SEQ ID NO: 82844 - DNA, 33 bp, Homo sapien
aagaaccacccagtaggacacaagggagaccaa

SEQ ID NO: 82845 - DNA, 33 bp, Homo sapien
gcaagagaagtcaaagaagggggtgattctggg

SEQ ID NO: 82846 - DNA, 33 bp, Homo sapien
gcaagagaagtcaaagcagggggtgattctggg

SEQ ID NO: 82847 - DNA, 33 bp, Homo sapien
atgaatcttttggtaacaggggtcttcctcata

SEQ ID NO: 82848 - DNA, 33 bp, Homo sapien
atgaatcttttggtaataggggtcttcctcata

SEQ ID NO: 82849 - DNA, 33 bp, Homo sapien
caattgaagctctgtaaatgaacgaagtggaat

SEQ ID NO: 82850 - DNA, 33 bp, Homo sapien
caattgaagctctgtagatgaacgaagtggaat

SEQ ID NO: 82851 - DNA, 33 bp, Homo sapien
tcaccaagaaaagagaagccgtggtaggtgaag

SEQ ID NO: 82852 - DNA, 33 bp, Homo sapien
tcaccaagaaaagagaggccgtggtaggtgaag

SEQ ID NO: 82853 - DNA, 33 bp, Homo sapien
accatcccctgtggaactgttagctctcagcat

SEQ ID NO: 82854 - DNA, 33 bp, Homo sapien
accatcccctgtggaagtgttagctctcagcat

SEQ ID NO: 82855 - DNA, 33 bp, Homo sapien
ctggatggatcattacgccagtgatttctatca

SEQ ID NO: 82856 - DNA, 33 bp, Homo sapien
ctggatggatcattactccagtgatttctatca

SEQ ID NO: 82857 - DNA, 33 bp, Homo sapien
gtgggctggtatcacacgtaggtaatggacaaa

SEQ ID NO: 82858 - DNA, 33 bp, Homo sapien
gtgggctggtatcacatgtaggtaatggacaaa

SEQ ID NO: 82859 - DNA, 33 bp, Homo sapien
tcatcagcgcttgtgacggttaaatgtttgttt

SEQ ID NO: 82860 - DNA, 33 bp, Homo sapien
tcatcagcgcttgtgatggttaaatgtttgttt

SEQ ID NO: 82861 - DNA, 33 bp, Homo sapien
caagatactagtcatgcacattttataactgaa

SEQ ID NO: 82862 - DNA, 33 bp, Homo sapien
caagatactagtcatggacattttataactgaa

SEQ ID NO: 82863 - DNA, 33 bp, Homo sapien
gacaacacagagaaagaaaaggagaacagagga

SEQ ID NO: 82864 - DNA, 33 bp, Homo sapien
gacaacacagagaaaggaaaggagaacagagga

SEQ ID NO: 82865 - DNA, 33 bp, Homo sapien
gctggagattaactcacacctcaaggttcagtt

SEQ ID NO: 82866 - DNA, 33 bp, Homo sapien
gctggagattaactcagacctcaaggttcagtt

SEQ ID NO: 82867 - DNA, 33 bp, Homo sapien
ttatcctgcttggtggaataagaaaagttggca

SEQ ID NO: 82868 - DNA, 33 bp, Homo sapien
ttatcctgcttggtgggataagaaaagttggca

SEQ ID NO: 82869 - DNA, 33 bp, Homo sapien
aattctgatacaaacaacaaagaatcatttcaa

SEQ ID NO: 82870 - DNA, 33 bp, Homo sapien
aattctgatacaaacagcaaagaatcatttcaa

SEQ ID NO: 82871 - DNA, 33 bp, Homo sapien
gaatttaaggtaaagcgaactctgctttttagg

SEQ ID NO: 82872 - DNA, 33 bp, Homo sapien
gaatttaaggtaaagctaactctgctttttagg

SEQ ID NO: 82873 - DNA, 33 bp, Homo sapien
taagccactcttcatactaattggcaaagcatg

SEQ ID NO: 82874 - DNA, 33 bp, Homo sapien
taagccactcttcatattaattggcaaagcatg

SEQ ID NO: 82875 - DNA, 33 bp, Homo sapien
tcaatgggaacatcaactagagaacactgatta

SEQ ID NO: 82876 - DNA, 33 bp, Homo sapien
tcaatgggaacatcaattagagaacactgatta

SEQ ID NO: 82877 - DNA, 33 bp, Homo sapien
gtgaagctcctaagaaatggccagagtagaaag

SEQ ID NO: 82878 - DNA, 33 bp, Homo sapien
gtgaagctcctaagaagtggccagagtagaaag

SEQ ID NO: 82879 - DNA, 33 bp, Homo sapien
attcctttatagcaacccagaacgaactaacat

SEQ ID NO: 82880 - DNA, 33 bp, Homo sapien
attcctttatagcaactcagaacgaactaacat

SEQ ID NO: 82881 - DNA, 33 bp, Homo sapien
acaccacgtcctgcccaatgtttctaatattaa

SEQ ID NO: 82882 - DNA, 33 bp, Homo sapien
acaccacgtcctgcccgatgtttctaatattaa

SEQ ID NO: 82883 - DNA, 33 bp, Homo sapien
gctccaacaatttcacccatgttttgctacatt

SEQ ID NO: 82884 - DNA, 33 bp, Homo sapien
gctccaacaatttcactcatgttttgctacatt

SEQ ID NO: 82885 - DNA, 33 bp, Homo sapien
tcatgtacagcaattcgcttttcttccttgaaa

SEQ ID NO: 82886 - DNA, 33 bp, Homo sapien
tcatgtacagcaattctcttttcttccttgaaa

SEQ ID NO: 82887 - DNA, 33 bp, Homo sapien
tgcattgatacggttaaacttctaggaccctta

SEQ ID NO: 82888 - DNA, 33 bp, Homo sapien
tgcattgatacggttacacttctaggaccctta

SEQ ID NO: 82889 - DNA, 33 bp, Homo sapien
gtagtgttggcaattgaatgtggaaataaacaa

SEQ ID NO: 82890 - DNA, 33 bp, Homo sapien
gtagtgttggcaattgtatgtggaaataaacaa

SEQ ID NO: 82891 - DNA, 33 bp, Homo sapien
cagagcaattacaaaccatcagacgagaatgtc

SEQ ID NO: 82892 - DNA, 33 bp, Homo sapien
cagagcaattacaaactatcagacgagaatgtc

SEQ ID NO: 82893 - DNA, 33 bp, Homo sapien
ctaaaatcaaggggtcaacaagactgtgttctt

SEQ ID NO: 82894 - DNA, 33 bp, Homo sapien
ctaaaatcaaggggtcgacaagactgtgttctt

SEQ ID NO: 82895 - DNA, 33 bp, Homo sapien
tcagaaagtaatggagacatcttacagaggagt

SEQ ID NO: 82896 - DNA, 33 bp, Homo sapien
tcagaaagtaatggagtcatcttacagaggagt

SEQ ID NO: 82897 - DNA, 33 bp, Homo sapien
gcctggtttagaggcagtaatttcctaatgaga

SEQ ID NO: 82898 - DNA, 33 bp, Homo sapien
gcctggtttagaggcattaatttcctaatgaga

SEQ ID NO: 82899 - DNA, 33 bp, Homo sapien
ctaattaaatccttgcaatgatcttataaagta

SEQ ID NO: 82900 - DNA, 33 bp, Homo sapien
ctaattaaatccttgcgatgatcttataaagta

SEQ ID NO: 82901 - DNA, 33 bp, Homo sapien
tgtgaaagtaggatgacagattctaatgcataa

SEQ ID NO: 82902 - DNA, 33 bp, Homo sapien
tgtgaaagtaggatgatagattctaatgcataa

SEQ ID NO: 82903 - DNA, 33 bp, Homo sapien
accgagctgttgagcacctaaggaaaaaaaatg

SEQ ID NO: 82904 - DNA, 33 bp, Homo sapien
accgagctgttgagcagctaaggaaaaaaaatg

SEQ ID NO: 82905 - DNA, 33 bp, Homo sapien
gaaaaggaggtttggcaaatgtacttaatacgc

SEQ ID NO: 82906 - DNA, 33 bp, Homo sapien
gaaaaggaggtttggcgaatgtacttaatacgc

SEQ ID NO: 82907 - DNA, 33 bp, Homo sapien
acatccaatcaaatggcaagtcctgtcggttct

SEQ ID NO: 82908 - DNA, 33 bp, Homo sapien
acatccaatcaaatggtaagtcctgtcggttct

SEQ ID NO: 82909 - DNA, 33 bp, Homo sapien
ggagggctagattagaaggtcgcggtatgaggg

SEQ ID NO: 82910 - DNA, 33 bp, Homo sapien
ggagggctagattagagggtcgcggtatgaggg

SEQ ID NO: 82911 - DNA, 33 bp, Homo sapien
ggcatctaactctgaagagcatcctatgagaaa

SEQ ID NO: 82912 - DNA, 33 bp, Homo sapien
ggcatctaactctgaatagcatcctatgagaaa

SEQ ID NO: 82913 - DNA, 33 bp, Homo sapien
aggagctggatgatgcaaagaaggtccagcagg

SEQ ID NO: 82914 - DNA, 33 bp, Homo sapien
aggagctggatgatgcgaagaaggtccagcagg

SEQ ID NO: 82915 - DNA, 33 bp, Homo sapien
gggccatgttctcatacatttccttcagtttgc

SEQ ID NO: 82916 - DNA, 33 bp, Homo sapien
gggccatgttctcatagatttccttcagtttgc

SEQ ID NO: 82917 - DNA, 33 bp, Homo sapien; identical to SEQ ID NO: 82915

SEQ ID NO: 82918 - DNA, 33 bp, Homo sapien; identical to SEQ ID NO: 82916

SEQ ID NO: 82919 - DNA, 33 bp, Homo sapien
atagtgtggacgcagaaatttgagagacttggt

SEQ ID NO: 82920 - DNA, 33 bp, Homo sapien
atagtgtggacgcagacatttgagagacttggt

SEQ ID NO: 82921 - DNA, 33 bp, Homo sapien
ttggtcaccaaagtcacggaagttgtagaagaa

SEQ ID NO: 82922 - DNA, 33 bp, Homo sapien
ttggtcaccaaagtcatggaagttgtagaagaa

SEQ ID NO: 82923 - DNA, 33 bp, Homo sapien
ttgtccacattctgcaagttcaatgttttacaa

SEQ ID NO: 82924 - DNA, 33 bp, Homo sapien
ttgtccacattctgcaggttcaatgttttacaa

SEQ ID NO: 82925 - DNA, 33 bp, Homo sapien
cattctaagcaccaacaagtcaccctagtctat

SEQ ID NO: 82926 - DNA, 33 bp, Homo sapien
cattctaagcaccaacgagtcaccctagtctat

SEQ ID NO: 82927 - DNA, 33 bp, Homo sapien
tggactttttaatgcacgtcactgttctaaatt

SEQ ID NO: 82928 - DNA, 33 bp, Homo sapien
tggactttttaatgcatgtcactgttctaaatt

SEQ ID NO: 82929 - DNA, 33 bp, Homo sapien
cactgttctaaattaaaccctgctatcagcact

SEQ ID NO: 82930 - DNA, 33 bp, Homo sapien
cactgttctaaattaatccctgctatcagcact

SEQ ID NO: 82931 - DNA, 33 bp, Homo sapien
attaaaacaagatttagagtctctttcatgatt

SEQ ID NO: 82932 - DNA, 33 bp, Homo sapien
attaaaacaagatttatagtctctttcatgatt

SEQ ID NO: 82933 - DNA, 33 bp, Homo sapien
gggattttttctctccaacagctgagttagagc

SEQ ID NO: 82934 - DNA, 33 bp, Homo sapien
gggattttttctctccgacagctgagttagagc

SEQ ID NO: 82935 - DNA, 33 bp, Homo sapien
aatgtaagtagattgaatacaacatcagagaac

SEQ ID NO: 82936 - DNA, 33 bp, Homo sapien
aatgtaagtagattgagtacaacatcagagaac

SEQ ID NO: 82937 - DNA, 33 bp, Homo sapien
gagctatcattggagaacctgaaggaattcaat

SEQ ID NO: 82938 - DNA, 33 bp, Homo sapien
gagctatcattggagagcctgaaggaattcaat

SEQ ID NO: 82939 - DNA, 33 bp, Homo sapien
gtcctttctgatccaacgctgaggctaacccca

SEQ ID NO: 82940 - DNA, 33 bp, Homo sapien
gtcctttctgatccaatgctgaggctaacccca

SEQ ID NO: 82941 - DNA, 33 bp, Homo sapien
agacctcgccagctacagaccaacagaatctgg

SEQ ID NO: 82942 - DNA, 33 bp, Homo sapien
agacctcgccagctacggaccaacagaatctgg

SEQ ID NO: 82943 - DNA, 33 bp, Homo sapien
gaggatctggtagaaacatggtagctgacttcc

SEQ ID NO: 82944 - DNA, 33 bp, Homo sapien
gaggatctggtagaaatatggtagctgacttcc

SEQ ID NO: 82945 - DNA, 33 bp, Homo sapien
acttgagctcgggtgacgaaggctacagtgagc

SEQ ID NO: 82946 - DNA, 33 bp, Homo sapien
acttgagctcgggtgatgaaggctacagtgagc

SEQ ID NO: 82947 - DNA, 33 bp, Homo sapien
ggcttgcagattttggaaagaagagtgagtgca

SEQ ID NO: 82948 - DNA, 33 bp, Homo sapien
ggcttgcagattttgggaagaagagtgagtgca

SEQ ID NO: 82949 - DNA, 33 bp, Homo sapien
tctgattcatggagcacgaggaattccttgaag

SEQ ID NO: 82950 - DNA, 33 bp, Homo sapien
tctgattcatggagcatgaggaattccttgaag

SEQ ID NO: 82951 - DNA, 33 bp, Homo sapien
ttagaaactagcaatcaagacaaataaggatag

SEQ ID NO: 82952 - DNA, 33 bp, Homo sapien
ttagaaactagcaatcgagacaaataaggatag

SEQ ID NO: 82953 - DNA, 33 bp, Homo sapien
tattgctgatctctgagaactcatcaaataaag

SEQ ID NO: 82954 - DNA, 33 bp, Homo sapien
tattgctgatctctgataactcatcaaataaag

SEQ ID NO: 82955 - DNA, 33 bp, Homo sapien
tcatatggtgctttcacggccaatcacaaacac

SEQ ID NO: 82956 - DNA, 33 bp, Homo sapien
tcatatggtgctttcatggccaatcacaaacac

SEQ ID NO: 82957 - DNA, 33 bp, Homo sapien
aaaactcatggctcccaactactgagcataaaa

SEQ ID NO: 82958 - DNA, 33 bp, Homo sapien
aaaactcatggctcccgactactgagcataaaa

SEQ ID NO: 82959 - DNA, 33 bp, Homo sapien
ggtttcttcttgtactcactatcatcatacaat

SEQ ID NO: 82960 - DNA, 33 bp, Homo sapien
ggtttcttcttgtacttactatcatcatacaat

SEQ ID NO: 82961 - DNA, 33 bp, Homo sapien
ctggatccaagaaatacctccacaaagtgaaaa

SEQ ID NO: 82962 - DNA, 33 bp, Homo sapien
ctggatccaagaaatatctccacaaagtgaaaa

SEQ ID NO: 82963 - DNA, 33 bp, Homo sapien
gaggatattggcaaagcctcttaccgacaattt

SEQ ID NO: 82964 - DNA, 33 bp, Homo sapien
gaggatattggcaaagtctcttaccgacaattt

SEQ ID NO: 82965 - DNA, 33 bp, Homo sapien
tatgaactgaggctaacggtgcctgtctcacag

SEQ ID NO: 82966 - DNA, 33 bp, Homo sapien
tatgaactgaggctaatggtgcctgtctcacag

SEQ ID NO: 82967 - DNA, 33 bp, Homo sapien
taatattgcagtcatcgctggcagtctgaaagc

SEQ ID NO: 82968 - DNA, 33 bp, Homo sapien
taatattgcagtcatctctggcagtctgaaagc

SEQ ID NO: 82969 - DNA, 33 bp, Homo sapien
aatctagcaaaagaacaaagttggaagcctcct

SEQ ID NO: 82970 - DNA, 33 bp, Homo sapien
aatctagcaaaagaacgaagttggaagcctcct

SEQ ID NO: 82971 - DNA, 33 bp, Homo sapien
atgtccagcttccttgaaagtctacaatcttta

SEQ ID NO: 82972 - DNA, 33 bp, Homo sapien
atgtccagcttccttgcaagtctacaatcttta

SEQ ID NO: 82973 - DNA, 33 bp, Homo sapien
gagatgtaagaatagaaggaaaggcaaagagaa

SEQ ID NO: 82974 - DNA, 33 bp, Homo sapien
gagatgtaagaatagagggaaaggcaaagagaa

SEQ ID NO: 82975 - DNA, 33 bp, Homo sapien
atataccaccttgtgccctaatgtcgtttgaga

SEQ ID NO: 82976 - DNA, 33 bp, Homo sapien
atataccaccttgtgctctaatgtcgtttgaga

SEQ ID NO: 82977 - DNA, 33 bp, Homo sapien
ggtaaagaaagtgagaaaagccttaagtgagat

SEQ ID NO: 82978 - DNA, 33 bp, Homo sapien
ggtaaagaaagtgagataagccttaagtgagat

SEQ ID NO: 82979 - DNA, 33 bp, Homo sapien
caaccacgaaaaccaccctgatcttttttgttg

SEQ ID NO: 82980 - DNA, 33 bp, Homo sapien
caaccacgaaaaccactctgatcttttttgttg

SEQ ID NO: 82981 - DNA, 33 bp, Homo sapien
aatccaaaccttacacactaattactctaatgg

SEQ ID NO: 82982 - DNA, 33 bp, Homo sapien
aatccaaaccttacacgctaattactctaatgg

SEQ ID NO: 82983 - DNA, 33 bp, Homo sapien
gtttccgtaagtttaacgtgtcagactactaaa

SEQ ID NO: 82984 - DNA, 33 bp, Homo sapien
gtttccgtaagtttaatgtgtcagactactaaa

SEQ ID NO: 82985 - DNA, 33 bp, Homo sapien
ttcaggtttatagatgaagtctgcctagttctt

SEQ ID NO: 82986 - DNA, 33 bp, Homo sapien
ttcaggtttatagatggagtctgcctagttctt

SEQ ID NO: 82987 - DNA, 33 bp, Homo sapien
acaacttgttccatagaaaatttcataagaaaa

SEQ ID NO: 82988 - DNA, 33 bp, Homo sapien
acaacttgttccataggaaatttcataagaaaa

SEQ ID NO: 82989 - DNA, 33 bp, Homo sapien
acacaaagaactttcaatcagccaattttgaaa

SEQ ID NO: 82990 - DNA, 33 bp, Homo sapien
acacaaagaactttcagtcagccaattttgaaa

SEQ ID NO: 82991 - DNA, 33 bp, Homo sapien
ctccaattctctcccccctgagtgctctctcca

SEQ ID NO: 82992 - DNA, 33 bp, Homo sapien
ctccaattctctccccgctgagtgctctctcca

SEQ ID NO: 82993 - DNA, 33 bp, Homo sapien
tttttgctgagacaaaatgcatgaacctggtgg

SEQ ID NO: 82994 - DNA, 33 bp, Homo sapien
tttttgctgagacaaagtgcatgaacctggtgg

SEQ ID NO: 82995 - DNA, 33 bp, Homo sapien
ggaagagtgtgagggacaatataatttgaggag

SEQ ID NO: 82996 - DNA, 33 bp, Homo sapien
ggaagagtgtgagggataatataatttgaggag

SEQ ID NO: 82997 - DNA, 33 bp, Homo sapien
ttcaggtctatctaaacccaaaacacaaggtct

SEQ ID NO: 82998 - DNA, 33 bp, Homo sapien
ttcaggtctatctaaatccaaaacacaaggtct

SEQ ID NO: 82999 - DNA, 33 bp, Homo sapien
ttactctcttctgattaaaagctctagtttaaa

SEQ ID NO: 83000 - DNA, 33 bp, Homo sapien
ttactctcttctgattcaaagctctagtttaaa

SEQ ID NO: 83001 - DNA, 33 bp, Homo sapien
gaaaactcatatttcaaaggaaggaagacactt

SEQ ID NO: 83002 - DNA, 33 bp, Homo sapien
gaaaactcatatttcacaggaaggaagacactt

SEQ ID NO: 83003 - DNA, 33 bp, Homo sapien
tggctctaaatgtggacgaactgctgtttctaa

SEQ ID NO: 83004 - DNA, 33 bp, Homo sapien
tggctctaaatgtggatgaactgctgtttctaa

SEQ ID NO: 83005 - DNA, 33 bp, Homo sapien
tagctttgttcaagtcactatctactcagatat

SEQ ID NO: 83006 - DNA, 33 bp, Homo sapien
tagctttgttcaagtctctatctactcagatat

SEQ ID NO: 83007 - DNA, 33 bp, Homo sapien
tgcaattcttgcaacaacctcctaattgaacaa

SEQ ID NO: 83008 - DNA, 33 bp, Homo sapien
tgcaattcttgcaacaccctcctaattgaacaa

SEQ ID NO: 83009 - DNA, 33 bp, Homo sapien
gcaacaggcacttgtccaactgagggtaaagca

SEQ ID NO: 83010 - DNA, 33 bp, Homo sapien
gcaacaggcacttgtctaactgagggtaaagca

SEQ ID NO: 83011 - DNA, 33 bp, Homo sapien
cttaaaatgataaaaccataactttcactgaga

SEQ ID NO: 83012 - DNA, 33 bp, Homo sapien
cttaaaatgataaaactataactttcactgaga

SEQ ID NO: 83013 - DNA, 33 bp, Homo sapien
tgtaaaagatcctcaaagtgacagagtttgaaa

SEQ ID NO: 83014 - DNA, 33 bp, Homo sapien
tgtaaaagatcctcaatgtgacagagtttgaaa

SEQ ID NO: 83015 - DNA, 33 bp, Homo sapien
tgtactaacactgttccatagcttaaaatgttg

SEQ ID NO: 83016 - DNA, 33 bp, Homo sapien
tgtactaacactgttctatagcttaaaatgttg

SEQ ID NO: 83017 - DNA, 33 bp, Homo sapien
gttcatgatgagaatagctattgtgaaattaac

SEQ ID NO: 83018 - DNA, 33 bp, Homo sapien
gttcatgatgagaatatctattgtgaaattaac

SEQ ID NO: 83019 - DNA, 33 bp, Homo sapien
aaacgggagctcagcacggtagaacgtttaggc

SEQ ID NO: 83020 - DNA, 33 bp, Homo sapien
aaacgggagctcagcatggtagaacgtttaggc

SEQ ID NO: 83021 - DNA, 33 bp, Homo sapien
acttacaaatataggaacattaagccatctgat

SEQ ID NO: 83022 - DNA, 33 bp, Homo sapien
acttacaaatataggagcattaagccatctgat

SEQ ID NO: 83023 - DNA, 33 bp, Homo sapien
acaccttctccaatgaaatctgcaccccagtct

SEQ ID NO: 83024 - DNA, 33 bp, Homo sapien
acaccttctccaatgagatctgcaccccagtct

SEQ ID NO: 83025 - DNA, 33 bp, Homo sapien
tacactctgggcttcacgttcactgtagcatcc

SEQ ID NO: 83026 - DNA, 33 bp, Homo sapien
tacactctgggcttcatgttcactgtagcatcc

SEQ ID NO: 83027 - DNA, 33 bp, Homo sapien
cttttctgcagcacaagtggtcagcggtgtggg

SEQ ID NO: 83028 - DNA, 33 bp, Homo sapien
cttttctgcagcacaattggtcagcggtgtggg

SEQ ID NO: 83029 - DNA, 33 bp, Homo sapien
aataacaggaacgacacataagaacaatcccgg

SEQ ID NO: 83030 - DNA, 33 bp, Homo sapien
aataacaggaacgacatataagaacaatcccgg

SEQ ID NO: 83031 - DNA, 33 bp, Homo sapien
gctctctgctctacaacgtcagccttttggatg

SEQ ID NO: 83032 - DNA, 33 bp, Homo sapien
gctctctgctctacaatgtcagccttttggatg

SEQ ID NO: 83033 - DNA, 33 bp, Homo sapien
ctaccactagaacagcactgacaaaaggtgttc

SEQ ID NO: 83034 - DNA, 33 bp, Homo sapien
ctaccactagaacagcgctgacaaaaggtgttc

SEQ ID NO: 83035 - DNA, 33 bp, Homo sapien
aggaagaaaagaatgacaactgaagattcagga

SEQ ID NO: 83036 - DNA, 33 bp, Homo sapien
aggaagaaaagaatgagaactgaagattcagga

SEQ ID NO: 83037 - DNA, 33 bp, Homo sapien
acattttatggtccaccgactcacacactacag

SEQ ID NO: 83038 - DNA, 33 bp, Homo sapien
acattttatggtccactgactcacacactacag

SEQ ID NO: 83039 - DNA, 33 bp, Homo sapien
cactcaggctttgctacgacagagagaggattt

SEQ ID NO: 83040 - DNA, 33 bp, Homo sapien
cactcaggctttgctatgacagagagaggattt

SEQ ID NO: 83041 - DNA, 33 bp, Homo sapien
aaaaaatagaaaagcacggccgatcttccaaag

SEQ ID NO: 83042 - DNA, 33 bp, Homo sapien
aaaaaatagaaaagcatggccgatcttccaaag

SEQ ID NO: 83043 - DNA, 33 bp, Homo sapien
taattccagtttgcgacgaattgagcaaatgct

SEQ ID NO: 83044 - DNA, 33 bp, Homo sapien
taattccagtttgcgatgaattgagcaaatgct

SEQ ID NO: 83045 - DNA, 33 bp, Homo sapien
ttgtcaaatatcagtaataccatttgttctagt

SEQ ID NO: 83046 - DNA, 33 bp, Homo sapien
ttgtcaaatatcagtagtaccatttgttctagt

SEQ ID NO: 83047 - DNA, 33 bp, Homo sapien
aaggcagacttttcaacgtttttagagaaaagt

SEQ ID NO: 83048 - DNA, 33 bp, Homo sapien
aaggcagacttttcaatgtttttagagaaaagt

SEQ ID NO: 83049 - DNA, 33 bp, Homo sapien
agtaaatacatttacccgagcttttgatttgat

SEQ ID NO: 83050 - DNA, 33 bp, Homo sapien
agtaaatacatttacctgagcttttgatttgat

SEQ ID NO: 83051 - DNA, 33 bp, Homo sapien
ctcatatagtaacacaatatcaaatcaaaagct

SEQ ID NO: 83052 - DNA, 33 bp, Homo sapien
ctcatatagtaacacagtatcaaatcaaaagct

SEQ ID NO: 83053 - DNA, 33 bp, Homo sapien
tataacaaggtttagaaaataggataacgtata

SEQ ID NO: 83054 - DNA, 33 bp, Homo sapien
tataacaaggtttagagaataggataacgtata

SEQ ID NO: 83055 - DNA, 33 bp, Homo sapien
ctcatcaacaatgtataagcatttcatttcctc

SEQ ID NO: 83056 - DNA, 33 bp, Homo sapien
ctcatcaacaatgtattagcatttcatttcctc

SEQ ID NO: 83057 - DNA, 33 bp, Homo sapien
tcctttgtatctgttacgtgacttccttcctac

SEQ ID NO: 83058 - DNA, 33 bp, Homo sapien
tcctttgtatctgttatgtgacttccttcctac

SEQ ID NO: 83059 - DNA, 33 bp, Homo sapien
cacgtccctacgaagaacatgaactcatccttt

SEQ ID NO: 83060 - DNA, 33 bp, Homo sapien
cacgtccctacgaagaccatgaactcatccttt

SEQ ID NO: 83061 - DNA, 33 bp, Homo sapien
tagcatgtgatgaggccgaacgtgtattcctgg

SEQ ID NO: 83062 - DNA, 33 bp, Homo sapien
tagcatgtgatgaggctgaacgtgtattcctgg

SEQ ID NO: 83063 - DNA, 33 bp, Homo sapien
ctgtgtccccttcagaaacaaccactatcctga

SEQ ID NO: 83064 - DNA, 33 bp, Homo sapien
ctgtgtccccttcagagacaaccactatcctga

SEQ ID NO: 83065 - DNA, 33 bp, Homo sapien
aggcctcaaatcgtccgacataaccacagagac

SEQ ID NO: 83066 - DNA, 33 bp, Homo sapien
aggcctcaaatcgtcctacataaccacagagac

SEQ ID NO: 83067 - DNA, 33 bp, Homo sapien
aggtttagcgatgtcccgaggaagttctggctt

SEQ ID NO: 83068 - DNA, 33 bp, Homo sapien
aggtttagcgatgtcctgaggaagttctggctt

SEQ ID NO: 83069 - DNA, 33 bp, Homo sapien
agtgtttctggaatctaaatcaagttttttaat

SEQ ID NO: 83070 - DNA, 33 bp, Homo sapien
agtgtttctggaatcttaatcaagttttttaat

SEQ ID NO: 83071 - DNA, 33 bp, Homo sapien
attgtcatcaaatcaccgggctttctgtgctac

SEQ ID NO: 83072 - DNA, 33 bp, Homo sapien
attgtcatcaaatcactgggctttctgtgctac

SEQ ID NO: 83073 - DNA, 33 bp, Homo sapien
aaccttcctgaaaatagtatgcattgtagtgct

SEQ ID NO: 83074 - DNA, 33 bp, Homo sapien
aaccttcctgaaaatattatgcattgtagtgct

SEQ ID NO: 83075 - DNA, 33 bp, Homo sapien
tatagttaacaattgacctgtaagtttatacaa

SEQ ID NO: 83076 - DNA, 33 bp, Homo sapien
tatagttaacaattgatctgtaagtttatacaa

SEQ ID NO: 83077 - DNA, 33 bp, Homo sapien
acttctctcagcttccacattccttcctcttcc

SEQ ID NO: 83078 - DNA, 33 bp, Homo sapien
acttctctcagcttccgcattccttcctcttcc

SEQ ID NO: 83079 - DNA, 33 bp, Homo sapien
tacaatcttccaaactaagcaagcctgtttttg

SEQ ID NO: 83080 - DNA, 33 bp, Homo sapien
tacaatcttccaaactgagcaagcctgtttttg

SEQ ID NO: 83081 - DNA, 33 bp, Homo sapien
attttcatcatgtctaagattagagtcctcaat

SEQ ID NO: 83082 - DNA, 33 bp, Homo sapien
attttcatcatgtctaggattagagtcctcaat

SEQ ID NO: 83083 - DNA, 33 bp, Homo sapien
ctgatgtgcatcggacaagctactccaaagtga

SEQ ID NO: 83084 - DNA, 33 bp, Homo sapien
ctgatgtgcatcggaccagctactccaaagtga

SEQ ID NO: 83085 - DNA, 33 bp, Homo sapien
tagagagaggacatttaaaaagacacatggatc

SEQ ID NO: 83086 - DNA, 33 bp, Homo sapien
tagagagaggacatttgaaaagacacatggatc

SEQ ID NO: 83087 - DNA, 33 bp, Homo sapien
cagggaggaactccaaatgaattgtgtccatct

SEQ ID NO: 83088 - DNA, 33 bp, Homo sapien
cagggaggaactccaactgaattgtgtccatct

SEQ ID NO: 83089 - DNA, 33 bp, Homo sapien
ttgtgaactgctaagccaaccacggtaccacca

SEQ ID NO: 83090 - DNA, 33 bp, Homo sapien
ttgtgaactgctaagctaaccacggtaccacca

SEQ ID NO: 83091 - DNA, 33 bp, Homo sapien
ttcacaaacctgatcccgaagcaagagaagagt

SEQ ID NO: 83092 - DNA, 33 bp, Homo sapien
ttcacaaacctgatcctgaagcaagagaagagt

SEQ ID NO: 83093 - DNA, 33 bp, Homo sapien
aaaacactgctctgaaaggaactgttgatcatg

SEQ ID NO: 83094 - DNA, 33 bp, Homo sapien
aaaacactgctctgaagggaactgttgatcatg

SEQ ID NO: 83095 - DNA, 33 bp, Homo sapien
ttggccaaccattcacgcttttcattcaggcat

SEQ ID NO: 83096 - DNA, 33 bp, Homo sapien
ttggccaaccattcactcttttcattcaggcat

SEQ ID NO: 83097 - DNA, 33 bp, Homo sapien
atacatatcataaaaaattgttgaatgcattac

SEQ ID NO: 83098 - DNA, 33 bp, Homo sapien
atacatatcataaaaagttgttgaatgcattac

SEQ ID NO: 83099 - DNA, 33 bp, Homo sapien
aaacacagacagtaacaagtgttgcagatgatg

SEQ ID NO: 83100 - DNA, 33 bp, Homo sapien
aaacacagacagtaacgagtgttgcagatgatg

SEQ ID NO: 83101 - DNA, 33 bp, Homo sapien
actttttttgagtagacgcgtaggtttgtgcac

SEQ ID NO: 83102 - DNA, 33 bp, Homo sapien
actttttttgagtagatgcgtaggtttgtgcac

SEQ ID NO: 83103 - DNA, 33 bp, Homo sapien
ctctgtagtgatgaaacaggctggtgctttccc

SEQ ID NO: 83104 - DNA, 33 bp, Homo sapien
ctctgtagtgatgaaataggctggtgctttccc

SEQ ID NO: 83105 - DNA, 33 bp, Homo sapien
gtaaacccacttcacgaactctaagtcatgttt

SEQ ID NO: 83106 - DNA, 33 bp, Homo sapien
gtaaacccacttcacggactctaagtcatgttt

SEQ ID NO: 83107 - DNA, 33 bp, Homo sapien
aagtctgaacactttaggtaatcaacctcatct

SEQ ID NO: 83108 - DNA, 33 bp, Homo sapien
aagtctgaacactttatgtaatcaacctcatct

SEQ ID NO: 83109 - DNA, 33 bp, Homo sapien
tccagacagaactttacatagctcagcatcaag

SEQ ID NO: 83110 - DNA, 33 bp, Homo sapien
tccagacagaactttatatagctcagcatcaag

SEQ ID NO: 83111 - DNA, 33 bp, Homo sapien
atattcttaatcactagtagtcatgtgtcattt

SEQ ID NO: 83112 - DNA, 33 bp, Homo sapien
atattcttaatcactattagtcatgtgtcattt

SEQ ID NO: 83113 - DNA, 33 bp, Homo sapien
tatacttacagaaataccattgtgtttaatcaa

SEQ ID NO: 83114 - DNA, 33 bp, Homo sapien
tatacttacagaaatatcattgtgtttaatcaa

SEQ ID NO: 83115 - DNA, 33 bp, Homo sapien
gagagagcagaataagacccagtgaatacatag

SEQ ID NO: 83116 - DNA, 33 bp, Homo sapien
gagagagcagaataaggcccagtgaatacatag

SEQ ID NO: 83117 - DNA, 33 bp, Homo sapien
tgctctctctagaaccacacagataaatccaat

SEQ ID NO: 83118 - DNA, 33 bp, Homo sapien
tgctctctctagaaccgcacagataaatccaat

SEQ ID NO: 83119 - DNA, 33 bp, Homo sapien
actccagaacaatgaacaggacaaagggtttat

SEQ ID NO: 83120 - DNA, 33 bp, Homo sapien
actccagaacaatgaagaggacaaagggtttat

SEQ ID NO: 83121 - DNA, 33 bp, Homo sapien
agaaatgatggctacacgagaggatacctagat

SEQ ID NO: 83122 - DNA, 33 bp, Homo sapien
agaaatgatggctacatgagaggatacctagat

SEQ ID NO: 83123 - DNA, 33 bp, Homo sapien
aagtaactattcctccacattcaatacagttat

SEQ ID NO: 83124 - DNA, 33 bp, Homo sapien
aagtaactattcctccgcattcaatacagttat

SEQ ID NO: 83125 - DNA, 33 bp, Homo sapien
gaaaacaaaaagattacgcaagaggtcaagaag

SEQ ID NO: 83126 - DNA, 33 bp, Homo sapien
gaaaacaaaaagattatgcaagaggtcaagaag

SEQ ID NO: 83127 - DNA, 33 bp, Homo sapien
ttaagtaggaaattcaaatgagcagatttgtat

SEQ ID NO: 83128 - DNA, 33 bp, Homo sapien
ttaagtaggaaattcagatgagcagatttgtat

SEQ ID NO: 83129 - DNA, 33 bp, Homo sapien
ttttttttctgagtaaaacaccttctgggcctg

SEQ ID NO: 83130 - DNA, 33 bp, Homo sapien
ttttttttctgagtaagacaccttctgggcctg

SEQ ID NO: 83131 - DNA, 33 bp, Homo sapien
aggaagtcacaagtaaatgggtcccttgaaatc

SEQ ID NO: 83132 - DNA, 33 bp, Homo sapien
aggaagtcacaagtaagtgggtcccttgaaatc

SEQ ID NO: 83133 - DNA, 33 bp, Homo sapien
gatgtaggaaaggaaaaagagaagagactgact

SEQ ID NO: 83134 - DNA, 33 bp, Homo sapien
gatgtaggaaaggaaagagagaagagactgact

SEQ ID NO: 83135 - DNA, 33 bp, Homo sapien
cagatgatgaggatctaaaccaaagtggtaaca

SEQ ID NO: 83136 - DNA, 33 bp, Homo sapien
cagatgatgaggatctcaaccaaagtggtaaca

SEQ ID NO: 83137 - DNA, 33 bp, Homo sapien
aaatgcctttgattgacgctatgtaggattcgg

SEQ ID NO: 83138 - DNA, 33 bp, Homo sapien
aaatgcctttgattgatgctatgtaggattcgg

SEQ ID NO: 83139 - DNA, 33 bp, Homo sapien
caatggtccataaggcaatgcaatgataaacca

SEQ ID NO: 83140 - DNA, 33 bp, Homo sapien
caatggtccataaggcgatgcaatgataaacca

SEQ ID NO: 83141 - DNA, 33 bp, Homo sapien
attcactttgtctagcaatcaaatgcttgtgaa

SEQ ID NO: 83142 - DNA, 33 bp, Homo sapien
attcactttgtctagcgatcaaatgcttgtgaa

SEQ ID NO: 83143 - DNA, 33 bp, Homo sapien
gtcaccatccattctaccagccaaatcagaaac

SEQ ID NO: 83144 - DNA, 33 bp, Homo sapien
gtcaccatccattctatcagccaaatcagaaac

SEQ ID NO: 83145 - DNA, 33 bp, Homo sapien
aagaaacacagcaggacgagtgggtctggagag

SEQ ID NO: 83146 - DNA, 33 bp, Homo sapien
aagaaacacagcaggatgagtgggtctggagag

SEQ ID NO: 83147 - DNA, 33 bp, Homo sapien
gacattctctttagccaaattctccagtgcctg

SEQ ID NO: 83148 - DNA, 33 bp, Homo sapien
gacattctctttagccgaattctccagtgcctg

SEQ ID NO: 83149 - DNA, 33 bp, Homo sapien
gcttctgatttgagacaaagatactgtaatgtt

SEQ ID NO: 83150 - DNA, 33 bp, Homo sapien
gcttctgatttgagacgaagatactgtaatgtt

SEQ ID NO: 83151 - DNA, 33 bp, Homo sapien
ctgagtgacagtcgaagaggaagagcatatttc

SEQ ID NO: 83152 - DNA, 33 bp, Homo sapien
ctgagtgacagtcgaataggaagagcatatttc

SEQ ID NO: 83153 - DNA, 33 bp, Homo sapien
aaagggatatagaatccgaagacaaaggaaaaa

SEQ ID NO: 83154 - DNA, 33 bp, Homo sapien
aaagggatatagaatctgaagacaaaggaaaaa

SEQ ID NO: 83155 - DNA, 33 bp, Homo sapien
tgacagtctgaagtaaccacaggacttttagta

SEQ ID NO: 83156 - DNA, 33 bp, Homo sapien
tgacagtctgaagtaatcacaggacttttagta

SEQ ID NO: 83157 - DNA, 33 bp, Homo sapien
ccagtgtgaacactcaatactagttaatgcaca

SEQ ID NO: 83158 - DNA, 33 bp, Homo sapien
ccagtgtgaacactcagtactagttaatgcaca

SEQ ID NO: 83159 - DNA, 33 bp, Homo sapien
atcgcttgacccagaacgtgaaggctgcaatga

SEQ ID NO: 83160 - DNA, 33 bp, Homo sapien
atcgcttgacccagaatgtgaaggctgcaatga

SEQ ID NO: 83161 - DNA, 33 bp, Homo sapien
gtccaaatggtgagaaaccaaactgaacaaaga

SEQ ID NO: 83162 - DNA, 33 bp, Homo sapien
gtccaaatggtgagaacccaaactgaacaaaga

SEQ ID NO: 83163 - DNA, 33 bp, Homo sapien
tcgttcacttctctcaggaatttgcagtctcat

SEQ ID NO: 83164 - DNA, 33 bp, Homo sapien
tcgttcacttctctcatgaatttgcagtctcat

SEQ ID NO: 83165 - DNA, 33 bp, Homo sapien
atgaccccagacagaaaccgttggcactccctg

SEQ ID NO: 83166 - DNA, 33 bp, Homo sapien
atgaccccagacagaatccgttggcactccctg

SEQ ID NO: 83167 - DNA, 33 bp, Homo sapien
atggaatagcaccaaaggtacacgatgtcagtg

SEQ ID NO: 83168 - DNA, 33 bp, Homo sapien
atggaatagcaccaaatgtacacgatgtcagtg

SEQ ID NO: 83169 - DNA, 33 bp, Homo sapien
aatgatttctcccccaatctggcacatatcctg

SEQ ID NO: 83170 - DNA, 33 bp, Homo sapien
aatgatttctcccccagtctggcacatatcctg

SEQ ID NO: 83171 - DNA, 33 bp, Homo sapien
tgtcaaattagcactcaaacccaggtttcctca

SEQ ID NO: 83172 - DNA, 33 bp, Homo sapien
tgtcaaattagcactcgaacccaggtttcctca

SEQ ID NO: 83173 - DNA, 33 bp, Homo sapien
ctaaaagcaggtatgaacacttccataattttc

SEQ ID NO: 83174 - DNA, 33 bp, Homo sapien
ctaaaagcaggtatgatcacttccataattttc

SEQ ID NO: 83175 - DNA, 33 bp, Homo sapien
gacttcaacttgaccaatggtatggaaaataca

SEQ ID NO: 83176 - DNA, 33 bp, Homo sapien
gacttcaacttgaccagtggtatggaaaataca

SEQ ID NO: 83177 - DNA, 33 bp, Homo sapien
gtgaagaatgatagcaaaaaacaatgaataatc

SEQ ID NO: 83178 - DNA, 33 bp, Homo sapien
gtgaagaatgatagcacaaaacaatgaataatc

SEQ ID NO: 83179 - DNA, 33 bp, Homo sapien
tttttgaaatcgtgtcaaagtatagacatggca

SEQ ID NO: 83180 - DNA, 33 bp, Homo sapien
tttttgaaatcgtgtccaagtatagacatggca

SEQ ID NO: 83181 - DNA, 33 bp, Homo sapien
tatagagaaaggataacgcatcagattcctaga

SEQ ID NO: 83182 - DNA, 33 bp, Homo sapien
tatagagaaaggataatgcatcagattcctaga

SEQ ID NO: 83183 - DNA, 33 bp, Homo sapien
ctgtcttaattcttaacgactggaggtaaaaga

SEQ ID NO: 83184 - DNA, 33 bp, Homo sapien
ctgtcttaattcttaatgactggaggtaaaaga

SEQ ID NO: 83185 - DNA, 33 bp, Homo sapien
tcaaagccatatgcataaattaggtacttcatt

SEQ ID NO: 83186 - DNA, 33 bp, Homo sapien
tcaaagccatatgcatgaattaggtacttcatt

SEQ ID NO: 83187 - DNA, 33 bp, Homo sapien
gggtagttattacagcaattacttgtttataaa

SEQ ID NO: 83188 - DNA, 33 bp, Homo sapien
gggtagttattacagcgattacttgtttataaa

SEQ ID NO: 83189 - DNA, 33 bp, Homo sapien
ttcttatcaaaggggaacagtttcaaccttagc

SEQ ID NO: 83190 - DNA, 33 bp, Homo sapien
ttcttatcaaaggggagcagtttcaaccttagc

SEQ ID NO: 83191 - DNA, 33 bp, Homo sapien
aggactatttctaagacaagagctaagtagacc

SEQ ID NO: 83192 - DNA, 33 bp, Homo sapien
aggactatttctaagataagagctaagtagacc

SEQ ID NO: 83193 - DNA, 33 bp, Homo sapien
ttgaaggatgagttaccctcagtgttactgcgg

SEQ ID NO: 83194 - DNA, 33 bp, Homo sapien
ttgaaggatgagttactctcagtgttactgcgg

SEQ ID NO: 83195 - DNA, 33 bp, Homo sapien
atttgatctccatttccatcttcatactagctt

SEQ ID NO: 83196 - DNA, 33 bp, Homo sapien
atttgatctccatttctatcttcatactagctt

SEQ ID NO: 83197 - DNA, 33 bp, Homo sapien
agattttcgtatgttgaaagtcaaataaaagtg

SEQ ID NO: 83198 - DNA, 33 bp, Homo sapien
agattttcgtatgttggaagtcaaataaaagtg

SEQ ID NO: 83199 - DNA, 33 bp, Homo sapien
gataatcaatgaaacaatgagacaaggatcaag

SEQ ID NO: 83200 - DNA, 33 bp, Homo sapien
gataatcaatgaaacagtgagacaaggatcaag

SEQ ID NO: 83201 - DNA, 33 bp, Homo sapien
tccaactgaaatatgcaaagtgccatctccaag

SEQ ID NO: 83202 - DNA, 33 bp, Homo sapien
tccaactgaaatatgcgaagtgccatctccaag

SEQ ID NO: 83203 - DNA, 33 bp, Homo sapien
gggctactcattctagcagatctacctctttat

SEQ ID NO: 83204 - DNA, 33 bp, Homo sapien
gggctactcattctaggagatctacctctttat

SEQ ID NO: 83205 - DNA, 33 bp, Homo sapien
aaactctgccctaccaagctcttgataacatat

SEQ ID NO: 83206 - DNA, 33 bp, Homo sapien
aaactctgccctaccatgctcttgataacatat

SEQ ID NO: 83207 - DNA, 33 bp, Homo sapien
gagaaacagcccaatacgatgtctagatatgtg

SEQ ID NO: 83208 - DNA, 33 bp, Homo sapien
gagaaacagcccaataggatgtctagatatgtg

SEQ ID NO: 83209 - DNA, 33 bp, Homo sapien
aacagcaccgtgagaacgtaagctcctggaggc

SEQ ID NO: 83210 - DNA, 33 bp, Homo sapien
aacagcaccgtgagaatgtaagctcctggaggc

SEQ ID NO: 83211 - DNA, 33 bp, Homo sapien
ctctgattctgtcttaaccgtgaaacagaagtg

SEQ ID NO: 83212 - DNA, 33 bp, Homo sapien
ctctgattctgtcttagccgtgaaacagaagtg

SEQ ID NO: 83213 - DNA, 33 bp, Homo sapien
atttatgttaatctaaaccaagttacttgacct

SEQ ID NO: 83214 - DNA, 33 bp, Homo sapien
atttatgttaatctaagccaagttacttgacct

SEQ ID NO: 83215 - DNA, 33 bp, Homo sapien
agtaaattgcttaaaactatttatggatcattt

SEQ ID NO: 83216 - DNA, 33 bp, Homo sapien
agtaaattgcttaaaattatttatggatcattt

SEQ ID NO: 83217 - DNA, 33 bp, Homo sapien
ttgtgcactcagtttacgttggctattacctca

SEQ ID NO: 83218 - DNA, 33 bp, Homo sapien
ttgtgcactcagtttatgttggctattacctca

SEQ ID NO: 83219 - DNA, 33 bp, Homo sapien
cacaaaacactcatcacaggacacaagcagact

SEQ ID NO: 83220 - DNA, 33 bp, Homo sapien
cacaaaacactcatcataggacacaagcagact

SEQ ID NO: 83221 - DNA, 33 bp, Homo sapien
catggtaagagctccacagagtgagtcagatcc

SEQ ID NO: 83222 - DNA, 33 bp, Homo sapien
catggtaagagctccatagagtgagtcagatcc

SEQ ID NO: 83223 - DNA, 33 bp, Homo sapien
aacaataacaacaaacagatttgatcctaaaga

SEQ ID NO: 83224 - DNA, 33 bp, Homo sapien
aacaataacaacaaacggatttgatcctaaaga

SEQ ID NO: 83225 - DNA, 33 bp, Homo sapien
gttaaatttctctcacagagtctccacaacttc

SEQ ID NO: 83226 - DNA, 33 bp, Homo sapien
gttaaatttctctcacggagtctccacaacttc

SEQ ID NO: 83227 - DNA, 33 bp, Homo sapien
tcaagattcataatcaagtgccagctgtgtgac

SEQ ID NO: 83228 - DNA, 33 bp, Homo sapien
tcaagattcataatcatgtgccagctgtgtgac

SEQ ID NO: 83229 - DNA, 33 bp, Homo sapien
ctatgtcttgggaccacgtagaaagtatagact

SEQ ID NO: 83230 - DNA, 33 bp, Homo sapien
ctatgtcttgggaccatgtagaaagtatagact

SEQ ID NO: 83231 - DNA, 33 bp, Homo sapien
cctagagtctagtacggcatagaatgattaaga

SEQ ID NO: 83232 - DNA, 33 bp, Homo sapien
cctagagtctagtacgtcatagaatgattaaga

SEQ ID NO: 83233 - DNA, 33 bp, Homo sapien
tagagaatgagaggaacgtccatctccctagcc

SEQ ID NO: 83234 - DNA, 33 bp, Homo sapien
tagagaatgagaggaatgtccatctccctagcc

SEQ ID NO: 83235 - DNA, 33 bp, Homo sapien
aggactgcataagtcacggaaaagtaaaaattg

SEQ ID NO: 83236 - DNA, 33 bp, Homo sapien
aggactgcataagtcatggaaaagtaaaaattg

SEQ ID NO: 83237 - DNA, 33 bp, Homo sapien
ctgatgttgacttttacgtaagacaagaaatgg

SEQ ID NO: 83238 - DNA, 33 bp, Homo sapien
ctgatgttgacttttatgtaagacaagaaatgg

SEQ ID NO: 83239 - DNA, 33 bp, Homo sapien
acatctttttgtgggacagcgcttcttttttaa

SEQ ID NO: 83240 - DNA, 33 bp, Homo sapien
acatctttttgtgggatagcgcttcttttttaa

SEQ ID NO: 83241 - DNA, 33 bp, Homo sapien
accataataaatgccaatggatacatcaactgg

SEQ ID NO: 83242 - DNA, 33 bp, Homo sapien
accataataaatgccagtggatacatcaactgg

SEQ ID NO: 83243 - DNA, 33 bp, Homo sapien
ggaggcgctacagagacggctcaattatggcgg

SEQ ID NO: 83244 - DNA, 33 bp, Homo sapien
ggaggcgctacagagatggctcaattatggcgg

SEQ ID NO: 83245 - DNA, 33 bp, Homo sapien
ccccggcagactacataaagcttaacaaaatca

SEQ ID NO: 83246 - DNA, 33 bp, Homo sapien
ccccggcagactacatgaagcttaacaaaatca

SEQ ID NO: 83247 - DNA, 33 bp, Homo sapien
tattcagtatagatcacctttctcgtgtttcac

SEQ ID NO: 83248 - DNA, 33 bp, Homo sapien
tattcagtatagatcatctttctcgtgtttcac

SEQ ID NO: 83249 - DNA, 33 bp, Homo sapien
gtgataatgcaaaaacacaatggcacaaaagga

SEQ ID NO: 83250 - DNA, 33 bp, Homo sapien
gtgataatgcaaaaacgcaatggcacaaaagga

SEQ ID NO: 83251 - DNA, 33 bp, Homo sapien
ggaacagtataatgcaaatcaaaatgccagttc

SEQ ID NO: 83252 - DNA, 33 bp, Homo sapien
ggaacagtataatgcagatcaaaatgccagttc

SEQ ID NO: 83253 - DNA, 33 bp, Homo sapien
ggaggacaaagcaagaaaggaattagaacaaat

SEQ ID NO: 83254 - DNA, 33 bp, Homo sapien
ggaggacaaagcaagagaggaattagaacaaat

SEQ ID NO: 83255 - DNA, 33 bp, Homo sapien
ctttttaaactacagcaacatcacatcggtctc

SEQ ID NO: 83256 - DNA, 33 bp, Homo sapien
ctttttaaactacagcgacatcacatcggtctc

SEQ ID NO: 83257 - DNA, 33 bp, Homo sapien
tgctggttgtataatacggctcagttgtgttgt

SEQ ID NO: 83258 - DNA, 33 bp, Homo sapien
tgctggttgtataatatggctcagttgtgttgt

SEQ ID NO: 83259 - DNA, 33 bp, Homo sapien
caaacataatctgaaagcatagaagaaccagtc

SEQ ID NO: 83260 - DNA, 33 bp, Homo sapien
caaacataatctgaaatcatagaagaaccagtc

SEQ ID NO: 83261 - DNA, 33 bp, Homo sapien
tgtgaggaggtatatgaaattattgtgagggaa

SEQ ID NO: 83262 - DNA, 33 bp, Homo sapien
tgtgaggaggtatatgcaattattgtgagggaa

SEQ ID NO: 83263 - DNA, 33 bp, Homo sapien
aaatgaagagcaacaactaaaaggtgtattggg

SEQ ID NO: 83264 - DNA, 33 bp, Homo sapien
aaatgaagagcaacaagtaaaaggtgtattggg

SEQ ID NO: 83265 - DNA, 33 bp, Homo sapien
ccaaaatctgactcaaagatacaaagcaagcaa

SEQ ID NO: 83266 - DNA, 33 bp, Homo sapien
ccaaaatctgactcaaggatacaaagcaagcaa

SEQ ID NO: 83267 - DNA, 33 bp, Homo sapien
gataacactctctcaacgacagcgtaagataca

SEQ ID NO: 83268 - DNA, 33 bp, Homo sapien
gataacactctctcaatgacagcgtaagataca

SEQ ID NO: 83269 - DNA, 33 bp, Homo sapien
tagatgagagtcacgcacccctgggaacacaat

SEQ ID NO: 83270 - DNA, 33 bp, Homo sapien
tagatgagagtcacgcgcccctgggaacacaat

SEQ ID NO: 83271 - DNA, 33 bp, Homo sapien
atagtccagtattcaacgttcatagtacacctt

SEQ ID NO: 83272 - DNA, 33 bp, Homo sapien
atagtccagtattcaatgttcatagtacacctt

SEQ ID NO: 83273 - DNA, 33 bp, Homo sapien
ctttcacggttattcacggccattcacagagtg

SEQ ID NO: 83274 - DNA, 33 bp, Homo sapien
ctttcacggttattcatggccattcacagagtg

SEQ ID NO: 83275 - DNA, 33 bp, Homo sapien
actgagaggaacagaaatcattctcccataaag

SEQ ID NO: 83276 - DNA, 33 bp, Homo sapien
actgagaggaacagaagtcattctcccataaag

SEQ ID NO: 83277 - DNA, 33 bp, Homo sapien
aacccaaggtcttcaaactcatgggccattgtt

SEQ ID NO: 83278 - DNA, 33 bp, Homo sapien
aacccaaggtcttcaagctcatgggccattgtt

SEQ ID NO: 83279 - DNA, 33 bp, Homo sapien
tggcatgtattttatgaatcggcactcttattt

SEQ ID NO: 83280 - DNA, 33 bp, Homo sapien
tggcatgtattttatggatcggcactcttattt

SEQ ID NO: 83281 - DNA, 33 bp, Homo sapien
ggagttagggctttgacataagttgaggctggg

SEQ ID NO: 83282 - DNA, 33 bp, Homo sapien
ggagttagggctttgatataagttgaggctggg

SEQ ID NO: 83283 - DNA, 33 bp, Homo sapien
tttttttcatgagttacgttagtttcgactctt

SEQ ID NO: 83284 - DNA, 33 bp, Homo sapien
tttttttcatgagttatgttagtttcgactctt

SEQ ID NO: 83285 - DNA, 33 bp, Homo sapien
gaagaagaacctgccaacatacactttgcactc

SEQ ID NO: 83286 - DNA, 33 bp, Homo sapien
gaagaagaacctgccagcatacactttgcactc

SEQ ID NO: 83287 - DNA, 33 bp, Homo sapien
gtggagaattctcttcactatccgaggatgttg

SEQ ID NO: 83288 - DNA, 33 bp, Homo sapien
gtggagaattctcttcgctatccgaggatgttg

SEQ ID NO: 83289 - DNA, 33 bp, Homo sapien
tttataagcaccgtgaactaaccgattgcaccc

SEQ ID NO: 83290 - DNA, 33 bp, Homo sapien
tttataagcaccgtgagctaaccgattgcaccc

SEQ ID NO: 83291 - DNA, 33 bp, Homo sapien
aacacagtataagtatcagtagtgtgtggggag

SEQ ID NO: 83292 - DNA, 33 bp, Homo sapien
aacacagtataagtatgagtagtgtgtggggag

SEQ ID NO: 83293 - DNA, 33 bp, Homo sapien
tcttcttaaacagaaaataacaagtctaacata

SEQ ID NO: 83294 - DNA, 33 bp, Homo sapien
tcttcttaaacagaaagtaacaagtctaacata

SEQ ID NO: 83295 - DNA, 33 bp, Homo sapien
atttcagcccacaaaacactctggtttgatcac

SEQ ID NO: 83296 - DNA, 33 bp, Homo sapien
atttcagcccacaaaagactctggtttgatcac

SEQ ID NO: 83297 - DNA, 33 bp, Homo sapien
cattgtcatttgtctcaaaccacacaagacagg

SEQ ID NO: 83298 - DNA, 33 bp, Homo sapien
cattgtcatttgtctctaaccacacaagacagg

SEQ ID NO: 83299 - DNA, 33 bp, Homo sapien
atgcaaaagcagaatcaaggtctgaaatagttg

SEQ ID NO: 83300 - DNA, 33 bp, Homo sapien
atgcaaaagcagaatccaggtctgaaatagttg

SEQ ID NO: 83301 - DNA, 33 bp, Homo sapien
taaaaggcagaggaaacacgaacgtggaagaac

SEQ ID NO: 83302 - DNA, 33 bp, Homo sapien
taaaaggcagaggaaatacgaacgtggaagaac

SEQ ID NO: 83303 - DNA, 33 bp, Homo sapien
atgggtgctgtgatgaataactttatacgtcaa

SEQ ID NO: 83304 - DNA, 33 bp, Homo sapien
atgggtgctgtgatgattaactttatacgtcaa

SEQ ID NO: 83305 - DNA, 33 bp, Homo sapien
cctcagatcctctccacgactaccaatgccaaa

SEQ ID NO: 83306 - DNA, 33 bp, Homo sapien
cctcagatcctctccatgactaccaatgccaaa

SEQ ID NO: 83307 - DNA, 33 bp, Homo sapien
ttttcctatgaaccagaaggcctgacaatcttt

SEQ ID NO: 83308 - DNA, 33 bp, Homo sapien
ttttcctatgaaccaggaggcctgacaatcttt

SEQ ID NO: 83309 - DNA, 33 bp, Homo sapien
tcacgtgcaatcaacacacagatttttttggac

SEQ ID NO: 83310 - DNA, 33 bp, Homo sapien
tcacgtgcaatcaacatacagatttttttggac

SEQ ID NO: 83311 - DNA, 33 bp, Homo sapien
agaaactttcaagtaccgtaatagctttcagtc

SEQ ID NO: 83312 - DNA, 33 bp, Homo sapien
agaaactttcaagtactgtaatagctttcagtc

SEQ ID NO: 83313 - DNA, 33 bp, Homo sapien
taggaatatatgtaaccaaggacgtgaaagatc

SEQ ID NO: 83314 - DNA, 33 bp, Homo sapien
taggaatatatgtaacgaaggacgtgaaagatc

SEQ ID NO: 83315 - DNA, 33 bp, Homo sapien
attccaattaggaaaaatgaagaatgggaggca

SEQ ID NO: 83316 - DNA, 33 bp, Homo sapien
attccaattaggaaaagtgaagaatgggaggca

SEQ ID NO: 83317 - DNA, 33 bp, Homo sapien
agttcaccactcagaaaaactctcccatcaaca

SEQ ID NO: 83318 - DNA, 33 bp, Homo sapien
agttcaccactcagaagaactctcccatcaaca

SEQ ID NO: 83319 - DNA, 33 bp, Homo sapien
tgcagttctttttccccactgaagacaaatggt

SEQ ID NO: 83320 - DNA, 33 bp, Homo sapien
tgcagttctttttccctactgaagacaaatggt

SEQ ID NO: 83321 - DNA, 33 bp, Homo sapien
ttgctttgaggtttgcactgaatccacgtatct

SEQ ID NO: 83322 - DNA, 33 bp, Homo sapien
ttgctttgaggtttgcgctgaatccacgtatct

SEQ ID NO: 83323 - DNA, 33 bp, Homo sapien
atcatgcagtttggtaaatcatgacaacattaa

SEQ ID NO: 83324 - DNA, 33 bp, Homo sapien
atcatgcagtttggtatatcatgacaacattaa

SEQ ID NO: 83325 - DNA, 33 bp, Homo sapien
tgaatcacacactctcagaaaggaccttagatt

SEQ ID NO: 83326 - DNA, 33 bp, Homo sapien
tgaatcacacactctcggaaaggaccttagatt

SEQ ID NO: 83327 - DNA, 33 bp, Homo sapien
agaaggtgctcaaaaaaaaatcagtattgaaga

SEQ ID NO: 83328 - DNA, 33 bp, Homo sapien
agaaggtgctcaaaaagaaatcagtattgaaga

SEQ ID NO: 83329 - DNA, 33 bp, Homo sapien
acagagcaaataattacactgagtgctctttcc

SEQ ID NO: 83330 - DNA, 33 bp, Homo sapien
acagagcaaataattagactgagtgctctttcc

SEQ ID NO: 83331 - DNA, 33 bp, Homo sapien
gttcagcactaacagtgaaggcccattaaaggg

SEQ ID NO: 83332 - DNA, 33 bp, Homo sapien
gttcagcactaacagttaaggcccattaaaggg

SEQ ID NO: 83333 - DNA, 33 bp, Homo sapien
tcatctttccataacactgagacatattcatcc

SEQ ID NO: 83334 - DNA, 33 bp, Homo sapien
tcatctttccataacattgagacatattcatcc

SEQ ID NO: 83335 - DNA, 33 bp, Homo sapien
atgggattcctgtacaagggttgcaggctgctt

SEQ ID NO: 83336 - DNA, 33 bp, Homo sapien
atgggattcctgtacaggggttgcaggctgctt

SEQ ID NO: 83337 - DNA, 33 bp, Homo sapien
tttcacaaactgtaaaactcaagcagtaagggc

SEQ ID NO: 83338 - DNA, 33 bp, Homo sapien
tttcacaaactgtaaagctcaagcagtaagggc

SEQ ID NO: 83339 - DNA, 33 bp, Homo sapien
ctgagaattaaaccgacagatgtaaggttacac

SEQ ID NO: 83340 - DNA, 33 bp, Homo sapien
ctgagaattaaaccgatagatgtaaggttacac

SEQ ID NO: 83341 - DNA, 33 bp, Homo sapien
gcaagataagcatgaaatcagaatccaggcata

SEQ ID NO: 83342 - DNA, 33 bp, Homo sapien
gcaagataagcatgaagtcagaatccaggcata

SEQ ID NO: 83343 - DNA, 33 bp, Homo sapien
ctgcatggtgcaggcccagaaaatgaccgcctg

SEQ ID NO: 83344 - DNA, 33 bp, Homo sapien
ctgcatggtgcaggcctagaaaatgaccgcctg

SEQ ID NO: 83345 - DNA, 33 bp, Homo sapien
tcttcaaaatgttaacagaaggacaactactat

SEQ ID NO: 83346 - DNA, 33 bp, Homo sapien
tcttcaaaatgttaacggaaggacaactactat

SEQ ID NO: 83347 - DNA, 33 bp, Homo sapien
gtgacttccgcttctacggcgtaggtgtgggga

SEQ ID NO: 83348 - DNA, 33 bp, Homo sapien
gtgacttccgcttctatggcgtaggtgtgggga

SEQ ID NO: 83349 - DNA, 33 bp, Homo sapien
acctgactgctacgtactacccggacggcctcc

SEQ ID NO: 83350 - DNA, 33 bp, Homo sapien
acctgactgctacgtagtacccggacggcctcc

SEQ ID NO: 83351 - DNA, 33 bp, Homo sapien
ctagcaagagtaagtacgttatttggtcagtca

SEQ ID NO: 83352 - DNA, 33 bp, Homo sapien
ctagcaagagtaagtatgttatttggtcagtca

SEQ ID NO: 83353 - DNA, 33 bp, Homo sapien
gaagagaaggaagagacagctaatatggaacct

SEQ ID NO: 83354 - DNA, 33 bp, Homo sapien
gaagagaaggaagagagagctaatatggaacct

SEQ ID NO: 83355 - DNA, 33 bp, Homo sapien
tgattggttgccattaagaaacagttgttatgt

SEQ ID NO: 83356 - DNA, 33 bp, Homo sapien
tgattggttgccattaggaaacagttgttatgt

SEQ ID NO: 83357 - DNA, 33 bp, Homo sapien
tctctgagggcggctacctgtgagatttcatct

SEQ ID NO: 83358 - DNA, 33 bp, Homo sapien
tctctgagggcggctatctgtgagatttcatct

SEQ ID NO: 83359 - DNA, 33 bp, Homo sapien
acacagttcagttctacgattatggttatagtc

SEQ ID NO: 83360 - DNA, 33 bp, Homo sapien
acacagttcagttctatgattatggttatagtc

SEQ ID NO: 83361 - DNA, 33 bp, Homo sapien
ttattttggtgactgacaaactaaaagacaggt

SEQ ID NO: 83362 - DNA, 33 bp, Homo sapien
ttattttggtgactgataaactaaaagacaggt

SEQ ID NO: 83363 - DNA, 33 bp, Homo sapien
agcttccaatgtgtaacaggagacaatgatccc

SEQ ID NO: 83364 - DNA, 33 bp, Homo sapien
agcttccaatgtgtaataggagacaatgatccc

SEQ ID NO: 83365 - DNA, 33 bp, Homo sapien
tgtgatggctgaagtacctacactgtagcagcg

SEQ ID NO: 83366 - DNA, 33 bp, Homo sapien
tgtgatggctgaagtatctacactgtagcagcg

SEQ ID NO: 83367 - DNA, 33 bp, Homo sapien
ggcactcagagaaccaaacaagtcccatccaaa

SEQ ID NO: 83368 - DNA, 33 bp, Homo sapien
ggcactcagagaaccagacaagtcccatccaaa

SEQ ID NO: 83369 - DNA, 33 bp, Homo sapien
aactcagtttttaaaacaatgtcctggatagct

SEQ ID NO: 83370 - DNA, 33 bp, Homo sapien
aactcagtttttaaaataatgtcctggatagct

SEQ ID NO: 83371 - DNA, 33 bp, Homo sapien
accaaatcatactgcaatcatttatgcggggaa

SEQ ID NO: 83372 - DNA, 33 bp, Homo sapien
accaaatcatactgcagtcatttatgcggggaa

SEQ ID NO: 83373 - DNA, 33 bp, Homo sapien
actgaaaatcactgacaaaaggcagattaacaa

SEQ ID NO: 83374 - DNA, 33 bp, Homo sapien
actgaaaatcactgacgaaaggcagattaacaa

SEQ ID NO: 83375 - DNA, 33 bp, Homo sapien
ctggcttctatgacccaccttcaggaaggggaa

SEQ ID NO: 83376 - DNA, 33 bp, Homo sapien
ctggcttctatgacccgccttcaggaaggggaa

SEQ ID NO: 83377 - DNA, 33 bp, Homo sapien
gtcacctgagaggtgacacacggttccaagctt

SEQ ID NO: 83378 - DNA, 33 bp, Homo sapien
gtcacctgagaggtgatacacggttccaagctt

SEQ ID NO: 83379 - DNA, 33 bp, Homo sapien
acagatgtctctttcagaagccacacctcctcc

SEQ ID NO: 83380 - DNA, 33 bp, Homo sapien
acagatgtctctttcataagccacacctcctcc

SEQ ID NO: 83381 - DNA, 33 bp, Homo sapien
aatgagaataaaaagacgtaaaacatggcgttt

SEQ ID NO: 83382 - DNA, 33 bp, Homo sapien
aatgagaataaaaagaggtaaaacatggcgttt

SEQ ID NO: 83383 - DNA, 33 bp, Homo sapien
ttattagcagagttaaaatctggagttgcaaat

SEQ ID NO: 83384 - DNA, 33 bp, Homo sapien
ttattagcagagttaagatctggagttgcaaat

SEQ ID NO: 83385 - DNA, 33 bp, Homo sapien
ttttctctcagtgatagactttagtttcaaaag

SEQ ID NO: 83386 - DNA, 33 bp, Homo sapien
ttttctctcagtgatatactttagtttcaaaag

SEQ ID NO: 83387 - DNA, 33 bp, Homo sapien
ctgaacaggtccactacgctttggtattctctc

SEQ ID NO: 83388 - DNA, 33 bp, Homo sapien
ctgaacaggtccactatgctttggtattctctc

SEQ ID NO: 83389 - DNA, 33 bp, Homo sapien
ctgaaagcccaggacaaagttttatttgctttc

SEQ ID NO: 83390 - DNA, 33 bp, Homo sapien
ctgaaagcccaggacagagttttatttgctttc

SEQ ID NO: 83391 - DNA, 33 bp, Homo sapien
aggtgtgagcctattcactcttgaaagcaaata

SEQ ID NO: 83392 - DNA, 33 bp, Homo sapien
aggtgtgagcctattcgctcttgaaagcaaata

SEQ ID NO: 83393 - DNA, 33 bp, Homo sapien
tcttgcccagtttcacagtatattgtatgaaca

SEQ ID NO: 83394 - DNA, 33 bp, Homo sapien
tcttgcccagtttcactgtatattgtatgaaca

SEQ ID NO: 83395 - DNA, 33 bp, Homo sapien
atcttgagttaggcaacgagtttttagatgtaa

SEQ ID NO: 83396 - DNA, 33 bp, Homo sapien
atcttgagttaggcaatgagtttttagatgtaa

SEQ ID NO: 83397 - DNA, 33 bp, Homo sapien
agaacccagataatctaacttccaacttggtac

SEQ ID NO: 83398 - DNA, 33 bp, Homo sapien
agaacccagataatctgacttccaacttggtac

SEQ ID NO: 83399 - DNA, 33 bp, Homo sapien
ctcttgacaaccaaagacactctaactgattct

SEQ ID NO: 83400 - DNA, 33 bp, Homo sapien
ctcttgacaaccaaaggcactctaactgattct

SEQ ID NO: 83401 - DNA, 33 bp, Homo sapien
tactcatcttcctttacggtattcatgcattca

SEQ ID NO: 83402 - DNA, 33 bp, Homo sapien
tactcatcttcctttatggtattcatgcattca

SEQ ID NO: 83403 - DNA, 33 bp, Homo sapien
taagcacttagagaaacgagaaaccaccttgta

SEQ ID NO: 83404 - DNA, 33 bp, Homo sapien
taagcacttagagaaatgagaaaccaccttgta

SEQ ID NO: 83405 - DNA, 33 bp, Homo sapien
gaaggtctttcctgtccataaccaatgtgttta

SEQ ID NO: 83406 - DNA, 33 bp, Homo sapien
gaaggtctttcctgtctataaccaatgtgttta

SEQ ID NO: 83407 - DNA, 33 bp, Homo sapien
tgtgttccagaagtcacgtgtaattcttacatg

SEQ ID NO: 83408 - DNA, 33 bp, Homo sapien
tgtgttccagaagtcatgtgtaattcttacatg

SEQ ID NO: 83409 - DNA, 33 bp, Homo sapien
actggaccatataccacgagcagtgagttattt

SEQ ID NO: 83410 - DNA, 33 bp, Homo sapien
actggaccatataccatgagcagtgagttattt

SEQ ID NO: 83411 - DNA, 33 bp, Homo sapien
ttcttcttctggtgaaaggtgtgtttctcaaca

SEQ ID NO: 83412 - DNA, 33 bp, Homo sapien
ttcttcttctggtgaagggtgtgtttctcaaca

SEQ ID NO: 83413 - DNA, 33 bp, Homo sapien
ttcccaaaggattctacaacacagtaaaaagct

SEQ ID NO: 83414 - DNA, 33 bp, Homo sapien
ttcccaaaggattctagaacacagtaaaaagct

SEQ ID NO: 83415 - DNA, 33 bp, Homo sapien
gtctaaaactccatccaccaagaccgtcgctgg

SEQ ID NO: 83416 - DNA, 33 bp, Homo sapien
gtctaaaactccatccgccaagaccgtcgctgg

SEQ ID NO: 83417 - DNA, 33 bp, Homo sapien
aagtcatcgatggcccgctagttctctgcacgc

SEQ ID NO: 83418 - DNA, 33 bp, Homo sapien
aagtcatcgatggccctctagttctctgcacgc

SEQ ID NO: 83419 - DNA, 33 bp, Homo sapien
gactcagctgtttttaccatgcagctttttcct

SEQ ID NO: 83420 - DNA, 33 bp, Homo sapien
gactcagctgtttttatcatgcagctttttcct

SEQ ID NO: 83421 - DNA, 33 bp, Homo sapien
gcaacatgaaaagcacaatctataaaccaaaaa

SEQ ID NO: 83422 - DNA, 33 bp, Homo sapien
gcaacatgaaaagcacgatctataaaccaaaaa

SEQ ID NO: 83423 - DNA, 33 bp, Homo sapien
gtaaagtaagcaaaacagtgtagtattggcata

SEQ ID NO: 83424 - DNA, 33 bp, Homo sapien
gtaaagtaagcaaaacggtgtagtattggcata

SEQ ID NO: 83425 - DNA, 33 bp, Homo sapien
tgcttttacagttatcaagaaagaaagtcaagg

SEQ ID NO: 83426 - DNA, 33 bp, Homo sapien
tgcttttacagttatcgagaaagaaagtcaagg

SEQ ID NO: 83427 - DNA, 33 bp, Homo sapien
acagacataaacacacaaacaggtcaggagata

SEQ ID NO: 83428 - DNA, 33 bp, Homo sapien
acagacataaacacaccaacaggtcaggagata

SEQ ID NO: 83429 - DNA, 33 bp, Homo sapien
cactggctccatttatcaatgctggcccctgca

SEQ ID NO: 83430 - DNA, 33 bp, Homo sapien
cactggctccatttattaatgctggcccctgca

SEQ ID NO: 83431 - DNA, 33 bp, Homo sapien
acttacgtggctaaaaagtctcctttataatgt

SEQ ID NO: 83432 - DNA, 33 bp, Homo sapien
acttacgtggctaaaacgtctcctttataatgt

SEQ ID NO: 83433 - DNA, 33 bp, Homo sapien
ggagggggaagctgtacgaaataatttggggag

SEQ ID NO: 83434 - DNA, 33 bp, Homo sapien
ggagggggaagctgtaggaaataatttggggag

SEQ ID NO: 83435 - DNA, 33 bp, Homo sapien
catgtttagtgcaaaccgtaaacgctgaataac

SEQ ID NO: 83436 - DNA, 33 bp, Homo sapien
catgtttagtgcaaactgtaaacgctgaataac

SEQ ID NO: 83437 - DNA, 33 bp, Homo sapien
actcttagaactaacgaatgagtccagcaaggt

SEQ ID NO: 83438 - DNA, 33 bp, Homo sapien
actcttagaactaacgcatgagtccagcaaggt

SEQ ID NO: 83439 - DNA, 33 bp, Homo sapien
tagaaagcctcagtaaataaatacaaagtctta

SEQ ID NO: 83440 - DNA, 33 bp, Homo sapien
tagaaagcctcagtaagtaaatacaaagtctta

SEQ ID NO: 83441 - DNA, 33 bp, Homo sapien
attcaagagagcaatacgcttccaggtttgtag

SEQ ID NO: 83442 - DNA, 33 bp, Homo sapien
attcaagagagcaatatgcttccaggtttgtag

SEQ ID NO: 83443 - DNA, 33 bp, Homo sapien
aaacaaatagtggtgacagaagagaaatcacct

SEQ ID NO: 83444 - DNA, 33 bp, Homo sapien
aaacaaatagtggtgagagaagagaaatcacct

SEQ ID NO: 83445 - DNA, 33 bp, Homo sapien
aataatagttcctctaactgagtgatgtgatta

SEQ ID NO: 83446 - DNA, 33 bp, Homo sapien
aataatagttcctctatctgagtgatgtgatta

SEQ ID NO: 83447 - DNA, 33 bp, Homo sapien
aaagggccttgaatgccatgtttaggggcagag

SEQ ID NO: 83448 - DNA, 33 bp, Homo sapien
aaagggccttgaatgctatgtttaggggcagag

SEQ ID NO: 83449 - DNA, 33 bp, Homo sapien
gacactgaggggttcaaatagaatcatcagtgt

SEQ ID NO: 83450 - DNA, 33 bp, Homo sapien
gacactgaggggttcacatagaatcatcagtgt

SEQ ID NO: 83451 - DNA, 33 bp, Homo sapien
atgagctgatttaacccctaccggacgtgataa

SEQ ID NO: 83452 - DNA, 33 bp, Homo sapien
atgagctgatttaaccgctaccggacgtgataa

SEQ ID NO: 83453 - DNA, 33 bp, Homo sapien
agtaacaactgatgtccctatacttggttgaat

SEQ ID NO: 83454 - DNA, 33 bp, Homo sapien
agtaacaactgatgtctctatacttggttgaat

SEQ ID NO: 83455 - DNA, 33 bp, Homo sapien
atgaacaatgaacaggaccatttccccagcagc

SEQ ID NO: 83456 - DNA, 33 bp, Homo sapien
atgaacaatgaacaggcccatttccccagcagc

SEQ ID NO: 83457 - DNA, 33 bp, Homo sapien
caatagtgagcttatgaaaaatactagcacaat

SEQ ID NO: 83458 - DNA, 33 bp, Homo sapien
caatagtgagcttatggaaaatactagcacaat

SEQ ID NO: 83459 - DNA, 33 bp, Homo sapien
aattgccttgcacataataattttttttaagtt

SEQ ID NO: 83460 - DNA, 33 bp, Homo sapien
aattgccttgcacatattaattttttttaagtt

SEQ ID NO: 83461 - DNA, 33 bp, Homo sapien
aattaaagcacgttgaataagaggtgtccctta

SEQ ID NO: 83462 - DNA, 33 bp, Homo sapien
aattaaagcacgttgagtaagaggtgtccctta

SEQ ID NO: 83463 - DNA, 33 bp, Homo sapien
tgaatgcctggtccaaagtccctactcttgcct

SEQ ID NO: 83464 - DNA, 33 bp, Homo sapien
tgaatgcctggtccaacgtccctactcttgcct

SEQ ID NO: 83465 - DNA, 33 bp, Homo sapien
taggatcagagaagtaacacaatttgcctgaag

SEQ ID NO: 83466 - DNA, 33 bp, Homo sapien
taggatcagagaagtagcacaatttgcctgaag

SEQ ID NO: 83467 - DNA, 33 bp, Homo sapien
tatatatttttccagacgacaaaacaacaatgt

SEQ ID NO: 83468 - DNA, 33 bp, Homo sapien
tatatatttttccagatgacaaaacaacaatgt

SEQ ID NO: 83469 - DNA, 33 bp, Homo sapien
aaactttctggaccaaaggatgttgtctaccct

SEQ ID NO: 83470 - DNA, 33 bp, Homo sapien
aaactttctggaccaagggatgttgtctaccct

SEQ ID NO: 83471 - DNA, 33 bp, Homo sapien
gaaaatagggtggcaacaagtggaaagggtgtc

SEQ ID NO: 83472 - DNA, 33 bp, Homo sapien
gaaaatagggtggcaataagtggaaagggtgtc

SEQ ID NO: 83473 - DNA, 33 bp, Homo sapien
tcagcataaattaacccggacaccactctctat

SEQ ID NO: 83474 - DNA, 33 bp, Homo sapien
tcagcataaattaacctggacaccactctctat

SEQ ID NO: 83475 - DNA, 33 bp, Homo sapien
ccactgcatccagctacgtattttgtaatggat

SEQ ID NO: 83476 - DNA, 33 bp, Homo sapien
ccactgcatccagctatgtattttgtaatggat

SEQ ID NO: 83477 - DNA, 33 bp, Homo sapien
gggaagggatgcaagcagagaccagttagaagg

SEQ ID NO: 83478 - DNA, 33 bp, Homo sapien
gggaagggatgcaagcggagaccagttagaagg

SEQ ID NO: 83479 - DNA, 33 bp, Homo sapien
cttctctcatctctcacggtgtcattcggatcc

SEQ ID NO: 83480 - DNA, 33 bp, Homo sapien
cttctctcatctctcatggtgtcattcggatcc

SEQ ID NO: 83481 - DNA, 33 bp, Homo sapien
caaggaggacagtctaaattgaagatgatagaa

SEQ ID NO: 83482 - DNA, 33 bp, Homo sapien
caaggaggacagtctagattgaagatgatagaa

SEQ ID NO: 83483 - DNA, 33 bp, Homo sapien
cacttcactaaagcccaatttcttcattgtaat

SEQ ID NO: 83484 - DNA, 33 bp, Homo sapien
cacttcactaaagccctatttcttcattgtaat

SEQ ID NO: 83485 - DNA, 33 bp, Homo sapien
ctaggcactgagtgtacaagaaaggtgcaataa

SEQ ID NO: 83486 - DNA, 33 bp, Homo sapien
ctaggcactgagtgtataagaaaggtgcaataa

SEQ ID NO: 83487 - DNA, 33 bp, Homo sapien
ttctctcctgagctccaaactcaaatttccttt

SEQ ID NO: 83488 - DNA, 33 bp, Homo sapien
ttctctcctgagctccgaactcaaatttccttt

SEQ ID NO: 83489 - DNA, 33 bp, Homo sapien
gcaaatgatagaccaacctcacttgtaatctta

SEQ ID NO: 83490 - DNA, 33 bp, Homo sapien
gcaaatgatagaccaatctcacttgtaatctta

SEQ ID NO: 83491 - DNA, 33 bp, Homo sapien
aagggattgctatcaacaatagataaacaggcc

SEQ ID NO: 83492 - DNA, 33 bp, Homo sapien
aagggattgctatcaagaatagataaacaggcc

SEQ ID NO: 83493 - DNA, 33 bp, Homo sapien
gtattccagagtggaaacacaattttacaatcg

SEQ ID NO: 83494 - DNA, 33 bp, Homo sapien
gtattccagagtggaagcacaattttacaatcg

SEQ ID NO: 83495 - DNA, 33 bp, Homo sapien
tgtgtccaccaattgacgaatgaagaaataaaa

SEQ ID NO: 83496 - DNA, 33 bp, Homo sapien
tgtgtccaccaattgatgaatgaagaaataaaa

SEQ ID NO: 83497 - DNA, 33 bp, Homo sapien
tgccacattagatagaacagtttgcagcagact

SEQ ID NO: 83498 - DNA, 33 bp, Homo sapien
tgccacattagatagagcagtttgcagcagact

SEQ ID NO: 83499 - DNA, 33 bp, Homo sapien
tcatatgctgcatcagaaagcaagtcttggcac

SEQ ID NO: 83500 - DNA, 33 bp, Homo sapien
tcatatgctgcatcaggaagcaagtcttggcac

SEQ ID NO: 83501 - DNA, 33 bp, Homo sapien
agactaacatggaccagtagaaagtgggagaat

SEQ ID NO: 83502 - DNA, 33 bp, Homo sapien
agactaacatggaccattagaaagtgggagaat

SEQ ID NO: 83503 - DNA, 33 bp, Homo sapien
cttcaggccaataaacagggtcagactttagca

SEQ ID NO: 83504 - DNA, 33 bp, Homo sapien
cttcaggccaataaacggggtcagactttagca

SEQ ID NO: 83505 - DNA, 33 bp, Homo sapien
gaggtcacttgcaatacgatgttaggtcccaag

SEQ ID NO: 83506 - DNA, 33 bp, Homo sapien
gaggtcacttgcaatatgatgttaggtcccaag

SEQ ID NO: 83507 - DNA, 33 bp, Homo sapien
gaatagctgtcaccaacattgtattagggaatg

SEQ ID NO: 83508 - DNA, 33 bp, Homo sapien
gaatagctgtcaccaagattgtattagggaatg

SEQ ID NO: 83509 - DNA, 33 bp, Homo sapien
catgattcaatagataactccttaccttacctc

SEQ ID NO: 83510 - DNA, 33 bp, Homo sapien
catgattcaatagatacctccttaccttacctc

SEQ ID NO: 83511 - DNA, 33 bp, Homo sapien
gtgagtagaaaaattaagaatcagtacatacgt

SEQ ID NO: 83512 - DNA, 33 bp, Homo sapien
gtgagtagaaaaattaggaatcagtacatacgt

SEQ ID NO: 83513 - DNA, 33 bp, Homo sapien
ctgctctgcctaatggccaggtgtatttatgtg

SEQ ID NO: 83514 - DNA, 33 bp, Homo sapien
ctgctctgcctaatggtcaggtgtatttatgtg

SEQ ID NO: 83515 - DNA, 33 bp, Homo sapien
aggcagttagtcagaaagagttcccccatactc

SEQ ID NO: 83516 - DNA, 33 bp, Homo sapien
aggcagttagtcagaaggagttcccccatactc

SEQ ID NO: 83517 - DNA, 33 bp, Homo sapien
taaattaaagttgcgaccatttttattcgtgcc

SEQ ID NO: 83518 - DNA, 33 bp, Homo sapien
taaattaaagttgcgatcatttttattcgtgcc

SEQ ID NO: 83519 - DNA, 33 bp, Homo sapien
attttaagaagctgcaaagaaagaagccctctc

SEQ ID NO: 83520 - DNA, 33 bp, Homo sapien
attttaagaagctgcagagaaagaagccctctc

SEQ ID NO: 83521 - DNA, 33 bp, Homo sapien
cttaaaatgcaagaacagaaatcaggaaacatt

SEQ ID NO: 83522 - DNA, 33 bp, Homo sapien
cttaaaatgcaagaacggaaatcaggaaacatt

SEQ ID NO: 83523 - DNA, 33 bp, Homo sapien
tatagcttcattaggcaaagagactctattcct

SEQ ID NO: 83524 - DNA, 33 bp, Homo sapien
tatagcttcattaggcgaagagactctattcct

SEQ ID NO: 83525 - DNA, 33 bp, Homo sapien
tacatgttaaactgtcaactcagatctaaaata

SEQ ID NO: 83526 - DNA, 33 bp, Homo sapien
tacatgttaaactgtcgactcagatctaaaata

SEQ ID NO: 83527 - DNA, 33 bp, Homo sapien
atgcctgcaaagctcccattctagtgtgtgagg

SEQ ID NO: 83528 - DNA, 33 bp, Homo sapien
atgcctgcaaagctcctattctagtgtgtgagg

SEQ ID NO: 83529 - DNA, 33 bp, Homo sapien
gaattaagcattctaacgaggcactgagataga

SEQ ID NO: 83530 - DNA, 33 bp, Homo sapien
gaattaagcattctaatgaggcactgagataga

SEQ ID NO: 83531 - DNA, 33 bp, Homo sapien
gagaaaaagagcaaaaatcaccaaattttaaac

SEQ ID NO: 83532 - DNA, 33 bp, Homo sapien
gagaaaaagagcaaaagtcaccaaattttaaac

SEQ ID NO: 83533 - DNA, 33 bp, Homo sapien
cacactgctgctgtctaaagcgtaactacctct

SEQ ID NO: 83534 - DNA, 33 bp, Homo sapien
cacactgctgctgtctgaagcgtaactacctct

SEQ ID NO: 83535 - DNA, 33 bp, Homo sapien
tttaggtagatgatacaaacgttctaaaatcag

SEQ ID NO: 83536 - DNA, 33 bp, Homo sapien
tttaggtagatgatacgaacgttctaaaatcag

SEQ ID NO: 83537 - DNA, 33 bp, Homo sapien
gcgtatggcagaaggaaaaaagagacctaagtt

SEQ ID NO: 83538 - DNA, 33 bp, Homo sapien
gcgtatggcagaaggagaaaagagacctaagtt

SEQ ID NO: 83539 - DNA, 33 bp, Homo sapien
atttgtggctcctccaactgatttaactatggc

SEQ ID NO: 83540 - DNA, 33 bp, Homo sapien
atttgtggctcctccagctgatttaactatggc

SEQ ID NO: 83541 - DNA, 33 bp, Homo sapien
gtaagcctgccagcaggaattgcttacacacag

SEQ ID NO: 83542 - DNA, 33 bp, Homo sapien
gtaagcctgccagcagtaattgcttacacacag

SEQ ID NO: 83543 - DNA, 33 bp, Homo sapien
atgtttctgatcctgtaaaaaacctccatgtct

SEQ ID NO: 83544 - DNA, 33 bp, Homo sapien
atgtttctgatcctgtgaaaaacctccatgtct

SEQ ID NO: 83545 - DNA, 33 bp, Homo sapien
aggaactcggaaggaaagtaattggaaaattgg

SEQ ID NO: 83546 - DNA, 33 bp, Homo sapien
aggaactcggaaggaacgtaattggaaaattgg

SEQ ID NO: 83547 - DNA, 33 bp, Homo sapien
acttaaggaaagaaaagaaattgtggctgggca

SEQ ID NO: 83548 - DNA, 33 bp, Homo sapien
acttaaggaaagaaaataaattgtggctgggca

SEQ ID NO: 83549 - DNA, 33 bp, Homo sapien
atctggtccatatccagaattactcccttagaa

SEQ ID NO: 83550 - DNA, 33 bp, Homo sapien
atctggtccatatccataattactcccttagaa

SEQ ID NO: 83551 - DNA, 33 bp, Homo sapien
agtattcagaaggataaagtctacagtggcttt

SEQ ID NO: 83552 - DNA, 33 bp, Homo sapien
agtattcagaaggatagagtctacagtggcttt

SEQ ID NO: 83553 - DNA, 33 bp, Homo sapien
ttgaatttgacaaataggaccttaaatgacccc

SEQ ID NO: 83554 - DNA, 33 bp, Homo sapien
ttgaatttgacaaatatgaccttaaatgacccc

SEQ ID NO: 83555 - DNA, 33 bp, Homo sapien
cttagaaagcaaatggaaagagggttttaagag

SEQ ID NO: 83556 - DNA, 33 bp, Homo sapien
cttagaaagcaaatgggaagagggttttaagag

SEQ ID NO: 83557 - DNA, 33 bp, Homo sapien
ttcctattctgtataactgtccttggcattgaa

SEQ ID NO: 83558 - DNA, 33 bp, Homo sapien
ttcctattctgtataattgtccttggcattgaa

SEQ ID NO: 83559 - DNA, 33 bp, Homo sapien
ttactgagctcttttcgaagaaacaggtataaa

SEQ ID NO: 83560 - DNA, 33 bp, Homo sapien
ttactgagctcttttctaagaaacaggtataaa

SEQ ID NO: 83561 - DNA, 33 bp, Homo sapien
ggcaaaacattcagcaccatagtggataaactg

SEQ ID NO: 83562 - DNA, 33 bp, Homo sapien
ggcaaaacattcagcatcatagtggataaactg

SEQ ID NO: 83563 - DNA, 33 bp, Homo sapien
tttgcaatcaactaaacctttatgtcattcttc

SEQ ID NO: 83564 - DNA, 33 bp, Homo sapien
tttgcaatcaactaaatctttatgtcattcttc

SEQ ID NO: 83565 - DNA, 33 bp, Homo sapien
atgggaccataggaaaatcatttagcctttctg

SEQ ID NO: 83566 - DNA, 33 bp, Homo sapien
atgggaccataggaaagtcatttagcctttctg

SEQ ID NO: 83567 - DNA, 33 bp, Homo sapien
aaaacgtcagacacacaagaattgagggacatt

SEQ ID NO: 83568 - DNA, 33 bp, Homo sapien
aaaacgtcagacacaccagaattgagggacatt

SEQ ID NO: 83569 - DNA, 33 bp, Homo sapien
tcagacatggttaagactaatactttgatgtgt

SEQ ID NO: 83570 - DNA, 33 bp, Homo sapien
tcagacatggttaagagtaatactttgatgtgt

SEQ ID NO: 83571 - DNA, 33 bp, Homo sapien
gatactctctacagcactaccctgttttcgttt

SEQ ID NO: 83572 - DNA, 33 bp, Homo sapien
gatactctctacagcattaccctgttttcgttt

SEQ ID NO: 83573 - DNA, 33 bp, Homo sapien
aaaacaagagtagagcaaatagagcttagttta

SEQ ID NO: 83574 - DNA, 33 bp, Homo sapien
aaaacaagagtagagcgaatagagcttagttta

SEQ ID NO: 83575 - DNA, 33 bp, Homo sapien
tgtgtaaggaaatagagctcgtataaatatgac

SEQ ID NO: 83576 - DNA, 33 bp, Homo sapien
tgtgtaaggaaatagatctcgtataaatatgac

SEQ ID NO: 83577 - DNA, 33 bp, Homo sapien
cattagaagcattatgccaagtcttatttgtca

SEQ ID NO: 83578 - DNA, 33 bp, Homo sapien
cattagaagcattatgtcaagtcttatttgtca

SEQ ID NO: 83579 - DNA, 33 bp, Homo sapien
tgtgttcgttcattccactctgatagtcattcg

SEQ ID NO: 83580 - DNA, 33 bp, Homo sapien
tgtgttcgttcattcctctctgatagtcattcg

SEQ ID NO: 83581 - DNA, 33 bp, Homo sapien
ttttatgggagaataaaggatctcgggtagtgt

SEQ ID NO: 83582 - DNA, 33 bp, Homo sapien
ttttatgggagaataagggatctcgggtagtgt

SEQ ID NO: 83583 - DNA, 33 bp, Homo sapien
tctgccaaccttagaaatattgaggcagaatct

SEQ ID NO: 83584 - DNA, 33 bp, Homo sapien
tctgccaaccttagaagtattgaggcagaatct

SEQ ID NO: 83585 - DNA, 33 bp, Homo sapien
gacaagttaaggactacgcttggaaatggctca

SEQ ID NO: 83586 - DNA, 33 bp, Homo sapien
gacaagttaaggactatgcttggaaatggctca

SEQ ID NO: 83587 - DNA, 33 bp, Homo sapien
aaatgacatcaccataagcctcagattttcccc

SEQ ID NO: 83588 - DNA, 33 bp, Homo sapien
aaatgacatcaccataggcctcagattttcccc

SEQ ID NO: 83589 - DNA, 33 bp, Homo sapien
agaatgggttatcacaaaagtcagaataatgtt

SEQ ID NO: 83590 - DNA, 33 bp, Homo sapien
agaatgggttatcacagaagtcagaataatgtt

SEQ ID NO: 83591 - DNA, 33 bp, Homo sapien
tcttgtatctggtgaaccaactaaagtgaaatt

SEQ ID NO: 83592 - DNA, 33 bp, Homo sapien
tcttgtatctggtgaatcaactaaagtgaaatt

SEQ ID NO: 83593 - DNA, 33 bp, Homo sapien
gcacaatatccacttaaacttttgctctaatgt

SEQ ID NO: 83594 - DNA, 33 bp, Homo sapien
gcacaatatccacttagacttttgctctaatgt

SEQ ID NO: 83595 - DNA, 33 bp, Homo sapien
agcctgcataagatgcacaaaagcctcgggaca

SEQ ID NO: 83596 - DNA, 33 bp, Homo sapien
agcctgcataagatgcccaaaagcctcgggaca

SEQ ID NO: 83597 - DNA, 33 bp, Homo sapien
ttatagtttattgtagcctaattcggctcttgg

SEQ ID NO: 83598 - DNA, 33 bp, Homo sapien
ttatagtttattgtaggctaattcggctcttgg

SEQ ID NO: 83599 - DNA, 33 bp, Homo sapien
tgtgaactgcacaggcaagacatctagcttgca

SEQ ID NO: 83600 - DNA, 33 bp, Homo sapien
tgtgaactgcacaggcgagacatctagcttgca

SEQ ID NO: 83601 - DNA, 33 bp, Homo sapien
tgtttagtctccacataagtcttagtcacagag

SEQ ID NO: 83602 - DNA, 33 bp, Homo sapien
tgtttagtctccacatgagtcttagtcacagag

SEQ ID NO: 83603 - DNA, 33 bp, Homo sapien
catggtcttctcaagcagaggaaagatcgtggt

SEQ ID NO: 83604 - DNA, 33 bp, Homo sapien
catggtcttctcaagcggaggaaagatcgtggt

SEQ ID NO: 83605 - DNA, 33 bp, Homo sapien
cattcagtttaattataagcagaacactatctt

SEQ ID NO: 83606 - DNA, 33 bp, Homo sapien
cattcagtttaattatgagcagaacactatctt

SEQ ID NO: 83607 - DNA, 33 bp, Homo sapien
ctagataaaaccagaaatggaaataaggaattc

SEQ ID NO: 83608 - DNA, 33 bp, Homo sapien
ctagataaaaccagaagtggaaataaggaattc

SEQ ID NO: 83609 - DNA, 33 bp, Homo sapien
ggtttgtgtaaagagaagtaaggagtcaaagga

SEQ ID NO: 83610 - DNA, 33 bp, Homo sapien
ggtttgtgtaaagagaggtaaggagtcaaagga

SEQ ID NO: 83611 - DNA, 33 bp, Homo sapien
tctgactcatgctgccactcagttatatgctca

SEQ ID NO: 83612 - DNA, 33 bp, Homo sapien
tctgactcatgctgccgctcagttatatgctca

SEQ ID NO: 83613 - DNA, 33 bp, Homo sapien
gtgatataaaaatacaatattgcagtcttcttg

SEQ ID NO: 83614 - DNA, 33 bp, Homo sapien
gtgatataaaaatacagtattgcagtcttcttg

SEQ ID NO: 83615 - DNA, 33 bp, Homo sapien
ctattccatcttttataacccaacttaagcttt

SEQ ID NO: 83616 - DNA, 33 bp, Homo sapien
ctattccatcttttatgacccaacttaagcttt

SEQ ID NO: 83617 - DNA, 33 bp, Homo sapien
aataataataccttacacattaccactttacta

SEQ ID NO: 83618 - DNA, 33 bp, Homo sapien
aataataataccttacgcattaccactttacta

SEQ ID NO: 83619 - DNA, 33 bp, Homo sapien
tttcgtgcacaatgacccagtttcaaaggaaac

SEQ ID NO: 83620 - DNA, 33 bp, Homo sapien
tttcgtgcacaatgactcagtttcaaaggaaac

SEQ ID NO: 83621 - DNA, 33 bp, Homo sapien
tagccaaaaattatcacgtaaggactgtcaaat

SEQ ID NO: 83622 - DNA, 33 bp, Homo sapien
tagccaaaaattatcatgtaaggactgtcaaat

SEQ ID NO: 83623 - DNA, 33 bp, Homo sapien
agttgatcaccattaaagaatagtaatagaaat

SEQ ID NO: 83624 - DNA, 33 bp, Homo sapien
agttgatcaccattaaggaatagtaatagaaat

SEQ ID NO: 83625 - DNA, 33 bp, Homo sapien
ttttctaatttcttgaaaatggacaatagagat

SEQ ID NO: 83626 - DNA, 33 bp, Homo sapien
ttttctaatttcttgagaatggacaatagagat

SEQ ID NO: 83627 - DNA, 33 bp, Homo sapien
gttacattccatgtgcagaagacatctgtgtga

SEQ ID NO: 83628 - DNA, 33 bp, Homo sapien
gttacattccatgtgcggaagacatctgtgtga

SEQ ID NO: 83629 - DNA, 33 bp, Homo sapien
atatccatgtgcaaataaatgaagttggagcct

SEQ ID NO: 83630 - DNA, 33 bp, Homo sapien
atatccatgtgcaaatgaatgaagttggagcct

SEQ ID NO: 83631 - DNA, 33 bp, Homo sapien
ccaaacaagaatgtcaaatgaaacgtgtctcca

SEQ ID NO: 83632 - DNA, 33 bp, Homo sapien
ccaaacaagaatgtcagatgaaacgtgtctcca

SEQ ID NO: 83633 - DNA, 33 bp, Homo sapien
tcctcacaataccgcgaaaagtaaagtttggcc

SEQ ID NO: 83634 - DNA, 33 bp, Homo sapien
tcctcacaataccgcggaaagtaaagtttggcc

SEQ ID NO: 83635 - DNA, 33 bp, Homo sapien
ctgaggaagtgcatgactagattgcttagtaat

SEQ ID NO: 83636 - DNA, 33 bp, Homo sapien
ctgaggaagtgcatgattagattgcttagtaat

SEQ ID NO: 83637 - DNA, 33 bp, Homo sapien
taccctagtattaccaccctcatccgtgtatct

SEQ ID NO: 83638 - DNA, 33 bp, Homo sapien
taccctagtattaccatcctcatccgtgtatct

SEQ ID NO: 83639 - DNA, 33 bp, Homo sapien
ctgcaattactattccaattaatgatgtggatt

SEQ ID NO: 83640 - DNA, 33 bp, Homo sapien
ctgcaattactattccgattaatgatgtggatt

SEQ ID NO: 83641 - DNA, 33 bp, Homo sapien
cgatggagagtaggaacttaatgcccctacaat

SEQ ID NO: 83642 - DNA, 33 bp, Homo sapien
cgatggagagtaggaatttaatgcccctacaat

SEQ ID NO: 83643 - DNA, 33 bp, Homo sapien
ctaagccttgcacccacaggtgatcttacatca

SEQ ID NO: 83644 - DNA, 33 bp, Homo sapien
ctaagccttgcacccataggtgatcttacatca

SEQ ID NO: 83645 - DNA, 33 bp, Homo sapien
ataacttaggttataacgcctttatacagcctt

SEQ ID NO: 83646 - DNA, 33 bp, Homo sapien
ataacttaggttataatgcctttatacagcctt

SEQ ID NO: 83647 - DNA, 33 bp, Homo sapien
aatcacactgcaccaccatgttttctatttctt

SEQ ID NO: 83648 - DNA, 33 bp, Homo sapien
aatcacactgcaccactatgttttctatttctt

SEQ ID NO: 83649 - DNA, 33 bp, Homo sapien
agactgagtggctttacgacagagatatgttgt

SEQ ID NO: 83650 - DNA, 33 bp, Homo sapien
agactgagtggctttatgacagagatatgttgt

SEQ ID NO: 83651 - DNA, 33 bp, Homo sapien
accaagacagagaataagaccaaaaactgacta

SEQ ID NO: 83652 - DNA, 33 bp, Homo sapien
accaagacagagaatatgaccaaaaactgacta

SEQ ID NO: 83653 - DNA, 33 bp, Homo sapien
accaaaaactgactaaccaatcaagctaaacag

SEQ ID NO: 83654 - DNA, 33 bp, Homo sapien
accaaaaactgactaagcaatcaagctaaacag

SEQ ID NO: 83655 - DNA, 33 bp, Homo sapien
tcaattgaataaacacagctagttttcacaatc

SEQ ID NO: 83656 - DNA, 33 bp, Homo sapien
tcaattgaataaacacggctagttttcacaatc

SEQ ID NO: 83657 - DNA, 33 bp, Homo sapien
gccctccaaaaggagacgtgtggactagcagac

SEQ ID NO: 83658 - DNA, 33 bp, Homo sapien
gccctccaaaaggagatgtgtggactagcagac

SEQ ID NO: 83659 - DNA, 33 bp, Homo sapien
gtttggtgtgccttacactatggagcactggta

SEQ ID NO: 83660 - DNA, 33 bp, Homo sapien
gtttggtgtgccttacgctatggagcactggta

SEQ ID NO: 83661 - DNA, 33 bp, Homo sapien
gacctattgtaagggaaaaaaagctgagcaaat

SEQ ID NO: 83662 - DNA, 33 bp, Homo sapien
gacctattgtaagggagaaaaagctgagcaaat

SEQ ID NO: 83663 - DNA, 33 bp, Homo sapien
tctgtttgaaacctaaacctcaacgtgatggtg

SEQ ID NO: 83664 - DNA, 33 bp, Homo sapien
tctgtttgaaacctaatcctcaacgtgatggtg

SEQ ID NO: 83665 - DNA, 33 bp, Homo sapien
aattgaacttttcatgcactcactggatttctg

SEQ ID NO: 83666 - DNA, 33 bp, Homo sapien
aattgaacttttcatgtactcactggatttctg

SEQ ID NO: 83667 - DNA, 33 bp, Homo sapien
tttgtcatagaacggaaacatactgtattagtt

SEQ ID NO: 83668 - DNA, 33 bp, Homo sapien
tttgtcatagaacggagacatactgtattagtt

SEQ ID NO: 83669 - DNA, 33 bp, Homo sapien
attacatagatcaacaaataccaatgcttaaac

SEQ ID NO: 83670 - DNA, 33 bp, Homo sapien
attacatagatcaacatataccaatgcttaaac

SEQ ID NO: 83671 - DNA, 33 bp, Homo sapien
agatcatattgatgtacatttcacataggtgaa

SEQ ID NO: 83672 - DNA, 33 bp, Homo sapien
agatcatattgatgtagatttcacataggtgaa

SEQ ID NO: 83673 - DNA, 33 bp, Homo sapien
tatattaggaactaggaaaccgcttttacaaga

SEQ ID NO: 83674 - DNA, 33 bp, Homo sapien
tatattaggaactagggaaccgcttttacaaga

SEQ ID NO: 83675 - DNA, 33 bp, Homo sapien
ggttgtaagagagaagaccgtattccttagctt

SEQ ID NO: 83676 - DNA, 33 bp, Homo sapien
ggttgtaagagagaagcccgtattccttagctt

SEQ ID NO: 83677 - DNA, 33 bp, Homo sapien
aatattggttgaacataactgatatgaattttt

SEQ ID NO: 83678 - DNA, 33 bp, Homo sapien
aatattggttgaacattactgatatgaattttt

SEQ ID NO: 83679 - DNA, 33 bp, Homo sapien
tttcctgtgagccaaccgactctgatgttatta

SEQ ID NO: 83680 - DNA, 33 bp, Homo sapien
tttcctgtgagccaactgactctgatgttatta

SEQ ID NO: 83681 - DNA, 33 bp, Homo sapien
gcacataaaatggcaacgtttggatgatacctg

SEQ ID NO: 83682 - DNA, 33 bp, Homo sapien
gcacataaaatggcaatgtttggatgatacctg

SEQ ID NO: 83683 - DNA, 33 bp, Homo sapien
atggcagctagatatacgtgatgtagcgggaac

SEQ ID NO: 83684 - DNA, 33 bp, Homo sapien
atggcagctagatatatgtgatgtagcgggaac

SEQ ID NO: 83685 - DNA, 33 bp, Homo sapien
gcagccaaattgattaccaagtgttaaataaca

SEQ ID NO: 83686 - DNA, 33 bp, Homo sapien
gcagccaaattgattatcaagtgttaaataaca

SEQ ID NO: 83687 - DNA, 33 bp, Homo sapien
tatgtcaactggactgcactaagggatacccag

SEQ ID NO: 83688 - DNA, 33 bp, Homo sapien
tatgtcaactggactggactaagggatacccag

SEQ ID NO: 83689 - DNA, 33 bp, Homo sapien
cgaacaaataatgcaaacataacttctccatga

SEQ ID NO: 83690 - DNA, 33 bp, Homo sapien
cgaacaaataatgcaaccataacttctccatga

SEQ ID NO: 83691 - DNA, 33 bp, Homo sapien
gtgttgaggaaagagccgaaaaagaaaacacag

SEQ ID NO: 83692 - DNA, 33 bp, Homo sapien
gtgttgaggaaagagctgaaaaagaaaacacag

SEQ ID NO: 83693 - DNA, 33 bp, Homo sapien
cttactatttctattacggcaacttctttgaag

SEQ ID NO: 83694 - DNA, 33 bp, Homo sapien
cttactatttctattatggcaacttctttgaag

SEQ ID NO: 83695 - DNA, 33 bp, Homo sapien
gatacccaggaatccaagacaattcaaatcaaa

SEQ ID NO: 83696 - DNA, 33 bp, Homo sapien
gatacccaggaatccatgacaattcaaatcaaa

SEQ ID NO: 83697 - DNA, 33 bp, Homo sapien
taatttaaaaaggtaaagtgagagtctgggtac

SEQ ID NO: 83698 - DNA, 33 bp, Homo sapien
taatttaaaaaggtaacgtgagagtctgggtac

SEQ ID NO: 83699 - DNA, 33 bp, Homo sapien
acaaccaattaacaaaagagtctagacagacgt

SEQ ID NO: 83700 - DNA, 33 bp, Homo sapien
acaaccaattaacaaacgagtctagacagacgt

SEQ ID NO: 83701 - DNA, 33 bp, Homo sapien
gctgtggaagttcagaacaggaaggtgagatct

SEQ ID NO: 83702 - DNA, 33 bp, Homo sapien
gctgtggaagttcagaccaggaaggtgagatct

SEQ ID NO: 83703 - DNA, 33 bp, Homo sapien
cttgagggatcaaacaatatcattaggactggc

SEQ ID NO: 83704 - DNA, 33 bp, Homo sapien
cttgagggatcaaacagtatcattaggactggc

SEQ ID NO: 83705 - DNA, 33 bp, Homo sapien
aatttgctgactttagaaaaagttccccatctc

SEQ ID NO: 83706 - DNA, 33 bp, Homo sapien
aatttgctgactttaggaaaagttccccatctc

SEQ ID NO: 83707 - DNA, 33 bp, Homo sapien
cattggctaagttccacactgtagaaaacactg

SEQ ID NO: 83708 - DNA, 33 bp, Homo sapien
cattggctaagttccatactgtagaaaacactg

SEQ ID NO: 83709 - DNA, 33 bp, Homo sapien
agacagtatcttccaaattaaaaatcaggcaac

SEQ ID NO: 83710 - DNA, 33 bp, Homo sapien
agacagtatcttccaagttaaaaatcaggcaac

SEQ ID NO: 83711 - DNA, 33 bp, Homo sapien
caaaacacatgtttatcagacagttaagtcaca

SEQ ID NO: 83712 - DNA, 33 bp, Homo sapien
caaaacacatgtttatgagacagttaagtcaca

SEQ ID NO: 83713 - DNA, 33 bp, Homo sapien
cagtttgaaaccttgggagtcaaattcacagta

SEQ ID NO: 83714 - DNA, 33 bp, Homo sapien
cagtttgaaaccttggtagtcaaattcacagta

SEQ ID NO: 83715 - DNA, 33 bp, Homo sapien
tttaaaattggcatgacagatgttagagtgatc

SEQ ID NO: 83716 - DNA, 33 bp, Homo sapien
tttaaaattggcatgatagatgttagagtgatc

SEQ ID NO: 83717 - DNA, 33 bp, Homo sapien
gaaaagatgtaaagaacgtaatcaaatggggag

SEQ ID NO: 83718 - DNA, 33 bp, Homo sapien
gaaaagatgtaaagaaggtaatcaaatggggag

SEQ ID NO: 83719 - DNA, 33 bp, Homo sapien
ccataatattttgcagacctaaggaaacgtgtc

SEQ ID NO: 83720 - DNA, 33 bp, Homo sapien
ccataatattttgcaggcctaaggaaacgtgtc

SEQ ID NO: 83721 - DNA, 33 bp, Homo sapien
cctgcatccagattaactgctttgtttaaaatt

SEQ ID NO: 83722 - DNA, 33 bp, Homo sapien
cctgcatccagattaattgctttgtttaaaatt

SEQ ID NO: 83723 - DNA, 33 bp, Homo sapien
tttttctttttttccacaggtatgtaggatttt

SEQ ID NO: 83724 - DNA, 33 bp, Homo sapien
tttttctttttttccataggtatgtaggatttt

SEQ ID NO: 83725 - DNA, 33 bp, Homo sapien
gtacatccatcaaatacgagaataggcttgatc

SEQ ID NO: 83726 - DNA, 33 bp, Homo sapien
gtacatccatcaaatatgagaataggcttgatc

SEQ ID NO: 83727 - DNA, 33 bp, Homo sapien
aaagcttcttgaattacagttctgttacagttt

SEQ ID NO: 83728 - DNA, 33 bp, Homo sapien
aaagcttcttgaattatagttctgttacagttt

SEQ ID NO: 83729 - DNA, 33 bp, Homo sapien
tcttcctctcccatcaataaacaagttgtaact

SEQ ID NO: 83730 - DNA, 33 bp, Homo sapien
tcttcctctcccatcagtaaacaagttgtaact

SEQ ID NO: 83731 - DNA, 33 bp, Homo sapien
ttccattgctatggaacaacatgacttaaaaga

SEQ ID NO: 83732 - DNA, 33 bp, Homo sapien
ttccattgctatggaataacatgacttaaaaga

SEQ ID NO: 83733 - DNA, 33 bp, Homo sapien
aaagccaaaatcagaactgtagcgcctatttta

SEQ ID NO: 83734 - DNA, 33 bp, Homo sapien
aaagccaaaatcagaagtgtagcgcctatttta

SEQ ID NO: 83735 - DNA, 33 bp, Homo sapien
gggtaaaattaaactcagagtcttttgacttct

SEQ ID NO: 83736 - DNA, 33 bp, Homo sapien
gggtaaaattaaactcggagtcttttgacttct

SEQ ID NO: 83737 - DNA, 33 bp, Homo sapien
gttggtgtcttctgacaagggcccaggccatca

SEQ ID NO: 83738 - DNA, 33 bp, Homo sapien
gttggtgtcttctgacgagggcccaggccatca

SEQ ID NO: 83739 - DNA, 33 bp, Homo sapien
cgttttagttatgtcccgagctgtgattaaagg

SEQ ID NO: 83740 - DNA, 33 bp, Homo sapien
cgttttagttatgtcctgagctgtgattaaagg

SEQ ID NO: 83741 - DNA, 33 bp, Homo sapien
tgccacagaagccgaacggagtgagatgagaaa

SEQ ID NO: 83742 - DNA, 33 bp, Homo sapien
tgccacagaagccgaatggagtgagatgagaaa

SEQ ID NO: 83743 - DNA, 33 bp, Homo sapien
aagcctaggaatgctacgggagttaaagctgtt

SEQ ID NO: 83744 - DNA, 33 bp, Homo sapien
aagcctaggaatgctatgggagttaaagctgtt

SEQ ID NO: 83745 - DNA, 33 bp, Homo sapien
tttactccagtctctcacctgtgcaccaaccac

SEQ ID NO: 83746 - DNA, 33 bp, Homo sapien
tttactccagtctctcgcctgtgcaccaaccac

SEQ ID NO: 83747 - DNA, 33 bp, Homo sapien
atgcggtaagtgctacactaaagaggtattcca

SEQ ID NO: 83748 - DNA, 33 bp, Homo sapien
atgcggtaagtgctacgctaaagaggtattcca

SEQ ID NO: 83749 - DNA, 33 bp, Homo sapien
ataatggattggaagcagcatacaatccaatag

SEQ ID NO: 83750 - DNA, 33 bp, Homo sapien
ataatggattggaagcggcatacaatccaatag

SEQ ID NO: 83751 - DNA, 33 bp, Homo sapien
gaatcactgtatgttcaattggtgagtatctca

SEQ ID NO: 83752 - DNA, 33 bp, Homo sapien
gaatcactgtatgttcgattggtgagtatctca

SEQ ID NO: 83753 - DNA, 33 bp, Homo sapien
acatctcaattaaccaatattttccaaaagacc

SEQ ID NO: 83754 - DNA, 33 bp, Homo sapien
acatctcaattaaccagtattttccaaaagacc

SEQ ID NO: 83755 - DNA, 33 bp, Homo sapien
aattttggaaaacgtacctgccacacaacagtt

SEQ ID NO: 83756 - DNA, 33 bp, Homo sapien
aattttggaaaacgtatctgccacacaacagtt

SEQ ID NO: 83757 - DNA, 33 bp, Homo sapien
caaacaaataaaatgaacaaagagagcctgtta

SEQ ID NO: 83758 - DNA, 33 bp, Homo sapien
caaacaaataaaatgagcaaagagagcctgtta

SEQ ID NO: 83759 - DNA, 33 bp, Homo sapien
ggtcttggaaaccgttcaaaggatcttgggact

SEQ ID NO: 83760 - DNA, 33 bp, Homo sapien
ggtcttggaaaccgttgaaaggatcttgggact

SEQ ID NO: 83761 - DNA, 33 bp, Homo sapien
ggcagatacctggaaacagaaccagctgcacaa

SEQ ID NO: 83762 - DNA, 33 bp, Homo sapien
ggcagatacctggaaagagaaccagctgcacaa

SEQ ID NO: 83763 - DNA, 33 bp, Homo sapien
gttccactgtcctctgaatctcctgcaatgtag

SEQ ID NO: 83764 - DNA, 33 bp, Homo sapien
gttccactgtcctctggatctcctgcaatgtag

SEQ ID NO: 83765 - DNA, 33 bp, Homo sapien
gggaattatttatgggaaagtgatattcctgag

SEQ ID NO: 83766 - DNA, 33 bp, Homo sapien
gggaattatttatggggaagtgatattcctgag

SEQ ID NO: 83767 - DNA, 33 bp, Homo sapien
ccaaccatcaacgataagagttcatccttgttg

SEQ ID NO: 83768 - DNA, 33 bp, Homo sapien
ccaaccatcaacgataggagttcatccttgttg

SEQ ID NO: 83769 - DNA, 33 bp, Homo sapien
aaaagaaatgaaggaaatagatgtgtatatact

SEQ ID NO: 83770 - DNA, 33 bp, Homo sapien
aaaagaaatgaaggaagtagatgtgtatatact

SEQ ID NO: 83771 - DNA, 33 bp, Homo sapien
tgccgagaccttgaaaacaacattcctccgaac

SEQ ID NO: 83772 - DNA, 33 bp, Homo sapien
tgccgagaccttgaaagcaacattcctccgaac

SEQ ID NO: 83773 - DNA, 33 bp, Homo sapien
taggctggttgacaaaacgagcctatctcaaaa

SEQ ID NO: 83774 - DNA, 33 bp, Homo sapien
taggctggttgacaaagcgagcctatctcaaaa

SEQ ID NO: 83775 - DNA, 33 bp, Homo sapien
gaatgtcatgcgaaaaatcacaggagcagagtg

SEQ ID NO: 83776 - DNA, 33 bp, Homo sapien
gaatgtcatgcgaaaagtcacaggagcagagtg

SEQ ID NO: 83777 - DNA, 33 bp, Homo sapien
ttccagagaatcataaacaggttatctgggaga

SEQ ID NO: 83778 - DNA, 33 bp, Homo sapien
ttccagagaatcataagcaggttatctgggaga

SEQ ID NO: 83779 - DNA, 33 bp, Homo sapien
tggggatgtttaaacacagatttctttttcttt

SEQ ID NO: 83780 - DNA, 33 bp, Homo sapien
tggggatgtttaaacagagatttctttttcttt

SEQ ID NO: 83781 - DNA, 33 bp, Homo sapien
gttaaaacccatggaacgtataccaccaagaat

SEQ ID NO: 83782 - DNA, 33 bp, Homo sapien
gttaaaacccatggaatgtataccaccaagaat

SEQ ID NO: 83783 - DNA, 33 bp, Homo sapien
gtggatgttgttgaaaccagttgaatttaggga

SEQ ID NO: 83784 - DNA, 33 bp, Homo sapien
gtggatgttgttgaaatcagttgaatttaggga

SEQ ID NO: 83785 - DNA, 33 bp, Homo sapien
tggtgactctgagaacagtgacagcagttactt

SEQ ID NO: 83786 - DNA, 33 bp, Homo sapien
tggtgactctgagaacggtgacagcagttactt

SEQ ID NO: 83787 - DNA, 33 bp, Homo sapien
ttgagaaacaaaggccaatttgtctccagtgat

SEQ ID NO: 83788 - DNA, 33 bp, Homo sapien
ttgagaaacaaaggccgatttgtctccagtgat

SEQ ID NO: 83789 - DNA, 33 bp, Homo sapien
tatggtataccaaaagccccagactgtcctctc

SEQ ID NO: 83790 - DNA, 33 bp, Homo sapien
tatggtataccaaaagtcccagactgtcctctc

SEQ ID NO: 83791 - DNA, 33 bp, Homo sapien
gtccagccctcttctcactttctgttgcatcct

SEQ ID NO: 83792 - DNA, 33 bp, Homo sapien
gtccagccctcttctcgctttctgttgcatcct

SEQ ID NO: 83793 - DNA, 33 bp, Homo sapien
aggcaccaagaaatgaggatttgctgggacctg

SEQ ID NO: 83794 - DNA, 33 bp, Homo sapien
aggcaccaagaaatgatgatttgctgggacctg

SEQ ID NO: 83795 - DNA, 33 bp, Homo sapien
ctgaggactacaggaaagatcatctcagccttg

SEQ ID NO: 83796 - DNA, 33 bp, Homo sapien
ctgaggactacaggaaggatcatctcagccttg

SEQ ID NO: 83797 - DNA, 33 bp, Homo sapien
gagtctggcctgtatcaccaaagcccatgctct

SEQ ID NO: 83798 - DNA, 33 bp, Homo sapien
gagtctggcctgtatcgccaaagcccatgctct

SEQ ID NO: 83799 - DNA, 33 bp, Homo sapien
gatgaattaatgaacaaattttgaataatcact

SEQ ID NO: 83800 - DNA, 33 bp, Homo sapien
gatgaattaatgaacagattttgaataatcact

SEQ ID NO: 83801 - DNA, 33 bp, Homo sapien
gcaatgcagaagcacacgtaggggctgtacctc

SEQ ID NO: 83802 - DNA, 33 bp, Homo sapien
gcaatgcagaagcacatgtaggggctgtacctc

SEQ ID NO: 83803 - DNA, 33 bp, Homo sapien
ggaagcatatgccccaaatgacgacattcaaat

SEQ ID NO: 83804 - DNA, 33 bp, Homo sapien
ggaagcatatgccccacatgacgacattcaaat

SEQ ID NO: 83805 - DNA, 33 bp, Homo sapien
ggatagagaatgaaaacaggttaggtgcgtggc

SEQ ID NO: 83806 - DNA, 33 bp, Homo sapien
ggatagagaatgaaaagaggttaggtgcgtggc

SEQ ID NO: 83807 - DNA, 33 bp, Homo sapien
cctcagtgaatatcgacgagctgctcttataaa

SEQ ID NO: 83808 - DNA, 33 bp, Homo sapien
cctcagtgaatatcgatgagctgctcttataaa

SEQ ID NO: 83809 - DNA, 33 bp, Homo sapien
atccagaatctacaaagaatttccacaaattta

SEQ ID NO: 83810 - DNA, 33 bp, Homo sapien
atccagaatctacaaataatttccacaaattta

SEQ ID NO: 83811 - DNA, 33 bp, Homo sapien
tgggccatctgcctagaatcccaatgctttgag

SEQ ID NO: 83812 - DNA, 33 bp, Homo sapien
tgggccatctgcctagtatcccaatgctttgag

SEQ ID NO: 83813 - DNA, 33 bp, Homo sapien
ttttaatatttgtcaactcactggaaaaattta

SEQ ID NO: 83814 - DNA, 33 bp, Homo sapien
ttttaatatttgtcaattcactggaaaaattta

SEQ ID NO: 83815 - DNA, 33 bp, Homo sapien
cagtctccagattcaccgacgggccatgttaat

SEQ ID NO: 83816 - DNA, 33 bp, Homo sapien
cagtctccagattcactgacgggccatgttaat

SEQ ID NO: 83817 - DNA, 33 bp, Homo sapien
aagggtggaaggttataaacaatttgcatttta

SEQ ID NO: 83818 - DNA, 33 bp, Homo sapien
aagggtggaaggttatgaacaatttgcatttta

SEQ ID NO: 83819 - DNA, 33 bp, Homo sapien
atgggagcactgcatacctccaggcttttctct

SEQ ID NO: 83820 - DNA, 33 bp, Homo sapien
atgggagcactgcatatctccaggcttttctct

SEQ ID NO: 83821 - DNA, 33 bp, Homo sapien
acacacattgttttcacgtaggcaatccacatc

SEQ ID NO: 83822 - DNA, 33 bp, Homo sapien
acacacattgttttcatgtaggcaatccacatc

SEQ ID NO: 83823 - DNA, 33 bp, Homo sapien
ccagcaaactaacatccactggcttgaaattgt

SEQ ID NO: 83824 - DNA, 33 bp, Homo sapien
ccagcaaactaacatctactggcttgaaattgt

SEQ ID NO: 83825 - DNA, 33 bp, Homo sapien
agtctagaagctggaacacaagataggttagag

SEQ ID NO: 83826 - DNA, 33 bp, Homo sapien
agtctagaagctggaatacaagataggttagag

SEQ ID NO: 83827 - DNA, 33 bp, Homo sapien
gtggtttctaaccagaaatcattgtaggtagta

SEQ ID NO: 83828 - DNA, 33 bp, Homo sapien
gtggtttctaaccagagatcattgtaggtagta

SEQ ID NO: 83829 - DNA, 33 bp, Homo sapien
ctgaaatataggaatacccacatctcacaatga

SEQ ID NO: 83830 - DNA, 33 bp, Homo sapien
ctgaaatataggaatatccacatctcacaatga

SEQ ID NO: 83831 - DNA, 33 bp, Homo sapien
tctttagatggtactacgattggcttttttatt

SEQ ID NO: 83832 - DNA, 33 bp, Homo sapien
tctttagatggtactatgattggcttttttatt

SEQ ID NO: 83833 - DNA, 33 bp, Homo sapien
gtgctgtggatatttcaaatcttcaaggcaaac

SEQ ID NO: 83834 - DNA, 33 bp, Homo sapien
gtgctgtggatatttcgaatcttcaaggcaaac

SEQ ID NO: 83835 - DNA, 33 bp, Homo sapien
aacttcaacatcttcaatacttcaggaaaccca

SEQ ID NO: 83836 - DNA, 33 bp, Homo sapien
aacttcaacatcttcagtacttcaggaaaccca

SEQ ID NO: 83837 - DNA, 33 bp, Homo sapien
aaaaatagctccttgaaccatccgcagtgagtt

SEQ ID NO: 83838 - DNA, 33 bp, Homo sapien
aaaaatagctccttgacccatccgcagtgagtt

SEQ ID NO: 83839 - DNA, 33 bp, Homo sapien
tctggtgtcaccaaccaaaaaggttgccctggg

SEQ ID NO: 83840 - DNA, 33 bp, Homo sapien
tctggtgtcaccaacccaaaaggttgccctggg

SEQ ID NO: 83841 - DNA, 33 bp, Homo sapien
gtccagcctgggaaaactgtgagtccctgtctc

SEQ ID NO: 83842 - DNA, 33 bp, Homo sapien
gtccagcctgggaaaagtgtgagtccctgtctc

SEQ ID NO: 83843 - DNA, 33 bp, Homo sapien
ctcctagggccttattcaagatctttttagtct

SEQ ID NO: 83844 - DNA, 33 bp, Homo sapien
ctcctagggccttattgaagatctttttagtct

SEQ ID NO: 83845 - DNA, 33 bp, Homo sapien
ctgccttttactcatcagagcagactcctaggg

SEQ ID NO: 83846 - DNA, 33 bp, Homo sapien
ctgccttttactcatcggagcagactcctaggg

SEQ ID NO: 83847 - DNA, 33 bp, Homo sapien
acagtggatccttgaacgatgtgagggttagag

SEQ ID NO: 83848 - DNA, 33 bp, Homo sapien
acagtggatccttgaatgatgtgagggttagag

SEQ ID NO: 83849 - DNA, 33 bp, Homo sapien
atgcctttctcactgacgttcatcattaagagc

SEQ ID NO: 83850 - DNA, 33 bp, Homo sapien
atgcctttctcactgaggttcatcattaagagc

SEQ ID NO: 83851 - DNA, 33 bp, Homo sapien
cctcagagtcatccataagggttagaatctact

SEQ ID NO: 83852 - DNA, 33 bp, Homo sapien
cctcagagtcatccatgagggttagaatctact

SEQ ID NO: 83853 - DNA, 33 bp, Homo sapien
aggaggaacttgggtacggcagaatctgaatat

SEQ ID NO: 83854 - DNA, 33 bp, Homo sapien
aggaggaacttgggtatggcagaatctgaatat

SEQ ID NO: 83855 - DNA, 33 bp, Homo sapien
tacaagccgagaaaccccagagatgaatgggca

SEQ ID NO: 83856 - DNA, 33 bp, Homo sapien
tacaagccgagaaacctcagagatgaatgggca

SEQ ID NO: 83857 - DNA, 33 bp, Homo sapien
tgtcctgataagaagacaaaatagaggtgtagg

SEQ ID NO: 83858 - DNA, 33 bp, Homo sapien
tgtcctgataagaagagaaaatagaggtgtagg

SEQ ID NO: 83859 - DNA, 33 bp, Homo sapien
gagtaatttatgagagccgctcgtcaatattca

SEQ ID NO: 83860 - DNA, 33 bp, Homo sapien
gagtaatttatgagaggcgctcgtcaatattca

SEQ ID NO: 83861 - DNA, 33 bp, Homo sapien
ccgcaatcagaatgcaaaacagtgtcatcgtcc

SEQ ID NO: 83862 - DNA, 33 bp, Homo sapien
ccgcaatcagaatgcagaacagtgtcatcgtcc

SEQ ID NO: 83863 - DNA, 33 bp, Homo sapien
ggcttcttttgcagtaacttcctcttcaaaccc

SEQ ID NO: 83864 - DNA, 33 bp, Homo sapien
ggcttcttttgcagtatcttcctcttcaaaccc

SEQ ID NO: 83865 - DNA, 33 bp, Homo sapien
agtgctctgaaacgtgaatctctgtgcagttcc

SEQ ID NO: 83866 - DNA, 33 bp, Homo sapien
agtgctctgaaacgtggatctctgtgcagttcc

SEQ ID NO: 83867 - DNA, 33 bp, Homo sapien
gaccagccaactttggaatccagagggctgcaa

SEQ ID NO: 83868 - DNA, 33 bp, Homo sapien
gaccagccaactttggtatccagagggctgcaa

SEQ ID NO: 83869 - DNA, 33 bp, Homo sapien
catctcttttttcaaaacttctcattcttttac

SEQ ID NO: 83870 - DNA, 33 bp, Homo sapien
catctcttttttcaaagcttctcattcttttac

SEQ ID NO: 83871 - DNA, 33 bp, Homo sapien
actacagtacaaagaaagatgagattgttgttc

SEQ ID NO: 83872 - DNA, 33 bp, Homo sapien
actacagtacaaagaaggatgagattgttgttc

SEQ ID NO: 83873 - DNA, 33 bp, Homo sapien
ggtaactcaaaaagtgaaccaagtacaagtcaa

SEQ ID NO: 83874 - DNA, 33 bp, Homo sapien
ggtaactcaaaaagtgcaccaagtacaagtcaa

SEQ ID NO: 83875 - DNA, 33 bp, Homo sapien
tacagaaaatattcacaaaagtcattctttgtg

SEQ ID NO: 83876 - DNA, 33 bp, Homo sapien
tacagaaaatattcacgaaagtcattctttgtg

SEQ ID NO: 83877 - DNA, 33 bp, Homo sapien
ccctgttcatgggacaaataggagatacacatg

SEQ ID NO: 83878 - DNA, 33 bp, Homo sapien
ccctgttcatgggacacataggagatacacatg

SEQ ID NO: 83879 - DNA, 33 bp, Homo sapien
gggtgtcatttccaacagctactaggaagtaag

SEQ ID NO: 83880 - DNA, 33 bp, Homo sapien
gggtgtcatttccaacggctactaggaagtaag

SEQ ID NO: 83881 - DNA, 33 bp, Homo sapien
ttaggctgcatattccaagcacagatttgctga

SEQ ID NO: 83882 - DNA, 33 bp, Homo sapien
ttaggctgcatattccgagcacagatttgctga

SEQ ID NO: 83883 - DNA, 33 bp, Homo sapien
ctgctttttaaatcaacgtcacgagaactggtg

SEQ ID NO: 83884 - DNA, 33 bp, Homo sapien
ctgctttttaaatcaatgtcacgagaactggtg

SEQ ID NO: 83885 - DNA, 33 bp, Homo sapien
aataaaatttagtcacgagtaaaggccaattaa

SEQ ID NO: 83886 - DNA, 33 bp, Homo sapien
aataaaatttagtcactagtaaaggccaattaa

SEQ ID NO: 83887 - DNA, 33 bp, Homo sapien
gtaaaggccaattaaacgtctaccaattgttca

SEQ ID NO: 83888 - DNA, 33 bp, Homo sapien
gtaaaggccaattaaatgtctaccaattgttca

SEQ ID NO: 83889 - DNA, 33 bp, Homo sapien
ttataaacataaaactcagccaaagaatccaga

SEQ ID NO: 83890 - DNA, 33 bp, Homo sapien
ttataaacataaaactgagccaaagaatccaga

SEQ ID NO: 83891 - DNA, 33 bp, Homo sapien
ttctgagatgtctgcaacgttctacatcttgac

SEQ ID NO: 83892 - DNA, 33 bp, Homo sapien
ttctgagatgtctgcagcgttctacatcttgac

SEQ ID NO: 83893 - DNA, 33 bp, Homo sapien
agcttccttgattacaaaaagcatctccctatg

SEQ ID NO: 83894 - DNA, 33 bp, Homo sapien
agcttccttgattacataaagcatctccctatg

SEQ ID NO: 83895 - DNA, 33 bp, Homo sapien
tgagctgaaggagtgaaggatgtgccatctcaa

SEQ ID NO: 83896 - DNA, 33 bp, Homo sapien
tgagctgaaggagtgagggatgtgccatctcaa

SEQ ID NO: 83897 - DNA, 33 bp, Homo sapien
cattcttctttagttacggccttcgtgtttttt

SEQ ID NO: 83898 - DNA, 33 bp, Homo sapien
cattcttctttagttatggccttcgtgtttttt

SEQ ID NO: 83899 - DNA, 33 bp, Homo sapien
agaagctagacatagcacggataaataatccca

SEQ ID NO: 83900 - DNA, 33 bp, Homo sapien
agaagctagacatagcgcggataaataatccca

SEQ ID NO: 83901 - DNA, 33 bp, Homo sapien
aaatacatttataataagctcatgtgtatcctg

SEQ ID NO: 83902 - DNA, 33 bp, Homo sapien
aaatacatttataatatgctcatgtgtatcctg

SEQ ID NO: 83903 - DNA, 33 bp, Homo sapien
gattgcaaaggaaactaaaagtgttaaagtgag

SEQ ID NO: 83904 - DNA, 33 bp, Homo sapien
gattgcaaaggaaactgaaagtgttaaagtgag

SEQ ID NO: 83905 - DNA, 33 bp, Homo sapien; identical to SEQ ID NO: 83903

SEQ ID NO: 83906 - DNA, 33 bp, Homo sapien; identical to SEQ ID NO: 83904

SEQ ID NO: 83907 - DNA, 33 bp, Homo sapien
ggtaagatgatcaagacagatttctttaaaaaa

SEQ ID NO: 83908 - DNA, 33 bp, Homo sapien
ggtaagatgatcaagagagatttctttaaaaaa

SEQ ID NO: 83909 - DNA, 33 bp, Homo sapien
acgcattttggttaacagatcacatatatgatg

SEQ ID NO: 83910 - DNA, 33 bp, Homo sapien
acgcattttggttaacggatcacatatatgatg

SEQ ID NO: 83911 - DNA, 33 bp, Homo sapien
aatacatttttggagaagtgacgagacaaagga

SEQ ID NO: 83912 - DNA, 33 bp, Homo sapien
aatacatttttggagaggtgacgagacaaagga

SEQ ID NO: 83913 - DNA, 33 bp, Homo sapien
tttgtttctgtttttacagagaatgtgcttcat

SEQ ID NO: 83914 - DNA, 33 bp, Homo sapien
tttgtttctgtttttatagagaatgtgcttcat

SEQ ID NO: 83915 - DNA, 33 bp, Homo sapien
gacagtgaaggtcataatagagcagttatctga

SEQ ID NO: 83916 - DNA, 33 bp, Homo sapien
gacagtgaaggtcatagtagagcagttatctga

SEQ ID NO: 83917 - DNA, 33 bp, Homo sapien; identical to SEQ ID NO: 83915

SEQ ID NO: 83918 - DNA, 33 bp, Homo sapien; identical to SEQ ID NO: 83916

SEQ ID NO: 83919 - DNA, 33 bp, Homo sapien
cttgaaacctcagtgacccaacatcttgtgtaa

SEQ ID NO: 83920 - DNA, 33 bp, Homo sapien
cttgaaacctcagtgatccaacatcttgtgtaa

SEQ ID NO: 83921 - DNA, 33 bp, Homo sapien
caatgagatggtacaacgtaaagtagcattatg

SEQ ID NO: 83922 - DNA, 33 bp, Homo sapien
caatgagatggtacaatgtaaagtagcattatg

SEQ ID NO: 83923 - DNA, 33 bp, Homo sapien
acacggggtcatgctacagtcataagagtcagg

SEQ ID NO: 83924 - DNA, 33 bp, Homo sapien
acacggggtcatgctagagtcataagagtcagg

SEQ ID NO: 83925 - DNA, 33 bp, Homo sapien; identical to SEQ ID NO: 83923

SEQ ID NO: 83926 - DNA, 33 bp, Homo sapien; identical to SEQ ID NO: 83924

SEQ ID NO: 83927 - DNA, 33 bp, Homo sapien
aatggagatctttatcaatcctggaacacgttt

SEQ ID NO: 83928 - DNA, 33 bp, Homo sapien
aatggagatctttatcgatcctggaacacgttt

SEQ ID NO: 83929 - DNA, 33 bp, Homo sapien
gtcaaacaagttacacactatcatccatttatt

SEQ ID NO: 83930 - DNA, 33 bp, Homo sapien
gtcaaacaagttacacgctatcatccatttatt

SEQ ID NO: 83931 - DNA, 33 bp, Homo sapien
ctgctgagaagtctaccgatgattgtattgaga

SEQ ID NO: 83932 - DNA, 33 bp, Homo sapien
ctgctgagaagtctactgatgattgtattgaga

SEQ ID NO: 83933 - DNA, 33 bp, Homo sapien
ctgctttattggttcacgaattgggcagttcca

SEQ ID NO: 83934 - DNA, 33 bp, Homo sapien
ctgctttattggttcatgaattgggcagttcca

SEQ ID NO: 83935 - DNA, 33 bp, Homo sapien
atcctgaggcaatagacaatgaaatgcaatctt

SEQ ID NO: 83936 - DNA, 33 bp, Homo sapien
atcctgaggcaatagataatgaaatgcaatctt

SEQ ID NO: 83937 - DNA, 33 bp, Homo sapien
aggcatggtttacatacgcgttcttcctctttc

SEQ ID NO: 83938 - DNA, 33 bp, Homo sapien
aggcatggtttacatatgcgttcttcctctttc

SEQ ID NO: 83939 - DNA, 33 bp, Homo sapien
tttgttaaacttaagcacaaaaatggacaattt

SEQ ID NO: 83940 - DNA, 33 bp, Homo sapien
tttgttaaacttaagcccaaaaatggacaattt

SEQ ID NO: 83941 - DNA, 33 bp, Homo sapien
cttaatgggtatagaacttcaggtctgcaagat

SEQ ID NO: 83942 - DNA, 33 bp, Homo sapien
cttaatgggtatagaatttcaggtctgcaagat

SEQ ID NO: 83943 - DNA, 33 bp, Homo sapien
ttatgggcatacaatcaacagtagttacagcag

SEQ ID NO: 83944 - DNA, 33 bp, Homo sapien
ttatgggcatacaatcgacagtagttacagcag

SEQ ID NO: 83945 - DNA, 33 bp, Homo sapien
ggatacaaacaatctaagcaaactgtagcaagc

SEQ ID NO: 83946 - DNA, 33 bp, Homo sapien
ggatacaaacaatctacgcaaactgtagcaagc

SEQ ID NO: 83947 - DNA, 33 bp, Homo sapien
ggagtaggaaagtcaacgctttaggaaaatgta

SEQ ID NO: 83948 - DNA, 33 bp, Homo sapien
ggagtaggaaagtcaatgctttaggaaaatgta

SEQ ID NO: 83949 - DNA, 33 bp, Homo sapien
aatggaaatgactgaaacgtcttctgaggtgaa

SEQ ID NO: 83950 - DNA, 33 bp, Homo sapien
aatggaaatgactgaagcgtcttctgaggtgaa

SEQ ID NO: 83951 - DNA, 33 bp, Homo sapien
ctctctcagtgcctcacgggtttagagcactca

SEQ ID NO: 83952 - DNA, 33 bp, Homo sapien
ctctctcagtgcctcatgggtttagagcactca

SEQ ID NO: 83953 - DNA, 33 bp, Homo sapien
attttttattatctccactgctattaacttagt

SEQ ID NO: 83954 - DNA, 33 bp, Homo sapien
attttttattatctccgctgctattaacttagt

SEQ ID NO: 83955 - DNA, 33 bp, Homo sapien
gatctctcaagtctgacgttttaataactagca

SEQ ID NO: 83956 - DNA, 33 bp, Homo sapien
gatctctcaagtctgatgttttaataactagca

SEQ ID NO: 83957 - DNA, 33 bp, Homo sapien
gaatgcttccaagtaaatgcattctggacaaaa

SEQ ID NO: 83958 - DNA, 33 bp, Homo sapien
gaatgcttccaagtaagtgcattctggacaaaa

SEQ ID NO: 83959 - DNA, 33 bp, Homo sapien
caaggttagtcaattacgtttgtgacaggataa

SEQ ID NO: 83960 - DNA, 33 bp, Homo sapien
caaggttagtcaattatgtttgtgacaggataa

SEQ ID NO: 83961 - DNA, 33 bp, Homo sapien
aatcaaaccttttagcaccagcctgagaaacag

SEQ ID NO: 83962 - DNA, 33 bp, Homo sapien
aatcaaaccttttagcgccagcctgagaaacag

SEQ ID NO: 83963 - DNA, 33 bp, Homo sapien
ttttttaagatatctcactccgtcatccaggct

SEQ ID NO: 83964 - DNA, 33 bp, Homo sapien
ttttttaagatatctcgctccgtcatccaggct

SEQ ID NO: 83965 - DNA, 33 bp, Homo sapien
agagatactgctttgaacttactccttcatatt

SEQ ID NO: 83966 - DNA, 33 bp, Homo sapien
agagatactgctttgagcttactccttcatatt

SEQ ID NO: 83967 - DNA, 33 bp, Homo sapien
cccaccagaatggccaaaataaaaactagaaca

SEQ ID NO: 83968 - DNA, 33 bp, Homo sapien
cccaccagaatggccagaataaaaactagaaca

SEQ ID NO: 83969 - DNA, 33 bp, Homo sapien
tgtgtagtgatttctcactggggtttctgaact

SEQ ID NO: 83970 - DNA, 33 bp, Homo sapien
tgtgtagtgatttctccctggggtttctgaact

SEQ ID NO: 83971 - DNA, 33 bp, Homo sapien
gaggtttgaagcaatccgaagcagtttggagcc

SEQ ID NO: 83972 - DNA, 33 bp, Homo sapien
gaggtttgaagcaatctgaagcagtttggagcc

SEQ ID NO: 83973 - DNA, 33 bp, Homo sapien
gctgtaagtgtagcccaaaagagttataatttt

SEQ ID NO: 83974 - DNA, 33 bp, Homo sapien
gctgtaagtgtagcccgaaagagttataatttt

SEQ ID NO: 83975 - DNA, 33 bp, Homo sapien
gcatcatgtcttccaaactatctacattattgt

SEQ ID NO: 83976 - DNA, 33 bp, Homo sapien
gcatcatgtcttccaacctatctacattattgt

SEQ ID NO: 83977 - DNA, 33 bp, Homo sapien
catcccttttttcaacaactgttcactggtaac

SEQ ID NO: 83978 - DNA, 33 bp, Homo sapien
catcccttttttcaaccactgttcactggtaac

SEQ ID NO: 83979 - DNA, 33 bp, Homo sapien
tgtctagcttgaccacagaaagcattagccatg

SEQ ID NO: 83980 - DNA, 33 bp, Homo sapien
tgtctagcttgaccacggaaagcattagccatg

SEQ ID NO: 83981 - DNA, 33 bp, Homo sapien
tatatttctcatccacagcttatttacacatct

SEQ ID NO: 83982 - DNA, 33 bp, Homo sapien
tatatttctcatccacggcttatttacacatct

SEQ ID NO: 83983 - DNA, 33 bp, Homo sapien
ccaataggaatgaataccttccttctaatattt

SEQ ID NO: 83984 - DNA, 33 bp, Homo sapien
ccaataggaatgaatagcttccttctaatattt

SEQ ID NO: 83985 - DNA, 33 bp, Homo sapien
aaaataaaacaagggaagtctcaatagaccata

SEQ ID NO: 83986 - DNA, 33 bp, Homo sapien
aaaataaaacaagggatgtctcaatagaccata

SEQ ID NO: 83987 - DNA, 33 bp, Homo sapien
caatttaatatgaacagcttactgtgcagctgt

SEQ ID NO: 83988 - DNA, 33 bp, Homo sapien
caatttaatatgaacatcttactgtgcagctgt

SEQ ID NO: 83989 - DNA, 33 bp, Homo sapien
ttgtttcttgttcacgcagagtccaagtcaatt

SEQ ID NO: 83990 - DNA, 33 bp, Homo sapien
ttgtttcttgttcacgtagagtccaagtcaatt

SEQ ID NO: 83991 - DNA, 33 bp, Homo sapien
ctaatcttcattttcccgctagtgcctgagatc

SEQ ID NO: 83992 - DNA, 33 bp, Homo sapien
ctaatcttcattttcctgctagtgcctgagatc

SEQ ID NO: 83993 - DNA, 33 bp, Homo sapien
ccgtagtgtgcttcacagaaaattggatggcca

SEQ ID NO: 83994 - DNA, 33 bp, Homo sapien
ccgtagtgtgcttcacggaaaattggatggcca

SEQ ID NO: 83995 - DNA, 33 bp, Homo sapien
tatttaaaggattgaaatatatacaagaacacc

SEQ ID NO: 83996 - DNA, 33 bp, Homo sapien
tatttaaaggattgaagtatatacaagaacacc

SEQ ID NO: 83997 - DNA, 33 bp, Homo sapien
gctcttcatatggtccacttggccctcataatt

SEQ ID NO: 83998 - DNA, 33 bp, Homo sapien
gctcttcatatggtccgcttggccctcataatt

SEQ ID NO: 83999 - DNA, 33 bp, Homo sapien
tcagccaaagtgtccaccagaaatattaaatcc

SEQ ID NO: 84000 - DNA, 33 bp, Homo sapien
tcagccaaagtgtccatcagaaatattaaatcc

SEQ ID NO: 84001 - DNA, 33 bp, Homo sapien
taacttcagccttgtccataggatttaatattt

SEQ ID NO: 84002 - DNA, 33 bp, Homo sapien
taacttcagccttgtctataggatttaatattt

SEQ ID NO: 84003 - DNA, 33 bp, Homo sapien
atccagtcagacatcccgaacaacttgtctcca

SEQ ID NO: 84004 - DNA, 33 bp, Homo sapien
atccagtcagacatcctgaacaacttgtctcca

SEQ ID NO: 84005 - DNA, 33 bp, Homo sapien
cttgggactaggggacaataaagggctcaaagg

SEQ ID NO: 84006 - DNA, 33 bp, Homo sapien
cttgggactaggggaccataaagggctcaaagg

SEQ ID NO: 84007 - DNA, 33 bp, Homo sapien
ctatttatctttccaaagtctactcaacagtgc

SEQ ID NO: 84008 - DNA, 33 bp, Homo sapien
ctatttatctttccaatgtctactcaacagtgc

SEQ ID NO: 84009 - DNA, 33 bp, Homo sapien
tatattagaaaagtgccacagagaaaaaagtaa

SEQ ID NO: 84010 - DNA, 33 bp, Homo sapien
tatattagaaaagtgctacagagaaaaaagtaa

SEQ ID NO: 84011 - DNA, 33 bp, Homo sapien
ttacttataaaaagtgcagctcggctgggcgcg

SEQ ID NO: 84012 - DNA, 33 bp, Homo sapien
ttacttataaaaagtggagctcggctgggcgcg

SEQ ID NO: 84013 - DNA, 33 bp, Homo sapien
ttcagtgtcaaggtgcaccgatagagcagaagg

SEQ ID NO: 84014 - DNA, 33 bp, Homo sapien
ttcagtgtcaaggtgcgccgatagagcagaagg

SEQ ID NO: 84015 - DNA, 33 bp, Homo sapien
cttgcgaagtgattgaactacacagatgatgcc

SEQ ID NO: 84016 - DNA, 33 bp, Homo sapien
cttgcgaagtgattgacctacacagatgatgcc

SEQ ID NO: 84017 - DNA, 33 bp, Homo sapien
taaaaaagattgtgaccagccaaagagatggat

SEQ ID NO: 84018 - DNA, 33 bp, Homo sapien
taaaaaagattgtgactagccaaagagatggat

SEQ ID NO: 84019 - DNA, 33 bp, Homo sapien
tagtttaggatatctcacaaaaccataaaagtt

SEQ ID NO: 84020 - DNA, 33 bp, Homo sapien
tagtttaggatatctcgcaaaaccataaaagtt

SEQ ID NO: 84021 - DNA, 33 bp, Homo sapien
tccctctgaccctttgaatggacgctgtccaga

SEQ ID NO: 84022 - DNA, 33 bp, Homo sapien
tccctctgaccctttggatggacgctgtccaga

SEQ ID NO: 84023 - DNA, 33 bp, Homo sapien
ccctgtgggactcagaactcactactctcaccc

SEQ ID NO: 84024 - DNA, 33 bp, Homo sapien
ccctgtgggactcagagctcactactctcaccc

SEQ ID NO: 84025 - DNA, 33 bp, Homo sapien
gcctctgtaagagggtaacattacagcagtgtt

SEQ ID NO: 84026 - DNA, 33 bp, Homo sapien
gcctctgtaagagggtgacattacagcagtgtt

SEQ ID NO: 84027 - DNA, 33 bp, Homo sapien
aaatgataagttcaacaaagaaaaatgaagcag

SEQ ID NO: 84028 - DNA, 33 bp, Homo sapien
aaatgataagttcaacgaagaaaaatgaagcag

SEQ ID NO: 84029 - DNA, 33 bp, Homo sapien
gatattaatgagcaatcaaaatgtgaaagtggc

SEQ ID NO: 84030 - DNA, 33 bp, Homo sapien
gatattaatgagcaatgaaaatgtgaaagtggc

SEQ ID NO: 84031 - DNA, 33 bp, Homo sapien
gattcctgtagttagccattccagtcactccca

SEQ ID NO: 84032 - DNA, 33 bp, Homo sapien
gattcctgtagttagctattccagtcactccca

SEQ ID NO: 84033 - DNA, 33 bp, Homo sapien
ctaactacaggaatcacctacaggccttttcac

SEQ ID NO: 84034 - DNA, 33 bp, Homo sapien
ctaactacaggaatcatctacaggccttttcac

SEQ ID NO: 84035 - DNA, 33 bp, Homo sapien
ataatggttcagatgccgcacagtcttttatga

SEQ ID NO: 84036 - DNA, 33 bp, Homo sapien
ataatggttcagatgctgcacagtcttttatga

SEQ ID NO: 84037 - DNA, 33 bp, Homo sapien
gtagtgccttagttaccgactgcaactgtacca

SEQ ID NO: 84038 - DNA, 33 bp, Homo sapien
gtagtgccttagttactgactgcaactgtacca

SEQ ID NO: 84039 - DNA, 33 bp, Homo sapien
ctgcctatttaatgaaagggaaagctcagttca

SEQ ID NO: 84040 - DNA, 33 bp, Homo sapien
ctgcctatttaatgaatgggaaagctcagttca

SEQ ID NO: 84041 - DNA, 33 bp, Homo sapien
atcatgtttcaccgagacagaaaacaccttttc

SEQ ID NO: 84042 - DNA, 33 bp, Homo sapien
atcatgtttcaccgaggcagaaaacaccttttc

SEQ ID NO: 84043 - DNA, 33 bp, Homo sapien
ggtttatttgtaacagaaaggtttaattagacc

SEQ ID NO: 84044 - DNA, 33 bp, Homo sapien
ggtttatttgtaacaggaaggtttaattagacc

SEQ ID NO: 84045 - DNA, 33 bp, Homo sapien
gtttttaagacaaaaacgggagcttttatacag

SEQ ID NO: 84046 - DNA, 33 bp, Homo sapien
gtttttaagacaaaaatgggagcttttatacag

SEQ ID NO: 84047 - DNA, 33 bp, Homo sapien
ttcgccgtgtttctcactataaagttactattt

SEQ ID NO: 84048 - DNA, 33 bp, Homo sapien
ttcgccgtgtttctcattataaagttactattt

SEQ ID NO: 84049 - DNA, 33 bp, Homo sapien
acagtttttggctgtccagattctgctcaaaag

SEQ ID NO: 84050 - DNA, 33 bp, Homo sapien
acagtttttggctgtctagattctgctcaaaag

SEQ ID NO: 84051 - DNA, 33 bp, Homo sapien
ttatgaataagtctgcacccaggtttatttgaa

SEQ ID NO: 84052 - DNA, 33 bp, Homo sapien
ttatgaataagtctgcgcccaggtttatttgaa

SEQ ID NO: 84053 - DNA, 33 bp, Homo sapien
tactggcataaacgatgaacttggacaagaatc

SEQ ID NO: 84054 - DNA, 33 bp, Homo sapien
tactggcataaacgattaacttggacaagaatc

SEQ ID NO: 84055 - DNA, 33 bp, Homo sapien
atcattctgaagctgcaaatattactaaattat

SEQ ID NO: 84056 - DNA, 33 bp, Homo sapien
atcattctgaagctgcgaatattactaaattat

SEQ ID NO: 84057 - DNA, 33 bp, Homo sapien
tcacctcttgaagccaaagtttctaaactatga

SEQ ID NO: 84058 - DNA, 33 bp, Homo sapien
tcacctcttgaagccacagtttctaaactatga

SEQ ID NO: 84059 - DNA, 33 bp, Homo sapien
aagagcaaatatagccaaaagcactaatcacac

SEQ ID NO: 84060 - DNA, 33 bp, Homo sapien
aagagcaaatatagccgaaagcactaatcacac

SEQ ID NO: 84061 - DNA, 33 bp, Homo sapien
aaattgccaacctgaaagtctgcaaataggaac

SEQ ID NO: 84062 - DNA, 33 bp, Homo sapien
aaattgccaacctgaaggtctgcaaataggaac

SEQ ID NO: 84063 - DNA, 33 bp, Homo sapien
ctttgtccattttgccaattccattccaagacg

SEQ ID NO: 84064 - DNA, 33 bp, Homo sapien
ctttgtccattttgcccattccattccaagacg

SEQ ID NO: 84065 - DNA, 33 bp, Homo sapien
ccactctagactgttcacaaaatgatcatgggt

SEQ ID NO: 84066 - DNA, 33 bp, Homo sapien
ccactctagactgttcgcaaaatgatcatgggt

SEQ ID NO: 84067 - DNA, 33 bp, Homo sapien
ccacaatgaattggtacaaagagaggaggaaga

SEQ ID NO: 84068 - DNA, 33 bp, Homo sapien
ccacaatgaattggtagaaagagaggaggaaga

SEQ ID NO: 84069 - DNA, 33 bp, Homo sapien
gaccaaagttgctatgaatgtcaaaacattagc

SEQ ID NO: 84070 - DNA, 33 bp, Homo sapien
gaccaaagttgctatgtatgtcaaaacattagc

SEQ ID NO: 84071 - DNA, 33 bp, Homo sapien
ttagtcaggtcctaaacgtcatggtgaaagatt

SEQ ID NO: 84072 - DNA, 33 bp, Homo sapien
ttagtcaggtcctaaatgtcatggtgaaagatt

SEQ ID NO: 84073 - DNA, 33 bp, Homo sapien
tttcaagtacaaaaaaatctacaatgaaatatt

SEQ ID NO: 84074 - DNA, 33 bp, Homo sapien
tttcaagtacaaaaaagtctacaatgaaatatt

SEQ ID NO: 84075 - DNA, 33 bp, Homo sapien
gcttgagactggcctacgtgtcaggataagatt

SEQ ID NO: 84076 - DNA, 33 bp, Homo sapien
gcttgagactggcctatgtgtcaggataagatt

SEQ ID NO: 84077 - DNA, 33 bp, Homo sapien
tgaatttaccattctaagtagagtgacatatat

SEQ ID NO: 84078 - DNA, 33 bp, Homo sapien
tgaatttaccattctaggtagagtgacatatat

SEQ ID NO: 84079 - DNA, 33 bp, Homo sapien
atgtattaaaaagtgccctctctccacacccaa

SEQ ID NO: 84080 - DNA, 33 bp, Homo sapien
atgtattaaaaagtgctctctctccacacccaa

SEQ ID NO: 84081 - DNA, 33 bp, Homo sapien
ttaaatgacatttggacggtttctgtttgagca

SEQ ID NO: 84082 - DNA, 33 bp, Homo sapien
ttaaatgacatttggatggtttctgtttgagca

SEQ ID NO: 84083 - DNA, 33 bp, Homo sapien
cagcatacattttgtcggaattttatgtttgtc

SEQ ID NO: 84084 - DNA, 33 bp, Homo sapien
cagcatacattttgtctgaattttatgtttgtc

SEQ ID NO: 84085 - DNA, 33 bp, Homo sapien
aatttggctttacaccaaatccagcttcatgct

SEQ ID NO: 84086 - DNA, 33 bp, Homo sapien
aatttggctttacaccgaatccagcttcatgct

SEQ ID NO: 84087 - DNA, 33 bp, Homo sapien
ttatatataaagtaaaagtcactgtatatctcc

SEQ ID NO: 84088 - DNA, 33 bp, Homo sapien
ttatatataaagtaaaggtcactgtatatctcc

SEQ ID NO: 84089 - DNA, 33 bp, Homo sapien
tgcagttcactgaaaaatgctcacagaggcagt

SEQ ID NO: 84090 - DNA, 33 bp, Homo sapien
tgcagttcactgaaaagtgctcacagaggcagt

SEQ ID NO: 84091 - DNA, 33 bp, Homo sapien
cgtcttggccttgtacagcgttcagaaggcgac

SEQ ID NO: 84092 - DNA, 33 bp, Homo sapien
cgtcttggccttgtaccgcgttcagaaggcgac

SEQ ID NO: 84093 - DNA, 33 bp, Homo sapien
tacccgggaaaagaggaacagtagcgtggactc

SEQ ID NO: 84094 - DNA, 33 bp, Homo sapien
tacccgggaaaagagggacagtagcgtggactc

SEQ ID NO: 84095 - DNA, 33 bp, Homo sapien
ttaagtggcagataaagttacctcaatagagat

SEQ ID NO: 84096 - DNA, 33 bp, Homo sapien
ttaagtggcagataaatttacctcaatagagat

SEQ ID NO: 84097 - DNA, 33 bp, Homo sapien
tatcttctctgactgaagcacaggttggagccc

SEQ ID NO: 84098 - DNA, 33 bp, Homo sapien
tatcttctctgactgaggcacaggttggagccc

SEQ ID NO: 84099 - DNA, 33 bp, Homo sapien
gtggacactgtggacaaacagcaatgggaagaa

SEQ ID NO: 84100 - DNA, 33 bp, Homo sapien
gtggacactgtggacagacagcaatgggaagaa

SEQ ID NO: 84101 - DNA, 33 bp, Homo sapien
agagcagctcagacagcccttgcaaaggccctt

SEQ ID NO: 84102 - DNA, 33 bp, Homo sapien
agagcagctcagacagtccttgcaaaggccctt

SEQ ID NO: 84103 - DNA, 33 bp, Homo sapien
tgatattgacgctaacagaaaaagatgacaaaa

SEQ ID NO: 84104 - DNA, 33 bp, Homo sapien
tgatattgacgctaacggaaaaagatgacaaaa

SEQ ID NO: 84105 - DNA, 33 bp, Homo sapien
aagttagatatgaagcaagaaattgtttaaatg

SEQ ID NO: 84106 - DNA, 33 bp, Homo sapien
aagttagatatgaagcgagaaattgtttaaatg

SEQ ID NO: 84107 - DNA, 33 bp, Homo sapien
ctatgattttcgctacacttaattataaattgg

SEQ ID NO: 84108 - DNA, 33 bp, Homo sapien
ctatgattttcgctactcttaattataaattgg

SEQ ID NO: 84109 - DNA, 33 bp, Homo sapien
catgtggaaactttcaaattgtgtccactcact

SEQ ID NO: 84110 - DNA, 33 bp, Homo sapien
catgtggaaactttcacattgtgtccactcact

SEQ ID NO: 84111 - DNA, 33 bp, Homo sapien
cttggaaaatgcgataagttttaaatccataaa

SEQ ID NO: 84112 - DNA, 33 bp, Homo sapien
cttggaaaatgcgatatgttttaaatccataaa

SEQ ID NO: 84113 - DNA, 33 bp, Homo sapien
ttttgagccagcttggcatcttagctcttgaaa

SEQ ID NO: 84114 - DNA, 33 bp, Homo sapien
ttttgagccagcttggtatcttagctcttgaaa

SEQ ID NO: 84115 - DNA, 33 bp, Homo sapien
gtaccaaggagcataactctgcaggatggcaga

SEQ ID NO: 84116 - DNA, 33 bp, Homo sapien
gtaccaaggagcataagtctgcaggatggcaga

SEQ ID NO: 84117 - DNA, 33 bp, Homo sapien
tggttttctcagctagatttcaactagagagcc

SEQ ID NO: 84118 - DNA, 33 bp, Homo sapien
tggttttctcagctaggtttcaactagagagcc

SEQ ID NO: 84119 - DNA, 33 bp, Homo sapien
gttatctaactgaacacgaacctcttgtaacct

SEQ ID NO: 84120 - DNA, 33 bp, Homo sapien
gttatctaactgaacatgaacctcttgtaacct

SEQ ID NO: 84121 - DNA, 33 bp, Homo sapien
ggattcagaagagtgacgaaaataattgaaaaa

SEQ ID NO: 84122 - DNA, 33 bp, Homo sapien
ggattcagaagagtgatgaaaataattgaaaaa

SEQ ID NO: 84123 - DNA, 33 bp, Homo sapien
agccagggccacattaaggaaacctcaaatcat

SEQ ID NO: 84124 - DNA, 33 bp, Homo sapien
agccagggccacattacggaaacctcaaatcat

SEQ ID NO: 84125 - DNA, 33 bp, Homo sapien
ctttatgactcaggaacgtctttctcaaggacc

SEQ ID NO: 84126 - DNA, 33 bp, Homo sapien
ctttatgactcaggaatgtctttctcaaggacc

SEQ ID NO: 84127 - DNA, 33 bp, Homo sapien
ggacagcataaataagccataaaagggtctaca

SEQ ID NO: 84128 - DNA, 33 bp, Homo sapien
ggacagcataaataagtcataaaagggtctaca

SEQ ID NO: 84129 - DNA, 33 bp, Homo sapien
agctgttttgcactcaccaaatattagaagtta

SEQ ID NO: 84130 - DNA, 33 bp, Homo sapien
agctgttttgcactcatcaaatattagaagtta

SEQ ID NO: 84131 - DNA, 33 bp, Homo sapien
ggttctgcttataataaaaacaaggacagagtc

SEQ ID NO: 84132 - DNA, 33 bp, Homo sapien
ggttctgcttataatacaaacaaggacagagtc

SEQ ID NO: 84133 - DNA, 33 bp, Homo sapien
aaccttgccacttagaaaggaggttggaatcaa

SEQ ID NO: 84134 - DNA, 33 bp, Homo sapien
aaccttgccacttagagaggaggttggaatcaa

SEQ ID NO: 84135 - DNA, 33 bp, Homo sapien
ctccatgtcaaaccaacgagcttaaagatcact

SEQ ID NO: 84136 - DNA, 33 bp, Homo sapien
ctccatgtcaaaccaatgagcttaaagatcact

SEQ ID NO: 84137 - DNA, 33 bp, Homo sapien
tagaataatgaattaaatctgcttgtgttggct

SEQ ID NO: 84138 - DNA, 33 bp, Homo sapien
tagaataatgaattaagtctgcttgtgttggct

SEQ ID NO: 84139 - DNA, 33 bp, Homo sapien
tggcttagattcatacactttggagtagaagtg

SEQ ID NO: 84140 - DNA, 33 bp, Homo sapien
tggcttagattcatacgctttggagtagaagtg

SEQ ID NO: 84141 - DNA, 33 bp, Homo sapien
gacccagtgagaattcaagcacagtgccggtgg

SEQ ID NO: 84142 - DNA, 33 bp, Homo sapien
gacccagtgagaattcgagcacagtgccggtgg

SEQ ID NO: 84143 - DNA, 33 bp, Homo sapien
tttatgtctgagatgcagaaatactcaaggttg

SEQ ID NO: 84144 - DNA, 33 bp, Homo sapien
tttatgtctgagatgcggaaatactcaaggttg

SEQ ID NO: 84145 - DNA, 33 bp, Homo sapien
agccttcccaaaagacaagacctgtgcactatg

SEQ ID NO: 84146 - DNA, 33 bp, Homo sapien
agccttcccaaaagacgagacctgtgcactatg

SEQ ID NO: 84147 - DNA, 33 bp, Homo sapien
gagtgacattatttggcacgaacctggtagcta

SEQ ID NO: 84148 - DNA, 33 bp, Homo sapien
gagtgacattatttgggacgaacctggtagcta

SEQ ID NO: 84149 - DNA, 33 bp, Homo sapien
ggagcaaggagctaacaagggtagtaaacaagg

SEQ ID NO: 84150 - DNA, 33 bp, Homo sapien
ggagcaaggagctaacgagggtagtaaacaagg

SEQ ID NO: 84151 - DNA, 33 bp, Homo sapien
aagaagtaaaacgacaaggagcagctgatggta

SEQ ID NO: 84152 - DNA, 33 bp, Homo sapien
aagaagtaaaacgacacggagcagctgatggta

SEQ ID NO: 84153 - DNA, 33 bp, Homo sapien
gaataatattgcatgacgggcgtgtactatgtt

SEQ ID NO: 84154 - DNA, 33 bp, Homo sapien
gaataatattgcatgatgggcgtgtactatgtt

SEQ ID NO: 84155 - DNA, 33 bp, Homo sapien
taaacggcttgcagacagaaacgctttggagtt

SEQ ID NO: 84156 - DNA, 33 bp, Homo sapien
taaacggcttgcagaccgaaacgctttggagtt

SEQ ID NO: 84157 - DNA, 33 bp, Homo sapien
aagctgagggagataccgaggtgccaccttccc

SEQ ID NO: 84158 - DNA, 33 bp, Homo sapien
aagctgagggagatactgaggtgccaccttccc

SEQ ID NO: 84159 - DNA, 33 bp, Homo sapien
ggtgaccatggagtggaattgagagagggtttt

SEQ ID NO: 84160 - DNA, 33 bp, Homo sapien
ggtgaccatggagtgggattgagagagggtttt

SEQ ID NO: 84161 - DNA, 33 bp, Homo sapien
agaggaagacaagttaaggtctagaaacctgca

SEQ ID NO: 84162 - DNA, 33 bp, Homo sapien
agaggaagacaagttagggtctagaaacctgca

SEQ ID NO: 84163 - DNA, 33 bp, Homo sapien
catattttgctagatgcaatgccaggaaagaac

SEQ ID NO: 84164 - DNA, 33 bp, Homo sapien
catattttgctagatgtaatgccaggaaagaac

SEQ ID NO: 84165 - DNA, 33 bp, Homo sapien
attataaagcaagttacaaagcaaggaagtttc

SEQ ID NO: 84166 - DNA, 33 bp, Homo sapien
attataaagcaagttataaagcaaggaagtttc

SEQ ID NO: 84167 - DNA, 33 bp, Homo sapien
tgcagtagcatcctaactggcagtcctgtttct

SEQ ID NO: 84168 - DNA, 33 bp, Homo sapien
tgcagtagcatcctaattggcagtcctgtttct

SEQ ID NO: 84169 - DNA, 33 bp, Homo sapien
tttttaacccttaaacaacattggcattttaac

SEQ ID NO: 84170 - DNA, 33 bp, Homo sapien
tttttaacccttaaacgacattggcattttaac

SEQ ID NO: 84171 - DNA, 33 bp, Homo sapien
gtctatcttttcccatcaggtctgttcgaaaac

SEQ ID NO: 84172 - DNA, 33 bp, Homo sapien
gtctatcttttcccattaggtctgttcgaaaac

SEQ ID NO: 84173 - DNA, 33 bp, Homo sapien
gctaagttcctcacaaagtaaggaagatgagtt

SEQ ID NO: 84174 - DNA, 33 bp, Homo sapien
gctaagttcctcacaacgtaaggaagatgagtt

SEQ ID NO: 84175 - DNA, 33 bp, Homo sapien
tatctccagtaccctcacagctgcttctctgct

SEQ ID NO: 84176 - DNA, 33 bp, Homo sapien
tatctccagtaccctcgcagctgcttctctgct

SEQ ID NO: 84177 - DNA, 33 bp, Homo sapien
ctgtaagaatatgcagaacttttatcttccctg

SEQ ID NO: 84178 - DNA, 33 bp, Homo sapien
ctgtaagaatatgcaggacttttatcttccctg

SEQ ID NO: 84179 - DNA, 33 bp, Homo sapien
attgctatcactgaggcacttggtttcttaagc

SEQ ID NO: 84180 - DNA, 33 bp, Homo sapien
attgctatcactgaggtacttggtttcttaagc

SEQ ID NO: 84181 - DNA, 33 bp, Homo sapien
attggaaatcagaataagatagcataacaaatc

SEQ ID NO: 84182 - DNA, 33 bp, Homo sapien
attggaaatcagaataggatagcataacaaatc

SEQ ID NO: 84183 - DNA, 33 bp, Homo sapien
aaatgaaaaccacacaaaaagtacagctatgta

SEQ ID NO: 84184 - DNA, 33 bp, Homo sapien
aaatgaaaaccacacataaagtacagctatgta

SEQ ID NO: 84185 - DNA, 33 bp, Homo sapien
ataattccgtaatttcaatgtctggtgagatct

SEQ ID NO: 84186 - DNA, 33 bp, Homo sapien
ataattccgtaatttcgatgtctggtgagatct

SEQ ID NO: 84187 - DNA, 33 bp, Homo sapien
atgacagtggcagagacataaacagccagccta

SEQ ID NO: 84188 - DNA, 33 bp, Homo sapien
atgacagtggcagagagataaacagccagccta

SEQ ID NO: 84189 - DNA, 33 bp, Homo sapien
gactggactattagccacaacagcattccccac

SEQ ID NO: 84190 - DNA, 33 bp, Homo sapien
gactggactattagccgcaacagcattccccac

SEQ ID NO: 84191 - DNA, 33 bp, Homo sapien
gcccctatctgaacccagaaagcagactggatg

SEQ ID NO: 84192 - DNA, 33 bp, Homo sapien
gcccctatctgaaccccgaaagcagactggatg

SEQ ID NO: 84193 - DNA, 33 bp, Homo sapien
ttaaaacatatgaacaagcagggaggctcacca

SEQ ID NO: 84194 - DNA, 33 bp, Homo sapien
ttaaaacatatgaacacgcagggaggctcacca

SEQ ID NO: 84195 - DNA, 33 bp, Homo sapien
cttgattctcatggcaatcttttttcttaacac

SEQ ID NO: 84196 - DNA, 33 bp, Homo sapien
cttgattctcatggcagtcttttttcttaacac

SEQ ID NO: 84197 - DNA, 33 bp, Homo sapien
cagaacacctctagcaatctatttccatcatct

SEQ ID NO: 84198 - DNA, 33 bp, Homo sapien
cagaacacctctagcagtctatttccatcatct

SEQ ID NO: 84199 - DNA, 33 bp, Homo sapien
gcctctgaaagctgccaatcagtgacagcctca

SEQ ID NO: 84200 - DNA, 33 bp, Homo sapien
gcctctgaaagctgcccatcagtgacagcctca

SEQ ID NO: 84201 - DNA, 33 bp, Homo sapien
tgtctggtggtgagttcaaagaataaatgtttg

SEQ ID NO: 84202 - DNA, 33 bp, Homo sapien
tgtctggtggtgagttgaaagaataaatgtttg

SEQ ID NO: 84203 - DNA, 33 bp, Homo sapien
agcaggttctccagtaacatcgtttcattcaat

SEQ ID NO: 84204 - DNA, 33 bp, Homo sapien
agcaggttctccagtagcatcgtttcattcaat

SEQ ID NO: 84205 - DNA, 33 bp, Homo sapien
cttgggttgggttataaaagtgcagcacaaggg

SEQ ID NO: 84206 - DNA, 33 bp, Homo sapien
cttgggttgggttatagaagtgcagcacaaggg

SEQ ID NO: 84207 - DNA, 33 bp, Homo sapien
cagtatgagacatttgaagagtcacttttttca

SEQ ID NO: 84208 - DNA, 33 bp, Homo sapien
cagtatgagacatttgcagagtcacttttttca

SEQ ID NO: 84209 - DNA, 33 bp, Homo sapien
gaaggaataaatggccactgggctttctctaga

SEQ ID NO: 84210 - DNA, 33 bp, Homo sapien
gaaggaataaatggccgctgggctttctctaga

SEQ ID NO: 84211 - DNA, 33 bp, Homo sapien
gcacacattgcaccaaatgaagctaacttatgc

SEQ ID NO: 84212 - DNA, 33 bp, Homo sapien
gcacacattgcaccaagtgaagctaacttatgc

SEQ ID NO: 84213 - DNA, 33 bp, Homo sapien
gaactaaacagaacacagctctaacattctgat

SEQ ID NO: 84214 - DNA, 33 bp, Homo sapien
gaactaaacagaacacggctctaacattctgat

SEQ ID NO: 84215 - DNA, 33 bp, Homo sapien
tagaactgggtgtcagaaactaagtgaggagag

SEQ ID NO: 84216 - DNA, 33 bp, Homo sapien
tagaactgggtgtcagcaactaagtgaggagag

SEQ ID NO: 84217 - DNA, 33 bp, Homo sapien
tgggcaaagagaatgacgaacactgtcttcaag

SEQ ID NO: 84218 - DNA, 33 bp, Homo sapien
tgggcaaagagaatgatgaacactgtcttcaag

SEQ ID NO: 84219 - DNA, 33 bp, Homo sapien
agtaagtcttcacccacaaaacctttcattgtg

SEQ ID NO: 84220 - DNA, 33 bp, Homo sapien
agtaagtcttcacccataaaacctttcattgtg

SEQ ID NO: 84221 - DNA, 33 bp, Homo sapien
atcaaggaaagccgagaattgcccgtaaacttc

SEQ ID NO: 84222 - DNA, 33 bp, Homo sapien
atcaaggaaagccgaggattgcccgtaaacttc

SEQ ID NO: 84223 - DNA, 33 bp, Homo sapien
gttccactatttacaaagttagaaaatcctcca

SEQ ID NO: 84224 - DNA, 33 bp, Homo sapien
gttccactatttacaacgttagaaaatcctcca

SEQ ID NO: 84225 - DNA, 33 bp, Homo sapien
gtccactgctaattaaatacacttgtcaatggg

SEQ ID NO: 84226 - DNA, 33 bp, Homo sapien
gtccactgctaattaagtacacttgtcaatggg

SEQ ID NO: 84227 - DNA, 33 bp, Homo sapien
ggaagaatgaatacaacagtgattaattttgtg

SEQ ID NO: 84228 - DNA, 33 bp, Homo sapien
ggaagaatgaatacaagagtgattaattttgtg

SEQ ID NO: 84229 - DNA, 33 bp, Homo sapien
ccaaagaattgagccactcagatgccctttaac

SEQ ID NO: 84230 - DNA, 33 bp, Homo sapien
ccaaagaattgagccagtcagatgccctttaac

SEQ ID NO: 84231 - DNA, 33 bp, Homo sapien
gagcagaggggtttgaacagtttcagcagcatt

SEQ ID NO: 84232 - DNA, 33 bp, Homo sapien
gagcagaggggtttgatcagtttcagcagcatt

SEQ ID NO: 84233 - DNA, 33 bp, Homo sapien
gctgcaccgctagcctaaagataacgtcctcca

SEQ ID NO: 84234 - DNA, 33 bp, Homo sapien
gctgcaccgctagcctgaagataacgtcctcca

SEQ ID NO: 84235 - DNA, 33 bp, Homo sapien
agagcactggttcaaaatatgtagcacatcctg

SEQ ID NO: 84236 - DNA, 33 bp, Homo sapien
agagcactggttcaaactatgtagcacatcctg

SEQ ID NO: 84237 - DNA, 33 bp, Homo sapien
gcatattcacagactcagaatgaaaaggacaaa

SEQ ID NO: 84238 - DNA, 33 bp, Homo sapien
gcatattcacagactcggaatgaaaaggacaaa

SEQ ID NO: 84239 - DNA, 33 bp, Homo sapien
gtcaacaagaaacaataactatagctgtgtagc

SEQ ID NO: 84240 - DNA, 33 bp, Homo sapien
gtcaacaagaaacaatcactatagctgtgtagc

SEQ ID NO: 84241 - DNA, 33 bp, Homo sapien
ctctcaccatcaccaacgagcgggagtaaccca

SEQ ID NO: 84242 - DNA, 33 bp, Homo sapien
ctctcaccatcaccaaggagcgggagtaaccca

SEQ ID NO: 84243 - DNA, 33 bp, Homo sapien
gcaacccagatgagtgaaaacacctgacacatc

SEQ ID NO: 84244 - DNA, 33 bp, Homo sapien
gcaacccagatgagtggaaacacctgacacatc

SEQ ID NO: 84245 - DNA, 33 bp, Homo sapien
cagcaacctttccacaaagccaggcactcagga

SEQ ID NO: 84246 - DNA, 33 bp, Homo sapien
cagcaacctttccacagagccaggcactcagga

SEQ ID NO: 84247 - DNA, 33 bp, Homo sapien
agggaatttcatgcagcctcccttgtggatgat

SEQ ID NO: 84248 - DNA, 33 bp, Homo sapien
agggaatttcatgcagtctcccttgtggatgat

SEQ ID NO: 84249 - DNA, 33 bp, Homo sapien; identical to SEQ ID NO: 84247

SEQ ID NO: 84250 - DNA, 33 bp, Homo sapien; identical to SEQ ID NO: 84248

SEQ ID NO: 84251 - DNA, 33 bp, Homo sapien
tgtcgctttttgggacactgagtcatggacctt

SEQ ID NO: 84252 - DNA, 33 bp, Homo sapien
tgtcgctttttgggaccctgagtcatggacctt

SEQ ID NO: 84253 - DNA, 33 bp, Homo sapien
agaaatgatgtctttgaattgaaactaaagggg

SEQ ID NO: 84254 - DNA, 33 bp, Homo sapien
agaaatgatgtctttggattgaaactaaagggg

SEQ ID NO: 84255 - DNA, 33 bp, Homo sapien; identical to SEQ ID NO: 84253

SEQ ID NO: 84256 - DNA, 33 bp, Homo sapien; identical to SEQ ID NO: 84254

SEQ ID NO: 84257 - DNA, 33 bp, Homo sapien
ttcagaatgaagaccaaaaaacggagaatagtg

SEQ ID NO: 84258 - DNA, 33 bp, Homo sapien
ttcagaatgaagaccacaaaacggagaatagtg

SEQ ID NO: 84259 - DNA, 33 bp, Homo sapien
tttggaagtggagtcacggagaacaaaaaacaa

SEQ ID NO: 84260 - DNA, 33 bp, Homo sapien
tttggaagtggagtcagggagaacaaaaaacaa

SEQ ID NO: 84261 - DNA, 33 bp, Homo sapien
ctgccacaggagcgaaactagacgtagagaaca

SEQ ID NO: 84262 - DNA, 33 bp, Homo sapien
ctgccacaggagcgaagctagacgtagagaaca

SEQ ID NO: 84263 - DNA, 33 bp, Homo sapien
gtgataggttgtatcccgccaaaccaagagtta

SEQ ID NO: 84264 - DNA, 33 bp, Homo sapien
gtgataggttgtatcctgccaaaccaagagtta

SEQ ID NO: 84265 - DNA, 33 bp, Homo sapien
ggtgtggctaaagcacaactaaaggtagaaggc

SEQ ID NO: 84266 - DNA, 33 bp, Homo sapien
ggtgtggctaaagcactactaaaggtagaaggc

SEQ ID NO: 84267 - DNA, 33 bp, Homo sapien
ctatttctttgtcttccctgctagatgactagc

SEQ ID NO: 84268 - DNA, 33 bp, Homo sapien
ctatttctttgtcttcgctgctagatgactagc

SEQ ID NO: 84269 - DNA, 33 bp, Homo sapien; identical to SEQ ID NO: 84267

SEQ ID NO: 84270 - DNA, 33 bp, Homo sapien; identical to SEQ ID NO: 84268

SEQ ID NO: 84271 - DNA, 33 bp, Homo sapien
gccatccagaaagtagcagagagtccactatgt

SEQ ID NO: 84272 - DNA, 33 bp, Homo sapien
gccatccagaaagtagtagagagtccactatgt

SEQ ID NO: 84273 - DNA, 33 bp, Homo sapien; identical to SEQ ID NO: 84271

SEQ ID NO: 84274 - DNA, 33 bp, Homo sapien; identical to SEQ ID NO: 84272

SEQ ID NO: 84275 - DNA, 33 bp, Homo sapien
cttcaaactgggttgacagtcactgagtacaca

SEQ ID NO: 84276 - DNA, 33 bp, Homo sapien
cttcaaactgggttgatagtcactgagtacaca

SEQ ID NO: 84277 - DNA, 33 bp, Homo sapien
tggccgtttcctcttcccataggtgcctccacc

SEQ ID NO: 84278 - DNA, 33 bp, Homo sapien
tggccgtttcctcttcgcataggtgcctccacc

SEQ ID NO: 84279 - DNA, 33 bp, Homo sapien; identical to SEQ ID NO: 84277

SEQ ID NO: 84280 - DNA, 33 bp, Homo sapien; identical to SEQ ID NO: 84278

SEQ ID NO: 84281 - DNA, 33 bp, Homo sapien
gcttttctggtgacaccgcacaatacatctaca

SEQ ID NO: 84282 - DNA, 33 bp, Homo sapien
gcttttctggtgacactgcacaatacatctaca

SEQ ID NO: 84283 - DNA, 33 bp, Homo sapien
tgaagtagaacctagtcacatccaggagccaga

SEQ ID NO: 84284 - DNA, 33 bp, Homo sapien
tgaagtagaacctagttacatccaggagccaga

SEQ ID NO: 84285 - DNA, 33 bp, Homo sapien
tcctgattttcattccaatcacgaacagcagtg

SEQ ID NO: 84286 - DNA, 33 bp, Homo sapien
tcctgattttcattccgatcacgaacagcagtg

SEQ ID NO: 84287 - DNA, 33 bp, Homo sapien; identical to SEQ ID NO: 84285

SEQ ID NO: 84288 - DNA, 33 bp, Homo sapien; identical to SEQ ID NO: 84286

SEQ ID NO: 84289 - DNA, 33 bp, Homo sapien
ccatctctgcaactgactaaaattaggggttta

SEQ ID NO: 84290 - DNA, 33 bp, Homo sapien
ccatctctgcaactgattaaaattaggggttta

SEQ ID NO: 84291 - DNA, 33 bp, Homo sapien
gcaggctgaagcgccaaagaagaaagatgaggc

SEQ ID NO: 84292 - DNA, 33 bp, Homo sapien
gcaggctgaagcgccagagaagaaagatgaggc

SEQ ID NO: 84293 - DNA, 33 bp, Homo sapien
gctacttacgactcacaataagagtaactataa

SEQ ID NO: 84294 - DNA, 33 bp, Homo sapien
gctacttacgactcacgataagagtaactataa

SEQ ID NO: 84295 - DNA, 33 bp, Homo sapien; identical to SEQ ID NO: 84293

SEQ ID NO: 84296 - DNA, 33 bp, Homo sapien; identical to SEQ ID NO: 84294

SEQ ID NO: 84297 - DNA, 33 bp, Homo sapien
tatgtttactgacacaaccaaaaaaggaataaa

SEQ ID NO: 84298 - DNA, 33 bp, Homo sapien
tatgtttactgacacatccaaaaaaggaataaa

SEQ ID NO: 84299 - DNA, 33 bp, Homo sapien
aaggcaattttattcactgaaactaaacaaggc

SEQ ID NO: 84300 - DNA, 33 bp, Homo sapien
aaggcaattttattcattgaaactaaacaaggc

SEQ ID NO: 84301 - DNA, 33 bp, Homo sapien
aggcaaccttccagtacggcattagaaagacgt

SEQ ID NO: 84302 - DNA, 33 bp, Homo sapien
aggcaaccttccagtatggcattagaaagacgt

SEQ ID NO: 84303 - DNA, 33 bp, Homo sapien
agaatgagtgcaagcacggggaattgccagact

SEQ ID NO: 84304 - DNA, 33 bp, Homo sapien
agaatgagtgcaagcagggggaattgccagact

SEQ ID NO: 84305 - DNA, 33 bp, Homo sapien
cacattttctatttccacttgaagcccaataac

SEQ ID NO: 84306 - DNA, 33 bp, Homo sapien
cacattttctatttccgcttgaagcccaataac

SEQ ID NO: 84307 - DNA, 33 bp, Homo sapien
atcaagtttgtatagacggttgagaaatgaacc

SEQ ID NO: 84308 - DNA, 33 bp, Homo sapien
atcaagtttgtatagatggttgagaaatgaacc

SEQ ID NO: 84309 - DNA, 33 bp, Homo sapien
tcacttagaggttagcaaaaataatactgtaat

SEQ ID NO: 84310 - DNA, 33 bp, Homo sapien
tcacttagaggttagcgaaaataatactgtaat

SEQ ID NO: 84311 - DNA, 33 bp, Homo sapien
ggttcaaggtttacaaagcatgggaagaaaaaa

SEQ ID NO: 84312 - DNA, 33 bp, Homo sapien
ggttcaaggtttacaaggcatgggaagaaaaaa

SEQ ID NO: 84313 - DNA, 33 bp, Homo sapien
agctataggaaaaagcaatgtagattaatagga

SEQ ID NO: 84314 - DNA, 33 bp, Homo sapien
agctataggaaaaagcgatgtagattaatagga

SEQ ID NO: 84315 - DNA, 33 bp, Homo sapien; identical to SEQ ID NO: 84313

SEQ ID NO: 84316 - DNA, 33 bp, Homo sapien; identical to SEQ ID NO: 84314

SEQ ID NO: 84317 - DNA, 33 bp, Homo sapien
tgtttgccctgaaaaccctcacatttagcatta

SEQ ID NO: 84318 - DNA, 33 bp, Homo sapien
tgtttgccctgaaaactctcacatttagcatta

SEQ ID NO: 84319 - DNA, 33 bp, Homo sapien
acatagaatattcaaaagatgtgattcaagggt

SEQ ID NO: 84320 - DNA, 33 bp, Homo sapien
acatagaatattcaaacgatgtgattcaagggt

SEQ ID NO: 84321 - DNA, 33 bp, Homo sapien
gtcagttaaaagaagaaagtcttcctggctggc

SEQ ID NO: 84322 - DNA, 33 bp, Homo sapien
gtcagttaaaagaagacagtcttcctggctggc

SEQ ID NO: 84323 - DNA, 33 bp, Homo sapien
attcctgcttttcctccctgaccctagtaactc

SEQ ID NO: 84324 - DNA, 33 bp, Homo sapien
attcctgcttttcctctctgaccctagtaactc

SEQ ID NO: 84325 - DNA, 33 bp, Homo sapien
atagcaccaccggcaacgattaaatgacagaac

SEQ ID NO: 84326 - DNA, 33 bp, Homo sapien
atagcaccaccggcaaggattaaatgacagaac

SEQ ID NO: 84327 - DNA, 33 bp, Homo sapien
ttgaggaataacatcacagcagcagaatgaaga

SEQ ID NO: 84328 - DNA, 33 bp, Homo sapien
ttgaggaataacatcatagcagcagaatgaaga

SEQ ID NO: 84329 - DNA, 33 bp, Homo sapien
atcagaaacagtctgaaataaggcaaagatgtt

SEQ ID NO: 84330 - DNA, 33 bp, Homo sapien
atcagaaacagtctgagataaggcaaagatgtt

SEQ ID NO: 84331 - DNA, 33 bp, Homo sapien
agacgtcaaaacataaagtgatgaatgtcagaa

SEQ ID NO: 84332 - DNA, 33 bp, Homo sapien
agacgtcaaaacataaggtgatgaatgtcagaa

SEQ ID NO: 84333 - DNA, 33 bp, Homo sapien
aggttctctcttcttcaaatgccctttccatct

SEQ ID NO: 84334 - DNA, 33 bp, Homo sapien
aggttctctcttcttcgaatgccctttccatct

SEQ ID NO: 84335 - DNA, 33 bp, Homo sapien
atgttcatataacaatcagtaggttaggtcagg

SEQ ID NO: 84336 - DNA, 33 bp, Homo sapien
atgttcatataacaattagtaggttaggtcagg

SEQ ID NO: 84337 - DNA, 33 bp, Homo sapien
gcttatgggaaacttacgtttaatagactttat

SEQ ID NO: 84338 - DNA, 33 bp, Homo sapien
gcttatgggaaacttatgtttaatagactttat

SEQ ID NO: 84339 - DNA, 33 bp, Homo sapien
tgtttccagaacatgacctgcagttggccattt

SEQ ID NO: 84340 - DNA, 33 bp, Homo sapien
tgtttccagaacatgagctgcagttggccattt

SEQ ID NO: 84341 - DNA, 33 bp, Homo sapien
tgaaggaacataagaccggagagccaaagagag

SEQ ID NO: 84342 - DNA, 33 bp, Homo sapien
tgaaggaacataagactggagagccaaagagag

SEQ ID NO: 84343 - DNA, 33 bp, Homo sapien
tgcaagggactcactgaactaggggaggcaagc

SEQ ID NO: 84344 - DNA, 33 bp, Homo sapien
tgcaagggactcactggactaggggaggcaagc

SEQ ID NO: 84345 - DNA, 33 bp, Homo sapien
attcttggaagctcaacgaaaatgccatttttt

SEQ ID NO: 84346 - DNA, 33 bp, Homo sapien
attcttggaagctcaatgaaaatgccatttttt

SEQ ID NO: 84347 - DNA, 33 bp, Homo sapien
caatacaagctggttacgtaaaaactgtttaag

SEQ ID NO: 84348 - DNA, 33 bp, Homo sapien
caatacaagctggttatgtaaaaactgtttaag

SEQ ID NO: 84349 - DNA, 33 bp, Homo sapien
ccactatgtgtatagcaaattaagctatgcaag

SEQ ID NO: 84350 - DNA, 33 bp, Homo sapien
ccactatgtgtatagcgaattaagctatgcaag

SEQ ID NO: 84351 - DNA, 33 bp, Homo sapien
cagaagatagagatcaaccaggccatacataag

SEQ ID NO: 84352 - DNA, 33 bp, Homo sapien
cagaagatagagatcacccaggccatacataag

SEQ ID NO: 84353 - DNA, 33 bp, Homo sapien
acaatgcttacaacctaaagagtcttactgtaa

SEQ ID NO: 84354 - DNA, 33 bp, Homo sapien
acaatgcttacaacctgaagagtcttactgtaa

SEQ ID NO: 84355 - DNA, 33 bp, Homo sapien
acttcagatgagctaccgggcaaagggcaaatc

SEQ ID NO: 84356 - DNA, 33 bp, Homo sapien
acttcagatgagctactgggcaaagggcaaatc

SEQ ID NO: 84357 - DNA, 33 bp, Homo sapien
gggacagctcacctaactgctgttttgctgagt

SEQ ID NO: 84358 - DNA, 33 bp, Homo sapien
gggacagctcacctaagtgctgttttgctgagt

SEQ ID NO: 84359 - DNA, 33 bp, Homo sapien
agtgcctttcacataaaagagttatgataaata

SEQ ID NO: 84360 - DNA, 33 bp, Homo sapien
agtgcctttcacataagagagttatgataaata

SEQ ID NO: 84361 - DNA, 33 bp, Homo sapien
tagatgtttcattcggaaaggatttctgggagt

SEQ ID NO: 84362 - DNA, 33 bp, Homo sapien
tagatgtttcattcgggaaggatttctgggagt

SEQ ID NO: 84363 - DNA, 33 bp, Homo sapien
gtgaaaactgcctaaaataatccacaaaaaggt

SEQ ID NO: 84364 - DNA, 33 bp, Homo sapien
gtgaaaactgcctaaagtaatccacaaaaaggt

SEQ ID NO: 84365 - DNA, 33 bp, Homo sapien
aacttggaacaattcaaacaaaaagggcgaaga

SEQ ID NO: 84366 - DNA, 33 bp, Homo sapien
aacttggaacaattcatacaaaaagggcgaaga

SEQ ID NO: 84367 - DNA, 33 bp, Homo sapien
tgggtgcaataaaagacgtattttgggtgttgt

SEQ ID NO: 84368 - DNA, 33 bp, Homo sapien
tgggtgcaataaaagatgtattttgggtgttgt

SEQ ID NO: 84369 - DNA, 33 bp, Homo sapien
cagcgaaaaatacaaaagtgattgaatacctat

SEQ ID NO: 84370 - DNA, 33 bp, Homo sapien
cagcgaaaaatacaaaggtgattgaatacctat

SEQ ID NO: 84371 - DNA, 33 bp, Homo sapien
tgcacccaggaaaggactatggaggggagaact

SEQ ID NO: 84372 - DNA, 33 bp, Homo sapien
tgcacccaggaaaggattatggaggggagaact

SEQ ID NO: 84373 - DNA, 33 bp, Homo sapien
tatttactgcttgttcccatgtgcaaaggtctt

SEQ ID NO: 84374 - DNA, 33 bp, Homo sapien
tatttactgcttgttctcatgtgcaaaggtctt

SEQ ID NO: 84375 - DNA, 33 bp, Homo sapien
ctccagcctgcatgacagaggaagaccctgtct

SEQ ID NO: 84376 - DNA, 33 bp, Homo sapien
ctccagcctgcatgacggaggaagaccctgtct

SEQ ID NO: 84377 - DNA, 33 bp, Homo sapien
tgtctttagctgctgaaatagttaggtctgcct

SEQ ID NO: 84378 - DNA, 33 bp, Homo sapien
tgtctttagctgctgatatagttaggtctgcct

SEQ ID NO: 84379 - DNA, 33 bp, Homo sapien
cactgtgggggagaagaaatacgcggagtcaat

SEQ ID NO: 84380 - DNA, 33 bp, Homo sapien
cactgtgggggagaaggaatacgcggagtcaat

SEQ ID NO: 84381 - DNA, 33 bp, Homo sapien
gtcagaaattttcaaaacaatcaaacactgctt

SEQ ID NO: 84382 - DNA, 33 bp, Homo sapien
gtcagaaattttcaaagcaatcaaacactgctt

SEQ ID NO: 84383 - DNA, 33 bp, Homo sapien
aaatgtaaacagcaaaccagccactaaaagtgc

SEQ ID NO: 84384 - DNA, 33 bp, Homo sapien
aaatgtaaacagcaaatcagccactaaaagtgc

SEQ ID NO: 84385 - DNA, 33 bp, Homo sapien
tcaacaccacaaatatcacagagcagtaaccac

SEQ ID NO: 84386 - DNA, 33 bp, Homo sapien
tcaacaccacaaatatgacagagcagtaaccac

SEQ ID NO: 84387 - DNA, 33 bp, Homo sapien
taggtttccttctggcaatacctaaggccatcg

SEQ ID NO: 84388 - DNA, 33 bp, Homo sapien
taggtttccttctggcgatacctaaggccatcg

SEQ ID NO: 84389 - DNA, 33 bp, Homo sapien
ggagtctcattctcctcacaaaatgaccctgtg

SEQ ID NO: 84390 - DNA, 33 bp, Homo sapien
ggagtctcattctccttacaaaatgaccctgtg

SEQ ID NO: 84391 - DNA, 33 bp, Homo sapien
gctgttctattcaagcaccatctgtcttacagg

SEQ ID NO: 84392 - DNA, 33 bp, Homo sapien
gctgttctattcaagcgccatctgtcttacagg

SEQ ID NO: 84393 - DNA, 33 bp, Homo sapien
tccttcagatacattcactctacttattgcttc

SEQ ID NO: 84394 - DNA, 33 bp, Homo sapien
tccttcagatacattcgctctacttattgcttc

SEQ ID NO: 84395 - DNA, 33 bp, Homo sapien
gtcttggaaatccccacgttaatgatggcttaa

SEQ ID NO: 84396 - DNA, 33 bp, Homo sapien
gtcttggaaatccccatgttaatgatggcttaa

SEQ ID NO: 84397 - DNA, 33 bp, Homo sapien
cacacagtgcacagtacaaactccagacatgct

SEQ ID NO: 84398 - DNA, 33 bp, Homo sapien
cacacagtgcacagtagaaactccagacatgct

SEQ ID NO: 84399 - DNA, 33 bp, Homo sapien
gtcatctttcgttatcaccattgatggtcctcc

SEQ ID NO: 84400 - DNA, 33 bp, Homo sapien
gtcatctttcgttatcgccattgatggtcctcc

SEQ ID NO: 84401 - DNA, 33 bp, Homo sapien
gtgtatcagatgtcgcaaagtcttgaagaaaaa

SEQ ID NO: 84402 - DNA, 33 bp, Homo sapien
gtgtatcagatgtcgcgaagtcttgaagaaaaa

SEQ ID NO: 84403 - DNA, 33 bp, Homo sapien
tgaatatcaaagtaataatgctaaatgaacaag

SEQ ID NO: 84404 - DNA, 33 bp, Homo sapien
tgaatatcaaagtaatcatgctaaatgaacaag

SEQ ID NO: 84405 - DNA, 33 bp, Homo sapien
gtatgactttagtatgaatatttaggggctcag

SEQ ID NO: 84406 - DNA, 33 bp, Homo sapien
gtatgactttagtatggatatttaggggctcag

SEQ ID NO: 84407 - DNA, 33 bp, Homo sapien
aatcctcagctactacaaattcctttactatta

SEQ ID NO: 84408 - DNA, 33 bp, Homo sapien
aatcctcagctactacgaattcctttactatta

SEQ ID NO: 84409 - DNA, 33 bp, Homo sapien
tgcaagatattaaagacagtaggtttcaaagaa

SEQ ID NO: 84410 - DNA, 33 bp, Homo sapien
tgcaagatattaaagatagtaggtttcaaagaa

SEQ ID NO: 84411 - DNA, 33 bp, Homo sapien
tctactggaatcatgaagtacactccagatccc

SEQ ID NO: 84412 - DNA, 33 bp, Homo sapien
tctactggaatcatgacgtacactccagatccc

SEQ ID NO: 84413 - DNA, 33 bp, Homo sapien
ataattatgatcaacaaatggattttttaaaag

SEQ ID NO: 84414 - DNA, 33 bp, Homo sapien
ataattatgatcaacagatggattttttaaaag

SEQ ID NO: 84415 - DNA, 33 bp, Homo sapien
tatcattcaccctctactacacacgatctaaag

SEQ ID NO: 84416 - DNA, 33 bp, Homo sapien
tatcattcaccctctattacacacgatctaaag

SEQ ID NO: 84417 - DNA, 33 bp, Homo sapien
gataaattaccactccaagagagagaccaagtg

SEQ ID NO: 84418 - DNA, 33 bp, Homo sapien
gataaattaccactccgagagagagaccaagtg

SEQ ID NO: 84419 - DNA, 33 bp, Homo sapien
caattttcatctcctacgtaagtaacgatacag

SEQ ID NO: 84420 - DNA, 33 bp, Homo sapien
caattttcatctcctatgtaagtaacgatacag

SEQ ID NO: 84421 - DNA, 33 bp, Homo sapien
ccccagaccaaagcacaaagttaaagaaggccc

SEQ ID NO: 84422 - DNA, 33 bp, Homo sapien
ccccagaccaaagcacgaagttaaagaaggccc

SEQ ID NO: 84423 - DNA, 33 bp, Homo sapien
gataaattctatattcacctctactaggacata

SEQ ID NO: 84424 - DNA, 33 bp, Homo sapien
gataaattctatattcgcctctactaggacata

SEQ ID NO: 84425 - DNA, 33 bp, Homo sapien
ctcttaatattatgaacgttttcccatatcatt

SEQ ID NO: 84426 - DNA, 33 bp, Homo sapien
ctcttaatattatgaaggttttcccatatcatt

SEQ ID NO: 84427 - DNA, 33 bp, Homo sapien
ccaaggcgtcctctacacacatagtgaggccag

SEQ ID NO: 84428 - DNA, 33 bp, Homo sapien
ccaaggcgtcctctacgcacatagtgaggccag

SEQ ID NO: 84429 - DNA, 33 bp, Homo sapien
gttactgtactgaatacgcagttctaacacaat

SEQ ID NO: 84430 - DNA, 33 bp, Homo sapien
gttactgtactgaatatgcagttctaacacaat

SEQ ID NO: 84431 - DNA, 33 bp, Homo sapien
agaaacaaagcaaagtaaaaaatcatcgaatga

SEQ ID NO: 84432 - DNA, 33 bp, Homo sapien
agaaacaaagcaaagtgaaaaatcatcgaatga

SEQ ID NO: 84433 - DNA, 33 bp, Homo sapien
tataaagtttagtggaaattatcaagggaaaga

SEQ ID NO: 84434 - DNA, 33 bp, Homo sapien
tataaagtttagtggagattatcaagggaaaga

SEQ ID NO: 84435 - DNA, 33 bp, Homo sapien
attccacatgaagagactaaagagccctgacaa

SEQ ID NO: 84436 - DNA, 33 bp, Homo sapien
attccacatgaagagagtaaagagccctgacaa

SEQ ID NO: 84437 - DNA, 33 bp, Homo sapien
acataatgtgactataacccatccttactctgt

SEQ ID NO: 84438 - DNA, 33 bp, Homo sapien
acataatgtgactatatcccatccttactctgt

SEQ ID NO: 84439 - DNA, 33 bp, Homo sapien
tctggtgaaaaagtacaacaaagctaggacatg

SEQ ID NO: 84440 - DNA, 33 bp, Homo sapien
tctggtgaaaaagtacgacaaagctaggacatg

SEQ ID NO: 84441 - DNA, 33 bp, Homo sapien
cagatgcagaacccacaatgggtatgagaggcg

SEQ ID NO: 84442 - DNA, 33 bp, Homo sapien
cagatgcagaacccacgatgggtatgagaggcg

SEQ ID NO: 84443 - DNA, 33 bp, Homo sapien
gtacgatccacttacacgaggcactaaagcagt

SEQ ID NO: 84444 - DNA, 33 bp, Homo sapien
gtacgatccacttacatgaggcactaaagcagt

SEQ ID NO: 84445 - DNA, 33 bp, Homo sapien
agagtttccctaacctaagaattctcacacctg

SEQ ID NO: 84446 - DNA, 33 bp, Homo sapien
agagtttccctaacctcagaattctcacacctg

SEQ ID NO: 84447 - DNA, 33 bp, Homo sapien
gcccagtactttcccccggactcctccatcaga

SEQ ID NO: 84448 - DNA, 33 bp, Homo sapien
gcccagtactttcccctggactcctccatcaga

SEQ ID NO: 84449 - DNA, 33 bp, Homo sapien
aatggatttaaaaagcactccggcatcaggatt

SEQ ID NO: 84450 - DNA, 33 bp, Homo sapien
aatggatttaaaaagcgctccggcatcaggatt

SEQ ID NO: 84451 - DNA, 33 bp, Homo sapien
ggtcacagttccatgaccttagtctaaaaggtt

SEQ ID NO: 84452 - DNA, 33 bp, Homo sapien
ggtcacagttccatgatcttagtctaaaaggtt

SEQ ID NO: 84453 - DNA, 33 bp, Homo sapien
gctgagtgggaaaaaaataatctcaaatggaat

SEQ ID NO: 84454 - DNA, 33 bp, Homo sapien
gctgagtgggaaaaaattaatctcaaatggaat

SEQ ID NO: 84455 - DNA, 33 bp, Homo sapien
ataatttgtctatagcaaatgctgacaaaaact

SEQ ID NO: 84456 - DNA, 33 bp, Homo sapien
ataatttgtctatagcgaatgctgacaaaaact

SEQ ID NO: 84457 - DNA, 33 bp, Homo sapien
gtgtgtgtgagttacaagacggctgttgcttca

SEQ ID NO: 84458 - DNA, 33 bp, Homo sapien
gtgtgtgtgagttacacgacggctgttgcttca

SEQ ID NO: 84459 - DNA, 33 bp, Homo sapien
agaagacttacattagcatatggttgggcaaaa

SEQ ID NO: 84460 - DNA, 33 bp, Homo sapien
agaagacttacattagtatatggttgggcaaaa

SEQ ID NO: 84461 - DNA, 33 bp, Homo sapien
actttttcagtgttaaaataccctctgcatttt

SEQ ID NO: 84462 - DNA, 33 bp, Homo sapien
actttttcagtgttaagataccctctgcatttt

SEQ ID NO: 84463 - DNA, 33 bp, Homo sapien
ggtaaaaacatggttcaaatcagctcttaaaat

SEQ ID NO: 84464 - DNA, 33 bp, Homo sapien
ggtaaaaacatggttcgaatcagctcttaaaat

SEQ ID NO: 84465 - DNA, 33 bp, Homo sapien
ttagaaaaaacgaagaagcaagccaaggcagac

SEQ ID NO: 84466 - DNA, 33 bp, Homo sapien
ttagaaaaaacgaagaggcaagccaaggcagac

SEQ ID NO: 84467 - DNA, 33 bp, Homo sapien
tcaagaaaagctcagcaagatcagagaggagtt

SEQ ID NO: 84468 - DNA, 33 bp, Homo sapien
tcaagaaaagctcagcgagatcagagaggagtt

SEQ ID NO: 84469 - DNA, 33 bp, Homo sapien
aacagtttcaaagttacgtgaagcagagaggta

SEQ ID NO: 84470 - DNA, 33 bp, Homo sapien
aacagtttcaaagttatgtgaagcagagaggta

SEQ ID NO: 84471 - DNA, 33 bp, Homo sapien
tcattggtgccaaatacgccagatgttctattt

SEQ ID NO: 84472 - DNA, 33 bp, Homo sapien
tcattggtgccaaatatgccagatgttctattt

SEQ ID NO: 84473 - DNA, 33 bp, Homo sapien
ccacagaggtaaagacaggactcctactaattc

SEQ ID NO: 84474 - DNA, 33 bp, Homo sapien
ccacagaggtaaagacgggactcctactaattc

SEQ ID NO: 84475 - DNA, 33 bp, Homo sapien
catctgagatttgagaggcaggttaatcattct

SEQ ID NO: 84476 - DNA, 33 bp, Homo sapien
catctgagatttgagatgcaggttaatcattct

SEQ ID NO: 84477 - DNA, 33 bp, Homo sapien
ggcaggaaaaaccgcaaatgtccacttgagcag

SEQ ID NO: 84478 - DNA, 33 bp, Homo sapien
ggcaggaaaaaccgcagatgtccacttgagcag

SEQ ID NO: 84479 - DNA, 33 bp, Homo sapien
ttactgacaagtcttcaaatctgttaaaaaagg

SEQ ID NO: 84480 - DNA, 33 bp, Homo sapien
ttactgacaagtcttcgaatctgttaaaaaagg

SEQ ID NO: 84481 - DNA, 33 bp, Homo sapien
ttctgagtgacaccaacacactggagaaagaca

SEQ ID NO: 84482 - DNA, 33 bp, Homo sapien
ttctgagtgacaccaatacactggagaaagaca

SEQ ID NO: 84483 - DNA, 33 bp, Homo sapien
ggctgcgagtgaataaccactaatttaaggcaa

SEQ ID NO: 84484 - DNA, 33 bp, Homo sapien
ggctgcgagtgaataatcactaatttaaggcaa

SEQ ID NO: 84485 - DNA, 33 bp, Homo sapien
ttctctgatttgtcaacgaatatatagggatcc

SEQ ID NO: 84486 - DNA, 33 bp, Homo sapien
ttctctgatttgtcaatgaatatatagggatcc

SEQ ID NO: 84487 - DNA, 33 bp, Homo sapien
ctgatatggtggagaaactcactattggttgtc

SEQ ID NO: 84488 - DNA, 33 bp, Homo sapien
ctgatatggtggagaagctcactattggttgtc

SEQ ID NO: 84489 - DNA, 33 bp, Homo sapien
ttggactgtgttatcactcacttttgaggaaaa

SEQ ID NO: 84490 - DNA, 33 bp, Homo sapien
ttggactgtgttatcattcacttttgaggaaaa

SEQ ID NO: 84491 - DNA, 33 bp, Homo sapien
gagaggctagctgacacgggcgagtgagtcgct

SEQ ID NO: 84492 - DNA, 33 bp, Homo sapien
gagaggctagctgacatgggcgagtgagtcgct

SEQ ID NO: 84493 - DNA, 33 bp, Homo sapien
taggtaagggaagcaacgaacgtctgtagaaga

SEQ ID NO: 84494 - DNA, 33 bp, Homo sapien
taggtaagggaagcaatgaacgtctgtagaaga

SEQ ID NO: 84495 - DNA, 33 bp, Homo sapien
gaaaaaaaattaaacaagtagcacaggcatagt

SEQ ID NO: 84496 - DNA, 33 bp, Homo sapien
gaaaaaaaattaaacaggtagcacaggcatagt

SEQ ID NO: 84497 - DNA, 33 bp, Homo sapien
caaagaaacatgatagacatatggcttgatgat

SEQ ID NO: 84498 - DNA, 33 bp, Homo sapien
caaagaaacatgataggcatatggcttgatgat

SEQ ID NO: 84499 - DNA, 33 bp, Homo sapien
gcctttccgctccaaaagggtgaaagcacaggg

SEQ ID NO: 84500 - DNA, 33 bp, Homo sapien
gcctttccgctccaaaggggtgaaagcacaggg

SEQ ID NO: 84501 - DNA, 33 bp, Homo sapien
aacttctgcaggatgaagatttggagctctgag

SEQ ID NO: 84502 - DNA, 33 bp, Homo sapien
aacttctgcaggatgaggatttggagctctgag

SEQ ID NO: 84503 - DNA, 33 bp, Homo sapien
ggatactctgagtaagcaaggtggatgagattg

SEQ ID NO: 84504 - DNA, 33 bp, Homo sapien
ggatactctgagtaaggaaggtggatgagattg

SEQ ID NO: 84505 - DNA, 33 bp, Homo sapien
atgcttggggccagaaaggattcggaattcagg

SEQ ID NO: 84506 - DNA, 33 bp, Homo sapien
atgcttggggccagaagggattcggaattcagg

SEQ ID NO: 84507 - DNA, 33 bp, Homo sapien
tttgttcttcacttacaaaaacaaacaaacaaa

SEQ ID NO: 84508 - DNA, 33 bp, Homo sapien
tttgttcttcacttacgaaaacaaacaaacaaa

SEQ ID NO: 84509 - DNA, 33 bp, Homo sapien
tctacagtagtggacaatgacgttctaggcctt

SEQ ID NO: 84510 - DNA, 33 bp, Homo sapien
tctacagtagtggacagtgacgttctaggcctt

SEQ ID NO: 84511 - DNA, 33 bp, Homo sapien
gagaaacagagagaaccgactataaagtatgaa

SEQ ID NO: 84512 - DNA, 33 bp, Homo sapien
gagaaacagagagaactgactataaagtatgaa

SEQ ID NO: 84513 - DNA, 33 bp, Homo sapien
attctggttatgcctaagtgataaaatttgcat

SEQ ID NO: 84514 - DNA, 33 bp, Homo sapien
attctggttatgcctaggtgataaaatttgcat

SEQ ID NO: 84515 - DNA, 33 bp, Homo sapien
accagtggaggcaaccagcggacggaggaaaag

SEQ ID NO: 84516 - DNA, 33 bp, Homo sapien
accagtggaggcaacccgcggacggaggaaaag

SEQ ID NO: 84517 - DNA, 33 bp, Homo sapien
tgatacacatcatccaatgataccctgcctcca

SEQ ID NO: 84518 - DNA, 33 bp, Homo sapien
tgatacacatcatccagtgataccctgcctcca

SEQ ID NO: 84519 - DNA, 33 bp, Homo sapien
tgaaataatcaacataaagaacttagcgtttag

SEQ ID NO: 84520 - DNA, 33 bp, Homo sapien
tgaaataatcaacatatagaacttagcgtttag

SEQ ID NO: 84521 - DNA, 33 bp, Homo sapien
ctagtgtcttggaaaccagacttgcctttctta

SEQ ID NO: 84522 - DNA, 33 bp, Homo sapien
ctagtgtcttggaaactagacttgcctttctta

SEQ ID NO: 84523 - DNA, 33 bp, Homo sapien
atcagcaggttacccacggacaagggaggctta

SEQ ID NO: 84524 - DNA, 33 bp, Homo sapien
atcagcaggttacccatggacaagggaggctta

SEQ ID NO: 84525 - DNA, 33 bp, Homo sapien
ggccagacaggacagaacacaaacattattcaa

SEQ ID NO: 84526 - DNA, 33 bp, Homo sapien
ggccagacaggacagagcacaaacattattcaa

SEQ ID NO: 84527 - DNA, 33 bp, Homo sapien
atgaatgaaggaatgggcaatataggtgagaat

SEQ ID NO: 84528 - DNA, 33 bp, Homo sapien
atgaatgaaggaatggtcaatataggtgagaat

SEQ ID NO: 84529 - DNA, 33 bp, Homo sapien
gacacaaaaatgacaagatgtacatgaagcctt

SEQ ID NO: 84530 - DNA, 33 bp, Homo sapien
gacacaaaaatgacaatatgtacatgaagcctt

SEQ ID NO: 84531 - DNA, 33 bp, Homo sapien
caggctatttattccaagtgacccttataaatg

SEQ ID NO: 84532 - DNA, 33 bp, Homo sapien
caggctatttattccaggtgacccttataaatg

SEQ ID NO: 84533 - DNA, 33 bp, Homo sapien
caaacaggatctcagggaaatctgatgggtgag

SEQ ID NO: 84534 - DNA, 33 bp, Homo sapien
caaacaggatctcaggtaaatctgatgggtgag

SEQ ID NO: 84535 - DNA, 33 bp, Homo sapien
caataccctagcatagacaaaaggaatctatct

SEQ ID NO: 84536 - DNA, 33 bp, Homo sapien
caataccctagcatagccaaaaggaatctatct

SEQ ID NO: 84537 - DNA, 33 bp, Homo sapien
ctcatcatgttattacaaagtgattcaggtacc

SEQ ID NO: 84538 - DNA, 33 bp, Homo sapien
ctcatcatgttattacgaagtgattcaggtacc

SEQ ID NO: 84539 - DNA, 33 bp, Homo sapien
ttcttgttcagtctagaatggtagctgtaattt

SEQ ID NO: 84540 - DNA, 33 bp, Homo sapien
ttcttgttcagtctaggatggtagctgtaattt

SEQ ID NO: 84541 - DNA, 33 bp, Homo sapien
tgagaatgtcgaccttaaagaacacaagagaaa

SEQ ID NO: 84542 - DNA, 33 bp, Homo sapien
tgagaatgtcgaccttcaagaacacaagagaaa

SEQ ID NO: 84543 - DNA, 33 bp, Homo sapien
gtgggcagatgtctaacattttttgcttccttt

SEQ ID NO: 84544 - DNA, 33 bp, Homo sapien
gtgggcagatgtctaatattttttgcttccttt

SEQ ID NO: 84545 - DNA, 33 bp, Homo sapien
acgaaaagcaacaaagccacccaaattctcttc

SEQ ID NO: 84546 - DNA, 33 bp, Homo sapien
acgaaaagcaacaaaggcacccaaattctcttc

SEQ ID NO: 84547 - DNA, 33 bp, Homo sapien
cccttctattatgtgcaaaattgatagcgtttt

SEQ ID NO: 84548 - DNA, 33 bp, Homo sapien
cccttctattatgtgctaaattgatagcgtttt

SEQ ID NO: 84549 - DNA, 33 bp, Homo sapien
ttgaaaatgtaactgcaatctgtttgaatgaaa

SEQ ID NO: 84550 - DNA, 33 bp, Homo sapien
ttgaaaatgtaactgcgatctgtttgaatgaaa

SEQ ID NO: 84551 - DNA, 33 bp, Homo sapien
aggccctgagtgagaaatgtcaaattgaactat

SEQ ID NO: 84552 - DNA, 33 bp, Homo sapien
aggccctgagtgagaactgtcaaattgaactat

SEQ ID NO: 84553 - DNA, 33 bp, Homo sapien
ttaggtcgaaggcaaacgaagaatttgtttttg

SEQ ID NO: 84554 - DNA, 33 bp, Homo sapien
ttaggtcgaaggcaaatgaagaatttgtttttg

SEQ ID NO: 84555 - DNA, 33 bp, Homo sapien
accacttatcaaagcccactgtgtgctaagggc

SEQ ID NO: 84556 - DNA, 33 bp, Homo sapien
accacttatcaaagcctactgtgtgctaagggc

SEQ ID NO: 84557 - DNA, 33 bp, Homo sapien
gcaagtctgacgtccaggtgggctggttagttg

SEQ ID NO: 84558 - DNA, 33 bp, Homo sapien
gcaagtctgacgtccatgtgggctggttagttg

SEQ ID NO: 84559 - DNA, 33 bp, Homo sapien
caggtagataagagtcacagcaaacaaactttg

SEQ ID NO: 84560 - DNA, 33 bp, Homo sapien
caggtagataagagtcgcagcaaacaaactttg

SEQ ID NO: 84561 - DNA, 33 bp, Homo sapien
agtcttaatctactccaaactgagcatacacat

SEQ ID NO: 84562 - DNA, 33 bp, Homo sapien
agtcttaatctactccgaactgagcatacacat

SEQ ID NO: 84563 - DNA, 33 bp, Homo sapien
caactgtagtggataacgtcaagttgtttttct

SEQ ID NO: 84564 - DNA, 33 bp, Homo sapien
caactgtagtggataatgtcaagttgtttttct

SEQ ID NO: 84565 - DNA, 33 bp, Homo sapien
tgcccagcagacagcactctccaagacatcccc

SEQ ID NO: 84566 - DNA, 33 bp, Homo sapien
tgcccagcagacagcattctccaagacatcccc

SEQ ID NO: 84567 - DNA, 33 bp, Homo sapien
taactgggagacaaaaggtaagaattggcttaa

SEQ ID NO: 84568 - DNA, 33 bp, Homo sapien
taactgggagacaaaatgtaagaattggcttaa

SEQ ID NO: 84569 - DNA, 33 bp, Homo sapien
taatccttccaatcaactgaaatgctaaacatt

SEQ ID NO: 84570 - DNA, 33 bp, Homo sapien
taatccttccaatcaagtgaaatgctaaacatt

SEQ ID NO: 84571 - DNA, 33 bp, Homo sapien
ccttcctgtacctcacactcaaatctcaaaccg

SEQ ID NO: 84572 - DNA, 33 bp, Homo sapien
ccttcctgtacctcacgctcaaatctcaaaccg

SEQ ID NO: 84573 - DNA, 33 bp, Homo sapien
gcctggtaaaaggggacgagaatgagtgaacag

SEQ ID NO: 84574 - DNA, 33 bp, Homo sapien
gcctggtaaaaggggatgagaatgagtgaacag

SEQ ID NO: 84575 - DNA, 33 bp, Homo sapien
gcctgagacatagttaacagaaaggttttgcag

SEQ ID NO: 84576 - DNA, 33 bp, Homo sapien
gcctgagacatagttagcagaaaggttttgcag

SEQ ID NO: 84577 - DNA, 33 bp, Homo sapien
attatggcacaattgcaaagataaggaaccaac

SEQ ID NO: 84578 - DNA, 33 bp, Homo sapien
attatggcacaattgcgaagataaggaaccaac

SEQ ID NO: 84579 - DNA, 33 bp, Homo sapien
aggaacactgaggaacagagacaggaaaactct

SEQ ID NO: 84580 - DNA, 33 bp, Homo sapien
aggaacactgaggaacggagacaggaaaactct

SEQ ID NO: 84581 - DNA, 33 bp, Homo sapien
ttagcaccttataccaacaagtcattgaagtgg

SEQ ID NO: 84582 - DNA, 33 bp, Homo sapien
ttagcaccttataccagcaagtcattgaagtgg

SEQ ID NO: 84583 - DNA, 33 bp, Homo sapien
gcagtgcctgccattacagtgcgagtcccagga

SEQ ID NO: 84584 - DNA, 33 bp, Homo sapien
gcagtgcctgccattagagtgcgagtcccagga

SEQ ID NO: 84585 - DNA, 33 bp, Homo sapien
tccctgacaagttcaacgatgggaaaaaaagag

SEQ ID NO: 84586 - DNA, 33 bp, Homo sapien
tccctgacaagttcaatgatgggaaaaaaagag

SEQ ID NO: 84587 - DNA, 33 bp, Homo sapien
tccagctctgctatgaaccacagataaaactgg

SEQ ID NO: 84588 - DNA, 33 bp, Homo sapien
tccagctctgctatgacccacagataaaactgg

SEQ ID NO: 84589 - DNA, 33 bp, Homo sapien
gggtacagctgctgccaaaatggccaggatgtc

SEQ ID NO: 84590 - DNA, 33 bp, Homo sapien
gggtacagctgctgccgaaatggccaggatgtc

SEQ ID NO: 84591 - DNA, 33 bp, Homo sapien
ttcaggacccaacaaaacttgtttgaccagtca

SEQ ID NO: 84592 - DNA, 33 bp, Homo sapien
ttcaggacccaacaaagcttgtttgaccagtca

SEQ ID NO: 84593 - DNA, 33 bp, Homo sapien
cctcacttattcttaacatcgtcaggctttcca

SEQ ID NO: 84594 - DNA, 33 bp, Homo sapien
cctcacttattcttaatatcgtcaggctttcca

SEQ ID NO: 84595 - DNA, 33 bp, Homo sapien
gagatgaattccaaaaatctatatctctagata

SEQ ID NO: 84596 - DNA, 33 bp, Homo sapien
gagatgaattccaaaagtctatatctctagata

SEQ ID NO: 84597 - DNA, 33 bp, Homo sapien
aaggagaaatagttcacagttaccattgtcttt

SEQ ID NO: 84598 - DNA, 33 bp, Homo sapien
aaggagaaatagttcatagttaccattgtcttt

SEQ ID NO: 84599 - DNA, 33 bp, Homo sapien
acaaagggtgacataacaatttacttgacaata

SEQ ID NO: 84600 - DNA, 33 bp, Homo sapien
acaaagggtgacataataatttacttgacaata

SEQ ID NO: 84601 - DNA, 33 bp, Homo sapien
cctgttctgtgtcattgaatctcacagccgtgg

SEQ ID NO: 84602 - DNA, 33 bp, Homo sapien
cctgttctgtgtcatttaatctcacagccgtgg

SEQ ID NO: 84603 - DNA, 33 bp, Homo sapien
aaagtgatagaagatacggctgcaaaagcagca

SEQ ID NO: 84604 - DNA, 33 bp, Homo sapien
aaagtgatagaagatatggctgcaaaagcagca

SEQ ID NO: 84605 - DNA, 33 bp, Homo sapien
attactgacattactcaagaacctccttataaa

SEQ ID NO: 84606 - DNA, 33 bp, Homo sapien
attactgacattactccagaacctccttataaa

SEQ ID NO: 84607 - DNA, 33 bp, Homo sapien
agatattgaacaccacggattttaaaacacaag

SEQ ID NO: 84608 - DNA, 33 bp, Homo sapien
agatattgaacaccactgattttaaaacacaag

SEQ ID NO: 84609 - DNA, 33 bp, Homo sapien
tttgatagatatgggaacattctccaaggatac

SEQ ID NO: 84610 - DNA, 33 bp, Homo sapien
tttgatagatatgggagcattctccaaggatac

SEQ ID NO: 84611 - DNA, 33 bp, Homo sapien
atgtctgctgtcccaccgtacctgaataaaaca

SEQ ID NO: 84612 - DNA, 33 bp, Homo sapien
atgtctgctgtcccacggtacctgaataaaaca

SEQ ID NO: 84613 - DNA, 33 bp, Homo sapien
tttcaagcacatggacacaagtgtttcaatctc

SEQ ID NO: 84614 - DNA, 33 bp, Homo sapien
tttcaagcacatggacgcaagtgtttcaatctc

SEQ ID NO: 84615 - DNA, 33 bp, Homo sapien
ggcagtgaatgcacaaatcaccagctaggtatg

SEQ ID NO: 84616 - DNA, 33 bp, Homo sapien
ggcagtgaatgcacaactcaccagctaggtatg

SEQ ID NO: 84617 - DNA, 33 bp, Homo sapien
aggccatgttgaaatacccttgatatcaccagt

SEQ ID NO: 84618 - DNA, 33 bp, Homo sapien
aggccatgttgaaatatccttgatatcaccagt

SEQ ID NO: 84619 - DNA, 33 bp, Homo sapien
agggcagtcggtatccgatgactgttcattgca

SEQ ID NO: 84620 - DNA, 33 bp, Homo sapien
agggcagtcggtatcctatgactgttcattgca

SEQ ID NO: 84621 - DNA, 33 bp, Homo sapien
tccatctaggttagtacatttgtctctagaaaa

SEQ ID NO: 84622 - DNA, 33 bp, Homo sapien
tccatctaggttagtatatttgtctctagaaaa

SEQ ID NO: 84623 - DNA, 33 bp, Homo sapien
ctcataaacacaaacacgaaagagttctcaaaa

SEQ ID NO: 84624 - DNA, 33 bp, Homo sapien
ctcataaacacaaacatgaaagagttctcaaaa

SEQ ID NO: 84625 - DNA, 33 bp, Homo sapien
acattacaaaccacctcaattgatattgataga

SEQ ID NO: 84626 - DNA, 33 bp, Homo sapien
acattacaaaccaccttaattgatattgataga

SEQ ID NO: 84627 - DNA, 33 bp, Homo sapien
tgtatatgctctgagtaacagtttcaaatacag

SEQ ID NO: 84628 - DNA, 33 bp, Homo sapien
tgtatatgctctgagtcacagtttcaaatacag

SEQ ID NO: 84629 - DNA, 33 bp, Homo sapien
ttcaattgatttggtacgactgctcacaaaatc

SEQ ID NO: 84630 - DNA, 33 bp, Homo sapien
ttcaattgatttggtaggactgctcacaaaatc

SEQ ID NO: 84631 - DNA, 33 bp, Homo sapien
tccctgcagctaccaacgaatgactgtgtaggt

SEQ ID NO: 84632 - DNA, 33 bp, Homo sapien
tccctgcagctaccaaggaatgactgtgtaggt

SEQ ID NO: 84633 - DNA, 33 bp, Homo sapien
aggagtgagtcggagacatggatagatcgattt

SEQ ID NO: 84634 - DNA, 33 bp, Homo sapien
aggagtgagtcggagatatggatagatcgattt

SEQ ID NO: 84635 - DNA, 33 bp, Homo sapien
gtggaatttaggaaacggctgtaggaattactt

SEQ ID NO: 84636 - DNA, 33 bp, Homo sapien
gtggaatttaggaaactgctgtaggaattactt

SEQ ID NO: 84637 - DNA, 33 bp, Homo sapien
gattgtaggattgttacggggaataaagaatca

SEQ ID NO: 84638 - DNA, 33 bp, Homo sapien
gattgtaggattgttatggggaataaagaatca

SEQ ID NO: 84639 - DNA, 33 bp, Homo sapien
ttgagttggtctcttacacagggtttcctgggc

SEQ ID NO: 84640 - DNA, 33 bp, Homo sapien
ttgagttggtctcttagacagggtttcctgggc

SEQ ID NO: 84641 - DNA, 33 bp, Homo sapien
accaggctttggataaggttctagaaattcttc

SEQ ID NO: 84642 - DNA, 33 bp, Homo sapien
accaggctttggataatgttctagaaattcttc

SEQ ID NO: 84643 - DNA, 33 bp, Homo sapien
agggtgagtcatgtcaatcccaaagcacttccc

SEQ ID NO: 84644 - DNA, 33 bp, Homo sapien
agggtgagtcatgtcagtcccaaagcacttccc

SEQ ID NO: 84645 - DNA, 33 bp, Homo sapien
catccagaaagtcaacagatgcaacttactcac

SEQ ID NO: 84646 - DNA, 33 bp, Homo sapien
catccagaaagtcaacggatgcaacttactcac

SEQ ID NO: 84647 - DNA, 33 bp, Homo sapien
agacacgtgatttcgccgccatgttgcttacag

SEQ ID NO: 84648 - DNA, 33 bp, Homo sapien
agacacgtgatttcgctgccatgttgcttacag

SEQ ID NO: 84649 - DNA, 33 bp, Homo sapien
accaatgtgataaaaacttgtattgttaaattt

SEQ ID NO: 84650 - DNA, 33 bp, Homo sapien
accaatgtgataaaaagttgtattgttaaattt

SEQ ID NO: 84651 - DNA, 33 bp, Homo sapien
ttatgaaacccaataccccaattttggacattt

SEQ ID NO: 84652 - DNA, 33 bp, Homo sapien
ttatgaaacccaatacgccaattttggacattt

SEQ ID NO: 84653 - DNA, 33 bp, Homo sapien
taattagcacatggtaaacatttgacaaatatt

SEQ ID NO: 84654 - DNA, 33 bp, Homo sapien
taattagcacatggtagacatttgacaaatatt

SEQ ID NO: 84655 - DNA, 33 bp, Homo sapien
ctgtcaggtcaaagataataattagcacatggt

SEQ ID NO: 84656 - DNA, 33 bp, Homo sapien
ctgtcaggtcaaagatgataattagcacatggt

SEQ ID NO: 84657 - DNA, 33 bp, Homo sapien
gagaatgaatggcttaaaaaaaatcctcagaag

SEQ ID NO: 84658 - DNA, 33 bp, Homo sapien
gagaatgaatggcttacaaaaaatcctcagaag

SEQ ID NO: 84659 - DNA, 33 bp, Homo sapien
gcctggggagttagaactgcacatcctgctgct

SEQ ID NO: 84660 - DNA, 33 bp, Homo sapien
gcctggggagttagaattgcacatcctgctgct

SEQ ID NO: 84661 - DNA, 33 bp, Homo sapien
catctcactgctacccaagacacatatatggct

SEQ ID NO: 84662 - DNA, 33 bp, Homo sapien
catctcactgctacccgagacacatatatggct

SEQ ID NO: 84663 - DNA, 33 bp, Homo sapien
agcccaatcaagtgaacaaataaagttaaccat

SEQ ID NO: 84664 - DNA, 33 bp, Homo sapien
agcccaatcaagtgaagaaataaagttaaccat

SEQ ID NO: 84665 - DNA, 33 bp, Homo sapien
ttcatcatgtacaaggaaccctcagtaagatta

SEQ ID NO: 84666 - DNA, 33 bp, Homo sapien
ttcatcatgtacaagggaccctcagtaagatta

SEQ ID NO: 84667 - DNA, 33 bp, Homo sapien
gacttcaacaatcaacagcaaaccctagggaaa

SEQ ID NO: 84668 - DNA, 33 bp, Homo sapien
gacttcaacaatcaacggcaaaccctagggaaa

SEQ ID NO: 84669 - DNA, 33 bp, Homo sapien
ctcgagcttctcttgactattcttttgcttggt

SEQ ID NO: 84670 - DNA, 33 bp, Homo sapien
ctcgagcttctcttgattattcttttgcttggt

SEQ ID NO: 84671 - DNA, 33 bp, Homo sapien
aaacacatgaaatggaaaagttttatgtgtttt

SEQ ID NO: 84672 - DNA, 33 bp, Homo sapien
aaacacatgaaatggacaagttttatgtgtttt

SEQ ID NO: 84673 - DNA, 33 bp, Homo sapien
ttataacttcaaacaccaaaaagaacagtctaa

SEQ ID NO: 84674 - DNA, 33 bp, Homo sapien
ttataacttcaaacacgaaaaagaacagtctaa

SEQ ID NO: 84675 - DNA, 33 bp, Homo sapien
gaatgactttctctgccctttattctatagtag

SEQ ID NO: 84676 - DNA, 33 bp, Homo sapien
gaatgactttctctgctctttattctatagtag

SEQ ID NO: 84677 - DNA, 33 bp, Homo sapien
aaacatggacctctgaccctagccatacagctc

SEQ ID NO: 84678 - DNA, 33 bp, Homo sapien
aaacatggacctctgagcctagccatacagctc

SEQ ID NO: 84679 - DNA, 33 bp, Homo sapien
gcctctttgagataaaaatctttcaggtaataa

SEQ ID NO: 84680 - DNA, 33 bp, Homo sapien
gcctctttgagataaacatctttcaggtaataa

SEQ ID NO: 84681 - DNA, 33 bp, Homo sapien
ggttaagaacacctgaagacagattgctacttt

SEQ ID NO: 84682 - DNA, 33 bp, Homo sapien
ggttaagaacacctgaggacagattgctacttt

SEQ ID NO: 84683 - DNA, 33 bp, Homo sapien
ttctcaaatatactgccgaagaaatactgaaga

SEQ ID NO: 84684 - DNA, 33 bp, Homo sapien
ttctcaaatatactgctgaagaaatactgaaga

SEQ ID NO: 84685 - DNA, 33 bp, Homo sapien
gttgagaaatggacaacggcaaatttggggata

SEQ ID NO: 84686 - DNA, 33 bp, Homo sapien
gttgagaaatggacaagggcaaatttggggata

SEQ ID NO: 84687 - DNA, 33 bp, Homo sapien
caccgtaaccttgacacagtaacttcaaatttc

SEQ ID NO: 84688 - DNA, 33 bp, Homo sapien
caccgtaaccttgacagagtaacttcaaatttc

SEQ ID NO: 84689 - DNA, 33 bp, Homo sapien
attatgttttgtaagccaagtgtgatgagacaa

SEQ ID NO: 84690 - DNA, 33 bp, Homo sapien
attatgttttgtaagcgaagtgtgatgagacaa

SEQ ID NO: 84691 - DNA, 33 bp, Homo sapien
taaggtaaggacagatcacagaaagccaaagga

SEQ ID NO: 84692 - DNA, 33 bp, Homo sapien
taaggtaaggacagatgacagaaagccaaagga

SEQ ID NO: 84693 - DNA, 33 bp, Homo sapien
acgaaatgaatatttcaaagtcctcatatgatt

SEQ ID NO: 84694 - DNA, 33 bp, Homo sapien
acgaaatgaatatttcgaagtcctcatatgatt

SEQ ID NO: 84695 - DNA, 33 bp, Homo sapien
ggtcacgtcatggaaacaggttttgcaatcact

SEQ ID NO: 84696 - DNA, 33 bp, Homo sapien
ggtcacgtcatggaaataggttttgcaatcact

SEQ ID NO: 84697 - DNA, 33 bp, Homo sapien
ttgttgtggtagaaaccggtgagcaccactgaa

SEQ ID NO: 84698 - DNA, 33 bp, Homo sapien
ttgttgtggtagaaactggtgagcaccactgaa

SEQ ID NO: 84699 - DNA, 33 bp, Homo sapien
aagtctaaaaatgctgcaaatgctgtccaagaa

SEQ ID NO: 84700 - DNA, 33 bp, Homo sapien
aagtctaaaaatgctggaaatgctgtccaagaa

SEQ ID NO: 84701 - DNA, 33 bp, Homo sapien
gtctcctaaaaggagaatagttatccaaggatg

SEQ ID NO: 84702 - DNA, 33 bp, Homo sapien
gtctcctaaaaggagagtagttatccaaggatg

SEQ ID NO: 84703 - DNA, 33 bp, Homo sapien
agggtctatgttcctacagctgtccactttttg

SEQ ID NO: 84704 - DNA, 33 bp, Homo sapien
agggtctatgttcctatagctgtccactttttg

SEQ ID NO: 84705 - DNA, 33 bp, Homo sapien
cagtttgatatctgccgacctcctgtttcagta

SEQ ID NO: 84706 - DNA, 33 bp, Homo sapien
cagtttgatatctgcctacctcctgtttcagta

SEQ ID NO: 84707 - DNA, 33 bp, Homo sapien
gatagatatttagatacatattagccttcagtt

SEQ ID NO: 84708 - DNA, 33 bp, Homo sapien
gatagatatttagatagatattagccttcagtt

SEQ ID NO: 84709 - DNA, 33 bp, Homo sapien
cttataacacctattaagacattgtttgcaaag

SEQ ID NO: 84710 - DNA, 33 bp, Homo sapien
cttataacacctattatgacattgtttgcaaag

SEQ ID NO: 84711 - DNA, 33 bp, Homo sapien
acagagtgacacaatagatcagtgagtatgaat

SEQ ID NO: 84712 - DNA, 33 bp, Homo sapien
acagagtgacacaatatatcagtgagtatgaat

SEQ ID NO: 84713 - DNA, 33 bp, Homo sapien
atacaataacctgtacaaattgtttctcctaga

SEQ ID NO: 84714 - DNA, 33 bp, Homo sapien
atacaataacctgtacgaattgtttctcctaga

SEQ ID NO: 84715 - DNA, 33 bp, Homo sapien
agtgctcaaggatggaccacgtctgcctcagtt

SEQ ID NO: 84716 - DNA, 33 bp, Homo sapien
agtgctcaaggatggatcacgtctgcctcagtt

SEQ ID NO: 84717 - DNA, 33 bp, Homo sapien
tgagttcagatccacactctaccatccactggc

SEQ ID NO: 84718 - DNA, 33 bp, Homo sapien
tgagttcagatccacattctaccatccactggc

SEQ ID NO: 84719 - DNA, 33 bp, Homo sapien
cagcaggctgtctcaacagggtctacacacttg

SEQ ID NO: 84720 - DNA, 33 bp, Homo sapien
cagcaggctgtctcaatagggtctacacacttg

SEQ ID NO: 84721 - DNA, 33 bp, Homo sapien
taaaggaggaataacaatagtaagatgctattt

SEQ ID NO: 84722 - DNA, 33 bp, Homo sapien
taaaggaggaataacagtagtaagatgctattt

SEQ ID NO: 84723 - DNA, 33 bp, Homo sapien
agattcagtcagtccacaatgtattttaaaaca

SEQ ID NO: 84724 - DNA, 33 bp, Homo sapien
agattcagtcagtccataatgtattttaaaaca

SEQ ID NO: 84725 - DNA, 33 bp, Homo sapien
accaacaaaagatcacacagaaattaagatgaa

SEQ ID NO: 84726 - DNA, 33 bp, Homo sapien
accaacaaaagatcacgcagaaattaagatgaa

SEQ ID NO: 84727 - DNA, 33 bp, Homo sapien
atatttaataatctgcaaacacatatttacagc

SEQ ID NO: 84728 - DNA, 33 bp, Homo sapien
atatttaataatctgcgaacacatatttacagc

SEQ ID NO: 84729 - DNA, 33 bp, Homo sapien
tttttggctccaatcacacttgtggttaccaga

SEQ ID NO: 84730 - DNA, 33 bp, Homo sapien
tttttggctccaatcatacttgtggttaccaga

SEQ ID NO: 84731 - DNA, 33 bp, Homo sapien
ggaatatgaattaacaatgagggctgcaacaat

SEQ ID NO: 84732 - DNA, 33 bp, Homo sapien
ggaatatgaattaacagtgagggctgcaacaat

SEQ ID NO: 84733 - DNA, 33 bp, Homo sapien
tccaagagacttttccaaatgccatggggacaa

SEQ ID NO: 84734 - DNA, 33 bp, Homo sapien
tccaagagacttttccgaatgccatggggacaa

SEQ ID NO: 84735 - DNA, 33 bp, Homo sapien
tgggagtggaatttcacgatttcacttatggcc

SEQ ID NO: 84736 - DNA, 33 bp, Homo sapien
tgggagtggaatttcatgatttcacttatggcc

SEQ ID NO: 84737 - DNA, 33 bp, Homo sapien
acccctgccgtaaagcaagtcatgtgaattttt

SEQ ID NO: 84738 - DNA, 33 bp, Homo sapien
acccctgccgtaaagcgagtcatgtgaattttt

SEQ ID NO: 84739 - DNA, 33 bp, Homo sapien
agatctcatctcaagaaagcaacgctgggtgtg

SEQ ID NO: 84740 - DNA, 33 bp, Homo sapien
agatctcatctcaagacagcaacgctgggtgtg

SEQ ID NO: 84741 - DNA, 33 bp, Homo sapien
ctacttcctgagacacagcaatattgaagttag

SEQ ID NO: 84742 - DNA, 33 bp, Homo sapien
ctacttcctgagacacggcaatattgaagttag

SEQ ID NO: 84743 - DNA, 33 bp, Homo sapien
tctatgagatgatgataaaaacaaactccatga

SEQ ID NO: 84744 - DNA, 33 bp, Homo sapien
tctatgagatgatgatgaaaacaaactccatga

SEQ ID NO: 84745 - DNA, 33 bp, Homo sapien
gtcttcggaacagttcaaccaaataacttaaat

SEQ ID NO: 84746 - DNA, 33 bp, Homo sapien
gtcttcggaacagttcgaccaaataacttaaat

SEQ ID NO: 84747 - DNA, 33 bp, Homo sapien
ggatgtggtaaggccacgattttggatgctgga

SEQ ID NO: 84748 - DNA, 33 bp, Homo sapien
ggatgtggtaaggccaggattttggatgctgga

SEQ ID NO: 84749 - DNA, 33 bp, Homo sapien
gctgcaactggtgctactacctggttgagtctg

SEQ ID NO: 84750 - DNA, 33 bp, Homo sapien
gctgcaactggtgctattacctggttgagtctg

SEQ ID NO: 84751 - DNA, 33 bp, Homo sapien
gatcctactctcatgaagcttacaatccagtga

SEQ ID NO: 84752 - DNA, 33 bp, Homo sapien
gatcctactctcatgaggcttacaatccagtga

SEQ ID NO: 84753 - DNA, 33 bp, Homo sapien
cgcagaggctgacacaccaaaggtactcattta

SEQ ID NO: 84754 - DNA, 33 bp, Homo sapien
cgcagaggctgacacatcaaaggtactcattta

SEQ ID NO: 84755 - DNA, 33 bp, Homo sapien
aaacctgtttttggtgcatcagctgccttgctt

SEQ ID NO: 84756 - DNA, 33 bp, Homo sapien
aaacctgtttttggtgtatcagctgccttgctt

SEQ ID NO: 84757 - DNA, 33 bp, Homo sapien
tagaaggcacggagacaggtaggcaggttagaa

SEQ ID NO: 84758 - DNA, 33 bp, Homo sapien
tagaaggcacggagacgggtaggcaggttagaa

SEQ ID NO: 84759 - DNA, 33 bp, Homo sapien
gcatgaccaaaccataactcttgatttccctac

SEQ ID NO: 84760 - DNA, 33 bp, Homo sapien
gcatgaccaaaccatagctcttgatttccctac

SEQ ID NO: 84761 - DNA, 33 bp, Homo sapien
ttggtccaactattaacgatgctcagttcaatc

SEQ ID NO: 84762 - DNA, 33 bp, Homo sapien
ttggtccaactattaatgatgctcagttcaatc

SEQ ID NO: 84763 - DNA, 33 bp, Homo sapien
tcaaaaaattccgatcaagagggatacttatat

SEQ ID NO: 84764 - DNA, 33 bp, Homo sapien
tcaaaaaattccgatcgagagggatacttatat

SEQ ID NO: 84765 - DNA, 33 bp, Homo sapien
tggcaagtgaaattacacaggaatatttgcagc

SEQ ID NO: 84766 - DNA, 33 bp, Homo sapien
tggcaagtgaaattacgcaggaatatttgcagc

SEQ ID NO: 84767 - DNA, 33 bp, Homo sapien
aaagacaaaataccaccgggactggtcgaatga

SEQ ID NO: 84768 - DNA, 33 bp, Homo sapien
aaagacaaaataccactgggactggtcgaatga

SEQ ID NO: 84769 - DNA, 33 bp, Homo sapien
acagaagcaaggtgacaaaggcaacatcatcgt

SEQ ID NO: 84770 - DNA, 33 bp, Homo sapien
acagaagcaaggtgacgaaggcaacatcatcgt

SEQ ID NO: 84771 - DNA, 33 bp, Homo sapien
catgtagcttttgtcaataatcacaagttagga

SEQ ID NO: 84772 - DNA, 33 bp, Homo sapien
catgtagcttttgtcagtaatcacaagttagga

SEQ ID NO: 84773 - DNA, 33 bp, Homo sapien
tagccattagttagacacttcttagtgaatatc

SEQ ID NO: 84774 - DNA, 33 bp, Homo sapien
tagccattagttagactcttcttagtgaatatc

SEQ ID NO: 84775 - DNA, 33 bp, Homo sapien
gtttataatcatcttaaatcactggtgtgcagg

SEQ ID NO: 84776 - DNA, 33 bp, Homo sapien
gtttataatcatcttagatcactggtgtgcagg

SEQ ID NO: 84777 - DNA, 33 bp, Homo sapien
gacaaaagattcgccgaaatctcagagggaatg

SEQ ID NO: 84778 - DNA, 33 bp, Homo sapien
gacaaaagattcgccgcaatctcagagggaatg

SEQ ID NO: 84779 - DNA, 33 bp, Homo sapien
gaggaagtggttctcactcatagggtataagcc

SEQ ID NO: 84780 - DNA, 33 bp, Homo sapien
gaggaagtggttctcattcatagggtataagcc

SEQ ID NO: 84781 - DNA, 33 bp, Homo sapien
ctcattgcacttcacaaagtactttcatacctc

SEQ ID NO: 84782 - DNA, 33 bp, Homo sapien
ctcattgcacttcacagagtactttcatacctc

SEQ ID NO: 84783 - DNA, 33 bp, Homo sapien
gggtcccatagccagaactcactgttgtccttc

SEQ ID NO: 84784 - DNA, 33 bp, Homo sapien
gggtcccatagccagagctcactgttgtccttc

SEQ ID NO: 84785 - DNA, 33 bp, Homo sapien
atgctagtaagagagaagagtgatcacagaatc

SEQ ID NO: 84786 - DNA, 33 bp, Homo sapien
atgctagtaagagagaggagtgatcacagaatc

SEQ ID NO: 84787 - DNA, 33 bp, Homo sapien
atagtataagtgaaaactgttttgtgaattgcg

SEQ ID NO: 84788 - DNA, 33 bp, Homo sapien
atagtataagtgaaaagtgttttgtgaattgcg

SEQ ID NO: 84789 - DNA, 33 bp, Homo sapien
cagaatcttagtgatacgagcttaggcgaggct

SEQ ID NO: 84790 - DNA, 33 bp, Homo sapien
cagaatcttagtgatatgagcttaggcgaggct

SEQ ID NO: 84791 - DNA, 33 bp, Homo sapien
gatttgcttaaggttacgcaattatgcaattag

SEQ ID NO: 84792 - DNA, 33 bp, Homo sapien
gatttgcttaaggttatgcaattatgcaattag

SEQ ID NO: 84793 - DNA, 33 bp, Homo sapien
tttagcactttgtgaggatccttgacggaatca

SEQ ID NO: 84794 - DNA, 33 bp, Homo sapien
tttagcactttgtgagtatccttgacggaatca

SEQ ID NO: 84795 - DNA, 33 bp, Homo sapien
ttcaaattttatcacactggaaggcacatacgt

SEQ ID NO: 84796 - DNA, 33 bp, Homo sapien
ttcaaattttatcacattggaaggcacatacgt

SEQ ID NO: 84797 - DNA, 33 bp, Homo sapien
attgaaaaactagctccaagttgttccacacat

SEQ ID NO: 84798 - DNA, 33 bp, Homo sapien
attgaaaaactagctcgaagttgttccacacat

SEQ ID NO: 84799 - DNA, 33 bp, Homo sapien
ttaggaagtctaaggcaattgttttgtaaaatg

SEQ ID NO: 84800 - DNA, 33 bp, Homo sapien
ttaggaagtctaaggcgattgttttgtaaaatg

SEQ ID NO: 84801 - DNA, 33 bp, Homo sapien
tatctaaggagtaataagattcagtacataaat

SEQ ID NO: 84802 - DNA, 33 bp, Homo sapien
tatctaaggagtaatacgattcagtacataaat

SEQ ID NO: 84803 - DNA, 33 bp, Homo sapien
tttgcttcatctaagcacacattaaataggcta

SEQ ID NO: 84804 - DNA, 33 bp, Homo sapien
tttgcttcatctaagcccacattaaataggcta

SEQ ID NO: 84805 - DNA, 33 bp, Homo sapien
catcctttatgagccacatctcagactgggccc

SEQ ID NO: 84806 - DNA, 33 bp, Homo sapien
catcctttatgagccatatctcagactgggccc

SEQ ID NO: 84807 - DNA, 33 bp, Homo sapien
agaggttgtggtcagcggaaattatgccactgc

SEQ ID NO: 84808 - DNA, 33 bp, Homo sapien
agaggttgtggtcagctgaaattatgccactgc

SEQ ID NO: 84809 - DNA, 33 bp, Homo sapien
tctaaagagctgattcacagccaacgtatttct

SEQ ID NO: 84810 - DNA, 33 bp, Homo sapien
tctaaagagctgattcgcagccaacgtatttct

SEQ ID NO: 84811 - DNA, 33 bp, Homo sapien
gttctgcaagatgaagaaagttctggagattgg

SEQ ID NO: 84812 - DNA, 33 bp, Homo sapien
gttctgcaagatgaaggaagttctggagattgg

SEQ ID NO: 84813 - DNA, 33 bp, Homo sapien
tctctctttccatatacgcttcctgtgaatgac

SEQ ID NO: 84814 - DNA, 33 bp, Homo sapien
tctctctttccatatatgcttcctgtgaatgac

SEQ ID NO: 84815 - DNA, 33 bp, Homo sapien
attacagagctatgtacgtatgaatatgtaaga

SEQ ID NO: 84816 - DNA, 33 bp, Homo sapien
attacagagctatgtatgtatgaatatgtaaga

SEQ ID NO: 84817 - DNA, 33 bp, Homo sapien
tatcagtggtgactgcacagtggtataaatagc

SEQ ID NO: 84818 - DNA, 33 bp, Homo sapien
tatcagtggtgactgcgcagtggtataaatagc

SEQ ID NO: 84819 - DNA, 33 bp, Homo sapien
tcttatcacgagtcctacgggaaaccagctgcc

SEQ ID NO: 84820 - DNA, 33 bp, Homo sapien
tcttatcacgagtcctgcgggaaaccagctgcc

SEQ ID NO: 84821 - DNA, 33 bp, Homo sapien
ctcctggtaacgtccacatggcttccagtgatt

SEQ ID NO: 84822 - DNA, 33 bp, Homo sapien
ctcctggtaacgtccatatggcttccagtgatt

SEQ ID NO: 84823 - DNA, 33 bp, Homo sapien
gaagaatttcgtagccaactgggcacgagtgcc

SEQ ID NO: 84824 - DNA, 33 bp, Homo sapien
gaagaatttcgtagcctactgggcacgagtgcc

SEQ ID NO: 84825 - DNA, 33 bp, Homo sapien
caacagcacattaaccactgtcctagtgccatg

SEQ ID NO: 84826 - DNA, 33 bp, Homo sapien
caacagcacattaaccgctgtcctagtgccatg

SEQ ID NO: 84827 - DNA, 33 bp, Homo sapien
atattgtttgatttagaccaattctcaaaactc

SEQ ID NO: 84828 - DNA, 33 bp, Homo sapien
atattgtttgatttagtccaattctcaaaactc

SEQ ID NO: 84829 - DNA, 33 bp, Homo sapien
tttacttatttgtctcactttccatactgtaaa

SEQ ID NO: 84830 - DNA, 33 bp, Homo sapien
tttacttatttgtctcgctttccatactgtaaa

SEQ ID NO: 84831 - DNA, 33 bp, Homo sapien
ttgccataaccttagcacattgtaagtactagg

SEQ ID NO: 84832 - DNA, 33 bp, Homo sapien
ttgccataaccttagcgcattgtaagtactagg

SEQ ID NO: 84833 - DNA, 33 bp, Homo sapien
ggctgcccagcatttgcaataccagactttccc

SEQ ID NO: 84834 - DNA, 33 bp, Homo sapien
ggctgcccagcatttggaataccagactttccc

SEQ ID NO: 84835 - DNA, 33 bp, Homo sapien
tatatacttgtggaaaaagtgagaatgaaaaga

SEQ ID NO: 84836 - DNA, 33 bp, Homo sapien
tatatacttgtggaaacagtgagaatgaaaaga

SEQ ID NO: 84837 - DNA, 33 bp, Homo sapien
acaaactcctcttccaatctcggtcagagtggg

SEQ ID NO: 84838 - DNA, 33 bp, Homo sapien
acaaactcctcttccagtctcggtcagagtggg

SEQ ID NO: 84839 - DNA, 33 bp, Homo sapien
ttgacaaatgaccaaaaccgacttttcttcttt

SEQ ID NO: 84840 - DNA, 33 bp, Homo sapien
ttgacaaatgaccaaagccgacttttcttcttt

SEQ ID NO: 84841 - DNA, 33 bp, Homo sapien
cttactgctcatctgacatagttaccccaaatc

SEQ ID NO: 84842 - DNA, 33 bp, Homo sapien
cttactgctcatctgatatagttaccccaaatc

SEQ ID NO: 84843 - DNA, 33 bp, Homo sapien
cttgatatatacagtagagtgacattggaagcc

SEQ ID NO: 84844 - DNA, 33 bp, Homo sapien
cttgatatatacagtatagtgacattggaagcc

SEQ ID NO: 84845 - DNA, 33 bp, Homo sapien
ctgttaaccaacttccacctgggacagtgctca

SEQ ID NO: 84846 - DNA, 33 bp, Homo sapien
ctgttaaccaacttccgcctgggacagtgctca

SEQ ID NO: 84847 - DNA, 33 bp, Homo sapien
gtttacttgctctgtgaataaagtggtatcact

SEQ ID NO: 84848 - DNA, 33 bp, Homo sapien
gtttacttgctctgtgcataaagtggtatcact

SEQ ID NO: 84849 - DNA, 33 bp, Homo sapien
cgtgtctccactgctaagatatgcttcctgaac

SEQ ID NO: 84850 - DNA, 33 bp, Homo sapien
cgtgtctccactgctatgatatgcttcctgaac

SEQ ID NO: 84851 - DNA, 33 bp, Homo sapien
gggaaaagcaagctggaagtgtggaagaggtaa

SEQ ID NO: 84852 - DNA, 33 bp, Homo sapien
gggaaaagcaagctggcagtgtggaagaggtaa

SEQ ID NO: 84853 - DNA, 33 bp, Homo sapien
atatttagaatacttacgtaccagtaggggtca

SEQ ID NO: 84854 - DNA, 33 bp, Homo sapien
atatttagaatacttatgtaccagtaggggtca

SEQ ID NO: 84855 - DNA, 33 bp, Homo sapien
taaaaatattggaagacaaagttcaagaaatct

SEQ ID NO: 84856 - DNA, 33 bp, Homo sapien
taaaaatattggaagagaaagttcaagaaatct

SEQ ID NO: 84857 - DNA, 33 bp, Homo sapien
tggagaaaacagattacgcaaagagaagaaaac

SEQ ID NO: 84858 - DNA, 33 bp, Homo sapien
tggagaaaacagattatgcaaagagaagaaaac

SEQ ID NO: 84859 - DNA, 33 bp, Homo sapien
tcgagggatcttctggcaaagacgtttttcctg

SEQ ID NO: 84860 - DNA, 33 bp, Homo sapien
tcgagggatcttctggtaaagacgtttttcctg

SEQ ID NO: 84861 - DNA, 33 bp, Homo sapien
aataatttaaaagtaacccgggcagcgtttgtg

SEQ ID NO: 84862 - DNA, 33 bp, Homo sapien
aataatttaaaagtaagccgggcagcgtttgtg

SEQ ID NO: 84863 - DNA, 33 bp, Homo sapien
cgcctttttttcagtccaaagaggccatgtggg

SEQ ID NO: 84864 - DNA, 33 bp, Homo sapien
cgcctttttttcagtcgaaagaggccatgtggg

SEQ ID NO: 84865 - DNA, 33 bp, Homo sapien
ataagatagcgcacggaattgctaggcgcattc

SEQ ID NO: 84866 - DNA, 33 bp, Homo sapien
ataagatagcgcacgggattgctaggcgcattc

SEQ ID NO: 84867 - DNA, 33 bp, Homo sapien
attgtaatatccttgacagaggaagtagattta

SEQ ID NO: 84868 - DNA, 33 bp, Homo sapien
attgtaatatccttgagagaggaagtagattta

SEQ ID NO: 84869 - DNA, 33 bp, Homo sapien
gagtggttcgttctgcaccctcttaagatcttt

SEQ ID NO: 84870 - DNA, 33 bp, Homo sapien
gagtggttcgttctgccccctcttaagatcttt

SEQ ID NO: 84871 - DNA, 33 bp, Homo sapien
gtgtgtcttgttataaaagaatatctaagtttg

SEQ ID NO: 84872 - DNA, 33 bp, Homo sapien
gtgtgtcttgttataacagaatatctaagtttg

SEQ ID NO: 84873 - DNA, 33 bp, Homo sapien
tgattattacaatggactcagaggttctgtaca

SEQ ID NO: 84874 - DNA, 33 bp, Homo sapien
tgattattacaatggattcagaggttctgtaca

SEQ ID NO: 84875 - DNA, 33 bp, Homo sapien
gtctaagtgtgcaggaagtcagacagggcaggc

SEQ ID NO: 84876 - DNA, 33 bp, Homo sapien
gtctaagtgtgcaggaggtcagacagggcaggc

SEQ ID NO: 84877 - DNA, 33 bp, Homo sapien
cacgtagtatcttcccaataaaggtttctcact

SEQ ID NO: 84878 - DNA, 33 bp, Homo sapien
cacgtagtatcttcccgataaaggtttctcact

SEQ ID NO: 84879 - DNA, 33 bp, Homo sapien
aaaaaaataatgataacaacagttgatgaaatg

SEQ ID NO: 84880 - DNA, 33 bp, Homo sapien
aaaaaaataatgataataacagttgatgaaatg

SEQ ID NO: 84881 - DNA, 33 bp, Homo sapien
gtgaaaagaagattacaggtcatagtcacaaat

SEQ ID NO: 84882 - DNA, 33 bp, Homo sapien
gtgaaaagaagattacgggtcatagtcacaaat

SEQ ID NO: 84883 - DNA, 33 bp, Homo sapien
ctcctcttataccacaataatgaccaggcacac

SEQ ID NO: 84884 - DNA, 33 bp, Homo sapien
ctcctcttataccacagtaatgaccaggcacac

SEQ ID NO: 84885 - DNA, 33 bp, Homo sapien
cagcttacactggccacgtggtatcttgatgaa

SEQ ID NO: 84886 - DNA, 33 bp, Homo sapien
cagcttacactggccatgtggtatcttgatgaa

SEQ ID NO: 84887 - DNA, 33 bp, Homo sapien
attccagtttcatctccctgttgactttttagc

SEQ ID NO: 84888 - DNA, 33 bp, Homo sapien
attccagtttcatctctctgttgactttttagc

SEQ ID NO: 84889 - DNA, 33 bp, Homo sapien
ttgtcaagatatcaacacagtttgtatccatca

SEQ ID NO: 84890 - DNA, 33 bp, Homo sapien
ttgtcaagatatcaactcagtttgtatccatca

SEQ ID NO: 84891 - DNA, 33 bp, Homo sapien
ttgtggttggcaacaggattgaacgtaaactcc

SEQ ID NO: 84892 - DNA, 33 bp, Homo sapien
ttgtggttggcaacagtattgaacgtaaactcc

SEQ ID NO: 84893 - DNA, 33 bp, Homo sapien
aggctgtcattaccccaaaagtcagctttgtgt

SEQ ID NO: 84894 - DNA, 33 bp, Homo sapien
aggctgtcattaccccgaaagtcagctttgtgt

SEQ ID NO: 84895 - DNA, 33 bp, Homo sapien
agggcaagtactaagagtcccactttacagaag

SEQ ID NO: 84896 - DNA, 33 bp, Homo sapien
agggcaagtactaagattcccactttacagaag

SEQ ID NO: 84897 - DNA, 33 bp, Homo sapien
gtacataaagtaatcaaactcagacaggaagta

SEQ ID NO: 84898 - DNA, 33 bp, Homo sapien
gtacataaagtaatcagactcagacaggaagta

SEQ ID NO: 84899 - DNA, 33 bp, Homo sapien
catctcagaaagactacgactccccaaagtcag

SEQ ID NO: 84900 - DNA, 33 bp, Homo sapien
catctcagaaagactatgactccccaaagtcag

SEQ ID NO: 84901 - DNA, 33 bp, Homo sapien
taagccactaaagaaacagtcgtgtgggattaa

SEQ ID NO: 84902 - DNA, 33 bp, Homo sapien
taagccactaaagaaatagtcgtgtgggattaa

SEQ ID NO: 84903 - DNA, 33 bp, Homo sapien
aaacatctgtgaatccaaaaacattcttgtggc

SEQ ID NO: 84904 - DNA, 33 bp, Homo sapien
aaacatctgtgaatccgaaaacattcttgtggc

SEQ ID NO: 84905 - DNA, 33 bp, Homo sapien
ggagcgggtgctgccacgtgaactttggtgttg

SEQ ID NO: 84906 - DNA, 33 bp, Homo sapien
ggagcgggtgctgccatgtgaactttggtgttg

SEQ ID NO: 84907 - DNA, 33 bp, Homo sapien
gaggaacaaatgaaaacggcactggggcttcat

SEQ ID NO: 84908 - DNA, 33 bp, Homo sapien
gaggaacaaatgaaaatggcactggggcttcat

SEQ ID NO: 84909 - DNA, 33 bp, Homo sapien
tagcataccagccataccataaggttgccaagt

SEQ ID NO: 84910 - DNA, 33 bp, Homo sapien
tagcataccagccatatcataaggttgccaagt

SEQ ID NO: 84911 - DNA, 33 bp, Homo sapien
tccctcctccgtgctaagttggtagtttccact

SEQ ID NO: 84912 - DNA, 33 bp, Homo sapien
tccctcctccgtgctaggttggtagtttccact

SEQ ID NO: 84913 - DNA, 33 bp, Homo sapien
agataaacagggatagaagcagcagttgtcact

SEQ ID NO: 84914 - DNA, 33 bp, Homo sapien
agataaacagggatagtagcagcagttgtcact

SEQ ID NO: 84915 - DNA, 33 bp, Homo sapien
tttttctatggtggaaaaaaaatagaataattg

SEQ ID NO: 84916 - DNA, 33 bp, Homo sapien
tttttctatggtggaacaaaaatagaataattg

SEQ ID NO: 84917 - DNA, 33 bp, Homo sapien
aaaagtttactgataacggtttcagggcccata

SEQ ID NO: 84918 - DNA, 33 bp, Homo sapien
aaaagtttactgataatggtttcagggcccata

SEQ ID NO: 84919 - DNA, 33 bp, Homo sapien
ttgaataaatgaatgacaccacatagcccaaca

SEQ ID NO: 84920 - DNA, 33 bp, Homo sapien
ttgaataaatgaatgagaccacatagcccaaca

SEQ ID NO: 84921 - DNA, 33 bp, Homo sapien
agcatttgtgatcacacggaccagagactcagt

SEQ ID NO: 84922 - DNA, 33 bp, Homo sapien
agcatttgtgatcacatggaccagagactcagt

SEQ ID NO: 84923 - DNA, 33 bp, Homo sapien
gctggctggttatctccctttcttcctctgtcc

SEQ ID NO: 84924 - DNA, 33 bp, Homo sapien
gctggctggttatctctctttcttcctctgtcc

SEQ ID NO: 84925 - DNA, 33 bp, Homo sapien
ggtcatgcacaatataaaatttacatacaactt

SEQ ID NO: 84926 - DNA, 33 bp, Homo sapien
ggtcatgcacaatatataatttacatacaactt

SEQ ID NO: 84927 - DNA, 33 bp, Homo sapien
gtaactgagggaaaaaaccgaaatgtccatcca

SEQ ID NO: 84928 - DNA, 33 bp, Homo sapien
gtaactgagggaaaaatccgaaatgtccatcca

SEQ ID NO: 84929 - DNA, 33 bp, Homo sapien
catcacatgaacaagacagagcaagagaaggag

SEQ ID NO: 84930 - DNA, 33 bp, Homo sapien
catcacatgaacaagagagagcaagagaaggag

SEQ ID NO: 84931 - DNA, 33 bp, Homo sapien
accctctatccatctcaccaccggccaaaatca

SEQ ID NO: 84932 - DNA, 33 bp, Homo sapien
accctctatccatctctccaccggccaaaatca

SEQ ID NO: 84933 - DNA, 33 bp, Homo sapien
caggagatcctgagaacgcgtgcccaagtggtc

SEQ ID NO: 84934 - DNA, 33 bp, Homo sapien
caggagatcctgagaatgcgtgcccaagtggtc

SEQ ID NO: 84935 - DNA, 33 bp, Homo sapien
ctctattcctcagtccacaccacctaggcaggc

SEQ ID NO: 84936 - DNA, 33 bp, Homo sapien
ctctattcctcagtccgcaccacctaggcaggc

SEQ ID NO: 84937 - DNA, 33 bp, Homo sapien
cacctctcagataaataaacagcatcctgtccc

SEQ ID NO: 84938 - DNA, 33 bp, Homo sapien
cacctctcagataaatgaacagcatcctgtccc

SEQ ID NO: 84939 - DNA, 33 bp, Homo sapien
ttcctgccagtcaaagaaaggaaattccaccag

SEQ ID NO: 84940 - DNA, 33 bp, Homo sapien
ttcctgccagtcaaaggaaggaaattccaccag

SEQ ID NO: 84941 - DNA, 33 bp, Homo sapien
ggaagcaacacaacaacagtaggagatttcaat

SEQ ID NO: 84942 - DNA, 33 bp, Homo sapien
ggaagcaacacaacaatagtaggagatttcaat

SEQ ID NO: 84943 - DNA, 33 bp, Homo sapien
agtgcctaaaacaataaagaaggagtgataaga

SEQ ID NO: 84944 - DNA, 33 bp, Homo sapien
agtgcctaaaacaatacagaaggagtgataaga

SEQ ID NO: 84945 - DNA, 33 bp, Homo sapien
acatggcgattcccacactttcttggcctttcc

SEQ ID NO: 84946 - DNA, 33 bp, Homo sapien
acatggcgattcccacgctttcttggcctttcc

SEQ ID NO: 84947 - DNA, 33 bp, Homo sapien
aaaaaaacagatggtgaaaggtactcatcatga

SEQ ID NO: 84948 - DNA, 33 bp, Homo sapien
aaaaaaacagatggtggaaggtactcatcatga

SEQ ID NO: 84949 - DNA, 33 bp, Homo sapien
agacttcaggagtagaaatgaacatacttgagt

SEQ ID NO: 84950 - DNA, 33 bp, Homo sapien
agacttcaggagtagagatgaacatacttgagt

SEQ ID NO: 84951 - DNA, 33 bp, Homo sapien
tcattgtgctgaaaaacaatgggatacaaactt

SEQ ID NO: 84952 - DNA, 33 bp, Homo sapien
tcattgtgctgaaaaataatgggatacaaactt

SEQ ID NO: 84953 - DNA, 33 bp, Homo sapien
cacccactttaattaactggtgtaatcaggagt

SEQ ID NO: 84954 - DNA, 33 bp, Homo sapien
cacccactttaattaattggtgtaatcaggagt

SEQ ID NO: 84955 - DNA, 33 bp, Homo sapien
aaattgctgacttaaactgtggctttgtggctc

SEQ ID NO: 84956 - DNA, 33 bp, Homo sapien
aaattgctgacttaaattgtggctttgtggctc

SEQ ID NO: 84957 - DNA, 33 bp, Homo sapien
ctggcagcagagatgacgacactgggattgaca

SEQ ID NO: 84958 - DNA, 33 bp, Homo sapien
ctggcagcagagatgatgacactgggattgaca

SEQ ID NO: 84959 - DNA, 33 bp, Homo sapien
ccatatgtaacactgcacacccctgttctctga

SEQ ID NO: 84960 - DNA, 33 bp, Homo sapien
ccatatgtaacactgcgcacccctgttctctga

SEQ ID NO: 84961 - DNA, 33 bp, Homo sapien
gcacagaacctgtgagaagacagacttcagtta

SEQ ID NO: 84962 - DNA, 33 bp, Homo sapien
gcacagaacctgtgagtagacagacttcagtta

SEQ ID NO: 84963 - DNA, 33 bp, Homo sapien
caaaatccttgctcacaaagtcggcctcacttt

SEQ ID NO: 84964 - DNA, 33 bp, Homo sapien
caaaatccttgctcacgaagtcggcctcacttt

SEQ ID NO: 84965 - DNA, 33 bp, Homo sapien
agcatctaaaatgagaccactacatcagggaag

SEQ ID NO: 84966 - DNA, 33 bp, Homo sapien
agcatctaaaatgagatcactacatcagggaag

SEQ ID NO: 84967 - DNA, 33 bp, Homo sapien
caaaaaccagatggaacaagtaaggtctgctgc

SEQ ID NO: 84968 - DNA, 33 bp, Homo sapien
caaaaaccagatggaataagtaaggtctgctgc

SEQ ID NO: 84969 - DNA, 33 bp, Homo sapien
gtctcatctatgaaaacggaacggcagtcatac

SEQ ID NO: 84970 - DNA, 33 bp, Homo sapien
gtctcatctatgaaaatggaacggcagtcatac

SEQ ID NO: 84971 - DNA, 33 bp, Homo sapien
ctttttgaccttcctcacctgaatacatctgat

SEQ ID NO: 84972 - DNA, 33 bp, Homo sapien
ctttttgaccttcctcgcctgaatacatctgat

SEQ ID NO: 84973 - DNA, 33 bp, Homo sapien
gttttcacacagtggaaggggcgaggaagctct

SEQ ID NO: 84974 - DNA, 33 bp, Homo sapien
gttttcacacagtggagggggcgaggaagctct

SEQ ID NO: 84975 - DNA, 33 bp, Homo sapien
ctttaattctctctacagcatggccaccttcta

SEQ ID NO: 84976 - DNA, 33 bp, Homo sapien
ctttaattctctctacggcatggccaccttcta

SEQ ID NO: 84977 - DNA, 33 bp, Homo sapien
ctggatcatctagtgacactgcaaactagcccc

SEQ ID NO: 84978 - DNA, 33 bp, Homo sapien
ctggatcatctagtgatactgcaaactagcccc

SEQ ID NO: 84979 - DNA, 33 bp, Homo sapien
gttcattcatcctaagaccccgctcttccgcga

SEQ ID NO: 84980 - DNA, 33 bp, Homo sapien
gttcattcatcctaaggccccgctcttccgcga

SEQ ID NO: 84981 - DNA, 33 bp, Homo sapien
cagctgcctcgcttgcagaacacgatcgttcaa

SEQ ID NO: 84982 - DNA, 33 bp, Homo sapien
cagctgcctcgcttgcggaacacgatcgttcaa

SEQ ID NO: 84983 - DNA, 33 bp, Homo sapien
gagtgttctaagtatcaaatccttacacttaaa

SEQ ID NO: 84984 - DNA, 33 bp, Homo sapien
gagtgttctaagtatcgaatccttacacttaaa

SEQ ID NO: 84985 - DNA, 33 bp, Homo sapien
aggttcctggtctttccggaggtactttagaaa

SEQ ID NO: 84986 - DNA, 33 bp, Homo sapien
aggttcctggtctttctggaggtactttagaaa

SEQ ID NO: 84987 - DNA, 33 bp, Homo sapien
atgtctgcagatgaacagaagaaagtctttctt

SEQ ID NO: 84988 - DNA, 33 bp, Homo sapien
atgtctgcagatgaacggaagaaagtctttctt

SEQ ID NO: 84989 - DNA, 33 bp, Homo sapien
gtcgggagatgaggtacacacgtgctcttcccg

SEQ ID NO: 84990 - DNA, 33 bp, Homo sapien
gtcgggagatgaggtatacacgtgctcttcccg

SEQ ID NO: 84991 - DNA, 33 bp, Homo sapien
aacactctagccttgaaaaatgtgtgtccatga

SEQ ID NO: 84992 - DNA, 33 bp, Homo sapien
aacactctagccttgagaaatgtgtgtccatga

SEQ ID NO: 84993 - DNA, 33 bp, Homo sapien
ggtaatccagaaacaaatactaaatgttgtatg

SEQ ID NO: 84994 - DNA, 33 bp, Homo sapien
ggtaatccagaaacaagtactaaatgttgtatg

SEQ ID NO: 84995 - DNA, 33 bp, Homo sapien
tagcgtcggagtattacatgaaaatagtttcga

SEQ ID NO: 84996 - DNA, 33 bp, Homo sapien
tagcgtcggagtattatatgaaaatagtttcga

SEQ ID NO: 84997 - DNA, 33 bp, Homo sapien
aatttgggagtgagacacagaataactcaagga

SEQ ID NO: 84998 - DNA, 33 bp, Homo sapien
aatttgggagtgagacgcagaataactcaagga

SEQ ID NO: 84999 - DNA, 33 bp, Homo sapien
tagattatataagaaccaaatcaagcaaatcaa

SEQ ID NO: 85000 - DNA, 33 bp, Homo sapien
tagattatataagaacgaaatcaagcaaatcaa

SEQ ID NO: 85001 - DNA, 33 bp, Homo sapien
ttgagctgtttctggaaaaggaaagggaaagaa

SEQ ID NO: 85002 - DNA, 33 bp, Homo sapien
ttgagctgtttctggagaaggaaagggaaagaa

SEQ ID NO: 85003 - DNA, 33 bp, Homo sapien
cagccctctagacctgaaggtatgctggataga

SEQ ID NO: 85004 - DNA, 33 bp, Homo sapien
cagccctctagacctggaggtatgctggataga

SEQ ID NO: 85005 - DNA, 33 bp, Homo sapien
aaactgtgaacacagacgcttatggctgatctg

SEQ ID NO: 85006 - DNA, 33 bp, Homo sapien
aaactgtgaacacagatgcttatggctgatctg

SEQ ID NO: 85007 - DNA, 33 bp, Homo sapien
cccgagctaataaaccagaaccagcgagattgg

SEQ ID NO: 85008 - DNA, 33 bp, Homo sapien
cccgagctaataaaccggaaccagcgagattgg

SEQ ID NO: 85009 - DNA, 33 bp, Homo sapien
tagccctacctccagcactctgccttgcatgat

SEQ ID NO: 85010 - DNA, 33 bp, Homo sapien
tagccctacctccagcgctctgccttgcatgat

SEQ ID NO: 85011 - DNA, 33 bp, Homo sapien
gttctgctagttccacaatggggagagggcatc

SEQ ID NO: 85012 - DNA, 33 bp, Homo sapien
gttctgctagttccacgatggggagagggcatc

SEQ ID NO: 85013 - DNA, 33 bp, Homo sapien
tttccattctgttatcacaggttctgatgactt

SEQ ID NO: 85014 - DNA, 33 bp, Homo sapien
tttccattctgttatctcaggttctgatgactt

SEQ ID NO: 85015 - DNA, 33 bp, Homo sapien
gttttcctgttgacgaaaaatatgtctctcctg

SEQ ID NO: 85016 - DNA, 33 bp, Homo sapien
gttttcctgttgacgagaaatatgtctctcctg

SEQ ID NO: 85017 - DNA, 33 bp, Homo sapien
ggtgttcatctccatacagcgtcactctcattc

SEQ ID NO: 85018 - DNA, 33 bp, Homo sapien
ggtgttcatctccatatagcgtcactctcattc

SEQ ID NO: 85019 - DNA, 33 bp, Homo sapien
attacctgcatccaagaaggattgacagagccc

SEQ ID NO: 85020 - DNA, 33 bp, Homo sapien
attacctgcatccaaggaggattgacagagccc

SEQ ID NO: 85021 - DNA, 33 bp, Homo sapien
acctggctggccagtacgatttttaaatgagtc

SEQ ID NO: 85022 - DNA, 33 bp, Homo sapien
acctggctggccagtatgatttttaaatgagtc

SEQ ID NO: 85023 - DNA, 33 bp, Homo sapien
tgtatctggagaaaaacttaaaaaagcaaccaa

SEQ ID NO: 85024 - DNA, 33 bp, Homo sapien
tgtatctggagaaaaatttaaaaaagcaaccaa

SEQ ID NO: 85025 - DNA, 33 bp, Homo sapien
tccatgtgtatcccccccacgtgcgcacatgca

SEQ ID NO: 85026 - DNA, 33 bp, Homo sapien
tccatgtgtatccccctcacgtgcgcacatgca

SEQ ID NO: 85027 - DNA, 33 bp, Homo sapien
gggccctgtgactggaagaatggagttctggga

SEQ ID NO: 85028 - DNA, 33 bp, Homo sapien
gggccctgtgactggaggaatggagttctggga

SEQ ID NO: 85029 - DNA, 33 bp, Homo sapien
tggatagtgctttcaacgtgtcttcctatggca

SEQ ID NO: 85030 - DNA, 33 bp, Homo sapien
tggatagtgctttcaatgtgtcttcctatggca

SEQ ID NO: 85031 - DNA, 33 bp, Homo sapien
tgagtgggctgaatcaccctacttcaactgatt

SEQ ID NO: 85032 - DNA, 33 bp, Homo sapien
tgagtgggctgaatcatcctacttcaactgatt

SEQ ID NO: 85033 - DNA, 33 bp, Homo sapien
agtcactgcaaaactcaactttagcacattgta

SEQ ID NO: 85034 - DNA, 33 bp, Homo sapien
agtcactgcaaaactcgactttagcacattgta

SEQ ID NO: 85035 - DNA, 33 bp, Homo sapien
gaggcacagaatatgaagttagttgccaaaagt

SEQ ID NO: 85036 - DNA, 33 bp, Homo sapien
gaggcacagaatatgaggttagttgccaaaagt

SEQ ID NO: 85037 - DNA, 33 bp, Homo sapien
aaggcttcctacgagacgcacacacagaaattt

SEQ ID NO: 85038 - DNA, 33 bp, Homo sapien
aaggcttcctacgagatgcacacacagaaattt

SEQ ID NO: 85039 - DNA, 33 bp, Homo sapien
gacaagtgggtattaaataacttcagtaaccat

SEQ ID NO: 85040 - DNA, 33 bp, Homo sapien
gacaagtgggtattaagtaacttcagtaaccat

SEQ ID NO: 85041 - DNA, 33 bp, Homo sapien
acaaccaattttatcacagtgaatttccaagtc

SEQ ID NO: 85042 - DNA, 33 bp, Homo sapien
acaaccaattttatcatagtgaatttccaagtc

SEQ ID NO: 85043 - DNA, 33 bp, Homo sapien
ggggaagctttttccaacagcttggactcaatg

SEQ ID NO: 85044 - DNA, 33 bp, Homo sapien
ggggaagctttttccagcagcttggactcaatg

SEQ ID NO: 85045 - DNA, 33 bp, Homo sapien
cttccaaaataaatgaagcccaggagtgtgagt

SEQ ID NO: 85046 - DNA, 33 bp, Homo sapien
cttccaaaataaatgatgcccaggagtgtgagt

SEQ ID NO: 85047 - DNA, 33 bp, Homo sapien
ctgcagaaggtcttgcacttttccaggctagag

SEQ ID NO: 85048 - DNA, 33 bp, Homo sapien
ctgcagaaggtcttgcgcttttccaggctagag

SEQ ID NO: 85049 - DNA, 33 bp, Homo sapien
agacactaatatgaaacggctgctttttattaa

SEQ ID NO: 85050 - DNA, 33 bp, Homo sapien
agacactaatatgaaatggctgctttttattaa

SEQ ID NO: 85051 - DNA, 33 bp, Homo sapien
taatattttgtatgacagggactccgatggagc

SEQ ID NO: 85052 - DNA, 33 bp, Homo sapien
taatattttgtatgacggggactccgatggagc

SEQ ID NO: 85053 - DNA, 33 bp, Homo sapien
gctctgcctcagaacgcaggatcttgttcccta

SEQ ID NO: 85054 - DNA, 33 bp, Homo sapien
gctctgcctcagaacgtaggatcttgttcccta

SEQ ID NO: 85055 - DNA, 33 bp, Homo sapien
tttagaactgaaatgaacttcacataggatggt

SEQ ID NO: 85056 - DNA, 33 bp, Homo sapien
tttagaactgaaatgagcttcacataggatggt

SEQ ID NO: 85057 - DNA, 33 bp, Homo sapien
aatacaggacacatagacctagattcagccttg

SEQ ID NO: 85058 - DNA, 33 bp, Homo sapien
aatacaggacacataggcctagattcagccttg

SEQ ID NO: 85059 - DNA, 33 bp, Homo sapien
ttggcacaaggcatcacggcaccttctaacacc

SEQ ID NO: 85060 - DNA, 33 bp, Homo sapien
ttggcacaaggcatcatggcaccttctaacacc

SEQ ID NO: 85061 - DNA, 33 bp, Homo sapien
gtggtgaatggttaatcagagaaatctgggcaa

SEQ ID NO: 85062 - DNA, 33 bp, Homo sapien
gtggtgaatggttaatgagagaaatctgggcaa

SEQ ID NO: 85063 - DNA, 33 bp, Homo sapien
atggactaagaggtgacgggtaaatgataggga

SEQ ID NO: 85064 - DNA, 33 bp, Homo sapien
atggactaagaggtgatgggtaaatgataggga

SEQ ID NO: 85065 - DNA, 33 bp, Homo sapien
tgcacccatagatcaccctggaattttagtccc

SEQ ID NO: 85066 - DNA, 33 bp, Homo sapien
tgcacccatagatcactctggaattttagtccc

SEQ ID NO: 85067 - DNA, 33 bp, Homo sapien
cccacttagagcccagcatggcaagaggcctca

SEQ ID NO: 85068 - DNA, 33 bp, Homo sapien
cccacttagagcccagtatggcaagaggcctca

SEQ ID NO: 85069 - DNA, 33 bp, Homo sapien
aaagcacgggcttaaactgcagagtgctgtgtg

SEQ ID NO: 85070 - DNA, 33 bp, Homo sapien
aaagcacgggcttaaattgcagagtgctgtgtg

SEQ ID NO: 85071 - DNA, 33 bp, Homo sapien
atgctgaagtttcaagactgagtggcatcatta

SEQ ID NO: 85072 - DNA, 33 bp, Homo sapien
atgctgaagtttcaagcctgagtggcatcatta

SEQ ID NO: 85073 - DNA, 33 bp, Homo sapien
aatttgaataagtgccaaagaagcaaaggactg

SEQ ID NO: 85074 - DNA, 33 bp, Homo sapien
aatttgaataagtgcccaagaagcaaaggactg

SEQ ID NO: 85075 - DNA, 33 bp, Homo sapien
aatgctctgagcataactgctgtaacagctggg

SEQ ID NO: 85076 - DNA, 33 bp, Homo sapien
aatgctctgagcataagtgctgtaacagctggg

SEQ ID NO: 85077 - DNA, 33 bp, Homo sapien
gccatgtgcatgtataacgcagagtatacaagg

SEQ ID NO: 85078 - DNA, 33 bp, Homo sapien
gccatgtgcatgtatatcgcagagtatacaagg

SEQ ID NO: 85079 - DNA, 33 bp, Homo sapien
ctgcctgggcattgtacgaagggaaaaaaaaaa

SEQ ID NO: 85080 - DNA, 33 bp, Homo sapien
ctgcctgggcattgtatgaagggaaaaaaaaaa

SEQ ID NO: 85081 - DNA, 33 bp, Homo sapien
gacaggtgttgtattcactgaattgctgcctta

SEQ ID NO: 85082 - DNA, 33 bp, Homo sapien
gacaggtgttgtattcgctgaattgctgcctta

SEQ ID NO: 85083 - DNA, 33 bp, Homo sapien
agacataaaaatgagcggagctaggaccagaag

SEQ ID NO: 85084 - DNA, 33 bp, Homo sapien
agacataaaaatgagctgagctaggaccagaag

SEQ ID NO: 85085 - DNA, 33 bp, Homo sapien
ggataataactaataacctatagcagaacctga

SEQ ID NO: 85086 - DNA, 33 bp, Homo sapien
ggataataactaataatctatagcagaacctga

SEQ ID NO: 85087 - DNA, 33 bp, Homo sapien
ttttagatttattccacaaaaagggtccatttt

SEQ ID NO: 85088 - DNA, 33 bp, Homo sapien
ttttagatttattccagaaaaagggtccatttt

SEQ ID NO: 85089 - DNA, 33 bp, Homo sapien
gatgagggaagggaatgaggttcatgagcacac

SEQ ID NO: 85090 - DNA, 33 bp, Homo sapien
gatgagggaagggaattaggttcatgagcacac

SEQ ID NO: 85091 - DNA, 33 bp, Homo sapien
agtacacgcgtcgttacgagaagcagctctctg

SEQ ID NO: 85092 - DNA, 33 bp, Homo sapien
agtacacgcgtcgttatgagaagcagctctctg

SEQ ID NO: 85093 - DNA, 33 bp, Homo sapien
ggggcaggaggaagaacgccaggagacgggagc

SEQ ID NO: 85094 - DNA, 33 bp, Homo sapien
ggggcaggaggaagaatgccaggagacgggagc

SEQ ID NO: 85095 - DNA, 33 bp, Homo sapien
catcccccacactgctaaaattcaaagaagaca

SEQ ID NO: 85096 - DNA, 33 bp, Homo sapien
catcccccacactgctgaaattcaaagaagaca

SEQ ID NO: 85097 - DNA, 33 bp, Homo sapien
gaacaatttgactttcgcttttccagtttggat

SEQ ID NO: 85098 - DNA, 33 bp, Homo sapien
gaacaatttgactttctcttttccagtttggat

SEQ ID NO: 85099 - DNA, 33 bp, Homo sapien
tttgtagcagttggataaaatgttctgtgaata

SEQ ID NO: 85100 - DNA, 33 bp, Homo sapien
tttgtagcagttggatcaaatgttctgtgaata

SEQ ID NO: 85101 - DNA, 33 bp, Homo sapien
tagaatagttatctgactacagagagagggtct

SEQ ID NO: 85102 - DNA, 33 bp, Homo sapien
tagaatagttatctgattacagagagagggtct

SEQ ID NO: 85103 - DNA, 33 bp, Homo sapien
aaatcagggggagaaaatacagcattaatgtac

SEQ ID NO: 85104 - DNA, 33 bp, Homo sapien
aaatcagggggagaaagtacagcattaatgtac

SEQ ID NO: 85105 - DNA, 33 bp, Homo sapien
ctatttgcacaaactccagataccagtttagag

SEQ ID NO: 85106 - DNA, 33 bp, Homo sapien
ctatttgcacaaactctagataccagtttagag

SEQ ID NO: 85107 - DNA, 33 bp, Homo sapien
ttcactgaattgggaaaagaatatcaggcccca

SEQ ID NO: 85108 - DNA, 33 bp, Homo sapien
ttcactgaattgggaacagaatatcaggcccca

SEQ ID NO: 85109 - DNA, 33 bp, Homo sapien
aggcttttcattcccaatcattctcttgtatct

SEQ ID NO: 85110 - DNA, 33 bp, Homo sapien
aggcttttcattcccagtcattctcttgtatct

SEQ ID NO: 85111 - DNA, 33 bp, Homo sapien
tctgctaaatgccttacggatatttcattctga

SEQ ID NO: 85112 - DNA, 33 bp, Homo sapien
tctgctaaatgccttatggatatttcattctga

SEQ ID NO: 85113 - DNA, 33 bp, Homo sapien
ggtttgaaagacaccaacgcggtgttttaaaga

SEQ ID NO: 85114 - DNA, 33 bp, Homo sapien
ggtttgaaagacaccagcgcggtgttttaaaga

SEQ ID NO: 85115 - DNA, 33 bp, Homo sapien
cacccctgagcctgaaatcgcgcgctgagaact

SEQ ID NO: 85116 - DNA, 33 bp, Homo sapien
cacccctgagcctgaagtcgcgcgctgagaact

SEQ ID NO: 85117 - DNA, 33 bp, Homo sapien
ggaaggaaacagtggacatggcaggtgccctta

SEQ ID NO: 85118 - DNA, 33 bp, Homo sapien
ggaaggaaacagtggatatggcaggtgccctta

SEQ ID NO: 85119 - DNA, 33 bp, Homo sapien
gtttctatttttcaaacatggccagaagcagaa

SEQ ID NO: 85120 - DNA, 33 bp, Homo sapien
gtttctatttttcaaagatggccagaagcagaa

SEQ ID NO: 85121 - DNA, 33 bp, Homo sapien
ttgaggatagtctaaactacattctcagcttga

SEQ ID NO: 85122 - DNA, 33 bp, Homo sapien
ttgaggatagtctaaattacattctcagcttga

SEQ ID NO: 85123 - DNA, 33 bp, Homo sapien
ttttttacatgccagaagtatttaacttgtccg

SEQ ID NO: 85124 - DNA, 33 bp, Homo sapien
ttttttacatgccagaggtatttaacttgtccg

SEQ ID NO: 85125 - DNA, 33 bp, Homo sapien
gaagttaaagatgaaacgaagatgtgctgaaag

SEQ ID NO: 85126 - DNA, 33 bp, Homo sapien
gaagttaaagatgaaatgaagatgtgctgaaag

SEQ ID NO: 85127 - DNA, 33 bp, Homo sapien
gacacagaagctgctacgttacacggaatggct

SEQ ID NO: 85128 - DNA, 33 bp, Homo sapien
gacacagaagctgctatgttacacggaatggct

SEQ ID NO: 85129 - DNA, 33 bp, Homo sapien
tttggcggttacagtgcagtaaagaggaagaac

SEQ ID NO: 85130 - DNA, 33 bp, Homo sapien
tttggcggttacagtggagtaaagaggaagaac

SEQ ID NO: 85131 - DNA, 33 bp, Homo sapien
ttggcggcacagtcctaaaagtttactcatgtt

SEQ ID NO: 85132 - DNA, 33 bp, Homo sapien
ttggcggcacagtcctgaaagtttactcatgtt

SEQ ID NO: 85133 - DNA, 33 bp, Homo sapien
gtgcctgagaaccaaacgaataggagaggttgg

SEQ ID NO: 85134 - DNA, 33 bp, Homo sapien
gtgcctgagaaccaaatgaataggagaggttgg

SEQ ID NO: 85135 - DNA, 33 bp, Homo sapien
cataataaaactgctgaaaagaggagaaaacag

SEQ ID NO: 85136 - DNA, 33 bp, Homo sapien
cataataaaactgctgtaaagaggagaaaacag

SEQ ID NO: 85137 - DNA, 33 bp, Homo sapien
gattcctcttaccaaggatgatctacctgctgt

SEQ ID NO: 85138 - DNA, 33 bp, Homo sapien
gattcctcttaccaagtatgatctacctgctgt

SEQ ID NO: 85139 - DNA, 33 bp, Homo sapien
taacgttctgtgggataacaaaatgattcagat

SEQ ID NO: 85140 - DNA, 33 bp, Homo sapien
taacgttctgtgggatgacaaaatgattcagat

SEQ ID NO: 85141 - DNA, 33 bp, Homo sapien
aggggccatgatggcactgaactaaatatgaaa

SEQ ID NO: 85142 - DNA, 33 bp, Homo sapien
aggggccatgatggcattgaactaaatatgaaa

SEQ ID NO: 85143 - DNA, 33 bp, Homo sapien
tctacagatgatttaaagtacgcgaggatgcgc

SEQ ID NO: 85144 - DNA, 33 bp, Homo sapien
tctacagatgatttaaggtacgcgaggatgcgc

SEQ ID NO: 85145 - DNA, 33 bp, Homo sapien
tttccacttctaaaaacgtcaattgtcttatgg

SEQ ID NO: 85146 - DNA, 33 bp, Homo sapien
tttccacttctaaaaatgtcaattgtcttatgg

SEQ ID NO: 85147 - DNA, 33 bp, Homo sapien
aaccctccgtcctgaaaaaggccagacctaacc

SEQ ID NO: 85148 - DNA, 33 bp, Homo sapien
aaccctccgtcctgaagaaggccagacctaacc

SEQ ID NO: 85149 - DNA, 33 bp, Homo sapien
gacctaaacatatgagaaaaagcttctactaga

SEQ ID NO: 85150 - DNA, 33 bp, Homo sapien
gacctaaacatatgagcaaaagcttctactaga

SEQ ID NO: 85151 - DNA, 33 bp, Homo sapien
ctgagcccagtggaaacggaagactaaaccaaa

SEQ ID NO: 85152 - DNA, 33 bp, Homo sapien
ctgagcccagtggaaatggaagactaaaccaaa

SEQ ID NO: 85153 - DNA, 33 bp, Homo sapien
cattaaattgtacacaccatattgagtcttttt

SEQ ID NO: 85154 - DNA, 33 bp, Homo sapien
cattaaattgtacacatcatattgagtcttttt

SEQ ID NO: 85155 - DNA, 33 bp, Homo sapien
tgttcgtaagtgatcaaactagacctttgtgtt

SEQ ID NO: 85156 - DNA, 33 bp, Homo sapien
tgttcgtaagtgatcagactagacctttgtgtt

SEQ ID NO: 85157 - DNA, 33 bp, Homo sapien
gccgaagggattcttaaaagccagattccacag

SEQ ID NO: 85158 - DNA, 33 bp, Homo sapien
gccgaagggattcttacaagccagattccacag

SEQ ID NO: 85159 - DNA, 33 bp, Homo sapien
cacttattgccagaaccgtattcactgacctcc

SEQ ID NO: 85160 - DNA, 33 bp, Homo sapien
cacttattgccagaactgtattcactgacctcc

SEQ ID NO: 85161 - DNA, 33 bp, Homo sapien
ttaaaacaatgttacacgacggagcatgattta

SEQ ID NO: 85162 - DNA, 33 bp, Homo sapien
ttaaaacaatgttacaggacggagcatgattta

SEQ ID NO: 85163 - DNA, 33 bp, Homo sapien
tctatttgtgtagaaacgactttaagatcccca

SEQ ID NO: 85164 - DNA, 33 bp, Homo sapien
tctatttgtgtagaaatgactttaagatcccca

SEQ ID NO: 85165 - DNA, 33 bp, Homo sapien
acaatcttcagttctacgatggcagagaaagcg

SEQ ID NO: 85166 - DNA, 33 bp, Homo sapien
acaatcttcagttctatgatggcagagaaagcg

SEQ ID NO: 85167 - DNA, 33 bp, Homo sapien
cctcccagctgacatacagaataaaaatcatga

SEQ ID NO: 85168 - DNA, 33 bp, Homo sapien
cctcccagctgacatagagaataaaaatcatga

SEQ ID NO: 85169 - DNA, 33 bp, Homo sapien
gcaaaaatacttgaggcaggatagcagcaatat

SEQ ID NO: 85170 - DNA, 33 bp, Homo sapien
gcaaaaatacttgaggtaggatagcagcaatat

SEQ ID NO: 85171 - DNA, 33 bp, Homo sapien
tgtatgtttttgtggaagcgtttctatttctga

SEQ ID NO: 85172 - DNA, 33 bp, Homo sapien
tgtatgtttttgtggaggcgtttctatttctga

SEQ ID NO: 85173 - DNA, 33 bp, Homo sapien
tgacttgttgaagatcccgggtccgggcttttg

SEQ ID NO: 85174 - DNA, 33 bp, Homo sapien
tgacttgttgaagatctcgggtccgggcttttg

SEQ ID NO: 85175 - DNA, 33 bp, Homo sapien
gattatcccagaaataggtttttacagttgtct

SEQ ID NO: 85176 - DNA, 33 bp, Homo sapien
gattatcccagaaatatgtttttacagttgtct

SEQ ID NO: 85177 - DNA, 33 bp, Homo sapien
ctgacacttgctctacaacaaaggagttactaa

SEQ ID NO: 85178 - DNA, 33 bp, Homo sapien
ctgacacttgctctacgacaaaggagttactaa

SEQ ID NO: 85179 - DNA, 33 bp, Homo sapien
tgtttcctgtgaaaatcataaatatgtaggaaa

SEQ ID NO: 85180 - DNA, 33 bp, Homo sapien
tgtttcctgtgaaaatgataaatatgtaggaaa

SEQ ID NO: 85181 - DNA, 33 bp, Homo sapien
gtgatctagctgtcctaaaagagctaactgcag

SEQ ID NO: 85182 - DNA, 33 bp, Homo sapien
gtgatctagctgtcctgaaagagctaactgcag

SEQ ID NO: 85183 - DNA, 33 bp, Homo sapien
tcttgagtacactaaccggtacagatatgtctc

SEQ ID NO: 85184 - DNA, 33 bp, Homo sapien
tcttgagtacactaactggtacagatatgtctc

SEQ ID NO: 85185 - DNA, 33 bp, Homo sapien
aatacaaagttttcaaaaatagttactacaagg

SEQ ID NO: 85186 - DNA, 33 bp, Homo sapien
aatacaaagttttcaagaatagttactacaagg

SEQ ID NO: 85187 - DNA, 33 bp, Homo sapien
aacttctagaactccacgccaggaacactacca

SEQ ID NO: 85188 - DNA, 33 bp, Homo sapien
aacttctagaactccatgccaggaacactacca

SEQ ID NO: 85189 - DNA, 33 bp, Homo sapien
agggaagagggtaacacaatcacacaaggctcc

SEQ ID NO: 85190 - DNA, 33 bp, Homo sapien
agggaagagggtaacataatcacacaaggctcc

SEQ ID NO: 85191 - DNA, 33 bp, Homo sapien
aattgaagtcactctacgaaaactccacgtcat

SEQ ID NO: 85192 - DNA, 33 bp, Homo sapien
aattgaagtcactctaggaaaactccacgtcat

SEQ ID NO: 85193 - DNA, 33 bp, Homo sapien
ttcatataactggaatcaaatagtgtttatctt

SEQ ID NO: 85194 - DNA, 33 bp, Homo sapien
ttcatataactggaatgaaatagtgtttatctt

SEQ ID NO: 85195 - DNA, 33 bp, Homo sapien
tcacacaaaggttgtcaatgtttggaccaagtt

SEQ ID NO: 85196 - DNA, 33 bp, Homo sapien
tcacacaaaggttgtcgatgtttggaccaagtt

SEQ ID NO: 85197 - DNA, 33 bp, Homo sapien
gatcttctcaataaaacatgtctgcctagcaca

SEQ ID NO: 85198 - DNA, 33 bp, Homo sapien
gatcttctcaataaaagatgtctgcctagcaca

SEQ ID NO: 85199 - DNA, 33 bp, Homo sapien
tttagtatctcagttacagtttgcatctaatca

SEQ ID NO: 85200 - DNA, 33 bp, Homo sapien
tttagtatctcagttatagtttgcatctaatca

SEQ ID NO: 85201 - DNA, 33 bp, Homo sapien
gtagagtgttcctatacaccctttacccagtcc

SEQ ID NO: 85202 - DNA, 33 bp, Homo sapien
gtagagtgttcctatataccctttacccagtcc

SEQ ID NO: 85203 - DNA, 33 bp, Homo sapien
tttaggaagcaaattacaatagacatcctagcc

SEQ ID NO: 85204 - DNA, 33 bp, Homo sapien
tttaggaagcaaattataatagacatcctagcc

SEQ ID NO: 85205 - DNA, 33 bp, Homo sapien
ttggtatcctgctgctcagagtacaatttgttg

SEQ ID NO: 85206 - DNA, 33 bp, Homo sapien
ttggtatcctgctgcttagagtacaatttgttg

SEQ ID NO: 85207 - DNA, 33 bp, Homo sapien
atggaagccacactccactcctgggactaggtc

SEQ ID NO: 85208 - DNA, 33 bp, Homo sapien
atggaagccacactccgctcctgggactaggtc

SEQ ID NO: 85209 - DNA, 33 bp, Homo sapien
gcaaatgcaacagagagaaagtctttttttttt

SEQ ID NO: 85210 - DNA, 33 bp, Homo sapien
gcaaatgcaacagagataaagtctttttttttt

SEQ ID NO: 85211 - DNA, 33 bp, Homo sapien
tatatgaggctttaaaatagtagaatgatgaat

SEQ ID NO: 85212 - DNA, 33 bp, Homo sapien
tatatgaggctttaaagtagtagaatgatgaat

SEQ ID NO: 85213 - DNA, 33 bp, Homo sapien
gtgcctgacccaggaacgtgagatgtacccatt

SEQ ID NO: 85214 - DNA, 33 bp, Homo sapien
gtgcctgacccaggaatgtgagatgtacccatt

SEQ ID NO: 85215 - DNA, 33 bp, Homo sapien
tcttccagaagtaagaatacaaggctgggtcat

SEQ ID NO: 85216 - DNA, 33 bp, Homo sapien
tcttccagaagtaagactacaaggctgggtcat

SEQ ID NO: 85217 - DNA, 33 bp, Homo sapien
cccagaagaagaaataactatctgaacttcatc

SEQ ID NO: 85218 - DNA, 33 bp, Homo sapien
cccagaagaagaaatagctatctgaacttcatc

SEQ ID NO: 85219 - DNA, 33 bp, Homo sapien
ttagaacttttcctaaaccatgctcatggagta

SEQ ID NO: 85220 - DNA, 33 bp, Homo sapien
ttagaacttttcctaatccatgctcatggagta

SEQ ID NO: 85221 - DNA, 33 bp, Homo sapien
gctcaggtcttcccacgataacatgtacccggc

SEQ ID NO: 85222 - DNA, 33 bp, Homo sapien
gctcaggtcttcccactataacatgtacccggc

SEQ ID NO: 85223 - DNA, 33 bp, Homo sapien
ttcgaggtaccttcccaccagcaaccttgttct

SEQ ID NO: 85224 - DNA, 33 bp, Homo sapien
ttcgaggtaccttcccgccagcaaccttgttct

SEQ ID NO: 85225 - DNA, 33 bp, Homo sapien
tcatgacacagcctctcaagctaggtctgagcc

SEQ ID NO: 85226 - DNA, 33 bp, Homo sapien
tcatgacacagcctctgaagctaggtctgagcc

SEQ ID NO: 85227 - DNA, 33 bp, Homo sapien
gaaaggcagttactgagaagtggacattgagtc

SEQ ID NO: 85228 - DNA, 33 bp, Homo sapien
gaaaggcagttactgataagtggacattgagtc

SEQ ID NO: 85229 - DNA, 33 bp, Homo sapien
ctaacttctgtctgaaccatcaggtgaatgatg

SEQ ID NO: 85230 - DNA, 33 bp, Homo sapien
ctaacttctgtctgaatcatcaggtgaatgatg

SEQ ID NO: 85231 - DNA, 33 bp, Homo sapien
tttaatacttcccaccacaaactgaatagaaaa

SEQ ID NO: 85232 - DNA, 33 bp, Homo sapien
tttaatacttcccacctcaaactgaatagaaaa

SEQ ID NO: 85233 - DNA, 33 bp, Homo sapien
gagtaaggagagaccacgtaggatgaaggtcat

SEQ ID NO: 85234 - DNA, 33 bp, Homo sapien
gagtaaggagagaccatgtaggatgaaggtcat

SEQ ID NO: 85235 - DNA, 33 bp, Homo sapien
gtttctctgcatcttcactaacctttgctgtta

SEQ ID NO: 85236 - DNA, 33 bp, Homo sapien
gtttctctgcatcttcgctaacctttgctgtta

SEQ ID NO: 85237 - DNA, 33 bp, Homo sapien
accccatgggatttgaccttacatacatagaag

SEQ ID NO: 85238 - DNA, 33 bp, Homo sapien
accccatgggatttgatcttacatacatagaag

SEQ ID NO: 85239 - DNA, 33 bp, Homo sapien
caggcagggagtggaaaaagtctaccctgggtc

SEQ ID NO: 85240 - DNA, 33 bp, Homo sapien
caggcagggagtggaagaagtctaccctgggtc

SEQ ID NO: 85241 - DNA, 33 bp, Homo sapien
tgaaaagaccatagcaatatctgtggcaaacag

SEQ ID NO: 85242 - DNA, 33 bp, Homo sapien
tgaaaagaccatagcagtatctgtggcaaacag

SEQ ID NO: 85243 - DNA, 33 bp, Homo sapien
tttaaagctgcactaacaggtagccaccagcca

SEQ ID NO: 85244 - DNA, 33 bp, Homo sapien
tttaaagctgcactaataggtagccaccagcca

SEQ ID NO: 85245 - DNA, 33 bp, Homo sapien
cattccaagaagctaacagccgcatgcggctgt

SEQ ID NO: 85246 - DNA, 33 bp, Homo sapien
cattccaagaagctaatagccgcatgcggctgt

SEQ ID NO: 85247 - DNA, 33 bp, Homo sapien
ctgtggctaccacactcaacaacccagatacag

SEQ ID NO: 85248 - DNA, 33 bp, Homo sapien
ctgtggctaccacactgaacaacccagatacag

SEQ ID NO: 85249 - DNA, 33 bp, Homo sapien
agtggtaaccctaatgaagttctcacctgggca

SEQ ID NO: 85250 - DNA, 33 bp, Homo sapien
agtggtaaccctaatgtagttctcacctgggca

SEQ ID NO: 85251 - DNA, 33 bp, Homo sapien
tacctctctgttatcacgtgcggtatttagaaa

SEQ ID NO: 85252 - DNA, 33 bp, Homo sapien
tacctctctgttatcatgtgcggtatttagaaa

SEQ ID NO: 85253 - DNA, 33 bp, Homo sapien
taggaaagggacgttcacttttggacatgctaa

SEQ ID NO: 85254 - DNA, 33 bp, Homo sapien
taggaaagggacgttcgcttttggacatgctaa

SEQ ID NO: 85255 - DNA, 33 bp, Homo sapien
tggaaacaggcagaccacttagggaggctcttg

SEQ ID NO: 85256 - DNA, 33 bp, Homo sapien
tggaaacaggcagaccgcttagggaggctcttg

SEQ ID NO: 85257 - DNA, 33 bp, Homo sapien
acatcaggactggagtaaagaagtttatttcct

SEQ ID NO: 85258 - DNA, 33 bp, Homo sapien
acatcaggactggagtcaagaagtttatttcct

SEQ ID NO: 85259 - DNA, 33 bp, Homo sapien
aacatgaccttatatacggagaaactaaaagac

SEQ ID NO: 85260 - DNA, 33 bp, Homo sapien
aacatgaccttatatatggagaaactaaaagac

SEQ ID NO: 85261 - DNA, 33 bp, Homo sapien
cattgtccttctgccactgagagtatttgtagt

SEQ ID NO: 85262 - DNA, 33 bp, Homo sapien
cattgtccttctgccagtgagagtatttgtagt

SEQ ID NO: 85263 - DNA, 33 bp, Homo sapien
gagaaagagcaagtgcaaaggccctacgctagg

SEQ ID NO: 85264 - DNA, 33 bp, Homo sapien
gagaaagagcaagtgcgaaggccctacgctagg

SEQ ID NO: 85265 - DNA, 33 bp, Homo sapien
actggtcccttaagaacggttcgaaagtctttt

SEQ ID NO: 85266 - DNA, 33 bp, Homo sapien
actggtcccttaagaatggttcgaaagtctttt

SEQ ID NO: 85267 - DNA, 33 bp, Homo sapien
agaatatgctatcataagtcactcaaaatccaa

SEQ ID NO: 85268 - DNA, 33 bp, Homo sapien
agaatatgctatcatatgtcactcaaaatccaa

SEQ ID NO: 85269 - DNA, 33 bp, Homo sapien
agtgtaactttatatcagaggcatattttggat

SEQ ID NO: 85270 - DNA, 33 bp, Homo sapien
agtgtaactttatatcggaggcatattttggat

SEQ ID NO: 85271 - DNA, 33 bp, Homo sapien
aagaaatgtgaatttacgtttgcaaataactaa

SEQ ID NO: 85272 - DNA, 33 bp, Homo sapien
aagaaatgtgaatttaggtttgcaaataactaa

SEQ ID NO: 85273 - DNA, 33 bp, Homo sapien
cattctgtgcaaaaacactgaaagtcaacataa

SEQ ID NO: 85274 - DNA, 33 bp, Homo sapien
cattctgtgcaaaaacgctgaaagtcaacataa

SEQ ID NO: 85275 - DNA, 33 bp, Homo sapien
tctgtaggtacaatgaactaaacacgttttaat

SEQ ID NO: 85276 - DNA, 33 bp, Homo sapien
tctgtaggtacaatgagctaaacacgttttaat

SEQ ID NO: 85277 - DNA, 33 bp, Homo sapien
tcatcctttaggatccagcttaaatgtcacctc

SEQ ID NO: 85278 - DNA, 33 bp, Homo sapien
tcatcctttaggatccggcttaaatgtcacctc

SEQ ID NO: 85279 - DNA, 33 bp, Homo sapien
agtccttactctttaacgtcaacgtttctctca

SEQ ID NO: 85280 - DNA, 33 bp, Homo sapien
agtccttactctttaatgtcaacgtttctctca

SEQ ID NO: 85281 - DNA, 33 bp, Homo sapien
tatagtaacatgtgtcaaaggggcatcagaccc

SEQ ID NO: 85282 - DNA, 33 bp, Homo sapien
tatagtaacatgtgtcgaaggggcatcagaccc

SEQ ID NO: 85283 - DNA, 33 bp, Homo sapien
gtaaccctgtgaggcacgtatagtagttatcct

SEQ ID NO: 85284 - DNA, 33 bp, Homo sapien
gtaaccctgtgaggcatgtatagtagttatcct

SEQ ID NO: 85285 - DNA, 33 bp, Homo sapien
ggttattttattcctcaatgtccttaccaacta

SEQ ID NO: 85286 - DNA, 33 bp, Homo sapien
ggttattttattcctccatgtccttaccaacta

SEQ ID NO: 85287 - DNA, 33 bp, Homo sapien
tcataattatttttccacattattttgctattt

SEQ ID NO: 85288 - DNA, 33 bp, Homo sapien
tcataattatttttccgcattattttgctattt

SEQ ID NO: 85289 - DNA, 33 bp, Homo sapien
aaggagaggaacaaaaactacccatgttgtgag

SEQ ID NO: 85290 - DNA, 33 bp, Homo sapien
aaggagaggaacaaaacctacccatgttgtgag

SEQ ID NO: 85291 - DNA, 33 bp, Homo sapien
gtcagacctatctagacgatgacctacctgatt

SEQ ID NO: 85292 - DNA, 33 bp, Homo sapien
gtcagacctatctagatgatgacctacctgatt

SEQ ID NO: 85293 - DNA, 33 bp, Homo sapien
tgctcactcatgcaaaacacctttatgtcctta

SEQ ID NO: 85294 - DNA, 33 bp, Homo sapien
tgctcactcatgcaaaccacctttatgtcctta

SEQ ID NO: 85295 - DNA, 33 bp, Homo sapien
ttattcccgtctccaagactgttgctccaactt

SEQ ID NO: 85296 - DNA, 33 bp, Homo sapien
ttattcccgtctccaatactgttgctccaactt

SEQ ID NO: 85297 - DNA, 33 bp, Homo sapien
ggaatgagagccagaaaggagtccaaagtcaag

SEQ ID NO: 85298 - DNA, 33 bp, Homo sapien
ggaatgagagccagaagggagtccaaagtcaag

SEQ ID NO: 85299 - DNA, 33 bp, Homo sapien
tttataacacttctgacgactggtttctgcagc

SEQ ID NO: 85300 - DNA, 33 bp, Homo sapien
tttataacacttctgatgactggtttctgcagc

SEQ ID NO: 85301 - DNA, 33 bp, Homo sapien
aagtttctaatgtccactaaacaaattgtcatg

SEQ ID NO: 85302 - DNA, 33 bp, Homo sapien
aagtttctaatgtccagtaaacaaattgtcatg

SEQ ID NO: 85303 - DNA, 33 bp, Homo sapien
agagtagtcaaactcaaagagacgcaaaacaga

SEQ ID NO: 85304 - DNA, 33 bp, Homo sapien
agagtagtcaaactcacagagacgcaaaacaga

SEQ ID NO: 85305 - DNA, 33 bp, Homo sapien
tgcacacaaagggttacgtagggttgaggccag

SEQ ID NO: 85306 - DNA, 33 bp, Homo sapien
tgcacacaaagggttatgtagggttgaggccag

SEQ ID NO: 85307 - DNA, 33 bp, Homo sapien
tttcattttcttttacgattctgcctgagcttt

SEQ ID NO: 85308 - DNA, 33 bp, Homo sapien
tttcattttcttttactattctgcctgagcttt

SEQ ID NO: 85309 - DNA, 33 bp, Homo sapien
agaaaatgtttccagcaaattgtagatgggtat

SEQ ID NO: 85310 - DNA, 33 bp, Homo sapien
agaaaatgtttccagctaattgtagatgggtat

SEQ ID NO: 85311 - DNA, 33 bp, Homo sapien
ttagagttcttacaaccaggggatctctcggga

SEQ ID NO: 85312 - DNA, 33 bp, Homo sapien
ttagagttcttacaactaggggatctctcggga

SEQ ID NO: 85313 - DNA, 33 bp, Homo sapien
agggatatgagaagaaaagtggctaagcccaag

SEQ ID NO: 85314 - DNA, 33 bp, Homo sapien
agggatatgagaagaagagtggctaagcccaag

SEQ ID NO: 85315 - DNA, 33 bp, Homo sapien
aagacaaaggtttcaagaactctttgcaagaag

SEQ ID NO: 85316 - DNA, 33 bp, Homo sapien
aagacaaaggtttcaataactctttgcaagaag

SEQ ID NO: 85317 - DNA, 33 bp, Homo sapien
ttatttagcactaaaaataagtgatgttatcaa

SEQ ID NO: 85318 - DNA, 33 bp, Homo sapien
ttatttagcactaaaagtaagtgatgttatcaa

SEQ ID NO: 85319 - DNA, 33 bp, Homo sapien
ttcactcctcctacaaaaagctgtgataacgtg

SEQ ID NO: 85320 - DNA, 33 bp, Homo sapien
ttcactcctcctacaagaagctgtgataacgtg

SEQ ID NO: 85321 - DNA, 33 bp, Homo sapien
tttgcctctaggtcacaggtcattgtcaaattc

SEQ ID NO: 85322 - DNA, 33 bp, Homo sapien
tttgcctctaggtcacgggtcattgtcaaattc

SEQ ID NO: 85323 - DNA, 33 bp, Homo sapien
gaccaaaaaataaaaaatctagtcaggaagtgg

SEQ ID NO: 85324 - DNA, 33 bp, Homo sapien
gaccaaaaaataaaaagtctagtcaggaagtgg

SEQ ID NO: 85325 - DNA, 33 bp, Homo sapien
agtactggtcaaagtcaatgctttggagctgca

SEQ ID NO: 85326 - DNA, 33 bp, Homo sapien
agtactggtcaaagtcgatgctttggagctgca

SEQ ID NO: 85327 - DNA, 33 bp, Homo sapien
agaccagggaagtgtacgacaattcagggaaag

SEQ ID NO: 85328 - DNA, 33 bp, Homo sapien
agaccagggaagtgtaggacaattcagggaaag

SEQ ID NO: 85329 - DNA, 33 bp, Homo sapien
taggagggtaggaaacagtcctgctatgctgag

SEQ ID NO: 85330 - DNA, 33 bp, Homo sapien
taggagggtaggaaacggtcctgctatgctgag

SEQ ID NO: 85331 - DNA, 33 bp, Homo sapien
taaagcacattttccccggatgagtccagaacc

SEQ ID NO: 85332 - DNA, 33 bp, Homo sapien
taaagcacattttccctggatgagtccagaacc

SEQ ID NO: 85333 - DNA, 33 bp, Homo sapien
gagcgaatatgcagaactgggtaaatgagttaa

SEQ ID NO: 85334 - DNA, 33 bp, Homo sapien
gagcgaatatgcagaattgggtaaatgagttaa

SEQ ID NO: 85335 - DNA, 33 bp, Homo sapien
gaataacacagacaacagatttattgctaataa

SEQ ID NO: 85336 - DNA, 33 bp, Homo sapien
gaataacacagacaacggatttattgctaataa

SEQ ID NO: 85337 - DNA, 33 bp, Homo sapien
tgcccatttgattaacagtggaaagcccattac

SEQ ID NO: 85338 - DNA, 33 bp, Homo sapien
tgcccatttgattaaccgtggaaagcccattac

SEQ ID NO: 85339 - DNA, 33 bp, Homo sapien
aatggattcattaccacataactggaccagctt

SEQ ID NO: 85340 - DNA, 33 bp, Homo sapien
aatggattcattaccatataactggaccagctt

SEQ ID NO: 85341 - DNA, 33 bp, Homo sapien
atgaattgcaaactgcaaagtgactgctgtagg

SEQ ID NO: 85342 - DNA, 33 bp, Homo sapien
atgaattgcaaactgcgaagtgactgctgtagg

SEQ ID NO: 85343 - DNA, 33 bp, Homo sapien
caagaacaacctcacacatccagctctcatgga

SEQ ID NO: 85344 - DNA, 33 bp, Homo sapien
caagaacaacctcacatatccagctctcatgga

SEQ ID NO: 85345 - DNA, 33 bp, Homo sapien
ctgggaacaaggaggaagaagcagagacctggg

SEQ ID NO: 85346 - DNA, 33 bp, Homo sapien
ctgggaacaaggaggacgaagcagagacctggg

SEQ ID NO: 85347 - DNA, 33 bp, Homo sapien
gctacatagctgtttacattacacatggagttg

SEQ ID NO: 85348 - DNA, 33 bp, Homo sapien
gctacatagctgtttatattacacatggagttg

SEQ ID NO: 85349 - DNA, 33 bp, Homo sapien
ttgacttttttggcctaacatttgagttctgga

SEQ ID NO: 85350 - DNA, 33 bp, Homo sapien
ttgacttttttggcctgacatttgagttctgga

SEQ ID NO: 85351 - DNA, 33 bp, Homo sapien
caaaaaagtcaaagcaaaaaacatcataaatga

SEQ ID NO: 85352 - DNA, 33 bp, Homo sapien
caaaaaagtcaaagcagaaaacatcataaatga

SEQ ID NO: 85353 - DNA, 33 bp, Homo sapien
tagagaagcatctttaaaaggtcctcagatgtc

SEQ ID NO: 85354 - DNA, 33 bp, Homo sapien
tagagaagcatctttagaaggtcctcagatgtc

SEQ ID NO: 85355 - DNA, 33 bp, Homo sapien
agtacattgtaaaggacagtctgttatctcctc

SEQ ID NO: 85356 - DNA, 33 bp, Homo sapien
agtacattgtaaaggatagtctgttatctcctc

SEQ ID NO: 85357 - DNA, 33 bp, Homo sapien
atcttaagcaaatttacgttctttgcctaatga

SEQ ID NO: 85358 - DNA, 33 bp, Homo sapien
atcttaagcaaatttatgttctttgcctaatga

SEQ ID NO: 85359 - DNA, 33 bp, Homo sapien
ggactacgagctaagcaattgggttgttgtttt

SEQ ID NO: 85360 - DNA, 33 bp, Homo sapien
ggactacgagctaagccattgggttgttgtttt

SEQ ID NO: 85361 - DNA, 33 bp, Homo sapien
tttggcagcttcttcacggagataaacacgagg

SEQ ID NO: 85362 - DNA, 33 bp, Homo sapien
tttggcagcttcttcatggagataaacacgagg

SEQ ID NO: 85363 - DNA, 33 bp, Homo sapien
gaggagacagtaaacacaattggctttctcaga

SEQ ID NO: 85364 - DNA, 33 bp, Homo sapien
gaggagacagtaaacataattggctttctcaga

SEQ ID NO: 85365 - DNA, 33 bp, Homo sapien
ggtgtggcctttctccagcaataaatatcgaag

SEQ ID NO: 85366 - DNA, 33 bp, Homo sapien
ggtgtggcctttctccggcaataaatatcgaag

SEQ ID NO: 85367 - DNA, 33 bp, Homo sapien
aatagatggaattacaaccaccgagcacgtcct

SEQ ID NO: 85368 - DNA, 33 bp, Homo sapien
aatagatggaattacacccaccgagcacgtcct

SEQ ID NO: 85369 - DNA, 33 bp, Homo sapien
atgactaagttatcccacggcccctagctctca

SEQ ID NO: 85370 - DNA, 33 bp, Homo sapien
atgactaagttatcccgcggcccctagctctca

SEQ ID NO: 85371 - DNA, 33 bp, Homo sapien
aaatgttttggagctgaataggttggtggtcgt

SEQ ID NO: 85372 - DNA, 33 bp, Homo sapien
aaatgttttggagctggataggttggtggtcgt

SEQ ID NO: 85373 - DNA, 33 bp, Homo sapien
atcagtgagctttagcaactcccctacttccca

SEQ ID NO: 85374 - DNA, 33 bp, Homo sapien
atcagtgagctttagcgactcccctacttccca

SEQ ID NO: 85375 - DNA, 33 bp, Homo sapien
tggtatctcttattaccgctaccatatataagg

SEQ ID NO: 85376 - DNA, 33 bp, Homo sapien
tggtatctcttattactgctaccatatataagg

SEQ ID NO: 85377 - DNA, 33 bp, Homo sapien
aattgctaatccctaacggcagtcaaccttatt

SEQ ID NO: 85378 - DNA, 33 bp, Homo sapien
aattgctaatccctaatggcagtcaaccttatt

SEQ ID NO: 85379 - DNA, 33 bp, Homo sapien
acagctggtactgccacgtttttgatggcctaa

SEQ ID NO: 85380 - DNA, 33 bp, Homo sapien
acagctggtactgccatgtttttgatggcctaa

SEQ ID NO: 85381 - DNA, 33 bp, Homo sapien
agggaaacctacattgaaatctattctaccata

SEQ ID NO: 85382 - DNA, 33 bp, Homo sapien
agggaaacctacattggaatctattctaccata

SEQ ID NO: 85383 - DNA, 33 bp, Homo sapien
taggactgttcctaaacattccggtagctgtct

SEQ ID NO: 85384 - DNA, 33 bp, Homo sapien
taggactgttcctaaatattccggtagctgtct

SEQ ID NO: 85385 - DNA, 33 bp, Homo sapien
tggtgaccccaacaacccagatagacgcactga

SEQ ID NO: 85386 - DNA, 33 bp, Homo sapien
tggtgaccccaacaactcagatagacgcactga

SEQ ID NO: 85387 - DNA, 33 bp, Homo sapien
atgtatattttcacctaaatacttccatatgag

SEQ ID NO: 85388 - DNA, 33 bp, Homo sapien
atgtatattttcacctgaatacttccatatgag

SEQ ID NO: 85389 - DNA, 33 bp, Homo sapien
tcttacatttcaaaacggctttaactcatatgg

SEQ ID NO: 85390 - DNA, 33 bp, Homo sapien
tcttacatttcaaaactgctttaactcatatgg

SEQ ID NO: 85391 - DNA, 33 bp, Homo sapien
ctaggtgcctagcaacagtagactggatgaaga

SEQ ID NO: 85392 - DNA, 33 bp, Homo sapien
ctaggtgcctagcaacggtagactggatgaaga

SEQ ID NO: 85393 - DNA, 33 bp, Homo sapien
cgggctactgacccaactaagcttgtgctccaa

SEQ ID NO: 85394 - DNA, 33 bp, Homo sapien
cgggctactgacccaagtaagcttgtgctccaa

SEQ ID NO: 85395 - DNA, 33 bp, Homo sapien
ttcttgggaaggtaaacctcatgtacaaagtca

SEQ ID NO: 85396 - DNA, 33 bp, Homo sapien
ttcttgggaaggtaaatctcatgtacaaagtca

SEQ ID NO: 85397 - DNA, 33 bp, Homo sapien
tgtgctctaacagcaactaacaaagtcaaatgc

SEQ ID NO: 85398 - DNA, 33 bp, Homo sapien
tgtgctctaacagcaagtaacaaagtcaaatgc

SEQ ID NO: 85399 - DNA, 33 bp, Homo sapien
acaaaacgaaatgccaaagatgtattaacttat

SEQ ID NO: 85400 - DNA, 33 bp, Homo sapien
acaaaacgaaatgccagagatgtattaacttat

SEQ ID NO: 85401 - DNA, 33 bp, Homo sapien
attccaactataagagacagcataatgttttca

SEQ ID NO: 85402 - DNA, 33 bp, Homo sapien
attccaactataagaggcagcataatgttttca

SEQ ID NO: 85403 - DNA, 33 bp, Homo sapien
gttctgacatgtttgacgtattggagtttttgg

SEQ ID NO: 85404 - DNA, 33 bp, Homo sapien
gttctgacatgtttgatgtattggagtttttgg

SEQ ID NO: 85405 - DNA, 33 bp, Homo sapien
ttttgatgcttataggaaaaatttatcaagaca

SEQ ID NO: 85406 - DNA, 33 bp, Homo sapien
ttttgatgcttataggcaaaatttatcaagaca

SEQ ID NO: 85407 - DNA, 33 bp, Homo sapien
agatgacttggtatatcataaaggtaagcaggc

SEQ ID NO: 85408 - DNA, 33 bp, Homo sapien
agatgacttggtatattataaaggtaagcaggc

SEQ ID NO: 85409 - DNA, 33 bp, Homo sapien
atggttaacagaactgaaaatttaagcttaaaa

SEQ ID NO: 85410 - DNA, 33 bp, Homo sapien
atggttaacagaactgcaaatttaagcttaaaa

SEQ ID NO: 85411 - DNA, 33 bp, Homo sapien
ttttattcttgttgccaccaatctaatgcctgt

SEQ ID NO: 85412 - DNA, 33 bp, Homo sapien
ttttattcttgttgccgccaatctaatgcctgt

SEQ ID NO: 85413 - DNA, 33 bp, Homo sapien
ggcataaatatatcttcaaacgtgtgcttacaa

SEQ ID NO: 85414 - DNA, 33 bp, Homo sapien
ggcataaatatatctttaaacgtgtgcttacaa

SEQ ID NO: 85415 - DNA, 33 bp, Homo sapien
cactttttcactctcaaatggggctaaccacat

SEQ ID NO: 85416 - DNA, 33 bp, Homo sapien
cactttttcactctcagatggggctaaccacat

SEQ ID NO: 85417 - DNA, 33 bp, Homo sapien
agatgaaaagaagtaagactgttctaggctaga

SEQ ID NO: 85418 - DNA, 33 bp, Homo sapien
agatgaaaagaagtaatactgttctaggctaga

SEQ ID NO: 85419 - DNA, 33 bp, Homo sapien
tcctgtgggcacaaggcacatgttacacctgca

SEQ ID NO: 85420 - DNA, 33 bp, Homo sapien
tcctgtgggcacaaggtacatgttacacctgca

SEQ ID NO: 85421 - DNA, 33 bp, Homo sapien
aacatacatattgggcaacacacatttttggcc

SEQ ID NO: 85422 - DNA, 33 bp, Homo sapien
aacatacatattgggcgacacacatttttggcc

SEQ ID NO: 85423 - DNA, 33 bp, Homo sapien
agcgtcctttttgcagaccacttggtgctctgt

SEQ ID NO: 85424 - DNA, 33 bp, Homo sapien
agcgtcctttttgcagtccacttggtgctctgt

SEQ ID NO: 85425 - DNA, 33 bp, Homo sapien
gtctgaagtcagcacagatgggatcttgagcca

SEQ ID NO: 85426 - DNA, 33 bp, Homo sapien
gtctgaagtcagcacatatgggatcttgagcca

SEQ ID NO: 85427 - DNA, 33 bp, Homo sapien
tggaaaatatacaatacgttgtggttaatagac

SEQ ID NO: 85428 - DNA, 33 bp, Homo sapien
tggaaaatatacaatatgttgtggttaatagac

SEQ ID NO: 85429 - DNA, 33 bp, Homo sapien
agagacttcaactgcaaaatacaacaacctctg

SEQ ID NO: 85430 - DNA, 33 bp, Homo sapien
agagacttcaactgcataatacaacaacctctg

SEQ ID NO: 85431 - DNA, 33 bp, Homo sapien
ttttcaacacacaccaaaaaccgcaaagttacc

SEQ ID NO: 85432 - DNA, 33 bp, Homo sapien
ttttcaacacacaccagaaaccgcaaagttacc

SEQ ID NO: 85433 - DNA, 33 bp, Homo sapien
ctggtaccggagatacaacaccaacctagataa

SEQ ID NO: 85434 - DNA, 33 bp, Homo sapien
ctggtaccggagatacgacaccaacctagataa

SEQ ID NO: 85435 - DNA, 33 bp, Homo sapien
gcaagaaagtgtgaagaccctgggaactgtgga

SEQ ID NO: 85436 - DNA, 33 bp, Homo sapien
gcaagaaagtgtgaagtccctgggaactgtgga

SEQ ID NO: 85437 - DNA, 33 bp, Homo sapien
tgagtggcgggtgaacaagcattattgcctgag

SEQ ID NO: 85438 - DNA, 33 bp, Homo sapien
tgagtggcgggtgaacgagcattattgcctgag

SEQ ID NO: 85439 - DNA, 33 bp, Homo sapien
tccacacctaacgtcaacaggttcatactcaca

SEQ ID NO: 85440 - DNA, 33 bp, Homo sapien
tccacacctaacgtcagcaggttcatactcaca

SEQ ID NO: 85441 - DNA, 33 bp, Homo sapien
gtcaaaacggtatgccaaagctgcaacactcat

SEQ ID NO: 85442 - DNA, 33 bp, Homo sapien
gtcaaaacggtatgccgaagctgcaacactcat

SEQ ID NO: 85443 - DNA, 33 bp, Homo sapien
tgaggcaaaccaacaactgttttcaagtactta

SEQ ID NO: 85444 - DNA, 33 bp, Homo sapien
tgaggcaaaccaacaagtgttttcaagtactta

SEQ ID NO: 85445 - DNA, 33 bp, Homo sapien
caaaacagtggggtaccagttactgaaataagg

SEQ ID NO: 85446 - DNA, 33 bp, Homo sapien
caaaacagtggggtactagttactgaaataagg

SEQ ID NO: 85447 - DNA, 33 bp, Homo sapien
ttaggttctggcaatacgagaaactattaagtt

SEQ ID NO: 85448 - DNA, 33 bp, Homo sapien
ttaggttctggcaatatgagaaactattaagtt

SEQ ID NO: 85449 - DNA, 33 bp, Homo sapien
aatagctttctccaacaggtaccatgatgtcag

SEQ ID NO: 85450 - DNA, 33 bp, Homo sapien
aatagctttctccaacgggtaccatgatgtcag

SEQ ID NO: 85451 - DNA, 33 bp, Homo sapien
ctactttctaacaagacgtaaacacagcagcta

SEQ ID NO: 85452 - DNA, 33 bp, Homo sapien
ctactttctaacaagaggtaaacacagcagcta

SEQ ID NO: 85453 - DNA, 33 bp, Homo sapien
gcctggtgcttgctcaaaaggctcaagaacaga

SEQ ID NO: 85454 - DNA, 33 bp, Homo sapien
gcctggtgcttgctcagaaggctcaagaacaga

SEQ ID NO: 85455 - DNA, 33 bp, Homo sapien
taaagccctttcccaaacctcgttacagaagaa

SEQ ID NO: 85456 - DNA, 33 bp, Homo sapien
taaagccctttcccaagcctcgttacagaagaa

SEQ ID NO: 85457 - DNA, 33 bp, Homo sapien
taaatgtgaccaggcaataaagggtaataactc

SEQ ID NO: 85458 - DNA, 33 bp, Homo sapien
taaatgtgaccaggcagtaaagggtaataactc

SEQ ID NO: 85459 - DNA, 33 bp, Homo sapien
aggacagtgctctcagcaaacattttggacaag

SEQ ID NO: 85460 - DNA, 33 bp, Homo sapien
aggacagtgctctcaggaaacattttggacaag

SEQ ID NO: 85461 - DNA, 33 bp, Homo sapien
cctaaggacttgagaacagtgggacctggacag

SEQ ID NO: 85462 - DNA, 33 bp, Homo sapien
cctaaggacttgagaatagtgggacctggacag

SEQ ID NO: 85463 - DNA, 33 bp, Homo sapien
aatactattacctaataacctttcagtatctgt

SEQ ID NO: 85464 - DNA, 33 bp, Homo sapien
aatactattacctaatgacctttcagtatctgt

SEQ ID NO: 85465 - DNA, 33 bp, Homo sapien
agacaatgaaaaagaccggctcatgtctaaaac

SEQ ID NO: 85466 - DNA, 33 bp, Homo sapien
agacaatgaaaaagactggctcatgtctaaaac

SEQ ID NO: 85467 - DNA, 33 bp, Homo sapien
aaggaaagcagctaaaatgactcgcagttcagg

SEQ ID NO: 85468 - DNA, 33 bp, Homo sapien
aaggaaagcagctaaattgactcgcagttcagg

SEQ ID NO: 85469 - DNA, 33 bp, Homo sapien
gcaccagcactgatgacgccagcaatccaacta

SEQ ID NO: 85470 - DNA, 33 bp, Homo sapien
gcaccagcactgatgatgccagcaatccaacta

SEQ ID NO: 85471 - DNA, 33 bp, Homo sapien
tacagtcctactacaaatagagtgagcacaaca

SEQ ID NO: 85472 - DNA, 33 bp, Homo sapien
tacagtcctactacaagtagagtgagcacaaca

SEQ ID NO: 85473 - DNA, 33 bp, Homo sapien
tgcatctatcagttcacggtgacagaaatggct

SEQ ID NO: 85474 - DNA, 33 bp, Homo sapien
tgcatctatcagttcatggtgacagaaatggct

SEQ ID NO: 85475 - DNA, 33 bp, Homo sapien
taagtactctgtaagacgttcaagcaacaatga

SEQ ID NO: 85476 - DNA, 33 bp, Homo sapien
taagtactctgtaagatgttcaagcaacaatga

SEQ ID NO: 85477 - DNA, 33 bp, Homo sapien
cactactgactgaaacaaggtataacgaacacg

SEQ ID NO: 85478 - DNA, 33 bp, Homo sapien
cactactgactgaaacgaggtataacgaacacg

SEQ ID NO: 85479 - DNA, 33 bp, Homo sapien
cctccttcatagcaaacattaagcaagcctgcc

SEQ ID NO: 85480 - DNA, 33 bp, Homo sapien
cctccttcatagcaaatattaagcaagcctgcc

SEQ ID NO: 85481 - DNA, 33 bp, Homo sapien
aaagtaggtctcaaacaaaacttggatagaaat

SEQ ID NO: 85482 - DNA, 33 bp, Homo sapien
aaagtaggtctcaaactaaacttggatagaaat

SEQ ID NO: 85483 - DNA, 33 bp, Homo sapien
ttggggctgtgcatacactattcaacaaaggaa

SEQ ID NO: 85484 - DNA, 33 bp, Homo sapien
ttggggctgtgcatacgctattcaacaaaggaa

SEQ ID NO: 85485 - DNA, 33 bp, Homo sapien
ttcattttttgccccaatatcctaatccatagc

SEQ ID NO: 85486 - DNA, 33 bp, Homo sapien
ttcattttttgccccactatcctaatccatagc

SEQ ID NO: 85487 - DNA, 33 bp, Homo sapien
gaaaagtggaataaagaccatggaagggaggag

SEQ ID NO: 85488 - DNA, 33 bp, Homo sapien
gaaaagtggaataaaggccatggaagggaggag

SEQ ID NO: 85489 - DNA, 33 bp, Homo sapien
atacaaaaaccataagaagacgtatcccctccc

SEQ ID NO: 85490 - DNA, 33 bp, Homo sapien
atacaaaaaccataagcagacgtatcccctccc

SEQ ID NO: 85491 - DNA, 33 bp, Homo sapien
gtttgaacatcattgaccttgtatatatttttt

SEQ ID NO: 85492 - DNA, 33 bp, Homo sapien
gtttgaacatcattgagcttgtatatatttttt

SEQ ID NO: 85493 - DNA, 33 bp, Homo sapien
tgtattatctcctttacgaacttgaagaatgcc

SEQ ID NO: 85494 - DNA, 33 bp, Homo sapien
tgtattatctcctttatgaacttgaagaatgcc

SEQ ID NO: 85495 - DNA, 33 bp, Homo sapien
ctggcaaatctaggtgaaatataccatgtgatg

SEQ ID NO: 85496 - DNA, 33 bp, Homo sapien
ctggcaaatctaggtggaatataccatgtgatg

SEQ ID NO: 85497 - DNA, 33 bp, Homo sapien
ctatacgggctggaaacgcactagcagatcagg

SEQ ID NO: 85498 - DNA, 33 bp, Homo sapien
ctatacgggctggaaatgcactagcagatcagg

SEQ ID NO: 85499 - DNA, 33 bp, Homo sapien; identical to SEQ ID NO: 85497

SEQ ID NO: 85500 - DNA, 33 bp, Homo sapien; identical to SEQ ID NO: 85498

SEQ ID NO: 85501 - DNA, 33 bp, Homo sapien
tcccccaaaaggccaacaacatcatctgatttc

SEQ ID NO: 85502 - DNA, 33 bp, Homo sapien
tcccccaaaaggccaagaacatcatctgatttc

SEQ ID NO: 85503 - DNA, 33 bp, Homo sapien
ccttctgattacacacaaacttattgcgtgatg

SEQ ID NO: 85504 - DNA, 33 bp, Homo sapien
ccttctgattacacacgaacttattgcgtgatg

SEQ ID NO: 85505 - DNA, 33 bp, Homo sapien
ggcaacagttttgtcacggatgcaaagcttcct

SEQ ID NO: 85506 - DNA, 33 bp, Homo sapien
ggcaacagttttgtcatggatgcaaagcttcct

SEQ ID NO: 85507 - DNA, 33 bp, Homo sapien
ctaacagaagacaggaaataaagatcacttgtt

SEQ ID NO: 85508 - DNA, 33 bp, Homo sapien
ctaacagaagacaggagataaagatcacttgtt

SEQ ID NO: 85509 - DNA, 33 bp, Homo sapien
cattcatttaaagtgcacagctctccaaatcca

SEQ ID NO: 85510 - DNA, 33 bp, Homo sapien
cattcatttaaagtgcgcagctctccaaatcca

SEQ ID NO: 85511 - DNA, 33 bp, Homo sapien
ggagagatgacatacactaaaatggcatgtcag

SEQ ID NO: 85512 - DNA, 33 bp, Homo sapien
ggagagatgacatacagtaaaatggcatgtcag

SEQ ID NO: 85513 - DNA, 33 bp, Homo sapien
caaatccttctggaagccggccctccgaggtgc

SEQ ID NO: 85514 - DNA, 33 bp, Homo sapien
caaatccttctggaagtcggccctccgaggtgc

SEQ ID NO: 85515 - DNA, 33 bp, Homo sapien
ggagccccactagccaatccctcattagaagat

SEQ ID NO: 85516 - DNA, 33 bp, Homo sapien
ggagccccactagccactccctcattagaagat

SEQ ID NO: 85517 - DNA, 33 bp, Homo sapien
acgaaaaaaatccacacagtactggtagacata

SEQ ID NO: 85518 - DNA, 33 bp, Homo sapien
acgaaaaaaatccacatagtactggtagacata

SEQ ID NO: 85519 - DNA, 33 bp, Homo sapien
tattgcaaagtgaaaacgagtctagcatgagct

SEQ ID NO: 85520 - DNA, 33 bp, Homo sapien
tattgcaaagtgaaaatgagtctagcatgagct

SEQ ID NO: 85521 - DNA, 33 bp, Homo sapien
aatacatcagaattcaatcccatttccaaagaa

SEQ ID NO: 85522 - DNA, 33 bp, Homo sapien
aatacatcagaattcagtcccatttccaaagaa

SEQ ID NO: 85523 - DNA, 33 bp, Homo sapien
tttgtacacagacttaagaagtagctatggcca

SEQ ID NO: 85524 - DNA, 33 bp, Homo sapien
tttgtacacagacttacgaagtagctatggcca

SEQ ID NO: 85525 - DNA, 33 bp, Homo sapien
cataaattttttcaacaaggctgtagcaggata

SEQ ID NO: 85526 - DNA, 33 bp, Homo sapien
cataaattttttcaactaggctgtagcaggata

SEQ ID NO: 85527 - DNA, 33 bp, Homo sapien
gctacacacattgtccaacccagcatagtctct

SEQ ID NO: 85528 - DNA, 33 bp, Homo sapien
gctacacacattgtccgacccagcatagtctct

SEQ ID NO: 85529 - DNA, 33 bp, Homo sapien
acttttatcccatagacagagaggttaagtgac

SEQ ID NO: 85530 - DNA, 33 bp, Homo sapien
acttttatcccatagagagagaggttaagtgac

SEQ ID NO: 85531 - DNA, 33 bp, Homo sapien
tattaagtgttaggaactgtactaagtgcttta

SEQ ID NO: 85532 - DNA, 33 bp, Homo sapien
tattaagtgttaggaagtgtactaagtgcttta

SEQ ID NO: 85533 - DNA, 33 bp, Homo sapien
cagactcaacaaacaccgtattgagtttagtgt

SEQ ID NO: 85534 - DNA, 33 bp, Homo sapien
cagactcaacaaacacggtattgagtttagtgt

SEQ ID NO: 85535 - DNA, 33 bp, Homo sapien
ttctaatttcacagccaataaaaccttttctaa

SEQ ID NO: 85536 - DNA, 33 bp, Homo sapien
ttctaatttcacagccgataaaaccttttctaa

SEQ ID NO: 85537 - DNA, 33 bp, Homo sapien
tgcacatctgaatcacaaaacagtaacaggttc

SEQ ID NO: 85538 - DNA, 33 bp, Homo sapien
tgcacatctgaatcacgaaacagtaacaggttc

SEQ ID NO: 85539 - DNA, 33 bp, Homo sapien
ctgctgtaaccctggaacccaagcgtggagcac

SEQ ID NO: 85540 - DNA, 33 bp, Homo sapien
ctgctgtaaccctggagcccaagcgtggagcac

SEQ ID NO: 85541 - DNA, 33 bp, Homo sapien
gcatcacttgcgaaaactgcttctggtcaaggt

SEQ ID NO: 85542 - DNA, 33 bp, Homo sapien
gcatcacttgcgaaaattgcttctggtcaaggt

SEQ ID NO: 85543 - DNA, 33 bp, Homo sapien
ttggaggtgataaacacgacaatcaatcatagg

SEQ ID NO: 85544 - DNA, 33 bp, Homo sapien
ttggaggtgataaacatgacaatcaatcatagg

SEQ ID NO: 85545 - DNA, 33 bp, Homo sapien
tcagatagggtaccagcctgcaccgcggaacag

SEQ ID NO: 85546 - DNA, 33 bp, Homo sapien
tcagatagggtaccagtctgcaccgcggaacag

SEQ ID NO: 85547 - DNA, 33 bp, Homo sapien
tgacgccaaggcaccgaacaatgtgaatctgaa

SEQ ID NO: 85548 - DNA, 33 bp, Homo sapien
tgacgccaaggcaccggacaatgtgaatctgaa

SEQ ID NO: 85549 - DNA, 33 bp, Homo sapien
cctatcctggagcctcaccgacctgtttcctcc

SEQ ID NO: 85550 - DNA, 33 bp, Homo sapien
cctatcctggagcctcgccgacctgtttcctcc

SEQ ID NO: 85551 - DNA, 33 bp, Homo sapien
aagctcacgagcaaaccagggctgtgtgagggt

SEQ ID NO: 85552 - DNA, 33 bp, Homo sapien
aagctcacgagcaaacgagggctgtgtgagggt

SEQ ID NO: 85553 - DNA, 33 bp, Homo sapien
tacctttccgcatatcccaatgttgatagagtt

SEQ ID NO: 85554 - DNA, 33 bp, Homo sapien
tacctttccgcatatctcaatgttgatagagtt

SEQ ID NO: 85555 - DNA, 33 bp, Homo sapien
cacttggcaaacattcaataatgggattccaga

SEQ ID NO: 85556 - DNA, 33 bp, Homo sapien
cacttggcaaacattcgataatgggattccaga

SEQ ID NO: 85557 - DNA, 33 bp, Homo sapien
gcctacagagcaccaaagctatttgtggtaaaa

SEQ ID NO: 85558 - DNA, 33 bp, Homo sapien
gcctacagagcaccaaggctatttgtggtaaaa

SEQ ID NO: 85559 - DNA, 33 bp, Homo sapien
tgtgctctagttgatcaaagattctagttagtg

SEQ ID NO: 85560 - DNA, 33 bp, Homo sapien
tgtgctctagttgatctaagattctagttagtg

SEQ ID NO: 85561 - DNA, 33 bp, Homo sapien
tgttaataagagaacaatgcgttcaagtgcaaa

SEQ ID NO: 85562 - DNA, 33 bp, Homo sapien
tgttaataagagaacagtgcgttcaagtgcaaa

SEQ ID NO: 85563 - DNA, 33 bp, Homo sapien
atacagaatttagaaacaggccatggtggttta

SEQ ID NO: 85564 - DNA, 33 bp, Homo sapien
atacagaatttagaaagaggccatggtggttta

SEQ ID NO: 85565 - DNA, 33 bp, Homo sapien
catggcacaacaaataccactgccctgagatct

SEQ ID NO: 85566 - DNA, 33 bp, Homo sapien
catggcacaacaaatatcactgccctgagatct

SEQ ID NO: 85567 - DNA, 33 bp, Homo sapien
ctacttggccttctcaccatggcttttttgaga

SEQ ID NO: 85568 - DNA, 33 bp, Homo sapien
ctacttggccttctcagcatggcttttttgaga

SEQ ID NO: 85569 - DNA, 33 bp, Homo sapien
caggtctgattctcagcccgggttgctctgcac

SEQ ID NO: 85570 - DNA, 33 bp, Homo sapien
caggtctgattctcagtccgggttgctctgcac

SEQ ID NO: 85571 - DNA, 33 bp, Homo sapien
tagctcgcataattctaacaatatatctgcggt

SEQ ID NO: 85572 - DNA, 33 bp, Homo sapien
tagctcgcataattctgacaatatatctgcggt

SEQ ID NO: 85573 - DNA, 33 bp, Homo sapien
attaaaccattcaccaaatatcctgtctagatt

SEQ ID NO: 85574 - DNA, 33 bp, Homo sapien
attaaaccattcaccagatatcctgtctagatt

SEQ ID NO: 85575 - DNA, 33 bp, Homo sapien
ccaatgtattgacacactgaaaaaggtatgaca

SEQ ID NO: 85576 - DNA, 33 bp, Homo sapien
ccaatgtattgacacagtgaaaaaggtatgaca

SEQ ID NO: 85577 - DNA, 33 bp, Homo sapien
tcacagtgtgaaagtacaataattttatgcaag

SEQ ID NO: 85578 - DNA, 33 bp, Homo sapien
tcacagtgtgaaagtataataattttatgcaag

SEQ ID NO: 85579 - DNA, 33 bp, Homo sapien
acgatatacaggaaaacgtgaatggtgattctt

SEQ ID NO: 85580 - DNA, 33 bp, Homo sapien
acgatatacaggaaaatgtgaatggtgattctt

SEQ ID NO: 85581 - DNA, 33 bp, Homo sapien
aagggaaggaggacgacgcaaactctttttaaa

SEQ ID NO: 85582 - DNA, 33 bp, Homo sapien
aagggaaggaggacgatgcaaactctttttaaa

SEQ ID NO: 85583 - DNA, 33 bp, Homo sapien
ggcttccctggcaatccatttactaaaattcat

SEQ ID NO: 85584 - DNA, 33 bp, Homo sapien
ggcttccctggcaatctatttactaaaattcat

SEQ ID NO: 85585 - DNA, 33 bp, Homo sapien
ctggctaaataaaagggatacacccttgtcaca

SEQ ID NO: 85586 - DNA, 33 bp, Homo sapien
ctggctaaataaaaggtatacacccttgtcaca

SEQ ID NO: 85587 - DNA, 33 bp, Homo sapien
gcaaactaccataaagcccagcgtagtgaaaat

SEQ ID NO: 85588 - DNA, 33 bp, Homo sapien
gcaaactaccataaaggccagcgtagtgaaaat

SEQ ID NO: 85589 - DNA, 33 bp, Homo sapien
aaagccaagagtgagaatatgaactcaaatcat

SEQ ID NO: 85590 - DNA, 33 bp, Homo sapien
aaagccaagagtgagactatgaactcaaatcat

SEQ ID NO: 85591 - DNA, 33 bp, Homo sapien
cttacagatggagaaacagagctctgaaatgtt

SEQ ID NO: 85592 - DNA, 33 bp, Homo sapien
cttacagatggagaaatagagctctgaaatgtt

SEQ ID NO: 85593 - DNA, 33 bp, Homo sapien
agcgatgacactaaagaagacagagaaaacatt

SEQ ID NO: 85594 - DNA, 33 bp, Homo sapien
agcgatgacactaaaggagacagagaaaacatt

SEQ ID NO: 85595 - DNA, 33 bp, Homo sapien
ttttacttggcttctaacacaccacaccttcct

SEQ ID NO: 85596 - DNA, 33 bp, Homo sapien
ttttacttggcttctagcacaccacaccttcct

SEQ ID NO: 85597 - DNA, 33 bp, Homo sapien
gttgagatacacttcccataagataaattactc

SEQ ID NO: 85598 - DNA, 33 bp, Homo sapien
gttgagatacacttcctataagataaattactc

SEQ ID NO: 85599 - DNA, 33 bp, Homo sapien
acattgcaggcagggtaaaatccaaacatgact

SEQ ID NO: 85600 - DNA, 33 bp, Homo sapien
acattgcaggcagggtgaaatccaaacatgact

SEQ ID NO: 85601 - DNA, 33 bp, Homo sapien
gcctaatcagaatccccccaaaaatatagtact

SEQ ID NO: 85602 - DNA, 33 bp, Homo sapien
gcctaatcagaatccctccaaaaatatagtact

SEQ ID NO: 85603 - DNA, 33 bp, Homo sapien
tctaaattgtggctcaagtagggtcacatcctt

SEQ ID NO: 85604 - DNA, 33 bp, Homo sapien
tctaaattgtggctcaggtagggtcacatcctt

SEQ ID NO: 85605 - DNA, 33 bp, Homo sapien
attatatattaaaaagacactggattgagaata

SEQ ID NO: 85606 - DNA, 33 bp, Homo sapien
attatatattaaaaagccactggattgagaata

SEQ ID NO: 85607 - DNA, 33 bp, Homo sapien
ttggttcttaagatgcaccagctgtggagtcca

SEQ ID NO: 85608 - DNA, 33 bp, Homo sapien
ttggttcttaagatgcgccagctgtggagtcca

SEQ ID NO: 85609 - DNA, 33 bp, Homo sapien
ataaatgacacagaccaatgaagtttcatacta

SEQ ID NO: 85610 - DNA, 33 bp, Homo sapien
ataaatgacacagaccgatgaagtttcatacta

SEQ ID NO: 85611 - DNA, 33 bp, Homo sapien
caaaagacactagggccgactttagagtagaag

SEQ ID NO: 85612 - DNA, 33 bp, Homo sapien
caaaagacactagggcggactttagagtagaag

SEQ ID NO: 85613 - DNA, 33 bp, Homo sapien
agctttgccctgttaaaaaccaaagaatgactt

SEQ ID NO: 85614 - DNA, 33 bp, Homo sapien
agctttgccctgttaagaaccaaagaatgactt

SEQ ID NO: 85615 - DNA, 33 bp, Homo sapien
caaacctagaattcttaaaccccaccaacacag

SEQ ID NO: 85616 - DNA, 33 bp, Homo sapien
caaacctagaattcttgaaccccaccaacacag

SEQ ID NO: 85617 - DNA, 33 bp, Homo sapien
aaaacagacaaaacaaataagaaccactagaaa

SEQ ID NO: 85618 - DNA, 33 bp, Homo sapien
aaaacagacaaaacaactaagaaccactagaaa

SEQ ID NO: 85619 - DNA, 33 bp, Homo sapien
aatttctattggataacaacaaagtgcaatgga

SEQ ID NO: 85620 - DNA, 33 bp, Homo sapien
aatttctattggataagaacaaagtgcaatgga

SEQ ID NO: 85621 - DNA, 33 bp, Homo sapien
gtttcttctaagcacacgtactatctttccact

SEQ ID NO: 85622 - DNA, 33 bp, Homo sapien
gtttcttctaagcacatgtactatctttccact

SEQ ID NO: 85623 - DNA, 33 bp, Homo sapien
cacatcagaatcattaaaatggacggctgaatt

SEQ ID NO: 85624 - DNA, 33 bp, Homo sapien
cacatcagaatcattagaatggacggctgaatt

SEQ ID NO: 85625 - DNA, 33 bp, Homo sapien
ctcataaattactgggaatccctaagcctgggc

SEQ ID NO: 85626 - DNA, 33 bp, Homo sapien
ctcataaattactggggatccctaagcctgggc

SEQ ID NO: 85627 - DNA, 33 bp, Homo sapien
acagtgctacaacaaacgagagtgtggatatct

SEQ ID NO: 85628 - DNA, 33 bp, Homo sapien
acagtgctacaacaaatgagagtgtggatatct

SEQ ID NO: 85629 - DNA, 33 bp, Homo sapien
ccattaatactgtgccaaaaagatgtttgtgtg

SEQ ID NO: 85630 - DNA, 33 bp, Homo sapien
ccattaatactgtgccgaaaagatgtttgtgtg

SEQ ID NO: 85631 - DNA, 33 bp, Homo sapien
ttccactcatgtgtaacgttcagaaatatttta

SEQ ID NO: 85632 - DNA, 33 bp, Homo sapien
ttccactcatgtgtaatgttcagaaatatttta

SEQ ID NO: 85633 - DNA, 33 bp, Homo sapien
ctgctgccaaagaccaactgttcctgctagttt

SEQ ID NO: 85634 - DNA, 33 bp, Homo sapien
ctgctgccaaagaccagctgttcctgctagttt

SEQ ID NO: 85635 - DNA, 33 bp, Homo sapien
ctgtttccctaaagagccaggagtcagtatttt

SEQ ID NO: 85636 - DNA, 33 bp, Homo sapien
ctgtttccctaaagagtcaggagtcagtatttt

SEQ ID NO: 85637 - DNA, 33 bp, Homo sapien
tggtttgatctgggcaataacaacgggtcatgt

SEQ ID NO: 85638 - DNA, 33 bp, Homo sapien
tggtttgatctgggcagtaacaacgggtcatgt

SEQ ID NO: 85639 - DNA, 33 bp, Homo sapien
acctcctgttattaaacggtcagaaaagctaga

SEQ ID NO: 85640 - DNA, 33 bp, Homo sapien
acctcctgttattaaatggtcagaaaagctaga

SEQ ID NO: 85641 - DNA, 33 bp, Homo sapien
gactgctgttttccacacatgtcatgaagaaca

SEQ ID NO: 85642 - DNA, 33 bp, Homo sapien
gactgctgttttccacgcatgtcatgaagaaca

SEQ ID NO: 85643 - DNA, 33 bp, Homo sapien
agtacaatgttctaatcactcctgagagactcc

SEQ ID NO: 85644 - DNA, 33 bp, Homo sapien
agtacaatgttctaattactcctgagagactcc

SEQ ID NO: 85645 - DNA, 33 bp, Homo sapien
ccagaagaaacgcttacacaagatgtgggaaaa

SEQ ID NO: 85646 - DNA, 33 bp, Homo sapien
ccagaagaaacgcttatacaagatgtgggaaaa

SEQ ID NO: 85647 - DNA, 33 bp, Homo sapien
gggttgtcattttttgcagaagtcatatgatag

SEQ ID NO: 85648 - DNA, 33 bp, Homo sapien
gggttgtcattttttgtagaagtcatatgatag

SEQ ID NO: 85649 - DNA, 33 bp, Homo sapien
gctatgtgggagaaaggaagtgtagacagagtc

SEQ ID NO: 85650 - DNA, 33 bp, Homo sapien
gctatgtgggagaaagtaagtgtagacagagtc

SEQ ID NO: 85651 - DNA, 33 bp, Homo sapien
tttggtccaactgatacactggatagtgagata

SEQ ID NO: 85652 - DNA, 33 bp, Homo sapien
tttggtccaactgatatactggatagtgagata

SEQ ID NO: 85653 - DNA, 33 bp, Homo sapien
tttcttgttcattcaacggtaaatttttcccat

SEQ ID NO: 85654 - DNA, 33 bp, Homo sapien
tttcttgttcattcaatggtaaatttttcccat

SEQ ID NO: 85655 - DNA, 33 bp, Homo sapien
gagccctctcaggaaaaagataatgcagatcaa

SEQ ID NO: 85656 - DNA, 33 bp, Homo sapien
gagccctctcaggaaacagataatgcagatcaa

SEQ ID NO: 85657 - DNA, 33 bp, Homo sapien
tgaccattcacaagacaagtaaacacagctgcc

SEQ ID NO: 85658 - DNA, 33 bp, Homo sapien
tgaccattcacaagacgagtaaacacagctgcc

SEQ ID NO: 85659 - DNA, 33 bp, Homo sapien
gctttggaaaatgaaggctctcgtgtttgttta

SEQ ID NO: 85660 - DNA, 33 bp, Homo sapien
gctttggaaaatgaagtctctcgtgtttgttta

SEQ ID NO: 85661 - DNA, 33 bp, Homo sapien
aggctttcaattagaaacaaatagccagtttgg

SEQ ID NO: 85662 - DNA, 33 bp, Homo sapien
aggctttcaattagaatcaaatagccagtttgg

SEQ ID NO: 85663 - DNA, 33 bp, Homo sapien
tgaccagcaatgtgtccccaaggaacagacgct

SEQ ID NO: 85664 - DNA, 33 bp, Homo sapien
tgaccagcaatgtgtctccaaggaacagacgct

SEQ ID NO: 85665 - DNA, 33 bp, Homo sapien
aggatcccagctgagaccaaaagaattgcccag

SEQ ID NO: 85666 - DNA, 33 bp, Homo sapien
aggatcccagctgagatcaaaagaattgcccag

SEQ ID NO: 85667 - DNA, 33 bp, Homo sapien
gaaacactcataatttaaaacctgacagcaact

SEQ ID NO: 85668 - DNA, 33 bp, Homo sapien
gaaacactcataattttaaacctgacagcaact

SEQ ID NO: 85669 - DNA, 33 bp, Homo sapien
atgtgagtatttggaaccttacaagtacacctg

SEQ ID NO: 85670 - DNA, 33 bp, Homo sapien
atgtgagtatttggaatcttacaagtacacctg

SEQ ID NO: 85671 - DNA, 33 bp, Homo sapien
gcataccttgggaatacggttaccaatgctgtg

SEQ ID NO: 85672 - DNA, 33 bp, Homo sapien
gcataccttgggaatatggttaccaatgctgtg

SEQ ID NO: 85673 - DNA, 33 bp, Homo sapien; identical to SEQ ID NO: 85671

SEQ ID NO: 85674 - DNA, 33 bp, Homo sapien; identical to SEQ ID NO: 85672

SEQ ID NO: 85675 - DNA, 33 bp, Homo sapien
aagtccacccaatataagaagacaaaacagctc

SEQ ID NO: 85676 - DNA, 33 bp, Homo sapien
aagtccacccaatatatgaagacaaaacagctc

SEQ ID NO: 85677 - DNA, 33 bp, Homo sapien
aggatatagaagcacacatcgtcatttccttac

SEQ ID NO: 85678 - DNA, 33 bp, Homo sapien
aggatatagaagcacagatcgtcatttccttac

SEQ ID NO: 85679 - DNA, 33 bp, Homo sapien
atcatcatttttaaaacttagtttactgtctca

SEQ ID NO: 85680 - DNA, 33 bp, Homo sapien
atcatcatttttaaaatttagtttactgtctca

SEQ ID NO: 85681 - DNA, 33 bp, Homo sapien
taaagacactagtaacaggatattactacaaac

SEQ ID NO: 85682 - DNA, 33 bp, Homo sapien
taaagacactagtaactggatattactacaaac

SEQ ID NO: 85683 - DNA, 33 bp, Homo sapien
ttaagattgactggtagatagggtgagtttgac

SEQ ID NO: 85684 - DNA, 33 bp, Homo sapien
ttaagattgactggtatatagggtgagtttgac

SEQ ID NO: 85685 - DNA, 33 bp, Homo sapien
gcctatggcattcacaagaaacatggcaattcc

SEQ ID NO: 85686 - DNA, 33 bp, Homo sapien
gcctatggcattcacaggaaacatggcaattcc

SEQ ID NO: 85687 - DNA, 33 bp, Homo sapien
gtcgctgcttgtggaaagaagtcagaataacat

SEQ ID NO: 85688 - DNA, 33 bp, Homo sapien
gtcgctgcttgtggaaggaagtcagaataacat

SEQ ID NO: 85689 - DNA, 33 bp, Homo sapien
ggaatattgactcagcaagtttttattatgcac

SEQ ID NO: 85690 - DNA, 33 bp, Homo sapien
ggaatattgactcagcgagtttttattatgcac

SEQ ID NO: 85691 - DNA, 33 bp, Homo sapien
caagatgtaattaagtgaacatgacgacatatg

SEQ ID NO: 85692 - DNA, 33 bp, Homo sapien
caagatgtaattaagttaacatgacgacatatg

SEQ ID NO: 85693 - DNA, 33 bp, Homo sapien
cccaaatgaatgcatcactcttggcacgcagag

SEQ ID NO: 85694 - DNA, 33 bp, Homo sapien
cccaaatgaatgcatcgctcttggcacgcagag

SEQ ID NO: 85695 - DNA, 33 bp, Homo sapien
catctttctcttctcaatacaaaacccaagcct

SEQ ID NO: 85696 - DNA, 33 bp, Homo sapien
catctttctcttctcagtacaaaacccaagcct

SEQ ID NO: 85697 - DNA, 33 bp, Homo sapien
agatgggaagactagacaggtgaggcacctcaa

SEQ ID NO: 85698 - DNA, 33 bp, Homo sapien
agatgggaagactagataggtgaggcacctcaa

SEQ ID NO: 85699 - DNA, 33 bp, Homo sapien
tctggctgggcagctaagtcgtctgttcaaaga

SEQ ID NO: 85700 - DNA, 33 bp, Homo sapien
tctggctgggcagctaggtcgtctgttcaaaga

SEQ ID NO: 85701 - DNA, 33 bp, Homo sapien
acatcaagaagacagcagattaagtaagctaca

SEQ ID NO: 85702 - DNA, 33 bp, Homo sapien
acatcaagaagacagcggattaagtaagctaca

SEQ ID NO: 85703 - DNA, 33 bp, Homo sapien
tctgactcctcagagcacccgagtaagcaagtc

SEQ ID NO: 85704 - DNA, 33 bp, Homo sapien
tctgactcctcagagcgcccgagtaagcaagtc

SEQ ID NO: 85705 - DNA, 33 bp, Homo sapien
cctacagaggcaaacacgggattttcaaggact

SEQ ID NO: 85706 - DNA, 33 bp, Homo sapien
cctacagaggcaaacaggggattttcaaggact

SEQ ID NO: 85707 - DNA, 33 bp, Homo sapien
gggttttatgaaaagcaccatgaaacagttccc

SEQ ID NO: 85708 - DNA, 33 bp, Homo sapien
gggttttatgaaaagcgccatgaaacagttccc

SEQ ID NO: 85709 - DNA, 33 bp, Homo sapien
gaggattacaaaatgacgcacatgaaaagtact

SEQ ID NO: 85710 - DNA, 33 bp, Homo sapien
gaggattacaaaatgatgcacatgaaaagtact

SEQ ID NO: 85711 - DNA, 33 bp, Homo sapien
gtgctttatatgtacaatggaaagagagtgtct

SEQ ID NO: 85712 - DNA, 33 bp, Homo sapien
gtgctttatatgtacagtggaaagagagtgtct

SEQ ID NO: 85713 - DNA, 33 bp, Homo sapien
caaataataaatcagcaattctgcaatataacg

SEQ ID NO: 85714 - DNA, 33 bp, Homo sapien
caaataataaatcagcgattctgcaatataacg

SEQ ID NO: 85715 - DNA, 33 bp, Homo sapien
aactccagcctgcagaataaaaaccaaattctt

SEQ ID NO: 85716 - DNA, 33 bp, Homo sapien
aactccagcctgcagagtaaaaaccaaattctt

SEQ ID NO: 85717 - DNA, 33 bp, Homo sapien
gggtgatcagtatcaacggtgcaggattctggc

SEQ ID NO: 85718 - DNA, 33 bp, Homo sapien
gggtgatcagtatcaatggtgcaggattctggc

SEQ ID NO: 85719 - DNA, 33 bp, Homo sapien
gcttgtgtattttcaaaacacccttctgctttt

SEQ ID NO: 85720 - DNA, 33 bp, Homo sapien
gcttgtgtattttcaacacacccttctgctttt

SEQ ID NO: 85721 - DNA, 33 bp, Homo sapien
ttgacttcccatcttacaaactgccatgcaatc

SEQ ID NO: 85722 - DNA, 33 bp, Homo sapien
ttgacttcccatcttataaactgccatgcaatc

SEQ ID NO: 85723 - DNA, 33 bp, Homo sapien
cacggtcaccctttaccaaatgtgcatgtgcgt

SEQ ID NO: 85724 - DNA, 33 bp, Homo sapien
cacggtcaccctttactaaatgtgcatgtgcgt

SEQ ID NO: 85725 - DNA, 33 bp, Homo sapien
gcttcagttcactagagatgattgcatccacca

SEQ ID NO: 85726 - DNA, 33 bp, Homo sapien
gcttcagttcactagatatgattgcatccacca

SEQ ID NO: 85727 - DNA, 33 bp, Homo sapien
atccaagtatgcgaacaatcaggtattcttcca

SEQ ID NO: 85728 - DNA, 33 bp, Homo sapien
atccaagtatgcgaacgatcaggtattcttcca

SEQ ID NO: 85729 - DNA, 33 bp, Homo sapien
taactgctattagccacgcactaaagtatatct

SEQ ID NO: 85730 - DNA, 33 bp, Homo sapien
taactgctattagccatgcactaaagtatatct

SEQ ID NO: 85731 - DNA, 33 bp, Homo sapien
ggacttccatcagtaaactcttctgagatccct

SEQ ID NO: 85732 - DNA, 33 bp, Homo sapien
ggacttccatcagtaacctcttctgagatccct

SEQ ID NO: 85733 - DNA, 33 bp, Homo sapien
gggatgtctatttgtaactccatcatgggatgt

SEQ ID NO: 85734 - DNA, 33 bp, Homo sapien
gggatgtctatttgtagctccatcatgggatgt

SEQ ID NO: 85735 - DNA, 33 bp, Homo sapien
aaccataatcaatcaccactgcattccagcctg

SEQ ID NO: 85736 - DNA, 33 bp, Homo sapien
aaccataatcaatcacgactgcattccagcctg

SEQ ID NO: 85737 - DNA, 33 bp, Homo sapien
gggtattgtaatagagcagagagaatggactca

SEQ ID NO: 85738 - DNA, 33 bp, Homo sapien
gggtattgtaatagaggagagagaatggactca

SEQ ID NO: 85739 - DNA, 33 bp, Homo sapien
gaggtggaggttgaagaattacctgttgggtac

SEQ ID NO: 85740 - DNA, 33 bp, Homo sapien
gaggtggaggttgaaggattacctgttgggtac

SEQ ID NO: 85741 - DNA, 33 bp, Homo sapien
tggacgacacaggcaacctgatgcaaaggagat

SEQ ID NO: 85742 - DNA, 33 bp, Homo sapien
tggacgacacaggcaatctgatgcaaaggagat

SEQ ID NO: 85743 - DNA, 33 bp, Homo sapien
agaggaaataaaatgacggtcaaagggtacgaa

SEQ ID NO: 85744 - DNA, 33 bp, Homo sapien
agaggaaataaaatgatggtcaaagggtacgaa

SEQ ID NO: 85745 - DNA, 33 bp, Homo sapien
agagccattgcagcaactggtttctgacctccc

SEQ ID NO: 85746 - DNA, 33 bp, Homo sapien
agagccattgcagcaagtggtttctgacctccc

SEQ ID NO: 85747 - DNA, 33 bp, Homo sapien
ccagcttcttcttggcacttgcctcctctcatc

SEQ ID NO: 85748 - DNA, 33 bp, Homo sapien
ccagcttcttcttggcgcttgcctcctctcatc

SEQ ID NO: 85749 - DNA, 33 bp, Homo sapien
tagggagctgggaagacgtagtattggtgggag

SEQ ID NO: 85750 - DNA, 33 bp, Homo sapien
tagggagctgggaagatgtagtattggtgggag

SEQ ID NO: 85751 - DNA, 33 bp, Homo sapien
tattacagcagctctaccaggttaggtattgac

SEQ ID NO: 85752 - DNA, 33 bp, Homo sapien
tattacagcagctctatcaggttaggtattgac

SEQ ID NO: 85753 - DNA, 33 bp, Homo sapien
gctctttggtgtctacaaggcaggaaaaataga

SEQ ID NO: 85754 - DNA, 33 bp, Homo sapien
gctctttggtgtctacgaggcaggaaaaataga

SEQ ID NO: 85755 - DNA, 33 bp, Homo sapien
tgaagccaggaatagcacaggtgattgcctcct

SEQ ID NO: 85756 - DNA, 33 bp, Homo sapien
tgaagccaggaatagcgcaggtgattgcctcct

SEQ ID NO: 85757 - DNA, 33 bp, Homo sapien
tgcccgggcaataaagccataggagagaaggat

SEQ ID NO: 85758 - DNA, 33 bp, Homo sapien
tgcccgggcaataaagtcataggagagaaggat

SEQ ID NO: 85759 - DNA, 33 bp, Homo sapien
agtatggtgtcattcacagcggtgtcagcacac

SEQ ID NO: 85760 - DNA, 33 bp, Homo sapien
agtatggtgtcattcatagcggtgtcagcacac

SEQ ID NO: 85761 - DNA, 33 bp, Homo sapien
ggccctgctcagctcactactgcccttgtgact

SEQ ID NO: 85762 - DNA, 33 bp, Homo sapien
ggccctgctcagctcagtactgcccttgtgact

SEQ ID NO: 85763 - DNA, 33 bp, Homo sapien
ttctatttggccataaaaaaaatgaagtcatat

SEQ ID NO: 85764 - DNA, 33 bp, Homo sapien
ttctatttggccataagaaaaatgaagtcatat

SEQ ID NO: 85765 - DNA, 33 bp, Homo sapien
agctagagaaaaaagacgatcgagtcaaaacct

SEQ ID NO: 85766 - DNA, 33 bp, Homo sapien
agctagagaaaaaagatgatcgagtcaaaacct

SEQ ID NO: 85767 - DNA, 33 bp, Homo sapien
ttctagaatgagaaaaaagaagacttgctctgc

SEQ ID NO: 85768 - DNA, 33 bp, Homo sapien
ttctagaatgagaaaagagaagacttgctctgc

SEQ ID NO: 85769 - DNA, 33 bp, Homo sapien
caaatcgttgcataaccatgaagtatagctgtg

SEQ ID NO: 85770 - DNA, 33 bp, Homo sapien
caaatcgttgcataactatgaagtatagctgtg

SEQ ID NO: 85771 - DNA, 33 bp, Homo sapien
tgaatgataaaatgaggattgcaatttctgaag

SEQ ID NO: 85772 - DNA, 33 bp, Homo sapien
tgaatgataaaatgagtattgcaatttctgaag

SEQ ID NO: 85773 - DNA, 33 bp, Homo sapien
catgagggagcatctgaagggtgttagccaaca

SEQ ID NO: 85774 - DNA, 33 bp, Homo sapien
catgagggagcatctggagggtgttagccaaca

SEQ ID NO: 85775 - DNA, 33 bp, Homo sapien
ctctgtgcttactgaaaaggatttaacaatgcc

SEQ ID NO: 85776 - DNA, 33 bp, Homo sapien
ctctgtgcttactgaacaggatttaacaatgcc

SEQ ID NO: 85777 - DNA, 33 bp, Homo sapien
cactttcagctattgaggatttccacagtctaa

SEQ ID NO: 85778 - DNA, 33 bp, Homo sapien
cactttcagctattgatgatttccacagtctaa

SEQ ID NO: 85779 - DNA, 33 bp, Homo sapien
ataaaagattaaaaaaatttgtctgttaatcca

SEQ ID NO: 85780 - DNA, 33 bp, Homo sapien
ataaaagattaaaaaattttgtctgttaatcca

SEQ ID NO: 85781 - DNA, 33 bp, Homo sapien
agcatcaatttggatacacactgctgtcagtta

SEQ ID NO: 85782 - DNA, 33 bp, Homo sapien
agcatcaatttggatagacactgctgtcagtta

SEQ ID NO: 85783 - DNA, 33 bp, Homo sapien
cttgtgtatggaaaaaaactcctgcagctagct

SEQ ID NO: 85784 - DNA, 33 bp, Homo sapien
cttgtgtatggaaaaagactcctgcagctagct

SEQ ID NO: 85785 - DNA, 33 bp, Homo sapien
cctcctacagaacagacgccccttcaacctata

SEQ ID NO: 85786 - DNA, 33 bp, Homo sapien
cctcctacagaacagatgccccttcaacctata

SEQ ID NO: 85787 - DNA, 33 bp, Homo sapien
tccagatagctgaagacgtggaggttcctggaa

SEQ ID NO: 85788 - DNA, 33 bp, Homo sapien
tccagatagctgaagatgtggaggttcctggaa

SEQ ID NO: 85789 - DNA, 33 bp, Homo sapien
tctcatggtaagaaagaaatgcaagaattcaga

SEQ ID NO: 85790 - DNA, 33 bp, Homo sapien
tctcatggtaagaaaggaatgcaagaattcaga

SEQ ID NO: 85791 - DNA, 33 bp, Homo sapien
ctgaaagaaacaccagacattccacacaatttc

SEQ ID NO: 85792 - DNA, 33 bp, Homo sapien
ctgaaagaaacaccaggcattccacacaatttc

SEQ ID NO: 85793 - DNA, 33 bp, Homo sapien
cctcctgggcttctccacacgaccctcactaga

SEQ ID NO: 85794 - DNA, 33 bp, Homo sapien
cctcctgggcttctccgcacgaccctcactaga

SEQ ID NO: 85795 - DNA, 33 bp, Homo sapien
ccgggcaacacagtgaaattgtgtctctaaaaa

SEQ ID NO: 85796 - DNA, 33 bp, Homo sapien
ccgggcaacacagtgagattgtgtctctaaaaa

SEQ ID NO: 85797 - DNA, 33 bp, Homo sapien
cttttttcttggtatgcaataagacctctctgg

SEQ ID NO: 85798 - DNA, 33 bp, Homo sapien
cttttttcttggtatggaataagacctctctgg

SEQ ID NO: 85799 - DNA, 33 bp, Homo sapien
gaggctcagaaaactccaggcatttgttaaaat

SEQ ID NO: 85800 - DNA, 33 bp, Homo sapien
gaggctcagaaaactctaggcatttgttaaaat

SEQ ID NO: 85801 - DNA, 33 bp, Homo sapien
gacataaacccatagacgtatgttagctagtat

SEQ ID NO: 85802 - DNA, 33 bp, Homo sapien
gacataaacccatagatgtatgttagctagtat

SEQ ID NO: 85803 - DNA, 33 bp, Homo sapien
ttaaaataaactagaaacaagtgaccgactaaa

SEQ ID NO: 85804 - DNA, 33 bp, Homo sapien
ttaaaataaactagaagcaagtgaccgactaaa

SEQ ID NO: 85805 - DNA, 33 bp, Homo sapien
gttgttgcaaaagtgacgcttccctgttgttaa

SEQ ID NO: 85806 - DNA, 33 bp, Homo sapien
gttgttgcaaaagtgatgcttccctgttgttaa

SEQ ID NO: 85807 - DNA, 33 bp, Homo sapien
ttactctccaaggaaaaaagatgtgttctcaaa

SEQ ID NO: 85808 - DNA, 33 bp, Homo sapien
ttactctccaaggaaagaagatgtgttctcaaa

SEQ ID NO: 85809 - DNA, 33 bp, Homo sapien
ttaatgtactgaataaaatggatttcaaaattt

SEQ ID NO: 85810 - DNA, 33 bp, Homo sapien
ttaatgtactgaataagatggatttcaaaattt

SEQ ID NO: 85811 - DNA, 33 bp, Homo sapien
aagatccaaaggggccactagacattatgctgc

SEQ ID NO: 85812 - DNA, 33 bp, Homo sapien
aagatccaaaggggccgctagacattatgctgc

SEQ ID NO: 85813 - DNA, 33 bp, Homo sapien
tctactttccacatcaactttaaagtgtgccct

SEQ ID NO: 85814 - DNA, 33 bp, Homo sapien
tctactttccacatcacctttaaagtgtgccct

SEQ ID NO: 85815 - DNA, 33 bp, Homo sapien
aaattttctatggctcacatggatacacaaata

SEQ ID NO: 85816 - DNA, 33 bp, Homo sapien
aaattttctatggctcgcatggatacacaaata

SEQ ID NO: 85817 - DNA, 33 bp, Homo sapien
ttaaactgaggggtcaggttctactgatacttt

SEQ ID NO: 85818 - DNA, 33 bp, Homo sapien
ttaaactgaggggtcatgttctactgatacttt

SEQ ID NO: 85819 - DNA, 33 bp, Homo sapien
gtatgtgtgtgtgttcaatgaaaaggatgtgca

SEQ ID NO: 85820 - DNA, 33 bp, Homo sapien
gtatgtgtgtgtgttcgatgaaaaggatgtgca

SEQ ID NO: 85821 - DNA, 33 bp, Homo sapien
tggatgaacctagagaagacatcatgttacgtg

SEQ ID NO: 85822 - DNA, 33 bp, Homo sapien
tggatgaacctagagaggacatcatgttacgtg

SEQ ID NO: 85823 - DNA, 33 bp, Homo sapien
aagagacaagaaacaaataacataccatgaagc

SEQ ID NO: 85824 - DNA, 33 bp, Homo sapien
aagagacaagaaacaagtaacataccatgaagc

SEQ ID NO: 85825 - DNA, 33 bp, Homo sapien
aacctccaaaagcagcacctactatctatctca

SEQ ID NO: 85826 - DNA, 33 bp, Homo sapien
aacctccaaaagcagcgcctactatctatctca

SEQ ID NO: 85827 - DNA, 33 bp, Homo sapien
gtaaagtggtataatacagaacaagaaagctat

SEQ ID NO: 85828 - DNA, 33 bp, Homo sapien
gtaaagtggtataatatagaacaagaaagctat

SEQ ID NO: 85829 - DNA, 33 bp, Homo sapien
agtttgaacaaagcaacagaagtttcttgcata

SEQ ID NO: 85830 - DNA, 33 bp, Homo sapien
agtttgaacaaagcaatagaagtttcttgcata

SEQ ID NO: 85831 - DNA, 33 bp, Homo sapien
tacacataggagacaaaggtgatgaggcatgaa

SEQ ID NO: 85832 - DNA, 33 bp, Homo sapien
tacacataggagacaagggtgatgaggcatgaa

SEQ ID NO: 85833 - DNA, 33 bp, Homo sapien
atggtggcatactctgaacttcttcattaccca

SEQ ID NO: 85834 - DNA, 33 bp, Homo sapien
atggtggcatactctgtacttcttcattaccca

SEQ ID NO: 85835 - DNA, 33 bp, Homo sapien
atactcaatgttgctaaaaatacagtgttttct

SEQ ID NO: 85836 - DNA, 33 bp, Homo sapien
atactcaatgttgctacaaatacagtgttttct

SEQ ID NO: 85837 - DNA, 33 bp, Homo sapien
atttctacatgaataacagatgtcaagtgaaga

SEQ ID NO: 85838 - DNA, 33 bp, Homo sapien
atttctacatgaataagagatgtcaagtgaaga

SEQ ID NO: 85839 - DNA, 33 bp, Homo sapien
cagctaatgtcataacacttttactctgtccat

SEQ ID NO: 85840 - DNA, 33 bp, Homo sapien
cagctaatgtcataactcttttactctgtccat

SEQ ID NO: 85841 - DNA, 33 bp, Homo sapien
ttctaagatgtttgcaaatattactggatataa

SEQ ID NO: 85842 - DNA, 33 bp, Homo sapien
ttctaagatgtttgcagatattactggatataa

SEQ ID NO: 85843 - DNA, 33 bp, Homo sapien
tttgtataggtaaatacgaaaatattcttcata

SEQ ID NO: 85844 - DNA, 33 bp, Homo sapien
tttgtataggtaaataggaaaatattcttcata

SEQ ID NO: 85845 - DNA, 33 bp, Homo sapien
agtccacagaggtctaagatctgggtccatgtg

SEQ ID NO: 85846 - DNA, 33 bp, Homo sapien
agtccacagaggtctaggatctgggtccatgtg

SEQ ID NO: 85847 - DNA, 33 bp, Homo sapien
aatgacatcttgtgttcatgatattctgtcttc

SEQ ID NO: 85848 - DNA, 33 bp, Homo sapien
aatgacatcttgtgtttatgatattctgtcttc

SEQ ID NO: 85849 - DNA, 33 bp, Homo sapien
gcttttttgaacactgaaggacttaacattcat

SEQ ID NO: 85850 - DNA, 33 bp, Homo sapien
gcttttttgaacactggaggacttaacattcat

SEQ ID NO: 85851 - DNA, 33 bp, Homo sapien
tcctgatactgtttctcactctatacaaaatgg

SEQ ID NO: 85852 - DNA, 33 bp, Homo sapien
tcctgatactgtttcttactctatacaaaatgg

SEQ ID NO: 85853 - DNA, 33 bp, Homo sapien
gggacaagagtgggggaacatcacagaaaaagt

SEQ ID NO: 85854 - DNA, 33 bp, Homo sapien
gggacaagagtggggggacatcacagaaaaagt

SEQ ID NO: 85855 - DNA, 33 bp, Homo sapien
gccatgcaagttcatacaccactatcaactttg

SEQ ID NO: 85856 - DNA, 33 bp, Homo sapien
gccatgcaagttcatataccactatcaactttg

SEQ ID NO: 85857 - DNA, 33 bp, Homo sapien
gcccaaattatcctacaatactatagaaactga

SEQ ID NO: 85858 - DNA, 33 bp, Homo sapien
gcccaaattatcctacgatactatagaaactga

SEQ ID NO: 85859 - DNA, 33 bp, Homo sapien
ctcacctgtcctgcaaaagaatcattcttgcat

SEQ ID NO: 85860 - DNA, 33 bp, Homo sapien
ctcacctgtcctgcaacagaatcattcttgcat

SEQ ID NO: 85861 - DNA, 33 bp, Homo sapien
taatataataaagacgaagtcagctttaataca

SEQ ID NO: 85862 - DNA, 33 bp, Homo sapien
taatataataaagacggagtcagctttaataca

SEQ ID NO: 85863 - DNA, 33 bp, Homo sapien
ataagatagctgagtcaaaagctgtctaaataa

SEQ ID NO: 85864 - DNA, 33 bp, Homo sapien
ataagatagctgagtccaaagctgtctaaataa

SEQ ID NO: 85865 - DNA, 33 bp, Homo sapien
gggaaaagtgaaagaaaggaggattgcacagaa

SEQ ID NO: 85866 - DNA, 33 bp, Homo sapien
gggaaaagtgaaagaagggaggattgcacagaa

SEQ ID NO: 85867 - DNA, 33 bp, Homo sapien
atctgtgaagtaatgacatgtatcctaatgtta

SEQ ID NO: 85868 - DNA, 33 bp, Homo sapien
atctgtgaagtaatgatatgtatcctaatgtta

SEQ ID NO: 85869 - DNA, 33 bp, Homo sapien
aaatttgaacagacaaccctaactttataactt

SEQ ID NO: 85870 - DNA, 33 bp, Homo sapien
aaatttgaacagacaatcctaactttataactt

SEQ ID NO: 85871 - DNA, 33 bp, Homo sapien
ttgctatgaggtcaaaccaatactagtgaacaa

SEQ ID NO: 85872 - DNA, 33 bp, Homo sapien
ttgctatgaggtcaaagcaatactagtgaacaa

SEQ ID NO: 85873 - DNA, 33 bp, Homo sapien
taagcagagcataatcaaaacagtgtgagttct

SEQ ID NO: 85874 - DNA, 33 bp, Homo sapien
taagcagagcataatcgaaacagtgtgagttct

SEQ ID NO: 85875 - DNA, 33 bp, Homo sapien
ttgcctacaaagcaaaaaacgcactgagtgttg

SEQ ID NO: 85876 - DNA, 33 bp, Homo sapien
ttgcctacaaagcaaacaacgcactgagtgttg

SEQ ID NO: 85877 - DNA, 33 bp, Homo sapien
tttacttctttttctggaataaatcctaacatt

SEQ ID NO: 85878 - DNA, 33 bp, Homo sapien
tttacttctttttctgtaataaatcctaacatt

SEQ ID NO: 85879 - DNA, 33 bp, Homo sapien
ccctcatactagaagaaagagacacgtatggac

SEQ ID NO: 85880 - DNA, 33 bp, Homo sapien
ccctcatactagaagacagagacacgtatggac

SEQ ID NO: 85881 - DNA, 33 bp, Homo sapien
aaatgttaggccacaacgtgatttttaacaagt

SEQ ID NO: 85882 - DNA, 33 bp, Homo sapien
aaatgttaggccacaatgtgatttttaacaagt

SEQ ID NO: 85883 - DNA, 33 bp, Homo sapien
agcgaagcagccatataagtggcatcaacagtg

SEQ ID NO: 85884 - DNA, 33 bp, Homo sapien
agcgaagcagccatattagtggcatcaacagtg

SEQ ID NO: 85885 - DNA, 33 bp, Homo sapien
tttccaccaaaagctcaaatctctcaatcctct

SEQ ID NO: 85886 - DNA, 33 bp, Homo sapien
tttccaccaaaagctcgaatctctcaatcctct

SEQ ID NO: 85887 - DNA, 33 bp, Homo sapien
gattaggcatgagcaagtctctctataacacaa

SEQ ID NO: 85888 - DNA, 33 bp, Homo sapien
gattaggcatgagcaattctctctataacacaa

SEQ ID NO: 85889 - DNA, 33 bp, Homo sapien
ttttgaggtttagtttaaaacagactagtacgt

SEQ ID NO: 85890 - DNA, 33 bp, Homo sapien
ttttgaggtttagtttgaaacagactagtacgt

SEQ ID NO: 85891 - DNA, 33 bp, Homo sapien
tttgttagaatcatcaatgatgaagctgaatac

SEQ ID NO: 85892 - DNA, 33 bp, Homo sapien
tttgttagaatcatcattgatgaagctgaatac

SEQ ID NO: 85893 - DNA, 33 bp, Homo sapien
agggtaaactaattcacctgtagttttccaccc

SEQ ID NO: 85894 - DNA, 33 bp, Homo sapien
agggtaaactaattcatctgtagttttccaccc

SEQ ID NO: 85895 - DNA, 33 bp, Homo sapien
taaatcagaggaatcaatatagaaagtgatgac

SEQ ID NO: 85896 - DNA, 33 bp, Homo sapien
taaatcagaggaatcagtatagaaagtgatgac

SEQ ID NO: 85897 - DNA, 33 bp, Homo sapien
ccagagtttatatcaccgaggtgaccatcttca

SEQ ID NO: 85898 - DNA, 33 bp, Homo sapien
ccagagtttatatcactgaggtgaccatcttca

SEQ ID NO: 85899 - DNA, 33 bp, Homo sapien
cacagacattcttaacacatgtcatataactat

SEQ ID NO: 85900 - DNA, 33 bp, Homo sapien
cacagacattcttaacgcatgtcatataactat

SEQ ID NO: 85901 - DNA, 33 bp, Homo sapien
attgcagattcattgcagaagtctgtatatctg

SEQ ID NO: 85902 - DNA, 33 bp, Homo sapien
attgcagattcattgcggaagtctgtatatctg

SEQ ID NO: 85903 - DNA, 33 bp, Homo sapien
agcccttagtccggagccagagtctgtttttct

SEQ ID NO: 85904 - DNA, 33 bp, Homo sapien
agcccttagtccggagtcagagtctgtttttct

SEQ ID NO: 85905 - DNA, 33 bp, Homo sapien
attggctgtttgcggacagaaatccccacacat

SEQ ID NO: 85906 - DNA, 33 bp, Homo sapien
attggctgtttgcggagagaaatccccacacat

SEQ ID NO: 85907 - DNA, 33 bp, Homo sapien
aggtacaactttcaacgatgtcctatttcgctc

SEQ ID NO: 85908 - DNA, 33 bp, Homo sapien
aggtacaactttcaactatgtcctatttcgctc

SEQ ID NO: 85909 - DNA, 33 bp, Homo sapien
aaagacaaactgacaaataaccattcatcaaca

SEQ ID NO: 85910 - DNA, 33 bp, Homo sapien
aaagacaaactgacaagtaaccattcatcaaca

SEQ ID NO: 85911 - DNA, 33 bp, Homo sapien
ttatcttgccacccacaacaatagcagggtcag

SEQ ID NO: 85912 - DNA, 33 bp, Homo sapien
ttatcttgccacccacgacaatagcagggtcag

SEQ ID NO: 85913 - DNA, 33 bp, Homo sapien
aaagaatgaagtgagacaaacagttgtaaagat

SEQ ID NO: 85914 - DNA, 33 bp, Homo sapien
aaagaatgaagtgagagaaacagttgtaaagat

SEQ ID NO: 85915 - DNA, 33 bp, Homo sapien
atgcatcactgttctccacgtggtccaagtgcc

SEQ ID NO: 85916 - DNA, 33 bp, Homo sapien
atgcatcactgttctctacgtggtccaagtgcc

SEQ ID NO: 85917 - DNA, 33 bp, Homo sapien
ggaatatagaaaatataaaactgtgctgcattc

SEQ ID NO: 85918 - DNA, 33 bp, Homo sapien
ggaatatagaaaatatcaaactgtgctgcattc

SEQ ID NO: 85919 - DNA, 33 bp, Homo sapien
agccgtcttgtacctaagtagcaggcccataat

SEQ ID NO: 85920 - DNA, 33 bp, Homo sapien
agccgtcttgtacctatgtagcaggcccataat

SEQ ID NO: 85921 - DNA, 33 bp, Homo sapien
gacagctctctacttcagaaaagcacttctgtc

SEQ ID NO: 85922 - DNA, 33 bp, Homo sapien
gacagctctctacttccgaaaagcacttctgtc

SEQ ID NO: 85923 - DNA, 33 bp, Homo sapien
aaggtcaaaactaaccaaatggccatatcaatc

SEQ ID NO: 85924 - DNA, 33 bp, Homo sapien
aaggtcaaaactaaccgaatggccatatcaatc

SEQ ID NO: 85925 - DNA, 33 bp, Homo sapien
atgaactgtgagattaaccttccatgttgcctt

SEQ ID NO: 85926 - DNA, 33 bp, Homo sapien
atgaactgtgagattacccttccatgttgcctt

SEQ ID NO: 85927 - DNA, 33 bp, Homo sapien
cagcttcctgaatgtcaaagtctccatctcagt

SEQ ID NO: 85928 - DNA, 33 bp, Homo sapien
cagcttcctgaatgtcgaagtctccatctcagt

SEQ ID NO: 85929 - DNA, 33 bp, Homo sapien
aactcaccacactgaacgagaatgtttaggtcg

SEQ ID NO: 85930 - DNA, 33 bp, Homo sapien
aactcaccacactgaatgagaatgtttaggtcg

SEQ ID NO: 85931 - DNA, 33 bp, Homo sapien
taaataaaggtgttgacaaaccaggcaaagaat

SEQ ID NO: 85932 - DNA, 33 bp, Homo sapien
taaataaaggtgttgataaaccaggcaaagaat

SEQ ID NO: 85933 - DNA, 33 bp, Homo sapien
ggtcacccctctaacacgctgtcttcacttaga

SEQ ID NO: 85934 - DNA, 33 bp, Homo sapien
ggtcacccctctaacatgctgtcttcacttaga

SEQ ID NO: 85935 - DNA, 33 bp, Homo sapien
atcaatttgtttcctagacctgggcagaaagct

SEQ ID NO: 85936 - DNA, 33 bp, Homo sapien
atcaatttgtttcctatacctgggcagaaagct

SEQ ID NO: 85937 - DNA, 33 bp, Homo sapien
cccaagatggcagtcaacttcctctcacagagt

SEQ ID NO: 85938 - DNA, 33 bp, Homo sapien
cccaagatggcagtcagcttcctctcacagagt

SEQ ID NO: 85939 - DNA, 33 bp, Homo sapien
ctgcagggcggcagaaagataagtgaattagtt

SEQ ID NO: 85940 - DNA, 33 bp, Homo sapien
ctgcagggcggcagaaggataagtgaattagtt

SEQ ID NO: 85941 - DNA, 33 bp, Homo sapien
gactaagtaagaaataaatgggcgtgtggagat

SEQ ID NO: 85942 - DNA, 33 bp, Homo sapien
gactaagtaagaaatacatgggcgtgtggagat

SEQ ID NO: 85943 - DNA, 33 bp, Homo sapien
tgtattttctctcaaccggtgggtatagcttat

SEQ ID NO: 85944 - DNA, 33 bp, Homo sapien
tgtattttctctcaactggtgggtatagcttat

SEQ ID NO: 85945 - DNA, 33 bp, Homo sapien
tgtaggatttcataaactattagagacacaaat

SEQ ID NO: 85946 - DNA, 33 bp, Homo sapien
tgtaggatttcataaagtattagagacacaaat

SEQ ID NO: 85947 - DNA, 33 bp, Homo sapien
taaaagaaaggaagcacgataatttctatttgc

SEQ ID NO: 85948 - DNA, 33 bp, Homo sapien
taaaagaaaggaagcaggataatttctatttgc

SEQ ID NO: 85949 - DNA, 33 bp, Homo sapien
tttaccattttccagccctatgtgttagtaggg

SEQ ID NO: 85950 - DNA, 33 bp, Homo sapien
tttaccattttccagctctatgtgttagtaggg

SEQ ID NO: 85951 - DNA, 33 bp, Homo sapien
acactcagaccatcacacattcccaccactatc

SEQ ID NO: 85952 - DNA, 33 bp, Homo sapien
acactcagaccatcacgcattcccaccactatc

SEQ ID NO: 85953 - DNA, 33 bp, Homo sapien
ctcctctcctcagagactaaagcgtttctcagg

SEQ ID NO: 85954 - DNA, 33 bp, Homo sapien
ctcctctcctcagagattaaagcgtttctcagg

SEQ ID NO: 85955 - DNA, 33 bp, Homo sapien
agagtaaaatgactgtaaaattcaaggaaatat

SEQ ID NO: 85956 - DNA, 33 bp, Homo sapien
agagtaaaatgactgtcaaattcaaggaaatat

SEQ ID NO: 85957 - DNA, 33 bp, Homo sapien
taaagtttagaaacacaaaaacattgacataat

SEQ ID NO: 85958 - DNA, 33 bp, Homo sapien
taaagtttagaaacacgaaaacattgacataat

SEQ ID NO: 85959 - DNA, 33 bp, Homo sapien
agggatcttggacgtacataggtataagcaaag

SEQ ID NO: 85960 - DNA, 33 bp, Homo sapien
agggatcttggacgtagataggtataagcaaag

SEQ ID NO: 85961 - DNA, 33 bp, Homo sapien
gttaatctgtcttgtaccaatttgtttcctaga

SEQ ID NO: 85962 - DNA, 33 bp, Homo sapien
gttaatctgtcttgtatcaatttgtttcctaga

SEQ ID NO: 85963 - DNA, 33 bp, Homo sapien
tagacaaagggtaaaaaatagccagtctattaa

SEQ ID NO: 85964 - DNA, 33 bp, Homo sapien
tagacaaagggtaaaacatagccagtctattaa

SEQ ID NO: 85965 - DNA, 33 bp, Homo sapien
aaaatgctgatcaaagaaattggagagacacca

SEQ ID NO: 85966 - DNA, 33 bp, Homo sapien
aaaatgctgatcaaaggaattggagagacacca

SEQ ID NO: 85967 - DNA, 33 bp, Homo sapien
ggaagagaaagtggtaaaccaagtatgaatgtc

SEQ ID NO: 85968 - DNA, 33 bp, Homo sapien
ggaagagaaagtggtagaccaagtatgaatgtc

SEQ ID NO: 85969 - DNA, 33 bp, Homo sapien
gctatccaataaacggaagaaattctgtaagtc

SEQ ID NO: 85970 - DNA, 33 bp, Homo sapien
gctatccaataaacggcagaaattctgtaagtc

SEQ ID NO: 85971 - DNA, 33 bp, Homo sapien
taacactggtgtaaaaatgcctattatgagagc

SEQ ID NO: 85972 - DNA, 33 bp, Homo sapien
taacactggtgtaaaactgcctattatgagagc

SEQ ID NO: 85973 - DNA, 33 bp, Homo sapien
aattgtgctcctaaaaacctgcaagtataaata

SEQ ID NO: 85974 - DNA, 33 bp, Homo sapien
aattgtgctcctaaaatcctgcaagtataaata

SEQ ID NO: 85975 - DNA, 33 bp, Homo sapien
aagacaaggttttcaaatcaacccaatccatcc

SEQ ID NO: 85976 - DNA, 33 bp, Homo sapien
aagacaaggttttcaagtcaacccaatccatcc

SEQ ID NO: 85977 - DNA, 33 bp, Homo sapien
gatattagcctggaacaccctgactgccattct

SEQ ID NO: 85978 - DNA, 33 bp, Homo sapien
gatattagcctggaacgccctgactgccattct

SEQ ID NO: 85979 - DNA, 33 bp, Homo sapien
tgctctggcaggtgtacagtatcacagtgtcat

SEQ ID NO: 85980 - DNA, 33 bp, Homo sapien
tgctctggcaggtgtagagtatcacagtgtcat

SEQ ID NO: 85981 - DNA, 33 bp, Homo sapien
gtcctgtctgctgaaaataggtgagactggaaa

SEQ ID NO: 85982 - DNA, 33 bp, Homo sapien
gtcctgtctgctgaaagtaggtgagactggaaa

SEQ ID NO: 85983 - DNA, 33 bp, Homo sapien
caggagacaggaactacacagggattttaaaaa

SEQ ID NO: 85984 - DNA, 33 bp, Homo sapien
caggagacaggaactatacagggattttaaaaa

SEQ ID NO: 85985 - DNA, 33 bp, Homo sapien
ttattcccctgagctaacacctcagctatactc

SEQ ID NO: 85986 - DNA, 33 bp, Homo sapien
ttattcccctgagctagcacctcagctatactc

SEQ ID NO: 85987 - DNA, 33 bp, Homo sapien
caaggagagctacttaaagagatgacaggggca

SEQ ID NO: 85988 - DNA, 33 bp, Homo sapien
caaggagagctacttagagagatgacaggggca

SEQ ID NO: 85989 - DNA, 33 bp, Homo sapien
tgacatactctactggacagtttatatgcatgc

SEQ ID NO: 85990 - DNA, 33 bp, Homo sapien
tgacatactctactgggcagtttatatgcatgc

SEQ ID NO: 85991 - DNA, 33 bp, Homo sapien
tcaatggagatgtcccaaggaaacccaggcagg

SEQ ID NO: 85992 - DNA, 33 bp, Homo sapien
tcaatggagatgtcccgaggaaacccaggcagg

SEQ ID NO: 85993 - DNA, 33 bp, Homo sapien
aaatcatccaaatctgaaaggaagacataaaat

SEQ ID NO: 85994 - DNA, 33 bp, Homo sapien
aaatcatccaaatctgcaaggaagacataaaat

SEQ ID NO: 85995 - DNA, 33 bp, Homo sapien
ccaccattacatatgaagttacctctggccttt

SEQ ID NO: 85996 - DNA, 33 bp, Homo sapien
ccaccattacatatgatgttacctctggccttt

SEQ ID NO: 85997 - DNA, 33 bp, Homo sapien
ggctctcggctttttacatatgacttgaattat

SEQ ID NO: 85998 - DNA, 33 bp, Homo sapien
ggctctcggctttttatatatgacttgaattat

SEQ ID NO: 85999 - DNA, 33 bp, Homo sapien
tttagacctcatctcacacacagatggtctcat

SEQ ID NO: 86000 - DNA, 33 bp, Homo sapien
tttagacctcatctcatacacagatggtctcat

SEQ ID NO: 86001 - DNA, 33 bp, Homo sapien
aacattaaatcatgggaaaaaagaatcatttct

SEQ ID NO: 86002 - DNA, 33 bp, Homo sapien
aacattaaatcatggggaaaaagaatcatttct

SEQ ID NO: 86003 - DNA, 33 bp, Homo sapien
acaaggaccatgacaaaaatacagctaaccagg

SEQ ID NO: 86004 - DNA, 33 bp, Homo sapien
acaaggaccatgacaagaatacagctaaccagg

SEQ ID NO: 86005 - DNA, 33 bp, Homo sapien
gcatttccatacaccaatagcagctaaggtaag

SEQ ID NO: 86006 - DNA, 33 bp, Homo sapien
gcatttccatacaccagtagcagctaaggtaag

SEQ ID NO: 86007 - DNA, 33 bp, Homo sapien
gttcaatttctctgacaaggattttagtagaga

SEQ ID NO: 86008 - DNA, 33 bp, Homo sapien
gttcaatttctctgacgaggattttagtagaga

SEQ ID NO: 86009 - DNA, 33 bp, Homo sapien
gaagactatactattaataaagacacaagatag

SEQ ID NO: 86010 - DNA, 33 bp, Homo sapien
gaagactatactattattaaagacacaagatag

SEQ ID NO: 86011 - DNA, 33 bp, Homo sapien
ggaacagtgaggtcaacgaagccctgaaacggt

SEQ ID NO: 86012 - DNA, 33 bp, Homo sapien
ggaacagtgaggtcaaggaagccctgaaacggt

SEQ ID NO: 86013 - DNA, 33 bp, Homo sapien
atctaggttcagtcaacgtcttgagaatgagaa

SEQ ID NO: 86014 - DNA, 33 bp, Homo sapien
atctaggttcagtcaatgtcttgagaatgagaa

SEQ ID NO: 86015 - DNA, 33 bp, Homo sapien
gcctaaactaatgtgacggagacaattcagagg

SEQ ID NO: 86016 - DNA, 33 bp, Homo sapien
gcctaaactaatgtgatggagacaattcagagg

SEQ ID NO: 86017 - DNA, 33 bp, Homo sapien
actgccaaaaaaagcagaacattttgagtttca

SEQ ID NO: 86018 - DNA, 33 bp, Homo sapien
actgccaaaaaaagcataacattttgagtttca

SEQ ID NO: 86019 - DNA, 33 bp, Homo sapien
ccatctttttacaaaacgacggaatttattaca

SEQ ID NO: 86020 - DNA, 33 bp, Homo sapien
ccatctttttacaaaatgacggaatttattaca

SEQ ID NO: 86021 - DNA, 33 bp, Homo sapien
caagggaatggattccacaagggctaaaaattt

SEQ ID NO: 86022 - DNA, 33 bp, Homo sapien
caagggaatggattccgcaagggctaaaaattt

SEQ ID NO: 86023 - DNA, 33 bp, Homo sapien
tctatctcctctcctacgacatgaagccgaatt

SEQ ID NO: 86024 - DNA, 33 bp, Homo sapien
tctatctcctctcctaggacatgaagccgaatt

SEQ ID NO: 86025 - DNA, 33 bp, Homo sapien
tcacatattacccacaaccattgtgtatgtcag

SEQ ID NO: 86026 - DNA, 33 bp, Homo sapien
tcacatattacccacagccattgtgtatgtcag

SEQ ID NO: 86027 - DNA, 33 bp, Homo sapien; identical to SEQ ID NO: 86025

SEQ ID NO: 86028 - DNA, 33 bp, Homo sapien; identical to SEQ ID NO: 86026

SEQ ID NO: 86029 - DNA, 33 bp, Homo sapien
acagaagattctacctaaccactgcagaatata

SEQ ID NO: 86030 - DNA, 33 bp, Homo sapien
acagaagattctaccttaccactgcagaatata

SEQ ID NO: 86031 - DNA, 33 bp, Homo sapien
taaacctccaagattaaatgaggaaaatataga

SEQ ID NO: 86032 - DNA, 33 bp, Homo sapien
taaacctccaagattagatgaggaaaatataga

SEQ ID NO: 86033 - DNA, 33 bp, Homo sapien
ccaactgtgagaaatccacagccaataataaac

SEQ ID NO: 86034 - DNA, 33 bp, Homo sapien
ccaactgtgagaaatcgacagccaataataaac

SEQ ID NO: 86035 - DNA, 33 bp, Homo sapien
tattccaaagtctgaaaaagtctgaaatctgca

SEQ ID NO: 86036 - DNA, 33 bp, Homo sapien
tattccaaagtctgaacaagtctgaaatctgca

SEQ ID NO: 86037 - DNA, 33 bp, Homo sapien
tgctgaaggtgtcagaacaagagagcttcagca

SEQ ID NO: 86038 - DNA, 33 bp, Homo sapien
tgctgaaggtgtcagagcaagagagcttcagca

SEQ ID NO: 86039 - DNA, 33 bp, Homo sapien
tcctaggaattgttctaaatgccagtttaccac

SEQ ID NO: 86040 - DNA, 33 bp, Homo sapien
tcctaggaattgttcttaatgccagtttaccac

SEQ ID NO: 86041 - DNA, 33 bp, Homo sapien
ccctgtcattaagccacgctgaacagctgacct

SEQ ID NO: 86042 - DNA, 33 bp, Homo sapien
ccctgtcattaagccatgctgaacagctgacct

SEQ ID NO: 86043 - DNA, 33 bp, Homo sapien
acagtgaattttttcacggaaactgtgaggcag

SEQ ID NO: 86044 - DNA, 33 bp, Homo sapien
acagtgaattttttcatggaaactgtgaggcag

SEQ ID NO: 86045 - DNA, 33 bp, Homo sapien
cactgtagcaggcaataaagcagatatttgcaa

SEQ ID NO: 86046 - DNA, 33 bp, Homo sapien
cactgtagcaggcaattaagcagatatttgcaa

SEQ ID NO: 86047 - DNA, 33 bp, Homo sapien
gcacttttcacaatagccgagattttgaagcaa

SEQ ID NO: 86048 - DNA, 33 bp, Homo sapien
gcacttttcacaatagtcgagattttgaagcaa

SEQ ID NO: 86049 - DNA, 33 bp, Homo sapien
tctgcctgatcattggccattcttatgtgttcc

SEQ ID NO: 86050 - DNA, 33 bp, Homo sapien
tctgcctgatcattggtcattcttatgtgttcc

SEQ ID NO: 86051 - DNA, 33 bp, Homo sapien
tggtactgagtttgaaatggaggcataagaaga

SEQ ID NO: 86052 - DNA, 33 bp, Homo sapien
tggtactgagtttgaactggaggcataagaaga

SEQ ID NO: 86053 - DNA, 33 bp, Homo sapien
tgagaatcctggtgtaagatgcagtcaccaccg

SEQ ID NO: 86054 - DNA, 33 bp, Homo sapien
tgagaatcctggtgtaggatgcagtcaccaccg

SEQ ID NO: 86055 - DNA, 33 bp, Homo sapien
accattttggcatacacagtttgtgaatatttt

SEQ ID NO: 86056 - DNA, 33 bp, Homo sapien
accattttggcatacatagtttgtgaatatttt

SEQ ID NO: 86057 - DNA, 33 bp, Homo sapien
tgtatgttggtagagaaaaaccatatccaaacc

SEQ ID NO: 86058 - DNA, 33 bp, Homo sapien
tgtatgttggtagagacaaaccatatccaaacc

SEQ ID NO: 86059 - DNA, 33 bp, Homo sapien
gtggtagatgtgaagacaggtttcagaattatt

SEQ ID NO: 86060 - DNA, 33 bp, Homo sapien
gtggtagatgtgaagataggtttcagaattatt

SEQ ID NO: 86061 - DNA, 33 bp, Homo sapien
gtctgctggaacagaaactaaaactagccagac

SEQ ID NO: 86062 - DNA, 33 bp, Homo sapien
gtctgctggaacagaagctaaaactagccagac

SEQ ID NO: 86063 - DNA, 33 bp, Homo sapien
ctcttttgcaacgtccaattctctacacttaca

SEQ ID NO: 86064 - DNA, 33 bp, Homo sapien
ctcttttgcaacgtccgattctctacacttaca

SEQ ID NO: 86065 - DNA, 33 bp, Homo sapien
tttgttcacataccaaataagtcaaaactgctg

SEQ ID NO: 86066 - DNA, 33 bp, Homo sapien
tttgttcacataccaagtaagtcaaaactgctg

SEQ ID NO: 86067 - DNA, 33 bp, Homo sapien
ctttgtcctgttggaaaacagcatagaacaaat

SEQ ID NO: 86068 - DNA, 33 bp, Homo sapien
ctttgtcctgttggaagacagcatagaacaaat

SEQ ID NO: 86069 - DNA, 33 bp, Homo sapien
tgactactaaacctcaactttatgcctacccca

SEQ ID NO: 86070 - DNA, 33 bp, Homo sapien
tgactactaaacctcagctttatgcctacccca

SEQ ID NO: 86071 - DNA, 33 bp, Homo sapien
aacatcacatagcacagtaacagaatgaatgat

SEQ ID NO: 86072 - DNA, 33 bp, Homo sapien
aacatcacatagcacattaacagaatgaatgat

SEQ ID NO: 86073 - DNA, 33 bp, Homo sapien
gaatgtctttacctaccgaaaccagtctatgca

SEQ ID NO: 86074 - DNA, 33 bp, Homo sapien
gaatgtctttacctactgaaaccagtctatgca

SEQ ID NO: 86075 - DNA, 33 bp, Homo sapien
tgaaccctatgtctgaagccaccaaacaatcca

SEQ ID NO: 86076 - DNA, 33 bp, Homo sapien
tgaaccctatgtctgaggccaccaaacaatcca

SEQ ID NO: 86077 - DNA, 33 bp, Homo sapien
gactgagaattgcccaagagttagggagaattt

SEQ ID NO: 86078 - DNA, 33 bp, Homo sapien
gactgagaattgcccaggagttagggagaattt

SEQ ID NO: 86079 - DNA, 33 bp, Homo sapien
tgaaatgattattcacaacttgagccagatcag

SEQ ID NO: 86080 - DNA, 33 bp, Homo sapien
tgaaatgattattcacgacttgagccagatcag

SEQ ID NO: 86081 - DNA, 33 bp, Homo sapien
gtgatatccttgacaaagtagtttaggtaagtt

SEQ ID NO: 86082 - DNA, 33 bp, Homo sapien
gtgatatccttgacaatgtagtttaggtaagtt

SEQ ID NO: 86083 - DNA, 33 bp, Homo sapien
caatgctccaggaaaccagatgtacttctttct

SEQ ID NO: 86084 - DNA, 33 bp, Homo sapien
caatgctccaggaaactagatgtacttctttct

SEQ ID NO: 86085 - DNA, 33 bp, Homo sapien
cagaatggttttcagggaaagatctttgggcca

SEQ ID NO: 86086 - DNA, 33 bp, Homo sapien
cagaatggttttcaggtaaagatctttgggcca

SEQ ID NO: 86087 - DNA, 33 bp, Homo sapien
ctggctatggaggtcaaaaagaccaggagaatg

SEQ ID NO: 86088 - DNA, 33 bp, Homo sapien
ctggctatggaggtcacaaagaccaggagaatg

SEQ ID NO: 86089 - DNA, 33 bp, Homo sapien
ggtttatgagatcaacaatgataaatttgtact

SEQ ID NO: 86090 - DNA, 33 bp, Homo sapien
ggtttatgagatcaaccatgataaatttgtact

SEQ ID NO: 86091 - DNA, 33 bp, Homo sapien
tcaagtctctataggaacctgtctgtccctgca

SEQ ID NO: 86092 - DNA, 33 bp, Homo sapien
tcaagtctctataggaccctgtctgtccctgca

SEQ ID NO: 86093 - DNA, 33 bp, Homo sapien
atgtgcaggtttcttaactgggtatagcgtgtg

SEQ ID NO: 86094 - DNA, 33 bp, Homo sapien
atgtgcaggtttcttacctgggtatagcgtgtg

SEQ ID NO: 86095 - DNA, 33 bp, Homo sapien
aattgtactgtcacacaaagtcaagtgacgagc

SEQ ID NO: 86096 - DNA, 33 bp, Homo sapien
aattgtactgtcacacgaagtcaagtgacgagc

SEQ ID NO: 86097 - DNA, 33 bp, Homo sapien
tccactctagtctcaaactaaaaatagatctct

SEQ ID NO: 86098 - DNA, 33 bp, Homo sapien
tccactctagtctcaagctaaaaatagatctct

SEQ ID NO: 86099 - DNA, 33 bp, Homo sapien
gtggtctgactctgtaaatatgtccaactggct

SEQ ID NO: 86100 - DNA, 33 bp, Homo sapien
gtggtctgactctgtacatatgtccaactggct

SEQ ID NO: 86101 - DNA, 33 bp, Homo sapien
tgttttcttcttagcactatgcaacctaacatt

SEQ ID NO: 86102 - DNA, 33 bp, Homo sapien
tgttttcttcttagcattatgcaacctaacatt

SEQ ID NO: 86103 - DNA, 33 bp, Homo sapien
aattaggtaagtataacgtgtagtaaattagat

SEQ ID NO: 86104 - DNA, 33 bp, Homo sapien
aattaggtaagtataatgtgtagtaaattagat

SEQ ID NO: 86105 - DNA, 33 bp, Homo sapien
tcccactttacttctccaactgtctttttctca

SEQ ID NO: 86106 - DNA, 33 bp, Homo sapien
tcccactttacttctcgaactgtctttttctca

SEQ ID NO: 86107 - DNA, 33 bp, Homo sapien
agcattaggccacaacaatagttataaccggag

SEQ ID NO: 86108 - DNA, 33 bp, Homo sapien
agcattaggccacaacgatagttataaccggag

SEQ ID NO: 86109 - DNA, 33 bp, Homo sapien
gagccgaatcatatcactagctaagtccatggg

SEQ ID NO: 86110 - DNA, 33 bp, Homo sapien
gagccgaatcatatcagtagctaagtccatggg

SEQ ID NO: 86111 - DNA, 33 bp, Homo sapien
acttggcttattcatcactgttgaacatactcc

SEQ ID NO: 86112 - DNA, 33 bp, Homo sapien
acttggcttattcatccctgttgaacatactcc

SEQ ID NO: 86113 - DNA, 33 bp, Homo sapien
ttgaacaaaacagttacatcatttctaagagct

SEQ ID NO: 86114 - DNA, 33 bp, Homo sapien
ttgaacaaaacagttatatcatttctaagagct

SEQ ID NO: 86115 - DNA, 33 bp, Homo sapien
ctgcttgacctttgaacgctgatgtggtgcttt

SEQ ID NO: 86116 - DNA, 33 bp, Homo sapien
ctgcttgacctttgaatgctgatgtggtgcttt

SEQ ID NO: 86117 - DNA, 33 bp, Homo sapien
tggcactcagctgaaaaggaatttggggaggac

SEQ ID NO: 86118 - DNA, 33 bp, Homo sapien
tggcactcagctgaaacggaatttggggaggac

SEQ ID NO: 86119 - DNA, 33 bp, Homo sapien
gaggagtgggatttacacatcggagccgtccgc

SEQ ID NO: 86120 - DNA, 33 bp, Homo sapien
gaggagtgggatttacccatcggagccgtccgc

SEQ ID NO: 86121 - DNA, 33 bp, Homo sapien
ctttgatggataataacgcctcagtcttctacc

SEQ ID NO: 86122 - DNA, 33 bp, Homo sapien
ctttgatggataataatgcctcagtcttctacc

SEQ ID NO: 86123 - DNA, 33 bp, Homo sapien
tccttctgtacctaaaaagtttggcatttgggc

SEQ ID NO: 86124 - DNA, 33 bp, Homo sapien
tccttctgtacctaaacagtttggcatttgggc

SEQ ID NO: 86125 - DNA, 33 bp, Homo sapien
ggaaagtagttggaaaaacgcttgccactaagt

SEQ ID NO: 86126 - DNA, 33 bp, Homo sapien
ggaaagtagttggaaagacgcttgccactaagt

SEQ ID NO: 86127 - DNA, 33 bp, Homo sapien
catattgctaaatgacacatcatgtcttccctg

SEQ ID NO: 86128 - DNA, 33 bp, Homo sapien
catattgctaaatgacgcatcatgtcttccctg

SEQ ID NO: 86129 - DNA, 33 bp, Homo sapien
tgtagaatcatgagccacttaaacctccttttt

SEQ ID NO: 86130 - DNA, 33 bp, Homo sapien
tgtagaatcatgagccgcttaaacctccttttt

SEQ ID NO: 86131 - DNA, 33 bp, Homo sapien
ttttctaaacaccacaatcggactttagcacaa

SEQ ID NO: 86132 - DNA, 33 bp, Homo sapien
ttttctaaacaccacagtcggactttagcacaa

SEQ ID NO: 86133 - DNA, 33 bp, Homo sapien; identical to SEQ ID NO: 86131

SEQ ID NO: 86134 - DNA, 33 bp, Homo sapien; identical to SEQ ID NO: 86132

SEQ ID NO: 86135 - DNA, 33 bp, Homo sapien
aaggagtggctgcgtcaagataaggggttgtgg

SEQ ID NO: 86136 - DNA, 33 bp, Homo sapien
aaggagtggctgcgtcgagataaggggttgtgg

SEQ ID NO: 86137 - DNA, 33 bp, Homo sapien
atctcaaactaagtctgacagaatgtatgttcc

SEQ ID NO: 86138 - DNA, 33 bp, Homo sapien
atctcaaactaagtcttacagaatgtatgttcc

SEQ ID NO: 86139 - DNA, 33 bp, Homo sapien
agttaattcactctcccagcaaccacacaacag

SEQ ID NO: 86140 - DNA, 33 bp, Homo sapien
agttaattcactctcctagcaaccacacaacag

SEQ ID NO: 86141 - DNA, 33 bp, Homo sapien
tgtaaccaggacccacagggaatcaaaagagag

SEQ ID NO: 86142 - DNA, 33 bp, Homo sapien
tgtaaccaggacccacggggaatcaaaagagag

SEQ ID NO: 86143 - DNA, 33 bp, Homo sapien
aattaaaacaaaagcaaactcttaacatgaaat

SEQ ID NO: 86144 - DNA, 33 bp, Homo sapien
aattaaaacaaaagcagactcttaacatgaaat

SEQ ID NO: 86145 - DNA, 33 bp, Homo sapien
tgagattgctgaaatcaccttgacctgcccttt

SEQ ID NO: 86146 - DNA, 33 bp, Homo sapien
tgagattgctgaaatctccttgacctgcccttt

SEQ ID NO: 86147 - DNA, 33 bp, Homo sapien
gagttctggagggatggaatggaggaaatgagg

SEQ ID NO: 86148 - DNA, 33 bp, Homo sapien
gagttctggagggatgtaatggaggaaatgagg

SEQ ID NO: 86149 - DNA, 33 bp, Homo sapien
attgactcctttgttacattctcaaggtgcatc

SEQ ID NO: 86150 - DNA, 33 bp, Homo sapien
attgactcctttgttagattctcaaggtgcatc

SEQ ID NO: 86151 - DNA, 33 bp, Homo sapien
catgtcagttccctaaatctgagtaaatcagta

SEQ ID NO: 86152 - DNA, 33 bp, Homo sapien
catgtcagttccctaagtctgagtaaatcagta

SEQ ID NO: 86153 - DNA, 33 bp, Homo sapien
aggatatgactgtgaaatgttttgtatgttggt

SEQ ID NO: 86154 - DNA, 33 bp, Homo sapien
aggatatgactgtgaagtgttttgtatgttggt

SEQ ID NO: 86155 - DNA, 33 bp, Homo sapien
ttcttcctttagagacaagtgttatgtagaagg

SEQ ID NO: 86156 - DNA, 33 bp, Homo sapien
ttcttcctttagagactagtgttatgtagaagg

SEQ ID NO: 86157 - DNA, 33 bp, Homo sapien
cactgcaccttcctgaccccacttctcacctag

SEQ ID NO: 86158 - DNA, 33 bp, Homo sapien
cactgcaccttcctgagcccacttctcacctag

SEQ ID NO: 86159 - DNA, 33 bp, Homo sapien
agtacactaaatacaggagaggaaaggacaaat

SEQ ID NO: 86160 - DNA, 33 bp, Homo sapien
agtacactaaatacagtagaggaaaggacaaat

SEQ ID NO: 86161 - DNA, 33 bp, Homo sapien
tcccgacctcttctgaagaataaggttcatgtt

SEQ ID NO: 86162 - DNA, 33 bp, Homo sapien
tcccgacctcttctgaggaataaggttcatgtt

SEQ ID NO: 86163 - DNA, 33 bp, Homo sapien
aatataaaatcagtcaatcccagaaaaaaaatc

SEQ ID NO: 86164 - DNA, 33 bp, Homo sapien
aatataaaatcagtcagtcccagaaaaaaaatc

SEQ ID NO: 86165 - DNA, 33 bp, Homo sapien
aagtacttatgccagacgagacatagttgatat

SEQ ID NO: 86166 - DNA, 33 bp, Homo sapien
aagtacttatgccagatgagacatagttgatat

SEQ ID NO: 86167 - DNA, 33 bp, Homo sapien
catctaccaccctaaccacatttttcaacagca

SEQ ID NO: 86168 - DNA, 33 bp, Homo sapien
catctaccaccctaactacatttttcaacagca

SEQ ID NO: 86169 - DNA, 33 bp, Homo sapien
ataatagccatagaataaactgctgttgaaaaa

SEQ ID NO: 86170 - DNA, 33 bp, Homo sapien
ataatagccatagaatgaactgctgttgaaaaa

SEQ ID NO: 86171 - DNA, 33 bp, Homo sapien
aggaaaagtgtaaggaagaatttgtagaagaaa

SEQ ID NO: 86172 - DNA, 33 bp, Homo sapien
aggaaaagtgtaaggaggaatttgtagaagaaa

SEQ ID NO: 86173 - DNA, 33 bp, Homo sapien
gtttctctctgaaagcagcacttggtaccagca

SEQ ID NO: 86174 - DNA, 33 bp, Homo sapien
gtttctctctgaaagcggcacttggtaccagca

SEQ ID NO: 86175 - DNA, 33 bp, Homo sapien
ctacaggtatgagtcaacctaatgatgccacac

SEQ ID NO: 86176 - DNA, 33 bp, Homo sapien
ctacaggtatgagtcagcctaatgatgccacac

SEQ ID NO: 86177 - DNA, 33 bp, Homo sapien
cagcaactagtaaaaacggttctctctcaagat

SEQ ID NO: 86178 - DNA, 33 bp, Homo sapien
cagcaactagtaaaaatggttctctctcaagat

SEQ ID NO: 86179 - DNA, 33 bp, Homo sapien
gcacaccttttagcgggaaaccagacagaaaat

SEQ ID NO: 86180 - DNA, 33 bp, Homo sapien
gcacaccttttagcggtaaaccagacagaaaat

SEQ ID NO: 86181 - DNA, 33 bp, Homo sapien
aattagaaaatacttacctctgtctacggccat

SEQ ID NO: 86182 - DNA, 33 bp, Homo sapien
aattagaaaatacttatctctgtctacggccat

SEQ ID NO: 86183 - DNA, 33 bp, Homo sapien
agatgaggtgtcaagaaaggagaccaaggccac

SEQ ID NO: 86184 - DNA, 33 bp, Homo sapien
agatgaggtgtcaagagaggagaccaaggccac

SEQ ID NO: 86185 - DNA, 33 bp, Homo sapien
gatcagaaagcaaacaatggaacttgacacctt

SEQ ID NO: 86186 - DNA, 33 bp, Homo sapien
gatcagaaagcaaacagtggaacttgacacctt

SEQ ID NO: 86187 - DNA, 33 bp, Homo sapien
gtccttcaccaggaaaatggcagagacctccac

SEQ ID NO: 86188 - DNA, 33 bp, Homo sapien
gtccttcaccaggaaagtggcagagacctccac

SEQ ID NO: 86189 - DNA, 33 bp, Homo sapien
ccttatttcttctccactccagtataaatcttg

SEQ ID NO: 86190 - DNA, 33 bp, Homo sapien
ccttatttcttctccagtccagtataaatcttg

SEQ ID NO: 86191 - DNA, 33 bp, Homo sapien
gatggcgccgtgcaaccgagtggggaacgaatg

SEQ ID NO: 86192 - DNA, 33 bp, Homo sapien
gatggcgccgtgcaactgagtggggaacgaatg

SEQ ID NO: 86193 - DNA, 33 bp, Homo sapien
tgatgacttagctcacaagtgcagtgttgatca

SEQ ID NO: 86194 - DNA, 33 bp, Homo sapien
tgatgacttagctcacgagtgcagtgttgatca

SEQ ID NO: 86195 - DNA, 33 bp, Homo sapien
caggggccacagaataaaagtacatcagtaaac

SEQ ID NO: 86196 - DNA, 33 bp, Homo sapien
caggggccacagaatagaagtacatcagtaaac

SEQ ID NO: 86197 - DNA, 33 bp, Homo sapien
gaaagcatctgaaatgaaagtgagagtacatag

SEQ ID NO: 86198 - DNA, 33 bp, Homo sapien
gaaagcatctgaaatggaagtgagagtacatag

SEQ ID NO: 86199 - DNA, 33 bp, Homo sapien
ctgccttccagtgagacggtcagataaagcagc

SEQ ID NO: 86200 - DNA, 33 bp, Homo sapien
ctgccttccagtgagatggtcagataaagcagc

SEQ ID NO: 86201 - DNA, 33 bp, Homo sapien
cagacacatacgacccaacagtgaaaaatggga

SEQ ID NO: 86202 - DNA, 33 bp, Homo sapien
cagacacatacgacccgacagtgaaaaatggga

SEQ ID NO: 86203 - DNA, 33 bp, Homo sapien
agggcaggacgagaacacagtgatgctggatgg

SEQ ID NO: 86204 - DNA, 33 bp, Homo sapien
agggcaggacgagaacgcagtgatgctggatgg

SEQ ID NO: 86205 - DNA, 33 bp, Homo sapien
agaggcctcggatcgcactcacacagtcgttct

SEQ ID NO: 86206 - DNA, 33 bp, Homo sapien
agaggcctcggatcgcgctcacacagtcgttct

SEQ ID NO: 86207 - DNA, 33 bp, Homo sapien
ctgctcagtcttgctacgtgaactgtattttca

SEQ ID NO: 86208 - DNA, 33 bp, Homo sapien
ctgctcagtcttgctatgtgaactgtattttca

SEQ ID NO: 86209 - DNA, 33 bp, Homo sapien
acttacaggggttcgcaccgtccgccactatca

SEQ ID NO: 86210 - DNA, 33 bp, Homo sapien
acttacaggggttcgcgccgtccgccactatca

SEQ ID NO: 86211 - DNA, 33 bp, Homo sapien
gacgagagtgactaaccgcaccagtgatgtagc

SEQ ID NO: 86212 - DNA, 33 bp, Homo sapien
gacgagagtgactaacggcaccagtgatgtagc

SEQ ID NO: 86213 - DNA, 33 bp, Homo sapien
tggagcaacagccaaacgagccaaccagcacat

SEQ ID NO: 86214 - DNA, 33 bp, Homo sapien
tggagcaacagccaaatgagccaaccagcacat

SEQ ID NO: 86215 - DNA, 33 bp, Homo sapien
gccgggatacagccaccgtgaaagccatctcac

SEQ ID NO: 86216 - DNA, 33 bp, Homo sapien
gccgggatacagccactgtgaaagccatctcac

SEQ ID NO: 86217 - DNA, 33 bp, Homo sapien
agaccctctttcctccaaagtctaaagcaacat

SEQ ID NO: 86218 - DNA, 33 bp, Homo sapien
agaccctctttcctccgaagtctaaagcaacat

SEQ ID NO: 86219 - DNA, 33 bp, Homo sapien
attctgcccatttcctaaaaattgaataaaatc

SEQ ID NO: 86220 - DNA, 33 bp, Homo sapien
attctgcccatttccttaaaattgaataaaatc

SEQ ID NO: 86221 - DNA, 33 bp, Homo sapien
gcctgtgcggctctcaagagtctcagtgtgacg

SEQ ID NO: 86222 - DNA, 33 bp, Homo sapien
gcctgtgcggctctcaggagtctcagtgtgacg

SEQ ID NO: 86223 - DNA, 33 bp, Homo sapien
ggtttttgggaataaactgttggtgtatttgtt

SEQ ID NO: 86224 - DNA, 33 bp, Homo sapien
ggtttttgggaataaattgttggtgtatttgtt

SEQ ID NO: 86225 - DNA, 33 bp, Homo sapien
aatccaaccactgagaaatgttactgggtcatg

SEQ ID NO: 86226 - DNA, 33 bp, Homo sapien
aatccaaccactgagagatgttactgggtcatg

SEQ ID NO: 86227 - DNA, 33 bp, Homo sapien
caacacaaaatcagaacaacaggcttcaagaca

SEQ ID NO: 86228 - DNA, 33 bp, Homo sapien
caacacaaaatcagaataacaggcttcaagaca

SEQ ID NO: 86229 - DNA, 33 bp, Homo sapien
ctacctctcttgccaaaaaagaaacctggctcc

SEQ ID NO: 86230 - DNA, 33 bp, Homo sapien
ctacctctcttgccaagaaagaaacctggctcc

SEQ ID NO: 86231 - DNA, 33 bp, Homo sapien
ttaggatcccaaactaaaatcatcttccattta

SEQ ID NO: 86232 - DNA, 33 bp, Homo sapien
ttaggatcccaaactagaatcatcttccattta

SEQ ID NO: 86233 - DNA, 33 bp, Homo sapien
aagaccctagagcccacatgaaggacactgttc

SEQ ID NO: 86234 - DNA, 33 bp, Homo sapien
aagaccctagagcccagatgaaggacactgttc

SEQ ID NO: 86235 - DNA, 33 bp, Homo sapien
accttattgttaaaaccacgtgagcatatactc

SEQ ID NO: 86236 - DNA, 33 bp, Homo sapien
accttattgttaaaactacgtgagcatatactc

SEQ ID NO: 86237 - DNA, 33 bp, Homo sapien
tcaggtgcttggcctacacgaatgaacagaaca

SEQ ID NO: 86238 - DNA, 33 bp, Homo sapien
tcaggtgcttggcctatacgaatgaacagaaca

SEQ ID NO: 86239 - DNA, 33 bp, Homo sapien
aggggcctccgagacacccacatgagtaagaga

SEQ ID NO: 86240 - DNA, 33 bp, Homo sapien
aggggcctccgagacatccacatgagtaagaga

SEQ ID NO: 86241 - DNA, 33 bp, Homo sapien
cagaagacaacagtcacgacttcacctgcttat

SEQ ID NO: 86242 - DNA, 33 bp, Homo sapien
cagaagacaacagtcaggacttcacctgcttat

SEQ ID NO: 86243 - DNA, 33 bp, Homo sapien
gctgcaagtggcttaacgatatgttcctggaag

SEQ ID NO: 86244 - DNA, 33 bp, Homo sapien
gctgcaagtggcttaatgatatgttcctggaag

SEQ ID NO: 86245 - DNA, 33 bp, Homo sapien
ccctacacgtctgtacaggatggcactcggcgg

SEQ ID NO: 86246 - DNA, 33 bp, Homo sapien
ccctacacgtctgtacgggatggcactcggcgg

SEQ ID NO: 86247 - DNA, 33 bp, Homo sapien
ggttggttactttaaaatgctataatcgtaaaa

SEQ ID NO: 86248 - DNA, 33 bp, Homo sapien
ggttggttactttaaagtgctataatcgtaaaa

SEQ ID NO: 86249 - DNA, 33 bp, Homo sapien
acaagctggtcaactcacttttcctagtgaaag

SEQ ID NO: 86250 - DNA, 33 bp, Homo sapien
acaagctggtcaactcgcttttcctagtgaaag

SEQ ID NO: 86251 - DNA, 33 bp, Homo sapien
cttctgttgatctttcacctgttcttttgatcc

SEQ ID NO: 86252 - DNA, 33 bp, Homo sapien
cttctgttgatctttctcctgttcttttgatcc

SEQ ID NO: 86253 - DNA, 33 bp, Homo sapien
aatcactttgacagcacaaagaagtgggctaac

SEQ ID NO: 86254 - DNA, 33 bp, Homo sapien
aatcactttgacagcagaaagaagtgggctaac

SEQ ID NO: 86255 - DNA, 33 bp, Homo sapien
tacccctctgctgtgccaaacaccgagttaacg

SEQ ID NO: 86256 - DNA, 33 bp, Homo sapien
tacccctctgctgtgcgaaacaccgagttaacg

SEQ ID NO: 86257 - DNA, 33 bp, Homo sapien
cagggctacacacactaagatttcccaactgcc

SEQ ID NO: 86258 - DNA, 33 bp, Homo sapien
cagggctacacacactgagatttcccaactgcc

SEQ ID NO: 86259 - DNA, 33 bp, Homo sapien
ggctaccccactttacactcattggttccattc

SEQ ID NO: 86260 - DNA, 33 bp, Homo sapien
ggctaccccactttacgctcattggttccattc

SEQ ID NO: 86261 - DNA, 33 bp, Homo sapien
cttgagggaaacacgcaacaaacaattttaaaa

SEQ ID NO: 86262 - DNA, 33 bp, Homo sapien
cttgagggaaacacgcgacaaacaattttaaaa

SEQ ID NO: 86263 - DNA, 33 bp, Homo sapien
aactttctgcaggtaacgcacacgtcttcggaa

SEQ ID NO: 86264 - DNA, 33 bp, Homo sapien
aactttctgcaggtaatgcacacgtcttcggaa

SEQ ID NO: 86265 - DNA, 33 bp, Homo sapien
tctaagagaaggcctcaatgataaggaaaactc

SEQ ID NO: 86266 - DNA, 33 bp, Homo sapien
tctaagagaaggcctcgatgataaggaaaactc

SEQ ID NO: 86267 - DNA, 33 bp, Homo sapien
tgatggcacctgcacaaacacttgcccggaaat

SEQ ID NO: 86268 - DNA, 33 bp, Homo sapien
tgatggcacctgcacagacacttgcccggaaat

SEQ ID NO: 86269 - DNA, 33 bp, Homo sapien
aagttaagcataaaatcactgtacgacccagca

SEQ ID NO: 86270 - DNA, 33 bp, Homo sapien
aagttaagcataaaattactgtacgacccagca

SEQ ID NO: 86271 - DNA, 33 bp, Homo sapien
tatctcttaagtggcagagtttgtaagtcattc

SEQ ID NO: 86272 - DNA, 33 bp, Homo sapien
tatctcttaagtggcatagtttgtaagtcattc

SEQ ID NO: 86273 - DNA, 33 bp, Homo sapien
ttcactccctactcccaattcttgccctgaaag

SEQ ID NO: 86274 - DNA, 33 bp, Homo sapien
ttcactccctactcccgattcttgccctgaaag

SEQ ID NO: 86275 - DNA, 33 bp, Homo sapien
ccagcctgacaatgcaaagtccccaacacaagg

SEQ ID NO: 86276 - DNA, 33 bp, Homo sapien
ccagcctgacaatgcagagtccccaacacaagg

SEQ ID NO: 86277 - DNA, 33 bp, Homo sapien
gaaagagtaaggacacactggctactatgacag

SEQ ID NO: 86278 - DNA, 33 bp, Homo sapien
gaaagagtaaggacacgctggctactatgacag

SEQ ID NO: 86279 - DNA, 33 bp, Homo sapien
gttgagagagttgtaccattaaggggttgtgtg

SEQ ID NO: 86280 - DNA, 33 bp, Homo sapien
gttgagagagttgtacgattaaggggttgtgtg

SEQ ID NO: 86281 - DNA, 33 bp, Homo sapien
gatgggaatattgagaaagtgtcatcaacatta

SEQ ID NO: 86282 - DNA, 33 bp, Homo sapien
gatgggaatattgagagagtgtcatcaacatta

SEQ ID NO: 86283 - DNA, 33 bp, Homo sapien
gatcatttggaggaaaacccgcatctgtgactt

SEQ ID NO: 86284 - DNA, 33 bp, Homo sapien
gatcatttggaggaaagcccgcatctgtgactt

SEQ ID NO: 86285 - DNA, 33 bp, Homo sapien
tttagcaatccagtaacaacctgatgatcaaga

SEQ ID NO: 86286 - DNA, 33 bp, Homo sapien
tttagcaatccagtaagaacctgatgatcaaga

SEQ ID NO: 86287 - DNA, 33 bp, Homo sapien
ttctactctagtttacacagagcgcagccgggc

SEQ ID NO: 86288 - DNA, 33 bp, Homo sapien
ttctactctagtttacgcagagcgcagccgggc

SEQ ID NO: 86289 - DNA, 33 bp, Homo sapien
attaacacgttttacacatctcaaaactcacaa

SEQ ID NO: 86290 - DNA, 33 bp, Homo sapien
attaacacgttttacatatctcaaaactcacaa

SEQ ID NO: 86291 - DNA, 33 bp, Homo sapien
ggagaacagcacagagaaagtcatagggagggc

SEQ ID NO: 86292 - DNA, 33 bp, Homo sapien
ggagaacagcacagaggaagtcatagggagggc

SEQ ID NO: 86293 - DNA, 33 bp, Homo sapien
caagccagagctctgacagaaagtggttgcgcc

SEQ ID NO: 86294 - DNA, 33 bp, Homo sapien
caagccagagctctgatagaaagtggttgcgcc

SEQ ID NO: 86295 - DNA, 33 bp, Homo sapien
agttaatacatccacacccaactttctaaatga

SEQ ID NO: 86296 - DNA, 33 bp, Homo sapien
agttaatacatccacatccaactttctaaatga

SEQ ID NO: 86297 - DNA, 33 bp, Homo sapien
actttcactgggaaaaacaccatctcaagagcc

SEQ ID NO: 86298 - DNA, 33 bp, Homo sapien
actttcactgggaaaaccaccatctcaagagcc

SEQ ID NO: 86299 - DNA, 33 bp, Homo sapien
cgttcatggacgcagacgctcagtggtggggct

SEQ ID NO: 86300 - DNA, 33 bp, Homo sapien
cgttcatggacgcagaggctcagtggtggggct

SEQ ID NO: 86301 - DNA, 33 bp, Homo sapien
attatcttgttgaatcgaaatgtgaatgagtca

SEQ ID NO: 86302 - DNA, 33 bp, Homo sapien
attatcttgttgaatctaaatgtgaatgagtca

SEQ ID NO: 86303 - DNA, 33 bp, Homo sapien
acatttcaagcgaagaaaacagtggtagggcat

SEQ ID NO: 86304 - DNA, 33 bp, Homo sapien
acatttcaagcgaagagaacagtggtagggcat

SEQ ID NO: 86305 - DNA, 33 bp, Homo sapien
ggtggctggttctgcagtatttctgtgtgagat

SEQ ID NO: 86306 - DNA, 33 bp, Homo sapien
ggtggctggttctgcattatttctgtgtgagat

SEQ ID NO: 86307 - DNA, 33 bp, Homo sapien
cctgctaaggcctagaaagagtcctggaagccc

SEQ ID NO: 86308 - DNA, 33 bp, Homo sapien
cctgctaaggcctagagagagtcctggaagccc

SEQ ID NO: 86309 - DNA, 33 bp, Homo sapien
gagattacactcctccaaacagacattgcgcct

SEQ ID NO: 86310 - DNA, 33 bp, Homo sapien
gagattacactcctccgaacagacattgcgcct

SEQ ID NO: 86311 - DNA, 33 bp, Homo sapien
tcctcaaagtacccagaccaggcaagcatagag

SEQ ID NO: 86312 - DNA, 33 bp, Homo sapien
tcctcaaagtacccaggccaggcaagcatagag

SEQ ID NO: 86313 - DNA, 33 bp, Homo sapien
tcctacctaaccaagcaagaaactgaggcacag

SEQ ID NO: 86314 - DNA, 33 bp, Homo sapien
tcctacctaaccaagcgagaaactgaggcacag

SEQ ID NO: 86315 - DNA, 33 bp, Homo sapien
tagttcaacggcaggccaccaattagtacttac

SEQ ID NO: 86316 - DNA, 33 bp, Homo sapien
tagttcaacggcaggctaccaattagtacttac

SEQ ID NO: 86317 - DNA, 33 bp, Homo sapien
gtaaggaatacgctcacggaatcctgaccttct

SEQ ID NO: 86318 - DNA, 33 bp, Homo sapien
gtaaggaatacgctcatggaatcctgaccttct

SEQ ID NO: 86319 - DNA, 33 bp, Homo sapien
agataacgcggacaaaatgagaactacgcaggt

SEQ ID NO: 86320 - DNA, 33 bp, Homo sapien
agataacgcggacaaagtgagaactacgcaggt

SEQ ID NO: 86321 - DNA, 33 bp, Homo sapien
gggctggtcaccttgaacatccaggagtgtctg

SEQ ID NO: 86322 - DNA, 33 bp, Homo sapien
gggctggtcaccttgagcatccaggagtgtctg

SEQ ID NO: 86323 - DNA, 33 bp, Homo sapien
aaatccttaattgacaccaatggtctcacgagc

SEQ ID NO: 86324 - DNA, 33 bp, Homo sapien
aaatccttaattgacatcaatggtctcacgagc

SEQ ID NO: 86325 - DNA, 33 bp, Homo sapien
actcatggtacttgctaaattctgctttgctct

SEQ ID NO: 86326 - DNA, 33 bp, Homo sapien
actcatggtacttgctcaattctgctttgctct

SEQ ID NO: 86327 - DNA, 33 bp, Homo sapien
gagtattttcatctaacgttctgcggaggccca

SEQ ID NO: 86328 - DNA, 33 bp, Homo sapien
gagtattttcatctaatgttctgcggaggccca

SEQ ID NO: 86329 - DNA, 33 bp, Homo sapien
aatactctgaagcacaagaaagagagaaagaaa

SEQ ID NO: 86330 - DNA, 33 bp, Homo sapien
aatactctgaagcacaggaaagagagaaagaaa

SEQ ID NO: 86331 - DNA, 33 bp, Homo sapien
aaatgagatactaaaaaattttgactagtccaa

SEQ ID NO: 86332 - DNA, 33 bp, Homo sapien
aaatgagatactaaaacattttgactagtccaa

SEQ ID NO: 86333 - DNA, 33 bp, Homo sapien
atttcactctttaaaacctgtccagttctgctt

SEQ ID NO: 86334 - DNA, 33 bp, Homo sapien
atttcactctttaaaagctgtccagttctgctt

SEQ ID NO: 86335 - DNA, 33 bp, Homo sapien
tctattggacactataaccaattgcagaagaca

SEQ ID NO: 86336 - DNA, 33 bp, Homo sapien
tctattggacactatagccaattgcagaagaca

SEQ ID NO: 86337 - DNA, 33 bp, Homo sapien
agaaggaaacaggaaagcttgtaaaggagggtg

SEQ ID NO: 86338 - DNA, 33 bp, Homo sapien
agaaggaaacaggaaatcttgtaaaggagggtg

SEQ ID NO: 86339 - DNA, 33 bp, Homo sapien
taaaatacatgcttcacgggtttgcttttgttg

SEQ ID NO: 86340 - DNA, 33 bp, Homo sapien
taaaatacatgcttcatgggtttgcttttgttg

SEQ ID NO: 86341 - DNA, 33 bp, Homo sapien
acctccctagaatatacagtttggttttgcatg

SEQ ID NO: 86342 - DNA, 33 bp, Homo sapien
acctccctagaatatatagtttggttttgcatg

SEQ ID NO: 86343 - DNA, 33 bp, Homo sapien
ggttcttgttggcaaacacaaatggttctagtc

SEQ ID NO: 86344 - DNA, 33 bp, Homo sapien
ggttcttgttggcaaatacaaatggttctagtc

SEQ ID NO: 86345 - DNA, 33 bp, Homo sapien
gagtttccatcttgtagctcaggctgcagtgca

SEQ ID NO: 86346 - DNA, 33 bp, Homo sapien
gagtttccatcttgtatctcaggctgcagtgca

SEQ ID NO: 86347 - DNA, 33 bp, Homo sapien
ttgttgtttcacagctcaacatgaaacatcaga

SEQ ID NO: 86348 - DNA, 33 bp, Homo sapien
ttgttgtttcacagctgaacatgaaacatcaga

SEQ ID NO: 86349 - DNA, 33 bp, Homo sapien
agccatttaaataaaaatgttgccgctaaaaaa

SEQ ID NO: 86350 - DNA, 33 bp, Homo sapien
agccatttaaataaaagtgttgccgctaaaaaa

SEQ ID NO: 86351 - DNA, 33 bp, Homo sapien
gctgggtataaaggaccgtcacttaacagccat

SEQ ID NO: 86352 - DNA, 33 bp, Homo sapien
gctgggtataaaggactgtcacttaacagccat

SEQ ID NO: 86353 - DNA, 33 bp, Homo sapien
cccgcccgactctaagaaaaagctgttgctgaa

SEQ ID NO: 86354 - DNA, 33 bp, Homo sapien
cccgcccgactctaaggaaaagctgttgctgaa

SEQ ID NO: 86355 - DNA, 33 bp, Homo sapien
cacgttctcatgttcacgtgggagctaaccact

SEQ ID NO: 86356 - DNA, 33 bp, Homo sapien
cacgttctcatgttcatgtgggagctaaccact

SEQ ID NO: 86357 - DNA, 33 bp, Homo sapien
gctggggtgtgggttacgaatgaccctgtcgcc

SEQ ID NO: 86358 - DNA, 33 bp, Homo sapien
gctggggtgtgggttatgaatgaccctgtcgcc

SEQ ID NO: 86359 - DNA, 33 bp, Homo sapien
gagagaattcattgccaacaaacctgttcctga

SEQ ID NO: 86360 - DNA, 33 bp, Homo sapien
gagagaattcattgcccacaaacctgttcctga

SEQ ID NO: 86361 - DNA, 33 bp, Homo sapien
ttctctttggtatgtccatctgaattgccacca

SEQ ID NO: 86362 - DNA, 33 bp, Homo sapien
ttctctttggtatgtctatctgaattgccacca

SEQ ID NO: 86363 - DNA, 33 bp, Homo sapien
tccaggccaaacatataagagaacataggagaa

SEQ ID NO: 86364 - DNA, 33 bp, Homo sapien
tccaggccaaacatattagagaacataggagaa

SEQ ID NO: 86365 - DNA, 33 bp, Homo sapien
gccctatccaatcagcaccatagatacattttc

SEQ ID NO: 86366 - DNA, 33 bp, Homo sapien
gccctatccaatcagcgccatagatacattttc

SEQ ID NO: 86367 - DNA, 33 bp, Homo sapien
cttgttcattgagtaacctggccttgctcattg

SEQ ID NO: 86368 - DNA, 33 bp, Homo sapien
cttgttcattgagtaatctggccttgctcattg

SEQ ID NO: 86369 - DNA, 33 bp, Homo sapien
agcaaaagaatctatccgaaataaagcacagag

SEQ ID NO: 86370 - DNA, 33 bp, Homo sapien
agcaaaagaatctatctgaaataaagcacagag

SEQ ID NO: 86371 - DNA, 33 bp, Homo sapien
tggtaaatataacggcaactgatactcaatcct

SEQ ID NO: 86372 - DNA, 33 bp, Homo sapien
tggtaaatataacggcgactgatactcaatcct

SEQ ID NO: 86373 - DNA, 33 bp, Homo sapien
tggccggctgggaggacgagatggagcagaccc

SEQ ID NO: 86374 - DNA, 33 bp, Homo sapien
tggccggctgggaggatgagatggagcagaccc

SEQ ID NO: 86375 - DNA, 33 bp, Homo sapien
gggacatgatggggtcacgcattttgcagggaa

SEQ ID NO: 86376 - DNA, 33 bp, Homo sapien
gggacatgatggggtcgcgcattttgcagggaa

SEQ ID NO: 86377 - DNA, 33 bp, Homo sapien
agctatttagtctcttcaacttgctcatttcag

SEQ ID NO: 86378 - DNA, 33 bp, Homo sapien
agctatttagtctcttgaacttgctcatttcag

SEQ ID NO: 86379 - DNA, 33 bp, Homo sapien
agaaccaacagaaacgaagacatcaccttcaca

SEQ ID NO: 86380 - DNA, 33 bp, Homo sapien
agaaccaacagaaacggagacatcaccttcaca

SEQ ID NO: 86381 - DNA, 33 bp, Homo sapien
agcctggaggaaacaacgttggtagccgagaag

SEQ ID NO: 86382 - DNA, 33 bp, Homo sapien
agcctggaggaaacaatgttggtagccgagaag

SEQ ID NO: 86383 - DNA, 33 bp, Homo sapien
cctctttaacagaaacaaaagtcttgccactgc

SEQ ID NO: 86384 - DNA, 33 bp, Homo sapien
cctctttaacagaaacgaaagtcttgccactgc

SEQ ID NO: 86385 - DNA, 33 bp, Homo sapien
attccgccataaagccaaatagccgcaaataaa

SEQ ID NO: 86386 - DNA, 33 bp, Homo sapien
attccgccataaagccgaatagccgcaaataaa

SEQ ID NO: 86387 - DNA, 33 bp, Homo sapien
tttagatgccattcgagcccgaaagaccggacc

SEQ ID NO: 86388 - DNA, 33 bp, Homo sapien
tttagatgccattcgatcccgaaagaccggacc

SEQ ID NO: 86389 - DNA, 33 bp, Homo sapien
ccacaaaaatgggtcaatagcacaaaagtgttt

SEQ ID NO: 86390 - DNA, 33 bp, Homo sapien
ccacaaaaatgggtcagtagcacaaaagtgttt

SEQ ID NO: 86391 - DNA, 33 bp, Homo sapien
taagtttccatcttcactagtgtttttaacttt

SEQ ID NO: 86392 - DNA, 33 bp, Homo sapien
taagtttccatcttcattagtgtttttaacttt

SEQ ID NO: 86393 - DNA, 33 bp, Homo sapien
cagcttggtggaaacaagagggcaaaggactcc

SEQ ID NO: 86394 - DNA, 33 bp, Homo sapien
cagcttggtggaaacaggagggcaaaggactcc

SEQ ID NO: 86395 - DNA, 33 bp, Homo sapien
cctcttttgcttctacaagttgagatttaaata

SEQ ID NO: 86396 - DNA, 33 bp, Homo sapien
cctcttttgcttctacgagttgagatttaaata

SEQ ID NO: 86397 - DNA, 33 bp, Homo sapien
ttagagttggtcgacaggattaatttttatgga

SEQ ID NO: 86398 - DNA, 33 bp, Homo sapien
ttagagttggtcgacatgattaatttttatgga

SEQ ID NO: 86399 - DNA, 33 bp, Homo sapien
caatacatcgttgttacgtttgctttaaacaag

SEQ ID NO: 86400 - DNA, 33 bp, Homo sapien
caatacatcgttgttatgtttgctttaaacaag

SEQ ID NO: 86401 - DNA, 33 bp, Homo sapien
gctgttttgcttgttacagtttcaatctctttt

SEQ ID NO: 86402 - DNA, 33 bp, Homo sapien
gctgttttgcttgttatagtttcaatctctttt

SEQ ID NO: 86403 - DNA, 33 bp, Homo sapien
aatgaaggtgttctaacaggtctgtcagggata

SEQ ID NO: 86404 - DNA, 33 bp, Homo sapien
aatgaaggtgttctaataggtctgtcagggata

SEQ ID NO: 86405 - DNA, 33 bp, Homo sapien
aagtactggtgatagggcaaattattgggttcc

SEQ ID NO: 86406 - DNA, 33 bp, Homo sapien
aagtactggtgataggtcaaattattgggttcc

SEQ ID NO: 86407 - DNA, 33 bp, Homo sapien
cttcttagactaccaaacgtcttatatttggat

SEQ ID NO: 86408 - DNA, 33 bp, Homo sapien
cttcttagactaccaagcgtcttatatttggat

SEQ ID NO: 86409 - DNA, 33 bp, Homo sapien
tttatatacctcctgacggaaataccaacaata

SEQ ID NO: 86410 - DNA, 33 bp, Homo sapien
tttatatacctcctgatggaaataccaacaata

SEQ ID NO: 86411 - DNA, 33 bp, Homo sapien
actcattggattttcaaataatagcaaaaatca

SEQ ID NO: 86412 - DNA, 33 bp, Homo sapien
actcattggattttcacataatagcaaaaatca

SEQ ID NO: 86413 - DNA, 33 bp, Homo sapien
ctctgaatcagaaaccgggaaagaaaaagaatg

SEQ ID NO: 86414 - DNA, 33 bp, Homo sapien
ctctgaatcagaaacctggaaagaaaaagaatg

SEQ ID NO: 86415 - DNA, 33 bp, Homo sapien
gacataaaatcctccaactgcttcccactggtc

SEQ ID NO: 86416 - DNA, 33 bp, Homo sapien
gacataaaatcctccagctgcttcccactggtc

SEQ ID NO: 86417 - DNA, 33 bp, Homo sapien
cacctacctcccagccacgttctcttccttcag

SEQ ID NO: 86418 - DNA, 33 bp, Homo sapien
cacctacctcccagccgcgttctcttccttcag

SEQ ID NO: 86419 - DNA, 33 bp, Homo sapien
ctgcttcataaaaacaccttaaatatatacttg

SEQ ID NO: 86420 - DNA, 33 bp, Homo sapien
ctgcttcataaaaacagcttaaatatatacttg

SEQ ID NO: 86421 - DNA, 33 bp, Homo sapien
actgaaaagccacaaccatttcaacttctgtaa

SEQ ID NO: 86422 - DNA, 33 bp, Homo sapien
actgaaaagccacaacgatttcaacttctgtaa

SEQ ID NO: 86423 - DNA, 33 bp, Homo sapien
ggaatttaaaacatgcaaaagcagggagaagag

SEQ ID NO: 86424 - DNA, 33 bp, Homo sapien
ggaatttaaaacatgcgaaagcagggagaagag

SEQ ID NO: 86425 - DNA, 33 bp, Homo sapien
gtgaggcctgttaggaagtttagggtctgcagg

SEQ ID NO: 86426 - DNA, 33 bp, Homo sapien
gtgaggcctgttaggaggtttagggtctgcagg

SEQ ID NO: 86427 - DNA, 33 bp, Homo sapien
aaagaaaaataatatcaagtaggcctgacccaa

SEQ ID NO: 86428 - DNA, 33 bp, Homo sapien
aaagaaaaataatatcgagtaggcctgacccaa

SEQ ID NO: 86429 - DNA, 33 bp, Homo sapien
atgtcaaacgctgttgcagcagatgatcaattt

SEQ ID NO: 86430 - DNA, 33 bp, Homo sapien
atgtcaaacgctgttggagcagatgatcaattt

SEQ ID NO: 86431 - DNA, 33 bp, Homo sapien
gggacttacgtgtagacgaattgaatacacagt

SEQ ID NO: 86432 - DNA, 33 bp, Homo sapien
gggacttacgtgtagatgaattgaatacacagt

SEQ ID NO: 86433 - DNA, 33 bp, Homo sapien
gcaatcaaagctgacacggctgaattttccctg

SEQ ID NO: 86434 - DNA, 33 bp, Homo sapien
gcaatcaaagctgacatggctgaattttccctg

SEQ ID NO: 86435 - DNA, 33 bp, Homo sapien
tgttgcaagcagagccagagggattaggggcaa

SEQ ID NO: 86436 - DNA, 33 bp, Homo sapien
tgttgcaagcagagccggagggattaggggcaa

SEQ ID NO: 86437 - DNA, 33 bp, Homo sapien
catgtagaatgtggaaatgaatcgcagctgtta

SEQ ID NO: 86438 - DNA, 33 bp, Homo sapien
catgtagaatgtggaactgaatcgcagctgtta

SEQ ID NO: 86439 - DNA, 33 bp, Homo sapien
ccacctccctcgacaacgaatccactcccgaca

SEQ ID NO: 86440 - DNA, 33 bp, Homo sapien
ccacctccctcgacaatgaatccactcccgaca

SEQ ID NO: 86441 - DNA, 33 bp, Homo sapien
ctttggagttccatgcaccctgaacgcacctca

SEQ ID NO: 86442 - DNA, 33 bp, Homo sapien
ctttggagttccatgcgccctgaacgcacctca

SEQ ID NO: 86443 - DNA, 33 bp, Homo sapien
gtagcggttggaatcaagcttctgcaatactca

SEQ ID NO: 86444 - DNA, 33 bp, Homo sapien
gtagcggttggaatcaggcttctgcaatactca

SEQ ID NO: 86445 - DNA, 33 bp, Homo sapien
tagtacctgacctttcccaagaaaccattcact

SEQ ID NO: 86446 - DNA, 33 bp, Homo sapien
tagtacctgacctttctcaagaaaccattcact

SEQ ID NO: 86447 - DNA, 33 bp, Homo sapien
caggtactgttctgagccctaggaatccagaag

SEQ ID NO: 86448 - DNA, 33 bp, Homo sapien
caggtactgttctgagtcctaggaatccagaag

SEQ ID NO: 86449 - DNA, 33 bp, Homo sapien
aagatgaatatcaccacaggcctggactgtaac

SEQ ID NO: 86450 - DNA, 33 bp, Homo sapien
aagatgaatatcaccataggcctggactgtaac

SEQ ID NO: 86451 - DNA, 33 bp, Homo sapien
agaggtaccaggctcccattcgatgcagtttta

SEQ ID NO: 86452 - DNA, 33 bp, Homo sapien
agaggtaccaggctcctattcgatgcagtttta

SEQ ID NO: 86453 - DNA, 33 bp, Homo sapien
ctgatagaagtatagccattcctacttgctttt

SEQ ID NO: 86454 - DNA, 33 bp, Homo sapien
ctgatagaagtatagctattcctacttgctttt

SEQ ID NO: 86455 - DNA, 33 bp, Homo sapien
acacatagactgaaaacgaagagatgcaaaaag

SEQ ID NO: 86456 - DNA, 33 bp, Homo sapien
acacatagactgaaaatgaagagatgcaaaaag

SEQ ID NO: 86457 - DNA, 33 bp, Homo sapien
atcgcaagcctaataacgtaaaaaagaaggcac

SEQ ID NO: 86458 - DNA, 33 bp, Homo sapien
atcgcaagcctaataatgtaaaaaagaaggcac

SEQ ID NO: 86459 - DNA, 33 bp, Homo sapien
atctgtacaactgcaaaatgactggatctagag

SEQ ID NO: 86460 - DNA, 33 bp, Homo sapien
atctgtacaactgcaacatgactggatctagag

SEQ ID NO: 86461 - DNA, 33 bp, Homo sapien
agggctctagatatcaatgaaatatagagaagg

SEQ ID NO: 86462 - DNA, 33 bp, Homo sapien
agggctctagatatcagtgaaatatagagaagg

SEQ ID NO: 86463 - DNA, 33 bp, Homo sapien
atgaggtctaaaaaacgagctgttacttaaatg

SEQ ID NO: 86464 - DNA, 33 bp, Homo sapien
atgaggtctaaaaaactagctgttacttaaatg

SEQ ID NO: 86465 - DNA, 33 bp, Homo sapien
attgttgagctgttcaaattttcaactcctgtc

SEQ ID NO: 86466 - DNA, 33 bp, Homo sapien
attgttgagctgttcagattttcaactcctgtc

SEQ ID NO: 86467 - DNA, 33 bp, Homo sapien
tacctgagcctaaacacggttaaataccaccca

SEQ ID NO: 86468 - DNA, 33 bp, Homo sapien
tacctgagcctaaacatggttaaataccaccca

SEQ ID NO: 86469 - DNA, 33 bp, Homo sapien
caacttttcttcaaaggaggtctgaaagatcaa

SEQ ID NO: 86470 - DNA, 33 bp, Homo sapien
caacttttcttcaaagtaggtctgaaagatcaa

SEQ ID NO: 86471 - DNA, 33 bp, Homo sapien
attaggatgctcaaccagcgtagcataaatctt

SEQ ID NO: 86472 - DNA, 33 bp, Homo sapien
attaggatgctcaaccggcgtagcataaatctt

SEQ ID NO: 86473 - DNA, 33 bp, Homo sapien
taaaagccaagcataacccaaaaatgttagaaa

SEQ ID NO: 86474 - DNA, 33 bp, Homo sapien
taaaagccaagcataatccaaaaatgttagaaa

SEQ ID NO: 86475 - DNA, 33 bp, Homo sapien
ccctgttctgagatcgcccccctcacacctacc

SEQ ID NO: 86476 - DNA, 33 bp, Homo sapien
ccctgttctgagatcgtccccctcacacctacc

SEQ ID NO: 86477 - DNA, 33 bp, Homo sapien
aaaactaaagaaaccagtcgaggctgggtgagg

SEQ ID NO: 86478 - DNA, 33 bp, Homo sapien
aaaactaaagaaaccattcgaggctgggtgagg

SEQ ID NO: 86479 - DNA, 33 bp, Homo sapien
aaccaccaaatcgctacagtttaggaccccagg

SEQ ID NO: 86480 - DNA, 33 bp, Homo sapien
aaccaccaaatcgctatagtttaggaccccagg

SEQ ID NO: 86481 - DNA, 33 bp, Homo sapien
aggaactgcggggggaacagcaaacatactgat

SEQ ID NO: 86482 - DNA, 33 bp, Homo sapien
aggaactgcggggggagcagcaaacatactgat

SEQ ID NO: 86483 - DNA, 33 bp, Homo sapien
agtagcacagagacacagcaagttgccaatgtc

SEQ ID NO: 86484 - DNA, 33 bp, Homo sapien
agtagcacagagacacggcaagttgccaatgtc

SEQ ID NO: 86485 - DNA, 33 bp, Homo sapien
agcatcctacacattcacaggtaaggaaaggtg

SEQ ID NO: 86486 - DNA, 33 bp, Homo sapien
agcatcctacacattcgcaggtaaggaaaggtg

SEQ ID NO: 86487 - DNA, 33 bp, Homo sapien
taccaacaagctcttcaccgctatggaggcttt

SEQ ID NO: 86488 - DNA, 33 bp, Homo sapien
taccaacaagctcttcgccgctatggaggcttt

SEQ ID NO: 86489 - DNA, 33 bp, Homo sapien
ctccctagtttcaatgacaggataaatgttagt

SEQ ID NO: 86490 - DNA, 33 bp, Homo sapien
ctccctagtttcaatggcaggataaatgttagt

SEQ ID NO: 86491 - DNA, 33 bp, Homo sapien
gttttctttagtcctaatagaggttatcatagt

SEQ ID NO: 86492 - DNA, 33 bp, Homo sapien
gttttctttagtcctattagaggttatcatagt

SEQ ID NO: 86493 - DNA, 33 bp, Homo sapien
tcaggacctaaaccgcactgcgaggccctcacc

SEQ ID NO: 86494 - DNA, 33 bp, Homo sapien
tcaggacctaaaccgcgctgcgaggccctcacc

SEQ ID NO: 86495 - DNA, 33 bp, Homo sapien
cctgctcatccgggaaatagctctgccggtttt

SEQ ID NO: 86496 - DNA, 33 bp, Homo sapien
cctgctcatccgggaagtagctctgccggtttt

SEQ ID NO: 86497 - DNA, 33 bp, Homo sapien
acaggaatttgagagaagttgaggggttcaagg

SEQ ID NO: 86498 - DNA, 33 bp, Homo sapien
acaggaatttgagagacgttgaggggttcaagg

SEQ ID NO: 86499 - DNA, 33 bp, Homo sapien
gtacaacacctgcgtcaccaacagtcctgactt

SEQ ID NO: 86500 - DNA, 33 bp, Homo sapien
gtacaacacctgcgtcgccaacagtcctgactt

SEQ ID NO: 86501 - DNA, 33 bp, Homo sapien
atgggagtgcttttcccgcacgacatcaaacac

SEQ ID NO: 86502 - DNA, 33 bp, Homo sapien
atgggagtgcttttccggcacgacatcaaacac

SEQ ID NO: 86503 - DNA, 33 bp, Homo sapien
tgtgcccttagctcacagggaaagtaaggtttt

SEQ ID NO: 86504 - DNA, 33 bp, Homo sapien
tgtgcccttagctcacggggaaagtaaggtttt

SEQ ID NO: 86505 - DNA, 33 bp, Homo sapien
aacaggtaaagtcaaactgttggttaagtaagt

SEQ ID NO: 86506 - DNA, 33 bp, Homo sapien
aacaggtaaagtcaaagtgttggttaagtaagt

SEQ ID NO: 86507 - DNA, 33 bp, Homo sapien
gggtcattctcattctcacaaatctcactgatc

SEQ ID NO: 86508 - DNA, 33 bp, Homo sapien
gggtcattctcattcttacaaatctcactgatc

SEQ ID NO: 86509 - DNA, 33 bp, Homo sapien
gtgaccacggattagacagacggactggcagac

SEQ ID NO: 86510 - DNA, 33 bp, Homo sapien
gtgaccacggattagatagacggactggcagac

SEQ ID NO: 86511 - DNA, 33 bp, Homo sapien
ataaagtgagtgctgacaagatgggggatttat

SEQ ID NO: 86512 - DNA, 33 bp, Homo sapien
ataaagtgagtgctgataagatgggggatttat

SEQ ID NO: 86513 - DNA, 33 bp, Homo sapien
tgattaacattttacactcctgttttatcacat

SEQ ID NO: 86514 - DNA, 33 bp, Homo sapien
tgattaacattttacattcctgttttatcacat

SEQ ID NO: 86515 - DNA, 33 bp, Homo sapien
gacctatcgggaaccacgtctctctcccggcat

SEQ ID NO: 86516 - DNA, 33 bp, Homo sapien
gacctatcgggaaccatgtctctctcccggcat

SEQ ID NO: 86517 - DNA, 33 bp, Homo sapien
cagcagctgtgaagaccggggccagaggaagct

SEQ ID NO: 86518 - DNA, 33 bp, Homo sapien
cagcagctgtgaagactggggccagaggaagct

SEQ ID NO: 86519 - DNA, 33 bp, Homo sapien
gagcgaagcaatttccaccctgtgatatttgaa

SEQ ID NO: 86520 - DNA, 33 bp, Homo sapien
gagcgaagcaatttccgccctgtgatatttgaa

SEQ ID NO: 86521 - DNA, 33 bp, Homo sapien
gtaggaagggcgttgaagtccatgtttagctga

SEQ ID NO: 86522 - DNA, 33 bp, Homo sapien
gtaggaagggcgttgaggtccatgtttagctga

SEQ ID NO: 86523 - DNA, 33 bp, Homo sapien
aggaagtgggcctttcacctggctgtgttcata

SEQ ID NO: 86524 - DNA, 33 bp, Homo sapien
aggaagtgggcctttcgcctggctgtgttcata

SEQ ID NO: 86525 - DNA, 33 bp, Homo sapien
cctgggcaccttctaacgcaacagaccgcttgt

SEQ ID NO: 86526 - DNA, 33 bp, Homo sapien
cctgggcaccttctaatgcaacagaccgcttgt

SEQ ID NO: 86527 - DNA, 33 bp, Homo sapien
gcaggacaggaaaggacataagtgactgacaag

SEQ ID NO: 86528 - DNA, 33 bp, Homo sapien
gcaggacaggaaaggatataagtgactgacaag

SEQ ID NO: 86529 - DNA, 33 bp, Homo sapien
caccacggaggcgaacagctcccgagtgatccc

SEQ ID NO: 86530 - DNA, 33 bp, Homo sapien
caccacggaggcgaacggctcccgagtgatccc

SEQ ID NO: 86531 - DNA, 33 bp, Homo sapien
gagacagagtgagataataagatacagagagag

SEQ ID NO: 86532 - DNA, 33 bp, Homo sapien
gagacagagtgagatagtaagatacagagagag

SEQ ID NO: 86533 - DNA, 33 bp, Homo sapien
catgttagctgcgaggacaatgcttctgcaact

SEQ ID NO: 86534 - DNA, 33 bp, Homo sapien
catgttagctgcgagggcaatgcttctgcaact

SEQ ID NO: 86535 - DNA, 33 bp, Homo sapien
cagaagaaactgtgaacatttgcatttagaaaa

SEQ ID NO: 86536 - DNA, 33 bp, Homo sapien
cagaagaaactgtgaagatttgcatttagaaaa

SEQ ID NO: 86537 - DNA, 33 bp, Homo sapien
aaaccctctatctgaagctttgacccagggagg

SEQ ID NO: 86538 - DNA, 33 bp, Homo sapien
aaaccctctatctgaatctttgacccagggagg

SEQ ID NO: 86539 - DNA, 33 bp, Homo sapien
cacccagtagttttaaatatcttcatctgctgc

SEQ ID NO: 86540 - DNA, 33 bp, Homo sapien
cacccagtagttttaagtatcttcatctgctgc

SEQ ID NO: 86541 - DNA, 33 bp, Homo sapien
aacacaaacttctagccgccccacgaggcgcta

SEQ ID NO: 86542 - DNA, 33 bp, Homo sapien
aacacaaacttctagcggccccacgaggcgcta

SEQ ID NO: 86543 - DNA, 33 bp, Homo sapien
atgcccagatgtcatcaatgtttgcctcaaagg

SEQ ID NO: 86544 - DNA, 33 bp, Homo sapien
atgcccagatgtcatcgatgtttgcctcaaagg

SEQ ID NO: 86545 - DNA, 33 bp, Homo sapien
gatcaattccccgaaggctacgatttctgagca

SEQ ID NO: 86546 - DNA, 33 bp, Homo sapien
gatcaattccccgaagtctacgatttctgagca

SEQ ID NO: 86547 - DNA, 33 bp, Homo sapien
tgatattgtttggtgtgaatctctagaggccag

SEQ ID NO: 86548 - DNA, 33 bp, Homo sapien
tgatattgtttggtgttaatctctagaggccag

SEQ ID NO: 86549 - DNA, 33 bp, Homo sapien
ataaacttgactgctactaaaagtatgaacact

SEQ ID NO: 86550 - DNA, 33 bp, Homo sapien
ataaacttgactgctattaaaagtatgaacact

SEQ ID NO: 86551 - DNA, 33 bp, Homo sapien
atcctcctgctcagccaacaacatgactctcac

SEQ ID NO: 86552 - DNA, 33 bp, Homo sapien
atcctcctgctcagccgacaacatgactctcac

SEQ ID NO: 86553 - DNA, 33 bp, Homo sapien
acttgtgaaggagaaacttgctcctaattgtgg

SEQ ID NO: 86554 - DNA, 33 bp, Homo sapien
acttgtgaaggagaaatttgctcctaattgtgg

SEQ ID NO: 86555 - DNA, 33 bp, Homo sapien
tcaccttgtctggctccatccacaactaccgct

SEQ ID NO: 86556 - DNA, 33 bp, Homo sapien
tcaccttgtctggctctatccacaactaccgct

SEQ ID NO: 86557 - DNA, 33 bp, Homo sapien
gtttttcttaagcccaaataacacatggagtgt

SEQ ID NO: 86558 - DNA, 33 bp, Homo sapien
gtttttcttaagcccagataacacatggagtgt

SEQ ID NO: 86559 - DNA, 33 bp, Homo sapien
ccccttacagtgtttacagcttgaaatggtctc

SEQ ID NO: 86560 - DNA, 33 bp, Homo sapien
ccccttacagtgtttatagcttgaaatggtctc

SEQ ID NO: 86561 - DNA, 33 bp, Homo sapien
ttcagcgtttgagacagcctcgaaatgggcttc

SEQ ID NO: 86562 - DNA, 33 bp, Homo sapien
ttcagcgtttgagacatcctcgaaatgggcttc

SEQ ID NO: 86563 - DNA, 33 bp, Homo sapien
ttttaaatgtccatcaagaacaatgcagggaca

SEQ ID NO: 86564 - DNA, 33 bp, Homo sapien
ttttaaatgtccatcaggaacaatgcagggaca

SEQ ID NO: 86565 - DNA, 33 bp, Homo sapien
cagtcaattaacacagaattctttccattaatt

SEQ ID NO: 86566 - DNA, 33 bp, Homo sapien
cagtcaattaacacaggattctttccattaatt

SEQ ID NO: 86567 - DNA, 33 bp, Homo sapien
ctccgagaacccgtgacaccaattgctttaaaa

SEQ ID NO: 86568 - DNA, 33 bp, Homo sapien
ctccgagaacccgtgataccaattgctttaaaa

SEQ ID NO: 86569 - DNA, 33 bp, Homo sapien
ctgtatctacctttcacggcattggaagagcac

SEQ ID NO: 86570 - DNA, 33 bp, Homo sapien
ctgtatctacctttcatggcattggaagagcac

SEQ ID NO: 86571 - DNA, 33 bp, Homo sapien
accagctcctggtaaacattggtccagttgcct

SEQ ID NO: 86572 - DNA, 33 bp, Homo sapien
accagctcctggtaaatattggtccagttgcct

SEQ ID NO: 86573 - DNA, 33 bp, Homo sapien
aggacagctctctgatcaataacgctaagaaag

SEQ ID NO: 86574 - DNA, 33 bp, Homo sapien
aggacagctctctgattaataacgctaagaaag

SEQ ID NO: 86575 - DNA, 33 bp, Homo sapien
taacacccatgaatcacccagaatcggatacca

SEQ ID NO: 86576 - DNA, 33 bp, Homo sapien
taacacccatgaatcatccagaatcggatacca

SEQ ID NO: 86577 - DNA, 33 bp, Homo sapien
aacttccagggcccaactcatcctcttagctca

SEQ ID NO: 86578 - DNA, 33 bp, Homo sapien
aacttccagggcccaagtcatcctcttagctca

SEQ ID NO: 86579 - DNA, 33 bp, Homo sapien
cttttccgttaagcacaggaatgcacagctcat

SEQ ID NO: 86580 - DNA, 33 bp, Homo sapien
cttttccgttaagcacgggaatgcacagctcat

SEQ ID NO: 86581 - DNA, 33 bp, Homo sapien
agtctgaggcaacagcacattcaaaggttaagt

SEQ ID NO: 86582 - DNA, 33 bp, Homo sapien
agtctgaggcaacagcgcattcaaaggttaagt

SEQ ID NO: 86583 - DNA, 33 bp, Homo sapien
agacagacagatgtcaacacacacaaccgtcaa

SEQ ID NO: 86584 - DNA, 33 bp, Homo sapien
agacagacagatgtcagcacacacaaccgtcaa

SEQ ID NO: 86585 - DNA, 33 bp, Homo sapien
tcagcttaacacacgcacgccgatagtggtgaa

SEQ ID NO: 86586 - DNA, 33 bp, Homo sapien
tcagcttaacacacgcccgccgatagtggtgaa

SEQ ID NO: 86587 - DNA, 33 bp, Homo sapien
agtagagtgacaattaataatcctgcgacagta

SEQ ID NO: 86588 - DNA, 33 bp, Homo sapien
agtagagtgacaattactaatcctgcgacagta

SEQ ID NO: 86589 - DNA, 33 bp, Homo sapien
aaaacctcactttcaagagacaacatctgctca

SEQ ID NO: 86590 - DNA, 33 bp, Homo sapien
aaaacctcactttcaatagacaacatctgctca

SEQ ID NO: 86591 - DNA, 33 bp, Homo sapien
cgactatcccatgtgcaacgggaattttttttt

SEQ ID NO: 86592 - DNA, 33 bp, Homo sapien
cgactatcccatgtgcgacgggaattttttttt

SEQ ID NO: 86593 - DNA, 33 bp, Homo sapien
ggagaatcattatccaacatcaaataaaaatgg

SEQ ID NO: 86594 - DNA, 33 bp, Homo sapien
ggagaatcattatccatcatcaaataaaaatgg

SEQ ID NO: 86595 - DNA, 33 bp, Homo sapien
tgtccactctattgccagaccgtggtgtcatct

SEQ ID NO: 86596 - DNA, 33 bp, Homo sapien
tgtccactctattgccggaccgtggtgtcatct

SEQ ID NO: 86597 - DNA, 33 bp, Homo sapien
ctgttgttggaatgataataatccgtcctggca

SEQ ID NO: 86598 - DNA, 33 bp, Homo sapien
ctgttgttggaatgatgataatccgtcctggca

SEQ ID NO: 86599 - DNA, 33 bp, Homo sapien
actcacttaggaatctcacattctggattctta

SEQ ID NO: 86600 - DNA, 33 bp, Homo sapien
actcacttaggaatctgacattctggattctta

SEQ ID NO: 86601 - DNA, 33 bp, Homo sapien
gtgacgaaaacagagtcaagaataaggccagat

SEQ ID NO: 86602 - DNA, 33 bp, Homo sapien
gtgacgaaaacagagtgaagaataaggccagat

SEQ ID NO: 86603 - DNA, 33 bp, Homo sapien
tggcaatacacaccaaaaactttagaaacgttt

SEQ ID NO: 86604 - DNA, 33 bp, Homo sapien
tggcaatacacaccaataactttagaaacgttt

SEQ ID NO: 86605 - DNA, 33 bp, Homo sapien
ggatattctaatggcagtcgatggctcttaggc

SEQ ID NO: 86606 - DNA, 33 bp, Homo sapien
ggatattctaatggcattcgatggctcttaggc

SEQ ID NO: 86607 - DNA, 33 bp, Homo sapien
gtctttctatgaactcggaaaagtaaccatttc

SEQ ID NO: 86608 - DNA, 33 bp, Homo sapien
gtctttctatgaactctgaaaagtaaccatttc

SEQ ID NO: 86609 - DNA, 33 bp, Homo sapien
cagacagctgccgagacgctctctgtcgtgctg

SEQ ID NO: 86610 - DNA, 33 bp, Homo sapien
cagacagctgccgagatgctctctgtcgtgctg

SEQ ID NO: 86611 - DNA, 33 bp, Homo sapien
gcatatcatgcaatcgaaggtcaccagctccaa

SEQ ID NO: 86612 - DNA, 33 bp, Homo sapien
gcatatcatgcaatcggaggtcaccagctccaa

SEQ ID NO: 86613 - DNA, 33 bp, Homo sapien
tcgagaaacattcaggaaacagtgactcctgac

SEQ ID NO: 86614 - DNA, 33 bp, Homo sapien
tcgagaaacattcagggaacagtgactcctgac

SEQ ID NO: 86615 - DNA, 33 bp, Homo sapien
aatgagctagtgggaacgtagattagctcggcc

SEQ ID NO: 86616 - DNA, 33 bp, Homo sapien
aatgagctagtgggaatgtagattagctcggcc

SEQ ID NO: 86617 - DNA, 33 bp, Homo sapien
cagtatctgttgctcccccatttgtggccatag

SEQ ID NO: 86618 - DNA, 33 bp, Homo sapien
cagtatctgttgctcctccatttgtggccatag

SEQ ID NO: 86619 - DNA, 33 bp, Homo sapien
ttgttcgagtgtctacaagcaacctctgttatt

SEQ ID NO: 86620 - DNA, 33 bp, Homo sapien
ttgttcgagtgtctacgagcaacctctgttatt

SEQ ID NO: 86621 - DNA, 33 bp, Homo sapien
gaagtcagtgtgcaccagccttatgttcctgcc

SEQ ID NO: 86622 - DNA, 33 bp, Homo sapien
gaagtcagtgtgcaccggccttatgttcctgcc

SEQ ID NO: 86623 - DNA, 33 bp, Homo sapien
ctacgccgagtaaccaatggaaatctctagagg

SEQ ID NO: 86624 - DNA, 33 bp, Homo sapien
ctacgccgagtaaccagtggaaatctctagagg

SEQ ID NO: 86625 - DNA, 33 bp, Homo sapien
ctgggaaatgaaagcacactccacggggtggga

SEQ ID NO: 86626 - DNA, 33 bp, Homo sapien
ctgggaaatgaaagcatactccacggggtggga

SEQ ID NO: 86627 - DNA, 33 bp, Homo sapien
tgggtccgccttctaacctgcgattaccttcac

SEQ ID NO: 86628 - DNA, 33 bp, Homo sapien
tgggtccgccttctaagctgcgattaccttcac

SEQ ID NO: 86629 - DNA, 33 bp, Homo sapien
tacctgaaaacactgcaacattacaggtctttt

SEQ ID NO: 86630 - DNA, 33 bp, Homo sapien
tacctgaaaacactgcgacattacaggtctttt

SEQ ID NO: 86631 - DNA, 33 bp, Homo sapien
cattcaccagcgagggcagtatggacccagcag

SEQ ID NO: 86632 - DNA, 33 bp, Homo sapien
cattcaccagcgagggtagtatggacccagcag

SEQ ID NO: 86633 - DNA, 33 bp, Homo sapien
tgagagtcgtaggacactgagtcaggaagaggc

SEQ ID NO: 86634 - DNA, 33 bp, Homo sapien
tgagagtcgtaggacattgagtcaggaagaggc

SEQ ID NO: 86635 - DNA, 33 bp, Homo sapien
gtcataggacgatcatcagcaatttgaaaactc

SEQ ID NO: 86636 - DNA, 33 bp, Homo sapien
gtcataggacgatcatgagcaatttgaaaactc

SEQ ID NO: 86637 - DNA, 33 bp, Homo sapien
caatcatacctcaaacccaccattccttaatct

SEQ ID NO: 86638 - DNA, 33 bp, Homo sapien
caatcatacctcaaactcaccattccttaatct

SEQ ID NO: 86639 - DNA, 33 bp, Homo sapien
cccattttacattcccagagggctctcatttcc

SEQ ID NO: 86640 - DNA, 33 bp, Homo sapien
cccattttacattcccggagggctctcatttcc

SEQ ID NO: 86641 - DNA, 33 bp, Homo sapien
gcatgaaactggaggaactcatcctaagtgaaa

SEQ ID NO: 86642 - DNA, 33 bp, Homo sapien
gcatgaaactggaggacctcatcctaagtgaaa

SEQ ID NO: 86643 - DNA, 33 bp, Homo sapien
ttagcagagtggggcacagtgagttttcagttc

SEQ ID NO: 86644 - DNA, 33 bp, Homo sapien
ttagcagagtggggcatagtgagttttcagttc

SEQ ID NO: 86645 - DNA, 33 bp, Homo sapien
agacccatggtcctcaagagcagatgagttttt

SEQ ID NO: 86646 - DNA, 33 bp, Homo sapien
agacccatggtcctcacgagcagatgagttttt

SEQ ID NO: 86647 - DNA, 33 bp, Homo sapien
tttagatagaagtgcaaccatttgaagacatac

SEQ ID NO: 86648 - DNA, 33 bp, Homo sapien
tttagatagaagtgcatccatttgaagacatac

SEQ ID NO: 86649 - DNA, 33 bp, Homo sapien
gatgccctgaaaatcaatctgcagcccactcca

SEQ ID NO: 86650 - DNA, 33 bp, Homo sapien
gatgccctgaaaatcagtctgcagcccactcca

SEQ ID NO: 86651 - DNA, 33 bp, Homo sapien
taagccctcccactcaagcaaattaaaaccatc

SEQ ID NO: 86652 - DNA, 33 bp, Homo sapien
taagccctcccactcaggcaaattaaaaccatc

SEQ ID NO: 86653 - DNA, 33 bp, Homo sapien
ggagggaagaaggcctaagaatcatcactgtct

SEQ ID NO: 86654 - DNA, 33 bp, Homo sapien
ggagggaagaaggcctgagaatcatcactgtct

SEQ ID NO: 86655 - DNA, 33 bp, Homo sapien
gtgtccccatttctaccgaagagcggcggcttc

SEQ ID NO: 86656 - DNA, 33 bp, Homo sapien
gtgtccccatttctactgaagagcggcggcttc

SEQ ID NO: 86657 - DNA, 33 bp, Homo sapien
agtgatctccttttaacgtcgtaatatttctag

SEQ ID NO: 86658 - DNA, 33 bp, Homo sapien
agtgatctccttttaatgtcgtaatatttctag

SEQ ID NO: 86659 - DNA, 33 bp, Homo sapien
acaaagtaactgctcaaacatgaaaatcacaag

SEQ ID NO: 86660 - DNA, 33 bp, Homo sapien
acaaagtaactgctcagacatgaaaatcacaag

SEQ ID NO: 86661 - DNA, 33 bp, Homo sapien
agagaggaaggagaaccgagcggcgcagggcag

SEQ ID NO: 86662 - DNA, 33 bp, Homo sapien
agagaggaaggagaacggagcggcgcagggcag

SEQ ID NO: 86663 - DNA, 33 bp, Homo sapien
aaggctgaccagtgaactctgataaattgctgt

SEQ ID NO: 86664 - DNA, 33 bp, Homo sapien
aaggctgaccagtgaattctgataaattgctgt

SEQ ID NO: 86665 - DNA, 33 bp, Homo sapien
gcagatggagcccaccaagtctccctagaaaca

SEQ ID NO: 86666 - DNA, 33 bp, Homo sapien
gcagatggagcccaccgagtctccctagaaaca

SEQ ID NO: 86667 - DNA, 33 bp, Homo sapien
gttgactcctgacggcacttactccaccactgc

SEQ ID NO: 86668 - DNA, 33 bp, Homo sapien
gttgactcctgacggcgcttactccaccactgc

SEQ ID NO: 86669 - DNA, 33 bp, Homo sapien
tcaatctcagggataacttaaaaaatcaggccc

SEQ ID NO: 86670 - DNA, 33 bp, Homo sapien
tcaatctcagggataagttaaaaaatcaggccc

SEQ ID NO: 86671 - DNA, 33 bp, Homo sapien
aagacaaacattgtcaagaacagaaaggtggtg

SEQ ID NO: 86672 - DNA, 33 bp, Homo sapien
aagacaaacattgtcaggaacagaaaggtggtg

SEQ ID NO: 86673 - DNA, 33 bp, Homo sapien
cctcaaacatcctcccaacttctctggttcgta

SEQ ID NO: 86674 - DNA, 33 bp, Homo sapien
cctcaaacatcctcccgacttctctggttcgta

SEQ ID NO: 86675 - DNA, 33 bp, Homo sapien
attataaagatggttacaatactacaaagtatc

SEQ ID NO: 86676 - DNA, 33 bp, Homo sapien
attataaagatggttagaatactacaaagtatc

SEQ ID NO: 86677 - DNA, 33 bp, Homo sapien
taaagcaaaaatgtaaaacttgaaatggcagtt

SEQ ID NO: 86678 - DNA, 33 bp, Homo sapien
taaagcaaaaatgtaatacttgaaatggcagtt

SEQ ID NO: 86679 - DNA, 33 bp, Homo sapien
tgaatgacccactataaagttttgtcatttaca

SEQ ID NO: 86680 - DNA, 33 bp, Homo sapien
tgaatgacccactatagagttttgtcatttaca

SEQ ID NO: 86681 - DNA, 33 bp, Homo sapien
gaagaacaaaaacacaaccttatttcagccttc

SEQ ID NO: 86682 - DNA, 33 bp, Homo sapien
gaagaacaaaaacacagccttatttcagccttc

SEQ ID NO: 86683 - DNA, 33 bp, Homo sapien
gctctaagccattccacgcgttgctgtaggtag

SEQ ID NO: 86684 - DNA, 33 bp, Homo sapien
gctctaagccattccatgcgttgctgtaggtag

SEQ ID NO: 86685 - DNA, 33 bp, Homo sapien
tgttcttgttcagtcccctttgtgatcagtttc

SEQ ID NO: 86686 - DNA, 33 bp, Homo sapien
tgttcttgttcagtcctctttgtgatcagtttc

SEQ ID NO: 86687 - DNA, 33 bp, Homo sapien
agaggtgttgctggtacgcacattctgggtggc

SEQ ID NO: 86688 - DNA, 33 bp, Homo sapien
agaggtgttgctggtatgcacattctgggtggc

SEQ ID NO: 86689 - DNA, 33 bp, Homo sapien
aattcaatccacactacaccatcttgccctcag

SEQ ID NO: 86690 - DNA, 33 bp, Homo sapien
aattcaatccacactataccatcttgccctcag

SEQ ID NO: 86691 - DNA, 33 bp, Homo sapien
ttgatcgctctgtgcaatcactttttgcctgtg

SEQ ID NO: 86692 - DNA, 33 bp, Homo sapien
ttgatcgctctgtgcattcactttttgcctgtg

SEQ ID NO: 86693 - DNA, 33 bp, Homo sapien
taatttctgaacccagcctgggtgccacaagtg

SEQ ID NO: 86694 - DNA, 33 bp, Homo sapien
taatttctgaacccagtctgggtgccacaagtg

SEQ ID NO: 86695 - DNA, 33 bp, Homo sapien
ttgcaggatcgggcaacccaagtttcacagcca

SEQ ID NO: 86696 - DNA, 33 bp, Homo sapien
ttgcaggatcgggcaatccaagtttcacagcca

SEQ ID NO: 86697 - DNA, 33 bp, Homo sapien
ccacaagtgcaagttaggaatcatgcttacttt

SEQ ID NO: 86698 - DNA, 33 bp, Homo sapien
ccacaagtgcaagttatgaatcatgcttacttt

SEQ ID NO: 86699 - DNA, 33 bp, Homo sapien
acgtccgctcctcacaatggaatattctgcatc

SEQ ID NO: 86700 - DNA, 33 bp, Homo sapien
acgtccgctcctcacactggaatattctgcatc

SEQ ID NO: 86701 - DNA, 33 bp, Homo sapien
tgtaaattgctacaaaatgagagttattgttat

SEQ ID NO: 86702 - DNA, 33 bp, Homo sapien
tgtaaattgctacaaagtgagagttattgttat

SEQ ID NO: 86703 - DNA, 33 bp, Homo sapien
ggagagatcagcaagaagaccatgaatcaagtg

SEQ ID NO: 86704 - DNA, 33 bp, Homo sapien
ggagagatcagcaagaggaccatgaatcaagtg

SEQ ID NO: 86705 - DNA, 33 bp, Homo sapien
gaattgccaataaaaaacaaccagttagaagat

SEQ ID NO: 86706 - DNA, 33 bp, Homo sapien
gaattgccaataaaaagcaaccagttagaagat

SEQ ID NO: 86707 - DNA, 33 bp, Homo sapien
gcaataaaaactgcaaacgtgaggaaacttcca

SEQ ID NO: 86708 - DNA, 33 bp, Homo sapien
gcaataaaaactgcaatcgtgaggaaacttcca

SEQ ID NO: 86709 - DNA, 33 bp, Homo sapien
gtgtacgcgggcattacgtagccagcccggccc

SEQ ID NO: 86710 - DNA, 33 bp, Homo sapien
gtgtacgcgggcattatgtagccagcccggccc

SEQ ID NO: 86711 - DNA, 33 bp, Homo sapien
gtatccagtgtagacagtatcaaagtcttggta

SEQ ID NO: 86712 - DNA, 33 bp, Homo sapien
gtatccagtgtagacattatcaaagtcttggta

SEQ ID NO: 86713 - DNA, 33 bp, Homo sapien
atcttagcactgcacactccatgttgacatgag

SEQ ID NO: 86714 - DNA, 33 bp, Homo sapien
atcttagcactgcacattccatgttgacatgag

SEQ ID NO: 86715 - DNA, 33 bp, Homo sapien
aggcactctgtgaggaaaggggttcccaagcca

SEQ ID NO: 86716 - DNA, 33 bp, Homo sapien
aggcactctgtgaggataggggttcccaagcca

SEQ ID NO: 86717 - DNA, 33 bp, Homo sapien
cggatccatcgctctcactgctggagcacttgc

SEQ ID NO: 86718 - DNA, 33 bp, Homo sapien
cggatccatcgctctcgctgctggagcacttgc

SEQ ID NO: 86719 - DNA, 33 bp, Homo sapien
aagcaaatgtgctaccaagttaaaaccgcatat

SEQ ID NO: 86720 - DNA, 33 bp, Homo sapien
aagcaaatgtgctaccgagttaaaaccgcatat

SEQ ID NO: 86721 - DNA, 33 bp, Homo sapien
taagacctcgatttacacagaaatgtttaattt

SEQ ID NO: 86722 - DNA, 33 bp, Homo sapien
taagacctcgatttacgcagaaatgtttaattt

SEQ ID NO: 86723 - DNA, 33 bp, Homo sapien
gcagaagcagtggataagcgcccatggtggcat

SEQ ID NO: 86724 - DNA, 33 bp, Homo sapien
gcagaagcagtggataggcgcccatggtggcat

SEQ ID NO: 86725 - DNA, 33 bp, Homo sapien
gttgcccgaccgaaacacccctctcagagctca

SEQ ID NO: 86726 - DNA, 33 bp, Homo sapien
gttgcccgaccgaaacgcccctctcagagctca

SEQ ID NO: 86727 - DNA, 33 bp, Homo sapien
tcatctgctgccaagaaactgggttcccttgag

SEQ ID NO: 86728 - DNA, 33 bp, Homo sapien
tcatctgctgccaagacactgggttcccttgag

SEQ ID NO: 86729 - DNA, 33 bp, Homo sapien
ccaagcatctggtagacgagagagaagtgggca

SEQ ID NO: 86730 - DNA, 33 bp, Homo sapien
ccaagcatctggtagaggagagagaagtgggca

SEQ ID NO: 86731 - DNA, 33 bp, Homo sapien
tctctcaaacaggaaacgaaacacaactggcaa

SEQ ID NO: 86732 - DNA, 33 bp, Homo sapien
tctctcaaacaggaaatgaaacacaactggcaa

SEQ ID NO: 86733 - DNA, 33 bp, Homo sapien
acatagctacttccgaaccaatacctctttgca

SEQ ID NO: 86734 - DNA, 33 bp, Homo sapien
acatagctacttccgacccaatacctctttgca

SEQ ID NO: 86735 - DNA, 33 bp, Homo sapien
catagctttttgaaatgaacagagaaatggacc

SEQ ID NO: 86736 - DNA, 33 bp, Homo sapien
catagctttttgaaattaacagagaaatggacc

SEQ ID NO: 86737 - DNA, 33 bp, Homo sapien
agccaatcactgggacaacgagtactgctgacg

SEQ ID NO: 86738 - DNA, 33 bp, Homo sapien
agccaatcactgggaccacgagtactgctgacg

SEQ ID NO: 86739 - DNA, 33 bp, Homo sapien
gtcccggagacattcacagccggaagcccggca

SEQ ID NO: 86740 - DNA, 33 bp, Homo sapien
gtcccggagacattcagagccggaagcccggca

SEQ ID NO: 86741 - DNA, 33 bp, Homo sapien
gggacacaatgtaccaaatagacaggtgctctg

SEQ ID NO: 86742 - DNA, 33 bp, Homo sapien
gggacacaatgtaccacatagacaggtgctctg

SEQ ID NO: 86743 - DNA, 33 bp, Homo sapien
cagtttctgcctcaaaaatcctgacaaacattt

SEQ ID NO: 86744 - DNA, 33 bp, Homo sapien
cagtttctgcctcaaagatcctgacaaacattt

SEQ ID NO: 86745 - DNA, 33 bp, Homo sapien
ctctggtttaaacgcacagagtcattttgttct

SEQ ID NO: 86746 - DNA, 33 bp, Homo sapien
ctctggtttaaacgcagagagtcattttgttct

SEQ ID NO: 86747 - DNA, 33 bp, Homo sapien
tgatgaaattttgttgaatgaatataaggccac

SEQ ID NO: 86748 - DNA, 33 bp, Homo sapien
tgatgaaattttgttggatgaatataaggccac

SEQ ID NO: 86749 - DNA, 33 bp, Homo sapien
ctgggctgattaaccacggctttctcccttttg

SEQ ID NO: 86750 - DNA, 33 bp, Homo sapien
ctgggctgattaaccatggctttctcccttttg

SEQ ID NO: 86751 - DNA, 33 bp, Homo sapien
gaaaatgccctcaaaccggctgtttccttcatg

SEQ ID NO: 86752 - DNA, 33 bp, Homo sapien
gaaaatgccctcaaactggctgtttccttcatg

SEQ ID NO: 86753 - DNA, 33 bp, Homo sapien
aagttcacctcgttcaaatttccatcctatggg

SEQ ID NO: 86754 - DNA, 33 bp, Homo sapien
aagttcacctcgttcacatttccatcctatggg

SEQ ID NO: 86755 - DNA, 33 bp, Homo sapien
tagaaataaagcctcacgcaggtttcaaagtcg

SEQ ID NO: 86756 - DNA, 33 bp, Homo sapien
tagaaataaagcctcatgcaggtttcaaagtcg

SEQ ID NO: 86757 - DNA, 33 bp, Homo sapien
ctgatccatcccgctcactatccacctgcctcc

SEQ ID NO: 86758 - DNA, 33 bp, Homo sapien
ctgatccatcccgctcgctatccacctgcctcc

SEQ ID NO: 86759 - DNA, 33 bp, Homo sapien
attgtgactcagctgtaaagagtacatgaggaa

SEQ ID NO: 86760 - DNA, 33 bp, Homo sapien
attgtgactcagctgttaagagtacatgaggaa

SEQ ID NO: 86761 - DNA, 33 bp, Homo sapien
tcacagacacagagcacctcacttttctaagtg

SEQ ID NO: 86762 - DNA, 33 bp, Homo sapien
tcacagacacagagcatctcacttttctaagtg

SEQ ID NO: 86763 - DNA, 33 bp, Homo sapien
agttatccctgttcacaaaaacagtctccactc

SEQ ID NO: 86764 - DNA, 33 bp, Homo sapien
agttatccctgttcacgaaaacagtctccactc

SEQ ID NO: 86765 - DNA, 33 bp, Homo sapien
tcatgaacacaaagaaagaccaatacacaccct

SEQ ID NO: 86766 - DNA, 33 bp, Homo sapien
tcatgaacacaaagaaggaccaatacacaccct

SEQ ID NO: 86767 - DNA, 33 bp, Homo sapien
atgaggcagtctgaaacggttataaggtgtata

SEQ ID NO: 86768 - DNA, 33 bp, Homo sapien
atgaggcagtctgaaatggttataaggtgtata

SEQ ID NO: 86769 - DNA, 33 bp, Homo sapien
ccaatacactgactagaagcagggatagaacct

SEQ ID NO: 86770 - DNA, 33 bp, Homo sapien
ccaatacactgactaggagcagggatagaacct

SEQ ID NO: 86771 - DNA, 33 bp, Homo sapien
ccattctacaggtttacgtacaggctcattacc

SEQ ID NO: 86772 - DNA, 33 bp, Homo sapien
ccattctacaggtttatgtacaggctcattacc

SEQ ID NO: 86773 - DNA, 33 bp, Homo sapien
tggtggtgattgtcaacgtaggttcatcgacta

SEQ ID NO: 86774 - DNA, 33 bp, Homo sapien
tggtggtgattgtcaatgtaggttcatcgacta

SEQ ID NO: 86775 - DNA, 33 bp, Homo sapien
tttctatgcctgataccgagctcggaattttgg

SEQ ID NO: 86776 - DNA, 33 bp, Homo sapien
tttctatgcctgatactgagctcggaattttgg

SEQ ID NO: 86777 - DNA, 33 bp, Homo sapien
tccacacacatatgcaaatctgtacatacacac

SEQ ID NO: 86778 - DNA, 33 bp, Homo sapien
tccacacacatatgcacatctgtacatacacac

SEQ ID NO: 86779 - DNA, 33 bp, Homo sapien
atgtgaggagaacttcaagaactagtgccatag

SEQ ID NO: 86780 - DNA, 33 bp, Homo sapien
atgtgaggagaacttcgagaactagtgccatag

SEQ ID NO: 86781 - DNA, 33 bp, Homo sapien
tagagagcattctttcacactcctcaccaggtg

SEQ ID NO: 86782 - DNA, 33 bp, Homo sapien
tagagagcattctttcgcactcctcaccaggtg

SEQ ID NO: 86783 - DNA, 33 bp, Homo sapien
atctcatcgctgggacgatatatcaagtcacct

SEQ ID NO: 86784 - DNA, 33 bp, Homo sapien
atctcatcgctgggactatatatcaagtcacct

SEQ ID NO: 86785 - DNA, 33 bp, Homo sapien
aacctggatacactgacgtgctaatagtttact

SEQ ID NO: 86786 - DNA, 33 bp, Homo sapien
aacctggatacactgatgtgctaatagtttact

SEQ ID NO: 86787 - DNA, 33 bp, Homo sapien
tctaatattatattgagagcaagcacaaaaata

SEQ ID NO: 86788 - DNA, 33 bp, Homo sapien
tctaatattatattgatagcaagcacaaaaata

SEQ ID NO: 86789 - DNA, 33 bp, Homo sapien
tgaggcaggagaaccactcgagcctgggaggcc

SEQ ID NO: 86790 - DNA, 33 bp, Homo sapien
tgaggcaggagaaccagtcgagcctgggaggcc

SEQ ID NO: 86791 - DNA, 33 bp, Homo sapien
aacataaaaggcacaaatcattaaggaaatatc

SEQ ID NO: 86792 - DNA, 33 bp, Homo sapien
aacataaaaggcacaattcattaaggaaatatc

SEQ ID NO: 86793 - DNA, 33 bp, Homo sapien
cacctaggcacccaccccggaggaatgaaaaca

SEQ ID NO: 86794 - DNA, 33 bp, Homo sapien
cacctaggcacccacctcggaggaatgaaaaca

SEQ ID NO: 86795 - DNA, 33 bp, Homo sapien
catgcctttgcgtggacgtgttttcattcctcc

SEQ ID NO: 86796 - DNA, 33 bp, Homo sapien
catgcctttgcgtggatgtgttttcattcctcc

SEQ ID NO: 86797 - DNA, 33 bp, Homo sapien
ggtgatgacggtacaacgggacagacaaggagt

SEQ ID NO: 86798 - DNA, 33 bp, Homo sapien
ggtgatgacggtacaatgggacagacaaggagt

SEQ ID NO: 86799 - DNA, 33 bp, Homo sapien
aaatggaggcagtctggattcttattctctttc

SEQ ID NO: 86800 - DNA, 33 bp, Homo sapien
aaatggaggcagtctgtattcttattctctttc

SEQ ID NO: 86801 - DNA, 33 bp, Homo sapien
caagagacatttttccagcctgttttctgtggt

SEQ ID NO: 86802 - DNA, 33 bp, Homo sapien
caagagacatttttccggcctgttttctgtggt

SEQ ID NO: 86803 - DNA, 33 bp, Homo sapien
ggcttgacgagcctcgaattgatttattgattt

SEQ ID NO: 86804 - DNA, 33 bp, Homo sapien
ggcttgacgagcctcggattgatttattgattt

SEQ ID NO: 86805 - DNA, 33 bp, Homo sapien
cgtgagcaaatggcggaactggtttcatttttc

SEQ ID NO: 86806 - DNA, 33 bp, Homo sapien
cgtgagcaaatggcgggactggtttcatttttc

SEQ ID NO: 86807 - DNA, 33 bp, Homo sapien
gttaggtcttgggccactgagtccactttcggc

SEQ ID NO: 86808 - DNA, 33 bp, Homo sapien
gttaggtcttgggccattgagtccactttcggc

SEQ ID NO: 86809 - DNA, 33 bp, Homo sapien
gagtcctgggaaaacaaccgctgtggttttctt

SEQ ID NO: 86810 - DNA, 33 bp, Homo sapien
gagtcctgggaaaacacccgctgtggttttctt

SEQ ID NO: 86811 - DNA, 33 bp, Homo sapien
cctatgtaacttagaacacgtctgcaagatctt

SEQ ID NO: 86812 - DNA, 33 bp, Homo sapien
cctatgtaacttagaatacgtctgcaagatctt

SEQ ID NO: 86813 - DNA, 33 bp, Homo sapien
acgaggctcagagaacaatgtctggctagcagt

SEQ ID NO: 86814 - DNA, 33 bp, Homo sapien
acgaggctcagagaacgatgtctggctagcagt

SEQ ID NO: 86815 - DNA, 33 bp, Homo sapien
gctgttgtttaaaccacagcattttttgaagga

SEQ ID NO: 86816 - DNA, 33 bp, Homo sapien
gctgttgtttaaaccatagcattttttgaagga

SEQ ID NO: 86817 - DNA, 33 bp, Homo sapien
tcccagccacactctcacagcaaagacgcagtg

SEQ ID NO: 86818 - DNA, 33 bp, Homo sapien
tcccagccacactctcgcagcaaagacgcagtg

SEQ ID NO: 86819 - DNA, 33 bp, Homo sapien
ccccttggctgtgaaccgcaggcaggtatgttc

SEQ ID NO: 86820 - DNA, 33 bp, Homo sapien
ccccttggctgtgaactgcaggcaggtatgttc

SEQ ID NO: 86821 - DNA, 33 bp, Homo sapien
cctgcgcttgcacacaatgggaatccgttcatg

SEQ ID NO: 86822 - DNA, 33 bp, Homo sapien
cctgcgcttgcacacagtgggaatccgttcatg

SEQ ID NO: 86823 - DNA, 33 bp, Homo sapien
ttattcaggtaatgcaactaataaacaggaggt

SEQ ID NO: 86824 - DNA, 33 bp, Homo sapien
ttattcaggtaatgcacctaataaacaggaggt

SEQ ID NO: 86825 - DNA, 33 bp, Homo sapien
agtacaaagtctctgcacctataaacttagcca

SEQ ID NO: 86826 - DNA, 33 bp, Homo sapien
agtacaaagtctctgcgcctataaacttagcca

SEQ ID NO: 86827 - DNA, 33 bp, Homo sapien
tcaccagtatggggaaatgagtgaataaggtgg

SEQ ID NO: 86828 - DNA, 33 bp, Homo sapien
tcaccagtatggggaagtgagtgaataaggtgg

SEQ ID NO: 86829 - DNA, 33 bp, Homo sapien
tagcaaagggaggtgacagatgtaggcagctaa

SEQ ID NO: 86830 - DNA, 33 bp, Homo sapien
tagcaaagggaggtgatagatgtaggcagctaa

SEQ ID NO: 86831 - DNA, 33 bp, Homo sapien
acacaaaaaagaggtcaaggtagactgtagaat

SEQ ID NO: 86832 - DNA, 33 bp, Homo sapien
acacaaaaaagaggtcgaggtagactgtagaat

SEQ ID NO: 86833 - DNA, 33 bp, Homo sapien
accaaaactcacaccggcagtgtatttaaacgt

SEQ ID NO: 86834 - DNA, 33 bp, Homo sapien
accaaaactcacaccgtcagtgtatttaaacgt

SEQ ID NO: 86835 - DNA, 33 bp, Homo sapien
aagcagcaaaatggcacgaaagctcaagccccc

SEQ ID NO: 86836 - DNA, 33 bp, Homo sapien
aagcagcaaaatggcatgaaagctcaagccccc

SEQ ID NO: 86837 - DNA, 33 bp, Homo sapien
tggcagcaaaatgccaatctttccatcaagatg

SEQ ID NO: 86838 - DNA, 33 bp, Homo sapien
tggcagcaaaatgccagtctttccatcaagatg

SEQ ID NO: 86839 - DNA, 33 bp, Homo sapien
tcaccattttgctatagctcagacaactctctc

SEQ ID NO: 86840 - DNA, 33 bp, Homo sapien
tcaccattttgctatatctcagacaactctctc

SEQ ID NO: 86841 - DNA, 33 bp, Homo sapien
cgagcgtaggcagggaagattccaagcacaacg

SEQ ID NO: 86842 - DNA, 33 bp, Homo sapien
cgagcgtaggcagggacgattccaagcacaacg

SEQ ID NO: 86843 - DNA, 33 bp, Homo sapien
ggctccattaggaaccaccctgtgcttaaataa

SEQ ID NO: 86844 - DNA, 33 bp, Homo sapien
ggctccattaggaacccccctgtgcttaaataa

SEQ ID NO: 86845 - DNA, 33 bp, Homo sapien
gaagacagcagacagcaaagcggggccttactg

SEQ ID NO: 86846 - DNA, 33 bp, Homo sapien
gaagacagcagacagcgaagcggggccttactg

SEQ ID NO: 86847 - DNA, 33 bp, Homo sapien
caggagatggcgaggaaggagactggtgcccag

SEQ ID NO: 86848 - DNA, 33 bp, Homo sapien
caggagatggcgaggagggagactggtgcccag

SEQ ID NO: 86849 - DNA, 33 bp, Homo sapien
aaaggtgggaccttacaaccgactttgcttccc

SEQ ID NO: 86850 - DNA, 33 bp, Homo sapien
aaaggtgggaccttacgaccgactttgcttccc

SEQ ID NO: 86851 - DNA, 33 bp, Homo sapien
ttccacggtttcctgagtcacagatggcctatg

SEQ ID NO: 86852 - DNA, 33 bp, Homo sapien
ttccacggtttcctgattcacagatggcctatg

SEQ ID NO: 86853 - DNA, 33 bp, Homo sapien
caatactgcttcatcaatcgtaatcaatgcgca

SEQ ID NO: 86854 - DNA, 33 bp, Homo sapien
caatactgcttcatcagtcgtaatcaatgcgca

SEQ ID NO: 86855 - DNA, 33 bp, Homo sapien
cgcagagtaacccagacgtaaatagagccaata

SEQ ID NO: 86856 - DNA, 33 bp, Homo sapien
cgcagagtaacccagatgtaaatagagccaata

SEQ ID NO: 86857 - DNA, 33 bp, Homo sapien
cccgtggagacagagagagaggaaaacgatggc

SEQ ID NO: 86858 - DNA, 33 bp, Homo sapien
cccgtggagacagagatagaggaaaacgatggc

SEQ ID NO: 86859 - DNA, 33 bp, Homo sapien
tgaaggttcagaccaaaataactgtttccttcc

SEQ ID NO: 86860 - DNA, 33 bp, Homo sapien
tgaaggttcagaccaagataactgtttccttcc

SEQ ID NO: 86861 - DNA, 33 bp, Homo sapien
gtagaggataaaaagcaacttgaaaaggagaga

SEQ ID NO: 86862 - DNA, 33 bp, Homo sapien
gtagaggataaaaagcgacttgaaaaggagaga

SEQ ID NO: 86863 - DNA, 33 bp, Homo sapien
ggatgcagacatgagcaagtgagttctcctgtc

SEQ ID NO: 86864 - DNA, 33 bp, Homo sapien
ggatgcagacatgagcgagtgagttctcctgtc

SEQ ID NO: 86865 - DNA, 33 bp, Homo sapien
aggaacagagtatggacgatgagagaatgcttc

SEQ ID NO: 86866 - DNA, 33 bp, Homo sapien
aggaacagagtatggatgatgagagaatgcttc

SEQ ID NO: 86867 - DNA, 33 bp, Homo sapien
agaactttcttccacaagttgttgggaaaaagg

SEQ ID NO: 86868 - DNA, 33 bp, Homo sapien
agaactttcttccacaggttgttgggaaaaagg

SEQ ID NO: 86869 - DNA, 33 bp, Homo sapien
ttgttgatttctctagcaaatgatcattccaaa

SEQ ID NO: 86870 - DNA, 33 bp, Homo sapien
ttgttgatttctctagtaaatgatcattccaaa

SEQ ID NO: 86871 - DNA, 33 bp, Homo sapien
aactgtcactgtatacacactggcaactttaat

SEQ ID NO: 86872 - DNA, 33 bp, Homo sapien
aactgtcactgtatacgcactggcaactttaat

SEQ ID NO: 86873 - DNA, 33 bp, Homo sapien
ggaaactcctgcacaaattaaaccaatgtcaca

SEQ ID NO: 86874 - DNA, 33 bp, Homo sapien
ggaaactcctgcacaagttaaaccaatgtcaca

SEQ ID NO: 86875 - DNA, 33 bp, Homo sapien
tgacaaaaacgagagaagagaagatgacagcgc

SEQ ID NO: 86876 - DNA, 33 bp, Homo sapien
tgacaaaaacgagagaggagaagatgacagcgc

SEQ ID NO: 86877 - DNA, 33 bp, Homo sapien
cagggtcagaagtgccaagggtcacctgcatcc

SEQ ID NO: 86878 - DNA, 33 bp, Homo sapien
cagggtcagaagtgccgagggtcacctgcatcc

SEQ ID NO: 86879 - DNA, 33 bp, Homo sapien
ttcagtcaatgttcacactactgacttgctggc

SEQ ID NO: 86880 - DNA, 33 bp, Homo sapien
ttcagtcaatgttcacgctactgacttgctggc

SEQ ID NO: 86881 - DNA, 33 bp, Homo sapien
ctgagcgagacagacacagagaacacgtggctc

SEQ ID NO: 86882 - DNA, 33 bp, Homo sapien
ctgagcgagacagacatagagaacacgtggctc

SEQ ID NO: 86883 - DNA, 33 bp, Homo sapien
gtttttctgacaggtgaaagtcgcgtattattg

SEQ ID NO: 86884 - DNA, 33 bp, Homo sapien
gtttttctgacaggtggaagtcgcgtattattg

SEQ ID NO: 86885 - DNA, 33 bp, Homo sapien
taaatcaacatctctaactctcccactgccctc

SEQ ID NO: 86886 - DNA, 33 bp, Homo sapien
taaatcaacatctctacctctcccactgccctc

SEQ ID NO: 86887 - DNA, 33 bp, Homo sapien
gcaactcgctatcccacactcaaaatcattctg

SEQ ID NO: 86888 - DNA, 33 bp, Homo sapien
gcaactcgctatcccatactcaaaatcattctg

SEQ ID NO: 86889 - DNA, 33 bp, Homo sapien
attggaaccagctactcaaaagccagatgcttc

SEQ ID NO: 86890 - DNA, 33 bp, Homo sapien
attggaaccagctacttaaaagccagatgcttc

SEQ ID NO: 86891 - DNA, 33 bp, Homo sapien
tgatgtgcctgcattacagtgttctaattccca

SEQ ID NO: 86892 - DNA, 33 bp, Homo sapien
tgatgtgcctgcattatagtgttctaattccca

SEQ ID NO: 86893 - DNA, 33 bp, Homo sapien
tgagggttaaaggaaaatgcagaggtcgttgaa

SEQ ID NO: 86894 - DNA, 33 bp, Homo sapien
tgagggttaaaggaaactgcagaggtcgttgaa

SEQ ID NO: 86895 - DNA, 33 bp, Homo sapien
ttgcttaagtaatacacgtttttgatttgaggg

SEQ ID NO: 86896 - DNA, 33 bp, Homo sapien
ttgcttaagtaatacaggtttttgatttgaggg

SEQ ID NO: 86897 - DNA, 33 bp, Homo sapien
aacctgggaaaagaaccgtcagcgagaagtgag

SEQ ID NO: 86898 - DNA, 33 bp, Homo sapien
aacctgggaaaagaactgtcagcgagaagtgag

SEQ ID NO: 86899 - DNA, 33 bp, Homo sapien
agtcatattctgtgacaaaggtgtttttttttt

SEQ ID NO: 86900 - DNA, 33 bp, Homo sapien
agtcatattctgtgacgaaggtgtttttttttt

SEQ ID NO: 86901 - DNA, 33 bp, Homo sapien
cacatgaaattcctgacggcaaaaatcagactc

SEQ ID NO: 86902 - DNA, 33 bp, Homo sapien
cacatgaaattcctgatggcaaaaatcagactc

SEQ ID NO: 86903 - DNA, 33 bp, Homo sapien
ctcgggtaagttaaaccgtgcctcagtttcctc

SEQ ID NO: 86904 - DNA, 33 bp, Homo sapien
ctcgggtaagttaaacggtgcctcagtttcctc

SEQ ID NO: 86905 - DNA, 33 bp, Homo sapien
tgattttaatcacgaacgtacctgtgcccaggt

SEQ ID NO: 86906 - DNA, 33 bp, Homo sapien
tgattttaatcacgaatgtacctgtgcccaggt

SEQ ID NO: 86907 - DNA, 33 bp, Homo sapien
gtgacagtcacgttcacgtcacgcaatccatgt

SEQ ID NO: 86908 - DNA, 33 bp, Homo sapien
gtgacagtcacgttcatgtcacgcaatccatgt

SEQ ID NO: 86909 - DNA, 33 bp, Homo sapien
caggtgagtaagttcaagtaaagccacccagag

SEQ ID NO: 86910 - DNA, 33 bp, Homo sapien
caggtgagtaagttcaggtaaagccacccagag

SEQ ID NO: 86911 - DNA, 33 bp, Homo sapien
ttgccttcgtatccagaactttctcaccctttt

SEQ ID NO: 86912 - DNA, 33 bp, Homo sapien
ttgccttcgtatccaggactttctcaccctttt

SEQ ID NO: 86913 - DNA, 33 bp, Homo sapien
gatctggcctgattaaccacttacgagatgttg

SEQ ID NO: 86914 - DNA, 33 bp, Homo sapien
gatctggcctgattaatcacttacgagatgttg

SEQ ID NO: 86915 - DNA, 33 bp, Homo sapien
gagggaagctggcctacgactttttaattttgt

SEQ ID NO: 86916 - DNA, 33 bp, Homo sapien
gagggaagctggcctatgactttttaattttgt

SEQ ID NO: 86917 - DNA, 33 bp, Homo sapien
gataattatttaacagaagctacatattgtcag

SEQ ID NO: 86918 - DNA, 33 bp, Homo sapien
gataattatttaacaggagctacatattgtcag

SEQ ID NO: 86919 - DNA, 33 bp, Homo sapien
attaatcctcactttcgctaatccctccaaaga

SEQ ID NO: 86920 - DNA, 33 bp, Homo sapien
attaatcctcactttctctaatccctccaaaga

SEQ ID NO: 86921 - DNA, 33 bp, Homo sapien
tgatgctaacacagaaattaacgtgagaataaa

SEQ ID NO: 86922 - DNA, 33 bp, Homo sapien
tgatgctaacacagaagttaacgtgagaataaa

SEQ ID NO: 86923 - DNA, 33 bp, Homo sapien
tgggaacaagctgtgaaaaggattaggatttgg

SEQ ID NO: 86924 - DNA, 33 bp, Homo sapien
tgggaacaagctgtgagaaggattaggatttgg

SEQ ID NO: 86925 - DNA, 33 bp, Homo sapien
accatcctacggttaacgagagcagccgtgtaa

SEQ ID NO: 86926 - DNA, 33 bp, Homo sapien
accatcctacggttaatgagagcagccgtgtaa

SEQ ID NO: 86927 - DNA, 33 bp, Homo sapien
cccccaaatggcacaactcaggacaagtctgaa

SEQ ID NO: 86928 - DNA, 33 bp, Homo sapien
cccccaaatggcacaattcaggacaagtctgaa

SEQ ID NO: 86929 - DNA, 33 bp, Homo sapien
tagcaggagaatataacccatttacaatttttg

SEQ ID NO: 86930 - DNA, 33 bp, Homo sapien
tagcaggagaatataatccatttacaatttttg

SEQ ID NO: 86931 - DNA, 33 bp, Homo sapien
taaataatggcctcccaattactcctttctagg

SEQ ID NO: 86932 - DNA, 33 bp, Homo sapien
taaataatggcctcccgattactcctttctagg

SEQ ID NO: 86933 - DNA, 33 bp, Homo sapien
cagggagcgtgccacaatgtactttctatagga

SEQ ID NO: 86934 - DNA, 33 bp, Homo sapien
cagggagcgtgccacagtgtactttctatagga

SEQ ID NO: 86935 - DNA, 33 bp, Homo sapien
tgtctagaatttaaggaccgttttcaaagcctc

SEQ ID NO: 86936 - DNA, 33 bp, Homo sapien
tgtctagaatttaagggccgttttcaaagcctc

SEQ ID NO: 86937 - DNA, 33 bp, Homo sapien
taccactgtgcacacacatttaaatttatagat

SEQ ID NO: 86938 - DNA, 33 bp, Homo sapien
taccactgtgcacacatatttaaatttatagat

SEQ ID NO: 86939 - DNA, 33 bp, Homo sapien
tactggttgtgaactacgcctaacagctaccta

SEQ ID NO: 86940 - DNA, 33 bp, Homo sapien
tactggttgtgaactatgcctaacagctaccta

SEQ ID NO: 86941 - DNA, 33 bp, Homo sapien
agagtttcttagacatcaaaagcataagcaatg

SEQ ID NO: 86942 - DNA, 33 bp, Homo sapien
agagtttcttagacattaaaagcataagcaatg

SEQ ID NO: 86943 - DNA, 33 bp, Homo sapien
ttttaaatcaagccaaactcctggtcctgctgt

SEQ ID NO: 86944 - DNA, 33 bp, Homo sapien
ttttaaatcaagccaacctcctggtcctgctgt

SEQ ID NO: 86945 - DNA, 33 bp, Homo sapien
gagcaataatctttgacactcctaagcactgtt

SEQ ID NO: 86946 - DNA, 33 bp, Homo sapien
gagcaataatctttgatactcctaagcactgtt

SEQ ID NO: 86947 - DNA, 33 bp, Homo sapien
ggcatagagcaactgaaaccctcactattcagc

SEQ ID NO: 86948 - DNA, 33 bp, Homo sapien
ggcatagagcaactgagaccctcactattcagc

SEQ ID NO: 86949 - DNA, 33 bp, Homo sapien
taattttggtgtcagacgttaaaaatgataggg

SEQ ID NO: 86950 - DNA, 33 bp, Homo sapien
taattttggtgtcagatgttaaaaatgataggg

SEQ ID NO: 86951 - DNA, 33 bp, Homo sapien
gctgttcatgagtgcacatgtgtgtgagttgtg

SEQ ID NO: 86952 - DNA, 33 bp, Homo sapien
gctgttcatgagtgcatatgtgtgtgagttgtg

SEQ ID NO: 86953 - DNA, 33 bp, Homo sapien
gatgtgttaaaagcatcagtcttccttcccttc

SEQ ID NO: 86954 - DNA, 33 bp, Homo sapien
gatgtgttaaaagcattagtcttccttcccttc

SEQ ID NO: 86955 - DNA, 33 bp, Homo sapien
tcaggacaccaaagacaatgtagcagtgtgatg

SEQ ID NO: 86956 - DNA, 33 bp, Homo sapien
tcaggacaccaaagacgatgtagcagtgtgatg

SEQ ID NO: 86957 - DNA, 33 bp, Homo sapien
gtaaatagctgggatacgagcacacatatatgt

SEQ ID NO: 86958 - DNA, 33 bp, Homo sapien
gtaaatagctgggatatgagcacacatatatgt

SEQ ID NO: 86959 - DNA, 33 bp, Homo sapien
gaacaaccatctaaacagcgtagtcagaaacgt

SEQ ID NO: 86960 - DNA, 33 bp, Homo sapien
gaacaaccatctaaacggcgtagtcagaaacgt

SEQ ID NO: 86961 - DNA, 33 bp, Homo sapien
cattgcacggctctgagataccggcttggcttt

SEQ ID NO: 86962 - DNA, 33 bp, Homo sapien
cattgcacggctctgatataccggcttggcttt

SEQ ID NO: 86963 - DNA, 33 bp, Homo sapien
cccagccttaaccatacgcaagcactgtttagc

SEQ ID NO: 86964 - DNA, 33 bp, Homo sapien
cccagccttaaccatatgcaagcactgtttagc

SEQ ID NO: 86965 - DNA, 33 bp, Homo sapien
tcttcctagagattcccataaacacaggtgtgt

SEQ ID NO: 86966 - DNA, 33 bp, Homo sapien
tcttcctagagattcctataaacacaggtgtgt

SEQ ID NO: 86967 - DNA, 33 bp, Homo sapien
tctgagctctacaagcagaacgcccgtacccag

SEQ ID NO: 86968 - DNA, 33 bp, Homo sapien
tctgagctctacaagccgaacgcccgtacccag

SEQ ID NO: 86969 - DNA, 33 bp, Homo sapien
aggttgaatagaaaaaaaaagtggcgctgggta

SEQ ID NO: 86970 - DNA, 33 bp, Homo sapien
aggttgaatagaaaaacaaagtggcgctgggta

SEQ ID NO: 86971 - DNA, 33 bp, Homo sapien
acctgcaaaatgagtaaggtaatattctccacc

SEQ ID NO: 86972 - DNA, 33 bp, Homo sapien
acctgcaaaatgagtagggtaatattctccacc

SEQ ID NO: 86973 - DNA, 33 bp, Homo sapien
ttatctatctatctagcctaacatctatctatc

SEQ ID NO: 86974 - DNA, 33 bp, Homo sapien
ttatctatctatctagtctaacatctatctatc

SEQ ID NO: 86975 - DNA, 33 bp, Homo sapien
catctatgtatctatggagctatctatgatcta

SEQ ID NO: 86976 - DNA, 33 bp, Homo sapien
catctatgtatctatgtagctatctatgatcta

SEQ ID NO: 86977 - DNA, 33 bp, Homo sapien
taggtcaatggatatacagatgataaagagatg

SEQ ID NO: 86978 - DNA, 33 bp, Homo sapien
taggtcaatggatatatagatgataaagagatg

SEQ ID NO: 86979 - DNA, 33 bp, Homo sapien
tggctgtattgagataacttgaatcagggaaga

SEQ ID NO: 86980 - DNA, 33 bp, Homo sapien
tggctgtattgagatagcttgaatcagggaaga

SEQ ID NO: 86981 - DNA, 33 bp, Homo sapien
attttacaaagtctgaagtgttttgatttggaa

SEQ ID NO: 86982 - DNA, 33 bp, Homo sapien
attttacaaagtctgaggtgttttgatttggaa

SEQ ID NO: 86983 - DNA, 33 bp, Homo sapien
acagttaagaaatgaaaagtgccattgctcagt

SEQ ID NO: 86984 - DNA, 33 bp, Homo sapien
acagttaagaaatgaagagtgccattgctcagt

SEQ ID NO: 86985 - DNA, 33 bp, Homo sapien
gttgctttttagacaacggtgtgtatggaaaca

SEQ ID NO: 86986 - DNA, 33 bp, Homo sapien
gttgctttttagacaatggtgtgtatggaaaca

SEQ ID NO: 86987 - DNA, 33 bp, Homo sapien
cacagtcccatgccgaggagggttgttcaataa

SEQ ID NO: 86988 - DNA, 33 bp, Homo sapien
cacagtcccatgccgatgagggttgttcaataa

SEQ ID NO: 86989 - DNA, 33 bp, Homo sapien
acatcctcccacataccgtaaatcatttctaga

SEQ ID NO: 86990 - DNA, 33 bp, Homo sapien
acatcctcccacatactgtaaatcatttctaga

SEQ ID NO: 86991 - DNA, 33 bp, Homo sapien
cactagagaactttcacaattacaggaggttat

SEQ ID NO: 86992 - DNA, 33 bp, Homo sapien
cactagagaactttcagaattacaggaggttat

SEQ ID NO: 86993 - DNA, 33 bp, Homo sapien
gaatacagctcttaacaggtagaagtcagagaa

SEQ ID NO: 86994 - DNA, 33 bp, Homo sapien
gaatacagctcttaacgggtagaagtcagagaa

SEQ ID NO: 86995 - DNA, 33 bp, Homo sapien
ttgttgctgcagtcaagacggttaaaaaggaca

SEQ ID NO: 86996 - DNA, 33 bp, Homo sapien
ttgttgctgcagtcaatacggttaaaaaggaca

SEQ ID NO: 86997 - DNA, 33 bp, Homo sapien
ttccattgaggtttgcacctagtgttgtacatt

SEQ ID NO: 86998 - DNA, 33 bp, Homo sapien
ttccattgaggtttgcgcctagtgttgtacatt

SEQ ID NO: 86999 - DNA, 33 bp, Homo sapien
aagggaaaggatccaacctgaaaaggctacaga

SEQ ID NO: 87000 - DNA, 33 bp, Homo sapien
aagggaaaggatccaatctgaaaaggctacaga

SEQ ID NO: 87001 - DNA, 33 bp, Homo sapien
ttgtattcttgctctaccacgttgattatgcca

SEQ ID NO: 87002 - DNA, 33 bp, Homo sapien
ttgtattcttgctctatcacgttgattatgcca

SEQ ID NO: 87003 - DNA, 33 bp, Homo sapien
aaagaactgaaaaaagaatgagcaggttttcag

SEQ ID NO: 87004 - DNA, 33 bp, Homo sapien
aaagaactgaaaaaaggatgagcaggttttcag

SEQ ID NO: 87005 - DNA, 33 bp, Homo sapien
tgttgaagccagagaactagcacgtcttcagcg

SEQ ID NO: 87006 - DNA, 33 bp, Homo sapien
tgttgaagccagagaattagcacgtcttcagcg

SEQ ID NO: 87007 - DNA, 33 bp, Homo sapien
gtcttctctctgtagcactttaatcatatcaga

SEQ ID NO: 87008 - DNA, 33 bp, Homo sapien
gtcttctctctgtagcgctttaatcatatcaga

SEQ ID NO: 87009 - DNA, 33 bp, Homo sapien
aggaagggctaagaatcaaggagtgctgtctct

SEQ ID NO: 87010 - DNA, 33 bp, Homo sapien
aggaagggctaagaatgaaggagtgctgtctct

SEQ ID NO: 87011 - DNA, 33 bp, Homo sapien
tctcaaaaacatctgaaggtgtggctttggttg

SEQ ID NO: 87012 - DNA, 33 bp, Homo sapien
tctcaaaaacatctgagggtgtggctttggttg

SEQ ID NO: 87013 - DNA, 33 bp, Homo sapien
atgaaagggcaaagaggcctccggttttccaca

SEQ ID NO: 87014 - DNA, 33 bp, Homo sapien
atgaaagggcaaagagtcctccggttttccaca

SEQ ID NO: 87015 - DNA, 33 bp, Homo sapien
aatgtataattttagacgttcccaggctacagt

SEQ ID NO: 87016 - DNA, 33 bp, Homo sapien
aatgtataattttagatgttcccaggctacagt

SEQ ID NO: 87017 - DNA, 33 bp, Homo sapien
gatggatatcgtaaacaccctgacatcaccact

SEQ ID NO: 87018 - DNA, 33 bp, Homo sapien
gatggatatcgtaaacgccctgacatcaccact

SEQ ID NO: 87019 - DNA, 33 bp, Homo sapien
tgcttgctttttcagacattctggcataggaga

SEQ ID NO: 87020 - DNA, 33 bp, Homo sapien
tgcttgctttttcagatattctggcataggaga

SEQ ID NO: 87021 - DNA, 33 bp, Homo sapien
aatttgaatctgttcactatccccttttaccat

SEQ ID NO: 87022 - DNA, 33 bp, Homo sapien
aatttgaatctgttcattatccccttttaccat

SEQ ID NO: 87023 - DNA, 33 bp, Homo sapien
tcactaaataagggcccaaggattccagttaat

SEQ ID NO: 87024 - DNA, 33 bp, Homo sapien
tcactaaataagggcctaaggattccagttaat

SEQ ID NO: 87025 - DNA, 33 bp, Homo sapien
agtttaaattttcttccacagtacattgtttaa

SEQ ID NO: 87026 - DNA, 33 bp, Homo sapien
agtttaaattttcttctacagtacattgtttaa

SEQ ID NO: 87027 - DNA, 33 bp, Homo sapien
tgaaacaccatagggccactaataatattaatt

SEQ ID NO: 87028 - DNA, 33 bp, Homo sapien
tgaaacaccatagggctactaataatattaatt

SEQ ID NO: 87029 - DNA, 33 bp, Homo sapien
aattactttctttcagcacattgagatgccttt

SEQ ID NO: 87030 - DNA, 33 bp, Homo sapien
aattactttctttcaggacattgagatgccttt

SEQ ID NO: 87031 - DNA, 33 bp, Homo sapien
aattttaagaaaactgcaagtacagtgaagcag

SEQ ID NO: 87032 - DNA, 33 bp, Homo sapien
aattttaagaaaactggaagtacagtgaagcag

SEQ ID NO: 87033 - DNA, 33 bp, Homo sapien
acggcagaagagactaaactatgccacttgggt

SEQ ID NO: 87034 - DNA, 33 bp, Homo sapien
acggcagaagagactagactatgccacttgggt

SEQ ID NO: 87035 - DNA, 33 bp, Homo sapien
agcagatcaagcagcacatcagcttgcacgaag

SEQ ID NO: 87036 - DNA, 33 bp, Homo sapien
agcagatcaagcagcagatcagcttgcacgaag

SEQ ID NO: 87037 - DNA, 33 bp, Homo sapien
ttcctgtggcattcaacacgttcagtcagaact

SEQ ID NO: 87038 - DNA, 33 bp, Homo sapien
ttcctgtggcattcaatacgttcagtcagaact

SEQ ID NO: 87039 - DNA, 33 bp, Homo sapien
ttcacattatctttaaacatatgtctgtggctt

SEQ ID NO: 87040 - DNA, 33 bp, Homo sapien
ttcacattatctttaaccatatgtctgtggctt

SEQ ID NO: 87041 - DNA, 33 bp, Homo sapien
cctcgacgcagctgcacgcggttagaattggat

SEQ ID NO: 87042 - DNA, 33 bp, Homo sapien
cctcgacgcagctgcatgcggttagaattggat

SEQ ID NO: 87043 - DNA, 33 bp, Homo sapien
ttattcaacttgtgtcgcttaatttctacaact

SEQ ID NO: 87044 - DNA, 33 bp, Homo sapien
ttattcaacttgtgtctcttaatttctacaact

SEQ ID NO: 87045 - DNA, 33 bp, Homo sapien
tggtgttaatggtcgaggaactgcatggtccat

SEQ ID NO: 87046 - DNA, 33 bp, Homo sapien
tggtgttaatggtcgatgaactgcatggtccat

SEQ ID NO: 87047 - DNA, 33 bp, Homo sapien
ggaggttaatgtaaacaatgtatgcaagtatta

SEQ ID NO: 87048 - DNA, 33 bp, Homo sapien
ggaggttaatgtaaaccatgtatgcaagtatta

SEQ ID NO: 87049 - DNA, 33 bp, Homo sapien
gtaaagagggttgctaacagcatggaaactgca

SEQ ID NO: 87050 - DNA, 33 bp, Homo sapien
gtaaagagggttgctagcagcatggaaactgca

SEQ ID NO: 87051 - DNA, 33 bp, Homo sapien
aagatttttgattgaaaggatatattgttgtaa

SEQ ID NO: 87052 - DNA, 33 bp, Homo sapien
aagatttttgattgaagggatatattgttgtaa

SEQ ID NO: 87053 - DNA, 33 bp, Homo sapien
acagattcaaaatatcccgtcagtaaagcctca

SEQ ID NO: 87054 - DNA, 33 bp, Homo sapien
acagattcaaaatatctcgtcagtaaagcctca

SEQ ID NO: 87055 - DNA, 33 bp, Homo sapien
tctgtctatgctgtcacgaaaggaataaataag

SEQ ID NO: 87056 - DNA, 33 bp, Homo sapien
tctgtctatgctgtcatgaaaggaataaataag

SEQ ID NO: 87057 - DNA, 33 bp, Homo sapien
caaagtgtccattttagcctctttgcctactgc

SEQ ID NO: 87058 - DNA, 33 bp, Homo sapien
caaagtgtccattttatcctctttgcctactgc

SEQ ID NO: 87059 - DNA, 33 bp, Homo sapien
atttaggtcaaagagcaacaaagcaccatgata

SEQ ID NO: 87060 - DNA, 33 bp, Homo sapien
atttaggtcaaagagcgacaaagcaccatgata

SEQ ID NO: 87061 - DNA, 33 bp, Homo sapien
acacaacaagacacaactgcaccaacttctcta

SEQ ID NO: 87062 - DNA, 33 bp, Homo sapien
acacaacaagacacaattgcaccaacttctcta

SEQ ID NO: 87063 - DNA, 33 bp, Homo sapien
gggaatttgggggagcacacacactcagatcac

SEQ ID NO: 87064 - DNA, 33 bp, Homo sapien
gggaatttgggggagcgcacacactcagatcac

SEQ ID NO: 87065 - DNA, 33 bp, Homo sapien
catgttgaagtcctcacccccaacacgagtgta

SEQ ID NO: 87066 - DNA, 33 bp, Homo sapien
catgttgaagtcctcagccccaacacgagtgta

SEQ ID NO: 87067 - DNA, 33 bp, Homo sapien
cgaaggacagctttacccagaacatcttgaatg

SEQ ID NO: 87068 - DNA, 33 bp, Homo sapien
cgaaggacagctttactcagaacatcttgaatg

SEQ ID NO: 87069 - DNA, 33 bp, Homo sapien
cctgaatatgtaaaacagtgaagaaggagagtt

SEQ ID NO: 87070 - DNA, 33 bp, Homo sapien
cctgaatatgtaaaacggtgaagaaggagagtt

SEQ ID NO: 87071 - DNA, 33 bp, Homo sapien
tggcttgctttagtccagatatcccataaatgt

SEQ ID NO: 87072 - DNA, 33 bp, Homo sapien
tggcttgctttagtccggatatcccataaatgt

SEQ ID NO: 87073 - DNA, 33 bp, Homo sapien
cctggaggctatggtcaaaataagtccatggtg

SEQ ID NO: 87074 - DNA, 33 bp, Homo sapien
cctggaggctatggtctaaataagtccatggtg

SEQ ID NO: 87075 - DNA, 33 bp, Homo sapien
aaagagtaatgaccaactccatgtgtcctgatg

SEQ ID NO: 87076 - DNA, 33 bp, Homo sapien
aaagagtaatgaccaattccatgtgtcctgatg

SEQ ID NO: 87077 - DNA, 33 bp, Homo sapien
tcttagaagcaggtcgcccagcgcgatggtggc

SEQ ID NO: 87078 - DNA, 33 bp, Homo sapien
tcttagaagcaggtcgtccagcgcgatggtggc

SEQ ID NO: 87079 - DNA, 33 bp, Homo sapien
accaaaatttgtctccaaaatgataaacaaaat

SEQ ID NO: 87080 - DNA, 33 bp, Homo sapien
accaaaatttgtctccgaaatgataaacaaaat

SEQ ID NO: 87081 - DNA, 33 bp, Homo sapien
attttgcatcaggtaacgtttttcgattaatgt

SEQ ID NO: 87082 - DNA, 33 bp, Homo sapien
attttgcatcaggtaatgtttttcgattaatgt

SEQ ID NO: 87083 - DNA, 33 bp, Homo sapien
ctgcaaagggttttccacatctttatgatctac

SEQ ID NO: 87084 - DNA, 33 bp, Homo sapien
ctgcaaagggttttccgcatctttatgatctac

SEQ ID NO: 87085 - DNA, 33 bp, Homo sapien
catcaaagatcaatgacgtccactttgaaaacg

SEQ ID NO: 87086 - DNA, 33 bp, Homo sapien
catcaaagatcaatgatgtccactttgaaaacg

SEQ ID NO: 87087 - DNA, 33 bp, Homo sapien
gttcatggcaagcaacactctcaaaggatcgcc

SEQ ID NO: 87088 - DNA, 33 bp, Homo sapien
gttcatggcaagcaacgctctcaaaggatcgcc

SEQ ID NO: 87089 - DNA, 33 bp, Homo sapien
tcacataatcagcatagaatgaccgttttttct

SEQ ID NO: 87090 - DNA, 33 bp, Homo sapien
tcacataatcagcatataatgaccgttttttct

SEQ ID NO: 87091 - DNA, 33 bp, Homo sapien
ctgaagattctggctacgtatgatatccttcaa

SEQ ID NO: 87092 - DNA, 33 bp, Homo sapien
ctgaagattctggctatgtatgatatccttcaa

SEQ ID NO: 87093 - DNA, 33 bp, Homo sapien
ttacaatccagtttgccaagatcaaaacatttt

SEQ ID NO: 87094 - DNA, 33 bp, Homo sapien
ttacaatccagtttgcgaagatcaaaacatttt

SEQ ID NO: 87095 - DNA, 33 bp, Homo sapien
cacactcttgattgaaaaaatttagtatagtaa

SEQ ID NO: 87096 - DNA, 33 bp, Homo sapien
cacactcttgattgaacaaatttagtatagtaa

SEQ ID NO: 87097 - DNA, 33 bp, Homo sapien
cagtttaccattgagaagatgacgaggaattaa

SEQ ID NO: 87098 - DNA, 33 bp, Homo sapien
cagtttaccattgagaggatgacgaggaattaa

SEQ ID NO: 87099 - DNA, 33 bp, Homo sapien
ttctgtcccagttggagaaatagcaacatcctg

SEQ ID NO: 87100 - DNA, 33 bp, Homo sapien
ttctgtcccagttggataaatagcaacatcctg

SEQ ID NO: 87101 - DNA, 33 bp, Homo sapien
atgccaggtggcagaaagaagacggtgtatggc

SEQ ID NO: 87102 - DNA, 33 bp, Homo sapien
atgccaggtggcagaacgaagacggtgtatggc

SEQ ID NO: 87103 - DNA, 33 bp, Homo sapien
gttgtaaaatgttgcacatagtgagaaaaaagc

SEQ ID NO: 87104 - DNA, 33 bp, Homo sapien
gttgtaaaatgttgcatatagtgagaaaaaagc

SEQ ID NO: 87105 - DNA, 33 bp, Homo sapien
gttatactctagctacacgaggtataaattgga

SEQ ID NO: 87106 - DNA, 33 bp, Homo sapien
gttatactctagctacgcgaggtataaattgga

SEQ ID NO: 87107 - DNA, 33 bp, Homo sapien
tactaatagcagttcacatgatacaaatctcat

SEQ ID NO: 87108 - DNA, 33 bp, Homo sapien
tactaatagcagttcatatgatacaaatctcat

SEQ ID NO: 87109 - DNA, 33 bp, Homo sapien
gctgcagcttttgttccatgctaattggggcta

SEQ ID NO: 87110 - DNA, 33 bp, Homo sapien
gctgcagcttttgttctatgctaattggggcta

SEQ ID NO: 87111 - DNA, 33 bp, Homo sapien
tcatttcataaattcccgaagacagtgaaaggc

SEQ ID NO: 87112 - DNA, 33 bp, Homo sapien
tcatttcataaattcctgaagacagtgaaaggc

SEQ ID NO: 87113 - DNA, 33 bp, Homo sapien
cgttgcctacgtgaaacgagtcctgaagcagga

SEQ ID NO: 87114 - DNA, 33 bp, Homo sapien
cgttgcctacgtgaaatgagtcctgaagcagga

SEQ ID NO: 87115 - DNA, 33 bp, Homo sapien
ttacataagcgcactggaagaaaagaatcaaag

SEQ ID NO: 87116 - DNA, 33 bp, Homo sapien
ttacataagcgcactgtaagaaaagaatcaaag

SEQ ID NO: 87117 - DNA, 33 bp, Homo sapien
gtctgtcaagatggtgcatgtcctatgtaagat

SEQ ID NO: 87118 - DNA, 33 bp, Homo sapien
gtctgtcaagatggtgtatgtcctatgtaagat

SEQ ID NO: 87119 - DNA, 33 bp, Homo sapien
cctaaaattgagttacagaccacatatgtccaa

SEQ ID NO: 87120 - DNA, 33 bp, Homo sapien
cctaaaattgagttactgaccacatatgtccaa

SEQ ID NO: 87121 - DNA, 33 bp, Homo sapien
aattcaattgtaattaaacacacaacatttgta

SEQ ID NO: 87122 - DNA, 33 bp, Homo sapien
aattcaattgtaattagacacacaacatttgta

SEQ ID NO: 87123 - DNA, 33 bp, Homo sapien
taatgaacagataaatcagaagaaaatgtgctt

SEQ ID NO: 87124 - DNA, 33 bp, Homo sapien
taatgaacagataaatgagaagaaaatgtgctt

SEQ ID NO: 87125 - DNA, 33 bp, Homo sapien
gaaatatgcaggcttaacctagagcatcttgta

SEQ ID NO: 87126 - DNA, 33 bp, Homo sapien
gaaatatgcaggcttatcctagagcatcttgta

SEQ ID NO: 87127 - DNA, 33 bp, Homo sapien
tgtggaattagttgccaattgtgatagttatct

SEQ ID NO: 87128 - DNA, 33 bp, Homo sapien
tgtggaattagttgccgattgtgatagttatct

SEQ ID NO: 87129 - DNA, 33 bp, Homo sapien
ttcaaatcctgacctcaataattccaactccag

SEQ ID NO: 87130 - DNA, 33 bp, Homo sapien
ttcaaatcctgacctctataattccaactccag

SEQ ID NO: 87131 - DNA, 33 bp, Homo sapien
aactggggcatggtaaacaatgcggataattgt

SEQ ID NO: 87132 - DNA, 33 bp, Homo sapien
aactggggcatggtaagcaatgcggataattgt

SEQ ID NO: 87133 - DNA, 33 bp, Homo sapien
gtctatgctttagcagaatactgtgcccctgtc

SEQ ID NO: 87134 - DNA, 33 bp, Homo sapien
gtctatgctttagcaggatactgtgcccctgtc

SEQ ID NO: 87135 - DNA, 33 bp, Homo sapien
attgcctacttttccaataagaaatgttatgat

SEQ ID NO: 87136 - DNA, 33 bp, Homo sapien
attgcctacttttccagtaagaaatgttatgat

SEQ ID NO: 87137 - DNA, 33 bp, Homo sapien
aagctatgtggctttacagatcataaaaccagt

SEQ ID NO: 87138 - DNA, 33 bp, Homo sapien
aagctatgtggctttagagatcataaaaccagt

SEQ ID NO: 87139 - DNA, 33 bp, Homo sapien
tgtgctgaagcagtcacgtgtgatttgatgttt

SEQ ID NO: 87140 - DNA, 33 bp, Homo sapien
tgtgctgaagcagtcatgtgtgatttgatgttt

SEQ ID NO: 87141 - DNA, 33 bp, Homo sapien
acatggacgggaaggacgatgagggagttttat

SEQ ID NO: 87142 - DNA, 33 bp, Homo sapien
acatggacgggaaggaggatgagggagttttat

SEQ ID NO: 87143 - DNA, 33 bp, Homo sapien
tctgccacgttgtttcactgtctgcctgcttgt

SEQ ID NO: 87144 - DNA, 33 bp, Homo sapien
tctgccacgttgtttcgctgtctgcctgcttgt

SEQ ID NO: 87145 - DNA, 33 bp, Homo sapien
tggggcctttgccggtaaactgctctcttctac

SEQ ID NO: 87146 - DNA, 33 bp, Homo sapien
tggggcctttgccggtgaactgctctcttctac

SEQ ID NO: 87147 - DNA, 33 bp, Homo sapien
tcacatagctgatgcaagccttgatgcagaaac

SEQ ID NO: 87148 - DNA, 33 bp, Homo sapien
tcacatagctgatgcaggccttgatgcagaaac

SEQ ID NO: 87149 - DNA, 33 bp, Homo sapien
aggtgtaataatcgtacctaggcaaacaaagcg

SEQ ID NO: 87150 - DNA, 33 bp, Homo sapien
aggtgtaataatcgtatctaggcaaacaaagcg

SEQ ID NO: 87151 - DNA, 33 bp, Homo sapien
ttatctcctgtatgatgagtattatgtccgcgt

SEQ ID NO: 87152 - DNA, 33 bp, Homo sapien
ttatctcctgtatgattagtattatgtccgcgt

SEQ ID NO: 87153 - DNA, 33 bp, Homo sapien
gctttgatcactgtgacgttatgtatttaggtt

SEQ ID NO: 87154 - DNA, 33 bp, Homo sapien
gctttgatcactgtgatgttatgtatttaggtt

SEQ ID NO: 87155 - DNA, 33 bp, Homo sapien
tcattaattggtataaagtttcatttaggcagg

SEQ ID NO: 87156 - DNA, 33 bp, Homo sapien
tcattaattggtataaggtttcatttaggcagg

SEQ ID NO: 87157 - DNA, 33 bp, Homo sapien
aacagagagggtggcccactcatcataactccc

SEQ ID NO: 87158 - DNA, 33 bp, Homo sapien
aacagagagggtggcctactcatcataactccc

SEQ ID NO: 87159 - DNA, 33 bp, Homo sapien
aattattgaatttatacgatgggtgcatgacag

SEQ ID NO: 87160 - DNA, 33 bp, Homo sapien
aattattgaatttatatgatgggtgcatgacag

SEQ ID NO: 87161 - DNA, 33 bp, Homo sapien
tctgctctttttgaagcctcctttaaacatgtc

SEQ ID NO: 87162 - DNA, 33 bp, Homo sapien
tctgctctttttgaaggctcctttaaacatgtc

SEQ ID NO: 87163 - DNA, 33 bp, Homo sapien
gtcccaggcactattccaattggcaggaacacc

SEQ ID NO: 87164 - DNA, 33 bp, Homo sapien
gtcccaggcactattctaattggcaggaacacc

SEQ ID NO: 87165 - DNA, 33 bp, Homo sapien
ctccttaactgaactacgaacatcttgagggaa

SEQ ID NO: 87166 - DNA, 33 bp, Homo sapien
ctccttaactgaactatgaacatcttgagggaa

SEQ ID NO: 87167 - DNA, 33 bp, Homo sapien
tttgcttggcgttgaaggttatgacaagcaatg

SEQ ID NO: 87168 - DNA, 33 bp, Homo sapien
tttgcttggcgttgaatgttatgacaagcaatg

SEQ ID NO: 87169 - DNA, 33 bp, Homo sapien
ccatgaacagatatgaataaattgttcaaaaca

SEQ ID NO: 87170 - DNA, 33 bp, Homo sapien
ccatgaacagatatgattaaattgttcaaaaca

SEQ ID NO: 87171 - DNA, 33 bp, Homo sapien
gtaaaagagtaatcacacatattatcatcacat

SEQ ID NO: 87172 - DNA, 33 bp, Homo sapien
gtaaaagagtaatcacgcatattatcatcacat

SEQ ID NO: 87173 - DNA, 33 bp, Homo sapien
caaaggcattcgagacagggggaaggagtgtga

SEQ ID NO: 87174 - DNA, 33 bp, Homo sapien
caaaggcattcgagacggggggaaggagtgtga

SEQ ID NO: 87175 - DNA, 33 bp, Homo sapien
agcatttcagtgatagccacttcgtcccaaaac

SEQ ID NO: 87176 - DNA, 33 bp, Homo sapien
agcatttcagtgatagtcacttcgtcccaaaac

SEQ ID NO: 87177 - DNA, 33 bp, Homo sapien
ttgagcttttaatctacgggagcgacttggaat

SEQ ID NO: 87178 - DNA, 33 bp, Homo sapien
ttgagcttttaatctatgggagcgacttggaat

SEQ ID NO: 87179 - DNA, 33 bp, Homo sapien
agagcacatgctgaagactccgcttggataagg

SEQ ID NO: 87180 - DNA, 33 bp, Homo sapien
agagcacatgctgaaggctccgcttggataagg

SEQ ID NO: 87181 - DNA, 33 bp, Homo sapien
tcacgtgggctgtggcgctagactagatgagac

SEQ ID NO: 87182 - DNA, 33 bp, Homo sapien
tcacgtgggctgtggctctagactagatgagac

SEQ ID NO: 87183 - DNA, 33 bp, Homo sapien
ccacagcccacgtgaaccctgaaaaactgacag

SEQ ID NO: 87184 - DNA, 33 bp, Homo sapien
ccacagcccacgtgaatcctgaaaaactgacag

SEQ ID NO: 87185 - DNA, 33 bp, Homo sapien
acttctttcactagtacacgtttatgtttcatc

SEQ ID NO: 87186 - DNA, 33 bp, Homo sapien
acttctttcactagtatacgtttatgtttcatc

SEQ ID NO: 87187 - DNA, 33 bp, Homo sapien
gagattcatcgacagaaccccgaataggaaaag

SEQ ID NO: 87188 - DNA, 33 bp, Homo sapien
gagattcatcgacagagccccgaataggaaaag

SEQ ID NO: 87189 - DNA, 33 bp, Homo sapien
ttccacttcctaaaaccgttccaagggagatta

SEQ ID NO: 87190 - DNA, 33 bp, Homo sapien
ttccacttcctaaaactgttccaagggagatta

SEQ ID NO: 87191 - DNA, 33 bp, Homo sapien
agcagaaacagcaccaacctttgagcagagtga

SEQ ID NO: 87192 - DNA, 33 bp, Homo sapien
agcagaaacagcaccagcctttgagcagagtga

SEQ ID NO: 87193 - DNA, 33 bp, Homo sapien
tatcacgacactattaaagagagatgtaaccaa

SEQ ID NO: 87194 - DNA, 33 bp, Homo sapien
tatcacgacactattagagagagatgtaaccaa

SEQ ID NO: 87195 - DNA, 33 bp, Homo sapien
ataaatatcgaacatacggatttacgggattca

SEQ ID NO: 87196 - DNA, 33 bp, Homo sapien
ataaatatcgaacatatggatttacgggattca

SEQ ID NO: 87197 - DNA, 33 bp, Homo sapien
cgtggcttcctccacaaaaccgattcggggaga

SEQ ID NO: 87198 - DNA, 33 bp, Homo sapien
cgtggcttcctccacagaaccgattcggggaga

SEQ ID NO: 87199 - DNA, 33 bp, Homo sapien
ccatttcaacagagagaattatcacgttgtcaa

SEQ ID NO: 87200 - DNA, 33 bp, Homo sapien
ccatttcaacagagaggattatcacgttgtcaa

SEQ ID NO: 87201 - DNA, 33 bp, Homo sapien
atctctatttttaccaagattttatcagtgagt

SEQ ID NO: 87202 - DNA, 33 bp, Homo sapien
atctctatttttaccatgattttatcagtgagt

SEQ ID NO: 87203 - DNA, 33 bp, Homo sapien
aaaataacatgcaagaagaactaaaattattgg

SEQ ID NO: 87204 - DNA, 33 bp, Homo sapien
aaaataacatgcaagaggaactaaaattattgg

SEQ ID NO: 87205 - DNA, 33 bp, Homo sapien
aagatatttcaccctcaaggaggcagaggacaa

SEQ ID NO: 87206 - DNA, 33 bp, Homo sapien
aagatatttcaccctctaggaggcagaggacaa

SEQ ID NO: 87207 - DNA, 33 bp, Homo sapien
aggccaggatcaagataaaccccaacaacacta

SEQ ID NO: 87208 - DNA, 33 bp, Homo sapien
aggccaggatcaagatcaaccccaacaacacta

SEQ ID NO: 87209 - DNA, 33 bp, Homo sapien
gagccaatgatttaggaccagtctgagtctgaa

SEQ ID NO: 87210 - DNA, 33 bp, Homo sapien
gagccaatgatttaggtccagtctgagtctgaa

SEQ ID NO: 87211 - DNA, 33 bp, Homo sapien
gaattttgtgtatgcacgtatcttaattaacac

SEQ ID NO: 87212 - DNA, 33 bp, Homo sapien
gaattttgtgtatgcatgtatcttaattaacac

SEQ ID NO: 87213 - DNA, 33 bp, Homo sapien
actttctgtggatgcgcactaagagacgaaaat

SEQ ID NO: 87214 - DNA, 33 bp, Homo sapien
actttctgtggatgcgtactaagagacgaaaat

SEQ ID NO: 87215 - DNA, 33 bp, Homo sapien
gtgtgatggtgggaaaatcatggccaaaggaag

SEQ ID NO: 87216 - DNA, 33 bp, Homo sapien
gtgtgatggtgggaaagtcatggccaaaggaag

SEQ ID NO: 87217 - DNA, 33 bp, Homo sapien
tcttttattactaggcaagcttataaaattatc

SEQ ID NO: 87218 - DNA, 33 bp, Homo sapien
tcttttattactaggcgagcttataaaattatc

SEQ ID NO: 87219 - DNA, 33 bp, Homo sapien
gctgaatcatttgacacagtaattagtagctta

SEQ ID NO: 87220 - DNA, 33 bp, Homo sapien
gctgaatcatttgacatagtaattagtagctta

SEQ ID NO: 87221 - DNA, 33 bp, Homo sapien
tgtgaagtgaaagcccactctgaggcagaacgg

SEQ ID NO: 87222 - DNA, 33 bp, Homo sapien
tgtgaagtgaaagcccgctctgaggcagaacgg

SEQ ID NO: 87223 - DNA, 33 bp, Homo sapien
taataagatagtgaaacgtttgcttggaacaag

SEQ ID NO: 87224 - DNA, 33 bp, Homo sapien
taataagatagtgaaatgtttgcttggaacaag

SEQ ID NO: 87225 - DNA, 33 bp, Homo sapien
caatcggctaaaaccaccctaagtgttgccctc

SEQ ID NO: 87226 - DNA, 33 bp, Homo sapien
caatcggctaaaaccatcctaagtgttgccctc

SEQ ID NO: 87227 - DNA, 33 bp, Homo sapien
caataatgcattcccagcagtaatgtgtaagag

SEQ ID NO: 87228 - DNA, 33 bp, Homo sapien
caataatgcattcccatcagtaatgtgtaagag

SEQ ID NO: 87229 - DNA, 33 bp, Homo sapien
aggacatggatgtctacaagagctttatttgca

SEQ ID NO: 87230 - DNA, 33 bp, Homo sapien
aggacatggatgtctataagagctttatttgca

SEQ ID NO: 87231 - DNA, 33 bp, Homo sapien
ccaaagaagcttcaccaaatttagcacatatat

SEQ ID NO: 87232 - DNA, 33 bp, Homo sapien
ccaaagaagcttcacctaatttagcacatatat

SEQ ID NO: 87233 - DNA, 33 bp, Homo sapien
atttaagtaggaaacaatgtctcaaaacacaac

SEQ ID NO: 87234 - DNA, 33 bp, Homo sapien
atttaagtaggaaacagtgtctcaaaacacaac

SEQ ID NO: 87235 - DNA, 33 bp, Homo sapien
atagtaaaagggaacacatttcattcataggtt

SEQ ID NO: 87236 - DNA, 33 bp, Homo sapien
atagtaaaagggaacatatttcattcataggtt

SEQ ID NO: 87237 - DNA, 33 bp, Homo sapien
taaaattagtagaaaaagcaagtgacagtccct

SEQ ID NO: 87238 - DNA, 33 bp, Homo sapien
taaaattagtagaaaaggcaagtgacagtccct

SEQ ID NO: 87239 - DNA, 33 bp, Homo sapien
cagtccctgaggtggactaactaaggcagagaa

SEQ ID NO: 87240 - DNA, 33 bp, Homo sapien
cagtccctgaggtggattaactaaggcagagaa

SEQ ID NO: 87241 - DNA, 33 bp, Homo sapien
ccattccgtttgcttcacttcctcactcattcg

SEQ ID NO: 87242 - DNA, 33 bp, Homo sapien
ccattccgtttgcttcgcttcctcactcattcg

SEQ ID NO: 87243 - DNA, 33 bp, Homo sapien
gtgtcttgactgaaaaatgaaacgaatgattta

SEQ ID NO: 87244 - DNA, 33 bp, Homo sapien
gtgtcttgactgaaaactgaaacgaatgattta

SEQ ID NO: 87245 - DNA, 33 bp, Homo sapien
atccatttcacacagcaacatagagagagttct

SEQ ID NO: 87246 - DNA, 33 bp, Homo sapien
atccatttcacacagcgacatagagagagttct

SEQ ID NO: 87247 - DNA, 33 bp, Homo sapien
agatatttactggaaaggtcataattggatgaa

SEQ ID NO: 87248 - DNA, 33 bp, Homo sapien
agatatttactggaaatgtcataattggatgaa

SEQ ID NO: 87249 - DNA, 33 bp, Homo sapien
gctttggagaaattgaagagaggccagcgttcc

SEQ ID NO: 87250 - DNA, 33 bp, Homo sapien
gctttggagaaattgaggagaggccagcgttcc

SEQ ID NO: 87251 - DNA, 33 bp, Homo sapien
ttccaggctgtaaatcactggctgaactgcttt

SEQ ID NO: 87252 - DNA, 33 bp, Homo sapien
ttccaggctgtaaatccctggctgaactgcttt

SEQ ID NO: 87253 - DNA, 33 bp, Homo sapien
ctatgtaacagtgatacgtccatgtaggttcat

SEQ ID NO: 87254 - DNA, 33 bp, Homo sapien
ctatgtaacagtgatatgtccatgtaggttcat

SEQ ID NO: 87255 - DNA, 33 bp, Homo sapien
tctggacatattttaacgctgataaataccaag

SEQ ID NO: 87256 - DNA, 33 bp, Homo sapien
tctggacatattttaatgctgataaataccaag

SEQ ID NO: 87257 - DNA, 33 bp, Homo sapien
actcagtggaatggccgaaacccactgacaaca

SEQ ID NO: 87258 - DNA, 33 bp, Homo sapien
actcagtggaatggcctaaacccactgacaaca

SEQ ID NO: 87259 - DNA, 33 bp, Homo sapien
ttgagctgaggtttgaacatgggaaggattcaa

SEQ ID NO: 87260 - DNA, 33 bp, Homo sapien
ttgagctgaggtttgatcatgggaaggattcaa

SEQ ID NO: 87261 - DNA, 33 bp, Homo sapien
tcctgctccgataagaagactgtcacaatgact

SEQ ID NO: 87262 - DNA, 33 bp, Homo sapien
tcctgctccgataagacgactgtcacaatgact

SEQ ID NO: 87263 - DNA, 33 bp, Homo sapien
gagacgcatttatgaaagccacatctcagagac

SEQ ID NO: 87264 - DNA, 33 bp, Homo sapien
gagacgcatttatgaaggccacatctcagagac

SEQ ID NO: 87265 - DNA, 33 bp, Homo sapien
taattaacagagagtaagagggaacactttgtg

SEQ ID NO: 87266 - DNA, 33 bp, Homo sapien
taattaacagagagtatgagggaacactttgtg

SEQ ID NO: 87267 - DNA, 33 bp, Homo sapien
cttacctgtgagcttaaggaacaggagttaatt

SEQ ID NO: 87268 - DNA, 33 bp, Homo sapien
cttacctgtgagcttagggaacaggagttaatt

SEQ ID NO: 87269 - DNA, 33 bp, Homo sapien
tttcaaaccttcccacacagtttgtagcttatc

SEQ ID NO: 87270 - DNA, 33 bp, Homo sapien
tttcaaaccttcccacccagtttgtagcttatc

SEQ ID NO: 87271 - DNA, 33 bp, Homo sapien
ggtactcttctctcaacagtgagcaagttctcc

SEQ ID NO: 87272 - DNA, 33 bp, Homo sapien
ggtactcttctctcaatagtgagcaagttctcc

SEQ ID NO: 87273 - DNA, 33 bp, Homo sapien
tcatttacagtagtcaaaactgattcacagtaa

SEQ ID NO: 87274 - DNA, 33 bp, Homo sapien
tcatttacagtagtcagaactgattcacagtaa

SEQ ID NO: 87275 - DNA, 33 bp, Homo sapien
gaactgggcaaaaatcagagtgagagatgttat

SEQ ID NO: 87276 - DNA, 33 bp, Homo sapien
gaactgggcaaaaatcggagtgagagatgttat

SEQ ID NO: 87277 - DNA, 33 bp, Homo sapien
gagtgaagcaaattacaaaagcacacagcatgc

SEQ ID NO: 87278 - DNA, 33 bp, Homo sapien
gagtgaagcaaattaccaaagcacacagcatgc

SEQ ID NO: 87279 - DNA, 33 bp, Homo sapien
ccaatggagcaagtacaaacatttactgccgat

SEQ ID NO: 87280 - DNA, 33 bp, Homo sapien
ccaatggagcaagtacgaacatttactgccgat

SEQ ID NO: 87281 - DNA, 33 bp, Homo sapien
ttggaattctgagctaagagagcctgcagttgg

SEQ ID NO: 87282 - DNA, 33 bp, Homo sapien
ttggaattctgagctacgagagcctgcagttgg

SEQ ID NO: 87283 - DNA, 33 bp, Homo sapien
ataatttgacttcatacgtagctcttctccagg

SEQ ID NO: 87284 - DNA, 33 bp, Homo sapien
ataatttgacttcatatgtagctcttctccagg

SEQ ID NO: 87285 - DNA, 33 bp, Homo sapien
aatttctttcttgcaccggatcgtacctccatg

SEQ ID NO: 87286 - DNA, 33 bp, Homo sapien
aatttctttcttgcactggatcgtacctccatg

SEQ ID NO: 87287 - DNA, 33 bp, Homo sapien
gcaacgagatctctgacagtaatgggtaaccct

SEQ ID NO: 87288 - DNA, 33 bp, Homo sapien
gcaacgagatctctgatagtaatgggtaaccct

SEQ ID NO: 87289 - DNA, 33 bp, Homo sapien
gagttactggtttgcactgaacagcctggtgga

SEQ ID NO: 87290 - DNA, 33 bp, Homo sapien
gagttactggtttgcattgaacagcctggtgga

SEQ ID NO: 87291 - DNA, 33 bp, Homo sapien
ttgctctgctcttaaacgactgctgctggtgac

SEQ ID NO: 87292 - DNA, 33 bp, Homo sapien
ttgctctgctcttaaaggactgctgctggtgac

SEQ ID NO: 87293 - DNA, 33 bp, Homo sapien
tcaaaaggagacatgaacaaagctgcccaagct

SEQ ID NO: 87294 - DNA, 33 bp, Homo sapien
tcaaaaggagacatgagcaaagctgcccaagct

SEQ ID NO: 87295 - DNA, 33 bp, Homo sapien
tgtttgatatgaaagaagagatttttaaccaga

SEQ ID NO: 87296 - DNA, 33 bp, Homo sapien
tgtttgatatgaaagaggagatttttaaccaga

SEQ ID NO: 87297 - DNA, 33 bp, Homo sapien
cacaaacaaaactgaaatgcaattagaagactt

SEQ ID NO: 87298 - DNA, 33 bp, Homo sapien
cacaaacaaaactgaactgcaattagaagactt

SEQ ID NO: 87299 - DNA, 33 bp, Homo sapien
ttgtaagcattgttcaaataaattacttggcaa

SEQ ID NO: 87300 - DNA, 33 bp, Homo sapien
ttgtaagcattgttcagataaattacttggcaa

SEQ ID NO: 87301 - DNA, 33 bp, Homo sapien
tgcacagaaggaaagcaaagggtgcatgcggct

SEQ ID NO: 87302 - DNA, 33 bp, Homo sapien
tgcacagaaggaaagcgaagggtgcatgcggct

SEQ ID NO: 87303 - DNA, 33 bp, Homo sapien
aaaatttttgcacctgcattgataaccaatgtt

SEQ ID NO: 87304 - DNA, 33 bp, Homo sapien
aaaatttttgcacctgtattgataaccaatgtt

SEQ ID NO: 87305 - DNA, 33 bp, Homo sapien
tcttagtctctattaaggttaccagtggagaat

SEQ ID NO: 87306 - DNA, 33 bp, Homo sapien
tcttagtctctattaatgttaccagtggagaat

SEQ ID NO: 87307 - DNA, 33 bp, Homo sapien
tctgcttactggatccaataaagcataaaatca

SEQ ID NO: 87308 - DNA, 33 bp, Homo sapien
tctgcttactggatccgataaagcataaaatca

SEQ ID NO: 87309 - DNA, 33 bp, Homo sapien
attctactctagaaagaaacttgagatagtatt

SEQ ID NO: 87310 - DNA, 33 bp, Homo sapien
attctactctagaaagcaacttgagatagtatt

SEQ ID NO: 87311 - DNA, 33 bp, Homo sapien
atcctttcctcccagaatacagtagaaaagtta

SEQ ID NO: 87312 - DNA, 33 bp, Homo sapien
atcctttcctcccagattacagtagaaaagtta

SEQ ID NO: 87313 - DNA, 33 bp, Homo sapien
atgcctgggagcaaaactacagaagtaaagtgc

SEQ ID NO: 87314 - DNA, 33 bp, Homo sapien
atgcctgggagcaaaattacagaagtaaagtgc

SEQ ID NO: 87315 - DNA, 33 bp, Homo sapien
accagtactccctccccgaaactgacaatgtca

SEQ ID NO: 87316 - DNA, 33 bp, Homo sapien
accagtactccctccctgaaactgacaatgtca

SEQ ID NO: 87317 - DNA, 33 bp, Homo sapien
tgattccctgagccacaacacaggaaacaaaca

SEQ ID NO: 87318 - DNA, 33 bp, Homo sapien
tgattccctgagccacgacacaggaaacaaaca

SEQ ID NO: 87319 - DNA, 33 bp, Homo sapien
aacccagcattgcccagcggtattaaaagcatg

SEQ ID NO: 87320 - DNA, 33 bp, Homo sapien
aacccagcattgcccatcggtattaaaagcatg

SEQ ID NO: 87321 - DNA, 33 bp, Homo sapien
tcaatttaagcacttaataaatttcctgagctt

SEQ ID NO: 87322 - DNA, 33 bp, Homo sapien
tcaatttaagcacttattaaatttcctgagctt

SEQ ID NO: 87323 - DNA, 33 bp, Homo sapien
tggtgatcctgcaatagctacagggtgagcctg

SEQ ID NO: 87324 - DNA, 33 bp, Homo sapien
tggtgatcctgcaatatctacagggtgagcctg

SEQ ID NO: 87325 - DNA, 33 bp, Homo sapien
aagaacatggagagtaggagaatgccaaacgca

SEQ ID NO: 87326 - DNA, 33 bp, Homo sapien
aagaacatggagagtatgagaatgccaaacgca

SEQ ID NO: 87327 - DNA, 33 bp, Homo sapien
gttttgtttatcccggaaagtcccagccaccgc

SEQ ID NO: 87328 - DNA, 33 bp, Homo sapien
gttttgtttatcccgggaagtcccagccaccgc

SEQ ID NO: 87329 - DNA, 33 bp, Homo sapien
gttgagccaaccagaacgagcttatgagaccag

SEQ ID NO: 87330 - DNA, 33 bp, Homo sapien
gttgagccaaccagaatgagcttatgagaccag

SEQ ID NO: 87331 - DNA, 33 bp, Homo sapien
gatatgaatgagaagacgttcatttttgcacat

SEQ ID NO: 87332 - DNA, 33 bp, Homo sapien
gatatgaatgagaagatgttcatttttgcacat

SEQ ID NO: 87333 - DNA, 33 bp, Homo sapien
agaagtatagcaagtaaaggctgcatattccag

SEQ ID NO: 87334 - DNA, 33 bp, Homo sapien
agaagtatagcaagtagaggctgcatattccag

SEQ ID NO: 87335 - DNA, 33 bp, Homo sapien
gcaaggctgcaatcaaagtgagagagacaggtt

SEQ ID NO: 87336 - DNA, 33 bp, Homo sapien
gcaaggctgcaatcaaggtgagagagacaggtt

SEQ ID NO: 87337 - DNA, 33 bp, Homo sapien
ttcagcatttgccaataaagtgaaataaataat

SEQ ID NO: 87338 - DNA, 33 bp, Homo sapien
ttcagcatttgccaatcaagtgaaataaataat

SEQ ID NO: 87339 - DNA, 33 bp, Homo sapien
taattttaatgctccacgtctttcccgaaagcc

SEQ ID NO: 87340 - DNA, 33 bp, Homo sapien
taattttaatgctccatgtctttcccgaaagcc

SEQ ID NO: 87341 - DNA, 33 bp, Homo sapien
agagaagtgtggggtaaaatccgttagataaga

SEQ ID NO: 87342 - DNA, 33 bp, Homo sapien
agagaagtgtggggtacaatccgttagataaga

SEQ ID NO: 87343 - DNA, 33 bp, Homo sapien
cagtttggggagactgaacaaagctaagatact

SEQ ID NO: 87344 - DNA, 33 bp, Homo sapien
cagtttggggagactgtacaaagctaagatact

SEQ ID NO: 87345 - DNA, 33 bp, Homo sapien
tcttggaaaaggaaacacccttgtgagaactga

SEQ ID NO: 87346 - DNA, 33 bp, Homo sapien
tcttggaaaaggaaactcccttgtgagaactga

SEQ ID NO: 87347 - DNA, 33 bp, Homo sapien
catgaacaacattctgaaattgctgatagatat

SEQ ID NO: 87348 - DNA, 33 bp, Homo sapien
catgaacaacattctggaattgctgatagatat

SEQ ID NO: 87349 - DNA, 33 bp, Homo sapien
aaaaacagggaaggtaccatggagaaagtgtct

SEQ ID NO: 87350 - DNA, 33 bp, Homo sapien
aaaaacagggaaggtatcatggagaaagtgtct

SEQ ID NO: 87351 - DNA, 33 bp, Homo sapien
gttccagccaaaaatacaccttaaatcactgaa

SEQ ID NO: 87352 - DNA, 33 bp, Homo sapien
gttccagccaaaaatataccttaaatcactgaa

SEQ ID NO: 87353 - DNA, 33 bp, Homo sapien
ttctgtgaaaatttgaccattgtttcacagccc

SEQ ID NO: 87354 - DNA, 33 bp, Homo sapien
ttctgtgaaaatttgatcattgtttcacagccc

SEQ ID NO: 87355 - DNA, 33 bp, Homo sapien
attcctcacaacatgccctaacggtgccgttga

SEQ ID NO: 87356 - DNA, 33 bp, Homo sapien
attcctcacaacatgctctaacggtgccgttga

SEQ ID NO: 87357 - DNA, 33 bp, Homo sapien
agttatacagcggttgcaaggaaacacagagat

SEQ ID NO: 87358 - DNA, 33 bp, Homo sapien
agttatacagcggttggaaggaaacacagagat

SEQ ID NO: 87359 - DNA, 33 bp, Homo sapien
ttaggaaagcatcgataaattctgacttagtca

SEQ ID NO: 87360 - DNA, 33 bp, Homo sapien
ttaggaaagcatcgatgaattctgacttagtca

SEQ ID NO: 87361 - DNA, 33 bp, Homo sapien
catttcagcctgtagacagtggcccgtggcaat

SEQ ID NO: 87362 - DNA, 33 bp, Homo sapien
catttcagcctgtagatagtggcccgtggcaat

SEQ ID NO: 87363 - DNA, 33 bp, Homo sapien
taggatgtaaaaggaaagcagcaaagatgtgta

SEQ ID NO: 87364 - DNA, 33 bp, Homo sapien
taggatgtaaaaggaaggcagcaaagatgtgta

SEQ ID NO: 87365 - DNA, 33 bp, Homo sapien
gtttttccagtttggtcaaacatttggacattt

SEQ ID NO: 87366 - DNA, 33 bp, Homo sapien
gtttttccagtttggttaaacatttggacattt

SEQ ID NO: 87367 - DNA, 33 bp, Homo sapien
agccactaggaaccgacgtagaaattatagaaa

SEQ ID NO: 87368 - DNA, 33 bp, Homo sapien
agccactaggaaccgatgtagaaattatagaaa

SEQ ID NO: 87369 - DNA, 33 bp, Homo sapien
ggctatataagaactacgaacctcagaacctca

SEQ ID NO: 87370 - DNA, 33 bp, Homo sapien
ggctatataagaactaggaacctcagaacctca

SEQ ID NO: 87371 - DNA, 33 bp, Homo sapien
agtaggccctgttatccgagtttctgtctctaa

SEQ ID NO: 87372 - DNA, 33 bp, Homo sapien
agtaggccctgttatctgagtttctgtctctaa

SEQ ID NO: 87373 - DNA, 33 bp, Homo sapien
tttatatggtaaattcagaataattacagagcc

SEQ ID NO: 87374 - DNA, 33 bp, Homo sapien
tttatatggtaaattcggaataattacagagcc

SEQ ID NO: 87375 - DNA, 33 bp, Homo sapien
ttgctcagtcttctcactagacacaaatcccta

SEQ ID NO: 87376 - DNA, 33 bp, Homo sapien
ttgctcagtcttctcattagacacaaatcccta

SEQ ID NO: 87377 - DNA, 33 bp, Homo sapien
cttccaagcgtcccccaaagacagaataaaatt

SEQ ID NO: 87378 - DNA, 33 bp, Homo sapien
cttccaagcgtcccccgaagacagaataaaatt

SEQ ID NO: 87379 - DNA, 33 bp, Homo sapien
tgtacacttgagtgtaagtagagcagaagtgtt

SEQ ID NO: 87380 - DNA, 33 bp, Homo sapien
tgtacacttgagtgtatgtagagcagaagtgtt

SEQ ID NO: 87381 - DNA, 33 bp, Homo sapien
ggcaagtgttttgtgaaaagtcaagtgggaaaa

SEQ ID NO: 87382 - DNA, 33 bp, Homo sapien
ggcaagtgttttgtgagaagtcaagtgggaaaa

SEQ ID NO: 87383 - DNA, 33 bp, Homo sapien
gatatataaaaggtatcagtcagaagtgaagaa

SEQ ID NO: 87384 - DNA, 33 bp, Homo sapien
gatatataaaaggtatgagtcagaagtgaagaa

SEQ ID NO: 87385 - DNA, 33 bp, Homo sapien
cttcacgcacactgtacgatttacgttctgtag

SEQ ID NO: 87386 - DNA, 33 bp, Homo sapien
cttcacgcacactgtatgatttacgttctgtag

SEQ ID NO: 87387 - DNA, 33 bp, Homo sapien
atgcaaggtcaaaggacgcgtttctcataccac

SEQ ID NO: 87388 - DNA, 33 bp, Homo sapien
atgcaaggtcaaaggatgcgtttctcataccac

SEQ ID NO: 87389 - DNA, 33 bp, Homo sapien
aacttaaaatggtccccatggtctgattcgtac

SEQ ID NO: 87390 - DNA, 33 bp, Homo sapien
aacttaaaatggtcccgatggtctgattcgtac

SEQ ID NO: 87391 - DNA, 33 bp, Homo sapien
acctcacttgtttccaaacagattcttcatcat

SEQ ID NO: 87392 - DNA, 33 bp, Homo sapien
acctcacttgtttccagacagattcttcatcat

SEQ ID NO: 87393 - DNA, 33 bp, Homo sapien
gtattcacaacctgcaggcctttgactgatgtt

SEQ ID NO: 87394 - DNA, 33 bp, Homo sapien
gtattcacaacctgcatgcctttgactgatgtt

SEQ ID NO: 87395 - DNA, 33 bp, Homo sapien
cctggaaatatagtaccaggaaaatataggact

SEQ ID NO: 87396 - DNA, 33 bp, Homo sapien
cctggaaatatagtactaggaaaatataggact

SEQ ID NO: 87397 - DNA, 33 bp, Homo sapien
tcatacactttgaaaccgaaaacatttaaactc

SEQ ID NO: 87398 - DNA, 33 bp, Homo sapien
tcatacactttgaaactgaaaacatttaaactc

SEQ ID NO: 87399 - DNA, 33 bp, Homo sapien
tcaggctatttcaaccacagttacctcacccat

SEQ ID NO: 87400 - DNA, 33 bp, Homo sapien
tcaggctatttcaacctcagttacctcacccat

SEQ ID NO: 87401 - DNA, 33 bp, Homo sapien
ttctccttgtttcccacgtatcatccctctgcg

SEQ ID NO: 87402 - DNA, 33 bp, Homo sapien
ttctccttgtttcccaggtatcatccctctgcg

SEQ ID NO: 87403 - DNA, 33 bp, Homo sapien
accatgaatataaagaatctgcatagtactaag

SEQ ID NO: 87404 - DNA, 33 bp, Homo sapien
accatgaatataaagagtctgcatagtactaag

SEQ ID NO: 87405 - DNA, 33 bp, Homo sapien
ctagtaggtaacaccacggctttctcaaatctc

SEQ ID NO: 87406 - DNA, 33 bp, Homo sapien
ctagtaggtaacaccatggctttctcaaatctc

SEQ ID NO: 87407 - DNA, 33 bp, Homo sapien
cccacagaatttgataactcaacctttgatgga

SEQ ID NO: 87408 - DNA, 33 bp, Homo sapien
cccacagaatttgatacctcaacctttgatgga

SEQ ID NO: 87409 - DNA, 33 bp, Homo sapien
gattcttgaaatacagaagactgattattaagg

SEQ ID NO: 87410 - DNA, 33 bp, Homo sapien
gattcttgaaatacaggagactgattattaagg

SEQ ID NO: 87411 - DNA, 33 bp, Homo sapien
ataaatgataaaccacactgacgataatcttag

SEQ ID NO: 87412 - DNA, 33 bp, Homo sapien
ataaatgataaaccacgctgacgataatcttag

SEQ ID NO: 87413 - DNA, 33 bp, Homo sapien
tcagctcacaccaggacgccttccctagtgaat

SEQ ID NO: 87414 - DNA, 33 bp, Homo sapien
tcagctcacaccaggatgccttccctagtgaat

SEQ ID NO: 87415 - DNA, 33 bp, Homo sapien
tttgcatagcctgagggcccaaagttttcttct

SEQ ID NO: 87416 - DNA, 33 bp, Homo sapien
tttgcatagcctgaggtcccaaagttttcttct

SEQ ID NO: 87417 - DNA, 33 bp, Homo sapien
gagacaacgcaaagcccggaatggccatttggc

SEQ ID NO: 87418 - DNA, 33 bp, Homo sapien
gagacaacgcaaagcctggaatggccatttggc

SEQ ID NO: 87419 - DNA, 33 bp, Homo sapien
tctgttggtctctatcacatttctctgcttcat

SEQ ID NO: 87420 - DNA, 33 bp, Homo sapien
tctgttggtctctatcccatttctctgcttcat

SEQ ID NO: 87421 - DNA, 33 bp, Homo sapien
ctagagccttcagaaggagcgttgtccagcaac

SEQ ID NO: 87422 - DNA, 33 bp, Homo sapien
ctagagccttcagaagtagcgttgtccagcaac

SEQ ID NO: 87423 - DNA, 33 bp, Homo sapien
cctcattttctgggagccagaaatccgaaatca

SEQ ID NO: 87424 - DNA, 33 bp, Homo sapien
cctcattttctgggaggcagaaatccgaaatca

SEQ ID NO: 87425 - DNA, 33 bp, Homo sapien
caatcacaggctccttcaactcaagacttggaa

SEQ ID NO: 87426 - DNA, 33 bp, Homo sapien
caatcacaggctccttgaactcaagacttggaa

SEQ ID NO: 87427 - DNA, 33 bp, Homo sapien
tcactatgctgttatacactgttattgcttgtg

SEQ ID NO: 87428 - DNA, 33 bp, Homo sapien
tcactatgctgttatatactgttattgcttgtg

SEQ ID NO: 87429 - DNA, 33 bp, Homo sapien
ctaagtgcattatctaatacaccttgttgtctt

SEQ ID NO: 87430 - DNA, 33 bp, Homo sapien
ctaagtgcattatctactacaccttgttgtctt

SEQ ID NO: 87431 - DNA, 33 bp, Homo sapien
agtttatcatcaatcactaagtattcacaatgt

SEQ ID NO: 87432 - DNA, 33 bp, Homo sapien
agtttatcatcaatcattaagtattcacaatgt

SEQ ID NO: 87433 - DNA, 33 bp, Homo sapien
aatgtggctgcaaatcccatctccgaattagac

SEQ ID NO: 87434 - DNA, 33 bp, Homo sapien
aatgtggctgcaaatctcatctccgaattagac

SEQ ID NO: 87435 - DNA, 33 bp, Homo sapien
agaagcattttttaccagaagtgtcaggggtca

SEQ ID NO: 87436 - DNA, 33 bp, Homo sapien
agaagcattttttaccggaagtgtcaggggtca

SEQ ID NO: 87437 - DNA, 33 bp, Homo sapien
accctcatgatacttcacagatacggaaaagat

SEQ ID NO: 87438 - DNA, 33 bp, Homo sapien
accctcatgatacttcgcagatacggaaaagat

SEQ ID NO: 87439 - DNA, 33 bp, Homo sapien
ttaggcccattaaccacagatgcatgatgacaa

SEQ ID NO: 87440 - DNA, 33 bp, Homo sapien
ttaggcccattaaccatagatgcatgatgacaa

SEQ ID NO: 87441 - DNA, 33 bp, Homo sapien
tctcctacctaaatacaagagcttggactcgat

SEQ ID NO: 87442 - DNA, 33 bp, Homo sapien
tctcctacctaaatacgagagcttggactcgat

SEQ ID NO: 87443 - DNA, 33 bp, Homo sapien
tgaagtcactgatggacatcacgcattccactt

SEQ ID NO: 87444 - DNA, 33 bp, Homo sapien
tgaagtcactgatggatatcacgcattccactt

SEQ ID NO: 87445 - DNA, 33 bp, Homo sapien
tggaataaatacgaaaggtaagaacaaacaaaa

SEQ ID NO: 87446 - DNA, 33 bp, Homo sapien
tggaataaatacgaaatgtaagaacaaacaaaa

SEQ ID NO: 87447 - DNA, 33 bp, Homo sapien
tgctctgtcactcagacgaaagtacattggtac

SEQ ID NO: 87448 - DNA, 33 bp, Homo sapien
tgctctgtcactcagatgaaagtacattggtac

SEQ ID NO: 87449 - DNA, 33 bp, Homo sapien
tctctaatcactgccccccaaattgttaagtaa

SEQ ID NO: 87450 - DNA, 33 bp, Homo sapien
tctctaatcactgccctccaaattgttaagtaa

SEQ ID NO: 87451 - DNA, 33 bp, Homo sapien
gactttaccaatggcactaaagagtttctgaag

SEQ ID NO: 87452 - DNA, 33 bp, Homo sapien
gactttaccaatggcagtaaagagtttctgaag

SEQ ID NO: 87453 - DNA, 33 bp, Homo sapien
catcttaagtagtgcaccgtcaaaaaaatccat

SEQ ID NO: 87454 - DNA, 33 bp, Homo sapien
catcttaagtagtgcatcgtcaaaaaaatccat

SEQ ID NO: 87455 - DNA, 33 bp, Homo sapien
tgattgagaaattccactgattgggcgagacaa

SEQ ID NO: 87456 - DNA, 33 bp, Homo sapien
tgattgagaaattccattgattgggcgagacaa

SEQ ID NO: 87457 - DNA, 33 bp, Homo sapien
agagaatgacttagcaagttttctgacagagct

SEQ ID NO: 87458 - DNA, 33 bp, Homo sapien
agagaatgacttagcacgttttctgacagagct

SEQ ID NO: 87459 - DNA, 33 bp, Homo sapien
tgaacaggaggaaagactaggcagatatctttt

SEQ ID NO: 87460 - DNA, 33 bp, Homo sapien
tgaacaggaggaaagagtaggcagatatctttt

SEQ ID NO: 87461 - DNA, 33 bp, Homo sapien
tcttctgttacttaaactcttatcatgttggga

SEQ ID NO: 87462 - DNA, 33 bp, Homo sapien
tcttctgttacttaaagtcttatcatgttggga

SEQ ID NO: 87463 - DNA, 33 bp, Homo sapien
tttgctgtctaacataaaagaatcagcagaatt

SEQ ID NO: 87464 - DNA, 33 bp, Homo sapien
tttgctgtctaacatagaagaatcagcagaatt

SEQ ID NO: 87465 - DNA, 33 bp, Homo sapien
atttaacaaaaaaatacatatactgtccaatat

SEQ ID NO: 87466 - DNA, 33 bp, Homo sapien
atttaacaaaaaaatagatatactgtccaatat

SEQ ID NO: 87467 - DNA, 33 bp, Homo sapien
ggagttactggcatctcacgcccatcttcatgc

SEQ ID NO: 87468 - DNA, 33 bp, Homo sapien
ggagttactggcatctgacgcccatcttcatgc

SEQ ID NO: 87469 - DNA, 33 bp, Homo sapien
tatttgcagtgatcaaagattttcagtggaagt

SEQ ID NO: 87470 - DNA, 33 bp, Homo sapien
tatttgcagtgatcaacgattttcagtggaagt

SEQ ID NO: 87471 - DNA, 33 bp, Homo sapien
gggagctaggatccaccggatgaattcatttct

SEQ ID NO: 87472 - DNA, 33 bp, Homo sapien
gggagctaggatccactggatgaattcatttct

SEQ ID NO: 87473 - DNA, 33 bp, Homo sapien
gaaaagacaaatgacaaactgaaagatgacatg

SEQ ID NO: 87474 - DNA, 33 bp, Homo sapien
gaaaagacaaatgacagactgaaagatgacatg

SEQ ID NO: 87475 - DNA, 33 bp, Homo sapien
ctgaatcagtgccagaaaagtggacatacattt

SEQ ID NO: 87476 - DNA, 33 bp, Homo sapien
ctgaatcagtgccagagaagtggacatacattt

SEQ ID NO: 87477 - DNA, 33 bp, Homo sapien
cagatgctgctgtctacgtggatttgcccagat

SEQ ID NO: 87478 - DNA, 33 bp, Homo sapien
cagatgctgctgtctatgtggatttgcccagat

SEQ ID NO: 87479 - DNA, 33 bp, Homo sapien
gctcaatccctatccagctggcttctcctcgtt

SEQ ID NO: 87480 - DNA, 33 bp, Homo sapien
gctcaatccctatccatctggcttctcctcgtt

SEQ ID NO: 87481 - DNA, 33 bp, Homo sapien
gctgtgtaacaaattaccgtaaccttacatctt

SEQ ID NO: 87482 - DNA, 33 bp, Homo sapien
gctgtgtaacaaattagcgtaaccttacatctt

SEQ ID NO: 87483 - DNA, 33 bp, Homo sapien
taactttggtatcagtaaagtgggacaatcaga

SEQ ID NO: 87484 - DNA, 33 bp, Homo sapien
taactttggtatcagtgaagtgggacaatcaga

SEQ ID NO: 87485 - DNA, 33 bp, Homo sapien
tatgttctcatttctaagtccttaactaaacaa

SEQ ID NO: 87486 - DNA, 33 bp, Homo sapien
tatgttctcatttctatgtccttaactaaacaa

SEQ ID NO: 87487 - DNA, 33 bp, Homo sapien
caagcttccctagctacgttgttggccacgtga

SEQ ID NO: 87488 - DNA, 33 bp, Homo sapien
caagcttccctagctatgttgttggccacgtga

SEQ ID NO: 87489 - DNA, 33 bp, Homo sapien
tgatagatgatgcgaacgaccccaatttctcac

SEQ ID NO: 87490 - DNA, 33 bp, Homo sapien
tgatagatgatgcgaatgaccccaatttctcac

SEQ ID NO: 87491 - DNA, 33 bp, Homo sapien
atagccctagtacagcaaaagaagtggatggag

SEQ ID NO: 87492 - DNA, 33 bp, Homo sapien
atagccctagtacagcgaaagaagtggatggag

SEQ ID NO: 87493 - DNA, 33 bp, Homo sapien
agccacttactaagccacagagttcagataccc

SEQ ID NO: 87494 - DNA, 33 bp, Homo sapien
agccacttactaagcctcagagttcagataccc

SEQ ID NO: 87495 - DNA, 33 bp, Homo sapien
agccccaaaaagaattaaaaggcgaggcaatgg

SEQ ID NO: 87496 - DNA, 33 bp, Homo sapien
agccccaaaaagaattcaaaggcgaggcaatgg

SEQ ID NO: 87497 - DNA, 33 bp, Homo sapien
acgcatctccatatcaatacaggagtccaacaa

SEQ ID NO: 87498 - DNA, 33 bp, Homo sapien
acgcatctccatatcagtacaggagtccaacaa

SEQ ID NO: 87499 - DNA, 33 bp, Homo sapien
acaggagtccaacaagaaagtgtgtctgactgc

SEQ ID NO: 87500 - DNA, 33 bp, Homo sapien
acaggagtccaacaagtaagtgtgtctgactgc

SEQ ID NO: 87501 - DNA, 33 bp, Homo sapien
ctcctgagggccacaaagacgtgccactgatgg

SEQ ID NO: 87502 - DNA, 33 bp, Homo sapien
ctcctgagggccacaaggacgtgccactgatgg

SEQ ID NO: 87503 - DNA, 33 bp, Homo sapien
tcagggcagatcgtagaaactaagattttaaac

SEQ ID NO: 87504 - DNA, 33 bp, Homo sapien
tcagggcagatcgtaggaactaagattttaaac

SEQ ID NO: 87505 - DNA, 33 bp, Homo sapien
cacacacacacgaccacaagttgaagagacaca

SEQ ID NO: 87506 - DNA, 33 bp, Homo sapien
cacacacacacgaccataagttgaagagacaca

SEQ ID NO: 87507 - DNA, 33 bp, Homo sapien
ggactcctgttccttcccattgcttcttctggt

SEQ ID NO: 87508 - DNA, 33 bp, Homo sapien
ggactcctgttccttctcattgcttcttctggt

SEQ ID NO: 87509 - DNA, 33 bp, Homo sapien
ctttcttgctgatgaaaataagaaaccttctag

SEQ ID NO: 87510 - DNA, 33 bp, Homo sapien
ctttcttgctgatgaagataagaaaccttctag

SEQ ID NO: 87511 - DNA, 33 bp, Homo sapien
cattctttggccaggcaagaaacctctatcatg

SEQ ID NO: 87512 - DNA, 33 bp, Homo sapien
cattctttggccaggcgagaaacctctatcatg

SEQ ID NO: 87513 - DNA, 33 bp, Homo sapien
tctgatgcatcgcataactgtaacggtggacac

SEQ ID NO: 87514 - DNA, 33 bp, Homo sapien
tctgatgcatcgcatagctgtaacggtggacac

SEQ ID NO: 87515 - DNA, 33 bp, Homo sapien
cactgtaggaaatacacgaagtacggaaagtac

SEQ ID NO: 87516 - DNA, 33 bp, Homo sapien
cactgtaggaaatacatgaagtacggaaagtac

SEQ ID NO: 87517 - DNA, 33 bp, Homo sapien
tgtttctatctttcacaaagcttacataattct

SEQ ID NO: 87518 - DNA, 33 bp, Homo sapien
tgtttctatctttcacgaagcttacataattct

SEQ ID NO: 87519 - DNA, 33 bp, Homo sapien
tttaattgtattgataagaaatctgaggagaaa

SEQ ID NO: 87520 - DNA, 33 bp, Homo sapien
tttaattgtattgataggaaatctgaggagaaa

SEQ ID NO: 87521 - DNA, 33 bp, Homo sapien
actgctgaaaaaactaactgcaaatttattgaa

SEQ ID NO: 87522 - DNA, 33 bp, Homo sapien
actgctgaaaaaactagctgcaaatttattgaa

SEQ ID NO: 87523 - DNA, 33 bp, Homo sapien
actcatttcccactaacgcctggagaattctgc

SEQ ID NO: 87524 - DNA, 33 bp, Homo sapien
actcatttcccactaatgcctggagaattctgc

SEQ ID NO: 87525 - DNA, 33 bp, Homo sapien
cctaccactaattcaaattctatgagtgcaaag

SEQ ID NO: 87526 - DNA, 33 bp, Homo sapien
cctaccactaattcaacttctatgagtgcaaag

SEQ ID NO: 87527 - DNA, 33 bp, Homo sapien
aggaactgtggcatccaagaagttttcaaagca

SEQ ID NO: 87528 - DNA, 33 bp, Homo sapien
aggaactgtggcatccgagaagttttcaaagca

SEQ ID NO: 87529 - DNA, 33 bp, Homo sapien
ctcataaaagtcgccaaataaatgaaaattcga

SEQ ID NO: 87530 - DNA, 33 bp, Homo sapien
ctcataaaagtcgccagataaatgaaaattcga

SEQ ID NO: 87531 - DNA, 33 bp, Homo sapien
aagtgtctttgaccagaatagtaacttgcaaat

SEQ ID NO: 87532 - DNA, 33 bp, Homo sapien
aagtgtctttgaccaggatagtaacttgcaaat

SEQ ID NO: 87533 - DNA, 33 bp, Homo sapien
cgtttaatattcaccaaaggaaagcatctcgtt

SEQ ID NO: 87534 - DNA, 33 bp, Homo sapien
cgtttaatattcaccacaggaaagcatctcgtt

SEQ ID NO: 87535 - DNA, 33 bp, Homo sapien
ttccagaaggtcctcaagttggctcgacggagc

SEQ ID NO: 87536 - DNA, 33 bp, Homo sapien
ttccagaaggtcctcaggttggctcgacggagc

SEQ ID NO: 87537 - DNA, 33 bp, Homo sapien
gtgactgtggaaaacaaaccagatattcaagtt

SEQ ID NO: 87538 - DNA, 33 bp, Homo sapien
gtgactgtggaaaacagaccagatattcaagtt

SEQ ID NO: 87539 - DNA, 33 bp, Homo sapien
tcaagaaactgtgagaacaagtcaaattaaaac

SEQ ID NO: 87540 - DNA, 33 bp, Homo sapien
tcaagaaactgtgagaccaagtcaaattaaaac

SEQ ID NO: 87541 - DNA, 33 bp, Homo sapien
taacacataatcatcgacaagtgaattctagaa

SEQ ID NO: 87542 - DNA, 33 bp, Homo sapien
taacacataatcatcggcaagtgaattctagaa

SEQ ID NO: 87543 - DNA, 33 bp, Homo sapien
aaatgaaatttcaacaaacacaaaaggagacaa

SEQ ID NO: 87544 - DNA, 33 bp, Homo sapien
aaatgaaatttcaacagacacaaaaggagacaa

SEQ ID NO: 87545 - DNA, 33 bp, Homo sapien
tgatgctcttcactcactaagtaaatttgagtt

SEQ ID NO: 87546 - DNA, 33 bp, Homo sapien
tgatgctcttcactcattaagtaaatttgagtt

SEQ ID NO: 87547 - DNA, 33 bp, Homo sapien
aacagatatttggtaccagttagtagagtcagg

SEQ ID NO: 87548 - DNA, 33 bp, Homo sapien
aacagatatttggtactagttagtagagtcagg

SEQ ID NO: 87549 - DNA, 33 bp, Homo sapien
taaagtttagttttcaagatcctctgtgattca

SEQ ID NO: 87550 - DNA, 33 bp, Homo sapien
taaagtttagttttcaggatcctctgtgattca

SEQ ID NO: 87551 - DNA, 33 bp, Homo sapien
ctagtaacataatactcaaggtgacccaatgca

SEQ ID NO: 87552 - DNA, 33 bp, Homo sapien
ctagtaacataatactgaaggtgacccaatgca

SEQ ID NO: 87553 - DNA, 33 bp, Homo sapien
aggtttctggggcagtcaatttttggagtgaag

SEQ ID NO: 87554 - DNA, 33 bp, Homo sapien
aggtttctggggcagtgaatttttggagtgaag

SEQ ID NO: 87555 - DNA, 33 bp, Homo sapien
tgccgaaagccagctcagacatgttcactcggc

SEQ ID NO: 87556 - DNA, 33 bp, Homo sapien
tgccgaaagccagctcggacatgttcactcggc

SEQ ID NO: 87557 - DNA, 33 bp, Homo sapien
atgctatataaaatggcaggaaagacgcagaaa

SEQ ID NO: 87558 - DNA, 33 bp, Homo sapien
atgctatataaaatggtaggaaagacgcagaaa

SEQ ID NO: 87559 - DNA, 33 bp, Homo sapien
atgttaagcagaagtgaaatctgtgtagcactg

SEQ ID NO: 87560 - DNA, 33 bp, Homo sapien
atgttaagcagaagtggaatctgtgtagcactg

SEQ ID NO: 87561 - DNA, 33 bp, Homo sapien
aaatttaccaagattgaacaagtttaggaaaac

SEQ ID NO: 87562 - DNA, 33 bp, Homo sapien
aaatttaccaagattggacaagtttaggaaaac

SEQ ID NO: 87563 - DNA, 33 bp, Homo sapien
gctgtttcgcctcttgaacctgggccttcttgg

SEQ ID NO: 87564 - DNA, 33 bp, Homo sapien
gctgtttcgcctcttggacctgggccttcttgg

SEQ ID NO: 87565 - DNA, 33 bp, Homo sapien
agtgattcaaccaaataatgccaaaatcccaga

SEQ ID NO: 87566 - DNA, 33 bp, Homo sapien
agtgattcaaccaaatgatgccaaaatcccaga

SEQ ID NO: 87567 - DNA, 33 bp, Homo sapien
attctctacctaatgaacaattgcatttgattc

SEQ ID NO: 87568 - DNA, 33 bp, Homo sapien
attctctacctaatgagcaattgcatttgattc

SEQ ID NO: 87569 - DNA, 33 bp, Homo sapien
aatatcgcatggtcaacgaaacaatcccattta

SEQ ID NO: 87570 - DNA, 33 bp, Homo sapien
aatatcgcatggtcaatgaaacaatcccattta

SEQ ID NO: 87571 - DNA, 33 bp, Homo sapien
ttggctggtctacggtaaaccgggcggtcatca

SEQ ID NO: 87572 - DNA, 33 bp, Homo sapien
ttggctggtctacggtgaaccgggcggtcatca

SEQ ID NO: 87573 - DNA, 33 bp, Homo sapien
agtcttgaggaaagcgaaggattacataaaacc

SEQ ID NO: 87574 - DNA, 33 bp, Homo sapien
agtcttgaggaaagcgcaggattacataaaacc

SEQ ID NO: 87575 - DNA, 33 bp, Homo sapien
gaaaccagttggtaaaatgttgtctgcaggtaa

SEQ ID NO: 87576 - DNA, 33 bp, Homo sapien
gaaaccagttggtaaagtgttgtctgcaggtaa

SEQ ID NO: 87577 - DNA, 33 bp, Homo sapien
aatttgaaggcattgaaagaagagctgtgtgtt

SEQ ID NO: 87578 - DNA, 33 bp, Homo sapien
aatttgaaggcattgatagaagagctgtgtgtt

SEQ ID NO: 87579 - DNA, 33 bp, Homo sapien
tattttaaatgcagaaacagacatagggttaaa

SEQ ID NO: 87580 - DNA, 33 bp, Homo sapien
tattttaaatgcagaatcagacatagggttaaa

SEQ ID NO: 87581 - DNA, 33 bp, Homo sapien
gtgaatttgaaaatgaagagtgaagtgaaaccc

SEQ ID NO: 87582 - DNA, 33 bp, Homo sapien
gtgaatttgaaaatgacgagtgaagtgaaaccc

SEQ ID NO: 87583 - DNA, 33 bp, Homo sapien
caataccagaaatagaactaagttgaaaagaag

SEQ ID NO: 87584 - DNA, 33 bp, Homo sapien
caataccagaaatagatctaagttgaaaagaag

SEQ ID NO: 87585 - DNA, 33 bp, Homo sapien
ttccacgaaaatataaaaggtgcagtcgctttt

SEQ ID NO: 87586 - DNA, 33 bp, Homo sapien
ttccacgaaaatataagaggtgcagtcgctttt

SEQ ID NO: 87587 - DNA, 33 bp, Homo sapien
acagctttgaactgcaaggcagaatgtggccat

SEQ ID NO: 87588 - DNA, 33 bp, Homo sapien
acagctttgaactgcagggcagaatgtggccat

SEQ ID NO: 87589 - DNA, 33 bp, Homo sapien
ggggaggaagtggctacgtgctctgacccggga

SEQ ID NO: 87590 - DNA, 33 bp, Homo sapien
ggggaggaagtggctaggtgctctgacccggga

SEQ ID NO: 87591 - DNA, 33 bp, Homo sapien
tctgaacatacaagaccctcagaaactcagatt

SEQ ID NO: 87592 - DNA, 33 bp, Homo sapien
tctgaacatacaagactctcagaaactcagatt

SEQ ID NO: 87593 - DNA, 33 bp, Homo sapien
ccctcaattatcttacaagtgaaccctgcaagt

SEQ ID NO: 87594 - DNA, 33 bp, Homo sapien
ccctcaattatcttacgagtgaaccctgcaagt

SEQ ID NO: 87595 - DNA, 33 bp, Homo sapien
tcaattttatatacgacgtaagggagagttgct

SEQ ID NO: 87596 - DNA, 33 bp, Homo sapien
tcaattttatatacgatgtaagggagagttgct

SEQ ID NO: 87597 - DNA, 33 bp, Homo sapien
actggaatcataaagacggtttgaagacagttt

SEQ ID NO: 87598 - DNA, 33 bp, Homo sapien
actggaatcataaagatggtttgaagacagttt

SEQ ID NO: 87599 - DNA, 33 bp, Homo sapien
cgggcaccatgttaccacatctggcagggagcc

SEQ ID NO: 87600 - DNA, 33 bp, Homo sapien
cgggcaccatgttaccgcatctggcagggagcc

SEQ ID NO: 87601 - DNA, 33 bp, Homo sapien
ggtttaaaattcttcacgtccagataccagcat

SEQ ID NO: 87602 - DNA, 33 bp, Homo sapien
ggtttaaaattcttcatgtccagataccagcat

SEQ ID NO: 87603 - DNA, 33 bp, Homo sapien
acaaatatggccatcaggcagacacgttgccca

SEQ ID NO: 87604 - DNA, 33 bp, Homo sapien
acaaatatggccatcatgcagacacgttgccca

SEQ ID NO: 87605 - DNA, 33 bp, Homo sapien
atgcacacattagggaccatttgccctacacac

SEQ ID NO: 87606 - DNA, 33 bp, Homo sapien
atgcacacattagggatcatttgccctacacac

SEQ ID NO: 87607 - DNA, 33 bp, Homo sapien
gaccttgctacaatccaatttgattagtgttga

SEQ ID NO: 87608 - DNA, 33 bp, Homo sapien
gaccttgctacaatccgatttgattagtgttga

SEQ ID NO: 87609 - DNA, 33 bp, Homo sapien
tcctggaagaagagacacatgtaaactttagtt

SEQ ID NO: 87610 - DNA, 33 bp, Homo sapien
tcctggaagaagagacgcatgtaaactttagtt

SEQ ID NO: 87611 - DNA, 33 bp, Homo sapien
ataaggtggctggcctaactgcagagcatttta

SEQ ID NO: 87612 - DNA, 33 bp, Homo sapien
ataaggtggctggcctgactgcagagcatttta

SEQ ID NO: 87613 - DNA, 33 bp, Homo sapien
tgtttccacttgaataagctaaaaagggattcc

SEQ ID NO: 87614 - DNA, 33 bp, Homo sapien
tgtttccacttgaataggctaaaaagggattcc

SEQ ID NO: 87615 - DNA, 33 bp, Homo sapien
catttgctatgttttaaggatgattcatctgct

SEQ ID NO: 87616 - DNA, 33 bp, Homo sapien
catttgctatgttttatggatgattcatctgct

SEQ ID NO: 87617 - DNA, 33 bp, Homo sapien
ccagaaagcatgattaccacaactaaccatctt

SEQ ID NO: 87618 - DNA, 33 bp, Homo sapien
ccagaaagcatgattatcacaactaaccatctt

SEQ ID NO: 87619 - DNA, 33 bp, Homo sapien
gcatgagcgaagaagaaatttcagacaattttg

SEQ ID NO: 87620 - DNA, 33 bp, Homo sapien
gcatgagcgaagaagagatttcagacaattttg

SEQ ID NO: 87621 - DNA, 33 bp, Homo sapien
tgcctaggtttttcaagtcctctccagggacag

SEQ ID NO: 87622 - DNA, 33 bp, Homo sapien
tgcctaggtttttcaattcctctccagggacag

SEQ ID NO: 87623 - DNA, 33 bp, Homo sapien
ggattacaaaatgaaacgaaactgagatttttt

SEQ ID NO: 87624 - DNA, 33 bp, Homo sapien
ggattacaaaatgaaatgaaactgagatttttt

SEQ ID NO: 87625 - DNA, 33 bp, Homo sapien
ataacacaaatgatgccgaaatgtctttttttc

SEQ ID NO: 87626 - DNA, 33 bp, Homo sapien
ataacacaaatgatgctgaaatgtctttttttc

SEQ ID NO: 87627 - DNA, 33 bp, Homo sapien
ctgatatttgacagaactccaccctttatcaca

SEQ ID NO: 87628 - DNA, 33 bp, Homo sapien
ctgatatttgacagaattccaccctttatcaca

SEQ ID NO: 87629 - DNA, 33 bp, Homo sapien
taagtcaatccttccaaaaggccttgcatttct

SEQ ID NO: 87630 - DNA, 33 bp, Homo sapien
taagtcaatccttccagaaggccttgcatttct

SEQ ID NO: 87631 - DNA, 33 bp, Homo sapien
tgacactgatttaataagtcaccttcaagaaca

SEQ ID NO: 87632 - DNA, 33 bp, Homo sapien
tgacactgatttaatatgtcaccttcaagaaca

SEQ ID NO: 87633 - DNA, 33 bp, Homo sapien
caagcagtgtcacagaagaaggacgtggttgga

SEQ ID NO: 87634 - DNA, 33 bp, Homo sapien
caagcagtgtcacagaggaaggacgtggttgga

SEQ ID NO: 87635 - DNA, 33 bp, Homo sapien
tacaagataatttggacgatatattttcaaaca

SEQ ID NO: 87636 - DNA, 33 bp, Homo sapien
tacaagataatttggatgatatattttcaaaca

SEQ ID NO: 87637 - DNA, 33 bp, Homo sapien
tcagatgtgctgtttacagaccacaaaccagaa

SEQ ID NO: 87638 - DNA, 33 bp, Homo sapien
tcagatgtgctgtttagagaccacaaaccagaa

SEQ ID NO: 87639 - DNA, 33 bp, Homo sapien
ttaaagagaagccagacgtttaggttttctgta

SEQ ID NO: 87640 - DNA, 33 bp, Homo sapien
ttaaagagaagccagatgtttaggttttctgta

SEQ ID NO: 87641 - DNA, 33 bp, Homo sapien
tatacaatagtccttgaaaatagccacattaaa

SEQ ID NO: 87642 - DNA, 33 bp, Homo sapien
tatacaatagtccttggaaatagccacattaaa

SEQ ID NO: 87643 - DNA, 33 bp, Homo sapien
gtaatctcactactcaaattcagaagaggataa

SEQ ID NO: 87644 - DNA, 33 bp, Homo sapien
gtaatctcactactcacattcagaagaggataa

SEQ ID NO: 87645 - DNA, 33 bp, Homo sapien
ttctgacttataaaaaccaaccaatatatttcc

SEQ ID NO: 87646 - DNA, 33 bp, Homo sapien
ttctgacttataaaaatcaaccaatatatttcc

SEQ ID NO: 87647 - DNA, 33 bp, Homo sapien
cttaaaaaagcagagaagtgtccggaaaaattg

SEQ ID NO: 87648 - DNA, 33 bp, Homo sapien
cttaaaaaagcagagacgtgtccggaaaaattg

SEQ ID NO: 87649 - DNA, 33 bp, Homo sapien
tttcccagtatgctcacaagactaacattcggg

SEQ ID NO: 87650 - DNA, 33 bp, Homo sapien
tttcccagtatgctcataagactaacattcggg

SEQ ID NO: 87651 - DNA, 33 bp, Homo sapien
ttgcatccatttttcagaaacatttctccataa

SEQ ID NO: 87652 - DNA, 33 bp, Homo sapien
ttgcatccatttttcataaacatttctccataa

SEQ ID NO: 87653 - DNA, 33 bp, Homo sapien
aagaaaaagcataacacaatgtatccgggaccc

SEQ ID NO: 87654 - DNA, 33 bp, Homo sapien
aagaaaaagcataacataatgtatccgggaccc

SEQ ID NO: 87655 - DNA, 33 bp, Homo sapien
tcctaaaaaggatgacagctctcaattttaaaa

SEQ ID NO: 87656 - DNA, 33 bp, Homo sapien
tcctaaaaaggatgacggctctcaattttaaaa

SEQ ID NO: 87657 - DNA, 33 bp, Homo sapien
tgaaacacaggctaccgctgactggtgcacatc

SEQ ID NO: 87658 - DNA, 33 bp, Homo sapien
tgaaacacaggctacctctgactggtgcacatc

SEQ ID NO: 87659 - DNA, 33 bp, Homo sapien
agacatggcaataccacaaattagaaatgtaag

SEQ ID NO: 87660 - DNA, 33 bp, Homo sapien
agacatggcaataccataaattagaaatgtaag

SEQ ID NO: 87661 - DNA, 33 bp, Homo sapien
ctcacagctgcttctacgagcaagtataggtga

SEQ ID NO: 87662 - DNA, 33 bp, Homo sapien
ctcacagctgcttctatgagcaagtataggtga

SEQ ID NO: 87663 - DNA, 33 bp, Homo sapien
actatagatttttccaaagtaagagatttttat

SEQ ID NO: 87664 - DNA, 33 bp, Homo sapien
actatagatttttccatagtaagagatttttat

SEQ ID NO: 87665 - DNA, 33 bp, Homo sapien
aaggaaatatgaaagagagtttgaggataatga

SEQ ID NO: 87666 - DNA, 33 bp, Homo sapien
aaggaaatatgaaagatagtttgaggataatga

SEQ ID NO: 87667 - DNA, 33 bp, Homo sapien
ataggatgagaaaaaactcacgagctctctgga

SEQ ID NO: 87668 - DNA, 33 bp, Homo sapien
ataggatgagaaaaaattcacgagctctctgga

SEQ ID NO: 87669 - DNA, 33 bp, Homo sapien
ccatacttttagctcccaaagacatggactgtg

SEQ ID NO: 87670 - DNA, 33 bp, Homo sapien
ccatacttttagctcctaaagacatggactgtg

SEQ ID NO: 87671 - DNA, 33 bp, Homo sapien
actccggatcttccaacgcttcaaacttcccgt

SEQ ID NO: 87672 - DNA, 33 bp, Homo sapien
actccggatcttccaatgcttcaaacttcccgt

SEQ ID NO: 87673 - DNA, 33 bp, Homo sapien
cctcccatgctcaaaaacctcatgactccggat

SEQ ID NO: 87674 - DNA, 33 bp, Homo sapien
cctcccatgctcaaaaccctcatgactccggat

SEQ ID NO: 87675 - DNA, 33 bp, Homo sapien
cattccctctgagaacggcaaaaagacaaggat

SEQ ID NO: 87676 - DNA, 33 bp, Homo sapien
cattccctctgagaactgcaaaaagacaaggat

SEQ ID NO: 87677 - DNA, 33 bp, Homo sapien
ggggaagcttacagtcacatttagagagggaga

SEQ ID NO: 87678 - DNA, 33 bp, Homo sapien
ggggaagcttacagtcccatttagagagggaga

SEQ ID NO: 87679 - DNA, 33 bp, Homo sapien
aggagaatgcagaataagcgaaggaagcagggg

SEQ ID NO: 87680 - DNA, 33 bp, Homo sapien
aggagaatgcagaataggcgaaggaagcagggg

SEQ ID NO: 87681 - DNA, 33 bp, Homo sapien
gcattttcagtgctgaactatcattcctccatc

SEQ ID NO: 87682 - DNA, 33 bp, Homo sapien
gcattttcagtgctgatctatcattcctccatc

SEQ ID NO: 87683 - DNA, 33 bp, Homo sapien
aattacacggcagatcaattatttatttattta

SEQ ID NO: 87684 - DNA, 33 bp, Homo sapien
aattacacggcagatcgattatttatttattta

SEQ ID NO: 87685 - DNA, 33 bp, Homo sapien
tggtaaaactcaaataacattaaaagctgtatg

SEQ ID NO: 87686 - DNA, 33 bp, Homo sapien
tggtaaaactcaaatagcattaaaagctgtatg

SEQ ID NO: 87687 - DNA, 33 bp, Homo sapien
ctacattttgaattcaacatttccacatatgac

SEQ ID NO: 87688 - DNA, 33 bp, Homo sapien
ctacattttgaattcagcatttccacatatgac

SEQ ID NO: 87689 - DNA, 33 bp, Homo sapien
gtcatgagtttatgcgaatatcaccaactcaag

SEQ ID NO: 87690 - DNA, 33 bp, Homo sapien
gtcatgagtttatgcggatatcaccaactcaag

SEQ ID NO: 87691 - DNA, 33 bp, Homo sapien
aaatcatgtgtaatgcacttggcttgtttgttt

SEQ ID NO: 87692 - DNA, 33 bp, Homo sapien
aaatcatgtgtaatgctcttggcttgtttgttt

SEQ ID NO: 87693 - DNA, 33 bp, Homo sapien
tagataacagtgaatacggtgttgaagactcaa

SEQ ID NO: 87694 - DNA, 33 bp, Homo sapien
tagataacagtgaatatggtgttgaagactcaa

SEQ ID NO: 87695 - DNA, 33 bp, Homo sapien
aaactttgaaatgttaagaatgtatgcacacag

SEQ ID NO: 87696 - DNA, 33 bp, Homo sapien
aaactttgaaatgttaggaatgtatgcacacag

SEQ ID NO: 87697 - DNA, 33 bp, Homo sapien
attatacaggaggaaacaagcaattcaccatct

SEQ ID NO: 87698 - DNA, 33 bp, Homo sapien
attatacaggaggaaataagcaattcaccatct

SEQ ID NO: 87699 - DNA, 33 bp, Homo sapien
gcatacagttagatcacgtgtttttaaattctg

SEQ ID NO: 87700 - DNA, 33 bp, Homo sapien
gcatacagttagatcatgtgtttttaaattctg

SEQ ID NO: 87701 - DNA, 33 bp, Homo sapien
ttaatttatctttggacaagcatttagattgtt

SEQ ID NO: 87702 - DNA, 33 bp, Homo sapien
ttaatttatctttggagaagcatttagattgtt

SEQ ID NO: 87703 - DNA, 33 bp, Homo sapien
ttgctgtagtttcaaaaggtcttgttctgtcgc

SEQ ID NO: 87704 - DNA, 33 bp, Homo sapien
ttgctgtagtttcaaacggtcttgttctgtcgc

SEQ ID NO: 87705 - DNA, 33 bp, Homo sapien
gcatctgcaagaaagcactaggcaaggttaaca

SEQ ID NO: 87706 - DNA, 33 bp, Homo sapien
gcatctgcaagaaagcgctaggcaaggttaaca

SEQ ID NO: 87707 - DNA, 33 bp, Homo sapien
ggggggctgtttgttacgtggtgagttatatat

SEQ ID NO: 87708 - DNA, 33 bp, Homo sapien
ggggggctgtttgttatgtggtgagttatatat

SEQ ID NO: 87709 - DNA, 33 bp, Homo sapien
taggtttgttggggacagcaccatctacatctg

SEQ ID NO: 87710 - DNA, 33 bp, Homo sapien
taggtttgttggggaccgcaccatctacatctg

SEQ ID NO: 87711 - DNA, 33 bp, Homo sapien
tatagtcatgagtcaactagcaaggaggatacc

SEQ ID NO: 87712 - DNA, 33 bp, Homo sapien
tatagtcatgagtcaattagcaaggaggatacc

SEQ ID NO: 87713 - DNA, 33 bp, Homo sapien
gttctcactgccagtacctgcaaatgaagactt

SEQ ID NO: 87714 - DNA, 33 bp, Homo sapien
gttctcactgccagtatctgcaaatgaagactt

SEQ ID NO: 87715 - DNA, 33 bp, Homo sapien
aagtgacgtttaagggaagacatgaatgagaac

SEQ ID NO: 87716 - DNA, 33 bp, Homo sapien
aagtgacgtttaaggggagacatgaatgagaac

SEQ ID NO: 87717 - DNA, 33 bp, Homo sapien
acactcattttgacgcaccttcaatcttcaagg

SEQ ID NO: 87718 - DNA, 33 bp, Homo sapien
acactcattttgacgcgccttcaatcttcaagg

SEQ ID NO: 87719 - DNA, 33 bp, Homo sapien
ttgaacactgaggagacctgccaagtacgggac

SEQ ID NO: 87720 - DNA, 33 bp, Homo sapien
ttgaacactgaggagagctgccaagtacgggac

SEQ ID NO: 87721 - DNA, 33 bp, Homo sapien
acatattaatatttcacgggtggatcactgagt

SEQ ID NO: 87722 - DNA, 33 bp, Homo sapien
acatattaatatttcatgggtggatcactgagt

SEQ ID NO: 87723 - DNA, 33 bp, Homo sapien
gccttcatcagataacccctgacaccgtctaga

SEQ ID NO: 87724 - DNA, 33 bp, Homo sapien
gccttcatcagataactcctgacaccgtctaga

SEQ ID NO: 87725 - DNA, 33 bp, Homo sapien
atctgaagttgtgaaacgtttgagcctatggaa

SEQ ID NO: 87726 - DNA, 33 bp, Homo sapien
atctgaagttgtgaaatgtttgagcctatggaa

SEQ ID NO: 87727 - DNA, 33 bp, Homo sapien
taccacgtatgcaaaactcacagacaagatcaa

SEQ ID NO: 87728 - DNA, 33 bp, Homo sapien
taccacgtatgcaaaagtcacagacaagatcaa

SEQ ID NO: 87729 - DNA, 33 bp, Homo sapien
tctctcctgactcctacgatcatcagctccttg

SEQ ID NO: 87730 - DNA, 33 bp, Homo sapien
tctctcctgactcctatgatcatcagctccttg

SEQ ID NO: 87731 - DNA, 33 bp, Homo sapien
atccaacagggactaacactgctaaaatttaca

SEQ ID NO: 87732 - DNA, 33 bp, Homo sapien
atccaacagggactaatactgctaaaatttaca

SEQ ID NO: 87733 - DNA, 33 bp, Homo sapien
tatccagtcactgaatcaggcgccaaatccaca

SEQ ID NO: 87734 - DNA, 33 bp, Homo sapien
tatccagtcactgaattaggcgccaaatccaca

SEQ ID NO: 87735 - DNA, 33 bp, Homo sapien
ttgaagaatctcattaacatctgaacctcatgc

SEQ ID NO: 87736 - DNA, 33 bp, Homo sapien
ttgaagaatctcattagcatctgaacctcatgc

SEQ ID NO: 87737 - DNA, 33 bp, Homo sapien
gaaagtcctgggctagcagacatccgtgtagac

SEQ ID NO: 87738 - DNA, 33 bp, Homo sapien
gaaagtcctgggctagtagacatccgtgtagac

SEQ ID NO: 87739 - DNA, 33 bp, Homo sapien
tttccttgtctttcccaccttctggaggccacc

SEQ ID NO: 87740 - DNA, 33 bp, Homo sapien
tttccttgtctttcccgccttctggaggccacc

SEQ ID NO: 87741 - DNA, 33 bp, Homo sapien
cacagccaagccatcacctctctctataaagac

SEQ ID NO: 87742 - DNA, 33 bp, Homo sapien
cacagccaagccatcatctctctctataaagac

SEQ ID NO: 87743 - DNA, 33 bp, Homo sapien
tgtctgtttcactcaccgctacgtcttaagcac

SEQ ID NO: 87744 - DNA, 33 bp, Homo sapien
tgtctgtttcactcacggctacgtcttaagcac

SEQ ID NO: 87745 - DNA, 33 bp, Homo sapien
tgattgtctttcaacagaccatgtgtttcttta

SEQ ID NO: 87746 - DNA, 33 bp, Homo sapien
tgattgtctttcaacataccatgtgtttcttta

SEQ ID NO: 87747 - DNA, 33 bp, Homo sapien
gtttaagcgacagtgacggttggattgtagttt

SEQ ID NO: 87748 - DNA, 33 bp, Homo sapien
gtttaagcgacagtgatggttggattgtagttt

SEQ ID NO: 87749 - DNA, 33 bp, Homo sapien
tttgtacatggtgcagaaaaagaagaaattcac

SEQ ID NO: 87750 - DNA, 33 bp, Homo sapien
tttgtacatggtgcagtaaaagaagaaattcac

SEQ ID NO: 87751 - DNA, 33 bp, Homo sapien
ggttactatggtgtacagattctcatggcaatg

SEQ ID NO: 87752 - DNA, 33 bp, Homo sapien
ggttactatggtgtacggattctcatggcaatg

SEQ ID NO: 87753 - DNA, 33 bp, Homo sapien
cgagcaaaatagaacaaaaatcctgcatttatt

SEQ ID NO: 87754 - DNA, 33 bp, Homo sapien
cgagcaaaatagaacacaaatcctgcatttatt

SEQ ID NO: 87755 - DNA, 33 bp, Homo sapien
taaagaagaggcattaactgcaaagttcaggtc

SEQ ID NO: 87756 - DNA, 33 bp, Homo sapien
taaagaagaggcattacctgcaaagttcaggtc

SEQ ID NO: 87757 - DNA, 33 bp, Homo sapien
gaacacatcccaaccacgtcagccagcagtaat

SEQ ID NO: 87758 - DNA, 33 bp, Homo sapien
gaacacatcccaaccatgtcagccagcagtaat

SEQ ID NO: 87759 - DNA, 33 bp, Homo sapien
ggtagtatctcataaacgtgtcctttcccaggg

SEQ ID NO: 87760 - DNA, 33 bp, Homo sapien
ggtagtatctcataaatgtgtcctttcccaggg

SEQ ID NO: 87761 - DNA, 33 bp, Homo sapien
cacaggtccttcataacgcactggtaatagtag

SEQ ID NO: 87762 - DNA, 33 bp, Homo sapien
cacaggtccttcataatgcactggtaatagtag

SEQ ID NO: 87763 - DNA, 33 bp, Homo sapien
gctctccagggtgtccacatacctgccccagac

SEQ ID NO: 87764 - DNA, 33 bp, Homo sapien
gctctccagggtgtccgcatacctgccccagac

SEQ ID NO: 87765 - DNA, 33 bp, Homo sapien
tctgttggcccagcaaagattgaaaacaaacaa

SEQ ID NO: 87766 - DNA, 33 bp, Homo sapien
tctgttggcccagcaaggattgaaaacaaacaa

SEQ ID NO: 87767 - DNA, 33 bp, Homo sapien
attccaatgacctatcaatctcatgttttgccc

SEQ ID NO: 87768 - DNA, 33 bp, Homo sapien
attccaatgacctatcgatctcatgttttgccc

SEQ ID NO: 87769 - DNA, 33 bp, Homo sapien
tttttccagtaaagtcaaggacctcatgggttg

SEQ ID NO: 87770 - DNA, 33 bp, Homo sapien
tttttccagtaaagtctaggacctcatgggttg

SEQ ID NO: 87771 - DNA, 33 bp, Homo sapien
gttttctcattgaacacgtgcaagaaacaaaag

SEQ ID NO: 87772 - DNA, 33 bp, Homo sapien
gttttctcattgaacaggtgcaagaaacaaaag

SEQ ID NO: 87773 - DNA, 33 bp, Homo sapien
gctttaaaaatacaaaagtcatcagaacaaaat

SEQ ID NO: 87774 - DNA, 33 bp, Homo sapien
gctttaaaaatacaaacgtcatcagaacaaaat

SEQ ID NO: 87775 - DNA, 33 bp, Homo sapien
tagagcctaacagagcaatgtataaccagaaag

SEQ ID NO: 87776 - DNA, 33 bp, Homo sapien
tagagcctaacagagcgatgtataaccagaaag

SEQ ID NO: 87777 - DNA, 33 bp, Homo sapien
tcctctctggactgcagctttctggttatacat

SEQ ID NO: 87778 - DNA, 33 bp, Homo sapien
tcctctctggactgcatctttctggttatacat

SEQ ID NO: 87779 - DNA, 33 bp, Homo sapien
gaggagggcctgtgtgaataaggaccaatcatc

SEQ ID NO: 87780 - DNA, 33 bp, Homo sapien
gaggagggcctgtgtggataaggaccaatcatc

SEQ ID NO: 87781 - DNA, 33 bp, Homo sapien
ttgagtcacgagttccaatctacagatgaggaa

SEQ ID NO: 87782 - DNA, 33 bp, Homo sapien
ttgagtcacgagttcccatctacagatgaggaa

SEQ ID NO: 87783 - DNA, 33 bp, Homo sapien
aactctgagacagaaacgcaggagttcccactt

SEQ ID NO: 87784 - DNA, 33 bp, Homo sapien
aactctgagacagaaatgcaggagttcccactt

SEQ ID NO: 87785 - DNA, 33 bp, Homo sapien
ggggccatggtgtaccacaggctgcaggatcga

SEQ ID NO: 87786 - DNA, 33 bp, Homo sapien
ggggccatggtgtaccgcaggctgcaggatcga

SEQ ID NO: 87787 - DNA, 33 bp, Homo sapien
taccccttagcctggtcaagacaatacataaaa

SEQ ID NO: 87788 - DNA, 33 bp, Homo sapien
taccccttagcctggtgaagacaatacataaaa

SEQ ID NO: 87789 - DNA, 33 bp, Homo sapien
ttaatctctgaacttcccagtacctcaagggcg

SEQ ID NO: 87790 - DNA, 33 bp, Homo sapien
ttaatctctgaacttctcagtacctcaagggcg

SEQ ID NO: 87791 - DNA, 33 bp, Homo sapien
accaaagccattcagaatcatttctttcttttt

SEQ ID NO: 87792 - DNA, 33 bp, Homo sapien
accaaagccattcagattcatttctttcttttt

SEQ ID NO: 87793 - DNA, 33 bp, Homo sapien
aattaacactaaaacggccatcaaattaaaatc

SEQ ID NO: 87794 - DNA, 33 bp, Homo sapien
aattaacactaaaacgtccatcaaattaaaatc

SEQ ID NO: 87795 - DNA, 33 bp, Homo sapien
acgcaaattggatttccaagatctttccaggcc

SEQ ID NO: 87796 - DNA, 33 bp, Homo sapien
acgcaaattggatttctaagatctttccaggcc

SEQ ID NO: 87797 - DNA, 33 bp, Homo sapien
actctgctatcccctcacttccctgaaagcaca

SEQ ID NO: 87798 - DNA, 33 bp, Homo sapien
actctgctatcccctcgcttccctgaaagcaca

SEQ ID NO: 87799 - DNA, 33 bp, Homo sapien
cctcctgttggaagcacagaattaaatttcatt

SEQ ID NO: 87800 - DNA, 33 bp, Homo sapien
cctcctgttggaagcatagaattaaatttcatt

SEQ ID NO: 87801 - DNA, 33 bp, Homo sapien
ccacctgcctactcaacggaactgtttgccagg

SEQ ID NO: 87802 - DNA, 33 bp, Homo sapien
ccacctgcctactcaatggaactgtttgccagg

SEQ ID NO: 87803 - DNA, 33 bp, Homo sapien
taaccatgttgttttcactattggtactgcctc

SEQ ID NO: 87804 - DNA, 33 bp, Homo sapien
taaccatgttgttttcgctattggtactgcctc

SEQ ID NO: 87805 - DNA, 33 bp, Homo sapien
gtggtaatctgtgataatagacagaaagcacgc

SEQ ID NO: 87806 - DNA, 33 bp, Homo sapien
gtggtaatctgtgatactagacagaaagcacgc

SEQ ID NO: 87807 - DNA, 33 bp, Homo sapien
gagactctgagttacaggcttgaataagaaaat

SEQ ID NO: 87808 - DNA, 33 bp, Homo sapien
gagactctgagttacatgcttgaataagaaaat

SEQ ID NO: 87809 - DNA, 33 bp, Homo sapien
cattagctgtaccaatcaaatcaacatgaacat

SEQ ID NO: 87810 - DNA, 33 bp, Homo sapien
cattagctgtaccaatgaaatcaacatgaacat

SEQ ID NO: 87811 - DNA, 33 bp, Homo sapien
taaacagggaatgaggaaatctcaaagagacag

SEQ ID NO: 87812 - DNA, 33 bp, Homo sapien
taaacagggaatgagggaatctcaaagagacag

SEQ ID NO: 87813 - DNA, 33 bp, Homo sapien
ggagccttagccagaaacaacacagacccaggc

SEQ ID NO: 87814 - DNA, 33 bp, Homo sapien
ggagccttagccagaagcaacacagacccaggc

SEQ ID NO: 87815 - DNA, 33 bp, Homo sapien
gcttggtcaacccagacgggagcgagtcacttc

SEQ ID NO: 87816 - DNA, 33 bp, Homo sapien
gcttggtcaacccagatgggagcgagtcacttc

SEQ ID NO: 87817 - DNA, 33 bp, Homo sapien
cgagtcacttctatccgatgattctgggtgtcc

SEQ ID NO: 87818 - DNA, 33 bp, Homo sapien
cgagtcacttctatcctatgattctgggtgtcc

SEQ ID NO: 87819 - DNA, 33 bp, Homo sapien
tccaggagcataaaaacaagtggaatttctgag

SEQ ID NO: 87820 - DNA, 33 bp, Homo sapien
tccaggagcataaaaataagtggaatttctgag

SEQ ID NO: 87821 - DNA, 33 bp, Homo sapien
tttatagattccagcaagagagcgacattctca

SEQ ID NO: 87822 - DNA, 33 bp, Homo sapien
tttatagattccagcaggagagcgacattctca

SEQ ID NO: 87823 - DNA, 33 bp, Homo sapien
cagcaccagggccagaactttctcctctgaggc

SEQ ID NO: 87824 - DNA, 33 bp, Homo sapien
cagcaccagggccagatctttctcctctgaggc

SEQ ID NO: 87825 - DNA, 33 bp, Homo sapien
ctggacaggggcgccacgtttgcccgtgtgatt

SEQ ID NO: 87826 - DNA, 33 bp, Homo sapien
ctggacaggggcgccatgtttgcccgtgtgatt

SEQ ID NO: 87827 - DNA, 33 bp, Homo sapien
ccacacaaggttatgaacatcccagtcacacgg

SEQ ID NO: 87828 - DNA, 33 bp, Homo sapien
ccacacaaggttatgagcatcccagtcacacgg

SEQ ID NO: 87829 - DNA, 33 bp, Homo sapien
taatcaccttacaaaactttcacatagtgaccc

SEQ ID NO: 87830 - DNA, 33 bp, Homo sapien
taatcaccttacaaaattttcacatagtgaccc

SEQ ID NO: 87831 - DNA, 33 bp, Homo sapien
tggttgaaagatgttccagggctatttttatct

SEQ ID NO: 87832 - DNA, 33 bp, Homo sapien
tggttgaaagatgttctagggctatttttatct

SEQ ID NO: 87833 - DNA, 33 bp, Homo sapien
atattttattcagaacccacagaaggatggcaa

SEQ ID NO: 87834 - DNA, 33 bp, Homo sapien
atattttattcagaactcacagaaggatggcaa

SEQ ID NO: 87835 - DNA, 33 bp, Homo sapien
taatcttgggggtctacagcgtgctggtcattc

SEQ ID NO: 87836 - DNA, 33 bp, Homo sapien
taatcttgggggtctatagcgtgctggtcattc

SEQ ID NO: 87837 - DNA, 33 bp, Homo sapien
ctgaaactgttgttacagaggcctgcattagtg

SEQ ID NO: 87838 - DNA, 33 bp, Homo sapien
ctgaaactgttgttacggaggcctgcattagtg

SEQ ID NO: 87839 - DNA, 33 bp, Homo sapien
caggagctgttggttgcatgaagtcatgagtga

SEQ ID NO: 87840 - DNA, 33 bp, Homo sapien
caggagctgttggttgtatgaagtcatgagtga

SEQ ID NO: 87841 - DNA, 33 bp, Homo sapien
agtagcgttcgatggccatctttacttcattag

SEQ ID NO: 87842 - DNA, 33 bp, Homo sapien
agtagcgttcgatggctatctttacttcattag

SEQ ID NO: 87843 - DNA, 33 bp, Homo sapien
ctggcagcacctctccagaaacacactgtcttt

SEQ ID NO: 87844 - DNA, 33 bp, Homo sapien
ctggcagcacctctccggaaacacactgtcttt

SEQ ID NO: 87845 - DNA, 33 bp, Homo sapien
ggactgggatcagagaagaatgtcctggctgga

SEQ ID NO: 87846 - DNA, 33 bp, Homo sapien
ggactgggatcagagaggaatgtcctggctgga

SEQ ID NO: 87847 - DNA, 33 bp, Homo sapien
tttttcattacaagagacctttgtattcagcta

SEQ ID NO: 87848 - DNA, 33 bp, Homo sapien
tttttcattacaagagtcctttgtattcagcta

SEQ ID NO: 87849 - DNA, 33 bp, Homo sapien
aactgcctatccttaaatattgcaatccaaagg

SEQ ID NO: 87850 - DNA, 33 bp, Homo sapien
aactgcctatccttaattattgcaatccaaagg

SEQ ID NO: 87851 - DNA, 33 bp, Homo sapien
tcaattgccatctttcgccccagttcaaagcct

SEQ ID NO: 87852 - DNA, 33 bp, Homo sapien
tcaattgccatctttctccccagttcaaagcct

SEQ ID NO: 87853 - DNA, 33 bp, Homo sapien
gtgttaattacaaaagacagaacttttatagca

SEQ ID NO: 87854 - DNA, 33 bp, Homo sapien
gtgttaattacaaaaggcagaacttttatagca

SEQ ID NO: 87855 - DNA, 33 bp, Homo sapien
agccagggcatgcttacaatttaacctgaaaga

SEQ ID NO: 87856 - DNA, 33 bp, Homo sapien
agccagggcatgcttataatttaacctgaaaga

SEQ ID NO: 87857 - DNA, 33 bp, Homo sapien
acactcttaatctgtgaatagaagccaagaaat

SEQ ID NO: 87858 - DNA, 33 bp, Homo sapien
acactcttaatctgtggatagaagccaagaaat

SEQ ID NO: 87859 - DNA, 33 bp, Homo sapien
ttggaattcatttcctcagcagtcagttatact

SEQ ID NO: 87860 - DNA, 33 bp, Homo sapien
ttggaattcatttcctgagcagtcagttatact

SEQ ID NO: 87861 - DNA, 33 bp, Homo sapien
aactcagttaccttcaaaaagcaccgccacgct

SEQ ID NO: 87862 - DNA, 33 bp, Homo sapien
aactcagttaccttcacaaagcaccgccacgct

SEQ ID NO: 87863 - DNA, 33 bp, Homo sapien
cgtactcagctttttaagaaattgtaaaccttg

SEQ ID NO: 87864 - DNA, 33 bp, Homo sapien
cgtactcagctttttaggaaattgtaaaccttg

SEQ ID NO: 87865 - DNA, 33 bp, Homo sapien
catagaagagaaatcaggtgccttagactagct

SEQ ID NO: 87866 - DNA, 33 bp, Homo sapien
catagaagagaaatcatgtgccttagactagct

SEQ ID NO: 87867 - DNA, 33 bp, Homo sapien
attacgcacggggatacgtagttctcttccctg

SEQ ID NO: 87868 - DNA, 33 bp, Homo sapien
attacgcacggggatatgtagttctcttccctg

SEQ ID NO: 87869 - DNA, 33 bp, Homo sapien
actttaggagagcagcaattcccaatgagtcat

SEQ ID NO: 87870 - DNA, 33 bp, Homo sapien
actttaggagagcagcgattcccaatgagtcat

SEQ ID NO: 87871 - DNA, 33 bp, Homo sapien
acagcagggtgggtgacgttcgttgcagaaagg

SEQ ID NO: 87872 - DNA, 33 bp, Homo sapien
acagcagggtgggtgatgttcgttgcagaaagg

SEQ ID NO: 87873 - DNA, 33 bp, Homo sapien
gaggagaaaacttaaggcatggagcttcgagaa

SEQ ID NO: 87874 - DNA, 33 bp, Homo sapien
gaggagaaaacttaagtcatggagcttcgagaa

SEQ ID NO: 87875 - DNA, 33 bp, Homo sapien
aggatcctgataaaagaatgaaataaaggacaa

SEQ ID NO: 87876 - DNA, 33 bp, Homo sapien
aggatcctgataaaagtatgaaataaaggacaa

SEQ ID NO: 87877 - DNA, 33 bp, Homo sapien
tcctactgatgtttaccaggttattcaataaat

SEQ ID NO: 87878 - DNA, 33 bp, Homo sapien
tcctactgatgtttactaggttattcaataaat

SEQ ID NO: 87879 - DNA, 33 bp, Homo sapien
agagagaaggaggccacgtcaacttcaaccctg

SEQ ID NO: 87880 - DNA, 33 bp, Homo sapien
agagagaaggaggccaggtcaacttcaaccctg

SEQ ID NO: 87881 - DNA, 33 bp, Homo sapien
taagtttcagctatgaacaaggcactatgacat

SEQ ID NO: 87882 - DNA, 33 bp, Homo sapien
taagtttcagctatgagcaaggcactatgacat

SEQ ID NO: 87883 - DNA, 33 bp, Homo sapien
aggagatgcagtgataagcagggtaagcatgga

SEQ ID NO: 87884 - DNA, 33 bp, Homo sapien
aggagatgcagtgatacgcagggtaagcatgga

SEQ ID NO: 87885 - DNA, 33 bp, Homo sapien
tgtaaattcattgaggaatccatgcttaccctg

SEQ ID NO: 87886 - DNA, 33 bp, Homo sapien
tgtaaattcattgagggatccatgcttaccctg

SEQ ID NO: 87887 - DNA, 33 bp, Homo sapien
caacaaggaaaacggacggtagacgagaccatt

SEQ ID NO: 87888 - DNA, 33 bp, Homo sapien
caacaaggaaaacggatggtagacgagaccatt

SEQ ID NO: 87889 - DNA, 33 bp, Homo sapien
accatcatgaatgacaaggtatctaggcttagg

SEQ ID NO: 87890 - DNA, 33 bp, Homo sapien
accatcatgaatgacagggtatctaggcttagg

SEQ ID NO: 87891 - DNA, 33 bp, Homo sapien
caggagaggtctggatcaaatcatttctttcat

SEQ ID NO: 87892 - DNA, 33 bp, Homo sapien
caggagaggtctggattaaatcatttctttcat

SEQ ID NO: 87893 - DNA, 33 bp, Homo sapien
tcagacatcacgggacggctggcaggatatgct

SEQ ID NO: 87894 - DNA, 33 bp, Homo sapien
tcagacatcacgggactgctggcaggatatgct

SEQ ID NO: 87895 - DNA, 33 bp, Homo sapien
aggcctcaggaagggaagagaacagaagagggc

SEQ ID NO: 87896 - DNA, 33 bp, Homo sapien
aggcctcaggaagggatgagaacagaagagggc

SEQ ID NO: 87897 - DNA, 33 bp, Homo sapien
ggctgtgccggcgagtcacctggttcccagagg

SEQ ID NO: 87898 - DNA, 33 bp, Homo sapien
ggctgtgccggcgagttacctggttcccagagg

SEQ ID NO: 87899 - DNA, 33 bp, Homo sapien
atttaatggctgataacattccacaatgtatat

SEQ ID NO: 87900 - DNA, 33 bp, Homo sapien
atttaatggctgataatattccacaatgtatat

SEQ ID NO: 87901 - DNA, 33 bp, Homo sapien
ggacagaaaaatcacaaaccaggataggacatg

SEQ ID NO: 87902 - DNA, 33 bp, Homo sapien
ggacagaaaaatcacagaccaggataggacatg

SEQ ID NO: 87903 - DNA, 33 bp, Homo sapien
catgtttctgaacttcacccagctaataagcag

SEQ ID NO: 87904 - DNA, 33 bp, Homo sapien
catgtttctgaacttcgcccagctaataagcag

SEQ ID NO: 87905 - DNA, 33 bp, Homo sapien
gggaatgaattaatgaagactccgagctcttgg

SEQ ID NO: 87906 - DNA, 33 bp, Homo sapien
gggaatgaattaatgacgactccgagctcttgg

SEQ ID NO: 87907 - DNA, 33 bp, Homo sapien
atggacttacagtttcacgtcgctggggaggcc

SEQ ID NO: 87908 - DNA, 33 bp, Homo sapien
atggacttacagtttctcgtcgctggggaggcc

SEQ ID NO: 87909 - DNA, 33 bp, Homo sapien
ccaaagcaaatatttcaatgcataagatacaga

SEQ ID NO: 87910 - DNA, 33 bp, Homo sapien
ccaaagcaaatatttcgatgcataagatacaga

SEQ ID NO: 87911 - DNA, 33 bp, Homo sapien
caaaccaaactagaagcatatatgtcacacatt

SEQ ID NO: 87912 - DNA, 33 bp, Homo sapien
caaaccaaactagaagtatatatgtcacacatt

SEQ ID NO: 87913 - DNA, 33 bp, Homo sapien
atgaaaaatggtacaacgagtttggaaaacagt

SEQ ID NO: 87914 - DNA, 33 bp, Homo sapien
atgaaaaatggtacaatgagtttggaaaacagt

SEQ ID NO: 87915 - DNA, 33 bp, Homo sapien
aaatatgttcaggtcaaacaaataaatgaaaag

SEQ ID NO: 87916 - DNA, 33 bp, Homo sapien
aaatatgttcaggtcatacaaataaatgaaaag

SEQ ID NO: 87917 - DNA, 33 bp, Homo sapien
aaaattccgtatattaagatgatcatagctacc

SEQ ID NO: 87918 - DNA, 33 bp, Homo sapien
aaaattccgtatattaggatgatcatagctacc

SEQ ID NO: 87919 - DNA, 33 bp, Homo sapien
catcagaagcaattaaaattagaaaggtgaaga

SEQ ID NO: 87920 - DNA, 33 bp, Homo sapien
catcagaagcaattaagattagaaaggtgaaga

SEQ ID NO: 87921 - DNA, 33 bp, Homo sapien
ctcttccagggccagaagcttcccatcttgtca

SEQ ID NO: 87922 - DNA, 33 bp, Homo sapien
ctcttccagggccagaggcttcccatcttgtca

SEQ ID NO: 87923 - DNA, 33 bp, Homo sapien
gaaatgagatctcagaatcagaacccctccttc

SEQ ID NO: 87924 - DNA, 33 bp, Homo sapien
gaaatgagatctcagagtcagaacccctccttc

SEQ ID NO: 87925 - DNA, 33 bp, Homo sapien
atcagcgcccgtcagcagataaatggacaaaga

SEQ ID NO: 87926 - DNA, 33 bp, Homo sapien
atcagcgcccgtcagcggataaatggacaaaga

SEQ ID NO: 87927 - DNA, 33 bp, Homo sapien
ctccaacatcggcgaacgtcctatggggggaaa

SEQ ID NO: 87928 - DNA, 33 bp, Homo sapien
ctccaacatcggcgaatgtcctatggggggaaa

SEQ ID NO: 87929 - DNA, 33 bp, Homo sapien
gttttatttttttaaggatgactcagtaattta

SEQ ID NO: 87930 - DNA, 33 bp, Homo sapien
gttttatttttttaagtatgactcagtaattta

SEQ ID NO: 87931 - DNA, 33 bp, Homo sapien
cagaagaatattcaacaacaggatatgaaattc

SEQ ID NO: 87932 - DNA, 33 bp, Homo sapien
cagaagaatattcaaccacaggatatgaaattc

SEQ ID NO: 87933 - DNA, 33 bp, Homo sapien
tacattaatataatacactgttgctaacacagc

SEQ ID NO: 87934 - DNA, 33 bp, Homo sapien
tacattaatataatacgctgttgctaacacagc

SEQ ID NO: 87935 - DNA, 33 bp, Homo sapien
atcgccgaatccatcacaaatggagtaagctag

SEQ ID NO: 87936 - DNA, 33 bp, Homo sapien
atcgccgaatccatcataaatggagtaagctag

SEQ ID NO: 87937 - DNA, 33 bp, Homo sapien
tgaaaagcaactaccaaccgcagttctaagccg

SEQ ID NO: 87938 - DNA, 33 bp, Homo sapien
tgaaaagcaactaccagccgcagttctaagccg

SEQ ID NO: 87939 - DNA, 33 bp, Homo sapien
agttttcttactactccagaagcaagaggattc

SEQ ID NO: 87940 - DNA, 33 bp, Homo sapien
agttttcttactactctagaagcaagaggattc

SEQ ID NO: 87941 - DNA, 33 bp, Homo sapien
tcatgcagggaaaggaaattgtatggttcccac

SEQ ID NO: 87942 - DNA, 33 bp, Homo sapien
tcatgcagggaaaggagattgtatggttcccac

SEQ ID NO: 87943 - DNA, 33 bp, Homo sapien
cagcactgtcgagcacaggacatacatgggagc

SEQ ID NO: 87944 - DNA, 33 bp, Homo sapien
cagcactgtcgagcacgggacatacatgggagc

SEQ ID NO: 87945 - DNA, 33 bp, Homo sapien
aaggggctttgacagccgagttagccaggaggc

SEQ ID NO: 87946 - DNA, 33 bp, Homo sapien
aaggggctttgacagctgagttagccaggaggc

SEQ ID NO: 87947 - DNA, 33 bp, Homo sapien
gatgccggccccttcaagactttccacgggagc

SEQ ID NO: 87948 - DNA, 33 bp, Homo sapien
gatgccggccccttcaggactttccacgggagc

SEQ ID NO: 87949 - DNA, 33 bp, Homo sapien
cacgtgagcctaaagaagtcatgaaaggaacat

SEQ ID NO: 87950 - DNA, 33 bp, Homo sapien
cacgtgagcctaaagaggtcatgaaaggaacat

SEQ ID NO: 87951 - DNA, 33 bp, Homo sapien
tgctggcagataagccaccttttctccacatga

SEQ ID NO: 87952 - DNA, 33 bp, Homo sapien
tgctggcagataagccgccttttctccacatga

SEQ ID NO: 87953 - DNA, 33 bp, Homo sapien
acaagcgacttgccatcaagctgccggatgatc

SEQ ID NO: 87954 - DNA, 33 bp, Homo sapien
acaagcgacttgccattaagctgccggatgatc

SEQ ID NO: 87955 - DNA, 33 bp, Homo sapien
tctagctaaagcaggcaaaagagcagtgaaagc

SEQ ID NO: 87956 - DNA, 33 bp, Homo sapien
tctagctaaagcaggcgaaagagcagtgaaagc

SEQ ID NO: 87957 - DNA, 33 bp, Homo sapien
gtttagcaactttgaacgttgcagggtccaggc

SEQ ID NO: 87958 - DNA, 33 bp, Homo sapien
gtttagcaactttgaatgttgcagggtccaggc

SEQ ID NO: 87959 - DNA, 33 bp, Homo sapien
tctaaacatgtctagacgtagaaaagcacagta

SEQ ID NO: 87960 - DNA, 33 bp, Homo sapien
tctaaacatgtctagatgtagaaaagcacagta

SEQ ID NO: 87961 - DNA, 33 bp, Homo sapien
ggtcacagctttaatcggataaccgttgtggat

SEQ ID NO: 87962 - DNA, 33 bp, Homo sapien
ggtcacagctttaatctgataaccgttgtggat

SEQ ID NO: 87963 - DNA, 33 bp, Homo sapien
caaggaggttgtcctaccaaacattcaaaaaat

SEQ ID NO: 87964 - DNA, 33 bp, Homo sapien
caaggaggttgtcctagcaaacattcaaaaaat

SEQ ID NO: 87965 - DNA, 33 bp, Homo sapien
catggcagatatggaacggtgagtaaacgtggc

SEQ ID NO: 87966 - DNA, 33 bp, Homo sapien
catggcagatatggaatggtgagtaaacgtggc

SEQ ID NO: 87967 - DNA, 33 bp, Homo sapien
ccaagaaagagctagcacggaggctttcctttc

SEQ ID NO: 87968 - DNA, 33 bp, Homo sapien
ccaagaaagagctagcgcggaggctttcctttc

SEQ ID NO: 87969 - DNA, 33 bp, Homo sapien
atgaaaaggtgcacaaaggtgtcccacgtctgc

SEQ ID NO: 87970 - DNA, 33 bp, Homo sapien
atgaaaaggtgcacaagggtgtcccacgtctgc

SEQ ID NO: 87971 - DNA, 33 bp, Homo sapien
ttaaatattctagaatcaggtaaaacgagcctg

SEQ ID NO: 87972 - DNA, 33 bp, Homo sapien
ttaaatattctagaatgaggtaaaacgagcctg

SEQ ID NO: 87973 - DNA, 33 bp, Homo sapien
gagacaatacacctccaagctgaatatgaaaag

SEQ ID NO: 87974 - DNA, 33 bp, Homo sapien
gagacaatacacctccgagctgaatatgaaaag

SEQ ID NO: 87975 - DNA, 33 bp, Homo sapien
tttccacgtctgacaccctaaacacgcttcctg

SEQ ID NO: 87976 - DNA, 33 bp, Homo sapien
tttccacgtctgacactctaaacacgcttcctg

SEQ ID NO: 87977 - DNA, 33 bp, Homo sapien
aatacctttgtctgaaagagcgacaggagcatc

SEQ ID NO: 87978 - DNA, 33 bp, Homo sapien
aatacctttgtctgaaggagcgacaggagcatc

SEQ ID NO: 87979 - DNA, 33 bp, Homo sapien
aaagtttggcttcgtccatgtcttgctgtgtga

SEQ ID NO: 87980 - DNA, 33 bp, Homo sapien
aaagtttggcttcgtcgatgtcttgctgtgtga

SEQ ID NO: 87981 - DNA, 33 bp, Homo sapien
acagggaaattacaaacacttacatggaaaaat

SEQ ID NO: 87982 - DNA, 33 bp, Homo sapien
acagggaaattacaaagacttacatggaaaaat

SEQ ID NO: 87983 - DNA, 33 bp, Homo sapien
ttccaacagtttttaacaaggagccagccggcc

SEQ ID NO: 87984 - DNA, 33 bp, Homo sapien
ttccaacagtttttaagaaggagccagccggcc

SEQ ID NO: 87985 - DNA, 33 bp, Homo sapien
ttctaggaacagggccaatttcctctgccttcc

SEQ ID NO: 87986 - DNA, 33 bp, Homo sapien
ttctaggaacagggccgatttcctctgccttcc

SEQ ID NO: 87987 - DNA, 33 bp, Homo sapien
acctaccatgtttatcagaaatctcagcctaaa

SEQ ID NO: 87988 - DNA, 33 bp, Homo sapien
acctaccatgtttatcggaaatctcagcctaaa

SEQ ID NO: 87989 - DNA, 33 bp, Homo sapien
agtggtgccattacaactagctgtagccgtgac

SEQ ID NO: 87990 - DNA, 33 bp, Homo sapien
agtggtgccattacaagtagctgtagccgtgac

SEQ ID NO: 87991 - DNA, 33 bp, Homo sapien
agcagaacattataaactgcaaaaaaataccat

SEQ ID NO: 87992 - DNA, 33 bp, Homo sapien
agcagaacattataaagtgcaaaaaaataccat

SEQ ID NO: 87993 - DNA, 33 bp, Homo sapien
cttgtccttcttcacacagagtcctgatgcctt

SEQ ID NO: 87994 - DNA, 33 bp, Homo sapien
cttgtccttcttcacagagagtcctgatgcctt

SEQ ID NO: 87995 - DNA, 33 bp, Homo sapien
agcttgctgaagaccacagtaaaagtgcagttt

SEQ ID NO: 87996 - DNA, 33 bp, Homo sapien
agcttgctgaagaccagagtaaaagtgcagttt

SEQ ID NO: 87997 - DNA, 33 bp, Homo sapien
aactacttgccctcaacctatttgcacttctag

SEQ ID NO: 87998 - DNA, 33 bp, Homo sapien
aactacttgccctcaatctatttgcacttctag

SEQ ID NO: 87999 - DNA, 33 bp, Homo sapien
cataaaacatttattgaagagcttacaactgga

SEQ ID NO: 88000 - DNA, 33 bp, Homo sapien
cataaaacatttattggagagcttacaactgga

SEQ ID NO: 88001 - DNA, 33 bp, Homo sapien
agatcaccgtgatacagacttcctttgttttgc

SEQ ID NO: 88002 - DNA, 33 bp, Homo sapien
agatcaccgtgatacatacttcctttgttttgc

SEQ ID NO: 88003 - DNA, 33 bp, Homo sapien
atggtttaatccgaaaatgtaagtaattggatg

SEQ ID NO: 88004 - DNA, 33 bp, Homo sapien
atggtttaatccgaaagtgtaagtaattggatg

SEQ ID NO: 88005 - DNA, 33 bp, Homo sapien
tagtctcgctctacaccattcttctgccttgtt

SEQ ID NO: 88006 - DNA, 33 bp, Homo sapien
tagtctcgctctacacgattcttctgccttgtt

SEQ ID NO: 88007 - DNA, 33 bp, Homo sapien
gaaggccgaaacaatgcatcaggctcagcttct

SEQ ID NO: 88008 - DNA, 33 bp, Homo sapien
gaaggccgaaacaatggatcaggctcagcttct

SEQ ID NO: 88009 - DNA, 33 bp, Homo sapien
aggaagctaacgctgacggttgtttgtttagag

SEQ ID NO: 88010 - DNA, 33 bp, Homo sapien
aggaagctaacgctgatggttgtttgtttagag

SEQ ID NO: 88011 - DNA, 33 bp, Homo sapien
ggtccaaaaatatcacagtacttcgagagacca

SEQ ID NO: 88012 - DNA, 33 bp, Homo sapien
ggtccaaaaatatcacggtacttcgagagacca

SEQ ID NO: 88013 - DNA, 33 bp, Homo sapien
caggcattgtttaacaaggtattcaatcattca

SEQ ID NO: 88014 - DNA, 33 bp, Homo sapien
caggcattgtttaacacggtattcaatcattca

SEQ ID NO: 88015 - DNA, 33 bp, Homo sapien
gggctgtaaatcgggacggatcagtcggtctgc

SEQ ID NO: 88016 - DNA, 33 bp, Homo sapien
gggctgtaaatcgggatggatcagtcggtctgc

SEQ ID NO: 88017 - DNA, 33 bp, Homo sapien
tgccccatcccaagaagagctacagcttactgt

SEQ ID NO: 88018 - DNA, 33 bp, Homo sapien
tgccccatcccaagaatagctacagcttactgt

SEQ ID NO: 88019 - DNA, 33 bp, Homo sapien
aacatcaacattagtactaactctggcattgta

SEQ ID NO: 88020 - DNA, 33 bp, Homo sapien
aacatcaacattagtagtaactctggcattgta

SEQ ID NO: 88021 - DNA, 33 bp, Homo sapien
gagacccacaaaggacagtatgctcaagaatgt

SEQ ID NO: 88022 - DNA, 33 bp, Homo sapien
gagacccacaaaggacggtatgctcaagaatgt

SEQ ID NO: 88023 - DNA, 33 bp, Homo sapien
agattatcacggtcataacatacagaaatgtcc

SEQ ID NO: 88024 - DNA, 33 bp, Homo sapien
agattatcacggtcatgacatacagaaatgtcc

SEQ ID NO: 88025 - DNA, 33 bp, Homo sapien
cacaacggcgacataacaaatttctttttttct

SEQ ID NO: 88026 - DNA, 33 bp, Homo sapien
cacaacggcgacataataaatttctttttttct

SEQ ID NO: 88027 - DNA, 33 bp, Homo sapien
atacataattaccatcacttcacaaacctcact

SEQ ID NO: 88028 - DNA, 33 bp, Homo sapien
atacataattaccatcgcttcacaaacctcact

SEQ ID NO: 88029 - DNA, 33 bp, Homo sapien
gtatgtgtgtgatatacgaaaaatgatacatat

SEQ ID NO: 88030 - DNA, 33 bp, Homo sapien
gtatgtgtgtgatatatgaaaaatgatacatat

SEQ ID NO: 88031 - DNA, 33 bp, Homo sapien
caggctggtgaaaaaaattcctgatctcaagtg

SEQ ID NO: 88032 - DNA, 33 bp, Homo sapien
caggctggtgaaaaaatttcctgatctcaagtg

SEQ ID NO: 88033 - DNA, 33 bp, Homo sapien
aacatggcggaactccaactttattaaaaaata

SEQ ID NO: 88034 - DNA, 33 bp, Homo sapien
aacatggcggaactccgactttattaaaaaata

SEQ ID NO: 88035 - DNA, 33 bp, Homo sapien
cacgagtggtcctgtacaagtcatcctgctaca

SEQ ID NO: 88036 - DNA, 33 bp, Homo sapien
cacgagtggtcctgtataagtcatcctgctaca

SEQ ID NO: 88037 - DNA, 33 bp, Homo sapien
tcagagctgtcttagacgcactatacccttcac

SEQ ID NO: 88038 - DNA, 33 bp, Homo sapien
tcagagctgtcttagatgcactatacccttcac

SEQ ID NO: 88039 - DNA, 33 bp, Homo sapien
tttcagctttctatcacgttccctcagtccagg

SEQ ID NO: 88040 - DNA, 33 bp, Homo sapien
tttcagctttctatcatgttccctcagtccagg

SEQ ID NO: 88041 - DNA, 33 bp, Homo sapien
ggggttggggcttccacgtaggatttcctggga

SEQ ID NO: 88042 - DNA, 33 bp, Homo sapien
ggggttggggcttccatgtaggatttcctggga

SEQ ID NO: 88043 - DNA, 33 bp, Homo sapien
aaataaatgtttatggaatgaattaacacagaa

SEQ ID NO: 88044 - DNA, 33 bp, Homo sapien
aaataaatgtttatgggatgaattaacacagaa

SEQ ID NO: 88045 - DNA, 33 bp, Homo sapien
cacctttttacaaagcaactcttgctctcctgc

SEQ ID NO: 88046 - DNA, 33 bp, Homo sapien
cacctttttacaaagcgactcttgctctcctgc

SEQ ID NO: 88047 - DNA, 33 bp, Homo sapien
agtgtctgatgcgtaagcacagatgagccgaca

SEQ ID NO: 88048 - DNA, 33 bp, Homo sapien
agtgtctgatgcgtaatcacagatgagccgaca

SEQ ID NO: 88049 - DNA, 33 bp, Homo sapien
ccctcggaaagataaacgatggaaagcacatga

SEQ ID NO: 88050 - DNA, 33 bp, Homo sapien
ccctcggaaagataaatgatggaaagcacatga

SEQ ID NO: 88051 - DNA, 33 bp, Homo sapien
gaaagaccgagcgtgaaagtgcaccaggagccc

SEQ ID NO: 88052 - DNA, 33 bp, Homo sapien
gaaagaccgagcgtgagagtgcaccaggagccc

SEQ ID NO: 88053 - DNA, 33 bp, Homo sapien
tgctgctgttgtgaaccctgagaaacttcacac

SEQ ID NO: 88054 - DNA, 33 bp, Homo sapien
tgctgctgttgtgaactctgagaaacttcacac

SEQ ID NO: 88055 - DNA, 33 bp, Homo sapien
tggacttagaaaagcacggcttccttgactaga

SEQ ID NO: 88056 - DNA, 33 bp, Homo sapien
tggacttagaaaagcatggcttccttgactaga

SEQ ID NO: 88057 - DNA, 33 bp, Homo sapien
cttgtcatgtgtcttccatttggagagtgagct

SEQ ID NO: 88058 - DNA, 33 bp, Homo sapien
cttgtcatgtgtcttctatttggagagtgagct

SEQ ID NO: 88059 - DNA, 33 bp, Homo sapien
ggtctagaaatgtgggccaaaattatggtttct

SEQ ID NO: 88060 - DNA, 33 bp, Homo sapien
ggtctagaaatgtgggtcaaaattatggtttct

SEQ ID NO: 88061 - DNA, 33 bp, Homo sapien
caatcccatctccaaaaagcaaggtttatttaa

SEQ ID NO: 88062 - DNA, 33 bp, Homo sapien
caatcccatctccaaagagcaaggtttatttaa

SEQ ID NO: 88063 - DNA, 33 bp, Homo sapien
aacagaaaacttcttacggttgtcttcagatac

SEQ ID NO: 88064 - DNA, 33 bp, Homo sapien
aacagaaaacttcttatggttgtcttcagatac

SEQ ID NO: 88065 - DNA, 33 bp, Homo sapien
tatgctttctctaccaaaattttcagactttgc

SEQ ID NO: 88066 - DNA, 33 bp, Homo sapien
tatgctttctctaccacaattttcagactttgc

SEQ ID NO: 88067 - DNA, 33 bp, Homo sapien
atgttccaggcagctccgaatcatctttttttt

SEQ ID NO: 88068 - DNA, 33 bp, Homo sapien
atgttccaggcagctcggaatcatctttttttt

SEQ ID NO: 88069 - DNA, 33 bp, Homo sapien
actgtggtcccgcagcacgattttattcagcgt

SEQ ID NO: 88070 - DNA, 33 bp, Homo sapien
actgtggtcccgcagcgcgattttattcagcgt

SEQ ID NO: 88071 - DNA, 33 bp, Homo sapien
agacaaattcgtgcaacagaggagcatgagtcc

SEQ ID NO: 88072 - DNA, 33 bp, Homo sapien
agacaaattcgtgcaatagaggagcatgagtcc

SEQ ID NO: 88073 - DNA, 33 bp, Homo sapien
aagagctccaagttccacgtactcagccactaa

SEQ ID NO: 88074 - DNA, 33 bp, Homo sapien
aagagctccaagttccgcgtactcagccactaa

SEQ ID NO: 88075 - DNA, 33 bp, Homo sapien
acacatacatatactacgaagacacacacacag

SEQ ID NO: 88076 - DNA, 33 bp, Homo sapien
acacatacatatactatgaagacacacacacag

SEQ ID NO: 88077 - DNA, 33 bp, Homo sapien
atattttactctcacgaacttttaaaaaatgat

SEQ ID NO: 88078 - DNA, 33 bp, Homo sapien
atattttactctcacggacttttaaaaaatgat

SEQ ID NO: 88079 - DNA, 33 bp, Homo sapien
taatgatttcagatgacccagtaccttgccttg

SEQ ID NO: 88080 - DNA, 33 bp, Homo sapien
taatgatttcagatgatccagtaccttgccttg

SEQ ID NO: 88081 - DNA, 33 bp, Homo sapien
tgtcagggttttaacacagggaactccatttgg

SEQ ID NO: 88082 - DNA, 33 bp, Homo sapien
tgtcagggttttaacatagggaactccatttgg

SEQ ID NO: 88083 - DNA, 33 bp, Homo sapien
atgaggactaaacgcaacagtgggtatgaaggg

SEQ ID NO: 88084 - DNA, 33 bp, Homo sapien
atgaggactaaacgcagcagtgggtatgaaggg

SEQ ID NO: 88085 - DNA, 33 bp, Homo sapien
agtcctcttttacttaccctatttgacttccta

SEQ ID NO: 88086 - DNA, 33 bp, Homo sapien
agtcctcttttacttatcctatttgacttccta

SEQ ID NO: 88087 - DNA, 33 bp, Homo sapien
taacaaacaggaaaaacccatgacttataggag

SEQ ID NO: 88088 - DNA, 33 bp, Homo sapien
taacaaacaggaaaaatccatgacttataggag

SEQ ID NO: 88089 - DNA, 33 bp, Homo sapien
tgatattcaagatccccgaattaggtagttcag

SEQ ID NO: 88090 - DNA, 33 bp, Homo sapien
tgatattcaagatccctgaattaggtagttcag

SEQ ID NO: 88091 - DNA, 33 bp, Homo sapien
atagatttcaaaaatcaaacttcatagaattaa

SEQ ID NO: 88092 - DNA, 33 bp, Homo sapien
atagatttcaaaaatcgaacttcatagaattaa

SEQ ID NO: 88093 - DNA, 33 bp, Homo sapien
gtgggaggggtagcaaatgaagggtcagatggt

SEQ ID NO: 88094 - DNA, 33 bp, Homo sapien
gtgggaggggtagcaagtgaagggtcagatggt

SEQ ID NO: 88095 - DNA, 33 bp, Homo sapien
gtcagacgagggctgccgcagagacggtagacc

SEQ ID NO: 88096 - DNA, 33 bp, Homo sapien
gtcagacgagggctgctgcagagacggtagacc

SEQ ID NO: 88097 - DNA, 33 bp, Homo sapien
cctccccctggcaacaccattcattctactttc

SEQ ID NO: 88098 - DNA, 33 bp, Homo sapien
cctccccctggcaacatcattcattctactttc

SEQ ID NO: 88099 - DNA, 33 bp, Homo sapien
gtgtccactaaataaaactccccattcctccat

SEQ ID NO: 88100 - DNA, 33 bp, Homo sapien
gtgtccactaaataaagctccccattcctccat

SEQ ID NO: 88101 - DNA, 33 bp, Homo sapien
gaagcccagtgtccccaatcaggccaagacaaa

SEQ ID NO: 88102 - DNA, 33 bp, Homo sapien
gaagcccagtgtccccgatcaggccaagacaaa

SEQ ID NO: 88103 - DNA, 33 bp, Homo sapien
tagagattcataaagcaagtgaaataatgttat

SEQ ID NO: 88104 - DNA, 33 bp, Homo sapien
tagagattcataaagcgagtgaaataatgttat

SEQ ID NO: 88105 - DNA, 33 bp, Homo sapien
gcttctttaaaatccgcaaactttgaatcactt

SEQ ID NO: 88106 - DNA, 33 bp, Homo sapien
gcttctttaaaatccgtaaactttgaatcactt

SEQ ID NO: 88107 - DNA, 33 bp, Homo sapien
tttctttccaaaatgaatcaatagctccaaggc

SEQ ID NO: 88108 - DNA, 33 bp, Homo sapien
tttctttccaaaatgagtcaatagctccaaggc

SEQ ID NO: 88109 - DNA, 33 bp, Homo sapien
caatagttctttacacactatgctaattttcat

SEQ ID NO: 88110 - DNA, 33 bp, Homo sapien
caatagttctttacacgctatgctaattttcat

SEQ ID NO: 88111 - DNA, 33 bp, Homo sapien
attgcaagtggtcagaactccagtggaaacata

SEQ ID NO: 88112 - DNA, 33 bp, Homo sapien
attgcaagtggtcagacctccagtggaaacata

SEQ ID NO: 88113 - DNA, 33 bp, Homo sapien
atcacaaccgcaccgaagcagttcctaaaagaa

SEQ ID NO: 88114 - DNA, 33 bp, Homo sapien
atcacaaccgcaccgatgcagttcctaaaagaa

SEQ ID NO: 88115 - DNA, 33 bp, Homo sapien
gttggcagagttatgcagacggtctcacctgcg

SEQ ID NO: 88116 - DNA, 33 bp, Homo sapien
gttggcagagttatgcggacggtctcacctgcg

SEQ ID NO: 88117 - DNA, 33 bp, Homo sapien
ccaggcccaaatactcagaacagagggatcgtc

SEQ ID NO: 88118 - DNA, 33 bp, Homo sapien
ccaggcccaaatactcggaacagagggatcgtc

SEQ ID NO: 88119 - DNA, 33 bp, Homo sapien
agcgcactgtgaacaacagcaacataaatcaca

SEQ ID NO: 88120 - DNA, 33 bp, Homo sapien
agcgcactgtgaacaatagcaacataaatcaca

SEQ ID NO: 88121 - DNA, 33 bp, Homo sapien
gtgtgacacccggtaacgtgtccagttgagaaa

SEQ ID NO: 88122 - DNA, 33 bp, Homo sapien
gtgtgacacccggtaatgtgtccagttgagaaa

SEQ ID NO: 88123 - DNA, 33 bp, Homo sapien
gtggactcgctgaatcccaaacaaaaattaagt

SEQ ID NO: 88124 - DNA, 33 bp, Homo sapien
gtggactcgctgaatctcaaacaaaaattaagt

SEQ ID NO: 88125 - DNA, 33 bp, Homo sapien
ccttcttctgctcttacctaaatgcgttccgag

SEQ ID NO: 88126 - DNA, 33 bp, Homo sapien
ccttcttctgctcttatctaaatgcgttccgag

SEQ ID NO: 88127 - DNA, 33 bp, Homo sapien
atcacaaagctggaagaacaggtaagtgtgacc

SEQ ID NO: 88128 - DNA, 33 bp, Homo sapien
atcacaaagctggaaggacaggtaagtgtgacc

SEQ ID NO: 88129 - DNA, 33 bp, Homo sapien
tagctcagttgtttcacaatgctacagggcctc

SEQ ID NO: 88130 - DNA, 33 bp, Homo sapien
tagctcagttgtttcataatgctacagggcctc

SEQ ID NO: 88131 - DNA, 33 bp, Homo sapien
agtctcttcctctgtcacatgagagttaatctt

SEQ ID NO: 88132 - DNA, 33 bp, Homo sapien
agtctcttcctctgtcgcatgagagttaatctt

SEQ ID NO: 88133 - DNA, 33 bp, Homo sapien
actggcatcgtgtagaaattaaacccacttaca

SEQ ID NO: 88134 - DNA, 33 bp, Homo sapien
actggcatcgtgtagagattaaacccacttaca

SEQ ID NO: 88135 - DNA, 33 bp, Homo sapien
tccctgtgcagttcgcaattcacgagacaccct

SEQ ID NO: 88136 - DNA, 33 bp, Homo sapien
tccctgtgcagttcgcgattcacgagacaccct

SEQ ID NO: 88137 - DNA, 33 bp, Homo sapien
taattccatttagaccagagaccgttgtgttta

SEQ ID NO: 88138 - DNA, 33 bp, Homo sapien
taattccatttagaccggagaccgttgtgttta

SEQ ID NO: 88139 - DNA, 33 bp, Homo sapien
tatcaacgctgtaaacacacattcacgctgaga

SEQ ID NO: 88140 - DNA, 33 bp, Homo sapien
tatcaacgctgtaaacgcacattcacgctgaga

SEQ ID NO: 88141 - DNA, 33 bp, Homo sapien
ttaaagaagttgcaaaatgtcataaaaccatca

SEQ ID NO: 88142 - DNA, 33 bp, Homo sapien
ttaaagaagttgcaaattgtcataaaaccatca

SEQ ID NO: 88143 - DNA, 33 bp, Homo sapien
tggaggatggctcctagctgcttgtaactttat

SEQ ID NO: 88144 - DNA, 33 bp, Homo sapien
tggaggatggctcctatctgcttgtaactttat

SEQ ID NO: 88145 - DNA, 33 bp, Homo sapien
cttaagtgaaaacatacggacaggagagatccc

SEQ ID NO: 88146 - DNA, 33 bp, Homo sapien
cttaagtgaaaacatatggacaggagagatccc

SEQ ID NO: 88147 - DNA, 33 bp, Homo sapien
gggaagggttgcagacacatctgaagattatca

SEQ ID NO: 88148 - DNA, 33 bp, Homo sapien
gggaagggttgcagacgcatctgaagattatca

SEQ ID NO: 88149 - DNA, 33 bp, Homo sapien
agacaggtaaacttacaagcccacaaataatca

SEQ ID NO: 88150 - DNA, 33 bp, Homo sapien
agacaggtaaacttaccagcccacaaataatca

SEQ ID NO: 88151 - DNA, 33 bp, Homo sapien
ctttgcaccagaaaagaaagccaatttacaaac

SEQ ID NO: 88152 - DNA, 33 bp, Homo sapien
ctttgcaccagaaaaggaagccaatttacaaac

SEQ ID NO: 88153 - DNA, 33 bp, Homo sapien
ctacctactattgaaacatgaactcaaccctac

SEQ ID NO: 88154 - DNA, 33 bp, Homo sapien
ctacctactattgaaatatgaactcaaccctac

SEQ ID NO: 88155 - DNA, 33 bp, Homo sapien
agagcgtagagagatcccgagaccacaaagttt

SEQ ID NO: 88156 - DNA, 33 bp, Homo sapien
agagcgtagagagatcgcgagaccacaaagttt

SEQ ID NO: 88157 - DNA, 33 bp, Homo sapien
tattgaatgtgaaagcagagaagacccagctgt

SEQ ID NO: 88158 - DNA, 33 bp, Homo sapien
tattgaatgtgaaagcggagaagacccagctgt

SEQ ID NO: 88159 - DNA, 33 bp, Homo sapien
tttgtctaccgcctcaagtaaggaaaagcagag

SEQ ID NO: 88160 - DNA, 33 bp, Homo sapien
tttgtctaccgcctcaggtaaggaaaagcagag

SEQ ID NO: 88161 - DNA, 33 bp, Homo sapien
ttataacaacggcaaccctggaattgacaggga

SEQ ID NO: 88162 - DNA, 33 bp, Homo sapien
ttataacaacggcaactctggaattgacaggga

SEQ ID NO: 88163 - DNA, 33 bp, Homo sapien
tgctagtataccaaaagaattttcactagtaca

SEQ ID NO: 88164 - DNA, 33 bp, Homo sapien
tgctagtataccaaaataattttcactagtaca

SEQ ID NO: 88165 - DNA, 33 bp, Homo sapien
tttagttcatagtttaactgtgaagcaagaatg

SEQ ID NO: 88166 - DNA, 33 bp, Homo sapien
tttagttcatagtttatctgtgaagcaagaatg

SEQ ID NO: 88167 - DNA, 33 bp, Homo sapien
cccaggctggattcccagacaaggctcactgct

SEQ ID NO: 88168 - DNA, 33 bp, Homo sapien
cccaggctggattcccggacaaggctcactgct

SEQ ID NO: 88169 - DNA, 33 bp, Homo sapien
aatttgcctcacaagggaacgtagtttaaaagt

SEQ ID NO: 88170 - DNA, 33 bp, Homo sapien
aatttgcctcacaaggtaacgtagtttaaaagt

SEQ ID NO: 88171 - DNA, 33 bp, Homo sapien
actgcccctattaccaccctacttgataagctc

SEQ ID NO: 88172 - DNA, 33 bp, Homo sapien
actgcccctattaccatcctacttgataagctc

SEQ ID NO: 88173 - DNA, 33 bp, Homo sapien
acttggaatgtccatcacggtgcggcagaaggt

SEQ ID NO: 88174 - DNA, 33 bp, Homo sapien
acttggaatgtccatcgcggtgcggcagaaggt

SEQ ID NO: 88175 - DNA, 33 bp, Homo sapien
aatctctgcaaacatccatcgcaactacactat

SEQ ID NO: 88176 - DNA, 33 bp, Homo sapien
aatctctgcaaacatctatcgcaactacactat

SEQ ID NO: 88177 - DNA, 33 bp, Homo sapien
acaatcaagctcaagaaaattctccccaaacca

SEQ ID NO: 88178 - DNA, 33 bp, Homo sapien
acaatcaagctcaagacaattctccccaaacca

SEQ ID NO: 88179 - DNA, 33 bp, Homo sapien
gctaaagagcagaagacgacaggttcccagaga

SEQ ID NO: 88180 - DNA, 33 bp, Homo sapien
gctaaagagcagaagatgacaggttcccagaga

SEQ ID NO: 88181 - DNA, 33 bp, Homo sapien
ttttcagggtcaggaacaggttaactggatgag

SEQ ID NO: 88182 - DNA, 33 bp, Homo sapien
ttttcagggtcaggaataggttaactggatgag

SEQ ID NO: 88183 - DNA, 33 bp, Homo sapien
gagctcctcccttgacaacttcctaacctggcg

SEQ ID NO: 88184 - DNA, 33 bp, Homo sapien
gagctcctcccttgaccacttcctaacctggcg

SEQ ID NO: 88185 - DNA, 33 bp, Homo sapien
gacaacaaaaaacagaagtcaggatctgttccg

SEQ ID NO: 88186 - DNA, 33 bp, Homo sapien
gacaacaaaaaacagaggtcaggatctgttccg

SEQ ID NO: 88187 - DNA, 33 bp, Homo sapien
gaatcgcatggagggacgatttgaccttggcca

SEQ ID NO: 88188 - DNA, 33 bp, Homo sapien
gaatcgcatggagggatgatttgaccttggcca

SEQ ID NO: 88189 - DNA, 33 bp, Homo sapien
ctgcctcggctgacacaggccgcaggaagagcc

SEQ ID NO: 88190 - DNA, 33 bp, Homo sapien
ctgcctcggctgacacgggccgcaggaagagcc

SEQ ID NO: 88191 - DNA, 33 bp, Homo sapien
agtgatttaagcatcacgtaacaaaggtggtgt

SEQ ID NO: 88192 - DNA, 33 bp, Homo sapien
agtgatttaagcatcatgtaacaaaggtggtgt

SEQ ID NO: 88193 - DNA, 33 bp, Homo sapien
ggcatcaagctgttcacagggccggtttctcct

SEQ ID NO: 88194 - DNA, 33 bp, Homo sapien
ggcatcaagctgttcatagggccggtttctcct

SEQ ID NO: 88195 - DNA, 33 bp, Homo sapien
gtcacttggcagaatcagaaaacagtcttgaaa

SEQ ID NO: 88196 - DNA, 33 bp, Homo sapien
gtcacttggcagaatccgaaaacagtcttgaaa

SEQ ID NO: 88197 - DNA, 33 bp, Homo sapien
cagagtttcacttcaactcagcaaaaactgtgg

SEQ ID NO: 88198 - DNA, 33 bp, Homo sapien
cagagtttcacttcaattcagcaaaaactgtgg

SEQ ID NO: 88199 - DNA, 33 bp, Homo sapien
gagcatcattttgaagaagactgtttagtgcaa

SEQ ID NO: 88200 - DNA, 33 bp, Homo sapien
gagcatcattttgaagtagactgtttagtgcaa

SEQ ID NO: 88201 - DNA, 33 bp, Homo sapien
ttttttttttgcaatcacttttcccagccatcc

SEQ ID NO: 88202 - DNA, 33 bp, Homo sapien
ttttttttttgcaatcgcttttcccagccatcc

SEQ ID NO: 88203 - DNA, 33 bp, Homo sapien
taaattatttcagggacagaaggtatcttttca

SEQ ID NO: 88204 - DNA, 33 bp, Homo sapien
taaattatttcagggagagaaggtatcttttca

SEQ ID NO: 88205 - DNA, 33 bp, Homo sapien
acaaagtgctaaagtgccaatgcaaataaaatc

SEQ ID NO: 88206 - DNA, 33 bp, Homo sapien
acaaagtgctaaagtgtcaatgcaaataaaatc

SEQ ID NO: 88207 - DNA, 33 bp, Homo sapien
tcagcctttcagtgaaaacgcactttacgcgtg

SEQ ID NO: 88208 - DNA, 33 bp, Homo sapien
tcagcctttcagtgaacacgcactttacgcgtg

SEQ ID NO: 88209 - DNA, 33 bp, Homo sapien
tgcaatgggttgtaaacataacagagtcactgc

SEQ ID NO: 88210 - DNA, 33 bp, Homo sapien
tgcaatgggttgtaaatataacagagtcactgc

SEQ ID NO: 88211 - DNA, 33 bp, Homo sapien
gattttagaatttgcacatgagaaatcatatct

SEQ ID NO: 88212 - DNA, 33 bp, Homo sapien
gattttagaatttgcagatgagaaatcatatct

SEQ ID NO: 88213 - DNA, 33 bp, Homo sapien
tctagaccctgaataccgaaaaggctctctccc

SEQ ID NO: 88214 - DNA, 33 bp, Homo sapien
tctagaccctgaatactgaaaaggctctctccc

SEQ ID NO: 88215 - DNA, 33 bp, Homo sapien
atcactaaacataaaacgatacacaaaccaagt

SEQ ID NO: 88216 - DNA, 33 bp, Homo sapien
atcactaaacataaaatgatacacaaaccaagt

SEQ ID NO: 88217 - DNA, 33 bp, Homo sapien
tcttgatcactttaacaggacacttaggatcaa

SEQ ID NO: 88218 - DNA, 33 bp, Homo sapien
tcttgatcactttaacgggacacttaggatcaa

SEQ ID NO: 88219 - DNA, 33 bp, Homo sapien
tcctgactgtggcacaaaacgaagaatctccaa

SEQ ID NO: 88220 - DNA, 33 bp, Homo sapien
tcctgactgtggcacagaacgaagaatctccaa

SEQ ID NO: 88221 - DNA, 33 bp, Homo sapien
aaaggaaatacctaaaacactcagacttagcct

SEQ ID NO: 88222 - DNA, 33 bp, Homo sapien
aaaggaaatacctaaaccactcagacttagcct

SEQ ID NO: 88223 - DNA, 33 bp, Homo sapien
ctgacgtttaagcaaacaattagtagtgtaagt

SEQ ID NO: 88224 - DNA, 33 bp, Homo sapien
ctgacgtttaagcaaataattagtagtgtaagt

SEQ ID NO: 88225 - DNA, 33 bp, Homo sapien
tggtttggaacagggaactacagcatgacaggc

SEQ ID NO: 88226 - DNA, 33 bp, Homo sapien
tggtttggaacagggagctacagcatgacaggc

SEQ ID NO: 88227 - DNA, 33 bp, Homo sapien
ccctgtggtgagatcccgataggcagaggccgc

SEQ ID NO: 88228 - DNA, 33 bp, Homo sapien
ccctgtggtgagatcctgataggcagaggccgc

SEQ ID NO: 88229 - DNA, 33 bp, Homo sapien
ccatgggaatgcttgacgactccagatatccta

SEQ ID NO: 88230 - DNA, 33 bp, Homo sapien
ccatgggaatgcttgatgactccagatatccta

SEQ ID NO: 88231 - DNA, 33 bp, Homo sapien
ctgtacttttgtgaaaaattgaattatttaaat

SEQ ID NO: 88232 - DNA, 33 bp, Homo sapien
ctgtacttttgtgaaacattgaattatttaaat

SEQ ID NO: 88233 - DNA, 33 bp, Homo sapien
agccaaaccatatcaacttcaaatctcttctag

SEQ ID NO: 88234 - DNA, 33 bp, Homo sapien
agccaaaccatatcaatttcaaatctcttctag

SEQ ID NO: 88235 - DNA, 33 bp, Homo sapien
gtgacaaatgtttgcactgatggatgtcctaat

SEQ ID NO: 88236 - DNA, 33 bp, Homo sapien
gtgacaaatgtttgcagtgatggatgtcctaat

SEQ ID NO: 88237 - DNA, 33 bp, Homo sapien
agtattttctcctggcaactgcagaaagaagag

SEQ ID NO: 88238 - DNA, 33 bp, Homo sapien
agtattttctcctggcgactgcagaaagaagag

SEQ ID NO: 88239 - DNA, 33 bp, Homo sapien
ttcccctcaaatgaagccatgatttaaagttca

SEQ ID NO: 88240 - DNA, 33 bp, Homo sapien
ttcccctcaaatgaaggcatgatttaaagttca

SEQ ID NO: 88241 - DNA, 33 bp, Homo sapien
ttctctaaaattgcctaaacttaaaagcattat

SEQ ID NO: 88242 - DNA, 33 bp, Homo sapien
ttctctaaaattgcctcaacttaaaagcattat

SEQ ID NO: 88243 - DNA, 33 bp, Homo sapien
ttctagtaagatgtgacaggaaaacaataaact

SEQ ID NO: 88244 - DNA, 33 bp, Homo sapien
ttctagtaagatgtgagaggaaaacaataaact

SEQ ID NO: 88245 - DNA, 33 bp, Homo sapien
gttctaacagtgggaccggaactctaatgggtg

SEQ ID NO: 88246 - DNA, 33 bp, Homo sapien
gttctaacagtgggactggaactctaatgggtg

SEQ ID NO: 88247 - DNA, 33 bp, Homo sapien
ttctgcagctatcccacgtgcaggtttagaaag

SEQ ID NO: 88248 - DNA, 33 bp, Homo sapien
ttctgcagctatcccaggtgcaggtttagaaag

SEQ ID NO: 88249 - DNA, 33 bp, Homo sapien
cagctactgatatctaagtcatcaaatggtgct

SEQ ID NO: 88250 - DNA, 33 bp, Homo sapien
cagctactgatatctacgtcatcaaatggtgct

SEQ ID NO: 88251 - DNA, 33 bp, Homo sapien
gagtgacttacggtccaggaagagtacatctgc

SEQ ID NO: 88252 - DNA, 33 bp, Homo sapien
gagtgacttacggtccgggaagagtacatctgc

SEQ ID NO: 88253 - DNA, 33 bp, Homo sapien
actgctgcccttatccagagaattctcatcaag

SEQ ID NO: 88254 - DNA, 33 bp, Homo sapien
actgctgcccttatccggagaattctcatcaag

SEQ ID NO: 88255 - DNA, 33 bp, Homo sapien
tcttcagcggttaaaacgttcttccttctgctg

SEQ ID NO: 88256 - DNA, 33 bp, Homo sapien
tcttcagcggttaaaatgttcttccttctgctg

SEQ ID NO: 88257 - DNA, 33 bp, Homo sapien
tggacctgacgacatcggagaaaaaaaaaattg

SEQ ID NO: 88258 - DNA, 33 bp, Homo sapien
tggacctgacgacatctgagaaaaaaaaaattg

SEQ ID NO: 88259 - DNA, 33 bp, Homo sapien
gtgtgtccggaggaaacgggatcttttctctcc

SEQ ID NO: 88260 - DNA, 33 bp, Homo sapien
gtgtgtccggaggaaatgggatcttttctctcc

SEQ ID NO: 88261 - DNA, 33 bp, Homo sapien
attaaatagccccaaactaaacctcactttatc

SEQ ID NO: 88262 - DNA, 33 bp, Homo sapien
attaaatagccccaaagtaaacctcactttatc

SEQ ID NO: 88263 - DNA, 33 bp, Homo sapien
ggctgcggcaaccaagcactgtggatcaggcgg

SEQ ID NO: 88264 - DNA, 33 bp, Homo sapien
ggctgcggcaaccaagtactgtggatcaggcgg

SEQ ID NO: 88265 - DNA, 33 bp, Homo sapien
tctcgcagaatagtcaaactctgtgaaaccgtc

SEQ ID NO: 88266 - DNA, 33 bp, Homo sapien
tctcgcagaatagtcagactctgtgaaaccgtc

SEQ ID NO: 88267 - DNA, 33 bp, Homo sapien
atgcaagaaggaaagacgaccatttgcctggat

SEQ ID NO: 88268 - DNA, 33 bp, Homo sapien
atgcaagaaggaaagatgaccatttgcctggat

SEQ ID NO: 88269 - DNA, 33 bp, Homo sapien
tttctgtcataatctaacccaggaaataaatgt

SEQ ID NO: 88270 - DNA, 33 bp, Homo sapien
tttctgtcataatctatcccaggaaataaatgt

SEQ ID NO: 88271 - DNA, 33 bp, Homo sapien
acgactctctagcagacgacctagcaagggcac

SEQ ID NO: 88272 - DNA, 33 bp, Homo sapien
acgactctctagcagatgacctagcaagggcac

SEQ ID NO: 88273 - DNA, 33 bp, Homo sapien
gaacaacagccaaacccggatccatgacggagc

SEQ ID NO: 88274 - DNA, 33 bp, Homo sapien
gaacaacagccaaacctggatccatgacggagc

SEQ ID NO: 88275 - DNA, 33 bp, Homo sapien
ctgcctttcaaagaaccctggctgaaatgccaa

SEQ ID NO: 88276 - DNA, 33 bp, Homo sapien
ctgcctttcaaagaactctggctgaaatgccaa

SEQ ID NO: 88277 - DNA, 33 bp, Homo sapien
agtggccacattgcacaggcagaactgggaaga

SEQ ID NO: 88278 - DNA, 33 bp, Homo sapien
agtggccacattgcacgggcagaactgggaaga

SEQ ID NO: 88279 - DNA, 33 bp, Homo sapien
atttcatttcaccaataatgttaacaagtgtgt

SEQ ID NO: 88280 - DNA, 33 bp, Homo sapien
atttcatttcaccaatgatgttaacaagtgtgt

SEQ ID NO: 88281 - DNA, 33 bp, Homo sapien
agttctatagttcaacaaaataaagctagaaat

SEQ ID NO: 88282 - DNA, 33 bp, Homo sapien
agttctatagttcaacgaaataaagctagaaat

SEQ ID NO: 88283 - DNA, 33 bp, Homo sapien
aatctttggccaacaaatattggagaacgatgt

SEQ ID NO: 88284 - DNA, 33 bp, Homo sapien
aatctttggccaacaactattggagaacgatgt

SEQ ID NO: 88285 - DNA, 33 bp, Homo sapien
cttctcttgttgtcctaaaattttcagcagaag

SEQ ID NO: 88286 - DNA, 33 bp, Homo sapien
cttctcttgttgtcctgaaattttcagcagaag

SEQ ID NO: 88287 - DNA, 33 bp, Homo sapien
gtggacatgctgtttacgaaaaagtgaatctgg

SEQ ID NO: 88288 - DNA, 33 bp, Homo sapien
gtggacatgctgtttatgaaaaagtgaatctgg

SEQ ID NO: 88289 - DNA, 33 bp, Homo sapien
agggcagcagaagacaacacgatggttcgaagg

SEQ ID NO: 88290 - DNA, 33 bp, Homo sapien
agggcagcagaagacagcacgatggttcgaagg

SEQ ID NO: 88291 - DNA, 33 bp, Homo sapien
tgttttaaagggacacacatcatcacaagcatg

SEQ ID NO: 88292 - DNA, 33 bp, Homo sapien
tgttttaaagggacactcatcatcacaagcatg

SEQ ID NO: 88293 - DNA, 33 bp, Homo sapien
cattaactgagaaaaacagatcggaagtgagct

SEQ ID NO: 88294 - DNA, 33 bp, Homo sapien
cattaactgagaaaaatagatcggaagtgagct

SEQ ID NO: 88295 - DNA, 33 bp, Homo sapien
gattctatgcaagcaacacaaagagaagggtca

SEQ ID NO: 88296 - DNA, 33 bp, Homo sapien
gattctatgcaagcaatacaaagagaagggtca

SEQ ID NO: 88297 - DNA, 33 bp, Homo sapien
gagagacagagaagcacattgacccttctcttt

SEQ ID NO: 88298 - DNA, 33 bp, Homo sapien
gagagacagagaagcatattgacccttctcttt

SEQ ID NO: 88299 - DNA, 33 bp, Homo sapien
acaaggtgttttaaaaccaaatgaaggttggga

SEQ ID NO: 88300 - DNA, 33 bp, Homo sapien
acaaggtgttttaaaatcaaatgaaggttggga

SEQ ID NO: 88301 - DNA, 33 bp, Homo sapien
gctaatggaattcaacaagggaatactagggga

SEQ ID NO: 88302 - DNA, 33 bp, Homo sapien
gctaatggaattcaacgagggaatactagggga

SEQ ID NO: 88303 - DNA, 33 bp, Homo sapien
cttctctggttctatacgcagggacccaaaagc

SEQ ID NO: 88304 - DNA, 33 bp, Homo sapien
cttctctggttctatatgcagggacccaaaagc

SEQ ID NO: 88305 - DNA, 33 bp, Homo sapien
gtcattttgtttgcaacatcttacagaccatga

SEQ ID NO: 88306 - DNA, 33 bp, Homo sapien
gtcattttgtttgcaagatcttacagaccatga

SEQ ID NO: 88307 - DNA, 33 bp, Homo sapien
atggaaaagatagaaaagggcgactctccaccc

SEQ ID NO: 88308 - DNA, 33 bp, Homo sapien
atggaaaagatagaaaggggcgactctccaccc

SEQ ID NO: 88309 - DNA, 33 bp, Homo sapien
tgctctagtccaaggaaattaaacgtctatagc

SEQ ID NO: 88310 - DNA, 33 bp, Homo sapien
tgctctagtccaaggagattaaacgtctatagc

SEQ ID NO: 88311 - DNA, 33 bp, Homo sapien
ccatcaccatcccaaccgcatgggtgagcacat

SEQ ID NO: 88312 - DNA, 33 bp, Homo sapien
ccatcaccatcccaactgcatgggtgagcacat

SEQ ID NO: 88313 - DNA, 33 bp, Homo sapien
cgtatggcgaacattcccagccttcttcttaac

SEQ ID NO: 88314 - DNA, 33 bp, Homo sapien
cgtatggcgaacattctcagccttcttcttaac

SEQ ID NO: 88315 - DNA, 33 bp, Homo sapien
agctcaggcatagataaaaataacctcaaaaaa

SEQ ID NO: 88316 - DNA, 33 bp, Homo sapien
agctcaggcatagatacaaataacctcaaaaaa

SEQ ID NO: 88317 - DNA, 33 bp, Homo sapien
aagaagaaaggctcaacgaagaagtccttagaa

SEQ ID NO: 88318 - DNA, 33 bp, Homo sapien
aagaagaaaggctcaaggaagaagtccttagaa

SEQ ID NO: 88319 - DNA, 33 bp, Homo sapien
acagcgcagtgcctagaatgtagcaagtcacaa

SEQ ID NO: 88320 - DNA, 33 bp, Homo sapien
acagcgcagtgcctagcatgtagcaagtcacaa

SEQ ID NO: 88321 - DNA, 33 bp, Homo sapien
ttctggaaatcaaggtaacacataggaagtttt

SEQ ID NO: 88322 - DNA, 33 bp, Homo sapien
ttctggaaatcaaggtgacacataggaagtttt

SEQ ID NO: 88323 - DNA, 33 bp, Homo sapien
ttttgattcagataaaagtccctattttaggga

SEQ ID NO: 88324 - DNA, 33 bp, Homo sapien
ttttgattcagataaatgtccctattttaggga

SEQ ID NO: 88325 - DNA, 33 bp, Homo sapien
gggtctaagaatccaacacattcatctcaaagc

SEQ ID NO: 88326 - DNA, 33 bp, Homo sapien
gggtctaagaatccaatacattcatctcaaagc

SEQ ID NO: 88327 - DNA, 33 bp, Homo sapien
gtctccttagcaatccaagttatatggaataat

SEQ ID NO: 88328 - DNA, 33 bp, Homo sapien
gtctccttagcaatccgagttatatggaataat

SEQ ID NO: 88329 - DNA, 33 bp, Homo sapien
gccacgcgttcaatgacgattgcttaactgctt

SEQ ID NO: 88330 - DNA, 33 bp, Homo sapien
gccacgcgttcaatgaggattgcttaactgctt

SEQ ID NO: 88331 - DNA, 33 bp, Homo sapien
gaatcagagcaatagtaaaaatggctaatattc

SEQ ID NO: 88332 - DNA, 33 bp, Homo sapien
gaatcagagcaatagtgaaaatggctaatattc

SEQ ID NO: 88333 - DNA, 33 bp, Homo sapien
agaatacccattcctacggcaggtgcacttggg

SEQ ID NO: 88334 - DNA, 33 bp, Homo sapien
agaatacccattcctatggcaggtgcacttggg

SEQ ID NO: 88335 - DNA, 33 bp, Homo sapien
cagggaatggcataagaactttttagcctgccc

SEQ ID NO: 88336 - DNA, 33 bp, Homo sapien
cagggaatggcataagcactttttagcctgccc

SEQ ID NO: 88337 - DNA, 33 bp, Homo sapien
aatcccgagagaccaactgaaaccaaaatctgt

SEQ ID NO: 88338 - DNA, 33 bp, Homo sapien
aatcccgagagaccaattgaaaccaaaatctgt

SEQ ID NO: 88339 - DNA, 33 bp, Homo sapien
tcaggcttaacctcaaaccaactcactcaaagg

SEQ ID NO: 88340 - DNA, 33 bp, Homo sapien
tcaggcttaacctcaagccaactcactcaaagg

SEQ ID NO: 88341 - DNA, 33 bp, Homo sapien
ccctgggtatcgttaacacttccctatcacata

SEQ ID NO: 88342 - DNA, 33 bp, Homo sapien
ccctgggtatcgttaatacttccctatcacata

SEQ ID NO: 88343 - DNA, 33 bp, Homo sapien
aagaactaatctactcagaagaaagagatagga

SEQ ID NO: 88344 - DNA, 33 bp, Homo sapien
aagaactaatctactcggaagaaagagatagga

SEQ ID NO: 88345 - DNA, 33 bp, Homo sapien
tctattcccagtaacaccatttgagcccttaga

SEQ ID NO: 88346 - DNA, 33 bp, Homo sapien
tctattcccagtaacatcatttgagcccttaga

SEQ ID NO: 88347 - DNA, 33 bp, Homo sapien
gagtcaggctggtcaacttcaaaatactttaga

SEQ ID NO: 88348 - DNA, 33 bp, Homo sapien
gagtcaggctggtcaatttcaaaatactttaga

SEQ ID NO: 88349 - DNA, 33 bp, Homo sapien
ccactgtgatgcttcacgctaacaatatcatct

SEQ ID NO: 88350 - DNA, 33 bp, Homo sapien
ccactgtgatgcttcatgctaacaatatcatct

SEQ ID NO: 88351 - DNA, 33 bp, Homo sapien
agaagccaggactgaaagagctttttacagatc

SEQ ID NO: 88352 - DNA, 33 bp, Homo sapien
agaagccaggactgaaggagctttttacagatc

SEQ ID NO: 88353 - DNA, 33 bp, Homo sapien
gcaaatgtagtaactccagcggaccatgctgtg

SEQ ID NO: 88354 - DNA, 33 bp, Homo sapien
gcaaatgtagtaactctagcggaccatgctgtg

SEQ ID NO: 88355 - DNA, 33 bp, Homo sapien
catgaagaagatcaccagcaaaattgtccttat

SEQ ID NO: 88356 - DNA, 33 bp, Homo sapien
catgaagaagatcaccggcaaaattgtccttat

SEQ ID NO: 88357 - DNA, 33 bp, Homo sapien
tgctattgtttcccaccggtcagtaatgatgag

SEQ ID NO: 88358 - DNA, 33 bp, Homo sapien
tgctattgtttcccactggtcagtaatgatgag

SEQ ID NO: 88359 - DNA, 33 bp, Homo sapien
aatggccccatgctcacgtctactttcattctg

SEQ ID NO: 88360 - DNA, 33 bp, Homo sapien
aatggccccatgctcatgtctactttcattctg

SEQ ID NO: 88361 - DNA, 33 bp, Homo sapien
acctgtgagctattaacaagacaactgtgcttt

SEQ ID NO: 88362 - DNA, 33 bp, Homo sapien
acctgtgagctattaataagacaactgtgcttt

SEQ ID NO: 88363 - DNA, 33 bp, Homo sapien
acacagagaagcggcaacataaatattgacata

SEQ ID NO: 88364 - DNA, 33 bp, Homo sapien
acacagagaagcggcagcataaatattgacata

SEQ ID NO: 88365 - DNA, 33 bp, Homo sapien
tacagtatcagttttaccttgagctcctttttc

SEQ ID NO: 88366 - DNA, 33 bp, Homo sapien
tacagtatcagttttatcttgagctcctttttc

SEQ ID NO: 88367 - DNA, 33 bp, Homo sapien
atggctcaaagagccgcaataaagtctgagcca

SEQ ID NO: 88368 - DNA, 33 bp, Homo sapien
atggctcaaagagccggaataaagtctgagcca

SEQ ID NO: 88369 - DNA, 33 bp, Homo sapien
cgatgaaggctgggccaatgtcaggacagagtc

SEQ ID NO: 88370 - DNA, 33 bp, Homo sapien
cgatgaaggctgggccgatgtcaggacagagtc

SEQ ID NO: 88371 - DNA, 33 bp, Homo sapien
aatcatttctgaaagccgaatatattcccgcta

SEQ ID NO: 88372 - DNA, 33 bp, Homo sapien
aatcatttctgaaagctgaatatattcccgcta

SEQ ID NO: 88373 - DNA, 33 bp, Homo sapien
gaggagtttccctgtacaatctctctctctctt

SEQ ID NO: 88374 - DNA, 33 bp, Homo sapien
gaggagtttccctgtataatctctctctctctt

SEQ ID NO: 88375 - DNA, 33 bp, Homo sapien
taaaggacattcaaaactgacagaggattttta

SEQ ID NO: 88376 - DNA, 33 bp, Homo sapien
taaaggacattcaaaattgacagaggattttta

SEQ ID NO: 88377 - DNA, 33 bp, Homo sapien
gtattatcacaatacaatcaataaaaacagcat

SEQ ID NO: 88378 - DNA, 33 bp, Homo sapien
gtattatcacaatacagtcaataaaaacagcat

SEQ ID NO: 88379 - DNA, 33 bp, Homo sapien
acacctcggcctacctcacggcagagcatcttt

SEQ ID NO: 88380 - DNA, 33 bp, Homo sapien
acacctcggcctacctgacggcagagcatcttt

SEQ ID NO: 88381 - DNA, 33 bp, Homo sapien
ttggccccccagttcacagacagtgactgctca

SEQ ID NO: 88382 - DNA, 33 bp, Homo sapien
ttggccccccagttcatagacagtgactgctca

SEQ ID NO: 88383 - DNA, 33 bp, Homo sapien
gcgttagaattagagacgagcctgtgacgcttg

SEQ ID NO: 88384 - DNA, 33 bp, Homo sapien
gcgttagaattagagaggagcctgtgacgcttg

SEQ ID NO: 88385 - DNA, 33 bp, Homo sapien
tgtcaatttctcgttcactctctccttttcctt

SEQ ID NO: 88386 - DNA, 33 bp, Homo sapien
tgtcaatttctcgttcgctctctccttttcctt

SEQ ID NO: 88387 - DNA, 33 bp, Homo sapien
agatatatgggtttaaaaaatcgattactccag

SEQ ID NO: 88388 - DNA, 33 bp, Homo sapien
agatatatgggtttaagaaatcgattactccag

SEQ ID NO: 88389 - DNA, 33 bp, Homo sapien
cctccattgcaagatacagtgattgattgatag

SEQ ID NO: 88390 - DNA, 33 bp, Homo sapien
cctccattgcaagatagagtgattgattgatag

SEQ ID NO: 88391 - DNA, 33 bp, Homo sapien
ctctttccctgcaagtcacaaagtttagcttta

SEQ ID NO: 88392 - DNA, 33 bp, Homo sapien
ctctttccctgcaagtgacaaagtttagcttta

SEQ ID NO: 88393 - DNA, 33 bp, Homo sapien
tgagaaagttgatttaacaaaacagatttttgg

SEQ ID NO: 88394 - DNA, 33 bp, Homo sapien
tgagaaagttgatttagcaaaacagatttttgg

SEQ ID NO: 88395 - DNA, 33 bp, Homo sapien
ttttcctgcagagcctcaaaatcgcacagaaca

SEQ ID NO: 88396 - DNA, 33 bp, Homo sapien
ttttcctgcagagcctgaaaatcgcacagaaca

SEQ ID NO: 88397 - DNA, 33 bp, Homo sapien
acccacctttgtgccaagactggggctaagctc

SEQ ID NO: 88398 - DNA, 33 bp, Homo sapien
acccacctttgtgccaggactggggctaagctc

SEQ ID NO: 88399 - DNA, 33 bp, Homo sapien
acagccaattaacccacgcagccctgcaagaaa

SEQ ID NO: 88400 - DNA, 33 bp, Homo sapien
acagccaattaacccatgcagccctgcaagaaa

SEQ ID NO: 88401 - DNA, 33 bp, Homo sapien
aaacctacacatcctgaaaaggcaacatttctg

SEQ ID NO: 88402 - DNA, 33 bp, Homo sapien
aaacctacacatcctggaaaggcaacatttctg

SEQ ID NO: 88403 - DNA, 33 bp, Homo sapien
ccctttgttgacgacaagcacatttatgggtga

SEQ ID NO: 88404 - DNA, 33 bp, Homo sapien
ccctttgttgacgacaggcacatttatgggtga

SEQ ID NO: 88405 - DNA, 33 bp, Homo sapien
cagacagggctttctcacaattcagaagcactc

SEQ ID NO: 88406 - DNA, 33 bp, Homo sapien
cagacagggctttctcgcaattcagaagcactc

SEQ ID NO: 88407 - DNA, 33 bp, Homo sapien
ttgaatgttttgtgtgaaaggagtataccatga

SEQ ID NO: 88408 - DNA, 33 bp, Homo sapien
ttgaatgttttgtgtgtaaggagtataccatga

SEQ ID NO: 88409 - DNA, 33 bp, Homo sapien
ccacgggtgctatgccacttcttacaggacctt

SEQ ID NO: 88410 - DNA, 33 bp, Homo sapien
ccacgggtgctatgccgcttcttacaggacctt

SEQ ID NO: 88411 - DNA, 33 bp, Homo sapien
ctgcgctcattgaccactgaacacacattactc

SEQ ID NO: 88412 - DNA, 33 bp, Homo sapien
ctgcgctcattgaccattgaacacacattactc

SEQ ID NO: 88413 - DNA, 33 bp, Homo sapien
tttccaggcatttaaccaaaagaattaaaagaa

SEQ ID NO: 88414 - DNA, 33 bp, Homo sapien
tttccaggcatttaactaaaagaattaaaagaa

SEQ ID NO: 88415 - DNA, 33 bp, Homo sapien
attgagcctggctttacggcaccagcttaagat

SEQ ID NO: 88416 - DNA, 33 bp, Homo sapien
attgagcctggctttatggcaccagcttaagat

SEQ ID NO: 88417 - DNA, 33 bp, Homo sapien
gaagtagagaacatgaaaaaaaattacagctga

SEQ ID NO: 88418 - DNA, 33 bp, Homo sapien
gaagtagagaacatgagaaaaaattacagctga

SEQ ID NO: 88419 - DNA, 33 bp, Homo sapien
agtcaaagactcaaaaaggcgaccttccacaca

SEQ ID NO: 88420 - DNA, 33 bp, Homo sapien
agtcaaagactcaaaacggcgaccttccacaca

SEQ ID NO: 88421 - DNA, 33 bp, Homo sapien
aggaaaccatagacaccgatgtatcgccagcat

SEQ ID NO: 88422 - DNA, 33 bp, Homo sapien
aggaaaccatagacactgatgtatcgccagcat

SEQ ID NO: 88423 - DNA, 33 bp, Homo sapien
gagccatttgtcaccaagatgtgaaaaaacaac

SEQ ID NO: 88424 - DNA, 33 bp, Homo sapien
gagccatttgtcaccatgatgtgaaaaaacaac

SEQ ID NO: 88425 - DNA, 33 bp, Homo sapien
tttcacatctgcaggaccttccagaggagccat

SEQ ID NO: 88426 - DNA, 33 bp, Homo sapien
tttcacatctgcaggatcttccagaggagccat

SEQ ID NO: 88427 - DNA, 33 bp, Homo sapien
caagcacactcgttcacacccaagagggtctcg

SEQ ID NO: 88428 - DNA, 33 bp, Homo sapien
caagcacactcgttcatacccaagagggtctcg

SEQ ID NO: 88429 - DNA, 33 bp, Homo sapien
aggtttttgcgttaaaagtaatggcaattatca

SEQ ID NO: 88430 - DNA, 33 bp, Homo sapien
aggtttttgcgttaaaggtaatggcaattatca

SEQ ID NO: 88431 - DNA, 33 bp, Homo sapien
tcaagtcattctgaacggatggaaaccccaacg

SEQ ID NO: 88432 - DNA, 33 bp, Homo sapien
tcaagtcattctgaactgatggaaaccccaacg

SEQ ID NO: 88433 - DNA, 33 bp, Homo sapien
agcacagagcagactgacagagagagggcctgg

SEQ ID NO: 88434 - DNA, 33 bp, Homo sapien
agcacagagcagactggcagagagagggcctgg

SEQ ID NO: 88435 - DNA, 33 bp, Homo sapien
gcagtgtgcaggcatccatcaatctatggcagg

SEQ ID NO: 88436 - DNA, 33 bp, Homo sapien
gcagtgtgcaggcatcgatcaatctatggcagg

SEQ ID NO: 88437 - DNA, 33 bp, Homo sapien
aatatctggtgcagaaacgtccttccatagaga

SEQ ID NO: 88438 - DNA, 33 bp, Homo sapien
aatatctggtgcagaaccgtccttccatagaga

SEQ ID NO: 88439 - DNA, 33 bp, Homo sapien
ttcctctcttcctccaataactcacatttctag

SEQ ID NO: 88440 - DNA, 33 bp, Homo sapien
ttcctctcttcctccagtaactcacatttctag

SEQ ID NO: 88441 - DNA, 33 bp, Homo sapien
aaatgccacaatttagaaattcatgtcaatgcc

SEQ ID NO: 88442 - DNA, 33 bp, Homo sapien
aaatgccacaatttagtaattcatgtcaatgcc

SEQ ID NO: 88443 - DNA, 33 bp, Homo sapien
cagctgtgacttcgaacgtttccctgtggatga

SEQ ID NO: 88444 - DNA, 33 bp, Homo sapien
cagctgtgacttcgaatgtttccctgtggatga

SEQ ID NO: 88445 - DNA, 33 bp, Homo sapien
gcttaagccttagaacaaacgcttactcctcaa

SEQ ID NO: 88446 - DNA, 33 bp, Homo sapien
gcttaagccttagaacgaacgcttactcctcaa

SEQ ID NO: 88447 - DNA, 33 bp, Homo sapien
gcactaagtcctttaaactgtctgagtgtgtag

SEQ ID NO: 88448 - DNA, 33 bp, Homo sapien
gcactaagtcctttaagctgtctgagtgtgtag

SEQ ID NO: 88449 - DNA, 33 bp, Homo sapien
tacctccattggtgaacgccatttatctctgtc

SEQ ID NO: 88450 - DNA, 33 bp, Homo sapien
tacctccattggtgaatgccatttatctctgtc

SEQ ID NO: 88451 - DNA, 33 bp, Homo sapien
cagaggtgacaggagtcaagtaagtgagtttat

SEQ ID NO: 88452 - DNA, 33 bp, Homo sapien
cagaggtgacaggagttaagtaagtgagtttat

SEQ ID NO: 88453 - DNA, 33 bp, Homo sapien
aaaacaaaacaaaacccgctcaaatcgtgttaa

SEQ ID NO: 88454 - DNA, 33 bp, Homo sapien
aaaacaaaacaaaacctgctcaaatcgtgttaa

SEQ ID NO: 88455 - DNA, 33 bp, Homo sapien
gctagcacattatagaacgtgtgttatgagcca

SEQ ID NO: 88456 - DNA, 33 bp, Homo sapien
gctagcacattatagaccgtgtgttatgagcca

SEQ ID NO: 88457 - DNA, 33 bp, Homo sapien
aaaatggaagaacttcacggccagtttatttgt

SEQ ID NO: 88458 - DNA, 33 bp, Homo sapien
aaaatggaagaacttcgcggccagtttatttgt

SEQ ID NO: 88459 - DNA, 33 bp, Homo sapien
ccaatggagaacaaccacaaacaaacaagcaaa

SEQ ID NO: 88460 - DNA, 33 bp, Homo sapien
ccaatggagaacaaccgcaaacaaacaagcaaa

SEQ ID NO: 88461 - DNA, 33 bp, Homo sapien
cccaacagtcaagctaagaggtgtatctacaat

SEQ ID NO: 88462 - DNA, 33 bp, Homo sapien
cccaacagtcaagctaggaggtgtatctacaat

SEQ ID NO: 88463 - DNA, 33 bp, Homo sapien
tggattgtgtgtcttcacgtctttgtaccaaat

SEQ ID NO: 88464 - DNA, 33 bp, Homo sapien
tggattgtgtgtcttcgcgtctttgtaccaaat

SEQ ID NO: 88465 - DNA, 33 bp, Homo sapien
atgcagaatttatggcactttcacccatgagga

SEQ ID NO: 88466 - DNA, 33 bp, Homo sapien
atgcagaatttatggcgctttcacccatgagga

SEQ ID NO: 88467 - DNA, 33 bp, Homo sapien
aagttgtagcgttcaaataatgggtaatttgtc

SEQ ID NO: 88468 - DNA, 33 bp, Homo sapien
aagttgtagcgttcaactaatgggtaatttgtc

SEQ ID NO: 88469 - DNA, 33 bp, Homo sapien
atgtgtctttaacatcactgagatatgttagag

SEQ ID NO: 88470 - DNA, 33 bp, Homo sapien
atgtgtctttaacatcgctgagatatgttagag

SEQ ID NO: 88471 - DNA, 33 bp, Homo sapien
gcctgtgtgggctgcaactaataaggtttttta

SEQ ID NO: 88472 - DNA, 33 bp, Homo sapien
gcctgtgtgggctgcatctaataaggtttttta

SEQ ID NO: 88473 - DNA, 33 bp, Homo sapien
cagaagctaaaaatgacaacgggcttttattag

SEQ ID NO: 88474 - DNA, 33 bp, Homo sapien
cagaagctaaaaatgataacgggcttttattag

SEQ ID NO: 88475 - DNA, 33 bp, Homo sapien
tttggctttgttttgacatagataggatctcac

SEQ ID NO: 88476 - DNA, 33 bp, Homo sapien
tttggctttgttttgagatagataggatctcac

SEQ ID NO: 88477 - DNA, 33 bp, Homo sapien
atttctgcctttgtcaacttgaaggaggtggaa

SEQ ID NO: 88478 - DNA, 33 bp, Homo sapien
atttctgcctttgtcatcttgaaggaggtggaa

SEQ ID NO: 88479 - DNA, 33 bp, Homo sapien
cacttacaaaggcctcactgaccaatatgccaa

SEQ ID NO: 88480 - DNA, 33 bp, Homo sapien
cacttacaaaggcctcgctgaccaatatgccaa

SEQ ID NO: 88481 - DNA, 33 bp, Homo sapien
gccatttccatagggccatcagtcatgctgcat

SEQ ID NO: 88482 - DNA, 33 bp, Homo sapien
gccatttccatagggctatcagtcatgctgcat

SEQ ID NO: 88483 - DNA, 33 bp, Homo sapien
atggcagcgtaggaaacgaatccactagccata

SEQ ID NO: 88484 - DNA, 33 bp, Homo sapien
atggcagcgtaggaaatgaatccactagccata

SEQ ID NO: 88485 - DNA, 33 bp, Homo sapien
tgggcatcacacactacacatgtccctggaagt

SEQ ID NO: 88486 - DNA, 33 bp, Homo sapien
tgggcatcacacactatacatgtccctggaagt

SEQ ID NO: 88487 - DNA, 33 bp, Homo sapien
aacttggttcccagcaatactattccagcttga

SEQ ID NO: 88488 - DNA, 33 bp, Homo sapien
aacttggttcccagcagtactattccagcttga

SEQ ID NO: 88489 - DNA, 33 bp, Homo sapien
cagggccctgatgcaacaggattagtgttctta

SEQ ID NO: 88490 - DNA, 33 bp, Homo sapien
cagggccctgatgcaataggattagtgttctta

SEQ ID NO: 88491 - DNA, 33 bp, Homo sapien
ccgctgtgatgggcaccgcttccctcctttccc

SEQ ID NO: 88492 - DNA, 33 bp, Homo sapien
ccgctgtgatgggcactgcttccctcctttccc

SEQ ID NO: 88493 - DNA, 33 bp, Homo sapien
cccttttagtgccaaacttaggagggaaacccc

SEQ ID NO: 88494 - DNA, 33 bp, Homo sapien
cccttttagtgccaaatttaggagggaaacccc

SEQ ID NO: 88495 - DNA, 33 bp, Homo sapien
ttgggggaagggtcaaaaatgaactaaaggtgg

SEQ ID NO: 88496 - DNA, 33 bp, Homo sapien
ttgggggaagggtcaacaatgaactaaaggtgg

SEQ ID NO: 88497 - DNA, 33 bp, Homo sapien
ttccaaataaaagtacaggaaatcttagtggag

SEQ ID NO: 88498 - DNA, 33 bp, Homo sapien
ttccaaataaaagtacgggaaatcttagtggag

SEQ ID NO: 88499 - DNA, 33 bp, Homo sapien
tatttcctgatgacgaacagagaccttgatctg

SEQ ID NO: 88500 - DNA, 33 bp, Homo sapien
tatttcctgatgacgagcagagaccttgatctg

SEQ ID NO: 88501 - DNA, 33 bp, Homo sapien
tgtaattgagaagtaacgccacacagcagaggc

SEQ ID NO: 88502 - DNA, 33 bp, Homo sapien
tgtaattgagaagtaatgccacacagcagaggc

SEQ ID NO: 88503 - DNA, 33 bp, Homo sapien
atagtgttatttgctacccagatgagtcaatat

SEQ ID NO: 88504 - DNA, 33 bp, Homo sapien
atagtgttatttgctatccagatgagtcaatat

SEQ ID NO: 88505 - DNA, 33 bp, Homo sapien
taggctatcattccaactatctgcctactttgc

SEQ ID NO: 88506 - DNA, 33 bp, Homo sapien
taggctatcattccaagtatctgcctactttgc

SEQ ID NO: 88507 - DNA, 33 bp, Homo sapien
ctgagcaagcagaaaacaatgcagacaaatgtc

SEQ ID NO: 88508 - DNA, 33 bp, Homo sapien
ctgagcaagcagaaaataatgcagacaaatgtc

SEQ ID NO: 88509 - DNA, 33 bp, Homo sapien
atatttgctcttcttgcatttttttcatgatta

SEQ ID NO: 88510 - DNA, 33 bp, Homo sapien
atatttgctcttcttgtatttttttcatgatta

SEQ ID NO: 88511 - DNA, 33 bp, Homo sapien
attctgataccaggtacgctaagatatgtttat

SEQ ID NO: 88512 - DNA, 33 bp, Homo sapien
attctgataccaggtatgctaagatatgtttat

SEQ ID NO: 88513 - DNA, 33 bp, Homo sapien
aattagtttctgaaccacactgtttgctggtaa

SEQ ID NO: 88514 - DNA, 33 bp, Homo sapien
aattagtttctgaaccgcactgtttgctggtaa

SEQ ID NO: 88515 - DNA, 33 bp, Homo sapien
cacgagaaaacaaaccagccaaatgttatcgtt

SEQ ID NO: 88516 - DNA, 33 bp, Homo sapien
cacgagaaaacaaaccggccaaatgttatcgtt

SEQ ID NO: 88517 - DNA, 33 bp, Homo sapien
tgggctccttcactaacgcatgtctttacgttg

SEQ ID NO: 88518 - DNA, 33 bp, Homo sapien
tgggctccttcactaatgcatgtctttacgttg

SEQ ID NO: 88519 - DNA, 33 bp, Homo sapien
gcagaccatgttttccacagcctaggccacacc

SEQ ID NO: 88520 - DNA, 33 bp, Homo sapien
gcagaccatgttttccgcagcctaggccacacc

SEQ ID NO: 88521 - DNA, 33 bp, Homo sapien
tttctcctgataaaaagtgaagagtttggaaga

SEQ ID NO: 88522 - DNA, 33 bp, Homo sapien
tttctcctgataaaaattgaagagtttggaaga

SEQ ID NO: 88523 - DNA, 33 bp, Homo sapien
ttaagcaaaacaatgcagatttggttcattaat

SEQ ID NO: 88524 - DNA, 33 bp, Homo sapien
ttaagcaaaacaatgcggatttggttcattaat

SEQ ID NO: 88525 - DNA, 33 bp, Homo sapien
tttgaaattttttgaacgccgacatgaggctga

SEQ ID NO: 88526 - DNA, 33 bp, Homo sapien
tttgaaattttttgaatgccgacatgaggctga

SEQ ID NO: 88527 - DNA, 33 bp, Homo sapien
tcatttggttccatggacaacctctattggtgt

SEQ ID NO: 88528 - DNA, 33 bp, Homo sapien
tcatttggttccatgggcaacctctattggtgt

SEQ ID NO: 88529 - DNA, 33 bp, Homo sapien
ttctgaaaagcctggagaggttagtgagaaagg

SEQ ID NO: 88530 - DNA, 33 bp, Homo sapien
ttctgaaaagcctggataggttagtgagaaagg

SEQ ID NO: 88531 - DNA, 33 bp, Homo sapien
tcacttcccagatacaatgagaggctactgaag

SEQ ID NO: 88532 - DNA, 33 bp, Homo sapien
tcacttcccagatacagtgagaggctactgaag

SEQ ID NO: 88533 - DNA, 33 bp, Homo sapien
ccaaacccaggagctcaataatattactggaat

SEQ ID NO: 88534 - DNA, 33 bp, Homo sapien
ccaaacccaggagctcgataatattactggaat

SEQ ID NO: 88535 - DNA, 33 bp, Homo sapien
ctaatatcatggaatcgccaaatacggtctcca

SEQ ID NO: 88536 - DNA, 33 bp, Homo sapien
ctaatatcatggaatctccaaatacggtctcca

SEQ ID NO: 88537 - DNA, 33 bp, Homo sapien
gtaaaaattgtgtaaaatcagttcccagtgtac

SEQ ID NO: 88538 - DNA, 33 bp, Homo sapien
gtaaaaattgtgtaaagtcagttcccagtgtac

SEQ ID NO: 88539 - DNA, 33 bp, Homo sapien
ctctttaggactaagcagatatgtctttcctac

SEQ ID NO: 88540 - DNA, 33 bp, Homo sapien
ctctttaggactaagccgatatgtctttcctac

SEQ ID NO: 88541 - DNA, 33 bp, Homo sapien
gtttttgtgcacaggacatttacaagcctgcag

SEQ ID NO: 88542 - DNA, 33 bp, Homo sapien
gtttttgtgcacaggatatttacaagcctgcag

SEQ ID NO: 88543 - DNA, 33 bp, Homo sapien
ttcaggctgtttcttcaagctctgatgccaccc

SEQ ID NO: 88544 - DNA, 33 bp, Homo sapien
ttcaggctgtttcttcgagctctgatgccaccc

SEQ ID NO: 88545 - DNA, 33 bp, Homo sapien
gagcaggtgccctcaactggggacttgatacag

SEQ ID NO: 88546 - DNA, 33 bp, Homo sapien
gagcaggtgccctcaattggggacttgatacag

SEQ ID NO: 88547 - DNA, 33 bp, Homo sapien
ggaagagggcgacccacgccatactcacggtgc

SEQ ID NO: 88548 - DNA, 33 bp, Homo sapien
ggaagagggcgacccatgccatactcacggtgc

SEQ ID NO: 88549 - DNA, 33 bp, Homo sapien
ttgaagtctccacggccgatctaaaagcaagtt

SEQ ID NO: 88550 - DNA, 33 bp, Homo sapien
ttgaagtctccacggctgatctaaaagcaagtt

SEQ ID NO: 88551 - DNA, 33 bp, Homo sapien
ccggaaagttctctgaaaccagtagtggaagct

SEQ ID NO: 88552 - DNA, 33 bp, Homo sapien
ccggaaagttctctgagaccagtagtggaagct

SEQ ID NO: 88553 - DNA, 33 bp, Homo sapien
gatttcttttgacaaactgactttgaaaaggaa

SEQ ID NO: 88554 - DNA, 33 bp, Homo sapien
gatttcttttgacaaattgactttgaaaaggaa

SEQ ID NO: 88555 - DNA, 33 bp, Homo sapien
catggcaatttactcaacagctacttaaaaaat

SEQ ID NO: 88556 - DNA, 33 bp, Homo sapien
catggcaatttactcatcagctacttaaaaaat

SEQ ID NO: 88557 - DNA, 33 bp, Homo sapien
aatgaatgtttggaaaatatgcaattaggtatc

SEQ ID NO: 88558 - DNA, 33 bp, Homo sapien
aatgaatgtttggaaagtatgcaattaggtatc

SEQ ID NO: 88559 - DNA, 33 bp, Homo sapien
caacactgtacactggaatttgagcaaagagga

SEQ ID NO: 88560 - DNA, 33 bp, Homo sapien
caacactgtacactgggatttgagcaaagagga

SEQ ID NO: 88561 - DNA, 33 bp, Homo sapien
ggacagaagcagcgaaaacgtgaaatcttggct

SEQ ID NO: 88562 - DNA, 33 bp, Homo sapien
ggacagaagcagcgaagacgtgaaatcttggct

SEQ ID NO: 88563 - DNA, 33 bp, Homo sapien
tgtaagtcaagctgcaagatgcaagaagttgaa

SEQ ID NO: 88564 - DNA, 33 bp, Homo sapien
tgtaagtcaagctgcaggatgcaagaagttgaa

SEQ ID NO: 88565 - DNA, 33 bp, Homo sapien
aatataggtgattgacagagataccgtgccttc

SEQ ID NO: 88566 - DNA, 33 bp, Homo sapien
aatataggtgattgacggagataccgtgccttc

SEQ ID NO: 88567 - DNA, 33 bp, Homo sapien
tttaatcgtctcacaactcaccagcttccaggg

SEQ ID NO: 88568 - DNA, 33 bp, Homo sapien
tttaatcgtctcacaattcaccagcttccaggg

SEQ ID NO: 88569 - DNA, 33 bp, Homo sapien
gttcaagcatgtaaaacacttaggacggggccc

SEQ ID NO: 88570 - DNA, 33 bp, Homo sapien
gttcaagcatgtaaaagacttaggacggggccc

SEQ ID NO: 88571 - DNA, 33 bp, Homo sapien
ccactgaaattaattcgaaccagatgcccagac

SEQ ID NO: 88572 - DNA, 33 bp, Homo sapien
ccactgaaattaattctaaccagatgcccagac

SEQ ID NO: 88573 - DNA, 33 bp, Homo sapien
gggggattcaatgacaaagtatacataaagcac

SEQ ID NO: 88574 - DNA, 33 bp, Homo sapien
gggggattcaatgacacagtatacataaagcac

SEQ ID NO: 88575 - DNA, 33 bp, Homo sapien
tgtaatattgcttaaaagattacaccatttggc

SEQ ID NO: 88576 - DNA, 33 bp, Homo sapien
tgtaatattgcttaaaggattacaccatttggc

SEQ ID NO: 88577 - DNA, 33 bp, Homo sapien
tcttacggtacaagcaatcacactgtgtggatc

SEQ ID NO: 88578 - DNA, 33 bp, Homo sapien
tcttacggtacaagcagtcacactgtgtggatc

SEQ ID NO: 88579 - DNA, 33 bp, Homo sapien
aagtcactgggaagaacgaattcgaaggtgaat

SEQ ID NO: 88580 - DNA, 33 bp, Homo sapien
aagtcactgggaagaatgaattcgaaggtgaat

SEQ ID NO: 88581 - DNA, 33 bp, Homo sapien
aacctttcattgtgccccctatgtaaagccatg

SEQ ID NO: 88582 - DNA, 33 bp, Homo sapien
aacctttcattgtgcctcctatgtaaagccatg

SEQ ID NO: 88583 - DNA, 33 bp, Homo sapien
ctctgtgaggtccaaagtttaggaaaaacacat

SEQ ID NO: 88584 - DNA, 33 bp, Homo sapien
ctctgtgaggtccaaattttaggaaaaacacat

SEQ ID NO: 88585 - DNA, 33 bp, Homo sapien
aggacaagataaaagcagatataacaaaccaag

SEQ ID NO: 88586 - DNA, 33 bp, Homo sapien
aggacaagataaaagccgatataacaaaccaag

SEQ ID NO: 88587 - DNA, 33 bp, Homo sapien
gctataaaccgtaaaaggttgctgcgtgggtgc

SEQ ID NO: 88588 - DNA, 33 bp, Homo sapien
gctataaaccgtaaaatgttgctgcgtgggtgc

SEQ ID NO: 88589 - DNA, 33 bp, Homo sapien
tatctcaaatgcacgaaatcaagtaattgttac

SEQ ID NO: 88590 - DNA, 33 bp, Homo sapien
tatctcaaatgcacgacatcaagtaattgttac

SEQ ID NO: 88591 - DNA, 33 bp, Homo sapien
gtggtgagagagttataaggagtgatgctgatc

SEQ ID NO: 88592 - DNA, 33 bp, Homo sapien
gtggtgagagagttatgaggagtgatgctgatc

SEQ ID NO: 88593 - DNA, 33 bp, Homo sapien
ccacttgggaattaacaccaatattggccactt

SEQ ID NO: 88594 - DNA, 33 bp, Homo sapien
ccacttgggaattaacgccaatattggccactt

SEQ ID NO: 88595 - DNA, 33 bp, Homo sapien
cttcactagtaactgaatcagccacttgggaat

SEQ ID NO: 88596 - DNA, 33 bp, Homo sapien
cttcactagtaactgactcagccacttgggaat

SEQ ID NO: 88597 - DNA, 33 bp, Homo sapien
gccactccaggtgaagcagcatagttaagagaa

SEQ ID NO: 88598 - DNA, 33 bp, Homo sapien
gccactccaggtgaaggagcatagttaagagaa

SEQ ID NO: 88599 - DNA, 33 bp, Homo sapien
tgtgttacaattgctccatttttatggaatttt

SEQ ID NO: 88600 - DNA, 33 bp, Homo sapien
tgtgttacaattgctctatttttatggaatttt

SEQ ID NO: 88601 - DNA, 33 bp, Homo sapien
gtcctacctcagtgtgcagctgtgccattcact

SEQ ID NO: 88602 - DNA, 33 bp, Homo sapien
gtcctacctcagtgtgtagctgtgccattcact

SEQ ID NO: 88603 - DNA, 33 bp, Homo sapien
taattaggaagcagacaatgtgccggtggtgat

SEQ ID NO: 88604 - DNA, 33 bp, Homo sapien
taattaggaagcagacgatgtgccggtggtgat

SEQ ID NO: 88605 - DNA, 33 bp, Homo sapien
tggctagtccattcagaaagcctatggaggtgg

SEQ ID NO: 88606 - DNA, 33 bp, Homo sapien
tggctagtccattcaggaagcctatggaggtgg

SEQ ID NO: 88607 - DNA, 33 bp, Homo sapien
aacttgctgttgaaagcctggatgcatctgttg

SEQ ID NO: 88608 - DNA, 33 bp, Homo sapien
aacttgctgttgaaagtctggatgcatctgttg

SEQ ID NO: 88609 - DNA, 33 bp, Homo sapien
aacagcaagttaactcactctgggacataccaa

SEQ ID NO: 88610 - DNA, 33 bp, Homo sapien
aacagcaagttaactcgctctgggacataccaa

SEQ ID NO: 88611 - DNA, 33 bp, Homo sapien
cctcagaaggatctcacgatagagctttgttca

SEQ ID NO: 88612 - DNA, 33 bp, Homo sapien
cctcagaaggatctcatgatagagctttgttca

SEQ ID NO: 88613 - DNA, 33 bp, Homo sapien
ttttgagacgtgaacaaggactaaaggcagagc

SEQ ID NO: 88614 - DNA, 33 bp, Homo sapien
ttttgagacgtgaacagggactaaaggcagagc

SEQ ID NO: 88615 - DNA, 33 bp, Homo sapien
gacatcaaaagagaagcccgtcgcaggaaatcg

SEQ ID NO: 88616 - DNA, 33 bp, Homo sapien
gacatcaaaagagaaggccgtcgcaggaaatcg

SEQ ID NO: 88617 - DNA, 33 bp, Homo sapien
ttactgcagaaggagcaataggaactgagaaca

SEQ ID NO: 88618 - DNA, 33 bp, Homo sapien
ttactgcagaaggagcgataggaactgagaaca

SEQ ID NO: 88619 - DNA, 33 bp, Homo sapien
tcggtcgcactaagccacgtgagatgttctcag

SEQ ID NO: 88620 - DNA, 33 bp, Homo sapien
tcggtcgcactaagccgcgtgagatgttctcag

SEQ ID NO: 88621 - DNA, 33 bp, Homo sapien
taaacaatggataaataagattccccaaacatg

SEQ ID NO: 88622 - DNA, 33 bp, Homo sapien
taaacaatggataaatgagattccccaaacatg

SEQ ID NO: 88623 - DNA, 33 bp, Homo sapien
accgtgaagctataaaatttaaggcatttttgg

SEQ ID NO: 88624 - DNA, 33 bp, Homo sapien
accgtgaagctataaagtttaaggcatttttgg

SEQ ID NO: 88625 - DNA, 33 bp, Homo sapien
aggacacagaggctgacgtagtgcagtgcactg

SEQ ID NO: 88626 - DNA, 33 bp, Homo sapien
aggacacagaggctgaggtagtgcagtgcactg

SEQ ID NO: 88627 - DNA, 33 bp, Homo sapien
aattacatatttaaccaatctttgactaatatt

SEQ ID NO: 88628 - DNA, 33 bp, Homo sapien
aattacatatttaaccgatctttgactaatatt

SEQ ID NO: 88629 - DNA, 33 bp, Homo sapien
gcagacaatagttgaaagcagaatgaataagca

SEQ ID NO: 88630 - DNA, 33 bp, Homo sapien
gcagacaatagttgaaggcagaatgaataagca

SEQ ID NO: 88631 - DNA, 33 bp, Homo sapien
aaagtgaaccattgtgaaaaattaagggaaatg

SEQ ID NO: 88632 - DNA, 33 bp, Homo sapien
aaagtgaaccattgtggaaaattaagggaaatg

SEQ ID NO: 88633 - DNA, 33 bp, Homo sapien
taatgacgactctacaaaacagccaagcaaatt

SEQ ID NO: 88634 - DNA, 33 bp, Homo sapien
taatgacgactctacagaacagccaagcaaatt

SEQ ID NO: 88635 - DNA, 33 bp, Homo sapien
gctcttgtttttgaaaattgtggtccttggcac

SEQ ID NO: 88636 - DNA, 33 bp, Homo sapien
gctcttgtttttgaaagttgtggtccttggcac

SEQ ID NO: 88637 - DNA, 33 bp, Homo sapien
tgaattcatttcagaacatttgcttggactatc

SEQ ID NO: 88638 - DNA, 33 bp, Homo sapien
tgaattcatttcagaatatttgcttggactatc

SEQ ID NO: 88639 - DNA, 33 bp, Homo sapien
aactacagatcgcaaggatagaagatgggacca

SEQ ID NO: 88640 - DNA, 33 bp, Homo sapien
aactacagatcgcaagtatagaagatgggacca

SEQ ID NO: 88641 - DNA, 33 bp, Homo sapien
accattaggtgttgaacggcattggggttcaaa

SEQ ID NO: 88642 - DNA, 33 bp, Homo sapien
accattaggtgttgaatggcattggggttcaaa

SEQ ID NO: 88643 - DNA, 33 bp, Homo sapien
cagtttgagtccaagacggacggcatatacaag

SEQ ID NO: 88644 - DNA, 33 bp, Homo sapien
cagtttgagtccaagagggacggcatatacaag

SEQ ID NO: 88645 - DNA, 33 bp, Homo sapien
gtaagactgatctataaattttgagtgccgagt

SEQ ID NO: 88646 - DNA, 33 bp, Homo sapien
gtaagactgatctatacattttgagtgccgagt

SEQ ID NO: 88647 - DNA, 33 bp, Homo sapien
ctcgggacgcttacctgagcctacaggtgagta

SEQ ID NO: 88648 - DNA, 33 bp, Homo sapien
ctcgggacgcttaccttagcctacaggtgagta

SEQ ID NO: 88649 - DNA, 33 bp, Homo sapien
ttagttcctgcagaccactgggttcccggaggc

SEQ ID NO: 88650 - DNA, 33 bp, Homo sapien
ttagttcctgcagaccgctgggttcccggaggc

SEQ ID NO: 88651 - DNA, 33 bp, Homo sapien
ggctcaactactgagaaggttttgtcactgtgt

SEQ ID NO: 88652 - DNA, 33 bp, Homo sapien
ggctcaactactgagacggttttgtcactgtgt

SEQ ID NO: 88653 - DNA, 33 bp, Homo sapien
gtttcagtttactccacatcctgttattagttc

SEQ ID NO: 88654 - DNA, 33 bp, Homo sapien
gtttcagtttactccatatcctgttattagttc

SEQ ID NO: 88655 - DNA, 33 bp, Homo sapien
atggtatatatcaaaaattacagtggcctcata

SEQ ID NO: 88656 - DNA, 33 bp, Homo sapien
atggtatatatcaaaatttacagtggcctcata

SEQ ID NO: 88657 - DNA, 33 bp, Homo sapien
aatgactcatatttgacagatgccacaaagcaa

SEQ ID NO: 88658 - DNA, 33 bp, Homo sapien
aatgactcatatttgatagatgccacaaagcaa

SEQ ID NO: 88659 - DNA, 33 bp, Homo sapien
gttttctgttgtaaaaaacagaccactgcccag

SEQ ID NO: 88660 - DNA, 33 bp, Homo sapien
gttttctgttgtaaaatacagaccactgcccag

SEQ ID NO: 88661 - DNA, 33 bp, Homo sapien
agccccgccgaggacaaccccatctgacatggg

SEQ ID NO: 88662 - DNA, 33 bp, Homo sapien
agccccgccgaggacacccccatctgacatggg

SEQ ID NO: 88663 - DNA, 33 bp, Homo sapien
ttatttcacagctgacaaactgaggccctcagt

SEQ ID NO: 88664 - DNA, 33 bp, Homo sapien
ttatttcacagctgacgaactgaggccctcagt

SEQ ID NO: 88665 - DNA, 33 bp, Homo sapien
gctctacccttcagaccctacttatgtattgct

SEQ ID NO: 88666 - DNA, 33 bp, Homo sapien
gctctacccttcagactctacttatgtattgct

SEQ ID NO: 88667 - DNA, 33 bp, Homo sapien
gaacctggtgggttgcaattcagtctctagggg

SEQ ID NO: 88668 - DNA, 33 bp, Homo sapien
gaacctggtgggttgcgattcagtctctagggg

SEQ ID NO: 88669 - DNA, 33 bp, Homo sapien
tgttaggctgtaacaacaagcagcattagacgg

SEQ ID NO: 88670 - DNA, 33 bp, Homo sapien
tgttaggctgtaacaagaagcagcattagacgg

SEQ ID NO: 88671 - DNA, 33 bp, Homo sapien
tggctacaatgcctgaatcaacattttgcccag

SEQ ID NO: 88672 - DNA, 33 bp, Homo sapien
tggctacaatgcctgagtcaacattttgcccag

SEQ ID NO: 88673 - DNA, 33 bp, Homo sapien
atttcttgttactcataatccatatcttttact

SEQ ID NO: 88674 - DNA, 33 bp, Homo sapien
atttcttgttactcatcatccatatcttttact

SEQ ID NO: 88675 - DNA, 33 bp, Homo sapien
atggcacagagattagcacatagtaaatgttta

SEQ ID NO: 88676 - DNA, 33 bp, Homo sapien
atggcacagagattagtacatagtaaatgttta

SEQ ID NO: 88677 - DNA, 33 bp, Homo sapien
tggatctccaagaaaaaggaagtcattatggat

SEQ ID NO: 88678 - DNA, 33 bp, Homo sapien
tggatctccaagaaaagggaagtcattatggat

SEQ ID NO: 88679 - DNA, 33 bp, Homo sapien
agtgaaaccggagttaacccctgaagatgagtg

SEQ ID NO: 88680 - DNA, 33 bp, Homo sapien
agtgaaaccggagttagcccctgaagatgagtg

SEQ ID NO: 88681 - DNA, 33 bp, Homo sapien
atgtgggtcagtcaaaactcccttgtgtatgtg

SEQ ID NO: 88682 - DNA, 33 bp, Homo sapien
atgtgggtcagtcaaagctcccttgtgtatgtg

SEQ ID NO: 88683 - DNA, 33 bp, Homo sapien
actaacatttgtttgcagatctatgcacttggt

SEQ ID NO: 88684 - DNA, 33 bp, Homo sapien
actaacatttgtttgcggatctatgcacttggt

SEQ ID NO: 88685 - DNA, 33 bp, Homo sapien
acttctcacccaaaagaatctgctattttctct

SEQ ID NO: 88686 - DNA, 33 bp, Homo sapien
acttctcacccaaaagcatctgctattttctct

SEQ ID NO: 88687 - DNA, 33 bp, Homo sapien
gggcttgcagactggaacagccatgctaaagaa

SEQ ID NO: 88688 - DNA, 33 bp, Homo sapien
gggcttgcagactggagcagccatgctaaagaa

SEQ ID NO: 88689 - DNA, 33 bp, Homo sapien
tttttggccttttggaagctggctctctcccct

SEQ ID NO: 88690 - DNA, 33 bp, Homo sapien
tttttggccttttggaggctggctctctcccct

SEQ ID NO: 88691 - DNA, 33 bp, Homo sapien
caatatggttataataaaaacaggcagaagaac

SEQ ID NO: 88692 - DNA, 33 bp, Homo sapien
caatatggttataatagaaacaggcagaagaac

SEQ ID NO: 88693 - DNA, 33 bp, Homo sapien; identical to SEQ ID NO: 88691

SEQ ID NO: 88694 - DNA, 33 bp, Homo sapien; identical to SEQ ID NO: 88692

SEQ ID NO: 88695 - DNA, 33 bp, Homo sapien
tagggagtccctggaacgtagccattaatggac

SEQ ID NO: 88696 - DNA, 33 bp, Homo sapien
tagggagtccctggaatgtagccattaatggac

SEQ ID NO: 88697 - DNA, 33 bp, Homo sapien
ctgatgaccgctataaaaagcaaagatactgaa

SEQ ID NO: 88698 - DNA, 33 bp, Homo sapien
ctgatgaccgctataagaagcaaagatactgaa

SEQ ID NO: 88699 - DNA, 33 bp, Homo sapien
aagtgtgtgcactttacattcaaggaactaatg

SEQ ID NO: 88700 - DNA, 33 bp, Homo sapien
aagtgtgtgcactttatattcaaggaactaatg

SEQ ID NO: 88701 - DNA, 33 bp, Homo sapien
aacctcttatgaaacccgaggtacctgacaaga

SEQ ID NO: 88702 - DNA, 33 bp, Homo sapien
aacctcttatgaaacctgaggtacctgacaaga

SEQ ID NO: 88703 - DNA, 33 bp, Homo sapien
gtggaatcctcattgaaaaaagggctgagaagg

SEQ ID NO: 88704 - DNA, 33 bp, Homo sapien
gtggaatcctcattgagaaaagggctgagaagg

SEQ ID NO: 88705 - DNA, 33 bp, Homo sapien
gaggagaaattagaaaatgtgcaggaagcagca

SEQ ID NO: 88706 - DNA, 33 bp, Homo sapien
gaggagaaattagaaagtgtgcaggaagcagca

SEQ ID NO: 88707 - DNA, 33 bp, Homo sapien
cagaacctcccagtaaaaggatggtgttggcag

SEQ ID NO: 88708 - DNA, 33 bp, Homo sapien
cagaacctcccagtaacaggatggtgttggcag

SEQ ID NO: 88709 - DNA, 33 bp, Homo sapien
taggtggaacttgcagaaccctgctactaaccc

SEQ ID NO: 88710 - DNA, 33 bp, Homo sapien
taggtggaacttgcaggaccctgctactaaccc

SEQ ID NO: 88711 - DNA, 33 bp, Homo sapien
atgtaaacctcagtaaactgcctgacttccctg

SEQ ID NO: 88712 - DNA, 33 bp, Homo sapien
atgtaaacctcagtaagctgcctgacttccctg

SEQ ID NO: 88713 - DNA, 33 bp, Homo sapien
tcacactgtctaggaacgaccatattaggaaat

SEQ ID NO: 88714 - DNA, 33 bp, Homo sapien
tcacactgtctaggaatgaccatattaggaaat

SEQ ID NO: 88715 - DNA, 33 bp, Homo sapien
tctagagatctcagagaaataggagctcaataa

SEQ ID NO: 88716 - DNA, 33 bp, Homo sapien
tctagagatctcagagcaataggagctcaataa

SEQ ID NO: 88717 - DNA, 33 bp, Homo sapien
gaatatcaaattgatacaaaaatgtcaaaactc

SEQ ID NO: 88718 - DNA, 33 bp, Homo sapien
gaatatcaaattgatagaaaaatgtcaaaactc

SEQ ID NO: 88719 - DNA, 33 bp, Homo sapien
gcaatgaataagctgacgtactttaaaggaagg

SEQ ID NO: 88720 - DNA, 33 bp, Homo sapien
gcaatgaataagctgaggtactttaaaggaagg

SEQ ID NO: 88721 - DNA, 33 bp, Homo sapien
ctgaaaacctaccttaaagactggaacttgata

SEQ ID NO: 88722 - DNA, 33 bp, Homo sapien
ctgaaaacctaccttagagactggaacttgata

SEQ ID NO: 88723 - DNA, 33 bp, Homo sapien
tggccagaatagtagaacctgaggattcaaagc

SEQ ID NO: 88724 - DNA, 33 bp, Homo sapien
tggccagaatagtagatcctgaggattcaaagc

SEQ ID NO: 88725 - DNA, 33 bp, Homo sapien
acctctaagaagcaaaagagagcaaatgaatgg

SEQ ID NO: 88726 - DNA, 33 bp, Homo sapien
acctctaagaagcaaaggagagcaaatgaatgg

SEQ ID NO: 88727 - DNA, 33 bp, Homo sapien
aaaagttttgaaattaggctgacacagaaggtt

SEQ ID NO: 88728 - DNA, 33 bp, Homo sapien
aaaagttttgaaattatgctgacacagaaggtt

SEQ ID NO: 88729 - DNA, 33 bp, Homo sapien
ctcataacctgtgagacaatatagaaatcagtg

SEQ ID NO: 88730 - DNA, 33 bp, Homo sapien
ctcataacctgtgagagaatatagaaatcagtg

SEQ ID NO: 88731 - DNA, 33 bp, Homo sapien
cgggcttggttccagaaccctgcagtaaagtaa

SEQ ID NO: 88732 - DNA, 33 bp, Homo sapien
cgggcttggttccagacccctgcagtaaagtaa

SEQ ID NO: 88733 - DNA, 33 bp, Homo sapien
caaacacccatcattcagaaatggacttgcttg

SEQ ID NO: 88734 - DNA, 33 bp, Homo sapien
caaacacccatcattcggaaatggacttgcttg

SEQ ID NO: 88735 - DNA, 33 bp, Homo sapien
tttgtctcttcagaaaggtaactactgctgttg

SEQ ID NO: 88736 - DNA, 33 bp, Homo sapien
tttgtctcttcagaaatgtaactactgctgttg

SEQ ID NO: 88737 - DNA, 33 bp, Homo sapien
tgttgaaacagcgagacaggaataaacccatgg

SEQ ID NO: 88738 - DNA, 33 bp, Homo sapien
tgttgaaacagcgagataggaataaacccatgg

SEQ ID NO: 88739 - DNA, 33 bp, Homo sapien
tagcttgagggtctaagaatggcactaataatt

SEQ ID NO: 88740 - DNA, 33 bp, Homo sapien
tagcttgagggtctaataatggcactaataatt

SEQ ID NO: 88741 - DNA, 33 bp, Homo sapien
ttagaccctcaagctaagacactgaatcaataa

SEQ ID NO: 88742 - DNA, 33 bp, Homo sapien
ttagaccctcaagctaggacactgaatcaataa

SEQ ID NO: 88743 - DNA, 33 bp, Homo sapien
aacacagcaaatcttaaggtaggcattctccat

SEQ ID NO: 88744 - DNA, 33 bp, Homo sapien
aacacagcaaatcttagggtaggcattctccat

SEQ ID NO: 88745 - DNA, 33 bp, Homo sapien
aaaagctaataactcacgaaaaaatggatgctt

SEQ ID NO: 88746 - DNA, 33 bp, Homo sapien
aaaagctaataactcaggaaaaaatggatgctt

SEQ ID NO: 88747 - DNA, 33 bp, Homo sapien
tcattattaagatttccagacgttcatctgcct

SEQ ID NO: 88748 - DNA, 33 bp, Homo sapien
tcattattaagatttcgagacgttcatctgcct

SEQ ID NO: 88749 - DNA, 33 bp, Homo sapien
tacaagaaaagtcaaacacatgagagctcagta

SEQ ID NO: 88750 - DNA, 33 bp, Homo sapien
tacaagaaaagtcaaatacatgagagctcagta

SEQ ID NO: 88751 - DNA, 33 bp, Homo sapien
tggggaagtaaatctcactgagctagaaaagga

SEQ ID NO: 88752 - DNA, 33 bp, Homo sapien
tggggaagtaaatctcgctgagctagaaaagga

SEQ ID NO: 88753 - DNA, 33 bp, Homo sapien
ttatcaagtttcctaactagaaaatgctgatta

SEQ ID NO: 88754 - DNA, 33 bp, Homo sapien
ttatcaagtttcctaagtagaaaatgctgatta

SEQ ID NO: 88755 - DNA, 33 bp, Homo sapien
agcaagtcgatggaagacaagggctagtgagta

SEQ ID NO: 88756 - DNA, 33 bp, Homo sapien
agcaagtcgatggaaggcaagggctagtgagta

SEQ ID NO: 88757 - DNA, 33 bp, Homo sapien
aataatatttctgaagaaagagtgttccctaag

SEQ ID NO: 88758 - DNA, 33 bp, Homo sapien
aataatatttctgaaggaagagtgttccctaag

SEQ ID NO: 88759 - DNA, 33 bp, Homo sapien
aaaagaaaaaagtctgaactgtaattaatattt

SEQ ID NO: 88760 - DNA, 33 bp, Homo sapien
aaaagaaaaaagtctgtactgtaattaatattt

SEQ ID NO: 88761 - DNA, 33 bp, Homo sapien
catttctgtatcctaacgtggtgatgaatgggg

SEQ ID NO: 88762 - DNA, 33 bp, Homo sapien
catttctgtatcctaatgtggtgatgaatgggg

SEQ ID NO: 88763 - DNA, 33 bp, Homo sapien
acgttatctagaagcaactgaaggataagattc

SEQ ID NO: 88764 - DNA, 33 bp, Homo sapien
acgttatctagaagcagctgaaggataagattc

SEQ ID NO: 88765 - DNA, 33 bp, Homo sapien
caagcatgagcccccaatgctgttcccaagctg

SEQ ID NO: 88766 - DNA, 33 bp, Homo sapien
caagcatgagcccccagtgctgttcccaagctg

SEQ ID NO: 88767 - DNA, 33 bp, Homo sapien
acaccctgttggaaacaaggaaacaggaaagcc

SEQ ID NO: 88768 - DNA, 33 bp, Homo sapien
acaccctgttggaaactaggaaacaggaaagcc

SEQ ID NO: 88769 - DNA, 33 bp, Homo sapien
aatggagatacatctaaggaacaattggttagc

SEQ ID NO: 88770 - DNA, 33 bp, Homo sapien
aatggagatacatctagggaacaattggttagc

SEQ ID NO: 88771 - DNA, 33 bp, Homo sapien
gaagctcaggtagttaagaccacagtgcagtag

SEQ ID NO: 88772 - DNA, 33 bp, Homo sapien
gaagctcaggtagttacgaccacagtgcagtag

SEQ ID NO: 88773 - DNA, 33 bp, Homo sapien
gagaaacaattcctggaatagcattaggatcat

SEQ ID NO: 88774 - DNA, 33 bp, Homo sapien
gagaaacaattcctgggatagcattaggatcat

SEQ ID NO: 88775 - DNA, 33 bp, Homo sapien
attcacgtttacaaagactaggacttctacatg

SEQ ID NO: 88776 - DNA, 33 bp, Homo sapien
attcacgtttacaaaggctaggacttctacatg

SEQ ID NO: 88777 - DNA, 33 bp, Homo sapien
taaaaatacaatccgaagcccccagctaactga

SEQ ID NO: 88778 - DNA, 33 bp, Homo sapien
taaaaatacaatccgaggcccccagctaactga

SEQ ID NO: 88779 - DNA, 33 bp, Homo sapien
tcactgatggggactccaataattcttactctt

SEQ ID NO: 88780 - DNA, 33 bp, Homo sapien
tcactgatggggactctaataattcttactctt

SEQ ID NO: 88781 - DNA, 33 bp, Homo sapien
tcatcttctttacaaactattgacaatggtttc

SEQ ID NO: 88782 - DNA, 33 bp, Homo sapien
tcatcttctttacaaattattgacaatggtttc

SEQ ID NO: 88783 - DNA, 33 bp, Homo sapien
ataaaagtaagtgcaagtattaagtttatgata

SEQ ID NO: 88784 - DNA, 33 bp, Homo sapien
ataaaagtaagtgcaattattaagtttatgata

SEQ ID NO: 88785 - DNA, 33 bp, Homo sapien
gaaaatatctatgccacactcttgaaatttcaa

SEQ ID NO: 88786 - DNA, 33 bp, Homo sapien
gaaaatatctatgccatactcttgaaatttcaa

SEQ ID NO: 88787 - DNA, 33 bp, Homo sapien
gacattgcagattaaacgatgttgaaatttcaa

SEQ ID NO: 88788 - DNA, 33 bp, Homo sapien
gacattgcagattaaatgatgttgaaatttcaa

SEQ ID NO: 88789 - DNA, 33 bp, Homo sapien
ttttcctttttagggagccatcaatattgctgt

SEQ ID NO: 88790 - DNA, 33 bp, Homo sapien
ttttcctttttagggatccatcaatattgctgt

SEQ ID NO: 88791 - DNA, 33 bp, Homo sapien
ggtgtggagcagttacaaagaggtggtaatacg

SEQ ID NO: 88792 - DNA, 33 bp, Homo sapien
ggtgtggagcagttacgaagaggtggtaatacg

SEQ ID NO: 88793 - DNA, 33 bp, Homo sapien
aaaaacacttggagtcgaaagtattccatcaga

SEQ ID NO: 88794 - DNA, 33 bp, Homo sapien
aaaaacacttggagtctaaagtattccatcaga

SEQ ID NO: 88795 - DNA, 33 bp, Homo sapien
caggagagaatacacacgtacgcattggcggcc

SEQ ID NO: 88796 - DNA, 33 bp, Homo sapien
caggagagaatacacatgtacgcattggcggcc

SEQ ID NO: 88797 - DNA, 33 bp, Homo sapien
ctctgcctatgagccacctctcctcattcagac

SEQ ID NO: 88798 - DNA, 33 bp, Homo sapien
ctctgcctatgagccagctctcctcattcagac

SEQ ID NO: 88799 - DNA, 33 bp, Homo sapien
tatgagatataccctgaaaggaaatacaatata

SEQ ID NO: 88800 - DNA, 33 bp, Homo sapien
tatgagatataccctgcaaggaaatacaatata

SEQ ID NO: 88801 - DNA, 33 bp, Homo sapien
acttagccatgtaaacaatttaaaaaagcaatg

SEQ ID NO: 88802 - DNA, 33 bp, Homo sapien
acttagccatgtaaaccatttaaaaaagcaatg

SEQ ID NO: 88803 - DNA, 33 bp, Homo sapien
taaaaggtttaatttgaaaaatcctatgtcaga

SEQ ID NO: 88804 - DNA, 33 bp, Homo sapien
taaaaggtttaatttgcaaaatcctatgtcaga

SEQ ID NO: 88805 - DNA, 33 bp, Homo sapien
caaatctcctcgcatacgttcttttttaatact

SEQ ID NO: 88806 - DNA, 33 bp, Homo sapien
caaatctcctcgcatatgttcttttttaatact

SEQ ID NO: 88807 - DNA, 33 bp, Homo sapien
cattgagcattttaatcagtgcctgggcaatat

SEQ ID NO: 88808 - DNA, 33 bp, Homo sapien
cattgagcattttaatgagtgcctgggcaatat

SEQ ID NO: 88809 - DNA, 33 bp, Homo sapien
gcaagtgaggaatccaggcttagagagtcattg

SEQ ID NO: 88810 - DNA, 33 bp, Homo sapien
gcaagtgaggaatccatgcttagagagtcattg

SEQ ID NO: 88811 - DNA, 33 bp, Homo sapien
ggttacaacagctcctaaaaagcccatcaaaga

SEQ ID NO: 88812 - DNA, 33 bp, Homo sapien
ggttacaacagctccttaaaagcccatcaaaga

SEQ ID NO: 88813 - DNA, 33 bp, Homo sapien
aacataaaagctgaaaaaattgcagagtgaaca

SEQ ID NO: 88814 - DNA, 33 bp, Homo sapien
aacataaaagctgaaataattgcagagtgaaca

SEQ ID NO: 88815 - DNA, 33 bp, Homo sapien
ttgagaagggctgccagtccttttgcagcacag

SEQ ID NO: 88816 - DNA, 33 bp, Homo sapien
ttgagaagggctgccattccttttgcagcacag

SEQ ID NO: 88817 - DNA, 33 bp, Homo sapien
ttgttcttacctggaaatgattatttagtaact

SEQ ID NO: 88818 - DNA, 33 bp, Homo sapien
ttgttcttacctggaactgattatttagtaact

SEQ ID NO: 88819 - DNA, 33 bp, Homo sapien
tccatcaaccaatgaacagatgagttgtaggca

SEQ ID NO: 88820 - DNA, 33 bp, Homo sapien
tccatcaaccaatgaagagatgagttgtaggca

SEQ ID NO: 88821 - DNA, 33 bp, Homo sapien
ctgtgttgattgttacactacctgggttgacca

SEQ ID NO: 88822 - DNA, 33 bp, Homo sapien
ctgtgttgattgttacgctacctgggttgacca

SEQ ID NO: 88823 - DNA, 33 bp, Homo sapien
cagttaaatgtcccaacgtaattccatgaaagc

SEQ ID NO: 88824 - DNA, 33 bp, Homo sapien
cagttaaatgtcccaatgtaattccatgaaagc

SEQ ID NO: 88825 - DNA, 33 bp, Homo sapien
ctattagattcactggaatttggtactatttat

SEQ ID NO: 88826 - DNA, 33 bp, Homo sapien
ctattagattcactgggatttggtactatttat

SEQ ID NO: 88827 - DNA, 33 bp, Homo sapien
tcttgcagttaaatggaaatgtgacatatatct

SEQ ID NO: 88828 - DNA, 33 bp, Homo sapien
tcttgcagttaaatggtaatgtgacatatatct

SEQ ID NO: 88829 - DNA, 33 bp, Homo sapien
aatagccagggtaatgccagttgctatgacaag

SEQ ID NO: 88830 - DNA, 33 bp, Homo sapien
aatagccagggtaatgtcagttgctatgacaag

SEQ ID NO: 88831 - DNA, 33 bp, Homo sapien
ccctaagaaaacaataaggcatgttgaaaaagt

SEQ ID NO: 88832 - DNA, 33 bp, Homo sapien
ccctaagaaaacaatacggcatgttgaaaaagt

SEQ ID NO: 88833 - DNA, 33 bp, Homo sapien
aaatcaggtactaaggaagaagagtgttattag

SEQ ID NO: 88834 - DNA, 33 bp, Homo sapien
aaatcaggtactaagggagaagagtgttattag

SEQ ID NO: 88835 - DNA, 33 bp, Homo sapien
acagataatgtagtcaatctaacttttggaaac

SEQ ID NO: 88836 - DNA, 33 bp, Homo sapien
acagataatgtagtcagtctaacttttggaaac

SEQ ID NO: 88837 - DNA, 33 bp, Homo sapien
ttgttgtaagtataaggctccccagaatgacat

SEQ ID NO: 88838 - DNA, 33 bp, Homo sapien
ttgttgtaagtataagtctccccagaatgacat

SEQ ID NO: 88839 - DNA, 33 bp, Homo sapien
gtaatagcagttgaatcaatagaaactgtgatt

SEQ ID NO: 88840 - DNA, 33 bp, Homo sapien
gtaatagcagttgaatgaatagaaactgtgatt

SEQ ID NO: 88841 - DNA, 33 bp, Homo sapien
gctttctaccttcagccatgaaatacgcctcct

SEQ ID NO: 88842 - DNA, 33 bp, Homo sapien
gctttctaccttcagctatgaaatacgcctcct

SEQ ID NO: 88843 - DNA, 33 bp, Homo sapien
ccctttccaaatctaaatgtagctctttcatgt

SEQ ID NO: 88844 - DNA, 33 bp, Homo sapien
ccctttccaaatctaactgtagctctttcatgt

SEQ ID NO: 88845 - DNA, 33 bp, Homo sapien
agggaaagagagataacgtggtgaaaaggcttt

SEQ ID NO: 88846 - DNA, 33 bp, Homo sapien
agggaaagagagataatgtggtgaaaaggcttt

SEQ ID NO: 88847 - DNA, 33 bp, Homo sapien
tatagattgcttgctaaatttgtaaatggtcag

SEQ ID NO: 88848 - DNA, 33 bp, Homo sapien
tatagattgcttgctagatttgtaaatggtcag

SEQ ID NO: 88849 - DNA, 33 bp, Homo sapien
tacattaggtaaatacagcataataagtactaa

SEQ ID NO: 88850 - DNA, 33 bp, Homo sapien
tacattaggtaaataccgcataataagtactaa

SEQ ID NO: 88851 - DNA, 33 bp, Homo sapien
aaactagccaagaaaaaggcctgctgagacata

SEQ ID NO: 88852 - DNA, 33 bp, Homo sapien
aaactagccaagaaaatggcctgctgagacata

SEQ ID NO: 88853 - DNA, 33 bp, Homo sapien
tctactttggtccttacgtctcatccagagtcg

SEQ ID NO: 88854 - DNA, 33 bp, Homo sapien
tctactttggtccttatgtctcatccagagtcg

SEQ ID NO: 88855 - DNA, 33 bp, Homo sapien
agcagacaaaaattgaatatgtaagaattaatc

SEQ ID NO: 88856 - DNA, 33 bp, Homo sapien
agcagacaaaaattgagtatgtaagaattaatc

SEQ ID NO: 88857 - DNA, 33 bp, Homo sapien
actgttcctggaacacaacaaatctaaattaac

SEQ ID NO: 88858 - DNA, 33 bp, Homo sapien
actgttcctggaacacgacaaatctaaattaac

SEQ ID NO: 88859 - DNA, 33 bp, Homo sapien
gtttgccataaaatgaccagggttgttctttta

SEQ ID NO: 88860 - DNA, 33 bp, Homo sapien
gtttgccataaaatgatcagggttgttctttta

SEQ ID NO: 88861 - DNA, 33 bp, Homo sapien
tttgaaataatgcaaaagcatctgttattcagg

SEQ ID NO: 88862 - DNA, 33 bp, Homo sapien
tttgaaataatgcaaacgcatctgttattcagg

SEQ ID NO: 88863 - DNA, 33 bp, Homo sapien
ccattaatccttattacaacatttgcaagactg

SEQ ID NO: 88864 - DNA, 33 bp, Homo sapien
ccattaatccttattataacatttgcaagactg

SEQ ID NO: 88865 - DNA, 33 bp, Homo sapien
gggttcttaggcctcccacaagaaagaatttgg

SEQ ID NO: 88866 - DNA, 33 bp, Homo sapien
gggttcttaggcctcctacaagaaagaatttgg

SEQ ID NO: 88867 - DNA, 33 bp, Homo sapien
ctgaggagaccatgccgctcttttgcctatgga

SEQ ID NO: 88868 - DNA, 33 bp, Homo sapien
ctgaggagaccatgcctctcttttgcctatgga

SEQ ID NO: 88869 - DNA, 33 bp, Homo sapien
ttatgactttatgagaatattttcacctgtgca

SEQ ID NO: 88870 - DNA, 33 bp, Homo sapien
ttatgactttatgagactattttcacctgtgca

SEQ ID NO: 88871 - DNA, 33 bp, Homo sapien
atctcagtacatcctacgcctcaaaaatcttca

SEQ ID NO: 88872 - DNA, 33 bp, Homo sapien
atctcagtacatcctatgcctcaaaaatcttca

SEQ ID NO: 88873 - DNA, 33 bp, Homo sapien
tatatgggaacatttagaggcagtgagaaattt

SEQ ID NO: 88874 - DNA, 33 bp, Homo sapien
tatatgggaacatttataggcagtgagaaattt

SEQ ID NO: 88875 - DNA, 33 bp, Homo sapien
aggacactgagttttacagcacaattccaaaca

SEQ ID NO: 88876 - DNA, 33 bp, Homo sapien
aggacactgagttttatagcacaattccaaaca

SEQ ID NO: 88877 - DNA, 33 bp, Homo sapien
aatctgtttaataagcaaaaaataagtgaaggc

SEQ ID NO: 88878 - DNA, 33 bp, Homo sapien
aatctgtttaataagccaaaaataagtgaaggc

SEQ ID NO: 88879 - DNA, 33 bp, Homo sapien
ttagtcatctgcaagacaggacacaatggcacc

SEQ ID NO: 88880 - DNA, 33 bp, Homo sapien
ttagtcatctgcaagagaggacacaatggcacc

SEQ ID NO: 88881 - DNA, 33 bp, Homo sapien
ctgggacacacagagcacctaagaggaggacat

SEQ ID NO: 88882 - DNA, 33 bp, Homo sapien
ctgggacacacagagcgcctaagaggaggacat

SEQ ID NO: 88883 - DNA, 33 bp, Homo sapien
ttactacatcttcaaaggtacctgtcagttgtg

SEQ ID NO: 88884 - DNA, 33 bp, Homo sapien
ttactacatcttcaaatgtacctgtcagttgtg

SEQ ID NO: 88885 - DNA, 33 bp, Homo sapien
ccaattagtaataggcaaaagacaccaccccaa

SEQ ID NO: 88886 - DNA, 33 bp, Homo sapien
ccaattagtaataggcgaaagacaccaccccaa

SEQ ID NO: 88887 - DNA, 33 bp, Homo sapien
accgagatgaccttaaatagataaatgataaac

SEQ ID NO: 88888 - DNA, 33 bp, Homo sapien
accgagatgaccttaagtagataaatgataaac

SEQ ID NO: 88889 - DNA, 33 bp, Homo sapien
tgaaagcacttttgaactgagaagctctaaatt

SEQ ID NO: 88890 - DNA, 33 bp, Homo sapien
tgaaagcacttttgaattgagaagctctaaatt

SEQ ID NO: 88891 - DNA, 33 bp, Homo sapien
aaagagttcagacttacaattgatttgctaaac

SEQ ID NO: 88892 - DNA, 33 bp, Homo sapien
aaagagttcagacttagaattgatttgctaaac

SEQ ID NO: 88893 - DNA, 33 bp, Homo sapien
catccattgagttgcaaataatccagtaaccat

SEQ ID NO: 88894 - DNA, 33 bp, Homo sapien
catccattgagttgcagataatccagtaaccat

SEQ ID NO: 88895 - DNA, 33 bp, Homo sapien
ctcttgcaggactatcaaagctgggccccatcc

SEQ ID NO: 88896 - DNA, 33 bp, Homo sapien
ctcttgcaggactatccaagctgggccccatcc

SEQ ID NO: 88897 - DNA, 33 bp, Homo sapien
tgtgtgtctgagttagcacagtgtgaaaaaagt

SEQ ID NO: 88898 - DNA, 33 bp, Homo sapien
tgtgtgtctgagttagtacagtgtgaaaaaagt

SEQ ID NO: 88899 - DNA, 33 bp, Homo sapien
acttttaaatatacaacttaatatgatcgctgt

SEQ ID NO: 88900 - DNA, 33 bp, Homo sapien
acttttaaatatacaagttaatatgatcgctgt

SEQ ID NO: 88901 - DNA, 33 bp, Homo sapien
cccattagactcaaaacggtcccgcttatatat

SEQ ID NO: 88902 - DNA, 33 bp, Homo sapien
cccattagactcaaaatggtcccgcttatatat

SEQ ID NO: 88903 - DNA, 33 bp, Homo sapien
tggcaaaaccagggcaaaatatatatctggcat

SEQ ID NO: 88904 - DNA, 33 bp, Homo sapien
tggcaaaaccagggcagaatatatatctggcat

SEQ ID NO: 88905 - DNA, 33 bp, Homo sapien
gggcactgcacatttacagtgttatcagcatat

SEQ ID NO: 88906 - DNA, 33 bp, Homo sapien
gggcactgcacatttatagtgttatcagcatat

SEQ ID NO: 88907 - DNA, 33 bp, Homo sapien
gatattccattgctagaacattttttagaagtt

SEQ ID NO: 88908 - DNA, 33 bp, Homo sapien
gatattccattgctaggacattttttagaagtt

SEQ ID NO: 88909 - DNA, 33 bp, Homo sapien
gaatatctctttgacccaagaaatacagatgga

SEQ ID NO: 88910 - DNA, 33 bp, Homo sapien
gaatatctctttgacctaagaaatacagatgga

SEQ ID NO: 88911 - DNA, 33 bp, Homo sapien
ttcatctttcgttgtcacaatagcatttggttt

SEQ ID NO: 88912 - DNA, 33 bp, Homo sapien
ttcatctttcgttgtcgcaatagcatttggttt

SEQ ID NO: 88913 - DNA, 33 bp, Homo sapien
cagatttttggcataaataagagttccagctaa

SEQ ID NO: 88914 - DNA, 33 bp, Homo sapien
cagatttttggcataattaagagttccagctaa

SEQ ID NO: 88915 - DNA, 33 bp, Homo sapien
caagcaggtgtttgtcaatgatgtgtatgtggc

SEQ ID NO: 88916 - DNA, 33 bp, Homo sapien
caagcaggtgtttgtcgatgatgtgtatgtggc

SEQ ID NO: 88917 - DNA, 33 bp, Homo sapien
ccgaagctggcaatcaataacagaaaagcaatg

SEQ ID NO: 88918 - DNA, 33 bp, Homo sapien
ccgaagctggcaatcagtaacagaaaagcaatg

SEQ ID NO: 88919 - DNA, 33 bp, Homo sapien
caaactgatgaggttacgcatttagctaatatg

SEQ ID NO: 88920 - DNA, 33 bp, Homo sapien
caaactgatgaggttatgcatttagctaatatg

SEQ ID NO: 88921 - DNA, 33 bp, Homo sapien
gcaacatgaattgaaaatgagccttgaaaacca

SEQ ID NO: 88922 - DNA, 33 bp, Homo sapien
gcaacatgaattgaaagtgagccttgaaaacca

SEQ ID NO: 88923 - DNA, 33 bp, Homo sapien
actcattcagtgatctaagagccagcacaataa

SEQ ID NO: 88924 - DNA, 33 bp, Homo sapien
actcattcagtgatctgagagccagcacaataa

SEQ ID NO: 88925 - DNA, 33 bp, Homo sapien
aagaggcttggaggaacagcagcttttaaagaa

SEQ ID NO: 88926 - DNA, 33 bp, Homo sapien
aagaggcttggaggaatagcagcttttaaagaa

SEQ ID NO: 88927 - DNA, 33 bp, Homo sapien
taaaatcatcaggataaggaaacagctgacata

SEQ ID NO: 88928 - DNA, 33 bp, Homo sapien
taaaatcatcaggatatggaaacagctgacata

SEQ ID NO: 88929 - DNA, 33 bp, Homo sapien
aatgggaactgaacaaatatgaggaagcaggtc

SEQ ID NO: 88930 - DNA, 33 bp, Homo sapien
aatgggaactgaacaagtatgaggaagcaggtc

SEQ ID NO: 88931 - DNA, 33 bp, Homo sapien
attttttgaaaattggcacgtgcataatatatg

SEQ ID NO: 88932 - DNA, 33 bp, Homo sapien
attttttgaaaattggtacgtgcataatatatg

SEQ ID NO: 88933 - DNA, 33 bp, Homo sapien
ttagagtcagttctaaaatcaactggaataaat

SEQ ID NO: 88934 - DNA, 33 bp, Homo sapien
ttagagtcagttctaacatcaactggaataaat

SEQ ID NO: 88935 - DNA, 33 bp, Homo sapien
catctatctcgtagtccacttgggcttctacaa

SEQ ID NO: 88936 - DNA, 33 bp, Homo sapien
catctatctcgtagtctacttgggcttctacaa

SEQ ID NO: 88937 - DNA, 33 bp, Homo sapien
tgagtgaataaaatcaaacaaaaacgtactgct

SEQ ID NO: 88938 - DNA, 33 bp, Homo sapien
tgagtgaataaaatcagacaaaaacgtactgct

SEQ ID NO: 88939 - DNA, 33 bp, Homo sapien
gggttgaatgaagagacgaatgcacaacggtgt

SEQ ID NO: 88940 - DNA, 33 bp, Homo sapien
gggttgaatgaagagatgaatgcacaacggtgt

SEQ ID NO: 88941 - DNA, 33 bp, Homo sapien
gctgtgttgaggaaaaatttatgcctccgaagc

SEQ ID NO: 88942 - DNA, 33 bp, Homo sapien
gctgtgttgaggaaaagtttatgcctccgaagc

SEQ ID NO: 88943 - DNA, 33 bp, Homo sapien
gccaaaaatgagtccactcagttagtgaagact

SEQ ID NO: 88944 - DNA, 33 bp, Homo sapien
gccaaaaatgagtccattcagttagtgaagact

SEQ ID NO: 88945 - DNA, 33 bp, Homo sapien
tatcattagtctctgtaaagggttgatactagg

SEQ ID NO: 88946 - DNA, 33 bp, Homo sapien
tatcattagtctctgtgaagggttgatactagg

SEQ ID NO: 88947 - DNA, 33 bp, Homo sapien
taattttttttaataacacaggtgcttggaaaa

SEQ ID NO: 88948 - DNA, 33 bp, Homo sapien
taattttttttaataatacaggtgcttggaaaa

SEQ ID NO: 88949 - DNA, 33 bp, Homo sapien
gggactctttcttttaactccctgattagtgat

SEQ ID NO: 88950 - DNA, 33 bp, Homo sapien
gggactctttcttttagctccctgattagtgat

SEQ ID NO: 88951 - DNA, 33 bp, Homo sapien
cggccttccatcaggaaagcagaaaacatttgg

SEQ ID NO: 88952 - DNA, 33 bp, Homo sapien
cggccttccatcaggagagcagaaaacatttgg

SEQ ID NO: 88953 - DNA, 33 bp, Homo sapien
ctgtcctaatctgggaactaagcaaaatccctc

SEQ ID NO: 88954 - DNA, 33 bp, Homo sapien
ctgtcctaatctgggagctaagcaaaatccctc

SEQ ID NO: 88955 - DNA, 33 bp, Homo sapien
cttccaggtctaccaaaggcattcctagagtta

SEQ ID NO: 88956 - DNA, 33 bp, Homo sapien
cttccaggtctaccaagggcattcctagagtta

SEQ ID NO: 88957 - DNA, 33 bp, Homo sapien
gagagaacccaggaaacgctgctcagttaaaag

SEQ ID NO: 88958 - DNA, 33 bp, Homo sapien
gagagaacccaggaaatgctgctcagttaaaag

SEQ ID NO: 88959 - DNA, 33 bp, Homo sapien
atcgtgataaagtcagaaaagtcagaatttaga

SEQ ID NO: 88960 - DNA, 33 bp, Homo sapien
atcgtgataaagtcaggaaagtcagaatttaga

SEQ ID NO: 88961 - DNA, 33 bp, Homo sapien
cactaccggaagaacactatgggggaaccaccc

SEQ ID NO: 88962 - DNA, 33 bp, Homo sapien
cactaccggaagaacagtatgggggaaccaccc

SEQ ID NO: 88963 - DNA, 33 bp, Homo sapien
aaacatattttttagagaatgcaacttctttca

SEQ ID NO: 88964 - DNA, 33 bp, Homo sapien
aaacatattttttagataatgcaacttctttca

SEQ ID NO: 88965 - DNA, 33 bp, Homo sapien
taatttagtatttaagaccactatgttttcatc

SEQ ID NO: 88966 - DNA, 33 bp, Homo sapien
taatttagtatttaaggccactatgttttcatc

SEQ ID NO: 88967 - DNA, 33 bp, Homo sapien
aaaacctaatgggaacaacgacttctacaagaa

SEQ ID NO: 88968 - DNA, 33 bp, Homo sapien
aaaacctaatgggaacgacgacttctacaagaa

SEQ ID NO: 88969 - DNA, 33 bp, Homo sapien
tgtatcatgtagctaaaagagtcattaatcatt

SEQ ID NO: 88970 - DNA, 33 bp, Homo sapien
tgtatcatgtagctaacagagtcattaatcatt

SEQ ID NO: 88971 - DNA, 33 bp, Homo sapien
atacacatgaaggagcacaagtgttcaggcagt

SEQ ID NO: 88972 - DNA, 33 bp, Homo sapien
atacacatgaaggagcgcaagtgttcaggcagt

SEQ ID NO: 88973 - DNA, 33 bp, Homo sapien
aattatccagttataacgcagctcagattcttg

SEQ ID NO: 88974 - DNA, 33 bp, Homo sapien
aattatccagttataatgcagctcagattcttg

SEQ ID NO: 88975 - DNA, 33 bp, Homo sapien
tgaattaggtagatagacaattggaaatcttct

SEQ ID NO: 88976 - DNA, 33 bp, Homo sapien
tgaattaggtagatagccaattggaaatcttct

SEQ ID NO: 88977 - DNA, 33 bp, Homo sapien
agtaggagagcaaatacagtggaaaacaattga

SEQ ID NO: 88978 - DNA, 33 bp, Homo sapien
agtaggagagcaaatagagtggaaaacaattga

SEQ ID NO: 88979 - DNA, 33 bp, Homo sapien
aaatttcaaacaccaacggcttctacgttctct

SEQ ID NO: 88980 - DNA, 33 bp, Homo sapien
aaatttcaaacaccaatggcttctacgttctct

SEQ ID NO: 88981 - DNA, 33 bp, Homo sapien
cactgagtcaggctaacgtgagaaagtgaaaca

SEQ ID NO: 88982 - DNA, 33 bp, Homo sapien
cactgagtcaggctaatgtgagaaagtgaaaca

SEQ ID NO: 88983 - DNA, 33 bp, Homo sapien
ctgatgaaaaacttacaagaccaaggtattaat

SEQ ID NO: 88984 - DNA, 33 bp, Homo sapien
ctgatgaaaaacttacgagaccaaggtattaat

SEQ ID NO: 88985 - DNA, 33 bp, Homo sapien
gtggtgatgattgcacagctttgtgaatatatt

SEQ ID NO: 88986 - DNA, 33 bp, Homo sapien
gtggtgatgattgcaccgctttgtgaatatatt

SEQ ID NO: 88987 - DNA, 33 bp, Homo sapien
accacgtgaaagaaacaattgcctaattcagag

SEQ ID NO: 88988 - DNA, 33 bp, Homo sapien
accacgtgaaagaaacgattgcctaattcagag

SEQ ID NO: 88989 - DNA, 33 bp, Homo sapien
tgaagagaaagtagaagagtagctgagagcaaa

SEQ ID NO: 88990 - DNA, 33 bp, Homo sapien
tgaagagaaagtagaatagtagctgagagcaaa

SEQ ID NO: 88991 - DNA, 33 bp, Homo sapien
gagagacttgagtgaccacagtgggaaaacatg

SEQ ID NO: 88992 - DNA, 33 bp, Homo sapien
gagagacttgagtgactacagtgggaaaacatg

SEQ ID NO: 88993 - DNA, 33 bp, Homo sapien
aagcatgtatccctacagaaggaaaaacaaatc

SEQ ID NO: 88994 - DNA, 33 bp, Homo sapien
aagcatgtatccctacggaaggaaaaacaaatc

SEQ ID NO: 88995 - DNA, 33 bp, Homo sapien
agttaggatttccacaaaagcatattaaaccct

SEQ ID NO: 88996 - DNA, 33 bp, Homo sapien
agttaggatttccacagaagcatattaaaccct

SEQ ID NO: 88997 - DNA, 33 bp, Homo sapien
aactttcattttttgaagatgtgagggccaaga

SEQ ID NO: 88998 - DNA, 33 bp, Homo sapien
aactttcattttttgatgatgtgagggccaaga

SEQ ID NO: 88999 - DNA, 33 bp, Homo sapien
gaaaactctgagaaacggcaagactgtcatata

SEQ ID NO: 89000 - DNA, 33 bp, Homo sapien
gaaaactctgagaaactgcaagactgtcatata

SEQ ID NO: 89001 - DNA, 33 bp, Homo sapien
tttgatgccaaaaaaccatcatttatcatacag

SEQ ID NO: 89002 - DNA, 33 bp, Homo sapien
tttgatgccaaaaaacgatcatttatcatacag

SEQ ID NO: 89003 - DNA, 33 bp, Homo sapien
tattttattaaggcagacacttagcttagaaat

SEQ ID NO: 89004 - DNA, 33 bp, Homo sapien
tattttattaaggcagtcacttagcttagaaat

SEQ ID NO: 89005 - DNA, 33 bp, Homo sapien
accattacaactctcaaggccatttcagcaaca

SEQ ID NO: 89006 - DNA, 33 bp, Homo sapien
accattacaactctcacggccatttcagcaaca

SEQ ID NO: 89007 - DNA, 33 bp, Homo sapien
tacactcttttggccaccgtgttagttttctat

SEQ ID NO: 89008 - DNA, 33 bp, Homo sapien
tacactcttttggccatcgtgttagttttctat

SEQ ID NO: 89009 - DNA, 33 bp, Homo sapien
tctaggaactcaatgacaggtgtagttttaaga

SEQ ID NO: 89010 - DNA, 33 bp, Homo sapien
tctaggaactcaatgataggtgtagttttaaga

SEQ ID NO: 89011 - DNA, 33 bp, Homo sapien
ttgtcagaagcctgatgagagtgatggagaggt

SEQ ID NO: 89012 - DNA, 33 bp, Homo sapien
ttgtcagaagcctgattagagtgatggagaggt

SEQ ID NO: 89013 - DNA, 33 bp, Homo sapien
tgcacggagtcctgtccagcagccagccctgat

SEQ ID NO: 89014 - DNA, 33 bp, Homo sapien
tgcacggagtcctgtcgagcagccagccctgat

SEQ ID NO: 89015 - DNA, 33 bp, Homo sapien
atgtgaaagaactgcccatgaggagcgagaggc

SEQ ID NO: 89016 - DNA, 33 bp, Homo sapien
atgtgaaagaactgcctatgaggagcgagaggc

SEQ ID NO: 89017 - DNA, 33 bp, Homo sapien
acacacttgatggaaaacttcaaaaagttaatt

SEQ ID NO: 89018 - DNA, 33 bp, Homo sapien
acacacttgatggaaaccttcaaaaagttaatt

SEQ ID NO: 89019 - DNA, 33 bp, Homo sapien
attcacacaacaaaaagaaattccatactagca

SEQ ID NO: 89020 - DNA, 33 bp, Homo sapien
attcacacaacaaaaataaattccatactagca

SEQ ID NO: 89021 - DNA, 33 bp, Homo sapien
ccgaaaaaaacaaacaacgttcattcacctgtc

SEQ ID NO: 89022 - DNA, 33 bp, Homo sapien
ccgaaaaaaacaaacagcgttcattcacctgtc

SEQ ID NO: 89023 - DNA, 33 bp, Homo sapien
tgctctaagttatcagcaaaagcagtaagttac

SEQ ID NO: 89024 - DNA, 33 bp, Homo sapien
tgctctaagttatcagtaaaagcagtaagttac

SEQ ID NO: 89025 - DNA, 33 bp, Homo sapien
gagagatgtttctgtaagtgtgtaaatactgct

SEQ ID NO: 89026 - DNA, 33 bp, Homo sapien
gagagatgtttctgtaggtgtgtaaatactgct

SEQ ID NO: 89027 - DNA, 33 bp, Homo sapien
gaaagctgccgagggaaataagagtctcatctg

SEQ ID NO: 89028 - DNA, 33 bp, Homo sapien
gaaagctgccgagggagataagagtctcatctg

SEQ ID NO: 89029 - DNA, 33 bp, Homo sapien
cctgcttacccacttacctgagtcccataagac

SEQ ID NO: 89030 - DNA, 33 bp, Homo sapien
cctgcttacccacttatctgagtcccataagac

SEQ ID NO: 89031 - DNA, 33 bp, Homo sapien
cgtgccttaagcaacacacaagtatttctcaca

SEQ ID NO: 89032 - DNA, 33 bp, Homo sapien
cgtgccttaagcaacagacaagtatttctcaca

SEQ ID NO: 89033 - DNA, 33 bp, Homo sapien
catgttctatccaacacgttcggttgttttcaa

SEQ ID NO: 89034 - DNA, 33 bp, Homo sapien
catgttctatccaacatgttcggttgttttcaa

SEQ ID NO: 89035 - DNA, 33 bp, Homo sapien
tgttgaaccatggatcaaagtttacacatcact

SEQ ID NO: 89036 - DNA, 33 bp, Homo sapien
tgttgaaccatggatccaagtttacacatcact

SEQ ID NO: 89037 - DNA, 33 bp, Homo sapien
tgttgctataatggaacacctgatagtgagcca

SEQ ID NO: 89038 - DNA, 33 bp, Homo sapien
tgttgctataatggaatacctgatagtgagcca

SEQ ID NO: 89039 - DNA, 33 bp, Homo sapien
ttaaagtaataagtggccagacaatagattata

SEQ ID NO: 89040 - DNA, 33 bp, Homo sapien
ttaaagtaataagtgggcagacaatagattata

SEQ ID NO: 89041 - DNA, 33 bp, Homo sapien
tgcaaaactacaactcacaatgagactgtgcac

SEQ ID NO: 89042 - DNA, 33 bp, Homo sapien
tgcaaaactacaactctcaatgagactgtgcac

SEQ ID NO: 89043 - DNA, 33 bp, Homo sapien
attcgtttggcaatcaagatgagtgaggaggct

SEQ ID NO: 89044 - DNA, 33 bp, Homo sapien
attcgtttggcaatcatgatgagtgaggaggct

SEQ ID NO: 89045 - DNA, 33 bp, Homo sapien
tgtaactttatatacccaagaaatgtgctgtga

SEQ ID NO: 89046 - DNA, 33 bp, Homo sapien
tgtaactttatatacctaagaaatgtgctgtga

SEQ ID NO: 89047 - DNA, 33 bp, Homo sapien
tcattcaaagacatcaaaaactcttgtagactc

SEQ ID NO: 89048 - DNA, 33 bp, Homo sapien
tcattcaaagacatcagaaactcttgtagactc

SEQ ID NO: 89049 - DNA, 33 bp, Homo sapien
atatgtgggagagttccattgtcccccgtatct

SEQ ID NO: 89050 - DNA, 33 bp, Homo sapien
atatgtgggagagttctattgtcccccgtatct

SEQ ID NO: 89051 - DNA, 33 bp, Homo sapien
tcccattttgggaatacataggctgttacatca

SEQ ID NO: 89052 - DNA, 33 bp, Homo sapien
tcccattttgggaatagataggctgttacatca

SEQ ID NO: 89053 - DNA, 33 bp, Homo sapien
ctttttttctgatttacctgtgactcttctatt

SEQ ID NO: 89054 - DNA, 33 bp, Homo sapien
ctttttttctgatttatctgtgactcttctatt

SEQ ID NO: 89055 - DNA, 33 bp, Homo sapien
aagtataatgaaggaaactctctcttcagaatg

SEQ ID NO: 89056 - DNA, 33 bp, Homo sapien
aagtataatgaaggaacctctctcttcagaatg

SEQ ID NO: 89057 - DNA, 33 bp, Homo sapien
ctttatgtttccaataccatcagtctatatcat

SEQ ID NO: 89058 - DNA, 33 bp, Homo sapien
ctttatgtttccaatatcatcagtctatatcat

SEQ ID NO: 89059 - DNA, 33 bp, Homo sapien
cattccattgttaaagaaagttgcatggtcaaa

SEQ ID NO: 89060 - DNA, 33 bp, Homo sapien
cattccattgttaaagcaagttgcatggtcaaa

SEQ ID NO: 89061 - DNA, 33 bp, Homo sapien
cacagcaatattgcaacaagagctgacgaaaac

SEQ ID NO: 89062 - DNA, 33 bp, Homo sapien
cacagcaatattgcaataagagctgacgaaaac

SEQ ID NO: 89063 - DNA, 33 bp, Homo sapien
gatgacacattgtacaacctctgaattctgttc

SEQ ID NO: 89064 - DNA, 33 bp, Homo sapien
gatgacacattgtacagcctctgaattctgttc

SEQ ID NO: 89065 - DNA, 33 bp, Homo sapien
gaaaatcacaaaattgaatgattaaatccaact

SEQ ID NO: 89066 - DNA, 33 bp, Homo sapien
gaaaatcacaaaattgcatgattaaatccaact

SEQ ID NO: 89067 - DNA, 33 bp, Homo sapien
cacttcacacactcgaatagctaaaattaaaaa

SEQ ID NO: 89068 - DNA, 33 bp, Homo sapien
cacttcacacactcgattagctaaaattaaaaa

SEQ ID NO: 89069 - DNA, 33 bp, Homo sapien
tataaaatgaaacctaagagccagaaagtccag

SEQ ID NO: 89070 - DNA, 33 bp, Homo sapien
tataaaatgaaacctatgagccagaaagtccag

SEQ ID NO: 89071 - DNA, 33 bp, Homo sapien
agttttatgttcagtaaaattgagcaaaaggta

SEQ ID NO: 89072 - DNA, 33 bp, Homo sapien
agttttatgttcagtataattgagcaaaaggta

SEQ ID NO: 89073 - DNA, 33 bp, Homo sapien
aataaacttgtacatacaattctgacacacata

SEQ ID NO: 89074 - DNA, 33 bp, Homo sapien
aataaacttgtacatataattctgacacacata

SEQ ID NO: 89075 - DNA, 33 bp, Homo sapien
tatagtctctcaggcaaagtaaacgcaagggga

SEQ ID NO: 89076 - DNA, 33 bp, Homo sapien
tatagtctctcaggcagagtaaacgcaagggga

SEQ ID NO: 89077 - DNA, 33 bp, Homo sapien
ttgcaaatcgctttcaaaaatcattgaaccact

SEQ ID NO: 89078 - DNA, 33 bp, Homo sapien
ttgcaaatcgctttcagaaatcattgaaccact

SEQ ID NO: 89079 - DNA, 33 bp, Homo sapien
atccttcaatgaatcaatcaacatttacctatc

SEQ ID NO: 89080 - DNA, 33 bp, Homo sapien
atccttcaatgaatcagtcaacatttacctatc

SEQ ID NO: 89081 - DNA, 33 bp, Homo sapien
cattgtccttttacacgggtgtttcctggtctt

SEQ ID NO: 89082 - DNA, 33 bp, Homo sapien
cattgtccttttacactggtgtttcctggtctt

SEQ ID NO: 89083 - DNA, 33 bp, Homo sapien
aacatgtccaactaacaatgcgctcttctttag

SEQ ID NO: 89084 - DNA, 33 bp, Homo sapien
aacatgtccaactaacgatgcgctcttctttag

SEQ ID NO: 89085 - DNA, 33 bp, Homo sapien
tccatagacttgcatcaagagaagaaggagagg

SEQ ID NO: 89086 - DNA, 33 bp, Homo sapien
tccatagacttgcatcgagagaagaaggagagg

SEQ ID NO: 89087 - DNA, 33 bp, Homo sapien
ttgcagttaactctcaactacaatactttaaca

SEQ ID NO: 89088 - DNA, 33 bp, Homo sapien
ttgcagttaactctcagctacaatactttaaca

SEQ ID NO: 89089 - DNA, 33 bp, Homo sapien
ataaatttaagagagcacggcaggttttggaat

SEQ ID NO: 89090 - DNA, 33 bp, Homo sapien
ataaatttaagagagcgcggcaggttttggaat

SEQ ID NO: 89091 - DNA, 33 bp, Homo sapien
agagcaacagctaccaacacaaaatgaaagctc

SEQ ID NO: 89092 - DNA, 33 bp, Homo sapien
agagcaacagctaccaccacaaaatgaaagctc

SEQ ID NO: 89093 - DNA, 33 bp, Homo sapien
ccctgacaattttaacccgttggactatctatt

SEQ ID NO: 89094 - DNA, 33 bp, Homo sapien
ccctgacaattttaacgcgttggactatctatt

SEQ ID NO: 89095 - DNA, 33 bp, Homo sapien
gttcttccatagttccaaagattagaaatccaa

SEQ ID NO: 89096 - DNA, 33 bp, Homo sapien
gttcttccatagttccgaagattagaaatccaa

SEQ ID NO: 89097 - DNA, 33 bp, Homo sapien
ctcattttcaaagtaactgaaccttccttctaa

SEQ ID NO: 89098 - DNA, 33 bp, Homo sapien
ctcattttcaaagtaattgaaccttccttctaa

SEQ ID NO: 89099 - DNA, 33 bp, Homo sapien
agagatgtctacatggaaaactgcatgaatgta

SEQ ID NO: 89100 - DNA, 33 bp, Homo sapien
agagatgtctacatgggaaactgcatgaatgta

SEQ ID NO: 89101 - DNA, 33 bp, Homo sapien
ggcccttcatgggcaccgtaacctggaatgtgt

SEQ ID NO: 89102 - DNA, 33 bp, Homo sapien
ggcccttcatgggcacggtaacctggaatgtgt

SEQ ID NO: 89103 - DNA, 33 bp, Homo sapien
tggagagtttagggtaaatttctgaacttaaac

SEQ ID NO: 89104 - DNA, 33 bp, Homo sapien
tggagagtttagggtacatttctgaacttaaac

SEQ ID NO: 89105 - DNA, 33 bp, Homo sapien
gttacattcaaatacgaagcaatttgatatagg

SEQ ID NO: 89106 - DNA, 33 bp, Homo sapien
gttacattcaaatacggagcaatttgatatagg

SEQ ID NO: 89107 - DNA, 33 bp, Homo sapien
cagttataaatgcaaacgctaaatctggccggc

SEQ ID NO: 89108 - DNA, 33 bp, Homo sapien
cagttataaatgcaaatgctaaatctggccggc

SEQ ID NO: 89109 - DNA, 33 bp, Homo sapien
gcatgggcctctgcgccgaaccactgtgctaga

SEQ ID NO: 89110 - DNA, 33 bp, Homo sapien
gcatgggcctctgcgctgaaccactgtgctaga

SEQ ID NO: 89111 - DNA, 33 bp, Homo sapien
tttgagtgtgaagttacaccatgacatacaaat

SEQ ID NO: 89112 - DNA, 33 bp, Homo sapien
tttgagtgtgaagttataccatgacatacaaat

SEQ ID NO: 89113 - DNA, 33 bp, Homo sapien
gtggtatttgaaattaaaagcacagtaccattt

SEQ ID NO: 89114 - DNA, 33 bp, Homo sapien
gtggtatttgaaattagaagcacagtaccattt

SEQ ID NO: 89115 - DNA, 33 bp, Homo sapien
ctatataggactcatacgtattttgttagattt

SEQ ID NO: 89116 - DNA, 33 bp, Homo sapien
ctatataggactcatatgtattttgttagattt

SEQ ID NO: 89117 - DNA, 33 bp, Homo sapien
ctccagggaaagtgacagaggcagtgaaagagg

SEQ ID NO: 89118 - DNA, 33 bp, Homo sapien
ctccagggaaagtgaccgaggcagtgaaagagg

SEQ ID NO: 89119 - DNA, 33 bp, Homo sapien
tgaaagaggccattgacgcagggtaccggcact

SEQ ID NO: 89120 - DNA, 33 bp, Homo sapien
tgaaagaggccattgatgcagggtaccggcact

SEQ ID NO: 89121 - DNA, 33 bp, Homo sapien
agtcatcaactcccataaagaaagtagaaagcc

SEQ ID NO: 89122 - DNA, 33 bp, Homo sapien
agtcatcaactcccatgaagaaagtagaaagcc

SEQ ID NO: 89123 - DNA, 33 bp, Homo sapien
ctgccctatttaaaaacgaaacagggctcctct

SEQ ID NO: 89124 - DNA, 33 bp, Homo sapien
ctgccctatttaaaaatgaaacagggctcctct

SEQ ID NO: 89125 - DNA, 33 bp, Homo sapien
ctcccaataccctccaaatccatttcctcttct

SEQ ID NO: 89126 - DNA, 33 bp, Homo sapien
ctcccaataccctccacatccatttcctcttct

SEQ ID NO: 89127 - DNA, 33 bp, Homo sapien
tttccactgctgactacgatccacacagaagca

SEQ ID NO: 89128 - DNA, 33 bp, Homo sapien
tttccactgctgactatgatccacacagaagca

SEQ ID NO: 89129 - DNA, 33 bp, Homo sapien
ccatgtggtgcttatacgtgtgatttatttatt

SEQ ID NO: 89130 - DNA, 33 bp, Homo sapien
ccatgtggtgcttatatgtgtgatttatttatt

SEQ ID NO: 89131 - DNA, 33 bp, Homo sapien
gtctttcaagccagtcgctttttttccaagcca

SEQ ID NO: 89132 - DNA, 33 bp, Homo sapien
gtctttcaagccagtctctttttttccaagcca

SEQ ID NO: 89133 - DNA, 33 bp, Homo sapien
acctaagggaaaaaaacctactgctctcttggc

SEQ ID NO: 89134 - DNA, 33 bp, Homo sapien
acctaagggaaaaaaatctactgctctcttggc

SEQ ID NO: 89135 - DNA, 33 bp, Homo sapien
tccaaccagttttagaataccatacagaactgc

SEQ ID NO: 89136 - DNA, 33 bp, Homo sapien
tccaaccagttttagactaccatacagaactgc

SEQ ID NO: 89137 - DNA, 33 bp, Homo sapien
tcttctgagtaagatacgggtggcactcaatct

SEQ ID NO: 89138 - DNA, 33 bp, Homo sapien
tcttctgagtaagatatgggtggcactcaatct

SEQ ID NO: 89139 - DNA, 33 bp, Homo sapien
aagaataaataagatacctgcactctggttgct

SEQ ID NO: 89140 - DNA, 33 bp, Homo sapien
aagaataaataagatatctgcactctggttgct

SEQ ID NO: 89141 - DNA, 33 bp, Homo sapien
tttctgtaccatctcagactaaccatgcatgca

SEQ ID NO: 89142 - DNA, 33 bp, Homo sapien
tttctgtaccatctcatactaaccatgcatgca

SEQ ID NO: 89143 - DNA, 33 bp, Homo sapien
ttcaaatccagaggaacgtgatagtgatccccg

SEQ ID NO: 89144 - DNA, 33 bp, Homo sapien
ttcaaatccagaggaatgtgatagtgatccccg

SEQ ID NO: 89145 - DNA, 33 bp, Homo sapien
gagcatcttgttgggaagatttgtgtgggccag

SEQ ID NO: 89146 - DNA, 33 bp, Homo sapien
gagcatcttgttgggatgatttgtgtgggccag

SEQ ID NO: 89147 - DNA, 33 bp, Homo sapien
gaaatgtaatgatacaatgaagggatagcatag

SEQ ID NO: 89148 - DNA, 33 bp, Homo sapien
gaaatgtaatgatacagtgaagggatagcatag

SEQ ID NO: 89149 - DNA, 33 bp, Homo sapien
gacagcatctggcccaagttatgttctaggaag

SEQ ID NO: 89150 - DNA, 33 bp, Homo sapien
gacagcatctggcccaggttatgttctaggaag

SEQ ID NO: 89151 - DNA, 33 bp, Homo sapien
tgagaaactgaggaataaggcaatggcaatgat

SEQ ID NO: 89152 - DNA, 33 bp, Homo sapien
tgagaaactgaggaatgaggcaatggcaatgat

SEQ ID NO: 89153 - DNA, 33 bp, Homo sapien
ccagccagagctggtcacatcacatgtcactgt

SEQ ID NO: 89154 - DNA, 33 bp, Homo sapien
ccagccagagctggtcgcatcacatgtcactgt

SEQ ID NO: 89155 - DNA, 33 bp, Homo sapien
gttacaggttttaactcaatcttcacagaaagg

SEQ ID NO: 89156 - DNA, 33 bp, Homo sapien
gttacaggttttaactgaatcttcacagaaagg

SEQ ID NO: 89157 - DNA, 33 bp, Homo sapien
aagatcgcttcatgaccacaagttgccacctga

SEQ ID NO: 89158 - DNA, 33 bp, Homo sapien
aagatcgcttcatgactacaagttgccacctga

SEQ ID NO: 89159 - DNA, 33 bp, Homo sapien
gacaatatcaatatcaatatcttggttgtgaat

SEQ ID NO: 89160 - DNA, 33 bp, Homo sapien
gacaatatcaatatcagtatcttggttgtgaat

SEQ ID NO: 89161 - DNA, 33 bp, Homo sapien
ttgatttcaacactacagagacagtccttgtaa

SEQ ID NO: 89162 - DNA, 33 bp, Homo sapien
ttgatttcaacactacggagacagtccttgtaa

SEQ ID NO: 89163 - DNA, 33 bp, Homo sapien
tgtgggctgaaatcaacggaattcccccactgt

SEQ ID NO: 89164 - DNA, 33 bp, Homo sapien
tgtgggctgaaatcaatggaattcccccactgt

SEQ ID NO: 89165 - DNA, 33 bp, Homo sapien
cttgaacaagaatatacgccatttgtaaatgtc

SEQ ID NO: 89166 - DNA, 33 bp, Homo sapien
cttgaacaagaatatatgccatttgtaaatgtc

SEQ ID NO: 89167 - DNA, 33 bp, Homo sapien
atttgtccatttataaagttgagattggcatgg

SEQ ID NO: 89168 - DNA, 33 bp, Homo sapien
atttgtccatttataaggttgagattggcatgg

SEQ ID NO: 89169 - DNA, 33 bp, Homo sapien
attgagagattacttcagaaggtacagtatcta

SEQ ID NO: 89170 - DNA, 33 bp, Homo sapien
attgagagattacttcggaaggtacagtatcta

SEQ ID NO: 89171 - DNA, 33 bp, Homo sapien
gacaaagactggtaataatcttcataaagttat

SEQ ID NO: 89172 - DNA, 33 bp, Homo sapien
gacaaagactggtaatcatcttcataaagttat

SEQ ID NO: 89173 - DNA, 33 bp, Homo sapien
gcattgcatggtatcaaacatcttttagaatac

SEQ ID NO: 89174 - DNA, 33 bp, Homo sapien
gcattgcatggtatcagacatcttttagaatac

SEQ ID NO: 89175 - DNA, 33 bp, Homo sapien
ttttgttcattgctgcaacccctgatagccaat

SEQ ID NO: 89176 - DNA, 33 bp, Homo sapien
ttttgttcattgctgcgacccctgatagccaat

SEQ ID NO: 89177 - DNA, 33 bp, Homo sapien
ttttttttttttgcaacaacacttgacatgaga

SEQ ID NO: 89178 - DNA, 33 bp, Homo sapien
ttttttttttttgcaagaacacttgacatgaga

SEQ ID NO: 89179 - DNA, 33 bp, Homo sapien
attttccagaatgttacagagtttggattagat

SEQ ID NO: 89180 - DNA, 33 bp, Homo sapien
attttccagaatgttatagagtttggattagat

SEQ ID NO: 89181 - DNA, 33 bp, Homo sapien
tgattgtctagtgatacatgatgtttagcaact

SEQ ID NO: 89182 - DNA, 33 bp, Homo sapien
tgattgtctagtgatatatgatgtttagcaact

SEQ ID NO: 89183 - DNA, 33 bp, Homo sapien
aaaggttttgagttcaatagttgatggagaccc

SEQ ID NO: 89184 - DNA, 33 bp, Homo sapien
aaaggttttgagttcagtagttgatggagaccc

SEQ ID NO: 89185 - DNA, 33 bp, Homo sapien
catcgggcaggccatccgaaagaagattgccaa

SEQ ID NO: 89186 - DNA, 33 bp, Homo sapien
catcgggcaggccatctgaaagaagattgccaa

SEQ ID NO: 89187 - DNA, 33 bp, Homo sapien
ttgtgggatacaagatcaatatagatacaagat

SEQ ID NO: 89188 - DNA, 33 bp, Homo sapien
ttgtgggatacaagatgaatatagatacaagat

SEQ ID NO: 89189 - DNA, 33 bp, Homo sapien
tcaagtttctgcttccaaaaccagaaagaagta

SEQ ID NO: 89190 - DNA, 33 bp, Homo sapien
tcaagtttctgcttccgaaaccagaaagaagta

SEQ ID NO: 89191 - DNA, 33 bp, Homo sapien
tataatttttgcaaagccaggttcatagctgat

SEQ ID NO: 89192 - DNA, 33 bp, Homo sapien
tataatttttgcaaaggcaggttcatagctgat

SEQ ID NO: 89193 - DNA, 33 bp, Homo sapien
ctcatttctgggcgtgcaccaaactaactatgg

SEQ ID NO: 89194 - DNA, 33 bp, Homo sapien
ctcatttctgggcgtggaccaaactaactatgg

SEQ ID NO: 89195 - DNA, 33 bp, Homo sapien
ggccagtgttccctgcaatgcatctacggagtc

SEQ ID NO: 89196 - DNA, 33 bp, Homo sapien
ggccagtgttccctgccatgcatctacggagtc

SEQ ID NO: 89197 - DNA, 33 bp, Homo sapien
agtgtctggtacttgacaaaaatggcaataaaa

SEQ ID NO: 89198 - DNA, 33 bp, Homo sapien
agtgtctggtacttgataaaaatggcaataaaa

SEQ ID NO: 89199 - DNA, 33 bp, Homo sapien
accactgtcctcaaaacgctctcaccaggatat

SEQ ID NO: 89200 - DNA, 33 bp, Homo sapien
accactgtcctcaaaatgctctcaccaggatat

SEQ ID NO: 89201 - DNA, 33 bp, Homo sapien
gctgcacaactacaataatctgatttctgtcaa

SEQ ID NO: 89202 - DNA, 33 bp, Homo sapien
gctgcacaactacaatcatctgatttctgtcaa

SEQ ID NO: 89203 - DNA, 33 bp, Homo sapien
ggcacacacacagacactctcatcttctccagc

SEQ ID NO: 89204 - DNA, 33 bp, Homo sapien
ggcacacacacagacagtctcatcttctccagc

SEQ ID NO: 89205 - DNA, 33 bp, Homo sapien
ttcaagaactgtggtaaacctgttattagagtc

SEQ ID NO: 89206 - DNA, 33 bp, Homo sapien
ttcaagaactgtggtacacctgttattagagtc

SEQ ID NO: 89207 - DNA, 33 bp, Homo sapien
ttcctttgttgtgttccactgatgggcagccta

SEQ ID NO: 89208 - DNA, 33 bp, Homo sapien
ttcctttgttgtgttctactgatgggcagccta

SEQ ID NO: 89209 - DNA, 33 bp, Homo sapien
gggaatgaaggaaaaaagcatcataaatgatct

SEQ ID NO: 89210 - DNA, 33 bp, Homo sapien
gggaatgaaggaaaaaggcatcataaatgatct

SEQ ID NO: 89211 - DNA, 33 bp, Homo sapien
gtcttggtagaactatgacatgagagatcacca

SEQ ID NO: 89212 - DNA, 33 bp, Homo sapien
gtcttggtagaactattacatgagagatcacca

SEQ ID NO: 89213 - DNA, 33 bp, Homo sapien
ttgaagtggcacactacggttacggtaaagtaa

SEQ ID NO: 89214 - DNA, 33 bp, Homo sapien
ttgaagtggcacactatggttacggtaaagtaa

SEQ ID NO: 89215 - DNA, 33 bp, Homo sapien
ttttggttcccttgaagctcaactttgagtcca

SEQ ID NO: 89216 - DNA, 33 bp, Homo sapien
ttttggttcccttgaatctcaactttgagtcca

SEQ ID NO: 89217 - DNA, 33 bp, Homo sapien
cactgtcctaagcatacggaccccctatctatc

SEQ ID NO: 89218 - DNA, 33 bp, Homo sapien
cactgtcctaagcatatggaccccctatctatc

SEQ ID NO: 89219 - DNA, 33 bp, Homo sapien
cttttacctaatttgggacataactgtcaagta

SEQ ID NO: 89220 - DNA, 33 bp, Homo sapien
cttttacctaatttggtacataactgtcaagta

SEQ ID NO: 89221 - DNA, 33 bp, Homo sapien
taccccagaccctgataagattctacatgctga

SEQ ID NO: 89222 - DNA, 33 bp, Homo sapien
taccccagaccctgatgagattctacatgctga

SEQ ID NO: 89223 - DNA, 33 bp, Homo sapien
aaaagttatgaatgacacaagaattcatggcta

SEQ ID NO: 89224 - DNA, 33 bp, Homo sapien
aaaagttatgaatgacccaagaattcatggcta

SEQ ID NO: 89225 - DNA, 33 bp, Homo sapien
ggcaagtgtaaaagacaaaagcacttgtttcat

SEQ ID NO: 89226 - DNA, 33 bp, Homo sapien
ggcaagtgtaaaagacgaaagcacttgtttcat

SEQ ID NO: 89227 - DNA, 33 bp, Homo sapien
ggaaaagtaatgaaagactgtgaaaattatcag

SEQ ID NO: 89228 - DNA, 33 bp, Homo sapien
ggaaaagtaatgaaagtctgtgaaaattatcag

SEQ ID NO: 89229 - DNA, 33 bp, Homo sapien
tcacaaaatgacaaaacaagtacaggggcagca

SEQ ID NO: 89230 - DNA, 33 bp, Homo sapien
tcacaaaatgacaaaataagtacaggggcagca

SEQ ID NO: 89231 - DNA, 33 bp, Homo sapien
cacaggggagagctggaagtgcatggcagatat

SEQ ID NO: 89232 - DNA, 33 bp, Homo sapien
cacaggggagagctggtagtgcatggcagatat

SEQ ID NO: 89233 - DNA, 33 bp, Homo sapien
accgcattctcaggagaccgttttcagcattcc

SEQ ID NO: 89234 - DNA, 33 bp, Homo sapien
accgcattctcaggaggccgttttcagcattcc

SEQ ID NO: 89235 - DNA, 33 bp, Homo sapien
aacactggttatgtgaacggtgaacttgtcatg

SEQ ID NO: 89236 - DNA, 33 bp, Homo sapien
aacactggttatgtgagcggtgaacttgtcatg

SEQ ID NO: 89237 - DNA, 33 bp, Homo sapien
cttggatgtaaacctgacactgttagcagagca

SEQ ID NO: 89238 - DNA, 33 bp, Homo sapien
cttggatgtaaacctggcactgttagcagagca

SEQ ID NO: 89239 - DNA, 33 bp, Homo sapien
ccactctgcataggatcaaagccttatcttgtg

SEQ ID NO: 89240 - DNA, 33 bp, Homo sapien
ccactctgcataggattaaagccttatcttgtg

SEQ ID NO: 89241 - DNA, 33 bp, Homo sapien
atggacaaaagtaccacatagcagatgggaggc

SEQ ID NO: 89242 - DNA, 33 bp, Homo sapien
atggacaaaagtaccagatagcagatgggaggc

SEQ ID NO: 89243 - DNA, 33 bp, Homo sapien
ttcgtagccaagtgtgaaacgcttaagcagact

SEQ ID NO: 89244 - DNA, 33 bp, Homo sapien
ttcgtagccaagtgtgtaacgcttaagcagact

SEQ ID NO: 89245 - DNA, 33 bp, Homo sapien
cttagaaaagtcttacaaaaaggtgttgtaact

SEQ ID NO: 89246 - DNA, 33 bp, Homo sapien
cttagaaaagtcttacgaaaaggtgttgtaact

SEQ ID NO: 89247 - DNA, 33 bp, Homo sapien
attagcaattttagcacatttaagacagctgtt

SEQ ID NO: 89248 - DNA, 33 bp, Homo sapien
attagcaattttagcatatttaagacagctgtt

SEQ ID NO: 89249 - DNA, 33 bp, Homo sapien
atagtaaaataacaaacagtgcagacaaggcag

SEQ ID NO: 89250 - DNA, 33 bp, Homo sapien
atagtaaaataacaaatagtgcagacaaggcag

SEQ ID NO: 89251 - DNA, 33 bp, Homo sapien
ctcaagcagtttgaaccggtgagccacacccct

SEQ ID NO: 89252 - DNA, 33 bp, Homo sapien
ctcaagcagtttgaactggtgagccacacccct

SEQ ID NO: 89253 - DNA, 33 bp, Homo sapien
ctctcggggtcgcccaagagagtctgtaacttc

SEQ ID NO: 89254 - DNA, 33 bp, Homo sapien
ctctcggggtcgcccaggagagtctgtaacttc

SEQ ID NO: 89255 - DNA, 33 bp, Homo sapien; identical to SEQ ID NO: 89253

SEQ ID NO: 89256 - DNA, 33 bp, Homo sapien; identical to SEQ ID NO: 89254

SEQ ID NO: 89257 - DNA, 33 bp, Homo sapien
taagaaaggttgaaaactaaatgatgaaggcgt

SEQ ID NO: 89258 - DNA, 33 bp, Homo sapien
taagaaaggttgaaaagtaaatgatgaaggcgt

SEQ ID NO: 89259 - DNA, 33 bp, Homo sapien
gcttctaggctgagaagtcaggcacacaggggg

SEQ ID NO: 89260 - DNA, 33 bp, Homo sapien
gcttctaggctgagaattcaggcacacaggggg

SEQ ID NO: 89261 - DNA, 33 bp, Homo sapien
attatttaaagttgtacgtacctaacactggag

SEQ ID NO: 89262 - DNA, 33 bp, Homo sapien
attatttaaagttgtatgtacctaacactggag

SEQ ID NO: 89263 - DNA, 33 bp, Homo sapien
gatgaaaactgatgagacatcctgagagcatga

SEQ ID NO: 89264 - DNA, 33 bp, Homo sapien
gatgaaaactgatgagtcatcctgagagcatga

SEQ ID NO: 89265 - DNA, 33 bp, Homo sapien
atccagatttacacagcaaaaggtttcttacag

SEQ ID NO: 89266 - DNA, 33 bp, Homo sapien
atccagatttacacaggaaaaggtttcttacag

SEQ ID NO: 89267 - DNA, 33 bp, Homo sapien
ttcagcttaggagagacgccttaaaaactttaa

SEQ ID NO: 89268 - DNA, 33 bp, Homo sapien
ttcagcttaggagagatgccttaaaaactttaa

SEQ ID NO: 89269 - DNA, 33 bp, Homo sapien
tctgtgattcaacaggccatttcagaagcaggt

SEQ ID NO: 89270 - DNA, 33 bp, Homo sapien
tctgtgattcaacagggcatttcagaagcaggt

SEQ ID NO: 89271 - DNA, 33 bp, Homo sapien
tctttatttcttacaacctctcatctctgcaca

SEQ ID NO: 89272 - DNA, 33 bp, Homo sapien
tctttatttcttacaatctctcatctctgcaca

SEQ ID NO: 89273 - DNA, 33 bp, Homo sapien
accagacttctatgcaaaacaaaggttgacttt

SEQ ID NO: 89274 - DNA, 33 bp, Homo sapien
accagacttctatgcacaacaaaggttgacttt

SEQ ID NO: 89275 - DNA, 33 bp, Homo sapien
atgcatatgaacaaggaccaataatttaaacgt

SEQ ID NO: 89276 - DNA, 33 bp, Homo sapien
atgcatatgaacaagggccaataatttaaacgt

SEQ ID NO: 89277 - DNA, 33 bp, Homo sapien
cagtgcaagctcctataagtcctctcccagtga

SEQ ID NO: 89278 - DNA, 33 bp, Homo sapien
cagtgcaagctcctatgagtcctctcccagtga

SEQ ID NO: 89279 - DNA, 33 bp, Homo sapien
agtcctaagcattcaccggttagtattaggact

SEQ ID NO: 89280 - DNA, 33 bp, Homo sapien
agtcctaagcattcactggttagtattaggact

SEQ ID NO: 89281 - DNA, 33 bp, Homo sapien
gtgcttggcgataggcaatagtctcgctgctca

SEQ ID NO: 89282 - DNA, 33 bp, Homo sapien
gtgcttggcgataggcgatagtctcgctgctca

SEQ ID NO: 89283 - DNA, 33 bp, Homo sapien
aggggtgagaccatcacctatcactgagcagcg

SEQ ID NO: 89284 - DNA, 33 bp, Homo sapien
aggggtgagaccatcagctatcactgagcagcg

SEQ ID NO: 89285 - DNA, 33 bp, Homo sapien
ggtgacaggtatatatcagtgcatctttagcta

SEQ ID NO: 89286 - DNA, 33 bp, Homo sapien
ggtgacaggtatatatgagtgcatctttagcta

SEQ ID NO: 89287 - DNA, 33 bp, Homo sapien; identical to SEQ ID NO: 89285

SEQ ID NO: 89288 - DNA, 33 bp, Homo sapien; identical to SEQ ID NO: 89286

SEQ ID NO: 89289 - DNA, 33 bp, Homo sapien
attactctcaaattaaagccaaaatggtgaata

SEQ ID NO: 89290 - DNA, 33 bp, Homo sapien
attactctcaaattaaggccaaaatggtgaata

SEQ ID NO: 89291 - DNA, 33 bp, Homo sapien
gaacagttgagtgaaagtgttagtgtgcccagg

SEQ ID NO: 89292 - DNA, 33 bp, Homo sapien
gaacagttgagtgaaattgttagtgtgcccagg

SEQ ID NO: 89293 - DNA, 33 bp, Homo sapien
gcccacaatctttcctgaaactatgtattcctt

SEQ ID NO: 89294 - DNA, 33 bp, Homo sapien
gcccacaatctttccttaaactatgtattcctt

SEQ ID NO: 89295 - DNA, 33 bp, Homo sapien
tacatatgttgcctaacaatcattcaaaaacaa

SEQ ID NO: 89296 - DNA, 33 bp, Homo sapien
tacatatgttgcctaataatcattcaaaaacaa

SEQ ID NO: 89297 - DNA, 33 bp, Homo sapien
gaaagtctgttcaagaagagaatccgtgccact

SEQ ID NO: 89298 - DNA, 33 bp, Homo sapien
gaaagtctgttcaagaggagaatccgtgccact

SEQ ID NO: 89299 - DNA, 33 bp, Homo sapien
ccttggtactaatcaaatatgtcaatgctctgc

SEQ ID NO: 89300 - DNA, 33 bp, Homo sapien
ccttggtactaatcaagtatgtcaatgctctgc

SEQ ID NO: 89301 - DNA, 33 bp, Homo sapien
accctttatttttggaatcacccaggatccttt

SEQ ID NO: 89302 - DNA, 33 bp, Homo sapien
accctttatttttggagtcacccaggatccttt

SEQ ID NO: 89303 - DNA, 33 bp, Homo sapien
gagaactactgttacagcatcttatttaagtgt

SEQ ID NO: 89304 - DNA, 33 bp, Homo sapien
gagaactactgttacatcatcttatttaagtgt

SEQ ID NO: 89305 - DNA, 33 bp, Homo sapien
tttacgatatgtcttacagagcctaaaaatgag

SEQ ID NO: 89306 - DNA, 33 bp, Homo sapien
tttacgatatgtcttatagagcctaaaaatgag

SEQ ID NO: 89307 - DNA, 33 bp, Homo sapien
atttttcattatgtgcgccaagtagccacataa

SEQ ID NO: 89308 - DNA, 33 bp, Homo sapien
atttttcattatgtgctccaagtagccacataa

SEQ ID NO: 89309 - DNA, 33 bp, Homo sapien
ggtaaactgccaccacaagtgccactggtgaga

SEQ ID NO: 89310 - DNA, 33 bp, Homo sapien
ggtaaactgccaccacgagtgccactggtgaga

SEQ ID NO: 89311 - DNA, 33 bp, Homo sapien
gtgagtcttgctgactcaccatgactagaggac

SEQ ID NO: 89312 - DNA, 33 bp, Homo sapien
gtgagtcttgctgacttaccatgactagaggac

SEQ ID NO: 89313 - DNA, 33 bp, Homo sapien
catcctgtgtaaatacccactttaaggaactga

SEQ ID NO: 89314 - DNA, 33 bp, Homo sapien
catcctgtgtaaatacgcactttaaggaactga

SEQ ID NO: 89315 - DNA, 33 bp, Homo sapien
gaaagcagtgctaagacataaatttatagtgtt

SEQ ID NO: 89316 - DNA, 33 bp, Homo sapien
gaaagcagtgctaagagataaatttatagtgtt

SEQ ID NO: 89317 - DNA, 33 bp, Homo sapien
aatgacatcaacaccccacttataaatgttgca

SEQ ID NO: 89318 - DNA, 33 bp, Homo sapien
aatgacatcaacaccctacttataaatgttgca

SEQ ID NO: 89319 - DNA, 33 bp, Homo sapien
gcaaaatgtgaaaatacgtgtttttgaaagttt

SEQ ID NO: 89320 - DNA, 33 bp, Homo sapien
gcaaaatgtgaaaatatgtgtttttgaaagttt

SEQ ID NO: 89321 - DNA, 33 bp, Homo sapien
taaaagccaacaacaaatagactatcttaaaag

SEQ ID NO: 89322 - DNA, 33 bp, Homo sapien
taaaagccaacaacaagtagactatcttaaaag

SEQ ID NO: 89323 - DNA, 33 bp, Homo sapien
aattggcaacagacatgaatctaaatatgtgag

SEQ ID NO: 89324 - DNA, 33 bp, Homo sapien
aattggcaacagacattaatctaaatatgtgag

SEQ ID NO: 89325 - DNA, 33 bp, Homo sapien
gtgcacaaacgaaaaacaagcagtacgtgacca

SEQ ID NO: 89326 - DNA, 33 bp, Homo sapien
gtgcacaaacgaaaaataagcagtacgtgacca

SEQ ID NO: 89327 - DNA, 33 bp, Homo sapien
aggaaatgaaaataacaacacaactgaagctcc

SEQ ID NO: 89328 - DNA, 33 bp, Homo sapien
aggaaatgaaaataacgacacaactgaagctcc

SEQ ID NO: 89329 - DNA, 33 bp, Homo sapien
ttaagtcttttctgcacagtcattctggctaca

SEQ ID NO: 89330 - DNA, 33 bp, Homo sapien
ttaagtcttttctgcatagtcattctggctaca

SEQ ID NO: 89331 - DNA, 33 bp, Homo sapien
tggaaaactcactgaaaaaagctcaattggact

SEQ ID NO: 89332 - DNA, 33 bp, Homo sapien
tggaaaactcactgaagaaagctcaattggact

SEQ ID NO: 89333 - DNA, 33 bp, Homo sapien
tatctggatagttgaaaagagctttttattagg

SEQ ID NO: 89334 - DNA, 33 bp, Homo sapien
tatctggatagttgaacagagctttttattagg

SEQ ID NO: 89335 - DNA, 33 bp, Homo sapien
atttactcgaaagaaaggaaattaggtgttcca

SEQ ID NO: 89336 - DNA, 33 bp, Homo sapien
atttactcgaaagaaatgaaattaggtgttcca

SEQ ID NO: 89337 - DNA, 33 bp, Homo sapien
ataactacagagaaaaccacagcacatatgcaa

SEQ ID NO: 89338 - DNA, 33 bp, Homo sapien
ataactacagagaaaatcacagcacatatgcaa

SEQ ID NO: 89339 - DNA, 33 bp, Homo sapien
gtctattgtcattccactgataatcttacatat

SEQ ID NO: 89340 - DNA, 33 bp, Homo sapien
gtctattgtcattccattgataatcttacatat

SEQ ID NO: 89341 - DNA, 33 bp, Homo sapien
tttggttacattccaacggttcctgaagccagg

SEQ ID NO: 89342 - DNA, 33 bp, Homo sapien
tttggttacattccaagggttcctgaagccagg

SEQ ID NO: 89343 - DNA, 33 bp, Homo sapien
attattctggaatggaagaattacacattattt

SEQ ID NO: 89344 - DNA, 33 bp, Homo sapien
attattctggaatggatgaattacacattattt

SEQ ID NO: 89345 - DNA, 33 bp, Homo sapien
tcaatagctcatggtcaatattcttcagataat

SEQ ID NO: 89346 - DNA, 33 bp, Homo sapien
tcaatagctcatggtcgatattcttcagataat

SEQ ID NO: 89347 - DNA, 33 bp, Homo sapien
gagggcatcaaaaaaaatgattcacaatggtgc

SEQ ID NO: 89348 - DNA, 33 bp, Homo sapien
gagggcatcaaaaaaagtgattcacaatggtgc

SEQ ID NO: 89349 - DNA, 33 bp, Homo sapien
ctgtcctgggaaaggtgaatgtgagtatcgcct

SEQ ID NO: 89350 - DNA, 33 bp, Homo sapien
ctgtcctgggaaaggttaatgtgagtatcgcct

SEQ ID NO: 89351 - DNA, 33 bp, Homo sapien
atctaaggaagtaccaataatgacctcagatta

SEQ ID NO: 89352 - DNA, 33 bp, Homo sapien
atctaaggaagtaccactaatgacctcagatta

SEQ ID NO: 89353 - DNA, 33 bp, Homo sapien
tcctagtgtaatggaaagagcgtcacatcaaga

SEQ ID NO: 89354 - DNA, 33 bp, Homo sapien
tcctagtgtaatggaaggagcgtcacatcaaga

SEQ ID NO: 89355 - DNA, 33 bp, Homo sapien
tgttgagggttttaatcataaagcaatggcgga

SEQ ID NO: 89356 - DNA, 33 bp, Homo sapien
tgttgagggttttaatgataaagcaatggcgga

SEQ ID NO: 89357 - DNA, 33 bp, Homo sapien
gcaaactacgcttccagcaaaggactattgtcc

SEQ ID NO: 89358 - DNA, 33 bp, Homo sapien
gcaaactacgcttccatcaaaggactattgtcc

SEQ ID NO: 89359 - DNA, 33 bp, Homo sapien
gctgagggccactggtaaaagtcctagagtgca

SEQ ID NO: 89360 - DNA, 33 bp, Homo sapien
gctgagggccactggtgaaagtcctagagtgca

SEQ ID NO: 89361 - DNA, 33 bp, Homo sapien
gaaatctccgatatgacaagttacaattgtaag

SEQ ID NO: 89362 - DNA, 33 bp, Homo sapien
gaaatctccgatatgataagttacaattgtaag

SEQ ID NO: 89363 - DNA, 33 bp, Homo sapien
acctggcctgggcttccactgtgtttcttggca

SEQ ID NO: 89364 - DNA, 33 bp, Homo sapien
acctggcctgggcttcgactgtgtttcttggca

SEQ ID NO: 89365 - DNA, 33 bp, Homo sapien
gctgctccttttccccaaattctccagagagtt

SEQ ID NO: 89366 - DNA, 33 bp, Homo sapien
gctgctccttttccccgaattctccagagagtt

SEQ ID NO: 89367 - DNA, 33 bp, Homo sapien
ctggaataacacccagaaataaaatggaaagaa

SEQ ID NO: 89368 - DNA, 33 bp, Homo sapien
ctggaataacacccagcaataaaatggaaagaa

SEQ ID NO: 89369 - DNA, 33 bp, Homo sapien
cactactgagcttaaacgtcaccaacattcttt

SEQ ID NO: 89370 - DNA, 33 bp, Homo sapien
cactactgagcttaaatgtcaccaacattcttt

SEQ ID NO: 89371 - DNA, 33 bp, Homo sapien
actttcacactcagaactggaatatgcccttcc

SEQ ID NO: 89372 - DNA, 33 bp, Homo sapien
actttcacactcagaattggaatatgcccttcc

SEQ ID NO: 89373 - DNA, 33 bp, Homo sapien
gtgcctaaggagctcgaccaaacaaccttcaag

SEQ ID NO: 89374 - DNA, 33 bp, Homo sapien
gtgcctaaggagctcggccaaacaaccttcaag

SEQ ID NO: 89375 - DNA, 33 bp, Homo sapien
ctaagaatcatcactacagcctttgattgctcc

SEQ ID NO: 89376 - DNA, 33 bp, Homo sapien
ctaagaatcatcactatagcctttgattgctcc

SEQ ID NO: 89377 - DNA, 33 bp, Homo sapien
gactaatagagagttgaagtaaaagcttgacca

SEQ ID NO: 89378 - DNA, 33 bp, Homo sapien
gactaatagagagttggagtaaaagcttgacca

SEQ ID NO: 89379 - DNA, 33 bp, Homo sapien
cctcttgtaaaggaaggctagtgtacttatcaa

SEQ ID NO: 89380 - DNA, 33 bp, Homo sapien
cctcttgtaaaggaagtctagtgtacttatcaa

SEQ ID NO: 89381 - DNA, 33 bp, Homo sapien
taatctctcacaggtcacagttaatttcttagg

SEQ ID NO: 89382 - DNA, 33 bp, Homo sapien
taatctctcacaggtcgcagttaatttcttagg

SEQ ID NO: 89383 - DNA, 33 bp, Homo sapien
atgaatcaattctacactggtgattctgagatt

SEQ ID NO: 89384 - DNA, 33 bp, Homo sapien
atgaatcaattctacattggtgattctgagatt

SEQ ID NO: 89385 - DNA, 33 bp, Homo sapien
attctgatgatctgaactgtgtttgagagaaat

SEQ ID NO: 89386 - DNA, 33 bp, Homo sapien
attctgatgatctgaattgtgtttgagagaaat

SEQ ID NO: 89387 - DNA, 33 bp, Homo sapien
caagaaaatggcttaggcattatacttaggact

SEQ ID NO: 89388 - DNA, 33 bp, Homo sapien
caagaaaatggcttagtcattatacttaggact

SEQ ID NO: 89389 - DNA, 33 bp, Homo sapien
ttcttgaatttttgaagcagaggctttgaggtt

SEQ ID NO: 89390 - DNA, 33 bp, Homo sapien
ttcttgaatttttgaatcagaggctttgaggtt

SEQ ID NO: 89391 - DNA, 33 bp, Homo sapien
aaactccattgtgaaacaagccttagtgaaaaa

SEQ ID NO: 89392 - DNA, 33 bp, Homo sapien
aaactccattgtgaaataagccttagtgaaaaa

SEQ ID NO: 89393 - DNA, 33 bp, Homo sapien
acatttttagagtctacgtcaaatcttgaaatg

SEQ ID NO: 89394 - DNA, 33 bp, Homo sapien
acatttttagagtctatgtcaaatcttgaaatg

SEQ ID NO: 89395 - DNA, 33 bp, Homo sapien
agagaggcatttccccaaaaaaaattataggat

SEQ ID NO: 89396 - DNA, 33 bp, Homo sapien
agagaggcatttcccccaaaaaaattataggat

SEQ ID NO: 89397 - DNA, 33 bp, Homo sapien
tgttatttggtgtttgaactgtgctagaagaac

SEQ ID NO: 89398 - DNA, 33 bp, Homo sapien
tgttatttggtgtttggactgtgctagaagaac

SEQ ID NO: 89399 - DNA, 33 bp, Homo sapien
agaagaaatgaggaacactgtagaagccatatg

SEQ ID NO: 89400 - DNA, 33 bp, Homo sapien
agaagaaatgaggaactctgtagaagccatatg

SEQ ID NO: 89401 - DNA, 33 bp, Homo sapien
ggaacaacaagttaacggaccaaagtacaacaa

SEQ ID NO: 89402 - DNA, 33 bp, Homo sapien
ggaacaacaagttaactgaccaaagtacaacaa

SEQ ID NO: 89403 - DNA, 33 bp, Homo sapien
tgcacaaaactgaagaaaagatctcaacagaaa

SEQ ID NO: 89404 - DNA, 33 bp, Homo sapien
tgcacaaaactgaagacaagatctcaacagaaa

SEQ ID NO: 89405 - DNA, 33 bp, Homo sapien
tccatgccagaaattcgcttctcttccatatgg

SEQ ID NO: 89406 - DNA, 33 bp, Homo sapien
tccatgccagaaattctcttctcttccatatgg

SEQ ID NO: 89407 - DNA, 33 bp, Homo sapien
catttatcgaatgttcaccatgttatctggtca

SEQ ID NO: 89408 - DNA, 33 bp, Homo sapien
catttatcgaatgttcgccatgttatctggtca

SEQ ID NO: 89409 - DNA, 33 bp, Homo sapien
gggaaggagaatcttacgtcctgtagccacagg

SEQ ID NO: 89410 - DNA, 33 bp, Homo sapien
gggaaggagaatcttatgtcctgtagccacagg

SEQ ID NO: 89411 - DNA, 33 bp, Homo sapien
gttgtaacacatgatcagaagaatgcaacagat

SEQ ID NO: 89412 - DNA, 33 bp, Homo sapien
gttgtaacacatgatcggaagaatgcaacagat

SEQ ID NO: 89413 - DNA, 33 bp, Homo sapien
ctctgggaggttatcaatgaaatccgccacctt

SEQ ID NO: 89414 - DNA, 33 bp, Homo sapien
ctctgggaggttatcagtgaaatccgccacctt

SEQ ID NO: 89415 - DNA, 33 bp, Homo sapien
agtttcttcagaacaaatgtgaccagagcaatt

SEQ ID NO: 89416 - DNA, 33 bp, Homo sapien
agtttcttcagaacaattgtgaccagagcaatt

SEQ ID NO: 89417 - DNA, 33 bp, Homo sapien
agttgccttttcctcacgaattgcagagtcttt

SEQ ID NO: 89418 - DNA, 33 bp, Homo sapien
agttgccttttcctcatgaattgcagagtcttt

SEQ ID NO: 89419 - DNA, 33 bp, Homo sapien
caagcagtggaccaaccattagctctccctccc

SEQ ID NO: 89420 - DNA, 33 bp, Homo sapien
caagcagtggaccaactattagctctccctccc

SEQ ID NO: 89421 - DNA, 33 bp, Homo sapien
gataactgtgtctgccaccagaaggggtgctga

SEQ ID NO: 89422 - DNA, 33 bp, Homo sapien
gataactgtgtctgccgccagaaggggtgctga

SEQ ID NO: 89423 - DNA, 33 bp, Homo sapien
tatgaaagtgaaagacagaaacagatattctat

SEQ ID NO: 89424 - DNA, 33 bp, Homo sapien
tatgaaagtgaaagacggaaacagatattctat

SEQ ID NO: 89425 - DNA, 33 bp, Homo sapien
ctctcaacgatattcaaaagtaaactctgtttc

SEQ ID NO: 89426 - DNA, 33 bp, Homo sapien
ctctcaacgatattcagaagtaaactctgtttc

SEQ ID NO: 89427 - DNA, 33 bp, Homo sapien
attggtttggttttataagaaggagtcgtccag

SEQ ID NO: 89428 - DNA, 33 bp, Homo sapien
attggtttggttttatgagaaggagtcgtccag

SEQ ID NO: 89429 - DNA, 33 bp, Homo sapien
atccagttgtcttcaacgagaatcatttcaaca

SEQ ID NO: 89430 - DNA, 33 bp, Homo sapien
atccagttgtcttcaatgagaatcatttcaaca

SEQ ID NO: 89431 - DNA, 33 bp, Homo sapien
tattttgctgttaggacgcaatagttaacaaac

SEQ ID NO: 89432 - DNA, 33 bp, Homo sapien
tattttgctgttaggatgcaatagttaacaaac

SEQ ID NO: 89433 - DNA, 33 bp, Homo sapien
acctcccatgtgtcacaaagatccacagtatca

SEQ ID NO: 89434 - DNA, 33 bp, Homo sapien
acctcccatgtgtcacgaagatccacagtatca

SEQ ID NO: 89435 - DNA, 33 bp, Homo sapien
atttcaactgtagggaaggcattcttagtgaag

SEQ ID NO: 89436 - DNA, 33 bp, Homo sapien
atttcaactgtagggacggcattcttagtgaag

SEQ ID NO: 89437 - DNA, 33 bp, Homo sapien
cctgagaacaattactaaacaatcaacggagtg

SEQ ID NO: 89438 - DNA, 33 bp, Homo sapien
cctgagaacaattactgaacaatcaacggagtg

SEQ ID NO: 89439 - DNA, 33 bp, Homo sapien
ccatttattcagagagcattatatgggtgtgtc

SEQ ID NO: 89440 - DNA, 33 bp, Homo sapien
ccatttattcagagaggattatatgggtgtgtc

SEQ ID NO: 89441 - DNA, 33 bp, Homo sapien
aaaaaacagtgttggacgcaatctttcataagg

SEQ ID NO: 89442 - DNA, 33 bp, Homo sapien
aaaaaacagtgttggatgcaatctttcataagg

SEQ ID NO: 89443 - DNA, 33 bp, Homo sapien
acggttggagtatctacaaagaagccagtcagg

SEQ ID NO: 89444 - DNA, 33 bp, Homo sapien
acggttggagtatctagaaagaagccagtcagg

SEQ ID NO: 89445 - DNA, 33 bp, Homo sapien
gtaaatatttctggaactgaatttcaggtaggc

SEQ ID NO: 89446 - DNA, 33 bp, Homo sapien
gtaaatatttctggaagtgaatttcaggtaggc

SEQ ID NO: 89447 - DNA, 33 bp, Homo sapien
gaatgcaacagattgaatatccagctttgctaa

SEQ ID NO: 89448 - DNA, 33 bp, Homo sapien
gaatgcaacagattgactatccagctttgctaa

SEQ ID NO: 89449 - DNA, 33 bp, Homo sapien
taatctgctgtagaaacttgtcagcttctttct

SEQ ID NO: 89450 - DNA, 33 bp, Homo sapien
taatctgctgtagaaatttgtcagcttctttct

SEQ ID NO: 89451 - DNA, 33 bp, Homo sapien
aagccaccaaagctcccggaacattacaagttg

SEQ ID NO: 89452 - DNA, 33 bp, Homo sapien
aagccaccaaagctcctggaacattacaagttg

SEQ ID NO: 89453 - DNA, 33 bp, Homo sapien
gaggttgtggagattaaatgaggccatagtcag

SEQ ID NO: 89454 - DNA, 33 bp, Homo sapien
gaggttgtggagattacatgaggccatagtcag

SEQ ID NO: 89455 - DNA, 33 bp, Homo sapien
caacctgtggcttgtcaaatgcagcctggtcac

SEQ ID NO: 89456 - DNA, 33 bp, Homo sapien
caacctgtggcttgtcgaatgcagcctggtcac

SEQ ID NO: 89457 - DNA, 33 bp, Homo sapien
caatagcacaagagagaataatatttatgagcc

SEQ ID NO: 89458 - DNA, 33 bp, Homo sapien
caatagcacaagagagtataatatttatgagcc

SEQ ID NO: 89459 - DNA, 33 bp, Homo sapien
ggaaatcatacctacaataagcgtatttcaaga

SEQ ID NO: 89460 - DNA, 33 bp, Homo sapien
ggaaatcatacctacagtaagcgtatttcaaga

SEQ ID NO: 89461 - DNA, 33 bp, Homo sapien
aggtcagaaaggtggaaagaaagagacaaagga

SEQ ID NO: 89462 - DNA, 33 bp, Homo sapien
aggtcagaaaggtggagagaaagagacaaagga

SEQ ID NO: 89463 - DNA, 33 bp, Homo sapien
tgacctcatgcactaagagaacataaaggattt

SEQ ID NO: 89464 - DNA, 33 bp, Homo sapien
tgacctcatgcactaatagaacataaaggattt

SEQ ID NO: 89465 - DNA, 33 bp, Homo sapien
taggctcaattataaacccacctcacacgacct

SEQ ID NO: 89466 - DNA, 33 bp, Homo sapien
taggctcaattataaatccacctcacacgacct

SEQ ID NO: 89467 - DNA, 33 bp, Homo sapien
tgtacccactccttcacggacctagagatgatg

SEQ ID NO: 89468 - DNA, 33 bp, Homo sapien
tgtacccactccttcatggacctagagatgatg

SEQ ID NO: 89469 - DNA, 33 bp, Homo sapien
tgagattactgttcaactcctacatcctccctc

SEQ ID NO: 89470 - DNA, 33 bp, Homo sapien
tgagattactgttcaattcctacatcctccctc

SEQ ID NO: 89471 - DNA, 33 bp, Homo sapien
tctacttagtcccgtgaagcccctggcagagca

SEQ ID NO: 89472 - DNA, 33 bp, Homo sapien
tctacttagtcccgtggagcccctggcagagca

SEQ ID NO: 89473 - DNA, 33 bp, Homo sapien
caagatacctgaatggaaaaggcatcgtgtcgt

SEQ ID NO: 89474 - DNA, 33 bp, Homo sapien
caagatacctgaatgggaaaggcatcgtgtcgt

SEQ ID NO: 89475 - DNA, 33 bp, Homo sapien
attactttccacgcaccgtgatacagagatgaa

SEQ ID NO: 89476 - DNA, 33 bp, Homo sapien
attactttccacgcactgtgatacagagatgaa

SEQ ID NO: 89477 - DNA, 33 bp, Homo sapien
gtagataaaagacagacgattccattcaccaaa

SEQ ID NO: 89478 - DNA, 33 bp, Homo sapien
gtagataaaagacagaggattccattcaccaaa

SEQ ID NO: 89479 - DNA, 33 bp, Homo sapien
agtaacactcatgtaggccttcctctagctcag

SEQ ID NO: 89480 - DNA, 33 bp, Homo sapien
agtaacactcatgtagtccttcctctagctcag

SEQ ID NO: 89481 - DNA, 33 bp, Homo sapien
agaatcttcacgagagccaaccctgcagttatg

SEQ ID NO: 89482 - DNA, 33 bp, Homo sapien
agaatcttcacgagagtcaaccctgcagttatg

SEQ ID NO: 89483 - DNA, 33 bp, Homo sapien
caatggaccttaaatcgcagtcttgttaatgct

SEQ ID NO: 89484 - DNA, 33 bp, Homo sapien
caatggaccttaaatctcagtcttgttaatgct

SEQ ID NO: 89485 - DNA, 33 bp, Homo sapien
ataaatgaccttaccaagaactcaggcttcttt

SEQ ID NO: 89486 - DNA, 33 bp, Homo sapien
ataaatgaccttaccaggaactcaggcttcttt

SEQ ID NO: 89487 - DNA, 33 bp, Homo sapien
ggagtgggaccttctaacacgttcccaatggtg

SEQ ID NO: 89488 - DNA, 33 bp, Homo sapien
ggagtgggaccttctagcacgttcccaatggtg

SEQ ID NO: 89489 - DNA, 33 bp, Homo sapien
ttaaaaggtagcagcaccactaatagtttgctt

SEQ ID NO: 89490 - DNA, 33 bp, Homo sapien
ttaaaaggtagcagcatcactaatagtttgctt

SEQ ID NO: 89491 - DNA, 33 bp, Homo sapien
acccactcttgctgtaaagttctgttctctcct

SEQ ID NO: 89492 - DNA, 33 bp, Homo sapien
acccactcttgctgtagagttctgttctctcct

SEQ ID NO: 89493 - DNA, 33 bp, Homo sapien
tactttcaatctaccgcccaaataatcaatatc

SEQ ID NO: 89494 - DNA, 33 bp, Homo sapien
tactttcaatctaccgtccaaataatcaatatc

SEQ ID NO: 89495 - DNA, 33 bp, Homo sapien
tacatccttgggtagacgggatggttattttca

SEQ ID NO: 89496 - DNA, 33 bp, Homo sapien
tacatccttgggtagatgggatggttattttca

SEQ ID NO: 89497 - DNA, 33 bp, Homo sapien
aaagtcagagatacaactaaaacccttacttct

SEQ ID NO: 89498 - DNA, 33 bp, Homo sapien
aaagtcagagatacaagtaaaacccttacttct

SEQ ID NO: 89499 - DNA, 33 bp, Homo sapien
aaacatgagtcaaagcaagactagaacaacttt

SEQ ID NO: 89500 - DNA, 33 bp, Homo sapien
aaacatgagtcaaagccagactagaacaacttt

SEQ ID NO: 89501 - DNA, 33 bp, Homo sapien
aattaggagctaacaaatcagtcctgcatgttg

SEQ ID NO: 89502 - DNA, 33 bp, Homo sapien
aattaggagctaacaagtcagtcctgcatgttg

SEQ ID NO: 89503 - DNA, 33 bp, Homo sapien
cagtgaaaataatttccagtaggtcctgggcag

SEQ ID NO: 89504 - DNA, 33 bp, Homo sapien
cagtgaaaataatttctagtaggtcctgggcag

SEQ ID NO: 89505 - DNA, 33 bp, Homo sapien
cagccacagaagtccaatagagggttccataag

SEQ ID NO: 89506 - DNA, 33 bp, Homo sapien
cagccacagaagtccagtagagggttccataag

SEQ ID NO: 89507 - DNA, 33 bp, Homo sapien
catctgttggtatgaagcactatgtcaagtgaa

SEQ ID NO: 89508 - DNA, 33 bp, Homo sapien
catctgttggtatgaatcactatgtcaagtgaa

SEQ ID NO: 89509 - DNA, 33 bp, Homo sapien
aggtgagtgcttgggaaaatttggaagaatcga

SEQ ID NO: 89510 - DNA, 33 bp, Homo sapien
aggtgagtgcttgggagaatttggaagaatcga

SEQ ID NO: 89511 - DNA, 33 bp, Homo sapien
ggaggctaacattgaccccccatggaatcccca

SEQ ID NO: 89512 - DNA, 33 bp, Homo sapien
ggaggctaacattgactccccatggaatcccca

SEQ ID NO: 89513 - DNA, 33 bp, Homo sapien
tcccccaccagatgcggcattcaagttgtaaag

SEQ ID NO: 89514 - DNA, 33 bp, Homo sapien
tcccccaccagatgcgtcattcaagttgtaaag

SEQ ID NO: 89515 - DNA, 33 bp, Homo sapien
tacagctgctcatgtccatgaaacattctgtgt

SEQ ID NO: 89516 - DNA, 33 bp, Homo sapien
tacagctgctcatgtctatgaaacattctgtgt

SEQ ID NO: 89517 - DNA, 33 bp, Homo sapien
tccccttcacaggtagcagttagccattgtagg

SEQ ID NO: 89518 - DNA, 33 bp, Homo sapien
tccccttcacaggtaggagttagccattgtagg

SEQ ID NO: 89519 - DNA, 33 bp, Homo sapien
ggtaatgggaccataccctctctctttcatctc

SEQ ID NO: 89520 - DNA, 33 bp, Homo sapien
ggtaatgggaccatacgctctctctttcatctc

SEQ ID NO: 89521 - DNA, 33 bp, Homo sapien
aaaatgctgaaacaaaataactgtcaacctaga

SEQ ID NO: 89522 - DNA, 33 bp, Homo sapien
aaaatgctgaaacaaagtaactgtcaacctaga

SEQ ID NO: 89523 - DNA, 33 bp, Homo sapien
gttatactttccactcaatgttgctgagaacct

SEQ ID NO: 89524 - DNA, 33 bp, Homo sapien
gttatactttccactctatgttgctgagaacct

SEQ ID NO: 89525 - DNA, 33 bp, Homo sapien
gtgcctcctatcttccaatgtctacctgagcca

SEQ ID NO: 89526 - DNA, 33 bp, Homo sapien
gtgcctcctatcttccgatgtctacctgagcca

SEQ ID NO: 89527 - DNA, 33 bp, Homo sapien
tatagctgaagggtgacggctgacaggttaaac

SEQ ID NO: 89528 - DNA, 33 bp, Homo sapien
tatagctgaagggtgagggctgacaggttaaac

SEQ ID NO: 89529 - DNA, 33 bp, Homo sapien
gagacaatgaaatcctaaagtttatgcttttcc

SEQ ID NO: 89530 - DNA, 33 bp, Homo sapien
gagacaatgaaatcctgaagtttatgcttttcc

SEQ ID NO: 89531 - DNA, 33 bp, Homo sapien
acaacatcaaacccaaatctaccccactgtcta

SEQ ID NO: 89532 - DNA, 33 bp, Homo sapien
acaacatcaaacccaattctaccccactgtcta

SEQ ID NO: 89533 - DNA, 33 bp, Homo sapien
tcttactgacttaagaaaaaagctagacagtgg

SEQ ID NO: 89534 - DNA, 33 bp, Homo sapien
tcttactgacttaagagaaaagctagacagtgg

SEQ ID NO: 89535 - DNA, 33 bp, Homo sapien
ttatatcatttgcctagctagtggatgtcttaa

SEQ ID NO: 89536 - DNA, 33 bp, Homo sapien
ttatatcatttgcctatctagtggatgtcttaa

SEQ ID NO: 89537 - DNA, 33 bp, Homo sapien
caaggatgtaggctgaaggcattcacaagcatc

SEQ ID NO: 89538 - DNA, 33 bp, Homo sapien
caaggatgtaggctgatggcattcacaagcatc

SEQ ID NO: 89539 - DNA, 33 bp, Homo sapien
gcgattgctatcacctcagatttcttagaattt

SEQ ID NO: 89540 - DNA, 33 bp, Homo sapien
gcgattgctatcaccttagatttcttagaattt

SEQ ID NO: 89541 - DNA, 33 bp, Homo sapien
aaaaggagagggtgaacgttcattgtttctaca

SEQ ID NO: 89542 - DNA, 33 bp, Homo sapien
aaaaggagagggtgaatgttcattgtttctaca

SEQ ID NO: 89543 - DNA, 33 bp, Homo sapien
tttcccgcagtggaaacatcttgcaagaccata

SEQ ID NO: 89544 - DNA, 33 bp, Homo sapien
tttcccgcagtggaaatatcttgcaagaccata

SEQ ID NO: 89545 - DNA, 33 bp, Homo sapien
gctgggaggctcctcaatcattactacagggca

SEQ ID NO: 89546 - DNA, 33 bp, Homo sapien
gctgggaggctcctcagtcattactacagggca

SEQ ID NO: 89547 - DNA, 33 bp, Homo sapien
ggcagtccaccttttcaagaatttttgtccata

SEQ ID NO: 89548 - DNA, 33 bp, Homo sapien
ggcagtccaccttttcgagaatttttgtccata

SEQ ID NO: 89549 - DNA, 33 bp, Homo sapien
aagttatttttccagaagatacacagaataacc

SEQ ID NO: 89550 - DNA, 33 bp, Homo sapien
aagttatttttccagaggatacacagaataacc

SEQ ID NO: 89551 - DNA, 33 bp, Homo sapien
gaattggtctggaataagtcccgtagcacactt

SEQ ID NO: 89552 - DNA, 33 bp, Homo sapien
gaattggtctggaataggtcccgtagcacactt

SEQ ID NO: 89553 - DNA, 33 bp, Homo sapien
gaacattccaggatagacggtatgtcaggctgc

SEQ ID NO: 89554 - DNA, 33 bp, Homo sapien
gaacattccaggatagtcggtatgtcaggctgc

SEQ ID NO: 89555 - DNA, 33 bp, Homo sapien
ctgtattcactcttcaacccctgtaatttgcct

SEQ ID NO: 89556 - DNA, 33 bp, Homo sapien
ctgtattcactcttcagcccctgtaatttgcct

SEQ ID NO: 89557 - DNA, 33 bp, Homo sapien
tctttagaggtccacaagaactatcttaataat

SEQ ID NO: 89558 - DNA, 33 bp, Homo sapien
tctttagaggtccacatgaactatcttaataat

SEQ ID NO: 89559 - DNA, 33 bp, Homo sapien
aggaaaacatgagggacctatacttggaaacaa

SEQ ID NO: 89560 - DNA, 33 bp, Homo sapien
aggaaaacatgagggatctatacttggaaacaa

SEQ ID NO: 89561 - DNA, 33 bp, Homo sapien
ccctctgacaggcctaccatgaccccatgttaa

SEQ ID NO: 89562 - DNA, 33 bp, Homo sapien
ccctctgacaggcctatcatgaccccatgttaa

SEQ ID NO: 89563 - DNA, 33 bp, Homo sapien
acgacaatgagatcgcacttcacaccaattaga

SEQ ID NO: 89564 - DNA, 33 bp, Homo sapien
acgacaatgagatcgcgcttcacaccaattaga

SEQ ID NO: 89565 - DNA, 33 bp, Homo sapien
gggggcccgaaagccacgaagctatgttcgcct

SEQ ID NO: 89566 - DNA, 33 bp, Homo sapien
gggggcccgaaagccatgaagctatgttcgcct

SEQ ID NO: 89567 - DNA, 33 bp, Homo sapien
tctcagcacctggaaggcttagcatccggactg

SEQ ID NO: 89568 - DNA, 33 bp, Homo sapien
tctcagcacctggaagtcttagcatccggactg

SEQ ID NO: 89569 - DNA, 33 bp, Homo sapien
gatcacaaaatcccaactcatcccctcttggtc

SEQ ID NO: 89570 - DNA, 33 bp, Homo sapien
gatcacaaaatcccaattcatcccctcttggtc

SEQ ID NO: 89571 - DNA, 33 bp, Homo sapien
aaacctgtccagaaacccacacacttcgaggga

SEQ ID NO: 89572 - DNA, 33 bp, Homo sapien
aaacctgtccagaaactcacacacttcgaggga

SEQ ID NO: 89573 - DNA, 33 bp, Homo sapien
tgcttccttgaagttacaggcagtgagccccat

SEQ ID NO: 89574 - DNA, 33 bp, Homo sapien
tgcttccttgaagttataggcagtgagccccat

SEQ ID NO: 89575 - DNA, 33 bp, Homo sapien
gtactcctagacactacccaccttccctgcaca

SEQ ID NO: 89576 - DNA, 33 bp, Homo sapien
gtactcctagacactatccaccttccctgcaca

SEQ ID NO: 89577 - DNA, 33 bp, Homo sapien
ggtgtgattcttgggcaacaacaacctgaagtc

SEQ ID NO: 89578 - DNA, 33 bp, Homo sapien
ggtgtgattcttgggcgacaacaacctgaagtc

SEQ ID NO: 89579 - DNA, 33 bp, Homo sapien
acgctgccatggcgcccattgtacacatgagga

SEQ ID NO: 89580 - DNA, 33 bp, Homo sapien
acgctgccatggcgcctattgtacacatgagga

SEQ ID NO: 89581 - DNA, 33 bp, Homo sapien
gcttccttttgcttccaaaggcccggattgacc

SEQ ID NO: 89582 - DNA, 33 bp, Homo sapien
gcttccttttgcttccgaaggcccggattgacc

SEQ ID NO: 89583 - DNA, 33 bp, Homo sapien
ggaagcaaaaggaagccgctgtatctggtcaat

SEQ ID NO: 89584 - DNA, 33 bp, Homo sapien
ggaagcaaaaggaagctgctgtatctggtcaat

SEQ ID NO: 89585 - DNA, 33 bp, Homo sapien
atggtgaggagattgacacatggtttggggcca

SEQ ID NO: 89586 - DNA, 33 bp, Homo sapien
atggtgaggagattgatacatggtttggggcca

SEQ ID NO: 89587 - DNA, 33 bp, Homo sapien
cttatccaaggccatacatctagtgaatcagag

SEQ ID NO: 89588 - DNA, 33 bp, Homo sapien
cttatccaaggccatatatctagtgaatcagag

SEQ ID NO: 89589 - DNA, 33 bp, Homo sapien
aacacaaagatatatgaatggcatttagagaat

SEQ ID NO: 89590 - DNA, 33 bp, Homo sapien
aacacaaagatatatggatggcatttagagaat

SEQ ID NO: 89591 - DNA, 33 bp, Homo sapien
gtctttgatcttgggacacagccttaatgcaag

SEQ ID NO: 89592 - DNA, 33 bp, Homo sapien
gtctttgatcttgggatacagccttaatgcaag

SEQ ID NO: 89593 - DNA, 33 bp, Homo sapien
ggcgcggccatatccaactttttgggactgaga

SEQ ID NO: 89594 - DNA, 33 bp, Homo sapien
ggcgcggccatatccacctttttgggactgaga

SEQ ID NO: 89595 - DNA, 33 bp, Homo sapien
ctggcctggaagagaaatgtggtgagtcacccc

SEQ ID NO: 89596 - DNA, 33 bp, Homo sapien
ctggcctggaagagaagtgtggtgagtcacccc

SEQ ID NO: 89597 - DNA, 33 bp, Homo sapien
tggctgcagttgctccagagtttcaagggagaa

SEQ ID NO: 89598 - DNA, 33 bp, Homo sapien
tggctgcagttgctccggagtttcaagggagaa

SEQ ID NO: 89599 - DNA, 33 bp, Homo sapien
caccaggtgaatctgacgatgagcccaggtgtg

SEQ ID NO: 89600 - DNA, 33 bp, Homo sapien
caccaggtgaatctgatgatgagcccaggtgtg

SEQ ID NO: 89601 - DNA, 33 bp, Homo sapien
cgtaattgccatcatcaataccagatacccaac

SEQ ID NO: 89602 - DNA, 33 bp, Homo sapien
cgtaattgccatcatcgataccagatacccaac

SEQ ID NO: 89603 - DNA, 33 bp, Homo sapien
tgagaagggaaagcataaataaccccaagagaa

SEQ ID NO: 89604 - DNA, 33 bp, Homo sapien
tgagaagggaaagcatcaataaccccaagagaa

SEQ ID NO: 89605 - DNA, 33 bp, Homo sapien
ttctctttctgatagacgttgcttcccggtttt

SEQ ID NO: 89606 - DNA, 33 bp, Homo sapien
ttctctttctgatagatgttgcttcccggtttt

SEQ ID NO: 89607 - DNA, 33 bp, Homo sapien
aaacatctgtgaaaggaaaatacattttgggac

SEQ ID NO: 89608 - DNA, 33 bp, Homo sapien
aaacatctgtgaaagggaaatacattttgggac

SEQ ID NO: 89609 - DNA, 33 bp, Homo sapien
tctgtggctgctttgaagattccagaccagtgt

SEQ ID NO: 89610 - DNA, 33 bp, Homo sapien
tctgtggctgctttgaggattccagaccagtgt

SEQ ID NO: 89611 - DNA, 33 bp, Homo sapien
cacctgataaggagcccacaggaatcccatcac

SEQ ID NO: 89612 - DNA, 33 bp, Homo sapien
cacctgataaggagcctacaggaatcccatcac

SEQ ID NO: 89613 - DNA, 33 bp, Homo sapien
taattgtttctcacaccattaattcaggaggga

SEQ ID NO: 89614 - DNA, 33 bp, Homo sapien
taattgtttctcacactattaattcaggaggga

SEQ ID NO: 89615 - DNA, 33 bp, Homo sapien
gcaaacagcagactccaagaccactggaggcct

SEQ ID NO: 89616 - DNA, 33 bp, Homo sapien
gcaaacagcagactccgagaccactggaggcct

SEQ ID NO: 89617 - DNA, 33 bp, Homo sapien
gccatccggttcccagaagcaaggctggctctg

SEQ ID NO: 89618 - DNA, 33 bp, Homo sapien
gccatccggttcccagcagcaaggctggctctg

SEQ ID NO: 89619 - DNA, 33 bp, Homo sapien
atcgagtgtaggaaaacgaaagacaggtgcagg

SEQ ID NO: 89620 - DNA, 33 bp, Homo sapien
atcgagtgtaggaaaatgaaagacaggtgcagg

SEQ ID NO: 89621 - DNA, 33 bp, Homo sapien
taaggaaattatggctcaaataacatacactat

SEQ ID NO: 89622 - DNA, 33 bp, Homo sapien
taaggaaattatggctgaaataacatacactat

SEQ ID NO: 89623 - DNA, 33 bp, Homo sapien
ggactggagatgaggacataataggttcaagag

SEQ ID NO: 89624 - DNA, 33 bp, Homo sapien
ggactggagatgaggagataataggttcaagag

SEQ ID NO: 89625 - DNA, 33 bp, Homo sapien
acaccaaggaagttcaagcatctgggttgattt

SEQ ID NO: 89626 - DNA, 33 bp, Homo sapien
acaccaaggaagttcaggcatctgggttgattt

SEQ ID NO: 89627 - DNA, 33 bp, Homo sapien
ccctcctagatatgaacgaagacacatgtggcc

SEQ ID NO: 89628 - DNA, 33 bp, Homo sapien
ccctcctagatatgaatgaagacacatgtggcc

SEQ ID NO: 89629 - DNA, 33 bp, Homo sapien
aaggcaagtgtttgaactgactttctccaaggt

SEQ ID NO: 89630 - DNA, 33 bp, Homo sapien
aaggcaagtgtttgaattgactttctccaaggt

SEQ ID NO: 89631 - DNA, 33 bp, Homo sapien
cctgccctctccttggcagctctcagaactgac

SEQ ID NO: 89632 - DNA, 33 bp, Homo sapien
cctgccctctccttggtagctctcagaactgac

SEQ ID NO: 89633 - DNA, 33 bp, Homo sapien
cagacattgactgcaccgaaaagccttcttggg

SEQ ID NO: 89634 - DNA, 33 bp, Homo sapien
cagacattgactgcacggaaaagccttcttggg

SEQ ID NO: 89635 - DNA, 33 bp, Homo sapien
aaaaagctaacctcaacaatctccccttttgtt

SEQ ID NO: 89636 - DNA, 33 bp, Homo sapien
aaaaagctaacctcaagaatctccccttttgtt

SEQ ID NO: 89637 - DNA, 33 bp, Homo sapien
tgttctatttgaagagaaaagattgtgtcccag

SEQ ID NO: 89638 - DNA, 33 bp, Homo sapien
tgttctatttgaagagcaaagattgtgtcccag

SEQ ID NO: 89639 - DNA, 33 bp, Homo sapien
gatagctcaagagacagatatattgattgattg

SEQ ID NO: 89640 - DNA, 33 bp, Homo sapien
gatagctcaagagacatatatattgattgattg

SEQ ID NO: 89641 - DNA, 33 bp, Homo sapien
gcaaggccagaaatgacggctttaatattacct

SEQ ID NO: 89642 - DNA, 33 bp, Homo sapien
gcaaggccagaaatgatggctttaatattacct

SEQ ID NO: 89643 - DNA, 33 bp, Homo sapien
cacaggacctcaggaaattacaggaggagcttg

SEQ ID NO: 89644 - DNA, 33 bp, Homo sapien
cacaggacctcaggaagttacaggaggagcttg

SEQ ID NO: 89645 - DNA, 33 bp, Homo sapien
agtgctgccattaatcaaagtcgttataaagct

SEQ ID NO: 89646 - DNA, 33 bp, Homo sapien
agtgctgccattaatcgaagtcgttataaagct

SEQ ID NO: 89647 - DNA, 33 bp, Homo sapien
gggcgtagatgttgccaccaaactcgataagca

SEQ ID NO: 89648 - DNA, 33 bp, Homo sapien
gggcgtagatgttgccgccaaactcgataagca

SEQ ID NO: 89649 - DNA, 33 bp, Homo sapien
ttcacaacatgacaacggcgatcatgtctggtg

SEQ ID NO: 89650 - DNA, 33 bp, Homo sapien
ttcacaacatgacaactgcgatcatgtctggtg

SEQ ID NO: 89651 - DNA, 33 bp, Homo sapien
tagattgtaaacttccaattgcattaaatctgg

SEQ ID NO: 89652 - DNA, 33 bp, Homo sapien
tagattgtaaacttcctattgcattaaatctgg

SEQ ID NO: 89653 - DNA, 33 bp, Homo sapien
agtggcataattggaactggaatccaagtggtc

SEQ ID NO: 89654 - DNA, 33 bp, Homo sapien
agtggcataattggaattggaatccaagtggtc

SEQ ID NO: 89655 - DNA, 33 bp, Homo sapien
atactaagagtggtccaagaaaacagaaggcca

SEQ ID NO: 89656 - DNA, 33 bp, Homo sapien
atactaagagtggtcctagaaaacagaaggcca

SEQ ID NO: 89657 - DNA, 33 bp, Homo sapien
ggaaatgcctgtaaagaataaaccgggaaagag

SEQ ID NO: 89658 - DNA, 33 bp, Homo sapien
ggaaatgcctgtaaagtataaaccgggaaagag

SEQ ID NO: 89659 - DNA, 33 bp, Homo sapien
gcccaaatgtccatcaataatacaatgggtaaa

SEQ ID NO: 89660 - DNA, 33 bp, Homo sapien
gcccaaatgtccatcagtaatacaatgggtaaa

SEQ ID NO: 89661 - DNA, 33 bp, Homo sapien
acaagggcaaaatttccaaaatgtcgcattcgg

SEQ ID NO: 89662 - DNA, 33 bp, Homo sapien
acaagggcaaaatttcgaaaatgtcgcattcgg

SEQ ID NO: 89663 - DNA, 33 bp, Homo sapien
gcgggtaggacacttaaggaaattggagcttgg

SEQ ID NO: 89664 - DNA, 33 bp, Homo sapien
gcgggtaggacacttacggaaattggagcttgg

SEQ ID NO: 89665 - DNA, 33 bp, Homo sapien
gcactggcatacaacaatgaaaaggacaaagcc

SEQ ID NO: 89666 - DNA, 33 bp, Homo sapien
gcactggcatacaacattgaaaaggacaaagcc

SEQ ID NO: 89667 - DNA, 33 bp, Homo sapien
tctcctctaccttgacagaagactgaaggttta

SEQ ID NO: 89668 - DNA, 33 bp, Homo sapien
tctcctctaccttgacggaagactgaaggttta

SEQ ID NO: 89669 - DNA, 33 bp, Homo sapien
tttagtatatccacagaattgtgcttagtatat

SEQ ID NO: 89670 - DNA, 33 bp, Homo sapien
tttagtatatccacagcattgtgcttagtatat

SEQ ID NO: 89671 - DNA, 33 bp, Homo sapien
gtacatagtctttatacccaaaggacaccttgg

SEQ ID NO: 89672 - DNA, 33 bp, Homo sapien
gtacatagtctttatagccaaaggacaccttgg

SEQ ID NO: 89673 - DNA, 33 bp, Homo sapien
tggtattacaaacttacgggatcactgtccaaa

SEQ ID NO: 89674 - DNA, 33 bp, Homo sapien
tggtattacaaacttatgggatcactgtccaaa

SEQ ID NO: 89675 - DNA, 33 bp, Homo sapien
ctagttcctgcggtctaaaaaacaacacaacag

SEQ ID NO: 89676 - DNA, 33 bp, Homo sapien
ctagttcctgcggtctgaaaaacaacacaacag

SEQ ID NO: 89677 - DNA, 33 bp, Homo sapien
ctaggcactagggatacagtagaatacaagaag

SEQ ID NO: 89678 - DNA, 33 bp, Homo sapien
ctaggcactagggatatagtagaatacaagaag

SEQ ID NO: 89679 - DNA, 33 bp, Homo sapien
gttttaaagttattgcgctggtctttttgttgt

SEQ ID NO: 89680 - DNA, 33 bp, Homo sapien
gttttaaagttattgctctggtctttttgttgt

SEQ ID NO: 89681 - DNA, 33 bp, Homo sapien
cgaaagcaaatctgccagctctaaagaccagtg

SEQ ID NO: 89682 - DNA, 33 bp, Homo sapien
cgaaagcaaatctgccggctctaaagaccagtg

SEQ ID NO: 89683 - DNA, 33 bp, Homo sapien
tctagtcaacaaaggcccctcatcccttagcta

SEQ ID NO: 89684 - DNA, 33 bp, Homo sapien
tctagtcaacaaaggctcctcatcccttagcta

SEQ ID NO: 89685 - DNA, 33 bp, Homo sapien
cttcttaaaggttgtacgttcatcagcagtatt

SEQ ID NO: 89686 - DNA, 33 bp, Homo sapien
cttcttaaaggttgtaggttcatcagcagtatt

SEQ ID NO: 89687 - DNA, 33 bp, Homo sapien
aaaccccgacattcaacagctcctttgtttcac

SEQ ID NO: 89688 - DNA, 33 bp, Homo sapien
aaaccccgacattcaatagctcctttgtttcac

SEQ ID NO: 89689 - DNA, 33 bp, Homo sapien
tagactataagaatcacgacaaaaaagcaacat

SEQ ID NO: 89690 - DNA, 33 bp, Homo sapien
tagactataagaatcatgacaaaaaagcaacat

SEQ ID NO: 89691 - DNA, 33 bp, Homo sapien
agccaaaagtaccttaaacttgtcatcttcttt

SEQ ID NO: 89692 - DNA, 33 bp, Homo sapien
agccaaaagtaccttacacttgtcatcttcttt

SEQ ID NO: 89693 - DNA, 33 bp, Homo sapien
tgcttatccattcatcaatacctggattgcttc

SEQ ID NO: 89694 - DNA, 33 bp, Homo sapien
tgcttatccattcatcgatacctggattgcttc

SEQ ID NO: 89695 - DNA, 33 bp, Homo sapien
agtgagacctaaataactgaagatgccccccac

SEQ ID NO: 89696 - DNA, 33 bp, Homo sapien
agtgagacctaaataattgaagatgccccccac

SEQ ID NO: 89697 - DNA, 33 bp, Homo sapien
gaatccggcatctcaaaaaactatcaattcatg

SEQ ID NO: 89698 - DNA, 33 bp, Homo sapien
gaatccggcatctcaacaaactatcaattcatg

SEQ ID NO: 89699 - DNA, 33 bp, Homo sapien
tccttaagttatcagcaagtaattttgtatcca

SEQ ID NO: 89700 - DNA, 33 bp, Homo sapien
tccttaagttatcagccagtaattttgtatcca

SEQ ID NO: 89701 - DNA, 33 bp, Homo sapien
catataatgatatgcacggatcttcagttaaaa

SEQ ID NO: 89702 - DNA, 33 bp, Homo sapien
catataatgatatgcatggatcttcagttaaaa

SEQ ID NO: 89703 - DNA, 33 bp, Homo sapien
gtcaggttccccaatacatgaagaacttttcta

SEQ ID NO: 89704 - DNA, 33 bp, Homo sapien
gtcaggttccccaatatatgaagaacttttcta

SEQ ID NO: 89705 - DNA, 33 bp, Homo sapien
agcaagtttttaaacacatgatgctgagaatca

SEQ ID NO: 89706 - DNA, 33 bp, Homo sapien
agcaagtttttaaacatatgatgctgagaatca

SEQ ID NO: 89707 - DNA, 33 bp, Homo sapien
tgttctacacagtaagaatttatgaatagaaat

SEQ ID NO: 89708 - DNA, 33 bp, Homo sapien
tgttctacacagtaaggatttatgaatagaaat

SEQ ID NO: 89709 - DNA, 33 bp, Homo sapien
acagactaatatagaagacaacaccatgagttg

SEQ ID NO: 89710 - DNA, 33 bp, Homo sapien
acagactaatatagaatacaacaccatgagttg

SEQ ID NO: 89711 - DNA, 33 bp, Homo sapien
agaggcttacaattcaatattaacaagataatg

SEQ ID NO: 89712 - DNA, 33 bp, Homo sapien
agaggcttacaattcattattaacaagataatg

SEQ ID NO: 89713 - DNA, 33 bp, Homo sapien
caccaaactcactgagccgtgcaggcctgtata

SEQ ID NO: 89714 - DNA, 33 bp, Homo sapien
caccaaactcactgagtcgtgcaggcctgtata

SEQ ID NO: 89715 - DNA, 33 bp, Homo sapien
gtctgggcatagccaactacagatgagctcaac

SEQ ID NO: 89716 - DNA, 33 bp, Homo sapien
gtctgggcatagccaagtacagatgagctcaac

SEQ ID NO: 89717 - DNA, 33 bp, Homo sapien
ccagctgatacagactgagataattccattttg

SEQ ID NO: 89718 - DNA, 33 bp, Homo sapien
ccagctgatacagacttagataattccattttg

SEQ ID NO: 89719 - DNA, 33 bp, Homo sapien
ttacccaatataaaaaggactcttacaaatcaa

SEQ ID NO: 89720 - DNA, 33 bp, Homo sapien
ttacccaatataaaaatgactcttacaaatcaa

SEQ ID NO: 89721 - DNA, 33 bp, Homo sapien
tgattggggccattaacgaaaccagttcttgct

SEQ ID NO: 89722 - DNA, 33 bp, Homo sapien
tgattggggccattaatgaaaccagttcttgct

SEQ ID NO: 89723 - DNA, 33 bp, Homo sapien
cagagattcaagagagaaaagagacttaaatgt

SEQ ID NO: 89724 - DNA, 33 bp, Homo sapien
cagagattcaagagaggaaagagacttaaatgt

SEQ ID NO: 89725 - DNA, 33 bp, Homo sapien
cttttccaggcaaacaaagcagaagggtcattt

SEQ ID NO: 89726 - DNA, 33 bp, Homo sapien
cttttccaggcaaacagagcagaagggtcattt

SEQ ID NO: 89727 - DNA, 33 bp, Homo sapien
ctgcataccagtcggggagaaaaacaatcaaca

SEQ ID NO: 89728 - DNA, 33 bp, Homo sapien
ctgcataccagtcgggtagaaaaacaatcaaca

SEQ ID NO: 89729 - DNA, 33 bp, Homo sapien
aggtcacagcttaaacactggcgctgagattct

SEQ ID NO: 89730 - DNA, 33 bp, Homo sapien
aggtcacagcttaaaccctggcgctgagattct

SEQ ID NO: 89731 - DNA, 33 bp, Homo sapien
cgcaacaagcattttgaattcagacgtattttc

SEQ ID NO: 89732 - DNA, 33 bp, Homo sapien
cgcaacaagcattttggattcagacgtattttc

SEQ ID NO: 89733 - DNA, 33 bp, Homo sapien
aaaaaagaagttgtcactagtggatatactgag

SEQ ID NO: 89734 - DNA, 33 bp, Homo sapien
aaaaaagaagttgtcattagtggatatactgag

SEQ ID NO: 89735 - DNA, 33 bp, Homo sapien
actttataattacacaagctaataggattcatt

SEQ ID NO: 89736 - DNA, 33 bp, Homo sapien
actttataattacacacgctaataggattcatt

SEQ ID NO: 89737 - DNA, 33 bp, Homo sapien
ggggtcatcaggattcggaaaatctcactcttc

SEQ ID NO: 89738 - DNA, 33 bp, Homo sapien
ggggtcatcaggattctgaaaatctcactcttc

SEQ ID NO: 89739 - DNA, 33 bp, Homo sapien
tccctttcaaataagcaaacttgttgataatgg

SEQ ID NO: 89740 - DNA, 33 bp, Homo sapien
tccctttcaaataagccaacttgttgataatgg

SEQ ID NO: 89741 - DNA, 33 bp, Homo sapien
tcttcttcaagagaaacagaaatgcagttgcct

SEQ ID NO: 89742 - DNA, 33 bp, Homo sapien
tcttcttcaagagaaagagaaatgcagttgcct

SEQ ID NO: 89743 - DNA, 33 bp, Homo sapien
gtgaggtccagtgtgccctggcttagcttcgtg

SEQ ID NO: 89744 - DNA, 33 bp, Homo sapien
gtgaggtccagtgtgctctggcttagcttcgtg

SEQ ID NO: 89745 - DNA, 33 bp, Homo sapien
tggcttagcttcgtggaagtgtttttgtccttt

SEQ ID NO: 89746 - DNA, 33 bp, Homo sapien
tggcttagcttcgtgggagtgtttttgtccttt

SEQ ID NO: 89747 - DNA, 33 bp, Homo sapien
cacctttcacagggcccggcacgtaagacattg

SEQ ID NO: 89748 - DNA, 33 bp, Homo sapien
cacctttcacagggcctggcacgtaagacattg

SEQ ID NO: 89749 - DNA, 33 bp, Homo sapien
ctattaaaagaacaaaacacctctgcagtgacg

SEQ ID NO: 89750 - DNA, 33 bp, Homo sapien
ctattaaaagaacaaatcacctctgcagtgacg

SEQ ID NO: 89751 - DNA, 33 bp, Homo sapien
catgtgctttggtgaagagcagtaacagtcaaa

SEQ ID NO: 89752 - DNA, 33 bp, Homo sapien
catgtgctttggtgaatagcagtaacagtcaaa

SEQ ID NO: 89753 - DNA, 33 bp, Homo sapien
atccctctccacactacctttaaaactactgcc

SEQ ID NO: 89754 - DNA, 33 bp, Homo sapien
atccctctccacactatctttaaaactactgcc

SEQ ID NO: 89755 - DNA, 33 bp, Homo sapien
cttgaaaatctttccacaaatgaatgagtgaat

SEQ ID NO: 89756 - DNA, 33 bp, Homo sapien
cttgaaaatctttccataaatgaatgagtgaat

SEQ ID NO: 89757 - DNA, 33 bp, Homo sapien
tggatgctgtttttcactcaacacataggcata

SEQ ID NO: 89758 - DNA, 33 bp, Homo sapien
tggatgctgtttttcattcaacacataggcata

SEQ ID NO: 89759 - DNA, 33 bp, Homo sapien
tgtctgtaccaaaaaaaaccagacaaatgataa

SEQ ID NO: 89760 - DNA, 33 bp, Homo sapien
tgtctgtaccaaaaaacaccagacaaatgataa

SEQ ID NO: 89761 - DNA, 33 bp, Homo sapien
acaggacaacaaggaaaacacacaggtgtgcta

SEQ ID NO: 89762 - DNA, 33 bp, Homo sapien
acaggacaacaaggaagacacacaggtgtgcta

SEQ ID NO: 89763 - DNA, 33 bp, Homo sapien
aaatactctacatgacacatcacagggcaaagg

SEQ ID NO: 89764 - DNA, 33 bp, Homo sapien
aaatactctacatgactcatcacagggcaaagg

SEQ ID NO: 89765 - DNA, 33 bp, Homo sapien
gtttcaaaagctgcaccgtatctgcattgtcag

SEQ ID NO: 89766 - DNA, 33 bp, Homo sapien
gtttcaaaagctgcactgtatctgcattgtcag

SEQ ID NO: 89767 - DNA, 33 bp, Homo sapien
aatgagacttctcttaccacaaagttttgatct

SEQ ID NO: 89768 - DNA, 33 bp, Homo sapien
aatgagacttctcttatcacaaagttttgatct

SEQ ID NO: 89769 - DNA, 33 bp, Homo sapien
agtacacaacagtgtacctgaaatgctaccttc

SEQ ID NO: 89770 - DNA, 33 bp, Homo sapien
agtacacaacagtgtatctgaaatgctaccttc

SEQ ID NO: 89771 - DNA, 33 bp, Homo sapien
tgctgaagatgcactgacaaaaacagaaatgac

SEQ ID NO: 89772 - DNA, 33 bp, Homo sapien
tgctgaagatgcactggcaaaaacagaaatgac

SEQ ID NO: 89773 - DNA, 33 bp, Homo sapien
aggactcagtcacagcactctcttgtatttcat

SEQ ID NO: 89774 - DNA, 33 bp, Homo sapien
aggactcagtcacagcgctctcttgtatttcat

SEQ ID NO: 89775 - DNA, 33 bp, Homo sapien
ctttatccataaatgcagatggcacggtgcctg

SEQ ID NO: 89776 - DNA, 33 bp, Homo sapien
ctttatccataaatgcggatggcacggtgcctg

SEQ ID NO: 89777 - DNA, 33 bp, Homo sapien
ggaaaaaggcaatgatcagtcctctggaaggcg

SEQ ID NO: 89778 - DNA, 33 bp, Homo sapien
ggaaaaaggcaatgattagtcctctggaaggcg

SEQ ID NO: 89779 - DNA, 33 bp, Homo sapien
aggaagcaaattcagaaaggagagatggaagcc

SEQ ID NO: 89780 - DNA, 33 bp, Homo sapien
aggaagcaaattcagagaggagagatggaagcc

SEQ ID NO: 89781 - DNA, 33 bp, Homo sapien
atgaaacaaaaccttacaccacaagcacacaca

SEQ ID NO: 89782 - DNA, 33 bp, Homo sapien
atgaaacaaaaccttataccacaagcacacaca

SEQ ID NO: 89783 - DNA, 33 bp, Homo sapien
aaggaaggaatcaacacaggtcctttggcaccc

SEQ ID NO: 89784 - DNA, 33 bp, Homo sapien
aaggaaggaatcaacataggtcctttggcaccc

SEQ ID NO: 89785 - DNA, 33 bp, Homo sapien
tccagagagactgtataaataaacatatagagg

SEQ ID NO: 89786 - DNA, 33 bp, Homo sapien
tccagagagactgtatgaataaacatatagagg

SEQ ID NO: 89787 - DNA, 33 bp, Homo sapien
gtcacaatggaagacacatttttcatggagagg

SEQ ID NO: 89788 - DNA, 33 bp, Homo sapien
gtcacaatggaagacatatttttcatggagagg

SEQ ID NO: 89789 - DNA, 33 bp, Homo sapien
agttgcttgatatccacgtgttatatgtgcaga

SEQ ID NO: 89790 - DNA, 33 bp, Homo sapien
agttgcttgatatccaggtgttatatgtgcaga

SEQ ID NO: 89791 - DNA, 33 bp, Homo sapien
cattgtataaattgaacgttttagcaggaaact

SEQ ID NO: 89792 - DNA, 33 bp, Homo sapien
cattgtataaattgaatgttttagcaggaaact

SEQ ID NO: 89793 - DNA, 33 bp, Homo sapien
cagcaccggcagccacaatgctatccatctctg

SEQ ID NO: 89794 - DNA, 33 bp, Homo sapien
cagcaccggcagccacgatgctatccatctctg

SEQ ID NO: 89795 - DNA, 33 bp, Homo sapien
cctaagtcaaaagccaagtacaccattactagg

SEQ ID NO: 89796 - DNA, 33 bp, Homo sapien
cctaagtcaaaagccacgtacaccattactagg

SEQ ID NO: 89797 - DNA, 33 bp, Homo sapien
gaaggaactgcttttcaatactcaagtagaaaa

SEQ ID NO: 89798 - DNA, 33 bp, Homo sapien
gaaggaactgcttttcgatactcaagtagaaaa

SEQ ID NO: 89799 - DNA, 33 bp, Homo sapien
gtttttccctccactccccgctatggcaaataa

SEQ ID NO: 89800 - DNA, 33 bp, Homo sapien
gtttttccctccactctccgctatggcaaataa

SEQ ID NO: 89801 - DNA, 33 bp, Homo sapien
agctaacaactttctccacaatcaccttagata

SEQ ID NO: 89802 - DNA, 33 bp, Homo sapien
agctaacaactttctctacaatcaccttagata

SEQ ID NO: 89803 - DNA, 33 bp, Homo sapien
gccctagcttagtatcacagataatatttctcc

SEQ ID NO: 89804 - DNA, 33 bp, Homo sapien
gccctagcttagtatcgcagataatatttctcc

SEQ ID NO: 89805 - DNA, 33 bp, Homo sapien
cacgaggcactaggccagcatattttcagtttt

SEQ ID NO: 89806 - DNA, 33 bp, Homo sapien
cacgaggcactaggccggcatattttcagtttt

SEQ ID NO: 89807 - DNA, 33 bp, Homo sapien
aaatttttatggtttaggtctttgaggcaatgg

SEQ ID NO: 89808 - DNA, 33 bp, Homo sapien
aaatttttatggtttatgtctttgaggcaatgg

SEQ ID NO: 89809 - DNA, 33 bp, Homo sapien
agttagagagtacagacggttgagtaaatatat

SEQ ID NO: 89810 - DNA, 33 bp, Homo sapien
agttagagagtacagatggttgagtaaatatat

SEQ ID NO: 89811 - DNA, 33 bp, Homo sapien
ttggatggactgccttaaaagtgttttcagtct

SEQ ID NO: 89812 - DNA, 33 bp, Homo sapien
ttggatggactgccttgaaagtgttttcagtct

SEQ ID NO: 89813 - DNA, 33 bp, Homo sapien
tctctggagaaagtaacctggctgagaagacta

SEQ ID NO: 89814 - DNA, 33 bp, Homo sapien
tctctggagaaagtaatctggctgagaagacta

SEQ ID NO: 89815 - DNA, 33 bp, Homo sapien
caatgaggcgtgtcaacccccccacttattgtc

SEQ ID NO: 89816 - DNA, 33 bp, Homo sapien
caatgaggcgtgtcaatccccccacttattgtc

SEQ ID NO: 89817 - DNA, 33 bp, Homo sapien
tggaagatggaaggaacgctctgaaggcaagtt

SEQ ID NO: 89818 - DNA, 33 bp, Homo sapien
tggaagatggaaggaatgctctgaaggcaagtt

SEQ ID NO: 89819 - DNA, 33 bp, Homo sapien
aaatgggccagtccagcctacaggataactaat

SEQ ID NO: 89820 - DNA, 33 bp, Homo sapien
aaatgggccagtccagtctacaggataactaat

SEQ ID NO: 89821 - DNA, 33 bp, Homo sapien
acagagaagcttcactcaacctgaatgaccaat

SEQ ID NO: 89822 - DNA, 33 bp, Homo sapien
acagagaagcttcacttaacctgaatgaccaat

SEQ ID NO: 89823 - DNA, 33 bp, Homo sapien
ggtgactggcgccaggccaagttctaggtgggc

SEQ ID NO: 89824 - DNA, 33 bp, Homo sapien
ggtgactggcgccaggtcaagttctaggtgggc

SEQ ID NO: 89825 - DNA, 33 bp, Homo sapien
cccagtgaagattagaataacgcacggagcaca

SEQ ID NO: 89826 - DNA, 33 bp, Homo sapien
cccagtgaagattagagtaacgcacggagcaca

SEQ ID NO: 89827 - DNA, 33 bp, Homo sapien
gcaaacataaatgcgcacaaagaagcaaggagg

SEQ ID NO: 89828 - DNA, 33 bp, Homo sapien
gcaaacataaatgcgcccaaagaagcaaggagg

SEQ ID NO: 89829 - DNA, 33 bp, Homo sapien
tacatatggttgataaagtgaagaattacaaaa

SEQ ID NO: 89830 - DNA, 33 bp, Homo sapien
tacatatggttgataaggtgaagaattacaaaa

SEQ ID NO: 89831 - DNA, 33 bp, Homo sapien
cttccttatgtattacagatactgagtctttgg

SEQ ID NO: 89832 - DNA, 33 bp, Homo sapien
cttccttatgtattacggatactgagtctttgg

SEQ ID NO: 89833 - DNA, 33 bp, Homo sapien
gcccagattcaagagaacaattactggagggga

SEQ ID NO: 89834 - DNA, 33 bp, Homo sapien
gcccagattcaagagagcaattactggagggga

SEQ ID NO: 89835 - DNA, 33 bp, Homo sapien
cctcagcagctgaattaaacacaatgattaagc

SEQ ID NO: 89836 - DNA, 33 bp, Homo sapien
cctcagcagctgaattcaacacaatgattaagc

SEQ ID NO: 89837 - DNA, 33 bp, Homo sapien
tctacagaagcagtcaaggagctgtagcacagc

SEQ ID NO: 89838 - DNA, 33 bp, Homo sapien
tctacagaagcagtcacggagctgtagcacagc

SEQ ID NO: 89839 - DNA, 33 bp, Homo sapien
tctgcttttaattacacgcagtttaaggggcag

SEQ ID NO: 89840 - DNA, 33 bp, Homo sapien
tctgcttttaattacatgcagtttaaggggcag

SEQ ID NO: 89841 - DNA, 33 bp, Homo sapien
cctgattccctcgggaaaggagaagaaggcggt

SEQ ID NO: 89842 - DNA, 33 bp, Homo sapien
cctgattccctcgggacaggagaagaaggcggt

SEQ ID NO: 89843 - DNA, 33 bp, Homo sapien
ctatccctgccttaacacaaattcttagtcaac

SEQ ID NO: 89844 - DNA, 33 bp, Homo sapien
ctatccctgccttaacgcaaattcttagtcaac

SEQ ID NO: 89845 - DNA, 33 bp, Homo sapien
cacactcagaacgcggaatgaacatagaggaaa

SEQ ID NO: 89846 - DNA, 33 bp, Homo sapien
cacactcagaacgcgggatgaacatagaggaaa

SEQ ID NO: 89847 - DNA, 33 bp, Homo sapien
ggctgcaagagctccaatcatttccattgcctc

SEQ ID NO: 89848 - DNA, 33 bp, Homo sapien
ggctgcaagagctccagtcatttccattgcctc

SEQ ID NO: 89849 - DNA, 33 bp, Homo sapien
ttaatctcccctgaaaacacctgtcgtgatgcc

SEQ ID NO: 89850 - DNA, 33 bp, Homo sapien
ttaatctcccctgaaagcacctgtcgtgatgcc

SEQ ID NO: 89851 - DNA, 33 bp, Homo sapien
cccatgcattcaggccaacacaggaagcaagct

SEQ ID NO: 89852 - DNA, 33 bp, Homo sapien
cccatgcattcaggccgacacaggaagcaagct

SEQ ID NO: 89853 - DNA, 33 bp, Homo sapien
tcaaatgttttctggaacaaagcttgaagcaaa

SEQ ID NO: 89854 - DNA, 33 bp, Homo sapien
tcaaatgttttctggatcaaagcttgaagcaaa

SEQ ID NO: 89855 - DNA, 33 bp, Homo sapien
tatttcaacatacatgaagttttgtgtgtgtgt

SEQ ID NO: 89856 - DNA, 33 bp, Homo sapien
tatttcaacatacatgcagttttgtgtgtgtgt

SEQ ID NO: 89857 - DNA, 33 bp, Homo sapien
atccctggatgatttccaaatgcattaaaggtt

SEQ ID NO: 89858 - DNA, 33 bp, Homo sapien
atccctggatgatttctaaatgcattaaaggtt

SEQ ID NO: 89859 - DNA, 33 bp, Homo sapien
tggtaaatttccatcaatgacattccagggaga

SEQ ID NO: 89860 - DNA, 33 bp, Homo sapien
tggtaaatttccatcagtgacattccagggaga

SEQ ID NO: 89861 - DNA, 33 bp, Homo sapien
tagatcttaccacatacgacttgtgttaccatg

SEQ ID NO: 89862 - DNA, 33 bp, Homo sapien
tagatcttaccacatatgacttgtgttaccatg

SEQ ID NO: 89863 - DNA, 33 bp, Homo sapien
cacttaagcaacttataacctggtgaggaggag

SEQ ID NO: 89864 - DNA, 33 bp, Homo sapien
cacttaagcaacttattacctggtgaggaggag

SEQ ID NO: 89865 - DNA, 33 bp, Homo sapien
tccaagaccactcagacccttggataagtcacc

SEQ ID NO: 89866 - DNA, 33 bp, Homo sapien
tccaagaccactcagatccttggataagtcacc

SEQ ID NO: 89867 - DNA, 33 bp, Homo sapien
tatttggatgttaacaaggtcccgatgagcagg

SEQ ID NO: 89868 - DNA, 33 bp, Homo sapien
tatttggatgttaacagggtcccgatgagcagg

SEQ ID NO: 89869 - DNA, 33 bp, Homo sapien
ctcccaccaaagtcacactcctttcttcttggg

SEQ ID NO: 89870 - DNA, 33 bp, Homo sapien
ctcccaccaaagtcacgctcctttcttcttggg

SEQ ID NO: 89871 - DNA, 33 bp, Homo sapien
ctctgaatccagctgacatttctgcccttagct

SEQ ID NO: 89872 - DNA, 33 bp, Homo sapien
ctctgaatccagctgatatttctgcccttagct

SEQ ID NO: 89873 - DNA, 33 bp, Homo sapien
taacgtgttggaagtccccataaggcacatgag

SEQ ID NO: 89874 - DNA, 33 bp, Homo sapien
taacgtgttggaagtctccataaggcacatgag

SEQ ID NO: 89875 - DNA, 33 bp, Homo sapien
ctaagcttacctactaaaaaactacaatctcag

SEQ ID NO: 89876 - DNA, 33 bp, Homo sapien
ctaagcttacctactagaaaactacaatctcag

SEQ ID NO: 89877 - DNA, 33 bp, Homo sapien
ccgctgtgtgaaacaacaggcagcataacttgc

SEQ ID NO: 89878 - DNA, 33 bp, Homo sapien
ccgctgtgtgaaacaataggcagcataacttgc

SEQ ID NO: 89879 - DNA, 33 bp, Homo sapien
cattttggtgcttgcacagatgcttttgtaact

SEQ ID NO: 89880 - DNA, 33 bp, Homo sapien
cattttggtgcttgcatagatgcttttgtaact

SEQ ID NO: 89881 - DNA, 33 bp, Homo sapien
gtaaactgtactgccaatagaattctggaattg

SEQ ID NO: 89882 - DNA, 33 bp, Homo sapien
gtaaactgtactgccagtagaattctggaattg

SEQ ID NO: 89883 - DNA, 33 bp, Homo sapien
ccgcaaaacaagaaaaggagaatgtagcaatgc

SEQ ID NO: 89884 - DNA, 33 bp, Homo sapien
ccgcaaaacaagaaaatgagaatgtagcaatgc

SEQ ID NO: 89885 - DNA, 33 bp, Homo sapien
aaaacgagtcacacgcaagatcccgctggaagg

SEQ ID NO: 89886 - DNA, 33 bp, Homo sapien
aaaacgagtcacacgcgagatcccgctggaagg

SEQ ID NO: 89887 - DNA, 33 bp, Homo sapien
catcacatctggctaacgttaagtttttgtaga

SEQ ID NO: 89888 - DNA, 33 bp, Homo sapien
catcacatctggctaatgttaagtttttgtaga

SEQ ID NO: 89889 - DNA, 33 bp, Homo sapien
gcacataaaaaattcaaccctgatgaaatgtct

SEQ ID NO: 89890 - DNA, 33 bp, Homo sapien
gcacataaaaaattcagccctgatgaaatgtct

SEQ ID NO: 89891 - DNA, 33 bp, Homo sapien
agatccgcatgggggcaccgcctcttgagcctg

SEQ ID NO: 89892 - DNA, 33 bp, Homo sapien
agatccgcatgggggcgccgcctcttgagcctg

SEQ ID NO: 89893 - DNA, 33 bp, Homo sapien
aattccatgggtcacaatccatctactaccata

SEQ ID NO: 89894 - DNA, 33 bp, Homo sapien
aattccatgggtcacagtccatctactaccata

SEQ ID NO: 89895 - DNA, 33 bp, Homo sapien
ctctctgatgatagaaagtatggctttgtctcc

SEQ ID NO: 89896 - DNA, 33 bp, Homo sapien
ctctctgatgatagaacgtatggctttgtctcc

SEQ ID NO: 89897 - DNA, 33 bp, Homo sapien
agacatccaaaccccaagtttattgcagcgcta

SEQ ID NO: 89898 - DNA, 33 bp, Homo sapien
agacatccaaaccccatgtttattgcagcgcta

SEQ ID NO: 89899 - DNA, 33 bp, Homo sapien
tactaaaagtatgaacaattagccaggtatggt

SEQ ID NO: 89900 - DNA, 33 bp, Homo sapien
tactaaaagtatgaaccattagccaggtatggt

SEQ ID NO: 89901 - DNA, 33 bp, Homo sapien
ctctgggacgtttgcacgaggaacattccgaac

SEQ ID NO: 89902 - DNA, 33 bp, Homo sapien
ctctgggacgtttgcatgaggaacattccgaac

SEQ ID NO: 89903 - DNA, 33 bp, Homo sapien
gacttcagttgcatcacaaatgagggtaggcac

SEQ ID NO: 89904 - DNA, 33 bp, Homo sapien
gacttcagttgcatcataaatgagggtaggcac

SEQ ID NO: 89905 - DNA, 33 bp, Homo sapien
aaatgtctgtccttccgccgtttccataaatgt

SEQ ID NO: 89906 - DNA, 33 bp, Homo sapien
aaatgtctgtccttcctccgtttccataaatgt

SEQ ID NO: 89907 - DNA, 33 bp, Homo sapien
caatcaatacacaaacactttattacttcatga

SEQ ID NO: 89908 - DNA, 33 bp, Homo sapien
caatcaatacacaaacgctttattacttcatga

SEQ ID NO: 89909 - DNA, 33 bp, Homo sapien
agagctgaatgagacccgcacaggcgttttcct

SEQ ID NO: 89910 - DNA, 33 bp, Homo sapien
agagctgaatgagaccggcacaggcgttttcct

SEQ ID NO: 89911 - DNA, 33 bp, Homo sapien
gccaccgttctgcctcactcactggcatcctca

SEQ ID NO: 89912 - DNA, 33 bp, Homo sapien
gccaccgttctgcctcgctcactggcatcctca

SEQ ID NO: 89913 - DNA, 33 bp, Homo sapien
tcctgggttctgatgccacctccaccactgagt

SEQ ID NO: 89914 - DNA, 33 bp, Homo sapien
tcctgggttctgatgctacctccaccactgagt

SEQ ID NO: 89915 - DNA, 33 bp, Homo sapien
tcagggctgggatttcaccctgggacataaaca

SEQ ID NO: 89916 - DNA, 33 bp, Homo sapien
tcagggctgggatttcgccctgggacataaaca

SEQ ID NO: 89917 - DNA, 33 bp, Homo sapien
ggttctgggtctaggacactgagaagattgaaa

SEQ ID NO: 89918 - DNA, 33 bp, Homo sapien
ggttctgggtctaggatactgagaagattgaaa

SEQ ID NO: 89919 - DNA, 33 bp, Homo sapien
tcaaaataaccacaaacagaagtcccagaaatt

SEQ ID NO: 89920 - DNA, 33 bp, Homo sapien
tcaaaataaccacaaagagaagtcccagaaatt

SEQ ID NO: 89921 - DNA, 33 bp, Homo sapien
ggcaaaaagaggaaaaacaccaactcatgtttt

SEQ ID NO: 89922 - DNA, 33 bp, Homo sapien
ggcaaaaagaggaaaagcaccaactcatgtttt

SEQ ID NO: 89923 - DNA, 33 bp, Homo sapien
ctgctttcaggacagacgacagatgcgccccag

SEQ ID NO: 89924 - DNA, 33 bp, Homo sapien
ctgctttcaggacagaggacagatgcgccccag

SEQ ID NO: 89925 - DNA, 33 bp, Homo sapien
ttgtctacttcgggaaatctccttcaccactca

SEQ ID NO: 89926 - DNA, 33 bp, Homo sapien
ttgtctacttcgggaactctccttcaccactca

SEQ ID NO: 89927 - DNA, 33 bp, Homo sapien
gaggactacaggttgcacctcgacctcttgtgg

SEQ ID NO: 89928 - DNA, 33 bp, Homo sapien
gaggactacaggttgcgcctcgacctcttgtgg

SEQ ID NO: 89929 - DNA, 33 bp, Homo sapien
acttgacttctccacactgatggaacgttgcat

SEQ ID NO: 89930 - DNA, 33 bp, Homo sapien
acttgacttctccacattgatggaacgttgcat

SEQ ID NO: 89931 - DNA, 33 bp, Homo sapien
gaaggatgaagaagaaacagctattgcaggaag

SEQ ID NO: 89932 - DNA, 33 bp, Homo sapien
gaaggatgaagaagaaccagctattgcaggaag

SEQ ID NO: 89933 - DNA, 33 bp, Homo sapien
acccatcaaccaggtcactacagaaacccccgt

SEQ ID NO: 89934 - DNA, 33 bp, Homo sapien
acccatcaaccaggtcgctacagaaacccccgt

SEQ ID NO: 89935 - DNA, 33 bp, Homo sapien
gctgcttttgagccacacaaatccaaataaggg

SEQ ID NO: 89936 - DNA, 33 bp, Homo sapien
gctgcttttgagccacgcaaatccaaataaggg

SEQ ID NO: 89937 - DNA, 33 bp, Homo sapien
cgggcaggactgcccaatgctttcctggcttag

SEQ ID NO: 89938 - DNA, 33 bp, Homo sapien
cgggcaggactgcccagtgctttcctggcttag

SEQ ID NO: 89939 - DNA, 33 bp, Homo sapien
gactttgaacagctgccgaatggcttgtcataa

SEQ ID NO: 89940 - DNA, 33 bp, Homo sapien
gactttgaacagctgcggaatggcttgtcataa

SEQ ID NO: 89941 - DNA, 33 bp, Homo sapien
gtcttgtctggctgcaaagtgtagtatcttttc

SEQ ID NO: 89942 - DNA, 33 bp, Homo sapien
gtcttgtctggctgcacagtgtagtatcttttc

SEQ ID NO: 89943 - DNA, 33 bp, Homo sapien
gaaattgtttaagagcaagaaaagatactacac

SEQ ID NO: 89944 - DNA, 33 bp, Homo sapien
gaaattgtttaagagcgagaaaagatactacac

SEQ ID NO: 89945 - DNA, 33 bp, Homo sapien
accatcttcttccaaagcgtggatgaaaaagga

SEQ ID NO: 89946 - DNA, 33 bp, Homo sapien
accatcttcttccaaatcgtggatgaaaaagga

SEQ ID NO: 89947 - DNA, 33 bp, Homo sapien
actacttaatgtggcaaggttgcgggttccaac

SEQ ID NO: 89948 - DNA, 33 bp, Homo sapien
actacttaatgtggcagggttgcgggttccaac

SEQ ID NO: 89949 - DNA, 33 bp, Homo sapien
tccttcccctgtaacccggtgacatctgtgttc

SEQ ID NO: 89950 - DNA, 33 bp, Homo sapien
tccttcccctgtaacctggtgacatctgtgttc

SEQ ID NO: 89951 - DNA, 33 bp, Homo sapien
cacaagattttccaaacagtatttgtgtctcat

SEQ ID NO: 89952 - DNA, 33 bp, Homo sapien
cacaagattttccaaagagtatttgtgtctcat

SEQ ID NO: 89953 - DNA, 33 bp, Homo sapien
tttgctgctgtactgcacacttaaaaaatagct

SEQ ID NO: 89954 - DNA, 33 bp, Homo sapien
tttgctgctgtactgcccacttaaaaaatagct

SEQ ID NO: 89955 - DNA, 33 bp, Homo sapien
ttttcccaactctaagccaccgtgagggcgagt

SEQ ID NO: 89956 - DNA, 33 bp, Homo sapien
ttttcccaactctaagtcaccgtgagggcgagt

SEQ ID NO: 89957 - DNA, 33 bp, Homo sapien
agacctttctcttagaacgagcgtgactttctg

SEQ ID NO: 89958 - DNA, 33 bp, Homo sapien
agacctttctcttagaccgagcgtgactttctg

SEQ ID NO: 89959 - DNA, 33 bp, Homo sapien
gagggaagtattttgccgaaatatgagaactgg

SEQ ID NO: 89960 - DNA, 33 bp, Homo sapien
gagggaagtattttgctgaaatatgagaactgg

SEQ ID NO: 89961 - DNA, 33 bp, Homo sapien
tctaatctgcttgcaaaagaactaatttattac

SEQ ID NO: 89962 - DNA, 33 bp, Homo sapien
tctaatctgcttgcaatagaactaatttattac

SEQ ID NO: 89963 - DNA, 33 bp, Homo sapien
ccaagaattacttgtcccggtctaatctgcttg

SEQ ID NO: 89964 - DNA, 33 bp, Homo sapien
ccaagaattacttgtctcggtctaatctgcttg

SEQ ID NO: 89965 - DNA, 33 bp, Homo sapien
catatcttataaaatgaactcctagctttcagc

SEQ ID NO: 89966 - DNA, 33 bp, Homo sapien
catatcttataaaatggactcctagctttcagc

SEQ ID NO: 89967 - DNA, 33 bp, Homo sapien
catacatgcagacaaaagcttataaagaaagtt

SEQ ID NO: 89968 - DNA, 33 bp, Homo sapien
catacatgcagacaaaggcttataaagaaagtt

SEQ ID NO: 89969 - DNA, 33 bp, Homo sapien
ccgatctgaaattacaccctgacttgttccttc

SEQ ID NO: 89970 - DNA, 33 bp, Homo sapien
ccgatctgaaattacatcctgacttgttccttc

SEQ ID NO: 89971 - DNA, 33 bp, Homo sapien
cttatagtaacacaataaagagttgggtctgtt

SEQ ID NO: 89972 - DNA, 33 bp, Homo sapien
cttatagtaacacaatgaagagttgggtctgtt

SEQ ID NO: 89973 - DNA, 33 bp, Homo sapien
aagaagaacatttgcactgaattagaattggag

SEQ ID NO: 89974 - DNA, 33 bp, Homo sapien
aagaagaacatttgcattgaattagaattggag

SEQ ID NO: 89975 - DNA, 33 bp, Homo sapien
ggaagtaggaggtcagaatgaggctccttagtg

SEQ ID NO: 89976 - DNA, 33 bp, Homo sapien
ggaagtaggaggtcaggatgaggctccttagtg

SEQ ID NO: 89977 - DNA, 33 bp, Homo sapien
aagttactctgtatcccagtaatgctgaaagca

SEQ ID NO: 89978 - DNA, 33 bp, Homo sapien
aagttactctgtatcctagtaatgctgaaagca

SEQ ID NO: 89979 - DNA, 33 bp, Homo sapien
ggcaaccatctctgaaaataaataagtacataa

SEQ ID NO: 89980 - DNA, 33 bp, Homo sapien
ggcaaccatctctgaacataaataagtacataa

SEQ ID NO: 89981 - DNA, 33 bp, Homo sapien
atgtcagaatgcataaatgaagagggccatatg

SEQ ID NO: 89982 - DNA, 33 bp, Homo sapien
atgtcagaatgcataagtgaagagggccatatg

SEQ ID NO: 89983 - DNA, 33 bp, Homo sapien
tatggaacagggctgacggaaactcatgaaagc

SEQ ID NO: 89984 - DNA, 33 bp, Homo sapien
tatggaacagggctgatggaaactcatgaaagc

SEQ ID NO: 89985 - DNA, 33 bp, Homo sapien
acatctctaatttcacagccatcatgagaatat

SEQ ID NO: 89986 - DNA, 33 bp, Homo sapien
acatctctaatttcacggccatcatgagaatat

SEQ ID NO: 89987 - DNA, 33 bp, Homo sapien
tagataaggccagcaactaatctgtaactatcc

SEQ ID NO: 89988 - DNA, 33 bp, Homo sapien
tagataaggccagcaattaatctgtaactatcc

SEQ ID NO: 89989 - DNA, 33 bp, Homo sapien
tgaaagataatttcaccgggtacaatactctag

SEQ ID NO: 89990 - DNA, 33 bp, Homo sapien
tgaaagataatttcactgggtacaatactctag

SEQ ID NO: 89991 - DNA, 33 bp, Homo sapien
cttacaacctacatacactgtttaatgcttacg

SEQ ID NO: 89992 - DNA, 33 bp, Homo sapien
cttacaacctacatacgctgtttaatgcttacg

SEQ ID NO: 89993 - DNA, 33 bp, Homo sapien
actgtttcatctgataacctgttcagatttcaa

SEQ ID NO: 89994 - DNA, 33 bp, Homo sapien
actgtttcatctgataccctgttcagatttcaa

SEQ ID NO: 89995 - DNA, 33 bp, Homo sapien
tttaaaattcatcacacgacggaaatgtagctg

SEQ ID NO: 89996 - DNA, 33 bp, Homo sapien
tttaaaattcatcacatgacggaaatgtagctg

SEQ ID NO: 89997 - DNA, 33 bp, Homo sapien
caagagaagatttctacgtccattcatgacagg

SEQ ID NO: 89998 - DNA, 33 bp, Homo sapien
caagagaagatttctatgtccattcatgacagg

SEQ ID NO: 89999 - DNA, 33 bp, Homo sapien
tgaaaagcctgtttgaacaccttgtgcacttta

SEQ ID NO: 90000 - DNA, 33 bp, Homo sapien
tgaaaagcctgtttgagcaccttgtgcacttta

SEQ ID NO: 90001 - DNA, 33 bp, Homo sapien
acacaattgcttctccgatgaaagccacttcca

SEQ ID NO: 90002 - DNA, 33 bp, Homo sapien
acacaattgcttctcctatgaaagccacttcca

SEQ ID NO: 90003 - DNA, 33 bp, Homo sapien
tggagtgactcgcatcccgcccgaagagacaaa

SEQ ID NO: 90004 - DNA, 33 bp, Homo sapien
tggagtgactcgcatctcgcccgaagagacaaa

SEQ ID NO: 90005 - DNA, 33 bp, Homo sapien
caaccaggccttaaagaagtcccacagataaag

SEQ ID NO: 90006 - DNA, 33 bp, Homo sapien
caaccaggccttaaagtagtcccacagataaag

SEQ ID NO: 90007 - DNA, 33 bp, Homo sapien
agaacatgcctttagcacctgtttttattatct

SEQ ID NO: 90008 - DNA, 33 bp, Homo sapien
agaacatgcctttagcgcctgtttttattatct

SEQ ID NO: 90009 - DNA, 33 bp, Homo sapien
actatatttgtgaaaccccttgttaatttccaa

SEQ ID NO: 90010 - DNA, 33 bp, Homo sapien
actatatttgtgaaacgccttgttaatttccaa

SEQ ID NO: 90011 - DNA, 33 bp, Homo sapien
tttgttcctctgtccccgagtattttctttttt

SEQ ID NO: 90012 - DNA, 33 bp, Homo sapien
tttgttcctctgtccctgagtattttctttttt

SEQ ID NO: 90013 - DNA, 33 bp, Homo sapien
agcagtgtttggagtacaaaaagtggactgggg

SEQ ID NO: 90014 - DNA, 33 bp, Homo sapien
agcagtgtttggagtataaaaagtggactgggg

SEQ ID NO: 90015 - DNA, 33 bp, Homo sapien
ttcctcatttatccaccgtaggctgtgtctctt

SEQ ID NO: 90016 - DNA, 33 bp, Homo sapien
ttcctcatttatccactgtaggctgtgtctctt

SEQ ID NO: 90017 - DNA, 33 bp, Homo sapien
ttttcagatcttagaacatgttgaactctttga

SEQ ID NO: 90018 - DNA, 33 bp, Homo sapien
ttttcagatcttagaatatgttgaactctttga

SEQ ID NO: 90019 - DNA, 33 bp, Homo sapien
tcagagctgtcctagtaaaatgttagcaagaag

SEQ ID NO: 90020 - DNA, 33 bp, Homo sapien
tcagagctgtcctagtgaaatgttagcaagaag

SEQ ID NO: 90021 - DNA, 33 bp, Homo sapien
acacacttcgggcactcaggacttgtttattcc

SEQ ID NO: 90022 - DNA, 33 bp, Homo sapien
acacacttcgggcacttaggacttgtttattcc

SEQ ID NO: 90023 - DNA, 33 bp, Homo sapien
ggggcccgagactccacacaagatgtgctcaga

SEQ ID NO: 90024 - DNA, 33 bp, Homo sapien
ggggcccgagactccatacaagatgtgctcaga

SEQ ID NO: 90025 - DNA, 33 bp, Homo sapien
taacccttggtctctcagaatgctattttttag

SEQ ID NO: 90026 - DNA, 33 bp, Homo sapien
taacccttggtctctcggaatgctattttttag

SEQ ID NO: 90027 - DNA, 33 bp, Homo sapien
tattaaacagactcaacttaatagagctagaac

SEQ ID NO: 90028 - DNA, 33 bp, Homo sapien
tattaaacagactcaatttaatagagctagaac

SEQ ID NO: 90029 - DNA, 33 bp, Homo sapien
agaaatagctgaaccaaattggtgtcaggagct

SEQ ID NO: 90030 - DNA, 33 bp, Homo sapien
agaaatagctgaaccagattggtgtcaggagct

SEQ ID NO: 90031 - DNA, 33 bp, Homo sapien
tgactttagtggactgaaacacatcaacatgta

SEQ ID NO: 90032 - DNA, 33 bp, Homo sapien
tgactttagtggactggaacacatcaacatgta

SEQ ID NO: 90033 - DNA, 33 bp, Homo sapien
aggaatgagagaattacagtaccaccattaggt

SEQ ID NO: 90034 - DNA, 33 bp, Homo sapien
aggaatgagagaattagagtaccaccattaggt

SEQ ID NO: 90035 - DNA, 33 bp, Homo sapien
ataaagccttattcaactaacgctctagcctgg

SEQ ID NO: 90036 - DNA, 33 bp, Homo sapien
ataaagccttattcaagtaacgctctagcctgg

SEQ ID NO: 90037 - DNA, 33 bp, Homo sapien
tcctcagtagtagttaacagaccatgaacatta

SEQ ID NO: 90038 - DNA, 33 bp, Homo sapien
tcctcagtagtagttaccagaccatgaacatta

SEQ ID NO: 90039 - DNA, 33 bp, Homo sapien
aaacttttaacagtgaaccttatggtcttcacc

SEQ ID NO: 90040 - DNA, 33 bp, Homo sapien
aaacttttaacagtgagccttatggtcttcacc

SEQ ID NO: 90041 - DNA, 33 bp, Homo sapien
agattccaggtctctcacttctcacctcccttc

SEQ ID NO: 90042 - DNA, 33 bp, Homo sapien
agattccaggtctctctcttctcacctcccttc

SEQ ID NO: 90043 - DNA, 33 bp, Homo sapien
catatcaaactttacacagcattgcccagcctg

SEQ ID NO: 90044 - DNA, 33 bp, Homo sapien
catatcaaactttacatagcattgcccagcctg

SEQ ID NO: 90045 - DNA, 33 bp, Homo sapien
atctggactaggtgtgcaagtctcttctaagtt

SEQ ID NO: 90046 - DNA, 33 bp, Homo sapien
atctggactaggtgtggaagtctcttctaagtt

SEQ ID NO: 90047 - DNA, 33 bp, Homo sapien
agccaaacactttactaagaaaaacatatccaa

SEQ ID NO: 90048 - DNA, 33 bp, Homo sapien
agccaaacactttactgagaaaaacatatccaa

SEQ ID NO: 90049 - DNA, 33 bp, Homo sapien
aggtgaaaaatattcactctcaggcccttcaca

SEQ ID NO: 90050 - DNA, 33 bp, Homo sapien
aggtgaaaaatattcagtctcaggcccttcaca

SEQ ID NO: 90051 - DNA, 33 bp, Homo sapien
tattgaatgggtaccacgttagatgctaagaac

SEQ ID NO: 90052 - DNA, 33 bp, Homo sapien
tattgaatgggtaccatgttagatgctaagaac

SEQ ID NO: 90053 - DNA, 33 bp, Homo sapien
ataaggtttttaatagccaagtgttaagtgtgg

SEQ ID NO: 90054 - DNA, 33 bp, Homo sapien
ataaggtttttaatagtcaagtgttaagtgtgg

SEQ ID NO: 90055 - DNA, 33 bp, Homo sapien
ggggagcgacttcagcaaacattattttacagc

SEQ ID NO: 90056 - DNA, 33 bp, Homo sapien
ggggagcgacttcagcgaacattattttacagc

SEQ ID NO: 90057 - DNA, 33 bp, Homo sapien
ctgactaaagacttgacactactaaacattaat

SEQ ID NO: 90058 - DNA, 33 bp, Homo sapien
ctgactaaagacttgatactactaaacattaat

SEQ ID NO: 90059 - DNA, 33 bp, Homo sapien
ggaattgctcagtttaaattttgctgattacat

SEQ ID NO: 90060 - DNA, 33 bp, Homo sapien
ggaattgctcagtttagattttgctgattacat

SEQ ID NO: 90061 - DNA, 33 bp, Homo sapien
ggggcatgaggaaaaaaataatcatagctaata

SEQ ID NO: 90062 - DNA, 33 bp, Homo sapien
ggggcatgaggaaaaacataatcatagctaata

SEQ ID NO: 90063 - DNA, 33 bp, Homo sapien
cattctctcctaccagcctgaaagggccaacac

SEQ ID NO: 90064 - DNA, 33 bp, Homo sapien
cattctctcctaccaggctgaaagggccaacac

SEQ ID NO: 90065 - DNA, 33 bp, Homo sapien
tctctgctactgtgaccgaccctacctcctggc

SEQ ID NO: 90066 - DNA, 33 bp, Homo sapien
tctctgctactgtgactgaccctacctcctggc

SEQ ID NO: 90067 - DNA, 33 bp, Homo sapien
cattttcctgactatacggagctcttgtgattt

SEQ ID NO: 90068 - DNA, 33 bp, Homo sapien
cattttcctgactatatggagctcttgtgattt

SEQ ID NO: 90069 - DNA, 33 bp, Homo sapien
gtaggctagtgactccaaatattatgcagactt

SEQ ID NO: 90070 - DNA, 33 bp, Homo sapien
gtaggctagtgactccgaatattatgcagactt

SEQ ID NO: 90071 - DNA, 33 bp, Homo sapien
tccacctgtttgccatgaagtcacaacatttta

SEQ ID NO: 90072 - DNA, 33 bp, Homo sapien
tccacctgtttgccattaagtcacaacatttta

SEQ ID NO: 90073 - DNA, 33 bp, Homo sapien
atcaccagtcatggcacgagaaggggttaaggt

SEQ ID NO: 90074 - DNA, 33 bp, Homo sapien
atcaccagtcatggcatgagaaggggttaaggt

SEQ ID NO: 90075 - DNA, 33 bp, Homo sapien
gccccccagccatttacacatccacagatagga

SEQ ID NO: 90076 - DNA, 33 bp, Homo sapien
gccccccagccatttatacatccacagatagga

SEQ ID NO: 90077 - DNA, 33 bp, Homo sapien
gccaactgctgatcaacgaaatgcttgttgaat

SEQ ID NO: 90078 - DNA, 33 bp, Homo sapien
gccaactgctgatcaatgaaatgcttgttgaat

SEQ ID NO: 90079 - DNA, 33 bp, Homo sapien
acaaatgactaacccacgtattagatgtggttc

SEQ ID NO: 90080 - DNA, 33 bp, Homo sapien
acaaatgactaacccatgtattagatgtggttc

SEQ ID NO: 90081 - DNA, 33 bp, Homo sapien
tgtggttctgtcacaaataattagagtgcttga

SEQ ID NO: 90082 - DNA, 33 bp, Homo sapien
tgtggttctgtcacaagtaattagagtgcttga

SEQ ID NO: 90083 - DNA, 33 bp, Homo sapien
tcctgtcttggcctaccgaggagtttgaactac

SEQ ID NO: 90084 - DNA, 33 bp, Homo sapien
tcctgtcttggcctactgaggagtttgaactac

SEQ ID NO: 90085 - DNA, 33 bp, Homo sapien
tccgtgctttaaaaaagataggtctgtacattt

SEQ ID NO: 90086 - DNA, 33 bp, Homo sapien
tccgtgctttaaaaaatataggtctgtacattt

SEQ ID NO: 90087 - DNA, 33 bp, Homo sapien
ctcttctcaggttctcgcacgaagagctgaaag

SEQ ID NO: 90088 - DNA, 33 bp, Homo sapien
ctcttctcaggttctctcacgaagagctgaaag

SEQ ID NO: 90089 - DNA, 33 bp, Homo sapien
tttgctggagtctgacacgttatcttctgaggt

SEQ ID NO: 90090 - DNA, 33 bp, Homo sapien
tttgctggagtctgacgcgttatcttctgaggt

SEQ ID NO: 90091 - DNA, 33 bp, Homo sapien
ctgatgtaagaataaccggtaactactccagac

SEQ ID NO: 90092 - DNA, 33 bp, Homo sapien
ctgatgtaagaataactggtaactactccagac

SEQ ID NO: 90093 - DNA, 33 bp, Homo sapien
tatcctcagcttttccagaggacctatgacttc

SEQ ID NO: 90094 - DNA, 33 bp, Homo sapien
tatcctcagcttttccggaggacctatgacttc

SEQ ID NO: 90095 - DNA, 33 bp, Homo sapien
tggtgcagttcaaatccaggttcatcaagggtc

SEQ ID NO: 90096 - DNA, 33 bp, Homo sapien
tggtgcagttcaaatctaggttcatcaagggtc

SEQ ID NO: 90097 - DNA, 33 bp, Homo sapien
aactacttctgcaccaacctaatagttaaattc

SEQ ID NO: 90098 - DNA, 33 bp, Homo sapien
aactacttctgcaccagcctaatagttaaattc

SEQ ID NO: 90099 - DNA, 33 bp, Homo sapien
agttaaattctagagaaaggaagtggaatagtg

SEQ ID NO: 90100 - DNA, 33 bp, Homo sapien
agttaaattctagagacaggaagtggaatagtg

SEQ ID NO: 90101 - DNA, 33 bp, Homo sapien
ttgttgaactcacagaacgaggcttattgatta

SEQ ID NO: 90102 - DNA, 33 bp, Homo sapien
ttgttgaactcacagagcgaggcttattgatta

SEQ ID NO: 90103 - DNA, 33 bp, Homo sapien
caaagctacatagttccaggactcagatggcca

SEQ ID NO: 90104 - DNA, 33 bp, Homo sapien
caaagctacatagttctaggactcagatggcca

SEQ ID NO: 90105 - DNA, 33 bp, Homo sapien
ccatccaacgccagaacgtcatgccaacaaact

SEQ ID NO: 90106 - DNA, 33 bp, Homo sapien
ccatccaacgccagaatgtcatgccaacaaact

SEQ ID NO: 90107 - DNA, 33 bp, Homo sapien
ctgagccaagtcagtcaagaagaaaacggacaa

SEQ ID NO: 90108 - DNA, 33 bp, Homo sapien
ctgagccaagtcagtcgagaagaaaacggacaa

SEQ ID NO: 90109 - DNA, 33 bp, Homo sapien
cgtccaatgagaatcacgtgaaagcattgaaag

SEQ ID NO: 90110 - DNA, 33 bp, Homo sapien
cgtccaatgagaatcatgtgaaagcattgaaag

SEQ ID NO: 90111 - DNA, 33 bp, Homo sapien
aattaaaagtgcaagaactgaaaggaaaaaata

SEQ ID NO: 90112 - DNA, 33 bp, Homo sapien
aattaaaagtgcaagagctgaaaggaaaaaata

SEQ ID NO: 90113 - DNA, 33 bp, Homo sapien
aacatacctggacataacttctgggggccacca

SEQ ID NO: 90114 - DNA, 33 bp, Homo sapien
aacatacctggacatatcttctgggggccacca

SEQ ID NO: 90115 - DNA, 33 bp, Homo sapien
tacaagcttactgtcagatttccaactcactgc

SEQ ID NO: 90116 - DNA, 33 bp, Homo sapien
tacaagcttactgtcatatttccaactcactgc

SEQ ID NO: 90117 - DNA, 33 bp, Homo sapien
tgctttgagccacctagaaatgcttatggaatt

SEQ ID NO: 90118 - DNA, 33 bp, Homo sapien
tgctttgagccacctataaatgcttatggaatt

SEQ ID NO: 90119 - DNA, 33 bp, Homo sapien
ttcttatcataccttacggtttctttctctttt

SEQ ID NO: 90120 - DNA, 33 bp, Homo sapien
ttcttatcataccttatggtttctttctctttt

SEQ ID NO: 90121 - DNA, 33 bp, Homo sapien
cagaagcaaatatgtaacctttggaaaggaagc

SEQ ID NO: 90122 - DNA, 33 bp, Homo sapien
cagaagcaaatatgtaccctttggaaaggaagc

SEQ ID NO: 90123 - DNA, 33 bp, Homo sapien
attccgaggtcctgggaagtagtttaggaacag

SEQ ID NO: 90124 - DNA, 33 bp, Homo sapien
attccgaggtcctggggagtagtttaggaacag

SEQ ID NO: 90125 - DNA, 33 bp, Homo sapien
ggctgctttttctgccagccttgaagagaaaaa

SEQ ID NO: 90126 - DNA, 33 bp, Homo sapien
ggctgctttttctgccggccttgaagagaaaaa

SEQ ID NO: 90127 - DNA, 33 bp, Homo sapien
gaaaaactgggtaaaacgtaaagctaggattta

SEQ ID NO: 90128 - DNA, 33 bp, Homo sapien
gaaaaactgggtaaaatgtaaagctaggattta

SEQ ID NO: 90129 - DNA, 33 bp, Homo sapien
gctctagttttatttcacagacatttattagct

SEQ ID NO: 90130 - DNA, 33 bp, Homo sapien
gctctagttttatttcgcagacatttattagct

SEQ ID NO: 90131 - DNA, 33 bp, Homo sapien
tcccaaaagtcaataacagaaacaaatgacaaa

SEQ ID NO: 90132 - DNA, 33 bp, Homo sapien
tcccaaaagtcaataagagaaacaaatgacaaa

SEQ ID NO: 90133 - DNA, 33 bp, Homo sapien
ttgtgagccatgcaaacaattgaaaatcatttt

SEQ ID NO: 90134 - DNA, 33 bp, Homo sapien
ttgtgagccatgcaaagaattgaaaatcatttt

SEQ ID NO: 90135 - DNA, 33 bp, Homo sapien
tgttttctctgacttcaaatcaacttaaaaatg

SEQ ID NO: 90136 - DNA, 33 bp, Homo sapien
tgttttctctgacttccaatcaacttaaaaatg

SEQ ID NO: 90137 - DNA, 33 bp, Homo sapien
aaaaatgaagcaaggccgccatgtttaccgaca

SEQ ID NO: 90138 - DNA, 33 bp, Homo sapien
aaaaatgaagcaaggctgccatgtttaccgaca

SEQ ID NO: 90139 - DNA, 33 bp, Homo sapien
taaatgcatagggtcaacaaagatctccttatc

SEQ ID NO: 90140 - DNA, 33 bp, Homo sapien
taaatgcatagggtcaccaaagatctccttatc

SEQ ID NO: 90141 - DNA, 33 bp, Homo sapien
gcaggatgccgggacactacgttttgtctctga

SEQ ID NO: 90142 - DNA, 33 bp, Homo sapien
gcaggatgccgggacattacgttttgtctctga

SEQ ID NO: 90143 - DNA, 33 bp, Homo sapien
caatgacggtcacaaccgggccagcctcttact

SEQ ID NO: 90144 - DNA, 33 bp, Homo sapien
caatgacggtcacaactgggccagcctcttact

SEQ ID NO: 90145 - DNA, 33 bp, Homo sapien
ttgtgtgcattttaaaccatcattgtcacttgt

SEQ ID NO: 90146 - DNA, 33 bp, Homo sapien
ttgtgtgcattttaaatcatcattgtcacttgt

SEQ ID NO: 90147 - DNA, 33 bp, Homo sapien
ctcctaacatttagaaccagaaggagataaact

SEQ ID NO: 90148 - DNA, 33 bp, Homo sapien
ctcctaacatttagaagcagaaggagataaact

SEQ ID NO: 90149 - DNA, 33 bp, Homo sapien
actgcacagaacacaacccacctcttcttcttc

SEQ ID NO: 90150 - DNA, 33 bp, Homo sapien
actgcacagaacacaatccacctcttcttcttc

SEQ ID NO: 90151 - DNA, 33 bp, Homo sapien
actgggctcagagaccactcctcctacacccag

SEQ ID NO: 90152 - DNA, 33 bp, Homo sapien
actgggctcagagaccgctcctcctacacccag

SEQ ID NO: 90153 - DNA, 33 bp, Homo sapien
tcatttctaacatcaaaatcacctgagaacctg

SEQ ID NO: 90154 - DNA, 33 bp, Homo sapien
tcatttctaacatcaatatcacctgagaacctg

SEQ ID NO: 90155 - DNA, 33 bp, Homo sapien
ctgagggagagtccaacgtgttccaggaactga

SEQ ID NO: 90156 - DNA, 33 bp, Homo sapien
ctgagggagagtccaatgtgttccaggaactga

SEQ ID NO: 90157 - DNA, 33 bp, Homo sapien
gggggtaagtgggaagaaacagaagtgaaaggt

SEQ ID NO: 90158 - DNA, 33 bp, Homo sapien
gggggtaagtgggaaggaacagaagtgaaaggt

SEQ ID NO: 90159 - DNA, 33 bp, Homo sapien
gcctgttaagtgtacacagttgaaatgctttat

SEQ ID NO: 90160 - DNA, 33 bp, Homo sapien
gcctgttaagtgtacatagttgaaatgctttat

SEQ ID NO: 90161 - DNA, 33 bp, Homo sapien
tcaagacaagctgagcactgttgttaatctatt

SEQ ID NO: 90162 - DNA, 33 bp, Homo sapien
tcaagacaagctgagcgctgttgttaatctatt

SEQ ID NO: 90163 - DNA, 33 bp, Homo sapien
tgacatggcatgtatgcaccattgttctctggc

SEQ ID NO: 90164 - DNA, 33 bp, Homo sapien
tgacatggcatgtatgtaccattgttctctggc

SEQ ID NO: 90165 - DNA, 33 bp, Homo sapien
ttgctctgactctgacaccaagttcatgggaac

SEQ ID NO: 90166 - DNA, 33 bp, Homo sapien
ttgctctgactctgacgccaagttcatgggaac

SEQ ID NO: 90167 - DNA, 33 bp, Homo sapien
aaaatgtatattccctcacctaaacaaataact

SEQ ID NO: 90168 - DNA, 33 bp, Homo sapien
aaaatgtatattccctgacctaaacaaataact

SEQ ID NO: 90169 - DNA, 33 bp, Homo sapien
cttcaaaagaccaagacgggaggtggacacggg

SEQ ID NO: 90170 - DNA, 33 bp, Homo sapien
cttcaaaagaccaagaggggaggtggacacggg

SEQ ID NO: 90171 - DNA, 33 bp, Homo sapien
cagaatatattgttaacggcaaggagagacact

SEQ ID NO: 90172 - DNA, 33 bp, Homo sapien
cagaatatattgttaatggcaaggagagacact

SEQ ID NO: 90173 - DNA, 33 bp, Homo sapien
tgttgttgtgctagaacacgcgtaacacaaaat

SEQ ID NO: 90174 - DNA, 33 bp, Homo sapien
tgttgttgtgctagaatacgcgtaacacaaaat

SEQ ID NO: 90175 - DNA, 33 bp, Homo sapien
aaggaactgcaactccaaagagagagaactctc

SEQ ID NO: 90176 - DNA, 33 bp, Homo sapien
aaggaactgcaactccgaagagagagaactctc

SEQ ID NO: 90177 - DNA, 33 bp, Homo sapien
attcagttccaaccacactttaattcccagttt

SEQ ID NO: 90178 - DNA, 33 bp, Homo sapien
attcagttccaaccacgctttaattcccagttt

SEQ ID NO: 90179 - DNA, 33 bp, Homo sapien
tagccttgaaattgttcaaaagaactctaaaga

SEQ ID NO: 90180 - DNA, 33 bp, Homo sapien
tagccttgaaattgtttaaaagaactctaaaga

SEQ ID NO: 90181 - DNA, 33 bp, Homo sapien
gccctagttcagctctaaatgaagtttctcgtc

SEQ ID NO: 90182 - DNA, 33 bp, Homo sapien
gccctagttcagctctgaatgaagtttctcgtc

SEQ ID NO: 90183 - DNA, 33 bp, Homo sapien
ttagctattgtctttcgactccaaaaaaaagta

SEQ ID NO: 90184 - DNA, 33 bp, Homo sapien
ttagctattgtctttctactccaaaaaaaagta

SEQ ID NO: 90185 - DNA, 33 bp, Homo sapien
ggagatctgaggtgaacaaaagtctgaaaaagc

SEQ ID NO: 90186 - DNA, 33 bp, Homo sapien
ggagatctgaggtgaataaaagtctgaaaaagc

SEQ ID NO: 90187 - DNA, 33 bp, Homo sapien
gtattgcagccatttacaccataatatttccta

SEQ ID NO: 90188 - DNA, 33 bp, Homo sapien
gtattgcagccatttataccataatatttccta

SEQ ID NO: 90189 - DNA, 33 bp, Homo sapien
ctcctagctgcatccacccaggggccatataag

SEQ ID NO: 90190 - DNA, 33 bp, Homo sapien
ctcctagctgcatccatccaggggccatataag

SEQ ID NO: 90191 - DNA, 33 bp, Homo sapien
agtggatacatttcaaactcctagggctgtagt

SEQ ID NO: 90192 - DNA, 33 bp, Homo sapien
agtggatacatttcaagctcctagggctgtagt

SEQ ID NO: 90193 - DNA, 33 bp, Homo sapien
tgatgaccaagcagacaacactggccaggaaga

SEQ ID NO: 90194 - DNA, 33 bp, Homo sapien
tgatgaccaagcagacgacactggccaggaaga

SEQ ID NO: 90195 - DNA, 33 bp, Homo sapien
ttgagcagacgtccacaagatgaggggatgctg

SEQ ID NO: 90196 - DNA, 33 bp, Homo sapien
ttgagcagacgtccacgagatgaggggatgctg

SEQ ID NO: 90197 - DNA, 33 bp, Homo sapien
actgattcccgcgatccaggcccagggcatgac

SEQ ID NO: 90198 - DNA, 33 bp, Homo sapien
actgattcccgcgatctaggcccagggcatgac

SEQ ID NO: 90199 - DNA, 33 bp, Homo sapien
cttccttctagcccctaagctcatctgattcta

SEQ ID NO: 90200 - DNA, 33 bp, Homo sapien
cttccttctagcccctgagctcatctgattcta

SEQ ID NO: 90201 - DNA, 33 bp, Homo sapien
cctgcgttaagtcatacgaaggagtttgatcct

SEQ ID NO: 90202 - DNA, 33 bp, Homo sapien
cctgcgttaagtcatatgaaggagtttgatcct

SEQ ID NO: 90203 - DNA, 33 bp, Homo sapien
cgcaggacaactctacaggacagtctgcccagg

SEQ ID NO: 90204 - DNA, 33 bp, Homo sapien
cgcaggacaactctacgggacagtctgcccagg

SEQ ID NO: 90205 - DNA, 33 bp, Homo sapien
ctttgagattacagaaagagctgaggtgtgaat

SEQ ID NO: 90206 - DNA, 33 bp, Homo sapien
ctttgagattacagaaggagctgaggtgtgaat

SEQ ID NO: 90207 - DNA, 33 bp, Homo sapien
tggtttcttgaaccaacgcataacatttattgg

SEQ ID NO: 90208 - DNA, 33 bp, Homo sapien
tggtttcttgaaccaatgcataacatttattgg

SEQ ID NO: 90209 - DNA, 33 bp, Homo sapien
cgagctttccccagaacgataagatcaacaccg

SEQ ID NO: 90210 - DNA, 33 bp, Homo sapien
cgagctttccccagaatgataagatcaacaccg

SEQ ID NO: 90211 - DNA, 33 bp, Homo sapien
aggcttctgaaaaccaacttatactccacgtgg

SEQ ID NO: 90212 - DNA, 33 bp, Homo sapien
aggcttctgaaaaccaccttatactccacgtgg

SEQ ID NO: 90213 - DNA, 33 bp, Homo sapien
gcacaatagaggaaaaaagctgtcagggcaaat

SEQ ID NO: 90214 - DNA, 33 bp, Homo sapien
gcacaatagaggaaaagagctgtcagggcaaat

SEQ ID NO: 90215 - DNA, 33 bp, Homo sapien
actacaaaatgcttcaggtataaagtcttgttt

SEQ ID NO: 90216 - DNA, 33 bp, Homo sapien
actacaaaatgcttcatgtataaagtcttgttt

SEQ ID NO: 90217 - DNA, 33 bp, Homo sapien
tctcgtggcttccagaccacaaaacttttctgg

SEQ ID NO: 90218 - DNA, 33 bp, Homo sapien
tctcgtggcttccagagcacaaaacttttctgg

SEQ ID NO: 90219 - DNA, 33 bp, Homo sapien
tggtgatttctgaaaacgagatgtgagaaagaa

SEQ ID NO: 90220 - DNA, 33 bp, Homo sapien
tggtgatttctgaaaatgagatgtgagaaagaa

SEQ ID NO: 90221 - DNA, 33 bp, Homo sapien
ttgagattccaatggcaatgtcaaataatcagc

SEQ ID NO: 90222 - DNA, 33 bp, Homo sapien
ttgagattccaatggcgatgtcaaataatcagc

SEQ ID NO: 90223 - DNA, 33 bp, Homo sapien
tttaaaattttgtgaaaagtcagataaagagac

SEQ ID NO: 90224 - DNA, 33 bp, Homo sapien
tttaaaattttgtgaagagtcagataaagagac

SEQ ID NO: 90225 - DNA, 33 bp, Homo sapien
aacatttattgagcatgaataagcactggggct

SEQ ID NO: 90226 - DNA, 33 bp, Homo sapien
aacatttattgagcattaataagcactggggct

SEQ ID NO: 90227 - DNA, 33 bp, Homo sapien
tgcccagatgaacaacaacattgcatacaaagg

SEQ ID NO: 90228 - DNA, 33 bp, Homo sapien
tgcccagatgaacaaccacattgcatacaaagg

SEQ ID NO: 90229 - DNA, 33 bp, Homo sapien
atgtagcttctcccaacgtggtgatgaggttac

SEQ ID NO: 90230 - DNA, 33 bp, Homo sapien
atgtagcttctcccaaggtggtgatgaggttac

SEQ ID NO: 90231 - DNA, 33 bp, Homo sapien
agtctttgtcagcgggaatgtaaccaagtatcc

SEQ ID NO: 90232 - DNA, 33 bp, Homo sapien
agtctttgtcagcgggcatgtaaccaagtatcc

SEQ ID NO: 90233 - DNA, 33 bp, Homo sapien
tgaaaacaaacaatgacaggatttaggctttga

SEQ ID NO: 90234 - DNA, 33 bp, Homo sapien
tgaaaacaaacaatgataggatttaggctttga

SEQ ID NO: 90235 - DNA, 33 bp, Homo sapien
tgctggaccgtgacacaaatgtggccatttcca

SEQ ID NO: 90236 - DNA, 33 bp, Homo sapien
tgctggaccgtgacacgaatgtggccatttcca

SEQ ID NO: 90237 - DNA, 33 bp, Homo sapien
taaacttctttccatccatattgccataaagag

SEQ ID NO: 90238 - DNA, 33 bp, Homo sapien
taaacttctttccatctatattgccataaagag

SEQ ID NO: 90239 - DNA, 33 bp, Homo sapien
tgtgtaatattcactaacatacccatcaaaata

SEQ ID NO: 90240 - DNA, 33 bp, Homo sapien
tgtgtaatattcactaccatacccatcaaaata

SEQ ID NO: 90241 - DNA, 33 bp, Homo sapien
catggcttctttaaaacagtgaagctcaaatgt

SEQ ID NO: 90242 - DNA, 33 bp, Homo sapien
catggcttctttaaaatagtgaagctcaaatgt

SEQ ID NO: 90243 - DNA, 33 bp, Homo sapien
ctactctgaaaattcaactggttatagtttcca

SEQ ID NO: 90244 - DNA, 33 bp, Homo sapien
ctactctgaaaattcacctggttatagtttcca

SEQ ID NO: 90245 - DNA, 33 bp, Homo sapien
ccaatacagttagccaagtaacagggtcaaact

SEQ ID NO: 90246 - DNA, 33 bp, Homo sapien
ccaatacagttagccaggtaacagggtcaaact

SEQ ID NO: 90247 - DNA, 33 bp, Homo sapien
atctggacttcattatgaatcacaaccaggagg

SEQ ID NO: 90248 - DNA, 33 bp, Homo sapien
atctggacttcattattaatcacaaccaggagg

SEQ ID NO: 90249 - DNA, 33 bp, Homo sapien
gcgtgtgtataaaatacgtaagtgacctctctc

SEQ ID NO: 90250 - DNA, 33 bp, Homo sapien
gcgtgtgtataaaatatgtaagtgacctctctc

SEQ ID NO: 90251 - DNA, 33 bp, Homo sapien
agacatggtccagaaaatagttacagagaggat

SEQ ID NO: 90252 - DNA, 33 bp, Homo sapien
agacatggtccagaaagtagttacagagaggat

SEQ ID NO: 90253 - DNA, 33 bp, Homo sapien
cacgtcattttaggaaaagaacagtcaggccat

SEQ ID NO: 90254 - DNA, 33 bp, Homo sapien
cacgtcattttaggaagagaacagtcaggccat

SEQ ID NO: 90255 - DNA, 33 bp, Homo sapien
actggataaaaggaaacgattttatggacagaa

SEQ ID NO: 90256 - DNA, 33 bp, Homo sapien
actggataaaaggaaatgattttatggacagaa

SEQ ID NO: 90257 - DNA, 33 bp, Homo sapien
agtggtagtatttaaacacactgaagcagtaga

SEQ ID NO: 90258 - DNA, 33 bp, Homo sapien
agtggtagtatttaaagacactgaagcagtaga

SEQ ID NO: 90259 - DNA, 33 bp, Homo sapien
agaactgtaggacaaaatgttaatcagtgggag

SEQ ID NO: 90260 - DNA, 33 bp, Homo sapien
agaactgtaggacaaagtgttaatcagtgggag

SEQ ID NO: 90261 - DNA, 33 bp, Homo sapien
ggagacttcagtaattaaagagaggatgttctc

SEQ ID NO: 90262 - DNA, 33 bp, Homo sapien
ggagacttcagtaattgaagagaggatgttctc

SEQ ID NO: 90263 - DNA, 33 bp, Homo sapien
tactggtaagaagagaatattgtgttgacccat

SEQ ID NO: 90264 - DNA, 33 bp, Homo sapien
tactggtaagaagagagtattgtgttgacccat

SEQ ID NO: 90265 - DNA, 33 bp, Homo sapien
ccagtatgaaattatcaagctgccaattctacc

SEQ ID NO: 90266 - DNA, 33 bp, Homo sapien
ccagtatgaaattatccagctgccaattctacc

SEQ ID NO: 90267 - DNA, 33 bp, Homo sapien
tagccttggacacttcaaagatcatgggctaaa

SEQ ID NO: 90268 - DNA, 33 bp, Homo sapien
tagccttggacacttcgaagatcatgggctaaa

SEQ ID NO: 90269 - DNA, 33 bp, Homo sapien
ccccagcacattctaaagttattctgagaacta

SEQ ID NO: 90270 - DNA, 33 bp, Homo sapien
ccccagcacattctaaggttattctgagaacta

SEQ ID NO: 90271 - DNA, 33 bp, Homo sapien
ttattacacactctggaagacagcagatcagcg

SEQ ID NO: 90272 - DNA, 33 bp, Homo sapien
ttattacacactctgggagacagcagatcagcg

SEQ ID NO: 90273 - DNA, 33 bp, Homo sapien
tttagacatgacacacggtatatgaaaaaggac

SEQ ID NO: 90274 - DNA, 33 bp, Homo sapien
tttagacatgacacactgtatatgaaaaaggac

SEQ ID NO: 90275 - DNA, 33 bp, Homo sapien
agaagctgtgggaatccagggcagcgggaaaaa

SEQ ID NO: 90276 - DNA, 33 bp, Homo sapien
agaagctgtgggaatcgagggcagcgggaaaaa

SEQ ID NO: 90277 - DNA, 33 bp, Homo sapien
gggcagcgggaaaaagccttacagggtcagggg

SEQ ID NO: 90278 - DNA, 33 bp, Homo sapien
gggcagcgggaaaaagtcttacagggtcagggg

SEQ ID NO: 90279 - DNA, 33 bp, Homo sapien
acagttctcttggcagcatttttgtttttaaag

SEQ ID NO: 90280 - DNA, 33 bp, Homo sapien
acagttctcttggcagtatttttgtttttaaag

SEQ ID NO: 90281 - DNA, 33 bp, Homo sapien
actctttggtgtagacaggaggagtccttaata

SEQ ID NO: 90282 - DNA, 33 bp, Homo sapien
actctttggtgtagacgggaggagtccttaata

SEQ ID NO: 90283 - DNA, 33 bp, Homo sapien
attatactgaggcgtacatgatctatcaaatta

SEQ ID NO: 90284 - DNA, 33 bp, Homo sapien
attatactgaggcgtagatgatctatcaaatta

SEQ ID NO: 90285 - DNA, 33 bp, Homo sapien
tgaatcttcaggggacaccattctttgcagggc

SEQ ID NO: 90286 - DNA, 33 bp, Homo sapien
tgaatcttcaggggactccattctttgcagggc

SEQ ID NO: 90287 - DNA, 33 bp, Homo sapien
aagtcattggctggaaagcttctatagggagaa

SEQ ID NO: 90288 - DNA, 33 bp, Homo sapien
aagtcattggctggaatgcttctatagggagaa

SEQ ID NO: 90289 - DNA, 33 bp, Homo sapien
ctgagtcatgctaccaaagagaatgctccaaat

SEQ ID NO: 90290 - DNA, 33 bp, Homo sapien
ctgagtcatgctaccacagagaatgctccaaat

SEQ ID NO: 90291 - DNA, 33 bp, Homo sapien
aaaatggttattgaaagatttgagattattggt

SEQ ID NO: 90292 - DNA, 33 bp, Homo sapien
aaaatggttattgaaatatttgagattattggt

SEQ ID NO: 90293 - DNA, 33 bp, Homo sapien
taaatggatagtgtagcacagtttcagacagac

SEQ ID NO: 90294 - DNA, 33 bp, Homo sapien
taaatggatagtgtagtacagtttcagacagac

SEQ ID NO: 90295 - DNA, 33 bp, Homo sapien
catagtatttgcagtacgaggataagcctgact

SEQ ID NO: 90296 - DNA, 33 bp, Homo sapien
catagtatttgcagtaggaggataagcctgact

SEQ ID NO: 90297 - DNA, 33 bp, Homo sapien
tatgttctccctttgacgcgggtgaactggttg

SEQ ID NO: 90298 - DNA, 33 bp, Homo sapien
tatgttctccctttgatgcgggtgaactggttg

SEQ ID NO: 90299 - DNA, 33 bp, Homo sapien
cgggttctttagggataaaaggatgctcaggtg

SEQ ID NO: 90300 - DNA, 33 bp, Homo sapien
cgggttctttagggatgaaaggatgctcaggtg

SEQ ID NO: 90301 - DNA, 33 bp, Homo sapien
tggaccctacacggggccagcatcccatgtaaa

SEQ ID NO: 90302 - DNA, 33 bp, Homo sapien
tggaccctacacgggggcagcatcccatgtaaa

SEQ ID NO: 90303 - DNA, 33 bp, Homo sapien
actaaattcttaattcgcctgctaacacatccc

SEQ ID NO: 90304 - DNA, 33 bp, Homo sapien
actaaattcttaattctcctgctaacacatccc

SEQ ID NO: 90305 - DNA, 33 bp, Homo sapien
ctcttacctgggttacaacaccatctgcaatgt

SEQ ID NO: 90306 - DNA, 33 bp, Homo sapien
ctcttacctgggttaccacaccatctgcaatgt

SEQ ID NO: 90307 - DNA, 33 bp, Homo sapien
ctctgaacaatcatccacataaaggaaacatca

SEQ ID NO: 90308 - DNA, 33 bp, Homo sapien
ctctgaacaatcatccgcataaaggaaacatca

SEQ ID NO: 90309 - DNA, 33 bp, Homo sapien
actgactactgaacacgatctatatctggaacc

SEQ ID NO: 90310 - DNA, 33 bp, Homo sapien
actgactactgaacactatctatatctggaacc

SEQ ID NO: 90311 - DNA, 33 bp, Homo sapien
ttgccactgtccatcaagattcttcaagggacc

SEQ ID NO: 90312 - DNA, 33 bp, Homo sapien
ttgccactgtccatcaggattcttcaagggacc

SEQ ID NO: 90313 - DNA, 33 bp, Homo sapien
taaaacctctctcgtacatgaattaactgggac

SEQ ID NO: 90314 - DNA, 33 bp, Homo sapien
taaaacctctctcgtatatgaattaactgggac

SEQ ID NO: 90315 - DNA, 33 bp, Homo sapien
gctgtgtgcccagagacgacgccgaggtcctca

SEQ ID NO: 90316 - DNA, 33 bp, Homo sapien
gctgtgtgcccagagatgacgccgaggtcctca

SEQ ID NO: 90317 - DNA, 33 bp, Homo sapien
cacaactggatgctgcagaaataagacatgagg

SEQ ID NO: 90318 - DNA, 33 bp, Homo sapien
cacaactggatgctgcggaaataagacatgagg

SEQ ID NO: 90319 - DNA, 33 bp, Homo sapien
tgctgcctcaggagccacacacatggcaagcag

SEQ ID NO: 90320 - DNA, 33 bp, Homo sapien
tgctgcctcaggagccgcacacatggcaagcag

SEQ ID NO: 90321 - DNA, 33 bp, Homo sapien
aacacttctgttggacacctttggagatgggtt

SEQ ID NO: 90322 - DNA, 33 bp, Homo sapien
aacacttctgttggacgcctttggagatgggtt

SEQ ID NO: 90323 - DNA, 33 bp, Homo sapien
ggggccgtcgcacagaataaatagaaaatgata

SEQ ID NO: 90324 - DNA, 33 bp, Homo sapien
ggggccgtcgcacagactaaatagaaaatgata

SEQ ID NO: 90325 - DNA, 33 bp, Homo sapien
ttactggagttgttgcaaaagccaaattaaaca

SEQ ID NO: 90326 - DNA, 33 bp, Homo sapien
ttactggagttgttgcgaaagccaaattaaaca

SEQ ID NO: 90327 - DNA, 33 bp, Homo sapien
aagcccagcctaagggaagaatcatgggaaatc

SEQ ID NO: 90328 - DNA, 33 bp, Homo sapien
aagcccagcctaaggggagaatcatgggaaatc

SEQ ID NO: 90329 - DNA, 33 bp, Homo sapien
caaatggtgactgacacagtttttggtattaac

SEQ ID NO: 90330 - DNA, 33 bp, Homo sapien
caaatggtgactgacatagtttttggtattaac

SEQ ID NO: 90331 - DNA, 33 bp, Homo sapien
gcactaaccctaatccacttcatggaaaggtgt

SEQ ID NO: 90332 - DNA, 33 bp, Homo sapien
gcactaaccctaatccgcttcatggaaaggtgt

SEQ ID NO: 90333 - DNA, 33 bp, Homo sapien
cacaagcaaagttaacactggaaatattaacat

SEQ ID NO: 90334 - DNA, 33 bp, Homo sapien
cacaagcaaagttaacgctggaaatattaacat

SEQ ID NO: 90335 - DNA, 33 bp, Homo sapien
acaaccaagtgaaagacaagcattgggcagagt

SEQ ID NO: 90336 - DNA, 33 bp, Homo sapien
acaaccaagtgaaagagaagcattgggcagagt

SEQ ID NO: 90337 - DNA, 33 bp, Homo sapien
ccaacatgagattaaacgtttggaactctcagt

SEQ ID NO: 90338 - DNA, 33 bp, Homo sapien
ccaacatgagattaaaggtttggaactctcagt

SEQ ID NO: 90339 - DNA, 33 bp, Homo sapien
actcaggaaatgccaaacgttttcgaagccctg

SEQ ID NO: 90340 - DNA, 33 bp, Homo sapien
actcaggaaatgccaagcgttttcgaagccctg

SEQ ID NO: 90341 - DNA, 33 bp, Homo sapien
acaagatgtgttcttacggatgaacaaagcagt

SEQ ID NO: 90342 - DNA, 33 bp, Homo sapien
acaagatgtgttcttatggatgaacaaagcagt

SEQ ID NO: 90343 - DNA, 33 bp, Homo sapien
aaagagttctggactaaagctaagctctttgcc

SEQ ID NO: 90344 - DNA, 33 bp, Homo sapien
aaagagttctggactacagctaagctctttgcc

SEQ ID NO: 90345 - DNA, 33 bp, Homo sapien
atggagtcaaggcaaacggtgccaattagtgaa

SEQ ID NO: 90346 - DNA, 33 bp, Homo sapien
atggagtcaaggcaaatggtgccaattagtgaa

SEQ ID NO: 90347 - DNA, 33 bp, Homo sapien
caaaacaagtatatagaagagattggtatgtgt

SEQ ID NO: 90348 - DNA, 33 bp, Homo sapien
caaaacaagtatataggagagattggtatgtgt

SEQ ID NO: 90349 - DNA, 33 bp, Homo sapien
aaggagggaaggagaccatttccaaatgtaaat

SEQ ID NO: 90350 - DNA, 33 bp, Homo sapien
aaggagggaaggagactatttccaaatgtaaat

SEQ ID NO: 90351 - DNA, 33 bp, Homo sapien
actagggctgaaacccaaccctccacgcaggca

SEQ ID NO: 90352 - DNA, 33 bp, Homo sapien
actagggctgaaacccgaccctccacgcaggca

SEQ ID NO: 90353 - DNA, 33 bp, Homo sapien
tggtttctgtaagttacataaatgagttccatt

SEQ ID NO: 90354 - DNA, 33 bp, Homo sapien
tggtttctgtaagttatataaatgagttccatt

SEQ ID NO: 90355 - DNA, 33 bp, Homo sapien
atgcctatgcctcgtgaagataaagacccattt

SEQ ID NO: 90356 - DNA, 33 bp, Homo sapien
atgcctatgcctcgtggagataaagacccattt

SEQ ID NO: 90357 - DNA, 33 bp, Homo sapien
tcccttcagcgtctaaagtcaaatgaaatcctt

SEQ ID NO: 90358 - DNA, 33 bp, Homo sapien
tcccttcagcgtctaatgtcaaatgaaatcctt

SEQ ID NO: 90359 - DNA, 33 bp, Homo sapien
cctgtagtcccagtacaaagcaaaaggcacagg

SEQ ID NO: 90360 - DNA, 33 bp, Homo sapien
cctgtagtcccagtacgaagcaaaaggcacagg

SEQ ID NO: 90361 - DNA, 33 bp, Homo sapien
gggaatgaacgatagactccgatttaccatgcc

SEQ ID NO: 90362 - DNA, 33 bp, Homo sapien
gggaatgaacgatagagtccgatttaccatgcc

SEQ ID NO: 90363 - DNA, 33 bp, Homo sapien
cagactcacaaaggggaaagcagaactggatgt

SEQ ID NO: 90364 - DNA, 33 bp, Homo sapien
cagactcacaaaggggcaagcagaactggatgt

SEQ ID NO: 90365 - DNA, 33 bp, Homo sapien
gttatattaagtttgaaaagttggagaaaacat

SEQ ID NO: 90366 - DNA, 33 bp, Homo sapien
gttatattaagtttgacaagttggagaaaacat

SEQ ID NO: 90367 - DNA, 33 bp, Homo sapien
cttcattcaggtactacaagaaatgctgagcaa

SEQ ID NO: 90368 - DNA, 33 bp, Homo sapien
cttcattcaggtactataagaaatgctgagcaa

SEQ ID NO: 90369 - DNA, 33 bp, Homo sapien
gtgttaataggaatccggactgttgaagctcct

SEQ ID NO: 90370 - DNA, 33 bp, Homo sapien
gtgttaataggaatcctgactgttgaagctcct

SEQ ID NO: 90371 - DNA, 33 bp, Homo sapien
acaagaaaatgggagccacccacaaacaatttc

SEQ ID NO: 90372 - DNA, 33 bp, Homo sapien
acaagaaaatgggagcgacccacaaacaatttc

SEQ ID NO: 90373 - DNA, 33 bp, Homo sapien
tttgttcttagacaacaccagaaaaacaaggca

SEQ ID NO: 90374 - DNA, 33 bp, Homo sapien
tttgttcttagacaacgccagaaaaacaaggca

SEQ ID NO: 90375 - DNA, 33 bp, Homo sapien
ttcacattattgacaaacctgtaggtgaatgtt

SEQ ID NO: 90376 - DNA, 33 bp, Homo sapien
ttcacattattgacaatcctgtaggtgaatgtt

SEQ ID NO: 90377 - DNA, 33 bp, Homo sapien
cctattgtgttgcacagcctggctaccttccct

SEQ ID NO: 90378 - DNA, 33 bp, Homo sapien
cctattgtgttgcacatcctggctaccttccct

SEQ ID NO: 90379 - DNA, 33 bp, Homo sapien
gctgagtacatcagaaaagctgggtcgagtttt

SEQ ID NO: 90380 - DNA, 33 bp, Homo sapien
gctgagtacatcagaagagctgggtcgagtttt

SEQ ID NO: 90381 - DNA, 33 bp, Homo sapien
aacgcagactggaaaaatgacacaagatgagct

SEQ ID NO: 90382 - DNA, 33 bp, Homo sapien
aacgcagactggaaaagtgacacaagatgagct

SEQ ID NO: 90383 - DNA, 33 bp, Homo sapien
actcagggctatctggacagtcccagggtttta

SEQ ID NO: 90384 - DNA, 33 bp, Homo sapien
actcagggctatctggccagtcccagggtttta

SEQ ID NO: 90385 - DNA, 33 bp, Homo sapien
tgaatcacgtgagtgacagtttgatgccatcca

SEQ ID NO: 90386 - DNA, 33 bp, Homo sapien
tgaatcacgtgagtgatagtttgatgccatcca

SEQ ID NO: 90387 - DNA, 33 bp, Homo sapien
gattcagaaaaagggactcagagagaagagcac

SEQ ID NO: 90388 - DNA, 33 bp, Homo sapien
gattcagaaaaagggattcagagagaagagcac

SEQ ID NO: 90389 - DNA, 33 bp, Homo sapien
atctttgactattcaccattctgatttccacat

SEQ ID NO: 90390 - DNA, 33 bp, Homo sapien
atctttgactattcactattctgatttccacat

SEQ ID NO: 90391 - DNA, 33 bp, Homo sapien
tctcctgcctcagggtaaaaataaaaatggtgt

SEQ ID NO: 90392 - DNA, 33 bp, Homo sapien
tctcctgcctcagggtgaaaataaaaatggtgt

SEQ ID NO: 90393 - DNA, 33 bp, Homo sapien
acagaaagagtatcagaaagcctttgtctatag

SEQ ID NO: 90394 - DNA, 33 bp, Homo sapien
acagaaagagtatcaggaagcctttgtctatag

SEQ ID NO: 90395 - DNA, 33 bp, Homo sapien
tcttcagcttctctgacaggttaaagcgttgaa

SEQ ID NO: 90396 - DNA, 33 bp, Homo sapien
tcttcagcttctctgataggttaaagcgttgaa

SEQ ID NO: 90397 - DNA, 33 bp, Homo sapien
ctagaattcaacctgcagaagtgatgtgagaag

SEQ ID NO: 90398 - DNA, 33 bp, Homo sapien
ctagaattcaacctgcggaagtgatgtgagaag

SEQ ID NO: 90399 - DNA, 33 bp, Homo sapien
tatgtggtgcttgtctaaatgtaatctaactac

SEQ ID NO: 90400 - DNA, 33 bp, Homo sapien
tatgtggtgcttgtctgaatgtaatctaactac

SEQ ID NO: 90401 - DNA, 33 bp, Homo sapien
acctcatgagctggacggcagattttgaaattc

SEQ ID NO: 90402 - DNA, 33 bp, Homo sapien
acctcatgagctggactgcagattttgaaattc

SEQ ID NO: 90403 - DNA, 33 bp, Homo sapien
cagagctcagctaggaaaggaacaggctggcat

SEQ ID NO: 90404 - DNA, 33 bp, Homo sapien
cagagctcagctaggagaggaacaggctggcat

SEQ ID NO: 90405 - DNA, 33 bp, Homo sapien
ttttctagcacttttagactagcagaacagagg

SEQ ID NO: 90406 - DNA, 33 bp, Homo sapien
ttttctagcacttttatactagcagaacagagg

SEQ ID NO: 90407 - DNA, 33 bp, Homo sapien
attatggcagaactaaagtaagtaatagctcag

SEQ ID NO: 90408 - DNA, 33 bp, Homo sapien
attatggcagaactaaggtaagtaatagctcag

SEQ ID NO: 90409 - DNA, 33 bp, Homo sapien
aaagaggcttatcccactaactgagggcagaat

SEQ ID NO: 90410 - DNA, 33 bp, Homo sapien
aaagaggcttatcccattaactgagggcagaat

SEQ ID NO: 90411 - DNA, 33 bp, Homo sapien
ttctgccaattgtttacctttagtcaaagggca

SEQ ID NO: 90412 - DNA, 33 bp, Homo sapien
ttctgccaattgtttatctttagtcaaagggca

SEQ ID NO: 90413 - DNA, 33 bp, Homo sapien
ttgactgtttgctacacgagtgaatgaaatctg

SEQ ID NO: 90414 - DNA, 33 bp, Homo sapien
ttgactgtttgctacatgagtgaatgaaatctg

SEQ ID NO: 90415 - DNA, 33 bp, Homo sapien
cattcacaacacaaaacggcccacgtgagagct

SEQ ID NO: 90416 - DNA, 33 bp, Homo sapien
cattcacaacacaaaatggcccacgtgagagct

SEQ ID NO: 90417 - DNA, 33 bp, Homo sapien
gagagggccagcttcacggtgtacgatgaatgc

SEQ ID NO: 90418 - DNA, 33 bp, Homo sapien
gagagggccagcttcatggtgtacgatgaatgc

SEQ ID NO: 90419 - DNA, 33 bp, Homo sapien
caatgtagcccaaactcaagaatgagaatgaac

SEQ ID NO: 90420 - DNA, 33 bp, Homo sapien
caatgtagcccaaactgaagaatgagaatgaac

SEQ ID NO: 90421 - DNA, 33 bp, Homo sapien
gaaaaacctgaatcagcaaagccaatacaacgg

SEQ ID NO: 90422 - DNA, 33 bp, Homo sapien
gaaaaacctgaatcaggaaagccaatacaacgg

SEQ ID NO: 90423 - DNA, 33 bp, Homo sapien
gacagcttgtctaagaacattaatttgatttgc

SEQ ID NO: 90424 - DNA, 33 bp, Homo sapien
gacagcttgtctaagatcattaatttgatttgc

SEQ ID NO: 90425 - DNA, 33 bp, Homo sapien
aatcgagcaccgtcgactcacaagatgaacaaa

SEQ ID NO: 90426 - DNA, 33 bp, Homo sapien
aatcgagcaccgtcgagtcacaagatgaacaaa

SEQ ID NO: 90427 - DNA, 33 bp, Homo sapien; identical to SEQ ID NO: 90425

SEQ ID NO: 90428 - DNA, 33 bp, Homo sapien; identical to SEQ ID NO: 90426

SEQ ID NO: 90429 - DNA, 33 bp, Homo sapien
tatggtgaatagtggaaggggtgtatttgaaga

SEQ ID NO: 90430 - DNA, 33 bp, Homo sapien
tatggtgaatagtggagggggtgtatttgaaga

SEQ ID NO: 90431 - DNA, 33 bp, Homo sapien
gcatgagtaaaaagtaacattcaaagtgcaaga

SEQ ID NO: 90432 - DNA, 33 bp, Homo sapien
gcatgagtaaaaagtagcattcaaagtgcaaga

SEQ ID NO: 90433 - DNA, 33 bp, Homo sapien
tgacacgccaattttacatgacattttaaaaat

SEQ ID NO: 90434 - DNA, 33 bp, Homo sapien
tgacacgccaattttatatgacattttaaaaat

SEQ ID NO: 90435 - DNA, 33 bp, Homo sapien
taatatgctgaaagaacatgataactgtcaacc

SEQ ID NO: 90436 - DNA, 33 bp, Homo sapien
taatatgctgaaagaagatgataactgtcaacc

SEQ ID NO: 90437 - DNA, 33 bp, Homo sapien
ggcctgaaagttaaaagtgctcaagaacaaaat

SEQ ID NO: 90438 - DNA, 33 bp, Homo sapien
ggcctgaaagttaaaattgctcaagaacaaaat

SEQ ID NO: 90439 - DNA, 33 bp, Homo sapien
tctctctcaatcgccaatgaggtaggagaccag

SEQ ID NO: 90440 - DNA, 33 bp, Homo sapien
tctctctcaatcgccagtgaggtaggagaccag

SEQ ID NO: 90441 - DNA, 33 bp, Homo sapien
tgactcactgggaagaaccacacatagtgtcag

SEQ ID NO: 90442 - DNA, 33 bp, Homo sapien
tgactcactgggaagatccacacatagtgtcag

SEQ ID NO: 90443 - DNA, 33 bp, Homo sapien
aagaagctgcctgctcactatgatttctgacct

SEQ ID NO: 90444 - DNA, 33 bp, Homo sapien
aagaagctgcctgctcgctatgatttctgacct

SEQ ID NO: 90445 - DNA, 33 bp, Homo sapien
gtactatattttggcacggtgaggattttgtac

SEQ ID NO: 90446 - DNA, 33 bp, Homo sapien
gtactatattttggcatggtgaggattttgtac

SEQ ID NO: 90447 - DNA, 33 bp, Homo sapien
ggaaaggagcctcctacctggaactgcataaag

SEQ ID NO: 90448 - DNA, 33 bp, Homo sapien
ggaaaggagcctcctatctggaactgcataaag

SEQ ID NO: 90449 - DNA, 33 bp, Homo sapien
aaagtagttgatgtcaatctttgcaagaaccag

SEQ ID NO: 90450 - DNA, 33 bp, Homo sapien
aaagtagttgatgtcagtctttgcaagaaccag

SEQ ID NO: 90451 - DNA, 33 bp, Homo sapien
aattgaatgagagagaggagctcataggaagat

SEQ ID NO: 90452 - DNA, 33 bp, Homo sapien
aattgaatgagagagatgagctcataggaagat

SEQ ID NO: 90453 - DNA, 33 bp, Homo sapien
attctgggaggagagcaaaaaaataaacagtta

SEQ ID NO: 90454 - DNA, 33 bp, Homo sapien
attctgggaggagagcgaaaaaataaacagtta

SEQ ID NO: 90455 - DNA, 33 bp, Homo sapien
gctaacattttcttcccctataaactagtgttc

SEQ ID NO: 90456 - DNA, 33 bp, Homo sapien
gctaacattttcttccgctataaactagtgttc

SEQ ID NO: 90457 - DNA, 33 bp, Homo sapien
cttcctggacagcaaacggctcttataaaacaa

SEQ ID NO: 90458 - DNA, 33 bp, Homo sapien
cttcctggacagcaaatggctcttataaaacaa

SEQ ID NO: 90459 - DNA, 33 bp, Homo sapien
gcttgccaaaaagaacactctgtggagacacaa

SEQ ID NO: 90460 - DNA, 33 bp, Homo sapien
gcttgccaaaaagaacgctctgtggagacacaa

SEQ ID NO: 90461 - DNA, 33 bp, Homo sapien
gtccaaaagaggacccacagtttctgagtccct

SEQ ID NO: 90462 - DNA, 33 bp, Homo sapien
gtccaaaagaggacccccagtttctgagtccct

SEQ ID NO: 90463 - DNA, 33 bp, Homo sapien
ttgatgagatgaagatgaagtgcctactcccat

SEQ ID NO: 90464 - DNA, 33 bp, Homo sapien
ttgatgagatgaagattaagtgcctactcccat

SEQ ID NO: 90465 - DNA, 33 bp, Homo sapien
tggattgttgagaaaacagtcatatagagaaac

SEQ ID NO: 90466 - DNA, 33 bp, Homo sapien
tggattgttgagaaaatagtcatatagagaaac

SEQ ID NO: 90467 - DNA, 33 bp, Homo sapien
agtcaaccacttctgcacaatatctaaatattt

SEQ ID NO: 90468 - DNA, 33 bp, Homo sapien
agtcaaccacttctgcgcaatatctaaatattt

SEQ ID NO: 90469 - DNA, 33 bp, Homo sapien
tactttccagtgaaaaccttatacctgccattc

SEQ ID NO: 90470 - DNA, 33 bp, Homo sapien
tactttccagtgaaaatcttatacctgccattc

SEQ ID NO: 90471 - DNA, 33 bp, Homo sapien
cgtcagcaagtcactcagaagtgtccaccatca

SEQ ID NO: 90472 - DNA, 33 bp, Homo sapien
cgtcagcaagtcactcggaagtgtccaccatca

SEQ ID NO: 90473 - DNA, 33 bp, Homo sapien
tgaggcagtggggagaaagaggaacacatggct

SEQ ID NO: 90474 - DNA, 33 bp, Homo sapien
tgaggcagtggggagagagaggaacacatggct

SEQ ID NO: 90475 - DNA, 33 bp, Homo sapien
ttacccatctgggcaaataaaaggaagcagcaa

SEQ ID NO: 90476 - DNA, 33 bp, Homo sapien
ttacccatctgggcaagtaaaaggaagcagcaa

SEQ ID NO: 90477 - DNA, 33 bp, Homo sapien
tgggactaggacaaaacgacatggggtaacttt

SEQ ID NO: 90478 - DNA, 33 bp, Homo sapien
tgggactaggacaaaaggacatggggtaacttt

SEQ ID NO: 90479 - DNA, 33 bp, Homo sapien
gttaacaaacgtacacacaatgtaaccacgagc

SEQ ID NO: 90480 - DNA, 33 bp, Homo sapien
gttaacaaacgtacacgcaatgtaaccacgagc

SEQ ID NO: 90481 - DNA, 33 bp, Homo sapien
ctccagtttatttgcacgtttccctttatttca

SEQ ID NO: 90482 - DNA, 33 bp, Homo sapien
ctccagtttatttgcatgtttccctttatttca

SEQ ID NO: 90483 - DNA, 33 bp, Homo sapien
gaaatgaaatcatttcaccaaattcacttgact

SEQ ID NO: 90484 - DNA, 33 bp, Homo sapien
gaaatgaaatcatttcgccaaattcacttgact

SEQ ID NO: 90485 - DNA, 33 bp, Homo sapien
tagaactgagaattgacgtgtaaatgacgcatg

SEQ ID NO: 90486 - DNA, 33 bp, Homo sapien
tagaactgagaattgatgtgtaaatgacgcatg

SEQ ID NO: 90487 - DNA, 33 bp, Homo sapien
aggtttacagcacacccctgactctacccactt

SEQ ID NO: 90488 - DNA, 33 bp, Homo sapien
aggtttacagcacacctctgactctacccactt

SEQ ID NO: 90489 - DNA, 33 bp, Homo sapien
gcaaaatgcctaaccaccagtgcctttcacaag

SEQ ID NO: 90490 - DNA, 33 bp, Homo sapien
gcaaaatgcctaaccatcagtgcctttcacaag

SEQ ID NO: 90491 - DNA, 33 bp, Homo sapien
acatctgtcacataagaaacgttaggagagaag

SEQ ID NO: 90492 - DNA, 33 bp, Homo sapien
acatctgtcacataaggaacgttaggagagaag

SEQ ID NO: 90493 - DNA, 33 bp, Homo sapien
tgtgaagactgtggccagaatgaagggtctgtg

SEQ ID NO: 90494 - DNA, 33 bp, Homo sapien
tgtgaagactgtggccggaatgaagggtctgtg

SEQ ID NO: 90495 - DNA, 33 bp, Homo sapien
attcaactttttgaagcctacagaagtgagatt

SEQ ID NO: 90496 - DNA, 33 bp, Homo sapien
attcaactttttgaagtctacagaagtgagatt

SEQ ID NO: 90497 - DNA, 33 bp, Homo sapien
attcttttcatggctagagtaacatggtccctg

SEQ ID NO: 90498 - DNA, 33 bp, Homo sapien
attcttttcatggctatagtaacatggtccctg

SEQ ID NO: 90499 - DNA, 33 bp, Homo sapien
gagtttctctttcttgaaaccagtagcactttg

SEQ ID NO: 90500 - DNA, 33 bp, Homo sapien
gagtttctctttcttgcaaccagtagcactttg

SEQ ID NO: 90501 - DNA, 33 bp, Homo sapien
tttctctgcttccatgcaacttaagtgtgcata

SEQ ID NO: 90502 - DNA, 33 bp, Homo sapien
tttctctgcttccatgtaacttaagtgtgcata

SEQ ID NO: 90503 - DNA, 33 bp, Homo sapien
gtcactgggccaggaaacagaaaccttatgcct

SEQ ID NO: 90504 - DNA, 33 bp, Homo sapien
gtcactgggccaggaagcagaaaccttatgcct

SEQ ID NO: 90505 - DNA, 33 bp, Homo sapien
atcgtggtatggttgcgaggtcactgggccagg

SEQ ID NO: 90506 - DNA, 33 bp, Homo sapien
atcgtggtatggttgctaggtcactgggccagg

SEQ ID NO: 90507 - DNA, 33 bp, Homo sapien
aaaactgaggcctgaacgactagacgtcagaca

SEQ ID NO: 90508 - DNA, 33 bp, Homo sapien
aaaactgaggcctgaatgactagacgtcagaca

SEQ ID NO: 90509 - DNA, 33 bp, Homo sapien
ggatgtaaacctgaaacgtctgggacaggtctc

SEQ ID NO: 90510 - DNA, 33 bp, Homo sapien
ggatgtaaacctgaaatgtctgggacaggtctc

SEQ ID NO: 90511 - DNA, 33 bp, Homo sapien
actcaacatgtggaagccatttaaagccatgag

SEQ ID NO: 90512 - DNA, 33 bp, Homo sapien
actcaacatgtggaaggcatttaaagccatgag

SEQ ID NO: 90513 - DNA, 33 bp, Homo sapien
ccagactttataatcacgtgagccgattcctta

SEQ ID NO: 90514 - DNA, 33 bp, Homo sapien
ccagactttataatcatgtgagccgattcctta

SEQ ID NO: 90515 - DNA, 33 bp, Homo sapien
tgtgctgaagttttcaacgcagtgcctaagcct

SEQ ID NO: 90516 - DNA, 33 bp, Homo sapien
tgtgctgaagttttcagcgcagtgcctaagcct

SEQ ID NO: 90517 - DNA, 33 bp, Homo sapien
gagaagacatgagggaagatggatagaagacag

SEQ ID NO: 90518 - DNA, 33 bp, Homo sapien
gagaagacatgagggaggatggatagaagacag

SEQ ID NO: 90519 - DNA, 33 bp, Homo sapien
ttgttcctagaagttaagtcagaagatagaagt

SEQ ID NO: 90520 - DNA, 33 bp, Homo sapien
ttgttcctagaagttaggtcagaagatagaagt

SEQ ID NO: 90521 - DNA, 33 bp, Homo sapien
ttatatcaacaaagaaactactgctgaactatc

SEQ ID NO: 90522 - DNA, 33 bp, Homo sapien
ttatatcaacaaagaagctactgctgaactatc

SEQ ID NO: 90523 - DNA, 33 bp, Homo sapien
gcccactacagaagggacaaagaacacatttta

SEQ ID NO: 90524 - DNA, 33 bp, Homo sapien
gcccactacagaaggggcaaagaacacatttta

SEQ ID NO: 90525 - DNA, 33 bp, Homo sapien
gcagcagaattttcagaatcatccctggatcgt

SEQ ID NO: 90526 - DNA, 33 bp, Homo sapien
gcagcagaattttcagcatcatccctggatcgt

SEQ ID NO: 90527 - DNA, 33 bp, Homo sapien
taattccgcttcttcaccttttgggtttatacc

SEQ ID NO: 90528 - DNA, 33 bp, Homo sapien
taattccgcttcttcatcttttgggtttatacc

SEQ ID NO: 90529 - DNA, 33 bp, Homo sapien
ttctttgtgatggagaaaccttttgttcaaata

SEQ ID NO: 90530 - DNA, 33 bp, Homo sapien
ttctttgtgatggagataccttttgttcaaata

SEQ ID NO: 90531 - DNA, 33 bp, Homo sapien
aatacatcacattgcacgttagggagtccacat

SEQ ID NO: 90532 - DNA, 33 bp, Homo sapien
aatacatcacattgcaggttagggagtccacat

SEQ ID NO: 90533 - DNA, 33 bp, Homo sapien
tgactcagttggggaacagatggatggaggtga

SEQ ID NO: 90534 - DNA, 33 bp, Homo sapien
tgactcagttggggaagagatggatggaggtga

SEQ ID NO: 90535 - DNA, 33 bp, Homo sapien
ggcaaatctggtaacaaaaagtgaccagagcat

SEQ ID NO: 90536 - DNA, 33 bp, Homo sapien
ggcaaatctggtaacagaaagtgaccagagcat

SEQ ID NO: 90537 - DNA, 33 bp, Homo sapien
cctcatcagaaagctaaattttagtaaagtcac

SEQ ID NO: 90538 - DNA, 33 bp, Homo sapien
cctcatcagaaagctacattttagtaaagtcac

SEQ ID NO: 90539 - DNA, 33 bp, Homo sapien
gcacctgggagaaagaagatctgggctttgtag

SEQ ID NO: 90540 - DNA, 33 bp, Homo sapien
gcacctgggagaaagaggatctgggctttgtag

SEQ ID NO: 90541 - DNA, 33 bp, Homo sapien
taaaccacaagtgttaccaaatgcttctccctt

SEQ ID NO: 90542 - DNA, 33 bp, Homo sapien
taaaccacaagtgttatcaaatgcttctccctt

SEQ ID NO: 90543 - DNA, 33 bp, Homo sapien
aaagaaaggaggcaacaatagaaaggtattttc

SEQ ID NO: 90544 - DNA, 33 bp, Homo sapien
aaagaaaggaggcaaccatagaaaggtattttc

SEQ ID NO: 90545 - DNA, 33 bp, Homo sapien
acctcactgctttgcggactgctgcattcccag

SEQ ID NO: 90546 - DNA, 33 bp, Homo sapien
acctcactgctttgcgtactgctgcattcccag

SEQ ID NO: 90547 - DNA, 33 bp, Homo sapien
gtgcatttgtcactaagtaataaggcttcggtt

SEQ ID NO: 90548 - DNA, 33 bp, Homo sapien
gtgcatttgtcactaattaataaggcttcggtt

SEQ ID NO: 90549 - DNA, 33 bp, Homo sapien
gcaattagtgcccttaaaaaagtgactccagtg

SEQ ID NO: 90550 - DNA, 33 bp, Homo sapien
gcaattagtgcccttacaaaagtgactccagtg

SEQ ID NO: 90551 - DNA, 33 bp, Homo sapien
agtgtgagaactgcgcgatcttctcaattgtcc

SEQ ID NO: 90552 - DNA, 33 bp, Homo sapien
agtgtgagaactgcgctatcttctcaattgtcc

SEQ ID NO: 90553 - DNA, 33 bp, Homo sapien
taaatttcatgaatagacacaactaatgtaaga

SEQ ID NO: 90554 - DNA, 33 bp, Homo sapien
taaatttcatgaataggcacaactaatgtaaga

SEQ ID NO: 90555 - DNA, 33 bp, Homo sapien
tatcttttgctgtatacgaaatttggccaaatc

SEQ ID NO: 90556 - DNA, 33 bp, Homo sapien
tatcttttgctgtatatgaaatttggccaaatc

SEQ ID NO: 90557 - DNA, 33 bp, Homo sapien
aacttttaacctaccactgcatttagaataact

SEQ ID NO: 90558 - DNA, 33 bp, Homo sapien
aacttttaacctaccattgcatttagaataact

SEQ ID NO: 90559 - DNA, 33 bp, Homo sapien
ttacatagggtaatcaataattcagtcttatca

SEQ ID NO: 90560 - DNA, 33 bp, Homo sapien
ttacatagggtaatcagtaattcagtcttatca

SEQ ID NO: 90561 - DNA, 33 bp, Homo sapien
cattaacccacagaacacttcagatgaaaactt

SEQ ID NO: 90562 - DNA, 33 bp, Homo sapien
cattaacccacagaacgcttcagatgaaaactt

SEQ ID NO: 90563 - DNA, 33 bp, Homo sapien
cggggtggaaagcctcaagacaggaacgctaac

SEQ ID NO: 90564 - DNA, 33 bp, Homo sapien
cggggtggaaagcctcgagacaggaacgctaac

SEQ ID NO: 90565 - DNA, 33 bp, Homo sapien
caggttttatcagtgaataagttgccatgaagg

SEQ ID NO: 90566 - DNA, 33 bp, Homo sapien
caggttttatcagtgagtaagttgccatgaagg

SEQ ID NO: 90567 - DNA, 33 bp, Homo sapien
cactatgttaaaccccaagagacagcaaagaag

SEQ ID NO: 90568 - DNA, 33 bp, Homo sapien
cactatgttaaaccccgagagacagcaaagaag

SEQ ID NO: 90569 - DNA, 33 bp, Homo sapien
cttccactggacaagaaggcagatgttgtcact

SEQ ID NO: 90570 - DNA, 33 bp, Homo sapien
cttccactggacaagatggcagatgttgtcact

SEQ ID NO: 90571 - DNA, 33 bp, Homo sapien
gagttcttttctgaaactggagtgcaaaagttc

SEQ ID NO: 90572 - DNA, 33 bp, Homo sapien
gagttcttttctgaaattggagtgcaaaagttc

SEQ ID NO: 90573 - DNA, 33 bp, Homo sapien
ttcaaaccatatcacaccctgagccatcgctct

SEQ ID NO: 90574 - DNA, 33 bp, Homo sapien
ttcaaaccatatcacatcctgagccatcgctct

SEQ ID NO: 90575 - DNA, 33 bp, Homo sapien
ttttgatgacaccaaaacctttccctcttgtct

SEQ ID NO: 90576 - DNA, 33 bp, Homo sapien
ttttgatgacaccaaagcctttccctcttgtct

SEQ ID NO: 90577 - DNA, 33 bp, Homo sapien
aatctccagaggttgcactggattccagcatct

SEQ ID NO: 90578 - DNA, 33 bp, Homo sapien
aatctccagaggttgcgctggattccagcatct

SEQ ID NO: 90579 - DNA, 33 bp, Homo sapien
tgcttctgtacaacttcaagcgttgtctgggat

SEQ ID NO: 90580 - DNA, 33 bp, Homo sapien
tgcttctgtacaactttaagcgttgtctgggat

SEQ ID NO: 90581 - DNA, 33 bp, Homo sapien
gcagttaagtacgctaacaagtctaactctgac

SEQ ID NO: 90582 - DNA, 33 bp, Homo sapien
gcagttaagtacgctagcaagtctaactctgac

SEQ ID NO: 90583 - DNA, 33 bp, Homo sapien
agtccaataggtataaactgtctctggttgtac

SEQ ID NO: 90584 - DNA, 33 bp, Homo sapien
agtccaataggtataatctgtctctggttgtac

SEQ ID NO: 90585 - DNA, 33 bp, Homo sapien
caatctgacattgtcacgttcggacaaaaaagt

SEQ ID NO: 90586 - DNA, 33 bp, Homo sapien
caatctgacattgtcatgttcggacaaaaaagt

SEQ ID NO: 90587 - DNA, 33 bp, Homo sapien
gccagatgctttcgcaaatcaaaccctgcagag

SEQ ID NO: 90588 - DNA, 33 bp, Homo sapien
gccagatgctttcgcagatcaaaccctgcagag

SEQ ID NO: 90589 - DNA, 33 bp, Homo sapien
gcattgtccttcttccaccatgttaatccacat

SEQ ID NO: 90590 - DNA, 33 bp, Homo sapien
gcattgtccttcttccgccatgttaatccacat

SEQ ID NO: 90591 - DNA, 33 bp, Homo sapien
ggatgcagctctgaaaacattcctggtccttgt

SEQ ID NO: 90592 - DNA, 33 bp, Homo sapien
ggatgcagctctgaaaccattcctggtccttgt

SEQ ID NO: 90593 - DNA, 33 bp, Homo sapien
tgctttcaaagcaccaggcacacagctattagt

SEQ ID NO: 90594 - DNA, 33 bp, Homo sapien
tgctttcaaagcaccatgcacacagctattagt

SEQ ID NO: 90595 - DNA, 33 bp, Homo sapien
tacaactgtgatctcaacatgtgtagagatttc

SEQ ID NO: 90596 - DNA, 33 bp, Homo sapien
tacaactgtgatctcaccatgtgtagagatttc

SEQ ID NO: 90597 - DNA, 33 bp, Homo sapien
aaccacaggagagctgaactcggtgaattactt

SEQ ID NO: 90598 - DNA, 33 bp, Homo sapien
aaccacaggagagctggactcggtgaattactt

SEQ ID NO: 90599 - DNA, 33 bp, Homo sapien
atgagtcagttctataaatagatgccatctcct

SEQ ID NO: 90600 - DNA, 33 bp, Homo sapien
atgagtcagttctatagatagatgccatctcct

SEQ ID NO: 90601 - DNA, 33 bp, Homo sapien
gggggcgctaggagatcacctgtacacctgttt

SEQ ID NO: 90602 - DNA, 33 bp, Homo sapien
gggggcgctaggagattacctgtacacctgttt

SEQ ID NO: 90603 - DNA, 33 bp, Homo sapien
tggactgcggatcaacaggcttctgaaagagtc

SEQ ID NO: 90604 - DNA, 33 bp, Homo sapien
tggactgcggatcaacgggcttctgaaagagtc

SEQ ID NO: 90605 - DNA, 33 bp, Homo sapien
aacctgtgaaatcctccatagctactattaaag

SEQ ID NO: 90606 - DNA, 33 bp, Homo sapien
aacctgtgaaatcctctatagctactattaaag

SEQ ID NO: 90607 - DNA, 33 bp, Homo sapien
ctgtatgtctcaaggtcaatcaggtagaaaggt

SEQ ID NO: 90608 - DNA, 33 bp, Homo sapien
ctgtatgtctcaaggtgaatcaggtagaaaggt

SEQ ID NO: 90609 - DNA, 33 bp, Homo sapien
gaaaggaatcaaaacacatcactacaaaaataa

SEQ ID NO: 90610 - DNA, 33 bp, Homo sapien
gaaaggaatcaaaacatatcactacaaaaataa

SEQ ID NO: 90611 - DNA, 33 bp, Homo sapien
acagagactttccacaactggtcccgttctctc

SEQ ID NO: 90612 - DNA, 33 bp, Homo sapien
acagagactttccacagctggtcccgttctctc

SEQ ID NO: 90613 - DNA, 33 bp, Homo sapien
ccatctggagggattcaagggacaactagagga

SEQ ID NO: 90614 - DNA, 33 bp, Homo sapien
ccatctggagggattcgagggacaactagagga

SEQ ID NO: 90615 - DNA, 33 bp, Homo sapien
gcttgagatggcgaaacggtccctcaaccacac

SEQ ID NO: 90616 - DNA, 33 bp, Homo sapien
gcttgagatggcgaaatggtccctcaaccacac

SEQ ID NO: 90617 - DNA, 33 bp, Homo sapien
gggaggatgcctcggtaacacgacagcaaaggc

SEQ ID NO: 90618 - DNA, 33 bp, Homo sapien
gggaggatgcctcggtgacacgacagcaaaggc

SEQ ID NO: 90619 - DNA, 33 bp, Homo sapien
tatagtgctggaaacacaggtgacgagcccttt

SEQ ID NO: 90620 - DNA, 33 bp, Homo sapien
tatagtgctggaaacataggtgacgagcccttt

SEQ ID NO: 90621 - DNA, 33 bp, Homo sapien
ctgcacaaaaccgatacgtcatagatctttgta

SEQ ID NO: 90622 - DNA, 33 bp, Homo sapien
ctgcacaaaaccgatatgtcatagatctttgta

SEQ ID NO: 90623 - DNA, 33 bp, Homo sapien
agactcattttcactacgaaaggttgtcaaact

SEQ ID NO: 90624 - DNA, 33 bp, Homo sapien
agactcattttcactatgaaaggttgtcaaact

SEQ ID NO: 90625 - DNA, 33 bp, Homo sapien
tggaacttgaaccttacaggataactttgagat

SEQ ID NO: 90626 - DNA, 33 bp, Homo sapien
tggaacttgaaccttataggataactttgagat

SEQ ID NO: 90627 - DNA, 33 bp, Homo sapien
tgtctctgtcttaccacgtaaatgcagaagtaa

SEQ ID NO: 90628 - DNA, 33 bp, Homo sapien
tgtctctgtcttaccatgtaaatgcagaagtaa

SEQ ID NO: 90629 - DNA, 33 bp, Homo sapien
agcgggagatgggggcacggaatgtgaaggact

SEQ ID NO: 90630 - DNA, 33 bp, Homo sapien
agcgggagatgggggcgcggaatgtgaaggact

SEQ ID NO: 90631 - DNA, 33 bp, Homo sapien
aatagaccaggtatgaaaaggttggcttggact

SEQ ID NO: 90632 - DNA, 33 bp, Homo sapien
aatagaccaggtatgagaaggttggcttggact

SEQ ID NO: 90633 - DNA, 33 bp, Homo sapien
taattaattcattctaaataactcttgatgcac

SEQ ID NO: 90634 - DNA, 33 bp, Homo sapien
taattaattcattctagataactcttgatgcac

SEQ ID NO: 90635 - DNA, 33 bp, Homo sapien
gccaaacctgctccaccgaaatggaaggaaaga

SEQ ID NO: 90636 - DNA, 33 bp, Homo sapien
gccaaacctgctccactgaaatggaaggaaaga

SEQ ID NO: 90637 - DNA, 33 bp, Homo sapien
ttcatgggtaaaaagacagtgttaacaggtata

SEQ ID NO: 90638 - DNA, 33 bp, Homo sapien
ttcatgggtaaaaagagagtgttaacaggtata

SEQ ID NO: 90639 - DNA, 33 bp, Homo sapien
gatttggaaatacaaaagcaaatagcagaaaaa

SEQ ID NO: 90640 - DNA, 33 bp, Homo sapien
gatttggaaatacaaaggcaaatagcagaaaaa

SEQ ID NO: 90641 - DNA, 33 bp, Homo sapien
ttcgttgacattctgaacaaggacgctgttagc

SEQ ID NO: 90642 - DNA, 33 bp, Homo sapien
ttcgttgacattctgagcaaggacgctgttagc

SEQ ID NO: 90643 - DNA, 33 bp, Homo sapien
tttgtgctcctgggacccttgtgatgctggttt

SEQ ID NO: 90644 - DNA, 33 bp, Homo sapien
tttgtgctcctgggacgcttgtgatgctggttt

SEQ ID NO: 90645 - DNA, 33 bp, Homo sapien
atcatgacattaccaactgaacagccccacttc

SEQ ID NO: 90646 - DNA, 33 bp, Homo sapien
atcatgacattaccaattgaacagccccacttc

SEQ ID NO: 90647 - DNA, 33 bp, Homo sapien
acagtttgagtcatacacctgggacataaacaa

SEQ ID NO: 90648 - DNA, 33 bp, Homo sapien
acagtttgagtcatacgcctgggacataaacaa

SEQ ID NO: 90649 - DNA, 33 bp, Homo sapien
ggtgactctgcaggaaagcgcagactgaaggca

SEQ ID NO: 90650 - DNA, 33 bp, Homo sapien
ggtgactctgcaggaacgcgcagactgaaggca

SEQ ID NO: 90651 - DNA, 33 bp, Homo sapien
agagcaaaactccatcgcaaataaataagtaaa

SEQ ID NO: 90652 - DNA, 33 bp, Homo sapien
agagcaaaactccatctcaaataaataagtaaa

SEQ ID NO: 90653 - DNA, 33 bp, Homo sapien
ttaaaagttctccaaaacttgtgaacttttttg

SEQ ID NO: 90654 - DNA, 33 bp, Homo sapien
ttaaaagttctccaaaccttgtgaacttttttg

SEQ ID NO: 90655 - DNA, 33 bp, Homo sapien
ttaactccaaaaccagcaggcaaagatgtagat

SEQ ID NO: 90656 - DNA, 33 bp, Homo sapien
ttaactccaaaaccagtaggcaaagatgtagat

SEQ ID NO: 90657 - DNA, 33 bp, Homo sapien
gaacagctgtgtttcccgaagagtttttaggca

SEQ ID NO: 90658 - DNA, 33 bp, Homo sapien
gaacagctgtgtttcctgaagagtttttaggca

SEQ ID NO: 90659 - DNA, 33 bp, Homo sapien
atgattagagttttaacctcagagctaaacaga

SEQ ID NO: 90660 - DNA, 33 bp, Homo sapien
atgattagagttttaatctcagagctaaacaga

SEQ ID NO: 90661 - DNA, 33 bp, Homo sapien
tttgtattccttgacaaaatgagtcatgcatga

SEQ ID NO: 90662 - DNA, 33 bp, Homo sapien
tttgtattccttgacacaatgagtcatgcatga

SEQ ID NO: 90663 - DNA, 33 bp, Homo sapien
gctacgggaatttagcagagaacgaagtcacct

SEQ ID NO: 90664 - DNA, 33 bp, Homo sapien
gctacgggaatttagcggagaacgaagtcacct

SEQ ID NO: 90665 - DNA, 33 bp, Homo sapien
gaaaaatcccattttacgctctaaaacatcagc

SEQ ID NO: 90666 - DNA, 33 bp, Homo sapien
gaaaaatcccattttatgctctaaaacatcagc

SEQ ID NO: 90667 - DNA, 33 bp, Homo sapien
tcagggagattccgggaaaatggtagttggcac

SEQ ID NO: 90668 - DNA, 33 bp, Homo sapien
tcagggagattccggggaaatggtagttggcac

SEQ ID NO: 90669 - DNA, 33 bp, Homo sapien
ctaccggggtccaccaagattgcacagtggagc

SEQ ID NO: 90670 - DNA, 33 bp, Homo sapien
ctaccggggtccaccaggattgcacagtggagc

SEQ ID NO: 90671 - DNA, 33 bp, Homo sapien
atgcatggggtccagaaggcagacaggcacttt

SEQ ID NO: 90672 - DNA, 33 bp, Homo sapien
atgcatggggtccagagggcagacaggcacttt

SEQ ID NO: 90673 - DNA, 33 bp, Homo sapien
gaaacgcttccaaaaactgcaggaatgatttct

SEQ ID NO: 90674 - DNA, 33 bp, Homo sapien
gaaacgcttccaaaaagtgcaggaatgatttct

SEQ ID NO: 90675 - DNA, 33 bp, Homo sapien
agagtcttttccaagccgcattgcgttcattat

SEQ ID NO: 90676 - DNA, 33 bp, Homo sapien
agagtcttttccaagctgcattgcgttcattat

SEQ ID NO: 90677 - DNA, 33 bp, Homo sapien
gccaatcttcctgtacactccaggcatcagcac

SEQ ID NO: 90678 - DNA, 33 bp, Homo sapien
gccaatcttcctgtacgctccaggcatcagcac

SEQ ID NO: 90679 - DNA, 33 bp, Homo sapien
aaataattcttctaaaagccaatggggattcta

SEQ ID NO: 90680 - DNA, 33 bp, Homo sapien
aaataattcttctaaaggccaatggggattcta

SEQ ID NO: 90681 - DNA, 33 bp, Homo sapien
atgttgtgaagatgcaataagttatgcatagca

SEQ ID NO: 90682 - DNA, 33 bp, Homo sapien
atgttgtgaagatgcagtaagttatgcatagca

SEQ ID NO: 90683 - DNA, 33 bp, Homo sapien
aacctcttgatgaaaccatccccaagtaaacct

SEQ ID NO: 90684 - DNA, 33 bp, Homo sapien
aacctcttgatgaaactatccccaagtaaacct

SEQ ID NO: 90685 - DNA, 33 bp, Homo sapien
ggatgtcattaaaccacggacagttggcttaac

SEQ ID NO: 90686 - DNA, 33 bp, Homo sapien
ggatgtcattaaaccatggacagttggcttaac

SEQ ID NO: 90687 - DNA, 33 bp, Homo sapien
gtgaggtatgctgttacctaaataatccttgaa

SEQ ID NO: 90688 - DNA, 33 bp, Homo sapien
gtgaggtatgctgttatctaaataatccttgaa

SEQ ID NO: 90689 - DNA, 33 bp, Homo sapien
tataactaagcacataaaacactctaaataaaa

SEQ ID NO: 90690 - DNA, 33 bp, Homo sapien
tataactaagcacatacaacactctaaataaaa

SEQ ID NO: 90691 - DNA, 33 bp, Homo sapien
ttacctcattgaaagccccatcttcaattacag

SEQ ID NO: 90692 - DNA, 33 bp, Homo sapien
ttacctcattgaaagctccatcttcaattacag

SEQ ID NO: 90693 - DNA, 33 bp, Homo sapien
cagaaaatggcaggccaattaacgatgctgcta

SEQ ID NO: 90694 - DNA, 33 bp, Homo sapien
cagaaaatggcaggccgattaacgatgctgcta

SEQ ID NO: 90695 - DNA, 33 bp, Homo sapien
cccatgctactttgaaacttgccacttctcttt

SEQ ID NO: 90696 - DNA, 33 bp, Homo sapien
cccatgctactttgaaccttgccacttctcttt

SEQ ID NO: 90697 - DNA, 33 bp, Homo sapien
cacatgaagtgaagaaacgtgattaagtctgat

SEQ ID NO: 90698 - DNA, 33 bp, Homo sapien
cacatgaagtgaagaaccgtgattaagtctgat

SEQ ID NO: 90699 - DNA, 33 bp, Homo sapien
caacagccgacaagacccttttggtcataggag

SEQ ID NO: 90700 - DNA, 33 bp, Homo sapien
caacagccgacaagactcttttggtcataggag

SEQ ID NO: 90701 - DNA, 33 bp, Homo sapien
gccagaaacttcgtccgctcttataaagcggcc

SEQ ID NO: 90702 - DNA, 33 bp, Homo sapien
gccagaaacttcgtcctctcttataaagcggcc

SEQ ID NO: 90703 - DNA, 33 bp, Homo sapien
caactgacaaaaatacagagagctgatgggctt

SEQ ID NO: 90704 - DNA, 33 bp, Homo sapien
caactgacaaaaatacggagagctgatgggctt

SEQ ID NO: 90705 - DNA, 33 bp, Homo sapien
actaggaaccagcagacgtaggaagcagaaatg

SEQ ID NO: 90706 - DNA, 33 bp, Homo sapien
actaggaaccagcagaggtaggaagcagaaatg

SEQ ID NO: 90707 - DNA, 33 bp, Homo sapien
ccccaggtatgtcgaaatggaataaaaagtgag

SEQ ID NO: 90708 - DNA, 33 bp, Homo sapien
ccccaggtatgtcgaagtggaataaaaagtgag

SEQ ID NO: 90709 - DNA, 33 bp, Homo sapien
cacttaaagattaagcaagatcatgaaaacatg

SEQ ID NO: 90710 - DNA, 33 bp, Homo sapien
cacttaaagattaagcgagatcatgaaaacatg

SEQ ID NO: 90711 - DNA, 33 bp, Homo sapien
ttcatggtaattggcccctcattaacctgacct

SEQ ID NO: 90712 - DNA, 33 bp, Homo sapien
ttcatggtaattggcctctcattaacctgacct

SEQ ID NO: 90713 - DNA, 33 bp, Homo sapien
attcccaatggacttacgacagccagagccagt

SEQ ID NO: 90714 - DNA, 33 bp, Homo sapien
attcccaatggacttatgacagccagagccagt

SEQ ID NO: 90715 - DNA, 33 bp, Homo sapien
ctaaatatatacatgcacgccacttacatgcac

SEQ ID NO: 90716 - DNA, 33 bp, Homo sapien
ctaaatatatacatgcgcgccacttacatgcac

SEQ ID NO: 90717 - DNA, 33 bp, Homo sapien
ctatctattacataaacggagtgccagaaacaa

SEQ ID NO: 90718 - DNA, 33 bp, Homo sapien
ctatctattacataaatggagtgccagaaacaa

SEQ ID NO: 90719 - DNA, 33 bp, Homo sapien
agtgcaagtcaaaatcagagtttggaggattca

SEQ ID NO: 90720 - DNA, 33 bp, Homo sapien
agtgcaagtcaaaatcggagtttggaggattca

SEQ ID NO: 90721 - DNA, 33 bp, Homo sapien
tcttcctcaccccagacaatgtttactctatta

SEQ ID NO: 90722 - DNA, 33 bp, Homo sapien
tcttcctcaccccagagaatgtttactctatta

SEQ ID NO: 90723 - DNA, 33 bp, Homo sapien
ggagaaagcttagctcactggaaataaacactc

SEQ ID NO: 90724 - DNA, 33 bp, Homo sapien
ggagaaagcttagctcgctggaaataaacactc

SEQ ID NO: 90725 - DNA, 33 bp, Homo sapien
agtaacttagtatctaaaacaggccagaaaaaa

SEQ ID NO: 90726 - DNA, 33 bp, Homo sapien
agtaacttagtatctacaacaggccagaaaaaa

SEQ ID NO: 90727 - DNA, 33 bp, Homo sapien
attccagtttgtatacacagaacctagttagtc

SEQ ID NO: 90728 - DNA, 33 bp, Homo sapien
attccagtttgtatacgcagaacctagttagtc

SEQ ID NO: 90729 - DNA, 33 bp, Homo sapien
atctgaaaacctgaaaccgaaaaggctccaatg

SEQ ID NO: 90730 - DNA, 33 bp, Homo sapien
atctgaaaacctgaaatcgaaaaggctccaatg

SEQ ID NO: 90731 - DNA, 33 bp, Homo sapien
ccaggtcccgctgaaaaaaccatccagaaccat

SEQ ID NO: 90732 - DNA, 33 bp, Homo sapien
ccaggtcccgctgaaagaaccatccagaaccat

SEQ ID NO: 90733 - DNA, 33 bp, Homo sapien
ttctgccactgtaggacgttgcaactgcatctc

SEQ ID NO: 90734 - DNA, 33 bp, Homo sapien
ttctgccactgtaggatgttgcaactgcatctc

SEQ ID NO: 90735 - DNA, 33 bp, Homo sapien
cctgagttgaggaccactgattcagattcggtt

SEQ ID NO: 90736 - DNA, 33 bp, Homo sapien
cctgagttgaggaccattgattcagattcggtt

SEQ ID NO: 90737 - DNA, 33 bp, Homo sapien
tctgtatgttgccaggaacgggtattcaacgaa

SEQ ID NO: 90738 - DNA, 33 bp, Homo sapien
tctgtatgttgccagggacgggtattcaacgaa

SEQ ID NO: 90739 - DNA, 33 bp, Homo sapien
tctgtgatctcggtgccattgattgaacttggg

SEQ ID NO: 90740 - DNA, 33 bp, Homo sapien
tctgtgatctcggtgctattgattgaacttggg

SEQ ID NO: 90741 - DNA, 33 bp, Homo sapien
ctattttttatcagccacatttccagattgcag

SEQ ID NO: 90742 - DNA, 33 bp, Homo sapien
ctattttttatcagccgcatttccagattgcag

SEQ ID NO: 90743 - DNA, 33 bp, Homo sapien
gtagaattttaggtgaactatcatttgtctcaa

SEQ ID NO: 90744 - DNA, 33 bp, Homo sapien
gtagaattttaggtgagctatcatttgtctcaa

SEQ ID NO: 90745 - DNA, 33 bp, Homo sapien
tgttgtggggacgtaactgaatcatgcaggcgg

SEQ ID NO: 90746 - DNA, 33 bp, Homo sapien
tgttgtggggacgtaattgaatcatgcaggcgg

SEQ ID NO: 90747 - DNA, 33 bp, Homo sapien
tattagtttgttctcacgctgttagggaagaca

SEQ ID NO: 90748 - DNA, 33 bp, Homo sapien
tattagtttgttctcatgctgttagggaagaca

SEQ ID NO: 90749 - DNA, 33 bp, Homo sapien
gatgggaagtgggcaccgtcctcattgttcaga

SEQ ID NO: 90750 - DNA, 33 bp, Homo sapien
gatgggaagtgggcactgtcctcattgttcaga

SEQ ID NO: 90751 - DNA, 33 bp, Homo sapien
gctttcctaggtgataggtggaattttggccca

SEQ ID NO: 90752 - DNA, 33 bp, Homo sapien
gctttcctaggtgatatgtggaattttggccca

SEQ ID NO: 90753 - DNA, 33 bp, Homo sapien
cttccaatgagctttcacagaacagccagtaga

SEQ ID NO: 90754 - DNA, 33 bp, Homo sapien
cttccaatgagctttcgcagaacagccagtaga

SEQ ID NO: 90755 - DNA, 33 bp, Homo sapien
ctccggatttttctggaagggtgattttgggtg

SEQ ID NO: 90756 - DNA, 33 bp, Homo sapien
ctccggatttttctgggagggtgattttgggtg

SEQ ID NO: 90757 - DNA, 33 bp, Homo sapien
gaaagatggggtaatccgagactaaaaagagag

SEQ ID NO: 90758 - DNA, 33 bp, Homo sapien
gaaagatggggtaatctgagactaaaaagagag

SEQ ID NO: 90759 - DNA, 33 bp, Homo sapien
gttctctttagtactaaccaattcgctggtatt

SEQ ID NO: 90760 - DNA, 33 bp, Homo sapien
gttctctttagtactatccaattcgctggtatt

SEQ ID NO: 90761 - DNA, 33 bp, Homo sapien
tcaccaactgaggacactgggatttcaaggaca

SEQ ID NO: 90762 - DNA, 33 bp, Homo sapien
tcaccaactgaggacagtgggatttcaaggaca

SEQ ID NO: 90763 - DNA, 33 bp, Homo sapien
ttgcatagtaaagcagaataattgatttatggc

SEQ ID NO: 90764 - DNA, 33 bp, Homo sapien
ttgcatagtaaagcagcataattgatttatggc

SEQ ID NO: 90765 - DNA, 33 bp, Homo sapien
ttttagggttcagatacagcccctgtgaactag

SEQ ID NO: 90766 - DNA, 33 bp, Homo sapien
ttttagggttcagatagagcccctgtgaactag

SEQ ID NO: 90767 - DNA, 33 bp, Homo sapien
cctcattagcaaaatcccttgtaagtaatccca

SEQ ID NO: 90768 - DNA, 33 bp, Homo sapien
cctcattagcaaaatctcttgtaagtaatccca

SEQ ID NO: 90769 - DNA, 33 bp, Homo sapien
tatgcagttatggaaactgacacagaattcaga

SEQ ID NO: 90770 - DNA, 33 bp, Homo sapien
tatgcagttatggaaattgacacagaattcaga

SEQ ID NO: 90771 - DNA, 33 bp, Homo sapien
gggagagcaagtgggcaattcagctctagctct

SEQ ID NO: 90772 - DNA, 33 bp, Homo sapien
gggagagcaagtgggcgattcagctctagctct

SEQ ID NO: 90773 - DNA, 33 bp, Homo sapien
cctcatcaaatcagtcaaaggcccaaatagatt

SEQ ID NO: 90774 - DNA, 33 bp, Homo sapien
cctcatcaaatcagtcgaaggcccaaatagatt

SEQ ID NO: 90775 - DNA, 33 bp, Homo sapien
aagtgaaggagttaacacggaagcaaaaatgag

SEQ ID NO: 90776 - DNA, 33 bp, Homo sapien
aagtgaaggagttaacgcggaagcaaaaatgag

SEQ ID NO: 90777 - DNA, 33 bp, Homo sapien
ggccagttctgaaatcaatgctttgaaaatagc

SEQ ID NO: 90778 - DNA, 33 bp, Homo sapien
ggccagttctgaaatcgatgctttgaaaatagc

SEQ ID NO: 90779 - DNA, 33 bp, Homo sapien
tttggtttagtaaatccataaggcttgatttat

SEQ ID NO: 90780 - DNA, 33 bp, Homo sapien
tttggtttagtaaatctataaggcttgatttat

SEQ ID NO: 90781 - DNA, 33 bp, Homo sapien
agttggttgtggataacagcctgggaatgtttg

SEQ ID NO: 90782 - DNA, 33 bp, Homo sapien
agttggttgtggataatagcctgggaatgtttg

SEQ ID NO: 90783 - DNA, 33 bp, Homo sapien
tccttgctatttcagacgaccatgtaagccgca

SEQ ID NO: 90784 - DNA, 33 bp, Homo sapien
tccttgctatttcagatgaccatgtaagccgca

SEQ ID NO: 90785 - DNA, 33 bp, Homo sapien
agtcaacaacacaaaccgaccagctgcctgaca

SEQ ID NO: 90786 - DNA, 33 bp, Homo sapien
agtcaacaacacaaactgaccagctgcctgaca

SEQ ID NO: 90787 - DNA, 33 bp, Homo sapien
tcaatgcgagattatcactccctcactttctca

SEQ ID NO: 90788 - DNA, 33 bp, Homo sapien
tcaatgcgagattatcgctccctcactttctca

SEQ ID NO: 90789 - DNA, 33 bp, Homo sapien
acatcagtgatacaagcaacttaaaccaggact

SEQ ID NO: 90790 - DNA, 33 bp, Homo sapien
acatcagtgatacaagtaacttaaaccaggact

SEQ ID NO: 90791 - DNA, 33 bp, Homo sapien
ttacccatagctctcacactttaaatcaggaaa

SEQ ID NO: 90792 - DNA, 33 bp, Homo sapien
ttacccatagctctcagactttaaatcaggaaa

SEQ ID NO: 90793 - DNA, 33 bp, Homo sapien
tgcaaatatcaacaagcataggaaggcgagctt

SEQ ID NO: 90794 - DNA, 33 bp, Homo sapien
tgcaaatatcaacaaggataggaaggcgagctt

SEQ ID NO: 90795 - DNA, 33 bp, Homo sapien
cagttcaaacacatacagcaaatccaagcgttc

SEQ ID NO: 90796 - DNA, 33 bp, Homo sapien
cagttcaaacacatacggcaaatccaagcgttc

SEQ ID NO: 90797 - DNA, 33 bp, Homo sapien
gatccatgttccttcaatcttccgtcccataca

SEQ ID NO: 90798 - DNA, 33 bp, Homo sapien
gatccatgttccttcagtcttccgtcccataca

SEQ ID NO: 90799 - DNA, 33 bp, Homo sapien
tagcaacagaagaaaaagctaaaatgcaaagga

SEQ ID NO: 90800 - DNA, 33 bp, Homo sapien
tagcaacagaagaaaaggctaaaatgcaaagga

SEQ ID NO: 90801 - DNA, 33 bp, Homo sapien
ccagccataccttaaagttctgtagctctgtac

SEQ ID NO: 90802 - DNA, 33 bp, Homo sapien
ccagccataccttaaatttctgtagctctgtac

SEQ ID NO: 90803 - DNA, 33 bp, Homo sapien
tctgtcacttggactgcagttgtcgcctgccag

SEQ ID NO: 90804 - DNA, 33 bp, Homo sapien
tctgtcacttggactgtagttgtcgcctgccag

SEQ ID NO: 90805 - DNA, 33 bp, Homo sapien
gtttctgcataaccaactgaagtccataattaa

SEQ ID NO: 90806 - DNA, 33 bp, Homo sapien
gtttctgcataaccaattgaagtccataattaa

SEQ ID NO: 90807 - DNA, 33 bp, Homo sapien
gatttagagttttacaatagaagtcccccagga

SEQ ID NO: 90808 - DNA, 33 bp, Homo sapien
gatttagagttttacagtagaagtcccccagga

SEQ ID NO: 90809 - DNA, 33 bp, Homo sapien
catcattatttagctcacatttagaatacaatt

SEQ ID NO: 90810 - DNA, 33 bp, Homo sapien
catcattatttagctcgcatttagaatacaatt

SEQ ID NO: 90811 - DNA, 33 bp, Homo sapien
agaattcacaaagacaccacatgaaagctcttg

SEQ ID NO: 90812 - DNA, 33 bp, Homo sapien
agaattcacaaagacatcacatgaaagctcttg

SEQ ID NO: 90813 - DNA, 33 bp, Homo sapien
tttagacaggagagacaaatgaggagaagctgg

SEQ ID NO: 90814 - DNA, 33 bp, Homo sapien
tttagacaggagagacgaatgaggagaagctgg

SEQ ID NO: 90815 - DNA, 33 bp, Homo sapien
gaggtcatgagctccaatgaggaataaaaagct

SEQ ID NO: 90816 - DNA, 33 bp, Homo sapien
gaggtcatgagctccagtgaggaataaaaagct

SEQ ID NO: 90817 - DNA, 33 bp, Homo sapien
tttctgaattaaagcaataatagtggaaactaa

SEQ ID NO: 90818 - DNA, 33 bp, Homo sapien
tttctgaattaaagcagtaatagtggaaactaa

SEQ ID NO: 90819 - DNA, 33 bp, Homo sapien
ctttgttttatgtacccgataggaaaccatcat

SEQ ID NO: 90820 - DNA, 33 bp, Homo sapien
ctttgttttatgtacctgataggaaaccatcat

SEQ ID NO: 90821 - DNA, 33 bp, Homo sapien
tcagaacaaccaagacaaaattctggacccgct

SEQ ID NO: 90822 - DNA, 33 bp, Homo sapien
tcagaacaaccaagaccaaattctggacccgct

SEQ ID NO: 90823 - DNA, 33 bp, Homo sapien
gcagactcatgaatcagctttgggaaatggaat

SEQ ID NO: 90824 - DNA, 33 bp, Homo sapien
gcagactcatgaatcatctttgggaaatggaat

SEQ ID NO: 90825 - DNA, 33 bp, Homo sapien
acagggtttttctttcacttgaattgcatgatg

SEQ ID NO: 90826 - DNA, 33 bp, Homo sapien
acagggtttttctttcgcttgaattgcatgatg

SEQ ID NO: 90827 - DNA, 33 bp, Homo sapien
gagcaggacatctcacagactcacgggctactt

SEQ ID NO: 90828 - DNA, 33 bp, Homo sapien
gagcaggacatctcacggactcacgggctactt

SEQ ID NO: 90829 - DNA, 33 bp, Homo sapien
cctcagggcccaagaagaaaaattccatcgagc

SEQ ID NO: 90830 - DNA, 33 bp, Homo sapien
cctcagggcccaagaataaaaattccatcgagc

SEQ ID NO: 90831 - DNA, 33 bp, Homo sapien
aaggttaagtgaagaacgaaaataatgtttaac

SEQ ID NO: 90832 - DNA, 33 bp, Homo sapien
aaggttaagtgaagaatgaaaataatgtttaac

SEQ ID NO: 90833 - DNA, 33 bp, Homo sapien
ggtgtccagggaataacgtcagactgaggagaa

SEQ ID NO: 90834 - DNA, 33 bp, Homo sapien
ggtgtccagggaataatgtcagactgaggagaa

SEQ ID NO: 90835 - DNA, 33 bp, Homo sapien
ttcgttaggataaagacgaaactgttgtagcaa

SEQ ID NO: 90836 - DNA, 33 bp, Homo sapien
ttcgttaggataaagatgaaactgttgtagcaa

SEQ ID NO: 90837 - DNA, 33 bp, Homo sapien
gtcggtaactgaataacggccacccacagatgt

SEQ ID NO: 90838 - DNA, 33 bp, Homo sapien
gtcggtaactgaataatggccacccacagatgt

SEQ ID NO: 90839 - DNA, 33 bp, Homo sapien
acgtaccctgcaaaccaactgctccattcccag

SEQ ID NO: 90840 - DNA, 33 bp, Homo sapien
acgtaccctgcaaaccgactgctccattcccag

SEQ ID NO: 90841 - DNA, 33 bp, Homo sapien
taagcaagttaagtaacatgcccaattcataga

SEQ ID NO: 90842 - DNA, 33 bp, Homo sapien
taagcaagttaagtaatatgcccaattcataga

SEQ ID NO: 90843 - DNA, 33 bp, Homo sapien
agagtaagggctaaacacctggcttatggagtc

SEQ ID NO: 90844 - DNA, 33 bp, Homo sapien
agagtaagggctaaacccctggcttatggagtc

SEQ ID NO: 90845 - DNA, 33 bp, Homo sapien
attaccctctgttaataaggacggactagaatt

SEQ ID NO: 90846 - DNA, 33 bp, Homo sapien
attaccctctgttaatcaggacggactagaatt

SEQ ID NO: 90847 - DNA, 33 bp, Homo sapien
aaataaccacgatgacaccttccgtaggcacac

SEQ ID NO: 90848 - DNA, 33 bp, Homo sapien
aaataaccacgatgacgccttccgtaggcacac

SEQ ID NO: 90849 - DNA, 33 bp, Homo sapien
tttatccccagatagacaggagacgatgttatt

SEQ ID NO: 90850 - DNA, 33 bp, Homo sapien
tttatccccagatagataggagacgatgttatt

SEQ ID NO: 90851 - DNA, 33 bp, Homo sapien
tgtttgtctaggatagaacgctttggcaaacct

SEQ ID NO: 90852 - DNA, 33 bp, Homo sapien
tgtttgtctaggataggacgctttggcaaacct

SEQ ID NO: 90853 - DNA, 33 bp, Homo sapien
agagatacagggaagagtagcatgactaccgtg

SEQ ID NO: 90854 - DNA, 33 bp, Homo sapien
agagatacagggaagattagcatgactaccgtg

SEQ ID NO: 90855 - DNA, 33 bp, Homo sapien
ccactatcatcctgtcaagtttattcacctctc

SEQ ID NO: 90856 - DNA, 33 bp, Homo sapien
ccactatcatcctgtcgagtttattcacctctc

SEQ ID NO: 90857 - DNA, 33 bp, Homo sapien
cctgcacactgtaaccaaaggagaaacactctc

SEQ ID NO: 90858 - DNA, 33 bp, Homo sapien
cctgcacactgtaaccgaaggagaaacactctc

SEQ ID NO: 90859 - DNA, 33 bp, Homo sapien
tagatccttgtttttgcaagcagtaatagtaca

SEQ ID NO: 90860 - DNA, 33 bp, Homo sapien
tagatccttgtttttgtaagcagtaatagtaca

SEQ ID NO: 90861 - DNA, 33 bp, Homo sapien
aaaataagcagaagagaagatgaggtatcccag

SEQ ID NO: 90862 - DNA, 33 bp, Homo sapien
aaaataagcagaagaggagatgaggtatcccag

SEQ ID NO: 90863 - DNA, 33 bp, Homo sapien
tttttgcacaaacgacagctccagcggataaca

SEQ ID NO: 90864 - DNA, 33 bp, Homo sapien
tttttgcacaaacgacggctccagcggataaca

SEQ ID NO: 90865 - DNA, 33 bp, Homo sapien
cctaaatcacaatggggagtgaatctgtcttgt

SEQ ID NO: 90866 - DNA, 33 bp, Homo sapien
cctaaatcacaatgggtagtgaatctgtcttgt

SEQ ID NO: 90867 - DNA, 33 bp, Homo sapien
atatttgttgagcaaacaaatgaatgcacacac

SEQ ID NO: 90868 - DNA, 33 bp, Homo sapien
atatttgttgagcaaataaatgaatgcacacac

SEQ ID NO: 90869 - DNA, 33 bp, Homo sapien
attatatgcaacaaaactgaataacctcctttg

SEQ ID NO: 90870 - DNA, 33 bp, Homo sapien
attatatgcaacaaaagtgaataacctcctttg

SEQ ID NO: 90871 - DNA, 33 bp, Homo sapien
actttacattggaaaccgtagagttatgactcg

SEQ ID NO: 90872 - DNA, 33 bp, Homo sapien
actttacattggaaactgtagagttatgactcg

SEQ ID NO: 90873 - DNA, 33 bp, Homo sapien
cccgccatggaaacacacttatgagtccttcgc

SEQ ID NO: 90874 - DNA, 33 bp, Homo sapien
cccgccatggaaacacgcttatgagtccttcgc

SEQ ID NO: 90875 - DNA, 33 bp, Homo sapien
gcctttgtgtaaaatgcaaataaatgcatggca

SEQ ID NO: 90876 - DNA, 33 bp, Homo sapien
gcctttgtgtaaaatgtaaataaatgcatggca

SEQ ID NO: 90877 - DNA, 33 bp, Homo sapien
tgaaccaatgatgctccaacaggtgagatgcaa

SEQ ID NO: 90878 - DNA, 33 bp, Homo sapien
tgaaccaatgatgctctaacaggtgagatgcaa

SEQ ID NO: 90879 - DNA, 33 bp, Homo sapien
acattcatgacgtcaccgtaaagttagtctccc

SEQ ID NO: 90880 - DNA, 33 bp, Homo sapien
acattcatgacgtcactgtaaagttagtctccc

SEQ ID NO: 90881 - DNA, 33 bp, Homo sapien
tacctctaaacaattacgaaacagtccaattct

SEQ ID NO: 90882 - DNA, 33 bp, Homo sapien
tacctctaaacaattatgaaacagtccaattct

SEQ ID NO: 90883 - DNA, 33 bp, Homo sapien
ggacttacacttagcaaataactcccaaactat

SEQ ID NO: 90884 - DNA, 33 bp, Homo sapien
ggacttacacttagcagataactcccaaactat

SEQ ID NO: 90885 - DNA, 33 bp, Homo sapien
ccccagggaagatgaaaaagaagcttagggctg

SEQ ID NO: 90886 - DNA, 33 bp, Homo sapien
ccccagggaagatgaagaagaagcttagggctg

SEQ ID NO: 90887 - DNA, 33 bp, Homo sapien
agctgtccacctcttaccataactaattacaca

SEQ ID NO: 90888 - DNA, 33 bp, Homo sapien
agctgtccacctcttatcataactaattacaca

SEQ ID NO: 90889 - DNA, 33 bp, Homo sapien
acaaggccgaagtccaacttctattctgaaggt

SEQ ID NO: 90890 - DNA, 33 bp, Homo sapien
acaaggccgaagtccagcttctattctgaaggt

SEQ ID NO: 90891 - DNA, 33 bp, Homo sapien
ttgctgagaaatctgaagcaggaactcctcctt

SEQ ID NO: 90892 - DNA, 33 bp, Homo sapien
ttgctgagaaatctgaggcaggaactcctcctt

SEQ ID NO: 90893 - DNA, 33 bp, Homo sapien
tgtaatatagctcaaccgaaatctaaacgcgat

SEQ ID NO: 90894 - DNA, 33 bp, Homo sapien
tgtaatatagctcaactgaaatctaaacgcgat

SEQ ID NO: 90895 - DNA, 33 bp, Homo sapien
aacgtcacccttcagccgacggataccgggagc

SEQ ID NO: 90896 - DNA, 33 bp, Homo sapien
aacgtcacccttcagcggacggataccgggagc

SEQ ID NO: 90897 - DNA, 33 bp, Homo sapien
ctgcctactaaactgaaccctgacaatggcttg

SEQ ID NO: 90898 - DNA, 33 bp, Homo sapien
ctgcctactaaactgagccctgacaatggcttg

SEQ ID NO: 90899 - DNA, 33 bp, Homo sapien
ctctttagccttctggaaaaatgaatgaggaat

SEQ ID NO: 90900 - DNA, 33 bp, Homo sapien
ctctttagccttctgggaaaatgaatgaggaat

SEQ ID NO: 90901 - DNA, 33 bp, Homo sapien
gctgtctggctgaataacaaacagatggcgatt

SEQ ID NO: 90902 - DNA, 33 bp, Homo sapien
gctgtctggctgaatagcaaacagatggcgatt

SEQ ID NO: 90903 - DNA, 33 bp, Homo sapien
ttctctgctttgagaacaatcttcccagtaatc

SEQ ID NO: 90904 - DNA, 33 bp, Homo sapien
ttctctgctttgagaataatcttcccagtaatc

SEQ ID NO: 90905 - DNA, 33 bp, Homo sapien
ggactttatagcctcagagccaaatctctactg

SEQ ID NO: 90906 - DNA, 33 bp, Homo sapien
ggactttatagcctcatagccaaatctctactg

SEQ ID NO: 90907 - DNA, 33 bp, Homo sapien
tcttcatcttctttaaggaatgaccatgatgtt

SEQ ID NO: 90908 - DNA, 33 bp, Homo sapien
tcttcatcttctttaatgaatgaccatgatgtt

SEQ ID NO: 90909 - DNA, 33 bp, Homo sapien
tttaagctgttacaaacgtacctaaaagctgtg

SEQ ID NO: 90910 - DNA, 33 bp, Homo sapien
tttaagctgttacaaatgtacctaaaagctgtg

SEQ ID NO: 90911 - DNA, 33 bp, Homo sapien
tgcttgtgtgttttgaagccaagctcccttttt

SEQ ID NO: 90912 - DNA, 33 bp, Homo sapien
tgcttgtgtgttttgaggccaagctcccttttt

SEQ ID NO: 90913 - DNA, 33 bp, Homo sapien
agccatgtcaattgcaacctcgctatcagggtc

SEQ ID NO: 90914 - DNA, 33 bp, Homo sapien
agccatgtcaattgcatcctcgctatcagggtc

SEQ ID NO: 90915 - DNA, 33 bp, Homo sapien
ggcacggaataccagaaatgtattgaaaagttc

SEQ ID NO: 90916 - DNA, 33 bp, Homo sapien
ggcacggaataccagagatgtattgaaaagttc

SEQ ID NO: 90917 - DNA, 33 bp, Homo sapien
ggaaaatcgcgtttcacatgcatcacattttta

SEQ ID NO: 90918 - DNA, 33 bp, Homo sapien
ggaaaatcgcgtttcatatgcatcacattttta

SEQ ID NO: 90919 - DNA, 33 bp, Homo sapien
tatagaaaggcactgaaaaatgggcactggtat

SEQ ID NO: 90920 - DNA, 33 bp, Homo sapien
tatagaaaggcactgagaaatgggcactggtat

SEQ ID NO: 90921 - DNA, 33 bp, Homo sapien
gcccatgcctgaaacccggcaagcactcagttt

SEQ ID NO: 90922 - DNA, 33 bp, Homo sapien
gcccatgcctgaaacctggcaagcactcagttt

SEQ ID NO: 90923 - DNA, 33 bp, Homo sapien
gccaggtgtgggggacacgggcctgagatacca

SEQ ID NO: 90924 - DNA, 33 bp, Homo sapien
gccaggtgtgggggacgcgggcctgagatacca

SEQ ID NO: 90925 - DNA, 33 bp, Homo sapien
ttcacttgtagactggaaaaggagagtacggat

SEQ ID NO: 90926 - DNA, 33 bp, Homo sapien
ttcacttgtagactgggaaaggagagtacggat

SEQ ID NO: 90927 - DNA, 33 bp, Homo sapien
aaaaatacaaaggaagaaaaggaatatcagttt

SEQ ID NO: 90928 - DNA, 33 bp, Homo sapien
aaaaatacaaaggaagtaaaggaatatcagttt

SEQ ID NO: 90929 - DNA, 33 bp, Homo sapien
gatcatataatacatacatcgtgctgtaaagtt

SEQ ID NO: 90930 - DNA, 33 bp, Homo sapien
gatcatataatacatatatcgtgctgtaaagtt

SEQ ID NO: 90931 - DNA, 33 bp, Homo sapien
atgctgggttgctattaaaatgacgtggcaaac

SEQ ID NO: 90932 - DNA, 33 bp, Homo sapien
atgctgggttgctattgaaatgacgtggcaaac

SEQ ID NO: 90933 - DNA, 33 bp, Homo sapien
ctttccctctcccttaagttctcacgattcctc

SEQ ID NO: 90934 - DNA, 33 bp, Homo sapien
ctttccctctcccttatgttctcacgattcctc

SEQ ID NO: 90935 - DNA, 33 bp, Homo sapien
atctgacctctgaaaccccattttcccacctgg

SEQ ID NO: 90936 - DNA, 33 bp, Homo sapien
atctgacctctgaaactccattttcccacctgg

SEQ ID NO: 90937 - DNA, 33 bp, Homo sapien
gctctccatctgaataacttcaccacctcactg

SEQ ID NO: 90938 - DNA, 33 bp, Homo sapien
gctctccatctgaataccttcaccacctcactg

SEQ ID NO: 90939 - DNA, 33 bp, Homo sapien
ttttacctctaagataaacttcatccgggtaaa

SEQ ID NO: 90940 - DNA, 33 bp, Homo sapien
ttttacctctaagatatacttcatccgggtaaa

SEQ ID NO: 90941 - DNA, 33 bp, Homo sapien
gagcacagccacaggcaatatgcaaagaaatgg

SEQ ID NO: 90942 - DNA, 33 bp, Homo sapien
gagcacagccacaggccatatgcaaagaaatgg

SEQ ID NO: 90943 - DNA, 33 bp, Homo sapien
tattgtgaaaaactcacgaagctgttctgcttt

SEQ ID NO: 90944 - DNA, 33 bp, Homo sapien
tattgtgaaaaactcatgaagctgttctgcttt

SEQ ID NO: 90945 - DNA, 33 bp, Homo sapien
tttagagggtaaagaacaagcatgtttcttatc

SEQ ID NO: 90946 - DNA, 33 bp, Homo sapien
tttagagggtaaagaataagcatgtttcttatc

SEQ ID NO: 90947 - DNA, 33 bp, Homo sapien
atgtagtccttgggagcattaagaatatgcttt

SEQ ID NO: 90948 - DNA, 33 bp, Homo sapien
atgtagtccttgggaggattaagaatatgcttt

SEQ ID NO: 90949 - DNA, 33 bp, Homo sapien
tgtaccgtgcaagtaacagtgtggttgcggcaa

SEQ ID NO: 90950 - DNA, 33 bp, Homo sapien
tgtaccgtgcaagtaagagtgtggttgcggcaa

SEQ ID NO: 90951 - DNA, 33 bp, Homo sapien
cagacttcagacctggaagtaaaggctgccacc

SEQ ID NO: 90952 - DNA, 33 bp, Homo sapien
cagacttcagacctgggagtaaaggctgccacc

SEQ ID NO: 90953 - DNA, 33 bp, Homo sapien
ggcttaaggtaatcaaagaaccacaccccaaaa

SEQ ID NO: 90954 - DNA, 33 bp, Homo sapien
ggcttaaggtaatcaatgaaccacaccccaaaa

SEQ ID NO: 90955 - DNA, 33 bp, Homo sapien
gtacttagcaataaaaacccaaaagatgaggtc

SEQ ID NO: 90956 - DNA, 33 bp, Homo sapien
gtacttagcaataaaaccccaaaagatgaggtc

SEQ ID NO: 90957 - DNA, 33 bp, Homo sapien
gacccattagacaggacaaagaaacgggtgctg

SEQ ID NO: 90958 - DNA, 33 bp, Homo sapien
gacccattagacaggagaaagaaacgggtgctg

SEQ ID NO: 90959 - DNA, 33 bp, Homo sapien
tgctaagtacgtgacaacacttgatcttttcaa

SEQ ID NO: 90960 - DNA, 33 bp, Homo sapien
tgctaagtacgtgacatcacttgatcttttcaa

SEQ ID NO: 90961 - DNA, 33 bp, Homo sapien
cagtcatgctagcttacatcattactgtatcag

SEQ ID NO: 90962 - DNA, 33 bp, Homo sapien
cagtcatgctagcttatatcattactgtatcag

SEQ ID NO: 90963 - DNA, 33 bp, Homo sapien
aggtctccaatggacacgtgatggcagaaaggg

SEQ ID NO: 90964 - DNA, 33 bp, Homo sapien
aggtctccaatggacatgtgatggcagaaaggg

SEQ ID NO: 90965 - DNA, 33 bp, Homo sapien
gataaaaagcacacaacgtaaaatttaccatct

SEQ ID NO: 90966 - DNA, 33 bp, Homo sapien
gataaaaagcacacaatgtaaaatttaccatct

SEQ ID NO: 90967 - DNA, 33 bp, Homo sapien
acagaatgcctggttacgtttgaatttcggata

SEQ ID NO: 90968 - DNA, 33 bp, Homo sapien
acagaatgcctggttatgtttgaatttcggata

SEQ ID NO: 90969 - DNA, 33 bp, Homo sapien
tcttcacagcaaaggcagatcatgatgctcaca

SEQ ID NO: 90970 - DNA, 33 bp, Homo sapien
tcttcacagcaaaggcggatcatgatgctcaca

SEQ ID NO: 90971 - DNA, 33 bp, Homo sapien
taagttttgcaacagaaaaaagtcaatataatg

SEQ ID NO: 90972 - DNA, 33 bp, Homo sapien
taagttttgcaacagagaaaagtcaatataatg

SEQ ID NO: 90973 - DNA, 33 bp, Homo sapien
caccattcttaggtcacgcaggtggtagctgta

SEQ ID NO: 90974 - DNA, 33 bp, Homo sapien
caccattcttaggtcatgcaggtggtagctgta

SEQ ID NO: 90975 - DNA, 33 bp, Homo sapien
aaatctatcctaggtaaaacatctaacatattg

SEQ ID NO: 90976 - DNA, 33 bp, Homo sapien
aaatctatcctaggtagaacatctaacatattg

SEQ ID NO: 90977 - DNA, 33 bp, Homo sapien
cagtgattcccagcaaagacaaagccgcctttt

SEQ ID NO: 90978 - DNA, 33 bp, Homo sapien
cagtgattcccagcaaggacaaagccgcctttt

SEQ ID NO: 90979 - DNA, 33 bp, Homo sapien
gtaggtgacacgctggacagggatgaagatttc

SEQ ID NO: 90980 - DNA, 33 bp, Homo sapien
gtaggtgacacgctggtcagggatgaagatttc

SEQ ID NO: 90981 - DNA, 33 bp, Homo sapien
tttctgccaaattggacgtcttcactgtgttca

SEQ ID NO: 90982 - DNA, 33 bp, Homo sapien
tttctgccaaattggatgtcttcactgtgttca

SEQ ID NO: 90983 - DNA, 33 bp, Homo sapien
ttcctatttactttccaatgcatctgtagaaat

SEQ ID NO: 90984 - DNA, 33 bp, Homo sapien
ttcctatttactttcccatgcatctgtagaaat

SEQ ID NO: 90985 - DNA, 33 bp, Homo sapien
caaggatgtgtgaaaccctgcgtgatgcgcctc

SEQ ID NO: 90986 - DNA, 33 bp, Homo sapien
caaggatgtgtgaaactctgcgtgatgcgcctc

SEQ ID NO: 90987 - DNA, 33 bp, Homo sapien
ttgcttgcagatcctccaaaacatataaagttg

SEQ ID NO: 90988 - DNA, 33 bp, Homo sapien
ttgcttgcagatcctctaaaacatataaagttg

SEQ ID NO: 90989 - DNA, 33 bp, Homo sapien
tattatcaatagaaagaaatctctgggttataa

SEQ ID NO: 90990 - DNA, 33 bp, Homo sapien
tattatcaatagaaaggaatctctgggttataa

SEQ ID NO: 90991 - DNA, 33 bp, Homo sapien
ggaaacatttacagtcaatgccctctaaagcct

SEQ ID NO: 90992 - DNA, 33 bp, Homo sapien
ggaaacatttacagtcgatgccctctaaagcct

SEQ ID NO: 90993 - DNA, 33 bp, Homo sapien
gagaatcaggttcaacacaggaacaatcctcag

SEQ ID NO: 90994 - DNA, 33 bp, Homo sapien
gagaatcaggttcaacgcaggaacaatcctcag

SEQ ID NO: 90995 - DNA, 33 bp, Homo sapien
gaaattaagcaagtccacaaagaagcatattgc

SEQ ID NO: 90996 - DNA, 33 bp, Homo sapien
gaaattaagcaagtccgcaaagaagcatattgc

SEQ ID NO: 90997 - DNA, 33 bp, Homo sapien
ctggttattaatcatgaaagtgagtgccagtat

SEQ ID NO: 90998 - DNA, 33 bp, Homo sapien
ctggttattaatcatgtaagtgagtgccagtat

SEQ ID NO: 90999 - DNA, 33 bp, Homo sapien
gctcaagggaatgggaactcagtatggagataa

SEQ ID NO: 91000 - DNA, 33 bp, Homo sapien
gctcaagggaatgggagctcagtatggagataa

SEQ ID NO: 91001 - DNA, 33 bp, Homo sapien
cataacacaggtgatgacaagaccagtggctcc

SEQ ID NO: 91002 - DNA, 33 bp, Homo sapien
cataacacaggtgatggcaagaccagtggctcc

SEQ ID NO: 91003 - DNA, 33 bp, Homo sapien
atactactcactaaagacatcttggaatatagg

SEQ ID NO: 91004 - DNA, 33 bp, Homo sapien
atactactcactaaaggcatcttggaatatagg

SEQ ID NO: 91005 - DNA, 33 bp, Homo sapien
agtcggatggttaccaacaaatacggatcacca

SEQ ID NO: 91006 - DNA, 33 bp, Homo sapien
agtcggatggttaccagcaaatacggatcacca

SEQ ID NO: 91007 - DNA, 33 bp, Homo sapien
tctgcctcaatgatgacgtttacagcaccataa

SEQ ID NO: 91008 - DNA, 33 bp, Homo sapien
tctgcctcaatgatgatgtttacagcaccataa

SEQ ID NO: 91009 - DNA, 33 bp, Homo sapien
aactaaatcgtagtaacgtaaatccatgcatgg

SEQ ID NO: 91010 - DNA, 33 bp, Homo sapien
aactaaatcgtagtaatgtaaatccatgcatgg

SEQ ID NO: 91011 - DNA, 33 bp, Homo sapien
tcttaagccatggaaaagtggctttgctgttga

SEQ ID NO: 91012 - DNA, 33 bp, Homo sapien
tcttaagccatggaaacgtggctttgctgttga

SEQ ID NO: 91013 - DNA, 33 bp, Homo sapien
catctacaaaatatacactcacacaaaaatcag

SEQ ID NO: 91014 - DNA, 33 bp, Homo sapien
catctacaaaatatacgctcacacaaaaatcag

SEQ ID NO: 91015 - DNA, 33 bp, Homo sapien
ctggggtgcttggtcccgaggataagacaacct

SEQ ID NO: 91016 - DNA, 33 bp, Homo sapien
ctggggtgcttggtcctgaggataagacaacct

SEQ ID NO: 91017 - DNA, 33 bp, Homo sapien
tttagaaaaggcagacaaaaaaagtgatacatt

SEQ ID NO: 91018 - DNA, 33 bp, Homo sapien
tttagaaaaggcagaccaaaaaagtgatacatt

SEQ ID NO: 91019 - DNA, 33 bp, Homo sapien
tgaatagatgggtttgcattaggtagaaatact

SEQ ID NO: 91020 - DNA, 33 bp, Homo sapien
tgaatagatgggtttgtattaggtagaaatact

SEQ ID NO: 91021 - DNA, 33 bp, Homo sapien
cctgatcctaaatttcacataatcatgcaatct

SEQ ID NO: 91022 - DNA, 33 bp, Homo sapien
cctgatcctaaatttcgcataatcatgcaatct

SEQ ID NO: 91023 - DNA, 33 bp, Homo sapien
tttatgggaggaatgacgtaccgacgggaatca

SEQ ID NO: 91024 - DNA, 33 bp, Homo sapien
tttatgggaggaatgaggtaccgacgggaatca

SEQ ID NO: 91025 - DNA, 33 bp, Homo sapien
tgtaaacctagagtgcccaagaatgtaaatgta

SEQ ID NO: 91026 - DNA, 33 bp, Homo sapien
tgtaaacctagagtgctcaagaatgtaaatgta

SEQ ID NO: 91027 - DNA, 33 bp, Homo sapien
cctataccttccaagaacaccagtgaatgcctg

SEQ ID NO: 91028 - DNA, 33 bp, Homo sapien
cctataccttccaagaccaccagtgaatgcctg

SEQ ID NO: 91029 - DNA, 33 bp, Homo sapien
ttgtttagctctctgccatagtcaagtgaaagt

SEQ ID NO: 91030 - DNA, 33 bp, Homo sapien
ttgtttagctctctgcgatagtcaagtgaaagt

SEQ ID NO: 91031 - DNA, 33 bp, Homo sapien
atattcaaaaaaggtcaatttggctttccattt

SEQ ID NO: 91032 - DNA, 33 bp, Homo sapien
atattcaaaaaaggtcgatttggctttccattt

SEQ ID NO: 91033 - DNA, 33 bp, Homo sapien
ataaatgtgtgacatactaatttacaggagatt

SEQ ID NO: 91034 - DNA, 33 bp, Homo sapien
ataaatgtgtgacatagtaatttacaggagatt

SEQ ID NO: 91035 - DNA, 33 bp, Homo sapien
aaaagaaacagttttacatagcgaataaggaac

SEQ ID NO: 91036 - DNA, 33 bp, Homo sapien
aaaagaaacagttttatatagcgaataaggaac

SEQ ID NO: 91037 - DNA, 33 bp, Homo sapien
tctcactctttcctgaacatgaatgctcttaaa

SEQ ID NO: 91038 - DNA, 33 bp, Homo sapien
tctcactctttcctgatcatgaatgctcttaaa

SEQ ID NO: 91039 - DNA, 33 bp, Homo sapien
gaatgcttaggatagcaaggctgatggatccaa

SEQ ID NO: 91040 - DNA, 33 bp, Homo sapien
gaatgcttaggatagcgaggctgatggatccaa

SEQ ID NO: 91041 - DNA, 33 bp, Homo sapien
tgcatcatgccaccaaataagctactgagacca

SEQ ID NO: 91042 - DNA, 33 bp, Homo sapien
tgcatcatgccaccaagtaagctactgagacca

SEQ ID NO: 91043 - DNA, 33 bp, Homo sapien
gaagtatgtggagttacaagtcagtctcctgct

SEQ ID NO: 91044 - DNA, 33 bp, Homo sapien
gaagtatgtggagttagaagtcagtctcctgct

SEQ ID NO: 91045 - DNA, 33 bp, Homo sapien
gtgaagaagctgccaccggccaaagatgcaaca

SEQ ID NO: 91046 - DNA, 33 bp, Homo sapien
gtgaagaagctgccactggccaaagatgcaaca

SEQ ID NO: 91047 - DNA, 33 bp, Homo sapien
cccaaaagcgcagggtcacaaaagcaaaactga

SEQ ID NO: 91048 - DNA, 33 bp, Homo sapien
cccaaaagcgcagggtgacaaaagcaaaactga

SEQ ID NO: 91049 - DNA, 33 bp, Homo sapien
aaagtcacatggctgcaaagtgatagaggtgac

SEQ ID NO: 91050 - DNA, 33 bp, Homo sapien
aaagtcacatggctgcgaagtgatagaggtgac

SEQ ID NO: 91051 - DNA, 33 bp, Homo sapien
gacagacacagactacaccctagcaggtgcaaa

SEQ ID NO: 91052 - DNA, 33 bp, Homo sapien
gacagacacagactacgccctagcaggtgcaaa

SEQ ID NO: 91053 - DNA, 33 bp, Homo sapien
ttttttgaacccttagacatattgaagatgttt

SEQ ID NO: 91054 - DNA, 33 bp, Homo sapien
ttttttgaacccttagtcatattgaagatgttt

SEQ ID NO: 91055 - DNA, 33 bp, Homo sapien
atactgcaaaatttgaagtccacaaagagtaaa

SEQ ID NO: 91056 - DNA, 33 bp, Homo sapien
atactgcaaaatttgaggtccacaaagagtaaa

SEQ ID NO: 91057 - DNA, 33 bp, Homo sapien
acatacaatgcttatgaaacataaattcacaca

SEQ ID NO: 91058 - DNA, 33 bp, Homo sapien
acatacaatgcttatgcaacataaattcacaca

SEQ ID NO: 91059 - DNA, 33 bp, Homo sapien
gccacaactattatgcacatttaaaacacaatt

SEQ ID NO: 91060 - DNA, 33 bp, Homo sapien
gccacaactattatgcccatttaaaacacaatt

SEQ ID NO: 91061 - DNA, 33 bp, Homo sapien
gcaactttccttcccacactctagcatttttat

SEQ ID NO: 91062 - DNA, 33 bp, Homo sapien
gcaactttccttcccatactctagcatttttat

SEQ ID NO: 91063 - DNA, 33 bp, Homo sapien
ttatctaaaggactccaaagccaacttaaagac

SEQ ID NO: 91064 - DNA, 33 bp, Homo sapien
ttatctaaaggactccgaagccaacttaaagac

SEQ ID NO: 91065 - DNA, 33 bp, Homo sapien
ctgctgctgcccatcacaggaaaaacagcttgg

SEQ ID NO: 91066 - DNA, 33 bp, Homo sapien
ctgctgctgcccatcataggaaaaacagcttgg

SEQ ID NO: 91067 - DNA, 33 bp, Homo sapien
gcttcatcttacgccacgctccctcagtagatt

SEQ ID NO: 91068 - DNA, 33 bp, Homo sapien
gcttcatcttacgccatgctccctcagtagatt

SEQ ID NO: 91069 - DNA, 33 bp, Homo sapien
agatcaatgtgcaattaaaattccaaactgagg

SEQ ID NO: 91070 - DNA, 33 bp, Homo sapien
agatcaatgtgcaatttaaattccaaactgagg

SEQ ID NO: 91071 - DNA, 33 bp, Homo sapien
taatatatgcttagcacacagatctcaataatg

SEQ ID NO: 91072 - DNA, 33 bp, Homo sapien
taatatatgcttagcagacagatctcaataatg

SEQ ID NO: 91073 - DNA, 33 bp, Homo sapien
agtataaaatttagcaatgaagctggaacgtaa

SEQ ID NO: 91074 - DNA, 33 bp, Homo sapien
agtataaaatttagcagtgaagctggaacgtaa

SEQ ID NO: 91075 - DNA, 33 bp, Homo sapien
cagtgagttcaaaactaaactgagcagagttga

SEQ ID NO: 91076 - DNA, 33 bp, Homo sapien
cagtgagttcaaaactgaactgagcagagttga

SEQ ID NO: 91077 - DNA, 33 bp, Homo sapien
gttaaattctaatcagacaatcaacactcacag

SEQ ID NO: 91078 - DNA, 33 bp, Homo sapien
gttaaattctaatcaggcaatcaacactcacag

SEQ ID NO: 91079 - DNA, 33 bp, Homo sapien
tgtgtcttttactatgaacaccttaatcattcc

SEQ ID NO: 91080 - DNA, 33 bp, Homo sapien
tgtgtcttttactatgtacaccttaatcattcc

SEQ ID NO: 91081 - DNA, 33 bp, Homo sapien
tttctggaagagtttcaaattttctatgctctt

SEQ ID NO: 91082 - DNA, 33 bp, Homo sapien
tttctggaagagtttccaattttctatgctctt

SEQ ID NO: 91083 - DNA, 33 bp, Homo sapien
cctaataaagataagaaaatagctgataaaata

SEQ ID NO: 91084 - DNA, 33 bp, Homo sapien
cctaataaagataagagaatagctgataaaata

SEQ ID NO: 91085 - DNA, 33 bp, Homo sapien
gattgtgatgccagatgaggtctttgaaatcca

SEQ ID NO: 91086 - DNA, 33 bp, Homo sapien
gattgtgatgccagattaggtctttgaaatcca

SEQ ID NO: 91087 - DNA, 33 bp, Homo sapien
ctaaatctgggttaccaagcgcttctgaaggaa

SEQ ID NO: 91088 - DNA, 33 bp, Homo sapien
ctaaatctgggttaccgagcgcttctgaaggaa

SEQ ID NO: 91089 - DNA, 33 bp, Homo sapien
ccctttctcagtcagaccagtaacatcaaaagt

SEQ ID NO: 91090 - DNA, 33 bp, Homo sapien
ccctttctcagtcagatcagtaacatcaaaagt

SEQ ID NO: 91091 - DNA, 33 bp, Homo sapien
tgtgaatgttcagtaagtcctgccatacttgat

SEQ ID NO: 91092 - DNA, 33 bp, Homo sapien
tgtgaatgttcagtaattcctgccatacttgat

SEQ ID NO: 91093 - DNA, 33 bp, Homo sapien
ttcaagtatctgattaagaaaaagtattaccag

SEQ ID NO: 91094 - DNA, 33 bp, Homo sapien
ttcaagtatctgattaggaaaaagtattaccag

SEQ ID NO: 91095 - DNA, 33 bp, Homo sapien
cgataagatcatgacaatgggataactaggtga

SEQ ID NO: 91096 - DNA, 33 bp, Homo sapien
cgataagatcatgacagtgggataactaggtga

SEQ ID NO: 91097 - DNA, 33 bp, Homo sapien
gtgtccagcgactcacacttaaacacccagtaa

SEQ ID NO: 91098 - DNA, 33 bp, Homo sapien
gtgtccagcgactcacgcttaaacacccagtaa

SEQ ID NO: 91099 - DNA, 33 bp, Homo sapien
ctacagttgccgtccaatccagtttctttctgt

SEQ ID NO: 91100 - DNA, 33 bp, Homo sapien
ctacagttgccgtccagtccagtttctttctgt

SEQ ID NO: 91101 - DNA, 33 bp, Homo sapien
tgattctggctcctacacatcacgttctgcttg

SEQ ID NO: 91102 - DNA, 33 bp, Homo sapien
tgattctggctcctacgcatcacgttctgcttg

SEQ ID NO: 91103 - DNA, 33 bp, Homo sapien
cctgcggggtgatgaaatgtgtggcccagagcc

SEQ ID NO: 91104 - DNA, 33 bp, Homo sapien
cctgcggggtgatgaagtgtgtggcccagagcc

SEQ ID NO: 91105 - DNA, 33 bp, Homo sapien
aataattccattgacaactccttataaaatatt

SEQ ID NO: 91106 - DNA, 33 bp, Homo sapien
aataattccattgacatctccttataaaatatt

SEQ ID NO: 91107 - DNA, 33 bp, Homo sapien
atcaaggaactaatgcaccaagaagatgaactt

SEQ ID NO: 91108 - DNA, 33 bp, Homo sapien
atcaaggaactaatgcgccaagaagatgaactt

SEQ ID NO: 91109 - DNA, 33 bp, Homo sapien
ccccatgcatcatctcacgcgttctccatctgt

SEQ ID NO: 91110 - DNA, 33 bp, Homo sapien
ccccatgcatcatctcgcgcgttctccatctgt

SEQ ID NO: 91111 - DNA, 33 bp, Homo sapien
ccttttgtacaccaaccaggttctttgccctgc

SEQ ID NO: 91112 - DNA, 33 bp, Homo sapien
ccttttgtacaccaactaggttctttgccctgc

SEQ ID NO: 91113 - DNA, 33 bp, Homo sapien
agatctttataagtcagtgaaccagtattttcc

SEQ ID NO: 91114 - DNA, 33 bp, Homo sapien
agatctttataagtcattgaaccagtattttcc

SEQ ID NO: 91115 - DNA, 33 bp, Homo sapien
acttttacagaactgacgaaagataccaatcca

SEQ ID NO: 91116 - DNA, 33 bp, Homo sapien
acttttacagaactgatgaaagataccaatcca

SEQ ID NO: 91117 - DNA, 33 bp, Homo sapien
ttcttaggctatgctccgaaaatttattttgtc

SEQ ID NO: 91118 - DNA, 33 bp, Homo sapien
ttcttaggctatgctctgaaaatttattttgtc

SEQ ID NO: 91119 - DNA, 33 bp, Homo sapien
ctcatttcatttaatcactgtaaaacaacctct

SEQ ID NO: 91120 - DNA, 33 bp, Homo sapien
ctcatttcatttaatccctgtaaaacaacctct

SEQ ID NO: 91121 - DNA, 33 bp, Homo sapien
tatgacatgtttacccaaaatcaaagtcaagca

SEQ ID NO: 91122 - DNA, 33 bp, Homo sapien
tatgacatgtttacccgaaatcaaagtcaagca

SEQ ID NO: 91123 - DNA, 33 bp, Homo sapien
acatagccctaagcaaccatttcctaccatatc

SEQ ID NO: 91124 - DNA, 33 bp, Homo sapien
acatagccctaagcaatcatttcctaccatatc

SEQ ID NO: 91125 - DNA, 33 bp, Homo sapien
caggagcctgcacttacatacaaaataccagtt

SEQ ID NO: 91126 - DNA, 33 bp, Homo sapien
caggagcctgcacttatatacaaaataccagtt

SEQ ID NO: 91127 - DNA, 33 bp, Homo sapien
gtctgcaggttcaggaagattataaggtcgggt

SEQ ID NO: 91128 - DNA, 33 bp, Homo sapien
gtctgcaggttcaggaggattataaggtcgggt

SEQ ID NO: 91129 - DNA, 33 bp, Homo sapien
gatccttcaccaaactgagttataatctcggga

SEQ ID NO: 91130 - DNA, 33 bp, Homo sapien
gatccttcaccaaacttagttataatctcggga

SEQ ID NO: 91131 - DNA, 33 bp, Homo sapien
acgtggtctcataaaactctcaggatgtaccac

SEQ ID NO: 91132 - DNA, 33 bp, Homo sapien
acgtggtctcataaaattctcaggatgtaccac

SEQ ID NO: 91133 - DNA, 33 bp, Homo sapien
caccctgttggtgtccaagagaaagaaaaggca

SEQ ID NO: 91134 - DNA, 33 bp, Homo sapien
caccctgttggtgtccgagagaaagaaaaggca

SEQ ID NO: 91135 - DNA, 33 bp, Homo sapien
ggatgtgttcacagcacggataggaaaagaggg

SEQ ID NO: 91136 - DNA, 33 bp, Homo sapien
ggatgtgttcacagcagggataggaaaagaggg

SEQ ID NO: 91137 - DNA, 33 bp, Homo sapien
cctttggcatgcactgaagcgtgtttgtgttta

SEQ ID NO: 91138 - DNA, 33 bp, Homo sapien
cctttggcatgcactgcagcgtgtttgtgttta

SEQ ID NO: 91139 - DNA, 33 bp, Homo sapien
aggagagagaggtttacattagaagtgacccaa

SEQ ID NO: 91140 - DNA, 33 bp, Homo sapien
aggagagagaggtttatattagaagtgacccaa

SEQ ID NO: 91141 - DNA, 33 bp, Homo sapien
ggagagaggagagggtaaaatcaaaacaaatgt

SEQ ID NO: 91142 - DNA, 33 bp, Homo sapien
ggagagaggagagggtgaaatcaaaacaaatgt

SEQ ID NO: 91143 - DNA, 33 bp, Homo sapien
tatcatgaagcctaaacgcgatggatatatgtt

SEQ ID NO: 91144 - DNA, 33 bp, Homo sapien
tatcatgaagcctaaatgcgatggatatatgtt

SEQ ID NO: 91145 - DNA, 33 bp, Homo sapien
tctctgaaaccctcaacggcaactggtgaacgg

SEQ ID NO: 91146 - DNA, 33 bp, Homo sapien
tctctgaaaccctcaatggcaactggtgaacgg

SEQ ID NO: 91147 - DNA, 33 bp, Homo sapien
tatgccattgttcagacgttttcttttggtctt

SEQ ID NO: 91148 - DNA, 33 bp, Homo sapien
tatgccattgttcagatgttttcttttggtctt

SEQ ID NO: 91149 - DNA, 33 bp, Homo sapien
ctaaccttggatgtcacagagagttcataagtc

SEQ ID NO: 91150 - DNA, 33 bp, Homo sapien
ctaaccttggatgtcatagagagttcataagtc

SEQ ID NO: 91151 - DNA, 33 bp, Homo sapien
aggaaaatcatccttacgaagagaaatggatgc

SEQ ID NO: 91152 - DNA, 33 bp, Homo sapien
aggaaaatcatccttatgaagagaaatggatgc

SEQ ID NO: 91153 - DNA, 33 bp, Homo sapien
cagggaatccgccggaaatgactgaaggatggt

SEQ ID NO: 91154 - DNA, 33 bp, Homo sapien
cagggaatccgccggagatgactgaaggatggt

SEQ ID NO: 91155 - DNA, 33 bp, Homo sapien
aggataactcacatgacccctcgacgctgtaca

SEQ ID NO: 91156 - DNA, 33 bp, Homo sapien
aggataactcacatgatccctcgacgctgtaca

SEQ ID NO: 91157 - DNA, 33 bp, Homo sapien
gaattcagtagcatagaattttcaggaagtaag

SEQ ID NO: 91158 - DNA, 33 bp, Homo sapien
gaattcagtagcataggattttcaggaagtaag

SEQ ID NO: 91159 - DNA, 33 bp, Homo sapien
aggaaggatacgaaaaacccagactggattgac

SEQ ID NO: 91160 - DNA, 33 bp, Homo sapien
aggaaggatacgaaaagcccagactggattgac

SEQ ID NO: 91161 - DNA, 33 bp, Homo sapien
agtccagtgtttgggcagaagaacttcagtttc

SEQ ID NO: 91162 - DNA, 33 bp, Homo sapien
agtccagtgtttgggcggaagaacttcagtttc

SEQ ID NO: 91163 - DNA, 33 bp, Homo sapien
ctcaatgtcctcatccaaaagtgaagataacag

SEQ ID NO: 91164 - DNA, 33 bp, Homo sapien
ctcaatgtcctcatccgaaagtgaagataacag

SEQ ID NO: 91165 - DNA, 33 bp, Homo sapien
gacggtgacgacgatgcaatggcacagagatat

SEQ ID NO: 91166 - DNA, 33 bp, Homo sapien
gacggtgacgacgatggaatggcacagagatat

SEQ ID NO: 91167 - DNA, 33 bp, Homo sapien
tttgtttcttggctgccagctctctgggtgtac

SEQ ID NO: 91168 - DNA, 33 bp, Homo sapien
tttgtttcttggctgctagctctctgggtgtac

SEQ ID NO: 91169 - DNA, 33 bp, Homo sapien
cctccgtgtgattctaactctcatagtctccac

SEQ ID NO: 91170 - DNA, 33 bp, Homo sapien
cctccgtgtgattctatctctcatagtctccac

SEQ ID NO: 91171 - DNA, 33 bp, Homo sapien
gcctctcccctggttaacaacttgcactagcta

SEQ ID NO: 91172 - DNA, 33 bp, Homo sapien
gcctctcccctggttagcaacttgcactagcta

SEQ ID NO: 91173 - DNA, 33 bp, Homo sapien
gaagcagattctgttcaatgttggataaatgtt

SEQ ID NO: 91174 - DNA, 33 bp, Homo sapien
gaagcagattctgttcgatgttggataaatgtt

SEQ ID NO: 91175 - DNA, 33 bp, Homo sapien
cgattgcctttaaaaactacctaaactgagtgc

SEQ ID NO: 91176 - DNA, 33 bp, Homo sapien
cgattgcctttaaaaagtacctaaactgagtgc

SEQ ID NO: 91177 - DNA, 33 bp, Homo sapien
ttgtgaatggaaaatgccaagatgggtccaaag

SEQ ID NO: 91178 - DNA, 33 bp, Homo sapien
ttgtgaatggaaaatgtcaagatgggtccaaag

SEQ ID NO: 91179 - DNA, 33 bp, Homo sapien
atgcaaacggacacaaagaggcatttcttcata

SEQ ID NO: 91180 - DNA, 33 bp, Homo sapien
atgcaaacggacacaaggaggcatttcttcata

SEQ ID NO: 91181 - DNA, 33 bp, Homo sapien
attaaaatagttaacaggtattgagcatcagtg

SEQ ID NO: 91182 - DNA, 33 bp, Homo sapien
attaaaatagttaacatgtattgagcatcagtg

SEQ ID NO: 91183 - DNA, 33 bp, Homo sapien
tgcacgaagtacttcagtcaaacgctctgcatt

SEQ ID NO: 91184 - DNA, 33 bp, Homo sapien
tgcacgaagtacttcattcaaacgctctgcatt

SEQ ID NO: 91185 - DNA, 33 bp, Homo sapien
atactgtccaacaccaatccagagagaggtgat

SEQ ID NO: 91186 - DNA, 33 bp, Homo sapien
atactgtccaacaccagtccagagagaggtgat

SEQ ID NO: 91187 - DNA, 33 bp, Homo sapien
gaaagacaagggagtacaagatggtgtcatgga

SEQ ID NO: 91188 - DNA, 33 bp, Homo sapien
gaaagacaagggagtagaagatggtgtcatgga

SEQ ID NO: 91189 - DNA, 33 bp, Homo sapien
agaagaagtactttagacatgcttctggctcag

SEQ ID NO: 91190 - DNA, 33 bp, Homo sapien
agaagaagtactttaggcatgcttctggctcag

SEQ ID NO: 91191 - DNA, 33 bp, Homo sapien
atctacatggtaaaaaagattgatcaccagtta

SEQ ID NO: 91192 - DNA, 33 bp, Homo sapien
atctacatggtaaaaacgattgatcaccagtta

SEQ ID NO: 91193 - DNA, 33 bp, Homo sapien
gattcaatccgagaaaggtatcactgcagagtt

SEQ ID NO: 91194 - DNA, 33 bp, Homo sapien
gattcaatccgagaaatgtatcactgcagagtt

SEQ ID NO: 91195 - DNA, 33 bp, Homo sapien
tgaaagatttttcacacaactcattcaataact

SEQ ID NO: 91196 - DNA, 33 bp, Homo sapien
tgaaagatttttcacataactcattcaataact

SEQ ID NO: 91197 - DNA, 33 bp, Homo sapien
gtgcagtttgcaaaaaccttatggtcaaatttc

SEQ ID NO: 91198 - DNA, 33 bp, Homo sapien
gtgcagtttgcaaaaagcttatggtcaaatttc

SEQ ID NO: 91199 - DNA, 33 bp, Homo sapien
gatacaataaattcaaactacaaatccacactg

SEQ ID NO: 91200 - DNA, 33 bp, Homo sapien
gatacaataaattcaagctacaaatccacactg

SEQ ID NO: 91201 - DNA, 33 bp, Homo sapien
ctattcaactgaaagacggaactattttgagta

SEQ ID NO: 91202 - DNA, 33 bp, Homo sapien
ctattcaactgaaagatggaactattttgagta

SEQ ID NO: 91203 - DNA, 33 bp, Homo sapien
gctatgatcatgctaccatattccagcctgggt

SEQ ID NO: 91204 - DNA, 33 bp, Homo sapien
gctatgatcatgctacgatattccagcctgggt

SEQ ID NO: 91205 - DNA, 33 bp, Homo sapien
gaatcccagcatatccaattacaccatgtaaat

SEQ ID NO: 91206 - DNA, 33 bp, Homo sapien
gaatcccagcatatccgattacaccatgtaaat

SEQ ID NO: 91207 - DNA, 33 bp, Homo sapien
acaccatgtaaattaacagttaaaagtgcaatt

SEQ ID NO: 91208 - DNA, 33 bp, Homo sapien
acaccatgtaaattaatagttaaaagtgcaatt

SEQ ID NO: 91209 - DNA, 33 bp, Homo sapien
caatgctaaaatctaccgccacatacagagaga

SEQ ID NO: 91210 - DNA, 33 bp, Homo sapien
caatgctaaaatctactgccacatacagagaga

SEQ ID NO: 91211 - DNA, 33 bp, Homo sapien
gccgacttcttggccacaatgtgaagtaaaagg

SEQ ID NO: 91212 - DNA, 33 bp, Homo sapien
gccgacttcttggccataatgtgaagtaaaagg

SEQ ID NO: 91213 - DNA, 33 bp, Homo sapien
cattagcattttcatgcaatctgcgggtggtgt

SEQ ID NO: 91214 - DNA, 33 bp, Homo sapien
cattagcattttcatgtaatctgcgggtggtgt

SEQ ID NO: 91215 - DNA, 33 bp, Homo sapien
tattcaagcttaccaaaaacttttcacatttgt

SEQ ID NO: 91216 - DNA, 33 bp, Homo sapien
tattcaagcttaccaagaacttttcacatttgt

SEQ ID NO: 91217 - DNA, 33 bp, Homo sapien
gagctaggatcagaacccaaggatctactttgg

SEQ ID NO: 91218 - DNA, 33 bp, Homo sapien
gagctaggatcagaacgcaaggatctactttgg

SEQ ID NO: 91219 - DNA, 33 bp, Homo sapien
ccactgaactgactgccctaatgaggtacacag

SEQ ID NO: 91220 - DNA, 33 bp, Homo sapien
ccactgaactgactgctctaatgaggtacacag

SEQ ID NO: 91221 - DNA, 33 bp, Homo sapien
atctgtaatcttcttagagagacataactttgg

SEQ ID NO: 91222 - DNA, 33 bp, Homo sapien
atctgtaatcttcttatagagacataactttgg

SEQ ID NO: 91223 - DNA, 33 bp, Homo sapien
atttgagtgagtcataccctttgtaggtgggtt

SEQ ID NO: 91224 - DNA, 33 bp, Homo sapien
atttgagtgagtcatagcctttgtaggtgggtt

SEQ ID NO: 91225 - DNA, 33 bp, Homo sapien
ggcatgagatgtttatcaggtcccactaatttt

SEQ ID NO: 91226 - DNA, 33 bp, Homo sapien
ggcatgagatgtttatgaggtcccactaatttt

SEQ ID NO: 91227 - DNA, 33 bp, Homo sapien
catatttgtaaggtacaaggcgtataaaggttt

SEQ ID NO: 91228 - DNA, 33 bp, Homo sapien
catatttgtaaggtacgaggcgtataaaggttt

SEQ ID NO: 91229 - DNA, 33 bp, Homo sapien
aggataagctatgatacgtgcaagttctaaaga

SEQ ID NO: 91230 - DNA, 33 bp, Homo sapien
aggataagctatgatatgtgcaagttctaaaga

SEQ ID NO: 91231 - DNA, 33 bp, Homo sapien
tctcttgtttcatgcaaaggctagaacaaggac

SEQ ID NO: 91232 - DNA, 33 bp, Homo sapien
tctcttgtttcatgcagaggctagaacaaggac

SEQ ID NO: 91233 - DNA, 33 bp, Homo sapien
tagaaccataacattccaacaactatctaaact

SEQ ID NO: 91234 - DNA, 33 bp, Homo sapien
tagaaccataacattctaacaactatctaaact

SEQ ID NO: 91235 - DNA, 33 bp, Homo sapien
agaaggtaagcctctcaagagttgaggttttct

SEQ ID NO: 91236 - DNA, 33 bp, Homo sapien
agaaggtaagcctctctagagttgaggttttct

SEQ ID NO: 91237 - DNA, 33 bp, Homo sapien
ttgcagcatagaagtaaaaccttagcaagaaac

SEQ ID NO: 91238 - DNA, 33 bp, Homo sapien
ttgcagcatagaagtataaccttagcaagaaac

SEQ ID NO: 91239 - DNA, 33 bp, Homo sapien
tttggttacaagatgcaagagacataggccaga

SEQ ID NO: 91240 - DNA, 33 bp, Homo sapien
tttggttacaagatgcgagagacataggccaga

SEQ ID NO: 91241 - DNA, 33 bp, Homo sapien
gcatttagtgagatacagatactcaatatgtgg

SEQ ID NO: 91242 - DNA, 33 bp, Homo sapien
gcatttagtgagatactgatactcaatatgtgg

SEQ ID NO: 91243 - DNA, 33 bp, Homo sapien
ctctattaatttggtacaattctcacccctaaa

SEQ ID NO: 91244 - DNA, 33 bp, Homo sapien
ctctattaatttggtataattctcacccctaaa

SEQ ID NO: 91245 - DNA, 33 bp, Homo sapien
tatggattgccactaacgcgggggaaattgact

SEQ ID NO: 91246 - DNA, 33 bp, Homo sapien
tatggattgccactaatgcgggggaaattgact

SEQ ID NO: 91247 - DNA, 33 bp, Homo sapien
gggggaaattgactgcaagccggttcacttgga

SEQ ID NO: 91248 - DNA, 33 bp, Homo sapien
gggggaaattgactgcgagccggttcacttgga

SEQ ID NO: 91249 - DNA, 33 bp, Homo sapien
aaaatgtcattttctacgttcttcgctttctca

SEQ ID NO: 91250 - DNA, 33 bp, Homo sapien
aaaatgtcattttctatgttcttcgctttctca

SEQ ID NO: 91251 - DNA, 33 bp, Homo sapien
cttcacaggtgagtaaacggaaacccagagtgg

SEQ ID NO: 91252 - DNA, 33 bp, Homo sapien
cttcacaggtgagtaaccggaaacccagagtgg

SEQ ID NO: 91253 - DNA, 33 bp, Homo sapien
ctttgtgtgggcagaaagttttattattattat

SEQ ID NO: 91254 - DNA, 33 bp, Homo sapien
ctttgtgtgggcagaaggttttattattattat

SEQ ID NO: 91255 - DNA, 33 bp, Homo sapien
ctcttgattctgagtgacacaggaaccggattt

SEQ ID NO: 91256 - DNA, 33 bp, Homo sapien
ctcttgattctgagtggcacaggaaccggattt

SEQ ID NO: 91257 - DNA, 33 bp, Homo sapien
cttataaaaagcaaaaactccatagttattagc

SEQ ID NO: 91258 - DNA, 33 bp, Homo sapien
cttataaaaagcaaaacctccatagttattagc

SEQ ID NO: 91259 - DNA, 33 bp, Homo sapien
aatatgaagttattaaccagggagagacgccat

SEQ ID NO: 91260 - DNA, 33 bp, Homo sapien
aatatgaagttattaatcagggagagacgccat

SEQ ID NO: 91261 - DNA, 33 bp, Homo sapien
gtcagggatttataaacaacaaagcggcatgag

SEQ ID NO: 91262 - DNA, 33 bp, Homo sapien
gtcagggatttataaataacaaagcggcatgag

SEQ ID NO: 91263 - DNA, 33 bp, Homo sapien
gttaatttaacaaacaataggaagctcttatga

SEQ ID NO: 91264 - DNA, 33 bp, Homo sapien
gttaatttaacaaacagtaggaagctcttatga

SEQ ID NO: 91265 - DNA, 33 bp, Homo sapien
aatacacacagtcctcaccttctggaaaacatt

SEQ ID NO: 91266 - DNA, 33 bp, Homo sapien
aatacacacagtcctcgccttctggaaaacatt

SEQ ID NO: 91267 - DNA, 33 bp, Homo sapien
acaaaattatactaaacaaatctcagcatgaag

SEQ ID NO: 91268 - DNA, 33 bp, Homo sapien
acaaaattatactaaagaaatctcagcatgaag

SEQ ID NO: 91269 - DNA, 33 bp, Homo sapien
aatgactatgaggcagaagaagggatggaagag

SEQ ID NO: 91270 - DNA, 33 bp, Homo sapien
aatgactatgaggcagtagaagggatggaagag

SEQ ID NO: 91271 - DNA, 33 bp, Homo sapien
caagaggggctccctaacttctggcaaatacag

SEQ ID NO: 91272 - DNA, 33 bp, Homo sapien
caagaggggctccctagcttctggcaaatacag

SEQ ID NO: 91273 - DNA, 33 bp, Homo sapien
cttgggacgacacaataaacatttgctggctga

SEQ ID NO: 91274 - DNA, 33 bp, Homo sapien
cttgggacgacacaatcaacatttgctggctga

SEQ ID NO: 91275 - DNA, 33 bp, Homo sapien
atctgtttagggactgaaattacaagactattt

SEQ ID NO: 91276 - DNA, 33 bp, Homo sapien
atctgtttagggactgcaattacaagactattt

SEQ ID NO: 91277 - DNA, 33 bp, Homo sapien
aagcatgagcttaggagtatctgtgatcacctt

SEQ ID NO: 91278 - DNA, 33 bp, Homo sapien
aagcatgagcttaggattatctgtgatcacctt

SEQ ID NO: 91279 - DNA, 33 bp, Homo sapien
tccatagcatttgtaaaccatttttaaagcctc

SEQ ID NO: 91280 - DNA, 33 bp, Homo sapien
tccatagcatttgtaagccatttttaaagcctc

SEQ ID NO: 91281 - DNA, 33 bp, Homo sapien
ggcaactcaggcacaacggcgagcggtgaaggc

SEQ ID NO: 91282 - DNA, 33 bp, Homo sapien
ggcaactcaggcacaatggcgagcggtgaaggc

SEQ ID NO: 91283 - DNA, 33 bp, Homo sapien
aatgctgttaggccatcaaaacttttaagttta

SEQ ID NO: 91284 - DNA, 33 bp, Homo sapien
aatgctgttaggccatgaaaacttttaagttta

SEQ ID NO: 91285 - DNA, 33 bp, Homo sapien
ttaacatcacaaaagccattccatgtgagcagc

SEQ ID NO: 91286 - DNA, 33 bp, Homo sapien
ttaacatcacaaaagctattccatgtgagcagc

SEQ ID NO: 91287 - DNA, 33 bp, Homo sapien
atcactgcttgctttcaacattaacgtctaagc

SEQ ID NO: 91288 - DNA, 33 bp, Homo sapien
atcactgcttgctttccacattaacgtctaagc

SEQ ID NO: 91289 - DNA, 33 bp, Homo sapien
gtgatgagggttaaaacaatatactggagcact

SEQ ID NO: 91290 - DNA, 33 bp, Homo sapien
gtgatgagggttaaaataatatactggagcact

SEQ ID NO: 91291 - DNA, 33 bp, Homo sapien
accacaaacaaaagaaaagtcctcacatgggca

SEQ ID NO: 91292 - DNA, 33 bp, Homo sapien
accacaaacaaaagaatagtcctcacatgggca

SEQ ID NO: 91293 - DNA, 33 bp, Homo sapien
aggaatgacctctgaactattttcttgcaacca

SEQ ID NO: 91294 - DNA, 33 bp, Homo sapien
aggaatgacctctgaattattttcttgcaacca

SEQ ID NO: 91295 - DNA, 33 bp, Homo sapien
agcttctccacagttacgaccatcacgggcaca

SEQ ID NO: 91296 - DNA, 33 bp, Homo sapien
agcttctccacagttatgaccatcacgggcaca

SEQ ID NO: 91297 - DNA, 33 bp, Homo sapien
gagcaatctaccaggaacctcttgcatactaac

SEQ ID NO: 91298 - DNA, 33 bp, Homo sapien
gagcaatctaccaggagcctcttgcatactaac

SEQ ID NO: 91299 - DNA, 33 bp, Homo sapien
cagctcctgacacaaagtctcactccttccttg

SEQ ID NO: 91300 - DNA, 33 bp, Homo sapien
cagctcctgacacaaattctcactccttccttg

SEQ ID NO: 91301 - DNA, 33 bp, Homo sapien
tcacaaaagttagtaaatctctgtgccaaaacc

SEQ ID NO: 91302 - DNA, 33 bp, Homo sapien
tcacaaaagttagtaagtctctgtgccaaaacc

SEQ ID NO: 91303 - DNA, 33 bp, Homo sapien
atctacaaagtagaaaacataaaatgcctagct

SEQ ID NO: 91304 - DNA, 33 bp, Homo sapien
atctacaaagtagaaatcataaaatgcctagct

SEQ ID NO: 91305 - DNA, 33 bp, Homo sapien
tcagagaaaaccacaaagaaacacacttagatg

SEQ ID NO: 91306 - DNA, 33 bp, Homo sapien
tcagagaaaaccacaaggaaacacacttagatg

SEQ ID NO: 91307 - DNA, 33 bp, Homo sapien
caaacaataacctgaactggctggcatttgcct

SEQ ID NO: 91308 - DNA, 33 bp, Homo sapien
caaacaataacctgaattggctggcatttgcct

SEQ ID NO: 91309 - DNA, 33 bp, Homo sapien
ttttcatgagccatgaagaaaacaaaggaaaga

SEQ ID NO: 91310 - DNA, 33 bp, Homo sapien
ttttcatgagccatgaggaaaacaaaggaaaga

SEQ ID NO: 91311 - DNA, 33 bp, Homo sapien
aaaggaaagaacaaaggctgctgttggaaacac

SEQ ID NO: 91312 - DNA, 33 bp, Homo sapien
aaaggaaagaacaaagtctgctgttggaaacac

SEQ ID NO: 91313 - DNA, 33 bp, Homo sapien
gatggcatatatcaaaatttcaagaaaggccaa

SEQ ID NO: 91314 - DNA, 33 bp, Homo sapien
gatggcatatatcaaagtttcaagaaaggccaa

SEQ ID NO: 91315 - DNA, 33 bp, Homo sapien
gaagatcaaggaagaaattatgccaaggaacag

SEQ ID NO: 91316 - DNA, 33 bp, Homo sapien
gaagatcaaggaagaagttatgccaaggaacag

SEQ ID NO: 91317 - DNA, 33 bp, Homo sapien
ccaggatgctcagtgaagtggaatctcagcaga

SEQ ID NO: 91318 - DNA, 33 bp, Homo sapien
ccaggatgctcagtgaggtggaatctcagcaga

SEQ ID NO: 91319 - DNA, 33 bp, Homo sapien
ttgaagagcttacacactgaagccagtcctaca

SEQ ID NO: 91320 - DNA, 33 bp, Homo sapien
ttgaagagcttacacattgaagccagtcctaca

SEQ ID NO: 91321 - DNA, 33 bp, Homo sapien
gagaaacaagggagaaacacacatcagtggctg

SEQ ID NO: 91322 - DNA, 33 bp, Homo sapien
gagaaacaagggagaagcacacatcagtggctg

SEQ ID NO: 91323 - DNA, 33 bp, Homo sapien
attttattttgtggtaagaatgtttaatatgag

SEQ ID NO: 91324 - DNA, 33 bp, Homo sapien
attttattttgtggtaggaatgtttaatatgag

SEQ ID NO: 91325 - DNA, 33 bp, Homo sapien
tgctgctggtgctacaagagggagagccagctc

SEQ ID NO: 91326 - DNA, 33 bp, Homo sapien
tgctgctggtgctacacgagggagagccagctc

SEQ ID NO: 91327 - DNA, 33 bp, Homo sapien
aatccctccttaaccaatgaagtagacgagctt

SEQ ID NO: 91328 - DNA, 33 bp, Homo sapien
aatccctccttaaccagtgaagtagacgagctt

SEQ ID NO: 91329 - DNA, 33 bp, Homo sapien
agtctgaaaactcttcaagggtaaaagtctccc

SEQ ID NO: 91330 - DNA, 33 bp, Homo sapien
agtctgaaaactcttcgagggtaaaagtctccc

SEQ ID NO: 91331 - DNA, 33 bp, Homo sapien
aaaatcataattacaacgctcctgacccacgtg

SEQ ID NO: 91332 - DNA, 33 bp, Homo sapien
aaaatcataattacaatgctcctgacccacgtg

SEQ ID NO: 91333 - DNA, 33 bp, Homo sapien
atgcttgactcagagcagacaatggttccatca

SEQ ID NO: 91334 - DNA, 33 bp, Homo sapien
atgcttgactcagagccgacaatggttccatca

SEQ ID NO: 91335 - DNA, 33 bp, Homo sapien
tgtgtcactatctctgaactcttgaatgtacta

SEQ ID NO: 91336 - DNA, 33 bp, Homo sapien
tgtgtcactatctctggactcttgaatgtacta

SEQ ID NO: 91337 - DNA, 33 bp, Homo sapien
ctctattttcagttcactcacttggaggaaagg

SEQ ID NO: 91338 - DNA, 33 bp, Homo sapien
ctctattttcagttcattcacttggaggaaagg

SEQ ID NO: 91339 - DNA, 33 bp, Homo sapien
aacatttgaatatgaactgtatcacatggctca

SEQ ID NO: 91340 - DNA, 33 bp, Homo sapien
aacatttgaatatgaattgtatcacatggctca

SEQ ID NO: 91341 - DNA, 33 bp, Homo sapien
acatcatttccagttaacttccactgactggaa

SEQ ID NO: 91342 - DNA, 33 bp, Homo sapien
acatcatttccagttaccttccactgactggaa

SEQ ID NO: 91343 - DNA, 33 bp, Homo sapien
atgtaaagacactatgaaaactataaaacaaca

SEQ ID NO: 91344 - DNA, 33 bp, Homo sapien
atgtaaagacactatgcaaactataaaacaaca

SEQ ID NO: 91345 - DNA, 33 bp, Homo sapien
tattgattacatcaacagaagctgaagctgtaa

SEQ ID NO: 91346 - DNA, 33 bp, Homo sapien
tattgattacatcaactgaagctgaagctgtaa

SEQ ID NO: 91347 - DNA, 33 bp, Homo sapien
ctgatttgaaaggtacaaggacattgagacact

SEQ ID NO: 91348 - DNA, 33 bp, Homo sapien
ctgatttgaaaggtacgaggacattgagacact

SEQ ID NO: 91349 - DNA, 33 bp, Homo sapien
cagtcaatttgtcagtaaactcactgttaaaac

SEQ ID NO: 91350 - DNA, 33 bp, Homo sapien
cagtcaatttgtcagttaactcactgttaaaac

SEQ ID NO: 91351 - DNA, 33 bp, Homo sapien
ttggatttgagggttacaggttcaactttggga

SEQ ID NO: 91352 - DNA, 33 bp, Homo sapien
ttggatttgagggttagaggttcaactttggga

SEQ ID NO: 91353 - DNA, 33 bp, Homo sapien
ttcttttccttctgataaaaccatagaattgcc

SEQ ID NO: 91354 - DNA, 33 bp, Homo sapien
ttcttttccttctgatgaaaccatagaattgcc

SEQ ID NO: 91355 - DNA, 33 bp, Homo sapien
tctaacacatctttcaaatcattgtgtggaaaa

SEQ ID NO: 91356 - DNA, 33 bp, Homo sapien
tctaacacatctttcagatcattgtgtggaaaa

SEQ ID NO: 91357 - DNA, 33 bp, Homo sapien
ccagagtttcgagggcaaggatatccatccatc

SEQ ID NO: 91358 - DNA, 33 bp, Homo sapien
ccagagtttcgagggcgaggatatccatccatc

SEQ ID NO: 91359 - DNA, 33 bp, Homo sapien
tccttgggcatcatgaccattgtaatctttctt

SEQ ID NO: 91360 - DNA, 33 bp, Homo sapien
tccttgggcatcatgatcattgtaatctttctt

SEQ ID NO: 91361 - DNA, 33 bp, Homo sapien
caataagtatcaatcaataatcaatagtcaaca

SEQ ID NO: 91362 - DNA, 33 bp, Homo sapien
caataagtatcaatcattaatcaatagtcaaca

SEQ ID NO: 91363 - DNA, 33 bp, Homo sapien
aattgagaatgattaacaggacaagtaaaattg

SEQ ID NO: 91364 - DNA, 33 bp, Homo sapien
aattgagaatgattaataggacaagtaaaattg

SEQ ID NO: 91365 - DNA, 33 bp, Homo sapien
aagtagcataaaggctaaatcactgtaattttt

SEQ ID NO: 91366 - DNA, 33 bp, Homo sapien
aagtagcataaaggctgaatcactgtaattttt

SEQ ID NO: 91367 - DNA, 33 bp, Homo sapien
aaacactacgtgcaacagcgcatctttctctgg

SEQ ID NO: 91368 - DNA, 33 bp, Homo sapien
aaacactacgtgcaacggcgcatctttctctgg

SEQ ID NO: 91369 - DNA, 33 bp, Homo sapien
tctagcaacgccctaacgagtaaatcctctgca

SEQ ID NO: 91370 - DNA, 33 bp, Homo sapien
tctagcaacgccctaatgagtaaatcctctgca

SEQ ID NO: 91371 - DNA, 33 bp, Homo sapien
catggaaagtatgaaacatatggctccaagatg

SEQ ID NO: 91372 - DNA, 33 bp, Homo sapien
catggaaagtatgaaatatatggctccaagatg

SEQ ID NO: 91373 - DNA, 33 bp, Homo sapien
agtcctgataaccatacaatttgatccatgtag

SEQ ID NO: 91374 - DNA, 33 bp, Homo sapien
agtcctgataaccatataatttgatccatgtag

SEQ ID NO: 91375 - DNA, 33 bp, Homo sapien
tgttccttcctgcaagacaacaacaaaatgtga

SEQ ID NO: 91376 - DNA, 33 bp, Homo sapien
tgttccttcctgcaaggcaacaacaaaatgtga

SEQ ID NO: 91377 - DNA, 33 bp, Homo sapien
cataaaaattccccaaaaatgagattgccaatt

SEQ ID NO: 91378 - DNA, 33 bp, Homo sapien
cataaaaattccccaacaatgagattgccaatt

SEQ ID NO: 91379 - DNA, 33 bp, Homo sapien
gtctttacttctgacaacaggggaaaagagtct

SEQ ID NO: 91380 - DNA, 33 bp, Homo sapien
gtctttacttctgacaccaggggaaaagagtct

SEQ ID NO: 91381 - DNA, 33 bp, Homo sapien
agttattcaccttacaaatctaatgtccatttg

SEQ ID NO: 91382 - DNA, 33 bp, Homo sapien
agttattcaccttacagatctaatgtccatttg

SEQ ID NO: 91383 - DNA, 33 bp, Homo sapien
gatttgaccgggaaaacaagaaaagccacacta

SEQ ID NO: 91384 - DNA, 33 bp, Homo sapien
gatttgaccgggaaaagaagaaaagccacacta

SEQ ID NO: 91385 - DNA, 33 bp, Homo sapien
ctttcataataaagaaatgcatgatgaaaacga

SEQ ID NO: 91386 - DNA, 33 bp, Homo sapien
ctttcataataaagaactgcatgatgaaaacga

SEQ ID NO: 91387 - DNA, 33 bp, Homo sapien
aaagtggagtctgttacgttaaggtagtggtca

SEQ ID NO: 91388 - DNA, 33 bp, Homo sapien
aaagtggagtctgttatgttaaggtagtggtca

SEQ ID NO: 91389 - DNA, 33 bp, Homo sapien
ttaaggtagtggtcaacagaggcctccatggta

SEQ ID NO: 91390 - DNA, 33 bp, Homo sapien
ttaaggtagtggtcaagagaggcctccatggta

SEQ ID NO: 91391 - DNA, 33 bp, Homo sapien
agtcactaaggaaaaaatcagagatactaggag

SEQ ID NO: 91392 - DNA, 33 bp, Homo sapien
agtcactaaggaaaaagtcagagatactaggag

SEQ ID NO: 91393 - DNA, 33 bp, Homo sapien
tagagcacagctgaaacttgttgtagatccaga

SEQ ID NO: 91394 - DNA, 33 bp, Homo sapien
tagagcacagctgaaatttgttgtagatccaga

SEQ ID NO: 91395 - DNA, 33 bp, Homo sapien
tctcatgatgaagagacagattttgaaatgtgg

SEQ ID NO: 91396 - DNA, 33 bp, Homo sapien
tctcatgatgaagagatagattttgaaatgtgg

SEQ ID NO: 91397 - DNA, 33 bp, Homo sapien
gttgccagctgtttagaagatttgcctggtaac

SEQ ID NO: 91398 - DNA, 33 bp, Homo sapien
gttgccagctgtttaggagatttgcctggtaac

SEQ ID NO: 91399 - DNA, 33 bp, Homo sapien
accacgtgtggagaagaaagagctaaggcctga

SEQ ID NO: 91400 - DNA, 33 bp, Homo sapien
accacgtgtggagaaggaagagctaaggcctga

SEQ ID NO: 91401 - DNA, 33 bp, Homo sapien
cagacatgtgagtgaaaaaactttcagaaaatt

SEQ ID NO: 91402 - DNA, 33 bp, Homo sapien
cagacatgtgagtgaagaaactttcagaaaatt

SEQ ID NO: 91403 - DNA, 33 bp, Homo sapien
ctaatctgagactcaaccagagcacctacctgt

SEQ ID NO: 91404 - DNA, 33 bp, Homo sapien
ctaatctgagactcaagcagagcacctacctgt

SEQ ID NO: 91405 - DNA, 33 bp, Homo sapien
taggggtctagaaaaaggctttaattcctttta

SEQ ID NO: 91406 - DNA, 33 bp, Homo sapien
taggggtctagaaaaatgctttaattcctttta

SEQ ID NO: 91407 - DNA, 33 bp, Homo sapien
tgtgtacagtcaatcaagttctctttctaaaga

SEQ ID NO: 91408 - DNA, 33 bp, Homo sapien
tgtgtacagtcaatcacgttctctttctaaaga

SEQ ID NO: 91409 - DNA, 33 bp, Homo sapien
gtttattaagcttggaaaaagaaaccagcagta

SEQ ID NO: 91410 - DNA, 33 bp, Homo sapien
gtttattaagcttggagaaagaaaccagcagta

SEQ ID NO: 91411 - DNA, 33 bp, Homo sapien
tctaatgcagcaattaagagtaggtgaatattt

SEQ ID NO: 91412 - DNA, 33 bp, Homo sapien
tctaatgcagcaattatgagtaggtgaatattt

SEQ ID NO: 91413 - DNA, 33 bp, Homo sapien
gctaacgtttgggtcacagtatatagtttttaa

SEQ ID NO: 91414 - DNA, 33 bp, Homo sapien
gctaacgtttgggtcatagtatatagtttttaa

SEQ ID NO: 91415 - DNA, 33 bp, Homo sapien
gggactcaaacctgtcacttgattcaaagagtc

SEQ ID NO: 91416 - DNA, 33 bp, Homo sapien
gggactcaaacctgtcgcttgattcaaagagtc

SEQ ID NO: 91417 - DNA, 33 bp, Homo sapien
aaattgctaataatggcattcaaaagtcaaaaa

SEQ ID NO: 91418 - DNA, 33 bp, Homo sapien
aaattgctaataatggtattcaaaagtcaaaaa

SEQ ID NO: 91419 - DNA, 33 bp, Homo sapien
tcaaaagtgccaaatgaattcttctgccaattc

SEQ ID NO: 91420 - DNA, 33 bp, Homo sapien
tcaaaagtgccaaatggattcttctgccaattc

SEQ ID NO: 91421 - DNA, 33 bp, Homo sapien
taatagtccaatgaaagaatccttttataattc

SEQ ID NO: 91422 - DNA, 33 bp, Homo sapien
taatagtccaatgaaataatccttttataattc

SEQ ID NO: 91423 - DNA, 33 bp, Homo sapien
aggtgaatttcacaggacagggactaaacactc

SEQ ID NO: 91424 - DNA, 33 bp, Homo sapien
aggtgaatttcacagggcagggactaaacactc

SEQ ID NO: 91425 - DNA, 33 bp, Homo sapien
ccagcgcagtagccaaccaaagaatacgtatat

SEQ ID NO: 91426 - DNA, 33 bp, Homo sapien
ccagcgcagtagccaatcaaagaatacgtatat

SEQ ID NO: 91427 - DNA, 33 bp, Homo sapien
ggctctgtcctttaagaaaatctagtgtgtgtc

SEQ ID NO: 91428 - DNA, 33 bp, Homo sapien
ggctctgtcctttaagcaaatctagtgtgtgtc

SEQ ID NO: 91429 - DNA, 33 bp, Homo sapien
taattgtcatcagataataactatttcaactca

SEQ ID NO: 91430 - DNA, 33 bp, Homo sapien
taattgtcatcagatagtaactatttcaactca

SEQ ID NO: 91431 - DNA, 33 bp, Homo sapien
ctatagtttgattccacgagagagtgggtgagg

SEQ ID NO: 91432 - DNA, 33 bp, Homo sapien
ctatagtttgattccatgagagagtgggtgagg

SEQ ID NO: 91433 - DNA, 33 bp, Homo sapien
ccaagatcacaagttacatgttagctcccctat

SEQ ID NO: 91434 - DNA, 33 bp, Homo sapien
ccaagatcacaagttagatgttagctcccctat

SEQ ID NO: 91435 - DNA, 33 bp, Homo sapien
tggacaccttaatgaccacgttttcacttgatt

SEQ ID NO: 91436 - DNA, 33 bp, Homo sapien
tggacaccttaatgacgacgttttcacttgatt

SEQ ID NO: 91437 - DNA, 33 bp, Homo sapien
gtagagacggttccaacgtgtcttcagtaacca

SEQ ID NO: 91438 - DNA, 33 bp, Homo sapien
gtagagacggttccaatgtgtcttcagtaacca

SEQ ID NO: 91439 - DNA, 33 bp, Homo sapien
gacagcttgctctaacaagacacattaattgcc

SEQ ID NO: 91440 - DNA, 33 bp, Homo sapien
gacagcttgctctaacgagacacattaattgcc

SEQ ID NO: 91441 - DNA, 33 bp, Homo sapien
tttagaccaagactaaagtttgtatgccctaat

SEQ ID NO: 91442 - DNA, 33 bp, Homo sapien
tttagaccaagactaaggtttgtatgccctaat

SEQ ID NO: 91443 - DNA, 33 bp, Homo sapien
ttgttaagtaaattcaagcaacagccacttagt

SEQ ID NO: 91444 - DNA, 33 bp, Homo sapien
ttgttaagtaaattcaggcaacagccacttagt

SEQ ID NO: 91445 - DNA, 33 bp, Homo sapien
tcaagtttgatttaacgacagttgagtgggaat

SEQ ID NO: 91446 - DNA, 33 bp, Homo sapien
tcaagtttgatttaactacagttgagtgggaat

SEQ ID NO: 91447 - DNA, 33 bp, Homo sapien
aaatggcaaattggatcactttgacctgatgta

SEQ ID NO: 91448 - DNA, 33 bp, Homo sapien
aaatggcaaattggattactttgacctgatgta

SEQ ID NO: 91449 - DNA, 33 bp, Homo sapien
accatatgtctgtgccacaaggtaatggttaaa

SEQ ID NO: 91450 - DNA, 33 bp, Homo sapien
accatatgtctgtgccgcaaggtaatggttaaa

SEQ ID NO: 91451 - DNA, 33 bp, Homo sapien
aaccaaccacatatgaccaaaagagaatcacct

SEQ ID NO: 91452 - DNA, 33 bp, Homo sapien
aaccaaccacatatgatcaaaagagaatcacct

SEQ ID NO: 91453 - DNA, 33 bp, Homo sapien
cagtacaccaaaagcacggtttagatgggttca

SEQ ID NO: 91454 - DNA, 33 bp, Homo sapien
cagtacaccaaaagcatggtttagatgggttca

SEQ ID NO: 91455 - DNA, 33 bp, Homo sapien
tcagtgcagctgtgacagacagttcttgacttg

SEQ ID NO: 91456 - DNA, 33 bp, Homo sapien
tcagtgcagctgtgacggacagttcttgacttg

SEQ ID NO: 91457 - DNA, 33 bp, Homo sapien
gttgcattctgctagcaaattgcgaagagggac

SEQ ID NO: 91458 - DNA, 33 bp, Homo sapien
gttgcattctgctagcgaattgcgaagagggac

SEQ ID NO: 91459 - DNA, 33 bp, Homo sapien
aaaaataggtgcaatagcttggaatatcatcca

SEQ ID NO: 91460 - DNA, 33 bp, Homo sapien
aaaaataggtgcaatatcttggaatatcatcca

SEQ ID NO: 91461 - DNA, 33 bp, Homo sapien
tccctgtcccttagaaaaacaggagcagaagat

SEQ ID NO: 91462 - DNA, 33 bp, Homo sapien
tccctgtcccttagaacaacaggagcagaagat

SEQ ID NO: 91463 - DNA, 33 bp, Homo sapien
acagggagcaaaggaacagaccagaagtggttc

SEQ ID NO: 91464 - DNA, 33 bp, Homo sapien
acagggagcaaaggaatagaccagaagtggttc

SEQ ID NO: 91465 - DNA, 33 bp, Homo sapien
tcccagctttgttgtcaactgtccttgattccc

SEQ ID NO: 91466 - DNA, 33 bp, Homo sapien
tcccagctttgttgtcgactgtccttgattccc

SEQ ID NO: 91467 - DNA, 33 bp, Homo sapien
acgttagatcaactggccatctagggtttcttt

SEQ ID NO: 91468 - DNA, 33 bp, Homo sapien
acgttagatcaactggtcatctagggtttcttt

SEQ ID NO: 91469 - DNA, 33 bp, Homo sapien
gggacgagatttattaaaacaacactgctcgtg

SEQ ID NO: 91470 - DNA, 33 bp, Homo sapien
gggacgagatttattagaacaacactgctcgtg

SEQ ID NO: 91471 - DNA, 33 bp, Homo sapien
cactgacttctggtaacctccgtacagataagc

SEQ ID NO: 91472 - DNA, 33 bp, Homo sapien
cactgacttctggtaatctccgtacagataagc

SEQ ID NO: 91473 - DNA, 33 bp, Homo sapien
atcctccataactgcaagtgtgtatccttggac

SEQ ID NO: 91474 - DNA, 33 bp, Homo sapien
atcctccataactgcaggtgtgtatccttggac

SEQ ID NO: 91475 - DNA, 33 bp, Homo sapien
taacacccaagtagaaaaggcatccaagtaatc

SEQ ID NO: 91476 - DNA, 33 bp, Homo sapien
taacacccaagtagaagaggcatccaagtaatc

SEQ ID NO: 91477 - DNA, 33 bp, Homo sapien
atcagtgagcctaaaaaataaatcctgtctctc

SEQ ID NO: 91478 - DNA, 33 bp, Homo sapien
atcagtgagcctaaaatataaatcctgtctctc

SEQ ID NO: 91479 - DNA, 33 bp, Homo sapien
gtctaaatctagattcaacacttattatctgtg

SEQ ID NO: 91480 - DNA, 33 bp, Homo sapien
gtctaaatctagattccacacttattatctgtg

SEQ ID NO: 91481 - DNA, 33 bp, Homo sapien
acaagctgtcttagcgcatttgaaagccattga

SEQ ID NO: 91482 - DNA, 33 bp, Homo sapien
acaagctgtcttagcgtatttgaaagccattga

SEQ ID NO: 91483 - DNA, 33 bp, Homo sapien
tattactatgttatcacgtagcattaactaaca

SEQ ID NO: 91484 - DNA, 33 bp, Homo sapien
tattactatgttatcatgtagcattaactaaca

SEQ ID NO: 91485 - DNA, 33 bp, Homo sapien
ttccacctccccgaacgcattgcttccatgacg

SEQ ID NO: 91486 - DNA, 33 bp, Homo sapien
ttccacctccccgaactcattgcttccatgacg

SEQ ID NO: 91487 - DNA, 33 bp, Homo sapien
gattgaagaaggttaacaaatcccagatattag

SEQ ID NO: 91488 - DNA, 33 bp, Homo sapien
gattgaagaaggttaagaaatcccagatattag

SEQ ID NO: 91489 - DNA, 33 bp, Homo sapien
gtgccaggcactgtgaactcctgatcctttcag

SEQ ID NO: 91490 - DNA, 33 bp, Homo sapien
gtgccaggcactgtgacctcctgatcctttcag

SEQ ID NO: 91491 - DNA, 33 bp, Homo sapien
acttccaatctggagaagatcaaatgaggctgc

SEQ ID NO: 91492 - DNA, 33 bp, Homo sapien
acttccaatctggagaggatcaaatgaggctgc

SEQ ID NO: 91493 - DNA, 33 bp, Homo sapien
tatgttcaaaagaaaaataatgtccattgtgtg

SEQ ID NO: 91494 - DNA, 33 bp, Homo sapien
tatgttcaaaagaaaactaatgtccattgtgtg

SEQ ID NO: 91495 - DNA, 33 bp, Homo sapien
gcaattggtgttcctcaaaaaaggtgtctgtgg

SEQ ID NO: 91496 - DNA, 33 bp, Homo sapien
gcaattggtgttcctcgaaaaaggtgtctgtgg

SEQ ID NO: 91497 - DNA, 33 bp, Homo sapien
caggaacatctttcaacgacaggtttagtttaa

SEQ ID NO: 91498 - DNA, 33 bp, Homo sapien
caggaacatctttcaatgacaggtttagtttaa

SEQ ID NO: 91499 - DNA, 33 bp, Homo sapien
ttatttgcaatactcacggatcacagtaagagc

SEQ ID NO: 91500 - DNA, 33 bp, Homo sapien
ttatttgcaatactcatggatcacagtaagagc

SEQ ID NO: 91501 - DNA, 33 bp, Homo sapien
ggaagcaagtctttgccagaaaatcatccaaac

SEQ ID NO: 91502 - DNA, 33 bp, Homo sapien
ggaagcaagtctttgctagaaaatcatccaaac

SEQ ID NO: 91503 - DNA, 33 bp, Homo sapien
gatatactctcagtaaataagaaagacaatgta

SEQ ID NO: 91504 - DNA, 33 bp, Homo sapien
gatatactctcagtaagtaagaaagacaatgta

SEQ ID NO: 91505 - DNA, 33 bp, Homo sapien
ggagattttcagttcccaaagatgtcttgtact

SEQ ID NO: 91506 - DNA, 33 bp, Homo sapien
ggagattttcagttcctaaagatgtcttgtact

SEQ ID NO: 91507 - DNA, 33 bp, Homo sapien
atttattcaatttctcagacgacagcaaatcag

SEQ ID NO: 91508 - DNA, 33 bp, Homo sapien
atttattcaatttctcggacgacagcaaatcag

SEQ ID NO: 91509 - DNA, 33 bp, Homo sapien
atactgttgatgcataaactataaaattaatta

SEQ ID NO: 91510 - DNA, 33 bp, Homo sapien
atactgttgatgcatagactataaaattaatta

SEQ ID NO: 91511 - DNA, 33 bp, Homo sapien
tcaacactgggacttacgttaccaaagtaaggg

SEQ ID NO: 91512 - DNA, 33 bp, Homo sapien
tcaacactgggacttatgttaccaaagtaaggg

SEQ ID NO: 91513 - DNA, 33 bp, Homo sapien
ccctgaaataagtaaagaactgctggtctttta

SEQ ID NO: 91514 - DNA, 33 bp, Homo sapien
ccctgaaataagtaaataactgctggtctttta

SEQ ID NO: 91515 - DNA, 33 bp, Homo sapien
attagaagcaacaaagaccagagaaggttgtca

SEQ ID NO: 91516 - DNA, 33 bp, Homo sapien
attagaagcaacaaaggccagagaaggttgtca

SEQ ID NO: 91517 - DNA, 33 bp, Homo sapien
gtgtctaattgtagaagacagaactgttttgtt

SEQ ID NO: 91518 - DNA, 33 bp, Homo sapien
gtgtctaattgtagaatacagaactgttttgtt

SEQ ID NO: 91519 - DNA, 33 bp, Homo sapien
tggcacaggggacttaagtgtttgggaagccag

SEQ ID NO: 91520 - DNA, 33 bp, Homo sapien
tggcacaggggacttatgtgtttgggaagccag

SEQ ID NO: 91521 - DNA, 33 bp, Homo sapien
gtcagatgttatgggcaaaggtagatactgtga

SEQ ID NO: 91522 - DNA, 33 bp, Homo sapien
gtcagatgttatgggcgaaggtagatactgtga

SEQ ID NO: 91523 - DNA, 33 bp, Homo sapien
gggaagttacgaagataaatcatcaaaatgatc

SEQ ID NO: 91524 - DNA, 33 bp, Homo sapien
gggaagttacgaagatcaatcatcaaaatgatc

SEQ ID NO: 91525 - DNA, 33 bp, Homo sapien
aaacagcaagtaccaactgttgccaatgataga

SEQ ID NO: 91526 - DNA, 33 bp, Homo sapien
aaacagcaagtaccaagtgttgccaatgataga

SEQ ID NO: 91527 - DNA, 33 bp, Homo sapien
aggtgggtacgattccacagactggagaggccc

SEQ ID NO: 91528 - DNA, 33 bp, Homo sapien
aggtgggtacgattccgcagactggagaggccc

SEQ ID NO: 91529 - DNA, 33 bp, Homo sapien
taaaaagcacttgatacacgtttgcagaatgcc

SEQ ID NO: 91530 - DNA, 33 bp, Homo sapien
taaaaagcacttgatatacgtttgcagaatgcc

SEQ ID NO: 91531 - DNA, 33 bp, Homo sapien
cacgcgagtgtgggcacgggggaactgaagtgc

SEQ ID NO: 91532 - DNA, 33 bp, Homo sapien
cacgcgagtgtgggcaggggggaactgaagtgc

SEQ ID NO: 91533 - DNA, 33 bp, Homo sapien
gattgattgaatgaagcaatcctctccatctgg

SEQ ID NO: 91534 - DNA, 33 bp, Homo sapien
gattgattgaatgaaggaatcctctccatctgg

SEQ ID NO: 91535 - DNA, 33 bp, Homo sapien; identical to SEQ ID NO: 91533

SEQ ID NO: 91536 - DNA, 33 bp, Homo sapien; identical to SEQ ID NO: 91534

SEQ ID NO: 91537 - DNA, 33 bp, Homo sapien
aagtaaaggtccagcacgttggaatataaaaaa

SEQ ID NO: 91538 - DNA, 33 bp, Homo sapien
aagtaaaggtccagcatgttggaatataaaaaa

SEQ ID NO: 91539 - DNA, 33 bp, Homo sapien
ttcccagaggataaggaaagagatgccagtggg

SEQ ID NO: 91540 - DNA, 33 bp, Homo sapien
ttcccagaggataagggaagagatgccagtggg

SEQ ID NO: 91541 - DNA, 33 bp, Homo sapien
ggagccctgctcaattaaaggaacaccgtgctg

SEQ ID NO: 91542 - DNA, 33 bp, Homo sapien
ggagccctgctcaattgaaggaacaccgtgctg

SEQ ID NO: 91543 - DNA, 33 bp, Homo sapien
gaattgaatacctataagatgccatttgaattg

SEQ ID NO: 91544 - DNA, 33 bp, Homo sapien
gaattgaatacctataggatgccatttgaattg

SEQ ID NO: 91545 - DNA, 33 bp, Homo sapien
tgtttaactggtgatacagtaattcttcataag

SEQ ID NO: 91546 - DNA, 33 bp, Homo sapien
tgtttaactggtgatatagtaattcttcataag

SEQ ID NO: 91547 - DNA, 33 bp, Homo sapien
ctatggaaaacataacagacatttctcaaagaa

SEQ ID NO: 91548 - DNA, 33 bp, Homo sapien
ctatggaaaacataacggacatttctcaaagaa

SEQ ID NO: 91549 - DNA, 33 bp, Homo sapien
aatgagccttgagaagccgtaggtgttgaagat

SEQ ID NO: 91550 - DNA, 33 bp, Homo sapien
aatgagccttgagaagtcgtaggtgttgaagat

SEQ ID NO: 91551 - DNA, 33 bp, Homo sapien
catgtgatgaattagaacatgcttttccaccta

SEQ ID NO: 91552 - DNA, 33 bp, Homo sapien
catgtgatgaattagatcatgcttttccaccta

SEQ ID NO: 91553 - DNA, 33 bp, Homo sapien
tagtttgataactaggcaacatgtggagtaatt

SEQ ID NO: 91554 - DNA, 33 bp, Homo sapien
tagtttgataactaggtaacatgtggagtaatt

SEQ ID NO: 91555 - DNA, 33 bp, Homo sapien
aaaagttagattcttaaattccatgattttata

SEQ ID NO: 91556 - DNA, 33 bp, Homo sapien
aaaagttagattcttagattccatgattttata

SEQ ID NO: 91557 - DNA, 33 bp, Homo sapien
aaaagaaatcttctctaaccttccaactctaaa

SEQ ID NO: 91558 - DNA, 33 bp, Homo sapien
aaaagaaatcttctctgaccttccaactctaaa

SEQ ID NO: 91559 - DNA, 33 bp, Homo sapien
gggcagttgttattgcacaatttacagatgtgc

SEQ ID NO: 91560 - DNA, 33 bp, Homo sapien
gggcagttgttattgcgcaatttacagatgtgc

SEQ ID NO: 91561 - DNA, 33 bp, Homo sapien
ttgcccattgcagtaaaccagaaagcaaaaaaa

SEQ ID NO: 91562 - DNA, 33 bp, Homo sapien
ttgcccattgcagtaagccagaaagcaaaaaaa

SEQ ID NO: 91563 - DNA, 33 bp, Homo sapien
aacagagtgcagggatgaggttcttggaataac

SEQ ID NO: 91564 - DNA, 33 bp, Homo sapien
aacagagtgcagggattaggttcttggaataac

SEQ ID NO: 91565 - DNA, 33 bp, Homo sapien
tgaaggcaactaatccacaatgagcaaattatc

SEQ ID NO: 91566 - DNA, 33 bp, Homo sapien
tgaaggcaactaatcctcaatgagcaaattatc

SEQ ID NO: 91567 - DNA, 33 bp, Homo sapien
cctggagggtaagctacaatatcggtcccatgc

SEQ ID NO: 91568 - DNA, 33 bp, Homo sapien
cctggagggtaagctataatatcggtcccatgc

SEQ ID NO: 91569 - DNA, 33 bp, Homo sapien
ctcttctaggaacacacgattttctcttcctga

SEQ ID NO: 91570 - DNA, 33 bp, Homo sapien
ctcttctaggaacacatgattttctcttcctga

SEQ ID NO: 91571 - DNA, 33 bp, Homo sapien
gtgactttatctgctacgttagtttagtaaatt

SEQ ID NO: 91572 - DNA, 33 bp, Homo sapien
gtgactttatctgctatgttagtttagtaaatt

SEQ ID NO: 91573 - DNA, 33 bp, Homo sapien
gtacatttggataaaaagattccaagaaggatg

SEQ ID NO: 91574 - DNA, 33 bp, Homo sapien
gtacatttggataaaaggattccaagaaggatg

SEQ ID NO: 91575 - DNA, 33 bp, Homo sapien
acctttccaggctctaggaaacagtccgttgct

SEQ ID NO: 91576 - DNA, 33 bp, Homo sapien
acctttccaggctctatgaaacagtccgttgct

SEQ ID NO: 91577 - DNA, 33 bp, Homo sapien
aaaaagtcttagggcccagagataggatggatc

SEQ ID NO: 91578 - DNA, 33 bp, Homo sapien
aaaaagtcttagggcctagagataggatggatc

SEQ ID NO: 91579 - DNA, 33 bp, Homo sapien
aggctcaatgctctccaaaatatattaggaaga

SEQ ID NO: 91580 - DNA, 33 bp, Homo sapien
aggctcaatgctctccgaaatatattaggaaga

SEQ ID NO: 91581 - DNA, 33 bp, Homo sapien
ttagacctgttgatacaaacctgctggagctgg

SEQ ID NO: 91582 - DNA, 33 bp, Homo sapien
ttagacctgttgatacgaacctgctggagctgg

SEQ ID NO: 91583 - DNA, 33 bp, Homo sapien
agatgggtcaatggtacaattccagccaataaa

SEQ ID NO: 91584 - DNA, 33 bp, Homo sapien
agatgggtcaatggtataattccagccaataaa

SEQ ID NO: 91585 - DNA, 33 bp, Homo sapien
gcactagagagtactactagacctgccttaatg

SEQ ID NO: 91586 - DNA, 33 bp, Homo sapien
gcactagagagtactattagacctgccttaatg

SEQ ID NO: 91587 - DNA, 33 bp, Homo sapien
agacttcgttgcaacaaaatatatccatgtaac

SEQ ID NO: 91588 - DNA, 33 bp, Homo sapien
agacttcgttgcaacacaatatatccatgtaac

SEQ ID NO: 91589 - DNA, 33 bp, Homo sapien
accctcagagcaggagaccttacaatgttcttc

SEQ ID NO: 91590 - DNA, 33 bp, Homo sapien
accctcagagcaggaggccttacaatgttcttc

SEQ ID NO: 91591 - DNA, 33 bp, Homo sapien
aatcttcttttccgtaaacaaatcttggaagcc

SEQ ID NO: 91592 - DNA, 33 bp, Homo sapien
aatcttcttttccgtagacaaatcttggaagcc

SEQ ID NO: 91593 - DNA, 33 bp, Homo sapien
tggccaacttctttacgagtaagctgattaggc

SEQ ID NO: 91594 - DNA, 33 bp, Homo sapien
tggccaacttctttactagtaagctgattaggc

SEQ ID NO: 91595 - DNA, 33 bp, Homo sapien
ttagccatagtagttaccacccaaagtttgtag

SEQ ID NO: 91596 - DNA, 33 bp, Homo sapien
ttagccatagtagttatcacccaaagtttgtag

SEQ ID NO: 91597 - DNA, 33 bp, Homo sapien
ctaggaaccagtcaaaaccttctttctgtattt

SEQ ID NO: 91598 - DNA, 33 bp, Homo sapien
ctaggaaccagtcaaatccttctttctgtattt

SEQ ID NO: 91599 - DNA, 33 bp, Homo sapien
ttcttcttaataacaacttagatatagccatgc

SEQ ID NO: 91600 - DNA, 33 bp, Homo sapien
ttcttcttaataacaagttagatatagccatgc

SEQ ID NO: 91601 - DNA, 33 bp, Homo sapien
ggtcttctgcctggaaattcatatgcctgcaat

SEQ ID NO: 91602 - DNA, 33 bp, Homo sapien
ggtcttctgcctggaacttcatatgcctgcaat

SEQ ID NO: 91603 - DNA, 33 bp, Homo sapien
ggaaagttaaactacaaagagagcaaagatgca

SEQ ID NO: 91604 - DNA, 33 bp, Homo sapien
ggaaagttaaactacagagagagcaaagatgca

SEQ ID NO: 91605 - DNA, 33 bp, Homo sapien
aattgcagaacagattcaataccaagcataaaa

SEQ ID NO: 91606 - DNA, 33 bp, Homo sapien
aattgcagaacagatttaataccaagcataaaa

SEQ ID NO: 91607 - DNA, 33 bp, Homo sapien
agcctgctttcttaagaatcactgaaaatgttt

SEQ ID NO: 91608 - DNA, 33 bp, Homo sapien
agcctgctttcttaaggatcactgaaaatgttt

SEQ ID NO: 91609 - DNA, 33 bp, Homo sapien
gtgttgagtgtgtttacagaaatatcttaggta

SEQ ID NO: 91610 - DNA, 33 bp, Homo sapien
gtgttgagtgtgtttatagaaatatcttaggta

SEQ ID NO: 91611 - DNA, 33 bp, Homo sapien
ctctaagataacctgcaatgaatcagaccattc

SEQ ID NO: 91612 - DNA, 33 bp, Homo sapien
ctctaagataacctgcgatgaatcagaccattc

SEQ ID NO: 91613 - DNA, 33 bp, Homo sapien
atggagctataggctacgtatccttagaaaact

SEQ ID NO: 91614 - DNA, 33 bp, Homo sapien
atggagctataggctatgtatccttagaaaact

SEQ ID NO: 91615 - DNA, 33 bp, Homo sapien
ctactgtgagaaagcagaaagagaggagccccg

SEQ ID NO: 91616 - DNA, 33 bp, Homo sapien
ctactgtgagaaagcataaagagaggagccccg

SEQ ID NO: 91617 - DNA, 33 bp, Homo sapien
ctcagttgtaatttacagatctcatatgtgtca

SEQ ID NO: 91618 - DNA, 33 bp, Homo sapien
ctcagttgtaatttacggatctcatatgtgtca

SEQ ID NO: 91619 - DNA, 33 bp, Homo sapien
agcttaagtgaaagaacggtaccctgtctcaaa

SEQ ID NO: 91620 - DNA, 33 bp, Homo sapien
agcttaagtgaaagaatggtaccctgtctcaaa

SEQ ID NO: 91621 - DNA, 33 bp, Homo sapien
ttcaaaattatctctaacaatgaggcaagaaaa

SEQ ID NO: 91622 - DNA, 33 bp, Homo sapien
ttcaaaattatctctagcaatgaggcaagaaaa

SEQ ID NO: 91623 - DNA, 33 bp, Homo sapien
atgcagaatttgggtaacaaacaccagcagctt

SEQ ID NO: 91624 - DNA, 33 bp, Homo sapien
atgcagaatttgggtagcaaacaccagcagctt

SEQ ID NO: 91625 - DNA, 33 bp, Homo sapien
agtgtacattgtgtaaactttattctagggtgt

SEQ ID NO: 91626 - DNA, 33 bp, Homo sapien
agtgtacattgtgtaagctttattctagggtgt

SEQ ID NO: 91627 - DNA, 33 bp, Homo sapien
catgtttgtgtcttcaaaggaagaatgtcctca

SEQ ID NO: 91628 - DNA, 33 bp, Homo sapien
catgtttgtgtcttcagaggaagaatgtcctca

SEQ ID NO: 91629 - DNA, 33 bp, Homo sapien
tcccttttgaagtccaggttaggcatttagcta

SEQ ID NO: 91630 - DNA, 33 bp, Homo sapien
tcccttttgaagtccatgttaggcatttagcta

SEQ ID NO: 91631 - DNA, 33 bp, Homo sapien
tattaatcctccagcagtaaaattagtcaatta

SEQ ID NO: 91632 - DNA, 33 bp, Homo sapien
tattaatcctccagcattaaaattagtcaatta

SEQ ID NO: 91633 - DNA, 33 bp, Homo sapien
ggcaacaaaaatactcaccttatgaacaagata

SEQ ID NO: 91634 - DNA, 33 bp, Homo sapien
ggcaacaaaaatactcgccttatgaacaagata

SEQ ID NO: 91635 - DNA, 33 bp, Homo sapien
ttcaaagtacctaccagcttcttatcgccacag

SEQ ID NO: 91636 - DNA, 33 bp, Homo sapien
ttcaaagtacctaccatcttcttatcgccacag

SEQ ID NO: 91637 - DNA, 33 bp, Homo sapien
tggtaggtactttgaaccattttgtgccaatta

SEQ ID NO: 91638 - DNA, 33 bp, Homo sapien
tggtaggtactttgaatcattttgtgccaatta

SEQ ID NO: 91639 - DNA, 33 bp, Homo sapien
ctatacctacagtggacgcctattggtttgtct

SEQ ID NO: 91640 - DNA, 33 bp, Homo sapien
ctatacctacagtggatgcctattggtttgtct

SEQ ID NO: 91641 - DNA, 33 bp, Homo sapien
aaactataaatggctacaacgggagttatggag

SEQ ID NO: 91642 - DNA, 33 bp, Homo sapien
aaactataaatggctagaacgggagttatggag

SEQ ID NO: 91643 - DNA, 33 bp, Homo sapien
ttggtctctctcactacgtcttacttcctttgc

SEQ ID NO: 91644 - DNA, 33 bp, Homo sapien
ttggtctctctcactatgtcttacttcctttgc

SEQ ID NO: 91645 - DNA, 33 bp, Homo sapien
ctcactttggagaaaactagagagaggaatggg

SEQ ID NO: 91646 - DNA, 33 bp, Homo sapien
ctcactttggagaaaattagagagaggaatggg

SEQ ID NO: 91647 - DNA, 33 bp, Homo sapien
gtatttgtatttttgcacctgcattatttcact

SEQ ID NO: 91648 - DNA, 33 bp, Homo sapien
gtatttgtatttttgcgcctgcattatttcact

SEQ ID NO: 91649 - DNA, 33 bp, Homo sapien
caagggaatggtttgtaaagtatagaaaagttg

SEQ ID NO: 91650 - DNA, 33 bp, Homo sapien
caagggaatggtttgtgaagtatagaaaagttg

SEQ ID NO: 91651 - DNA, 33 bp, Homo sapien
tcatgtatgagtgtgacctatgacctaatttta

SEQ ID NO: 91652 - DNA, 33 bp, Homo sapien
tcatgtatgagtgtgagctatgacctaatttta

SEQ ID NO: 91653 - DNA, 33 bp, Homo sapien
tttctttaaatacaagaccaattgcctgggcct

SEQ ID NO: 91654 - DNA, 33 bp, Homo sapien
tttctttaaatacaagtccaattgcctgggcct

SEQ ID NO: 91655 - DNA, 33 bp, Homo sapien
aaatacagatttcagaactattattccaacata

SEQ ID NO: 91656 - DNA, 33 bp, Homo sapien
aaatacagatttcagagctattattccaacata

SEQ ID NO: 91657 - DNA, 33 bp, Homo sapien
cttacctgggatttacagctaaggcagaaacag

SEQ ID NO: 91658 - DNA, 33 bp, Homo sapien
cttacctgggatttacggctaaggcagaaacag

SEQ ID NO: 91659 - DNA, 33 bp, Homo sapien
ctttgatgttatttaagtcactatacctgagtc

SEQ ID NO: 91660 - DNA, 33 bp, Homo sapien
ctttgatgttatttaattcactatacctgagtc

SEQ ID NO: 91661 - DNA, 33 bp, Homo sapien
gttttggtctcaggatcaaaggactcatttcag

SEQ ID NO: 91662 - DNA, 33 bp, Homo sapien
gttttggtctcaggattaaaggactcatttcag

SEQ ID NO: 91663 - DNA, 33 bp, Homo sapien
agtgaaaagcgaaaaacttgttgcatgaaaata

SEQ ID NO: 91664 - DNA, 33 bp, Homo sapien
agtgaaaagcgaaaaatttgttgcatgaaaata

SEQ ID NO: 91665 - DNA, 33 bp, Homo sapien
gtattctggattttctcaacgctaacttcctgt

SEQ ID NO: 91666 - DNA, 33 bp, Homo sapien
gtattctggattttctgaacgctaacttcctgt

SEQ ID NO: 91667 - DNA, 33 bp, Homo sapien
gcaccttggaaagatcaatcaaaaagtcaaaat

SEQ ID NO: 91668 - DNA, 33 bp, Homo sapien
gcaccttggaaagatccatcaaaaagtcaaaat

SEQ ID NO: 91669 - DNA, 33 bp, Homo sapien
tccagagagaattaggaaactagagagaaagga

SEQ ID NO: 91670 - DNA, 33 bp, Homo sapien
tccagagagaattagggaactagagagaaagga

SEQ ID NO: 91671 - DNA, 33 bp, Homo sapien
acatagaattaggcgaagggatccaagcagtac

SEQ ID NO: 91672 - DNA, 33 bp, Homo sapien
acatagaattaggcgaggggatccaagcagtac

SEQ ID NO: 91673 - DNA, 33 bp, Homo sapien
tgtatcctaacactcaccttctccatttgttat

SEQ ID NO: 91674 - DNA, 33 bp, Homo sapien
tgtatcctaacactcatcttctccatttgttat

SEQ ID NO: 91675 - DNA, 33 bp, Homo sapien
taacacaaaagcaatcgatcatttttaatcaga

SEQ ID NO: 91676 - DNA, 33 bp, Homo sapien
taacacaaaagcaatctatcatttttaatcaga

SEQ ID NO: 91677 - DNA, 33 bp, Homo sapien
gaggaaatagtgtagacgaattgctagcataac

SEQ ID NO: 91678 - DNA, 33 bp, Homo sapien
gaggaaatagtgtagatgaattgctagcataac

SEQ ID NO: 91679 - DNA, 33 bp, Homo sapien
agactcggatgaacaccaggggacattctcacc

SEQ ID NO: 91680 - DNA, 33 bp, Homo sapien
agactcggatgaacacgaggggacattctcacc

SEQ ID NO: 91681 - DNA, 33 bp, Homo sapien
agtttcttgttacatacggatattttcagtgtt

SEQ ID NO: 91682 - DNA, 33 bp, Homo sapien
agtttcttgttacatatggatattttcagtgtt

SEQ ID NO: 91683 - DNA, 33 bp, Homo sapien
aatagctctttgaaaaactttgcctcaagttat

SEQ ID NO: 91684 - DNA, 33 bp, Homo sapien
aatagctctttgaaaacctttgcctcaagttat

SEQ ID NO: 91685 - DNA, 33 bp, Homo sapien
atctgtgtgatgactccatctctagtctttgac

SEQ ID NO: 91686 - DNA, 33 bp, Homo sapien
atctgtgtgatgactctatctctagtctttgac

SEQ ID NO: 91687 - DNA, 33 bp, Homo sapien
cctcaggctcctgaaactactactagaaaaata

SEQ ID NO: 91688 - DNA, 33 bp, Homo sapien
cctcaggctcctgaaagtactactagaaaaata

SEQ ID NO: 91689 - DNA, 33 bp, Homo sapien
atataaaacttcaaccacatgaggccaggtgct

SEQ ID NO: 91690 - DNA, 33 bp, Homo sapien
atataaaacttcaaccgcatgaggccaggtgct

SEQ ID NO: 91691 - DNA, 33 bp, Homo sapien
cttcaatctcctaaaaggaatctatgaaaaacc

SEQ ID NO: 91692 - DNA, 33 bp, Homo sapien
cttcaatctcctaaaatgaatctatgaaaaacc

SEQ ID NO: 91693 - DNA, 33 bp, Homo sapien
aattaagtgaggagagaaatttccttgggcctt

SEQ ID NO: 91694 - DNA, 33 bp, Homo sapien
aattaagtgaggagaggaatttccttgggcctt

SEQ ID NO: 91695 - DNA, 33 bp, Homo sapien
ttcaagttcatgcttagaattggtattgcaggc

SEQ ID NO: 91696 - DNA, 33 bp, Homo sapien
ttcaagttcatgcttataattggtattgcaggc

SEQ ID NO: 91697 - DNA, 33 bp, Homo sapien
tggactcgccctgaaccctttcttgtgagatcc

SEQ ID NO: 91698 - DNA, 33 bp, Homo sapien
tggactcgccctgaactctttcttgtgagatcc

SEQ ID NO: 91699 - DNA, 33 bp, Homo sapien
ctgactggtagccagaggtacaatgactcaatg

SEQ ID NO: 91700 - DNA, 33 bp, Homo sapien
ctgactggtagccagatgtacaatgactcaatg

SEQ ID NO: 91701 - DNA, 33 bp, Homo sapien
agcagagcagaacggaaaagtggaagactccag

SEQ ID NO: 91702 - DNA, 33 bp, Homo sapien
agcagagcagaacggagaagtggaagactccag

SEQ ID NO: 91703 - DNA, 33 bp, Homo sapien
tacacatcctatcagacgtttgcaagagaggac

SEQ ID NO: 91704 - DNA, 33 bp, Homo sapien
tacacatcctatcagaggtttgcaagagaggac

SEQ ID NO: 91705 - DNA, 33 bp, Homo sapien
gctgaagcacttgcaggactcatcttaattatt

SEQ ID NO: 91706 - DNA, 33 bp, Homo sapien
gctgaagcacttgcagtactcatcttaattatt

SEQ ID NO: 91707 - DNA, 33 bp, Homo sapien
ccttgagactttggcaacatactcaactatgtg

SEQ ID NO: 91708 - DNA, 33 bp, Homo sapien
ccttgagactttggcatcatactcaactatgtg

SEQ ID NO: 91709 - DNA, 33 bp, Homo sapien
acaaaaaattattcagaagaaatggagccaaaa

SEQ ID NO: 91710 - DNA, 33 bp, Homo sapien
acaaaaaattattcagtagaaatggagccaaaa

SEQ ID NO: 91711 - DNA, 33 bp, Homo sapien
tctcatctgaaagtccaccactaggtcaggaca

SEQ ID NO: 91712 - DNA, 33 bp, Homo sapien
tctcatctgaaagtccgccactaggtcaggaca

SEQ ID NO: 91713 - DNA, 33 bp, Homo sapien
caattttcaaaaatcagcacattgttattatgt

SEQ ID NO: 91714 - DNA, 33 bp, Homo sapien
caattttcaaaaatcatcacattgttattatgt

SEQ ID NO: 91715 - DNA, 33 bp, Homo sapien
tgaatggatccattgggccaagtgacagagggt

SEQ ID NO: 91716 - DNA, 33 bp, Homo sapien
tgaatggatccattggtccaagtgacagagggt

SEQ ID NO: 91717 - DNA, 33 bp, Homo sapien
attacatatgacattaaatttagagtaagttat

SEQ ID NO: 91718 - DNA, 33 bp, Homo sapien
attacatatgacattacatttagagtaagttat

SEQ ID NO: 91719 - DNA, 33 bp, Homo sapien
taaatcccatttcaaaagtatgtatagagtaag

SEQ ID NO: 91720 - DNA, 33 bp, Homo sapien
taaatcccatttcaaatgtatgtatagagtaag

SEQ ID NO: 91721 - DNA, 33 bp, Homo sapien
gagaagggcccattgaaaatgtgagttgtaagt

SEQ ID NO: 91722 - DNA, 33 bp, Homo sapien
gagaagggcccattgacaatgtgagttgtaagt

SEQ ID NO: 91723 - DNA, 33 bp, Homo sapien
ggtggtaatactgatactaacaatgttaaaacc

SEQ ID NO: 91724 - DNA, 33 bp, Homo sapien
ggtggtaatactgatagtaacaatgttaaaacc

SEQ ID NO: 91725 - DNA, 33 bp, Homo sapien
cgtttgcacagtttcgaatcttttattactagt

SEQ ID NO: 91726 - DNA, 33 bp, Homo sapien
cgtttgcacagtttcgcatcttttattactagt

SEQ ID NO: 91727 - DNA, 33 bp, Homo sapien
tgtaatggagacagtaaaagtagaacaactgtg

SEQ ID NO: 91728 - DNA, 33 bp, Homo sapien
tgtaatggagacagtagaagtagaacaactgtg

SEQ ID NO: 91729 - DNA, 33 bp, Homo sapien
cattctttgaataacaccatcaattttggtaag

SEQ ID NO: 91730 - DNA, 33 bp, Homo sapien
cattctttgaataacagcatcaattttggtaag

SEQ ID NO: 91731 - DNA, 33 bp, Homo sapien
ctctaaaaatattaaaatgactgctattaaaaa

SEQ ID NO: 91732 - DNA, 33 bp, Homo sapien
ctctaaaaatattaaagtgactgctattaaaaa

SEQ ID NO: 91733 - DNA, 33 bp, Homo sapien
caaagtgctgggattaccactatgagccaatga

SEQ ID NO: 91734 - DNA, 33 bp, Homo sapien
caaagtgctgggattatcactatgagccaatga

SEQ ID NO: 91735 - DNA, 33 bp, Homo sapien
ggaaatctaaaccagaatcctacaggcaaggaa

SEQ ID NO: 91736 - DNA, 33 bp, Homo sapien
ggaaatctaaaccagactcctacaggcaaggaa

SEQ ID NO: 91737 - DNA, 33 bp, Homo sapien
aatcaacagctgggtcccattctttttggatct

SEQ ID NO: 91738 - DNA, 33 bp, Homo sapien
aatcaacagctgggtctcattctttttggatct

SEQ ID NO: 91739 - DNA, 33 bp, Homo sapien
tgtcatagtgattgacaatgttagagatacctg

SEQ ID NO: 91740 - DNA, 33 bp, Homo sapien
tgtcatagtgattgaccatgttagagatacctg

SEQ ID NO: 91741 - DNA, 33 bp, Homo sapien
tgggagctaaaagttaaaagaattggactcatg

SEQ ID NO: 91742 - DNA, 33 bp, Homo sapien
tgggagctaaaagttacaagaattggactcatg

SEQ ID NO: 91743 - DNA, 33 bp, Homo sapien
cgcttcatttgtgtcagacttctttggcaagag

SEQ ID NO: 91744 - DNA, 33 bp, Homo sapien
cgcttcatttgtgtcatacttctttggcaagag

SEQ ID NO: 91745 - DNA, 33 bp, Homo sapien
atgtttttaaagagaaagtgtgaataaggaagc

SEQ ID NO: 91746 - DNA, 33 bp, Homo sapien
atgtttttaaagagaatgtgtgaataaggaagc

SEQ ID NO: 91747 - DNA, 33 bp, Homo sapien
aattgtaacagtttaacagtggaaaagtggcta

SEQ ID NO: 91748 - DNA, 33 bp, Homo sapien
aattgtaacagtttaatagtggaaaagtggcta

SEQ ID NO: 91749 - DNA, 33 bp, Homo sapien
tcagaagtccagaaccaaggtgtcctgtttcct

SEQ ID NO: 91750 - DNA, 33 bp, Homo sapien
tcagaagtccagaaccgaggtgtcctgtttcct

SEQ ID NO: 91751 - DNA, 33 bp, Homo sapien
tactgagacacatgtacggggaagacaatgtgg

SEQ ID NO: 91752 - DNA, 33 bp, Homo sapien
tactgagacacatgtagggggaagacaatgtgg

SEQ ID NO: 91753 - DNA, 33 bp, Homo sapien
tataggttttctacaccagagcataagaaacac

SEQ ID NO: 91754 - DNA, 33 bp, Homo sapien
tataggttttctacactagagcataagaaacac

SEQ ID NO: 91755 - DNA, 33 bp, Homo sapien
tctcttctgttattgacgtatgttgtatgttcg

SEQ ID NO: 91756 - DNA, 33 bp, Homo sapien
tctcttctgttattgatgtatgttgtatgttcg

SEQ ID NO: 91757 - DNA, 33 bp, Homo sapien
atgaagagttgaagtagcattcaagctggcaat

SEQ ID NO: 91758 - DNA, 33 bp, Homo sapien
atgaagagttgaagtatcattcaagctggcaat

SEQ ID NO: 91759 - DNA, 33 bp, Homo sapien
caatgaaagtcatttaaaagttgaaatcaaagc

SEQ ID NO: 91760 - DNA, 33 bp, Homo sapien
caatgaaagtcatttagaagttgaaatcaaagc

SEQ ID NO: 91761 - DNA, 33 bp, Homo sapien
tttttctgccacaataaaagaaacaacaatgat

SEQ ID NO: 91762 - DNA, 33 bp, Homo sapien
tttttctgccacaatagaagaaacaacaatgat

SEQ ID NO: 91763 - DNA, 33 bp, Homo sapien
ataaatattcattacacaattgagtgaaaacta

SEQ ID NO: 91764 - DNA, 33 bp, Homo sapien
ataaatattcattacagaattgagtgaaaacta

SEQ ID NO: 91765 - DNA, 33 bp, Homo sapien
cattttgtagactggacagttttagcactgatg

SEQ ID NO: 91766 - DNA, 33 bp, Homo sapien
cattttgtagactggatagttttagcactgatg

SEQ ID NO: 91767 - DNA, 33 bp, Homo sapien
ttagtaacatggaaaccgtttatgatctaataa

SEQ ID NO: 91768 - DNA, 33 bp, Homo sapien
ttagtaacatggaaactgtttatgatctaataa

SEQ ID NO: 91769 - DNA, 33 bp, Homo sapien
taaaaccagactcataagtaggttacagataca

SEQ ID NO: 91770 - DNA, 33 bp, Homo sapien
taaaaccagactcataggtaggttacagataca

SEQ ID NO: 91771 - DNA, 33 bp, Homo sapien
tcattatgcacgctacggtaagcatttagctcc

SEQ ID NO: 91772 - DNA, 33 bp, Homo sapien
tcattatgcacgctactgtaagcatttagctcc

SEQ ID NO: 91773 - DNA, 33 bp, Homo sapien
agctaccttcacataaccctacaagttaacaaa

SEQ ID NO: 91774 - DNA, 33 bp, Homo sapien
agctaccttcacataatcctacaagttaacaaa

SEQ ID NO: 91775 - DNA, 33 bp, Homo sapien
ggctaagcagtgcagaagacagggtgaaagctg

SEQ ID NO: 91776 - DNA, 33 bp, Homo sapien
ggctaagcagtgcagaggacagggtgaaagctg

SEQ ID NO: 91777 - DNA, 33 bp, Homo sapien
cttcgggggtgccaataactgcactctgagtaa

SEQ ID NO: 91778 - DNA, 33 bp, Homo sapien
cttcgggggtgccaatgactgcactctgagtaa

SEQ ID NO: 91779 - DNA, 33 bp, Homo sapien
aggcaaaagagtagaacgcagtccaataactaa

SEQ ID NO: 91780 - DNA, 33 bp, Homo sapien
aggcaaaagagtagaatgcagtccaataactaa

SEQ ID NO: 91781 - DNA, 33 bp, Homo sapien
cttctttgaagtcatcactttcttaatcaagtt

SEQ ID NO: 91782 - DNA, 33 bp, Homo sapien
cttctttgaagtcatcgctttcttaatcaagtt

SEQ ID NO: 91783 - DNA, 33 bp, Homo sapien
atgctactatatgacccacctaaagaaaatggc

SEQ ID NO: 91784 - DNA, 33 bp, Homo sapien
atgctactatatgaccgacctaaagaaaatggc

SEQ ID NO: 91785 - DNA, 33 bp, Homo sapien
gtggtcagtgtcaaagccctcacttttcataac

SEQ ID NO: 91786 - DNA, 33 bp, Homo sapien
gtggtcagtgtcaaaggcctcacttttcataac

SEQ ID NO: 91787 - DNA, 33 bp, Homo sapien
gtatctaattgtaaaaatttacacgaaaaataa

SEQ ID NO: 91788 - DNA, 33 bp, Homo sapien
gtatctaattgtaaaagtttacacgaaaaataa

SEQ ID NO: 91789 - DNA, 33 bp, Homo sapien
atttgaaagcccagtaaaggagagtgaggatga

SEQ ID NO: 91790 - DNA, 33 bp, Homo sapien
atttgaaagcccagtagaggagagtgaggatga

SEQ ID NO: 91791 - DNA, 33 bp, Homo sapien
tgtttaattgggcaggaattactctcaaacata

SEQ ID NO: 91792 - DNA, 33 bp, Homo sapien
tgtttaattgggcaggcattactctcaaacata

SEQ ID NO: 91793 - DNA, 33 bp, Homo sapien
caccattctactgacaagtaaattcctgagaag

SEQ ID NO: 91794 - DNA, 33 bp, Homo sapien
caccattctactgacaggtaaattcctgagaag

SEQ ID NO: 91795 - DNA, 33 bp, Homo sapien
aggaatagtaataccacgtttatgtcatcctag

SEQ ID NO: 91796 - DNA, 33 bp, Homo sapien
aggaatagtaataccatgtttatgtcatcctag

SEQ ID NO: 91797 - DNA, 33 bp, Homo sapien
atacactatttcaaaccgtaatgacactccctc

SEQ ID NO: 91798 - DNA, 33 bp, Homo sapien
atacactatttcaaactgtaatgacactccctc

SEQ ID NO: 91799 - DNA, 33 bp, Homo sapien
ctgtaatttgtgaagacctaatccacaatttta

SEQ ID NO: 91800 - DNA, 33 bp, Homo sapien
ctgtaatttgtgaagagctaatccacaatttta

SEQ ID NO: 91801 - DNA, 33 bp, Homo sapien
ccaagatgcaatgggcaaaaagtgtcctaagca

SEQ ID NO: 91802 - DNA, 33 bp, Homo sapien
ccaagatgcaatgggcgaaaagtgtcctaagca

SEQ ID NO: 91803 - DNA, 33 bp, Homo sapien
ctagtctgtaagaatgcattgatttaagtatat

SEQ ID NO: 91804 - DNA, 33 bp, Homo sapien
ctagtctgtaagaatgtattgatttaagtatat

SEQ ID NO: 91805 - DNA, 33 bp, Homo sapien
ctgtaagattcaatgacgtctctggtgcagcag

SEQ ID NO: 91806 - DNA, 33 bp, Homo sapien
ctgtaagattcaatgatgtctctggtgcagcag

SEQ ID NO: 91807 - DNA, 33 bp, Homo sapien
agtcccttttggggagaccttgatggcatcttc

SEQ ID NO: 91808 - DNA, 33 bp, Homo sapien
agtcccttttggggagcccttgatggcatcttc

SEQ ID NO: 91809 - DNA, 33 bp, Homo sapien
aaagactgaggctgtaccgagaaattttctgta

SEQ ID NO: 91810 - DNA, 33 bp, Homo sapien
aaagactgaggctgtatcgagaaattttctgta

SEQ ID NO: 91811 - DNA, 33 bp, Homo sapien
acagccaaagcagcaaatatctctttactgtct

SEQ ID NO: 91812 - DNA, 33 bp, Homo sapien
acagccaaagcagcaagtatctctttactgtct

SEQ ID NO: 91813 - DNA, 33 bp, Homo sapien
atctaaaccaaacaaaacatgataatttcagaa

SEQ ID NO: 91814 - DNA, 33 bp, Homo sapien
atctaaaccaaacaaatcatgataatttcagaa

SEQ ID NO: 91815 - DNA, 33 bp, Homo sapien
tatttatatcagaagcagagattaactgtcctt

SEQ ID NO: 91816 - DNA, 33 bp, Homo sapien
tatttatatcagaagcggagattaactgtcctt

SEQ ID NO: 91817 - DNA, 33 bp, Homo sapien
ttttgaaaccaccagccatgctgtacttttaaa

SEQ ID NO: 91818 - DNA, 33 bp, Homo sapien
ttttgaaaccaccagcgatgctgtacttttaaa

SEQ ID NO: 91819 - DNA, 33 bp, Homo sapien
attagtaaagatgtgacgtataactagcaaaga

SEQ ID NO: 91820 - DNA, 33 bp, Homo sapien
attagtaaagatgtgatgtataactagcaaaga

SEQ ID NO: 91821 - DNA, 33 bp, Homo sapien
aaatgcaagaggtaatcaaatatcaaatgcaga

SEQ ID NO: 91822 - DNA, 33 bp, Homo sapien
aaatgcaagaggtaattaaatatcaaatgcaga

SEQ ID NO: 91823 - DNA, 33 bp, Homo sapien
acagcatgagggactacagttaagaatactgta

SEQ ID NO: 91824 - DNA, 33 bp, Homo sapien
acagcatgagggactatagttaagaatactgta

SEQ ID NO: 91825 - DNA, 33 bp, Homo sapien
ataactatatgtttctgaagtctctattgacag

SEQ ID NO: 91826 - DNA, 33 bp, Homo sapien
ataactatatgtttcttaagtctctattgacag

SEQ ID NO: 91827 - DNA, 33 bp, Homo sapien
tcataaacttctggaaaatagaagcagtagtgt

SEQ ID NO: 91828 - DNA, 33 bp, Homo sapien
tcataaacttctggaatatagaagcagtagtgt

SEQ ID NO: 91829 - DNA, 33 bp, Homo sapien
aatatcaattataccaaacacttccaatgcata

SEQ ID NO: 91830 - DNA, 33 bp, Homo sapien
aatatcaattataccagacacttccaatgcata

SEQ ID NO: 91831 - DNA, 33 bp, Homo sapien
taaacaaaattcatacacactaaagaatgccat

SEQ ID NO: 91832 - DNA, 33 bp, Homo sapien
taaacaaaattcatacccactaaagaatgccat

SEQ ID NO: 91833 - DNA, 33 bp, Homo sapien
tcagcagaaactcaaaaaatttacaggctgaaa

SEQ ID NO: 91834 - DNA, 33 bp, Homo sapien
tcagcagaaactcaaagaatttacaggctgaaa

SEQ ID NO: 91835 - DNA, 33 bp, Homo sapien
tgctcgtataatgttcaatgaaaattctagtca

SEQ ID NO: 91836 - DNA, 33 bp, Homo sapien
tgctcgtataatgttcgatgaaaattctagtca

SEQ ID NO: 91837 - DNA, 33 bp, Homo sapien
aggctacacatcatctaaacttctgtggactct

SEQ ID NO: 91838 - DNA, 33 bp, Homo sapien
aggctacacatcatctgaacttctgtggactct

SEQ ID NO: 91839 - DNA, 33 bp, Homo sapien
caacttgctgctacaaatcacaaaaagagagac

SEQ ID NO: 91840 - DNA, 33 bp, Homo sapien
caacttgctgctacaattcacaaaaagagagac

SEQ ID NO: 91841 - DNA, 33 bp, Homo sapien
tatatcgtttattgtacaatggtacggcgaata

SEQ ID NO: 91842 - DNA, 33 bp, Homo sapien
tatatcgtttattgtataatggtacggcgaata

SEQ ID NO: 91843 - DNA, 33 bp, Homo sapien
tagtttaaacactgataaccttttgtaaccata

SEQ ID NO: 91844 - DNA, 33 bp, Homo sapien
tagtttaaacactgatgaccttttgtaaccata

SEQ ID NO: 91845 - DNA, 33 bp, Homo sapien
atctaatcagctagacaacaaatgtgtccatta

SEQ ID NO: 91846 - DNA, 33 bp, Homo sapien
atctaatcagctagacgacaaatgtgtccatta

SEQ ID NO: 91847 - DNA, 33 bp, Homo sapien
taggcttaggcttcaccgtactccaaatgtcaa

SEQ ID NO: 91848 - DNA, 33 bp, Homo sapien
taggcttaggcttcactgtactccaaatgtcaa

SEQ ID NO: 91849 - DNA, 33 bp, Homo sapien
gagataatgaagtaaacgtgctaagaataaagg

SEQ ID NO: 91850 - DNA, 33 bp, Homo sapien
gagataatgaagtaaatgtgctaagaataaagg

SEQ ID NO: 91851 - DNA, 33 bp, Homo sapien
ggaggaccatgactagaccagagggatgggagg

SEQ ID NO: 91852 - DNA, 33 bp, Homo sapien
ggaggaccatgactaggccagagggatgggagg

SEQ ID NO: 91853 - DNA, 33 bp, Homo sapien
aatctgagagtgtaaaaaccacagtctgatccc

SEQ ID NO: 91854 - DNA, 33 bp, Homo sapien
aatctgagagtgtaaagaccacagtctgatccc

SEQ ID NO: 91855 - DNA, 33 bp, Homo sapien
ttcccccattcatggacgttcaacttgctcctc

SEQ ID NO: 91856 - DNA, 33 bp, Homo sapien
ttcccccattcatggatgttcaacttgctcctc

SEQ ID NO: 91857 - DNA, 33 bp, Homo sapien
gcttatgatttatagacggatggatttactgca

SEQ ID NO: 91858 - DNA, 33 bp, Homo sapien
gcttatgatttatagatggatggatttactgca

SEQ ID NO: 91859 - DNA, 33 bp, Homo sapien
ggagactgcagataacaattataggaattctat

SEQ ID NO: 91860 - DNA, 33 bp, Homo sapien
ggagactgcagataactattataggaattctat

SEQ ID NO: 91861 - DNA, 33 bp, Homo sapien
atatgacattgtcccaactgcgcagagtcccac

SEQ ID NO: 91862 - DNA, 33 bp, Homo sapien
atatgacattgtcccagctgcgcagagtcccac

SEQ ID NO: 91863 - DNA, 33 bp, Homo sapien
gctgtaaatacagacaactttgctagctcaccc

SEQ ID NO: 91864 - DNA, 33 bp, Homo sapien
gctgtaaatacagacagctttgctagctcaccc

SEQ ID NO: 91865 - DNA, 33 bp, Homo sapien
tgactaaagagaccaacgagcaagaagagcagg

SEQ ID NO: 91866 - DNA, 33 bp, Homo sapien
tgactaaagagaccaatgagcaagaagagcagg

SEQ ID NO: 91867 - DNA, 33 bp, Homo sapien
gatcaaggctagatagaagtagagttatcagaa

SEQ ID NO: 91868 - DNA, 33 bp, Homo sapien
gatcaaggctagatagcagtagagttatcagaa

SEQ ID NO: 91869 - DNA, 33 bp, Homo sapien
aactggcttgatttgaacattttacaacgtaaa

SEQ ID NO: 91870 - DNA, 33 bp, Homo sapien
aactggcttgatttgaccattttacaacgtaaa

SEQ ID NO: 91871 - DNA, 33 bp, Homo sapien
acacttctcttccaaacatgaatctgacctgca

SEQ ID NO: 91872 - DNA, 33 bp, Homo sapien
acacttctcttccaaatatgaatctgacctgca

SEQ ID NO: 91873 - DNA, 33 bp, Homo sapien
cctcctgtggctaaaaaccctcatttgttttat

SEQ ID NO: 91874 - DNA, 33 bp, Homo sapien
cctcctgtggctaaaatccctcatttgttttat

SEQ ID NO: 91875 - DNA, 33 bp, Homo sapien
ggtctctttctgagaactctaatggtaaaacac

SEQ ID NO: 91876 - DNA, 33 bp, Homo sapien
ggtctctttctgagaattctaatggtaaaacac

SEQ ID NO: 91877 - DNA, 33 bp, Homo sapien
tatagctttaaatgtcagaaaaaatcctcattt

SEQ ID NO: 91878 - DNA, 33 bp, Homo sapien
tatagctttaaatgtcggaaaaaatcctcattt

SEQ ID NO: 91879 - DNA, 33 bp, Homo sapien
atctaatagtcactcaataagtatgttttgaat

SEQ ID NO: 91880 - DNA, 33 bp, Homo sapien
atctaatagtcactcagtaagtatgttttgaat

SEQ ID NO: 91881 - DNA, 33 bp, Homo sapien
aggtaggattttgccaagtgagaactaattatt

SEQ ID NO: 91882 - DNA, 33 bp, Homo sapien
aggtaggattttgccaggtgagaactaattatt

SEQ ID NO: 91883 - DNA, 33 bp, Homo sapien
tctctttctaacctgacgattggggatggcatt

SEQ ID NO: 91884 - DNA, 33 bp, Homo sapien
tctctttctaacctgatgattggggatggcatt

SEQ ID NO: 91885 - DNA, 33 bp, Homo sapien
atataactcaattgccgaatctatcatatgtga

SEQ ID NO: 91886 - DNA, 33 bp, Homo sapien
atataactcaattgcctaatctatcatatgtga

SEQ ID NO: 91887 - DNA, 33 bp, Homo sapien
ccccaaagaacacatacgaattgagttattgtt

SEQ ID NO: 91888 - DNA, 33 bp, Homo sapien
ccccaaagaacacatatgaattgagttattgtt

SEQ ID NO: 91889 - DNA, 33 bp, Homo sapien
agagttttttttaaaggcatgtcatcagctatt

SEQ ID NO: 91890 - DNA, 33 bp, Homo sapien
agagttttttttaaagtcatgtcatcagctatt

SEQ ID NO: 91891 - DNA, 33 bp, Homo sapien
cacattccatcatcaagtaaacatttaaacagc

SEQ ID NO: 91892 - DNA, 33 bp, Homo sapien
cacattccatcatcaattaaacatttaaacagc

SEQ ID NO: 91893 - DNA, 33 bp, Homo sapien
aaccacatgggcaaaaagtaaaaaatttacact

SEQ ID NO: 91894 - DNA, 33 bp, Homo sapien
aaccacatgggcaaaacgtaaaaaatttacact

SEQ ID NO: 91895 - DNA, 33 bp, Homo sapien
ttccaattctacttaaatcagagtgccagaata

SEQ ID NO: 91896 - DNA, 33 bp, Homo sapien
ttccaattctacttaactcagagtgccagaata

SEQ ID NO: 91897 - DNA, 33 bp, Homo sapien
gttggccatataaagtaactcaaaagtaataca

SEQ ID NO: 91898 - DNA, 33 bp, Homo sapien
gttggccatataaagtgactcaaaagtaataca

SEQ ID NO: 91899 - DNA, 33 bp, Homo sapien
tgtaactgtgtgatcacggcatagtctcctaag

SEQ ID NO: 91900 - DNA, 33 bp, Homo sapien
tgtaactgtgtgatcatggcatagtctcctaag

SEQ ID NO: 91901 - DNA, 33 bp, Homo sapien
ttttcattcctgagcaatcataccttttatctt

SEQ ID NO: 91902 - DNA, 33 bp, Homo sapien
ttttcattcctgagcagtcataccttttatctt

SEQ ID NO: 91903 - DNA, 33 bp, Homo sapien
ttctatttttcacaacaaccatatcctctgaaa

SEQ ID NO: 91904 - DNA, 33 bp, Homo sapien
ttctatttttcacaaccaccatatcctctgaaa

SEQ ID NO: 91905 - DNA, 33 bp, Homo sapien
tctggaaattccttgacaatgcttcagtcagga

SEQ ID NO: 91906 - DNA, 33 bp, Homo sapien
tctggaaattccttgagaatgcttcagtcagga

SEQ ID NO: 91907 - DNA, 33 bp, Homo sapien
ttaggctttgcttatgaatgaaaaaaaatgaga

SEQ ID NO: 91908 - DNA, 33 bp, Homo sapien
ttaggctttgcttatgcatgaaaaaaaatgaga

SEQ ID NO: 91909 - DNA, 33 bp, Homo sapien
gaccaagaaactcatcacatataataatcacta

SEQ ID NO: 91910 - DNA, 33 bp, Homo sapien
gaccaagaaactcatcgcatataataatcacta

SEQ ID NO: 91911 - DNA, 33 bp, Homo sapien
ggggtgcctccataggaaagacgccatttcagc

SEQ ID NO: 91912 - DNA, 33 bp, Homo sapien
ggggtgcctccatagggaagacgccatttcagc

SEQ ID NO: 91913 - DNA, 33 bp, Homo sapien
cagaggttaaatcagacgttggctaactacagc

SEQ ID NO: 91914 - DNA, 33 bp, Homo sapien
cagaggttaaatcagatgttggctaactacagc

SEQ ID NO: 91915 - DNA, 33 bp, Homo sapien
ctttgtcaatggtccaaattttgctgcatcaaa

SEQ ID NO: 91916 - DNA, 33 bp, Homo sapien
ctttgtcaatggtccatattttgctgcatcaaa

SEQ ID NO: 91917 - DNA, 33 bp, Homo sapien
tcagtgaatttgatgaagtgcacaaaagatagt

SEQ ID NO: 91918 - DNA, 33 bp, Homo sapien
tcagtgaatttgatgaggtgcacaaaagatagt

SEQ ID NO: 91919 - DNA, 33 bp, Homo sapien
aaattacactataggactaacttaacttcttgc

SEQ ID NO: 91920 - DNA, 33 bp, Homo sapien
aaattacactataggagtaacttaacttcttgc

SEQ ID NO: 91921 - DNA, 33 bp, Homo sapien
cccatgatttggggaacttattgtagcagtcaa

SEQ ID NO: 91922 - DNA, 33 bp, Homo sapien
cccatgatttggggaatttattgtagcagtcaa

SEQ ID NO: 91923 - DNA, 33 bp, Homo sapien
ttcaaaattatacttacgtggaaatgagaactg

SEQ ID NO: 91924 - DNA, 33 bp, Homo sapien
ttcaaaattatacttatgtggaaatgagaactg

SEQ ID NO: 91925 - DNA, 33 bp, Homo sapien
actcttacacaagataccatattctagtcacat

SEQ ID NO: 91926 - DNA, 33 bp, Homo sapien
actcttacacaagatatcatattctagtcacat

SEQ ID NO: 91927 - DNA, 33 bp, Homo sapien
ccctcaaatgcttccaatcttctttgttaaaat

SEQ ID NO: 91928 - DNA, 33 bp, Homo sapien
ccctcaaatgcttccagtcttctttgttaaaat

SEQ ID NO: 91929 - DNA, 33 bp, Homo sapien
atttaaatgaagaatgaaatatgcaaagatttg

SEQ ID NO: 91930 - DNA, 33 bp, Homo sapien
atttaaatgaagaatgtaatatgcaaagatttg

SEQ ID NO: 91931 - DNA, 33 bp, Homo sapien
taaaatggttttcaggaaagagagttaatgcat

SEQ ID NO: 91932 - DNA, 33 bp, Homo sapien
taaaatggttttcagggaagagagttaatgcat

SEQ ID NO: 91933 - DNA, 33 bp, Homo sapien
tgctgatcaatgagcccatatcacttcatgcac

SEQ ID NO: 91934 - DNA, 33 bp, Homo sapien
tgctgatcaatgagcctatatcacttcatgcac

SEQ ID NO: 91935 - DNA, 33 bp, Homo sapien
tccagctcagttcccaaatttaatattcctcag

SEQ ID NO: 91936 - DNA, 33 bp, Homo sapien
tccagctcagttcccatatttaatattcctcag

SEQ ID NO: 91937 - DNA, 33 bp, Homo sapien
attggatttttaattaagaagggtgaacatcag

SEQ ID NO: 91938 - DNA, 33 bp, Homo sapien
attggatttttaattaggaagggtgaacatcag

SEQ ID NO: 91939 - DNA, 33 bp, Homo sapien
acatcagcataaaacaataacaaattacatcaa

SEQ ID NO: 91940 - DNA, 33 bp, Homo sapien
acatcagcataaaacagtaacaaattacatcaa

SEQ ID NO: 91941 - DNA, 33 bp, Homo sapien
agccttggaggaactccgaggaatggttaaaag

SEQ ID NO: 91942 - DNA, 33 bp, Homo sapien
agccttggaggaactctgaggaatggttaaaag

SEQ ID NO: 91943 - DNA, 33 bp, Homo sapien
cttgtttggatcaaaaggaatggcttcacatat

SEQ ID NO: 91944 - DNA, 33 bp, Homo sapien
cttgtttggatcaaaatgaatggcttcacatat

SEQ ID NO: 91945 - DNA, 33 bp, Homo sapien
tgagtttatatggttacgcttagggcttagaga

SEQ ID NO: 91946 - DNA, 33 bp, Homo sapien
tgagtttatatggttatgcttagggcttagaga

SEQ ID NO: 91947 - DNA, 33 bp, Homo sapien
ctctgtattccacaaacaacttgaggttgccgt

SEQ ID NO: 91948 - DNA, 33 bp, Homo sapien
ctctgtattccacaaataacttgaggttgccgt

SEQ ID NO: 91949 - DNA, 33 bp, Homo sapien
gcacactttctccctaaaaataccataacaata

SEQ ID NO: 91950 - DNA, 33 bp, Homo sapien
gcacactttctccctacaaataccataacaata

SEQ ID NO: 91951 - DNA, 33 bp, Homo sapien
tatccaaatggaaatacgctgctagaaatgtga

SEQ ID NO: 91952 - DNA, 33 bp, Homo sapien
tatccaaatggaaatatgctgctagaaatgtga

SEQ ID NO: 91953 - DNA, 33 bp, Homo sapien
tcatcaagaaatcctaatagattgtaagctcat

SEQ ID NO: 91954 - DNA, 33 bp, Homo sapien
tcatcaagaaatcctagtagattgtaagctcat

SEQ ID NO: 91955 - DNA, 33 bp, Homo sapien
tgctgggaaagccttccaagtcatttgaggata

SEQ ID NO: 91956 - DNA, 33 bp, Homo sapien
tgctgggaaagccttctaagtcatttgaggata

SEQ ID NO: 91957 - DNA, 33 bp, Homo sapien
actttgtgtatagaacaatcattgagctgtcag

SEQ ID NO: 91958 - DNA, 33 bp, Homo sapien
actttgtgtatagaactatcattgagctgtcag

SEQ ID NO: 91959 - DNA, 33 bp, Homo sapien
gggagcagacactgtaggatttctattgtttta

SEQ ID NO: 91960 - DNA, 33 bp, Homo sapien
gggagcagacactgtatgatttctattgtttta

SEQ ID NO: 91961 - DNA, 33 bp, Homo sapien
taggcaaggtgtcctacgtcaaagaacatcatc

SEQ ID NO: 91962 - DNA, 33 bp, Homo sapien
taggcaaggtgtcctatgtcaaagaacatcatc

SEQ ID NO: 91963 - DNA, 33 bp, Homo sapien
aatcatgtggtaaagacgccaggatactagtga

SEQ ID NO: 91964 - DNA, 33 bp, Homo sapien
aatcatgtggtaaagatgccaggatactagtga

SEQ ID NO: 91965 - DNA, 33 bp, Homo sapien
agagagagagagaacactctttggcacaaaaca

SEQ ID NO: 91966 - DNA, 33 bp, Homo sapien
agagagagagagaacattctttggcacaaaaca

SEQ ID NO: 91967 - DNA, 33 bp, Homo sapien
ataagaagggcactaacttactcttgggagcca

SEQ ID NO: 91968 - DNA, 33 bp, Homo sapien
ataagaagggcactaatttactcttgggagcca

SEQ ID NO: 91969 - DNA, 33 bp, Homo sapien
agaacttagaccatccaaatttctgtatttgaa

SEQ ID NO: 91970 - DNA, 33 bp, Homo sapien
agaacttagaccatccgaatttctgtatttgaa

SEQ ID NO: 91971 - DNA, 33 bp, Homo sapien
ctttttgaatgaactgccagattgctaactttt

SEQ ID NO: 91972 - DNA, 33 bp, Homo sapien
ctttttgaatgaactggcagattgctaactttt

SEQ ID NO: 91973 - DNA, 33 bp, Homo sapien
aattgttattctgccacaatgagaaaaatggtc

SEQ ID NO: 91974 - DNA, 33 bp, Homo sapien
aattgttattctgccataatgagaaaaatggtc

SEQ ID NO: 91975 - DNA, 33 bp, Homo sapien
agtgactataatcctaacagaaagattgctcat

SEQ ID NO: 91976 - DNA, 33 bp, Homo sapien
agtgactataatcctagcagaaagattgctcat

SEQ ID NO: 91977 - DNA, 33 bp, Homo sapien
tatctcggaaatgttacgacaatgggcttagaa

SEQ ID NO: 91978 - DNA, 33 bp, Homo sapien
tatctcggaaatgttatgacaatgggcttagaa

SEQ ID NO: 91979 - DNA, 33 bp, Homo sapien
aaaccggctatattgaataagttagatatgagc

SEQ ID NO: 91980 - DNA, 33 bp, Homo sapien
aaaccggctatattgagtaagttagatatgagc

SEQ ID NO: 91981 - DNA, 33 bp, Homo sapien
gaagagacaggctaaacgattctgataattact

SEQ ID NO: 91982 - DNA, 33 bp, Homo sapien
gaagagacaggctaaatgattctgataattact

SEQ ID NO: 91983 - DNA, 33 bp, Homo sapien
tggtctttataacacacggaatgttgattacat

SEQ ID NO: 91984 - DNA, 33 bp, Homo sapien
tggtctttataacacagggaatgttgattacat

SEQ ID NO: 91985 - DNA, 33 bp, Homo sapien
taaggtaggtgcccttaaaaggatgactagacc

SEQ ID NO: 91986 - DNA, 33 bp, Homo sapien
taaggtaggtgcccttcaaaggatgactagacc

SEQ ID NO: 91987 - DNA, 33 bp, Homo sapien
ttattatgcctggttacaatttgagaactgtga

SEQ ID NO: 91988 - DNA, 33 bp, Homo sapien
ttattatgcctggttagaatttgagaactgtga

SEQ ID NO: 91989 - DNA, 33 bp, Homo sapien
tgtatcataaattttaagcagtattaattatat

SEQ ID NO: 91990 - DNA, 33 bp, Homo sapien
tgtatcataaattttaggcagtattaattatat

SEQ ID NO: 91991 - DNA, 33 bp, Homo sapien
ttccttaaacttcaacggagctttgaaataggt

SEQ ID NO: 91992 - DNA, 33 bp, Homo sapien
ttccttaaacttcaactgagctttgaaataggt

SEQ ID NO: 91993 - DNA, 33 bp, Homo sapien
ctgggaacccacaacacgatcttgaatagaagt

SEQ ID NO: 91994 - DNA, 33 bp, Homo sapien
ctgggaacccacaacatgatcttgaatagaagt

SEQ ID NO: 91995 - DNA, 33 bp, Homo sapien
ttgctttttctgaaccacagggagtatgacatt

SEQ ID NO: 91996 - DNA, 33 bp, Homo sapien
ttgctttttctgaacctcagggagtatgacatt

SEQ ID NO: 91997 - DNA, 33 bp, Homo sapien
cctctgaagctgccagccgattctgtaattttt

SEQ ID NO: 91998 - DNA, 33 bp, Homo sapien
cctctgaagctgccaggcgattctgtaattttt

SEQ ID NO: 91999 - DNA, 33 bp, Homo sapien
acgaacaatgtttagcccttaagtcaacagaca

SEQ ID NO: 92000 - DNA, 33 bp, Homo sapien
acgaacaatgtttagcgcttaagtcaacagaca

SEQ ID NO: 92001 - DNA, 33 bp, Homo sapien
ttacctttttagaaaagaaaccatcatgaaaga

SEQ ID NO: 92002 - DNA, 33 bp, Homo sapien
ttacctttttagaaaataaaccatcatgaaaga

SEQ ID NO: 92003 - DNA, 33 bp, Homo sapien
atgcacatggtttctaggctttcttcatctctc

SEQ ID NO: 92004 - DNA, 33 bp, Homo sapien
atgcacatggtttctatgctttcttcatctctc

SEQ ID NO: 92005 - DNA, 33 bp, Homo sapien
ccatatcaagtatatccacaaaatagaatcctc

SEQ ID NO: 92006 - DNA, 33 bp, Homo sapien
ccatatcaagtatatcgacaaaatagaatcctc

SEQ ID NO: 92007 - DNA, 33 bp, Homo sapien
tgtgaaatttatgtgaagttttaaggaatgact

SEQ ID NO: 92008 - DNA, 33 bp, Homo sapien
tgtgaaatttatgtgaggttttaaggaatgact

SEQ ID NO: 92009 - DNA, 33 bp, Homo sapien
aaaataaggataataaaagcctgtctcaaaagt

SEQ ID NO: 92010 - DNA, 33 bp, Homo sapien
aaaataaggataataacagcctgtctcaaaagt

SEQ ID NO: 92011 - DNA, 33 bp, Homo sapien
ggtggttgtttgagaaagaaaggcaggagggca

SEQ ID NO: 92012 - DNA, 33 bp, Homo sapien
ggtggttgtttgagaaggaaaggcaggagggca

SEQ ID NO: 92013 - DNA, 33 bp, Homo sapien
gctacttatgatgaaaacaatattctccagctc

SEQ ID NO: 92014 - DNA, 33 bp, Homo sapien
gctacttatgatgaaagcaatattctccagctc

SEQ ID NO: 92015 - DNA, 33 bp, Homo sapien
gtattttagggtatgactcacttctcaaatttt

SEQ ID NO: 92016 - DNA, 33 bp, Homo sapien
gtattttagggtatgagtcacttctcaaatttt

SEQ ID NO: 92017 - DNA, 33 bp, Homo sapien
gagatttgcattcaaccaggaggtaattttttt

SEQ ID NO: 92018 - DNA, 33 bp, Homo sapien
gagatttgcattcaactaggaggtaattttttt

SEQ ID NO: 92019 - DNA, 33 bp, Homo sapien
atcactcaccaaccaccgagctacagatagcag

SEQ ID NO: 92020 - DNA, 33 bp, Homo sapien
atcactcaccaaccactgagctacagatagcag

SEQ ID NO: 92021 - DNA, 33 bp, Homo sapien
tcatctgaaatctacaatattagtcattttcta

SEQ ID NO: 92022 - DNA, 33 bp, Homo sapien
tcatctgaaatctacagtattagtcattttcta

SEQ ID NO: 92023 - DNA, 33 bp, Homo sapien
ggtgtttaggcagtacactacaataagatgatt

SEQ ID NO: 92024 - DNA, 33 bp, Homo sapien
ggtgtttaggcagtacgctacaataagatgatt

SEQ ID NO: 92025 - DNA, 33 bp, Homo sapien
atttgaaaccttctcaaatctcagtctgctggt

SEQ ID NO: 92026 - DNA, 33 bp, Homo sapien
atttgaaaccttctcagatctcagtctgctggt

SEQ ID NO: 92027 - DNA, 33 bp, Homo sapien
acaaaaggtgcctcaaaagaggaggagagaaat

SEQ ID NO: 92028 - DNA, 33 bp, Homo sapien
acaaaaggtgcctcaacagaggaggagagaaat

SEQ ID NO: 92029 - DNA, 33 bp, Homo sapien
ttaggtgataaagtaaccatttgagtgaaattt

SEQ ID NO: 92030 - DNA, 33 bp, Homo sapien
ttaggtgataaagtaatcatttgagtgaaattt

SEQ ID NO: 92031 - DNA, 33 bp, Homo sapien
atctgccttagaaaaaattaggacagagaatca

SEQ ID NO: 92032 - DNA, 33 bp, Homo sapien
atctgccttagaaaaatttaggacagagaatca

SEQ ID NO: 92033 - DNA, 33 bp, Homo sapien
attttgtaagcctacactacagctgccatagat

SEQ ID NO: 92034 - DNA, 33 bp, Homo sapien
attttgtaagcctacagtacagctgccatagat

SEQ ID NO: 92035 - DNA, 33 bp, Homo sapien
aaaagccattgatagcaaagtaaagtgagattg

SEQ ID NO: 92036 - DNA, 33 bp, Homo sapien
aaaagccattgatagcgaagtaaagtgagattg

SEQ ID NO: 92037 - DNA, 33 bp, Homo sapien
attaatgccagattataaggaagcaaactttga

SEQ ID NO: 92038 - DNA, 33 bp, Homo sapien
attaatgccagattatgaggaagcaaactttga

SEQ ID NO: 92039 - DNA, 33 bp, Homo sapien
aatatttacaaagatacagtgtgacaagtagtt

SEQ ID NO: 92040 - DNA, 33 bp, Homo sapien
aatatttacaaagatatagtgtgacaagtagtt

SEQ ID NO: 92041 - DNA, 33 bp, Homo sapien
cttcttatgaaacaataatctactccattagaa

SEQ ID NO: 92042 - DNA, 33 bp, Homo sapien
cttcttatgaaacaattatctactccattagaa

SEQ ID NO: 92043 - DNA, 33 bp, Homo sapien
tgaaggatattgtcctaaaaacgcatcagaaat

SEQ ID NO: 92044 - DNA, 33 bp, Homo sapien
tgaaggatattgtccttaaaacgcatcagaaat

SEQ ID NO: 92045 - DNA, 33 bp, Homo sapien
ctgggcaggccctcaccggtaaacaatagggat

SEQ ID NO: 92046 - DNA, 33 bp, Homo sapien
ctgggcaggccctcactggtaaacaatagggat

SEQ ID NO: 92047 - DNA, 33 bp, Homo sapien
gtttctgtgcaaaaacgagtgtcctaaaaatga

SEQ ID NO: 92048 - DNA, 33 bp, Homo sapien
gtttctgtgcaaaaactagtgtcctaaaaatga

SEQ ID NO: 92049 - DNA, 33 bp, Homo sapien
ttttactaggaaaatgacatgacctgatttgca

SEQ ID NO: 92050 - DNA, 33 bp, Homo sapien
ttttactaggaaaatggcatgacctgatttgca

SEQ ID NO: 92051 - DNA, 33 bp, Homo sapien
gatacatgagccacacagaaagttcaccaaatt

SEQ ID NO: 92052 - DNA, 33 bp, Homo sapien
gatacatgagccacaccgaaagttcaccaaatt

SEQ ID NO: 92053 - DNA, 33 bp, Homo sapien
tactaaacaagatcaaacagaatgaaaatgtaa

SEQ ID NO: 92054 - DNA, 33 bp, Homo sapien
tactaaacaagatcaagcagaatgaaaatgtaa

SEQ ID NO: 92055 - DNA, 33 bp, Homo sapien
aaggataaagttaataagaaatgtccaaagtgt

SEQ ID NO: 92056 - DNA, 33 bp, Homo sapien
aaggataaagttaataggaaatgtccaaagtgt

SEQ ID NO: 92057 - DNA, 33 bp, Homo sapien
ttaagcattggcctgacggataggctgctcata

SEQ ID NO: 92058 - DNA, 33 bp, Homo sapien
ttaagcattggcctgatggataggctgctcata

SEQ ID NO: 92059 - DNA, 33 bp, Homo sapien
ccaatgcttaaggtaccccctacaggagctttt

SEQ ID NO: 92060 - DNA, 33 bp, Homo sapien
ccaatgcttaaggtacgccctacaggagctttt

SEQ ID NO: 92061 - DNA, 33 bp, Homo sapien
cccgctctgcaaagtccgaccacttcaattgcc

SEQ ID NO: 92062 - DNA, 33 bp, Homo sapien
cccgctctgcaaagtctgaccacttcaattgcc

SEQ ID NO: 92063 - DNA, 33 bp, Homo sapien
actactttgttaggtaggtggatcttgcaaata

SEQ ID NO: 92064 - DNA, 33 bp, Homo sapien
actactttgttaggtatgtggatcttgcaaata

SEQ ID NO: 92065 - DNA, 33 bp, Homo sapien
gaaaccacaacccagaaggagcatgaagagtta

SEQ ID NO: 92066 - DNA, 33 bp, Homo sapien
gaaaccacaacccagatggagcatgaagagtta

SEQ ID NO: 92067 - DNA, 33 bp, Homo sapien
ggcagtcatgaatcaccccccaaaggccccatc

SEQ ID NO: 92068 - DNA, 33 bp, Homo sapien
ggcagtcatgaatcacgccccaaaggccccatc

SEQ ID NO: 92069 - DNA, 33 bp, Homo sapien
gaaatcagtcttctgacatttatgttgcaaatt

SEQ ID NO: 92070 - DNA, 33 bp, Homo sapien
gaaatcagtcttctgatatttatgttgcaaatt

SEQ ID NO: 92071 - DNA, 33 bp, Homo sapien
tgcctggcttgttttgaaacttaaagatgaggt

SEQ ID NO: 92072 - DNA, 33 bp, Homo sapien
tgcctggcttgttttgtaacttaaagatgaggt

SEQ ID NO: 92073 - DNA, 33 bp, Homo sapien
cttatgtggctgacaacattgggttagtttaaa

SEQ ID NO: 92074 - DNA, 33 bp, Homo sapien
cttatgtggctgacaatattgggttagtttaaa

SEQ ID NO: 92075 - DNA, 33 bp, Homo sapien
gagatatggttctacagtattctctatttcgaa

SEQ ID NO: 92076 - DNA, 33 bp, Homo sapien
gagatatggttctacattattctctatttcgaa

SEQ ID NO: 92077 - DNA, 33 bp, Homo sapien
atcctaacaaactatgaaatgatttatgacaag

SEQ ID NO: 92078 - DNA, 33 bp, Homo sapien
atcctaacaaactatggaatgatttatgacaag

SEQ ID NO: 92079 - DNA, 33 bp, Homo sapien
catggctcaggacttcactatgagacatgtttc

SEQ ID NO: 92080 - DNA, 33 bp, Homo sapien
catggctcaggacttcgctatgagacatgtttc

SEQ ID NO: 92081 - DNA, 33 bp, Homo sapien
tgcccatgttttctcaagcatgacacatggctc

SEQ ID NO: 92082 - DNA, 33 bp, Homo sapien
tgcccatgttttctcaggcatgacacatggctc

SEQ ID NO: 92083 - DNA, 33 bp, Homo sapien
cctcagatgcagaaggcaatgttggtaaatcac

SEQ ID NO: 92084 - DNA, 33 bp, Homo sapien
cctcagatgcagaaggtaatgttggtaaatcac

SEQ ID NO: 92085 - DNA, 33 bp, Homo sapien
agtctcttgactaagaagataacaatacagacg

SEQ ID NO: 92086 - DNA, 33 bp, Homo sapien
agtctcttgactaagaggataacaatacagacg

SEQ ID NO: 92087 - DNA, 33 bp, Homo sapien
tctgtgcaatctaaaaatgtcacacaggactcc

SEQ ID NO: 92088 - DNA, 33 bp, Homo sapien
tctgtgcaatctaaaagtgtcacacaggactcc

SEQ ID NO: 92089 - DNA, 33 bp, Homo sapien
gaagtttctgttgacacaactataagctcatta

SEQ ID NO: 92090 - DNA, 33 bp, Homo sapien
gaagtttctgttgacataactataagctcatta

SEQ ID NO: 92091 - DNA, 33 bp, Homo sapien
tttaaatgaccattccaataattctgaaaccac

SEQ ID NO: 92092 - DNA, 33 bp, Homo sapien
tttaaatgaccattccgataattctgaaaccac

SEQ ID NO: 92093 - DNA, 33 bp, Homo sapien
tcactggcgtgataacaagattgtatgcgagat

SEQ ID NO: 92094 - DNA, 33 bp, Homo sapien
tcactggcgtgataacgagattgtatgcgagat

SEQ ID NO: 92095 - DNA, 33 bp, Homo sapien
aaagctggaaggatcaatagaatgaaggtccca

SEQ ID NO: 92096 - DNA, 33 bp, Homo sapien
aaagctggaaggatcagtagaatgaaggtccca

SEQ ID NO: 92097 - DNA, 33 bp, Homo sapien
aggagtagacaactgacgacaaagtaagaaaaa

SEQ ID NO: 92098 - DNA, 33 bp, Homo sapien
aggagtagacaactgatgacaaagtaagaaaaa

SEQ ID NO: 92099 - DNA, 33 bp, Homo sapien
cctgattcaaacacaaagagcccttcttgttct

SEQ ID NO: 92100 - DNA, 33 bp, Homo sapien
cctgattcaaacacaaggagcccttcttgttct

SEQ ID NO: 92101 - DNA, 33 bp, Homo sapien
aaccaagagcatgataaatggttgttttacatc

SEQ ID NO: 92102 - DNA, 33 bp, Homo sapien
aaccaagagcatgatagatggttgttttacatc

SEQ ID NO: 92103 - DNA, 33 bp, Homo sapien
gcaaatgtgatacttacgctgcctgttcttcca

SEQ ID NO: 92104 - DNA, 33 bp, Homo sapien
gcaaatgtgatacttatgctgcctgttcttcca

SEQ ID NO: 92105 - DNA, 33 bp, Homo sapien
catgcatactagtgatcacccttgaaaatctct

SEQ ID NO: 92106 - DNA, 33 bp, Homo sapien
catgcatactagtgattacccttgaaaatctct

SEQ ID NO: 92107 - DNA, 33 bp, Homo sapien
aaagaccatgtataaaattgtttgtgatctttc

SEQ ID NO: 92108 - DNA, 33 bp, Homo sapien
aaagaccatgtataaagttgtttgtgatctttc

SEQ ID NO: 92109 - DNA, 33 bp, Homo sapien
attgtagtctactttgcagtttacagcatgaac

SEQ ID NO: 92110 - DNA, 33 bp, Homo sapien
attgtagtctactttggagtttacagcatgaac

SEQ ID NO: 92111 - DNA, 33 bp, Homo sapien
aaaaagaaagtcgagaaaactagccgtcagatt

SEQ ID NO: 92112 - DNA, 33 bp, Homo sapien
aaaaagaaagtcgagagaactagccgtcagatt

SEQ ID NO: 92113 - DNA, 33 bp, Homo sapien
aggaaagtaacaatatcataactggatgtgttc

SEQ ID NO: 92114 - DNA, 33 bp, Homo sapien
aggaaagtaacaatatgataactggatgtgttc

SEQ ID NO: 92115 - DNA, 33 bp, Homo sapien
gtgccttgcaataagagggtctcaataagcatt

SEQ ID NO: 92116 - DNA, 33 bp, Homo sapien
gtgccttgcaataagatggtctcaataagcatt

SEQ ID NO: 92117 - DNA, 33 bp, Homo sapien
catctgtctacatctcactaaatatggaagcat

SEQ ID NO: 92118 - DNA, 33 bp, Homo sapien
catctgtctacatctccctaaatatggaagcat

SEQ ID NO: 92119 - DNA, 33 bp, Homo sapien
tttatcttactatcgaactaggagatcaagggt

SEQ ID NO: 92120 - DNA, 33 bp, Homo sapien
tttatcttactatcgagctaggagatcaagggt

SEQ ID NO: 92121 - DNA, 33 bp, Homo sapien
tggaagtaacggtggagaggcataggaatcttc

SEQ ID NO: 92122 - DNA, 33 bp, Homo sapien
tggaagtaacggtggataggcataggaatcttc

SEQ ID NO: 92123 - DNA, 33 bp, Homo sapien
ttcatctaactcctgaagacaacactccccagg

SEQ ID NO: 92124 - DNA, 33 bp, Homo sapien
ttcatctaactcctgacgacaacactccccagg

SEQ ID NO: 92125 - DNA, 33 bp, Homo sapien
ctattcctaaaactgaaggatgagatattatcc

SEQ ID NO: 92126 - DNA, 33 bp, Homo sapien
ctattcctaaaactgagggatgagatattatcc

SEQ ID NO: 92127 - DNA, 33 bp, Homo sapien
tccagttgaaggtaaagagtgtacatttgtcat

SEQ ID NO: 92128 - DNA, 33 bp, Homo sapien
tccagttgaaggtaaatagtgtacatttgtcat

SEQ ID NO: 92129 - DNA, 33 bp, Homo sapien
tccaaatctggaagaaccatttatggaaaaaca

SEQ ID NO: 92130 - DNA, 33 bp, Homo sapien
tccaaatctggaagaatcatttatggaaaaaca

SEQ ID NO: 92131 - DNA, 33 bp, Homo sapien
gtctccttgataacaactgagatattcacgggg

SEQ ID NO: 92132 - DNA, 33 bp, Homo sapien
gtctccttgataacaattgagatattcacgggg

SEQ ID NO: 92133 - DNA, 33 bp, Homo sapien
aggaggaaacaatatcagagaggttcattgata

SEQ ID NO: 92134 - DNA, 33 bp, Homo sapien
aggaggaaacaatatcggagaggttcattgata

SEQ ID NO: 92135 - DNA, 33 bp, Homo sapien
cccctctaagtcttcacaagagatactgctata

SEQ ID NO: 92136 - DNA, 33 bp, Homo sapien
cccctctaagtcttcataagagatactgctata

SEQ ID NO: 92137 - DNA, 33 bp, Homo sapien
caaattcctcattatcaatagaacttagctcac

SEQ ID NO: 92138 - DNA, 33 bp, Homo sapien
caaattcctcattatcgatagaacttagctcac

SEQ ID NO: 92139 - DNA, 33 bp, Homo sapien
cagtgtggccaggacaaatgaagatggcttccg

SEQ ID NO: 92140 - DNA, 33 bp, Homo sapien
cagtgtggccaggacagatgaagatggcttccg

SEQ ID NO: 92141 - DNA, 33 bp, Homo sapien
taggtagaattgtccccatttaccatcatatcc

SEQ ID NO: 92142 - DNA, 33 bp, Homo sapien
taggtagaattgtccctatttaccatcatatcc

SEQ ID NO: 92143 - DNA, 33 bp, Homo sapien
atactagcaagctgaactctcttaaacattaca

SEQ ID NO: 92144 - DNA, 33 bp, Homo sapien
atactagcaagctgaagtctcttaaacattaca

SEQ ID NO: 92145 - DNA, 33 bp, Homo sapien
gtcattaacctacccacgtgtgtccgtgtcctt

SEQ ID NO: 92146 - DNA, 33 bp, Homo sapien
gtcattaacctacccatgtgtgtccgtgtcctt

SEQ ID NO: 92147 - DNA, 33 bp, Homo sapien
tcgtgttaacactcctcaactttcttggtcata

SEQ ID NO: 92148 - DNA, 33 bp, Homo sapien
tcgtgttaacactccttaactttcttggtcata

SEQ ID NO: 92149 - DNA, 33 bp, Homo sapien
aagcgtaatagtaaaacaaacgtgcagttggac

SEQ ID NO: 92150 - DNA, 33 bp, Homo sapien
aagcgtaatagtaaaataaacgtgcagttggac

SEQ ID NO: 92151 - DNA, 33 bp, Homo sapien
aagaggagtcagagtacgattaagaaccatgcc

SEQ ID NO: 92152 - DNA, 33 bp, Homo sapien
aagaggagtcagagtatgattaagaaccatgcc

SEQ ID NO: 92153 - DNA, 33 bp, Homo sapien
gtagattaattctttccaccccttaagccagat

SEQ ID NO: 92154 - DNA, 33 bp, Homo sapien
gtagattaattctttctaccccttaagccagat

SEQ ID NO: 92155 - DNA, 33 bp, Homo sapien
gtgtagccttcagaacactaatttacaggatgt

SEQ ID NO: 92156 - DNA, 33 bp, Homo sapien
gtgtagccttcagaacgctaatttacaggatgt

SEQ ID NO: 92157 - DNA, 33 bp, Homo sapien
ataacaatttaaacataaaacaggacaaaccac

SEQ ID NO: 92158 - DNA, 33 bp, Homo sapien
ataacaatttaaacatgaaacaggacaaaccac

SEQ ID NO: 92159 - DNA, 33 bp, Homo sapien
gttgcctttttattggcaaaatgcaattacaca

SEQ ID NO: 92160 - DNA, 33 bp, Homo sapien
gttgcctttttattggtaaaatgcaattacaca

SEQ ID NO: 92161 - DNA, 33 bp, Homo sapien
tgttatagattgataaaatttaaaaatactagg

SEQ ID NO: 92162 - DNA, 33 bp, Homo sapien
tgttatagattgataagatttaaaaatactagg

SEQ ID NO: 92163 - DNA, 33 bp, Homo sapien
tccaataaatttgctacggaatttttcaagtgc

SEQ ID NO: 92164 - DNA, 33 bp, Homo sapien
tccaataaatttgctatggaatttttcaagtgc

SEQ ID NO: 92165 - DNA, 33 bp, Homo sapien
gctataatcatcctaacgcaaaaacgaaaacag

SEQ ID NO: 92166 - DNA, 33 bp, Homo sapien
gctataatcatcctaatgcaaaaacgaaaacag

SEQ ID NO: 92167 - DNA, 33 bp, Homo sapien
gttatctttaggccaaactgatcctgctatgag

SEQ ID NO: 92168 - DNA, 33 bp, Homo sapien
gttatctttaggccaatctgatcctgctatgag

SEQ ID NO: 92169 - DNA, 33 bp, Homo sapien
ttgcaatgaatgggtacattaggcagaagccct

SEQ ID NO: 92170 - DNA, 33 bp, Homo sapien
ttgcaatgaatgggtatattaggcagaagccct

SEQ ID NO: 92171 - DNA, 33 bp, Homo sapien
tctatttgagtgaagacagtcattcttattcca

SEQ ID NO: 92172 - DNA, 33 bp, Homo sapien
tctatttgagtgaagatagtcattcttattcca

SEQ ID NO: 92173 - DNA, 33 bp, Homo sapien
gttaccaccattttacacattaactttcggtgc

SEQ ID NO: 92174 - DNA, 33 bp, Homo sapien
gttaccaccattttacgcattaactttcggtgc

SEQ ID NO: 92175 - DNA, 33 bp, Homo sapien
taatttagcatgcaagacagagtgcagcactgg

SEQ ID NO: 92176 - DNA, 33 bp, Homo sapien
taatttagcatgcaaggcagagtgcagcactgg

SEQ ID NO: 92177 - DNA, 33 bp, Homo sapien
tctgtagttgaaagtacacaaatttagcttgga

SEQ ID NO: 92178 - DNA, 33 bp, Homo sapien
tctgtagttgaaagtatacaaatttagcttgga

SEQ ID NO: 92179 - DNA, 33 bp, Homo sapien
tgtaatttgagatacacggacgtgagcattccc

SEQ ID NO: 92180 - DNA, 33 bp, Homo sapien
tgtaatttgagatacatggacgtgagcattccc

SEQ ID NO: 92181 - DNA, 33 bp, Homo sapien
agacatgaaatacacaagataggaagataaaat

SEQ ID NO: 92182 - DNA, 33 bp, Homo sapien
agacatgaaatacacaggataggaagataaaat

SEQ ID NO: 92183 - DNA, 33 bp, Homo sapien
gaaaatcacttacttacgttggttatctaaacc

SEQ ID NO: 92184 - DNA, 33 bp, Homo sapien
gaaaatcacttacttatgttggttatctaaacc

SEQ ID NO: 92185 - DNA, 33 bp, Homo sapien
tgaggttgtagagaaagaatccatggagaaaga

SEQ ID NO: 92186 - DNA, 33 bp, Homo sapien
tgaggttgtagagaaataatccatggagaaaga

SEQ ID NO: 92187 - DNA, 33 bp, Homo sapien
accccaaagactaggcagccagtccattccatt

SEQ ID NO: 92188 - DNA, 33 bp, Homo sapien
accccaaagactaggcggccagtccattccatt

SEQ ID NO: 92189 - DNA, 33 bp, Homo sapien
caggaattagtcataaaaatagctcacatgtat

SEQ ID NO: 92190 - DNA, 33 bp, Homo sapien
caggaattagtcataagaatagctcacatgtat

SEQ ID NO: 92191 - DNA, 33 bp, Homo sapien
aggagatcaatgggaaagctgttacagtgactc

SEQ ID NO: 92192 - DNA, 33 bp, Homo sapien
aggagatcaatgggaaggctgttacagtgactc

SEQ ID NO: 92193 - DNA, 33 bp, Homo sapien
tgaaattggctcagtaagctgagttagcagtga

SEQ ID NO: 92194 - DNA, 33 bp, Homo sapien
tgaaattggctcagtacgctgagttagcagtga

SEQ ID NO: 92195 - DNA, 33 bp, Homo sapien
ggaaatacggattcaaatgacattcaggaggtg

SEQ ID NO: 92196 - DNA, 33 bp, Homo sapien
ggaaatacggattcaagtgacattcaggaggtg

SEQ ID NO: 92197 - DNA, 33 bp, Homo sapien
gatgtgcataatccagaaacaactccctgctga

SEQ ID NO: 92198 - DNA, 33 bp, Homo sapien
gatgtgcataatccagcaacaactccctgctga

SEQ ID NO: 92199 - DNA, 33 bp, Homo sapien
cactaaagtggacacaccgtaatgtcgccagca

SEQ ID NO: 92200 - DNA, 33 bp, Homo sapien
cactaaagtggacacagcgtaatgtcgccagca

SEQ ID NO: 92201 - DNA, 33 bp, Homo sapien
caatatgtttttattgcacctgatttggaaggc

SEQ ID NO: 92202 - DNA, 33 bp, Homo sapien
caatatgtttttattggacctgatttggaaggc

SEQ ID NO: 92203 - DNA, 33 bp, Homo sapien
gttgggtttcatggaacgtatatgtgtagttaa

SEQ ID NO: 92204 - DNA, 33 bp, Homo sapien
gttgggtttcatggaatgtatatgtgtagttaa

SEQ ID NO: 92205 - DNA, 33 bp, Homo sapien
gtacgtaagtatggaacagaattgacgtattat

SEQ ID NO: 92206 - DNA, 33 bp, Homo sapien
gtacgtaagtatggaatagaattgacgtattat

SEQ ID NO: 92207 - DNA, 33 bp, Homo sapien
atctgctgttaatgaaaacttagaatacaaccc

SEQ ID NO: 92208 - DNA, 33 bp, Homo sapien
atctgctgttaatgaatacttagaatacaaccc

SEQ ID NO: 92209 - DNA, 33 bp, Homo sapien
accatgacctagaaaaatattgaatattcatta

SEQ ID NO: 92210 - DNA, 33 bp, Homo sapien
accatgacctagaaaagtattgaatattcatta

SEQ ID NO: 92211 - DNA, 33 bp, Homo sapien
ttattcaaaagcaaccaagcctctgacagctat

SEQ ID NO: 92212 - DNA, 33 bp, Homo sapien
ttattcaaaagcaaccgagcctctgacagctat

SEQ ID NO: 92213 - DNA, 33 bp, Homo sapien
tttctaactgccatcaagctaattaaaatacca

SEQ ID NO: 92214 - DNA, 33 bp, Homo sapien
tttctaactgccatcatgctaattaaaatacca

SEQ ID NO: 92215 - DNA, 33 bp, Homo sapien
cacaattagatgaatgaacgagataagccaaaa

SEQ ID NO: 92216 - DNA, 33 bp, Homo sapien
cacaattagatgaatggacgagataagccaaaa

SEQ ID NO: 92217 - DNA, 33 bp, Homo sapien
cacaatttaatgaatgcatgagaaccacaattt

SEQ ID NO: 92218 - DNA, 33 bp, Homo sapien
cacaatttaatgaatggatgagaaccacaattt

SEQ ID NO: 92219 - DNA, 33 bp, Homo sapien
taccattgtaagtgaaatatgcttaaatgaaca

SEQ ID NO: 92220 - DNA, 33 bp, Homo sapien
taccattgtaagtgaagtatgcttaaatgaaca

SEQ ID NO: 92221 - DNA, 33 bp, Homo sapien
taagaggactttgttaagactcaataattgttg

SEQ ID NO: 92222 - DNA, 33 bp, Homo sapien
taagaggactttgttatgactcaataattgttg

SEQ ID NO: 92223 - DNA, 33 bp, Homo sapien
tttgagttactcaggaagtctttcttatgatag

SEQ ID NO: 92224 - DNA, 33 bp, Homo sapien
tttgagttactcaggacgtctttcttatgatag

SEQ ID NO: 92225 - DNA, 33 bp, Homo sapien
ctagatagtgcaataaaataagatgaggaaata

SEQ ID NO: 92226 - DNA, 33 bp, Homo sapien
ctagatagtgcaataagataagatgaggaaata

SEQ ID NO: 92227 - DNA, 33 bp, Homo sapien
acttttaatatggtgaacctaggccaaatattg

SEQ ID NO: 92228 - DNA, 33 bp, Homo sapien
acttttaatatggtgagcctaggccaaatattg

SEQ ID NO: 92229 - DNA, 33 bp, Homo sapien
aagtgtaaatccaaaacgaaagcatcagaatcc

SEQ ID NO: 92230 - DNA, 33 bp, Homo sapien
aagtgtaaatccaaaatgaaagcatcagaatcc

SEQ ID NO: 92231 - DNA, 33 bp, Homo sapien
agaactctagacagcaagccttctttatttatc

SEQ ID NO: 92232 - DNA, 33 bp, Homo sapien
agaactctagacagcaggccttctttatttatc

SEQ ID NO: 92233 - DNA, 33 bp, Homo sapien
tttatatggcagacagaatgaatgaggatacat

SEQ ID NO: 92234 - DNA, 33 bp, Homo sapien
tttatatggcagacaggatgaatgaggatacat

SEQ ID NO: 92235 - DNA, 33 bp, Homo sapien
cactttgacttctccccaattcctccatcaccc

SEQ ID NO: 92236 - DNA, 33 bp, Homo sapien
cactttgacttctccctaattcctccatcaccc

SEQ ID NO: 92237 - DNA, 33 bp, Homo sapien
caaggtcatcccccacaaagagtgtgagcaacc

SEQ ID NO: 92238 - DNA, 33 bp, Homo sapien
caaggtcatcccccactaagagtgtgagcaacc

SEQ ID NO: 92239 - DNA, 33 bp, Homo sapien
tgcataggagtacagaagtgattggtggaaaat

SEQ ID NO: 92240 - DNA, 33 bp, Homo sapien
tgcataggagtacagaggtgattggtggaaaat

SEQ ID NO: 92241 - DNA, 33 bp, Homo sapien
tcagtctgtgagctgacgaacttttccacatcc

SEQ ID NO: 92242 - DNA, 33 bp, Homo sapien
tcagtctgtgagctgatgaacttttccacatcc

SEQ ID NO: 92243 - DNA, 33 bp, Homo sapien
tttatgtttttcctgacgagatattgatggtgg

SEQ ID NO: 92244 - DNA, 33 bp, Homo sapien
tttatgtttttcctgatgagatattgatggtgg

SEQ ID NO: 92245 - DNA, 33 bp, Homo sapien
tggagaaagcctgttacagagaaatggaatgga

SEQ ID NO: 92246 - DNA, 33 bp, Homo sapien
tggagaaagcctgttatagagaaatggaatgga

SEQ ID NO: 92247 - DNA, 33 bp, Homo sapien
aaatacagagatgaggccagaccaaaaaagcaa

SEQ ID NO: 92248 - DNA, 33 bp, Homo sapien
aaatacagagatgaggtcagaccaaaaaagcaa

SEQ ID NO: 92249 - DNA, 33 bp, Homo sapien
atgtagtgattaattaaaatgctcatatgtatg

SEQ ID NO: 92250 - DNA, 33 bp, Homo sapien
atgtagtgattaattacaatgctcatatgtatg

SEQ ID NO: 92251 - DNA, 33 bp, Homo sapien
ttgtatgatctctaccacaaacacagatacata

SEQ ID NO: 92252 - DNA, 33 bp, Homo sapien
ttgtatgatctctaccgcaaacacagatacata

SEQ ID NO: 92253 - DNA, 33 bp, Homo sapien
tacctccaggcctttacgccttctgttccctct

SEQ ID NO: 92254 - DNA, 33 bp, Homo sapien
tacctccaggcctttatgccttctgttccctct

SEQ ID NO: 92255 - DNA, 33 bp, Homo sapien
tgattttacttccgcaagtctctctttaaaatg

SEQ ID NO: 92256 - DNA, 33 bp, Homo sapien
tgattttacttccgcaggtctctctttaaaatg

SEQ ID NO: 92257 - DNA, 33 bp, Homo sapien
tacgcctataaaaggacaagtaggtcaaaaacg

SEQ ID NO: 92258 - DNA, 33 bp, Homo sapien
tacgcctataaaaggataagtaggtcaaaaacg

SEQ ID NO: 92259 - DNA, 33 bp, Homo sapien
gttcctcccatcagaagttctcaatttgctgtg

SEQ ID NO: 92260 - DNA, 33 bp, Homo sapien
gttcctcccatcagaatttctcaatttgctgtg

SEQ ID NO: 92261 - DNA, 33 bp, Homo sapien
tgcccagggaccagtccagaagattacaagagg

SEQ ID NO: 92262 - DNA, 33 bp, Homo sapien
tgcccagggaccagtctagaagattacaagagg

SEQ ID NO: 92263 - DNA, 33 bp, Homo sapien
aatacagtagtgaaccaggcacttaggcttgta

SEQ ID NO: 92264 - DNA, 33 bp, Homo sapien
aatacagtagtgaaccgggcacttaggcttgta

SEQ ID NO: 92265 - DNA, 33 bp, Homo sapien
catgacagataattagaaaatctggtcaggctt

SEQ ID NO: 92266 - DNA, 33 bp, Homo sapien
catgacagataattaggaaatctggtcaggctt

SEQ ID NO: 92267 - DNA, 33 bp, Homo sapien
cataggttaagcctaacgtattttcgtgttgtt

SEQ ID NO: 92268 - DNA, 33 bp, Homo sapien
cataggttaagcctaatgtattttcgtgttgtt

SEQ ID NO: 92269 - DNA, 33 bp, Homo sapien
tatttagtataacattaaaaacctgtcatctca

SEQ ID NO: 92270 - DNA, 33 bp, Homo sapien
tatttagtataacattgaaaacctgtcatctca

SEQ ID NO: 92271 - DNA, 33 bp, Homo sapien
ctgtggtatttccccaatgaagatactaaaaca

SEQ ID NO: 92272 - DNA, 33 bp, Homo sapien
ctgtggtatttccccagtgaagatactaaaaca

SEQ ID NO: 92273 - DNA, 33 bp, Homo sapien
taatacagaaaggctccataaatgtgagtttcc

SEQ ID NO: 92274 - DNA, 33 bp, Homo sapien
taatacagaaaggctcgataaatgtgagtttcc

SEQ ID NO: 92275 - DNA, 33 bp, Homo sapien
acagattggaaaaacacgtttcacgttctgtta

SEQ ID NO: 92276 - DNA, 33 bp, Homo sapien
acagattggaaaaacatgtttcacgttctgtta

SEQ ID NO: 92277 - DNA, 33 bp, Homo sapien
gatagccacagcagaaaagaagactgacagatg

SEQ ID NO: 92278 - DNA, 33 bp, Homo sapien
gatagccacagcagaagagaagactgacagatg

SEQ ID NO: 92279 - DNA, 33 bp, Homo sapien
tggaccacccatcaagcccaacaagtatccatg

SEQ ID NO: 92280 - DNA, 33 bp, Homo sapien
tggaccacccatcaagtccaacaagtatccatg

SEQ ID NO: 92281 - DNA, 33 bp, Homo sapien
aggccttttggagacaagaaggcaaaaactgtg

SEQ ID NO: 92282 - DNA, 33 bp, Homo sapien
aggccttttggagacatgaaggcaaaaactgtg

SEQ ID NO: 92283 - DNA, 33 bp, Homo sapien
tacaagaccagctagaacactctttatttaaca

SEQ ID NO: 92284 - DNA, 33 bp, Homo sapien
tacaagaccagctagaccactctttatttaaca

SEQ ID NO: 92285 - DNA, 33 bp, Homo sapien
aacgggcatttcagaaaaggtgtatgggattga

SEQ ID NO: 92286 - DNA, 33 bp, Homo sapien
aacgggcatttcagaacaggtgtatgggattga

SEQ ID NO: 92287 - DNA, 33 bp, Homo sapien
cctcctgccctggagccgaaaggaacactgctg

SEQ ID NO: 92288 - DNA, 33 bp, Homo sapien
cctcctgccctggagcggaaaggaacactgctg

SEQ ID NO: 92289 - DNA, 33 bp, Homo sapien
tttcatctatgtatcaatcagtcatgggataaa

SEQ ID NO: 92290 - DNA, 33 bp, Homo sapien
tttcatctatgtatcagtcagtcatgggataaa

SEQ ID NO: 92291 - DNA, 33 bp, Homo sapien
caagcggtaaatggaacactgggagtgatggca

SEQ ID NO: 92292 - DNA, 33 bp, Homo sapien
caagcggtaaatggaagactgggagtgatggca

SEQ ID NO: 92293 - DNA, 33 bp, Homo sapien
tgttcaaccgatatacagagtgttttataaacc

SEQ ID NO: 92294 - DNA, 33 bp, Homo sapien
tgttcaaccgatatacggagtgttttataaacc

SEQ ID NO: 92295 - DNA, 33 bp, Homo sapien
cctccaactacagggaacctaactatgcaaagg

SEQ ID NO: 92296 - DNA, 33 bp, Homo sapien
cctccaactacagggagcctaactatgcaaagg

SEQ ID NO: 92297 - DNA, 33 bp, Homo sapien
atggacttcaaagcacagtagttgggcctttgc

SEQ ID NO: 92298 - DNA, 33 bp, Homo sapien
atggacttcaaagcacggtagttgggcctttgc

SEQ ID NO: 92299 - DNA, 33 bp, Homo sapien
ggacgtcaggagatcacagtcctttttttagaa

SEQ ID NO: 92300 - DNA, 33 bp, Homo sapien
ggacgtcaggagatcatagtcctttttttagaa

SEQ ID NO: 92301 - DNA, 33 bp, Homo sapien
cttccactctccaacacgacaaggtcaatcaaa

SEQ ID NO: 92302 - DNA, 33 bp, Homo sapien
cttccactctccaacatgacaaggtcaatcaaa

SEQ ID NO: 92303 - DNA, 33 bp, Homo sapien
ttgctttcctaatggcaagctcattcactgaca

SEQ ID NO: 92304 - DNA, 33 bp, Homo sapien
ttgctttcctaatggcgagctcattcactgaca

SEQ ID NO: 92305 - DNA, 33 bp, Homo sapien
taggtttggagagataaaagtatgaagttgaga

SEQ ID NO: 92306 - DNA, 33 bp, Homo sapien
taggtttggagagatagaagtatgaagttgaga

SEQ ID NO: 92307 - DNA, 33 bp, Homo sapien
ttaaaaccaacatgtaagctgaagaagaaaatg

SEQ ID NO: 92308 - DNA, 33 bp, Homo sapien
ttaaaaccaacatgtaggctgaagaagaaaatg

SEQ ID NO: 92309 - DNA, 33 bp, Homo sapien
tttaacattaccctaccaagaccaacactttac

SEQ ID NO: 92310 - DNA, 33 bp, Homo sapien
tttaacattaccctactaagaccaacactttac

SEQ ID NO: 92311 - DNA, 33 bp, Homo sapien
tattcttgacccagtacgctgtgtttgagatgg

SEQ ID NO: 92312 - DNA, 33 bp, Homo sapien
tattcttgacccagtatgctgtgtttgagatgg

SEQ ID NO: 92313 - DNA, 33 bp, Homo sapien
tcctaccatcattgcaacaaaggaaagaggttt

SEQ ID NO: 92314 - DNA, 33 bp, Homo sapien
tcctaccatcattgcaccaaaggaaagaggttt

SEQ ID NO: 92315 - DNA, 33 bp, Homo sapien
acattagcagtctcccaggatttccaaaagaag

SEQ ID NO: 92316 - DNA, 33 bp, Homo sapien
acattagcagtctcccgggatttccaaaagaag

SEQ ID NO: 92317 - DNA, 33 bp, Homo sapien
tgaaaccaatgaggtcaattttagagagatacc

SEQ ID NO: 92318 - DNA, 33 bp, Homo sapien
tgaaaccaatgaggtcgattttagagagatacc

SEQ ID NO: 92319 - DNA, 33 bp, Homo sapien
gtagctaagaagaagacgtaaaaggagtgaaaa

SEQ ID NO: 92320 - DNA, 33 bp, Homo sapien
gtagctaagaagaagatgtaaaaggagtgaaaa

SEQ ID NO: 92321 - DNA, 33 bp, Homo sapien
gaagggaagactcaaaatggacccttgataaaa

SEQ ID NO: 92322 - DNA, 33 bp, Homo sapien
gaagggaagactcaaactggacccttgataaaa

SEQ ID NO: 92323 - DNA, 33 bp, Homo sapien
tcaatatactgaaacccgaacccacaatgtgat

SEQ ID NO: 92324 - DNA, 33 bp, Homo sapien
tcaatatactgaaacctgaacccacaatgtgat

SEQ ID NO: 92325 - DNA, 33 bp, Homo sapien
taattctcagggaagaccttatgagactataaa

SEQ ID NO: 92326 - DNA, 33 bp, Homo sapien
taattctcagggaagatcttatgagactataaa

SEQ ID NO: 92327 - DNA, 33 bp, Homo sapien
ctaacagctctttcaaacatttatttgctactt

SEQ ID NO: 92328 - DNA, 33 bp, Homo sapien
ctaacagctctttcaagcatttatttgctactt

SEQ ID NO: 92329 - DNA, 33 bp, Homo sapien
ctgataggtacaagtcactattcttgatgctgg

SEQ ID NO: 92330 - DNA, 33 bp, Homo sapien
ctgataggtacaagtcgctattcttgatgctgg

SEQ ID NO: 92331 - DNA, 33 bp, Homo sapien
cagaggtcaattggtacgtaaggaataaataaa

SEQ ID NO: 92332 - DNA, 33 bp, Homo sapien
cagaggtcaattggtatgtaaggaataaataaa

SEQ ID NO: 92333 - DNA, 33 bp, Homo sapien
cagatggttgcctaacaccagcgtccatctatg

SEQ ID NO: 92334 - DNA, 33 bp, Homo sapien
cagatggttgcctaaccccagcgtccatctatg

SEQ ID NO: 92335 - DNA, 33 bp, Homo sapien
gtatgttagtataatgccacttaatttcttcat

SEQ ID NO: 92336 - DNA, 33 bp, Homo sapien
gtatgttagtataatgtcacttaatttcttcat

SEQ ID NO: 92337 - DNA, 33 bp, Homo sapien
gtatacattgaaattggagggataattgatcat

SEQ ID NO: 92338 - DNA, 33 bp, Homo sapien
gtatacattgaaattgtagggataattgatcat

SEQ ID NO: 92339 - DNA, 33 bp, Homo sapien
actgaaggaataggaacgcttctatttatcaaa

SEQ ID NO: 92340 - DNA, 33 bp, Homo sapien
actgaaggaataggaatgcttctatttatcaaa

SEQ ID NO: 92341 - DNA, 33 bp, Homo sapien
atcttgttgtttcttaggtaagatcaattttaa

SEQ ID NO: 92342 - DNA, 33 bp, Homo sapien
atcttgttgtttcttatgtaagatcaattttaa

SEQ ID NO: 92343 - DNA, 33 bp, Homo sapien
ttccccttcaccagaaagttcttatgtacccat

SEQ ID NO: 92344 - DNA, 33 bp, Homo sapien
ttccccttcaccagaatgttcttatgtacccat

SEQ ID NO: 92345 - DNA, 33 bp, Homo sapien
agaatcttcctctgataacgtttaaggttgact

SEQ ID NO: 92346 - DNA, 33 bp, Homo sapien
agaatcttcctctgatgacgtttaaggttgact

SEQ ID NO: 92347 - DNA, 33 bp, Homo sapien
aagtattactgtttaacaaaatgcaaactataa

SEQ ID NO: 92348 - DNA, 33 bp, Homo sapien
aagtattactgtttaataaaatgcaaactataa

SEQ ID NO: 92349 - DNA, 33 bp, Homo sapien
aaaatgcaaactataaaagtgagacttaactgt

SEQ ID NO: 92350 - DNA, 33 bp, Homo sapien
aaaatgcaaactataacagtgagacttaactgt

SEQ ID NO: 92351 - DNA, 33 bp, Homo sapien
cttcacccagcataaccgtattacagcgtgaaa

SEQ ID NO: 92352 - DNA, 33 bp, Homo sapien
cttcacccagcataactgtattacagcgtgaaa

SEQ ID NO: 92353 - DNA, 33 bp, Homo sapien
gtttccactcaacaacacagcaagtcagaatga

SEQ ID NO: 92354 - DNA, 33 bp, Homo sapien
gtttccactcaacaacccagcaagtcagaatga

SEQ ID NO: 92355 - DNA, 33 bp, Homo sapien
attaatgaacacataaatagtggagaacgtgac

SEQ ID NO: 92356 - DNA, 33 bp, Homo sapien
attaatgaacacataagtagtggagaacgtgac

SEQ ID NO: 92357 - DNA, 33 bp, Homo sapien
cttactcagttatctcacatttgtcaaattaca

SEQ ID NO: 92358 - DNA, 33 bp, Homo sapien
cttactcagttatctcgcatttgtcaaattaca

SEQ ID NO: 92359 - DNA, 33 bp, Homo sapien
taaccagaaccaagaaagtgaacgccagtaatt

SEQ ID NO: 92360 - DNA, 33 bp, Homo sapien
taaccagaaccaagaaggtgaacgccagtaatt

SEQ ID NO: 92361 - DNA, 33 bp, Homo sapien
cacctggaatgagagacccaatttctcctttta

SEQ ID NO: 92362 - DNA, 33 bp, Homo sapien
cacctggaatgagagagccaatttctcctttta

SEQ ID NO: 92363 - DNA, 33 bp, Homo sapien
tcctggacaaaatacaaaggatatcaggtatta

SEQ ID NO: 92364 - DNA, 33 bp, Homo sapien
tcctggacaaaatacacaggatatcaggtatta

SEQ ID NO: 92365 - DNA, 33 bp, Homo sapien
ccaaaaatatagccacccttttgatgcttgctt

SEQ ID NO: 92366 - DNA, 33 bp, Homo sapien
ccaaaaatatagccactcttttgatgcttgctt

SEQ ID NO: 92367 - DNA, 33 bp, Homo sapien
gccccatatccaatgaagtctgcctgtttgttg

SEQ ID NO: 92368 - DNA, 33 bp, Homo sapien
gccccatatccaatgacgtctgcctgtttgttg

SEQ ID NO: 92369 - DNA, 33 bp, Homo sapien
ttggctcttttgaagacgtttttatgtgtggat

SEQ ID NO: 92370 - DNA, 33 bp, Homo sapien
ttggctcttttgaagatgtttttatgtgtggat

SEQ ID NO: 92371 - DNA, 33 bp, Homo sapien
aggatcttgatatgaaggaaagtagctgtagag

SEQ ID NO: 92372 - DNA, 33 bp, Homo sapien
aggatcttgatatgaatgaaagtagctgtagag

SEQ ID NO: 92373 - DNA, 33 bp, Homo sapien
acagctctctggaaacagaagccactcgtagac

SEQ ID NO: 92374 - DNA, 33 bp, Homo sapien
acagctctctggaaacggaagccactcgtagac

SEQ ID NO: 92375 - DNA, 33 bp, Homo sapien
ccttcatcttgctctacggtttgcctattcaca

SEQ ID NO: 92376 - DNA, 33 bp, Homo sapien
ccttcatcttgctctatggtttgcctattcaca

SEQ ID NO: 92377 - DNA, 33 bp, Homo sapien
ctacctgtacataaatgacctagctttatatgt

SEQ ID NO: 92378 - DNA, 33 bp, Homo sapien
ctacctgtacataaattacctagctttatatgt

SEQ ID NO: 92379 - DNA, 33 bp, Homo sapien
aaatgtttttgcataacagattccacttctcta

SEQ ID NO: 92380 - DNA, 33 bp, Homo sapien
aaatgtttttgcataatagattccacttctcta

SEQ ID NO: 92381 - DNA, 33 bp, Homo sapien
ggggtatttactaaaagggatgatatgctgggt

SEQ ID NO: 92382 - DNA, 33 bp, Homo sapien
ggggtatttactaaaatggatgatatgctgggt

SEQ ID NO: 92383 - DNA, 33 bp, Homo sapien
tgtttcttgcaataaacaaaacttgcatacaaa

SEQ ID NO: 92384 - DNA, 33 bp, Homo sapien
tgtttcttgcaataaataaaacttgcatacaaa

SEQ ID NO: 92385 - DNA, 33 bp, Homo sapien
ggcaatgggtggaataacctgcattctcttctg

SEQ ID NO: 92386 - DNA, 33 bp, Homo sapien
ggcaatgggtggaataccctgcattctcttctg

SEQ ID NO: 92387 - DNA, 33 bp, Homo sapien
ttcagtctcttataaccagggcaatgggtggaa

SEQ ID NO: 92388 - DNA, 33 bp, Homo sapien
ttcagtctcttataactagggcaatgggtggaa

SEQ ID NO: 92389 - DNA, 33 bp, Homo sapien
ttgttgcaaaaagccaatatccaatatatttaa

SEQ ID NO: 92390 - DNA, 33 bp, Homo sapien
ttgttgcaaaaagccagtatccaatatatttaa

SEQ ID NO: 92391 - DNA, 33 bp, Homo sapien
tgtaattgacctctcaactagataaaaggatac

SEQ ID NO: 92392 - DNA, 33 bp, Homo sapien
tgtaattgacctctcagctagataaaaggatac

SEQ ID NO: 92393 - DNA, 33 bp, Homo sapien
tactgaataatgatgccaaacaaggaaatggtc

SEQ ID NO: 92394 - DNA, 33 bp, Homo sapien
tactgaataatgatgctaaacaaggaaatggtc

SEQ ID NO: 92395 - DNA, 33 bp, Homo sapien
atatagttctaatgcaaaagctgattttagtta

SEQ ID NO: 92396 - DNA, 33 bp, Homo sapien
atatagttctaatgcacaagctgattttagtta

SEQ ID NO: 92397 - DNA, 33 bp, Homo sapien
agaatgttctgtgtcaacctgaagtgttttgtt

SEQ ID NO: 92398 - DNA, 33 bp, Homo sapien
agaatgttctgtgtcaccctgaagtgttttgtt

SEQ ID NO: 92399 - DNA, 33 bp, Homo sapien
gacattgacacttcacagaagatactagcaact

SEQ ID NO: 92400 - DNA, 33 bp, Homo sapien
gacattgacacttcacggaagatactagcaact

SEQ ID NO: 92401 - DNA, 33 bp, Homo sapien
tatatgtgaaagtgaaacgtcgggtactcatgg

SEQ ID NO: 92402 - DNA, 33 bp, Homo sapien
tatatgtgaaagtgaatcgtcgggtactcatgg

SEQ ID NO: 92403 - DNA, 33 bp, Homo sapien
ggacaacgtcaaaggacagagatgtaatggtca

SEQ ID NO: 92404 - DNA, 33 bp, Homo sapien
ggacaacgtcaaaggatagagatgtaatggtca

SEQ ID NO: 92405 - DNA, 33 bp, Homo sapien
ctaggtttacctgaccgctaaggctgccacttt

SEQ ID NO: 92406 - DNA, 33 bp, Homo sapien
ctaggtttacctgacctctaaggctgccacttt

SEQ ID NO: 92407 - DNA, 33 bp, Homo sapien
cctgtaggacagttctaagaaagttgcaaccag

SEQ ID NO: 92408 - DNA, 33 bp, Homo sapien
cctgtaggacagttcttagaaagttgcaaccag

SEQ ID NO: 92409 - DNA, 33 bp, Homo sapien
ttccccgtgttcaacaaaggtctaaatgcaggc

SEQ ID NO: 92410 - DNA, 33 bp, Homo sapien
ttccccgtgttcaacagaggtctaaatgcaggc

SEQ ID NO: 92411 - DNA, 33 bp, Homo sapien
ctttgtctgtttgatcacctgtcccctttgtca

SEQ ID NO: 92412 - DNA, 33 bp, Homo sapien
ctttgtctgtttgatcgcctgtcccctttgtca

SEQ ID NO: 92413 - DNA, 33 bp, Homo sapien
tggggacagccaagttaaaatctcagtgctctg

SEQ ID NO: 92414 - DNA, 33 bp, Homo sapien
tggggacagccaagttgaaatctcagtgctctg

SEQ ID NO: 92415 - DNA, 33 bp, Homo sapien
agcgaactacttcttcacatatagtacaaatgt

SEQ ID NO: 92416 - DNA, 33 bp, Homo sapien
agcgaactacttcttctcatatagtacaaatgt

SEQ ID NO: 92417 - DNA, 33 bp, Homo sapien
taaccctaactccaaacctctctctgtgtttga

SEQ ID NO: 92418 - DNA, 33 bp, Homo sapien
taaccctaactccaaatctctctctgtgtttga

SEQ ID NO: 92419 - DNA, 33 bp, Homo sapien
tagtacaggattgcacaataagcactgtggata

SEQ ID NO: 92420 - DNA, 33 bp, Homo sapien
tagtacaggattgcacgataagcactgtggata

SEQ ID NO: 92421 - DNA, 33 bp, Homo sapien
ctattgagtttcgaagcaatgacaaaggaaatt

SEQ ID NO: 92422 - DNA, 33 bp, Homo sapien
ctattgagtttcgaagtaatgacaaaggaaatt

SEQ ID NO: 92423 - DNA, 33 bp, Homo sapien
agacaagtgttaaccacaatactaccaaataca

SEQ ID NO: 92424 - DNA, 33 bp, Homo sapien
agacaagtgttaaccataatactaccaaataca

SEQ ID NO: 92425 - DNA, 33 bp, Homo sapien
gttaacatgtcttgtacgccatagaaaatgcac

SEQ ID NO: 92426 - DNA, 33 bp, Homo sapien
gttaacatgtcttgtatgccatagaaaatgcac

SEQ ID NO: 92427 - DNA, 33 bp, Homo sapien
tcatctttggtagttccaacctgaaggagaaag

SEQ ID NO: 92428 - DNA, 33 bp, Homo sapien
tcatctttggtagttctaacctgaaggagaaag

SEQ ID NO: 92429 - DNA, 33 bp, Homo sapien
gagagaattcttttggaaaacaagtcttctaag

SEQ ID NO: 92430 - DNA, 33 bp, Homo sapien
gagagaattcttttggtaaacaagtcttctaag

SEQ ID NO: 92431 - DNA, 33 bp, Homo sapien
ggtgttgtcttttggcaagaaacctggttgata

SEQ ID NO: 92432 - DNA, 33 bp, Homo sapien
ggtgttgtcttttggcgagaaacctggttgata

SEQ ID NO: 92433 - DNA, 33 bp, Homo sapien
tgatttcatctctaagactagattacataagtt

SEQ ID NO: 92434 - DNA, 33 bp, Homo sapien
tgatttcatctctaaggctagattacataagtt

SEQ ID NO: 92435 - DNA, 33 bp, Homo sapien
gtcctcagaaacaagaagttgaaaatgaatcaa

SEQ ID NO: 92436 - DNA, 33 bp, Homo sapien
gtcctcagaaacaagatgttgaaaatgaatcaa

SEQ ID NO: 92437 - DNA, 33 bp, Homo sapien
taagtacattgtgactgaattttagaaagggtt

SEQ ID NO: 92438 - DNA, 33 bp, Homo sapien
taagtacattgtgacttaattttagaaagggtt

SEQ ID NO: 92439 - DNA, 33 bp, Homo sapien
tgtccagaatatctaacagaagttcccccaatt

SEQ ID NO: 92440 - DNA, 33 bp, Homo sapien
tgtccagaatatctaatagaagttcccccaatt

SEQ ID NO: 92441 - DNA, 33 bp, Homo sapien
tctccttgaatagggaacagaacaaatctctca

SEQ ID NO: 92442 - DNA, 33 bp, Homo sapien
tctccttgaatagggagcagaacaaatctctca

SEQ ID NO: 92443 - DNA, 33 bp, Homo sapien
atggaatctttcaccactacaagagaatgagta

SEQ ID NO: 92444 - DNA, 33 bp, Homo sapien
atggaatctttcaccagtacaagagaatgagta

SEQ ID NO: 92445 - DNA, 33 bp, Homo sapien
tattgcaggataattacgtattggacaaaaagt

SEQ ID NO: 92446 - DNA, 33 bp, Homo sapien
tattgcaggataattatgtattggacaaaaagt

SEQ ID NO: 92447 - DNA, 33 bp, Homo sapien
acttggggaaggtatacgccactctggagctct

SEQ ID NO: 92448 - DNA, 33 bp, Homo sapien
acttggggaaggtatatgccactctggagctct

SEQ ID NO: 92449 - DNA, 33 bp, Homo sapien
attctttaatacagccaaaaggaaggagagaag

SEQ ID NO: 92450 - DNA, 33 bp, Homo sapien
attctttaatacagccgaaaggaaggagagaag

SEQ ID NO: 92451 - DNA, 33 bp, Homo sapien
ttacctattacaacgacgcttcttacgatatat

SEQ ID NO: 92452 - DNA, 33 bp, Homo sapien
ttacctattacaacgatgcttcttacgatatat

SEQ ID NO: 92453 - DNA, 33 bp, Homo sapien
acagattgggaaactgcagataagagaagttaa

SEQ ID NO: 92454 - DNA, 33 bp, Homo sapien
acagattgggaaactgtagataagagaagttaa

SEQ ID NO: 92455 - DNA, 33 bp, Homo sapien
gctggtcgactggaaccgacagagagacatctt

SEQ ID NO: 92456 - DNA, 33 bp, Homo sapien
gctggtcgactggaactgacagagagacatctt

SEQ ID NO: 92457 - DNA, 33 bp, Homo sapien
atcaacaggaaaatcccatctttaatgacagca

SEQ ID NO: 92458 - DNA, 33 bp, Homo sapien
atcaacaggaaaatcctatctttaatgacagca

SEQ ID NO: 92459 - DNA, 33 bp, Homo sapien
tacccaggttcctataaagcagtaatataaaaa

SEQ ID NO: 92460 - DNA, 33 bp, Homo sapien
tacccaggttcctatacagcagtaatataaaaa

SEQ ID NO: 92461 - DNA, 33 bp, Homo sapien
tttggaacttttctgaacagctattacacaatc

SEQ ID NO: 92462 - DNA, 33 bp, Homo sapien
tttggaacttttctgagcagctattacacaatc

SEQ ID NO: 92463 - DNA, 33 bp, Homo sapien
gcactgacctttacaaatactgttctttagggt

SEQ ID NO: 92464 - DNA, 33 bp, Homo sapien
gcactgacctttacaagtactgttctttagggt

SEQ ID NO: 92465 - DNA, 33 bp, Homo sapien
ttcctgagttctgagagccactctggcaaattc

SEQ ID NO: 92466 - DNA, 33 bp, Homo sapien
ttcctgagttctgagatccactctggcaaattc

SEQ ID NO: 92467 - DNA, 33 bp, Homo sapien
aacctctgttgatataacctacattctcccata

SEQ ID NO: 92468 - DNA, 33 bp, Homo sapien
aacctctgttgatatagcctacattctcccata

SEQ ID NO: 92469 - DNA, 33 bp, Homo sapien
gcagtggagccataaaaacagttgggtaacttc

SEQ ID NO: 92470 - DNA, 33 bp, Homo sapien
gcagtggagccataaacacagttgggtaacttc

SEQ ID NO: 92471 - DNA, 33 bp, Homo sapien
tgtcctctgttcttcaaagtggtaccttaaaga

SEQ ID NO: 92472 - DNA, 33 bp, Homo sapien
tgtcctctgttcttcacagtggtaccttaaaga

SEQ ID NO: 92473 - DNA, 33 bp, Homo sapien
tattttatcaataaaacctgtccaatgatctag

SEQ ID NO: 92474 - DNA, 33 bp, Homo sapien
tattttatcaataaaatctgtccaatgatctag

SEQ ID NO: 92475 - DNA, 33 bp, Homo sapien
ctgtagcaagcagaaccctaacgccttctagga

SEQ ID NO: 92476 - DNA, 33 bp, Homo sapien
ctgtagcaagcagaactctaacgccttctagga

SEQ ID NO: 92477 - DNA, 33 bp, Homo sapien
caatgtctagtttacaactcaaaattactagac

SEQ ID NO: 92478 - DNA, 33 bp, Homo sapien
caatgtctagtttacagctcaaaattactagac

SEQ ID NO: 92479 - DNA, 33 bp, Homo sapien
gaactgcgatgtgatacatttgttgttttaagc

SEQ ID NO: 92480 - DNA, 33 bp, Homo sapien
gaactgcgatgtgatatatttgttgttttaagc

SEQ ID NO: 92481 - DNA, 33 bp, Homo sapien
aactgggaaaaagagaatcatgtcattttccac

SEQ ID NO: 92482 - DNA, 33 bp, Homo sapien
aactgggaaaaagagattcatgtcattttccac

SEQ ID NO: 92483 - DNA, 33 bp, Homo sapien
tcaaattacctatgagaacaacgtatattgagc

SEQ ID NO: 92484 - DNA, 33 bp, Homo sapien
tcaaattacctatgaggacaacgtatattgagc

SEQ ID NO: 92485 - DNA, 33 bp, Homo sapien
agccatgctaaccaacgctttgccttggaatgt

SEQ ID NO: 92486 - DNA, 33 bp, Homo sapien
agccatgctaaccaactctttgccttggaatgt

SEQ ID NO: 92487 - DNA, 33 bp, Homo sapien
ttacttcattcggtaaatactgttgaaagacta

SEQ ID NO: 92488 - DNA, 33 bp, Homo sapien
ttacttcattcggtaattactgttgaaagacta

SEQ ID NO: 92489 - DNA, 33 bp, Homo sapien
ggcagatgacaagttacacactatgcagactca

SEQ ID NO: 92490 - DNA, 33 bp, Homo sapien
ggcagatgacaagttagacactatgcagactca

SEQ ID NO: 92491 - DNA, 33 bp, Homo sapien
ttttataaatgcaatcacatgatgtgtaacctt

SEQ ID NO: 92492 - DNA, 33 bp, Homo sapien
ttttataaatgcaatcccatgatgtgtaacctt

SEQ ID NO: 92493 - DNA, 33 bp, Homo sapien
gattatgtgccttggcagaaatttatttggata

SEQ ID NO: 92494 - DNA, 33 bp, Homo sapien
gattatgtgccttggccgaaatttatttggata

SEQ ID NO: 92495 - DNA, 33 bp, Homo sapien
attcctctcctttccaccctggtctctcagttg

SEQ ID NO: 92496 - DNA, 33 bp, Homo sapien
attcctctcctttccatcctggtctctcagttg

SEQ ID NO: 92497 - DNA, 33 bp, Homo sapien
gcttaaaaaaattagcacattctaagtgatcag

SEQ ID NO: 92498 - DNA, 33 bp, Homo sapien
gcttaaaaaaattagcccattctaagtgatcag

SEQ ID NO: 92499 - DNA, 33 bp, Homo sapien
ggcttctcagaaggaaagtcttgtgtttaatgt

SEQ ID NO: 92500 - DNA, 33 bp, Homo sapien
ggcttctcagaaggaaggtcttgtgtttaatgt

SEQ ID NO: 92501 - DNA, 33 bp, Homo sapien
tagaagtttgcagagaaaattggctatagaaag

SEQ ID NO: 92502 - DNA, 33 bp, Homo sapien
tagaagtttgcagagacaattggctatagaaag

SEQ ID NO: 92503 - DNA, 33 bp, Homo sapien
gactaagcaagaaaaaagttgccaattaagtga

SEQ ID NO: 92504 - DNA, 33 bp, Homo sapien
gactaagcaagaaaaacgttgccaattaagtga

SEQ ID NO: 92505 - DNA, 33 bp, Homo sapien
tgacatagtctcaccccagctggttattactac

SEQ ID NO: 92506 - DNA, 33 bp, Homo sapien
tgacatagtctcacccgagctggttattactac

SEQ ID NO: 92507 - DNA, 33 bp, Homo sapien
cccagccagatagtagactaccatggaagaata

SEQ ID NO: 92508 - DNA, 33 bp, Homo sapien
cccagccagatagtaggctaccatggaagaata

SEQ ID NO: 92509 - DNA, 33 bp, Homo sapien
gtgctctgtgagaacacggttccggtgattcct

SEQ ID NO: 92510 - DNA, 33 bp, Homo sapien
gtgctctgtgagaacatggttccggtgattcct

SEQ ID NO: 92511 - DNA, 33 bp, Homo sapien
caatcaaagtgtgaggaatcatttgaatactgc

SEQ ID NO: 92512 - DNA, 33 bp, Homo sapien
caatcaaagtgtgaggcatcatttgaatactgc

SEQ ID NO: 92513 - DNA, 33 bp, Homo sapien
agctggacttctggacacctaagcaaagaagga

SEQ ID NO: 92514 - DNA, 33 bp, Homo sapien
agctggacttctggacgcctaagcaaagaagga

SEQ ID NO: 92515 - DNA, 33 bp, Homo sapien
ccactgcagtactccaatgatgtcacaccctgt

SEQ ID NO: 92516 - DNA, 33 bp, Homo sapien
ccactgcagtactccagtgatgtcacaccctgt

SEQ ID NO: 92517 - DNA, 33 bp, Homo sapien
tgctcttaattaaccacgctggctctgtgcagt

SEQ ID NO: 92518 - DNA, 33 bp, Homo sapien
tgctcttaattaaccatgctggctctgtgcagt

SEQ ID NO: 92519 - DNA, 33 bp, Homo sapien
aattctaactcaagtaagctttcatctcaggga

SEQ ID NO: 92520 - DNA, 33 bp, Homo sapien
aattctaactcaagtacgctttcatctcaggga

SEQ ID NO: 92521 - DNA, 33 bp, Homo sapien
tgatcttttctatgaccgctcatcctgcagaag

SEQ ID NO: 92522 - DNA, 33 bp, Homo sapien
tgatcttttctatgactgctcatcctgcagaag

SEQ ID NO: 92523 - DNA, 33 bp, Homo sapien
atggtgagtggggaaaatcaatgagtacacctc

SEQ ID NO: 92524 - DNA, 33 bp, Homo sapien
atggtgagtggggaaagtcaatgagtacacctc

SEQ ID NO: 92525 - DNA, 33 bp, Homo sapien
gaatgtttttgttgtcaagatactgaaatatta

SEQ ID NO: 92526 - DNA, 33 bp, Homo sapien
gaatgtttttgttgtctagatactgaaatatta

SEQ ID NO: 92527 - DNA, 33 bp, Homo sapien
ttgattgaactctggacgtagtagattaggttt

SEQ ID NO: 92528 - DNA, 33 bp, Homo sapien
ttgattgaactctggatgtagtagattaggttt

SEQ ID NO: 92529 - DNA, 33 bp, Homo sapien
cagaaaactttatcacaatacactttgccttcc

SEQ ID NO: 92530 - DNA, 33 bp, Homo sapien
cagaaaactttatcacgatacactttgccttcc

SEQ ID NO: 92531 - DNA, 33 bp, Homo sapien
gatgatgcaggtcaacagagatggtaatgggac

SEQ ID NO: 92532 - DNA, 33 bp, Homo sapien
gatgatgcaggtcaaccgagatggtaatgggac

SEQ ID NO: 92533 - DNA, 33 bp, Homo sapien
tgataataatgatgtcgcacaaaattttaggct

SEQ ID NO: 92534 - DNA, 33 bp, Homo sapien
tgataataatgatgtctcacaaaattttaggct

SEQ ID NO: 92535 - DNA, 33 bp, Homo sapien
atgtaaaatcactcccaaatttgatattctata

SEQ ID NO: 92536 - DNA, 33 bp, Homo sapien
atgtaaaatcactcccgaatttgatattctata

SEQ ID NO: 92537 - DNA, 33 bp, Homo sapien
ggaaacagaaaacccactgagaggtgtgtatta

SEQ ID NO: 92538 - DNA, 33 bp, Homo sapien
ggaaacagaaaacccattgagaggtgtgtatta

SEQ ID NO: 92539 - DNA, 33 bp, Homo sapien
aagctgagactatgacaaatgccctccaggaag

SEQ ID NO: 92540 - DNA, 33 bp, Homo sapien
aagctgagactatgactaatgccctccaggaag

SEQ ID NO: 92541 - DNA, 33 bp, Homo sapien
tacagttataggagtcacagtattttacaaaat

SEQ ID NO: 92542 - DNA, 33 bp, Homo sapien
tacagttataggagtcgcagtattttacaaaat

SEQ ID NO: 92543 - DNA, 33 bp, Homo sapien
aacttgaaacaccatacacatttgacctttgaa

SEQ ID NO: 92544 - DNA, 33 bp, Homo sapien
aacttgaaacaccatatacatttgacctttgaa

SEQ ID NO: 92545 - DNA, 33 bp, Homo sapien
acatcattggtaaaaacgtgcctgatgtactag

SEQ ID NO: 92546 - DNA, 33 bp, Homo sapien
acatcattggtaaaaatgtgcctgatgtactag

SEQ ID NO: 92547 - DNA, 33 bp, Homo sapien
cttcaataatagcctgcattttttccacatttt

SEQ ID NO: 92548 - DNA, 33 bp, Homo sapien
cttcaataatagcctggattttttccacatttt

SEQ ID NO: 92549 - DNA, 33 bp, Homo sapien
ataaaaatttgcactaaaatcgttattgaatgc

SEQ ID NO: 92550 - DNA, 33 bp, Homo sapien
ataaaaatttgcactagaatcgttattgaatgc

SEQ ID NO: 92551 - DNA, 33 bp, Homo sapien
gggtaatattctcagacccatcctaccctgtct

SEQ ID NO: 92552 - DNA, 33 bp, Homo sapien
gggtaatattctcagatccatcctaccctgtct

SEQ ID NO: 92553 - DNA, 33 bp, Homo sapien
tgtgttggatgagcaacgccgctccttattcta

SEQ ID NO: 92554 - DNA, 33 bp, Homo sapien
tgtgttggatgagcaatgccgctccttattcta

SEQ ID NO: 92555 - DNA, 33 bp, Homo sapien
aagctaatgtagctccatctttaatgatcacac

SEQ ID NO: 92556 - DNA, 33 bp, Homo sapien
aagctaatgtagctccttctttaatgatcacac

SEQ ID NO: 92557 - DNA, 33 bp, Homo sapien
ttataccttgactgcaatgactttcaattccgt

SEQ ID NO: 92558 - DNA, 33 bp, Homo sapien
ttataccttgactgcactgactttcaattccgt

SEQ ID NO: 92559 - DNA, 33 bp, Homo sapien
aaataagagcaggaaacagatcttgtgagcaca

SEQ ID NO: 92560 - DNA, 33 bp, Homo sapien
aaataagagcaggaaatagatcttgtgagcaca

SEQ ID NO: 92561 - DNA, 33 bp, Homo sapien
aattgatccttcttgactatgaacatgcagaac

SEQ ID NO: 92562 - DNA, 33 bp, Homo sapien
aattgatccttcttgattatgaacatgcagaac

SEQ ID NO: 92563 - DNA, 33 bp, Homo sapien
aagaagcacactgaagacatgaaattctgctag

SEQ ID NO: 92564 - DNA, 33 bp, Homo sapien
aagaagcacactgaaggcatgaaattctgctag

SEQ ID NO: 92565 - DNA, 33 bp, Homo sapien
tatacttcacaaatacaagaatacttattttga

SEQ ID NO: 92566 - DNA, 33 bp, Homo sapien
tatacttcacaaatacgagaatacttattttga

SEQ ID NO: 92567 - DNA, 33 bp, Homo sapien
tcggtcaagtggatagaaagtatgataggaaaa

SEQ ID NO: 92568 - DNA, 33 bp, Homo sapien
tcggtcaagtggataggaagtatgataggaaaa

SEQ ID NO: 92569 - DNA, 33 bp, Homo sapien
gcctgaattggagcagactcctagagggtcaaa

SEQ ID NO: 92570 - DNA, 33 bp, Homo sapien
gcctgaattggagcagtctcctagagggtcaaa

SEQ ID NO: 92571 - DNA, 33 bp, Homo sapien
atgtgtttcaaatcaacgcatacagaagagcac

SEQ ID NO: 92572 - DNA, 33 bp, Homo sapien
atgtgtttcaaatcaatgcatacagaagagcac

SEQ ID NO: 92573 - DNA, 33 bp, Homo sapien
caaaggggaaaatgacacactttttcatgaaca

SEQ ID NO: 92574 - DNA, 33 bp, Homo sapien
caaaggggaaaatgacgcactttttcatgaaca

SEQ ID NO: 92575 - DNA, 33 bp, Homo sapien
ttggaaagttcaagggaagctatgccgtgtagt

SEQ ID NO: 92576 - DNA, 33 bp, Homo sapien
ttggaaagttcaaggggagctatgccgtgtagt

SEQ ID NO: 92577 - DNA, 33 bp, Homo sapien
ttctagtgtatattcaagttaggaacccaatga

SEQ ID NO: 92578 - DNA, 33 bp, Homo sapien
ttctagtgtatattcaggttaggaacccaatga

SEQ ID NO: 92579 - DNA, 33 bp, Homo sapien
agagcaggaagaaacagtaaaggccactatgtg

SEQ ID NO: 92580 - DNA, 33 bp, Homo sapien
agagcaggaagaaacattaaaggccactatgtg

SEQ ID NO: 92581 - DNA, 33 bp, Homo sapien
ggtttctgcaaacaaaatacaaaacatgagcag

SEQ ID NO: 92582 - DNA, 33 bp, Homo sapien
ggtttctgcaaacaaagtacaaaacatgagcag

SEQ ID NO: 92583 - DNA, 33 bp, Homo sapien
tgcttcactcatttcactcctatatattttcct

SEQ ID NO: 92584 - DNA, 33 bp, Homo sapien
tgcttcactcatttcattcctatatattttcct

SEQ ID NO: 92585 - DNA, 33 bp, Homo sapien
ggagagtaagttgtataataaaaggcacaattt

SEQ ID NO: 92586 - DNA, 33 bp, Homo sapien
ggagagtaagttgtatcataaaaggcacaattt

SEQ ID NO: 92587 - DNA, 33 bp, Homo sapien
agtcttcaggcctttaaattttccatggatcac

SEQ ID NO: 92588 - DNA, 33 bp, Homo sapien
agtcttcaggcctttagattttccatggatcac

SEQ ID NO: 92589 - DNA, 33 bp, Homo sapien
attgcaaacagattaaaggtcagtttatgcagg

SEQ ID NO: 92590 - DNA, 33 bp, Homo sapien
attgcaaacagattaagggtcagtttatgcagg

SEQ ID NO: 92591 - DNA, 33 bp, Homo sapien
atgaatgagccacaaaatcggtaaatcatgggt

SEQ ID NO: 92592 - DNA, 33 bp, Homo sapien
atgaatgagccacaaagtcggtaaatcatgggt

SEQ ID NO: 92593 - DNA, 33 bp, Homo sapien
cagaatatttgcgcaaacacacatgatcttcat

SEQ ID NO: 92594 - DNA, 33 bp, Homo sapien
cagaatatttgcgcaagcacacatgatcttcat

SEQ ID NO: 92595 - DNA, 33 bp, Homo sapien
gctgtttctcacaggacggatgtgaccctctgt

SEQ ID NO: 92596 - DNA, 33 bp, Homo sapien
gctgtttctcacaggatggatgtgaccctctgt

SEQ ID NO: 92597 - DNA, 33 bp, Homo sapien
tatgggattcaaatcaacaaacttggttctttg

SEQ ID NO: 92598 - DNA, 33 bp, Homo sapien
tatgggattcaaatcagcaaacttggttctttg

SEQ ID NO: 92599 - DNA, 33 bp, Homo sapien
aaatgaatatgctaccagcttgattgaatgtgc

SEQ ID NO: 92600 - DNA, 33 bp, Homo sapien
aaatgaatatgctaccggcttgattgaatgtgc

SEQ ID NO: 92601 - DNA, 33 bp, Homo sapien
ctaggcttctcatcagaatgaagtgaccagtca

SEQ ID NO: 92602 - DNA, 33 bp, Homo sapien
ctaggcttctcatcaggatgaagtgaccagtca

SEQ ID NO: 92603 - DNA, 33 bp, Homo sapien
ctgagctaagagtttcaaagccattaaagtttg

SEQ ID NO: 92604 - DNA, 33 bp, Homo sapien
ctgagctaagagtttcgaagccattaaagtttg

SEQ ID NO: 92605 - DNA, 33 bp, Homo sapien
ttactttgaggacgaacagaaaaaactcccttt

SEQ ID NO: 92606 - DNA, 33 bp, Homo sapien
ttactttgaggacgaagagaaaaaactcccttt

SEQ ID NO: 92607 - DNA, 33 bp, Homo sapien
atataaactcataagaaaatgcttctgacattt

SEQ ID NO: 92608 - DNA, 33 bp, Homo sapien
atataaactcataagagaatgcttctgacattt

SEQ ID NO: 92609 - DNA, 33 bp, Homo sapien
tctctctggcctaaataaaaagtgtcttgagtg

SEQ ID NO: 92610 - DNA, 33 bp, Homo sapien
tctctctggcctaaatgaaaagtgtcttgagtg

SEQ ID NO: 92611 - DNA, 33 bp, Homo sapien
cagctcaggttcagcaaaggaatgacagtatca

SEQ ID NO: 92612 - DNA, 33 bp, Homo sapien
cagctcaggttcagcagaggaatgacagtatca

SEQ ID NO: 92613 - DNA, 33 bp, Homo sapien
ctaaaaggagtttctcacatagagccttgagaa

SEQ ID NO: 92614 - DNA, 33 bp, Homo sapien
ctaaaaggagtttctcgcatagagccttgagaa

SEQ ID NO: 92615 - DNA, 33 bp, Homo sapien
gaaataatgaccatgacgaggatgttaaaaaga

SEQ ID NO: 92616 - DNA, 33 bp, Homo sapien
gaaataatgaccatgatgaggatgttaaaaaga

SEQ ID NO: 92617 - DNA, 33 bp, Homo sapien
agacattctccgacaacgtgtccttatttcaca

SEQ ID NO: 92618 - DNA, 33 bp, Homo sapien
agacattctccgacaatgtgtccttatttcaca

SEQ ID NO: 92619 - DNA, 33 bp, Homo sapien
gttagataagaattaaacatctgggctgggcat

SEQ ID NO: 92620 - DNA, 33 bp, Homo sapien
gttagataagaattaagcatctgggctgggcat

SEQ ID NO: 92621 - DNA, 33 bp, Homo sapien
aagagcagaaaaggacccacattgttaatccaa

SEQ ID NO: 92622 - DNA, 33 bp, Homo sapien
aagagcagaaaaggacgcacattgttaatccaa

SEQ ID NO: 92623 - DNA, 33 bp, Homo sapien
gatggacaaagggtggaaaaccagcaattaaat

SEQ ID NO: 92624 - DNA, 33 bp, Homo sapien
gatggacaaagggtggcaaaccagcaattaaat

SEQ ID NO: 92625 - DNA, 33 bp, Homo sapien
gaaatctcatggttacacagctcttaggtaatt

SEQ ID NO: 92626 - DNA, 33 bp, Homo sapien
gaaatctcatggttacgcagctcttaggtaatt

SEQ ID NO: 92627 - DNA, 33 bp, Homo sapien
aagggcagagcaaagacccaaatctcacctggt

SEQ ID NO: 92628 - DNA, 33 bp, Homo sapien
aagggcagagcaaagatccaaatctcacctggt

SEQ ID NO: 92629 - DNA, 33 bp, Homo sapien
atgaaccaatgtttaacgagagatttgtggatg

SEQ ID NO: 92630 - DNA, 33 bp, Homo sapien
atgaaccaatgtttaatgagagatttgtggatg

SEQ ID NO: 92631 - DNA, 33 bp, Homo sapien
cattataaatagggtcacatactcctcctttcc

SEQ ID NO: 92632 - DNA, 33 bp, Homo sapien
cattataaatagggtcgcatactcctcctttcc

SEQ ID NO: 92633 - DNA, 33 bp, Homo sapien
cttttgcaccagcccaatactttaaatgcgtga

SEQ ID NO: 92634 - DNA, 33 bp, Homo sapien
cttttgcaccagcccagtactttaaatgcgtga

SEQ ID NO: 92635 - DNA, 33 bp, Homo sapien
aagctttgacgttttacgggccaagtgtggaat

SEQ ID NO: 92636 - DNA, 33 bp, Homo sapien
aagctttgacgttttatgggccaagtgtggaat

SEQ ID NO: 92637 - DNA, 33 bp, Homo sapien
aggaatttttaagtaaccattctcaacagggga

SEQ ID NO: 92638 - DNA, 33 bp, Homo sapien
aggaatttttaagtaagcattctcaacagggga

SEQ ID NO: 92639 - DNA, 33 bp, Homo sapien
taagataagactaaaacgtgcatgacttctcag

SEQ ID NO: 92640 - DNA, 33 bp, Homo sapien
taagataagactaaaatgtgcatgacttctcag

SEQ ID NO: 92641 - DNA, 33 bp, Homo sapien
gaaagtagagtttgggaaaaaattatgcatata

SEQ ID NO: 92642 - DNA, 33 bp, Homo sapien
gaaagtagagtttgggtaaaaattatgcatata

SEQ ID NO: 92643 - DNA, 33 bp, Homo sapien
tgcagaaccattggaaactcaatttgcagacaa

SEQ ID NO: 92644 - DNA, 33 bp, Homo sapien
tgcagaaccattggaagctcaatttgcagacaa

SEQ ID NO: 92645 - DNA, 33 bp, Homo sapien
caggttaaatgacttcaaaagctcagatcccca

SEQ ID NO: 92646 - DNA, 33 bp, Homo sapien
caggttaaatgacttcgaaagctcagatcccca

SEQ ID NO: 92647 - DNA, 33 bp, Homo sapien
tcatttaacctgcacaaatggggtttatgctgc

SEQ ID NO: 92648 - DNA, 33 bp, Homo sapien
tcatttaacctgcacagatggggtttatgctgc

SEQ ID NO: 92649 - DNA, 33 bp, Homo sapien
tttgtgacaaagtctcaatctctctaccaggct

SEQ ID NO: 92650 - DNA, 33 bp, Homo sapien
tttgtgacaaagtctcgatctctctaccaggct

SEQ ID NO: 92651 - DNA, 33 bp, Homo sapien
tggactgcaccagataagctatgctaacaatgt

SEQ ID NO: 92652 - DNA, 33 bp, Homo sapien
tggactgcaccagataggctatgctaacaatgt

SEQ ID NO: 92653 - DNA, 33 bp, Homo sapien
gaattcatgaacctagactaggacttgacaaac

SEQ ID NO: 92654 - DNA, 33 bp, Homo sapien
gaattcatgaacctaggctaggacttgacaaac

SEQ ID NO: 92655 - DNA, 33 bp, Homo sapien
gatgaagggatgaagcacggatgatagaggact

SEQ ID NO: 92656 - DNA, 33 bp, Homo sapien
gatgaagggatgaagctcggatgatagaggact

SEQ ID NO: 92657 - DNA, 33 bp, Homo sapien
tggtaagaaggcgggacgtagaacagcaatatc

SEQ ID NO: 92658 - DNA, 33 bp, Homo sapien
tggtaagaaggcgggatgtagaacagcaatatc

SEQ ID NO: 92659 - DNA, 33 bp, Homo sapien
gatcccaccttcttgaagaaatcttacatagtg

SEQ ID NO: 92660 - DNA, 33 bp, Homo sapien
gatcccaccttcttgatgaaatcttacatagtg

SEQ ID NO: 92661 - DNA, 33 bp, Homo sapien
tttatgaaatcattataagcatgaaaaagttaa

SEQ ID NO: 92662 - DNA, 33 bp, Homo sapien
tttatgaaatcattattagcatgaaaaagttaa

SEQ ID NO: 92663 - DNA, 33 bp, Homo sapien
ggaatttctgcaaataagaacaatggatcttct

SEQ ID NO: 92664 - DNA, 33 bp, Homo sapien
ggaatttctgcaaataggaacaatggatcttct

SEQ ID NO: 92665 - DNA, 33 bp, Homo sapien
taaaaagcacatttcacaaaatcataacatgaa

SEQ ID NO: 92666 - DNA, 33 bp, Homo sapien
taaaaagcacatttcataaaatcataacatgaa

SEQ ID NO: 92667 - DNA, 33 bp, Homo sapien
tccaggttcttcggtgaatctgttttggttcat

SEQ ID NO: 92668 - DNA, 33 bp, Homo sapien
tccaggttcttcggtgcatctgttttggttcat

SEQ ID NO: 92669 - DNA, 33 bp, Homo sapien
caaatttaacgaaatacgtacgtgtgaacaaaa

SEQ ID NO: 92670 - DNA, 33 bp, Homo sapien
caaatttaacgaaatatgtacgtgtgaacaaaa

SEQ ID NO: 92671 - DNA, 33 bp, Homo sapien
actgtttctctttgtaccatttttctgaattct

SEQ ID NO: 92672 - DNA, 33 bp, Homo sapien
actgtttctctttgtatcatttttctgaattct

SEQ ID NO: 92673 - DNA, 33 bp, Homo sapien
cttcttcattggcttccaagactatataggttt

SEQ ID NO: 92674 - DNA, 33 bp, Homo sapien
cttcttcattggcttctaagactatataggttt

SEQ ID NO: 92675 - DNA, 33 bp, Homo sapien
gatggagacattaacaagggtgggaattgccag

SEQ ID NO: 92676 - DNA, 33 bp, Homo sapien
gatggagacattaacatgggtgggaattgccag

SEQ ID NO: 92677 - DNA, 33 bp, Homo sapien
ttaaggccagtgtgcaaattggaagctggacgg

SEQ ID NO: 92678 - DNA, 33 bp, Homo sapien
ttaaggccagtgtgcagattggaagctggacgg

SEQ ID NO: 92679 - DNA, 33 bp, Homo sapien
gaacttcgtatcttgaagtaggaataattacag

SEQ ID NO: 92680 - DNA, 33 bp, Homo sapien
gaacttcgtatcttgaggtaggaataattacag

SEQ ID NO: 92681 - DNA, 33 bp, Homo sapien
ccagtttgtacatctgaaggttagttataaaaa

SEQ ID NO: 92682 - DNA, 33 bp, Homo sapien
ccagtttgtacatctggaggttagttataaaaa

SEQ ID NO: 92683 - DNA, 33 bp, Homo sapien
tggtttcaaatacaaccagcaatgaaatatttt

SEQ ID NO: 92684 - DNA, 33 bp, Homo sapien
tggtttcaaatacaacgagcaatgaaatatttt

SEQ ID NO: 92685 - DNA, 33 bp, Homo sapien
aaagcagaattgcatgacataccagaatttgaa

SEQ ID NO: 92686 - DNA, 33 bp, Homo sapien
aaagcagaattgcatggcataccagaatttgaa

SEQ ID NO: 92687 - DNA, 33 bp, Homo sapien
taactatttcagaaaaacagttagtctggcttt

SEQ ID NO: 92688 - DNA, 33 bp, Homo sapien
taactatttcagaaaagcagttagtctggcttt

SEQ ID NO: 92689 - DNA, 33 bp, Homo sapien
actatcccaagattacagaagttctggaaaatc

SEQ ID NO: 92690 - DNA, 33 bp, Homo sapien
actatcccaagattacggaagttctggaaaatc

SEQ ID NO: 92691 - DNA, 33 bp, Homo sapien
gatttataactataaaatgtcttgaacaaaatg

SEQ ID NO: 92692 - DNA, 33 bp, Homo sapien
gatttataactataaagtgtcttgaacaaaatg

SEQ ID NO: 92693 - DNA, 33 bp, Homo sapien
acattttctgccaagactcaaaactagcagaaa

SEQ ID NO: 92694 - DNA, 33 bp, Homo sapien
acattttctgccaagattcaaaactagcagaaa

SEQ ID NO: 92695 - DNA, 33 bp, Homo sapien
aaggtttcttatgccaatctagcatgccatcaa

SEQ ID NO: 92696 - DNA, 33 bp, Homo sapien
aaggtttcttatgccattctagcatgccatcaa

SEQ ID NO: 92697 - DNA, 33 bp, Homo sapien
tactaatagattctcaagttgcatagctctcgt

SEQ ID NO: 92698 - DNA, 33 bp, Homo sapien
tactaatagattctcatgttgcatagctctcgt

SEQ ID NO: 92699 - DNA, 33 bp, Homo sapien
cttatgataacacctgcatgaattcctcagcag

SEQ ID NO: 92700 - DNA, 33 bp, Homo sapien
cttatgataacacctgtatgaattcctcagcag

SEQ ID NO: 92701 - DNA, 33 bp, Homo sapien
gaggtataaacaaatacgatggagcacttcaaa

SEQ ID NO: 92702 - DNA, 33 bp, Homo sapien
gaggtataaacaaatatgatggagcacttcaaa

SEQ ID NO: 92703 - DNA, 33 bp, Homo sapien
taatctggaattcttacgatgccctaggaggcc

SEQ ID NO: 92704 - DNA, 33 bp, Homo sapien
taatctggaattcttatgatgccctaggaggcc

SEQ ID NO: 92705 - DNA, 33 bp, Homo sapien
atacctcccatttcacagtattacagaaagagt

SEQ ID NO: 92706 - DNA, 33 bp, Homo sapien
atacctcccatttcacggtattacagaaagagt

SEQ ID NO: 92707 - DNA, 33 bp, Homo sapien
caacgcactgcgaacaactgggtgacggagtac

SEQ ID NO: 92708 - DNA, 33 bp, Homo sapien
caacgcactgcgaacagctgggtgacggagtac

SEQ ID NO: 92709 - DNA, 33 bp, Homo sapien
tatgtataatatttgtcaagatctaagcaatga

SEQ ID NO: 92710 - DNA, 33 bp, Homo sapien
tatgtataatatttgttaagatctaagcaatga

SEQ ID NO: 92711 - DNA, 33 bp, Homo sapien
taattaatactactacaaatatcctgcacataa

SEQ ID NO: 92712 - DNA, 33 bp, Homo sapien
taattaatactactacgaatatcctgcacataa

SEQ ID NO: 92713 - DNA, 33 bp, Homo sapien
tagagagagtctttagcagtccttttcttgctc

SEQ ID NO: 92714 - DNA, 33 bp, Homo sapien
tagagagagtctttaggagtccttttcttgctc

SEQ ID NO: 92715 - DNA, 33 bp, Homo sapien
tacagtcagctccaacaattacttttcattttt

SEQ ID NO: 92716 - DNA, 33 bp, Homo sapien
tacagtcagctccaaccattacttttcattttt

SEQ ID NO: 92717 - DNA, 33 bp, Homo sapien
taacttttgaaataccacatttacctgtacaaa

SEQ ID NO: 92718 - DNA, 33 bp, Homo sapien
taacttttgaaataccgcatttacctgtacaaa

SEQ ID NO: 92719 - DNA, 33 bp, Homo sapien
tgtgaattttggggagacacatttcagttcaca

SEQ ID NO: 92720 - DNA, 33 bp, Homo sapien
tgtgaattttggggagtcacatttcagttcaca

SEQ ID NO: 92721 - DNA, 33 bp, Homo sapien
attctccctttaaaaagcctggtcatctctata

SEQ ID NO: 92722 - DNA, 33 bp, Homo sapien
attctccctttaaaaatcctggtcatctctata

SEQ ID NO: 92723 - DNA, 33 bp, Homo sapien
agtgccatagagtcaggaagtgaaaaattgcaa

SEQ ID NO: 92724 - DNA, 33 bp, Homo sapien
agtgccatagagtcagtaagtgaaaaattgcaa

SEQ ID NO: 92725 - DNA, 33 bp, Homo sapien
tcacctgtggagaattcaatggcaaagcaagga

SEQ ID NO: 92726 - DNA, 33 bp, Homo sapien
tcacctgtggagaatttaatggcaaagcaagga

SEQ ID NO: 92727 - DNA, 33 bp, Homo sapien
ctggaccatactaaacaaaatcgttacatggaa

SEQ ID NO: 92728 - DNA, 33 bp, Homo sapien
ctggaccatactaaaccaaatcgttacatggaa

SEQ ID NO: 92729 - DNA, 33 bp, Homo sapien
cataaaaaatgagatccagtcgtttgcaacaac

SEQ ID NO: 92730 - DNA, 33 bp, Homo sapien
cataaaaaatgagatcgagtcgtttgcaacaac

SEQ ID NO: 92731 - DNA, 33 bp, Homo sapien
actcaggttccctttcaatcaacatcagtatct

SEQ ID NO: 92732 - DNA, 33 bp, Homo sapien
actcaggttccctttcgatcaacatcagtatct

SEQ ID NO: 92733 - DNA, 33 bp, Homo sapien
caaggattccctcaaactggcatacaatgcttt

SEQ ID NO: 92734 - DNA, 33 bp, Homo sapien
caaggattccctcaaagtggcatacaatgcttt

SEQ ID NO: 92735 - DNA, 33 bp, Homo sapien
aatgattcttgtgctacgggtgatcctacttgt

SEQ ID NO: 92736 - DNA, 33 bp, Homo sapien
aatgattcttgtgctatgggtgatcctacttgt

SEQ ID NO: 92737 - DNA, 33 bp, Homo sapien
gggagagaagataaaacgcaaaattggcctatc

SEQ ID NO: 92738 - DNA, 33 bp, Homo sapien
gggagagaagataaaatgcaaaattggcctatc

SEQ ID NO: 92739 - DNA, 33 bp, Homo sapien
ctgtggttttgaactgaatctgctattgcttcg

SEQ ID NO: 92740 - DNA, 33 bp, Homo sapien
ctgtggttttgaactgcatctgctattgcttcg

SEQ ID NO: 92741 - DNA, 33 bp, Homo sapien
aaggagttcaccttcaccatcagtttaatgaac

SEQ ID NO: 92742 - DNA, 33 bp, Homo sapien
aaggagttcaccttcagcatcagtttaatgaac

SEQ ID NO: 92743 - DNA, 33 bp, Homo sapien
cagttgctgtgtgctacggaaaaggagttcacc

SEQ ID NO: 92744 - DNA, 33 bp, Homo sapien
cagttgctgtgtgctatggaaaaggagttcacc

SEQ ID NO: 92745 - DNA, 33 bp, Homo sapien
ggtcaactagggagaaacataagaaaagaaaag

SEQ ID NO: 92746 - DNA, 33 bp, Homo sapien
ggtcaactagggagaagcataagaaaagaaaag

SEQ ID NO: 92747 - DNA, 33 bp, Homo sapien
taacaagccaattaaaatataggcaaaatatct

SEQ ID NO: 92748 - DNA, 33 bp, Homo sapien
taacaagccaattaaagtataggcaaaatatct

SEQ ID NO: 92749 - DNA, 33 bp, Homo sapien
agagctaagcccattactaaccttgaagagggt

SEQ ID NO: 92750 - DNA, 33 bp, Homo sapien
agagctaagcccattattaaccttgaagagggt

SEQ ID NO: 92751 - DNA, 33 bp, Homo sapien
gaaagccttggattcacaaatgagcaatactca

SEQ ID NO: 92752 - DNA, 33 bp, Homo sapien
gaaagccttggattcagaaatgagcaatactca

SEQ ID NO: 92753 - DNA, 33 bp, Homo sapien
atcatggttgtgatatcatactagaacactttt

SEQ ID NO: 92754 - DNA, 33 bp, Homo sapien
atcatggttgtgatattatactagaacactttt

SEQ ID NO: 92755 - DNA, 33 bp, Homo sapien
gctcattccctcaaaacttaataatcagaccaa

SEQ ID NO: 92756 - DNA, 33 bp, Homo sapien
gctcattccctcaaaatttaataatcagaccaa

SEQ ID NO: 92757 - DNA, 33 bp, Homo sapien
tccaagcttttaatgggaagcataaatgtttgg

SEQ ID NO: 92758 - DNA, 33 bp, Homo sapien
tccaagcttttaatggtaagcataaatgtttgg

SEQ ID NO: 92759 - DNA, 33 bp, Homo sapien
tcacaagaaaatcttacggagaaaattcacatg

SEQ ID NO: 92760 - DNA, 33 bp, Homo sapien
tcacaagaaaatcttatggagaaaattcacatg

SEQ ID NO: 92761 - DNA, 33 bp, Homo sapien
gaagaagagtctgacaactgaacgagagcctga

SEQ ID NO: 92762 - DNA, 33 bp, Homo sapien
gaagaagagtctgacagctgaacgagagcctga

SEQ ID NO: 92763 - DNA, 33 bp, Homo sapien
agaaattgcatttctacatgagctgaggtttgg

SEQ ID NO: 92764 - DNA, 33 bp, Homo sapien
agaaattgcatttctagatgagctgaggtttgg

SEQ ID NO: 92765 - DNA, 33 bp, Homo sapien
ctagaaggaatgtctacgttctttctgctccca

SEQ ID NO: 92766 - DNA, 33 bp, Homo sapien
ctagaaggaatgtctatgttctttctgctccca

SEQ ID NO: 92767 - DNA, 33 bp, Homo sapien
cactgggtatgatccaatctgggaaaattcttg

SEQ ID NO: 92768 - DNA, 33 bp, Homo sapien
cactgggtatgatccagtctgggaaaattcttg

SEQ ID NO: 92769 - DNA, 33 bp, Homo sapien
cacaatttcttcatcgcatatataatgtaataa

SEQ ID NO: 92770 - DNA, 33 bp, Homo sapien
cacaatttcttcatcggatatataatgtaataa

SEQ ID NO: 92771 - DNA, 33 bp, Homo sapien
acgtctgcaacagaaaaaacctgcatgcccagg

SEQ ID NO: 92772 - DNA, 33 bp, Homo sapien
acgtctgcaacagaaacaacctgcatgcccagg

SEQ ID NO: 92773 - DNA, 33 bp, Homo sapien
tgtttctctcatttcggcctttagataaggatc

SEQ ID NO: 92774 - DNA, 33 bp, Homo sapien
tgtttctctcatttcgtcctttagataaggatc

SEQ ID NO: 92775 - DNA, 33 bp, Homo sapien
acctgaatgactttgaagatagaagaaaattag

SEQ ID NO: 92776 - DNA, 33 bp, Homo sapien
acctgaatgactttgacgatagaagaaaattag

SEQ ID NO: 92777 - DNA, 33 bp, Homo sapien
gttatctgctttctcaatcacaaatattggcat

SEQ ID NO: 92778 - DNA, 33 bp, Homo sapien
gttatctgctttctcagtcacaaatattggcat

SEQ ID NO: 92779 - DNA, 33 bp, Homo sapien
tttccttaagaagccacgtatgaattgcagtgc

SEQ ID NO: 92780 - DNA, 33 bp, Homo sapien
tttccttaagaagccatgtatgaattgcagtgc

SEQ ID NO: 92781 - DNA, 33 bp, Homo sapien
acaagcatatgatttgaaaaaaatacacttctg

SEQ ID NO: 92782 - DNA, 33 bp, Homo sapien
acaagcatatgatttggaaaaaatacacttctg

SEQ ID NO: 92783 - DNA, 33 bp, Homo sapien
aaccagctcttgaagacagtctcagagcctaga

SEQ ID NO: 92784 - DNA, 33 bp, Homo sapien
aaccagctcttgaagatagtctcagagcctaga

SEQ ID NO: 92785 - DNA, 33 bp, Homo sapien
agctggttacatttgcgactgccaaagtctaaa

SEQ ID NO: 92786 - DNA, 33 bp, Homo sapien
agctggttacatttgctactgccaaagtctaaa

SEQ ID NO: 92787 - DNA, 33 bp, Homo sapien
aaaacaaggatgcaaaaaactacaaagtgcaat

SEQ ID NO: 92788 - DNA, 33 bp, Homo sapien
aaaacaaggatgcaaacaactacaaagtgcaat

SEQ ID NO: 92789 - DNA, 33 bp, Homo sapien
gtgatttaaagcaggtaacataaaaaccatgca

SEQ ID NO: 92790 - DNA, 33 bp, Homo sapien
gtgatttaaagcaggtgacataaaaaccatgca

SEQ ID NO: 92791 - DNA, 33 bp, Homo sapien
aaagcaacccttgaggaaaataaattgagcaga

SEQ ID NO: 92792 - DNA, 33 bp, Homo sapien
aaagcaacccttgagggaaataaattgagcaga

SEQ ID NO: 92793 - DNA, 33 bp, Homo sapien
gcctggccatgtcagacgtttccaaaagagagg

SEQ ID NO: 92794 - DNA, 33 bp, Homo sapien
gcctggccatgtcagatgtttccaaaagagagg

SEQ ID NO: 92795 - DNA, 33 bp, Homo sapien
acatagccattgacaaatatttcccttccccac

SEQ ID NO: 92796 - DNA, 33 bp, Homo sapien
acatagccattgacaagtatttcccttccccac

SEQ ID NO: 92797 - DNA, 33 bp, Homo sapien
tttgtttgtttgtacaatctcgtagaattccat

SEQ ID NO: 92798 - DNA, 33 bp, Homo sapien
tttgtttgtttgtacagtctcgtagaattccat

SEQ ID NO: 92799 - DNA, 33 bp, Homo sapien
tctgaaaaaaggctgaaagctggaacaactgat

SEQ ID NO: 92800 - DNA, 33 bp, Homo sapien
tctgaaaaaaggctgacagctggaacaactgat

SEQ ID NO: 92801 - DNA, 33 bp, Homo sapien
tcttttctggccacatcaagtttaagtttatgc

SEQ ID NO: 92802 - DNA, 33 bp, Homo sapien
tcttttctggccacattaagtttaagtttatgc

SEQ ID NO: 92803 - DNA, 33 bp, Homo sapien
attgtccaagatcacaaagtaatctgcataatt

SEQ ID NO: 92804 - DNA, 33 bp, Homo sapien
attgtccaagatcacagagtaatctgcataatt

SEQ ID NO: 92805 - DNA, 33 bp, Homo sapien
atcactggacaagctaacattttcttggggtgg

SEQ ID NO: 92806 - DNA, 33 bp, Homo sapien
atcactggacaagctatcattttcttggggtgg

SEQ ID NO: 92807 - DNA, 33 bp, Homo sapien
cagccatgccttaaaaagtagttctctaccctc

SEQ ID NO: 92808 - DNA, 33 bp, Homo sapien
cagccatgccttaaaatgtagttctctaccctc

SEQ ID NO: 92809 - DNA, 33 bp, Homo sapien
cctagatggctaaacaaggatttcaccttcaaa

SEQ ID NO: 92810 - DNA, 33 bp, Homo sapien
cctagatggctaaacatggatttcaccttcaaa

SEQ ID NO: 92811 - DNA, 33 bp, Homo sapien
aatctttctccgatgaatcaagaaatttcagaa

SEQ ID NO: 92812 - DNA, 33 bp, Homo sapien
aatctttctccgatgagtcaagaaatttcagaa

SEQ ID NO: 92813 - DNA, 33 bp, Homo sapien
ttttctttttaactggacattagctttgtacat

SEQ ID NO: 92814 - DNA, 33 bp, Homo sapien
ttttctttttaactgggcattagctttgtacat

SEQ ID NO: 92815 - DNA, 33 bp, Homo sapien
ctatactcagtttacaaaggattctaaatgcca

SEQ ID NO: 92816 - DNA, 33 bp, Homo sapien
ctatactcagtttacagaggattctaaatgcca

SEQ ID NO: 92817 - DNA, 33 bp, Homo sapien
aggagcacaggttttagatttggatagtcctgg

SEQ ID NO: 92818 - DNA, 33 bp, Homo sapien
aggagcacaggttttatatttggatagtcctgg

SEQ ID NO: 92819 - DNA, 33 bp, Homo sapien
taagcacattcacatacatggtggaaggcagat

SEQ ID NO: 92820 - DNA, 33 bp, Homo sapien
taagcacattcacatatatggtggaaggcagat

SEQ ID NO: 92821 - DNA, 33 bp, Homo sapien
tctaattaatttatcaagcacttgccagtttgc

SEQ ID NO: 92822 - DNA, 33 bp, Homo sapien
tctaattaatttatcaggcacttgccagtttgc

SEQ ID NO: 92823 - DNA, 33 bp, Homo sapien
atgcacctcagtataacctggactcaaagcatt

SEQ ID NO: 92824 - DNA, 33 bp, Homo sapien
atgcacctcagtataatctggactcaaagcatt

SEQ ID NO: 92825 - DNA, 33 bp, Homo sapien
agctattctcaagcaacggtgactacttactat

SEQ ID NO: 92826 - DNA, 33 bp, Homo sapien
agctattctcaagcaatggtgactacttactat

SEQ ID NO: 92827 - DNA, 33 bp, Homo sapien
aaaagccaatgtgggacgaattcttcctctcgg

SEQ ID NO: 92828 - DNA, 33 bp, Homo sapien
aaaagccaatgtgggatgaattcttcctctcgg

SEQ ID NO: 92829 - DNA, 33 bp, Homo sapien
ttttacaattacctgaaagcatcacatttgctg

SEQ ID NO: 92830 - DNA, 33 bp, Homo sapien
ttttacaattacctgagagcatcacatttgctg

SEQ ID NO: 92831 - DNA, 33 bp, Homo sapien
cacttgattgacattcgagatccaacctgaggc

SEQ ID NO: 92832 - DNA, 33 bp, Homo sapien
cacttgattgacattctagatccaacctgaggc

SEQ ID NO: 92833 - DNA, 33 bp, Homo sapien
gcaaagggacatcttacatggcgcaagcaagag

SEQ ID NO: 92834 - DNA, 33 bp, Homo sapien
gcaaagggacatcttatatggcgcaagcaagag

SEQ ID NO: 92835 - DNA, 33 bp, Homo sapien
ttatctttatgtggaccatgacaaattgatttt

SEQ ID NO: 92836 - DNA, 33 bp, Homo sapien
ttatctttatgtggactatgacaaattgatttt

SEQ ID NO: 92837 - DNA, 33 bp, Homo sapien
ccatattgttggaggcaattcacagagaacaca

SEQ ID NO: 92838 - DNA, 33 bp, Homo sapien
ccatattgttggaggccattcacagagaacaca

SEQ ID NO: 92839 - DNA, 33 bp, Homo sapien
tcattacaaaagcaaacttaactgatcgtgatc

SEQ ID NO: 92840 - DNA, 33 bp, Homo sapien
tcattacaaaagcaaagttaactgatcgtgatc

SEQ ID NO: 92841 - DNA, 33 bp, Homo sapien
aaacaatgggtctgacaatataataattccgaa

SEQ ID NO: 92842 - DNA, 33 bp, Homo sapien
aaacaatgggtctgacgatataataattccgaa

SEQ ID NO: 92843 - DNA, 33 bp, Homo sapien
cttgctacttagaagggaatacagtcctataca

SEQ ID NO: 92844 - DNA, 33 bp, Homo sapien
cttgctacttagaaggtaatacagtcctataca

SEQ ID NO: 92845 - DNA, 33 bp, Homo sapien
accctaggtacagtaacgcaaccatctgattat

SEQ ID NO: 92846 - DNA, 33 bp, Homo sapien
accctaggtacagtaatgcaaccatctgattat

SEQ ID NO: 92847 - DNA, 33 bp, Homo sapien
agaggtgggataaaacagaaaaccaggattggt

SEQ ID NO: 92848 - DNA, 33 bp, Homo sapien
agaggtgggataaaaccgaaaaccaggattggt

SEQ ID NO: 92849 - DNA, 33 bp, Homo sapien
aagatggcatactaacaagtgcagctattgaaa

SEQ ID NO: 92850 - DNA, 33 bp, Homo sapien
aagatggcatactaacgagtgcagctattgaaa

SEQ ID NO: 92851 - DNA, 33 bp, Homo sapien
gaatacacgagtaaaacgactataggattcacc

SEQ ID NO: 92852 - DNA, 33 bp, Homo sapien
gaatacacgagtaaaatgactataggattcacc

SEQ ID NO: 92853 - DNA, 33 bp, Homo sapien
aagtgttcagagagaaatccagtgtaatgggct

SEQ ID NO: 92854 - DNA, 33 bp, Homo sapien
aagtgttcagagagaagtccagtgtaatgggct

SEQ ID NO: 92855 - DNA, 33 bp, Homo sapien
aaataatgtccagacaatgtagtttaatgattt

SEQ ID NO: 92856 - DNA, 33 bp, Homo sapien
aaataatgtccagacagtgtagtttaatgattt

SEQ ID NO: 92857 - DNA, 33 bp, Homo sapien
atagcatctgtatcaccgtctggctccaataca

SEQ ID NO: 92858 - DNA, 33 bp, Homo sapien
atagcatctgtatcactgtctggctccaataca

SEQ ID NO: 92859 - DNA, 33 bp, Homo sapien
tgaagccttccttgacaagctttaccaccagtc

SEQ ID NO: 92860 - DNA, 33 bp, Homo sapien
tgaagccttccttgaccagctttaccaccagtc

SEQ ID NO: 92861 - DNA, 33 bp, Homo sapien
cagtcactcataagtgcatgaagcatgagggca

SEQ ID NO: 92862 - DNA, 33 bp, Homo sapien
cagtcactcataagtgtatgaagcatgagggca

SEQ ID NO: 92863 - DNA, 33 bp, Homo sapien
cacatttagcaaagaacgtctttccacttcaga

SEQ ID NO: 92864 - DNA, 33 bp, Homo sapien
cacatttagcaaagaatgtctttccacttcaga

SEQ ID NO: 92865 - DNA, 33 bp, Homo sapien
ctctgtggctcccctagctgcttttaaagcttt

SEQ ID NO: 92866 - DNA, 33 bp, Homo sapien
ctctgtggctcccctatctgcttttaaagcttt

SEQ ID NO: 92867 - DNA, 33 bp, Homo sapien
tgttttagggtggaaaacctgtgcttgagtata

SEQ ID NO: 92868 - DNA, 33 bp, Homo sapien
tgttttagggtggaaagcctgtgcttgagtata

SEQ ID NO: 92869 - DNA, 33 bp, Homo sapien
atagccttgcagactccgagatagcagccatca

SEQ ID NO: 92870 - DNA, 33 bp, Homo sapien
atagccttgcagactctgagatagcagccatca

SEQ ID NO: 92871 - DNA, 33 bp, Homo sapien
tgaggctgcgcttcccgctggctgatacaaatc

SEQ ID NO: 92872 - DNA, 33 bp, Homo sapien
tgaggctgcgcttccctctggctgatacaaatc

SEQ ID NO: 92873 - DNA, 33 bp, Homo sapien
agcacagaatagatgcccaaaagccgttgaatt

SEQ ID NO: 92874 - DNA, 33 bp, Homo sapien
agcacagaatagatgctcaaaagccgttgaatt

SEQ ID NO: 92875 - DNA, 33 bp, Homo sapien
ccctctggaagcaaaaaccaaagatgctcattg

SEQ ID NO: 92876 - DNA, 33 bp, Homo sapien
ccctctggaagcaaaagccaaagatgctcattg

SEQ ID NO: 92877 - DNA, 33 bp, Homo sapien
attgaccaaatactcacactaatcagaccaata

SEQ ID NO: 92878 - DNA, 33 bp, Homo sapien
attgaccaaatactcatactaatcagaccaata

SEQ ID NO: 92879 - DNA, 33 bp, Homo sapien
cttttcgtagctgcatcatcaaaacgcagtatc

SEQ ID NO: 92880 - DNA, 33 bp, Homo sapien
cttttcgtagctgcatgatcaaaacgcagtatc

SEQ ID NO: 92881 - DNA, 33 bp, Homo sapien
tcctccgtctccttcaaaagctcatcgtctctt

SEQ ID NO: 92882 - DNA, 33 bp, Homo sapien
tcctccgtctccttcacaagctcatcgtctctt

SEQ ID NO: 92883 - DNA, 33 bp, Homo sapien
aaaggatatagaggcaaccccaaccataggagc

SEQ ID NO: 92884 - DNA, 33 bp, Homo sapien
aaaggatatagaggcagccccaaccataggagc

SEQ ID NO: 92885 - DNA, 33 bp, Homo sapien
aatagcaggtaatttaacccatagtgaatatta

SEQ ID NO: 92886 - DNA, 33 bp, Homo sapien
aatagcaggtaatttatcccatagtgaatatta

SEQ ID NO: 92887 - DNA, 33 bp, Homo sapien
cattctgagtcaaagacgttgttcttgcagccc

SEQ ID NO: 92888 - DNA, 33 bp, Homo sapien
cattctgagtcaaagaggttgttcttgcagccc

SEQ ID NO: 92889 - DNA, 33 bp, Homo sapien
ggtaactctgatcatacgtgatgatactgccag

SEQ ID NO: 92890 - DNA, 33 bp, Homo sapien
ggtaactctgatcatatgtgatgatactgccag

SEQ ID NO: 92891 - DNA, 33 bp, Homo sapien
taagaaaaaaatgaaacggaaccatccagatta

SEQ ID NO: 92892 - DNA, 33 bp, Homo sapien
taagaaaaaaatgaaatggaaccatccagatta

SEQ ID NO: 92893 - DNA, 33 bp, Homo sapien
ttaatgactctcataaatatggctaaaacattt

SEQ ID NO: 92894 - DNA, 33 bp, Homo sapien
ttaatgactctcataagtatggctaaaacattt

SEQ ID NO: 92895 - DNA, 33 bp, Homo sapien
gtgaggtcatgtaaaaaatccaagtagagaccc

SEQ ID NO: 92896 - DNA, 33 bp, Homo sapien
gtgaggtcatgtaaaagatccaagtagagaccc

SEQ ID NO: 92897 - DNA, 33 bp, Homo sapien
taattggtgcatgacactgatttggatattgaa

SEQ ID NO: 92898 - DNA, 33 bp, Homo sapien
taattggtgcatgacagtgatttggatattgaa

SEQ ID NO: 92899 - DNA, 33 bp, Homo sapien
aatacacaatgaaaaggcccttcaatatccaaa

SEQ ID NO: 92900 - DNA, 33 bp, Homo sapien
aatacacaatgaaaagtcccttcaatatccaaa

SEQ ID NO: 92901 - DNA, 33 bp, Homo sapien
atttttattttcccaaaagaggtgtcagctgtc

SEQ ID NO: 92902 - DNA, 33 bp, Homo sapien
atttttattttcccaacagaggtgtcagctgtc

SEQ ID NO: 92903 - DNA, 33 bp, Homo sapien
ctgagactggcaacggaaagcacagagtgaaga

SEQ ID NO: 92904 - DNA, 33 bp, Homo sapien
ctgagactggcaacgggaagcacagagtgaaga

SEQ ID NO: 92905 - DNA, 33 bp, Homo sapien
attaatatactgtccaactttcttgaagcccaa

SEQ ID NO: 92906 - DNA, 33 bp, Homo sapien
attaatatactgtccatctttcttgaagcccaa

SEQ ID NO: 92907 - DNA, 33 bp, Homo sapien
gtaacacatcatcccaaacttagttgcatagaa

SEQ ID NO: 92908 - DNA, 33 bp, Homo sapien
gtaacacatcatcccatacttagttgcatagaa

SEQ ID NO: 92909 - DNA, 33 bp, Homo sapien
ccactgaaacctctttcaaagaccatatactga

SEQ ID NO: 92910 - DNA, 33 bp, Homo sapien
ccactgaaacctcttttaaagaccatatactga

SEQ ID NO: 92911 - DNA, 33 bp, Homo sapien
tagggagcaccttgaacgctatgaagggaaaca

SEQ ID NO: 92912 - DNA, 33 bp, Homo sapien
tagggagcaccttgaatgctatgaagggaaaca

SEQ ID NO: 92913 - DNA, 33 bp, Homo sapien
ttgaaagaaaaggcaaagcacatgaactttctt

SEQ ID NO: 92914 - DNA, 33 bp, Homo sapien
ttgaaagaaaaggcaaggcacatgaactttctt

SEQ ID NO: 92915 - DNA, 33 bp, Homo sapien
cctcatgaacgagttacatctgtgagaatcgtt

SEQ ID NO: 92916 - DNA, 33 bp, Homo sapien
cctcatgaacgagttatatctgtgagaatcgtt

SEQ ID NO: 92917 - DNA, 33 bp, Homo sapien
tttttcaactgaatcaaccagtcaattccgtta

SEQ ID NO: 92918 - DNA, 33 bp, Homo sapien
tttttcaactgaatcagccagtcaattccgtta

SEQ ID NO: 92919 - DNA, 33 bp, Homo sapien
gagtggtagagatacaatctgaagccatcataa

SEQ ID NO: 92920 - DNA, 33 bp, Homo sapien
gagtggtagagatacagtctgaagccatcataa

SEQ ID NO: 92921 - DNA, 33 bp, Homo sapien
gtggacattgaatctccgagaactcatatcgac

SEQ ID NO: 92922 - DNA, 33 bp, Homo sapien
gtggacattgaatctctgagaactcatatcgac

SEQ ID NO: 92923 - DNA, 33 bp, Homo sapien
aagtggtcgacaataaagcttccatagcaacca

SEQ ID NO: 92924 - DNA, 33 bp, Homo sapien
aagtggtcgacaataaggcttccatagcaacca

SEQ ID NO: 92925 - DNA, 33 bp, Homo sapien
atgtttaacattgcaaacccaatgaacaggtac

SEQ ID NO: 92926 - DNA, 33 bp, Homo sapien
atgtttaacattgcaagcccaatgaacaggtac

SEQ ID NO: 92927 - DNA, 33 bp, Homo sapien
ctttcttatgacataccgatctgtacatcctat

SEQ ID NO: 92928 - DNA, 33 bp, Homo sapien
ctttcttatgacatactgatctgtacatcctat

SEQ ID NO: 92929 - DNA, 33 bp, Homo sapien
tattgaaattgtcaacaaaagtacagatcatta

SEQ ID NO: 92930 - DNA, 33 bp, Homo sapien
tattgaaattgtcaacgaaagtacagatcatta

SEQ ID NO: 92931 - DNA, 33 bp, Homo sapien
cagatagtaagtgctacgaagaaatctaaagaa

SEQ ID NO: 92932 - DNA, 33 bp, Homo sapien
cagatagtaagtgctatgaagaaatctaaagaa

SEQ ID NO: 92933 - DNA, 33 bp, Homo sapien
gagtccactcctgtcacactgctctctcacctg

SEQ ID NO: 92934 - DNA, 33 bp, Homo sapien
gagtccactcctgtcagactgctctctcacctg

SEQ ID NO: 92935 - DNA, 33 bp, Homo sapien
ttgagatgatgtgttacgcagtacgggaaaggg

SEQ ID NO: 92936 - DNA, 33 bp, Homo sapien
ttgagatgatgtgttatgcagtacgggaaaggg

SEQ ID NO: 92937 - DNA, 33 bp, Homo sapien
cgagagtgtaagtaagaacattagcaactttta

SEQ ID NO: 92938 - DNA, 33 bp, Homo sapien
cgagagtgtaagtaaggacattagcaactttta

SEQ ID NO: 92939 - DNA, 33 bp, Homo sapien
aaattgattttttcaacttcgtttgattggtaa

SEQ ID NO: 92940 - DNA, 33 bp, Homo sapien
aaattgattttttcaatttcgtttgattggtaa

SEQ ID NO: 92941 - DNA, 33 bp, Homo sapien
gggctgtcagatatgaagtaaatttagagacct

SEQ ID NO: 92942 - DNA, 33 bp, Homo sapien
gggctgtcagatatgaggtaaatttagagacct

SEQ ID NO: 92943 - DNA, 33 bp, Homo sapien
ccttcactgtgcaaataagtcttgacacatggc

SEQ ID NO: 92944 - DNA, 33 bp, Homo sapien
ccttcactgtgcaaatcagtcttgacacatggc

SEQ ID NO: 92945 - DNA, 33 bp, Homo sapien
gggttcagactaccgagaaccaggatgaagaat

SEQ ID NO: 92946 - DNA, 33 bp, Homo sapien
gggttcagactaccgataaccaggatgaagaat

SEQ ID NO: 92947 - DNA, 33 bp, Homo sapien
ctgtagtgctgccgtaagtctcactatggtcct

SEQ ID NO: 92948 - DNA, 33 bp, Homo sapien
ctgtagtgctgccgtacgtctcactatggtcct

SEQ ID NO: 92949 - DNA, 33 bp, Homo sapien
cttctcgggcaagatacgggtctaaggtggtga

SEQ ID NO: 92950 - DNA, 33 bp, Homo sapien
cttctcgggcaagatatgggtctaaggtggtga

SEQ ID NO: 92951 - DNA, 33 bp, Homo sapien
aaagctgtttgaaaagcagcacaaagaatcaac

SEQ ID NO: 92952 - DNA, 33 bp, Homo sapien
aaagctgtttgaaaaggagcacaaagaatcaac

SEQ ID NO: 92953 - DNA, 33 bp, Homo sapien
ctcagctgggcccagacgtcctcacactacatc

SEQ ID NO: 92954 - DNA, 33 bp, Homo sapien
ctcagctgggcccagaggtcctcacactacatc

SEQ ID NO: 92955 - DNA, 33 bp, Homo sapien
aaaatcccgattcctacctctcaaaagtttaga

SEQ ID NO: 92956 - DNA, 33 bp, Homo sapien
aaaatcccgattcctagctctcaaaagtttaga

SEQ ID NO: 92957 - DNA, 33 bp, Homo sapien
tactccgtttgaaaaacagcagacatataaatt

SEQ ID NO: 92958 - DNA, 33 bp, Homo sapien
tactccgtttgaaaaatagcagacatataaatt

SEQ ID NO: 92959 - DNA, 33 bp, Homo sapien
ttaagcaatcgatatcacgcccaattcaattac

SEQ ID NO: 92960 - DNA, 33 bp, Homo sapien
ttaagcaatcgatatcgcgcccaattcaattac

SEQ ID NO: 92961 - DNA, 33 bp, Homo sapien
ctttcctcgagtgactaagtacacagtgtccac

SEQ ID NO: 92962 - DNA, 33 bp, Homo sapien
ctttcctcgagtgactgagtacacagtgtccac

SEQ ID NO: 92963 - DNA, 33 bp, Homo sapien
tttgggtgcatcatgaacaaaggcctaagggtc

SEQ ID NO: 92964 - DNA, 33 bp, Homo sapien
tttgggtgcatcatgagcaaaggcctaagggtc

SEQ ID NO: 92965 - DNA, 33 bp, Homo sapien
ggtaaaaataatttgcacagtttgttaattgtg

SEQ ID NO: 92966 - DNA, 33 bp, Homo sapien
ggtaaaaataatttgcgcagtttgttaattgtg

SEQ ID NO: 92967 - DNA, 33 bp, Homo sapien
aagtctcttatggaaaatgctatattctgtttc

SEQ ID NO: 92968 - DNA, 33 bp, Homo sapien
aagtctcttatggaaattgctatattctgtttc

SEQ ID NO: 92969 - DNA, 33 bp, Homo sapien
aaaacatactgccaaacgtttacttttagaaga

SEQ ID NO: 92970 - DNA, 33 bp, Homo sapien
aaaacatactgccaaatgtttacttttagaaga

SEQ ID NO: 92971 - DNA, 33 bp, Homo sapien
gtgtggttattaagaaaaacagtaattatttca

SEQ ID NO: 92972 - DNA, 33 bp, Homo sapien
gtgtggttattaagaagaacagtaattatttca

SEQ ID NO: 92973 - DNA, 33 bp, Homo sapien
ttaaaaactagcgaagcagaatgtcatttggcc

SEQ ID NO: 92974 - DNA, 33 bp, Homo sapien
ttaaaaactagcgaagtagaatgtcatttggcc

SEQ ID NO: 92975 - DNA, 33 bp, Homo sapien
ccttgaatttgtcagactcgcgtcataaatatg

SEQ ID NO: 92976 - DNA, 33 bp, Homo sapien
ccttgaatttgtcagagtcgcgtcataaatatg

SEQ ID NO: 92977 - DNA, 33 bp, Homo sapien
cagcctcatcccccaacctgctcttgaaatgcc

SEQ ID NO: 92978 - DNA, 33 bp, Homo sapien
cagcctcatcccccaatctgctcttgaaatgcc

SEQ ID NO: 92979 - DNA, 33 bp, Homo sapien
agaagtagaaattgaaaccaggacctagcgaag

SEQ ID NO: 92980 - DNA, 33 bp, Homo sapien
agaagtagaaattgaagccaggacctagcgaag

SEQ ID NO: 92981 - DNA, 33 bp, Homo sapien
ccttttccttactggcaaggtgaaatgatagaa

SEQ ID NO: 92982 - DNA, 33 bp, Homo sapien
ccttttccttactggctaggtgaaatgatagaa

SEQ ID NO: 92983 - DNA, 33 bp, Homo sapien
tggtgacaacattctacgtgctttttgaaacaa

SEQ ID NO: 92984 - DNA, 33 bp, Homo sapien
tggtgacaacattctatgtgctttttgaaacaa

SEQ ID NO: 92985 - DNA, 33 bp, Homo sapien
gccatctcatctcatgaagacgcaaaatggtgt

SEQ ID NO: 92986 - DNA, 33 bp, Homo sapien
gccatctcatctcatggagacgcaaaatggtgt

SEQ ID NO: 92987 - DNA, 33 bp, Homo sapien
tgggagagagtttactcagccagagtccccaga

SEQ ID NO: 92988 - DNA, 33 bp, Homo sapien
tgggagagagtttactgagccagagtccccaga

SEQ ID NO: 92989 - DNA, 33 bp, Homo sapien
tctctggagcgaaagcaaggaaaggcaggtagg

SEQ ID NO: 92990 - DNA, 33 bp, Homo sapien
tctctggagcgaaagcgaggaaaggcaggtagg

SEQ ID NO: 92991 - DNA, 33 bp, Homo sapien
ttttagaagtgttcagaattctagcattaatta

SEQ ID NO: 92992 - DNA, 33 bp, Homo sapien
ttttagaagtgttcaggattctagcattaatta

SEQ ID NO: 92993 - DNA, 33 bp, Homo sapien
tcgggagaattgaagacgttccgacccatactg

SEQ ID NO: 92994 - DNA, 33 bp, Homo sapien
tcgggagaattgaagatgttccgacccatactg

SEQ ID NO: 92995 - DNA, 33 bp, Homo sapien
caactcattgttacaaaagggctctgcattaag

SEQ ID NO: 92996 - DNA, 33 bp, Homo sapien
caactcattgttacaacagggctctgcattaag

SEQ ID NO: 92997 - DNA, 33 bp, Homo sapien
cagaaacgatgaaaaaggtggtgccggcagctg

SEQ ID NO: 92998 - DNA, 33 bp, Homo sapien
cagaaacgatgaaaaatgtggtgccggcagctg

SEQ ID NO: 92999 - DNA, 33 bp, Homo sapien
ccagcactgcagggaactgtacaaattaagcaa

SEQ ID NO: 93000 - DNA, 33 bp, Homo sapien
ccagcactgcagggaagtgtacaaattaagcaa

SEQ ID NO: 93001 - DNA, 33 bp, Homo sapien
ctaactttctactggacaagccttgactatctt

SEQ ID NO: 93002 - DNA, 33 bp, Homo sapien
ctaactttctactggagaagccttgactatctt

SEQ ID NO: 93003 - DNA, 33 bp, Homo sapien
agtttacatcgcttgccgaaggactgtatcttg

SEQ ID NO: 93004 - DNA, 33 bp, Homo sapien
agtttacatcgcttgctgaaggactgtatcttg

SEQ ID NO: 93005 - DNA, 33 bp, Homo sapien
aaaactcaagttcacaagatttggatgtgaagg

SEQ ID NO: 93006 - DNA, 33 bp, Homo sapien
aaaactcaagttcacaggatttggatgtgaagg

SEQ ID NO: 93007 - DNA, 33 bp, Homo sapien
cgccagtcaaaactctcaacacaactgttgcct

SEQ ID NO: 93008 - DNA, 33 bp, Homo sapien
cgccagtcaaaactctgaacacaactgttgcct

SEQ ID NO: 93009 - DNA, 33 bp, Homo sapien
tctttttttgaacatgacaaaacaaagtattca

SEQ ID NO: 93010 - DNA, 33 bp, Homo sapien
tctttttttgaacatggcaaaacaaagtattca

SEQ ID NO: 93011 - DNA, 33 bp, Homo sapien
cgcagacaatgaatgcaagaacaatgggaaccc

SEQ ID NO: 93012 - DNA, 33 bp, Homo sapien
cgcagacaatgaatgcgagaacaatgggaaccc

SEQ ID NO: 93013 - DNA, 33 bp, Homo sapien
tgagctttgtacagaacgcaagtctgaagcaaa

SEQ ID NO: 93014 - DNA, 33 bp, Homo sapien
tgagctttgtacagaatgcaagtctgaagcaaa

SEQ ID NO: 93015 - DNA, 33 bp, Homo sapien
catttaaaatgctttccaggtattcatgaaaat

SEQ ID NO: 93016 - DNA, 33 bp, Homo sapien
catttaaaatgctttcgaggtattcatgaaaat

SEQ ID NO: 93017 - DNA, 33 bp, Homo sapien
cacctagccattaaacagcatctctcttaggct

SEQ ID NO: 93018 - DNA, 33 bp, Homo sapien
cacctagccattaaaccgcatctctcttaggct

SEQ ID NO: 93019 - DNA, 33 bp, Homo sapien
ggaataaggacgtcataatctacttcctcactc

SEQ ID NO: 93020 - DNA, 33 bp, Homo sapien
ggaataaggacgtcattatctacttcctcactc

SEQ ID NO: 93021 - DNA, 33 bp, Homo sapien
tttctactctattcacagcctcagtaggatacc

SEQ ID NO: 93022 - DNA, 33 bp, Homo sapien
tttctactctattcacggcctcagtaggatacc

SEQ ID NO: 93023 - DNA, 33 bp, Homo sapien
ggaaggagacatttaactgttgctagttattac

SEQ ID NO: 93024 - DNA, 33 bp, Homo sapien
ggaaggagacatttaattgttgctagttattac

SEQ ID NO: 93025 - DNA, 33 bp, Homo sapien
tgtcaatttggggttaaagatagcatcccttct

SEQ ID NO: 93026 - DNA, 33 bp, Homo sapien
tgtcaatttggggttacagatagcatcccttct

SEQ ID NO: 93027 - DNA, 33 bp, Homo sapien
ttgcaaatttcttccacacatcttctctgaata

SEQ ID NO: 93028 - DNA, 33 bp, Homo sapien
ttgcaaatttcttccagacatcttctctgaata

SEQ ID NO: 93029 - DNA, 33 bp, Homo sapien
ctgactgacacattccacagcagaatacatgtg

SEQ ID NO: 93030 - DNA, 33 bp, Homo sapien
ctgactgacacattccgcagcagaatacatgtg

SEQ ID NO: 93031 - DNA, 33 bp, Homo sapien
gcctccagttggtggcaaatcttttgaaacttg

SEQ ID NO: 93032 - DNA, 33 bp, Homo sapien
gcctccagttggtggcgaatcttttgaaacttg

SEQ ID NO: 93033 - DNA, 33 bp, Homo sapien
ggtgatggctggggttaaacaagttccaacatg

SEQ ID NO: 93034 - DNA, 33 bp, Homo sapien
ggtgatggctggggttcaacaagttccaacatg

SEQ ID NO: 93035 - DNA, 33 bp, Homo sapien
ctccagccacacagaaagggaagttttaattca

SEQ ID NO: 93036 - DNA, 33 bp, Homo sapien
ctccagccacacagaatgggaagttttaattca

SEQ ID NO: 93037 - DNA, 33 bp, Homo sapien
aaacacgtgaataaacaagcagtcatactgggt

SEQ ID NO: 93038 - DNA, 33 bp, Homo sapien
aaacacgtgaataaacgagcagtcatactgggt

SEQ ID NO: 93039 - DNA, 33 bp, Homo sapien
gtcaaatcattgaaaccatttctgttacaggga

SEQ ID NO: 93040 - DNA, 33 bp, Homo sapien
gtcaaatcattgaaacgatttctgttacaggga

SEQ ID NO: 93041 - DNA, 33 bp, Homo sapien
gcttcttctattttgacgtcacctgcaaaggga

SEQ ID NO: 93042 - DNA, 33 bp, Homo sapien
gcttcttctattttgaggtcacctgcaaaggga

SEQ ID NO: 93043 - DNA, 33 bp, Homo sapien
agggtaacagtagatagggtgaatgagggcttc

SEQ ID NO: 93044 - DNA, 33 bp, Homo sapien
agggtaacagtagatatggtgaatgagggcttc

SEQ ID NO: 93045 - DNA, 33 bp, Homo sapien
taatagtacctggagaagtcttgttgtcactta

SEQ ID NO: 93046 - DNA, 33 bp, Homo sapien
taatagtacctggagacgtcttgttgtcactta

SEQ ID NO: 93047 - DNA, 33 bp, Homo sapien
gccactcctgtagtcaccagttgttcatcagtt

SEQ ID NO: 93048 - DNA, 33 bp, Homo sapien
gccactcctgtagtcagcagttgttcatcagtt

SEQ ID NO: 93049 - DNA, 33 bp, Homo sapien
tgatagaatgcctctacgaaatgttgattactg

SEQ ID NO: 93050 - DNA, 33 bp, Homo sapien
tgatagaatgcctctatgaaatgttgattactg

SEQ ID NO: 93051 - DNA, 33 bp, Homo sapien
cattacatttcttcgaaaccattcctatgaaca

SEQ ID NO: 93052 - DNA, 33 bp, Homo sapien
cattacatttcttcgataccattcctatgaaca

SEQ ID NO: 93053 - DNA, 33 bp, Homo sapien
tcatggtggcaaagaaatgcctacaatcttctt

SEQ ID NO: 93054 - DNA, 33 bp, Homo sapien
tcatggtggcaaagaagtgcctacaatcttctt

SEQ ID NO: 93055 - DNA, 33 bp, Homo sapien
tgcagggagtcattcacggctggtgtgctagct

SEQ ID NO: 93056 - DNA, 33 bp, Homo sapien
tgcagggagtcattcatggctggtgtgctagct

SEQ ID NO: 93057 - DNA, 33 bp, Homo sapien
cagccaggccagcagacggggagcagaaatcaa

SEQ ID NO: 93058 - DNA, 33 bp, Homo sapien
cagccaggccagcagagggggagcagaaatcaa

SEQ ID NO: 93059 - DNA, 33 bp, Homo sapien
aatgaacaggattgccacctgcagcgttcagag

SEQ ID NO: 93060 - DNA, 33 bp, Homo sapien
aatgaacaggattgccgcctgcagcgttcagag

SEQ ID NO: 93061 - DNA, 33 bp, Homo sapien
gctccttgagcatacaacagttatttctgcaga

SEQ ID NO: 93062 - DNA, 33 bp, Homo sapien
gctccttgagcatacatcagttatttctgcaga

SEQ ID NO: 93063 - DNA, 33 bp, Homo sapien
ttttctttttttgcaacagggaattctcatcag

SEQ ID NO: 93064 - DNA, 33 bp, Homo sapien
ttttctttttttgcaatagggaattctcatcag

SEQ ID NO: 93065 - DNA, 33 bp, Homo sapien
ccctggttttgtgttacaaggtactgtgcagag

SEQ ID NO: 93066 - DNA, 33 bp, Homo sapien
ccctggttttgtgttagaaggtactgtgcagag

SEQ ID NO: 93067 - DNA, 33 bp, Homo sapien
gagagggtgcagctgaacggttcacttttcttt

SEQ ID NO: 93068 - DNA, 33 bp, Homo sapien
gagagggtgcagctgagcggttcacttttcttt

SEQ ID NO: 93069 - DNA, 33 bp, Homo sapien
cccaggattattgccacggataaccaacctctg

SEQ ID NO: 93070 - DNA, 33 bp, Homo sapien
cccaggattattgccatggataaccaacctctg

SEQ ID NO: 93071 - DNA, 33 bp, Homo sapien
attatgggacttcacactatcaggttatactaa

SEQ ID NO: 93072 - DNA, 33 bp, Homo sapien
attatgggacttcacattatcaggttatactaa

SEQ ID NO: 93073 - DNA, 33 bp, Homo sapien
gtgaagtcccataataccgtcgtacctgaggct

SEQ ID NO: 93074 - DNA, 33 bp, Homo sapien
gtgaagtcccataatatcgtcgtacctgaggct

SEQ ID NO: 93075 - DNA, 33 bp, Homo sapien
gctcctaggagattccaaggctgccgctgatct

SEQ ID NO: 93076 - DNA, 33 bp, Homo sapien
gctcctaggagattccgaggctgccgctgatct

SEQ ID NO: 93077 - DNA, 33 bp, Homo sapien
caatcccactaccatacgctttctactgtattt

SEQ ID NO: 93078 - DNA, 33 bp, Homo sapien
caatcccactaccatatgctttctactgtattt

SEQ ID NO: 93079 - DNA, 33 bp, Homo sapien
gaattttagatgcagacatcattttatatatat

SEQ ID NO: 93080 - DNA, 33 bp, Homo sapien
gaattttagatgcagagatcattttatatatat

SEQ ID NO: 93081 - DNA, 33 bp, Homo sapien
agaaaatggattaggaacatacctttataaatt

SEQ ID NO: 93082 - DNA, 33 bp, Homo sapien
agaaaatggattaggatcatacctttataaatt

SEQ ID NO: 93083 - DNA, 33 bp, Homo sapien
ggccatcaggaagaaacgagagctgaggagtga

SEQ ID NO: 93084 - DNA, 33 bp, Homo sapien
ggccatcaggaagaaatgagagctgaggagtga

SEQ ID NO: 93085 - DNA, 33 bp, Homo sapien
ccacttgggtcagagacatgaggtccctggcca

SEQ ID NO: 93086 - DNA, 33 bp, Homo sapien
ccacttgggtcagagatatgaggtccctggcca

SEQ ID NO: 93087 - DNA, 33 bp, Homo sapien
tgtcttcttccaggagacatccagaccttttgg

SEQ ID NO: 93088 - DNA, 33 bp, Homo sapien
tgtcttcttccaggagtcatccagaccttttgg

SEQ ID NO: 93089 - DNA, 33 bp, Homo sapien
tcgcacctggaggcacagaaacctacctgccac

SEQ ID NO: 93090 - DNA, 33 bp, Homo sapien
tcgcacctggaggcacggaaacctacctgccac

SEQ ID NO: 93091 - DNA, 33 bp, Homo sapien
agggctaaaccctctcactttctggtttggcca

SEQ ID NO: 93092 - DNA, 33 bp, Homo sapien
agggctaaaccctctcgctttctggtttggcca

SEQ ID NO: 93093 - DNA, 33 bp, Homo sapien
accgtaaatatctctacccccaaagctgcgcag

SEQ ID NO: 93094 - DNA, 33 bp, Homo sapien
accgtaaatatctctatccccaaagctgcgcag

SEQ ID NO: 93095 - DNA, 33 bp, Homo sapien
ctgcttccataagtaaatctctgcagtagccac

SEQ ID NO: 93096 - DNA, 33 bp, Homo sapien
ctgcttccataagtaagtctctgcagtagccac

SEQ ID NO: 93097 - DNA, 33 bp, Homo sapien
cccagtcactgtatgaagttagcaaaaccttgg

SEQ ID NO: 93098 - DNA, 33 bp, Homo sapien
cccagtcactgtatgaggttagcaaaaccttgg

SEQ ID NO: 93099 - DNA, 33 bp, Homo sapien
tcacccaaagccacaaacacagctcctcagctc

SEQ ID NO: 93100 - DNA, 33 bp, Homo sapien
tcacccaaagccacaagcacagctcctcagctc

SEQ ID NO: 93101 - DNA, 33 bp, Homo sapien
gtccttgcagagtcccaagagaggtcaaggagt

SEQ ID NO: 93102 - DNA, 33 bp, Homo sapien
gtccttgcagagtcccgagagaggtcaaggagt

SEQ ID NO: 93103 - DNA, 33 bp, Homo sapien
aaaatgtcctaattctaaaaatgatttatcagg

SEQ ID NO: 93104 - DNA, 33 bp, Homo sapien
aaaatgtcctaattctgaaaatgatttatcagg

SEQ ID NO: 93105 - DNA, 33 bp, Homo sapien
cgtacctgagaaaatacggccacccaagaaaaa

SEQ ID NO: 93106 - DNA, 33 bp, Homo sapien
cgtacctgagaaaatatggccacccaagaaaaa

SEQ ID NO: 93107 - DNA, 33 bp, Homo sapien
gaatattgtttagctacgaaaaacacaaaagtc

SEQ ID NO: 93108 - DNA, 33 bp, Homo sapien
gaatattgtttagctatgaaaaacacaaaagtc

SEQ ID NO: 93109 - DNA, 33 bp, Homo sapien
ctgggcagaaaagtcaggtcctcttcttcctcc

SEQ ID NO: 93110 - DNA, 33 bp, Homo sapien
ctgggcagaaaagtcatgtcctcttcttcctcc

SEQ ID NO: 93111 - DNA, 33 bp, Homo sapien
ttagtatagaaccttccgaacagctgacgttta

SEQ ID NO: 93112 - DNA, 33 bp, Homo sapien
ttagtatagaaccttctgaacagctgacgttta

SEQ ID NO: 93113 - DNA, 33 bp, Homo sapien
gactggttgtttttgacgttggtgatccttatt

SEQ ID NO: 93114 - DNA, 33 bp, Homo sapien
gactggttgtttttgatgttggtgatccttatt

SEQ ID NO: 93115 - DNA, 33 bp, Homo sapien
gccaccacacctgatcactgtttaacttcttag

SEQ ID NO: 93116 - DNA, 33 bp, Homo sapien
gccaccacacctgatcgctgtttaacttcttag

SEQ ID NO: 93117 - DNA, 33 bp, Homo sapien
tcacaagtgtaagtcacgttgtcctcctcttat

SEQ ID NO: 93118 - DNA, 33 bp, Homo sapien
tcacaagtgtaagtcatgttgtcctcctcttat

SEQ ID NO: 93119 - DNA, 33 bp, Homo sapien
agatggcaagaagcagcagttggtggttggtga

SEQ ID NO: 93120 - DNA, 33 bp, Homo sapien
agatggcaagaagcaggagttggtggttggtga

SEQ ID NO: 93121 - DNA, 33 bp, Homo sapien
agaactttctagaaaacgggcagtaacttcctg

SEQ ID NO: 93122 - DNA, 33 bp, Homo sapien
agaactttctagaaaatgggcagtaacttcctg

SEQ ID NO: 93123 - DNA, 33 bp, Homo sapien
gcaaatgtggaacaaaggaagccgagatatcaa

SEQ ID NO: 93124 - DNA, 33 bp, Homo sapien
gcaaatgtggaacaaatgaagccgagatatcaa

SEQ ID NO: 93125 - DNA, 33 bp, Homo sapien
cttttcaaaacaactaggcctacatctcaattt

SEQ ID NO: 93126 - DNA, 33 bp, Homo sapien
cttttcaaaacaactatgcctacatctcaattt

SEQ ID NO: 93127 - DNA, 33 bp, Homo sapien
gagacctggagtgttaccttcttctctttccta

SEQ ID NO: 93128 - DNA, 33 bp, Homo sapien
gagacctggagtgttatcttcttctctttccta

SEQ ID NO: 93129 - DNA, 33 bp, Homo sapien
gtctccaggtgtgacacgatgaatgatgtcttg

SEQ ID NO: 93130 - DNA, 33 bp, Homo sapien
gtctccaggtgtgacatgatgaatgatgtcttg

SEQ ID NO: 93131 - DNA, 33 bp, Homo sapien
atggctgcaatgaatcaaaaatctgcaagagat

SEQ ID NO: 93132 - DNA, 33 bp, Homo sapien
atggctgcaatgaatcgaaaatctgcaagagat

SEQ ID NO: 93133 - DNA, 33 bp, Homo sapien
gggttaaaagagacaaccaaaagaagtcaggag

SEQ ID NO: 93134 - DNA, 33 bp, Homo sapien
gggttaaaagagacaagcaaaagaagtcaggag

SEQ ID NO: 93135 - DNA, 33 bp, Homo sapien
gtggtccaggtcacacagccagttgctactgag

SEQ ID NO: 93136 - DNA, 33 bp, Homo sapien
gtggtccaggtcacaccgccagttgctactgag

SEQ ID NO: 93137 - DNA, 33 bp, Homo sapien
ataaatgttgtgtaagccactggtttgtggtat

SEQ ID NO: 93138 - DNA, 33 bp, Homo sapien
ataaatgttgtgtaagtcactggtttgtggtat

SEQ ID NO: 93139 - DNA, 33 bp, Homo sapien
tctattttggtatctccatttgggtctgtcaaa

SEQ ID NO: 93140 - DNA, 33 bp, Homo sapien
tctattttggtatctctatttgggtctgtcaaa

SEQ ID NO: 93141 - DNA, 33 bp, Homo sapien
tagcacaacagggcaactatcgtcaataataat

SEQ ID NO: 93142 - DNA, 33 bp, Homo sapien
tagcacaacagggcaattatcgtcaataataat

SEQ ID NO: 93143 - DNA, 33 bp, Homo sapien
tgttcactcttctatcactgcataatagttatt

SEQ ID NO: 93144 - DNA, 33 bp, Homo sapien
tgttcactcttctatcgctgcataatagttatt

SEQ ID NO: 93145 - DNA, 33 bp, Homo sapien
cctgtattcttactgacactcaaaacagtctca

SEQ ID NO: 93146 - DNA, 33 bp, Homo sapien
cctgtattcttactgatactcaaaacagtctca

SEQ ID NO: 93147 - DNA, 33 bp, Homo sapien
tcctgtcatactggaaagcaaggatggtatcaa

SEQ ID NO: 93148 - DNA, 33 bp, Homo sapien
tcctgtcatactggaaggcaaggatggtatcaa

SEQ ID NO: 93149 - DNA, 33 bp, Homo sapien
ccacatagccaacctcaccagggctgagcaggt

SEQ ID NO: 93150 - DNA, 33 bp, Homo sapien
ccacatagccaacctcgccagggctgagcaggt

SEQ ID NO: 93151 - DNA, 33 bp, Homo sapien
atataagggactggcacagtaataagcacgagg

SEQ ID NO: 93152 - DNA, 33 bp, Homo sapien
atataagggactggcagagtaataagcacgagg

SEQ ID NO: 93153 - DNA, 33 bp, Homo sapien
acctgcgtttcctccaaatgaacgatgactcac

SEQ ID NO: 93154 - DNA, 33 bp, Homo sapien
acctgcgtttcctccacatgaacgatgactcac

SEQ ID NO: 93155 - DNA, 33 bp, Homo sapien
cagcattatctttgccaatgattgtttccattt

SEQ ID NO: 93156 - DNA, 33 bp, Homo sapien
cagcattatctttgcccatgattgtttccattt

SEQ ID NO: 93157 - DNA, 33 bp, Homo sapien
tccaatccctaacttaacacatccttcgctcca

SEQ ID NO: 93158 - DNA, 33 bp, Homo sapien
tccaatccctaacttagcacatccttcgctcca

SEQ ID NO: 93159 - DNA, 33 bp, Homo sapien
attcctgagtgacaacactgtgtggatatttca

SEQ ID NO: 93160 - DNA, 33 bp, Homo sapien
attcctgagtgacaacgctgtgtggatatttca

SEQ ID NO: 93161 - DNA, 33 bp, Homo sapien
gttgtacccataagcaatgaaaacatataaatg

SEQ ID NO: 93162 - DNA, 33 bp, Homo sapien
gttgtacccataagcactgaaaacatataaatg

SEQ ID NO: 93163 - DNA, 33 bp, Homo sapien
tcaagacatacatggtcaagtactatctggtag

SEQ ID NO: 93164 - DNA, 33 bp, Homo sapien
tcaagacatacatggtgaagtactatctggtag

SEQ ID NO: 93165 - DNA, 33 bp, Homo sapien
gggcattaaaaagggcacaagcagcatacaact

SEQ ID NO: 93166 - DNA, 33 bp, Homo sapien
gggcattaaaaagggcgcaagcagcatacaact

SEQ ID NO: 93167 - DNA, 33 bp, Homo sapien
ggtgaataccgctctaccatgctcttcaagatg

SEQ ID NO: 93168 - DNA, 33 bp, Homo sapien
ggtgaataccgctctatcatgctcttcaagatg

SEQ ID NO: 93169 - DNA, 33 bp, Homo sapien
cattgttatgttggaaatatacttgtgatgcct

SEQ ID NO: 93170 - DNA, 33 bp, Homo sapien
cattgttatgttggaagtatacttgtgatgcct

SEQ ID NO: 93171 - DNA, 33 bp, Homo sapien
ttccaacataacaatgaaaagtttaaaagtgta

SEQ ID NO: 93172 - DNA, 33 bp, Homo sapien
ttccaacataacaatggaaagtttaaaagtgta

SEQ ID NO: 93173 - DNA, 33 bp, Homo sapien
gatcactgtcggtctacagagacttccagaaat

SEQ ID NO: 93174 - DNA, 33 bp, Homo sapien
gatcactgtcggtctatagagacttccagaaat

SEQ ID NO: 93175 - DNA, 33 bp, Homo sapien
aatgctattggtgatacgagaaatattttgaat

SEQ ID NO: 93176 - DNA, 33 bp, Homo sapien
aatgctattggtgatatgagaaatattttgaat

SEQ ID NO: 93177 - DNA, 33 bp, Homo sapien
ttgcccaaatgatttcccttcccgtcagcttcc

SEQ ID NO: 93178 - DNA, 33 bp, Homo sapien
ttgcccaaatgatttctcttcccgtcagcttcc

SEQ ID NO: 93179 - DNA, 33 bp, Homo sapien
cagatgtggaaatacaataggtcagaagcagca

SEQ ID NO: 93180 - DNA, 33 bp, Homo sapien
cagatgtggaaatacagtaggtcagaagcagca

SEQ ID NO: 93181 - DNA, 33 bp, Homo sapien
atgagatacatataacgcagttcaggatttgtt

SEQ ID NO: 93182 - DNA, 33 bp, Homo sapien
atgagatacatataactcagttcaggatttgtt

SEQ ID NO: 93183 - DNA, 33 bp, Homo sapien
gaacaactccatatccgcaaaagcatttttaat

SEQ ID NO: 93184 - DNA, 33 bp, Homo sapien
gaacaactccatatcctcaaaagcatttttaat

SEQ ID NO: 93185 - DNA, 33 bp, Homo sapien
ttgagaatgctacttgaaattaaatgtttatag

SEQ ID NO: 93186 - DNA, 33 bp, Homo sapien
ttgagaatgctacttggaattaaatgtttatag

SEQ ID NO: 93187 - DNA, 33 bp, Homo sapien
ttatcacattagaaaccatactagtgagaatca

SEQ ID NO: 93188 - DNA, 33 bp, Homo sapien
ttatcacattagaaacgatactagtgagaatca

SEQ ID NO: 93189 - DNA, 33 bp, Homo sapien
gcatagtataccgaaaaggcagaagtagtaaaa

SEQ ID NO: 93190 - DNA, 33 bp, Homo sapien
gcatagtataccgaaagggcagaagtagtaaaa

SEQ ID NO: 93191 - DNA, 33 bp, Homo sapien
aacttctctcataacacattaccctaaccccta

SEQ ID NO: 93192 - DNA, 33 bp, Homo sapien
aacttctctcataacatattaccctaaccccta

SEQ ID NO: 93193 - DNA, 33 bp, Homo sapien
agccaaactcaacagaaagcgcagaccagtgag

SEQ ID NO: 93194 - DNA, 33 bp, Homo sapien
agccaaactcaacagagagcgcagaccagtgag

SEQ ID NO: 93195 - DNA, 33 bp, Homo sapien
ggttaggggattataaaaaatgatgattaaccc

SEQ ID NO: 93196 - DNA, 33 bp, Homo sapien
ggttaggggattataacaaatgatgattaaccc

SEQ ID NO: 93197 - DNA, 33 bp, Homo sapien
ttccggctctctcgtaagcttgctaaataccag

SEQ ID NO: 93198 - DNA, 33 bp, Homo sapien
ttccggctctctcgtaggcttgctaaataccag

SEQ ID NO: 93199 - DNA, 33 bp, Homo sapien
gacttcttaatgtggacagttggatttgtccct

SEQ ID NO: 93200 - DNA, 33 bp, Homo sapien
gacttcttaatgtggatagttggatttgtccct

SEQ ID NO: 93201 - DNA, 33 bp, Homo sapien
gaagtcctgcaagtcactagggacagcacttaa

SEQ ID NO: 93202 - DNA, 33 bp, Homo sapien
gaagtcctgcaagtcattagggacagcacttaa

SEQ ID NO: 93203 - DNA, 33 bp, Homo sapien
gatttttggcttaaacacaaaaggaattcaaag

SEQ ID NO: 93204 - DNA, 33 bp, Homo sapien
gatttttggcttaaacgcaaaaggaattcaaag

SEQ ID NO: 93205 - DNA, 33 bp, Homo sapien
ccagcataatgcaatacggtgctacgaagagta

SEQ ID NO: 93206 - DNA, 33 bp, Homo sapien
ccagcataatgcaatatggtgctacgaagagta

SEQ ID NO: 93207 - DNA, 33 bp, Homo sapien
gtttctggcagaacagcccttaatttgttggta

SEQ ID NO: 93208 - DNA, 33 bp, Homo sapien
gtttctggcagaacaggccttaatttgttggta

SEQ ID NO: 93209 - DNA, 33 bp, Homo sapien
ccacaatagcactgcaatcatattgaagaacat

SEQ ID NO: 93210 - DNA, 33 bp, Homo sapien
ccacaatagcactgcagtcatattgaagaacat

SEQ ID NO: 93211 - DNA, 33 bp, Homo sapien
gtggggatgggagcaaacctaactcatatccac

SEQ ID NO: 93212 - DNA, 33 bp, Homo sapien
gtggggatgggagcaagcctaactcatatccac

SEQ ID NO: 93213 - DNA, 33 bp, Homo sapien
cgatgttgacagctacagactgattaccaattt

SEQ ID NO: 93214 - DNA, 33 bp, Homo sapien
cgatgttgacagctaccgactgattaccaattt

SEQ ID NO: 93215 - DNA, 33 bp, Homo sapien
tctgactttttccaacccccctgtatggtataa

SEQ ID NO: 93216 - DNA, 33 bp, Homo sapien
tctgactttttccaactcccctgtatggtataa

SEQ ID NO: 93217 - DNA, 33 bp, Homo sapien
caagacgtttcacaaaatctcagccgagaaggc

SEQ ID NO: 93218 - DNA, 33 bp, Homo sapien
caagacgtttcacaaagtctcagccgagaaggc

SEQ ID NO: 93219 - DNA, 33 bp, Homo sapien
ccactccccagcgaaacctagtaacttgtgttg

SEQ ID NO: 93220 - DNA, 33 bp, Homo sapien
ccactccccagcgaaatctagtaacttgtgttg

SEQ ID NO: 93221 - DNA, 33 bp, Homo sapien
ctggaatctgtgagaactggatcctcttgtaga

SEQ ID NO: 93222 - DNA, 33 bp, Homo sapien
ctggaatctgtgagaagtggatcctcttgtaga

SEQ ID NO: 93223 - DNA, 33 bp, Homo sapien
ctcacttggcctatccacagtgtttcacccaat

SEQ ID NO: 93224 - DNA, 33 bp, Homo sapien
ctcacttggcctatccgcagtgtttcacccaat

SEQ ID NO: 93225 - DNA, 33 bp, Homo sapien
cctagtgactactggaatagatgcagccagact

SEQ ID NO: 93226 - DNA, 33 bp, Homo sapien
cctagtgactactggattagatgcagccagact

SEQ ID NO: 93227 - DNA, 33 bp, Homo sapien
atggtagcagagtttgaagtaacctatgtgtcc

SEQ ID NO: 93228 - DNA, 33 bp, Homo sapien
atggtagcagagtttggagtaacctatgtgtcc

SEQ ID NO: 93229 - DNA, 33 bp, Homo sapien
aatgataaaggctaacacagacagttaactctg

SEQ ID NO: 93230 - DNA, 33 bp, Homo sapien
aatgataaaggctaacgcagacagttaactctg

SEQ ID NO: 93231 - DNA, 33 bp, Homo sapien
gtgcactgaggttgcaagagtgcattaaacctg

SEQ ID NO: 93232 - DNA, 33 bp, Homo sapien
gtgcactgaggttgcaggagtgcattaaacctg

SEQ ID NO: 93233 - DNA, 33 bp, Homo sapien
accaggatctctgaaacgagcaacaggttctct

SEQ ID NO: 93234 - DNA, 33 bp, Homo sapien
accaggatctctgaaatgagcaacaggttctct

SEQ ID NO: 93235 - DNA, 33 bp, Homo sapien
ggagatttgagatacactgaaaaagtttcaggg

SEQ ID NO: 93236 - DNA, 33 bp, Homo sapien
ggagatttgagatacattgaaaaagtttcaggg

SEQ ID NO: 93237 - DNA, 33 bp, Homo sapien
catgaactctgctatacgtttaaatagtatctt

SEQ ID NO: 93238 - DNA, 33 bp, Homo sapien
catgaactctgctatatgtttaaatagtatctt

SEQ ID NO: 93239 - DNA, 33 bp, Homo sapien
tcttcaaaacagcttaaacacgaatccaaacgg

SEQ ID NO: 93240 - DNA, 33 bp, Homo sapien
tcttcaaaacagcttagacacgaatccaaacgg

SEQ ID NO: 93241 - DNA, 33 bp, Homo sapien
gcttggctcatcaacacgattctacctcacttt

SEQ ID NO: 93242 - DNA, 33 bp, Homo sapien
gcttggctcatcaacatgattctacctcacttt

SEQ ID NO: 93243 - DNA, 33 bp, Homo sapien
tgtttcctggtgctcacagtggaagtgacctgt

SEQ ID NO: 93244 - DNA, 33 bp, Homo sapien
tgtttcctggtgctcatagtggaagtgacctgt

SEQ ID NO: 93245 - DNA, 33 bp, Homo sapien
cgagggagtgagtcacacaagtatctagggcca

SEQ ID NO: 93246 - DNA, 33 bp, Homo sapien
cgagggagtgagtcacgcaagtatctagggcca

SEQ ID NO: 93247 - DNA, 33 bp, Homo sapien
attgtgtcagggagaaagcctgcgtggaaaata

SEQ ID NO: 93248 - DNA, 33 bp, Homo sapien
attgtgtcagggagaaggcctgcgtggaaaata

SEQ ID NO: 93249 - DNA, 33 bp, Homo sapien
aggcacaaaagttttgaatgatttataaaggca

SEQ ID NO: 93250 - DNA, 33 bp, Homo sapien
aggcacaaaagttttggatgatttataaaggca

SEQ ID NO: 93251 - DNA, 33 bp, Homo sapien
ttatagtacctgcaagacattgagggaaacata

SEQ ID NO: 93252 - DNA, 33 bp, Homo sapien
ttatagtacctgcaaggcattgagggaaacata

SEQ ID NO: 93253 - DNA, 33 bp, Homo sapien
caacaacactcagaacgaaaacaaaatcttttc

SEQ ID NO: 93254 - DNA, 33 bp, Homo sapien
caacaacactcagaactaaaacaaaatcttttc

SEQ ID NO: 93255 - DNA, 33 bp, Homo sapien
acttctaaagtcttgcggcaaagaaagaaaaga

SEQ ID NO: 93256 - DNA, 33 bp, Homo sapien
acttctaaagtcttgctgcaaagaaagaaaaga

SEQ ID NO: 93257 - DNA, 33 bp, Homo sapien
gcttcacacaagcacaatgaggacagaactgtc

SEQ ID NO: 93258 - DNA, 33 bp, Homo sapien
gcttcacacaagcacagtgaggacagaactgtc

SEQ ID NO: 93259 - DNA, 33 bp, Homo sapien
ctcctccagtgcatgcaatgattcaagatccgc

SEQ ID NO: 93260 - DNA, 33 bp, Homo sapien
ctcctccagtgcatgcgatgattcaagatccgc

SEQ ID NO: 93261 - DNA, 33 bp, Homo sapien
tgtcttgttccagaacagatttagaataggtga

SEQ ID NO: 93262 - DNA, 33 bp, Homo sapien
tgtcttgttccagaacggatttagaataggtga

SEQ ID NO: 93263 - DNA, 33 bp, Homo sapien
atgctaaagcagatcacatacattagaaagcaa

SEQ ID NO: 93264 - DNA, 33 bp, Homo sapien
atgctaaagcagatcatatacattagaaagcaa

SEQ ID NO: 93265 - DNA, 33 bp, Homo sapien
tgtggaaccttccagcacatcaggtgttgaaga

SEQ ID NO: 93266 - DNA, 33 bp, Homo sapien
tgtggaaccttccagcgcatcaggtgttgaaga

SEQ ID NO: 93267 - DNA, 33 bp, Homo sapien
agcaggcccacacaatgagatctgcaaatccag

SEQ ID NO: 93268 - DNA, 33 bp, Homo sapien
agcaggcccacacaattagatctgcaaatccag

SEQ ID NO: 93269 - DNA, 33 bp, Homo sapien
catgcccaaggagagaagctctttacaaatggg

SEQ ID NO: 93270 - DNA, 33 bp, Homo sapien
catgcccaaggagagacgctctttacaaatggg

SEQ ID NO: 93271 - DNA, 33 bp, Homo sapien
cccaggctctctaacaactgcaccagtttgagc

SEQ ID NO: 93272 - DNA, 33 bp, Homo sapien
cccaggctctctaacatctgcaccagtttgagc

SEQ ID NO: 93273 - DNA, 33 bp, Homo sapien
agggaccaaatgtcagaaagtggccaagcctga

SEQ ID NO: 93274 - DNA, 33 bp, Homo sapien
agggaccaaatgtcaggaagtggccaagcctga

SEQ ID NO: 93275 - DNA, 33 bp, Homo sapien
tatgtcctttgtagcacgtaaactccagtagga

SEQ ID NO: 93276 - DNA, 33 bp, Homo sapien
tatgtcctttgtagcatgtaaactccagtagga

SEQ ID NO: 93277 - DNA, 33 bp, Homo sapien
ggctattatgttcccacgaaagcaaatttaact

SEQ ID NO: 93278 - DNA, 33 bp, Homo sapien
ggctattatgttcccatgaaagcaaatttaact

SEQ ID NO: 93279 - DNA, 33 bp, Homo sapien
aaatccatgtaaccaacataaaggaagttaaat

SEQ ID NO: 93280 - DNA, 33 bp, Homo sapien
aaatccatgtaaccaatataaaggaagttaaat

SEQ ID NO: 93281 - DNA, 33 bp, Homo sapien
attgatatgatgctaaagaattggccgggcacg

SEQ ID NO: 93282 - DNA, 33 bp, Homo sapien
attgatatgatgctaacgaattggccgggcacg

SEQ ID NO: 93283 - DNA, 33 bp, Homo sapien
catctcatcatatgccaaagctacatgttacaa

SEQ ID NO: 93284 - DNA, 33 bp, Homo sapien
catctcatcatatgccgaagctacatgttacaa

SEQ ID NO: 93285 - DNA, 33 bp, Homo sapien
gacagacctgtagaacgggctacataatttgtg

SEQ ID NO: 93286 - DNA, 33 bp, Homo sapien
gacagacctgtagaactggctacataatttgtg

SEQ ID NO: 93287 - DNA, 33 bp, Homo sapien
cctgatcccacctacactcatcactgaacttca

SEQ ID NO: 93288 - DNA, 33 bp, Homo sapien
cctgatcccacctacattcatcactgaacttca

SEQ ID NO: 93289 - DNA, 33 bp, Homo sapien
gtttgtgttaaatgtacggctggcccaccactg

SEQ ID NO: 93290 - DNA, 33 bp, Homo sapien
gtttgtgttaaatgtatggctggcccaccactg

SEQ ID NO: 93291 - DNA, 33 bp, Homo sapien
ttaatgtgatgagtcacgaacttcccagttttc

SEQ ID NO: 93292 - DNA, 33 bp, Homo sapien
ttaatgtgatgagtcatgaacttcccagttttc

SEQ ID NO: 93293 - DNA, 33 bp, Homo sapien
gaatgaggctacaagtcacatagccagggaagg

SEQ ID NO: 93294 - DNA, 33 bp, Homo sapien
gaatgaggctacaagttacatagccagggaagg

SEQ ID NO: 93295 - DNA, 33 bp, Homo sapien
tgaaaaaagtgaagtcaaagctgagcttcaagg

SEQ ID NO: 93296 - DNA, 33 bp, Homo sapien
tgaaaaaagtgaagtcgaagctgagcttcaagg

SEQ ID NO: 93297 - DNA, 33 bp, Homo sapien
atattatcacggaagcaagctccattacggata

SEQ ID NO: 93298 - DNA, 33 bp, Homo sapien
atattatcacggaagcgagctccattacggata

SEQ ID NO: 93299 - DNA, 33 bp, Homo sapien
ccgggaattgtcagtaagggtcctccatcgtcc

SEQ ID NO: 93300 - DNA, 33 bp, Homo sapien
ccgggaattgtcagtaggggtcctccatcgtcc

SEQ ID NO: 93301 - DNA, 33 bp, Homo sapien
tgacaaagcgcaagtcagacaactggcttccga

SEQ ID NO: 93302 - DNA, 33 bp, Homo sapien
tgacaaagcgcaagtcggacaactggcttccga

SEQ ID NO: 93303 - DNA, 33 bp, Homo sapien
ccacaccagggtggaacaagctcacacaagacc

SEQ ID NO: 93304 - DNA, 33 bp, Homo sapien
ccacaccagggtggaagaagctcacacaagacc

SEQ ID NO: 93305 - DNA, 33 bp, Homo sapien
cttaagagtagtttcaaacatgttaacatcagt

SEQ ID NO: 93306 - DNA, 33 bp, Homo sapien
cttaagagtagtttcagacatgttaacatcagt

SEQ ID NO: 93307 - DNA, 33 bp, Homo sapien
caagccagtcatttaaaaatgcagatgcaaaaa

SEQ ID NO: 93308 - DNA, 33 bp, Homo sapien
caagccagtcatttaagaatgcagatgcaaaaa

SEQ ID NO: 93309 - DNA, 33 bp, Homo sapien
aagatttttgtctgccaattcattttcattagt

SEQ ID NO: 93310 - DNA, 33 bp, Homo sapien
aagatttttgtctgccgattcattttcattagt

SEQ ID NO: 93311 - DNA, 33 bp, Homo sapien
agttaaaataaaaacactgtcacactggatttt

SEQ ID NO: 93312 - DNA, 33 bp, Homo sapien
agttaaaataaaaacattgtcacactggatttt

SEQ ID NO: 93313 - DNA, 33 bp, Homo sapien
tgcattgtgtaaaaccaagagattacagattaa

SEQ ID NO: 93314 - DNA, 33 bp, Homo sapien
tgcattgtgtaaaaccgagagattacagattaa

SEQ ID NO: 93315 - DNA, 33 bp, Homo sapien
gggaagtggatacaaccgacgtcgtaaaggaag

SEQ ID NO: 93316 - DNA, 33 bp, Homo sapien
gggaagtggatacaactgacgtcgtaaaggaag

SEQ ID NO: 93317 - DNA, 33 bp, Homo sapien
agaatggttaacaatacaaaggagacatggcag

SEQ ID NO: 93318 - DNA, 33 bp, Homo sapien
agaatggttaacaatataaaggagacatggcag

SEQ ID NO: 93319 - DNA, 33 bp, Homo sapien
gtacgatatgtaaatgcacctcttagaaggctc

SEQ ID NO: 93320 - DNA, 33 bp, Homo sapien
gtacgatatgtaaatggacctcttagaaggctc

SEQ ID NO: 93321 - DNA, 33 bp, Homo sapien
tctgggatcggacccacgaatgtttctgacaag

SEQ ID NO: 93322 - DNA, 33 bp, Homo sapien
tctgggatcggacccaggaatgtttctgacaag

SEQ ID NO: 93323 - DNA, 33 bp, Homo sapien
gaaaccatgcaagcaaaaccgaaaccatgagca

SEQ ID NO: 93324 - DNA, 33 bp, Homo sapien
gaaaccatgcaagcaacaccgaaaccatgagca

SEQ ID NO: 93325 - DNA, 33 bp, Homo sapien
ccatccgctggtgccacggagagttccattaca

SEQ ID NO: 93326 - DNA, 33 bp, Homo sapien
ccatccgctggtgccagggagagttccattaca

SEQ ID NO: 93327 - DNA, 33 bp, Homo sapien
ggacccagcatgtccaaaagaacaaatgagctc

SEQ ID NO: 93328 - DNA, 33 bp, Homo sapien
ggacccagcatgtccagaagaacaaatgagctc

SEQ ID NO: 93329 - DNA, 33 bp, Homo sapien
agagaggtaggggccactcgtgaaaggacaatg

SEQ ID NO: 93330 - DNA, 33 bp, Homo sapien
agagaggtaggggccattcgtgaaaggacaatg

SEQ ID NO: 93331 - DNA, 33 bp, Homo sapien
cagacccagctggacaacagaaggccaagctca

SEQ ID NO: 93332 - DNA, 33 bp, Homo sapien
cagacccagctggacaccagaaggccaagctca

SEQ ID NO: 93333 - DNA, 33 bp, Homo sapien
caagcagcctgacggacggtgcagaaagtgcac

SEQ ID NO: 93334 - DNA, 33 bp, Homo sapien
caagcagcctgacggagggtgcagaaagtgcac

SEQ ID NO: 93335 - DNA, 33 bp, Homo sapien
agtaccatctaagccacgtaagtattaacactt

SEQ ID NO: 93336 - DNA, 33 bp, Homo sapien
agtaccatctaagccatgtaagtattaacactt

SEQ ID NO: 93337 - DNA, 33 bp, Homo sapien
actagcctacacaatacggcgagactctgtctc

SEQ ID NO: 93338 - DNA, 33 bp, Homo sapien
actagcctacacaatatggcgagactctgtctc

SEQ ID NO: 93339 - DNA, 33 bp, Homo sapien
ggcaaagattggcacaatgaaattattctgttc

SEQ ID NO: 93340 - DNA, 33 bp, Homo sapien
ggcaaagattggcacagtgaaattattctgttc

SEQ ID NO: 93341 - DNA, 33 bp, Homo sapien
gcaagcaaaatgtgcagagggaggttccaagtg

SEQ ID NO: 93342 - DNA, 33 bp, Homo sapien
gcaagcaaaatgtgcatagggaggttccaagtg

SEQ ID NO: 93343 - DNA, 33 bp, Homo sapien
gagggagatcactgacaagcttcaagcggtgtt

SEQ ID NO: 93344 - DNA, 33 bp, Homo sapien
gagggagatcactgacgagcttcaagcggtgtt

SEQ ID NO: 93345 - DNA, 33 bp, Homo sapien
catgggaaatacagaaacagattcaaggaagta

SEQ ID NO: 93346 - DNA, 33 bp, Homo sapien
catgggaaatacagaagcagattcaaggaagta

SEQ ID NO: 93347 - DNA, 33 bp, Homo sapien
tgttggaggaacaacaaacctctgaaatctgag

SEQ ID NO: 93348 - DNA, 33 bp, Homo sapien
tgttggaggaacaacatacctctgaaatctgag

SEQ ID NO: 93349 - DNA, 33 bp, Homo sapien
cgcttcttcttgacaaaggcacttagaattact

SEQ ID NO: 93350 - DNA, 33 bp, Homo sapien
cgcttcttcttgacaatggcacttagaattact

SEQ ID NO: 93351 - DNA, 33 bp, Homo sapien
gggtggctggtttacacagagaaagaatctgca

SEQ ID NO: 93352 - DNA, 33 bp, Homo sapien
gggtggctggtttacatagagaaagaatctgca

SEQ ID NO: 93353 - DNA, 33 bp, Homo sapien
caggcatgcgtgaccacgctcagcctttatttt

SEQ ID NO: 93354 - DNA, 33 bp, Homo sapien
caggcatgcgtgaccatgctcagcctttatttt

SEQ ID NO: 93355 - DNA, 33 bp, Homo sapien
gattattttcctataccgcctgatgtccagtgt

SEQ ID NO: 93356 - DNA, 33 bp, Homo sapien
gattattttcctatactgcctgatgtccagtgt

SEQ ID NO: 93357 - DNA, 33 bp, Homo sapien
aatatacagacaaagcagagaaataactcatta

SEQ ID NO: 93358 - DNA, 33 bp, Homo sapien
aatatacagacaaagcggagaaataactcatta

SEQ ID NO: 93359 - DNA, 33 bp, Homo sapien
ttttacagatataaacagtaagtaatgagaaca

SEQ ID NO: 93360 - DNA, 33 bp, Homo sapien
ttttacagatataaacggtaagtaatgagaaca

SEQ ID NO: 93361 - DNA, 33 bp, Homo sapien
ttgcagaatgtgcaaacgacagtgctctagctc

SEQ ID NO: 93362 - DNA, 33 bp, Homo sapien
ttgcagaatgtgcaaatgacagtgctctagctc

SEQ ID NO: 93363 - DNA, 33 bp, Homo sapien
tccactttgtatgttacagtgaagttaaaatgt

SEQ ID NO: 93364 - DNA, 33 bp, Homo sapien
tccactttgtatgttatagtgaagttaaaatgt

SEQ ID NO: 93365 - DNA, 33 bp, Homo sapien
agaggaaataaaataaacagttctgtggtgaag

SEQ ID NO: 93366 - DNA, 33 bp, Homo sapien
agaggaaataaaataagcagttctgtggtgaag

SEQ ID NO: 93367 - DNA, 33 bp, Homo sapien
tttgctgagcaggaagcagaagcaataaccagc

SEQ ID NO: 93368 - DNA, 33 bp, Homo sapien
tttgctgagcaggaaggagaagcaataaccagc

SEQ ID NO: 93369 - DNA, 33 bp, Homo sapien
agtgctaaaacaaggaaagcaaagagttaaatg

SEQ ID NO: 93370 - DNA, 33 bp, Homo sapien
agtgctaaaacaaggagagcaaagagttaaatg

SEQ ID NO: 93371 - DNA, 33 bp, Homo sapien
acatgatacctctccactcttatgcaatctcat

SEQ ID NO: 93372 - DNA, 33 bp, Homo sapien
acatgatacctctccattcttatgcaatctcat

SEQ ID NO: 93373 - DNA, 33 bp, Homo sapien
gaataataggatgtcacgatggggaactttagt

SEQ ID NO: 93374 - DNA, 33 bp, Homo sapien
gaataataggatgtcatgatggggaactttagt

SEQ ID NO: 93375 - DNA, 33 bp, Homo sapien
tacttttaagtgagagaccacagtgtttgactt

SEQ ID NO: 93376 - DNA, 33 bp, Homo sapien
tacttttaagtgagagcccacagtgtttgactt

SEQ ID NO: 93377 - DNA, 33 bp, Homo sapien
attcttttcatggctcagaagtatttcattatt

SEQ ID NO: 93378 - DNA, 33 bp, Homo sapien
attcttttcatggctcggaagtatttcattatt

SEQ ID NO: 93379 - DNA, 33 bp, Homo sapien
tgaaaaacactaaccacgtgaatgaaacataaa

SEQ ID NO: 93380 - DNA, 33 bp, Homo sapien
tgaaaaacactaaccatgtgaatgaaacataaa

SEQ ID NO: 93381 - DNA, 33 bp, Homo sapien
catgctattaactagacggtagagacagcggtg

SEQ ID NO: 93382 - DNA, 33 bp, Homo sapien
catgctattaactagatggtagagacagcggtg

SEQ ID NO: 93383 - DNA, 33 bp, Homo sapien
aagttgagacggagcagtaacgcttgagtccgg

SEQ ID NO: 93384 - DNA, 33 bp, Homo sapien
aagttgagacggagcattaacgcttgagtccgg

SEQ ID NO: 93385 - DNA, 33 bp, Homo sapien
cataacactgggtggaagtttttatggtaacag

SEQ ID NO: 93386 - DNA, 33 bp, Homo sapien
cataacactgggtggatgtttttatggtaacag

SEQ ID NO: 93387 - DNA, 33 bp, Homo sapien
ctaaggaagagttagaactttggagaatcacaa

SEQ ID NO: 93388 - DNA, 33 bp, Homo sapien
ctaaggaagagttagagctttggagaatcacaa

SEQ ID NO: 93389 - DNA, 33 bp, Homo sapien
cacacccggcccgatacatcctttgcacgcaca

SEQ ID NO: 93390 - DNA, 33 bp, Homo sapien
cacacccggcccgatatatcctttgcacgcaca

SEQ ID NO: 93391 - DNA, 33 bp, Homo sapien
actaatactggcataccgaagttggtgaaaaat

SEQ ID NO: 93392 - DNA, 33 bp, Homo sapien
actaatactggcatactgaagttggtgaaaaat

SEQ ID NO: 93393 - DNA, 33 bp, Homo sapien
taataccaaaaagtcactgaacacacttctaaa

SEQ ID NO: 93394 - DNA, 33 bp, Homo sapien
taataccaaaaagtcattgaacacacttctaaa

SEQ ID NO: 93395 - DNA, 33 bp, Homo sapien
ttacagcctgctttcccgaagttaacagaacat

SEQ ID NO: 93396 - DNA, 33 bp, Homo sapien
ttacagcctgctttcctgaagttaacagaacat

SEQ ID NO: 93397 - DNA, 33 bp, Homo sapien
ttgtttacagttagaagttagcacatagtctgg

SEQ ID NO: 93398 - DNA, 33 bp, Homo sapien
ttgtttacagttagaatttagcacatagtctgg

SEQ ID NO: 93399 - DNA, 33 bp, Homo sapien
atgctttctcaccgaaccctggatgcagcctca

SEQ ID NO: 93400 - DNA, 33 bp, Homo sapien
atgctttctcaccgaatcctggatgcagcctca

SEQ ID NO: 93401 - DNA, 33 bp, Homo sapien
tgaatcactgtctctaccagaaaagcacattgc

SEQ ID NO: 93402 - DNA, 33 bp, Homo sapien
tgaatcactgtctctatcagaaaagcacattgc

SEQ ID NO: 93403 - DNA, 33 bp, Homo sapien
tcagggcactaaactaaattccgtgagatgaac

SEQ ID NO: 93404 - DNA, 33 bp, Homo sapien
tcagggcactaaactagattccgtgagatgaac

SEQ ID NO: 93405 - DNA, 33 bp, Homo sapien
tcgacccggaagtgaacagaaatactgctgtta

SEQ ID NO: 93406 - DNA, 33 bp, Homo sapien
tcgacccggaagtgaatagaaatactgctgtta

SEQ ID NO: 93407 - DNA, 33 bp, Homo sapien
aggaaaacgttccaatgaatgtaagagaacaat

SEQ ID NO: 93408 - DNA, 33 bp, Homo sapien
aggaaaacgttccaattaatgtaagagaacaat

SEQ ID NO: 93409 - DNA, 33 bp, Homo sapien
accaaaagccatccaacaatggcaatgtgcagg

SEQ ID NO: 93410 - DNA, 33 bp, Homo sapien
accaaaagccatccaataatggcaatgtgcagg

SEQ ID NO: 93411 - DNA, 33 bp, Homo sapien
agtgtggacatcagccactttttatattcatgt

SEQ ID NO: 93412 - DNA, 33 bp, Homo sapien
agtgtggacatcagccgctttttatattcatgt

SEQ ID NO: 93413 - DNA, 33 bp, Homo sapien
aaccatactgttctgaaaataaaatgctttcta

SEQ ID NO: 93414 - DNA, 33 bp, Homo sapien
aaccatactgttctgataataaaatgctttcta

SEQ ID NO: 93415 - DNA, 33 bp, Homo sapien
agactttttgcctaaccgtataacttttagcta

SEQ ID NO: 93416 - DNA, 33 bp, Homo sapien
agactttttgcctaactgtataacttttagcta

SEQ ID NO: 93417 - DNA, 33 bp, Homo sapien
tcctcagacctaaacaatgggccctgcttataa

SEQ ID NO: 93418 - DNA, 33 bp, Homo sapien
tcctcagacctaaacagtgggccctgcttataa

SEQ ID NO: 93419 - DNA, 33 bp, Homo sapien
gaacatttgttttccaccttgtgaaaggcatat

SEQ ID NO: 93420 - DNA, 33 bp, Homo sapien
gaacatttgttttccatcttgtgaaaggcatat

SEQ ID NO: 93421 - DNA, 33 bp, Homo sapien
aagtgagcaaatcataccctgggatctttgtct

SEQ ID NO: 93422 - DNA, 33 bp, Homo sapien
aagtgagcaaatcatatcctgggatctttgtct

SEQ ID NO: 93423 - DNA, 33 bp, Homo sapien
gggaaaactttggagacgcaaaagacactatcc

SEQ ID NO: 93424 - DNA, 33 bp, Homo sapien
gggaaaactttggagatgcaaaagacactatcc

SEQ ID NO: 93425 - DNA, 33 bp, Homo sapien
ctctacgttctttttcaactatggaaatgtatg

SEQ ID NO: 93426 - DNA, 33 bp, Homo sapien
ctctacgttctttttctactatggaaatgtatg

SEQ ID NO: 93427 - DNA, 33 bp, Homo sapien
gatttttccatccaaaaccaaattcagtggagc

SEQ ID NO: 93428 - DNA, 33 bp, Homo sapien
gatttttccatccaaagccaaattcagtggagc

SEQ ID NO: 93429 - DNA, 33 bp, Homo sapien
atcgtgtcagtccacactagacccgatttacct

SEQ ID NO: 93430 - DNA, 33 bp, Homo sapien
atcgtgtcagtccacattagacccgatttacct

SEQ ID NO: 93431 - DNA, 33 bp, Homo sapien
tttcgcaggttaattcaatagtagtaggaagct

SEQ ID NO: 93432 - DNA, 33 bp, Homo sapien
tttcgcaggttaattcgatagtagtaggaagct

SEQ ID NO: 93433 - DNA, 33 bp, Homo sapien
atgtggttgacacataagggttgtttaaacaaa

SEQ ID NO: 93434 - DNA, 33 bp, Homo sapien
atgtggttgacacataggggttgtttaaacaaa

SEQ ID NO: 93435 - DNA, 33 bp, Homo sapien
gtgactggctggtaaacaggaataccatgagcc

SEQ ID NO: 93436 - DNA, 33 bp, Homo sapien
gtgactggctggtaaataggaataccatgagcc

SEQ ID NO: 93437 - DNA, 33 bp, Homo sapien
agtttagtgggtatcacaatcaccaagttggga

SEQ ID NO: 93438 - DNA, 33 bp, Homo sapien
agtttagtgggtatcagaatcaccaagttggga

SEQ ID NO: 93439 - DNA, 33 bp, Homo sapien
tccttacagctaataaaaggcatctactgtatg

SEQ ID NO: 93440 - DNA, 33 bp, Homo sapien
tccttacagctaataagaggcatctactgtatg

SEQ ID NO: 93441 - DNA, 33 bp, Homo sapien
attttaaatgttggtaacttacagccaggcacg

SEQ ID NO: 93442 - DNA, 33 bp, Homo sapien
attttaaatgttggtagcttacagccaggcacg

SEQ ID NO: 93443 - DNA, 33 bp, Homo sapien
cagctcaaacaatcagccaggaaggggaaaaag

SEQ ID NO: 93444 - DNA, 33 bp, Homo sapien
cagctcaaacaatcaggcaggaaggggaaaaag

SEQ ID NO: 93445 - DNA, 33 bp, Homo sapien
cttgttgatttaatgccctaggtttttataaat

SEQ ID NO: 93446 - DNA, 33 bp, Homo sapien
cttgttgatttaatgcgctaggtttttataaat

SEQ ID NO: 93447 - DNA, 33 bp, Homo sapien
atacatgggtggttaacatcaagatatgtccta

SEQ ID NO: 93448 - DNA, 33 bp, Homo sapien
atacatgggtggttaatatcaagatatgtccta

SEQ ID NO: 93449 - DNA, 33 bp, Homo sapien
ctgttccaagagatcactgaaagcttgttgttg

SEQ ID NO: 93450 - DNA, 33 bp, Homo sapien
ctgttccaagagatcattgaaagcttgttgttg

SEQ ID NO: 93451 - DNA, 33 bp, Homo sapien
acaggtctgttgaccccagcatcgccacaaaca

SEQ ID NO: 93452 - DNA, 33 bp, Homo sapien
acaggtctgttgaccctagcatcgccacaaaca

SEQ ID NO: 93453 - DNA, 33 bp, Homo sapien
tagtgataataaacaacgatgttactggtttat

SEQ ID NO: 93454 - DNA, 33 bp, Homo sapien
tagtgataataaacaatgatgttactggtttat

SEQ ID NO: 93455 - DNA, 33 bp, Homo sapien
gtattcttttaacagacgtttgcaaagcgcttg

SEQ ID NO: 93456 - DNA, 33 bp, Homo sapien
gtattcttttaacagatgtttgcaaagcgcttg

SEQ ID NO: 93457 - DNA, 33 bp, Homo sapien
aattaggcatggacacagtaccaatttccagga

SEQ ID NO: 93458 - DNA, 33 bp, Homo sapien
aattaggcatggacacggtaccaatttccagga

SEQ ID NO: 93459 - DNA, 33 bp, Homo sapien
tcttaagggaagaacactgagcttcaagtcaaa

SEQ ID NO: 93460 - DNA, 33 bp, Homo sapien
tcttaagggaagaacattgagcttcaagtcaaa

SEQ ID NO: 93461 - DNA, 33 bp, Homo sapien
cataccagaaaaaatcccaggtaaactgtacat

SEQ ID NO: 93462 - DNA, 33 bp, Homo sapien
cataccagaaaaaatcgcaggtaaactgtacat

SEQ ID NO: 93463 - DNA, 33 bp, Homo sapien
aaattttgagtctttacagaatagctgttcatg

SEQ ID NO: 93464 - DNA, 33 bp, Homo sapien
aaattttgagtctttatagaatagctgttcatg

SEQ ID NO: 93465 - DNA, 33 bp, Homo sapien
actcaatctcagcatcaccctgtacaatacata

SEQ ID NO: 93466 - DNA, 33 bp, Homo sapien
actcaatctcagcatcgccctgtacaatacata

SEQ ID NO: 93467 - DNA, 33 bp, Homo sapien
attcagacacgacagaaaacatggcagatcaga

SEQ ID NO: 93468 - DNA, 33 bp, Homo sapien
attcagacacgacagataacatggcagatcaga

SEQ ID NO: 93469 - DNA, 33 bp, Homo sapien
gcccacagtctaatgcaaatggtttttcgcttt

SEQ ID NO: 93470 - DNA, 33 bp, Homo sapien
gcccacagtctaatgcgaatggtttttcgcttt

SEQ ID NO: 93471 - DNA, 33 bp, Homo sapien
gttcctcctgttacacacgactaaaatccggac

SEQ ID NO: 93472 - DNA, 33 bp, Homo sapien
gttcctcctgttacacgcgactaaaatccggac

SEQ ID NO: 93473 - DNA, 33 bp, Homo sapien
tgcgatgcctggatacaaatgactgctggattc

SEQ ID NO: 93474 - DNA, 33 bp, Homo sapien
tgcgatgcctggatacgaatgactgctggattc

SEQ ID NO: 93475 - DNA, 33 bp, Homo sapien
tcaagccagcttgaaacgatagttttgaatgtc

SEQ ID NO: 93476 - DNA, 33 bp, Homo sapien
tcaagccagcttgaaatgatagttttgaatgtc

SEQ ID NO: 93477 - DNA, 33 bp, Homo sapien
aagcctaaatactgcacggcccaaagacatctc

SEQ ID NO: 93478 - DNA, 33 bp, Homo sapien
aagcctaaatactgcatggcccaaagacatctc

SEQ ID NO: 93479 - DNA, 33 bp, Homo sapien
caaaaaacaaagtcagcaagcctcaataaaatc

SEQ ID NO: 93480 - DNA, 33 bp, Homo sapien
caaaaaacaaagtcagtaagcctcaataaaatc

SEQ ID NO: 93481 - DNA, 33 bp, Homo sapien
gtgatggtgacgtgtcattgtgggttcatcagc

SEQ ID NO: 93482 - DNA, 33 bp, Homo sapien
gtgatggtgacgtgtccttgtgggttcatcagc

SEQ ID NO: 93483 - DNA, 33 bp, Homo sapien
aagtcgtgggtccttccccttgagcttgggacc

SEQ ID NO: 93484 - DNA, 33 bp, Homo sapien
aagtcgtgggtccttcgccttgagcttgggacc

SEQ ID NO: 93485 - DNA, 33 bp, Homo sapien
ttaatgaagtttgcaacgactgctgacctctta

SEQ ID NO: 93486 - DNA, 33 bp, Homo sapien
ttaatgaagtttgcaatgactgctgacctctta

SEQ ID NO: 93487 - DNA, 33 bp, Homo sapien
caaatgagcaatataagtctctgcagttgtcag

SEQ ID NO: 93488 - DNA, 33 bp, Homo sapien
caaatgagcaatataattctctgcagttgtcag

SEQ ID NO: 93489 - DNA, 33 bp, Homo sapien
tagcatttgacattcacaaaaaaaacgccaaca

SEQ ID NO: 93490 - DNA, 33 bp, Homo sapien
tagcatttgacattcagaaaaaaaacgccaaca

SEQ ID NO: 93491 - DNA, 33 bp, Homo sapien
tttcatgtttttcaccaggaggaatggtccggg

SEQ ID NO: 93492 - DNA, 33 bp, Homo sapien
tttcatgtttttcaccgggaggaatggtccggg

SEQ ID NO: 93493 - DNA, 33 bp, Homo sapien
atgtgactatccggaaatggagtgtgatcacag

SEQ ID NO: 93494 - DNA, 33 bp, Homo sapien
atgtgactatccggaagtggagtgtgatcacag

SEQ ID NO: 93495 - DNA, 33 bp, Homo sapien
gctatactctcaacacaggagcagctacacaag

SEQ ID NO: 93496 - DNA, 33 bp, Homo sapien
gctatactctcaacacgggagcagctacacaag

SEQ ID NO: 93497 - DNA, 33 bp, Homo sapien
tgttgagagtatagcacgttgaaaacagccttg

SEQ ID NO: 93498 - DNA, 33 bp, Homo sapien
tgttgagagtatagcatgttgaaaacagccttg

SEQ ID NO: 93499 - DNA, 33 bp, Homo sapien
gatggagcaggttcccaatgtctacagaggaat

SEQ ID NO: 93500 - DNA, 33 bp, Homo sapien
gatggagcaggttcccgatgtctacagaggaat

SEQ ID NO: 93501 - DNA, 33 bp, Homo sapien
atatgcatttcttgaactggtaaatctttcaaa

SEQ ID NO: 93502 - DNA, 33 bp, Homo sapien
atatgcatttcttgaagtggtaaatctttcaaa

SEQ ID NO: 93503 - DNA, 33 bp, Homo sapien
ggtaagcgaaatatgacctagccatacaatgga

SEQ ID NO: 93504 - DNA, 33 bp, Homo sapien
ggtaagcgaaatatgatctagccatacaatgga

SEQ ID NO: 93505 - DNA, 33 bp, Homo sapien
agttaacctaatcaataactcatactccatcca

SEQ ID NO: 93506 - DNA, 33 bp, Homo sapien
agttaacctaatcaatgactcatactccatcca

SEQ ID NO: 93507 - DNA, 33 bp, Homo sapien
ttcgaatgagaagaagcagagcaaggttttgaa

SEQ ID NO: 93508 - DNA, 33 bp, Homo sapien
ttcgaatgagaagaagtagagcaaggttttgaa

SEQ ID NO: 93509 - DNA, 33 bp, Homo sapien
ctccatgtgtctctcaagataaggaattacctt

SEQ ID NO: 93510 - DNA, 33 bp, Homo sapien
ctccatgtgtctctcaggataaggaattacctt

SEQ ID NO: 93511 - DNA, 33 bp, Homo sapien
tgccccgggcattggcaatgactccataatccc

SEQ ID NO: 93512 - DNA, 33 bp, Homo sapien
tgccccgggcattggcgatgactccataatccc

SEQ ID NO: 93513 - DNA, 33 bp, Homo sapien
tccagagcaggaagaacgggatttaggtagaca

SEQ ID NO: 93514 - DNA, 33 bp, Homo sapien
tccagagcaggaagaatgggatttaggtagaca

SEQ ID NO: 93515 - DNA, 33 bp, Homo sapien
cagcatctagaattcaagaactaaggagagaat

SEQ ID NO: 93516 - DNA, 33 bp, Homo sapien
cagcatctagaattcaggaactaaggagagaat

SEQ ID NO: 93517 - DNA, 33 bp, Homo sapien
ccacagagatccccacaaactctgactcctcaa

SEQ ID NO: 93518 - DNA, 33 bp, Homo sapien
ccacagagatccccaccaactctgactcctcaa

SEQ ID NO: 93519 - DNA, 33 bp, Homo sapien
aataatggctggtaacaatttaattatgcccac

SEQ ID NO: 93520 - DNA, 33 bp, Homo sapien
aataatggctggtaacgatttaattatgcccac

SEQ ID NO: 93521 - DNA, 33 bp, Homo sapien
aaaagccctgtagccacgattctcagtctcctt

SEQ ID NO: 93522 - DNA, 33 bp, Homo sapien
aaaagccctgtagccatgattctcagtctcctt

SEQ ID NO: 93523 - DNA, 33 bp, Homo sapien
cctggcctgtttaatgaatttctgactggaggc

SEQ ID NO: 93524 - DNA, 33 bp, Homo sapien
cctggcctgtttaatgcatttctgactggaggc

SEQ ID NO: 93525 - DNA, 33 bp, Homo sapien
aacagccacagtaggcacttcccactgtcatcc

SEQ ID NO: 93526 - DNA, 33 bp, Homo sapien
aacagccacagtaggcgcttcccactgtcatcc

SEQ ID NO: 93527 - DNA, 33 bp, Homo sapien
ttatcaacaagagtacagaaagcaagtgtgcaa

SEQ ID NO: 93528 - DNA, 33 bp, Homo sapien
ttatcaacaagagtacggaaagcaagtgtgcaa

SEQ ID NO: 93529 - DNA, 33 bp, Homo sapien
ggacagactggtgaccacagagggttgtttcta

SEQ ID NO: 93530 - DNA, 33 bp, Homo sapien
ggacagactggtgaccgcagagggttgtttcta

SEQ ID NO: 93531 - DNA, 33 bp, Homo sapien
ccacttcttataggacacaccagcaagacctgt

SEQ ID NO: 93532 - DNA, 33 bp, Homo sapien
ccacttcttataggacgcaccagcaagacctgt

SEQ ID NO: 93533 - DNA, 33 bp, Homo sapien
gatgtccccaaccctgcatttcagtttagtgca

SEQ ID NO: 93534 - DNA, 33 bp, Homo sapien
gatgtccccaaccctgtatttcagtttagtgca

SEQ ID NO: 93535 - DNA, 33 bp, Homo sapien
agagggcacagaagaaagggcccagagctgacg

SEQ ID NO: 93536 - DNA, 33 bp, Homo sapien
agagggcacagaagaaggggcccagagctgacg

SEQ ID NO: 93537 - DNA, 33 bp, Homo sapien
gcctggtctgctctaaagtgaaaatccctctct

SEQ ID NO: 93538 - DNA, 33 bp, Homo sapien
gcctggtctgctctaaggtgaaaatccctctct

SEQ ID NO: 93539 - DNA, 33 bp, Homo sapien
atgcagagctttaggaaggtattcaatggtgct

SEQ ID NO: 93540 - DNA, 33 bp, Homo sapien
atgcagagctttaggagggtattcaatggtgct

SEQ ID NO: 93541 - DNA, 33 bp, Homo sapien
ataggaatatagagaccattaggcctgcactat

SEQ ID NO: 93542 - DNA, 33 bp, Homo sapien
ataggaatatagagactattaggcctgcactat

SEQ ID NO: 93543 - DNA, 33 bp, Homo sapien
ttgtcctgttcattgacggaaccccgctgggaa

SEQ ID NO: 93544 - DNA, 33 bp, Homo sapien
ttgtcctgttcattgatggaaccccgctgggaa

SEQ ID NO: 93545 - DNA, 33 bp, Homo sapien
aaagtggaggtcaaaccaccctgcttgagaatc

SEQ ID NO: 93546 - DNA, 33 bp, Homo sapien
aaagtggaggtcaaactaccctgcttgagaatc

SEQ ID NO: 93547 - DNA, 33 bp, Homo sapien
caaataagtatcaaaacgtgtcagctcatcaaa

SEQ ID NO: 93548 - DNA, 33 bp, Homo sapien
caaataagtatcaaaatgtgtcagctcatcaaa

SEQ ID NO: 93549 - DNA, 33 bp, Homo sapien
ctgctttaacttctccccaacgaatcagaattc

SEQ ID NO: 93550 - DNA, 33 bp, Homo sapien
ctgctttaacttctcctcaacgaatcagaattc

SEQ ID NO: 93551 - DNA, 33 bp, Homo sapien
gatcttggagaattgacggggattccaggaagg

SEQ ID NO: 93552 - DNA, 33 bp, Homo sapien
gatcttggagaattgatggggattccaggaagg

SEQ ID NO: 93553 - DNA, 33 bp, Homo sapien
aagacaattaatttgaacacaggcttcaaggac

SEQ ID NO: 93554 - DNA, 33 bp, Homo sapien
aagacaattaatttgagcacaggcttcaaggac

SEQ ID NO: 93555 - DNA, 33 bp, Homo sapien
tctgttgcctcatccacgcagttactgtttacc

SEQ ID NO: 93556 - DNA, 33 bp, Homo sapien
tctgttgcctcatccatgcagttactgtttacc

SEQ ID NO: 93557 - DNA, 33 bp, Homo sapien
gtgctgggatgctgtacgtaaacctggactttg

SEQ ID NO: 93558 - DNA, 33 bp, Homo sapien
gtgctgggatgctgtatgtaaacctggactttg

SEQ ID NO: 93559 - DNA, 33 bp, Homo sapien
ggagagttgctaagtacaaattgctacaacatt

SEQ ID NO: 93560 - DNA, 33 bp, Homo sapien
ggagagttgctaagtataaattgctacaacatt

SEQ ID NO: 93561 - DNA, 33 bp, Homo sapien
acagttcactaaaccaaccactcggtgaaatta

SEQ ID NO: 93562 - DNA, 33 bp, Homo sapien
acagttcactaaaccagccactcggtgaaatta

SEQ ID NO: 93563 - DNA, 33 bp, Homo sapien
cagatctgcaaagtaactaatgtatcctaatga

SEQ ID NO: 93564 - DNA, 33 bp, Homo sapien
cagatctgcaaagtaagtaatgtatcctaatga

SEQ ID NO: 93565 - DNA, 33 bp, Homo sapien
tctccttctgcctttacgtccatttccgctcca

SEQ ID NO: 93566 - DNA, 33 bp, Homo sapien
tctccttctgcctttatgtccatttccgctcca

SEQ ID NO: 93567 - DNA, 33 bp, Homo sapien
gtggaaatcaacaaacagtcaggaaataagcaa

SEQ ID NO: 93568 - DNA, 33 bp, Homo sapien
gtggaaatcaacaaacggtcaggaaataagcaa

SEQ ID NO: 93569 - DNA, 33 bp, Homo sapien
ccgctgatgccagagcaaggctgccggtcctca

SEQ ID NO: 93570 - DNA, 33 bp, Homo sapien
ccgctgatgccagagcgaggctgccggtcctca

SEQ ID NO: 93571 - DNA, 33 bp, Homo sapien
aagagagagggggatgaatagattggaaagtgg

SEQ ID NO: 93572 - DNA, 33 bp, Homo sapien
aagagagagggggatgcatagattggaaagtgg

SEQ ID NO: 93573 - DNA, 33 bp, Homo sapien
tggttgttctgacatcacactgattatgagtta

SEQ ID NO: 93574 - DNA, 33 bp, Homo sapien
tggttgttctgacatcgcactgattatgagtta

SEQ ID NO: 93575 - DNA, 33 bp, Homo sapien
tctccagcccttgtcccctgatttcacctccca

SEQ ID NO: 93576 - DNA, 33 bp, Homo sapien
tctccagcccttgtccgctgatttcacctccca

SEQ ID NO: 93577 - DNA, 33 bp, Homo sapien
ctcctagtcatcatacagagcagctccaccctg

SEQ ID NO: 93578 - DNA, 33 bp, Homo sapien
ctcctagtcatcatacggagcagctccaccctg

SEQ ID NO: 93579 - DNA, 33 bp, Homo sapien
gcagatccctcatgaccgaaacaattcctagca

SEQ ID NO: 93580 - DNA, 33 bp, Homo sapien
gcagatccctcatgactgaaacaattcctagca

SEQ ID NO: 93581 - DNA, 33 bp, Homo sapien
gtgagggtgactatcacacaggcatttaaatac

SEQ ID NO: 93582 - DNA, 33 bp, Homo sapien
gtgagggtgactatcagacaggcatttaaatac

SEQ ID NO: 93583 - DNA, 33 bp, Homo sapien
gcctccagaattacatcagccaatacctcataa

SEQ ID NO: 93584 - DNA, 33 bp, Homo sapien
gcctccagaattacatgagccaatacctcataa

SEQ ID NO: 93585 - DNA, 33 bp, Homo sapien
cagacagactgctcttcaaatcatttaactgga

SEQ ID NO: 93586 - DNA, 33 bp, Homo sapien
cagacagactgctcttgaaatcatttaactgga

SEQ ID NO: 93587 - DNA, 33 bp, Homo sapien
ggactaagatggcagacatagaaaaagaaatag

SEQ ID NO: 93588 - DNA, 33 bp, Homo sapien
ggactaagatggcagatatagaaaaagaaatag

SEQ ID NO: 93589 - DNA, 33 bp, Homo sapien
aaagagttctgaattcaaaggtcagaaaccatc

SEQ ID NO: 93590 - DNA, 33 bp, Homo sapien
aaagagttctgaattcgaaggtcagaaaccatc

SEQ ID NO: 93591 - DNA, 33 bp, Homo sapien
cggcatacaagtccaactgaaatgtatcttttc

SEQ ID NO: 93592 - DNA, 33 bp, Homo sapien
cggcatacaagtccaattgaaatgtatcttttc

SEQ ID NO: 93593 - DNA, 33 bp, Homo sapien
agatgacaaatctaaactatttacaagtctgag

SEQ ID NO: 93594 - DNA, 33 bp, Homo sapien
agatgacaaatctaaattatttacaagtctgag

SEQ ID NO: 93595 - DNA, 33 bp, Homo sapien
tgtcataattaaagaagctgagttttaagaagg

SEQ ID NO: 93596 - DNA, 33 bp, Homo sapien
tgtcataattaaagaatctgagttttaagaagg

SEQ ID NO: 93597 - DNA, 33 bp, Homo sapien
tctcctccttcactcacgctccggctcctgctc

SEQ ID NO: 93598 - DNA, 33 bp, Homo sapien
tctcctccttcactcatgctccggctcctgctc

SEQ ID NO: 93599 - DNA, 33 bp, Homo sapien
accaacaaaaataagcaagtcacatatagattt

SEQ ID NO: 93600 - DNA, 33 bp, Homo sapien
accaacaaaaataagcgagtcacatatagattt

SEQ ID NO: 93601 - DNA, 33 bp, Homo sapien
agatagatgcatacacaaaaagttagctttatc

SEQ ID NO: 93602 - DNA, 33 bp, Homo sapien
agatagatgcatacacgaaaagttagctttatc

SEQ ID NO: 93603 - DNA, 33 bp, Homo sapien
agggagacttggagctaaaaacgcattgacttc

SEQ ID NO: 93604 - DNA, 33 bp, Homo sapien
agggagacttggagctcaaaacgcattgacttc

SEQ ID NO: 93605 - DNA, 33 bp, Homo sapien
aggcagtttctgaagacgagacattttcactgg

SEQ ID NO: 93606 - DNA, 33 bp, Homo sapien
aggcagtttctgaagatgagacattttcactgg

SEQ ID NO: 93607 - DNA, 33 bp, Homo sapien
tctagcactttctgtcccattttaggtcactga

SEQ ID NO: 93608 - DNA, 33 bp, Homo sapien
tctagcactttctgtctcattttaggtcactga

SEQ ID NO: 93609 - DNA, 33 bp, Homo sapien
tttatttcttgctgcgaagttaatgatatgcat

SEQ ID NO: 93610 - DNA, 33 bp, Homo sapien
tttatttcttgctgcggagttaatgatatgcat

SEQ ID NO: 93611 - DNA, 33 bp, Homo sapien
cagagaaggccaaatacgctcccgtaaccgatc

SEQ ID NO: 93612 - DNA, 33 bp, Homo sapien
cagagaaggccaaatatgctcccgtaaccgatc

SEQ ID NO: 93613 - DNA, 33 bp, Homo sapien
cgggtcaaccttttaacgcgtatcttgcaaata

SEQ ID NO: 93614 - DNA, 33 bp, Homo sapien
cgggtcaaccttttaatgcgtatcttgcaaata

SEQ ID NO: 93615 - DNA, 33 bp, Homo sapien
tggcctttgtgtcctccatgaagagatgctggt

SEQ ID NO: 93616 - DNA, 33 bp, Homo sapien
tggcctttgtgtcctctatgaagagatgctggt

SEQ ID NO: 93617 - DNA, 33 bp, Homo sapien
ttctaaggaatggtaaaatgtaataagtcacag

SEQ ID NO: 93618 - DNA, 33 bp, Homo sapien
ttctaaggaatggtaagatgtaataagtcacag

SEQ ID NO: 93619 - DNA, 33 bp, Homo sapien
ctctgaatagcatcaaataagtacttctggaaa

SEQ ID NO: 93620 - DNA, 33 bp, Homo sapien
ctctgaatagcatcaagtaagtacttctggaaa

SEQ ID NO: 93621 - DNA, 33 bp, Homo sapien
tcctttgagttaacaacgcaggtgccgtcatcc

SEQ ID NO: 93622 - DNA, 33 bp, Homo sapien
tcctttgagttaacaatgcaggtgccgtcatcc

SEQ ID NO: 93623 - DNA, 33 bp, Homo sapien
ctgtgatgtttctgcccctacaaaaggaaatgt

SEQ ID NO: 93624 - DNA, 33 bp, Homo sapien
ctgtgatgtttctgcctctacaaaaggaaatgt

SEQ ID NO: 93625 - DNA, 33 bp, Homo sapien
agcaagaaaggcaaaaattattacacagtcatc

SEQ ID NO: 93626 - DNA, 33 bp, Homo sapien
agcaagaaaggcaaaagttattacacagtcatc

SEQ ID NO: 93627 - DNA, 33 bp, Homo sapien
aaaccctttacatgaactagcgcattaaatcct

SEQ ID NO: 93628 - DNA, 33 bp, Homo sapien
aaaccctttacatgaattagcgcattaaatcct

SEQ ID NO: 93629 - DNA, 33 bp, Homo sapien
gtctctgtcttgagtccatacattataactgtt

SEQ ID NO: 93630 - DNA, 33 bp, Homo sapien
gtctctgtcttgagtctatacattataactgtt

SEQ ID NO: 93631 - DNA, 33 bp, Homo sapien
ttttcagttatacttaagaagaatagagaaaca

SEQ ID NO: 93632 - DNA, 33 bp, Homo sapien
ttttcagttatacttaggaagaatagagaaaca

SEQ ID NO: 93633 - DNA, 33 bp, Homo sapien
ctgattacctttgtaaacattgtaatgacctct

SEQ ID NO: 93634 - DNA, 33 bp, Homo sapien
ctgattacctttgtaagcattgtaatgacctct

SEQ ID NO: 93635 - DNA, 33 bp, Homo sapien
ataagagacataaaggaatgttttgaggctatg

SEQ ID NO: 93636 - DNA, 33 bp, Homo sapien
ataagagacataaagggatgttttgaggctatg

SEQ ID NO: 93637 - DNA, 33 bp, Homo sapien
tcgtctgcattttctccagcacacaatcacgtg

SEQ ID NO: 93638 - DNA, 33 bp, Homo sapien
tcgtctgcattttctctagcacacaatcacgtg

SEQ ID NO: 93639 - DNA, 33 bp, Homo sapien
tttaggacaaaggagcccattaccatctttgga

SEQ ID NO: 93640 - DNA, 33 bp, Homo sapien
tttaggacaaaggagctcattaccatctttgga

SEQ ID NO: 93641 - DNA, 33 bp, Homo sapien
agtgagagaatgaagcgctaatgcttaagacat

SEQ ID NO: 93642 - DNA, 33 bp, Homo sapien
agtgagagaatgaagctctaatgcttaagacat

SEQ ID NO: 93643 - DNA, 33 bp, Homo sapien
gatggatatttaccaaatacacagatggcccaa

SEQ ID NO: 93644 - DNA, 33 bp, Homo sapien
gatggatatttaccaagtacacagatggcccaa

SEQ ID NO: 93645 - DNA, 33 bp, Homo sapien
catgcaatacttgggacgtacttaaactacaaa

SEQ ID NO: 93646 - DNA, 33 bp, Homo sapien
catgcaatacttgggatgtacttaaactacaaa

SEQ ID NO: 93647 - DNA, 33 bp, Homo sapien
agatatcggtactgccaatctgcagactgcact

SEQ ID NO: 93648 - DNA, 33 bp, Homo sapien
agatatcggtactgccgatctgcagactgcact

SEQ ID NO: 93649 - DNA, 33 bp, Homo sapien
attctccataccctcaacaatccaaagtctcaa

SEQ ID NO: 93650 - DNA, 33 bp, Homo sapien
attctccataccctcagcaatccaaagtctcaa

SEQ ID NO: 93651 - DNA, 33 bp, Homo sapien
aagagcacctacacacgaataaatttcagaata

SEQ ID NO: 93652 - DNA, 33 bp, Homo sapien
aagagcacctacacactaataaatttcagaata

SEQ ID NO: 93653 - DNA, 33 bp, Homo sapien
tgatatttccaaaaccagatctcatctctttga

SEQ ID NO: 93654 - DNA, 33 bp, Homo sapien
tgatatttccaaaaccggatctcatctctttga

SEQ ID NO: 93655 - DNA, 33 bp, Homo sapien
gacatgaaggtcactgaaagatagatacttaaa

SEQ ID NO: 93656 - DNA, 33 bp, Homo sapien
gacatgaaggtcactggaagatagatacttaaa

SEQ ID NO: 93657 - DNA, 33 bp, Homo sapien
tgtggcatatttaacacgggcttagctagaata

SEQ ID NO: 93658 - DNA, 33 bp, Homo sapien
tgtggcatatttaacaggggcttagctagaata

SEQ ID NO: 93659 - DNA, 33 bp, Homo sapien
cagagttgtttccaaaaaagttcatctgattgt

SEQ ID NO: 93660 - DNA, 33 bp, Homo sapien
cagagttgtttccaaagaagttcatctgattgt

SEQ ID NO: 93661 - DNA, 33 bp, Homo sapien
agctgtcacaaaataaactctcatatttattca

SEQ ID NO: 93662 - DNA, 33 bp, Homo sapien
agctgtcacaaaataagctctcatatttattca

SEQ ID NO: 93663 - DNA, 33 bp, Homo sapien
actgatgagaaaagtaaagcagcgaaggggagg

SEQ ID NO: 93664 - DNA, 33 bp, Homo sapien
actgatgagaaaagtagagcagcgaaggggagg

SEQ ID NO: 93665 - DNA, 33 bp, Homo sapien
aaggagatctgaaataggtaccatgcctccggg

SEQ ID NO: 93666 - DNA, 33 bp, Homo sapien
aaggagatctgaaatatgtaccatgcctccggg

SEQ ID NO: 93667 - DNA, 33 bp, Homo sapien
acagagccactcaaacccttttccatctgaacc

SEQ ID NO: 93668 - DNA, 33 bp, Homo sapien
acagagccactcaaacgcttttccatctgaacc

SEQ ID NO: 93669 - DNA, 33 bp, Homo sapien
accagtttcttccaacaagttacttctaggcat

SEQ ID NO: 93670 - DNA, 33 bp, Homo sapien
accagtttcttccaaccagttacttctaggcat

SEQ ID NO: 93671 - DNA, 33 bp, Homo sapien
atgctatcagtaaaaacgcttcttgaaggaagc

SEQ ID NO: 93672 - DNA, 33 bp, Homo sapien
atgctatcagtaaaaatgcttcttgaaggaagc

SEQ ID NO: 93673 - DNA, 33 bp, Homo sapien
ctctgtggcatgaaaaatacggggtgagggtgg

SEQ ID NO: 93674 - DNA, 33 bp, Homo sapien
ctctgtggcatgaaaactacggggtgagggtgg

SEQ ID NO: 93675 - DNA, 33 bp, Homo sapien
tggtgcccaaccacgacgacatgaaggcacaaa

SEQ ID NO: 93676 - DNA, 33 bp, Homo sapien
tggtgcccaaccacgatgacatgaaggcacaaa

SEQ ID NO: 93677 - DNA, 33 bp, Homo sapien
gtgtagagagattaaacattcgaggaggaggga

SEQ ID NO: 93678 - DNA, 33 bp, Homo sapien
gtgtagagagattaaatattcgaggaggaggga

SEQ ID NO: 93679 - DNA, 33 bp, Homo sapien
tctgtcttttgtccccaacctcaccagcattag

SEQ ID NO: 93680 - DNA, 33 bp, Homo sapien
tctgtcttttgtccccgacctcaccagcattag

SEQ ID NO: 93681 - DNA, 33 bp, Homo sapien
tgttactagaactcgccgaatagaattatccag

SEQ ID NO: 93682 - DNA, 33 bp, Homo sapien
tgttactagaactcgctgaatagaattatccag

SEQ ID NO: 93683 - DNA, 33 bp, Homo sapien
acctaagcatatgaaccagatttcttattcatt

SEQ ID NO: 93684 - DNA, 33 bp, Homo sapien
acctaagcatatgaactagatttcttattcatt

SEQ ID NO: 93685 - DNA, 33 bp, Homo sapien
cagtgagagaaacccacgaggaactggcagaac

SEQ ID NO: 93686 - DNA, 33 bp, Homo sapien
cagtgagagaaacccatgaggaactggcagaac

SEQ ID NO: 93687 - DNA, 33 bp, Homo sapien
gctatttgtccctgacacagatgctgagttctg

SEQ ID NO: 93688 - DNA, 33 bp, Homo sapien
gctatttgtccctgacgcagatgctgagttctg

SEQ ID NO: 93689 - DNA, 33 bp, Homo sapien
agctagaatgaagcaaccttggggcaactcatg

SEQ ID NO: 93690 - DNA, 33 bp, Homo sapien
agctagaatgaagcaatcttggggcaactcatg

SEQ ID NO: 93691 - DNA, 33 bp, Homo sapien
aggtccagaaggcagacatttacattattatta

SEQ ID NO: 93692 - DNA, 33 bp, Homo sapien
aggtccagaaggcagatatttacattattatta

SEQ ID NO: 93693 - DNA, 33 bp, Homo sapien
atactcttgaaatctgcaggctgtgatgaagaa

SEQ ID NO: 93694 - DNA, 33 bp, Homo sapien
atactcttgaaatctgtaggctgtgatgaagaa

SEQ ID NO: 93695 - DNA, 33 bp, Homo sapien
taagacagtataatgccattgtattgtgtgcaa

SEQ ID NO: 93696 - DNA, 33 bp, Homo sapien
taagacagtataatgctattgtattgtgtgcaa

SEQ ID NO: 93697 - DNA, 33 bp, Homo sapien
acagaatgggaagcagaacaggtaggttttgag

SEQ ID NO: 93698 - DNA, 33 bp, Homo sapien
acagaatgggaagcaggacaggtaggttttgag

SEQ ID NO: 93699 - DNA, 33 bp, Homo sapien
tgctcttggaaaaccactgggcgaggatatttg

SEQ ID NO: 93700 - DNA, 33 bp, Homo sapien
tgctcttggaaaaccattgggcgaggatatttg

SEQ ID NO: 93701 - DNA, 33 bp, Homo sapien
gctctgggcttggttacataggttgttttaact

SEQ ID NO: 93702 - DNA, 33 bp, Homo sapien
gctctgggcttggttatataggttgttttaact

SEQ ID NO: 93703 - DNA, 33 bp, Homo sapien
tgccccagcctacctgaaaatgtacctccttct

SEQ ID NO: 93704 - DNA, 33 bp, Homo sapien
tgccccagcctacctgcaaatgtacctccttct

SEQ ID NO: 93705 - DNA, 33 bp, Homo sapien
tcgcatagctttctacaaagagaaggaggtaca

SEQ ID NO: 93706 - DNA, 33 bp, Homo sapien
tcgcatagctttctacgaagagaaggaggtaca

SEQ ID NO: 93707 - DNA, 33 bp, Homo sapien
tgtcttgttgccctgaaaagctattagagacag

SEQ ID NO: 93708 - DNA, 33 bp, Homo sapien
tgtcttgttgccctgagaagctattagagacag

SEQ ID NO: 93709 - DNA, 33 bp, Homo sapien
ttgtgccgccttttcacacctagccaatgtaca

SEQ ID NO: 93710 - DNA, 33 bp, Homo sapien
ttgtgccgccttttcatacctagccaatgtaca

SEQ ID NO: 93711 - DNA, 33 bp, Homo sapien
tgctttgaagagcttgcatctagaggacatccc

SEQ ID NO: 93712 - DNA, 33 bp, Homo sapien
tgctttgaagagcttgtatctagaggacatccc

SEQ ID NO: 93713 - DNA, 33 bp, Homo sapien
aatagttaattctgccaacatgaagctatgact

SEQ ID NO: 93714 - DNA, 33 bp, Homo sapien
aatagttaattctgccgacatgaagctatgact

SEQ ID NO: 93715 - DNA, 33 bp, Homo sapien
ctctaacaatgaaaccaaaattggtgctttttc

SEQ ID NO: 93716 - DNA, 33 bp, Homo sapien
ctctaacaatgaaaccgaaattggtgctttttc

SEQ ID NO: 93717 - DNA, 33 bp, Homo sapien
tatcccatcggcttatcaagtttacaccagtaa

SEQ ID NO: 93718 - DNA, 33 bp, Homo sapien
tatcccatcggcttattaagtttacaccagtaa

SEQ ID NO: 93719 - DNA, 33 bp, Homo sapien
ccaagcacagttaagacggtcaccagaagacaa

SEQ ID NO: 93720 - DNA, 33 bp, Homo sapien
ccaagcacagttaagatggtcaccagaagacaa

SEQ ID NO: 93721 - DNA, 33 bp, Homo sapien
aaatatcaggatgacaatattggcgatggaaat

SEQ ID NO: 93722 - DNA, 33 bp, Homo sapien
aaatatcaggatgacactattggcgatggaaat

SEQ ID NO: 93723 - DNA, 33 bp, Homo sapien
ttccatcagtaatctcacatctcacacacacac

SEQ ID NO: 93724 - DNA, 33 bp, Homo sapien
ttccatcagtaatctcgcatctcacacacacac

SEQ ID NO: 93725 - DNA, 33 bp, Homo sapien
tgtcctgggtaagcagacactggacaggagccc

SEQ ID NO: 93726 - DNA, 33 bp, Homo sapien
tgtcctgggtaagcaggcactggacaggagccc

SEQ ID NO: 93727 - DNA, 33 bp, Homo sapien
gacataaaggaacaaacaaccagaaggccagaa

SEQ ID NO: 93728 - DNA, 33 bp, Homo sapien
gacataaaggaacaaataaccagaaggccagaa

SEQ ID NO: 93729 - DNA, 33 bp, Homo sapien
agccctcaccaggaaacgaattggttgatacct

SEQ ID NO: 93730 - DNA, 33 bp, Homo sapien
agccctcaccaggaaatgaattggttgatacct

SEQ ID NO: 93731 - DNA, 33 bp, Homo sapien
tctgagatctcttcaccactctgcccataatca

SEQ ID NO: 93732 - DNA, 33 bp, Homo sapien
tctgagatctcttcactactctgcccataatca

SEQ ID NO: 93733 - DNA, 33 bp, Homo sapien
accacttgtcaaatcagactcagaagtacgtgc

SEQ ID NO: 93734 - DNA, 33 bp, Homo sapien
accacttgtcaaatcatactcagaagtacgtgc

SEQ ID NO: 93735 - DNA, 33 bp, Homo sapien
atttgccagggttcaaatgtagtattaagcaaa

SEQ ID NO: 93736 - DNA, 33 bp, Homo sapien
atttgccagggttcaagtgtagtattaagcaaa

SEQ ID NO: 93737 - DNA, 33 bp, Homo sapien
aaacttcacaagcagaacagttgagggaaatcg

SEQ ID NO: 93738 - DNA, 33 bp, Homo sapien
aaacttcacaagcagagcagttgagggaaatcg

SEQ ID NO: 93739 - DNA, 33 bp, Homo sapien
ttcttctgtgtgcacaatgtcctgctaggggaa

SEQ ID NO: 93740 - DNA, 33 bp, Homo sapien
ttcttctgtgtgcacagtgtcctgctaggggaa

SEQ ID NO: 93741 - DNA, 33 bp, Homo sapien
cagaagcccacgactcaacgcaacaccatgtaa

SEQ ID NO: 93742 - DNA, 33 bp, Homo sapien
cagaagcccacgactcgacgcaacaccatgtaa

SEQ ID NO: 93743 - DNA, 33 bp, Homo sapien
agcaaagaggacacgccgaaagtgcagtgaaag

SEQ ID NO: 93744 - DNA, 33 bp, Homo sapien
agcaaagaggacacgctgaaagtgcagtgaaag

SEQ ID NO: 93745 - DNA, 33 bp, Homo sapien
tggaaacgcacacaatcaaatatacggttactg

SEQ ID NO: 93746 - DNA, 33 bp, Homo sapien
tggaaacgcacacaatgaaatatacggttactg

SEQ ID NO: 93747 - DNA, 33 bp, Homo sapien
gtcctataccagtacacagcatgtgctcagcaa

SEQ ID NO: 93748 - DNA, 33 bp, Homo sapien
gtcctataccagtacatagcatgtgctcagcaa

SEQ ID NO: 93749 - DNA, 33 bp, Homo sapien
gaatgtgttccatgcaaccagaactgccaacat

SEQ ID NO: 93750 - DNA, 33 bp, Homo sapien
gaatgtgttccatgcacccagaactgccaacat

SEQ ID NO: 93751 - DNA, 33 bp, Homo sapien
gactacagatgatgcccactgtgtgaagaatgc

SEQ ID NO: 93752 - DNA, 33 bp, Homo sapien
gactacagatgatgcctactgtgtgaagaatgc

SEQ ID NO: 93753 - DNA, 33 bp, Homo sapien
ctgcagtggagctggaaggaggaacggacagtt

SEQ ID NO: 93754 - DNA, 33 bp, Homo sapien
ctgcagtggagctggacggaggaacggacagtt

SEQ ID NO: 93755 - DNA, 33 bp, Homo sapien
gtttgagtcaggaagacgagtggccaacttgct

SEQ ID NO: 93756 - DNA, 33 bp, Homo sapien
gtttgagtcaggaagatgagtggccaacttgct

SEQ ID NO: 93757 - DNA, 33 bp, Homo sapien
aggaggcaccaagtgactatgtgtatgtcggct

SEQ ID NO: 93758 - DNA, 33 bp, Homo sapien
aggaggcaccaagtgagtatgtgtatgtcggct

SEQ ID NO: 93759 - DNA, 33 bp, Homo sapien
catggatccatttcaaagttgatttttagcaga

SEQ ID NO: 93760 - DNA, 33 bp, Homo sapien
catggatccatttcaaggttgatttttagcaga

SEQ ID NO: 93761 - DNA, 33 bp, Homo sapien
gaggtaaggaagagaaaggtctaggattattcc

SEQ ID NO: 93762 - DNA, 33 bp, Homo sapien
gaggtaaggaagagaagggtctaggattattcc

SEQ ID NO: 93763 - DNA, 33 bp, Homo sapien
ctacagtacattttaaacctcccaataagtcaa

SEQ ID NO: 93764 - DNA, 33 bp, Homo sapien
ctacagtacattttaaccctcccaataagtcaa

SEQ ID NO: 93765 - DNA, 33 bp, Homo sapien
cactgctgcaggaagaccgtgtaacacagagcc

SEQ ID NO: 93766 - DNA, 33 bp, Homo sapien
cactgctgcaggaagatcgtgtaacacagagcc

SEQ ID NO: 93767 - DNA, 33 bp, Homo sapien
aatccgcaagagtgacggtacaatgagaggtaa

SEQ ID NO: 93768 - DNA, 33 bp, Homo sapien
aatccgcaagagtgactgtacaatgagaggtaa

SEQ ID NO: 93769 - DNA, 33 bp, Homo sapien
ctgttagctctcgtgagaaatgagggttgtgtg

SEQ ID NO: 93770 - DNA, 33 bp, Homo sapien
ctgttagctctcgtgataaatgagggttgtgtg

SEQ ID NO: 93771 - DNA, 33 bp, Homo sapien
ttcttagtaagcaaccacctagttctccaatac

SEQ ID NO: 93772 - DNA, 33 bp, Homo sapien
ttcttagtaagcaaccgcctagttctccaatac

SEQ ID NO: 93773 - DNA, 33 bp, Homo sapien
tgagtgggatgagtacagggtaggtaaaccgag

SEQ ID NO: 93774 - DNA, 33 bp, Homo sapien
tgagtgggatgagtacggggtaggtaaaccgag

SEQ ID NO: 93775 - DNA, 33 bp, Homo sapien
ctgtccctcccacctacgattcatccagggcat

SEQ ID NO: 93776 - DNA, 33 bp, Homo sapien
ctgtccctcccacctatgattcatccagggcat

SEQ ID NO: 93777 - DNA, 33 bp, Homo sapien
tggtcccggggcatcacggtctgcagctctggg

SEQ ID NO: 93778 - DNA, 33 bp, Homo sapien
tggtcccggggcatcatggtctgcagctctggg

SEQ ID NO: 93779 - DNA, 33 bp, Homo sapien
acatgaaatgctgtccaaatggtggcagaaatg

SEQ ID NO: 93780 - DNA, 33 bp, Homo sapien
acatgaaatgctgtccgaatggtggcagaaatg

SEQ ID NO: 93781 - DNA, 33 bp, Homo sapien
ttattggaggaaaacaagaagtcatcaatctca

SEQ ID NO: 93782 - DNA, 33 bp, Homo sapien
ttattggaggaaaacaggaagtcatcaatctca

SEQ ID NO: 93783 - DNA, 33 bp, Homo sapien
aaagatagagacactgaaactccacatccttct

SEQ ID NO: 93784 - DNA, 33 bp, Homo sapien
aaagatagagacactggaactccacatccttct

SEQ ID NO: 93785 - DNA, 33 bp, Homo sapien
ggtgacctgaaatattaaagggggactccatga

SEQ ID NO: 93786 - DNA, 33 bp, Homo sapien
ggtgacctgaaatatttaagggggactccatga

SEQ ID NO: 93787 - DNA, 33 bp, Homo sapien
tagcccagaccctaatcatgagttgcatcaata

SEQ ID NO: 93788 - DNA, 33 bp, Homo sapien
tagcccagaccctaatgatgagttgcatcaata

SEQ ID NO: 93789 - DNA, 33 bp, Homo sapien
cacatctcttcattcacatggattcaatgtagt

SEQ ID NO: 93790 - DNA, 33 bp, Homo sapien
cacatctcttcattcatatggattcaatgtagt

SEQ ID NO: 93791 - DNA, 33 bp, Homo sapien
aaccctaaaacagcaaagttctgcccttccccc

SEQ ID NO: 93792 - DNA, 33 bp, Homo sapien
aaccctaaaacagcaacgttctgcccttccccc

SEQ ID NO: 93793 - DNA, 33 bp, Homo sapien
attctggaaggctctacggtggggacgtaatga

SEQ ID NO: 93794 - DNA, 33 bp, Homo sapien
attctggaaggctctatggtggggacgtaatga

SEQ ID NO: 93795 - DNA, 33 bp, Homo sapien
ggcttgtagacagcaaccttctccttatgcacc

SEQ ID NO: 93796 - DNA, 33 bp, Homo sapien
ggcttgtagacagcaatcttctccttatgcacc

SEQ ID NO: 93797 - DNA, 33 bp, Homo sapien
atattatttcatcccccaggtactaagccttgt

SEQ ID NO: 93798 - DNA, 33 bp, Homo sapien
atattatttcatccccgaggtactaagccttgt

SEQ ID NO: 93799 - DNA, 33 bp, Homo sapien
agagaaggagcaaagcacgtggactctggatac

SEQ ID NO: 93800 - DNA, 33 bp, Homo sapien
agagaaggagcaaagcgcgtggactctggatac

SEQ ID NO: 93801 - DNA, 33 bp, Homo sapien
gccgagaaatattgaactctactcccagcatac

SEQ ID NO: 93802 - DNA, 33 bp, Homo sapien
gccgagaaatattgaagtctactcccagcatac

SEQ ID NO: 93803 - DNA, 33 bp, Homo sapien
agaggatttagccatgaaactattctggtgtag

SEQ ID NO: 93804 - DNA, 33 bp, Homo sapien
agaggatttagccatgcaactattctggtgtag

SEQ ID NO: 93805 - DNA, 33 bp, Homo sapien
tcattctcaattaccgccaggattggccctgca

SEQ ID NO: 93806 - DNA, 33 bp, Homo sapien
tcattctcaattaccgtcaggattggccctgca

SEQ ID NO: 93807 - DNA, 33 bp, Homo sapien
agagcctctgggatgacaaagcgctgatgtgtt

SEQ ID NO: 93808 - DNA, 33 bp, Homo sapien
agagcctctgggatgagaaagcgctgatgtgtt

SEQ ID NO: 93809 - DNA, 33 bp, Homo sapien
ctctcatcccatccacgcttttcacattcacct

SEQ ID NO: 93810 - DNA, 33 bp, Homo sapien
ctctcatcccatccactcttttcacattcacct

SEQ ID NO: 93811 - DNA, 33 bp, Homo sapien
aaggtcaagctcgggcaaacgacaatcacaaaa

SEQ ID NO: 93812 - DNA, 33 bp, Homo sapien
aaggtcaagctcgggcgaacgacaatcacaaaa

SEQ ID NO: 93813 - DNA, 33 bp, Homo sapien
catgcgataaacttgaaaatggaaccaggaaaa

SEQ ID NO: 93814 - DNA, 33 bp, Homo sapien
catgcgataaacttgacaatggaaccaggaaaa

SEQ ID NO: 93815 - DNA, 33 bp, Homo sapien
aaagagctgtgggtgcaatttagcaagaccttg

SEQ ID NO: 93816 - DNA, 33 bp, Homo sapien
aaagagctgtgggtgcgatttagcaagaccttg

SEQ ID NO: 93817 - DNA, 33 bp, Homo sapien
attggccaaatgttcaatatataaacttatgac

SEQ ID NO: 93818 - DNA, 33 bp, Homo sapien
attggccaaatgttcagtatataaacttatgac

SEQ ID NO: 93819 - DNA, 33 bp, Homo sapien
tgtgagtgagataagacaatcccttgatgaatt

SEQ ID NO: 93820 - DNA, 33 bp, Homo sapien
tgtgagtgagataagataatcccttgatgaatt

SEQ ID NO: 93821 - DNA, 33 bp, Homo sapien
ttcaggtatttgtgaaaaagtaatgatgtcaga

SEQ ID NO: 93822 - DNA, 33 bp, Homo sapien
ttcaggtatttgtgaataagtaatgatgtcaga

SEQ ID NO: 93823 - DNA, 33 bp, Homo sapien
tgtgtatctttgcaaacatcgataaggacatct

SEQ ID NO: 93824 - DNA, 33 bp, Homo sapien
tgtgtatctttgcaaatatcgataaggacatct

SEQ ID NO: 93825 - DNA, 33 bp, Homo sapien
ctaactccacatctcacgaaattctcaattcat

SEQ ID NO: 93826 - DNA, 33 bp, Homo sapien
ctaactccacatctcatgaaattctcaattcat

SEQ ID NO: 93827 - DNA, 33 bp, Homo sapien
gctcttgggcatagcaactcaagtacccaactg

SEQ ID NO: 93828 - DNA, 33 bp, Homo sapien
gctcttgggcatagcatctcaagtacccaactg

SEQ ID NO: 93829 - DNA, 33 bp, Homo sapien
cagacaacaatggaaaaacgacaatggaattaa

SEQ ID NO: 93830 - DNA, 33 bp, Homo sapien
cagacaacaatggaaagacgacaatggaattaa

SEQ ID NO: 93831 - DNA, 33 bp, Homo sapien
taagggaggatggaagccaagaagaaatagaaa

SEQ ID NO: 93832 - DNA, 33 bp, Homo sapien
taagggaggatggaagtcaagaagaaatagaaa

SEQ ID NO: 93833 - DNA, 33 bp, Homo sapien
aatgcaaacatttctaaagttcctgactcctcg

SEQ ID NO: 93834 - DNA, 33 bp, Homo sapien
aatgcaaacatttctacagttcctgactcctcg

SEQ ID NO: 93835 - DNA, 33 bp, Homo sapien
ggatgatagaaataaaaccatggatgtgcacat

SEQ ID NO: 93836 - DNA, 33 bp, Homo sapien
ggatgatagaaataaacccatggatgtgcacat

SEQ ID NO: 93837 - DNA, 33 bp, Homo sapien
cagaggctgacaaaaacagcaggtgtcgccaca

SEQ ID NO: 93838 - DNA, 33 bp, Homo sapien
cagaggctgacaaaaatagcaggtgtcgccaca

SEQ ID NO: 93839 - DNA, 33 bp, Homo sapien
ggctaacagatacccaacaattactaattaccc

SEQ ID NO: 93840 - DNA, 33 bp, Homo sapien
ggctaacagatacccagcaattactaattaccc

SEQ ID NO: 93841 - DNA, 33 bp, Homo sapien
ccctccctgaaagtaactggctttgcattcaag

SEQ ID NO: 93842 - DNA, 33 bp, Homo sapien
ccctccctgaaagtaattggctttgcattcaag

SEQ ID NO: 93843 - DNA, 33 bp, Homo sapien
cctgaagtaatggccacgtgaaagacagtgcaa

SEQ ID NO: 93844 - DNA, 33 bp, Homo sapien
cctgaagtaatggccatgtgaaagacagtgcaa

SEQ ID NO: 93845 - DNA, 33 bp, Homo sapien
aggctgagtttaggtgcatagaacagacacacg

SEQ ID NO: 93846 - DNA, 33 bp, Homo sapien
aggctgagtttaggtggatagaacagacacacg

SEQ ID NO: 93847 - DNA, 33 bp, Homo sapien
aaaccagaggaatataacactggggagactgtg

SEQ ID NO: 93848 - DNA, 33 bp, Homo sapien
aaaccagaggaatatatcactggggagactgtg

SEQ ID NO: 93849 - DNA, 33 bp, Homo sapien
gaggtaggaattatgcccacctcacatgtcacg

SEQ ID NO: 93850 - DNA, 33 bp, Homo sapien
gaggtaggaattatgctcacctcacatgtcacg

SEQ ID NO: 93851 - DNA, 33 bp, Homo sapien
gttaacaactgtagcacctaaagtcaatttcct

SEQ ID NO: 93852 - DNA, 33 bp, Homo sapien
gttaacaactgtagcatctaaagtcaatttcct

SEQ ID NO: 93853 - DNA, 33 bp, Homo sapien
gcatttggcccagatcagaagactcttttatat

SEQ ID NO: 93854 - DNA, 33 bp, Homo sapien
gcatttggcccagatcggaagactcttttatat

SEQ ID NO: 93855 - DNA, 33 bp, Homo sapien
ccatcctgcacctctacgtcttaccaactatag

SEQ ID NO: 93856 - DNA, 33 bp, Homo sapien
ccatcctgcacctctatgtcttaccaactatag

SEQ ID NO: 93857 - DNA, 33 bp, Homo sapien
acaggtaaatgcaaaccgttgctggcaatcctt

SEQ ID NO: 93858 - DNA, 33 bp, Homo sapien
acaggtaaatgcaaactgttgctggcaatcctt

SEQ ID NO: 93859 - DNA, 33 bp, Homo sapien
actgaagccccttacccagcttttagacataag

SEQ ID NO: 93860 - DNA, 33 bp, Homo sapien
actgaagccccttacctagcttttagacataag

SEQ ID NO: 93861 - DNA, 33 bp, Homo sapien
tgactctagtacaggacgatgccatcgaaaagg

SEQ ID NO: 93862 - DNA, 33 bp, Homo sapien
tgactctagtacaggatgatgccatcgaaaagg

SEQ ID NO: 93863 - DNA, 33 bp, Homo sapien
agaagaagaaagaagaagaactcactcatttat

SEQ ID NO: 93864 - DNA, 33 bp, Homo sapien
agaagaagaaagaagaggaactcactcatttat

SEQ ID NO: 93865 - DNA, 33 bp, Homo sapien
agctggggccaaacaaattaggtctccaagctg

SEQ ID NO: 93866 - DNA, 33 bp, Homo sapien
agctggggccaaacaagttaggtctccaagctg

SEQ ID NO: 93867 - DNA, 33 bp, Homo sapien
gacattgttcacataactaggaaaagactattc

SEQ ID NO: 93868 - DNA, 33 bp, Homo sapien
gacattgttcacataagtaggaaaagactattc

SEQ ID NO: 93869 - DNA, 33 bp, Homo sapien
tgctccattaccatgacatttacttggattacc

SEQ ID NO: 93870 - DNA, 33 bp, Homo sapien
tgctccattaccatgatatttacttggattacc

SEQ ID NO: 93871 - DNA, 33 bp, Homo sapien
agtggcaagatgtgaacgggaactgaaatgtca

SEQ ID NO: 93872 - DNA, 33 bp, Homo sapien
agtggcaagatgtgaatgggaactgaaatgtca

SEQ ID NO: 93873 - DNA, 33 bp, Homo sapien
agaccctctatcctaccagactatattcttgag

SEQ ID NO: 93874 - DNA, 33 bp, Homo sapien
agaccctctatcctactagactatattcttgag

SEQ ID NO: 93875 - DNA, 33 bp, Homo sapien
gatgggaattcatccccgctcttgccatagcac

SEQ ID NO: 93876 - DNA, 33 bp, Homo sapien
gatgggaattcatccctgctcttgccatagcac

SEQ ID NO: 93877 - DNA, 33 bp, Homo sapien
agtatctgactttggaccataggtaaacagtag

SEQ ID NO: 93878 - DNA, 33 bp, Homo sapien
agtatctgactttggatcataggtaaacagtag

SEQ ID NO: 93879 - DNA, 33 bp, Homo sapien
tgcagactatgcagaagctatcttctcaaagca

SEQ ID NO: 93880 - DNA, 33 bp, Homo sapien
tgcagactatgcagaatctatcttctcaaagca

SEQ ID NO: 93881 - DNA, 33 bp, Homo sapien
ggctcctgatctaagacggacttcctgcttttc

SEQ ID NO: 93882 - DNA, 33 bp, Homo sapien
ggctcctgatctaagatggacttcctgcttttc

SEQ ID NO: 93883 - DNA, 33 bp, Homo sapien
aaagatgcctcaagaccgccaaacttctatggg

SEQ ID NO: 93884 - DNA, 33 bp, Homo sapien
aaagatgcctcaagactgccaaacttctatggg

SEQ ID NO: 93885 - DNA, 33 bp, Homo sapien
ctggcagctggaattacggatgtcattttgcag

SEQ ID NO: 93886 - DNA, 33 bp, Homo sapien
ctggcagctggaattatggatgtcattttgcag

SEQ ID NO: 93887 - DNA, 33 bp, Homo sapien
cttttgttctttcccaacagagctacacagccc

SEQ ID NO: 93888 - DNA, 33 bp, Homo sapien
cttttgttctttcccatcagagctacacagccc

SEQ ID NO: 93889 - DNA, 33 bp, Homo sapien
gtggttcctttagctcccattgggcgacttctg

SEQ ID NO: 93890 - DNA, 33 bp, Homo sapien
gtggttcctttagctctcattgggcgacttctg

SEQ ID NO: 93891 - DNA, 33 bp, Homo sapien
cttgcctgaggtcacaatgcaaattacagtgaa

SEQ ID NO: 93892 - DNA, 33 bp, Homo sapien
cttgcctgaggtcacagtgcaaattacagtgaa

SEQ ID NO: 93893 - DNA, 33 bp, Homo sapien
ataggtagtgttaatacgcaatttatcaaaata

SEQ ID NO: 93894 - DNA, 33 bp, Homo sapien
ataggtagtgttaatatgcaatttatcaaaata

SEQ ID NO: 93895 - DNA, 33 bp, Homo sapien
cagagaatagctggaagaaatgagatgaagagc

SEQ ID NO: 93896 - DNA, 33 bp, Homo sapien
cagagaatagctggaataaatgagatgaagagc

SEQ ID NO: 93897 - DNA, 33 bp, Homo sapien
cctgccaccaaagcctaaatcttcctgccatac

SEQ ID NO: 93898 - DNA, 33 bp, Homo sapien
cctgccaccaaagcctcaatcttcctgccatac

SEQ ID NO: 93899 - DNA, 33 bp, Homo sapien
ttcagctggggcccaaacatcatgaagacttac

SEQ ID NO: 93900 - DNA, 33 bp, Homo sapien
ttcagctggggcccaatcatcatgaagacttac

SEQ ID NO: 93901 - DNA, 33 bp, Homo sapien
aatccacctcttgatgcaagagaaacgtgtgta

SEQ ID NO: 93902 - DNA, 33 bp, Homo sapien
aatccacctcttgatgtaagagaaacgtgtgta

SEQ ID NO: 93903 - DNA, 33 bp, Homo sapien
tcactgaaggatttaactcattccaaaatgctt

SEQ ID NO: 93904 - DNA, 33 bp, Homo sapien
tcactgaaggatttaattcattccaaaatgctt

SEQ ID NO: 93905 - DNA, 33 bp, Homo sapien
tgatactcagctgcctcaattaattaattccac

SEQ ID NO: 93906 - DNA, 33 bp, Homo sapien
tgatactcagctgccttaattaattaattccac

SEQ ID NO: 93907 - DNA, 33 bp, Homo sapien
cagctggaaggaatcacgaaaagtcttcttgtc

SEQ ID NO: 93908 - DNA, 33 bp, Homo sapien
cagctggaaggaatcatgaaaagtcttcttgtc

SEQ ID NO: 93909 - DNA, 33 bp, Homo sapien
attttccagccattctaaaatcttcctgaggat

SEQ ID NO: 93910 - DNA, 33 bp, Homo sapien
attttccagccattctgaaatcttcctgaggat

SEQ ID NO: 93911 - DNA, 33 bp, Homo sapien
gggctttcaggctacaaataaacttaaacattt

SEQ ID NO: 93912 - DNA, 33 bp, Homo sapien
gggctttcaggctacagataaacttaaacattt

SEQ ID NO: 93913 - DNA, 33 bp, Homo sapien
tccaatgggcatcagaatattgaaaaaacaagg

SEQ ID NO: 93914 - DNA, 33 bp, Homo sapien
tccaatgggcatcagagtattgaaaaaacaagg

SEQ ID NO: 93915 - DNA, 33 bp, Homo sapien
gtaagatgtgtttttaccaaaagatgataagaa

SEQ ID NO: 93916 - DNA, 33 bp, Homo sapien
gtaagatgtgtttttagcaaaagatgataagaa

SEQ ID NO: 93917 - DNA, 33 bp, Homo sapien; identical to SEQ ID NO: 93915

SEQ ID NO: 93918 - DNA, 33 bp, Homo sapien; identical to SEQ ID NO: 93916

SEQ ID NO: 93919 - DNA, 33 bp, Homo sapien
agacagatgataatggaagttaaaagacacagc

SEQ ID NO: 93920 - DNA, 33 bp, Homo sapien
agacagatgataatggcagttaaaagacacagc

SEQ ID NO: 93921 - DNA, 33 bp, Homo sapien
aaggatgatgaccaaaattaactgctttctgct

SEQ ID NO: 93922 - DNA, 33 bp, Homo sapien
aaggatgatgaccaaagttaactgctttctgct

SEQ ID NO: 93923 - DNA, 33 bp, Homo sapien
tatttttagattggtagaaacttccatatgttc

SEQ ID NO: 93924 - DNA, 33 bp, Homo sapien
tatttttagattggtataaacttccatatgttc

SEQ ID NO: 93925 - DNA, 33 bp, Homo sapien
ctacaaggttggtgcactagcaattgtggtcct

SEQ ID NO: 93926 - DNA, 33 bp, Homo sapien
ctacaaggttggtgcagtagcaattgtggtcct

SEQ ID NO: 93927 - DNA, 33 bp, Homo sapien
atctctagttctcatactacttttcaagatcaa

SEQ ID NO: 93928 - DNA, 33 bp, Homo sapien
atctctagttctcatattacttttcaagatcaa

SEQ ID NO: 93929 - DNA, 33 bp, Homo sapien
tgaggtggtagactaaaattcgtacttgctacc

SEQ ID NO: 93930 - DNA, 33 bp, Homo sapien
tgaggtggtagactaatattcgtacttgctacc

SEQ ID NO: 93931 - DNA, 33 bp, Homo sapien
aggcccaactgacccaacagagtcacctcctgc

SEQ ID NO: 93932 - DNA, 33 bp, Homo sapien
aggcccaactgacccaccagagtcacctcctgc

SEQ ID NO: 93933 - DNA, 33 bp, Homo sapien
gatcatttctaaggccaactcagcaatcagatg

SEQ ID NO: 93934 - DNA, 33 bp, Homo sapien
gatcatttctaaggccgactcagcaatcagatg

SEQ ID NO: 93935 - DNA, 33 bp, Homo sapien
ctcatgaatagctataactgtcctaatgacagc

SEQ ID NO: 93936 - DNA, 33 bp, Homo sapien
ctcatgaatagctatacctgtcctaatgacagc

SEQ ID NO: 93937 - DNA, 33 bp, Homo sapien
acacatagatacaaaaagttcaaaaatgaatcc

SEQ ID NO: 93938 - DNA, 33 bp, Homo sapien
acacatagatacaaaaggttcaaaaatgaatcc

SEQ ID NO: 93939 - DNA, 33 bp, Homo sapien
caagtggcaaaataacagtatcaacgagtcaca

SEQ ID NO: 93940 - DNA, 33 bp, Homo sapien
caagtggcaaaataacggtatcaacgagtcaca

SEQ ID NO: 93941 - DNA, 33 bp, Homo sapien
aataagttagcgttgcggattaatagactggtt

SEQ ID NO: 93942 - DNA, 33 bp, Homo sapien
aataagttagcgttgctgattaatagactggtt

SEQ ID NO: 93943 - DNA, 33 bp, Homo sapien
tgatgggagtgaaaacgggtccaaccactctgg

SEQ ID NO: 93944 - DNA, 33 bp, Homo sapien
tgatgggagtgaaaactggtccaaccactctgg

SEQ ID NO: 93945 - DNA, 33 bp, Homo sapien
aaaaagtactctttcccattagtgatcagggaa

SEQ ID NO: 93946 - DNA, 33 bp, Homo sapien
aaaaagtactctttccgattagtgatcagggaa

SEQ ID NO: 93947 - DNA, 33 bp, Homo sapien
ttcacaaaagaggatacctcaaaggccaaaaac

SEQ ID NO: 93948 - DNA, 33 bp, Homo sapien
ttcacaaaagaggatatctcaaaggccaaaaac

SEQ ID NO: 93949 - DNA, 33 bp, Homo sapien
ttttaaaataatgcaacaatgtgaggacatagg

SEQ ID NO: 93950 - DNA, 33 bp, Homo sapien
ttttaaaataatgcaagaatgtgaggacatagg

SEQ ID NO: 93951 - DNA, 33 bp, Homo sapien
tttcatttccagttaaagttgaatgtttatcct

SEQ ID NO: 93952 - DNA, 33 bp, Homo sapien
tttcatttccagttaacgttgaatgtttatcct

SEQ ID NO: 93953 - DNA, 33 bp, Homo sapien
cacagagaagaatgaacgaaaggagcagaatat

SEQ ID NO: 93954 - DNA, 33 bp, Homo sapien
cacagagaagaatgaatgaaaggagcagaatat

SEQ ID NO: 93955 - DNA, 33 bp, Homo sapien
attagtatgattgatacgctaagagaggagaga

SEQ ID NO: 93956 - DNA, 33 bp, Homo sapien
attagtatgattgatatgctaagagaggagaga

SEQ ID NO: 93957 - DNA, 33 bp, Homo sapien
gcccaacagacttttagagggacgtcatcctat

SEQ ID NO: 93958 - DNA, 33 bp, Homo sapien
gcccaacagacttttatagggacgtcatcctat

SEQ ID NO: 93959 - DNA, 33 bp, Homo sapien
atggcggcgagggaaaactggagcagtcccgga

SEQ ID NO: 93960 - DNA, 33 bp, Homo sapien
atggcggcgagggaaacctggagcagtcccgga

SEQ ID NO: 93961 - DNA, 33 bp, Homo sapien
tttccttgaaacagagaaacagaaaactgccag

SEQ ID NO: 93962 - DNA, 33 bp, Homo sapien
tttccttgaaacagagtaacagaaaactgccag

SEQ ID NO: 93963 - DNA, 33 bp, Homo sapien
aataaaatggaacaatcatgacaatatactgta

SEQ ID NO: 93964 - DNA, 33 bp, Homo sapien
aataaaatggaacaattatgacaatatactgta

SEQ ID NO: 93965 - DNA, 33 bp, Homo sapien
gtggtctctctctaaactatctattgcactctc

SEQ ID NO: 93966 - DNA, 33 bp, Homo sapien
gtggtctctctctaaagtatctattgcactctc

SEQ ID NO: 93967 - DNA, 33 bp, Homo sapien
gaaagcagagaagatacgttcagagttgggagt

SEQ ID NO: 93968 - DNA, 33 bp, Homo sapien
gaaagcagagaagatatgttcagagttgggagt

SEQ ID NO: 93969 - DNA, 33 bp, Homo sapien
tttataactagtttgactattgggtgcttcgtt

SEQ ID NO: 93970 - DNA, 33 bp, Homo sapien
tttataactagtttgattattgggtgcttcgtt

SEQ ID NO: 93971 - DNA, 33 bp, Homo sapien
ttacaagagcagctaaaagtaacaacaattaaa

SEQ ID NO: 93972 - DNA, 33 bp, Homo sapien
ttacaagagcagctaagagtaacaacaattaaa

SEQ ID NO: 93973 - DNA, 33 bp, Homo sapien
tagaagtgtttgataactctcctgaaagtcaga

SEQ ID NO: 93974 - DNA, 33 bp, Homo sapien
tagaagtgtttgataattctcctgaaagtcaga

SEQ ID NO: 93975 - DNA, 33 bp, Homo sapien
aagagcctgtttctggaatttgattgatgattg

SEQ ID NO: 93976 - DNA, 33 bp, Homo sapien
aagagcctgtttctgggatttgattgatgattg

SEQ ID NO: 93977 - DNA, 33 bp, Homo sapien
agggaacaggatctatgacctgaggctgagaag

SEQ ID NO: 93978 - DNA, 33 bp, Homo sapien
agggaacaggatctattacctgaggctgagaag

SEQ ID NO: 93979 - DNA, 33 bp, Homo sapien
acttcctgagtgccccaatcgagcctctctctt

SEQ ID NO: 93980 - DNA, 33 bp, Homo sapien
acttcctgagtgccccgatcgagcctctctctt

SEQ ID NO: 93981 - DNA, 33 bp, Homo sapien
taattttgtaccatgcccagatgaagtctcact

SEQ ID NO: 93982 - DNA, 33 bp, Homo sapien
taattttgtaccatgctcagatgaagtctcact

SEQ ID NO: 93983 - DNA, 33 bp, Homo sapien
aataaaacaaacaacacattcttggtcctacag

SEQ ID NO: 93984 - DNA, 33 bp, Homo sapien
aataaaacaaacaacagattcttggtcctacag

SEQ ID NO: 93985 - DNA, 33 bp, Homo sapien
cggtccctgccagccaaagaggtagcaatcatt

SEQ ID NO: 93986 - DNA, 33 bp, Homo sapien
cggtccctgccagccacagaggtagcaatcatt

SEQ ID NO: 93987 - DNA, 33 bp, Homo sapien
tgtcaagtgtgtgcccaaaggcagttatttcta

SEQ ID NO: 93988 - DNA, 33 bp, Homo sapien
tgtcaagtgtgtgcccgaaggcagttatttcta

SEQ ID NO: 93989 - DNA, 33 bp, Homo sapien
acagtaagagtaactcaatgattattcaaatga

SEQ ID NO: 93990 - DNA, 33 bp, Homo sapien
acagtaagagtaactcgatgattattcaaatga

SEQ ID NO: 93991 - DNA, 33 bp, Homo sapien
gcttattcttactccccattagcagcaaagcca

SEQ ID NO: 93992 - DNA, 33 bp, Homo sapien
gcttattcttactccctattagcagcaaagcca

SEQ ID NO: 93993 - DNA, 33 bp, Homo sapien
tttgctattttgactagtactgtgataaacata

SEQ ID NO: 93994 - DNA, 33 bp, Homo sapien
tttgctattttgactattactgtgataaacata

SEQ ID NO: 93995 - DNA, 33 bp, Homo sapien
aagatgataactctgacgatgagtgtttttccg

SEQ ID NO: 93996 - DNA, 33 bp, Homo sapien
aagatgataactctgatgatgagtgtttttccg

SEQ ID NO: 93997 - DNA, 33 bp, Homo sapien
aataaatctaccctaaatgagccattaaaaaca

SEQ ID NO: 93998 - DNA, 33 bp, Homo sapien
aataaatctaccctaagtgagccattaaaaaca

SEQ ID NO: 93999 - DNA, 33 bp, Homo sapien
tgcactcagtacggaacagaagggcactgaggg

SEQ ID NO: 94000 - DNA, 33 bp, Homo sapien
tgcactcagtacggaagagaagggcactgaggg

SEQ ID NO: 94001 - DNA, 33 bp, Homo sapien
attcttggtttttgacatctgaaaagccctgca

SEQ ID NO: 94002 - DNA, 33 bp, Homo sapien
attcttggtttttgacgtctgaaaagccctgca

SEQ ID NO: 94003 - DNA, 33 bp, Homo sapien
catatgccaccgaatacgctagagttgactcac

SEQ ID NO: 94004 - DNA, 33 bp, Homo sapien
catatgccaccgaatatgctagagttgactcac

SEQ ID NO: 94005 - DNA, 33 bp, Homo sapien
ggcctggcctccggagaatgagttttggaaaag

SEQ ID NO: 94006 - DNA, 33 bp, Homo sapien
ggcctggcctccggaggatgagttttggaaaag

SEQ ID NO: 94007 - DNA, 33 bp, Homo sapien
gaggctgtgcatttcccatgactccggagcttc

SEQ ID NO: 94008 - DNA, 33 bp, Homo sapien
gaggctgtgcatttccgatgactccggagcttc

SEQ ID NO: 94009 - DNA, 33 bp, Homo sapien
gctgggaacaggacacccggctagtgatgctga

SEQ ID NO: 94010 - DNA, 33 bp, Homo sapien
gctgggaacaggacactcggctagtgatgctga

SEQ ID NO: 94011 - DNA, 33 bp, Homo sapien
caactgggaattcacaaaggacaatactccgtc

SEQ ID NO: 94012 - DNA, 33 bp, Homo sapien
caactgggaattcacataggacaatactccgtc

SEQ ID NO: 94013 - DNA, 33 bp, Homo sapien
tctttcatctctgaaacggttataattgtccct

SEQ ID NO: 94014 - DNA, 33 bp, Homo sapien
tctttcatctctgaaatggttataattgtccct

SEQ ID NO: 94015 - DNA, 33 bp, Homo sapien
aatctcagctctgttgacaaagaagggggtggt

SEQ ID NO: 94016 - DNA, 33 bp, Homo sapien
aatctcagctctgttgtcaaagaagggggtggt

SEQ ID NO: 94017 - DNA, 33 bp, Homo sapien
attgaataaactccaaattactatgtgtggtgt

SEQ ID NO: 94018 - DNA, 33 bp, Homo sapien
attgaataaactccaatttactatgtgtggtgt

SEQ ID NO: 94019 - DNA, 33 bp, Homo sapien
taaacttttctgatcactcgaaattttggtccg

SEQ ID NO: 94020 - DNA, 33 bp, Homo sapien
taaacttttctgatcagtcgaaattttggtccg

SEQ ID NO: 94021 - DNA, 33 bp, Homo sapien
taaaataggcagtgtacaggaattacctgagat

SEQ ID NO: 94022 - DNA, 33 bp, Homo sapien
taaaataggcagtgtataggaattacctgagat

SEQ ID NO: 94023 - DNA, 33 bp, Homo sapien
gtgatgggattgcagcagcataattaaggaatc

SEQ ID NO: 94024 - DNA, 33 bp, Homo sapien
gtgatgggattgcagcggcataattaaggaatc

SEQ ID NO: 94025 - DNA, 33 bp, Homo sapien
gaagatagccccaaacactgtgtccactgcaac

SEQ ID NO: 94026 - DNA, 33 bp, Homo sapien
gaagatagccccaaacgctgtgtccactgcaac

SEQ ID NO: 94027 - DNA, 33 bp, Homo sapien
tgccctcagctggtaccgaaaatatggtgctgt

SEQ ID NO: 94028 - DNA, 33 bp, Homo sapien
tgccctcagctggtactgaaaatatggtgctgt

SEQ ID NO: 94029 - DNA, 33 bp, Homo sapien
cctggtctacttaaccaacttctaaaacagtgt

SEQ ID NO: 94030 - DNA, 33 bp, Homo sapien
cctggtctacttaaccgacttctaaaacagtgt

SEQ ID NO: 94031 - DNA, 33 bp, Homo sapien
catacctcccactctgaatctgagcagggtatc

SEQ ID NO: 94032 - DNA, 33 bp, Homo sapien
catacctcccactctgcatctgagcagggtatc

SEQ ID NO: 94033 - DNA, 33 bp, Homo sapien
aagtttgcagggcttccagagcgtgtggagtct

SEQ ID NO: 94034 - DNA, 33 bp, Homo sapien
aagtttgcagggcttctagagcgtgtggagtct

SEQ ID NO: 94035 - DNA, 33 bp, Homo sapien
tagatgcctatacctccaacgcgtcctgcacca

SEQ ID NO: 94036 - DNA, 33 bp, Homo sapien
tagatgcctatacctctaacgcgtcctgcacca

SEQ ID NO: 94037 - DNA, 33 bp, Homo sapien
ttgttttcattatagccgacatcagaaatgggc

SEQ ID NO: 94038 - DNA, 33 bp, Homo sapien
ttgttttcattatagctgacatcagaaatgggc

SEQ ID NO: 94039 - DNA, 33 bp, Homo sapien
gctgtaagtttccctacgtttcacagtccttaa

SEQ ID NO: 94040 - DNA, 33 bp, Homo sapien
gctgtaagtttccctatgtttcacagtccttaa

SEQ ID NO: 94041 - DNA, 33 bp, Homo sapien
gtctgtgaattcagggcaaggaaggtgctgtaa

SEQ ID NO: 94042 - DNA, 33 bp, Homo sapien
gtctgtgaattcagggtaaggaaggtgctgtaa

SEQ ID NO: 94043 - DNA, 33 bp, Homo sapien
aaaaactgctaaagaaagtggcagccttagaga

SEQ ID NO: 94044 - DNA, 33 bp, Homo sapien
aaaaactgctaaagaacgtggcagccttagaga

SEQ ID NO: 94045 - DNA, 33 bp, Homo sapien
aatttctctaccctgcgacatcaagctaagata

SEQ ID NO: 94046 - DNA, 33 bp, Homo sapien
aatttctctaccctgctacatcaagctaagata

SEQ ID NO: 94047 - DNA, 33 bp, Homo sapien
aagttgtcactttccacgtttgatgtcttgtta

SEQ ID NO: 94048 - DNA, 33 bp, Homo sapien
aagttgtcactttccatgtttgatgtcttgtta

SEQ ID NO: 94049 - DNA, 33 bp, Homo sapien
acaatttctttgaagacgagaatcctataaatg

SEQ ID NO: 94050 - DNA, 33 bp, Homo sapien
acaatttctttgaagatgagaatcctataaatg

SEQ ID NO: 94051 - DNA, 33 bp, Homo sapien
acatccaaaatgagaaatggtccctgcaatcca

SEQ ID NO: 94052 - DNA, 33 bp, Homo sapien
acatccaaaatgagaagtggtccctgcaatcca

SEQ ID NO: 94053 - DNA, 33 bp, Homo sapien
caaggaggtcaaacctcaacaacatccaaaatg

SEQ ID NO: 94054 - DNA, 33 bp, Homo sapien
caaggaggtcaaacctgaacaacatccaaaatg

SEQ ID NO: 94055 - DNA, 33 bp, Homo sapien
ggcttggttgatatgtaaactttgtcacttgat

SEQ ID NO: 94056 - DNA, 33 bp, Homo sapien
ggcttggttgatatgtgaactttgtcacttgat

SEQ ID NO: 94057 - DNA, 33 bp, Homo sapien
tatatttctattggacagagattatatttctat

SEQ ID NO: 94058 - DNA, 33 bp, Homo sapien
tatatttctattggacggagattatatttctat

SEQ ID NO: 94059 - DNA, 33 bp, Homo sapien
tgcacaacacacttccagcttattaatagctca

SEQ ID NO: 94060 - DNA, 33 bp, Homo sapien
tgcacaacacacttcctgcttattaatagctca

SEQ ID NO: 94061 - DNA, 33 bp, Homo sapien
tagtgcaaacactgtacattgctatttgtagtg

SEQ ID NO: 94062 - DNA, 33 bp, Homo sapien
tagtgcaaacactgtatattgctatttgtagtg

SEQ ID NO: 94063 - DNA, 33 bp, Homo sapien
gaaatgaaaaaactgccaggctcagtggctcat

SEQ ID NO: 94064 - DNA, 33 bp, Homo sapien
gaaatgaaaaaactgctaggctcagtggctcat

SEQ ID NO: 94065 - DNA, 33 bp, Homo sapien
tcaataactttttgacaactaagcctttcttct

SEQ ID NO: 94066 - DNA, 33 bp, Homo sapien
tcaataactttttgacgactaagcctttcttct

SEQ ID NO: 94067 - DNA, 33 bp, Homo sapien
gacagaaaatattgccaggcaaggtaaaatctt

SEQ ID NO: 94068 - DNA, 33 bp, Homo sapien
gacagaaaatattgccgggcaaggtaaaatctt

SEQ ID NO: 94069 - DNA, 33 bp, Homo sapien
gaattggcaaatgccaccaagagtccagaagct

SEQ ID NO: 94070 - DNA, 33 bp, Homo sapien
gaattggcaaatgccatcaagagtccagaagct

SEQ ID NO: 94071 - DNA, 33 bp, Homo sapien
atcaacagaaggatgacgtgtttatgtccttcc

SEQ ID NO: 94072 - DNA, 33 bp, Homo sapien
atcaacagaaggatgatgtgtttatgtccttcc

SEQ ID NO: 94073 - DNA, 33 bp, Homo sapien
ttacgggtatgagcaaaggtgtcagggaaagaa

SEQ ID NO: 94074 - DNA, 33 bp, Homo sapien
ttacgggtatgagcaacggtgtcagggaaagaa

SEQ ID NO: 94075 - DNA, 33 bp, Homo sapien
cacttcttgtgtgtccacgttctcaattccctt

SEQ ID NO: 94076 - DNA, 33 bp, Homo sapien
cacttcttgtgtgtccgcgttctcaattccctt

SEQ ID NO: 94077 - DNA, 33 bp, Homo sapien
atcctgacagcatgtgaataaggaagaatctta

SEQ ID NO: 94078 - DNA, 33 bp, Homo sapien
atcctgacagcatgtggataaggaagaatctta

SEQ ID NO: 94079 - DNA, 33 bp, Homo sapien
ttttgtataacgctaaatcaccatgagacagaa

SEQ ID NO: 94080 - DNA, 33 bp, Homo sapien
ttttgtataacgctaagtcaccatgagacagaa

SEQ ID NO: 94081 - DNA, 33 bp, Homo sapien
agaggccagtttcaatgaaggagattaaaagtc

SEQ ID NO: 94082 - DNA, 33 bp, Homo sapien
agaggccagtttcaattaaggagattaaaagtc

SEQ ID NO: 94083 - DNA, 33 bp, Homo sapien
tgtagaagaataaagcaagatctctatctctca

SEQ ID NO: 94084 - DNA, 33 bp, Homo sapien
tgtagaagaataaagccagatctctatctctca

SEQ ID NO: 94085 - DNA, 33 bp, Homo sapien
ctgatggagacatctaagtggcatgacagaagc

SEQ ID NO: 94086 - DNA, 33 bp, Homo sapien
ctgatggagacatctaggtggcatgacagaagc

SEQ ID NO: 94087 - DNA, 33 bp, Homo sapien
tactggtcattctgatcaaaagctccctcttgg

SEQ ID NO: 94088 - DNA, 33 bp, Homo sapien
tactggtcattctgattaaaagctccctcttgg

SEQ ID NO: 94089 - DNA, 33 bp, Homo sapien
cttccttgtagccccccaaaagaagaaaaagaa

SEQ ID NO: 94090 - DNA, 33 bp, Homo sapien
cttccttgtagcccccgaaaagaagaaaaagaa

SEQ ID NO: 94091 - DNA, 33 bp, Homo sapien
aggcaatcaagagacacgctatccaggtgaata

SEQ ID NO: 94092 - DNA, 33 bp, Homo sapien
aggcaatcaagagacatgctatccaggtgaata

SEQ ID NO: 94093 - DNA, 33 bp, Homo sapien
catgaccacgttaatgccagagttagattggca

SEQ ID NO: 94094 - DNA, 33 bp, Homo sapien
catgaccacgttaatggcagagttagattggca

SEQ ID NO: 94095 - DNA, 33 bp, Homo sapien
ccattgaaatataccaactgtgttaaacaaagg

SEQ ID NO: 94096 - DNA, 33 bp, Homo sapien
ccattgaaatataccacctgtgttaaacaaagg

SEQ ID NO: 94097 - DNA, 33 bp, Homo sapien
aaaaggagttgataggcccaggtaattgagcag

SEQ ID NO: 94098 - DNA, 33 bp, Homo sapien
aaaaggagttgatagggccaggtaattgagcag

SEQ ID NO: 94099 - DNA, 33 bp, Homo sapien
gctttgcataaacaaccgactggtcatctgaaa

SEQ ID NO: 94100 - DNA, 33 bp, Homo sapien
gctttgcataaacaactgactggtcatctgaaa

SEQ ID NO: 94101 - DNA, 33 bp, Homo sapien
cagtacagttacagatcactttctcatacacta

SEQ ID NO: 94102 - DNA, 33 bp, Homo sapien
cagtacagttacagatgactttctcatacacta

SEQ ID NO: 94103 - DNA, 33 bp, Homo sapien
ccattgcaagtttccaataaaggaagaattgtg

SEQ ID NO: 94104 - DNA, 33 bp, Homo sapien
ccattgcaagtttccagtaaaggaagaattgtg

SEQ ID NO: 94105 - DNA, 33 bp, Homo sapien
tcggagaaaagaatccaaacatcataaagtaac

SEQ ID NO: 94106 - DNA, 33 bp, Homo sapien
tcggagaaaagaatccgaacatcataaagtaac

SEQ ID NO: 94107 - DNA, 33 bp, Homo sapien
atgtatgaagttaataaaccccacatcagtaag

SEQ ID NO: 94108 - DNA, 33 bp, Homo sapien
atgtatgaagttaatagaccccacatcagtaag

SEQ ID NO: 94109 - DNA, 33 bp, Homo sapien
catcctgagacattgaggagacagcgaaggacc

SEQ ID NO: 94110 - DNA, 33 bp, Homo sapien
catcctgagacattgatgagacagcgaaggacc

SEQ ID NO: 94111 - DNA, 33 bp, Homo sapien
aacttcttaaggaaaccgaaaatgctttcttac

SEQ ID NO: 94112 - DNA, 33 bp, Homo sapien
aacttcttaaggaaactgaaaatgctttcttac

SEQ ID NO: 94113 - DNA, 33 bp, Homo sapien
ttattaacttaactgacagcattgtcctcagca

SEQ ID NO: 94114 - DNA, 33 bp, Homo sapien
ttattaacttaactgatagcattgtcctcagca

SEQ ID NO: 94115 - DNA, 33 bp, Homo sapien
ttctgatacgttttcagtcttccctgttatttg

SEQ ID NO: 94116 - DNA, 33 bp, Homo sapien
ttctgatacgttttcattcttccctgttatttg

SEQ ID NO: 94117 - DNA, 33 bp, Homo sapien
ccaacccctgaggcaactatcctcttgatcaga

SEQ ID NO: 94118 - DNA, 33 bp, Homo sapien
ccaacccctgaggcaattatcctcttgatcaga

SEQ ID NO: 94119 - DNA, 33 bp, Homo sapien
tttgtcctatgttaaacaggccattgagaaact

SEQ ID NO: 94120 - DNA, 33 bp, Homo sapien
tttgtcctatgttaaagaggccattgagaaact

SEQ ID NO: 94121 - DNA, 33 bp, Homo sapien
agaaataataagatgaccaggattatactatat

SEQ ID NO: 94122 - DNA, 33 bp, Homo sapien
agaaataataagatgagcaggattatactatat

SEQ ID NO: 94123 - DNA, 33 bp, Homo sapien
acagcctagcacaggaaacaaaagagtgtgtac

SEQ ID NO: 94124 - DNA, 33 bp, Homo sapien
acagcctagcacaggagacaaaagagtgtgtac

SEQ ID NO: 94125 - DNA, 33 bp, Homo sapien
ctaactgtgtcctatcactcttacaaaaacctt

SEQ ID NO: 94126 - DNA, 33 bp, Homo sapien
ctaactgtgtcctatcgctcttacaaaaacctt

SEQ ID NO: 94127 - DNA, 33 bp, Homo sapien
aattatgtgaaagacaaattattagcttcaaga

SEQ ID NO: 94128 - DNA, 33 bp, Homo sapien
aattatgtgaaagacatattattagcttcaaga

SEQ ID NO: 94129 - DNA, 33 bp, Homo sapien
gaacatcattaagtaccatctggattatatttc

SEQ ID NO: 94130 - DNA, 33 bp, Homo sapien
gaacatcattaagtacgatctggattatatttc

SEQ ID NO: 94131 - DNA, 33 bp, Homo sapien
atgggaagatgtggccaaatttaggcaccaaat

SEQ ID NO: 94132 - DNA, 33 bp, Homo sapien
atgggaagatgtggccgaatttaggcaccaaat

SEQ ID NO: 94133 - DNA, 33 bp, Homo sapien
atctgcaatgaactggaaagaagatggagatga

SEQ ID NO: 94134 - DNA, 33 bp, Homo sapien
atctgcaatgaactgggaagaagatggagatga

SEQ ID NO: 94135 - DNA, 33 bp, Homo sapien
aatactacagtaggaacacagcattggacactc

SEQ ID NO: 94136 - DNA, 33 bp, Homo sapien
aatactacagtaggaatacagcattggacactc

SEQ ID NO: 94137 - DNA, 33 bp, Homo sapien
tctgttatccttataactagcagattatcggag

SEQ ID NO: 94138 - DNA, 33 bp, Homo sapien
tctgttatccttataagtagcagattatcggag

SEQ ID NO: 94139 - DNA, 33 bp, Homo sapien
aaaatccttatttcaccgtatagatggccatat

SEQ ID NO: 94140 - DNA, 33 bp, Homo sapien
aaaatccttatttcactgtatagatggccatat

SEQ ID NO: 94141 - DNA, 33 bp, Homo sapien
ctgataggtcctcagaaatgtgatttaaatgca

SEQ ID NO: 94142 - DNA, 33 bp, Homo sapien
ctgataggtcctcagatatgtgatttaaatgca

SEQ ID NO: 94143 - DNA, 33 bp, Homo sapien
tggccacgatctttccactgtaccatgctgcct

SEQ ID NO: 94144 - DNA, 33 bp, Homo sapien
tggccacgatctttccgctgtaccatgctgcct

SEQ ID NO: 94145 - DNA, 33 bp, Homo sapien
cggcaggtccgtctgtaaaatggaggaggtctt

SEQ ID NO: 94146 - DNA, 33 bp, Homo sapien
cggcaggtccgtctgtgaaatggaggaggtctt

SEQ ID NO: 94147 - DNA, 33 bp, Homo sapien
gggaaagaatcaagtccatctctgttcccagtt

SEQ ID NO: 94148 - DNA, 33 bp, Homo sapien
gggaaagaatcaagtctatctctgttcccagtt

SEQ ID NO: 94149 - DNA, 33 bp, Homo sapien
tcgggcaagtgtataacagacttcagtctcctg

SEQ ID NO: 94150 - DNA, 33 bp, Homo sapien
tcgggcaagtgtataatagacttcagtctcctg

SEQ ID NO: 94151 - DNA, 33 bp, Homo sapien
accaatgttgggcagcaaaactgtaaaagtagt

SEQ ID NO: 94152 - DNA, 33 bp, Homo sapien
accaatgttgggcagcgaaactgtaaaagtagt

SEQ ID NO: 94153 - DNA, 33 bp, Homo sapien
ttagtctcagtaatggaaaaacattcgtcctta

SEQ ID NO: 94154 - DNA, 33 bp, Homo sapien
ttagtctcagtaatgggaaaacattcgtcctta

SEQ ID NO: 94155 - DNA, 33 bp, Homo sapien
actgcctttggggtaaccctgcttcacaaggag

SEQ ID NO: 94156 - DNA, 33 bp, Homo sapien
actgcctttggggtaagcctgcttcacaaggag

SEQ ID NO: 94157 - DNA, 33 bp, Homo sapien
gaatggggatgaatggaaaatggagatctatga

SEQ ID NO: 94158 - DNA, 33 bp, Homo sapien
gaatggggatgaatggtaaatggagatctatga

SEQ ID NO: 94159 - DNA, 33 bp, Homo sapien
aaggcagaactggaagcctggaacccaagtcct

SEQ ID NO: 94160 - DNA, 33 bp, Homo sapien
aaggcagaactggaaggctggaacccaagtcct

SEQ ID NO: 94161 - DNA, 33 bp, Homo sapien
gcagtgaagactatgacggctggtaaggtttca

SEQ ID NO: 94162 - DNA, 33 bp, Homo sapien
gcagtgaagactatgatggctggtaaggtttca

SEQ ID NO: 94163 - DNA, 33 bp, Homo sapien
atctcctgcgggggaaaaagtgcatttgcagtc

SEQ ID NO: 94164 - DNA, 33 bp, Homo sapien
atctcctgcgggggaagaagtgcatttgcagtc

SEQ ID NO: 94165 - DNA, 33 bp, Homo sapien
aggtcacagaagctaacgtagtatagagctcat

SEQ ID NO: 94166 - DNA, 33 bp, Homo sapien
aggtcacagaagctaatgtagtatagagctcat

SEQ ID NO: 94167 - DNA, 33 bp, Homo sapien
ctgtaagttactgacaaacactgtgatgcagaa

SEQ ID NO: 94168 - DNA, 33 bp, Homo sapien
ctgtaagttactgacagacactgtgatgcagaa

SEQ ID NO: 94169 - DNA, 33 bp, Homo sapien
tagaatccaactactacgccagaggtttctaaa

SEQ ID NO: 94170 - DNA, 33 bp, Homo sapien
tagaatccaactactatgccagaggtttctaaa

SEQ ID NO: 94171 - DNA, 33 bp, Homo sapien
acagcaacagactggaaagagaaatagaatcca

SEQ ID NO: 94172 - DNA, 33 bp, Homo sapien
acagcaacagactggagagagaaatagaatcca

SEQ ID NO: 94173 - DNA, 33 bp, Homo sapien
ggctgtcctagtctacacccagcagtgtgaggg

SEQ ID NO: 94174 - DNA, 33 bp, Homo sapien
ggctgtcctagtctacgcccagcagtgtgaggg

SEQ ID NO: 94175 - DNA, 33 bp, Homo sapien
agtcaagagggggtaacgaatgtgagatttctt

SEQ ID NO: 94176 - DNA, 33 bp, Homo sapien
agtcaagagggggtaatgaatgtgagatttctt

SEQ ID NO: 94177 - DNA, 33 bp, Homo sapien
ctgtgaaatactttcaataagaatttgagccag

SEQ ID NO: 94178 - DNA, 33 bp, Homo sapien
ctgtgaaatactttcagtaagaatttgagccag

SEQ ID NO: 94179 - DNA, 33 bp, Homo sapien
caggcagagaattacaacaaatagaacatagcg

SEQ ID NO: 94180 - DNA, 33 bp, Homo sapien
caggcagagaattacagcaaatagaacatagcg

SEQ ID NO: 94181 - DNA, 33 bp, Homo sapien
aaatagagatgtaaccactggcccagactttgg

SEQ ID NO: 94182 - DNA, 33 bp, Homo sapien
aaatagagatgtaacccctggcccagactttgg

SEQ ID NO: 94183 - DNA, 33 bp, Homo sapien
gccagcagtcgaactgcataatgtgatggtagt

SEQ ID NO: 94184 - DNA, 33 bp, Homo sapien
gccagcagtcgaactggataatgtgatggtagt

SEQ ID NO: 94185 - DNA, 33 bp, Homo sapien
tctgtaacacagtgcacagatcaattcatctat

SEQ ID NO: 94186 - DNA, 33 bp, Homo sapien
tctgtaacacagtgcatagatcaattcatctat

SEQ ID NO: 94187 - DNA, 33 bp, Homo sapien
gcacctttgtaagcgaacttttctctgaagtct

SEQ ID NO: 94188 - DNA, 33 bp, Homo sapien
gcacctttgtaagcgaccttttctctgaagtct

SEQ ID NO: 94189 - DNA, 33 bp, Homo sapien
taccttctagtgctatcagtgagaagtatgaca

SEQ ID NO: 94190 - DNA, 33 bp, Homo sapien
taccttctagtgctattagtgagaagtatgaca

SEQ ID NO: 94191 - DNA, 33 bp, Homo sapien
tagtcataagtagttaccacagagcggtatgat

SEQ ID NO: 94192 - DNA, 33 bp, Homo sapien
tagtcataagtagttatcacagagcggtatgat

SEQ ID NO: 94193 - DNA, 33 bp, Homo sapien
ttcattgctggttacaaactcttcccaagatcg

SEQ ID NO: 94194 - DNA, 33 bp, Homo sapien
ttcattgctggttacagactcttcccaagatcg

SEQ ID NO: 94195 - DNA, 33 bp, Homo sapien
ctggcctgtttgcgcacggtattgagtatttgg

SEQ ID NO: 94196 - DNA, 33 bp, Homo sapien
ctggcctgtttgcgcagggtattgagtatttgg

SEQ ID NO: 94197 - DNA, 33 bp, Homo sapien
attgggagtcttgagccgaaaagtactttctca

SEQ ID NO: 94198 - DNA, 33 bp, Homo sapien
attgggagtcttgagctgaaaagtactttctca

SEQ ID NO: 94199 - DNA, 33 bp, Homo sapien
aagtaaacatttcacaaagtaaacaaagtaact

SEQ ID NO: 94200 - DNA, 33 bp, Homo sapien
aagtaaacatttcacacagtaaacaaagtaact

SEQ ID NO: 94201 - DNA, 33 bp, Homo sapien
ccaactatctttgcccaatagattttataaaaa

SEQ ID NO: 94202 - DNA, 33 bp, Homo sapien
ccaactatctttgcccgatagattttataaaaa

SEQ ID NO: 94203 - DNA, 33 bp, Homo sapien
tggaagtgagcccatcaagagagtgttctctac

SEQ ID NO: 94204 - DNA, 33 bp, Homo sapien
tggaagtgagcccatcgagagagtgttctctac

SEQ ID NO: 94205 - DNA, 33 bp, Homo sapien
ccttggccactagagccagttgatgctgccgaa

SEQ ID NO: 94206 - DNA, 33 bp, Homo sapien
ccttggccactagagctagttgatgctgccgaa

SEQ ID NO: 94207 - DNA, 33 bp, Homo sapien
agagtccctgacttacagatgaaatggtgactg

SEQ ID NO: 94208 - DNA, 33 bp, Homo sapien
agagtccctgacttacggatgaaatggtgactg

SEQ ID NO: 94209 - DNA, 33 bp, Homo sapien
gagcacagaggattaacggtagtcacagagagc

SEQ ID NO: 94210 - DNA, 33 bp, Homo sapien
gagcacagaggattaatggtagtcacagagagc

SEQ ID NO: 94211 - DNA, 33 bp, Homo sapien
tgagcttgctagatgacacagagaagcttggtt

SEQ ID NO: 94212 - DNA, 33 bp, Homo sapien
tgagcttgctagatgatacagagaagcttggtt

SEQ ID NO: 94213 - DNA, 33 bp, Homo sapien
aagaatttgtatagtacctttacattttgcaaa

SEQ ID NO: 94214 - DNA, 33 bp, Homo sapien
aagaatttgtatagtatctttacattttgcaaa

SEQ ID NO: 94215 - DNA, 33 bp, Homo sapien
tgttctacatcatgcagagtagcttgaaatcta

SEQ ID NO: 94216 - DNA, 33 bp, Homo sapien
tgttctacatcatgcatagtagcttgaaatcta

SEQ ID NO: 94217 - DNA, 33 bp, Homo sapien
gtcaaaagggaaaaggcagctgatgaggttaca

SEQ ID NO: 94218 - DNA, 33 bp, Homo sapien
gtcaaaagggaaaaggtagctgatgaggttaca

SEQ ID NO: 94219 - DNA, 33 bp, Homo sapien
atcagacacaggtgaaagagcttgcgacttgtt

SEQ ID NO: 94220 - DNA, 33 bp, Homo sapien
atcagacacaggtgaaggagcttgcgacttgtt

SEQ ID NO: 94221 - DNA, 33 bp, Homo sapien
ctgacaaaagaaacacccaacagcatttttatt

SEQ ID NO: 94222 - DNA, 33 bp, Homo sapien
ctgacaaaagaaacactcaacagcatttttatt

SEQ ID NO: 94223 - DNA, 33 bp, Homo sapien
ctactaatgacttacaaagtttattgagaagcc

SEQ ID NO: 94224 - DNA, 33 bp, Homo sapien
ctactaatgacttacatagtttattgagaagcc

SEQ ID NO: 94225 - DNA, 33 bp, Homo sapien
aaatggagtgtcagaaagaggttggctgaggga

SEQ ID NO: 94226 - DNA, 33 bp, Homo sapien
aaatggagtgtcagaaggaggttggctgaggga

SEQ ID NO: 94227 - DNA, 33 bp, Homo sapien
aggaggtaggggaaaagttgtgtggtcttggcc

SEQ ID NO: 94228 - DNA, 33 bp, Homo sapien
aggaggtaggggaaaatttgtgtggtcttggcc

SEQ ID NO: 94229 - DNA, 33 bp, Homo sapien
ttgctatattgcccagactggcacgcatggtta

SEQ ID NO: 94230 - DNA, 33 bp, Homo sapien
ttgctatattgcccaggctggcacgcatggtta

SEQ ID NO: 94231 - DNA, 33 bp, Homo sapien
tttattatctccgaaacagttctctttaacctt

SEQ ID NO: 94232 - DNA, 33 bp, Homo sapien
tttattatctccgaaatagttctctttaacctt

SEQ ID NO: 94233 - DNA, 33 bp, Homo sapien
gatctatggaagaaaaactgccgagagaaggaa

SEQ ID NO: 94234 - DNA, 33 bp, Homo sapien
gatctatggaagaaaagctgccgagagaaggaa

SEQ ID NO: 94235 - DNA, 33 bp, Homo sapien
agctgcacgctgaagacgtaatttaacactctg

SEQ ID NO: 94236 - DNA, 33 bp, Homo sapien
agctgcacgctgaagatgtaatttaacactctg

SEQ ID NO: 94237 - DNA, 33 bp, Homo sapien
aggtctaacaatggacaggattccaggggcctt

SEQ ID NO: 94238 - DNA, 33 bp, Homo sapien
aggtctaacaatggacgggattccaggggcctt

SEQ ID NO: 94239 - DNA, 33 bp, Homo sapien
gtattaaccactgaaacgaataaatgggactgc

SEQ ID NO: 94240 - DNA, 33 bp, Homo sapien
gtattaaccactgaaatgaataaatgggactgc

SEQ ID NO: 94241 - DNA, 33 bp, Homo sapien
gtgtcttcacctacaaagatacacccagttatt

SEQ ID NO: 94242 - DNA, 33 bp, Homo sapien
gtgtcttcacctacaacgatacacccagttatt

SEQ ID NO: 94243 - DNA, 33 bp, Homo sapien
ctggaatttcaagtaacatgagatgggaaggaa

SEQ ID NO: 94244 - DNA, 33 bp, Homo sapien
ctggaatttcaagtaatatgagatgggaaggaa

SEQ ID NO: 94245 - DNA, 33 bp, Homo sapien
gtacctgaactttctgcaaatgtgttacctgaa

SEQ ID NO: 94246 - DNA, 33 bp, Homo sapien
gtacctgaactttctggaaatgtgttacctgaa

SEQ ID NO: 94247 - DNA, 33 bp, Homo sapien
gaaagcaacagagagacgcagctacaaatgtgg

SEQ ID NO: 94248 - DNA, 33 bp, Homo sapien
gaaagcaacagagagatgcagctacaaatgtgg

SEQ ID NO: 94249 - DNA, 33 bp, Homo sapien
cttaaatacaggtctacggggtctcacagggga

SEQ ID NO: 94250 - DNA, 33 bp, Homo sapien
cttaaatacaggtctatggggtctcacagggga

SEQ ID NO: 94251 - DNA, 33 bp, Homo sapien
agggccctgaatcccgcagtagtgatacgcaga

SEQ ID NO: 94252 - DNA, 33 bp, Homo sapien
agggccctgaatcccgtagtagtgatacgcaga

SEQ ID NO: 94253 - DNA, 33 bp, Homo sapien
tcattgtattggtataccgatgcttatctatta

SEQ ID NO: 94254 - DNA, 33 bp, Homo sapien
tcattgtattggtatatcgatgcttatctatta

SEQ ID NO: 94255 - DNA, 33 bp, Homo sapien
agtggaatatgagaaaaaaacctgattgatgta

SEQ ID NO: 94256 - DNA, 33 bp, Homo sapien
agtggaatatgagaaagaaacctgattgatgta

SEQ ID NO: 94257 - DNA, 33 bp, Homo sapien
tctggggtcccaccaacgaacgtctgacacggt

SEQ ID NO: 94258 - DNA, 33 bp, Homo sapien
tctggggtcccaccaatgaacgtctgacacggt

SEQ ID NO: 94259 - DNA, 33 bp, Homo sapien
aagagagactctccccaacaatgcccatgtcct

SEQ ID NO: 94260 - DNA, 33 bp, Homo sapien
aagagagactctccccgacaatgcccatgtcct

SEQ ID NO: 94261 - DNA, 33 bp, Homo sapien
ctgcctagaaatgttacgaagctctctgtccca

SEQ ID NO: 94262 - DNA, 33 bp, Homo sapien
ctgcctagaaatgttatgaagctctctgtccca

SEQ ID NO: 94263 - DNA, 33 bp, Homo sapien
attctctaaaaggcccacaaattaaatcagaga

SEQ ID NO: 94264 - DNA, 33 bp, Homo sapien
attctctaaaaggcccgcaaattaaatcagaga

SEQ ID NO: 94265 - DNA, 33 bp, Homo sapien
ttgagcatttcaagaaacttgttcttatggctt

SEQ ID NO: 94266 - DNA, 33 bp, Homo sapien
ttgagcatttcaagaagcttgttcttatggctt

SEQ ID NO: 94267 - DNA, 33 bp, Homo sapien
tgtaccacagtgtggaaagaggaaaaggtgtat

SEQ ID NO: 94268 - DNA, 33 bp, Homo sapien
tgtaccacagtgtggacagaggaaaaggtgtat

SEQ ID NO: 94269 - DNA, 33 bp, Homo sapien
cctgcgctaggactagaacccatcactgccagg

SEQ ID NO: 94270 - DNA, 33 bp, Homo sapien
cctgcgctaggactaggacccatcactgccagg

SEQ ID NO: 94271 - DNA, 33 bp, Homo sapien
cctatgagacaggaaacgtgcctacggtgggga

SEQ ID NO: 94272 - DNA, 33 bp, Homo sapien
cctatgagacaggaaatgtgcctacggtgggga

SEQ ID NO: 94273 - DNA, 33 bp, Homo sapien
ctctgccatgctaaataactgacctgaagccat

SEQ ID NO: 94274 - DNA, 33 bp, Homo sapien
ctctgccatgctaaatgactgacctgaagccat

SEQ ID NO: 94275 - DNA, 33 bp, Homo sapien
tttctttttttgcctcacacagatatcgctagg

SEQ ID NO: 94276 - DNA, 33 bp, Homo sapien
tttctttttttgcctcgcacagatatcgctagg

SEQ ID NO: 94277 - DNA, 33 bp, Homo sapien
cagctcaaggagggacaatggtaagagccacag

SEQ ID NO: 94278 - DNA, 33 bp, Homo sapien
cagctcaaggagggacgatggtaagagccacag

SEQ ID NO: 94279 - DNA, 33 bp, Homo sapien
gatattctgctccggcaacttttatccattcaa

SEQ ID NO: 94280 - DNA, 33 bp, Homo sapien
gatattctgctccggcgacttttatccattcaa

SEQ ID NO: 94281 - DNA, 33 bp, Homo sapien
acttctgtatctgcagccatccttttccctcac

SEQ ID NO: 94282 - DNA, 33 bp, Homo sapien
acttctgtatctgcagtcatccttttccctcac

SEQ ID NO: 94283 - DNA, 33 bp, Homo sapien
acaaacacacaaatgacgcccctgacttctgta

SEQ ID NO: 94284 - DNA, 33 bp, Homo sapien
acaaacacacaaatgatgcccctgacttctgta

SEQ ID NO: 94285 - DNA, 33 bp, Homo sapien
gagcagtatcactagaaagggccatgagcagac

SEQ ID NO: 94286 - DNA, 33 bp, Homo sapien
gagcagtatcactagagagggccatgagcagac

SEQ ID NO: 94287 - DNA, 33 bp, Homo sapien
tccaaaccaagataccactacaaatgaaaaggg

SEQ ID NO: 94288 - DNA, 33 bp, Homo sapien
tccaaaccaagataccgctacaaatgaaaaggg

SEQ ID NO: 94289 - DNA, 33 bp, Homo sapien
gttctttatgacaatcaaagcttcaaacttgct

SEQ ID NO: 94290 - DNA, 33 bp, Homo sapien
gttctttatgacaatcgaagcttcaaacttgct

SEQ ID NO: 94291 - DNA, 33 bp, Homo sapien
accacctgggactgaaaagacaaatctcctttt

SEQ ID NO: 94292 - DNA, 33 bp, Homo sapien
accacctgggactgaatagacaaatctcctttt

SEQ ID NO: 94293 - DNA, 33 bp, Homo sapien
acacccagccagatgacgtagcagccgccctga

SEQ ID NO: 94294 - DNA, 33 bp, Homo sapien
acacccagccagatgatgtagcagccgccctga

SEQ ID NO: 94295 - DNA, 33 bp, Homo sapien
atttgactgcctttcccgctagactgtaagctc

SEQ ID NO: 94296 - DNA, 33 bp, Homo sapien
atttgactgcctttcctgctagactgtaagctc

SEQ ID NO: 94297 - DNA, 33 bp, Homo sapien
caaacatccaagacaaagagaatgcaagtcctt

SEQ ID NO: 94298 - DNA, 33 bp, Homo sapien
caaacatccaagacaaggagaatgcaagtcctt

SEQ ID NO: 94299 - DNA, 33 bp, Homo sapien
cacagcctacctgctcggaatgcgtagtcagga

SEQ ID NO: 94300 - DNA, 33 bp, Homo sapien
cacagcctacctgctctgaatgcgtagtcagga

SEQ ID NO: 94301 - DNA, 33 bp, Homo sapien
cctggatctaggagtcaacttcacaaaacccca

SEQ ID NO: 94302 - DNA, 33 bp, Homo sapien
cctggatctaggagtcgacttcacaaaacccca

SEQ ID NO: 94303 - DNA, 33 bp, Homo sapien
aaaggaaaaaggtccccatctacactgagttgc

SEQ ID NO: 94304 - DNA, 33 bp, Homo sapien
aaaggaaaaaggtccctatctacactgagttgc

SEQ ID NO: 94305 - DNA, 33 bp, Homo sapien
agcctggcccagacaacgcagttcacactttct

SEQ ID NO: 94306 - DNA, 33 bp, Homo sapien
agcctggcccagacaatgcagttcacactttct

SEQ ID NO: 94307 - DNA, 33 bp, Homo sapien
catgaatcatagataaatcacatgaatttacca

SEQ ID NO: 94308 - DNA, 33 bp, Homo sapien
catgaatcatagataagtcacatgaatttacca

SEQ ID NO: 94309 - DNA, 33 bp, Homo sapien
cttgcagactgacaccacaggtatacactaaga

SEQ ID NO: 94310 - DNA, 33 bp, Homo sapien
cttgcagactgacaccgcaggtatacactaaga

SEQ ID NO: 94311 - DNA, 33 bp, Homo sapien
actcaggttttgattgaatacttgggggccagt

SEQ ID NO: 94312 - DNA, 33 bp, Homo sapien
actcaggttttgattggatacttgggggccagt

SEQ ID NO: 94313 - DNA, 33 bp, Homo sapien
cagtagcactttgacaaatggagcacaacccgg

SEQ ID NO: 94314 - DNA, 33 bp, Homo sapien
cagtagcactttgacagatggagcacaacccgg

SEQ ID NO: 94315 - DNA, 33 bp, Homo sapien
gaactgggaatagcataatctggccccacggat

SEQ ID NO: 94316 - DNA, 33 bp, Homo sapien
gaactgggaatagcatgatctggccccacggat

SEQ ID NO: 94317 - DNA, 33 bp, Homo sapien
tttggggttttgataaatgccagtccatatcta

SEQ ID NO: 94318 - DNA, 33 bp, Homo sapien
tttggggttttgataagtgccagtccatatcta

SEQ ID NO: 94319 - DNA, 33 bp, Homo sapien
aatggtatggaaagacaaaccgtgaccgtctgc

SEQ ID NO: 94320 - DNA, 33 bp, Homo sapien
aatggtatggaaagacgaaccgtgaccgtctgc

SEQ ID NO: 94321 - DNA, 33 bp, Homo sapien
cttagtttctaagtgtaaagcaacagaccaggg

SEQ ID NO: 94322 - DNA, 33 bp, Homo sapien
cttagtttctaagtgtgaagcaacagaccaggg

SEQ ID NO: 94323 - DNA, 33 bp, Homo sapien
agcctcgtacaggaaagagagaccaacacaaat

SEQ ID NO: 94324 - DNA, 33 bp, Homo sapien
agcctcgtacaggaaatagagaccaacacaaat

SEQ ID NO: 94325 - DNA, 33 bp, Homo sapien
ttcagcttttgctgccaggcagacccaggttct

SEQ ID NO: 94326 - DNA, 33 bp, Homo sapien
ttcagcttttgctgccgggcagacccaggttct

SEQ ID NO: 94327 - DNA, 33 bp, Homo sapien
tcagttaaacaattcacataaagcactcagcaa

SEQ ID NO: 94328 - DNA, 33 bp, Homo sapien
tcagttaaacaattcatataaagcactcagcaa

SEQ ID NO: 94329 - DNA, 33 bp, Homo sapien
catcccacaaaaggagacactacaagcttatgg

SEQ ID NO: 94330 - DNA, 33 bp, Homo sapien
catcccacaaaaggaggcactacaagcttatgg

SEQ ID NO: 94331 - DNA, 33 bp, Homo sapien
ctacaagcttatggagcaattggatacaggaca

SEQ ID NO: 94332 - DNA, 33 bp, Homo sapien
ctacaagcttatggaggaattggatacaggaca

SEQ ID NO: 94333 - DNA, 33 bp, Homo sapien
acatcatgcaagtcacactaaagatgtcctttt

SEQ ID NO: 94334 - DNA, 33 bp, Homo sapien
acatcatgcaagtcacgctaaagatgtcctttt

SEQ ID NO: 94335 - DNA, 33 bp, Homo sapien
aagatagagaaaaagaaaggaaaggctcgaggg

SEQ ID NO: 94336 - DNA, 33 bp, Homo sapien
aagatagagaaaaagagaggaaaggctcgaggg

SEQ ID NO: 94337 - DNA, 33 bp, Homo sapien
cagaagctggaggaaacggacgcgaaattgcct

SEQ ID NO: 94338 - DNA, 33 bp, Homo sapien
cagaagctggaggaaatggacgcgaaattgcct

SEQ ID NO: 94339 - DNA, 33 bp, Homo sapien
tatctgacactgtggacacccgccggaaggtat

SEQ ID NO: 94340 - DNA, 33 bp, Homo sapien
tatctgacactgtggagacccgccggaaggtat

SEQ ID NO: 94341 - DNA, 33 bp, Homo sapien
gatgagacctcatctcaccttcgtaacttatta

SEQ ID NO: 94342 - DNA, 33 bp, Homo sapien
gatgagacctcatctcgccttcgtaacttatta

SEQ ID NO: 94343 - DNA, 33 bp, Homo sapien
acccaccttgccctcccaaagtacaggcatgaa

SEQ ID NO: 94344 - DNA, 33 bp, Homo sapien
acccaccttgccctccgaaagtacaggcatgaa

SEQ ID NO: 94345 - DNA, 33 bp, Homo sapien
attctgctttgccaacaaaggctacctagacat

SEQ ID NO: 94346 - DNA, 33 bp, Homo sapien
attctgctttgccaacgaaggctacctagacat

SEQ ID NO: 94347 - DNA, 33 bp, Homo sapien
cctgaagaaaatagagacaaattggttaggggt

SEQ ID NO: 94348 - DNA, 33 bp, Homo sapien
cctgaagaaaatagaggcaaattggttaggggt

SEQ ID NO: 94349 - DNA, 33 bp, Homo sapien
cacacagcattagctacgggggaaatgcagtgg

SEQ ID NO: 94350 - DNA, 33 bp, Homo sapien
cacacagcattagctatgggggaaatgcagtgg

SEQ ID NO: 94351 - DNA, 33 bp, Homo sapien
gcattttccagatataaaaagtcaactggtgct

SEQ ID NO: 94352 - DNA, 33 bp, Homo sapien
gcattttccagatatagaaagtcaactggtgct

SEQ ID NO: 94353 - DNA, 33 bp, Homo sapien
caaggaagacttcactaaaagtaagacttgaac

SEQ ID NO: 94354 - DNA, 33 bp, Homo sapien
caaggaagacttcactgaaagtaagacttgaac

SEQ ID NO: 94355 - DNA, 33 bp, Homo sapien
caaagacattttggcaccctttaatacatcctg

SEQ ID NO: 94356 - DNA, 33 bp, Homo sapien
caaagacattttggcagcctttaatacatcctg

SEQ ID NO: 94357 - DNA, 33 bp, Homo sapien
tccaagcacactcaccagatattaggaaagtta

SEQ ID NO: 94358 - DNA, 33 bp, Homo sapien
tccaagcacactcaccggatattaggaaagtta

SEQ ID NO: 94359 - DNA, 33 bp, Homo sapien
tttggctttttaaactcagcgctagctcttact

SEQ ID NO: 94360 - DNA, 33 bp, Homo sapien
tttggctttttaaacttagcgctagctcttact

SEQ ID NO: 94361 - DNA, 33 bp, Homo sapien
atttacaaatggagaaataaaggccgtgaagag

SEQ ID NO: 94362 - DNA, 33 bp, Homo sapien
atttacaaatggagaagtaaaggccgtgaagag

SEQ ID NO: 94363 - DNA, 33 bp, Homo sapien
acaggatatattaactcactagattcaagagat

SEQ ID NO: 94364 - DNA, 33 bp, Homo sapien
acaggatatattaactgactagattcaagagat

SEQ ID NO: 94365 - DNA, 33 bp, Homo sapien
aggtcttcggggtttccatctgagggtgtatga

SEQ ID NO: 94366 - DNA, 33 bp, Homo sapien
aggtcttcggggtttctatctgagggtgtatga

SEQ ID NO: 94367 - DNA, 33 bp, Homo sapien
gtttggaaatgttctcactacaaaaatcgtaag

SEQ ID NO: 94368 - DNA, 33 bp, Homo sapien
gtttggaaatgttctcgctacaaaaatcgtaag

SEQ ID NO: 94369 - DNA, 33 bp, Homo sapien
tattgtagctaataacaatgtcttcaatgcttg

SEQ ID NO: 94370 - DNA, 33 bp, Homo sapien
tattgtagctaataacgatgtcttcaatgcttg

SEQ ID NO: 94371 - DNA, 33 bp, Homo sapien
ttctaccacgagacagcatggaacctggacacc

SEQ ID NO: 94372 - DNA, 33 bp, Homo sapien
ttctaccacgagacaggatggaacctggacacc

SEQ ID NO: 94373 - DNA, 33 bp, Homo sapien
catctgatgattttggcatcttagcagggtcct

SEQ ID NO: 94374 - DNA, 33 bp, Homo sapien
catctgatgattttggtatcttagcagggtcct

SEQ ID NO: 94375 - DNA, 33 bp, Homo sapien
ttttacatccttgctcgcctgactttcatgaaa

SEQ ID NO: 94376 - DNA, 33 bp, Homo sapien
ttttacatccttgctctcctgactttcatgaaa

SEQ ID NO: 94377 - DNA, 33 bp, Homo sapien
agtaagacaaagtccactgaagacggtgaggca

SEQ ID NO: 94378 - DNA, 33 bp, Homo sapien
agtaagacaaagtccattgaagacggtgaggca

SEQ ID NO: 94379 - DNA, 33 bp, Homo sapien
catggtctagcccccaacaaagcccagcacaca

SEQ ID NO: 94380 - DNA, 33 bp, Homo sapien
catggtctagcccccagcaaagcccagcacaca

SEQ ID NO: 94381 - DNA, 33 bp, Homo sapien
aatgtaaagcgcgttacctcctccagagagaac

SEQ ID NO: 94382 - DNA, 33 bp, Homo sapien
aatgtaaagcgcgttatctcctccagagagaac

SEQ ID NO: 94383 - DNA, 33 bp, Homo sapien
gcctgaagccacacagccagtaaggagctccca

SEQ ID NO: 94384 - DNA, 33 bp, Homo sapien
gcctgaagccacacagtcagtaaggagctccca

SEQ ID NO: 94385 - DNA, 33 bp, Homo sapien
gtgggctcttgtaaagacttacgagatgctagg

SEQ ID NO: 94386 - DNA, 33 bp, Homo sapien
gtgggctcttgtaaaggcttacgagatgctagg

SEQ ID NO: 94387 - DNA, 33 bp, Homo sapien
tgcaattctgtatagagtagtgggctcttgtaa

SEQ ID NO: 94388 - DNA, 33 bp, Homo sapien
tgcaattctgtatagattagtgggctcttgtaa

SEQ ID NO: 94389 - DNA, 33 bp, Homo sapien
taatcatctcaacaacactatgaggcagatgtt

SEQ ID NO: 94390 - DNA, 33 bp, Homo sapien
taatcatctcaacaaccctatgaggcagatgtt

SEQ ID NO: 94391 - DNA, 33 bp, Homo sapien
tcagcattacaaagcacgtcaggagaacaaggc

SEQ ID NO: 94392 - DNA, 33 bp, Homo sapien
tcagcattacaaagcaggtcaggagaacaaggc

SEQ ID NO: 94393 - DNA, 33 bp, Homo sapien
gacattgaataaaaacaatccaatgatgattaa

SEQ ID NO: 94394 - DNA, 33 bp, Homo sapien
gacattgaataaaaaccatccaatgatgattaa

SEQ ID NO: 94395 - DNA, 33 bp, Homo sapien
actgtaacattagaccactttttaatttcatct

SEQ ID NO: 94396 - DNA, 33 bp, Homo sapien
actgtaacattagaccgctttttaatttcatct

SEQ ID NO: 94397 - DNA, 33 bp, Homo sapien
aaccacctggaattaacgcagatttcacaggtt

SEQ ID NO: 94398 - DNA, 33 bp, Homo sapien
aaccacctggaattaatgcagatttcacaggtt

SEQ ID NO: 94399 - DNA, 33 bp, Homo sapien
acgtgtatggactagaagacactcagaagacag

SEQ ID NO: 94400 - DNA, 33 bp, Homo sapien
acgtgtatggactagacgacactcagaagacag

SEQ ID NO: 94401 - DNA, 33 bp, Homo sapien
taaaatgggaattataagtaccttgcaggattt

SEQ ID NO: 94402 - DNA, 33 bp, Homo sapien
taaaatgggaattataggtaccttgcaggattt

SEQ ID NO: 94403 - DNA, 33 bp, Homo sapien
aaagagtcacgatgggaagaaagtctcttttct

SEQ ID NO: 94404 - DNA, 33 bp, Homo sapien
aaagagtcacgatggggagaaagtctcttttct

SEQ ID NO: 94405 - DNA, 33 bp, Homo sapien
gagaatactgtagttgaactaagggctaagagt

SEQ ID NO: 94406 - DNA, 33 bp, Homo sapien
gagaatactgtagttgtactaagggctaagagt

SEQ ID NO: 94407 - DNA, 33 bp, Homo sapien
gtatgtgtgtacatgaatatatgtatgtgagtg

SEQ ID NO: 94408 - DNA, 33 bp, Homo sapien
gtatgtgtgtacatgagtatatgtatgtgagtg

SEQ ID NO: 94409 - DNA, 33 bp, Homo sapien
cccaccaaacttaacactgaaggctttagacat

SEQ ID NO: 94410 - DNA, 33 bp, Homo sapien
cccaccaaacttaacattgaaggctttagacat

SEQ ID NO: 94411 - DNA, 33 bp, Homo sapien
ttacatgatactgggacgcaaccattgaaatca

SEQ ID NO: 94412 - DNA, 33 bp, Homo sapien
ttacatgatactgggatgcaaccattgaaatca

SEQ ID NO: 94413 - DNA, 33 bp, Homo sapien
taggttttgtgctccaatgatgtcaaatcagtc

SEQ ID NO: 94414 - DNA, 33 bp, Homo sapien
taggttttgtgctccagtgatgtcaaatcagtc

SEQ ID NO: 94415 - DNA, 33 bp, Homo sapien
tttctaagtgctaagcaacccccttcttacccc

SEQ ID NO: 94416 - DNA, 33 bp, Homo sapien
tttctaagtgctaagcgacccccttcttacccc

SEQ ID NO: 94417 - DNA, 33 bp, Homo sapien
ttaatttcaagtttcaatagggcagataatagc

SEQ ID NO: 94418 - DNA, 33 bp, Homo sapien
ttaatttcaagtttcagtagggcagataatagc

SEQ ID NO: 94419 - DNA, 33 bp, Homo sapien
gggatgtcaacgagtacgcaattggtaactaga

SEQ ID NO: 94420 - DNA, 33 bp, Homo sapien
gggatgtcaacgagtaggcaattggtaactaga

SEQ ID NO: 94421 - DNA, 33 bp, Homo sapien
acctgcctgggtccacacctcatcgtctacact

SEQ ID NO: 94422 - DNA, 33 bp, Homo sapien
acctgcctgggtccacgcctcatcgtctacact

SEQ ID NO: 94423 - DNA, 33 bp, Homo sapien
cgtgcgtgaagagtacaacacaaaactgtaaac

SEQ ID NO: 94424 - DNA, 33 bp, Homo sapien
cgtgcgtgaagagtacgacacaaaactgtaaac

SEQ ID NO: 94425 - DNA, 33 bp, Homo sapien
agaaggataactagaccgggtgaaggtccagaa

SEQ ID NO: 94426 - DNA, 33 bp, Homo sapien
agaaggataactagactgggtgaaggtccagaa

SEQ ID NO: 94427 - DNA, 33 bp, Homo sapien
ttccattgaatccgaaagtatcttctggaattt

SEQ ID NO: 94428 - DNA, 33 bp, Homo sapien
ttccattgaatccgaatgtatcttctggaattt

SEQ ID NO: 94429 - DNA, 33 bp, Homo sapien
tatgtggcttcacccaccactgagggcagatcc

SEQ ID NO: 94430 - DNA, 33 bp, Homo sapien
tatgtggcttcacccatcactgagggcagatcc

SEQ ID NO: 94431 - DNA, 33 bp, Homo sapien
tcctttgcttcttgccaatgaaactgaccacgc

SEQ ID NO: 94432 - DNA, 33 bp, Homo sapien
tcctttgcttcttgccgatgaaactgaccacgc

SEQ ID NO: 94433 - DNA, 33 bp, Homo sapien
cctagttcaatatgtcaaaatgagaaatagaca

SEQ ID NO: 94434 - DNA, 33 bp, Homo sapien
cctagttcaatatgtcgaaatgagaaatagaca

SEQ ID NO: 94435 - DNA, 33 bp, Homo sapien
cagtaaaggcagtaacaatctttgatggtagtc

SEQ ID NO: 94436 - DNA, 33 bp, Homo sapien
cagtaaaggcagtaacgatctttgatggtagtc

SEQ ID NO: 94437 - DNA, 33 bp, Homo sapien
gcaacattgtattcaccggctggacaatatagc

SEQ ID NO: 94438 - DNA, 33 bp, Homo sapien
gcaacattgtattcactggctggacaatatagc

SEQ ID NO: 94439 - DNA, 33 bp, Homo sapien
cctcaccatcaatagaaagggaattgggcatac

SEQ ID NO: 94440 - DNA, 33 bp, Homo sapien
cctcaccatcaatagagagggaattgggcatac

SEQ ID NO: 94441 - DNA, 33 bp, Homo sapien
tcctgtcttttctctgacaatgctactgataac

SEQ ID NO: 94442 - DNA, 33 bp, Homo sapien
tcctgtcttttctctggcaatgctactgataac

SEQ ID NO: 94443 - DNA, 33 bp, Homo sapien
acattgaatctacaaacagagatttgaattcta

SEQ ID NO: 94444 - DNA, 33 bp, Homo sapien
acattgaatctacaaagagagatttgaattcta

SEQ ID NO: 94445 - DNA, 33 bp, Homo sapien
ctacagcaactgagaaaagtcatcaggtataaa

SEQ ID NO: 94446 - DNA, 33 bp, Homo sapien
ctacagcaactgagaagagtcatcaggtataaa

SEQ ID NO: 94447 - DNA, 33 bp, Homo sapien
agtcatcaggtataaaacaatcacagagccact

SEQ ID NO: 94448 - DNA, 33 bp, Homo sapien
agtcatcaggtataaagcaatcacagagccact

SEQ ID NO: 94449 - DNA, 33 bp, Homo sapien
ttgaatttctgacaccacagtaatgacagggaa

SEQ ID NO: 94450 - DNA, 33 bp, Homo sapien
ttgaatttctgacaccgcagtaatgacagggaa

SEQ ID NO: 94451 - DNA, 33 bp, Homo sapien
acaggtgcttcaatagcagggtggtaactaaca

SEQ ID NO: 94452 - DNA, 33 bp, Homo sapien
acaggtgcttcaatagtagggtggtaactaaca

SEQ ID NO: 94453 - DNA, 33 bp, Homo sapien
agggtggtaactaacactgaatcaattctcact

SEQ ID NO: 94454 - DNA, 33 bp, Homo sapien
agggtggtaactaacattgaatcaattctcact

SEQ ID NO: 94455 - DNA, 33 bp, Homo sapien
ctgtctatcccttacactggtgataatcagtga

SEQ ID NO: 94456 - DNA, 33 bp, Homo sapien
ctgtctatcccttacattggtgataatcagtga

SEQ ID NO: 94457 - DNA, 33 bp, Homo sapien
tgcctgtctttatttacgtagtaccttctattt

SEQ ID NO: 94458 - DNA, 33 bp, Homo sapien
tgcctgtctttatttatgtagtaccttctattt

SEQ ID NO: 94459 - DNA, 33 bp, Homo sapien
gcagtctgctctaaaaataaaaagctctcctcc

SEQ ID NO: 94460 - DNA, 33 bp, Homo sapien
gcagtctgctctaaaagtaaaaagctctcctcc

SEQ ID NO: 94461 - DNA, 33 bp, Homo sapien
acagagcctaagtctaaagttgtggtactagta

SEQ ID NO: 94462 - DNA, 33 bp, Homo sapien
acagagcctaagtctacagttgtggtactagta

SEQ ID NO: 94463 - DNA, 33 bp, Homo sapien
gtacacacacataaaccgggtatgttagcacag

SEQ ID NO: 94464 - DNA, 33 bp, Homo sapien
gtacacacacataaactgggtatgttagcacag

SEQ ID NO: 94465 - DNA, 33 bp, Homo sapien
aggtaggccacgtttaacttatacataagcagt

SEQ ID NO: 94466 - DNA, 33 bp, Homo sapien
aggtaggccacgtttatcttatacataagcagt

SEQ ID NO: 94467 - DNA, 33 bp, Homo sapien
aaggggagatagacaaaataaacctgcaagtca

SEQ ID NO: 94468 - DNA, 33 bp, Homo sapien
aaggggagatagacaacataaacctgcaagtca

SEQ ID NO: 94469 - DNA, 33 bp, Homo sapien
tccttgaaagaagtaactgcagatcttgcccat

SEQ ID NO: 94470 - DNA, 33 bp, Homo sapien
tccttgaaagaagtaagtgcagatcttgcccat

SEQ ID NO: 94471 - DNA, 33 bp, Homo sapien
agcagttggttttttaacttagctgctctgttt

SEQ ID NO: 94472 - DNA, 33 bp, Homo sapien
agcagttggttttttatcttagctgctctgttt

SEQ ID NO: 94473 - DNA, 33 bp, Homo sapien
tagaaccgctaatagaaactaggcctccagctt

SEQ ID NO: 94474 - DNA, 33 bp, Homo sapien
tagaaccgctaatagagactaggcctccagctt

SEQ ID NO: 94475 - DNA, 33 bp, Homo sapien
agggataggggatagaacaaaggctttactgca

SEQ ID NO: 94476 - DNA, 33 bp, Homo sapien
agggataggggatagagcaaaggctttactgca

SEQ ID NO: 94477 - DNA, 33 bp, Homo sapien
agctaacattaaagcactcattcaactttcatt

SEQ ID NO: 94478 - DNA, 33 bp, Homo sapien
agctaacattaaagcattcattcaactttcatt

SEQ ID NO: 94479 - DNA, 33 bp, Homo sapien
aggtgtggcatctgcaaagtcaccagctaaaca

SEQ ID NO: 94480 - DNA, 33 bp, Homo sapien
aggtgtggcatctgcacagtcaccagctaaaca

SEQ ID NO: 94481 - DNA, 33 bp, Homo sapien
attcaatatcaggttacgaagagaaccatgtgt

SEQ ID NO: 94482 - DNA, 33 bp, Homo sapien
attcaatatcaggttatgaagagaaccatgtgt

SEQ ID NO: 94483 - DNA, 33 bp, Homo sapien
aaagtaaagagcttcaactggactcctggtttc

SEQ ID NO: 94484 - DNA, 33 bp, Homo sapien
aaagtaaagagcttcagctggactcctggtttc

SEQ ID NO: 94485 - DNA, 33 bp, Homo sapien
ccattcttttcagtccacccaagatgaatagga

SEQ ID NO: 94486 - DNA, 33 bp, Homo sapien
ccattcttttcagtccgcccaagatgaatagga

SEQ ID NO: 94487 - DNA, 33 bp, Homo sapien
ctgaacacaaggaaaacttctaatactgagagt

SEQ ID NO: 94488 - DNA, 33 bp, Homo sapien
ctgaacacaaggaaaatttctaatactgagagt

SEQ ID NO: 94489 - DNA, 33 bp, Homo sapien
gaattcaacgccagtaccaaccgtatggttcac

SEQ ID NO: 94490 - DNA, 33 bp, Homo sapien
gaattcaacgccagtatcaaccgtatggttcac

SEQ ID NO: 94491 - DNA, 33 bp, Homo sapien
catatttttaataggacaagaaataacatgtat

SEQ ID NO: 94492 - DNA, 33 bp, Homo sapien
catatttttaataggagaagaaataacatgtat

SEQ ID NO: 94493 - DNA, 33 bp, Homo sapien
acctgcctggtgtctacgatctgagactcttct

SEQ ID NO: 94494 - DNA, 33 bp, Homo sapien
acctgcctggtgtctatgatctgagactcttct

SEQ ID NO: 94495 - DNA, 33 bp, Homo sapien
cccttctgtctgagggaaagcacaaatcctaac

SEQ ID NO: 94496 - DNA, 33 bp, Homo sapien
cccttctgtctgagggcaagcacaaatcctaac

SEQ ID NO: 94497 - DNA, 33 bp, Homo sapien
tcatttcaacagtctacaggacacatggctggc

SEQ ID NO: 94498 - DNA, 33 bp, Homo sapien
tcatttcaacagtctataggacacatggctggc

SEQ ID NO: 94499 - DNA, 33 bp, Homo sapien
gcactcgatatgttcccaccattcagagacaac

SEQ ID NO: 94500 - DNA, 33 bp, Homo sapien
gcactcgatatgttcctaccattcagagacaac

SEQ ID NO: 94501 - DNA, 33 bp, Homo sapien
tgcattgctctgagacacaagaaggcaactcct

SEQ ID NO: 94502 - DNA, 33 bp, Homo sapien
tgcattgctctgagacgcaagaaggcaactcct

SEQ ID NO: 94503 - DNA, 33 bp, Homo sapien
cttctttgtgccataaactccccgaggtcaagt

SEQ ID NO: 94504 - DNA, 33 bp, Homo sapien
cttctttgtgccataagctccccgaggtcaagt

SEQ ID NO: 94505 - DNA, 33 bp, Homo sapien
gaccttacataacccacaacaatctcctctctg

SEQ ID NO: 94506 - DNA, 33 bp, Homo sapien
gaccttacataacccataacaatctcctctctg

SEQ ID NO: 94507 - DNA, 33 bp, Homo sapien
tcctagcgcatccataacatccacgtagtcaac

SEQ ID NO: 94508 - DNA, 33 bp, Homo sapien
tcctagcgcatccatagcatccacgtagtcaac

SEQ ID NO: 94509 - DNA, 33 bp, Homo sapien
ttaatcttcaccagaccgctatcattcccaatt

SEQ ID NO: 94510 - DNA, 33 bp, Homo sapien
ttaatcttcaccagactgctatcattcccaatt

SEQ ID NO: 94511 - DNA, 33 bp, Homo sapien
tacaatgatggataaacggaatgaaggtgaaga

SEQ ID NO: 94512 - DNA, 33 bp, Homo sapien
tacaatgatggataaatggaatgaaggtgaaga

SEQ ID NO: 94513 - DNA, 33 bp, Homo sapien
caggttctgctattgacaatcagggtgaaagac

SEQ ID NO: 94514 - DNA, 33 bp, Homo sapien
caggttctgctattgataatcagggtgaaagac

SEQ ID NO: 94515 - DNA, 33 bp, Homo sapien
tgcttctgaaacaagacgctgagaaatctccat

SEQ ID NO: 94516 - DNA, 33 bp, Homo sapien
tgcttctgaaacaagatgctgagaaatctccat

SEQ ID NO: 94517 - DNA, 33 bp, Homo sapien
ataaacaagaattcccaagaacagcaagaccta

SEQ ID NO: 94518 - DNA, 33 bp, Homo sapien
ataaacaagaattcccgagaacagcaagaccta

SEQ ID NO: 94519 - DNA, 33 bp, Homo sapien
gtggctgtaatgtctacgcctgtggaagggagc

SEQ ID NO: 94520 - DNA, 33 bp, Homo sapien
gtggctgtaatgtctatgcctgtggaagggagc

SEQ ID NO: 94521 - DNA, 33 bp, Homo sapien
agaatggaaaatcgacacttaagaaacttccac

SEQ ID NO: 94522 - DNA, 33 bp, Homo sapien
agaatggaaaatcgactcttaagaaacttccac

SEQ ID NO: 94523 - DNA, 33 bp, Homo sapien
ggatcagaggagaaaacagctgcatagattaag

SEQ ID NO: 94524 - DNA, 33 bp, Homo sapien
ggatcagaggagaaaatagctgcatagattaag

SEQ ID NO: 94525 - DNA, 33 bp, Homo sapien
ttcctgttgggttcaacggatgtatcttccttt

SEQ ID NO: 94526 - DNA, 33 bp, Homo sapien
ttcctgttgggttcaatggatgtatcttccttt

SEQ ID NO: 94527 - DNA, 33 bp, Homo sapien
caacttccatcaaagcaacggtttctcccatcc

SEQ ID NO: 94528 - DNA, 33 bp, Homo sapien
caacttccatcaaagcgacggtttctcccatcc

SEQ ID NO: 94529 - DNA, 33 bp, Homo sapien
tatatcaatacaaaaacgaaaaatagctgaatc

SEQ ID NO: 94530 - DNA, 33 bp, Homo sapien
tatatcaatacaaaaatgaaaaatagctgaatc

SEQ ID NO: 94531 - DNA, 33 bp, Homo sapien
gccaagagagcaggtaaaagattattgcaattg

SEQ ID NO: 94532 - DNA, 33 bp, Homo sapien
gccaagagagcaggtacaagattattgcaattg

SEQ ID NO: 94533 - DNA, 33 bp, Homo sapien
gatctggctcaaatcccctgtttatattgatcc

SEQ ID NO: 94534 - DNA, 33 bp, Homo sapien
gatctggctcaaatcctctgtttatattgatcc

SEQ ID NO: 94535 - DNA, 33 bp, Homo sapien
tcattggattaaataaaccagtatcagactcaa

SEQ ID NO: 94536 - DNA, 33 bp, Homo sapien
tcattggattaaataacccagtatcagactcaa

SEQ ID NO: 94537 - DNA, 33 bp, Homo sapien
atgatggattgcagcaagcgacttaaaacagat

SEQ ID NO: 94538 - DNA, 33 bp, Homo sapien
atgatggattgcagcaggcgacttaaaacagat

SEQ ID NO: 94539 - DNA, 33 bp, Homo sapien
cctctaatggaagaatcagagcgggtcccacag

SEQ ID NO: 94540 - DNA, 33 bp, Homo sapien
cctctaatggaagaattagagcgggtcccacag

SEQ ID NO: 94541 - DNA, 33 bp, Homo sapien
ctgtcttgcttggtgacagaaggcacttggctt

SEQ ID NO: 94542 - DNA, 33 bp, Homo sapien
ctgtcttgcttggtgagagaaggcacttggctt

SEQ ID NO: 94543 - DNA, 33 bp, Homo sapien
ccactcaaagttgtccaaagtgcagaacatgca

SEQ ID NO: 94544 - DNA, 33 bp, Homo sapien
ccactcaaagttgtcccaagtgcagaacatgca

SEQ ID NO: 94545 - DNA, 33 bp, Homo sapien
gactggcaaaggtatcactgaattcaatctggt

SEQ ID NO: 94546 - DNA, 33 bp, Homo sapien
gactggcaaaggtatcgctgaattcaatctggt

SEQ ID NO: 94547 - DNA, 33 bp, Homo sapien
aatctaagttaatccacacatgaggatataaaa

SEQ ID NO: 94548 - DNA, 33 bp, Homo sapien
aatctaagttaatccatacatgaggatataaaa

SEQ ID NO: 94549 - DNA, 33 bp, Homo sapien
agcacagagaaagagaacatcgaaaggctagat

SEQ ID NO: 94550 - DNA, 33 bp, Homo sapien
agcacagagaaagagagcatcgaaaggctagat

SEQ ID NO: 94551 - DNA, 33 bp, Homo sapien
gctggtattcttgtaaaaggagactcagagaca

SEQ ID NO: 94552 - DNA, 33 bp, Homo sapien
gctggtattcttgtaagaggagactcagagaca

SEQ ID NO: 94553 - DNA, 33 bp, Homo sapien
ggccttccagggacacaggcatagatgtgtgtg

SEQ ID NO: 94554 - DNA, 33 bp, Homo sapien
ggccttccagggacactggcatagatgtgtgtg

SEQ ID NO: 94555 - DNA, 33 bp, Homo sapien
tttatgggaggatgaaatcagtataaagatagc

SEQ ID NO: 94556 - DNA, 33 bp, Homo sapien
tttatgggaggatgaattcagtataaagatagc

SEQ ID NO: 94557 - DNA, 33 bp, Homo sapien
gactcactagtggaaaaattagcaacagctttg

SEQ ID NO: 94558 - DNA, 33 bp, Homo sapien
gactcactagtggaaagattagcaacagctttg

SEQ ID NO: 94559 - DNA, 33 bp, Homo sapien
tgacttaggactacaacgccccaacttccaaaa

SEQ ID NO: 94560 - DNA, 33 bp, Homo sapien
tgacttaggactacaatgccccaacttccaaaa

SEQ ID NO: 94561 - DNA, 33 bp, Homo sapien
ctgaaaaactacaaagccatgtaaatgcccttc

SEQ ID NO: 94562 - DNA, 33 bp, Homo sapien
ctgaaaaactacaaagtcatgtaaatgcccttc

SEQ ID NO: 94563 - DNA, 33 bp, Homo sapien
gactcagaagcattcaaagagctgagatactga

SEQ ID NO: 94564 - DNA, 33 bp, Homo sapien
gactcagaagcattcagagagctgagatactga

SEQ ID NO: 94565 - DNA, 33 bp, Homo sapien
cttctttggtctgttacctatgttgtagtacta

SEQ ID NO: 94566 - DNA, 33 bp, Homo sapien
cttctttggtctgttatctatgttgtagtacta

SEQ ID NO: 94567 - DNA, 33 bp, Homo sapien
ctctaagagaccaagactaaatcaggctggcat

SEQ ID NO: 94568 - DNA, 33 bp, Homo sapien
ctctaagagaccaagattaaatcaggctggcat

SEQ ID NO: 94569 - DNA, 33 bp, Homo sapien
ctctgaccttgacttccaggaatttactcttag

SEQ ID NO: 94570 - DNA, 33 bp, Homo sapien
ctctgaccttgacttctaggaatttactcttag

SEQ ID NO: 94571 - DNA, 33 bp, Homo sapien
cccagttacaggaagacattgtgtgattgtgtc

SEQ ID NO: 94572 - DNA, 33 bp, Homo sapien
cccagttacaggaagagattgtgtgattgtgtc

SEQ ID NO: 94573 - DNA, 33 bp, Homo sapien
tgggcctctgaataaccgggtttcattactaca

SEQ ID NO: 94574 - DNA, 33 bp, Homo sapien
tgggcctctgaataactgggtttcattactaca

SEQ ID NO: 94575 - DNA, 33 bp, Homo sapien
tactaataataatgaccgtaaagagttatggca

SEQ ID NO: 94576 - DNA, 33 bp, Homo sapien
tactaataataatgactgtaaagagttatggca

SEQ ID NO: 94577 - DNA, 33 bp, Homo sapien
gcatctgttgggcccagagtactagctcctgct

SEQ ID NO: 94578 - DNA, 33 bp, Homo sapien
gcatctgttgggcccatagtactagctcctgct

SEQ ID NO: 94579 - DNA, 33 bp, Homo sapien
tctacttgcgtgaaataaaggcaaaaggaccca

SEQ ID NO: 94580 - DNA, 33 bp, Homo sapien
tctacttgcgtgaaatgaaggcaaaaggaccca

SEQ ID NO: 94581 - DNA, 33 bp, Homo sapien
cactgaagttgagtgacgaaaaggcacctgaaa

SEQ ID NO: 94582 - DNA, 33 bp, Homo sapien
cactgaagttgagtgatgaaaaggcacctgaaa

SEQ ID NO: 94583 - DNA, 33 bp, Homo sapien
gctgcttgtggcatcacgggggaaagtaaaaag

SEQ ID NO: 94584 - DNA, 33 bp, Homo sapien
gctgcttgtggcatcatgggggaaagtaaaaag

SEQ ID NO: 94585 - DNA, 33 bp, Homo sapien
cgtagacgcatggttacgtctagggatgtttgg

SEQ ID NO: 94586 - DNA, 33 bp, Homo sapien
cgtagacgcatggttatgtctagggatgtttgg

SEQ ID NO: 94587 - DNA, 33 bp, Homo sapien
tttgcactggagatgaaaagagtttatgataaa

SEQ ID NO: 94588 - DNA, 33 bp, Homo sapien
tttgcactggagatgagaagagtttatgataaa

SEQ ID NO: 94589 - DNA, 33 bp, Homo sapien
cagtcccatctgataactccacactgttggtga

SEQ ID NO: 94590 - DNA, 33 bp, Homo sapien
cagtcccatctgataattccacactgttggtga

SEQ ID NO: 94591 - DNA, 33 bp, Homo sapien
atgactcttagaaggaagtttacgacccacaat

SEQ ID NO: 94592 - DNA, 33 bp, Homo sapien
atgactcttagaaggatgtttacgacccacaat

SEQ ID NO: 94593 - DNA, 33 bp, Homo sapien
acgctggatcgaatccacgttcaataggaagca

SEQ ID NO: 94594 - DNA, 33 bp, Homo sapien
acgctggatcgaatccgcgttcaataggaagca

SEQ ID NO: 94595 - DNA, 33 bp, Homo sapien
gcactagggtaagagactagattggggggttct

SEQ ID NO: 94596 - DNA, 33 bp, Homo sapien
gcactagggtaagagattagattggggggttct

SEQ ID NO: 94597 - DNA, 33 bp, Homo sapien
ggataaggtatgacataagtagaacgtgtcatc

SEQ ID NO: 94598 - DNA, 33 bp, Homo sapien
ggataaggtatgacatcagtagaacgtgtcatc

SEQ ID NO: 94599 - DNA, 33 bp, Homo sapien
tctagaaaacagcatacactttctcacctcact

SEQ ID NO: 94600 - DNA, 33 bp, Homo sapien
tctagaaaacagcatatactttctcacctcact

SEQ ID NO: 94601 - DNA, 33 bp, Homo sapien
aaggtaaattttatgacatgtgtactttctcac

SEQ ID NO: 94602 - DNA, 33 bp, Homo sapien
aaggtaaattttatgatatgtgtactttctcac

SEQ ID NO: 94603 - DNA, 33 bp, Homo sapien
aaataaatcgagggtaaaatattgcctgtgcac

SEQ ID NO: 94604 - DNA, 33 bp, Homo sapien
aaataaatcgagggtagaatattgcctgtgcac

SEQ ID NO: 94605 - DNA, 33 bp, Homo sapien
ggctactgccttgcacactgcaggtataggcaa

SEQ ID NO: 94606 - DNA, 33 bp, Homo sapien
ggctactgccttgcacgctgcaggtataggcaa

SEQ ID NO: 94607 - DNA, 33 bp, Homo sapien
aggtgcaatagcccgaagagaaaaacaactaag

SEQ ID NO: 94608 - DNA, 33 bp, Homo sapien
aggtgcaatagcccgaggagaaaaacaactaag

SEQ ID NO: 94609 - DNA, 33 bp, Homo sapien
ctattggcctagcaaagctacaccatccaaaga

SEQ ID NO: 94610 - DNA, 33 bp, Homo sapien
ctattggcctagcaaatctacaccatccaaaga

SEQ ID NO: 94611 - DNA, 33 bp, Homo sapien
tgtcttttcctggctacggaagtgtggccctgt

SEQ ID NO: 94612 - DNA, 33 bp, Homo sapien
tgtcttttcctggctatggaagtgtggccctgt

SEQ ID NO: 94613 - DNA, 33 bp, Homo sapien
agtgtgctaccaagaacggctctctctcaccta

SEQ ID NO: 94614 - DNA, 33 bp, Homo sapien
agtgtgctaccaagaatggctctctctcaccta

SEQ ID NO: 94615 - DNA, 33 bp, Homo sapien
gctgccaatgtgttacagcaaacatcaccatca

SEQ ID NO: 94616 - DNA, 33 bp, Homo sapien
gctgccaatgtgttacggcaaacatcaccatca

SEQ ID NO: 94617 - DNA, 33 bp, Homo sapien
tagtgaggttatcgcaacaccaagcttcaaatc

SEQ ID NO: 94618 - DNA, 33 bp, Homo sapien
tagtgaggttatcgcagcaccaagcttcaaatc

SEQ ID NO: 94619 - DNA, 33 bp, Homo sapien
tcctgaaggaagtgacactgaactgagtttaga

SEQ ID NO: 94620 - DNA, 33 bp, Homo sapien
tcctgaaggaagtgacgctgaactgagtttaga

SEQ ID NO: 94621 - DNA, 33 bp, Homo sapien
aacaatgtgagctaaacgtttccagagaactat

SEQ ID NO: 94622 - DNA, 33 bp, Homo sapien
aacaatgtgagctaaatgtttccagagaactat

SEQ ID NO: 94623 - DNA, 33 bp, Homo sapien
caggggaggagggagcaacctgtttgagaccag

SEQ ID NO: 94624 - DNA, 33 bp, Homo sapien
caggggaggagggagcgacctgtttgagaccag

SEQ ID NO: 94625 - DNA, 33 bp, Homo sapien
tttatccttcctataaaacccacattttgttca

SEQ ID NO: 94626 - DNA, 33 bp, Homo sapien
tttatccttcctataagacccacattttgttca

SEQ ID NO: 94627 - DNA, 33 bp, Homo sapien
ccctgatttcagttcaagtaacacttcccaggg

SEQ ID NO: 94628 - DNA, 33 bp, Homo sapien
ccctgatttcagttcaggtaacacttcccaggg

SEQ ID NO: 94629 - DNA, 33 bp, Homo sapien
aagatggcactacagccagacggcccagattca

SEQ ID NO: 94630 - DNA, 33 bp, Homo sapien
aagatggcactacagctagacggcccagattca

SEQ ID NO: 94631 - DNA, 33 bp, Homo sapien
catgcttttcctgtgacgatacaataaattggc

SEQ ID NO: 94632 - DNA, 33 bp, Homo sapien
catgcttttcctgtgatgatacaataaattggc

SEQ ID NO: 94633 - DNA, 33 bp, Homo sapien
ccatgtgtcagtctgcacttaccaatatcaccg

SEQ ID NO: 94634 - DNA, 33 bp, Homo sapien
ccatgtgtcagtctgcgcttaccaatatcaccg

SEQ ID NO: 94635 - DNA, 33 bp, Homo sapien
taggcacgcagatagggagcaatgcctatgctt

SEQ ID NO: 94636 - DNA, 33 bp, Homo sapien
taggcacgcagataggtagcaatgcctatgctt

SEQ ID NO: 94637 - DNA, 33 bp, Homo sapien
aaattatatgtagaaaattcatagagattaaca

SEQ ID NO: 94638 - DNA, 33 bp, Homo sapien
aaattatatgtagaaacttcatagagattaaca

SEQ ID NO: 94639 - DNA, 33 bp, Homo sapien
tctctgtctgggacgacaaactcagtaatattg

SEQ ID NO: 94640 - DNA, 33 bp, Homo sapien
tctctgtctgggacgataaactcagtaatattg

SEQ ID NO: 94641 - DNA, 33 bp, Homo sapien
ttaaacatctccaaaacttagtctacagcattt

SEQ ID NO: 94642 - DNA, 33 bp, Homo sapien
ttaaacatctccaaaatttagtctacagcattt

SEQ ID NO: 94643 - DNA, 33 bp, Homo sapien
tgcagaaggcaacacaaaagttagcatccatgt

SEQ ID NO: 94644 - DNA, 33 bp, Homo sapien
tgcagaaggcaacacagaagttagcatccatgt

SEQ ID NO: 94645 - DNA, 33 bp, Homo sapien
ttcagaccaacaaagaaagactagagatttact

SEQ ID NO: 94646 - DNA, 33 bp, Homo sapien
ttcagaccaacaaagagagactagagatttact

SEQ ID NO: 94647 - DNA, 33 bp, Homo sapien
agggcaagggacagggacatcttccttaaatca

SEQ ID NO: 94648 - DNA, 33 bp, Homo sapien
agggcaagggacaggggcatcttccttaaatca

SEQ ID NO: 94649 - DNA, 33 bp, Homo sapien
ccttggcatagtcccccctctgttctatctact

SEQ ID NO: 94650 - DNA, 33 bp, Homo sapien
ccttggcatagtccccgctctgttctatctact

SEQ ID NO: 94651 - DNA, 33 bp, Homo sapien
gacagagttcactttacatcattagtggtgtct

SEQ ID NO: 94652 - DNA, 33 bp, Homo sapien
gacagagttcactttatatcattagtggtgtct

SEQ ID NO: 94653 - DNA, 33 bp, Homo sapien
gcttcctgagagatcccagcagaaggatgtaga

SEQ ID NO: 94654 - DNA, 33 bp, Homo sapien
gcttcctgagagatcctagcagaaggatgtaga

SEQ ID NO: 94655 - DNA, 33 bp, Homo sapien
gtactagctctccttacgcttagggtggtagat

SEQ ID NO: 94656 - DNA, 33 bp, Homo sapien
gtactagctctccttaggcttagggtggtagat

SEQ ID NO: 94657 - DNA, 33 bp, Homo sapien
tctctttcttacaagacgagattgaacctttaa

SEQ ID NO: 94658 - DNA, 33 bp, Homo sapien
tctctttcttacaagatgagattgaacctttaa

SEQ ID NO: 94659 - DNA, 33 bp, Homo sapien
ccatcccttctctctacaactactgaaggtgcc

SEQ ID NO: 94660 - DNA, 33 bp, Homo sapien
ccatcccttctctctagaactactgaaggtgcc

SEQ ID NO: 94661 - DNA, 33 bp, Homo sapien
gaagagggaatgattgaataatgagtttggcag

SEQ ID NO: 94662 - DNA, 33 bp, Homo sapien
gaagagggaatgattggataatgagtttggcag

SEQ ID NO: 94663 - DNA, 33 bp, Homo sapien
gttgaaagagattgatcaacttgtttagagtaa

SEQ ID NO: 94664 - DNA, 33 bp, Homo sapien
gttgaaagagattgattaacttgtttagagtaa

SEQ ID NO: 94665 - DNA, 33 bp, Homo sapien
gaccctgtcccaaaagaaaaggctcaggagaga

SEQ ID NO: 94666 - DNA, 33 bp, Homo sapien
gaccctgtcccaaaaggaaaggctcaggagaga

SEQ ID NO: 94667 - DNA, 33 bp, Homo sapien
ccatctgtggtctttaacacctactcctggctg

SEQ ID NO: 94668 - DNA, 33 bp, Homo sapien
ccatctgtggtctttagcacctactcctggctg

SEQ ID NO: 94669 - DNA, 33 bp, Homo sapien
cgtggataaaatttcaactgttcagggccccac

SEQ ID NO: 94670 - DNA, 33 bp, Homo sapien
cgtggataaaatttcagctgttcagggccccac

SEQ ID NO: 94671 - DNA, 33 bp, Homo sapien
tgtatcaggagaaatcgaactggcaggtagaac

SEQ ID NO: 94672 - DNA, 33 bp, Homo sapien
tgtatcaggagaaatctaactggcaggtagaac

SEQ ID NO: 94673 - DNA, 33 bp, Homo sapien
aggtcacctccctgcacgttttttttaaatttt

SEQ ID NO: 94674 - DNA, 33 bp, Homo sapien
aggtcacctccctgcatgttttttttaaatttt

SEQ ID NO: 94675 - DNA, 33 bp, Homo sapien
cacatgtgcacctacaaaataaacctgcatatg

SEQ ID NO: 94676 - DNA, 33 bp, Homo sapien
cacatgtgcacctacataataaacctgcatatg

SEQ ID NO: 94677 - DNA, 33 bp, Homo sapien
gtacttagcttgagacaataggtacaagtacct

SEQ ID NO: 94678 - DNA, 33 bp, Homo sapien
gtacttagcttgagacgataggtacaagtacct

SEQ ID NO: 94679 - DNA, 33 bp, Homo sapien
acgtcgttgctaaggaggttggagacatttggt

SEQ ID NO: 94680 - DNA, 33 bp, Homo sapien
acgtcgttgctaaggatgttggagacatttggt

SEQ ID NO: 94681 - DNA, 33 bp, Homo sapien
tggtgatagatagcccacaggtataagtagtat

SEQ ID NO: 94682 - DNA, 33 bp, Homo sapien
tggtgatagatagcccgcaggtataagtagtat

SEQ ID NO: 94683 - DNA, 33 bp, Homo sapien
agtgcatgacctctgaacaaaattacaaagtaa

SEQ ID NO: 94684 - DNA, 33 bp, Homo sapien
agtgcatgacctctgagcaaaattacaaagtaa

SEQ ID NO: 94685 - DNA, 33 bp, Homo sapien
tagtttcctcttgtgcaaaatgcggatgaccaa

SEQ ID NO: 94686 - DNA, 33 bp, Homo sapien
tagtttcctcttgtgccaaatgcggatgaccaa

SEQ ID NO: 94687 - DNA, 33 bp, Homo sapien
caaaagaaatgctttgaaaattgtattacttct

SEQ ID NO: 94688 - DNA, 33 bp, Homo sapien
caaaagaaatgctttgcaaattgtattacttct

SEQ ID NO: 94689 - DNA, 33 bp, Homo sapien
ggggataccattcaacgcaatacaaaaattact

SEQ ID NO: 94690 - DNA, 33 bp, Homo sapien
ggggataccattcaactcaatacaaaaattact

SEQ ID NO: 94691 - DNA, 33 bp, Homo sapien
atgaatttgtgaggccactttttacattaggta

SEQ ID NO: 94692 - DNA, 33 bp, Homo sapien
atgaatttgtgaggccgctttttacattaggta

SEQ ID NO: 94693 - DNA, 33 bp, Homo sapien
gtcttcttctttccacaatgttctccctcctgc

SEQ ID NO: 94694 - DNA, 33 bp, Homo sapien
gtcttcttctttccacgatgttctccctcctgc

SEQ ID NO: 94695 - DNA, 33 bp, Homo sapien
ttggagtttggcatgacgatctatttatccttg

SEQ ID NO: 94696 - DNA, 33 bp, Homo sapien
ttggagtttggcatgaggatctatttatccttg

SEQ ID NO: 94697 - DNA, 33 bp, Homo sapien
gtggtgtcaatatttgaagactggacagtcttt

SEQ ID NO: 94698 - DNA, 33 bp, Homo sapien
gtggtgtcaatatttgcagactggacagtcttt

SEQ ID NO: 94699 - DNA, 33 bp, Homo sapien
gcacgtggaatggatgcacttcttgaaattaaa

SEQ ID NO: 94700 - DNA, 33 bp, Homo sapien
gcacgtggaatggatgtacttcttgaaattaaa

SEQ ID NO: 94701 - DNA, 33 bp, Homo sapien
aagttacccttgcccacgatcagctctgagtct

SEQ ID NO: 94702 - DNA, 33 bp, Homo sapien
aagttacccttgcccatgatcagctctgagtct

SEQ ID NO: 94703 - DNA, 33 bp, Homo sapien
ggctgctttatgagtagcctgaaaatcatccat

SEQ ID NO: 94704 - DNA, 33 bp, Homo sapien
ggctgctttatgagtatcctgaaaatcatccat

SEQ ID NO: 94705 - DNA, 33 bp, Homo sapien
gctgctaaactcgtacaaattttttacagcagc

SEQ ID NO: 94706 - DNA, 33 bp, Homo sapien
gctgctaaactcgtacgaattttttacagcagc

SEQ ID NO: 94707 - DNA, 33 bp, Homo sapien
ggaattggctcattcaactgtgcagtgagaagt

SEQ ID NO: 94708 - DNA, 33 bp, Homo sapien
ggaattggctcattcagctgtgcagtgagaagt

SEQ ID NO: 94709 - DNA, 33 bp, Homo sapien
aaacgtaccgtgggaaagtcactcttatgtata

SEQ ID NO: 94710 - DNA, 33 bp, Homo sapien
aaacgtaccgtgggaacgtcactcttatgtata

SEQ ID NO: 94711 - DNA, 33 bp, Homo sapien
aaggagagcaagtgtaacacatggcgggcacag

SEQ ID NO: 94712 - DNA, 33 bp, Homo sapien
aaggagagcaagtgtaccacatggcgggcacag

SEQ ID NO: 94713 - DNA, 33 bp, Homo sapien
gaggggttcagagccaacatggccattccatgt

SEQ ID NO: 94714 - DNA, 33 bp, Homo sapien
gaggggttcagagccagcatggccattccatgt

SEQ ID NO: 94715 - DNA, 33 bp, Homo sapien
atactaacctcaaacacatctgagaaagtgaaa

SEQ ID NO: 94716 - DNA, 33 bp, Homo sapien
atactaacctcaaacatatctgagaaagtgaaa

SEQ ID NO: 94717 - DNA, 33 bp, Homo sapien
ctattgccttttaaaaacatcttggctggacac

SEQ ID NO: 94718 - DNA, 33 bp, Homo sapien
ctattgccttttaaaagcatcttggctggacac

SEQ ID NO: 94719 - DNA, 33 bp, Homo sapien
gagcccagaatttgaacggggatcatgcgtttt

SEQ ID NO: 94720 - DNA, 33 bp, Homo sapien
gagcccagaatttgaatggggatcatgcgtttt

SEQ ID NO: 94721 - DNA, 33 bp, Homo sapien
aacaaagcactaaagggaaagggaggcagttac

SEQ ID NO: 94722 - DNA, 33 bp, Homo sapien
aacaaagcactaaaggtaaagggaggcagttac

SEQ ID NO: 94723 - DNA, 33 bp, Homo sapien
aacttcacacttttcactcaggttcttaaagga

SEQ ID NO: 94724 - DNA, 33 bp, Homo sapien
aacttcacacttttcattcaggttcttaaagga

SEQ ID NO: 94725 - DNA, 33 bp, Homo sapien
tagagtaagtgacaccgcttcccagcgtgataa

SEQ ID NO: 94726 - DNA, 33 bp, Homo sapien
tagagtaagtgacacctcttcccagcgtgataa

SEQ ID NO: 94727 - DNA, 33 bp, Homo sapien
acatagactatatttcacatcactcttggcgtt

SEQ ID NO: 94728 - DNA, 33 bp, Homo sapien
acatagactatatttcgcatcactcttggcgtt

SEQ ID NO: 94729 - DNA, 33 bp, Homo sapien
atttctatagaaacacagaagaggaagagcaca

SEQ ID NO: 94730 - DNA, 33 bp, Homo sapien
atttctatagaaacacggaagaggaagagcaca

SEQ ID NO: 94731 - DNA, 33 bp, Homo sapien
acttccactaaagaccaaattcacttttatttg

SEQ ID NO: 94732 - DNA, 33 bp, Homo sapien
acttccactaaagacccaattcacttttatttg

SEQ ID NO: 94733 - DNA, 33 bp, Homo sapien
aaacttagataaagaaacaaatatggctatgtt

SEQ ID NO: 94734 - DNA, 33 bp, Homo sapien
aaacttagataaagaagcaaatatggctatgtt

SEQ ID NO: 94735 - DNA, 33 bp, Homo sapien
agcttggcttgttcctaaactgaaaattaattt

SEQ ID NO: 94736 - DNA, 33 bp, Homo sapien
agcttggcttgttcctgaactgaaaattaattt

SEQ ID NO: 94737 - DNA, 33 bp, Homo sapien
ttccctagaaaggccacgaacacagatccagcc

SEQ ID NO: 94738 - DNA, 33 bp, Homo sapien
ttccctagaaaggccatgaacacagatccagcc

SEQ ID NO: 94739 - DNA, 33 bp, Homo sapien
ggggacttggtcacaccgagcaggatgtgagac

SEQ ID NO: 94740 - DNA, 33 bp, Homo sapien
ggggacttggtcacactgagcaggatgtgagac

SEQ ID NO: 94741 - DNA, 33 bp, Homo sapien
aacttttactttcccacgatgatagttcagatg

SEQ ID NO: 94742 - DNA, 33 bp, Homo sapien
aacttttactttcccatgatgatagttcagatg

SEQ ID NO: 94743 - DNA, 33 bp, Homo sapien
aactgagatgacacagaatctttttaatgctcg

SEQ ID NO: 94744 - DNA, 33 bp, Homo sapien
aactgagatgacacagtatctttttaatgctcg

SEQ ID NO: 94745 - DNA, 33 bp, Homo sapien
tacaacatttagcaaactcataatcctataaag

SEQ ID NO: 94746 - DNA, 33 bp, Homo sapien
tacaacatttagcaaattcataatcctataaag

SEQ ID NO: 94747 - DNA, 33 bp, Homo sapien
gacagcagggtatcaggacattgttttcaaaca

SEQ ID NO: 94748 - DNA, 33 bp, Homo sapien
gacagcagggtatcagtacattgttttcaaaca

SEQ ID NO: 94749 - DNA, 33 bp, Homo sapien
acgtgacctaccaaataacccattggttagtta

SEQ ID NO: 94750 - DNA, 33 bp, Homo sapien
acgtgacctaccaaatgacccattggttagtta

SEQ ID NO: 94751 - DNA, 33 bp, Homo sapien
tggtcctatagaaccacatggctcatgttctgg

SEQ ID NO: 94752 - DNA, 33 bp, Homo sapien
tggtcctatagaaccagatggctcatgttctgg

SEQ ID NO: 94753 - DNA, 33 bp, Homo sapien
tctgcctcatgtatgcaagtaaaagctaatcaa

SEQ ID NO: 94754 - DNA, 33 bp, Homo sapien
tctgcctcatgtatgcgagtaaaagctaatcaa

SEQ ID NO: 94755 - DNA, 33 bp, Homo sapien
atgtcgatgtggttcaagacatgtttcaagcca

SEQ ID NO: 94756 - DNA, 33 bp, Homo sapien
atgtcgatgtggttcaggacatgtttcaagcca

SEQ ID NO: 94757 - DNA, 33 bp, Homo sapien
aaacaaactatcccacactttgtaatttttgta

SEQ ID NO: 94758 - DNA, 33 bp, Homo sapien
aaacaaactatcccacgctttgtaatttttgta

SEQ ID NO: 94759 - DNA, 33 bp, Homo sapien
ggaattttggtgagtacagtgcatggcccttgc

SEQ ID NO: 94760 - DNA, 33 bp, Homo sapien
ggaattttggtgagtatagtgcatggcccttgc

SEQ ID NO: 94761 - DNA, 33 bp, Homo sapien
ctggacaatcagctaacgcttttagaaaaacag

SEQ ID NO: 94762 - DNA, 33 bp, Homo sapien
ctggacaatcagctaatgcttttagaaaaacag

SEQ ID NO: 94763 - DNA, 33 bp, Homo sapien
ctgctgtgttcaccaaaccgtgaggaggcttca

SEQ ID NO: 94764 - DNA, 33 bp, Homo sapien
ctgctgtgttcaccaacccgtgaggaggcttca

SEQ ID NO: 94765 - DNA, 33 bp, Homo sapien
aatggaagggaacctacacatcagagagcactc

SEQ ID NO: 94766 - DNA, 33 bp, Homo sapien
aatggaagggaacctagacatcagagagcactc

SEQ ID NO: 94767 - DNA, 33 bp, Homo sapien
cagatggctcttgcctcaacagtgagaaataat

SEQ ID NO: 94768 - DNA, 33 bp, Homo sapien
cagatggctcttgccttaacagtgagaaataat

SEQ ID NO: 94769 - DNA, 33 bp, Homo sapien
aaaaattaccatgtacaaagaaagtaggaagat

SEQ ID NO: 94770 - DNA, 33 bp, Homo sapien
aaaaattaccatgtacgaagaaagtaggaagat

SEQ ID NO: 94771 - DNA, 33 bp, Homo sapien
agcaagaatgcaaaaaatttaaacaaaatgaca

SEQ ID NO: 94772 - DNA, 33 bp, Homo sapien
agcaagaatgcaaaaattttaaacaaaatgaca

SEQ ID NO: 94773 - DNA, 33 bp, Homo sapien
atacaattagttgttacaacgctgcgagtaaga

SEQ ID NO: 94774 - DNA, 33 bp, Homo sapien
atacaattagttgttagaacgctgcgagtaaga

SEQ ID NO: 94775 - DNA, 33 bp, Homo sapien
gctggtcccaggttgacggcttgtgccctccag

SEQ ID NO: 94776 - DNA, 33 bp, Homo sapien
gctggtcccaggttgatggcttgtgccctccag

SEQ ID NO: 94777 - DNA, 33 bp, Homo sapien
gctctgggatctgagaggaaactgaccaggaaa

SEQ ID NO: 94778 - DNA, 33 bp, Homo sapien
gctctgggatctgagatgaaactgaccaggaaa

SEQ ID NO: 94779 - DNA, 33 bp, Homo sapien
aatgtttgacataaaagaattaatgccaaacgc

SEQ ID NO: 94780 - DNA, 33 bp, Homo sapien
aatgtttgacataaaataattaatgccaaacgc

SEQ ID NO: 94781 - DNA, 33 bp, Homo sapien
aattcaatgtcgatgacacctgagtgctgtaaa

SEQ ID NO: 94782 - DNA, 33 bp, Homo sapien
aattcaatgtcgatgatacctgagtgctgtaaa

SEQ ID NO: 94783 - DNA, 33 bp, Homo sapien
gaaggagccttctcaagaaaagaaaaaatctct

SEQ ID NO: 94784 - DNA, 33 bp, Homo sapien
gaaggagccttctcaataaaagaaaaaatctct

SEQ ID NO: 94785 - DNA, 33 bp, Homo sapien
gggtggctcctctcgcagatacagatgatttga

SEQ ID NO: 94786 - DNA, 33 bp, Homo sapien
gggtggctcctctcgcggatacagatgatttga

SEQ ID NO: 94787 - DNA, 33 bp, Homo sapien
atgctgttggcacggaacttcccattgggattt

SEQ ID NO: 94788 - DNA, 33 bp, Homo sapien
atgctgttggcacggagcttcccattgggattt

SEQ ID NO: 94789 - DNA, 33 bp, Homo sapien
tgatatcatgggtttaaattgagacagaatggc

SEQ ID NO: 94790 - DNA, 33 bp, Homo sapien
tgatatcatgggtttatattgagacagaatggc

SEQ ID NO: 94791 - DNA, 33 bp, Homo sapien
ttctgacagtggtgcaaagagttttgagaatca

SEQ ID NO: 94792 - DNA, 33 bp, Homo sapien
ttctgacagtggtgcacagagttttgagaatca

SEQ ID NO: 94793 - DNA, 33 bp, Homo sapien
cactgtcagaagtcaagctgtgatcactgaggt

SEQ ID NO: 94794 - DNA, 33 bp, Homo sapien
cactgtcagaagtcaatctgtgatcactgaggt

SEQ ID NO: 94795 - DNA, 33 bp, Homo sapien
aataccaaaactctaacaaatgaatacacagag

SEQ ID NO: 94796 - DNA, 33 bp, Homo sapien
aataccaaaactctaataaatgaatacacagag

SEQ ID NO: 94797 - DNA, 33 bp, Homo sapien
gcttttcttagagttaagatcacaaggcattga

SEQ ID NO: 94798 - DNA, 33 bp, Homo sapien
gcttttcttagagttaggatcacaaggcattga

SEQ ID NO: 94799 - DNA, 33 bp, Homo sapien
aagtttattaataccaagttgcaaaaagggcaa

SEQ ID NO: 94800 - DNA, 33 bp, Homo sapien
aagtttattaataccatgttgcaaaaagggcaa

SEQ ID NO: 94801 - DNA, 33 bp, Homo sapien
gcaggtagcacagtagaaaagtaggaaacaacc

SEQ ID NO: 94802 - DNA, 33 bp, Homo sapien
gcaggtagcacagtaggaaagtaggaaacaacc

SEQ ID NO: 94803 - DNA, 33 bp, Homo sapien
aaatatgagtggagataaataaggaatggaaag

SEQ ID NO: 94804 - DNA, 33 bp, Homo sapien
aaatatgagtggagatgaataaggaatggaaag

SEQ ID NO: 94805 - DNA, 33 bp, Homo sapien
tccaaaatatggtaaaacctgttggctcttcct

SEQ ID NO: 94806 - DNA, 33 bp, Homo sapien
tccaaaatatggtaaaccctgttggctcttcct

SEQ ID NO: 94807 - DNA, 33 bp, Homo sapien
tcctcacttgcttcaaacctatgctcaagtgtc

SEQ ID NO: 94808 - DNA, 33 bp, Homo sapien
tcctcacttgcttcaagcctatgctcaagtgtc

SEQ ID NO: 94809 - DNA, 33 bp, Homo sapien
cccacacattcagaaacttatgagtgttggcaa

SEQ ID NO: 94810 - DNA, 33 bp, Homo sapien
cccacacattcagaaatttatgagtgttggcaa

SEQ ID NO: 94811 - DNA, 33 bp, Homo sapien
catttaagactatatcaaggaatggaactgctg

SEQ ID NO: 94812 - DNA, 33 bp, Homo sapien
catttaagactatatccaggaatggaactgctg

SEQ ID NO: 94813 - DNA, 33 bp, Homo sapien
cagggctctttcccaaccagactacgcgcaggc

SEQ ID NO: 94814 - DNA, 33 bp, Homo sapien
cagggctctttcccaagcagactacgcgcaggc

SEQ ID NO: 94815 - DNA, 33 bp, Homo sapien
aactgtgttaaccttacagtgacattacttaaa

SEQ ID NO: 94816 - DNA, 33 bp, Homo sapien
aactgtgttaaccttatagtgacattacttaaa

SEQ ID NO: 94817 - DNA, 33 bp, Homo sapien
cctggcagtcaaagagaaagtagaaaacgatgc

SEQ ID NO: 94818 - DNA, 33 bp, Homo sapien
cctggcagtcaaagaggaagtagaaaacgatgc

SEQ ID NO: 94819 - DNA, 33 bp, Homo sapien
attcctctcttatgtcgagattccactttcatt

SEQ ID NO: 94820 - DNA, 33 bp, Homo sapien
attcctctcttatgtctagattccactttcatt

SEQ ID NO: 94821 - DNA, 33 bp, Homo sapien
agttctttcactcaaccgtatggtctgtggagg

SEQ ID NO: 94822 - DNA, 33 bp, Homo sapien
agttctttcactcaactgtatggtctgtggagg

SEQ ID NO: 94823 - DNA, 33 bp, Homo sapien
ttccctggctccctctcaaatgcgcccatgaca

SEQ ID NO: 94824 - DNA, 33 bp, Homo sapien
ttccctggctccctcttaaatgcgcccatgaca

SEQ ID NO: 94825 - DNA, 33 bp, Homo sapien
ataaactaaaacctcaacttcaatggttatcag

SEQ ID NO: 94826 - DNA, 33 bp, Homo sapien
ataaactaaaacctcaccttcaatggttatcag

SEQ ID NO: 94827 - DNA, 33 bp, Homo sapien
cagtcataagaccagacatcaaagtgttgggtt

SEQ ID NO: 94828 - DNA, 33 bp, Homo sapien
cagtcataagaccagatatcaaagtgttgggtt

SEQ ID NO: 94829 - DNA, 33 bp, Homo sapien
ttgtctcagctctcataacaccatatgaaaata

SEQ ID NO: 94830 - DNA, 33 bp, Homo sapien
ttgtctcagctctcatgacaccatatgaaaata

SEQ ID NO: 94831 - DNA, 33 bp, Homo sapien
cagagagggaatttcaaagcagaaacaactaat

SEQ ID NO: 94832 - DNA, 33 bp, Homo sapien
cagagagggaatttcagagcagaaacaactaat

SEQ ID NO: 94833 - DNA, 33 bp, Homo sapien
cttgatggttgccttccagcccctgaatagctt

SEQ ID NO: 94834 - DNA, 33 bp, Homo sapien
cttgatggttgccttctagcccctgaatagctt

SEQ ID NO: 94835 - DNA, 33 bp, Homo sapien
agaccagcgcaggtctcacgtctataaacagag

SEQ ID NO: 94836 - DNA, 33 bp, Homo sapien
agaccagcgcaggtcttacgtctataaacagag

SEQ ID NO: 94837 - DNA, 33 bp, Homo sapien
aggcatgtgctaccacaccaatgaagttttgta

SEQ ID NO: 94838 - DNA, 33 bp, Homo sapien
aggcatgtgctaccacgccaatgaagttttgta

SEQ ID NO: 94839 - DNA, 33 bp, Homo sapien
tcaatgcactttgtcactcaacccttcctttcc

SEQ ID NO: 94840 - DNA, 33 bp, Homo sapien
tcaatgcactttgtcattcaacccttcctttcc

SEQ ID NO: 94841 - DNA, 33 bp, Homo sapien
aggcatgggggcaatcaacaaatatggggtcct

SEQ ID NO: 94842 - DNA, 33 bp, Homo sapien
aggcatgggggcaatcgacaaatatggggtcct

SEQ ID NO: 94843 - DNA, 33 bp, Homo sapien
tacgtaccagagaatagggcagcttaggaaaaa

SEQ ID NO: 94844 - DNA, 33 bp, Homo sapien
tacgtaccagagaatatggcagcttaggaaaaa

SEQ ID NO: 94845 - DNA, 33 bp, Homo sapien
gtttgcaaaatggagaaaatagcagtaatggtc

SEQ ID NO: 94846 - DNA, 33 bp, Homo sapien
gtttgcaaaatggagataatagcagtaatggtc

SEQ ID NO: 94847 - DNA, 33 bp, Homo sapien
ccaccattaataggaaaaacctggtttgcaaat

SEQ ID NO: 94848 - DNA, 33 bp, Homo sapien
ccaccattaataggaataacctggtttgcaaat

SEQ ID NO: 94849 - DNA, 33 bp, Homo sapien
taatattggaaaaggacggaaatagagcagaat

SEQ ID NO: 94850 - DNA, 33 bp, Homo sapien
taatattggaaaaggatggaaatagagcagaat

SEQ ID NO: 94851 - DNA, 33 bp, Homo sapien
caaattagatgatgtaaagacggataagaattc

SEQ ID NO: 94852 - DNA, 33 bp, Homo sapien
caaattagatgatgtagagacggataagaattc

SEQ ID NO: 94853 - DNA, 33 bp, Homo sapien
ggtgtccttaccattaccaaatagtttcacttc

SEQ ID NO: 94854 - DNA, 33 bp, Homo sapien
ggtgtccttaccattatcaaatagtttcacttc

SEQ ID NO: 94855 - DNA, 33 bp, Homo sapien
tattactacgcattcccagatctcaaagctacc

SEQ ID NO: 94856 - DNA, 33 bp, Homo sapien
tattactacgcattcctagatctcaaagctacc

SEQ ID NO: 94857 - DNA, 33 bp, Homo sapien
gacaaggtaggctgaccattgcatataaagtaa

SEQ ID NO: 94858 - DNA, 33 bp, Homo sapien
gacaaggtaggctgactattgcatataaagtaa

SEQ ID NO: 94859 - DNA, 33 bp, Homo sapien
attaagtccgatgaagcctagacaaggtaggct

SEQ ID NO: 94860 - DNA, 33 bp, Homo sapien
attaagtccgatgaagtctagacaaggtaggct

SEQ ID NO: 94861 - DNA, 33 bp, Homo sapien
catctatgtgcttccacgttacaaaaagaaaga

SEQ ID NO: 94862 - DNA, 33 bp, Homo sapien
catctatgtgcttccatgttacaaaaagaaaga

SEQ ID NO: 94863 - DNA, 33 bp, Homo sapien
tcaaatattaaataacaactgacacagaccctt

SEQ ID NO: 94864 - DNA, 33 bp, Homo sapien
tcaaatattaaataacgactgacacagaccctt

SEQ ID NO: 94865 - DNA, 33 bp, Homo sapien
ttcgttggtatcaacaacttgcctaatgctctg

SEQ ID NO: 94866 - DNA, 33 bp, Homo sapien
ttcgttggtatcaacaccttgcctaatgctctg

SEQ ID NO: 94867 - DNA, 33 bp, Homo sapien
gctccttctgcctggagccctatttttcccaga

SEQ ID NO: 94868 - DNA, 33 bp, Homo sapien
gctccttctgcctggatccctatttttcccaga

SEQ ID NO: 94869 - DNA, 33 bp, Homo sapien
ctattatggccatgtgacaagaacccagctctt

SEQ ID NO: 94870 - DNA, 33 bp, Homo sapien
ctattatggccatgtggcaagaacccagctctt

SEQ ID NO: 94871 - DNA, 33 bp, Homo sapien
tgtatgtaatgtcagacagtgttaagtgccatg

SEQ ID NO: 94872 - DNA, 33 bp, Homo sapien
tgtatgtaatgtcagatagtgttaagtgccatg

SEQ ID NO: 94873 - DNA, 33 bp, Homo sapien
atgcctgtgattctacaatgcaacaaatgctgc

SEQ ID NO: 94874 - DNA, 33 bp, Homo sapien
atgcctgtgattctacgatgcaacaaatgctgc

SEQ ID NO: 94875 - DNA, 33 bp, Homo sapien
atatctcattattcaacacgaaatgtttgtgat

SEQ ID NO: 94876 - DNA, 33 bp, Homo sapien
atatctcattattcaatacgaaatgtttgtgat

SEQ ID NO: 94877 - DNA, 33 bp, Homo sapien
gaccaatgcagcataactgtatgagtctgcaac

SEQ ID NO: 94878 - DNA, 33 bp, Homo sapien
gaccaatgcagcataattgtatgagtctgcaac

SEQ ID NO: 94879 - DNA, 33 bp, Homo sapien
gacaaaaataatcagcaccattaactgagttcc

SEQ ID NO: 94880 - DNA, 33 bp, Homo sapien
gacaaaaataatcagcgccattaactgagttcc

SEQ ID NO: 94881 - DNA, 33 bp, Homo sapien
gaagaagggtaacaataattaacagcttgccta

SEQ ID NO: 94882 - DNA, 33 bp, Homo sapien
gaagaagggtaacaatgattaacagcttgccta

SEQ ID NO: 94883 - DNA, 33 bp, Homo sapien
actccatcacccattacggcatccgagcccgag

SEQ ID NO: 94884 - DNA, 33 bp, Homo sapien
actccatcacccattatggcatccgagcccgag

SEQ ID NO: 94885 - DNA, 33 bp, Homo sapien
aaagccaaatgcacagaagaaagtgggtgacaa

SEQ ID NO: 94886 - DNA, 33 bp, Homo sapien
aaagccaaatgcacaggagaaagtgggtgacaa

SEQ ID NO: 94887 - DNA, 33 bp, Homo sapien
ttcctttcttcattcaataaacatccacggagc

SEQ ID NO: 94888 - DNA, 33 bp, Homo sapien
ttcctttcttcattcagtaaacatccacggagc

SEQ ID NO: 94889 - DNA, 33 bp, Homo sapien
ctgtgagtccattacacctattttttctttata

SEQ ID NO: 94890 - DNA, 33 bp, Homo sapien
ctgtgagtccattacatctattttttctttata

SEQ ID NO: 94891 - DNA, 33 bp, Homo sapien
tctcaatgaagatacccagaaaatccgaacaaa

SEQ ID NO: 94892 - DNA, 33 bp, Homo sapien
tctcaatgaagatacctagaaaatccgaacaaa

SEQ ID NO: 94893 - DNA, 33 bp, Homo sapien
gacacagtattggcacaaggagggcccagtgaa

SEQ ID NO: 94894 - DNA, 33 bp, Homo sapien
gacacagtattggcaccaggagggcccagtgaa

SEQ ID NO: 94895 - DNA, 33 bp, Homo sapien
cctgtggtcttccacacgtaccttcacatcttc

SEQ ID NO: 94896 - DNA, 33 bp, Homo sapien
cctgtggtcttccacaggtaccttcacatcttc

SEQ ID NO: 94897 - DNA, 33 bp, Homo sapien
gattgtgttggcttaaaccccattaaactgtag

SEQ ID NO: 94898 - DNA, 33 bp, Homo sapien
gattgtgttggcttaacccccattaaactgtag

SEQ ID NO: 94899 - DNA, 33 bp, Homo sapien
gccagaccaatgttgacctttaaattaccccag

SEQ ID NO: 94900 - DNA, 33 bp, Homo sapien
gccagaccaatgttgatctttaaattaccccag

SEQ ID NO: 94901 - DNA, 33 bp, Homo sapien
caagtggctgattaaaggagtgggaaccttggg

SEQ ID NO: 94902 - DNA, 33 bp, Homo sapien
caagtggctgattaaatgagtgggaaccttggg

SEQ ID NO: 94903 - DNA, 33 bp, Homo sapien
cctcagtgggacagagcaaaataacaattaagt

SEQ ID NO: 94904 - DNA, 33 bp, Homo sapien
cctcagtgggacagagtaaaataacaattaagt

SEQ ID NO: 94905 - DNA, 33 bp, Homo sapien
gtctgcagagtggcccaagctatctaagtgcac

SEQ ID NO: 94906 - DNA, 33 bp, Homo sapien
gtctgcagagtggcccgagctatctaagtgcac

SEQ ID NO: 94907 - DNA, 33 bp, Homo sapien
ccacggatgaagagtaaccaggggcaggtgtgt

SEQ ID NO: 94908 - DNA, 33 bp, Homo sapien
ccacggatgaagagtacccaggggcaggtgtgt

SEQ ID NO: 94909 - DNA, 33 bp, Homo sapien
aactcatttttgttggaaagtaatagagtgtca

SEQ ID NO: 94910 - DNA, 33 bp, Homo sapien
aactcatttttgttgggaagtaatagagtgtca

SEQ ID NO: 94911 - DNA, 33 bp, Homo sapien
tctgtgatcgctgagacgggtaactagttaagc

SEQ ID NO: 94912 - DNA, 33 bp, Homo sapien
tctgtgatcgctgagatgggtaactagttaagc

SEQ ID NO: 94913 - DNA, 33 bp, Homo sapien
ttccacggcacccaaccatccaaaagttactac

SEQ ID NO: 94914 - DNA, 33 bp, Homo sapien
ttccacggcacccaacgatccaaaagttactac

SEQ ID NO: 94915 - DNA, 33 bp, Homo sapien
tctcatctgtgcattcacttaaaaaacagtcga

SEQ ID NO: 94916 - DNA, 33 bp, Homo sapien
tctcatctgtgcattcgcttaaaaaacagtcga

SEQ ID NO: 94917 - DNA, 33 bp, Homo sapien
ttcttaatggtgaaaaagtgaaaatatttcttt

SEQ ID NO: 94918 - DNA, 33 bp, Homo sapien
ttcttaatggtgaaaaggtgaaaatatttcttt

SEQ ID NO: 94919 - DNA, 33 bp, Homo sapien
cctacctgattttgcacgggatggctttggctc

SEQ ID NO: 94920 - DNA, 33 bp, Homo sapien
cctacctgattttgcatgggatggctttggctc

SEQ ID NO: 94921 - DNA, 33 bp, Homo sapien
cgtagtcaataacaaccaaatggctggctgtcc

SEQ ID NO: 94922 - DNA, 33 bp, Homo sapien
cgtagtcaataacaacgaaatggctggctgtcc

SEQ ID NO: 94923 - DNA, 33 bp, Homo sapien
ctgcagatttgagtgacattaggaaagaaatgc

SEQ ID NO: 94924 - DNA, 33 bp, Homo sapien
ctgcagatttgagtgagattaggaaagaaatgc

SEQ ID NO: 94925 - DNA, 33 bp, Homo sapien
tgaagggcagaaatacagagccttttatggaag

SEQ ID NO: 94926 - DNA, 33 bp, Homo sapien
tgaagggcagaaatacggagccttttatggaag

SEQ ID NO: 94927 - DNA, 33 bp, Homo sapien
ccatagataatctccacgatgccaaacccaaac

SEQ ID NO: 94928 - DNA, 33 bp, Homo sapien
ccatagataatctccatgatgccaaacccaaac

SEQ ID NO: 94929 - DNA, 33 bp, Homo sapien
tccactaacagtaggacgggtaagtaaacagcg

SEQ ID NO: 94930 - DNA, 33 bp, Homo sapien
tccactaacagtaggatgggtaagtaaacagcg

SEQ ID NO: 94931 - DNA, 33 bp, Homo sapien
ctcacaaatacaacgtgaagcaaacaaagcaag

SEQ ID NO: 94932 - DNA, 33 bp, Homo sapien
ctcacaaatacaacgttaagcaaacaaagcaag

SEQ ID NO: 94933 - DNA, 33 bp, Homo sapien
tgaaggacacagaagtcaatctctgcagaaggg

SEQ ID NO: 94934 - DNA, 33 bp, Homo sapien
tgaaggacacagaagtgaatctctgcagaaggg

SEQ ID NO: 94935 - DNA, 33 bp, Homo sapien
actagtgacttcagacaacagtgtcgaatctca

SEQ ID NO: 94936 - DNA, 33 bp, Homo sapien
actagtgacttcagacgacagtgtcgaatctca

SEQ ID NO: 94937 - DNA, 33 bp, Homo sapien
aataaaatagttcacaatcctttacaatagaac

SEQ ID NO: 94938 - DNA, 33 bp, Homo sapien
aataaaatagttcacagtcctttacaatagaac

SEQ ID NO: 94939 - DNA, 33 bp, Homo sapien
tattcaataacgaaaacctgggtgctatatttg

SEQ ID NO: 94940 - DNA, 33 bp, Homo sapien
tattcaataacgaaaagctgggtgctatatttg

SEQ ID NO: 94941 - DNA, 33 bp, Homo sapien
accacagggtattcaaggagcaccaatggcctg

SEQ ID NO: 94942 - DNA, 33 bp, Homo sapien
accacagggtattcaatgagcaccaatggcctg

SEQ ID NO: 94943 - DNA, 33 bp, Homo sapien
tttgcacggcctgatactatatttccctcggtt

SEQ ID NO: 94944 - DNA, 33 bp, Homo sapien
tttgcacggcctgatattatatttccctcggtt

SEQ ID NO: 94945 - DNA, 33 bp, Homo sapien
cagatataactgccaacaactgatatagaaata

SEQ ID NO: 94946 - DNA, 33 bp, Homo sapien
cagatataactgccaataactgatatagaaata

SEQ ID NO: 94947 - DNA, 33 bp, Homo sapien
cttgacaataaaagtcagaaggaagattcgagt

SEQ ID NO: 94948 - DNA, 33 bp, Homo sapien
cttgacaataaaagtccgaaggaagattcgagt

SEQ ID NO: 94949 - DNA, 33 bp, Homo sapien
tcctagacacttaatacagcatggataaaataa

SEQ ID NO: 94950 - DNA, 33 bp, Homo sapien
tcctagacacttaatagagcatggataaaataa

SEQ ID NO: 94951 - DNA, 33 bp, Homo sapien
aaaccaaaactcggtaaccataatacaattcct

SEQ ID NO: 94952 - DNA, 33 bp, Homo sapien
aaaccaaaactcggtacccataatacaattcct

SEQ ID NO: 94953 - DNA, 33 bp, Homo sapien
cgaaagggactcgtggccaccgttgttcatagg

SEQ ID NO: 94954 - DNA, 33 bp, Homo sapien
cgaaagggactcgtggtcaccgttgttcatagg

SEQ ID NO: 94955 - DNA, 33 bp, Homo sapien
ctcagctgagacaccaacgagctacccagatca

SEQ ID NO: 94956 - DNA, 33 bp, Homo sapien
ctcagctgagacaccagcgagctacccagatca

SEQ ID NO: 94957 - DNA, 33 bp, Homo sapien
tatggtcaccctactcacgagtacttggttgca

SEQ ID NO: 94958 - DNA, 33 bp, Homo sapien
tatggtcaccctactcgcgagtacttggttgca

SEQ ID NO: 94959 - DNA, 33 bp, Homo sapien
agggtgaccatattaactgtcgaccacagcagt

SEQ ID NO: 94960 - DNA, 33 bp, Homo sapien
agggtgaccatattaattgtcgaccacagcagt

SEQ ID NO: 94961 - DNA, 33 bp, Homo sapien
ttctagggctaagcaaattcccgcgattggata

SEQ ID NO: 94962 - DNA, 33 bp, Homo sapien
ttctagggctaagcaacttcccgcgattggata

SEQ ID NO: 94963 - DNA, 33 bp, Homo sapien
aaaatccatattaatcaacgtgacgttagtaga

SEQ ID NO: 94964 - DNA, 33 bp, Homo sapien
aaaatccatattaatcgacgtgacgttagtaga

SEQ ID NO: 94965 - DNA, 33 bp, Homo sapien
taaatgtcctatgccaacctacagctttaaaaa

SEQ ID NO: 94966 - DNA, 33 bp, Homo sapien
taaatgtcctatgccagcctacagctttaaaaa

SEQ ID NO: 94967 - DNA, 33 bp, Homo sapien
tcttctgcaaacatacagaagaaatggatcttt

SEQ ID NO: 94968 - DNA, 33 bp, Homo sapien
tcttctgcaaacatacggaagaaatggatcttt

SEQ ID NO: 94969 - DNA, 33 bp, Homo sapien
ttgacaccatgcctggccacatataagatgatt

SEQ ID NO: 94970 - DNA, 33 bp, Homo sapien
ttgacaccatgcctggtcacatataagatgatt

SEQ ID NO: 94971 - DNA, 33 bp, Homo sapien
tacgtctgatgtctatcacttctatgacacctc

SEQ ID NO: 94972 - DNA, 33 bp, Homo sapien
tacgtctgatgtctatgacttctatgacacctc

SEQ ID NO: 94973 - DNA, 33 bp, Homo sapien
attttatagaagacgacgctgggaaacagaaat

SEQ ID NO: 94974 - DNA, 33 bp, Homo sapien
attttatagaagacgatgctgggaaacagaaat

SEQ ID NO: 94975 - DNA, 33 bp, Homo sapien
ttaccaatcaatgggcacaaggtttcagttcag

SEQ ID NO: 94976 - DNA, 33 bp, Homo sapien
ttaccaatcaatgggcccaaggtttcagttcag

SEQ ID NO: 94977 - DNA, 33 bp, Homo sapien
cagatttttaagcgtacggtgttttattgttga

SEQ ID NO: 94978 - DNA, 33 bp, Homo sapien
cagatttttaagcgtatggtgttttattgttga

SEQ ID NO: 94979 - DNA, 33 bp, Homo sapien
gaacattttttgaaagactgtgggcactggcat

SEQ ID NO: 94980 - DNA, 33 bp, Homo sapien
gaacattttttgaaaggctgtgggcactggcat

SEQ ID NO: 94981 - DNA, 33 bp, Homo sapien
gggggtgctgttcttacaccccagtctctctgc

SEQ ID NO: 94982 - DNA, 33 bp, Homo sapien
gggggtgctgttcttataccccagtctctctgc

SEQ ID NO: 94983 - DNA, 33 bp, Homo sapien
aggaaacattattgtcaccaacccatgtgactt

SEQ ID NO: 94984 - DNA, 33 bp, Homo sapien
aggaaacattattgtctccaacccatgtgactt

SEQ ID NO: 94985 - DNA, 33 bp, Homo sapien
gtcaccttctctaggccgaaagaagagtgacaa

SEQ ID NO: 94986 - DNA, 33 bp, Homo sapien
gtcaccttctctaggctgaaagaagagtgacaa

SEQ ID NO: 94987 - DNA, 33 bp, Homo sapien
tcgttctttagccacacatttggccactggacg

SEQ ID NO: 94988 - DNA, 33 bp, Homo sapien
tcgttctttagccacagatttggccactggacg

SEQ ID NO: 94989 - DNA, 33 bp, Homo sapien
tcaataaagagacttacagaactcatttgtgga

SEQ ID NO: 94990 - DNA, 33 bp, Homo sapien
tcaataaagagacttagagaactcatttgtgga

SEQ ID NO: 94991 - DNA, 33 bp, Homo sapien
gatggcaactgagagacgaacaaggagaattgc

SEQ ID NO: 94992 - DNA, 33 bp, Homo sapien
gatggcaactgagagatgaacaaggagaattgc

SEQ ID NO: 94993 - DNA, 33 bp, Homo sapien
ctttcacttcacaagacgcttttgagatttctc

SEQ ID NO: 94994 - DNA, 33 bp, Homo sapien
ctttcacttcacaagatgcttttgagatttctc

SEQ ID NO: 94995 - DNA, 33 bp, Homo sapien
ggagtgatgtatcaataagctaaagggtgccaa

SEQ ID NO: 94996 - DNA, 33 bp, Homo sapien
ggagtgatgtatcaatgagctaaagggtgccaa

SEQ ID NO: 94997 - DNA, 33 bp, Homo sapien
acaaatcgtaaaagaaagcatggataaataagc

SEQ ID NO: 94998 - DNA, 33 bp, Homo sapien
acaaatcgtaaaagaaggcatggataaataagc

SEQ ID NO: 94999 - DNA, 33 bp, Homo sapien
caataaaatatgttcaagttgctctgtgattcc

SEQ ID NO: 95000 - DNA, 33 bp, Homo sapien
caataaaatatgttcatgttgctctgtgattcc

SEQ ID NO: 95001 - DNA, 33 bp, Homo sapien
ccttaatttttctgtcactcaatgagaatgtca

SEQ ID NO: 95002 - DNA, 33 bp, Homo sapien
ccttaatttttctgtcgctcaatgagaatgtca

SEQ ID NO: 95003 - DNA, 33 bp, Homo sapien
ctagtactttggataaccagtaggaatttaatg

SEQ ID NO: 95004 - DNA, 33 bp, Homo sapien
ctagtactttggataagcagtaggaatttaatg

SEQ ID NO: 95005 - DNA, 33 bp, Homo sapien
tcttacctacacctgcaaagaactgaattcttc

SEQ ID NO: 95006 - DNA, 33 bp, Homo sapien
tcttacctacacctgcgaagaactgaattcttc

SEQ ID NO: 95007 - DNA, 33 bp, Homo sapien
aaatgactgcaatcaaagtgtctgctaggctga

SEQ ID NO: 95008 - DNA, 33 bp, Homo sapien
aaatgactgcaatcaaggtgtctgctaggctga

SEQ ID NO: 95009 - DNA, 33 bp, Homo sapien
ttaccacatattaccacaaacttagtgacaaaa

SEQ ID NO: 95010 - DNA, 33 bp, Homo sapien
ttaccacatattaccagaaacttagtgacaaaa

SEQ ID NO: 95011 - DNA, 33 bp, Homo sapien
tctccagaatggtagaaggtgatcagctgttct

SEQ ID NO: 95012 - DNA, 33 bp, Homo sapien
tctccagaatggtagagggtgatcagctgttct

SEQ ID NO: 95013 - DNA, 33 bp, Homo sapien
tctgctttgtttccaaaagaactcaagcagatg

SEQ ID NO: 95014 - DNA, 33 bp, Homo sapien
tctgctttgtttccaagagaactcaagcagatg

SEQ ID NO: 95015 - DNA, 33 bp, Homo sapien
acgtgggttctgaagacgaagagaacagtatct

SEQ ID NO: 95016 - DNA, 33 bp, Homo sapien
acgtgggttctgaagatgaagagaacagtatct

SEQ ID NO: 95017 - DNA, 33 bp, Homo sapien
agattcctccaggatgcaaacagttaaagatca

SEQ ID NO: 95018 - DNA, 33 bp, Homo sapien
agattcctccaggatggaaacagttaaagatca

SEQ ID NO: 95019 - DNA, 33 bp, Homo sapien
gtagtctagttagtatgacctattcttctccat

SEQ ID NO: 95020 - DNA, 33 bp, Homo sapien
gtagtctagttagtattacctattcttctccat

SEQ ID NO: 95021 - DNA, 33 bp, Homo sapien
tttcctaaacagaaaaatctggaagcaatttgc

SEQ ID NO: 95022 - DNA, 33 bp, Homo sapien
tttcctaaacagaaaactctggaagcaatttgc

SEQ ID NO: 95023 - DNA, 33 bp, Homo sapien
gtgaacaagaggccacaggctgtaatatatatt

SEQ ID NO: 95024 - DNA, 33 bp, Homo sapien
gtgaacaagaggccacgggctgtaatatatatt

SEQ ID NO: 95025 - DNA, 33 bp, Homo sapien
tgctttatatgtgttaagtacccaaataaacaa

SEQ ID NO: 95026 - DNA, 33 bp, Homo sapien
tgctttatatgtgttaggtacccaaataaacaa

SEQ ID NO: 95027 - DNA, 33 bp, Homo sapien
gttcagggagaggataagactggcaaacacatg

SEQ ID NO: 95028 - DNA, 33 bp, Homo sapien
gttcagggagaggataggactggcaaacacatg

SEQ ID NO: 95029 - DNA, 33 bp, Homo sapien
caacatgctagtcaaactctctttctctcaggt

SEQ ID NO: 95030 - DNA, 33 bp, Homo sapien
caacatgctagtcaaattctctttctctcaggt

SEQ ID NO: 95031 - DNA, 33 bp, Homo sapien
aacaagaatcactcagaatgttttagaattgac

SEQ ID NO: 95032 - DNA, 33 bp, Homo sapien
aacaagaatcactcagcatgttttagaattgac

SEQ ID NO: 95033 - DNA, 33 bp, Homo sapien
ttttaagaaattaacacggcagatacaactatt

SEQ ID NO: 95034 - DNA, 33 bp, Homo sapien
ttttaagaaattaacatggcagatacaactatt

SEQ ID NO: 95035 - DNA, 33 bp, Homo sapien
tcacctagcattctacacagtgaaggtggcaaa

SEQ ID NO: 95036 - DNA, 33 bp, Homo sapien
tcacctagcattctacgcagtgaaggtggcaaa

SEQ ID NO: 95037 - DNA, 33 bp, Homo sapien
cccatgatatcaaccacgacactaaactctctc

SEQ ID NO: 95038 - DNA, 33 bp, Homo sapien
cccatgatatcaaccatgacactaaactctctc

SEQ ID NO: 95039 - DNA, 33 bp, Homo sapien
aactacattgccgaacagtatgcagaacagaca

SEQ ID NO: 95040 - DNA, 33 bp, Homo sapien
aactacattgccgaacggtatgcagaacagaca

SEQ ID NO: 95041 - DNA, 33 bp, Homo sapien
aacaacattcgttgcacggtggaaatttcagaa

SEQ ID NO: 95042 - DNA, 33 bp, Homo sapien
aacaacattcgttgcatggtggaaatttcagaa

SEQ ID NO: 95043 - DNA, 33 bp, Homo sapien
tcatgagtgagtaccaatagaatcatgactctc

SEQ ID NO: 95044 - DNA, 33 bp, Homo sapien
tcatgagtgagtaccagtagaatcatgactctc

SEQ ID NO: 95045 - DNA, 33 bp, Homo sapien
cagtaacactcaacaacgcctctggtttcctgt

SEQ ID NO: 95046 - DNA, 33 bp, Homo sapien
cagtaacactcaacaatgcctctggtttcctgt

SEQ ID NO: 95047 - DNA, 33 bp, Homo sapien
atttcaggaaattttacgctcaaaaagcatggc

SEQ ID NO: 95048 - DNA, 33 bp, Homo sapien
atttcaggaaattttatgctcaaaaagcatggc

SEQ ID NO: 95049 - DNA, 33 bp, Homo sapien
atgtatacatgaaagggagtgtattaaagatgc

SEQ ID NO: 95050 - DNA, 33 bp, Homo sapien
atgtatacatgaaaggtagtgtattaaagatgc

SEQ ID NO: 95051 - DNA, 33 bp, Homo sapien
aggaaagcaatcattgcaaactgggaaatgcta

SEQ ID NO: 95052 - DNA, 33 bp, Homo sapien
aggaaagcaatcattgtaaactgggaaatgcta

SEQ ID NO: 95053 - DNA, 33 bp, Homo sapien
ctgggaaatgctagagcagactttacagcaatg

SEQ ID NO: 95054 - DNA, 33 bp, Homo sapien
ctgggaaatgctagagtagactttacagcaatg

SEQ ID NO: 95055 - DNA, 33 bp, Homo sapien
gcaccaactccaaacaagttatttgtgcttatg

SEQ ID NO: 95056 - DNA, 33 bp, Homo sapien
gcaccaactccaaacacgttatttgtgcttatg

SEQ ID NO: 95057 - DNA, 33 bp, Homo sapien
tttaggctcaggggtaaatacacaggtttgtta

SEQ ID NO: 95058 - DNA, 33 bp, Homo sapien
tttaggctcaggggtatatacacaggtttgtta

SEQ ID NO: 95059 - DNA, 33 bp, Homo sapien
atatctgcctcatagacagtgagctggacaaaa

SEQ ID NO: 95060 - DNA, 33 bp, Homo sapien
atatctgcctcatagagagtgagctggacaaaa

SEQ ID NO: 95061 - DNA, 33 bp, Homo sapien
tgattggattcaggaacgcctagatggctggcg

SEQ ID NO: 95062 - DNA, 33 bp, Homo sapien
tgattggattcaggaatgcctagatggctggcg

SEQ ID NO: 95063 - DNA, 33 bp, Homo sapien
ggttaattttggtatacagtgtgaggtaggggt

SEQ ID NO: 95064 - DNA, 33 bp, Homo sapien
ggttaattttggtatatagtgtgaggtaggggt

SEQ ID NO: 95065 - DNA, 33 bp, Homo sapien
tgcttaagagccagtacaagaacagcttaagac

SEQ ID NO: 95066 - DNA, 33 bp, Homo sapien
tgcttaagagccagtataagaacagcttaagac

SEQ ID NO: 95067 - DNA, 33 bp, Homo sapien
actgttgcatggaaagcctatgtccacatagaa

SEQ ID NO: 95068 - DNA, 33 bp, Homo sapien
actgttgcatggaaaggctatgtccacatagaa

SEQ ID NO: 95069 - DNA, 33 bp, Homo sapien
aagaagacctaaatataagacacaaatattaga

SEQ ID NO: 95070 - DNA, 33 bp, Homo sapien
aagaagacctaaatatgagacacaaatattaga

SEQ ID NO: 95071 - DNA, 33 bp, Homo sapien
ggcttctcttgcaaaactaggtcataattcggt

SEQ ID NO: 95072 - DNA, 33 bp, Homo sapien
ggcttctcttgcaaaagtaggtcataattcggt

SEQ ID NO: 95073 - DNA, 33 bp, Homo sapien
agtcattctaaagcacactatcttttgtcctaa

SEQ ID NO: 95074 - DNA, 33 bp, Homo sapien
agtcattctaaagcacgctatcttttgtcctaa

SEQ ID NO: 95075 - DNA, 33 bp, Homo sapien
gtcctaaaagatggcaatccccctgtgtggcaa

SEQ ID NO: 95076 - DNA, 33 bp, Homo sapien
gtcctaaaagatggcagtccccctgtgtggcaa

SEQ ID NO: 95077 - DNA, 33 bp, Homo sapien
gttttctctgaactacaccttatcttttcccta

SEQ ID NO: 95078 - DNA, 33 bp, Homo sapien
gttttctctgaactacgccttatcttttcccta

SEQ ID NO: 95079 - DNA, 33 bp, Homo sapien
gttggggtaatgtccgaattccttaccttcctg

SEQ ID NO: 95080 - DNA, 33 bp, Homo sapien
gttggggtaatgtccggattccttaccttcctg

SEQ ID NO: 95081 - DNA, 33 bp, Homo sapien
ttgggttagtgtgctaagtttccattgattata

SEQ ID NO: 95082 - DNA, 33 bp, Homo sapien
ttgggttagtgtgctatgtttccattgattata

SEQ ID NO: 95083 - DNA, 33 bp, Homo sapien
atcctgagaccaccaaactgggaaaagtgtaaa

SEQ ID NO: 95084 - DNA, 33 bp, Homo sapien
atcctgagaccaccaagctgggaaaagtgtaaa

SEQ ID NO: 95085 - DNA, 33 bp, Homo sapien
acgttcatcatacacaccccattacgtaaagtg

SEQ ID NO: 95086 - DNA, 33 bp, Homo sapien
acgttcatcatacacatcccattacgtaaagtg

SEQ ID NO: 95087 - DNA, 33 bp, Homo sapien
agaagcagcctccatcgctccatgacgggagtg

SEQ ID NO: 95088 - DNA, 33 bp, Homo sapien
agaagcagcctccatctctccatgacgggagtg

SEQ ID NO: 95089 - DNA, 33 bp, Homo sapien
tttggagaaattggaacgatccagaaatgggaa

SEQ ID NO: 95090 - DNA, 33 bp, Homo sapien
tttggagaaattggaatgatccagaaatgggaa

SEQ ID NO: 95091 - DNA, 33 bp, Homo sapien
tccccaaacacctgtgaaaatattacctgcagc

SEQ ID NO: 95092 - DNA, 33 bp, Homo sapien
tccccaaacacctgtggaaatattacctgcagc

SEQ ID NO: 95093 - DNA, 33 bp, Homo sapien
aaggttgtaacgcaccgagactgaagcccaggc

SEQ ID NO: 95094 - DNA, 33 bp, Homo sapien
aaggttgtaacgcacctagactgaagcccaggc

SEQ ID NO: 95095 - DNA, 33 bp, Homo sapien
catttctcttatacaacgtgctatttgaatggc

SEQ ID NO: 95096 - DNA, 33 bp, Homo sapien
catttctcttatacaatgtgctatttgaatggc

SEQ ID NO: 95097 - DNA, 33 bp, Homo sapien
atagcatctgccataacagcgtcagcctgcgta

SEQ ID NO: 95098 - DNA, 33 bp, Homo sapien
atagcatctgccataatagcgtcagcctgcgta

SEQ ID NO: 95099 - DNA, 33 bp, Homo sapien
acctatttatagttatcagaaaaggcaatgtgg

SEQ ID NO: 95100 - DNA, 33 bp, Homo sapien
acctatttatagttattagaaaaggcaatgtgg

SEQ ID NO: 95101 - DNA, 33 bp, Homo sapien
gtaacagttcttctcaaatgtcttgtgatgctt

SEQ ID NO: 95102 - DNA, 33 bp, Homo sapien
gtaacagttcttctcatatgtcttgtgatgctt

SEQ ID NO: 95103 - DNA, 33 bp, Homo sapien
tttacctgaggctgaagctatccctacatattg

SEQ ID NO: 95104 - DNA, 33 bp, Homo sapien
tttacctgaggctgaatctatccctacatattg

SEQ ID NO: 95105 - DNA, 33 bp, Homo sapien
aagtgaatatgattcccgatacaggtcaaagca

SEQ ID NO: 95106 - DNA, 33 bp, Homo sapien
aagtgaatatgattcctgatacaggtcaaagca

SEQ ID NO: 95107 - DNA, 33 bp, Homo sapien
gaatagaaccatgtcaaaatccaacccgaaaga

SEQ ID NO: 95108 - DNA, 33 bp, Homo sapien
gaatagaaccatgtcataatccaacccgaaaga

SEQ ID NO: 95109 - DNA, 33 bp, Homo sapien
ccattaaaataccacacggactaaggataatta

SEQ ID NO: 95110 - DNA, 33 bp, Homo sapien
ccattaaaataccacatggactaaggataatta

SEQ ID NO: 95111 - DNA, 33 bp, Homo sapien
aggattgtccactataacatttatgctttccca

SEQ ID NO: 95112 - DNA, 33 bp, Homo sapien
aggattgtccactatagcatttatgctttccca

SEQ ID NO: 95113 - DNA, 33 bp, Homo sapien
tgggacagcagcatttcaaaaaaaaaattattg

SEQ ID NO: 95114 - DNA, 33 bp, Homo sapien
tgggacagcagcatttgaaaaaaaaaattattg

SEQ ID NO: 95115 - DNA, 33 bp, Homo sapien
tactgcacaatgagaactgatattggcataggc

SEQ ID NO: 95116 - DNA, 33 bp, Homo sapien
tactgcacaatgagaagtgatattggcataggc

SEQ ID NO: 95117 - DNA, 33 bp, Homo sapien
atcctgatagggtagcagagaaagaaagtcatt

SEQ ID NO: 95118 - DNA, 33 bp, Homo sapien
atcctgatagggtagctgagaaagaaagtcatt

SEQ ID NO: 95119 - DNA, 33 bp, Homo sapien
ccaattgagaaaacagaattgattatgagagaa

SEQ ID NO: 95120 - DNA, 33 bp, Homo sapien
ccaattgagaaaacaggattgattatgagagaa

SEQ ID NO: 95121 - DNA, 33 bp, Homo sapien
taataaaagcagcacacgatgttcatttaacct

SEQ ID NO: 95122 - DNA, 33 bp, Homo sapien
taataaaagcagcacatgatgttcatttaacct

SEQ ID NO: 95123 - DNA, 33 bp, Homo sapien
caactctgacacattacatctggcttattagta

SEQ ID NO: 95124 - DNA, 33 bp, Homo sapien
caactctgacacattatatctggcttattagta

SEQ ID NO: 95125 - DNA, 33 bp, Homo sapien
gtatcatctaggtgatcaaagttaggaatacta

SEQ ID NO: 95126 - DNA, 33 bp, Homo sapien
gtatcatctaggtgatgaaagttaggaatacta

SEQ ID NO: 95127 - DNA, 33 bp, Homo sapien
ccatgtgaagacacaacgtcataatgttagttc

SEQ ID NO: 95128 - DNA, 33 bp, Homo sapien
ccatgtgaagacacaatgtcataatgttagttc

SEQ ID NO: 95129 - DNA, 33 bp, Homo sapien
tagtcttagcaactccggagactgaatcccttg

SEQ ID NO: 95130 - DNA, 33 bp, Homo sapien
tagtcttagcaactcctgagactgaatcccttg

SEQ ID NO: 95131 - DNA, 33 bp, Homo sapien
ctctctccatttatagccaggatttaccaacac

SEQ ID NO: 95132 - DNA, 33 bp, Homo sapien
ctctctccatttataggcaggatttaccaacac

SEQ ID NO: 95133 - DNA, 33 bp, Homo sapien
aaatactttaacaatcaatgtcatgtggctcac

SEQ ID NO: 95134 - DNA, 33 bp, Homo sapien
aaatactttaacaatcgatgtcatgtggctcac

SEQ ID NO: 95135 - DNA, 33 bp, Homo sapien
tcctaccaataatcatcaacgatgccaagagaa

SEQ ID NO: 95136 - DNA, 33 bp, Homo sapien
tcctaccaataatcattaacgatgccaagagaa

SEQ ID NO: 95137 - DNA, 33 bp, Homo sapien
ccctggaatcagtgaccaatgcatggtgttctg

SEQ ID NO: 95138 - DNA, 33 bp, Homo sapien
ccctggaatcagtgacgaatgcatggtgttctg

SEQ ID NO: 95139 - DNA, 33 bp, Homo sapien
aaataaggcatcaataccgccaattctctttat

SEQ ID NO: 95140 - DNA, 33 bp, Homo sapien
aaataaggcatcaatagcgccaattctctttat

SEQ ID NO: 95141 - DNA, 33 bp, Homo sapien
ttctacttcagctggacgctattttgtcaattg

SEQ ID NO: 95142 - DNA, 33 bp, Homo sapien
ttctacttcagctggatgctattttgtcaattg

SEQ ID NO: 95143 - DNA, 33 bp, Homo sapien
agcttttagaacatcactccgtaactccaactc

SEQ ID NO: 95144 - DNA, 33 bp, Homo sapien
agcttttagaacatcagtccgtaactccaactc

SEQ ID NO: 95145 - DNA, 33 bp, Homo sapien
ctttaggggcatcccaatcttaaggcagggtat

SEQ ID NO: 95146 - DNA, 33 bp, Homo sapien
ctttaggggcatcccagtcttaaggcagggtat

SEQ ID NO: 95147 - DNA, 33 bp, Homo sapien
tagaagtcaacaagcaaaggagcaacttagctg

SEQ ID NO: 95148 - DNA, 33 bp, Homo sapien
tagaagtcaacaagcataggagcaacttagctg

SEQ ID NO: 95149 - DNA, 33 bp, Homo sapien
tccaatctctgccttccatgttctaagggattc

SEQ ID NO: 95150 - DNA, 33 bp, Homo sapien
tccaatctctgccttctatgttctaagggattc

SEQ ID NO: 95151 - DNA, 33 bp, Homo sapien
attaattttcaataccaccctttctacttatct

SEQ ID NO: 95152 - DNA, 33 bp, Homo sapien
attaattttcaataccgccctttctacttatct

SEQ ID NO: 95153 - DNA, 33 bp, Homo sapien; identical to SEQ ID NO: 95151

SEQ ID NO: 95154 - DNA, 33 bp, Homo sapien; identical to SEQ ID NO: 95152

SEQ ID NO: 95155 - DNA, 33 bp, Homo sapien
ggggggtctctctcagaaatcttcttcaaaatt

SEQ ID NO: 95156 - DNA, 33 bp, Homo sapien
ggggggtctctctcaggaatcttcttcaaaatt

SEQ ID NO: 95157 - DNA, 33 bp, Homo sapien
cacagggtgtagagaaactgtgatattagaggt

SEQ ID NO: 95158 - DNA, 33 bp, Homo sapien
cacagggtgtagagaagctgtgatattagaggt

SEQ ID NO: 95159 - DNA, 33 bp, Homo sapien
gggctacctgatctgacaaagccttttacatcg

SEQ ID NO: 95160 - DNA, 33 bp, Homo sapien
gggctacctgatctgagaaagccttttacatcg

SEQ ID NO: 95161 - DNA, 33 bp, Homo sapien
acattaattgaatttcccttgaaggactgaagg

SEQ ID NO: 95162 - DNA, 33 bp, Homo sapien
acattaattgaatttctcttgaaggactgaagg

SEQ ID NO: 95163 - DNA, 33 bp, Homo sapien
aatacaatggtaatggaatcccacagtaatttg

SEQ ID NO: 95164 - DNA, 33 bp, Homo sapien
aatacaatggtaatgggatcccacagtaatttg

SEQ ID NO: 95165 - DNA, 33 bp, Homo sapien
tgatctcaggttcacaaaatttttctactgagg

SEQ ID NO: 95166 - DNA, 33 bp, Homo sapien
tgatctcaggttcacagaatttttctactgagg

SEQ ID NO: 95167 - DNA, 33 bp, Homo sapien
tttgatagttgttttaaataggtcagaaaatag

SEQ ID NO: 95168 - DNA, 33 bp, Homo sapien
tttgatagttgttttacataggtcagaaaatag

SEQ ID NO: 95169 - DNA, 33 bp, Homo sapien
gaggaaacaacgctcaaggttccaagagtcctg

SEQ ID NO: 95170 - DNA, 33 bp, Homo sapien
gaggaaacaacgctcagggttccaagagtcctg

SEQ ID NO: 95171 - DNA, 33 bp, Homo sapien
agatcaactgaaaaaacgagaggggtataacag

SEQ ID NO: 95172 - DNA, 33 bp, Homo sapien
agatcaactgaaaaaatgagaggggtataacag

SEQ ID NO: 95173 - DNA, 33 bp, Homo sapien
agctccagtggaatgacgtattcttgctcgtca

SEQ ID NO: 95174 - DNA, 33 bp, Homo sapien
agctccagtggaatgatgtattcttgctcgtca

SEQ ID NO: 95175 - DNA, 33 bp, Homo sapien
aatttcatgcacagagaaaaaaattacaacggt

SEQ ID NO: 95176 - DNA, 33 bp, Homo sapien
aatttcatgcacagagcaaaaaattacaacggt

SEQ ID NO: 95177 - DNA, 33 bp, Homo sapien
aatagatgaaaggaaactgtgagttgattaaga

SEQ ID NO: 95178 - DNA, 33 bp, Homo sapien
aatagatgaaaggaaagtgtgagttgattaaga

SEQ ID NO: 95179 - DNA, 33 bp, Homo sapien
tcagcaaagaaaaacacgacaagaactgttaag

SEQ ID NO: 95180 - DNA, 33 bp, Homo sapien
tcagcaaagaaaaacatgacaagaactgttaag

SEQ ID NO: 95181 - DNA, 33 bp, Homo sapien
gtgcaaaagccattgaagtttttgccactactt

SEQ ID NO: 95182 - DNA, 33 bp, Homo sapien
gtgcaaaagccattgaggtttttgccactactt

SEQ ID NO: 95183 - DNA, 33 bp, Homo sapien
caactaataactggctaacatattgaaatctct

SEQ ID NO: 95184 - DNA, 33 bp, Homo sapien
caactaataactggctgacatattgaaatctct

SEQ ID NO: 95185 - DNA, 33 bp, Homo sapien
gacgttatcctgcgtaaagttgtaatacatact

SEQ ID NO: 95186 - DNA, 33 bp, Homo sapien
gacgttatcctgcgtagagttgtaatacatact

SEQ ID NO: 95187 - DNA, 33 bp, Homo sapien
aaggcacaggactaaacgcctattcaatttgac

SEQ ID NO: 95188 - DNA, 33 bp, Homo sapien
aaggcacaggactaaatgcctattcaatttgac

SEQ ID NO: 95189 - DNA, 33 bp, Homo sapien
gccaaggagagctaaactgtcattgcagagaag

SEQ ID NO: 95190 - DNA, 33 bp, Homo sapien
gccaaggagagctaaattgtcattgcagagaag

SEQ ID NO: 95191 - DNA, 33 bp, Homo sapien
aatcctttgatgaaataagtgaaggtcccaaca

SEQ ID NO: 95192 - DNA, 33 bp, Homo sapien
aatcctttgatgaaatcagtgaaggtcccaaca

SEQ ID NO: 95193 - DNA, 33 bp, Homo sapien
tattttaaaactagcactataatttccacgagg

SEQ ID NO: 95194 - DNA, 33 bp, Homo sapien
tattttaaaactagcagtataatttccacgagg

SEQ ID NO: 95195 - DNA, 33 bp, Homo sapien
aatgctaagcgttgtaggacacagatattcttg

SEQ ID NO: 95196 - DNA, 33 bp, Homo sapien
aatgctaagcgttgtatgacacagatattcttg

SEQ ID NO: 95197 - DNA, 33 bp, Homo sapien
ccttattgagggacaccggaatttgaattttgt

SEQ ID NO: 95198 - DNA, 33 bp, Homo sapien
ccttattgagggacactggaatttgaattttgt

SEQ ID NO: 95199 - DNA, 33 bp, Homo sapien
ttcatgataaaatcagcatagaggagtatgtgc

SEQ ID NO: 95200 - DNA, 33 bp, Homo sapien
ttcatgataaaatcagtatagaggagtatgtgc

SEQ ID NO: 95201 - DNA, 33 bp, Homo sapien
gggcaagccaatgagaactgtttgcatcttgac

SEQ ID NO: 95202 - DNA, 33 bp, Homo sapien
gggcaagccaatgagagctgtttgcatcttgac

SEQ ID NO: 95203 - DNA, 33 bp, Homo sapien
ggtcagtgacataagcaaaatctgacttagggc

SEQ ID NO: 95204 - DNA, 33 bp, Homo sapien
ggtcagtgacataagccaaatctgacttagggc

SEQ ID NO: 95205 - DNA, 33 bp, Homo sapien
cagtgactgggaaggacgctttgaagtagatgc

SEQ ID NO: 95206 - DNA, 33 bp, Homo sapien
cagtgactgggaaggatgctttgaagtagatgc

SEQ ID NO: 95207 - DNA, 33 bp, Homo sapien
gcaagaactcaaaatacatcatccacgcactct

SEQ ID NO: 95208 - DNA, 33 bp, Homo sapien
gcaagaactcaaaatatatcatccacgcactct

SEQ ID NO: 95209 - DNA, 33 bp, Homo sapien
ttctttaacagcattcgcacatgattttttttc

SEQ ID NO: 95210 - DNA, 33 bp, Homo sapien
ttctttaacagcattctcacatgattttttttc

SEQ ID NO: 95211 - DNA, 33 bp, Homo sapien
tagtactgccaaatagaagaccggtgaagttca

SEQ ID NO: 95212 - DNA, 33 bp, Homo sapien
tagtactgccaaataggagaccggtgaagttca

SEQ ID NO: 95213 - DNA, 33 bp, Homo sapien
gggatgatggcaaacagataaaccctcggcagg

SEQ ID NO: 95214 - DNA, 33 bp, Homo sapien
gggatgatggcaaacatataaaccctcggcagg

SEQ ID NO: 95215 - DNA, 33 bp, Homo sapien
ccccctatccaactacaattgtgtattcattaa

SEQ ID NO: 95216 - DNA, 33 bp, Homo sapien
ccccctatccaactacgattgtgtattcattaa

SEQ ID NO: 95217 - DNA, 33 bp, Homo sapien
agatctggctttctcaagaactctttcactgag

SEQ ID NO: 95218 - DNA, 33 bp, Homo sapien
agatctggctttctcaggaactctttcactgag

SEQ ID NO: 95219 - DNA, 33 bp, Homo sapien
ggataatcagtctatcaagggaaaatgtgttag

SEQ ID NO: 95220 - DNA, 33 bp, Homo sapien
ggataatcagtctatcgagggaaaatgtgttag

SEQ ID NO: 95221 - DNA, 33 bp, Homo sapien
cacctaaaagaatgataaacaggatgtgtcaaa

SEQ ID NO: 95222 - DNA, 33 bp, Homo sapien
cacctaaaagaatgatgaacaggatgtgtcaaa

SEQ ID NO: 95223 - DNA, 33 bp, Homo sapien
ttgccacatgtggctgaaacattatttagcaag

SEQ ID NO: 95224 - DNA, 33 bp, Homo sapien
ttgccacatgtggctgcaacattatttagcaag

SEQ ID NO: 95225 - DNA, 33 bp, Homo sapien
ccctatgtgttacagcaaatgccagtgcagatc

SEQ ID NO: 95226 - DNA, 33 bp, Homo sapien
ccctatgtgttacagcgaatgccagtgcagatc

SEQ ID NO: 95227 - DNA, 33 bp, Homo sapien
ggagtagggaattcacaggacaacatgaagata

SEQ ID NO: 95228 - DNA, 33 bp, Homo sapien
ggagtagggaattcacgggacaacatgaagata

SEQ ID NO: 95229 - DNA, 33 bp, Homo sapien
ctgcaaatctggggtacagctgttaatcgaccc

SEQ ID NO: 95230 - DNA, 33 bp, Homo sapien
ctgcaaatctggggtatagctgttaatcgaccc

SEQ ID NO: 95231 - DNA, 33 bp, Homo sapien
tttcttgcctttaaggaaaaaacctccactgac

SEQ ID NO: 95232 - DNA, 33 bp, Homo sapien
tttcttgcctttaagggaaaaacctccactgac

SEQ ID NO: 95233 - DNA, 33 bp, Homo sapien
tgaaaaagagtttaacaatagtcatctgattta

SEQ ID NO: 95234 - DNA, 33 bp, Homo sapien
tgaaaaagagtttaacgatagtcatctgattta

SEQ ID NO: 95235 - DNA, 33 bp, Homo sapien
ggcaactgataaggccgcgaagcaacccaagtg

SEQ ID NO: 95236 - DNA, 33 bp, Homo sapien
ggcaactgataaggcctcgaagcaacccaagtg

SEQ ID NO: 95237 - DNA, 33 bp, Homo sapien
ccccaaagagtgtcacactttagccatagtagg

SEQ ID NO: 95238 - DNA, 33 bp, Homo sapien
ccccaaagagtgtcacgctttagccatagtagg

SEQ ID NO: 95239 - DNA, 33 bp, Homo sapien
tcctacagctacattcacactgtgagagatttg

SEQ ID NO: 95240 - DNA, 33 bp, Homo sapien
tcctacagctacattcgcactgtgagagatttg

SEQ ID NO: 95241 - DNA, 33 bp, Homo sapien
aggacatccctggcagcaacagtggtcagtgca

SEQ ID NO: 95242 - DNA, 33 bp, Homo sapien
aggacatccctggcaggaacagtggtcagtgca

SEQ ID NO: 95243 - DNA, 33 bp, Homo sapien
catctgaaataaactaactcattctcggtctcc

SEQ ID NO: 95244 - DNA, 33 bp, Homo sapien
catctgaaataaactagctcattctcggtctcc

SEQ ID NO: 95245 - DNA, 33 bp, Homo sapien
atatttgctgaccgaacgaactgtttgattttt

SEQ ID NO: 95246 - DNA, 33 bp, Homo sapien
atatttgctgaccgaaggaactgtttgattttt

SEQ ID NO: 95247 - DNA, 33 bp, Homo sapien
tgattcccaggcctcaaagaagcggtctggatc

SEQ ID NO: 95248 - DNA, 33 bp, Homo sapien
tgattcccaggcctcatagaagcggtctggatc

SEQ ID NO: 95249 - DNA, 33 bp, Homo sapien
aatgatccaattgtgccctctctgtgtcccggg

SEQ ID NO: 95250 - DNA, 33 bp, Homo sapien
aatgatccaattgtgctctctctgtgtcccggg

SEQ ID NO: 95251 - DNA, 33 bp, Homo sapien
tttattcagctacttacatacttacctacctac

SEQ ID NO: 95252 - DNA, 33 bp, Homo sapien
tttattcagctacttatatacttacctacctac

SEQ ID NO: 95253 - DNA, 33 bp, Homo sapien
gctgtgtgcaaactgaacccaggggccgccatg

SEQ ID NO: 95254 - DNA, 33 bp, Homo sapien
gctgtgtgcaaactgaccccaggggccgccatg

SEQ ID NO: 95255 - DNA, 33 bp, Homo sapien
ccactgaaaagagaaaagactccaattacctgt

SEQ ID NO: 95256 - DNA, 33 bp, Homo sapien
ccactgaaaagagaaacgactccaattacctgt

SEQ ID NO: 95257 - DNA, 33 bp, Homo sapien
gtcgagaaggcagtcacggaaacggcttgatta

SEQ ID NO: 95258 - DNA, 33 bp, Homo sapien
gtcgagaaggcagtcatggaaacggcttgatta

SEQ ID NO: 95259 - DNA, 33 bp, Homo sapien
ctagaagagatgaaagcctcagcataaatccag

SEQ ID NO: 95260 - DNA, 33 bp, Homo sapien
ctagaagagatgaaaggctcagcataaatccag

SEQ ID NO: 95261 - DNA, 33 bp, Homo sapien
agagcagcctgacagcaaggatgaggaaggagt

SEQ ID NO: 95262 - DNA, 33 bp, Homo sapien
agagcagcctgacagcgaggatgaggaaggagt

SEQ ID NO: 95263 - DNA, 33 bp, Homo sapien
ggcctgagtattaacaactttatatccagagct

SEQ ID NO: 95264 - DNA, 33 bp, Homo sapien
ggcctgagtattaacatctttatatccagagct

SEQ ID NO: 95265 - DNA, 33 bp, Homo sapien
acaggaatgtatttctcaagttcaggtagctgg

SEQ ID NO: 95266 - DNA, 33 bp, Homo sapien
acaggaatgtatttcttaagttcaggtagctgg

SEQ ID NO: 95267 - DNA, 33 bp, Homo sapien
tactattctgtctaaaacgtcgatcccagcctc

SEQ ID NO: 95268 - DNA, 33 bp, Homo sapien
tactattctgtctaaatcgtcgatcccagcctc

SEQ ID NO: 95269 - DNA, 33 bp, Homo sapien
acgctgggcactagaaacccccctagcttcctg

SEQ ID NO: 95270 - DNA, 33 bp, Homo sapien
acgctgggcactagaaccccccctagcttcctg

SEQ ID NO: 95271 - DNA, 33 bp, Homo sapien
catggctgccttttcacgaggtttaacataagc

SEQ ID NO: 95272 - DNA, 33 bp, Homo sapien
catggctgccttttcatgaggtttaacataagc

SEQ ID NO: 95273 - DNA, 33 bp, Homo sapien
ctaacaggccatacacaggatcaaatagtgaag

SEQ ID NO: 95274 - DNA, 33 bp, Homo sapien
ctaacaggccatacacgggatcaaatagtgaag

SEQ ID NO: 95275 - DNA, 33 bp, Homo sapien
ccagggattttgaaccgagaccttctcaaaagt

SEQ ID NO: 95276 - DNA, 33 bp, Homo sapien
ccagggattttgaacctagaccttctcaaaagt

SEQ ID NO: 95277 - DNA, 33 bp, Homo sapien
cattttagaccacacaataagtttgcacataat

SEQ ID NO: 95278 - DNA, 33 bp, Homo sapien
cattttagaccacacagtaagtttgcacataat

SEQ ID NO: 95279 - DNA, 33 bp, Homo sapien
tagacagaaataatgacgttgccattgcttaaa

SEQ ID NO: 95280 - DNA, 33 bp, Homo sapien
tagacagaaataatgatgttgccattgcttaaa

SEQ ID NO: 95281 - DNA, 33 bp, Homo sapien
caaggcatcttgttcaaaatagctcagttcctg

SEQ ID NO: 95282 - DNA, 33 bp, Homo sapien
caaggcatcttgttcagaatagctcagttcctg

SEQ ID NO: 95283 - DNA, 33 bp, Homo sapien
gttctgaactcatacaaccttcaagaaacattt

SEQ ID NO: 95284 - DNA, 33 bp, Homo sapien
gttctgaactcatacagccttcaagaaacattt

SEQ ID NO: 95285 - DNA, 33 bp, Homo sapien
ttagagtatgacatcacagctttttccatttca

SEQ ID NO: 95286 - DNA, 33 bp, Homo sapien
ttagagtatgacatcagagctttttccatttca

SEQ ID NO: 95287 - DNA, 33 bp, Homo sapien
agaggcactaatacagacagttgggcctttgac

SEQ ID NO: 95288 - DNA, 33 bp, Homo sapien
agaggcactaatacagccagttgggcctttgac

SEQ ID NO: 95289 - DNA, 33 bp, Homo sapien
ggtgcaaagaagactaagaaaggacagatcagc

SEQ ID NO: 95290 - DNA, 33 bp, Homo sapien
ggtgcaaagaagactacgaaaggacagatcagc

SEQ ID NO: 95291 - DNA, 33 bp, Homo sapien
gctggatctggagaaacgggttactgtgatgtg

SEQ ID NO: 95292 - DNA, 33 bp, Homo sapien
gctggatctggagaaatgggttactgtgatgtg

SEQ ID NO: 95293 - DNA, 33 bp, Homo sapien
aaagggttgacaagtacctaacttcaagtattg

SEQ ID NO: 95294 - DNA, 33 bp, Homo sapien
aaagggttgacaagtatctaacttcaagtattg

SEQ ID NO: 95295 - DNA, 33 bp, Homo sapien
tgagtgcacataaaaaataccaagggtccaaaa

SEQ ID NO: 95296 - DNA, 33 bp, Homo sapien
tgagtgcacataaaaactaccaagggtccaaaa

SEQ ID NO: 95297 - DNA, 33 bp, Homo sapien
gcctgcccagctaaaaggtcgaggatggatcat

SEQ ID NO: 95298 - DNA, 33 bp, Homo sapien
gcctgcccagctaaaatgtcgaggatggatcat

SEQ ID NO: 95299 - DNA, 33 bp, Homo sapien
tctccagaacaaggaacatcaactttatcccca

SEQ ID NO: 95300 - DNA, 33 bp, Homo sapien
tctccagaacaaggaagatcaactttatcccca

SEQ ID NO: 95301 - DNA, 33 bp, Homo sapien
taataagttctgaaaacggtaaatgaaaggaag

SEQ ID NO: 95302 - DNA, 33 bp, Homo sapien
taataagttctgaaaatggtaaatgaaaggaag

SEQ ID NO: 95303 - DNA, 33 bp, Homo sapien
ttctcccacgaggacacggatttttctccttga

SEQ ID NO: 95304 - DNA, 33 bp, Homo sapien
ttctcccacgaggacagggatttttctccttga

SEQ ID NO: 95305 - DNA, 33 bp, Homo sapien
ggcatgcatgtaaaaaagggtgatttttatatt

SEQ ID NO: 95306 - DNA, 33 bp, Homo sapien
ggcatgcatgtaaaaaggggtgatttttatatt

SEQ ID NO: 95307 - DNA, 33 bp, Homo sapien
agaaagtgcatagacactcagaagggataaaaa

SEQ ID NO: 95308 - DNA, 33 bp, Homo sapien
agaaagtgcatagacattcagaagggataaaaa

SEQ ID NO: 95309 - DNA, 33 bp, Homo sapien
acacacaacccgatagaaaaaatgggcttgagt

SEQ ID NO: 95310 - DNA, 33 bp, Homo sapien
acacacaacccgataggaaaaatgggcttgagt

SEQ ID NO: 95311 - DNA, 33 bp, Homo sapien
ttgaccacgtttatgaagtatctacaacaggca

SEQ ID NO: 95312 - DNA, 33 bp, Homo sapien
ttgaccacgtttatgaggtatctacaacaggca

SEQ ID NO: 95313 - DNA, 33 bp, Homo sapien
attccttgcctggaaacacgttctgaaaggagg

SEQ ID NO: 95314 - DNA, 33 bp, Homo sapien
attccttgcctggaaagacgttctgaaaggagg

SEQ ID NO: 95315 - DNA, 33 bp, Homo sapien
tccaatatttacatgaagatgatgccttgctgt

SEQ ID NO: 95316 - DNA, 33 bp, Homo sapien
tccaatatttacatgacgatgatgccttgctgt

SEQ ID NO: 95317 - DNA, 33 bp, Homo sapien
taaactaatagaaagcaaagaacatgccttcag

SEQ ID NO: 95318 - DNA, 33 bp, Homo sapien
taaactaatagaaagcgaagaacatgccttcag

SEQ ID NO: 95319 - DNA, 33 bp, Homo sapien
catagaaggcctcacacgagaattttgctaggg

SEQ ID NO: 95320 - DNA, 33 bp, Homo sapien
catagaaggcctcacaggagaattttgctaggg

SEQ ID NO: 95321 - DNA, 33 bp, Homo sapien
acagcaccaatgtcacacacttggaatgagaat

SEQ ID NO: 95322 - DNA, 33 bp, Homo sapien
acagcaccaatgtcacgcacttggaatgagaat

SEQ ID NO: 95323 - DNA, 33 bp, Homo sapien
gcagcctggtgatccacccaggaaaatggcttt

SEQ ID NO: 95324 - DNA, 33 bp, Homo sapien
gcagcctggtgatccatccaggaaaatggcttt

SEQ ID NO: 95325 - DNA, 33 bp, Homo sapien
tctggggatctgtgtacagttagcagttgcatg

SEQ ID NO: 95326 - DNA, 33 bp, Homo sapien
tctggggatctgtgtatagttagcagttgcatg

SEQ ID NO: 95327 - DNA, 33 bp, Homo sapien
acaaatccttacccccaaaagcaactatgaaac

SEQ ID NO: 95328 - DNA, 33 bp, Homo sapien
acaaatccttacccccgaaagcaactatgaaac

SEQ ID NO: 95329 - DNA, 33 bp, Homo sapien
actccaagagacccccaagtcattgcaaaacca

SEQ ID NO: 95330 - DNA, 33 bp, Homo sapien
actccaagagacccccgagtcattgcaaaacca

SEQ ID NO: 95331 - DNA, 33 bp, Homo sapien
tctccagggaagtagactcctttctttgatgag

SEQ ID NO: 95332 - DNA, 33 bp, Homo sapien
tctccagggaagtagagtcctttctttgatgag

SEQ ID NO: 95333 - DNA, 33 bp, Homo sapien
ttaacaagaagcggtcccctaaccatccgaaag

SEQ ID NO: 95334 - DNA, 33 bp, Homo sapien
ttaacaagaagcggtctcctaaccatccgaaag

SEQ ID NO: 95335 - DNA, 33 bp, Homo sapien
ccaatttctgcaaagcactaaaagcattgatgg

SEQ ID NO: 95336 - DNA, 33 bp, Homo sapien
ccaatttctgcaaagcgctaaaagcattgatgg

SEQ ID NO: 95337 - DNA, 33 bp, Homo sapien
cagctatttgggataaacggtcaataattattg

SEQ ID NO: 95338 - DNA, 33 bp, Homo sapien
cagctatttgggataagcggtcaataattattg

SEQ ID NO: 95339 - DNA, 33 bp, Homo sapien
caaccagggctgtcaaccaccaagccatattgg

SEQ ID NO: 95340 - DNA, 33 bp, Homo sapien
caaccagggctgtcaatcaccaagccatattgg

SEQ ID NO: 95341 - DNA, 33 bp, Homo sapien
tttggtttaaagcctaagtttcttcatttacca

SEQ ID NO: 95342 - DNA, 33 bp, Homo sapien
tttggtttaaagcctaggtttcttcatttacca

SEQ ID NO: 95343 - DNA, 33 bp, Homo sapien
gtttattagtcctaacgattgcatttgtaatca

SEQ ID NO: 95344 - DNA, 33 bp, Homo sapien
gtttattagtcctaactattgcatttgtaatca

SEQ ID NO: 95345 - DNA, 33 bp, Homo sapien
gatgccagcattgaaaatataccaaaatgtaat

SEQ ID NO: 95346 - DNA, 33 bp, Homo sapien
gatgccagcattgaaattataccaaaatgtaat

SEQ ID NO: 95347 - DNA, 33 bp, Homo sapien
agaaaaggagaaatcagtaggagtcaatcacag

SEQ ID NO: 95348 - DNA, 33 bp, Homo sapien
agaaaaggagaaatcattaggagtcaatcacag

SEQ ID NO: 95349 - DNA, 33 bp, Homo sapien
agactgatccttacctcacatcctatatccaaa

SEQ ID NO: 95350 - DNA, 33 bp, Homo sapien
agactgatccttaccttacatcctatatccaaa

SEQ ID NO: 95351 - DNA, 33 bp, Homo sapien
aacactattgaaacaacggactaccagtttggg

SEQ ID NO: 95352 - DNA, 33 bp, Homo sapien
aacactattgaaacaatggactaccagtttggg

SEQ ID NO: 95353 - DNA, 33 bp, Homo sapien
ggaggagacggccttcactaagacctgatggat

SEQ ID NO: 95354 - DNA, 33 bp, Homo sapien
ggaggagacggccttcgctaagacctgatggat

SEQ ID NO: 95355 - DNA, 33 bp, Homo sapien
ttaggaactaaacatagactggtaaagaagatg

SEQ ID NO: 95356 - DNA, 33 bp, Homo sapien
ttaggaactaaacatatactggtaaagaagatg

SEQ ID NO: 95357 - DNA, 33 bp, Homo sapien
gcctagtaacctaacactaattcggaaggctag

SEQ ID NO: 95358 - DNA, 33 bp, Homo sapien
gcctagtaacctaacattaattcggaaggctag

SEQ ID NO: 95359 - DNA, 33 bp, Homo sapien
gaggaaactgtggtgaaaacaataggcatggtc

SEQ ID NO: 95360 - DNA, 33 bp, Homo sapien
gaggaaactgtggtgagaacaataggcatggtc

SEQ ID NO: 95361 - DNA, 33 bp, Homo sapien
tccgtggacttagataccatctcgatgacaatg

SEQ ID NO: 95362 - DNA, 33 bp, Homo sapien
tccgtggacttagatatcatctcgatgacaatg

SEQ ID NO: 95363 - DNA, 33 bp, Homo sapien
ctcaggtgtgaggaaacgtagagctttggagag

SEQ ID NO: 95364 - DNA, 33 bp, Homo sapien
ctcaggtgtgaggaaatgtagagctttggagag

SEQ ID NO: 95365 - DNA, 33 bp, Homo sapien
tacatttgttttgaatcaagatgctgtgtgtag

SEQ ID NO: 95366 - DNA, 33 bp, Homo sapien
tacatttgttttgaattaagatgctgtgtgtag

SEQ ID NO: 95367 - DNA, 33 bp, Homo sapien
gaagccctccactaagcagtttatgtgcatctt

SEQ ID NO: 95368 - DNA, 33 bp, Homo sapien
gaagccctccactaagtagtttatgtgcatctt

SEQ ID NO: 95369 - DNA, 33 bp, Homo sapien
agattggctagcagaacaatttactaatgactt

SEQ ID NO: 95370 - DNA, 33 bp, Homo sapien
agattggctagcagaataatttactaatgactt

SEQ ID NO: 95371 - DNA, 33 bp, Homo sapien
ttagttgtttctacaacgcaatccacaatcaaa

SEQ ID NO: 95372 - DNA, 33 bp, Homo sapien
ttagttgtttctacaatgcaatccacaatcaaa

SEQ ID NO: 95373 - DNA, 33 bp, Homo sapien
gaaattcacaaaacgcgaatggagtacagttag

SEQ ID NO: 95374 - DNA, 33 bp, Homo sapien
gaaattcacaaaacgctaatggagtacagttag

SEQ ID NO: 95375 - DNA, 33 bp, Homo sapien
ccttctagtacctccactcttatacaagtgatt

SEQ ID NO: 95376 - DNA, 33 bp, Homo sapien
ccttctagtacctccagtcttatacaagtgatt

SEQ ID NO: 95377 - DNA, 33 bp, Homo sapien
ggccacaatagggaaacttatgtctcatgtgaa

SEQ ID NO: 95378 - DNA, 33 bp, Homo sapien
ggccacaatagggaaagttatgtctcatgtgaa

SEQ ID NO: 95379 - DNA, 33 bp, Homo sapien
gttctctgggcagaacggattgctggaaggttt

SEQ ID NO: 95380 - DNA, 33 bp, Homo sapien
gttctctgggcagaactgattgctggaaggttt

SEQ ID NO: 95381 - DNA, 33 bp, Homo sapien
gatcaccagattcaggacattacctggggtcag

SEQ ID NO: 95382 - DNA, 33 bp, Homo sapien
gatcaccagattcagggcattacctggggtcag

SEQ ID NO: 95383 - DNA, 33 bp, Homo sapien
agctcctgaccgacccaaaactgctaccaggac

SEQ ID NO: 95384 - DNA, 33 bp, Homo sapien
agctcctgaccgacccgaaactgctaccaggac

SEQ ID NO: 95385 - DNA, 33 bp, Homo sapien
ggaacttcattgaggaacaaatgaaaggcacat

SEQ ID NO: 95386 - DNA, 33 bp, Homo sapien
ggaacttcattgaggagcaaatgaaaggcacat

SEQ ID NO: 95387 - DNA, 33 bp, Homo sapien
aagtccattctaaaggcatgtcatagaccacat

SEQ ID NO: 95388 - DNA, 33 bp, Homo sapien
aagtccattctaaaggtatgtcatagaccacat

SEQ ID NO: 95389 - DNA, 33 bp, Homo sapien
acatgggtgtaggatggcacaaagagctgataa

SEQ ID NO: 95390 - DNA, 33 bp, Homo sapien
acatgggtgtaggatgtcacaaagagctgataa

SEQ ID NO: 95391 - DNA, 33 bp, Homo sapien
aaaccctagaatagaactgagtgcatcaggaat

SEQ ID NO: 95392 - DNA, 33 bp, Homo sapien
aaaccctagaatagaattgagtgcatcaggaat

SEQ ID NO: 95393 - DNA, 33 bp, Homo sapien
ttcaaccaacacaattaaaactaggagacctta

SEQ ID NO: 95394 - DNA, 33 bp, Homo sapien
ttcaaccaacacaattcaaactaggagacctta

SEQ ID NO: 95395 - DNA, 33 bp, Homo sapien
gacaagcatcacaggaaatgaggaattttattt

SEQ ID NO: 95396 - DNA, 33 bp, Homo sapien
gacaagcatcacaggacatgaggaattttattt

SEQ ID NO: 95397 - DNA, 33 bp, Homo sapien
agtatttaataactcacggaaagcaattacggg

SEQ ID NO: 95398 - DNA, 33 bp, Homo sapien
agtatttaataactcatggaaagcaattacggg

SEQ ID NO: 95399 - DNA, 33 bp, Homo sapien
attattcttatgttcaatataacctctctccca

SEQ ID NO: 95400 - DNA, 33 bp, Homo sapien
attattcttatgttcagtataacctctctccca

SEQ ID NO: 95401 - DNA, 33 bp, Homo sapien
ggtgaaagttttgccactaattccttaggtttt

SEQ ID NO: 95402 - DNA, 33 bp, Homo sapien
ggtgaaagttttgccagtaattccttaggtttt

SEQ ID NO: 95403 - DNA, 33 bp, Homo sapien
acgcattcctctttagcatttggcacctgacac

SEQ ID NO: 95404 - DNA, 33 bp, Homo sapien
acgcattcctctttaggatttggcacctgacac

SEQ ID NO: 95405 - DNA, 33 bp, Homo sapien
tattgtttccaaagccactcaattactattgac

SEQ ID NO: 95406 - DNA, 33 bp, Homo sapien
tattgtttccaaagcccctcaattactattgac

SEQ ID NO: 95407 - DNA, 33 bp, Homo sapien
tccctgttaaagaagacccggtgtctgcaaaaa

SEQ ID NO: 95408 - DNA, 33 bp, Homo sapien
tccctgttaaagaagatccggtgtctgcaaaaa

SEQ ID NO: 95409 - DNA, 33 bp, Homo sapien
gtgatgctcaaaagtaacaggaggaatgtgttg

SEQ ID NO: 95410 - DNA, 33 bp, Homo sapien
gtgatgctcaaaagtagcaggaggaatgtgttg

SEQ ID NO: 95411 - DNA, 33 bp, Homo sapien
ctatagaactttttaactgaatacccaggatga

SEQ ID NO: 95412 - DNA, 33 bp, Homo sapien
ctatagaactttttaattgaatacccaggatga

SEQ ID NO: 95413 - DNA, 33 bp, Homo sapien
actttggcatctcaaacgaagccatcaaggtgg

SEQ ID NO: 95414 - DNA, 33 bp, Homo sapien
actttggcatctcaaatgaagccatcaaggtgg

SEQ ID NO: 95415 - DNA, 33 bp, Homo sapien
tgctttaatgaatgaaacatctcaggccaaatg

SEQ ID NO: 95416 - DNA, 33 bp, Homo sapien
tgctttaatgaatgaagcatctcaggccaaatg

SEQ ID NO: 95417 - DNA, 33 bp, Homo sapien
taaacttttggattcagatttgctaagtgaata

SEQ ID NO: 95418 - DNA, 33 bp, Homo sapien
taaacttttggattcatatttgctaagtgaata

SEQ ID NO: 95419 - DNA, 33 bp, Homo sapien
atcaaaatataaaatccacagaggctgttatag

SEQ ID NO: 95420 - DNA, 33 bp, Homo sapien
atcaaaatataaaatctacagaggctgttatag

SEQ ID NO: 95421 - DNA, 33 bp, Homo sapien
tgaaagcataaactgtaaatcctgtttttctct

SEQ ID NO: 95422 - DNA, 33 bp, Homo sapien
tgaaagcataaactgtcaatcctgtttttctct

SEQ ID NO: 95423 - DNA, 33 bp, Homo sapien
agctgtaacctcaggaaagacactgaaccagaa

SEQ ID NO: 95424 - DNA, 33 bp, Homo sapien
agctgtaacctcaggagagacactgaaccagaa

SEQ ID NO: 95425 - DNA, 33 bp, Homo sapien
ttcagggtatgtctcactagtacactgagacag

SEQ ID NO: 95426 - DNA, 33 bp, Homo sapien
ttcagggtatgtctcattagtacactgagacag

SEQ ID NO: 95427 - DNA, 33 bp, Homo sapien
ctagttctgtgtctcagcgatgcagaagttttc

SEQ ID NO: 95428 - DNA, 33 bp, Homo sapien
ctagttctgtgtctcatcgatgcagaagttttc

SEQ ID NO: 95429 - DNA, 33 bp, Homo sapien
cagtgatagctaccgtaaattatttcagtttca

SEQ ID NO: 95430 - DNA, 33 bp, Homo sapien
cagtgatagctaccgtgaattatttcagtttca

SEQ ID NO: 95431 - DNA, 33 bp, Homo sapien
agatagttttaacttcaaggattgttcttggtc

SEQ ID NO: 95432 - DNA, 33 bp, Homo sapien
agatagttttaacttccaggattgttcttggtc

SEQ ID NO: 95433 - DNA, 33 bp, Homo sapien
attttctttagccttgaactctaggcaattttt

SEQ ID NO: 95434 - DNA, 33 bp, Homo sapien
attttctttagccttggactctaggcaattttt

SEQ ID NO: 95435 - DNA, 33 bp, Homo sapien
tctgccctgacaaaaacgacttttcgaaagtct

SEQ ID NO: 95436 - DNA, 33 bp, Homo sapien
tctgccctgacaaaaatgacttttcgaaagtct

SEQ ID NO: 95437 - DNA, 33 bp, Homo sapien
atgaacaggagaggaaataccagacacttataa

SEQ ID NO: 95438 - DNA, 33 bp, Homo sapien
atgaacaggagaggaactaccagacacttataa

SEQ ID NO: 95439 - DNA, 33 bp, Homo sapien
cagggcagtcctgcttcaaatcttagcataaat

SEQ ID NO: 95440 - DNA, 33 bp, Homo sapien
cagggcagtcctgcttgaaatcttagcataaat

SEQ ID NO: 95441 - DNA, 33 bp, Homo sapien
ctcaaactggagacaactcaaatgttcaccaat

SEQ ID NO: 95442 - DNA, 33 bp, Homo sapien
ctcaaactggagacaattcaaatgttcaccaat

SEQ ID NO: 95443 - DNA, 33 bp, Homo sapien
ctgaggacagtcaccaagacctgtttgtatgtg

SEQ ID NO: 95444 - DNA, 33 bp, Homo sapien
ctgaggacagtcaccaggacctgtttgtatgtg

SEQ ID NO: 95445 - DNA, 33 bp, Homo sapien
aaacttagaaattaacaatcttgcacactagta

SEQ ID NO: 95446 - DNA, 33 bp, Homo sapien
aaacttagaaattaaccatcttgcacactagta

SEQ ID NO: 95447 - DNA, 33 bp, Homo sapien
tctttcagttaataaaacttttagcctgatgtt

SEQ ID NO: 95448 - DNA, 33 bp, Homo sapien
tctttcagttaataaaccttttagcctgatgtt

SEQ ID NO: 95449 - DNA, 33 bp, Homo sapien
acacccaggagggcgacagtgcaaaaaaagtaa

SEQ ID NO: 95450 - DNA, 33 bp, Homo sapien
acacccaggagggcgatagtgcaaaaaaagtaa

SEQ ID NO: 95451 - DNA, 33 bp, Homo sapien
cggcttcattgaaatacgcttctggagccaatc

SEQ ID NO: 95452 - DNA, 33 bp, Homo sapien
cggcttcattgaaatatgcttctggagccaatc

SEQ ID NO: 95453 - DNA, 33 bp, Homo sapien
ttcatttaatcatgcaggggtaaggataaacgc

SEQ ID NO: 95454 - DNA, 33 bp, Homo sapien
ttcatttaatcatgcatgggtaaggataaacgc

SEQ ID NO: 95455 - DNA, 33 bp, Homo sapien
tgggatcaaacacttaggaggaaaagtggggag

SEQ ID NO: 95456 - DNA, 33 bp, Homo sapien
tgggatcaaacacttatgaggaaaagtggggag

SEQ ID NO: 95457 - DNA, 33 bp, Homo sapien
tccttcagtctgatcaagttgacactcaacatc

SEQ ID NO: 95458 - DNA, 33 bp, Homo sapien
tccttcagtctgatcaggttgacactcaacatc

SEQ ID NO: 95459 - DNA, 33 bp, Homo sapien
aatggcaaagaaaataagactgtaagcccttcc

SEQ ID NO: 95460 - DNA, 33 bp, Homo sapien
aatggcaaagaaaatacgactgtaagcccttcc

SEQ ID NO: 95461 - DNA, 33 bp, Homo sapien
acaattttcttcatgacaatgtggtcacggtta

SEQ ID NO: 95462 - DNA, 33 bp, Homo sapien
acaattttcttcatgagaatgtggtcacggtta

SEQ ID NO: 95463 - DNA, 33 bp, Homo sapien
tattttcataaggcagactcatcatttgatatt

SEQ ID NO: 95464 - DNA, 33 bp, Homo sapien
tattttcataaggcagtctcatcatttgatatt

SEQ ID NO: 95465 - DNA, 33 bp, Homo sapien
agaatttaggtaccccgactcacggcgcttttt

SEQ ID NO: 95466 - DNA, 33 bp, Homo sapien
agaatttaggtacccctactcacggcgcttttt

SEQ ID NO: 95467 - DNA, 33 bp, Homo sapien
gtctcacagccaagagaagctggcatctgaagg

SEQ ID NO: 95468 - DNA, 33 bp, Homo sapien
gtctcacagccaagagcagctggcatctgaagg

SEQ ID NO: 95469 - DNA, 33 bp, Homo sapien
cttgtgaaaggctttacctgagaacctgattca

SEQ ID NO: 95470 - DNA, 33 bp, Homo sapien
cttgtgaaaggctttatctgagaacctgattca

SEQ ID NO: 95471 - DNA, 33 bp, Homo sapien
ctggcttcacatttaaagtcattgacatagctg

SEQ ID NO: 95472 - DNA, 33 bp, Homo sapien
ctggcttcacatttaaggtcattgacatagctg

SEQ ID NO: 95473 - DNA, 33 bp, Homo sapien
ctatagtcattttcaaatccgataacataatat

SEQ ID NO: 95474 - DNA, 33 bp, Homo sapien
ctatagtcattttcaagtccgataacataatat

SEQ ID NO: 95475 - DNA, 33 bp, Homo sapien
ccctatagttcagtcaataaatgctacgttcta

SEQ ID NO: 95476 - DNA, 33 bp, Homo sapien
ccctatagttcagtcagtaaatgctacgttcta

SEQ ID NO: 95477 - DNA, 33 bp, Homo sapien
agtctacgtcctgaaaaagagtccattttctga

SEQ ID NO: 95478 - DNA, 33 bp, Homo sapien
agtctacgtcctgaaatagagtccattttctga

SEQ ID NO: 95479 - DNA, 33 bp, Homo sapien
agaactacaagcctaacctacgagtttaacact

SEQ ID NO: 95480 - DNA, 33 bp, Homo sapien
agaactacaagcctaagctacgagtttaacact

SEQ ID NO: 95481 - DNA, 33 bp, Homo sapien
gtacaaatgtacttaactatctccagcttgggg

SEQ ID NO: 95482 - DNA, 33 bp, Homo sapien
gtacaaatgtacttaattatctccagcttgggg

SEQ ID NO: 95483 - DNA, 33 bp, Homo sapien
ggtttaaaaagaaaaactgcagcgataaaatgg

SEQ ID NO: 95484 - DNA, 33 bp, Homo sapien
ggtttaaaaagaaaaagtgcagcgataaaatgg

SEQ ID NO: 95485 - DNA, 33 bp, Homo sapien
cttactgaaatagagacgcaatagtttatgatc

SEQ ID NO: 95486 - DNA, 33 bp, Homo sapien
cttactgaaatagagatgcaatagtttatgatc

SEQ ID NO: 95487 - DNA, 33 bp, Homo sapien
agatcaaaactcaaaactcaaagtatgattatt

SEQ ID NO: 95488 - DNA, 33 bp, Homo sapien
agatcaaaactcaaaattcaaagtatgattatt

SEQ ID NO: 95489 - DNA, 33 bp, Homo sapien
acacacacgccatataataaaagtggtaaagac

SEQ ID NO: 95490 - DNA, 33 bp, Homo sapien
acacacacgccatatactaaaagtggtaaagac

SEQ ID NO: 95491 - DNA, 33 bp, Homo sapien
ctaaaaacaaaccacaatcagatataatagggt

SEQ ID NO: 95492 - DNA, 33 bp, Homo sapien
ctaaaaacaaaccacagtcagatataatagggt

SEQ ID NO: 95493 - DNA, 33 bp, Homo sapien
tgtttgtgggatgggaaaagttgtggttgccat

SEQ ID NO: 95494 - DNA, 33 bp, Homo sapien
tgtttgtgggatgggagaagttgtggttgccat

SEQ ID NO: 95495 - DNA, 33 bp, Homo sapien
gtaactgtgaagtctgaaatctcatgtgaccac

SEQ ID NO: 95496 - DNA, 33 bp, Homo sapien
gtaactgtgaagtctgcaatctcatgtgaccac

SEQ ID NO: 95497 - DNA, 33 bp, Homo sapien
tttgaactgtcactcaactacaaaaaatattca

SEQ ID NO: 95498 - DNA, 33 bp, Homo sapien
tttgaactgtcactcagctacaaaaaatattca

SEQ ID NO: 95499 - DNA, 33 bp, Homo sapien
aaaaaatattcagttgcaagaaaaaataggaga

SEQ ID NO: 95500 - DNA, 33 bp, Homo sapien
aaaaaatattcagttggaagaaaaaataggaga

SEQ ID NO: 95501 - DNA, 33 bp, Homo sapien
cctggaattggttaggaacagattactttcttg

SEQ ID NO: 95502 - DNA, 33 bp, Homo sapien
cctggaattggttagggacagattactttcttg

SEQ ID NO: 95503 - DNA, 33 bp, Homo sapien
aaaagagtcttgttggaaagctctcaagaatag

SEQ ID NO: 95504 - DNA, 33 bp, Homo sapien
aaaagagtcttgttgggaagctctcaagaatag

SEQ ID NO: 95505 - DNA, 33 bp, Homo sapien
acaaaatagctgctcaaattatgtattacacat

SEQ ID NO: 95506 - DNA, 33 bp, Homo sapien
acaaaatagctgctcacattatgtattacacat

SEQ ID NO: 95507 - DNA, 33 bp, Homo sapien
tttacagtcagtaccaccatcgctctaagaaac

SEQ ID NO: 95508 - DNA, 33 bp, Homo sapien
tttacagtcagtaccatcatcgctctaagaaac

SEQ ID NO: 95509 - DNA, 33 bp, Homo sapien
ctcccaggtcctcccacaataaggtctccattc

SEQ ID NO: 95510 - DNA, 33 bp, Homo sapien
ctcccaggtcctcccagaataaggtctccattc

SEQ ID NO: 95511 - DNA, 33 bp, Homo sapien
aatgcttattaacaacaatttatcaccctttaa

SEQ ID NO: 95512 - DNA, 33 bp, Homo sapien
aatgcttattaacaacgatttatcaccctttaa

SEQ ID NO: 95513 - DNA, 33 bp, Homo sapien
aaccatgacatttcacaacttaaaagaagcatt

SEQ ID NO: 95514 - DNA, 33 bp, Homo sapien
aaccatgacatttcacgacttaaaagaagcatt

SEQ ID NO: 95515 - DNA, 33 bp, Homo sapien
cctgtcttgaataaccaatagtgcctagccagt

SEQ ID NO: 95516 - DNA, 33 bp, Homo sapien
cctgtcttgaataaccgatagtgcctagccagt

SEQ ID NO: 95517 - DNA, 33 bp, Homo sapien
aacgttgtctcagtcaatacaatccactgtaac

SEQ ID NO: 95518 - DNA, 33 bp, Homo sapien
aacgttgtctcagtcagtacaatccactgtaac

SEQ ID NO: 95519 - DNA, 33 bp, Homo sapien
gccaggcactactatcccatcaaagttgaatat

SEQ ID NO: 95520 - DNA, 33 bp, Homo sapien
gccaggcactactatctcatcaaagttgaatat

SEQ ID NO: 95521 - DNA, 33 bp, Homo sapien
gacagctcttgcgcccagacgcaatggttacag

SEQ ID NO: 95522 - DNA, 33 bp, Homo sapien
gacagctcttgcgccccgacgcaatggttacag

SEQ ID NO: 95523 - DNA, 33 bp, Homo sapien
tccaacacagttgtcaacattcctatttgtatg

SEQ ID NO: 95524 - DNA, 33 bp, Homo sapien
tccaacacagttgtcagcattcctatttgtatg

SEQ ID NO: 95525 - DNA, 33 bp, Homo sapien
atctggttcagtaacacagtcttaaagtgaaaa

SEQ ID NO: 95526 - DNA, 33 bp, Homo sapien
atctggttcagtaacatagtcttaaagtgaaaa

SEQ ID NO: 95527 - DNA, 33 bp, Homo sapien
agcctgcccacgctggaagatttaacaaacact

SEQ ID NO: 95528 - DNA, 33 bp, Homo sapien
agcctgcccacgctgggagatttaacaaacact

SEQ ID NO: 95529 - DNA, 33 bp, Homo sapien
aaagagagatgatcgacgctacagaagcagcta

SEQ ID NO: 95530 - DNA, 33 bp, Homo sapien
aaagagagatgatcgatgctacagaagcagcta

SEQ ID NO: 95531 - DNA, 33 bp, Homo sapien
gtatgggtaagtggagccagcgttgtcaccaaa

SEQ ID NO: 95532 - DNA, 33 bp, Homo sapien
gtatgggtaagtggagtcagcgttgtcaccaaa

SEQ ID NO: 95533 - DNA, 33 bp, Homo sapien
atattaaggaaatagaagtcactttgggagacc

SEQ ID NO: 95534 - DNA, 33 bp, Homo sapien
atattaaggaaatagatgtcactttgggagacc

SEQ ID NO: 95535 - DNA, 33 bp, Homo sapien
ttggactcttttgacaaagtgagctttagaatt

SEQ ID NO: 95536 - DNA, 33 bp, Homo sapien
ttggactcttttgacacagtgagctttagaatt

SEQ ID NO: 95537 - DNA, 33 bp, Homo sapien
ttctgtataatttgagcatgtcagcaaaacaca

SEQ ID NO: 95538 - DNA, 33 bp, Homo sapien
ttctgtataatttgagtatgtcagcaaaacaca

SEQ ID NO: 95539 - DNA, 33 bp, Homo sapien
ggtttcaattgcatgaccttgcagtttattaag

SEQ ID NO: 95540 - DNA, 33 bp, Homo sapien
ggtttcaattgcatgatcttgcagtttattaag

SEQ ID NO: 95541 - DNA, 33 bp, Homo sapien
tagtcagtcagtccacagacacgtccactagat

SEQ ID NO: 95542 - DNA, 33 bp, Homo sapien
tagtcagtcagtccacggacacgtccactagat

SEQ ID NO: 95543 - DNA, 33 bp, Homo sapien
aatttgatagagaagaagatgatccaggggtcc

SEQ ID NO: 95544 - DNA, 33 bp, Homo sapien
aatttgatagagaagatgatgatccaggggtcc

SEQ ID NO: 95545 - DNA, 33 bp, Homo sapien
agcactagttactgaactccttatatgtatatg

SEQ ID NO: 95546 - DNA, 33 bp, Homo sapien
agcactagttactgaattccttatatgtatatg

SEQ ID NO: 95547 - DNA, 33 bp, Homo sapien
tgattccagatacaacacacattttgcccaagc

SEQ ID NO: 95548 - DNA, 33 bp, Homo sapien
tgattccagatacaacgcacattttgcccaagc

SEQ ID NO: 95549 - DNA, 33 bp, Homo sapien
atattagcaaaacagcaaatacgataaaatctt

SEQ ID NO: 95550 - DNA, 33 bp, Homo sapien
atattagcaaaacagcgaatacgataaaatctt

SEQ ID NO: 95551 - DNA, 33 bp, Homo sapien
cctgtgtggtgctatgcagcaataaaacagaca

SEQ ID NO: 95552 - DNA, 33 bp, Homo sapien
cctgtgtggtgctatgtagcaataaaacagaca

SEQ ID NO: 95553 - DNA, 33 bp, Homo sapien
ctccactgagccactcaagaataggaccagaat

SEQ ID NO: 95554 - DNA, 33 bp, Homo sapien
ctccactgagccactcgagaataggaccagaat

SEQ ID NO: 95555 - DNA, 33 bp, Homo sapien
caacaacatcctttcacggccaaaaagcatcca

SEQ ID NO: 95556 - DNA, 33 bp, Homo sapien
caacaacatcctttcatggccaaaaagcatcca

SEQ ID NO: 95557 - DNA, 33 bp, Homo sapien
agagctgtcagtgagacaaggatggttgctatt

SEQ ID NO: 95558 - DNA, 33 bp, Homo sapien
agagctgtcagtgagataaggatggttgctatt

SEQ ID NO: 95559 - DNA, 33 bp, Homo sapien
actgctataatgttttaaaaaagtgagatgagc

SEQ ID NO: 95560 - DNA, 33 bp, Homo sapien
actgctataatgtttttaaaaagtgagatgagc

SEQ ID NO: 95561 - DNA, 33 bp, Homo sapien
tgtctgttgtactggaaactcattatatcgact

SEQ ID NO: 95562 - DNA, 33 bp, Homo sapien
tgtctgttgtactggagactcattatatcgact

SEQ ID NO: 95563 - DNA, 33 bp, Homo sapien
tgttgtatatttcaatcaggatttcaggactct

SEQ ID NO: 95564 - DNA, 33 bp, Homo sapien
tgttgtatatttcaattaggatttcaggactct

SEQ ID NO: 95565 - DNA, 33 bp, Homo sapien
tattaactctggttcacaacatagtgaaaaaat

SEQ ID NO: 95566 - DNA, 33 bp, Homo sapien
tattaactctggttcagaacatagtgaaaaaat

SEQ ID NO: 95567 - DNA, 33 bp, Homo sapien
agaaaagtaaaagagacgttgaaagatcaaact

SEQ ID NO: 95568 - DNA, 33 bp, Homo sapien
agaaaagtaaaagagaggttgaaagatcaaact

SEQ ID NO: 95569 - DNA, 33 bp, Homo sapien
ggaacactttgaatagacctgataactgcttct

SEQ ID NO: 95570 - DNA, 33 bp, Homo sapien
ggaacactttgaataggcctgataactgcttct

SEQ ID NO: 95571 - DNA, 33 bp, Homo sapien
cttctctttaagctgaataagtgtgctagtctc

SEQ ID NO: 95572 - DNA, 33 bp, Homo sapien
cttctctttaagctgagtaagtgtgctagtctc

SEQ ID NO: 95573 - DNA, 33 bp, Homo sapien
tatgttttgcagggcacatggtcttagcagcaa

SEQ ID NO: 95574 - DNA, 33 bp, Homo sapien
tatgttttgcagggcatatggtcttagcagcaa

SEQ ID NO: 95575 - DNA, 33 bp, Homo sapien
tacatttactttctatcagatgcttggaggaat

SEQ ID NO: 95576 - DNA, 33 bp, Homo sapien
tacatttactttctatgagatgcttggaggaat

SEQ ID NO: 95577 - DNA, 33 bp, Homo sapien
tacatctagaaaaccaaacaattctggtgaata

SEQ ID NO: 95578 - DNA, 33 bp, Homo sapien
tacatctagaaaaccatacaattctggtgaata

SEQ ID NO: 95579 - DNA, 33 bp, Homo sapien
aaaaagttgtatttaaaaaggagcttatatgtt

SEQ ID NO: 95580 - DNA, 33 bp, Homo sapien
aaaaagttgtatttaagaaggagcttatatgtt

SEQ ID NO: 95581 - DNA, 33 bp, Homo sapien
gtatgagaactcttgacaagaaaagtaatgctg

SEQ ID NO: 95582 - DNA, 33 bp, Homo sapien
gtatgagaactcttgagaagaaaagtaatgctg

SEQ ID NO: 95583 - DNA, 33 bp, Homo sapien
tggaaagacccagtaacgctttgagtagaggtg

SEQ ID NO: 95584 - DNA, 33 bp, Homo sapien
tggaaagacccagtaatgctttgagtagaggtg

SEQ ID NO: 95585 - DNA, 33 bp, Homo sapien
aggcagtagactgttcactgaaaccatagtttg

SEQ ID NO: 95586 - DNA, 33 bp, Homo sapien
aggcagtagactgttcgctgaaaccatagtttg

SEQ ID NO: 95587 - DNA, 33 bp, Homo sapien
ctctactatttttatacatggcctagtgatttt

SEQ ID NO: 95588 - DNA, 33 bp, Homo sapien
ctctactatttttatagatggcctagtgatttt

SEQ ID NO: 95589 - DNA, 33 bp, Homo sapien
tcctgtagacagaaaaatattcctattcacact

SEQ ID NO: 95590 - DNA, 33 bp, Homo sapien
tcctgtagacagaaaagtattcctattcacact

SEQ ID NO: 95591 - DNA, 33 bp, Homo sapien
ccatttgggacctaaagcttattcagggctctt

SEQ ID NO: 95592 - DNA, 33 bp, Homo sapien
ccatttgggacctaaatcttattcagggctctt

SEQ ID NO: 95593 - DNA, 33 bp, Homo sapien
gtagctttgtttaacacggtattttcaaatgta

SEQ ID NO: 95594 - DNA, 33 bp, Homo sapien
gtagctttgtttaacatggtattttcaaatgta

SEQ ID NO: 95595 - DNA, 33 bp, Homo sapien
agcatgcccaactcaaagaagatcttgaaaata

SEQ ID NO: 95596 - DNA, 33 bp, Homo sapien
agcatgcccaactcaatgaagatcttgaaaata

SEQ ID NO: 95597 - DNA, 33 bp, Homo sapien
tcaaacttctttccgtcaaaaattatgcagtct

SEQ ID NO: 95598 - DNA, 33 bp, Homo sapien
tcaaacttctttccgttaaaaattatgcagtct

SEQ ID NO: 95599 - DNA, 33 bp, Homo sapien
ctcttccgtgatgggacaaactctgggatgtgg

SEQ ID NO: 95600 - DNA, 33 bp, Homo sapien
ctcttccgtgatgggagaaactctgggatgtgg

SEQ ID NO: 95601 - DNA, 33 bp, Homo sapien
tgacagaggccttcaactagaggagcctaagtc

SEQ ID NO: 95602 - DNA, 33 bp, Homo sapien
tgacagaggccttcaattagaggagcctaagtc

SEQ ID NO: 95603 - DNA, 33 bp, Homo sapien
cttaaaatttcagggtaacaagagctagcactt

SEQ ID NO: 95604 - DNA, 33 bp, Homo sapien
cttaaaatttcagggttacaagagctagcactt

SEQ ID NO: 95605 - DNA, 33 bp, Homo sapien
gagtatttttgagacaatgaaattcttttgagc

SEQ ID NO: 95606 - DNA, 33 bp, Homo sapien
gagtatttttgagacattgaaattcttttgagc

SEQ ID NO: 95607 - DNA, 33 bp, Homo sapien
agaaagggaattgggaccatttaaaatgtgata

SEQ ID NO: 95608 - DNA, 33 bp, Homo sapien
agaaagggaattgggagcatttaaaatgtgata

SEQ ID NO: 95609 - DNA, 33 bp, Homo sapien
tggagttgtatcacgaggtatgatctttgattc

SEQ ID NO: 95610 - DNA, 33 bp, Homo sapien
tggagttgtatcacgatgtatgatctttgattc

SEQ ID NO: 95611 - DNA, 33 bp, Homo sapien
gattattaagtgttgacgagcctatgggagaat

SEQ ID NO: 95612 - DNA, 33 bp, Homo sapien
gattattaagtgttgatgagcctatgggagaat

SEQ ID NO: 95613 - DNA, 33 bp, Homo sapien
agaggacctcacgaagcagttgcggtcttgatg

SEQ ID NO: 95614 - DNA, 33 bp, Homo sapien
agaggacctcacgaaggagttgcggtcttgatg

SEQ ID NO: 95615 - DNA, 33 bp, Homo sapien
agtggtgaagcctgctgaagatgatccacactg

SEQ ID NO: 95616 - DNA, 33 bp, Homo sapien
agtggtgaagcctgcttaagatgatccacactg

SEQ ID NO: 95617 - DNA, 33 bp, Homo sapien
cagtctctggactaaacaagtttcccattccag

SEQ ID NO: 95618 - DNA, 33 bp, Homo sapien
cagtctctggactaaagaagtttcccattccag

SEQ ID NO: 95619 - DNA, 33 bp, Homo sapien
tttacaaatgttcaaaagtctgacatcatgagc

SEQ ID NO: 95620 - DNA, 33 bp, Homo sapien
tttacaaatgttcaaacgtctgacatcatgagc

SEQ ID NO: 95621 - DNA, 33 bp, Homo sapien
gacctttgatcatacagattgcgaagcttttct

SEQ ID NO: 95622 - DNA, 33 bp, Homo sapien
gacctttgatcatacatattgcgaagcttttct

SEQ ID NO: 95623 - DNA, 33 bp, Homo sapien
tgttgataatagtgcaacctgaattcagaaagt

SEQ ID NO: 95624 - DNA, 33 bp, Homo sapien
tgttgataatagtgcagcctgaattcagaaagt

SEQ ID NO: 95625 - DNA, 33 bp, Homo sapien
agatgttgtcaccttccatttctcaatgttgtt

SEQ ID NO: 95626 - DNA, 33 bp, Homo sapien
agatgttgtcaccttctatttctcaatgttgtt

SEQ ID NO: 95627 - DNA, 33 bp, Homo sapien
ggacagaggtgacagaaaggaatagatggtgga

SEQ ID NO: 95628 - DNA, 33 bp, Homo sapien
ggacagaggtgacagagaggaatagatggtgga

SEQ ID NO: 95629 - DNA, 33 bp, Homo sapien
cgtctcaagtaaaaaaagcaaggctaagtgaat

SEQ ID NO: 95630 - DNA, 33 bp, Homo sapien
cgtctcaagtaaaaaatgcaaggctaagtgaat

SEQ ID NO: 95631 - DNA, 33 bp, Homo sapien
tctgtgtagcaggagaactgttttgtgcttgga

SEQ ID NO: 95632 - DNA, 33 bp, Homo sapien
tctgtgtagcaggagagctgttttgtgcttgga

SEQ ID NO: 95633 - DNA, 33 bp, Homo sapien
tgatgcttttcatgtgcatagttcaatgagttt

SEQ ID NO: 95634 - DNA, 33 bp, Homo sapien
tgatgcttttcatgtgtatagttcaatgagttt

SEQ ID NO: 95635 - DNA, 33 bp, Homo sapien
acctgtttatacctccaaactcattatcagctt

SEQ ID NO: 95636 - DNA, 33 bp, Homo sapien
acctgtttatacctccgaactcattatcagctt

SEQ ID NO: 95637 - DNA, 33 bp, Homo sapien
tactctctcctgaccccgatataaatgagcttt

SEQ ID NO: 95638 - DNA, 33 bp, Homo sapien
tactctctcctgacccggatataaatgagcttt

SEQ ID NO: 95639 - DNA, 33 bp, Homo sapien
agaggaagttagtcaacgtgattagacttcttc

SEQ ID NO: 95640 - DNA, 33 bp, Homo sapien
agaggaagttagtcaatgtgattagacttcttc

SEQ ID NO: 95641 - DNA, 33 bp, Homo sapien
ttttttcccacatgtacggccagttgatccagt

SEQ ID NO: 95642 - DNA, 33 bp, Homo sapien
ttttttcccacatgtatggccagttgatccagt

SEQ ID NO: 95643 - DNA, 33 bp, Homo sapien
gtttagagcacctgtacgtgtgtctatcttcca

SEQ ID NO: 95644 - DNA, 33 bp, Homo sapien
gtttagagcacctgtatgtgtgtctatcttcca

SEQ ID NO: 95645 - DNA, 33 bp, Homo sapien
agattctctgatgtaaacttctagtcaaacatg

SEQ ID NO: 95646 - DNA, 33 bp, Homo sapien
agattctctgatgtaaccttctagtcaaacatg

SEQ ID NO: 95647 - DNA, 33 bp, Homo sapien
gcctgggggaagccaaagtattgccatctgctg

SEQ ID NO: 95648 - DNA, 33 bp, Homo sapien
gcctgggggaagccaacgtattgccatctgctg

SEQ ID NO: 95649 - DNA, 33 bp, Homo sapien
aggcttttgaaggtcacgttcaaaatctaaatc

SEQ ID NO: 95650 - DNA, 33 bp, Homo sapien
aggcttttgaaggtcatgttcaaaatctaaatc

SEQ ID NO: 95651 - DNA, 33 bp, Homo sapien
cctccacgtttccttaagcatctcatctgcact

SEQ ID NO: 95652 - DNA, 33 bp, Homo sapien
cctccacgtttccttaggcatctcatctgcact

SEQ ID NO: 95653 - DNA, 33 bp, Homo sapien
agggctaggatgagtacaaaaaagcagatattt

SEQ ID NO: 95654 - DNA, 33 bp, Homo sapien
agggctaggatgagtataaaaaagcagatattt

SEQ ID NO: 95655 - DNA, 33 bp, Homo sapien
actatagcctttgacaatcaaaaacaaagaaaa

SEQ ID NO: 95656 - DNA, 33 bp, Homo sapien
actatagcctttgacagtcaaaaacaaagaaaa

SEQ ID NO: 95657 - DNA, 33 bp, Homo sapien
caaaccactggatacaaccaatcaatcagtatg

SEQ ID NO: 95658 - DNA, 33 bp, Homo sapien
caaaccactggatacagccaatcaatcagtatg

SEQ ID NO: 95659 - DNA, 33 bp, Homo sapien
acagtgggaaagcctaacaaatattactacaag

SEQ ID NO: 95660 - DNA, 33 bp, Homo sapien
acagtgggaaagcctagcaaatattactacaag

SEQ ID NO: 95661 - DNA, 33 bp, Homo sapien
tagtacatctccgcataagtcatattttgtacc

SEQ ID NO: 95662 - DNA, 33 bp, Homo sapien
tagtacatctccgcatgagtcatattttgtacc

SEQ ID NO: 95663 - DNA, 33 bp, Homo sapien
acttcatctcgcattaaaattcagccaattgca

SEQ ID NO: 95664 - DNA, 33 bp, Homo sapien
acttcatctcgcattataattcagccaattgca

SEQ ID NO: 95665 - DNA, 33 bp, Homo sapien
ttaactaagagtctggcacctttaccatgtaat

SEQ ID NO: 95666 - DNA, 33 bp, Homo sapien
ttaactaagagtctggtacctttaccatgtaat

SEQ ID NO: 95667 - DNA, 33 bp, Homo sapien
gcaacctgtgaaggcaaattgttgtcagactat

SEQ ID NO: 95668 - DNA, 33 bp, Homo sapien
gcaacctgtgaaggcatattgttgtcagactat

SEQ ID NO: 95669 - DNA, 33 bp, Homo sapien
gtaaataaggaaacaaataaatctgggtactca

SEQ ID NO: 95670 - DNA, 33 bp, Homo sapien
gtaaataaggaaacaagtaaatctgggtactca

SEQ ID NO: 95671 - DNA, 33 bp, Homo sapien
cacaggcatagtgtaacagttacagacatttgc

SEQ ID NO: 95672 - DNA, 33 bp, Homo sapien
cacaggcatagtgtaagagttacagacatttgc

SEQ ID NO: 95673 - DNA, 33 bp, Homo sapien
cactttaaacatctcaaaatttgtatctgtaga

SEQ ID NO: 95674 - DNA, 33 bp, Homo sapien
cactttaaacatctcacaatttgtatctgtaga

SEQ ID NO: 95675 - DNA, 33 bp, Homo sapien
tttaaaaagatcaaagccatgaaacagcaaaaa

SEQ ID NO: 95676 - DNA, 33 bp, Homo sapien
tttaaaaagatcaaagtcatgaaacagcaaaaa

SEQ ID NO: 95677 - DNA, 33 bp, Homo sapien
gtatgtaacttaccagcagcctagtgcaattac

SEQ ID NO: 95678 - DNA, 33 bp, Homo sapien
gtatgtaacttaccaggagcctagtgcaattac

SEQ ID NO: 95679 - DNA, 33 bp, Homo sapien
gtagttagaactctcacaagacatggttggaat

SEQ ID NO: 95680 - DNA, 33 bp, Homo sapien
gtagttagaactctcataagacatggttggaat

SEQ ID NO: 95681 - DNA, 33 bp, Homo sapien
gtgagttaaatcttgaatacacatggacacaaa

SEQ ID NO: 95682 - DNA, 33 bp, Homo sapien
gtgagttaaatcttgagtacacatggacacaaa

SEQ ID NO: 95683 - DNA, 33 bp, Homo sapien
tatagacaaaaggcaacgtcagcgtacccatct

SEQ ID NO: 95684 - DNA, 33 bp, Homo sapien
tatagacaaaaggcaatgtcagcgtacccatct

SEQ ID NO: 95685 - DNA, 33 bp, Homo sapien
tgcagtcagacttaaaacgtctattatgcatca

SEQ ID NO: 95686 - DNA, 33 bp, Homo sapien
tgcagtcagacttaaagcgtctattatgcatca

SEQ ID NO: 95687 - DNA, 33 bp, Homo sapien
ctccacctgtttaatgccaatttcaacctttct

SEQ ID NO: 95688 - DNA, 33 bp, Homo sapien
ctccacctgtttaatgtcaatttcaacctttct

SEQ ID NO: 95689 - DNA, 33 bp, Homo sapien
ggcttccttgatttgacggattttggttgagat

SEQ ID NO: 95690 - DNA, 33 bp, Homo sapien
ggcttccttgatttgatggattttggttgagat

SEQ ID NO: 95691 - DNA, 33 bp, Homo sapien
attaatcttcctattacggtccatggctaaggc

SEQ ID NO: 95692 - DNA, 33 bp, Homo sapien
attaatcttcctattatggtccatggctaaggc

SEQ ID NO: 95693 - DNA, 33 bp, Homo sapien
gctggaatttaaatggaacatatagatgctaat

SEQ ID NO: 95694 - DNA, 33 bp, Homo sapien
gctggaatttaaatgggacatatagatgctaat

SEQ ID NO: 95695 - DNA, 33 bp, Homo sapien
cagttcagtgattctacatccatactgcaagtt

SEQ ID NO: 95696 - DNA, 33 bp, Homo sapien
cagttcagtgattctatatccatactgcaagtt

SEQ ID NO: 95697 - DNA, 33 bp, Homo sapien
aagcattcaatacatcaaaattacaatcattgc

SEQ ID NO: 95698 - DNA, 33 bp, Homo sapien
aagcattcaatacatcgaaattacaatcattgc

SEQ ID NO: 95699 - DNA, 33 bp, Homo sapien
gggactgtagtgttgaagtgaatgggaaagagg

SEQ ID NO: 95700 - DNA, 33 bp, Homo sapien
gggactgtagtgttgacgtgaatgggaaagagg

SEQ ID NO: 95701 - DNA, 33 bp, Homo sapien
tagcttatccattgaaaacttaacagcactcag

SEQ ID NO: 95702 - DNA, 33 bp, Homo sapien
tagcttatccattgaatacttaacagcactcag

SEQ ID NO: 95703 - DNA, 33 bp, Homo sapien
gagtaggctgatggccgcttggggctgacagtc

SEQ ID NO: 95704 - DNA, 33 bp, Homo sapien
gagtaggctgatggcctcttggggctgacagtc

SEQ ID NO: 95705 - DNA, 33 bp, Homo sapien
atctgtgaaatgatcacctaaccaaagtttaaa

SEQ ID NO: 95706 - DNA, 33 bp, Homo sapien
atctgtgaaatgatcatctaaccaaagtttaaa

SEQ ID NO: 95707 - DNA, 33 bp, Homo sapien
atgatctattacactaacttctgtgaattgaaa

SEQ ID NO: 95708 - DNA, 33 bp, Homo sapien
atgatctattacactaccttctgtgaattgaaa

SEQ ID NO: 95709 - DNA, 33 bp, Homo sapien
gaggtggtatctcaccacaattttggtttgcat

SEQ ID NO: 95710 - DNA, 33 bp, Homo sapien
gaggtggtatctcaccgcaattttggtttgcat

SEQ ID NO: 95711 - DNA, 33 bp, Homo sapien
gttgcacctgattctacacttctcaccattctt

SEQ ID NO: 95712 - DNA, 33 bp, Homo sapien
gttgcacctgattctatacttctcaccattctt

SEQ ID NO: 95713 - DNA, 33 bp, Homo sapien
aatattttggcaaatacctggaccactgtttca

SEQ ID NO: 95714 - DNA, 33 bp, Homo sapien
aatattttggcaaatatctggaccactgtttca

SEQ ID NO: 95715 - DNA, 33 bp, Homo sapien
tcttgggggaacagatgacaggagaggtaaata

SEQ ID NO: 95716 - DNA, 33 bp, Homo sapien
tcttgggggaacagattacaggagaggtaaata

SEQ ID NO: 95717 - DNA, 33 bp, Homo sapien
catgttgaacgaatcaatgagttggtttgtgtc

SEQ ID NO: 95718 - DNA, 33 bp, Homo sapien
catgttgaacgaatcagtgagttggtttgtgtc

SEQ ID NO: 95719 - DNA, 33 bp, Homo sapien
taagaaaggtgactaacacctcattagagtgtt

SEQ ID NO: 95720 - DNA, 33 bp, Homo sapien
taagaaaggtgactaatacctcattagagtgtt

SEQ ID NO: 95721 - DNA, 33 bp, Homo sapien
atatcaatatccaagaagagaaattgctgggtc

SEQ ID NO: 95722 - DNA, 33 bp, Homo sapien
atatcaatatccaagaggagaaattgctgggtc

SEQ ID NO: 95723 - DNA, 33 bp, Homo sapien
aatcatggtgtatggtaaaaggcacgtctcacc

SEQ ID NO: 95724 - DNA, 33 bp, Homo sapien
aatcatggtgtatggtcaaaggcacgtctcacc

SEQ ID NO: 95725 - DNA, 33 bp, Homo sapien
aaatgcagatggaaaactggttacaaacagtga

SEQ ID NO: 95726 - DNA, 33 bp, Homo sapien
aaatgcagatggaaaagtggttacaaacagtga

SEQ ID NO: 95727 - DNA, 33 bp, Homo sapien
atggtacgttggaccacgatggtaacaatggag

SEQ ID NO: 95728 - DNA, 33 bp, Homo sapien
atggtacgttggaccatgatggtaacaatggag

SEQ ID NO: 95729 - DNA, 33 bp, Homo sapien
ccttgcacatgacctcagacaaccaatttcatc

SEQ ID NO: 95730 - DNA, 33 bp, Homo sapien
ccttgcacatgacctcggacaaccaatttcatc

SEQ ID NO: 95731 - DNA, 33 bp, Homo sapien
cagggatggagaggcaaacaaaactaaaaagat

SEQ ID NO: 95732 - DNA, 33 bp, Homo sapien
cagggatggagaggcagacaaaactaaaaagat

SEQ ID NO: 95733 - DNA, 33 bp, Homo sapien
tgattgtcaagatgatgacacagcgatatacaa

SEQ ID NO: 95734 - DNA, 33 bp, Homo sapien
tgattgtcaagatgattacacagcgatatacaa

SEQ ID NO: 95735 - DNA, 33 bp, Homo sapien
acagaagcgtgaatgcagagaggcaagtagaac

SEQ ID NO: 95736 - DNA, 33 bp, Homo sapien
acagaagcgtgaatgcggagaggcaagtagaac

SEQ ID NO: 95737 - DNA, 33 bp, Homo sapien
atgctcactatgggtgaaagatatgactcaaga

SEQ ID NO: 95738 - DNA, 33 bp, Homo sapien
atgctcactatgggtggaagatatgactcaaga

SEQ ID NO: 95739 - DNA, 33 bp, Homo sapien
cagctgcagcctactcaaaggaggtaacccttc

SEQ ID NO: 95740 - DNA, 33 bp, Homo sapien
cagctgcagcctactcgaaggaggtaacccttc

SEQ ID NO: 95741 - DNA, 33 bp, Homo sapien
ttggcatgccttccccactcggtttctaaccat

SEQ ID NO: 95742 - DNA, 33 bp, Homo sapien
ttggcatgccttcccctctcggtttctaaccat

SEQ ID NO: 95743 - DNA, 33 bp, Homo sapien
gggcctgaagtttgtacgatttgggaagcttgg

SEQ ID NO: 95744 - DNA, 33 bp, Homo sapien
gggcctgaagtttgtatgatttgggaagcttgg

SEQ ID NO: 95745 - DNA, 33 bp, Homo sapien
tatatggaatcctgaaaactatttgatcagttc

SEQ ID NO: 95746 - DNA, 33 bp, Homo sapien
tatatggaatcctgaagactatttgatcagttc

SEQ ID NO: 95747 - DNA, 33 bp, Homo sapien
tgcagacctaggactaggcagatgatacaaatc

SEQ ID NO: 95748 - DNA, 33 bp, Homo sapien
tgcagacctaggactatgcagatgatacaaatc

SEQ ID NO: 95749 - DNA, 33 bp, Homo sapien
cccagaaatggataatcatcaggttgcaaagta

SEQ ID NO: 95750 - DNA, 33 bp, Homo sapien
cccagaaatggataatgatcaggttgcaaagta

SEQ ID NO: 95751 - DNA, 33 bp, Homo sapien
agatgctgctctagacactggagataaagcagg

SEQ ID NO: 95752 - DNA, 33 bp, Homo sapien
agatgctgctctagacgctggagataaagcagg

SEQ ID NO: 95753 - DNA, 33 bp, Homo sapien
cccttttctgcatctcacagtactgagcccctc

SEQ ID NO: 95754 - DNA, 33 bp, Homo sapien
cccttttctgcatctcgcagtactgagcccctc

SEQ ID NO: 95755 - DNA, 33 bp, Homo sapien
tcgtaggtctttaaacaggaattcaatccgacc

SEQ ID NO: 95756 - DNA, 33 bp, Homo sapien
tcgtaggtctttaaacgggaattcaatccgacc

SEQ ID NO: 95757 - DNA, 33 bp, Homo sapien
ctatacttcaggcgttaaaacattctcacaaat

SEQ ID NO: 95758 - DNA, 33 bp, Homo sapien
ctatacttcaggcgttgaaacattctcacaaat

SEQ ID NO: 95759 - DNA, 33 bp, Homo sapien
gtaaactattccatgagtacttcctttgtaaac

SEQ ID NO: 95760 - DNA, 33 bp, Homo sapien
gtaaactattccatgattacttcctttgtaaac

SEQ ID NO: 95761 - DNA, 33 bp, Homo sapien
atcaacaccgtatgtcacttctctattcctaat

SEQ ID NO: 95762 - DNA, 33 bp, Homo sapien
atcaacaccgtatgtcgcttctctattcctaat

SEQ ID NO: 95763 - DNA, 33 bp, Homo sapien
tggtatgggtttcagacactgtgatgacaactt

SEQ ID NO: 95764 - DNA, 33 bp, Homo sapien
tggtatgggtttcagatactgtgatgacaactt

SEQ ID NO: 95765 - DNA, 33 bp, Homo sapien
gccatggtctgaataactgtgtcaccccatcct

SEQ ID NO: 95766 - DNA, 33 bp, Homo sapien
gccatggtctgaataattgtgtcaccccatcct

SEQ ID NO: 95767 - DNA, 33 bp, Homo sapien
tgagcgctagggcgtcaacgaggaaaattgctg

SEQ ID NO: 95768 - DNA, 33 bp, Homo sapien
tgagcgctagggcgtcgacgaggaaaattgctg

SEQ ID NO: 95769 - DNA, 33 bp, Homo sapien
aatttattcttatgacaagagtttcagatttgc

SEQ ID NO: 95770 - DNA, 33 bp, Homo sapien
aatttattcttatgacgagagtttcagatttgc

SEQ ID NO: 95771 - DNA, 33 bp, Homo sapien
ggggagatatgcaaagaacatcaatggcattaa

SEQ ID NO: 95772 - DNA, 33 bp, Homo sapien
ggggagatatgcaaagcacatcaatggcattaa

SEQ ID NO: 95773 - DNA, 33 bp, Homo sapien
aatgtttggttccagaccacattgtttttcaac

SEQ ID NO: 95774 - DNA, 33 bp, Homo sapien
aatgtttggttccagatcacattgtttttcaac

SEQ ID NO: 95775 - DNA, 33 bp, Homo sapien
cagagaatttctttaccgccagttttgacacag

SEQ ID NO: 95776 - DNA, 33 bp, Homo sapien
cagagaatttctttacggccagttttgacacag

SEQ ID NO: 95777 - DNA, 33 bp, Homo sapien
aatcaactgacaaaagacagtttcacagtagaa

SEQ ID NO: 95778 - DNA, 33 bp, Homo sapien
aatcaactgacaaaaggcagtttcacagtagaa

SEQ ID NO: 95779 - DNA, 33 bp, Homo sapien
gtctgttggcaaaacacgatgcttggagcagct

SEQ ID NO: 95780 - DNA, 33 bp, Homo sapien
gtctgttggcaaaacatgatgcttggagcagct

SEQ ID NO: 95781 - DNA, 33 bp, Homo sapien
ttgttttgacaaaatacgtacaaccacagagcc

SEQ ID NO: 95782 - DNA, 33 bp, Homo sapien
ttgttttgacaaaataggtacaaccacagagcc

SEQ ID NO: 95783 - DNA, 33 bp, Homo sapien
tttcagtgcacttccaagttttccaatacagag

SEQ ID NO: 95784 - DNA, 33 bp, Homo sapien
tttcagtgcacttccaggttttccaatacagag

SEQ ID NO: 95785 - DNA, 33 bp, Homo sapien
ataattacccaattaaaccactgcaagataagt

SEQ ID NO: 95786 - DNA, 33 bp, Homo sapien
ataattacccaattaagccactgcaagataagt

SEQ ID NO: 95787 - DNA, 33 bp, Homo sapien
ttcagactgcaaggtaagcttgattatgtacat

SEQ ID NO: 95788 - DNA, 33 bp, Homo sapien
ttcagactgcaaggtacgcttgattatgtacat

SEQ ID NO: 95789 - DNA, 33 bp, Homo sapien
tttctcctgtgtgccaaatatttcggagcagct

SEQ ID NO: 95790 - DNA, 33 bp, Homo sapien
tttctcctgtgtgccagatatttcggagcagct

SEQ ID NO: 95791 - DNA, 33 bp, Homo sapien
cagtgccccttgttgacgatcattcctctcaag

SEQ ID NO: 95792 - DNA, 33 bp, Homo sapien
cagtgccccttgttgatgatcattcctctcaag

SEQ ID NO: 95793 - DNA, 33 bp, Homo sapien
ttcctctcaagtgttaccttttcactctttgcc

SEQ ID NO: 95794 - DNA, 33 bp, Homo sapien
ttcctctcaagtgttatcttttcactctttgcc

SEQ ID NO: 95795 - DNA, 33 bp, Homo sapien
gtttgatctctctatccaactacactaacaggc

SEQ ID NO: 95796 - DNA, 33 bp, Homo sapien
gtttgatctctctatctaactacactaacaggc

SEQ ID NO: 95797 - DNA, 33 bp, Homo sapien
taaacttgaacttctaacttgaaatagtttgat

SEQ ID NO: 95798 - DNA, 33 bp, Homo sapien
taaacttgaacttctagcttgaaatagtttgat

SEQ ID NO: 95799 - DNA, 33 bp, Homo sapien
catggtgaggtcaaaacgcttaatttcttaatt

SEQ ID NO: 95800 - DNA, 33 bp, Homo sapien
catggtgaggtcaaaaggcttaatttcttaatt

SEQ ID NO: 95801 - DNA, 33 bp, Homo sapien
ggttagctgaaatgtgaatcaaaagatgaccca

SEQ ID NO: 95802 - DNA, 33 bp, Homo sapien
ggttagctgaaatgtggatcaaaagatgaccca

SEQ ID NO: 95803 - DNA, 33 bp, Homo sapien; identical to SEQ ID NO: 95801

SEQ ID NO: 95804 - DNA, 33 bp, Homo sapien; identical to SEQ ID NO: 95802

SEQ ID NO: 95805 - DNA, 33 bp, Homo sapien
ctccttgttgctcaagaaatacaggtaagatgt

SEQ ID NO: 95806 - DNA, 33 bp, Homo sapien
ctccttgttgctcaagcaatacaggtaagatgt

SEQ ID NO: 95807 - DNA, 33 bp, Homo sapien
aagctaaaggaatcaccgatgcatggatgccat

SEQ ID NO: 95808 - DNA, 33 bp, Homo sapien
aagctaaaggaatcactgatgcatggatgccat

SEQ ID NO: 95809 - DNA, 33 bp, Homo sapien
tcaagaatagccttccagatgaaactatgagag

SEQ ID NO: 95810 - DNA, 33 bp, Homo sapien
tcaagaatagccttccggatgaaactatgagag

SEQ ID NO: 95811 - DNA, 33 bp, Homo sapien
gggtaggactttccagaactctattttacctgt

SEQ ID NO: 95812 - DNA, 33 bp, Homo sapien
gggtaggactttccaggactctattttacctgt

SEQ ID NO: 95813 - DNA, 33 bp, Homo sapien
tcgaggtagcataactgaagatggaaaagtgag

SEQ ID NO: 95814 - DNA, 33 bp, Homo sapien
tcgaggtagcataacttaagatggaaaagtgag

SEQ ID NO: 95815 - DNA, 33 bp, Homo sapien
aggaaatgacttatgcaaaatatcttatgtgaa

SEQ ID NO: 95816 - DNA, 33 bp, Homo sapien
aggaaatgacttatgcgaaatatcttatgtgaa

SEQ ID NO: 95817 - DNA, 33 bp, Homo sapien
tgtctctgtcccgcgaacaagtaagtgttactt

SEQ ID NO: 95818 - DNA, 33 bp, Homo sapien
tgtctctgtcccgcgagcaagtaagtgttactt

SEQ ID NO: 95819 - DNA, 33 bp, Homo sapien
aattaacgggaagtcactcaaaaacaattccaa

SEQ ID NO: 95820 - DNA, 33 bp, Homo sapien
aattaacgggaagtcattcaaaaacaattccaa

SEQ ID NO: 95821 - DNA, 33 bp, Homo sapien
aagaacacggcctcaacacaaaagcagtttggg

SEQ ID NO: 95822 - DNA, 33 bp, Homo sapien
aagaacacggcctcaagacaaaagcagtttggg

SEQ ID NO: 95823 - DNA, 33 bp, Homo sapien
tggggtaactaaacatcaacgtgaaggcaatta

SEQ ID NO: 95824 - DNA, 33 bp, Homo sapien
tggggtaactaaacattaacgtgaaggcaatta

SEQ ID NO: 95825 - DNA, 33 bp, Homo sapien
tattcccaaacgaaagccttccttgtcaatctc

SEQ ID NO: 95826 - DNA, 33 bp, Homo sapien
tattcccaaacgaaagtcttccttgtcaatctc

SEQ ID NO: 95827 - DNA, 33 bp, Homo sapien
tgtgacttaagagcaaaagcagagacagagcca

SEQ ID NO: 95828 - DNA, 33 bp, Homo sapien
tgtgacttaagagcaagagcagagacagagcca

SEQ ID NO: 95829 - DNA, 33 bp, Homo sapien
gcaaggttcctaaggcaacaaatagatggaatc

SEQ ID NO: 95830 - DNA, 33 bp, Homo sapien
gcaaggttcctaaggcgacaaatagatggaatc

SEQ ID NO: 95831 - DNA, 33 bp, Homo sapien
ttaacttcccttgttgaagaagctattttacag

SEQ ID NO: 95832 - DNA, 33 bp, Homo sapien
ttaacttcccttgttgcagaagctattttacag

SEQ ID NO: 95833 - DNA, 33 bp, Homo sapien
cactagcacgcacctacgtgaaacagacaagaa

SEQ ID NO: 95834 - DNA, 33 bp, Homo sapien
cactagcacgcacctatgtgaaacagacaagaa

SEQ ID NO: 95835 - DNA, 33 bp, Homo sapien
attccaaagccataagaatatacggcttcccta

SEQ ID NO: 95836 - DNA, 33 bp, Homo sapien
attccaaagccataaggatatacggcttcccta

SEQ ID NO: 95837 - DNA, 33 bp, Homo sapien
taggaccagctttcacagactttttccactttc

SEQ ID NO: 95838 - DNA, 33 bp, Homo sapien
taggaccagctttcacggactttttccactttc

SEQ ID NO: 95839 - DNA, 33 bp, Homo sapien
ctgtgagcagttgatacaggaagatgaccactg

SEQ ID NO: 95840 - DNA, 33 bp, Homo sapien
ctgtgagcagttgatagaggaagatgaccactg

SEQ ID NO: 95841 - DNA, 33 bp, Homo sapien
cactcagctcagaaacaatgatatccttccttg

SEQ ID NO: 95842 - DNA, 33 bp, Homo sapien
cactcagctcagaaacgatgatatccttccttg

SEQ ID NO: 95843 - DNA, 33 bp, Homo sapien
taagagactacagttacgtggctgaaagaaggg

SEQ ID NO: 95844 - DNA, 33 bp, Homo sapien
taagagactacagttatgtggctgaaagaaggg

SEQ ID NO: 95845 - DNA, 33 bp, Homo sapien
acatggcagcatattcaagttcagtgtttgaat

SEQ ID NO: 95846 - DNA, 33 bp, Homo sapien
acatggcagcatattccagttcagtgtttgaat

SEQ ID NO: 95847 - DNA, 33 bp, Homo sapien
ggtggcatgataaaccacggtcctttttactca

SEQ ID NO: 95848 - DNA, 33 bp, Homo sapien
ggtggcatgataaaccgcggtcctttttactca

SEQ ID NO: 95849 - DNA, 33 bp, Homo sapien
gctatacagatgattaaacagttctctgaagaa

SEQ ID NO: 95850 - DNA, 33 bp, Homo sapien
gctatacagatgattagacagttctctgaagaa

SEQ ID NO: 95851 - DNA, 33 bp, Homo sapien
ccactgaagaaggacaagctgtcgttacacctc

SEQ ID NO: 95852 - DNA, 33 bp, Homo sapien
ccactgaagaaggacacgctgtcgttacacctc

SEQ ID NO: 95853 - DNA, 33 bp, Homo sapien
atatccatttagagaccgcgttctttcttcttc

SEQ ID NO: 95854 - DNA, 33 bp, Homo sapien
atatccatttagagactgcgttctttcttcttc

SEQ ID NO: 95855 - DNA, 33 bp, Homo sapien
catgaactgcaggtgacaattacattggtgtct

SEQ ID NO: 95856 - DNA, 33 bp, Homo sapien
catgaactgcaggtgagaattacattggtgtct

SEQ ID NO: 95857 - DNA, 33 bp, Homo sapien
gtcttacacaaactaaccatgtaactcaaggag

SEQ ID NO: 95858 - DNA, 33 bp, Homo sapien
gtcttacacaaactaatcatgtaactcaaggag

SEQ ID NO: 95859 - DNA, 33 bp, Homo sapien
atgaaggcattttgtacgtcacaaattaagagg

SEQ ID NO: 95860 - DNA, 33 bp, Homo sapien
atgaaggcattttgtatgtcacaaattaagagg

SEQ ID NO: 95861 - DNA, 33 bp, Homo sapien
aggggtctaccagctacataaggataaatacag

SEQ ID NO: 95862 - DNA, 33 bp, Homo sapien
aggggtctaccagctatataaggataaatacag

SEQ ID NO: 95863 - DNA, 33 bp, Homo sapien
tagtctctaaagtcaaatgatatccccagggct

SEQ ID NO: 95864 - DNA, 33 bp, Homo sapien
tagtctctaaagtcaagtgatatccccagggct

SEQ ID NO: 95865 - DNA, 33 bp, Homo sapien
catttgtcaaaacttaaggaaatgtatacttaa

SEQ ID NO: 95866 - DNA, 33 bp, Homo sapien
catttgtcaaaacttacggaaatgtatacttaa

SEQ ID NO: 95867 - DNA, 33 bp, Homo sapien
ttttgctctgacaatcacttttgccgagaatgt

SEQ ID NO: 95868 - DNA, 33 bp, Homo sapien
ttttgctctgacaatcgcttttgccgagaatgt

SEQ ID NO: 95869 - DNA, 33 bp, Homo sapien
atatattatgtagaaacgtatatgatgcataac

SEQ ID NO: 95870 - DNA, 33 bp, Homo sapien
atatattatgtagaaatgtatatgatgcataac

SEQ ID NO: 95871 - DNA, 33 bp, Homo sapien
agcttaacaactgttacgggacaactgatacag

SEQ ID NO: 95872 - DNA, 33 bp, Homo sapien
agcttaacaactgttatgggacaactgatacag

SEQ ID NO: 95873 - DNA, 33 bp, Homo sapien
catctccagttacttacggtttgtgtcagaccc

SEQ ID NO: 95874 - DNA, 33 bp, Homo sapien
catctccagttacttatggtttgtgtcagaccc

SEQ ID NO: 95875 - DNA, 33 bp, Homo sapien
cctttccttaatcccaaatcacactctgctgtc

SEQ ID NO: 95876 - DNA, 33 bp, Homo sapien
cctttccttaatcccacatcacactctgctgtc

SEQ ID NO: 95877 - DNA, 33 bp, Homo sapien
cctggcaatgggataacggagacggcatctccg

SEQ ID NO: 95878 - DNA, 33 bp, Homo sapien
cctggcaatgggataatggagacggcatctccg

SEQ ID NO: 95879 - DNA, 33 bp, Homo sapien
cgtaagtggtttgtaacagacaggctaatgaag

SEQ ID NO: 95880 - DNA, 33 bp, Homo sapien
cgtaagtggtttgtaatagacaggctaatgaag

SEQ ID NO: 95881 - DNA, 33 bp, Homo sapien
gaccagttgctgggacagtatcattttgcagag

SEQ ID NO: 95882 - DNA, 33 bp, Homo sapien
gaccagttgctgggacggtatcattttgcagag

SEQ ID NO: 95883 - DNA, 33 bp, Homo sapien
tccagcttgtaaatcacctgaacataccttgtc

SEQ ID NO: 95884 - DNA, 33 bp, Homo sapien
tccagcttgtaaatcatctgaacataccttgtc

SEQ ID NO: 95885 - DNA, 33 bp, Homo sapien
agtcgcagcattgcctcagaacctgtttcatgt

SEQ ID NO: 95886 - DNA, 33 bp, Homo sapien
agtcgcagcattgccttagaacctgtttcatgt

SEQ ID NO: 95887 - DNA, 33 bp, Homo sapien
aaaagtgatctgataaacaaaaatgtgtattgt

SEQ ID NO: 95888 - DNA, 33 bp, Homo sapien
aaaagtgatctgataagcaaaaatgtgtattgt

SEQ ID NO: 95889 - DNA, 33 bp, Homo sapien
ttcattttcttgcagacaaaattagaccaggaa

SEQ ID NO: 95890 - DNA, 33 bp, Homo sapien
ttcattttcttgcagataaaattagaccaggaa

SEQ ID NO: 95891 - DNA, 33 bp, Homo sapien
taaaaactctccaagacatggtttaaaagatga

SEQ ID NO: 95892 - DNA, 33 bp, Homo sapien
taaaaactctccaagatatggtttaaaagatga

SEQ ID NO: 95893 - DNA, 33 bp, Homo sapien
atttgcatttccctaacggctttgatgctggac

SEQ ID NO: 95894 - DNA, 33 bp, Homo sapien
atttgcatttccctaatggctttgatgctggac

SEQ ID NO: 95895 - DNA, 33 bp, Homo sapien
aatttgaagagttttaaatggcaagatgtgttt

SEQ ID NO: 95896 - DNA, 33 bp, Homo sapien
aatttgaagagttttagatggcaagatgtgttt

SEQ ID NO: 95897 - DNA, 33 bp, Homo sapien
catggggtctcattaaccacctttctattataa

SEQ ID NO: 95898 - DNA, 33 bp, Homo sapien
catggggtctcattaatcacctttctattataa

SEQ ID NO: 95899 - DNA, 33 bp, Homo sapien
aggaatagcgaagctaactgagaatcacttgtt

SEQ ID NO: 95900 - DNA, 33 bp, Homo sapien
aggaatagcgaagctacctgagaatcacttgtt

SEQ ID NO: 95901 - DNA, 33 bp, Homo sapien
ttgtactgtactggaaaacactgacagctacca

SEQ ID NO: 95902 - DNA, 33 bp, Homo sapien
ttgtactgtactggaagacactgacagctacca

SEQ ID NO: 95903 - DNA, 33 bp, Homo sapien
atattcaatatacctgcaaccgattttttgtgt

SEQ ID NO: 95904 - DNA, 33 bp, Homo sapien
atattcaatatacctggaaccgattttttgtgt

SEQ ID NO: 95905 - DNA, 33 bp, Homo sapien
ggctacaatatgtttacaaggacaggcaaaagg

SEQ ID NO: 95906 - DNA, 33 bp, Homo sapien
ggctacaatatgtttataaggacaggcaaaagg

SEQ ID NO: 95907 - DNA, 33 bp, Homo sapien
aattctcaacaaataacactcaaagcaaacata

SEQ ID NO: 95908 - DNA, 33 bp, Homo sapien
aattctcaacaaataatactcaaagcaaacata

SEQ ID NO: 95909 - DNA, 33 bp, Homo sapien
agttaatctgaaatcacctctgggaagcaatat

SEQ ID NO: 95910 - DNA, 33 bp, Homo sapien
agttaatctgaaatcatctctgggaagcaatat

SEQ ID NO: 95911 - DNA, 33 bp, Homo sapien
tgcacttttcctttaacactgttgtgctttctg

SEQ ID NO: 95912 - DNA, 33 bp, Homo sapien
tgcacttttcctttaatactgttgtgctttctg

SEQ ID NO: 95913 - DNA, 33 bp, Homo sapien
ggtaagtagccaaacacggtgaaagatcagcag

SEQ ID NO: 95914 - DNA, 33 bp, Homo sapien
ggtaagtagccaaacatggtgaaagatcagcag

SEQ ID NO: 95915 - DNA, 33 bp, Homo sapien
aattccaagcccataaaacattctcaattagat

SEQ ID NO: 95916 - DNA, 33 bp, Homo sapien
aattccaagcccataagacattctcaattagat

SEQ ID NO: 95917 - DNA, 33 bp, Homo sapien
aacctcaaatttagtgcacataagaccaaactc

SEQ ID NO: 95918 - DNA, 33 bp, Homo sapien
aacctcaaatttagtgtacataagaccaaactc

SEQ ID NO: 95919 - DNA, 33 bp, Homo sapien
ctggaaataagcctaacgtccaccagcaggcaa

SEQ ID NO: 95920 - DNA, 33 bp, Homo sapien
ctggaaataagcctaatgtccaccagcaggcaa

SEQ ID NO: 95921 - DNA, 33 bp, Homo sapien
tttcttagcaatatagaaaattaattccatctg

SEQ ID NO: 95922 - DNA, 33 bp, Homo sapien
tttcttagcaatataggaaattaattccatctg

SEQ ID NO: 95923 - DNA, 33 bp, Homo sapien
aggtcaggctccatctaaaatgacgcaggtgga

SEQ ID NO: 95924 - DNA, 33 bp, Homo sapien
aggtcaggctccatctcaaatgacgcaggtgga

SEQ ID NO: 95925 - DNA, 33 bp, Homo sapien
gagtacaaatatgtcaatccaaaaaatctgaaa

SEQ ID NO: 95926 - DNA, 33 bp, Homo sapien
gagtacaaatatgtcagtccaaaaaatctgaaa

SEQ ID NO: 95927 - DNA, 33 bp, Homo sapien
atgaggccttgtaggaagctgaatttgattcaa

SEQ ID NO: 95928 - DNA, 33 bp, Homo sapien
atgaggccttgtaggaggctgaatttgattcaa

SEQ ID NO: 95929 - DNA, 33 bp, Homo sapien
tatttgcatgaaattaagagtaagttcttagat

SEQ ID NO: 95930 - DNA, 33 bp, Homo sapien
tatttgcatgaaattatgagtaagttcttagat

SEQ ID NO: 95931 - DNA, 33 bp, Homo sapien
agccagttgccttgaccccaaagaacatcaaga

SEQ ID NO: 95932 - DNA, 33 bp, Homo sapien
agccagttgccttgactccaaagaacatcaaga

SEQ ID NO: 95933 - DNA, 33 bp, Homo sapien
agtgatttgccacccacgtctgtcccactcaga

SEQ ID NO: 95934 - DNA, 33 bp, Homo sapien
agtgatttgccacccatgtctgtcccactcaga

SEQ ID NO: 95935 - DNA, 33 bp, Homo sapien
cctcacattgtaacagacctgaggttgggctcc

SEQ ID NO: 95936 - DNA, 33 bp, Homo sapien
cctcacattgtaacaggcctgaggttgggctcc

SEQ ID NO: 95937 - DNA, 33 bp, Homo sapien
acaatattccagacaacagaggttagagaaaag

SEQ ID NO: 95938 - DNA, 33 bp, Homo sapien
acaatattccagacaatagaggttagagaaaag

SEQ ID NO: 95939 - DNA, 33 bp, Homo sapien
tctttcccctgcttcacgatgggcctatgtgtc

SEQ ID NO: 95940 - DNA, 33 bp, Homo sapien
tctttcccctgcttcatgatgggcctatgtgtc

SEQ ID NO: 95941 - DNA, 33 bp, Homo sapien
gccatttatctccaacacttttgagagtggtta

SEQ ID NO: 95942 - DNA, 33 bp, Homo sapien
gccatttatctccaacgcttttgagagtggtta

SEQ ID NO: 95943 - DNA, 33 bp, Homo sapien
taaaggctataacacggacccaaaaatttttgt

SEQ ID NO: 95944 - DNA, 33 bp, Homo sapien
taaaggctataacacgtacccaaaaatttttgt

SEQ ID NO: 95945 - DNA, 33 bp, Homo sapien
taaccctcaatatctcagaatgtgactatttgg

SEQ ID NO: 95946 - DNA, 33 bp, Homo sapien
taaccctcaatatctcggaatgtgactatttgg

SEQ ID NO: 95947 - DNA, 33 bp, Homo sapien
aacaaattgtgaaggactagaattatatagact

SEQ ID NO: 95948 - DNA, 33 bp, Homo sapien
aacaaattgtgaaggattagaattatatagact

SEQ ID NO: 95949 - DNA, 33 bp, Homo sapien
cacccatatgctggtaagaggattcctagaaat

SEQ ID NO: 95950 - DNA, 33 bp, Homo sapien
cacccatatgctggtatgaggattcctagaaat

SEQ ID NO: 95951 - DNA, 33 bp, Homo sapien
cttccctttagactaacatggctgccaacagaa

SEQ ID NO: 95952 - DNA, 33 bp, Homo sapien
cttccctttagactaatatggctgccaacagaa

SEQ ID NO: 95953 - DNA, 33 bp, Homo sapien
gttaaagtagttgttacggctacttgaacatgt

SEQ ID NO: 95954 - DNA, 33 bp, Homo sapien
gttaaagtagttgttatggctacttgaacatgt

SEQ ID NO: 95955 - DNA, 33 bp, Homo sapien
cagagtcccatgtgccactgacagcagtaagta

SEQ ID NO: 95956 - DNA, 33 bp, Homo sapien
cagagtcccatgtgccgctgacagcagtaagta

SEQ ID NO: 95957 - DNA, 33 bp, Homo sapien
acaggggcgtggaactcagcctgagaaagtgtg

SEQ ID NO: 95958 - DNA, 33 bp, Homo sapien
acaggggcgtggaacttagcctgagaaagtgtg

SEQ ID NO: 95959 - DNA, 33 bp, Homo sapien
tttctgaaatgtctaaggtatcactggcctttt

SEQ ID NO: 95960 - DNA, 33 bp, Homo sapien
tttctgaaatgtctaatgtatcactggcctttt

SEQ ID NO: 95961 - DNA, 33 bp, Homo sapien; identical to SEQ ID NO: 95959

SEQ ID NO: 95962 - DNA, 33 bp, Homo sapien; identical to SEQ ID NO: 95960

SEQ ID NO: 95963 - DNA, 33 bp, Homo sapien
acctgttgtaacaatcacagtttcaattctgtt

SEQ ID NO: 95964 - DNA, 33 bp, Homo sapien
acctgttgtaacaatcgcagtttcaattctgtt

SEQ ID NO: 95965 - DNA, 33 bp, Homo sapien
ggagcagcaggcaccacgcaaaaaacataagga

SEQ ID NO: 95966 - DNA, 33 bp, Homo sapien
ggagcagcaggcaccatgcaaaaaacataagga

SEQ ID NO: 95967 - DNA, 33 bp, Homo sapien
cctggcttaactcaccacaaaacaatggcccta

SEQ ID NO: 95968 - DNA, 33 bp, Homo sapien
cctggcttaactcaccgcaaaacaatggcccta

SEQ ID NO: 95969 - DNA, 33 bp, Homo sapien
aggaagatgaccttcgacattattgctgccttc

SEQ ID NO: 95970 - DNA, 33 bp, Homo sapien
aggaagatgaccttcggcattattgctgccttc

SEQ ID NO: 95971 - DNA, 33 bp, Homo sapien
tgaatgggcaggtactaactttgaatgcaacaa

SEQ ID NO: 95972 - DNA, 33 bp, Homo sapien
tgaatgggcaggtactgactttgaatgcaacaa

SEQ ID NO: 95973 - DNA, 33 bp, Homo sapien
gtaaaagtgaggcgacaaggaagctgaaagtgg

SEQ ID NO: 95974 - DNA, 33 bp, Homo sapien
gtaaaagtgaggcgacgaggaagctgaaagtgg

SEQ ID NO: 95975 - DNA, 33 bp, Homo sapien
ccccacaaaaaactccaaaatacaagtagatga

SEQ ID NO: 95976 - DNA, 33 bp, Homo sapien
ccccacaaaaaactccgaaatacaagtagatga

SEQ ID NO: 95977 - DNA, 33 bp, Homo sapien
catataataaattacacaggcatctttgacacg

SEQ ID NO: 95978 - DNA, 33 bp, Homo sapien
catataataaattacataggcatctttgacacg

SEQ ID NO: 95979 - DNA, 33 bp, Homo sapien
atggggcctttaaagacgcgatcaggttaaaat

SEQ ID NO: 95980 - DNA, 33 bp, Homo sapien
atggggcctttaaagaggcgatcaggttaaaat

SEQ ID NO: 95981 - DNA, 33 bp, Homo sapien
caaagacagaacctggagaatgaaggtggaaga

SEQ ID NO: 95982 - DNA, 33 bp, Homo sapien
caaagacagaacctggcgaatgaaggtggaaga

SEQ ID NO: 95983 - DNA, 33 bp, Homo sapien
ggtggaagaactgtagaggcagcaaagctctgt

SEQ ID NO: 95984 - DNA, 33 bp, Homo sapien
ggtggaagaactgtagcggcagcaaagctctgt

SEQ ID NO: 95985 - DNA, 33 bp, Homo sapien
ctttatttcttggaaacgttggtgatggtactt

SEQ ID NO: 95986 - DNA, 33 bp, Homo sapien
ctttatttcttggaaatgttggtgatggtactt

SEQ ID NO: 95987 - DNA, 33 bp, Homo sapien
tgccaagtagagagacacttcagctaggctgga

SEQ ID NO: 95988 - DNA, 33 bp, Homo sapien
tgccaagtagagagacgcttcagctaggctgga

SEQ ID NO: 95989 - DNA, 33 bp, Homo sapien
gattcaagaaatgcttaaaacgctccaggcaca

SEQ ID NO: 95990 - DNA, 33 bp, Homo sapien
gattcaagaaatgcttgaaacgctccaggcaca

SEQ ID NO: 95991 - DNA, 33 bp, Homo sapien
atgtactctcttctcaagtatcaccgaggataa

SEQ ID NO: 95992 - DNA, 33 bp, Homo sapien
atgtactctcttctcaggtatcaccgaggataa

SEQ ID NO: 95993 - DNA, 33 bp, Homo sapien
ggaggcatgcagctcaaaataacttcaagagag

SEQ ID NO: 95994 - DNA, 33 bp, Homo sapien
ggaggcatgcagctcagaataacttcaagagag

SEQ ID NO: 95995 - DNA, 33 bp, Homo sapien
aggagaaaagagtcaactgtactctcattcgta

SEQ ID NO: 95996 - DNA, 33 bp, Homo sapien
aggagaaaagagtcaagtgtactctcattcgta

SEQ ID NO: 95997 - DNA, 33 bp, Homo sapien
ttatgggtgacaattacattggaaaggacagtg

SEQ ID NO: 95998 - DNA, 33 bp, Homo sapien
ttatgggtgacaattatattggaaaggacagtg

SEQ ID NO: 95999 - DNA, 33 bp, Homo sapien
tggcagcattggagataaggatgtgctactgaa

SEQ ID NO: 96000 - DNA, 33 bp, Homo sapien
tggcagcattggagatgaggatgtgctactgaa

SEQ ID NO: 96001 - DNA, 33 bp, Homo sapien
agggatctacccccacaatctaaacacctccca

SEQ ID NO: 96002 - DNA, 33 bp, Homo sapien
agggatctacccccacgatctaaacacctccca

SEQ ID NO: 96003 - DNA, 33 bp, Homo sapien
gagatatttgcataaccaaaagccaactgctaa

SEQ ID NO: 96004 - DNA, 33 bp, Homo sapien
gagatatttgcataactaaaagccaactgctaa

SEQ ID NO: 96005 - DNA, 33 bp, Homo sapien
tattaacttttaaaaacgtatgtcacatatgcc

SEQ ID NO: 96006 - DNA, 33 bp, Homo sapien
tattaacttttaaaaatgtatgtcacatatgcc

SEQ ID NO: 96007 - DNA, 33 bp, Homo sapien
aattttacttcactcacatcactggcgtcaact

SEQ ID NO: 96008 - DNA, 33 bp, Homo sapien
aattttacttcactcatatcactggcgtcaact

SEQ ID NO: 96009 - DNA, 33 bp, Homo sapien
aatgagaaaggtgtaacagttgactggaagcag

SEQ ID NO: 96010 - DNA, 33 bp, Homo sapien
aatgagaaaggtgtaatagttgactggaagcag

SEQ ID NO: 96011 - DNA, 33 bp, Homo sapien
aaacgcccaaactcaaaagcgtggtgctggcta

SEQ ID NO: 96012 - DNA, 33 bp, Homo sapien
aaacgcccaaactcaagagcgtggtgctggcta

SEQ ID NO: 96013 - DNA, 33 bp, Homo sapien
gaggatcttgaaagggaaggtgaaggcatgaaa

SEQ ID NO: 96014 - DNA, 33 bp, Homo sapien
gaggatcttgaaaggggaggtgaaggcatgaaa

SEQ ID NO: 96015 - DNA, 33 bp, Homo sapien
gttaagagttagttgcactgtgactccaaccta

SEQ ID NO: 96016 - DNA, 33 bp, Homo sapien
gttaagagttagttgcgctgtgactccaaccta

SEQ ID NO: 96017 - DNA, 33 bp, Homo sapien; identical to SEQ ID NO: 96015

SEQ ID NO: 96018 - DNA, 33 bp, Homo sapien; identical to SEQ ID NO: 96016

SEQ ID NO: 96019 - DNA, 33 bp, Homo sapien
ggatctggaggaaagaaggaataatcccgttag

SEQ ID NO: 96020 - DNA, 33 bp, Homo sapien
ggatctggaggaaagatggaataatcccgttag

SEQ ID NO: 96021 - DNA, 33 bp, Homo sapien
tccaagttgcattgtacgttccaccacaaggca

SEQ ID NO: 96022 - DNA, 33 bp, Homo sapien
tccaagttgcattgtatgttccaccacaaggca

SEQ ID NO: 96023 - DNA, 33 bp, Homo sapien
ttttgggtcatcactacaatttgggcctataac

SEQ ID NO: 96024 - DNA, 33 bp, Homo sapien
ttttgggtcatcactataatttgggcctataac

SEQ ID NO: 96025 - DNA, 33 bp, Homo sapien
aagtagaaaaagataaatgatagtccattagta

SEQ ID NO: 96026 - DNA, 33 bp, Homo sapien
aagtagaaaaagataagtgatagtccattagta

SEQ ID NO: 96027 - DNA, 33 bp, Homo sapien
tgaatcccattagccaaagaacacagtctgaca

SEQ ID NO: 96028 - DNA, 33 bp, Homo sapien
tgaatcccattagccacagaacacagtctgaca

SEQ ID NO: 96029 - DNA, 33 bp, Homo sapien
catttcaatggatgccagctaacctgaacattg

SEQ ID NO: 96030 - DNA, 33 bp, Homo sapien
catttcaatggatgccggctaacctgaacattg

SEQ ID NO: 96031 - DNA, 33 bp, Homo sapien
attgtccattttcccaatgaatgcctttttttt

SEQ ID NO: 96032 - DNA, 33 bp, Homo sapien
attgtccattttcccagtgaatgcctttttttt

SEQ ID NO: 96033 - DNA, 33 bp, Homo sapien
gaattaaacactgtataagacagagaaaagtta

SEQ ID NO: 96034 - DNA, 33 bp, Homo sapien
gaattaaacactgtatgagacagagaaaagtta

SEQ ID NO: 96035 - DNA, 33 bp, Homo sapien
ttgtaaagtatgactacatatggctgtgtagct

SEQ ID NO: 96036 - DNA, 33 bp, Homo sapien
ttgtaaagtatgactatatatggctgtgtagct

SEQ ID NO: 96037 - DNA, 33 bp, Homo sapien
tctataactaatgcacaatttttttattctcaa

SEQ ID NO: 96038 - DNA, 33 bp, Homo sapien
tctataactaatgcaccatttttttattctcaa

SEQ ID NO: 96039 - DNA, 33 bp, Homo sapien
gagtgctggaaaggaaatactgaaagacaaccc

SEQ ID NO: 96040 - DNA, 33 bp, Homo sapien
gagtgctggaaaggaagtactgaaagacaaccc

SEQ ID NO: 96041 - DNA, 33 bp, Homo sapien
tagaggaagtaatacaatagacaggtttttcag

SEQ ID NO: 96042 - DNA, 33 bp, Homo sapien
tagaggaagtaatacagtagacaggtttttcag

SEQ ID NO: 96043 - DNA, 33 bp, Homo sapien
ttctctgacttgaaaaatgctacatttcccacg

SEQ ID NO: 96044 - DNA, 33 bp, Homo sapien
ttctctgacttgaaaactgctacatttcccacg

SEQ ID NO: 96045 - DNA, 33 bp, Homo sapien
ccaagtaagccccaaacaaatatgtgcaggatc

SEQ ID NO: 96046 - DNA, 33 bp, Homo sapien
ccaagtaagccccaaataaatatgtgcaggatc

SEQ ID NO: 96047 - DNA, 33 bp, Homo sapien
aaacaacaggccaaaaggtaagtaacagtcctg

SEQ ID NO: 96048 - DNA, 33 bp, Homo sapien
aaacaacaggccaaaatgtaagtaacagtcctg

SEQ ID NO: 96049 - DNA, 33 bp, Homo sapien
cagctgttctgcttaagaccacaagccggtggt

SEQ ID NO: 96050 - DNA, 33 bp, Homo sapien
cagctgttctgcttaataccacaagccggtggt

SEQ ID NO: 96051 - DNA, 33 bp, Homo sapien
ttgtagataaatgggaaaacgcattcttagata

SEQ ID NO: 96052 - DNA, 33 bp, Homo sapien
ttgtagataaatgggagaacgcattcttagata

SEQ ID NO: 96053 - DNA, 33 bp, Homo sapien
gtagggagaggagaacggaaccagggggacgag

SEQ ID NO: 96054 - DNA, 33 bp, Homo sapien
gtagggagaggagaactgaaccagggggacgag

SEQ ID NO: 96055 - DNA, 33 bp, Homo sapien
gggcaagttgggtggagaaatttactaatatta

SEQ ID NO: 96056 - DNA, 33 bp, Homo sapien
gggcaagttgggtggataaatttactaatatta

SEQ ID NO: 96057 - DNA, 33 bp, Homo sapien
aagttgtttgaagagaatatcagctatcactct

SEQ ID NO: 96058 - DNA, 33 bp, Homo sapien
aagttgtttgaagagactatcagctatcactct

SEQ ID NO: 96059 - DNA, 33 bp, Homo sapien
tgctagaaataagtaaggagtgtaaatgtttga

SEQ ID NO: 96060 - DNA, 33 bp, Homo sapien
tgctagaaataagtaatgagtgtaaatgtttga

SEQ ID NO: 96061 - DNA, 33 bp, Homo sapien
aaatttccaatgagaacagataaatggtctggc

SEQ ID NO: 96062 - DNA, 33 bp, Homo sapien
aaatttccaatgagaatagataaatggtctggc

SEQ ID NO: 96063 - DNA, 33 bp, Homo sapien
tgtgaatgcatagaaaatctcaatgttacaagt

SEQ ID NO: 96064 - DNA, 33 bp, Homo sapien
tgtgaatgcatagaaagtctcaatgttacaagt

SEQ ID NO: 96065 - DNA, 33 bp, Homo sapien
tcccatatatggtgcccgcttttgactcatcaa

SEQ ID NO: 96066 - DNA, 33 bp, Homo sapien
tcccatatatggtgcctgcttttgactcatcaa

SEQ ID NO: 96067 - DNA, 33 bp, Homo sapien
atagtgtcactgtgaacataaaatcagatagta

SEQ ID NO: 96068 - DNA, 33 bp, Homo sapien
atagtgtcactgtgaagataaaatcagatagta

SEQ ID NO: 96069 - DNA, 33 bp, Homo sapien
gattgtgtttctggaactgatatggtagccaat

SEQ ID NO: 96070 - DNA, 33 bp, Homo sapien
gattgtgtttctggaattgatatggtagccaat

SEQ ID NO: 96071 - DNA, 33 bp, Homo sapien
ccatatcctcatcagcacttcttattttctatt

SEQ ID NO: 96072 - DNA, 33 bp, Homo sapien
ccatatcctcatcagcgcttcttattttctatt

SEQ ID NO: 96073 - DNA, 33 bp, Homo sapien
acaggggtgaagtaaccggtcagctctgctcta

SEQ ID NO: 96074 - DNA, 33 bp, Homo sapien
acaggggtgaagtaactggtcagctctgctcta

SEQ ID NO: 96075 - DNA, 33 bp, Homo sapien
ctgtcttgaacacctacctcagttcctggcaac

SEQ ID NO: 96076 - DNA, 33 bp, Homo sapien
ctgtcttgaacacctagctcagttcctggcaac

SEQ ID NO: 96077 - DNA, 33 bp, Homo sapien
agatagtatttccatcacacattttaaaacatt

SEQ ID NO: 96078 - DNA, 33 bp, Homo sapien
agatagtatttccatctcacattttaaaacatt

SEQ ID NO: 96079 - DNA, 33 bp, Homo sapien
gcataatgtaggaaaggctttaagttcttcact

SEQ ID NO: 96080 - DNA, 33 bp, Homo sapien
gcataatgtaggaaagtctttaagttcttcact

SEQ ID NO: 96081 - DNA, 33 bp, Homo sapien
gacatgacagaatggccgcaaagcgggtgatgc

SEQ ID NO: 96082 - DNA, 33 bp, Homo sapien
gacatgacagaatggctgcaaagcgggtgatgc

SEQ ID NO: 96083 - DNA, 33 bp, Homo sapien
aatcagtgactcacggaccagaatgcaatgcgc

SEQ ID NO: 96084 - DNA, 33 bp, Homo sapien
aatcagtgactcacgggccagaatgcaatgcgc

SEQ ID NO: 96085 - DNA, 33 bp, Homo sapien
ttacagctgtgagaaaagacaataaagccagtt

SEQ ID NO: 96086 - DNA, 33 bp, Homo sapien
ttacagctgtgagaaaggacaataaagccagtt

SEQ ID NO: 96087 - DNA, 33 bp, Homo sapien
tattcaaaaattcatccagacactgagttccaa

SEQ ID NO: 96088 - DNA, 33 bp, Homo sapien
tattcaaaaattcatctagacactgagttccaa

SEQ ID NO: 96089 - DNA, 33 bp, Homo sapien
aaaatgggacagtgtacgtgaagggctgaatcc

SEQ ID NO: 96090 - DNA, 33 bp, Homo sapien
aaaatgggacagtgtatgtgaagggctgaatcc

SEQ ID NO: 96091 - DNA, 33 bp, Homo sapien
tagtggtctgattcaacgtgacctgctccctct

SEQ ID NO: 96092 - DNA, 33 bp, Homo sapien
tagtggtctgattcaatgtgacctgctccctct

SEQ ID NO: 96093 - DNA, 33 bp, Homo sapien
aagtcacttgcgagtaacttccttacattgaat

SEQ ID NO: 96094 - DNA, 33 bp, Homo sapien
aagtcacttgcgagtaccttccttacattgaat

SEQ ID NO: 96095 - DNA, 33 bp, Homo sapien
acaaaatgacatttaaaccatcactacaaaacc

SEQ ID NO: 96096 - DNA, 33 bp, Homo sapien
acaaaatgacatttaatccatcactacaaaacc

SEQ ID NO: 96097 - DNA, 33 bp, Homo sapien
tagactcaagtatgaacgtagtaagaggttttg

SEQ ID NO: 96098 - DNA, 33 bp, Homo sapien
tagactcaagtatgaatgtagtaagaggttttg

SEQ ID NO: 96099 - DNA, 33 bp, Homo sapien
tcccaaggcaaagctaacaaatgatattactat

SEQ ID NO: 96100 - DNA, 33 bp, Homo sapien
tcccaaggcaaagctagcaaatgatattactat

SEQ ID NO: 96101 - DNA, 33 bp, Homo sapien
ttctgttaattagaacaaatcacgaggtctatc

SEQ ID NO: 96102 - DNA, 33 bp, Homo sapien
ttctgttaattagaaccaatcacgaggtctatc

SEQ ID NO: 96103 - DNA, 33 bp, Homo sapien
tcctcagccccaagaaaagatgctataatgagt

SEQ ID NO: 96104 - DNA, 33 bp, Homo sapien
tcctcagccccaagaagagatgctataatgagt

SEQ ID NO: 96105 - DNA, 33 bp, Homo sapien
ctataaactctaaaaacttgcagttgttgcgag

SEQ ID NO: 96106 - DNA, 33 bp, Homo sapien
ctataaactctaaaaatttgcagttgttgcgag

SEQ ID NO: 96107 - DNA, 33 bp, Homo sapien
cttgtctggtcagcacacaagtggcttcattac

SEQ ID NO: 96108 - DNA, 33 bp, Homo sapien
cttgtctggtcagcacgcaagtggcttcattac

SEQ ID NO: 96109 - DNA, 33 bp, Homo sapien
caggaagctggacttgaaggcaggtttcaacac

SEQ ID NO: 96110 - DNA, 33 bp, Homo sapien
caggaagctggacttgcaggcaggtttcaacac

SEQ ID NO: 96111 - DNA, 33 bp, Homo sapien
gccatcacaatttcaacagaagtcaaaaaatcc

SEQ ID NO: 96112 - DNA, 33 bp, Homo sapien
gccatcacaatttcaatagaagtcaaaaaatcc

SEQ ID NO: 96113 - DNA, 33 bp, Homo sapien
agtacagcacattcccaatggtgtcctctgaga

SEQ ID NO: 96114 - DNA, 33 bp, Homo sapien
agtacagcacattcccgatggtgtcctctgaga

SEQ ID NO: 96115 - DNA, 33 bp, Homo sapien
cagtagtctttatatcaccaaagcaccaatgtt

SEQ ID NO: 96116 - DNA, 33 bp, Homo sapien
cagtagtctttatatcgccaaagcaccaatgtt

SEQ ID NO: 96117 - DNA, 33 bp, Homo sapien
ttgcctcaatttggaacctatagggactaggcc

SEQ ID NO: 96118 - DNA, 33 bp, Homo sapien
ttgcctcaatttggaatctatagggactaggcc

SEQ ID NO: 96119 - DNA, 33 bp, Homo sapien
aatgcaactcctaactcaatcctcttccttagt

SEQ ID NO: 96120 - DNA, 33 bp, Homo sapien
aatgcaactcctaactgaatcctcttccttagt

SEQ ID NO: 96121 - DNA, 33 bp, Homo sapien
catttgtcaatagaagaaaaagtgttaagaatt

SEQ ID NO: 96122 - DNA, 33 bp, Homo sapien
catttgtcaatagaaggaaaagtgttaagaatt

SEQ ID NO: 96123 - DNA, 33 bp, Homo sapien
agagctgtattctacaatgacaacaggcagcag

SEQ ID NO: 96124 - DNA, 33 bp, Homo sapien
agagctgtattctacagtgacaacaggcagcag

SEQ ID NO: 96125 - DNA, 33 bp, Homo sapien
ctgctcctagtattccacgctgtctcttcttct

SEQ ID NO: 96126 - DNA, 33 bp, Homo sapien
ctgctcctagtattccgcgctgtctcttcttct

SEQ ID NO: 96127 - DNA, 33 bp, Homo sapien
attcactcttatatgaagcgcaaagcattagtt

SEQ ID NO: 96128 - DNA, 33 bp, Homo sapien
attcactcttatatgacgcgcaaagcattagtt

SEQ ID NO: 96129 - DNA, 33 bp, Homo sapien
accaacacttttaatgaattcctacctgaaact

SEQ ID NO: 96130 - DNA, 33 bp, Homo sapien
accaacacttttaatgcattcctacctgaaact

SEQ ID NO: 96131 - DNA, 33 bp, Homo sapien
atatttttagaggacaatgaagaagcagcattc

SEQ ID NO: 96132 - DNA, 33 bp, Homo sapien
atatttttagaggacagtgaagaagcagcattc

SEQ ID NO: 96133 - DNA, 33 bp, Homo sapien
gagatagccacatttgcagaatgcttactgtgt

SEQ ID NO: 96134 - DNA, 33 bp, Homo sapien
gagatagccacatttgtagaatgcttactgtgt

SEQ ID NO: 96135 - DNA, 33 bp, Homo sapien
gatgtcactaagttataagtgtgtagccttcat

SEQ ID NO: 96136 - DNA, 33 bp, Homo sapien
gatgtcactaagttatcagtgtgtagccttcat

SEQ ID NO: 96137 - DNA, 33 bp, Homo sapien
aagtaaataatgtccaaagtggcagtgtttatt

SEQ ID NO: 96138 - DNA, 33 bp, Homo sapien
aagtaaataatgtccacagtggcagtgtttatt

SEQ ID NO: 96139 - DNA, 33 bp, Homo sapien
actgctcaacactccaataaatcctgagaccat

SEQ ID NO: 96140 - DNA, 33 bp, Homo sapien
actgctcaacactccagtaaatcctgagaccat

SEQ ID NO: 96141 - DNA, 33 bp, Homo sapien
acttcattactataccacacaggctctcaaatc

SEQ ID NO: 96142 - DNA, 33 bp, Homo sapien
acttcattactataccgcacaggctctcaaatc

SEQ ID NO: 96143 - DNA, 33 bp, Homo sapien
aaaatttaaaaagtaaatgctgtattgcccggc

SEQ ID NO: 96144 - DNA, 33 bp, Homo sapien
aaaatttaaaaagtaactgctgtattgcccggc

SEQ ID NO: 96145 - DNA, 33 bp, Homo sapien
tcacatcaggaagaaacaggtaaacccaagaac

SEQ ID NO: 96146 - DNA, 33 bp, Homo sapien
tcacatcaggaagaaataggtaaacccaagaac

SEQ ID NO: 96147 - DNA, 33 bp, Homo sapien
ttacattcctattcaaaatgtcatataaatact

SEQ ID NO: 96148 - DNA, 33 bp, Homo sapien
ttacattcctattcaagatgtcatataaatact

SEQ ID NO: 96149 - DNA, 33 bp, Homo sapien
gtgtaccaaaataatgaaattgaaggaatgcag

SEQ ID NO: 96150 - DNA, 33 bp, Homo sapien
gtgtaccaaaataatgcaattgaaggaatgcag

SEQ ID NO: 96151 - DNA, 33 bp, Homo sapien
gagatacaattcagcccataccagaaaggaagg

SEQ ID NO: 96152 - DNA, 33 bp, Homo sapien
gagatacaattcagcctataccagaaaggaagg

SEQ ID NO: 96153 - DNA, 33 bp, Homo sapien
ttacgtcttgcatttaactccaatggatcaaaa

SEQ ID NO: 96154 - DNA, 33 bp, Homo sapien
ttacgtcttgcatttacctccaatggatcaaaa

SEQ ID NO: 96155 - DNA, 33 bp, Homo sapien
gaagacattctcttgcaaacgagtgctagagga

SEQ ID NO: 96156 - DNA, 33 bp, Homo sapien
gaagacattctcttgcgaacgagtgctagagga

SEQ ID NO: 96157 - DNA, 33 bp, Homo sapien
cgttcacactcagtgccgcacgaatacagtgtg

SEQ ID NO: 96158 - DNA, 33 bp, Homo sapien
cgttcacactcagtgctgcacgaatacagtgtg

SEQ ID NO: 96159 - DNA, 33 bp, Homo sapien
catcatgtgctagacactactaccaatactttg

SEQ ID NO: 96160 - DNA, 33 bp, Homo sapien
catcatgtgctagacagtactaccaatactttg

SEQ ID NO: 96161 - DNA, 33 bp, Homo sapien
gatgtcttgttcccccaaaaaatgtagcatttg

SEQ ID NO: 96162 - DNA, 33 bp, Homo sapien
gatgtcttgttcccccgaaaaatgtagcatttg

SEQ ID NO: 96163 - DNA, 33 bp, Homo sapien
gccctaatgagtatcgcccataggcaggctaga

SEQ ID NO: 96164 - DNA, 33 bp, Homo sapien
gccctaatgagtatcgtccataggcaggctaga

SEQ ID NO: 96165 - DNA, 33 bp, Homo sapien
tctgtaacaaaccagaataagtgatggcttctt

SEQ ID NO: 96166 - DNA, 33 bp, Homo sapien
tctgtaacaaaccagagtaagtgatggcttctt

SEQ ID NO: 96167 - DNA, 33 bp, Homo sapien
tctggtttgttacagacagcctcagaattcagg

SEQ ID NO: 96168 - DNA, 33 bp, Homo sapien
tctggtttgttacagagagcctcagaattcagg

SEQ ID NO: 96169 - DNA, 33 bp, Homo sapien
caccttccgggtttcagcaattctcgtgcctca

SEQ ID NO: 96170 - DNA, 33 bp, Homo sapien
caccttccgggtttcatcaattctcgtgcctca

SEQ ID NO: 96171 - DNA, 33 bp, Homo sapien
ctactccatacttttaacaatcacaagtagcaa

SEQ ID NO: 96172 - DNA, 33 bp, Homo sapien
ctactccatacttttagcaatcacaagtagcaa

SEQ ID NO: 96173 - DNA, 33 bp, Homo sapien
tcccaacataggaaaacctaccagttctttctg

SEQ ID NO: 96174 - DNA, 33 bp, Homo sapien
tcccaacataggaaaagctaccagttctttctg

SEQ ID NO: 96175 - DNA, 33 bp, Homo sapien
cagagtctctaaaaaacaacacatcctagggaa

SEQ ID NO: 96176 - DNA, 33 bp, Homo sapien
cagagtctctaaaaaagaacacatcctagggaa

SEQ ID NO: 96177 - DNA, 33 bp, Homo sapien
ctcattattactatgccctttgcaaatgaagta

SEQ ID NO: 96178 - DNA, 33 bp, Homo sapien
ctcattattactatgctctttgcaaatgaagta

SEQ ID NO: 96179 - DNA, 33 bp, Homo sapien
cttgctgcagtaattaaaatttttatttcaaca

SEQ ID NO: 96180 - DNA, 33 bp, Homo sapien
cttgctgcagtaattataatttttatttcaaca

SEQ ID NO: 96181 - DNA, 33 bp, Homo sapien
ggggagttgatttgcacggaaaacaattgaaag

SEQ ID NO: 96182 - DNA, 33 bp, Homo sapien
ggggagttgatttgcatggaaaacaattgaaag

SEQ ID NO: 96183 - DNA, 33 bp, Homo sapien
tagggtattctatgtacgaaagatcatgccatt

SEQ ID NO: 96184 - DNA, 33 bp, Homo sapien
tagggtattctatgtatgaaagatcatgccatt

SEQ ID NO: 96185 - DNA, 33 bp, Homo sapien
ttaagtctctaaaagacgtttgcaataaaacca

SEQ ID NO: 96186 - DNA, 33 bp, Homo sapien
ttaagtctctaaaagatgtttgcaataaaacca

SEQ ID NO: 96187 - DNA, 33 bp, Homo sapien
ggaattgattttccaaagtctgtgcctacatgg

SEQ ID NO: 96188 - DNA, 33 bp, Homo sapien
ggaattgattttccaaggtctgtgcctacatgg

SEQ ID NO: 96189 - DNA, 33 bp, Homo sapien
gaggaggggagatgaactatgcaggaagtagga

SEQ ID NO: 96190 - DNA, 33 bp, Homo sapien
gaggaggggagatgaagtatgcaggaagtagga

SEQ ID NO: 96191 - DNA, 33 bp, Homo sapien
catccatgaacattacgaagctccttgtacctc

SEQ ID NO: 96192 - DNA, 33 bp, Homo sapien
catccatgaacattactaagctccttgtacctc

SEQ ID NO: 96193 - DNA, 33 bp, Homo sapien
gtttctctggttttccagaaacatgatgattag

SEQ ID NO: 96194 - DNA, 33 bp, Homo sapien
gtttctctggttttccggaaacatgatgattag

SEQ ID NO: 96195 - DNA, 33 bp, Homo sapien
taggcagtgactatggaaatgttcataaatgtc

SEQ ID NO: 96196 - DNA, 33 bp, Homo sapien
taggcagtgactatgggaatgttcataaatgtc

SEQ ID NO: 96197 - DNA, 33 bp, Homo sapien
tatgaggtaagcctccaacttcttttgcatgtg

SEQ ID NO: 96198 - DNA, 33 bp, Homo sapien
tatgaggtaagcctcctacttcttttgcatgtg

SEQ ID NO: 96199 - DNA, 33 bp, Homo sapien
atctagaatgcattccactaatattctgcatgt

SEQ ID NO: 96200 - DNA, 33 bp, Homo sapien
atctagaatgcattcccctaatattctgcatgt

SEQ ID NO: 96201 - DNA, 33 bp, Homo sapien
caaccctgtggagccacgtctgagacccagagt

SEQ ID NO: 96202 - DNA, 33 bp, Homo sapien
caaccctgtggagccatgtctgagacccagagt

SEQ ID NO: 96203 - DNA, 33 bp, Homo sapien
atttgtccatcctccaacgcacctctgcatctc

SEQ ID NO: 96204 - DNA, 33 bp, Homo sapien
atttgtccatcctccagcgcacctctgcatctc

SEQ ID NO: 96205 - DNA, 33 bp, Homo sapien
tgatctttggttatgaagcttgaacttggaaga

SEQ ID NO: 96206 - DNA, 33 bp, Homo sapien
tgatctttggttatgaggcttgaacttggaaga

SEQ ID NO: 96207 - DNA, 33 bp, Homo sapien
atttctcaaatccagacattcaattgcctataa

SEQ ID NO: 96208 - DNA, 33 bp, Homo sapien
atttctcaaatccagatattcaattgcctataa

SEQ ID NO: 96209 - DNA, 33 bp, Homo sapien
gaatttttaatgatgaagtccttgaagtcaatg

SEQ ID NO: 96210 - DNA, 33 bp, Homo sapien
gaatttttaatgatgaggtccttgaagtcaatg

SEQ ID NO: 96211 - DNA, 33 bp, Homo sapien
ccatgcttgccaccacagtgagtgacagggaat

SEQ ID NO: 96212 - DNA, 33 bp, Homo sapien
ccatgcttgccaccacggtgagtgacagggaat

SEQ ID NO: 96213 - DNA, 33 bp, Homo sapien
cacagcaaacggagctcaagtcattacatctgc

SEQ ID NO: 96214 - DNA, 33 bp, Homo sapien
cacagcaaacggagcttaagtcattacatctgc

SEQ ID NO: 96215 - DNA, 33 bp, Homo sapien
tgtgatgagagtgcacagatcagccttcatggt

SEQ ID NO: 96216 - DNA, 33 bp, Homo sapien
tgtgatgagagtgcacggatcagccttcatggt

SEQ ID NO: 96217 - DNA, 33 bp, Homo sapien
aatatgtctgaacttacatgattatctatctca

SEQ ID NO: 96218 - DNA, 33 bp, Homo sapien
aatatgtctgaacttatatgattatctatctca

SEQ ID NO: 96219 - DNA, 33 bp, Homo sapien
ttcctaaaagttgtaaatctggactcatttaat

SEQ ID NO: 96220 - DNA, 33 bp, Homo sapien
ttcctaaaagttgtaactctggactcatttaat

SEQ ID NO: 96221 - DNA, 33 bp, Homo sapien
atttgtgatttccgcgaagtaatcacctactgt

SEQ ID NO: 96222 - DNA, 33 bp, Homo sapien
atttgtgatttccgcgtagtaatcacctactgt

SEQ ID NO: 96223 - DNA, 33 bp, Homo sapien
tgagtgacctcaataaacatctagaaatgatat

SEQ ID NO: 96224 - DNA, 33 bp, Homo sapien
tgagtgacctcaataagcatctagaaatgatat

SEQ ID NO: 96225 - DNA, 33 bp, Homo sapien
atagttttaacaattacctcagcaaacaataac

SEQ ID NO: 96226 - DNA, 33 bp, Homo sapien
atagttttaacaattatctcagcaaacaataac

SEQ ID NO: 96227 - DNA, 33 bp, Homo sapien
cggagttttccttccaaataaagcatctgcagc

SEQ ID NO: 96228 - DNA, 33 bp, Homo sapien
cggagttttccttccagataaagcatctgcagc

SEQ ID NO: 96229 - DNA, 33 bp, Homo sapien
gactaagtcttcataaacgattgcaacaaaaac

SEQ ID NO: 96230 - DNA, 33 bp, Homo sapien
gactaagtcttcataagcgattgcaacaaaaac

SEQ ID NO: 96231 - DNA, 33 bp, Homo sapien
taaaaagtcaataaaaagctaggcgtgatggct

SEQ ID NO: 96232 - DNA, 33 bp, Homo sapien
taaaaagtcaataaaaggctaggcgtgatggct

SEQ ID NO: 96233 - DNA, 33 bp, Homo sapien
ggggctggcctatgaaccgcttaattttttttt

SEQ ID NO: 96234 - DNA, 33 bp, Homo sapien
ggggctggcctatgaatcgcttaattttttttt

SEQ ID NO: 96235 - DNA, 33 bp, Homo sapien
ctagaattgaaactcaataaatctgctcaaaaa

SEQ ID NO: 96236 - DNA, 33 bp, Homo sapien
ctagaattgaaactcagtaaatctgctcaaaaa

SEQ ID NO: 96237 - DNA, 33 bp, Homo sapien
cttagaagcctgaacactcaaacattctttcca

SEQ ID NO: 96238 - DNA, 33 bp, Homo sapien
cttagaagcctgaacattcaaacattctttcca

SEQ ID NO: 96239 - DNA, 33 bp, Homo sapien
ttggtggaggtgttcaatcagtcagttgggggg

SEQ ID NO: 96240 - DNA, 33 bp, Homo sapien
ttggtggaggtgttcactcagtcagttgggggg

SEQ ID NO: 96241 - DNA, 33 bp, Homo sapien
caataaataattaacacgttgccaaatcaggtc

SEQ ID NO: 96242 - DNA, 33 bp, Homo sapien
caataaataattaacaggttgccaaatcaggtc

SEQ ID NO: 96243 - DNA, 33 bp, Homo sapien
atcacgagataagcctcagagaggaaataatac

SEQ ID NO: 96244 - DNA, 33 bp, Homo sapien
atcacgagataagccttagagaggaaataatac

SEQ ID NO: 96245 - DNA, 33 bp, Homo sapien
agacagcttgatacaggacaaagaatatggtcc

SEQ ID NO: 96246 - DNA, 33 bp, Homo sapien
agacagcttgatacagtacaaagaatatggtcc

SEQ ID NO: 96247 - DNA, 33 bp, Homo sapien
cctgaaaagattgaagcctataatagaaaacaa

SEQ ID NO: 96248 - DNA, 33 bp, Homo sapien
cctgaaaagattgaaggctataatagaaaacaa

SEQ ID NO: 96249 - DNA, 33 bp, Homo sapien
tgtaactatttctgccccccttcctttggaaaa

SEQ ID NO: 96250 - DNA, 33 bp, Homo sapien
tgtaactatttctgcctcccttcctttggaaaa

SEQ ID NO: 96251 - DNA, 33 bp, Homo sapien
tcatcagacttgttaacacatatatgcctttgt

SEQ ID NO: 96252 - DNA, 33 bp, Homo sapien
tcatcagacttgttaatacatatatgcctttgt

SEQ ID NO: 96253 - DNA, 33 bp, Homo sapien
aattactatggcatataaagtactacagcacgg

SEQ ID NO: 96254 - DNA, 33 bp, Homo sapien
aattactatggcatatgaagtactacagcacgg

SEQ ID NO: 96255 - DNA, 33 bp, Homo sapien
gagtaaatgccaggaaaaggagttgataattaa

SEQ ID NO: 96256 - DNA, 33 bp, Homo sapien
gagtaaatgccaggaagaggagttgataattaa

SEQ ID NO: 96257 - DNA, 33 bp, Homo sapien
aagaatggtacaaatccaaggtaggaaacaaat

SEQ ID NO: 96258 - DNA, 33 bp, Homo sapien
aagaatggtacaaatcgaaggtaggaaacaaat

SEQ ID NO: 96259 - DNA, 33 bp, Homo sapien
ttacaacattccactgaatccttatattgcctg

SEQ ID NO: 96260 - DNA, 33 bp, Homo sapien
ttacaacattccactggatccttatattgcctg

SEQ ID NO: 96261 - DNA, 33 bp, Homo sapien
cataatgaaaagcttcacaggtgccccatctcc

SEQ ID NO: 96262 - DNA, 33 bp, Homo sapien
cataatgaaaagcttcgcaggtgccccatctcc

SEQ ID NO: 96263 - DNA, 33 bp, Homo sapien
ttatgaacagcatcagcactggaatctactgtc

SEQ ID NO: 96264 - DNA, 33 bp, Homo sapien
ttatgaacagcatcaggactggaatctactgtc

SEQ ID NO: 96265 - DNA, 33 bp, Homo sapien
ggctttgataaacgcacgcaggttgtagttgag

SEQ ID NO: 96266 - DNA, 33 bp, Homo sapien
ggctttgataaacgcatgcaggttgtagttgag

SEQ ID NO: 96267 - DNA, 33 bp, Homo sapien
agacttcttgtttaaaagatttatggtgtttca

SEQ ID NO: 96268 - DNA, 33 bp, Homo sapien
agacttcttgtttaaaggatttatggtgtttca

SEQ ID NO: 96269 - DNA, 33 bp, Homo sapien
aatagggtactaacagaagaatagtgttgctgt

SEQ ID NO: 96270 - DNA, 33 bp, Homo sapien
aatagggtactaacaggagaatagtgttgctgt

SEQ ID NO: 96271 - DNA, 33 bp, Homo sapien
gcaagccagttgctaaactaattacgcctccag

SEQ ID NO: 96272 - DNA, 33 bp, Homo sapien
gcaagccagttgctaagctaattacgcctccag

SEQ ID NO: 96273 - DNA, 33 bp, Homo sapien
atgccttccttatctacggtcatgttttctttc

SEQ ID NO: 96274 - DNA, 33 bp, Homo sapien
atgccttccttatctatggtcatgttttctttc

SEQ ID NO: 96275 - DNA, 33 bp, Homo sapien
gaggacctgacagaacactgatagtatctgcaa

SEQ ID NO: 96276 - DNA, 33 bp, Homo sapien
gaggacctgacagaacgctgatagtatctgcaa

SEQ ID NO: 96277 - DNA, 33 bp, Homo sapien
ggctgtcaggataggaaactgttgtattcaaaa

SEQ ID NO: 96278 - DNA, 33 bp, Homo sapien
ggctgtcaggataggagactgttgtattcaaaa

SEQ ID NO: 96279 - DNA, 33 bp, Homo sapien
ttattaacatttctaaaggagttgaggattatg

SEQ ID NO: 96280 - DNA, 33 bp, Homo sapien
ttattaacatttctaagggagttgaggattatg

SEQ ID NO: 96281 - DNA, 33 bp, Homo sapien
ataatttatccaaagccgctaaaaagaggagaa

SEQ ID NO: 96282 - DNA, 33 bp, Homo sapien
ataatttatccaaagctgctaaaaagaggagaa

SEQ ID NO: 96283 - DNA, 33 bp, Homo sapien
aggtctaagcagacaccgtaaggagatattcta

SEQ ID NO: 96284 - DNA, 33 bp, Homo sapien
aggtctaagcagacactgtaaggagatattcta

SEQ ID NO: 96285 - DNA, 33 bp, Homo sapien
gggggaaaaaaactcacgtggttgccaacactc

SEQ ID NO: 96286 - DNA, 33 bp, Homo sapien
gggggaaaaaaactcatgtggttgccaacactc

SEQ ID NO: 96287 - DNA, 33 bp, Homo sapien
aactgtgaaagttagaagatatgtgtaaaatgc

SEQ ID NO: 96288 - DNA, 33 bp, Homo sapien
aactgtgaaagttagaggatatgtgtaaaatgc

SEQ ID NO: 96289 - DNA, 33 bp, Homo sapien
atctcattcttaaaacactttgctaaatataag

SEQ ID NO: 96290 - DNA, 33 bp, Homo sapien
atctcattcttaaaactctttgctaaatataag

SEQ ID NO: 96291 - DNA, 33 bp, Homo sapien
gcatcccatcacaggtaacaagtttgacttttc

SEQ ID NO: 96292 - DNA, 33 bp, Homo sapien
gcatcccatcacaggtgacaagtttgacttttc

SEQ ID NO: 96293 - DNA, 33 bp, Homo sapien
tgcttttataagtggaaacctctttcacttggt

SEQ ID NO: 96294 - DNA, 33 bp, Homo sapien
tgcttttataagtggatacctctttcacttggt

SEQ ID NO: 96295 - DNA, 33 bp, Homo sapien
tggtacctgtgtttaaatcaggaccagttttat

SEQ ID NO: 96296 - DNA, 33 bp, Homo sapien
tggtacctgtgtttaagtcaggaccagttttat

SEQ ID NO: 96297 - DNA, 33 bp, Homo sapien
tagcggtcgtaatatccaggaagagaaaggatg

SEQ ID NO: 96298 - DNA, 33 bp, Homo sapien
tagcggtcgtaatatctaggaagagaaaggatg

SEQ ID NO: 96299 - DNA, 33 bp, Homo sapien
tttgtggctgaaagcactctaatggttctaagc

SEQ ID NO: 96300 - DNA, 33 bp, Homo sapien
tttgtggctgaaagcagtctaatggttctaagc

SEQ ID NO: 96301 - DNA, 33 bp, Homo sapien
ggtattgtctgagaacaggaaaaaattagaata

SEQ ID NO: 96302 - DNA, 33 bp, Homo sapien
ggtattgtctgagaacgggaaaaaattagaata

SEQ ID NO: 96303 - DNA, 33 bp, Homo sapien
aggatttagaggaagaataactagctgagaatg

SEQ ID NO: 96304 - DNA, 33 bp, Homo sapien
aggatttagaggaagactaactagctgagaatg

SEQ ID NO: 96305 - DNA, 33 bp, Homo sapien
cccttagcctgtgacagcttagattataattct

SEQ ID NO: 96306 - DNA, 33 bp, Homo sapien
cccttagcctgtgacatcttagattataattct

SEQ ID NO: 96307 - DNA, 33 bp, Homo sapien
tttgtttcaagtctcaagtcaaaattcttcttc

SEQ ID NO: 96308 - DNA, 33 bp, Homo sapien
tttgtttcaagtctcaggtcaaaattcttcttc

SEQ ID NO: 96309 - DNA, 33 bp, Homo sapien
caaggtcatggtattaaaatttgcaaagtatta

SEQ ID NO: 96310 - DNA, 33 bp, Homo sapien
caaggtcatggtattacaatttgcaaagtatta

SEQ ID NO: 96311 - DNA, 33 bp, Homo sapien
tgcaagaagctcaagtcacatatggaggttcct

SEQ ID NO: 96312 - DNA, 33 bp, Homo sapien
tgcaagaagctcaagttacatatggaggttcct

SEQ ID NO: 96313 - DNA, 33 bp, Homo sapien
acattatgctaagtgaactaagctaggcacaga

SEQ ID NO: 96314 - DNA, 33 bp, Homo sapien
acattatgctaagtgacctaagctaggcacaga

SEQ ID NO: 96315 - DNA, 33 bp, Homo sapien
aattctcttttccttacaacattgcttgccatg

SEQ ID NO: 96316 - DNA, 33 bp, Homo sapien
aattctcttttccttataacattgcttgccatg

SEQ ID NO: 96317 - DNA, 33 bp, Homo sapien
aaacatgatatgagacaccctctagtcctcctt

SEQ ID NO: 96318 - DNA, 33 bp, Homo sapien
aaacatgatatgagacgccctctagtcctcctt

SEQ ID NO: 96319 - DNA, 33 bp, Homo sapien
caagttatgttcaaaagaataatgtctatttaa

SEQ ID NO: 96320 - DNA, 33 bp, Homo sapien
caagttatgttcaaaataataatgtctatttaa

SEQ ID NO: 96321 - DNA, 33 bp, Homo sapien
ttgcagatatttgtgaagaagaagtgatatggt

SEQ ID NO: 96322 - DNA, 33 bp, Homo sapien
ttgcagatatttgtgacgaagaagtgatatggt

SEQ ID NO: 96323 - DNA, 33 bp, Homo sapien
tgtcactttcatctctcaatattctcttataca

SEQ ID NO: 96324 - DNA, 33 bp, Homo sapien
tgtcactttcatctctgaatattctcttataca

SEQ ID NO: 96325 - DNA, 33 bp, Homo sapien
taccatggtcttcccaaaaaggcttcattcaaa

SEQ ID NO: 96326 - DNA, 33 bp, Homo sapien
taccatggtcttcccagaaaggcttcattcaaa

SEQ ID NO: 96327 - DNA, 33 bp, Homo sapien
agagaaaaatggaaacactggcttgctagacta

SEQ ID NO: 96328 - DNA, 33 bp, Homo sapien
agagaaaaatggaaacgctggcttgctagacta

SEQ ID NO: 96329 - DNA, 33 bp, Homo sapien
ttaaaaggtggtttaacaatcattctgtacttc

SEQ ID NO: 96330 - DNA, 33 bp, Homo sapien
ttaaaaggtggtttaataatcattctgtacttc

SEQ ID NO: 96331 - DNA, 33 bp, Homo sapien
cttagaagacatctcaatcccttactagaggat

SEQ ID NO: 96332 - DNA, 33 bp, Homo sapien
cttagaagacatctcagtcccttactagaggat

SEQ ID NO: 96333 - DNA, 33 bp, Homo sapien
ttcctctaagcaaataccgttagtctatttacc

SEQ ID NO: 96334 - DNA, 33 bp, Homo sapien
ttcctctaagcaaatatcgttagtctatttacc

SEQ ID NO: 96335 - DNA, 33 bp, Homo sapien
tcaattatagaagcagcttattgaaatgaaggt

SEQ ID NO: 96336 - DNA, 33 bp, Homo sapien
tcaattatagaagcaggttattgaaatgaaggt

SEQ ID NO: 96337 - DNA, 33 bp, Homo sapien
taaagatttcccccccacaacatactgaagtga

SEQ ID NO: 96338 - DNA, 33 bp, Homo sapien
taaagatttcccccccgcaacatactgaagtga

SEQ ID NO: 96339 - DNA, 33 bp, Homo sapien
aagtgatcactttcaactcaagaatgacttata

SEQ ID NO: 96340 - DNA, 33 bp, Homo sapien
aagtgatcactttcaattcaagaatgacttata

SEQ ID NO: 96341 - DNA, 33 bp, Homo sapien
ggatggaaaatcactaagaggaaacatcagagg

SEQ ID NO: 96342 - DNA, 33 bp, Homo sapien
ggatggaaaatcactacgaggaaacatcagagg

SEQ ID NO: 96343 - DNA, 33 bp, Homo sapien
tttcaaaattctgaaacgcaaaggaggaaaact

SEQ ID NO: 96344 - DNA, 33 bp, Homo sapien
tttcaaaattctgaaatgcaaaggaggaaaact

SEQ ID NO: 96345 - DNA, 33 bp, Homo sapien
ctgccctcactcctaactcagttgcctttaagc

SEQ ID NO: 96346 - DNA, 33 bp, Homo sapien
ctgccctcactcctaattcagttgcctttaagc

SEQ ID NO: 96347 - DNA, 33 bp, Homo sapien
aatgtgcacttatatgcatttacaggtccttag

SEQ ID NO: 96348 - DNA, 33 bp, Homo sapien
aatgtgcacttatatggatttacaggtccttag

SEQ ID NO: 96349 - DNA, 33 bp, Homo sapien
atgtgtggtttctgcaacactttagttatctac

SEQ ID NO: 96350 - DNA, 33 bp, Homo sapien
atgtgtggtttctgcatcactttagttatctac

SEQ ID NO: 96351 - DNA, 33 bp, Homo sapien
tcacggagacagtcaactgaaaacaagaacttg

SEQ ID NO: 96352 - DNA, 33 bp, Homo sapien
tcacggagacagtcaagtgaaaacaagaacttg

SEQ ID NO: 96353 - DNA, 33 bp, Homo sapien
agaccattatatgcaccctgtatgcctctgcat

SEQ ID NO: 96354 - DNA, 33 bp, Homo sapien
agaccattatatgcactctgtatgcctctgcat

SEQ ID NO: 96355 - DNA, 33 bp, Homo sapien
ttaattctcaccacaacgttattatgtagaact

SEQ ID NO: 96356 - DNA, 33 bp, Homo sapien
ttaattctcaccacaatgttattatgtagaact

SEQ ID NO: 96357 - DNA, 33 bp, Homo sapien
aagaaaaattttagaaccttggatcaggtagca

SEQ ID NO: 96358 - DNA, 33 bp, Homo sapien
aagaaaaattttagaagcttggatcaggtagca

SEQ ID NO: 96359 - DNA, 33 bp, Homo sapien
gtctgccacccatgaacgatgatcacttctcca

SEQ ID NO: 96360 - DNA, 33 bp, Homo sapien
gtctgccacccatgaatgatgatcacttctcca

SEQ ID NO: 96361 - DNA, 33 bp, Homo sapien
caatttggcatttgatcaccaggtcttcactcc

SEQ ID NO: 96362 - DNA, 33 bp, Homo sapien
caatttggcatttgattaccaggtcttcactcc

SEQ ID NO: 96363 - DNA, 33 bp, Homo sapien
tgggaacttccagtaacgaacaatcaagtcatt

SEQ ID NO: 96364 - DNA, 33 bp, Homo sapien
tgggaacttccagtaatgaacaatcaagtcatt

SEQ ID NO: 96365 - DNA, 33 bp, Homo sapien
tgagagctgagaaacactcaacagaagagcatg

SEQ ID NO: 96366 - DNA, 33 bp, Homo sapien
tgagagctgagaaacattcaacagaagagcatg

SEQ ID NO: 96367 - DNA, 33 bp, Homo sapien
gcaaggcaaaatgaaacgaataaacctaactgt

SEQ ID NO: 96368 - DNA, 33 bp, Homo sapien
gcaaggcaaaatgaaatgaataaacctaactgt

SEQ ID NO: 96369 - DNA, 33 bp, Homo sapien
ttcaaactggattgacacaaagtattccacatg

SEQ ID NO: 96370 - DNA, 33 bp, Homo sapien
ttcaaactggattgacgcaaagtattccacatg

SEQ ID NO: 96371 - DNA, 33 bp, Homo sapien
gttcactgagatattcacttgtggaggcttaaa

SEQ ID NO: 96372 - DNA, 33 bp, Homo sapien
gttcactgagatattcgcttgtggaggcttaaa

SEQ ID NO: 96373 - DNA, 33 bp, Homo sapien
gaatgtggcaagatagacatgctattaaaaata

SEQ ID NO: 96374 - DNA, 33 bp, Homo sapien
gaatgtggcaagatagtcatgctattaaaaata

SEQ ID NO: 96375 - DNA, 33 bp, Homo sapien
attacccgcaaagatgaatttcatcctgagaaa

SEQ ID NO: 96376 - DNA, 33 bp, Homo sapien
attacccgcaaagatgcatttcatcctgagaaa

SEQ ID NO: 96377 - DNA, 33 bp, Homo sapien
atgcctattgaaacatgaatctcacccggaatc

SEQ ID NO: 96378 - DNA, 33 bp, Homo sapien
atgcctattgaaacattaatctcacccggaatc

SEQ ID NO: 96379 - DNA, 33 bp, Homo sapien
taaataagatagacttcaagaaaacacataagc

SEQ ID NO: 96380 - DNA, 33 bp, Homo sapien
taaataagatagacttgaagaaaacacataagc

SEQ ID NO: 96381 - DNA, 33 bp, Homo sapien
gaatttcgttccaaaccgtggaaagcccagagc

SEQ ID NO: 96382 - DNA, 33 bp, Homo sapien
gaatttcgttccaaactgtggaaagcccagagc

SEQ ID NO: 96383 - DNA, 33 bp, Homo sapien
agagatatatgcacacactagaatattactagg

SEQ ID NO: 96384 - DNA, 33 bp, Homo sapien
agagatatatgcacacgctagaatattactagg

SEQ ID NO: 96385 - DNA, 33 bp, Homo sapien
attcaactgtggcttacgaatttgattaactaa

SEQ ID NO: 96386 - DNA, 33 bp, Homo sapien
attcaactgtggcttatgaatttgattaactaa

SEQ ID NO: 96387 - DNA, 33 bp, Homo sapien
ccacataatggaatacaccatctctagtaaata

SEQ ID NO: 96388 - DNA, 33 bp, Homo sapien
ccacataatggaatactccatctctagtaaata

SEQ ID NO: 96389 - DNA, 33 bp, Homo sapien
atgtgcatgggactcacccaatcactggaaggc

SEQ ID NO: 96390 - DNA, 33 bp, Homo sapien
atgtgcatgggactcatccaatcactggaaggc

SEQ ID NO: 96391 - DNA, 33 bp, Homo sapien
aaaattaaccatcgcaataaccaaacagagctt

SEQ ID NO: 96392 - DNA, 33 bp, Homo sapien
aaaattaaccatcgcagtaaccaaacagagctt

SEQ ID NO: 96393 - DNA, 33 bp, Homo sapien
atggtactttagaatcacattaacatggccaga

SEQ ID NO: 96394 - DNA, 33 bp, Homo sapien
atggtactttagaatcgcattaacatggccaga

SEQ ID NO: 96395 - DNA, 33 bp, Homo sapien
attctgttgactagaacttactcatacagccat

SEQ ID NO: 96396 - DNA, 33 bp, Homo sapien
attctgttgactagaagttactcatacagccat

SEQ ID NO: 96397 - DNA, 33 bp, Homo sapien
tccatgttgtttgcacagtattctcttggatga

SEQ ID NO: 96398 - DNA, 33 bp, Homo sapien
tccatgttgtttgcacggtattctcttggatga

SEQ ID NO: 96399 - DNA, 33 bp, Homo sapien
aagggtattaagtgccactctctgttgaactgt

SEQ ID NO: 96400 - DNA, 33 bp, Homo sapien
aagggtattaagtgccgctctctgttgaactgt

SEQ ID NO: 96401 - DNA, 33 bp, Homo sapien
ggactagagtttaacacagcaatctaggccaga

SEQ ID NO: 96402 - DNA, 33 bp, Homo sapien
ggactagagtttaacatagcaatctaggccaga

SEQ ID NO: 96403 - DNA, 33 bp, Homo sapien; identical to SEQ ID NO: 96401

SEQ ID NO: 96404 - DNA, 33 bp, Homo sapien; identical to SEQ ID NO: 96402

SEQ ID NO: 96405 - DNA, 33 bp, Homo sapien
tgacttggctattgaaagttatggtcatttatg

SEQ ID NO: 96406 - DNA, 33 bp, Homo sapien
tgacttggctattgaaggttatggtcatttatg

SEQ ID NO: 96407 - DNA, 33 bp, Homo sapien
atggagatgcctcaaaagccatgaggaggaaga

SEQ ID NO: 96408 - DNA, 33 bp, Homo sapien
atggagatgcctcaaaggccatgaggaggaaga

SEQ ID NO: 96409 - DNA, 33 bp, Homo sapien
ttccgagcaaggattgcaaagaaccttgaatat

SEQ ID NO: 96410 - DNA, 33 bp, Homo sapien
ttccgagcaaggattgtaaagaaccttgaatat

SEQ ID NO: 96411 - DNA, 33 bp, Homo sapien
taggtagaagggttgaataattgtagatgaagt

SEQ ID NO: 96412 - DNA, 33 bp, Homo sapien
taggtagaagggttgagtaattgtagatgaagt

SEQ ID NO: 96413 - DNA, 33 bp, Homo sapien
tctggaaataacaacacctagtgtcaccagaga

SEQ ID NO: 96414 - DNA, 33 bp, Homo sapien
tctggaaataacaacatctagtgtcaccagaga

SEQ ID NO: 96415 - DNA, 33 bp, Homo sapien
taagagcatatactccaagcttagtggtggctg

SEQ ID NO: 96416 - DNA, 33 bp, Homo sapien
taagagcatatactccgagcttagtggtggctg

SEQ ID NO: 96417 - DNA, 33 bp, Homo sapien
tcagcaacctacacaaaaagaaatgttcaaaca

SEQ ID NO: 96418 - DNA, 33 bp, Homo sapien
tcagcaacctacacaataagaaatgttcaaaca

SEQ ID NO: 96419 - DNA, 33 bp, Homo sapien
ccttaaaacttctccaacacacagagaataatt

SEQ ID NO: 96420 - DNA, 33 bp, Homo sapien
ccttaaaacttctccatcacacagagaataatt

SEQ ID NO: 96421 - DNA, 33 bp, Homo sapien
tgacttcatccgagcaagtttgtcacctcacgc

SEQ ID NO: 96422 - DNA, 33 bp, Homo sapien
tgacttcatccgagcaggtttgtcacctcacgc

SEQ ID NO: 96423 - DNA, 33 bp, Homo sapien
catattatttaactgcagaatggaatgatgtgt

SEQ ID NO: 96424 - DNA, 33 bp, Homo sapien
catattatttaactgcggaatggaatgatgtgt

SEQ ID NO: 96425 - DNA, 33 bp, Homo sapien
gctgattcaacatttgaaccgttaccctccaag

SEQ ID NO: 96426 - DNA, 33 bp, Homo sapien
gctgattcaacatttgtaccgttaccctccaag

SEQ ID NO: 96427 - DNA, 33 bp, Homo sapien
gaattacatatgccataaccaattaagattcat

SEQ ID NO: 96428 - DNA, 33 bp, Homo sapien
gaattacatatgccatgaccaattaagattcat

SEQ ID NO: 96429 - DNA, 33 bp, Homo sapien
tgaatgacagcaatgacgcaagggatgggaagg

SEQ ID NO: 96430 - DNA, 33 bp, Homo sapien
tgaatgacagcaatgatgcaagggatgggaagg

SEQ ID NO: 96431 - DNA, 33 bp, Homo sapien
tggaaattgcgcagtaaaaatcatgtgaatatc

SEQ ID NO: 96432 - DNA, 33 bp, Homo sapien
tggaaattgcgcagtagaaatcatgtgaatatc

SEQ ID NO: 96433 - DNA, 33 bp, Homo sapien
taaatatatacagtgacgttatttgactattat

SEQ ID NO: 96434 - DNA, 33 bp, Homo sapien
taaatatatacagtgatgttatttgactattat

SEQ ID NO: 96435 - DNA, 33 bp, Homo sapien
cataaaaaccatatgccgagcagtgacaggaag

SEQ ID NO: 96436 - DNA, 33 bp, Homo sapien
cataaaaaccatatgctgagcagtgacaggaag

SEQ ID NO: 96437 - DNA, 33 bp, Homo sapien
atatgatacagctcaactctacagtcagaggat

SEQ ID NO: 96438 - DNA, 33 bp, Homo sapien
atatgatacagctcaattctacagtcagaggat

SEQ ID NO: 96439 - DNA, 33 bp, Homo sapien
ctgcgcccataggagccgggaccatttctggct

SEQ ID NO: 96440 - DNA, 33 bp, Homo sapien
ctgcgcccataggagctgggaccatttctggct

SEQ ID NO: 96441 - DNA, 33 bp, Homo sapien
aaatataaaattcaaaatactaagcattcaata

SEQ ID NO: 96442 - DNA, 33 bp, Homo sapien
aaatataaaattcaaagtactaagcattcaata

SEQ ID NO: 96443 - DNA, 33 bp, Homo sapien
aacataagccacagacaaatgtaaccacttctg

SEQ ID NO: 96444 - DNA, 33 bp, Homo sapien
aacataagccacagacgaatgtaaccacttctg

SEQ ID NO: 96445 - DNA, 33 bp, Homo sapien
aaacagttgtaatctcaatggacattcaggaca

SEQ ID NO: 96446 - DNA, 33 bp, Homo sapien
aaacagttgtaatctcgatggacattcaggaca

SEQ ID NO: 96447 - DNA, 33 bp, Homo sapien
ttcatggtttcacatcactcattacagtctgtc

SEQ ID NO: 96448 - DNA, 33 bp, Homo sapien
ttcatggtttcacatcgctcattacagtctgtc

SEQ ID NO: 96449 - DNA, 33 bp, Homo sapien
actttttggtgttcacagaatacaactttaaac

SEQ ID NO: 96450 - DNA, 33 bp, Homo sapien
actttttggtgttcacggaatacaactttaaac

SEQ ID NO: 96451 - DNA, 33 bp, Homo sapien
aattgtcagcttcagacggttcacaggctccag

SEQ ID NO: 96452 - DNA, 33 bp, Homo sapien
aattgtcagcttcagatggttcacaggctccag

SEQ ID NO: 96453 - DNA, 33 bp, Homo sapien
acctcttatgtcatgccagaggattttgctttg

SEQ ID NO: 96454 - DNA, 33 bp, Homo sapien
acctcttatgtcatgctagaggattttgctttg

SEQ ID NO: 96455 - DNA, 33 bp, Homo sapien
atacatgggacactgaaaacataaaagcaaaat

SEQ ID NO: 96456 - DNA, 33 bp, Homo sapien
atacatgggacactgacaacataaaagcaaaat

SEQ ID NO: 96457 - DNA, 33 bp, Homo sapien
tgaggataatattaaaaatggaacatttctcac

SEQ ID NO: 96458 - DNA, 33 bp, Homo sapien
tgaggataatattaaacatggaacatttctcac

SEQ ID NO: 96459 - DNA, 33 bp, Homo sapien
ttataatactaccatcactacaggtagctttag

SEQ ID NO: 96460 - DNA, 33 bp, Homo sapien
ttataatactaccatcgctacaggtagctttag

SEQ ID NO: 96461 - DNA, 33 bp, Homo sapien
taaggtgggtattgaacaaatggagaaaagctg

SEQ ID NO: 96462 - DNA, 33 bp, Homo sapien
taaggtgggtattgaataaatggagaaaagctg

SEQ ID NO: 96463 - DNA, 33 bp, Homo sapien
acctaaaagccatccacagtgaataaggtgggt

SEQ ID NO: 96464 - DNA, 33 bp, Homo sapien
acctaaaagccatccagagtgaataaggtgggt

SEQ ID NO: 96465 - DNA, 33 bp, Homo sapien
tcccaggactgggtaagtgtgactcagtacttg

SEQ ID NO: 96466 - DNA, 33 bp, Homo sapien
tcccaggactgggtaattgtgactcagtacttg

SEQ ID NO: 96467 - DNA, 33 bp, Homo sapien
aaagttaatccacttaggactaaacctttccca

SEQ ID NO: 96468 - DNA, 33 bp, Homo sapien
aaagttaatccacttatgactaaacctttccca

SEQ ID NO: 96469 - DNA, 33 bp, Homo sapien
atctgcaagcatagacaagatcaaggagtattc

SEQ ID NO: 96470 - DNA, 33 bp, Homo sapien
atctgcaagcatagaccagatcaaggagtattc

SEQ ID NO: 96471 - DNA, 33 bp, Homo sapien
agggaggagccctcacacataacctaatcacct

SEQ ID NO: 96472 - DNA, 33 bp, Homo sapien
agggaggagccctcacgcataacctaatcacct

SEQ ID NO: 96473 - DNA, 33 bp, Homo sapien
tcctgactgtaattccagcccttgtaacagagg

SEQ ID NO: 96474 - DNA, 33 bp, Homo sapien
tcctgactgtaattccggcccttgtaacagagg

SEQ ID NO: 96475 - DNA, 33 bp, Homo sapien
tgacacatagaatcaaccatcacaaataccaag

SEQ ID NO: 96476 - DNA, 33 bp, Homo sapien
tgacacatagaatcaagcatcacaaataccaag

SEQ ID NO: 96477 - DNA, 33 bp, Homo sapien
aaaacagaatcattaacccagggagtatagaga

SEQ ID NO: 96478 - DNA, 33 bp, Homo sapien
aaaacagaatcattaatccagggagtatagaga

SEQ ID NO: 96479 - DNA, 33 bp, Homo sapien
gagaacttgctgaatacggattggactatttct

SEQ ID NO: 96480 - DNA, 33 bp, Homo sapien
gagaacttgctgaatagggattggactatttct

SEQ ID NO: 96481 - DNA, 33 bp, Homo sapien
ccaaaaagcgaatccactgaaataaaagtgtaa

SEQ ID NO: 96482 - DNA, 33 bp, Homo sapien
ccaaaaagcgaatccattgaaataaaagtgtaa

SEQ ID NO: 96483 - DNA, 33 bp, Homo sapien
tcgttaagcttcagaacgccagaattgagagca

SEQ ID NO: 96484 - DNA, 33 bp, Homo sapien
tcgttaagcttcagaatgccagaattgagagca

SEQ ID NO: 96485 - DNA, 33 bp, Homo sapien
tgtcctaagccattagaatgcaaccttgacacg

SEQ ID NO: 96486 - DNA, 33 bp, Homo sapien
tgtcctaagccattaggatgcaaccttgacacg

SEQ ID NO: 96487 - DNA, 33 bp, Homo sapien
agacactggacttcgacagtggggcacatgacc

SEQ ID NO: 96488 - DNA, 33 bp, Homo sapien
agacactggacttcgagagtggggcacatgacc

SEQ ID NO: 96489 - DNA, 33 bp, Homo sapien
aaagattagaaaccaccgcttttgaatatgttt

SEQ ID NO: 96490 - DNA, 33 bp, Homo sapien
aaagattagaaaccactgcttttgaatatgttt

SEQ ID NO: 96491 - DNA, 33 bp, Homo sapien
atacatactactcttcaatgaatattttatatt

SEQ ID NO: 96492 - DNA, 33 bp, Homo sapien
atacatactactcttccatgaatattttatatt

SEQ ID NO: 96493 - DNA, 33 bp, Homo sapien
taaatatctaagattccacattcactaagagaa

SEQ ID NO: 96494 - DNA, 33 bp, Homo sapien
taaatatctaagattctacattcactaagagaa

SEQ ID NO: 96495 - DNA, 33 bp, Homo sapien
ttcattcgagaggagacacaatttttttccgag

SEQ ID NO: 96496 - DNA, 33 bp, Homo sapien
ttcattcgagaggagatacaatttttttccgag

SEQ ID NO: 96497 - DNA, 33 bp, Homo sapien
gaggcccatatcagaaacaaatgctgacaccat

SEQ ID NO: 96498 - DNA, 33 bp, Homo sapien
gaggcccatatcagaagcaaatgctgacaccat

SEQ ID NO: 96499 - DNA, 33 bp, Homo sapien
attctgtccaatgagaagtttcatagtatgtgc

SEQ ID NO: 96500 - DNA, 33 bp, Homo sapien
attctgtccaatgagatgtttcatagtatgtgc

SEQ ID NO: 96501 - DNA, 33 bp, Homo sapien
aaaagtctattgcagacctactatgtgcccagc

SEQ ID NO: 96502 - DNA, 33 bp, Homo sapien
aaaagtctattgcagagctactatgtgcccagc

SEQ ID NO: 96503 - DNA, 33 bp, Homo sapien
taatgtaatatggatacgttcactattcattct

SEQ ID NO: 96504 - DNA, 33 bp, Homo sapien
taatgtaatatggatatgttcactattcattct

SEQ ID NO: 96505 - DNA, 33 bp, Homo sapien
ttgccagggacatactcaattaagcttcaaata

SEQ ID NO: 96506 - DNA, 33 bp, Homo sapien
ttgccagggacatactgaattaagcttcaaata

SEQ ID NO: 96507 - DNA, 33 bp, Homo sapien
gtagtcttaggccatggaacagttcgaaaccag

SEQ ID NO: 96508 - DNA, 33 bp, Homo sapien
gtagtcttaggccatgtaacagttcgaaaccag

SEQ ID NO: 96509 - DNA, 33 bp, Homo sapien
agcactaggccagttacatgttgaacaaaataa

SEQ ID NO: 96510 - DNA, 33 bp, Homo sapien
agcactaggccagttagatgttgaacaaaataa

SEQ ID NO: 96511 - DNA, 33 bp, Homo sapien
tcactttgtttccgcaaaagtcaggactagaga

SEQ ID NO: 96512 - DNA, 33 bp, Homo sapien
tcactttgtttccgcagaagtcaggactagaga

SEQ ID NO: 96513 - DNA, 33 bp, Homo sapien
cagctcattcgattccagctttgtacctatata

SEQ ID NO: 96514 - DNA, 33 bp, Homo sapien
cagctcattcgattccggctttgtacctatata

SEQ ID NO: 96515 - DNA, 33 bp, Homo sapien
aggaggctgttctgtacacccaggtcaggaggc

SEQ ID NO: 96516 - DNA, 33 bp, Homo sapien
aggaggctgttctgtatacccaggtcaggaggc

SEQ ID NO: 96517 - DNA, 33 bp, Homo sapien
cctgcaagtcttagaccctttgctctaactgca

SEQ ID NO: 96518 - DNA, 33 bp, Homo sapien
cctgcaagtcttagactctttgctctaactgca

SEQ ID NO: 96519 - DNA, 33 bp, Homo sapien
agaaaatcaggcaaaagataccaaacaggtaat

SEQ ID NO: 96520 - DNA, 33 bp, Homo sapien
agaaaatcaggcaaaatataccaaacaggtaat

SEQ ID NO: 96521 - DNA, 33 bp, Homo sapien
acagcaaacacaccaacagaaaatcaggcaaaa

SEQ ID NO: 96522 - DNA, 33 bp, Homo sapien
acagcaaacacaccaatagaaaatcaggcaaaa

SEQ ID NO: 96523 - DNA, 33 bp, Homo sapien
aggtgatttttatcccccagagaaaatttgact

SEQ ID NO: 96524 - DNA, 33 bp, Homo sapien
aggtgatttttatccctcagagaaaatttgact

SEQ ID NO: 96525 - DNA, 33 bp, Homo sapien
aaaatgcctccagacacagtcaaattttctctg

SEQ ID NO: 96526 - DNA, 33 bp, Homo sapien
aaaatgcctccagacatagtcaaattttctctg

SEQ ID NO: 96527 - DNA, 33 bp, Homo sapien
aaaaatctctttgtacaggtcagcatggtgtgg

SEQ ID NO: 96528 - DNA, 33 bp, Homo sapien
aaaaatctctttgtaccggtcagcatggtgtgg

SEQ ID NO: 96529 - DNA, 33 bp, Homo sapien
gagaagccattttaccagagcctatttgataaa

SEQ ID NO: 96530 - DNA, 33 bp, Homo sapien
gagaagccattttacctgagcctatttgataaa

SEQ ID NO: 96531 - DNA, 33 bp, Homo sapien
ccctggagtcaggccaccgagctgctggactct

SEQ ID NO: 96532 - DNA, 33 bp, Homo sapien
ccctggagtcaggccatcgagctgctggactct

SEQ ID NO: 96533 - DNA, 33 bp, Homo sapien
cacatgggtttatatgcagaagaattttacttt

SEQ ID NO: 96534 - DNA, 33 bp, Homo sapien
cacatgggtttatatggagaagaattttacttt

SEQ ID NO: 96535 - DNA, 33 bp, Homo sapien
taaagtatgattctggaagcaaagtagaccaac

SEQ ID NO: 96536 - DNA, 33 bp, Homo sapien
taaagtatgattctggcagcaaagtagaccaac

SEQ ID NO: 96537 - DNA, 33 bp, Homo sapien
ggctggtgtgactcagaaatttttaattcgata

SEQ ID NO: 96538 - DNA, 33 bp, Homo sapien
ggctggtgtgactcaggaatttttaattcgata

SEQ ID NO: 96539 - DNA, 33 bp, Homo sapien
ttaatagatgccatacaggatagcatagacaca

SEQ ID NO: 96540 - DNA, 33 bp, Homo sapien
ttaatagatgccatacgggatagcatagacaca

SEQ ID NO: 96541 - DNA, 33 bp, Homo sapien
agcccctcaaagatccagaacgtgcttcccatc

SEQ ID NO: 96542 - DNA, 33 bp, Homo sapien
agcccctcaaagatcccgaacgtgcttcccatc

SEQ ID NO: 96543 - DNA, 33 bp, Homo sapien
agccaccaaggacctaggaaaatgtcaaggcag

SEQ ID NO: 96544 - DNA, 33 bp, Homo sapien
agccaccaaggacctatgaaaatgtcaaggcag

SEQ ID NO: 96545 - DNA, 33 bp, Homo sapien
gaagcaaacctcaaacgagtctacctggctcag

SEQ ID NO: 96546 - DNA, 33 bp, Homo sapien
gaagcaaacctcaaactagtctacctggctcag

SEQ ID NO: 96547 - DNA, 33 bp, Homo sapien
cctgtcatgagcgccaaagaggattaacgtcat

SEQ ID NO: 96548 - DNA, 33 bp, Homo sapien
cctgtcatgagcgccagagaggattaacgtcat

SEQ ID NO: 96549 - DNA, 33 bp, Homo sapien
aaaacaggaccaaaaacagatgaaattacttcg

SEQ ID NO: 96550 - DNA, 33 bp, Homo sapien
aaaacaggaccaaaaatagatgaaattacttcg

SEQ ID NO: 96551 - DNA, 33 bp, Homo sapien
cattgaccttcttttacggtaaaatgagatccc

SEQ ID NO: 96552 - DNA, 33 bp, Homo sapien
cattgaccttcttttatggtaaaatgagatccc

SEQ ID NO: 96553 - DNA, 33 bp, Homo sapien
tccttctttacgactgcaaaaattgccttttta

SEQ ID NO: 96554 - DNA, 33 bp, Homo sapien
tccttctttacgactggaaaaattgccttttta

SEQ ID NO: 96555 - DNA, 33 bp, Homo sapien
cacacacacctcacacaatgtatatagcttgca

SEQ ID NO: 96556 - DNA, 33 bp, Homo sapien
cacacacacctcacaccatgtatatagcttgca

SEQ ID NO: 96557 - DNA, 33 bp, Homo sapien
ccatgtggctttgcagaaatgcccctctgaaga

SEQ ID NO: 96558 - DNA, 33 bp, Homo sapien
ccatgtggctttgcaggaatgcccctctgaaga

SEQ ID NO: 96559 - DNA, 33 bp, Homo sapien
gtactgttattgtaaacagatgtactgaattga

SEQ ID NO: 96560 - DNA, 33 bp, Homo sapien
gtactgttattgtaaatagatgtactgaattga

SEQ ID NO: 96561 - DNA, 33 bp, Homo sapien
atgggtaaggctttcaacatcctagctctacag

SEQ ID NO: 96562 - DNA, 33 bp, Homo sapien
atgggtaaggctttcagcatcctagctctacag

SEQ ID NO: 96563 - DNA, 33 bp, Homo sapien
ttttcttctcagtcctcacccttaccagctgag

SEQ ID NO: 96564 - DNA, 33 bp, Homo sapien
ttttcttctcagtcctgacccttaccagctgag

SEQ ID NO: 96565 - DNA, 33 bp, Homo sapien
cagcatacaactttgccagttttaacgtacaat

SEQ ID NO: 96566 - DNA, 33 bp, Homo sapien
cagcatacaactttgctagttttaacgtacaat

SEQ ID NO: 96567 - DNA, 33 bp, Homo sapien
tatgggctacggacacaaatagaaaattctcaa

SEQ ID NO: 96568 - DNA, 33 bp, Homo sapien
tatgggctacggacacgaatagaaaattctcaa

SEQ ID NO: 96569 - DNA, 33 bp, Homo sapien
agtggcacctccagtcacacctgaaactgaaca

SEQ ID NO: 96570 - DNA, 33 bp, Homo sapien
agtggcacctccagtcgcacctgaaactgaaca

SEQ ID NO: 96571 - DNA, 33 bp, Homo sapien
ttttctagtggctcttcaactacatcaacactg

SEQ ID NO: 96572 - DNA, 33 bp, Homo sapien
ttttctagtggctcttgaactacatcaacactg

SEQ ID NO: 96573 - DNA, 33 bp, Homo sapien
acaactttgagtgcacagctaaaatctccagtt

SEQ ID NO: 96574 - DNA, 33 bp, Homo sapien
acaactttgagtgcacggctaaaatctccagtt

SEQ ID NO: 96575 - DNA, 33 bp, Homo sapien
gtagtacaaggtgttacctatagattctccctg

SEQ ID NO: 96576 - DNA, 33 bp, Homo sapien
gtagtacaaggtgttatctatagattctccctg

SEQ ID NO: 96577 - DNA, 33 bp, Homo sapien
ttttaggttgcagacaaaaatgttacctaggtg

SEQ ID NO: 96578 - DNA, 33 bp, Homo sapien
ttttaggttgcagacacaaatgttacctaggtg

SEQ ID NO: 96579 - DNA, 33 bp, Homo sapien
atttggaacactttataaactaggcttgattaa

SEQ ID NO: 96580 - DNA, 33 bp, Homo sapien
atttggaacactttatgaactaggcttgattaa

SEQ ID NO: 96581 - DNA, 33 bp, Homo sapien
aattacactttccaccgatacctcattttcttc

SEQ ID NO: 96582 - DNA, 33 bp, Homo sapien
aattacactttccacctatacctcattttcttc

SEQ ID NO: 96583 - DNA, 33 bp, Homo sapien
aacaggaagataatccaagaaggatggaagaag

SEQ ID NO: 96584 - DNA, 33 bp, Homo sapien
aacaggaagataatcccagaaggatggaagaag

SEQ ID NO: 96585 - DNA, 33 bp, Homo sapien
ccatcccagaaacacactgtgcatccccactgt

SEQ ID NO: 96586 - DNA, 33 bp, Homo sapien
ccatcccagaaacacattgtgcatccccactgt

SEQ ID NO: 96587 - DNA, 33 bp, Homo sapien
tcagattctgggttcacggagaaatggatagaa

SEQ ID NO: 96588 - DNA, 33 bp, Homo sapien
tcagattctgggttcatggagaaatggatagaa

SEQ ID NO: 96589 - DNA, 33 bp, Homo sapien
atgaaggacctccaagacaggatatatatgaag

SEQ ID NO: 96590 - DNA, 33 bp, Homo sapien
atgaaggacctccaagccaggatatatatgaag

SEQ ID NO: 96591 - DNA, 33 bp, Homo sapien
aatacatttgcttttcaaaacagagttctataa

SEQ ID NO: 96592 - DNA, 33 bp, Homo sapien
aatacatttgcttttcgaaacagagttctataa

SEQ ID NO: 96593 - DNA, 33 bp, Homo sapien
tttccctcttttagacaatcagcatagggaaat

SEQ ID NO: 96594 - DNA, 33 bp, Homo sapien
tttccctcttttagacgatcagcatagggaaat

SEQ ID NO: 96595 - DNA, 33 bp, Homo sapien
ttcatttaccgccttgcaaggtgctcaagaccg

SEQ ID NO: 96596 - DNA, 33 bp, Homo sapien
ttcatttaccgccttgtaaggtgctcaagaccg

SEQ ID NO: 96597 - DNA, 33 bp, Homo sapien
cctcatggggcagttacgaggattagggacagt

SEQ ID NO: 96598 - DNA, 33 bp, Homo sapien
cctcatggggcagttatgaggattagggacagt

SEQ ID NO: 96599 - DNA, 33 bp, Homo sapien
tgtaaatccttgagggaaaaatagcctctgctc

SEQ ID NO: 96600 - DNA, 33 bp, Homo sapien
tgtaaatccttgaggggaaaatagcctctgctc

SEQ ID NO: 96601 - DNA, 33 bp, Homo sapien
ggaatgaccttacctaaatccctactttctccc

SEQ ID NO: 96602 - DNA, 33 bp, Homo sapien
ggaatgaccttacctagatccctactttctccc

SEQ ID NO: 96603 - DNA, 33 bp, Homo sapien
tgagaagatgcaagaccgtagccctggttaaac

SEQ ID NO: 96604 - DNA, 33 bp, Homo sapien
tgagaagatgcaagactgtagccctggttaaac

SEQ ID NO: 96605 - DNA, 33 bp, Homo sapien
cttatagaagtctgctaaagttagccctttgag

SEQ ID NO: 96606 - DNA, 33 bp, Homo sapien
cttatagaagtctgctgaagttagccctttgag

SEQ ID NO: 96607 - DNA, 33 bp, Homo sapien
gcaacggagctctagaacaattcagtaactctc

SEQ ID NO: 96608 - DNA, 33 bp, Homo sapien
gcaacggagctctagagcaattcagtaactctc

SEQ ID NO: 96609 - DNA, 33 bp, Homo sapien
cattaatctgaaaaagcccatccaattgacctg

SEQ ID NO: 96610 - DNA, 33 bp, Homo sapien
cattaatctgaaaaagtccatccaattgacctg

SEQ ID NO: 96611 - DNA, 33 bp, Homo sapien
tctgtatctgagaaaacctacgttattgtatct

SEQ ID NO: 96612 - DNA, 33 bp, Homo sapien
tctgtatctgagaaaatctacgttattgtatct

SEQ ID NO: 96613 - DNA, 33 bp, Homo sapien
gcctctgcatttgctgaagatcagaggagacga

SEQ ID NO: 96614 - DNA, 33 bp, Homo sapien
gcctctgcatttgctggagatcagaggagacga

SEQ ID NO: 96615 - DNA, 33 bp, Homo sapien
aagaacaaggccagacaaaggtacagtctgttg

SEQ ID NO: 96616 - DNA, 33 bp, Homo sapien
aagaacaaggccagacgaaggtacagtctgttg

SEQ ID NO: 96617 - DNA, 33 bp, Homo sapien
actgaataaatgaatgaatctaggagtttatct

SEQ ID NO: 96618 - DNA, 33 bp, Homo sapien
actgaataaatgaatggatctaggagtttatct

SEQ ID NO: 96619 - DNA, 33 bp, Homo sapien
gaaaacggatatgctaacgccctaatctgatca

SEQ ID NO: 96620 - DNA, 33 bp, Homo sapien
gaaaacggatatgctatcgccctaatctgatca

SEQ ID NO: 96621 - DNA, 33 bp, Homo sapien
caaattagagatgatacagtttaaggatttagt

SEQ ID NO: 96622 - DNA, 33 bp, Homo sapien
caaattagagatgatatagtttaaggatttagt

SEQ ID NO: 96623 - DNA, 33 bp, Homo sapien
ttggctggtatttaaccactctgtgatatcatt

SEQ ID NO: 96624 - DNA, 33 bp, Homo sapien
ttggctggtatttaactactctgtgatatcatt

SEQ ID NO: 96625 - DNA, 33 bp, Homo sapien
aatatcagtgggataaagaaatcttgctctaat

SEQ ID NO: 96626 - DNA, 33 bp, Homo sapien
aatatcagtgggataaggaaatcttgctctaat

SEQ ID NO: 96627 - DNA, 33 bp, Homo sapien
tcttctctccactccaataagctggaatagaag

SEQ ID NO: 96628 - DNA, 33 bp, Homo sapien
tcttctctccactccagtaagctggaatagaag

SEQ ID NO: 96629 - DNA, 33 bp, Homo sapien
agggagagagaatctacggttttcagtctcccc

SEQ ID NO: 96630 - DNA, 33 bp, Homo sapien
agggagagagaatctatggttttcagtctcccc

SEQ ID NO: 96631 - DNA, 33 bp, Homo sapien
cttacttcaccttccaacgaaaaatggagcccg

SEQ ID NO: 96632 - DNA, 33 bp, Homo sapien
cttacttcaccttccagcgaaaaatggagcccg

SEQ ID NO: 96633 - DNA, 33 bp, Homo sapien
acgaatattagttgcacctttcttgtcagagga

SEQ ID NO: 96634 - DNA, 33 bp, Homo sapien
acgaatattagttgcatctttcttgtcagagga

SEQ ID NO: 96635 - DNA, 33 bp, Homo sapien
aactgatgcgtatacacccacatatgaacccag

SEQ ID NO: 96636 - DNA, 33 bp, Homo sapien
aactgatgcgtatacatccacatatgaacccag

SEQ ID NO: 96637 - DNA, 33 bp, Homo sapien
taataaccatttgtaacttaaagcagaaagccc

SEQ ID NO: 96638 - DNA, 33 bp, Homo sapien
taataaccatttgtaagttaaagcagaaagccc

SEQ ID NO: 96639 - DNA, 33 bp, Homo sapien
agaaccacacagctgacgaaaaagcaagctgga

SEQ ID NO: 96640 - DNA, 33 bp, Homo sapien
agaaccacacagctgatgaaaaagcaagctgga

SEQ ID NO: 96641 - DNA, 33 bp, Homo sapien
tgtcattgacaaactaccaaaagctccttggtg

SEQ ID NO: 96642 - DNA, 33 bp, Homo sapien
tgtcattgacaaactatcaaaagctccttggtg

SEQ ID NO: 96643 - DNA, 33 bp, Homo sapien
gcactatctggtaaagcccatcaaaagaagagc

SEQ ID NO: 96644 - DNA, 33 bp, Homo sapien
gcactatctggtaaagtccatcaaaagaagagc

SEQ ID NO: 96645 - DNA, 33 bp, Homo sapien
tgaactattttctagcaataacccagagatcct

SEQ ID NO: 96646 - DNA, 33 bp, Homo sapien
tgaactattttctagcgataacccagagatcct

SEQ ID NO: 96647 - DNA, 33 bp, Homo sapien
agtattataccgaagacacaaggggctcttcct

SEQ ID NO: 96648 - DNA, 33 bp, Homo sapien
agtattataccgaagatacaaggggctcttcct

SEQ ID NO: 96649 - DNA, 33 bp, Homo sapien
tgtcaaataaattgtacggaattcagtgatggc

SEQ ID NO: 96650 - DNA, 33 bp, Homo sapien
tgtcaaataaattgtatggaattcagtgatggc

SEQ ID NO: 96651 - DNA, 33 bp, Homo sapien
tctttttccccccaaacgaaccatcaactaacc

SEQ ID NO: 96652 - DNA, 33 bp, Homo sapien
tctttttccccccaaatgaaccatcaactaacc

SEQ ID NO: 96653 - DNA, 33 bp, Homo sapien
aggacttttggtgacacgatctttaatattctt

SEQ ID NO: 96654 - DNA, 33 bp, Homo sapien
aggacttttggtgacatgatctttaatattctt

SEQ ID NO: 96655 - DNA, 33 bp, Homo sapien
gcgccattttatgtgccagtgaaggttcaatgg

SEQ ID NO: 96656 - DNA, 33 bp, Homo sapien
gcgccattttatgtgctagtgaaggttcaatgg

SEQ ID NO: 96657 - DNA, 33 bp, Homo sapien
gagatgtttcagaaaagagccttcatagttccc

SEQ ID NO: 96658 - DNA, 33 bp, Homo sapien
gagatgtttcagaaaatagccttcatagttccc

SEQ ID NO: 96659 - DNA, 33 bp, Homo sapien
ctttgaactagcataacaaaaactatgagtatt

SEQ ID NO: 96660 - DNA, 33 bp, Homo sapien
ctttgaactagcataagaaaaactatgagtatt

SEQ ID NO: 96661 - DNA, 33 bp, Homo sapien
tgtaaccaggtcgctcactattaatcttttagc

SEQ ID NO: 96662 - DNA, 33 bp, Homo sapien
tgtaaccaggtcgctcgctattaatcttttagc

SEQ ID NO: 96663 - DNA, 33 bp, Homo sapien
cccacgtggcacttacccagagtaatcttttcc

SEQ ID NO: 96664 - DNA, 33 bp, Homo sapien
cccacgtggcacttactcagagtaatcttttcc

SEQ ID NO: 96665 - DNA, 33 bp, Homo sapien
agatacatacaggtgacctataaagaggtacat

SEQ ID NO: 96666 - DNA, 33 bp, Homo sapien
agatacatacaggtgagctataaagaggtacat

SEQ ID NO: 96667 - DNA, 33 bp, Homo sapien
tcaaaatattacatgacgtagaagctcatttta

SEQ ID NO: 96668 - DNA, 33 bp, Homo sapien
tcaaaatattacatgatgtagaagctcatttta

SEQ ID NO: 96669 - DNA, 33 bp, Homo sapien
tatctttagtgtgtcacagatattgatccaaat

SEQ ID NO: 96670 - DNA, 33 bp, Homo sapien
tatctttagtgtgtcatagatattgatccaaat

SEQ ID NO: 96671 - DNA, 33 bp, Homo sapien
ttattttaactgtcgggacaattctgatcactt

SEQ ID NO: 96672 - DNA, 33 bp, Homo sapien
ttattttaactgtcggtacaattctgatcactt

SEQ ID NO: 96673 - DNA, 33 bp, Homo sapien
atctgtctccttaaatcactcagagcttttcca

SEQ ID NO: 96674 - DNA, 33 bp, Homo sapien
atctgtctccttaaatgactcagagcttttcca

SEQ ID NO: 96675 - DNA, 33 bp, Homo sapien
atagtgatggagtttacaaggaaacatccagaa

SEQ ID NO: 96676 - DNA, 33 bp, Homo sapien
atagtgatggagtttataaggaaacatccagaa

SEQ ID NO: 96677 - DNA, 33 bp, Homo sapien
aaaggtaaacacagaacagccaatcaagtcaga

SEQ ID NO: 96678 - DNA, 33 bp, Homo sapien
aaaggtaaacacagaatagccaatcaagtcaga

SEQ ID NO: 96679 - DNA, 33 bp, Homo sapien
cggttgactgactgaccgcataaaatgccatga

SEQ ID NO: 96680 - DNA, 33 bp, Homo sapien
cggttgactgactgactgcataaaatgccatga

SEQ ID NO: 96681 - DNA, 33 bp, Homo sapien
gtgttggccacttggcagaaaagaacagagatc

SEQ ID NO: 96682 - DNA, 33 bp, Homo sapien
gtgttggccacttggcggaaaagaacagagatc

SEQ ID NO: 96683 - DNA, 33 bp, Homo sapien
atttgtgttttagaaacctctgtatatatttca

SEQ ID NO: 96684 - DNA, 33 bp, Homo sapien
atttgtgttttagaaatctctgtatatatttca

SEQ ID NO: 96685 - DNA, 33 bp, Homo sapien
ataaatattgattaaacgaataagtgtagacat

SEQ ID NO: 96686 - DNA, 33 bp, Homo sapien
ataaatattgattaaatgaataagtgtagacat

SEQ ID NO: 96687 - DNA, 33 bp, Homo sapien
accaactaaattaaaacgtccttgataagaaat

SEQ ID NO: 96688 - DNA, 33 bp, Homo sapien
accaactaaattaaaatgtccttgataagaaat

SEQ ID NO: 96689 - DNA, 33 bp, Homo sapien
tcaaatgaaaactgcccaactgagctcaatgaa

SEQ ID NO: 96690 - DNA, 33 bp, Homo sapien
tcaaatgaaaactgcctaactgagctcaatgaa

SEQ ID NO: 96691 - DNA, 33 bp, Homo sapien
taatccgatttcatcaactcacactaatcacta

SEQ ID NO: 96692 - DNA, 33 bp, Homo sapien
taatccgatttcatcagctcacactaatcacta

SEQ ID NO: 96693 - DNA, 33 bp, Homo sapien
cagctgtggtctctaacgcaaaaataagatact

SEQ ID NO: 96694 - DNA, 33 bp, Homo sapien
cagctgtggtctctaatgcaaaaataagatact

SEQ ID NO: 96695 - DNA, 33 bp, Homo sapien
gtttctgcaactaaaaaacggggatgctctgga

SEQ ID NO: 96696 - DNA, 33 bp, Homo sapien
gtttctgcaactaaaacacggggatgctctgga

SEQ ID NO: 96697 - DNA, 33 bp, Homo sapien
tcttgaatttctaccacgaaacccagcatttga

SEQ ID NO: 96698 - DNA, 33 bp, Homo sapien
tcttgaatttctaccatgaaacccagcatttga

SEQ ID NO: 96699 - DNA, 33 bp, Homo sapien
catagggtgggattcaatagttggtataactta

SEQ ID NO: 96700 - DNA, 33 bp, Homo sapien
catagggtgggattcagtagttggtataactta

SEQ ID NO: 96701 - DNA, 33 bp, Homo sapien
gtccccctaatttaacaaaccagtgtagaatag

SEQ ID NO: 96702 - DNA, 33 bp, Homo sapien
gtccccctaatttaaccaaccagtgtagaatag

SEQ ID NO: 96703 - DNA, 33 bp, Homo sapien
atgaaggtgccctttacgtcaaagctgtcaatg

SEQ ID NO: 96704 - DNA, 33 bp, Homo sapien
atgaaggtgccctttatgtcaaagctgtcaatg

SEQ ID NO: 96705 - DNA, 33 bp, Homo sapien
caccagaagaaataagaaatccaagacaatttg

SEQ ID NO: 96706 - DNA, 33 bp, Homo sapien
caccagaagaaataagtaatccaagacaatttg

SEQ ID NO: 96707 - DNA, 33 bp, Homo sapien
ttgaacaattcatagcccagggttctttctttc

SEQ ID NO: 96708 - DNA, 33 bp, Homo sapien
ttgaacaattcatagctcagggttctttctttc

SEQ ID NO: 96709 - DNA, 33 bp, Homo sapien
aaagtcaattaacaaacgcaagtgggagggtct

SEQ ID NO: 96710 - DNA, 33 bp, Homo sapien
aaagtcaattaacaaatgcaagtgggagggtct

SEQ ID NO: 96711 - DNA, 33 bp, Homo sapien
ctgcctatcagaagtaccacagtttgggatttc

SEQ ID NO: 96712 - DNA, 33 bp, Homo sapien
ctgcctatcagaagtatcacagtttgggatttc

SEQ ID NO: 96713 - DNA, 33 bp, Homo sapien
tgatgatgaagtattcgaagaaggctagtaatt

SEQ ID NO: 96714 - DNA, 33 bp, Homo sapien
tgatgatgaagtattctaagaaggctagtaatt

SEQ ID NO: 96715 - DNA, 33 bp, Homo sapien
ggcaataatttttatccctctactgctctgtct

SEQ ID NO: 96716 - DNA, 33 bp, Homo sapien
ggcaataatttttatctctctactgctctgtct

SEQ ID NO: 96717 - DNA, 33 bp, Homo sapien
ctataaaagcctatacaggtaatgcagtatcct

SEQ ID NO: 96718 - DNA, 33 bp, Homo sapien
ctataaaagcctatacgggtaatgcagtatcct

SEQ ID NO: 96719 - DNA, 33 bp, Homo sapien
gcagaatcagaaaagaactctagcacagtccaa

SEQ ID NO: 96720 - DNA, 33 bp, Homo sapien
gcagaatcagaaaagatctctagcacagtccaa

SEQ ID NO: 96721 - DNA, 33 bp, Homo sapien
caaatgtattacatcacctctagtaaagctata

SEQ ID NO: 96722 - DNA, 33 bp, Homo sapien
caaatgtattacatcatctctagtaaagctata

SEQ ID NO: 96723 - DNA, 33 bp, Homo sapien
tgaatggaaaggaatacgcagaaacaggaaaac

SEQ ID NO: 96724 - DNA, 33 bp, Homo sapien
tgaatggaaaggaatatgcagaaacaggaaaac

SEQ ID NO: 96725 - DNA, 33 bp, Homo sapien
ctacgttatttagggacctattttgcagacata

SEQ ID NO: 96726 - DNA, 33 bp, Homo sapien
ctacgttatttagggatctattttgcagacata

SEQ ID NO: 96727 - DNA, 33 bp, Homo sapien
agtccataacgtgttaaaagtccataacaaata

SEQ ID NO: 96728 - DNA, 33 bp, Homo sapien
agtccataacgtgttagaagtccataacaaata

SEQ ID NO: 96729 - DNA, 33 bp, Homo sapien
ccagcttttcttcccaggaacagtaaaataggt

SEQ ID NO: 96730 - DNA, 33 bp, Homo sapien
ccagcttttcttcccatgaacagtaaaataggt

SEQ ID NO: 96731 - DNA, 33 bp, Homo sapien
gactgggtacaagacaacctcaagtgagtagac

SEQ ID NO: 96732 - DNA, 33 bp, Homo sapien
gactgggtacaagacatcctcaagtgagtagac

SEQ ID NO: 96733 - DNA, 33 bp, Homo sapien
atattgctatagaaaacgcatgtagaaggcagg

SEQ ID NO: 96734 - DNA, 33 bp, Homo sapien
atattgctatagaaaatgcatgtagaaggcagg

SEQ ID NO: 96735 - DNA, 33 bp, Homo sapien
ctaagtgcaagagaaagtgtatggacttctgga

SEQ ID NO: 96736 - DNA, 33 bp, Homo sapien
ctaagtgcaagagaaattgtatggacttctgga

SEQ ID NO: 96737 - DNA, 33 bp, Homo sapien
gtaattaactctgagggccaagacaagtgcctt

SEQ ID NO: 96738 - DNA, 33 bp, Homo sapien
gtaattaactctgaggtccaagacaagtgcctt

SEQ ID NO: 96739 - DNA, 33 bp, Homo sapien
aaaaaatgagacaagaataagttgaactcagga

SEQ ID NO: 96740 - DNA, 33 bp, Homo sapien
aaaaaatgagacaagagtaagttgaactcagga

SEQ ID NO: 96741 - DNA, 33 bp, Homo sapien
tcctgcttttggcatgcactagtcaacactgtc

SEQ ID NO: 96742 - DNA, 33 bp, Homo sapien
tcctgcttttggcatgtactagtcaacactgtc

SEQ ID NO: 96743 - DNA, 33 bp, Homo sapien
gggagcacattttgtacagaaaggagtctagta

SEQ ID NO: 96744 - DNA, 33 bp, Homo sapien
gggagcacattttgtatagaaaggagtctagta

SEQ ID NO: 96745 - DNA, 33 bp, Homo sapien
tattacagtctaactacgagaaccaaagtacat

SEQ ID NO: 96746 - DNA, 33 bp, Homo sapien
tattacagtctaactaggagaaccaaagtacat

SEQ ID NO: 96747 - DNA, 33 bp, Homo sapien
gatggacagagctgtgaatactaactgcagaga

SEQ ID NO: 96748 - DNA, 33 bp, Homo sapien
gatggacagagctgtggatactaactgcagaga

SEQ ID NO: 96749 - DNA, 33 bp, Homo sapien
acagcatgatgtaatacacgaacacaacactca

SEQ ID NO: 96750 - DNA, 33 bp, Homo sapien
acagcatgatgtaatatacgaacacaacactca

SEQ ID NO: 96751 - DNA, 33 bp, Homo sapien
tggtacaggatgtgttgaaaggcataggcaaag

SEQ ID NO: 96752 - DNA, 33 bp, Homo sapien
tggtacaggatgtgtttaaaggcataggcaaag

SEQ ID NO: 96753 - DNA, 33 bp, Homo sapien
tcagtactgagactcccgaagatcaataggacc

SEQ ID NO: 96754 - DNA, 33 bp, Homo sapien
tcagtactgagactcctgaagatcaataggacc

SEQ ID NO: 96755 - DNA, 33 bp, Homo sapien
catagctaagcattacaaaactatcacgatgcc

SEQ ID NO: 96756 - DNA, 33 bp, Homo sapien
catagctaagcattacgaaactatcacgatgcc

SEQ ID NO: 96757 - DNA, 33 bp, Homo sapien
cagacattcaatagaacagttgtgtctactgag

SEQ ID NO: 96758 - DNA, 33 bp, Homo sapien
cagacattcaatagaatagttgtgtctactgag

SEQ ID NO: 96759 - DNA, 33 bp, Homo sapien
caacctatctagaaaaccatgctctggtttgca

SEQ ID NO: 96760 - DNA, 33 bp, Homo sapien
caacctatctagaaaagcatgctctggtttgca

SEQ ID NO: 96761 - DNA, 33 bp, Homo sapien
tctccattccatcttaataaagtgtgtatatat

SEQ ID NO: 96762 - DNA, 33 bp, Homo sapien
tctccattccatcttagtaaagtgtgtatatat

SEQ ID NO: 96763 - DNA, 33 bp, Homo sapien
ttctcttgctggatcacgtgtcatcagatagag

SEQ ID NO: 96764 - DNA, 33 bp, Homo sapien
ttctcttgctggatcatgtgtcatcagatagag

SEQ ID NO: 96765 - DNA, 33 bp, Homo sapien
agatagagaagggccaaaattgtagtataaaag

SEQ ID NO: 96766 - DNA, 33 bp, Homo sapien
agatagagaagggccagaattgtagtataaaag

SEQ ID NO: 96767 - DNA, 33 bp, Homo sapien
gttgacaattttttaaagcaagaagcatgaaaa

SEQ ID NO: 96768 - DNA, 33 bp, Homo sapien
gttgacaattttttaacgcaagaagcatgaaaa

SEQ ID NO: 96769 - DNA, 33 bp, Homo sapien
gactgggtaggtaacaatcacacacattggtac

SEQ ID NO: 96770 - DNA, 33 bp, Homo sapien
gactgggtaggtaacagtcacacacattggtac

SEQ ID NO: 96771 - DNA, 33 bp, Homo sapien
ttgtgaaataaacaacactgtcctcccttctgt

SEQ ID NO: 96772 - DNA, 33 bp, Homo sapien
ttgtgaaataaacaacgctgtcctcccttctgt

SEQ ID NO: 96773 - DNA, 33 bp, Homo sapien
gccccatcaatggctaaataaaagatgttgaaa

SEQ ID NO: 96774 - DNA, 33 bp, Homo sapien
gccccatcaatggctacataaaagatgttgaaa

SEQ ID NO: 96775 - DNA, 33 bp, Homo sapien
tttcagatttgcaagacgaaaagattctaggca

SEQ ID NO: 96776 - DNA, 33 bp, Homo sapien
tttcagatttgcaagatgaaaagattctaggca

SEQ ID NO: 96777 - DNA, 33 bp, Homo sapien
actatctgctgaacttcaaacggtcttttggtt

SEQ ID NO: 96778 - DNA, 33 bp, Homo sapien
actatctgctgaacttgaaacggtcttttggtt

SEQ ID NO: 96779 - DNA, 33 bp, Homo sapien
tagatcatccaggcaaaaataaacaggaatcaa

SEQ ID NO: 96780 - DNA, 33 bp, Homo sapien
tagatcatccaggcaagaataaacaggaatcaa

SEQ ID NO: 96781 - DNA, 33 bp, Homo sapien
cagaagggtaacctacagatgcccgattgtcct

SEQ ID NO: 96782 - DNA, 33 bp, Homo sapien
cagaagggtaacctacggatgcccgattgtcct

SEQ ID NO: 96783 - DNA, 33 bp, Homo sapien
ctcccttcctgttcataacattatgtcttacca

SEQ ID NO: 96784 - DNA, 33 bp, Homo sapien
ctcccttcctgttcattacattatgtcttacca

SEQ ID NO: 96785 - DNA, 33 bp, Homo sapien
aaagatcgaggaattaaagatgaaagatgaaat

SEQ ID NO: 96786 - DNA, 33 bp, Homo sapien
aaagatcgaggaattacagatgaaagatgaaat

SEQ ID NO: 96787 - DNA, 33 bp, Homo sapien
aactggcttttgtataaggagtgagataggaat

SEQ ID NO: 96788 - DNA, 33 bp, Homo sapien
aactggcttttgtatatggagtgagataggaat

SEQ ID NO: 96789 - DNA, 33 bp, Homo sapien
aggccagtttccctcacgattatacatacagta

SEQ ID NO: 96790 - DNA, 33 bp, Homo sapien
aggccagtttccctcatgattatacatacagta

SEQ ID NO: 96791 - DNA, 33 bp, Homo sapien
cctcccacatacctggaactataggcctccacc

SEQ ID NO: 96792 - DNA, 33 bp, Homo sapien
cctcccacatacctgggactataggcctccacc

SEQ ID NO: 96793 - DNA, 33 bp, Homo sapien
gaaactgtctatccccaaatccttttttctacc

SEQ ID NO: 96794 - DNA, 33 bp, Homo sapien
gaaactgtctatcccctaatccttttttctacc

SEQ ID NO: 96795 - DNA, 33 bp, Homo sapien
aatggcgtaggccagcacgtgaattggtggtaa

SEQ ID NO: 96796 - DNA, 33 bp, Homo sapien
aatggcgtaggccagcgcgtgaattggtggtaa

SEQ ID NO: 96797 - DNA, 33 bp, Homo sapien
gtgaattggtggtaaactgaaggtcatcgggga

SEQ ID NO: 96798 - DNA, 33 bp, Homo sapien
gtgaattggtggtaaagtgaaggtcatcgggga

SEQ ID NO: 96799 - DNA, 33 bp, Homo sapien
caaaaactgaactatacggcttccttgatgggg

SEQ ID NO: 96800 - DNA, 33 bp, Homo sapien
caaaaactgaactatatggcttccttgatgggg

SEQ ID NO: 96801 - DNA, 33 bp, Homo sapien
ttggtagttataaacaccgtagttcaagataaa

SEQ ID NO: 96802 - DNA, 33 bp, Homo sapien
ttggtagttataaacatcgtagttcaagataaa

SEQ ID NO: 96803 - DNA, 33 bp, Homo sapien
gaggcttgcactttaaagaagaatgtggagaat

SEQ ID NO: 96804 - DNA, 33 bp, Homo sapien
gaggcttgcactttaaggaagaatgtggagaat

SEQ ID NO: 96805 - DNA, 33 bp, Homo sapien
ggaaataaatatgaacaagagagaccgtctgtg

SEQ ID NO: 96806 - DNA, 33 bp, Homo sapien
ggaaataaatatgaacgagagagaccgtctgtg

SEQ ID NO: 96807 - DNA, 33 bp, Homo sapien
tgctacttactgcccaagtattgcaacagatga

SEQ ID NO: 96808 - DNA, 33 bp, Homo sapien
tgctacttactgcccacgtattgcaacagatga

SEQ ID NO: 96809 - DNA, 33 bp, Homo sapien
attttgagaatgatacagacccaagggatatac

SEQ ID NO: 96810 - DNA, 33 bp, Homo sapien
attttgagaatgatactgacccaagggatatac

SEQ ID NO: 96811 - DNA, 33 bp, Homo sapien
ctatccggttaatgtgcagttccaaccagctta

SEQ ID NO: 96812 - DNA, 33 bp, Homo sapien
ctatccggttaatgtgtagttccaaccagctta

SEQ ID NO: 96813 - DNA, 33 bp, Homo sapien
tatcatctgtctcctccattggaaagaaaattg

SEQ ID NO: 96814 - DNA, 33 bp, Homo sapien
tatcatctgtctcctctattggaaagaaaattg

SEQ ID NO: 96815 - DNA, 33 bp, Homo sapien
gataataagaaggtcacaacccagcaaaagtgg

SEQ ID NO: 96816 - DNA, 33 bp, Homo sapien
gataataagaaggtcataacccagcaaaagtgg

SEQ ID NO: 96817 - DNA, 33 bp, Homo sapien
tgtagatgtctgtaaacgcaggaaatatcttat

SEQ ID NO: 96818 - DNA, 33 bp, Homo sapien
tgtagatgtctgtaaatgcaggaaatatcttat

SEQ ID NO: 96819 - DNA, 33 bp, Homo sapien
ttttcacttgttattaacatcctaactgcaatg

SEQ ID NO: 96820 - DNA, 33 bp, Homo sapien
ttttcacttgttattagcatcctaactgcaatg

SEQ ID NO: 96821 - DNA, 33 bp, Homo sapien
ataatttcttatagtgaatattctgtcccagga

SEQ ID NO: 96822 - DNA, 33 bp, Homo sapien
ataatttcttatagtgtatattctgtcccagga

SEQ ID NO: 96823 - DNA, 33 bp, Homo sapien
tagcaaattcctaaaccgtatccaaatctagaa

SEQ ID NO: 96824 - DNA, 33 bp, Homo sapien
tagcaaattcctaaactgtatccaaatctagaa

SEQ ID NO: 96825 - DNA, 33 bp, Homo sapien
taaatagagatgaaaacgcattcaataaatata

SEQ ID NO: 96826 - DNA, 33 bp, Homo sapien
taaatagagatgaaaatgcattcaataaatata

SEQ ID NO: 96827 - DNA, 33 bp, Homo sapien
ctctcaattcttccaaaaacagatgtgggttgt

SEQ ID NO: 96828 - DNA, 33 bp, Homo sapien
ctctcaattcttccaacaacagatgtgggttgt

SEQ ID NO: 96829 - DNA, 33 bp, Homo sapien
tgtgggttgttttcccccccaacagcaagcagt

SEQ ID NO: 96830 - DNA, 33 bp, Homo sapien
tgtgggttgttttccctcccaacagcaagcagt

SEQ ID NO: 96831 - DNA, 33 bp, Homo sapien
acttcagatgccagtcacacaagtgatgagtct

SEQ ID NO: 96832 - DNA, 33 bp, Homo sapien
acttcagatgccagtcgcacaagtgatgagtct

SEQ ID NO: 96833 - DNA, 33 bp, Homo sapien
tagttttacagagggaataaaaagtcatgcaaa

SEQ ID NO: 96834 - DNA, 33 bp, Homo sapien
tagttttacagagggattaaaaagtcatgcaaa

SEQ ID NO: 96835 - DNA, 33 bp, Homo sapien
ggtcatcagtagtttgaattgagacactgtcag

SEQ ID NO: 96836 - DNA, 33 bp, Homo sapien
ggtcatcagtagtttgtattgagacactgtcag

SEQ ID NO: 96837 - DNA, 33 bp, Homo sapien
atcgtttccaaaggtcccatctattattctcct

SEQ ID NO: 96838 - DNA, 33 bp, Homo sapien
atcgtttccaaaggtctcatctattattctcct

SEQ ID NO: 96839 - DNA, 33 bp, Homo sapien
aactggctatgacaccaatgcccagatgtcaag

SEQ ID NO: 96840 - DNA, 33 bp, Homo sapien
aactggctatgacaccgatgcccagatgtcaag

SEQ ID NO: 96841 - DNA, 33 bp, Homo sapien
ctacaatacatgttaaccaaaatcaagagtttc

SEQ ID NO: 96842 - DNA, 33 bp, Homo sapien
ctacaatacatgttaatcaaaatcaagagtttc

SEQ ID NO: 96843 - DNA, 33 bp, Homo sapien
tgagattcaaggaaaaacatttctgaagagttt

SEQ ID NO: 96844 - DNA, 33 bp, Homo sapien
tgagattcaaggaaaaccatttctgaagagttt

SEQ ID NO: 96845 - DNA, 33 bp, Homo sapien
aatattaaatgaagcacccttttgaaaactagg

SEQ ID NO: 96846 - DNA, 33 bp, Homo sapien
aatattaaatgaagcagccttttgaaaactagg

SEQ ID NO: 96847 - DNA, 33 bp, Homo sapien
ttgagatgagcaagaaaactgtagacaacagta

SEQ ID NO: 96848 - DNA, 33 bp, Homo sapien
ttgagatgagcaagaagactgtagacaacagta

SEQ ID NO: 96849 - DNA, 33 bp, Homo sapien
atgttatttgtcactaaaacatcatgataagtt

SEQ ID NO: 96850 - DNA, 33 bp, Homo sapien
atgttatttgtcactagaacatcatgataagtt

SEQ ID NO: 96851 - DNA, 33 bp, Homo sapien
caaaatggaaacctcaaagtttaagagtaggtt

SEQ ID NO: 96852 - DNA, 33 bp, Homo sapien
caaaatggaaacctcagagtttaagagtaggtt

SEQ ID NO: 96853 - DNA, 33 bp, Homo sapien
atctagagtaactgaactattgactgtctttgc

SEQ ID NO: 96854 - DNA, 33 bp, Homo sapien
atctagagtaactgaattattgactgtctttgc

SEQ ID NO: 96855 - DNA, 33 bp, Homo sapien
tagaatgtcatatgtacatacacacctgatact

SEQ ID NO: 96856 - DNA, 33 bp, Homo sapien
tagaatgtcatatgtatatacacacctgatact

SEQ ID NO: 96857 - DNA, 33 bp, Homo sapien
ttcgtttactctgaaggatgattatataaataa

SEQ ID NO: 96858 - DNA, 33 bp, Homo sapien
ttcgtttactctgaagtatgattatataaataa

SEQ ID NO: 96859 - DNA, 33 bp, Homo sapien
ggttctaagaggttcaatatgttacccactggc

SEQ ID NO: 96860 - DNA, 33 bp, Homo sapien
ggttctaagaggttcagtatgttacccactggc

SEQ ID NO: 96861 - DNA, 33 bp, Homo sapien
caaccttaagaatcgacgacaaattctgataat

SEQ ID NO: 96862 - DNA, 33 bp, Homo sapien
caaccttaagaatcgatgacaaattctgataat

SEQ ID NO: 96863 - DNA, 33 bp, Homo sapien
ttgtggtagccttacacacatactttacactcc

SEQ ID NO: 96864 - DNA, 33 bp, Homo sapien
ttgtggtagccttacatacatactttacactcc

SEQ ID NO: 96865 - DNA, 33 bp, Homo sapien
aaacactgtgacattaccaaaggcctgagcttc

SEQ ID NO: 96866 - DNA, 33 bp, Homo sapien
aaacactgtgacattatcaaaggcctgagcttc

SEQ ID NO: 96867 - DNA, 33 bp, Homo sapien
cttcctagttggaaacaagtggactcaaattgc

SEQ ID NO: 96868 - DNA, 33 bp, Homo sapien
cttcctagttggaaacgagtggactcaaattgc

SEQ ID NO: 96869 - DNA, 33 bp, Homo sapien
ataaaatgatgttctacgtgacaaggattcctt

SEQ ID NO: 96870 - DNA, 33 bp, Homo sapien
ataaaatgatgttctatgtgacaaggattcctt

SEQ ID NO: 96871 - DNA, 33 bp, Homo sapien
tgatagtattatagaaatgttgagaagggccag

SEQ ID NO: 96872 - DNA, 33 bp, Homo sapien
tgatagtattatagaagtgttgagaagggccag

SEQ ID NO: 96873 - DNA, 33 bp, Homo sapien
acacactggcacctcaaaatctttgcagcagtt

SEQ ID NO: 96874 - DNA, 33 bp, Homo sapien
acacactggcacctcagaatctttgcagcagtt

SEQ ID NO: 96875 - DNA, 33 bp, Homo sapien
tcctctctcagctgtacggactgtggtttcagt

SEQ ID NO: 96876 - DNA, 33 bp, Homo sapien
tcctctctcagctgtatggactgtggtttcagt

SEQ ID NO: 96877 - DNA, 33 bp, Homo sapien
atctgtaaatggtgaacctgtcaacggtaatgg

SEQ ID NO: 96878 - DNA, 33 bp, Homo sapien
atctgtaaatggtgaatctgtcaacggtaatgg

SEQ ID NO: 96879 - DNA, 33 bp, Homo sapien
agcaaactgtacccccaaccacctggggcacat

SEQ ID NO: 96880 - DNA, 33 bp, Homo sapien
agcaaactgtacccccgaccacctggggcacat

SEQ ID NO: 96881 - DNA, 33 bp, Homo sapien
ccagcacagcagtctgcagtcaacgtgggatga

SEQ ID NO: 96882 - DNA, 33 bp, Homo sapien
ccagcacagcagtctggagtcaacgtgggatga

SEQ ID NO: 96883 - DNA, 33 bp, Homo sapien
gcatagcctacaatgcagacaatttgtaaatat

SEQ ID NO: 96884 - DNA, 33 bp, Homo sapien
gcatagcctacaatgcggacaatttgtaaatat

SEQ ID NO: 96885 - DNA, 33 bp, Homo sapien
tgtctccaaaataaccaaacaagtaactccatg

SEQ ID NO: 96886 - DNA, 33 bp, Homo sapien
tgtctccaaaataaccgaacaagtaactccatg

SEQ ID NO: 96887 - DNA, 33 bp, Homo sapien
ctgaacaatacatccactagtacaccctcaaga

SEQ ID NO: 96888 - DNA, 33 bp, Homo sapien
ctgaacaatacatccattagtacaccctcaaga

SEQ ID NO: 96889 - DNA, 33 bp, Homo sapien
ttattatatggagatacgtggctacaaaagtat

SEQ ID NO: 96890 - DNA, 33 bp, Homo sapien
ttattatatggagatatgtggctacaaaagtat

SEQ ID NO: 96891 - DNA, 33 bp, Homo sapien
agattgcgtatgttaacacagtctgttagtaaa

SEQ ID NO: 96892 - DNA, 33 bp, Homo sapien
agattgcgtatgttaatacagtctgttagtaaa

SEQ ID NO: 96893 - DNA, 33 bp, Homo sapien
gatgagggaaaactgactattgtttaggacttg

SEQ ID NO: 96894 - DNA, 33 bp, Homo sapien
gatgagggaaaactgattattgtttaggacttg

SEQ ID NO: 96895 - DNA, 33 bp, Homo sapien
agctataagcacagagacggtctataaaaaatc

SEQ ID NO: 96896 - DNA, 33 bp, Homo sapien
agctataagcacagaggcggtctataaaaaatc

SEQ ID NO: 96897 - DNA, 33 bp, Homo sapien
ttgtttaaaggtgaaagttacatacagtgaaac

SEQ ID NO: 96898 - DNA, 33 bp, Homo sapien
ttgtttaaaggtgaaatttacatacagtgaaac

SEQ ID NO: 96899 - DNA, 33 bp, Homo sapien
gcttgtgacagtggtacgctggtacatatttaa

SEQ ID NO: 96900 - DNA, 33 bp, Homo sapien
gcttgtgacagtggtatgctggtacatatttaa

SEQ ID NO: 96901 - DNA, 33 bp, Homo sapien
tttcacatactacataaaagaccaatcaccaca

SEQ ID NO: 96902 - DNA, 33 bp, Homo sapien
tttcacatactacatagaagaccaatcaccaca

SEQ ID NO: 96903 - DNA, 33 bp, Homo sapien
aaacaaaacaaaaatcaaagttcattatcttct

SEQ ID NO: 96904 - DNA, 33 bp, Homo sapien
aaacaaaacaaaaatcgaagttcattatcttct

SEQ ID NO: 96905 - DNA, 33 bp, Homo sapien
actagaatgcaaatcaagtgcctgagattcaaa

SEQ ID NO: 96906 - DNA, 33 bp, Homo sapien
actagaatgcaaatcatgtgcctgagattcaaa

SEQ ID NO: 96907 - DNA, 33 bp, Homo sapien
gtttattgatgtttgaatactttgccaagaagt

SEQ ID NO: 96908 - DNA, 33 bp, Homo sapien
gtttattgatgtttgagtactttgccaagaagt

SEQ ID NO: 96909 - DNA, 33 bp, Homo sapien
caggaattaacttttacattgctttacttagac

SEQ ID NO: 96910 - DNA, 33 bp, Homo sapien
caggaattaacttttagattgctttacttagac

SEQ ID NO: 96911 - DNA, 33 bp, Homo sapien
ttaatccaaaggtcccgagagtaaacatagaaa

SEQ ID NO: 96912 - DNA, 33 bp, Homo sapien
ttaatccaaaggtccctagagtaaacatagaaa

SEQ ID NO: 96913 - DNA, 33 bp, Homo sapien
tccaatgcaacgtgtaagtaaacaaagatggcg

SEQ ID NO: 96914 - DNA, 33 bp, Homo sapien
tccaatgcaacgtgtacgtaaacaaagatggcg

SEQ ID NO: 96915 - DNA, 33 bp, Homo sapien
ctttaatgaaaccatacgtgaatctcatatatc

SEQ ID NO: 96916 - DNA, 33 bp, Homo sapien
ctttaatgaaaccatatgtgaatctcatatatc

SEQ ID NO: 96917 - DNA, 33 bp, Homo sapien
cagcaaatttgaattcacatctgagatttttga

SEQ ID NO: 96918 - DNA, 33 bp, Homo sapien
cagcaaatttgaattcccatctgagatttttga

SEQ ID NO: 96919 - DNA, 33 bp, Homo sapien
ttgttattatcaaactcaaactacatttgtttc

SEQ ID NO: 96920 - DNA, 33 bp, Homo sapien
ttgttattatcaaactgaaactacatttgtttc

SEQ ID NO: 96921 - DNA, 33 bp, Homo sapien
ttgatgttgagtcatacagtgtcatctgccaaa

SEQ ID NO: 96922 - DNA, 33 bp, Homo sapien
ttgatgttgagtcatatagtgtcatctgccaaa

SEQ ID NO: 96923 - DNA, 33 bp, Homo sapien
tgcatttaaacttcccgcgtgtcttctcattgc

SEQ ID NO: 96924 - DNA, 33 bp, Homo sapien
tgcatttaaacttccctcgtgtcttctcattgc

SEQ ID NO: 96925 - DNA, 33 bp, Homo sapien
gactgtataagcaacaatgacaaatgtcatcta

SEQ ID NO: 96926 - DNA, 33 bp, Homo sapien
gactgtataagcaacagtgacaaatgtcatcta

SEQ ID NO: 96927 - DNA, 33 bp, Homo sapien
ccagaagggatcaggaagttcaatattaccatt

SEQ ID NO: 96928 - DNA, 33 bp, Homo sapien
ccagaagggatcaggatgttcaatattaccatt

SEQ ID NO: 96929 - DNA, 33 bp, Homo sapien
agtacactgggtacaaataccttgaagttaaca

SEQ ID NO: 96930 - DNA, 33 bp, Homo sapien
agtacactgggtacaattaccttgaagttaaca

SEQ ID NO: 96931 - DNA, 33 bp, Homo sapien
acacagagacaaggaaacttcaggaagtatata

SEQ ID NO: 96932 - DNA, 33 bp, Homo sapien
acacagagacaaggaaccttcaggaagtatata

SEQ ID NO: 96933 - DNA, 33 bp, Homo sapien
ggcaatctgactctaacatctatgcttgtcagt

SEQ ID NO: 96934 - DNA, 33 bp, Homo sapien
ggcaatctgactctaatatctatgcttgtcagt

SEQ ID NO: 96935 - DNA, 33 bp, Homo sapien
aagattgtgtgtgaaacgaggaaggtgctatct

SEQ ID NO: 96936 - DNA, 33 bp, Homo sapien
aagattgtgtgtgaaaggaggaaggtgctatct

SEQ ID NO: 96937 - DNA, 33 bp, Homo sapien
taatgatcattaaggacaaagcttgagatagca

SEQ ID NO: 96938 - DNA, 33 bp, Homo sapien
taatgatcattaaggataaagcttgagatagca

SEQ ID NO: 96939 - DNA, 33 bp, Homo sapien
ctattgactggtttcaaatggctggagtttcat

SEQ ID NO: 96940 - DNA, 33 bp, Homo sapien
ctattgactggtttcacatggctggagtttcat

SEQ ID NO: 96941 - DNA, 33 bp, Homo sapien
ggatgaattttcgtgcgcgtcagagtcaggatt

SEQ ID NO: 96942 - DNA, 33 bp, Homo sapien
ggatgaattttcgtgctcgtcagagtcaggatt

SEQ ID NO: 96943 - DNA, 33 bp, Homo sapien
catacatgtgatctcccctttgaaaagaaccat

SEQ ID NO: 96944 - DNA, 33 bp, Homo sapien
catacatgtgatctcctctttgaaaagaaccat

SEQ ID NO: 96945 - DNA, 33 bp, Homo sapien
actcagatgtcacaaaaacagtgtgattcagac

SEQ ID NO: 96946 - DNA, 33 bp, Homo sapien
actcagatgtcacaaagacagtgtgattcagac

SEQ ID NO: 96947 - DNA, 33 bp, Homo sapien
ctagaaagattggagactctaggactctggaga

SEQ ID NO: 96948 - DNA, 33 bp, Homo sapien
ctagaaagattggagattctaggactctggaga

SEQ ID NO: 96949 - DNA, 33 bp, Homo sapien
caaccggttgcacaacagcaatgggtatcatct

SEQ ID NO: 96950 - DNA, 33 bp, Homo sapien
caaccggttgcacaacggcaatgggtatcatct

SEQ ID NO: 96951 - DNA, 33 bp, Homo sapien
tcccaccatctttcaacgtgatgagtaacttgc

SEQ ID NO: 96952 - DNA, 33 bp, Homo sapien
tcccaccatctttcaatgtgatgagtaacttgc

SEQ ID NO: 96953 - DNA, 33 bp, Homo sapien
tcttccttgctatcggcattcggttaaagatgt

SEQ ID NO: 96954 - DNA, 33 bp, Homo sapien
tcttccttgctatcggtattcggttaaagatgt

SEQ ID NO: 96955 - DNA, 33 bp, Homo sapien
cctacatggttgaaaacattcacaagagacttg

SEQ ID NO: 96956 - DNA, 33 bp, Homo sapien
cctacatggttgaaaatattcacaagagacttg

SEQ ID NO: 96957 - DNA, 33 bp, Homo sapien
gatgaatttgacttcaaaataagaactcctgcc

SEQ ID NO: 96958 - DNA, 33 bp, Homo sapien
gatgaatttgacttcagaataagaactcctgcc

SEQ ID NO: 96959 - DNA, 33 bp, Homo sapien
attcagtgagcttcaaaagattattataaccat

SEQ ID NO: 96960 - DNA, 33 bp, Homo sapien
attcagtgagcttcaatagattattataaccat

SEQ ID NO: 96961 - DNA, 33 bp, Homo sapien
tagcatggcatcttgcagaaacagagattttca

SEQ ID NO: 96962 - DNA, 33 bp, Homo sapien
tagcatggcatcttgccgaaacagagattttca

SEQ ID NO: 96963 - DNA, 33 bp, Homo sapien
ttacctgacttagggaagattctgagaggatcc

SEQ ID NO: 96964 - DNA, 33 bp, Homo sapien
ttacctgacttagggaggattctgagaggatcc

SEQ ID NO: 96965 - DNA, 33 bp, Homo sapien
caagtgatcactaaaaatgatattcgcggccag

SEQ ID NO: 96966 - DNA, 33 bp, Homo sapien
caagtgatcactaaaattgatattcgcggccag

SEQ ID NO: 96967 - DNA, 33 bp, Homo sapien
gctggaatttgcttaaactacttttctaattct

SEQ ID NO: 96968 - DNA, 33 bp, Homo sapien
gctggaatttgcttaatctacttttctaattct

SEQ ID NO: 96969 - DNA, 33 bp, Homo sapien
gtgtaggagctttagaacactttgattattttg

SEQ ID NO: 96970 - DNA, 33 bp, Homo sapien
gtgtaggagctttagaccactttgattattttg

SEQ ID NO: 96971 - DNA, 33 bp, Homo sapien
gtacacaagtgaggaactgatctctgccccatc

SEQ ID NO: 96972 - DNA, 33 bp, Homo sapien
gtacacaagtgaggaagtgatctctgccccatc

SEQ ID NO: 96973 - DNA, 33 bp, Homo sapien
tgttctaggcacgtcaggtaagtggaatcatgc

SEQ ID NO: 96974 - DNA, 33 bp, Homo sapien
tgttctaggcacgtcatgtaagtggaatcatgc

SEQ ID NO: 96975 - DNA, 33 bp, Homo sapien
tagaacatatagaaccaatagcaaagtacaaat

SEQ ID NO: 96976 - DNA, 33 bp, Homo sapien
tagaacatatagaacccatagcaaagtacaaat

SEQ ID NO: 96977 - DNA, 33 bp, Homo sapien
gatgggttatttttaccgatgacattagtgact

SEQ ID NO: 96978 - DNA, 33 bp, Homo sapien
gatgggttatttttactgatgacattagtgact

SEQ ID NO: 96979 - DNA, 33 bp, Homo sapien
tcagtgtttgactaaagtagagaaagcatggtg

SEQ ID NO: 96980 - DNA, 33 bp, Homo sapien
tcagtgtttgactaaattagagaaagcatggtg

SEQ ID NO: 96981 - DNA, 33 bp, Homo sapien
aacttaaggaaaagaccgattgctctatgctca

SEQ ID NO: 96982 - DNA, 33 bp, Homo sapien
aacttaaggaaaagactgattgctctatgctca

SEQ ID NO: 96983 - DNA, 33 bp, Homo sapien
tcttcgtggtaagtgcgagaagttgtttagatg

SEQ ID NO: 96984 - DNA, 33 bp, Homo sapien
tcttcgtggtaagtgctagaagttgtttagatg

SEQ ID NO: 96985 - DNA, 33 bp, Homo sapien
taggtagagttcttctaaacaattttcattcac

SEQ ID NO: 96986 - DNA, 33 bp, Homo sapien
taggtagagttcttcttaacaattttcattcac

SEQ ID NO: 96987 - DNA, 33 bp, Homo sapien
ttctccatgacgcttaacccaactactctagcc

SEQ ID NO: 96988 - DNA, 33 bp, Homo sapien
ttctccatgacgcttaccccaactactctagcc

SEQ ID NO: 96989 - DNA, 33 bp, Homo sapien
acacagaccaggagtgcagagctgagccttggt

SEQ ID NO: 96990 - DNA, 33 bp, Homo sapien
acacagaccaggagtggagagctgagccttggt

SEQ ID NO: 96991 - DNA, 33 bp, Homo sapien
aaggggcacatatagaagtttgttacataggaa

SEQ ID NO: 96992 - DNA, 33 bp, Homo sapien
aaggggcacatatagaggtttgttacataggaa

SEQ ID NO: 96993 - DNA, 33 bp, Homo sapien
gtctactattttggatcaaattctgctaaattg

SEQ ID NO: 96994 - DNA, 33 bp, Homo sapien
gtctactattttggatgaaattctgctaaattg

SEQ ID NO: 96995 - DNA, 33 bp, Homo sapien
tgcctttagtcctttgacaaagatcagttgacg

SEQ ID NO: 96996 - DNA, 33 bp, Homo sapien
tgcctttagtcctttgtcaaagatcagttgacg

SEQ ID NO: 96997 - DNA, 33 bp, Homo sapien
ttcgatcaaagtagcccagaaatcaacccccac

SEQ ID NO: 96998 - DNA, 33 bp, Homo sapien
ttcgatcaaagtagccgagaaatcaacccccac

SEQ ID NO: 96999 - DNA, 33 bp, Homo sapien
ttcagttctgagtatccgagactagtgctggtt

SEQ ID NO: 97000 - DNA, 33 bp, Homo sapien
ttcagttctgagtatctgagactagtgctggtt

SEQ ID NO: 97001 - DNA, 33 bp, Homo sapien
ctaaaataaagcactactaaccagcactagtct

SEQ ID NO: 97002 - DNA, 33 bp, Homo sapien
ctaaaataaagcactattaaccagcactagtct

SEQ ID NO: 97003 - DNA, 33 bp, Homo sapien
atgcatagagtacatgacaaaaaattatagcca

SEQ ID NO: 97004 - DNA, 33 bp, Homo sapien
atgcatagagtacatggcaaaaaattatagcca

SEQ ID NO: 97005 - DNA, 33 bp, Homo sapien
ctgtgtagacatctcaaatatgcaatataatac

SEQ ID NO: 97006 - DNA, 33 bp, Homo sapien
ctgtgtagacatctcagatatgcaatataatac

SEQ ID NO: 97007 - DNA, 33 bp, Homo sapien
ctttctaacagtttcacatgcaaggacatggta

SEQ ID NO: 97008 - DNA, 33 bp, Homo sapien
ctttctaacagtttcatatgcaaggacatggta

SEQ ID NO: 97009 - DNA, 33 bp, Homo sapien
tccctgctctatctcaatccttcaagtcctcca

SEQ ID NO: 97010 - DNA, 33 bp, Homo sapien
tccctgctctatctcagtccttcaagtcctcca

SEQ ID NO: 97011 - DNA, 33 bp, Homo sapien
ttgcattcttaataaaaatggcattgtggcata

SEQ ID NO: 97012 - DNA, 33 bp, Homo sapien
ttgcattcttaataaacatggcattgtggcata

SEQ ID NO: 97013 - DNA, 33 bp, Homo sapien
tctaacatgtcacaaaatcgctttaattgcaaa

SEQ ID NO: 97014 - DNA, 33 bp, Homo sapien
tctaacatgtcacaaagtcgctttaattgcaaa

SEQ ID NO: 97015 - DNA, 33 bp, Homo sapien
aagatactttttcataacttcgtaactaagata

SEQ ID NO: 97016 - DNA, 33 bp, Homo sapien
aagatactttttcatagcttcgtaactaagata

SEQ ID NO: 97017 - DNA, 33 bp, Homo sapien
tgtggaagccaaattacaatgggtggaataatt

SEQ ID NO: 97018 - DNA, 33 bp, Homo sapien
tgtggaagccaaattagaatgggtggaataatt

SEQ ID NO: 97019 - DNA, 33 bp, Homo sapien
catcgaaggattttgaaagagagacgtaatctg

SEQ ID NO: 97020 - DNA, 33 bp, Homo sapien
catcgaaggattttgagagagagacgtaatctg

SEQ ID NO: 97021 - DNA, 33 bp, Homo sapien
ctaagaagacaagagaagattccacccaaagtc

SEQ ID NO: 97022 - DNA, 33 bp, Homo sapien
ctaagaagacaagagaggattccacccaaagtc

SEQ ID NO: 97023 - DNA, 33 bp, Homo sapien
tatttagtagtcacaagttagtagttagaattt

SEQ ID NO: 97024 - DNA, 33 bp, Homo sapien
tatttagtagtcacaatttagtagttagaattt

SEQ ID NO: 97025 - DNA, 33 bp, Homo sapien
caattccgttagttaacagacaatgtccatgcc

SEQ ID NO: 97026 - DNA, 33 bp, Homo sapien
caattccgttagttaatagacaatgtccatgcc

SEQ ID NO: 97027 - DNA, 33 bp, Homo sapien
gagaaaagtggaagccaccagttcctaaagcct

SEQ ID NO: 97028 - DNA, 33 bp, Homo sapien
gagaaaagtggaagccgccagttcctaaagcct

SEQ ID NO: 97029 - DNA, 33 bp, Homo sapien
gccacagcaacaactgcagtataaaggtcatga

SEQ ID NO: 97030 - DNA, 33 bp, Homo sapien
gccacagcaacaactggagtataaaggtcatga

SEQ ID NO: 97031 - DNA, 33 bp, Homo sapien
gccggcataacctggtaacactttgcctcagct

SEQ ID NO: 97032 - DNA, 33 bp, Homo sapien
gccggcataacctggtgacactttgcctcagct

SEQ ID NO: 97033 - DNA, 33 bp, Homo sapien
aaatttgacctagatacaataccattgtctatc

SEQ ID NO: 97034 - DNA, 33 bp, Homo sapien
aaatttgacctagatataataccattgtctatc

SEQ ID NO: 97035 - DNA, 33 bp, Homo sapien
atagaatgaatgaaccaaaagcttctatgtctg

SEQ ID NO: 97036 - DNA, 33 bp, Homo sapien
atagaatgaatgaaccgaaagcttctatgtctg

SEQ ID NO: 97037 - DNA, 33 bp, Homo sapien
tatgactgatacctcaaactccattggatctac

SEQ ID NO: 97038 - DNA, 33 bp, Homo sapien
tatgactgatacctcagactccattggatctac

SEQ ID NO: 97039 - DNA, 33 bp, Homo sapien
ataagataaaatcagcactgtagatactgtcag

SEQ ID NO: 97040 - DNA, 33 bp, Homo sapien
ataagataaaatcagcgctgtagatactgtcag

SEQ ID NO: 97041 - DNA, 33 bp, Homo sapien
ttgtctgcagaatgaactgggaaagaaaaaata

SEQ ID NO: 97042 - DNA, 33 bp, Homo sapien
ttgtctgcagaatgaattgggaaagaaaaaata

SEQ ID NO: 97043 - DNA, 33 bp, Homo sapien
caaaaatctcagtatacaggcctttctctactt

SEQ ID NO: 97044 - DNA, 33 bp, Homo sapien
caaaaatctcagtatataggcctttctctactt

SEQ ID NO: 97045 - DNA, 33 bp, Homo sapien
gtgtgctccattaataggtgagtgagcaagtca

SEQ ID NO: 97046 - DNA, 33 bp, Homo sapien
gtgtgctccattaatatgtgagtgagcaagtca

SEQ ID NO: 97047 - DNA, 33 bp, Homo sapien
gactctccacctcttcaatttcctacattctca

SEQ ID NO: 97048 - DNA, 33 bp, Homo sapien
gactctccacctcttccatttcctacattctca

SEQ ID NO: 97049 - DNA, 33 bp, Homo sapien
aaccacatgagtaaaccatcaggaatctccatc

SEQ ID NO: 97050 - DNA, 33 bp, Homo sapien
aaccacatgagtaaactatcaggaatctccatc

SEQ ID NO: 97051 - DNA, 33 bp, Homo sapien
ttcaatagcaagtcaaaatctcaacttgtgggc

SEQ ID NO: 97052 - DNA, 33 bp, Homo sapien
ttcaatagcaagtcaacatctcaacttgtgggc

SEQ ID NO: 97053 - DNA, 33 bp, Homo sapien
aagactcttatcactacgactgaatgatacttc

SEQ ID NO: 97054 - DNA, 33 bp, Homo sapien
aagactcttatcactatgactgaatgatacttc

SEQ ID NO: 97055 - DNA, 33 bp, Homo sapien
taaatggatgtgaaaaactccacaaaaatcact

SEQ ID NO: 97056 - DNA, 33 bp, Homo sapien
taaatggatgtgaaaatctccacaaaaatcact

SEQ ID NO: 97057 - DNA, 33 bp, Homo sapien
tccaaaacatcagttcaaaataaatcattcaat

SEQ ID NO: 97058 - DNA, 33 bp, Homo sapien
tccaaaacatcagttccaaataaatcattcaat

SEQ ID NO: 97059 - DNA, 33 bp, Homo sapien
cttacactttctagcaataaaaaaacagcagga

SEQ ID NO: 97060 - DNA, 33 bp, Homo sapien
cttacactttctagcagtaaaaaaacagcagga

SEQ ID NO: 97061 - DNA, 33 bp, Homo sapien
attcttcaacgaaataatatcaaggtgcatcag

SEQ ID NO: 97062 - DNA, 33 bp, Homo sapien
attcttcaacgaaatagtatcaaggtgcatcag

SEQ ID NO: 97063 - DNA, 33 bp, Homo sapien
ctcacagcatggtggacagagaattcttcaacg

SEQ ID NO: 97064 - DNA, 33 bp, Homo sapien
ctcacagcatggtggagagagaattcttcaacg

SEQ ID NO: 97065 - DNA, 33 bp, Homo sapien
ttctgaacaaagtcaggccttcctgctgcaacc

SEQ ID NO: 97066 - DNA, 33 bp, Homo sapien
ttctgaacaaagtcagtccttcctgctgcaacc

SEQ ID NO: 97067 - DNA, 33 bp, Homo sapien
ttgtatttaatagtacagcacaatggatcagaa

SEQ ID NO: 97068 - DNA, 33 bp, Homo sapien
ttgtatttaatagtaccgcacaatggatcagaa

SEQ ID NO: 97069 - DNA, 33 bp, Homo sapien
gaaagaacatgaccacaataggcagaagccgac

SEQ ID NO: 97070 - DNA, 33 bp, Homo sapien
gaaagaacatgaccacgataggcagaagccgac

SEQ ID NO: 97071 - DNA, 33 bp, Homo sapien
cccaccctcaagtagaagcaggatgcctggtga

SEQ ID NO: 97072 - DNA, 33 bp, Homo sapien
cccaccctcaagtagatgcaggatgcctggtga

SEQ ID NO: 97073 - DNA, 33 bp, Homo sapien
ttgcagagctacccgaccaagaaattacaagat

SEQ ID NO: 97074 - DNA, 33 bp, Homo sapien
ttgcagagctacccgatcaagaaattacaagat

SEQ ID NO: 97075 - DNA, 33 bp, Homo sapien
tcatttggaatcctcaagtagagggtttggggc

SEQ ID NO: 97076 - DNA, 33 bp, Homo sapien
tcatttggaatcctcacgtagagggtttggggc

SEQ ID NO: 97077 - DNA, 33 bp, Homo sapien
cctgattttgctgtgccaatagaaggtgacatt

SEQ ID NO: 97078 - DNA, 33 bp, Homo sapien
cctgattttgctgtgcgaatagaaggtgacatt

SEQ ID NO: 97079 - DNA, 33 bp, Homo sapien
ctagtaagccaaataagaaagtgctgtaggtat

SEQ ID NO: 97080 - DNA, 33 bp, Homo sapien
ctagtaagccaaataataaagtgctgtaggtat

SEQ ID NO: 97081 - DNA, 33 bp, Homo sapien
ttatttctattatatgcacagaagacatttgga

SEQ ID NO: 97082 - DNA, 33 bp, Homo sapien
ttatttctattatatggacagaagacatttgga

SEQ ID NO: 97083 - DNA, 33 bp, Homo sapien
ggatgaatccagtaaccatgtgcaatgggatat

SEQ ID NO: 97084 - DNA, 33 bp, Homo sapien
ggatgaatccagtaactatgtgcaatgggatat

SEQ ID NO: 97085 - DNA, 33 bp, Homo sapien
gaaagagtgagatttcaaagagttcaatgctga

SEQ ID NO: 97086 - DNA, 33 bp, Homo sapien
gaaagagtgagatttccaagagttcaatgctga

SEQ ID NO: 97087 - DNA, 33 bp, Homo sapien
catttgacaatcattgcagattaactgtatgtg

SEQ ID NO: 97088 - DNA, 33 bp, Homo sapien
catttgacaatcattggagattaactgtatgtg

SEQ ID NO: 97089 - DNA, 33 bp, Homo sapien
ctcaacttcaccataagaatgaacatcgacggg

SEQ ID NO: 97090 - DNA, 33 bp, Homo sapien
ctcaacttcaccataataatgaacatcgacggg

SEQ ID NO: 97091 - DNA, 33 bp, Homo sapien
gaaggtagaggatgtacagaaggaaggcaagga

SEQ ID NO: 97092 - DNA, 33 bp, Homo sapien
gaaggtagaggatgtagagaaggaaggcaagga

SEQ ID NO: 97093 - DNA, 33 bp, Homo sapien
agaactcaaagaagacaaatagttttcccagga

SEQ ID NO: 97094 - DNA, 33 bp, Homo sapien
agaactcaaagaagacgaatagttttcccagga

SEQ ID NO: 97095 - DNA, 33 bp, Homo sapien
cttaccaccatgctaaatgggctgttaaacaat

SEQ ID NO: 97096 - DNA, 33 bp, Homo sapien
cttaccaccatgctaactgggctgttaaacaat

SEQ ID NO: 97097 - DNA, 33 bp, Homo sapien
ttgggaagagacttcaaatcatttcagtgagca

SEQ ID NO: 97098 - DNA, 33 bp, Homo sapien
ttgggaagagacttcagatcatttcagtgagca

SEQ ID NO: 97099 - DNA, 33 bp, Homo sapien
tttcgacttcagaatacgccctgaatctgacca

SEQ ID NO: 97100 - DNA, 33 bp, Homo sapien
tttcgacttcagaatatgccctgaatctgacca

SEQ ID NO: 97101 - DNA, 33 bp, Homo sapien
actgtactacaattaaaagccaaagttgctgcc

SEQ ID NO: 97102 - DNA, 33 bp, Homo sapien
actgtactacaattaagagccaaagttgctgcc

SEQ ID NO: 97103 - DNA, 33 bp, Homo sapien
caaaacaacaaaaacaataacagcagcttggag

SEQ ID NO: 97104 - DNA, 33 bp, Homo sapien
caaaacaacaaaaacagtaacagcagcttggag

SEQ ID NO: 97105 - DNA, 33 bp, Homo sapien
aaagctgaactcataaaaacagagagttagaat

SEQ ID NO: 97106 - DNA, 33 bp, Homo sapien
aaagctgaactcataataacagagagttagaat

SEQ ID NO: 97107 - DNA, 33 bp, Homo sapien
ggaagtcccagaacaacagctgtgcagcaacat

SEQ ID NO: 97108 - DNA, 33 bp, Homo sapien
ggaagtcccagaacaatagctgtgcagcaacat

SEQ ID NO: 97109 - DNA, 33 bp, Homo sapien
ggcatggtggcgcataacactcagctacttcgg

SEQ ID NO: 97110 - DNA, 33 bp, Homo sapien
ggcatggtggcgcataccactcagctacttcgg

SEQ ID NO: 97111 - DNA, 33 bp, Homo sapien
tttactggtcacagaaatcagtaccttttttct

SEQ ID NO: 97112 - DNA, 33 bp, Homo sapien
tttactggtcacagaagtcagtaccttttttct

SEQ ID NO: 97113 - DNA, 33 bp, Homo sapien
tcgaagtaaaagtggacactattctgctgccct

SEQ ID NO: 97114 - DNA, 33 bp, Homo sapien
tcgaagtaaaagtggatactattctgctgccct

SEQ ID NO: 97115 - DNA, 33 bp, Homo sapien
tggctgacctaagtaaccctggtgactattctt

SEQ ID NO: 97116 - DNA, 33 bp, Homo sapien
tggctgacctaagtaatcctggtgactattctt

SEQ ID NO: 97117 - DNA, 33 bp, Homo sapien; identical to SEQ ID NO: 97115

SEQ ID NO: 97118 - DNA, 33 bp, Homo sapien; identical to SEQ ID NO: 97116

SEQ ID NO: 97119 - DNA, 33 bp, Homo sapien
aaatcaggaagtgttacacctcttactttcttc

SEQ ID NO: 97120 - DNA, 33 bp, Homo sapien
aaatcaggaagtgttagacctcttactttcttc

SEQ ID NO: 97121 - DNA, 33 bp, Homo sapien
tgtaagagatgcatgactattaccaaagttacc

SEQ ID NO: 97122 - DNA, 33 bp, Homo sapien
tgtaagagatgcatgattattaccaaagttacc

SEQ ID NO: 97123 - DNA, 33 bp, Homo sapien
ctggtgatagagacataaaccgtatacacgtac

SEQ ID NO: 97124 - DNA, 33 bp, Homo sapien
ctggtgatagagacatcaaccgtatacacgtac

SEQ ID NO: 97125 - DNA, 33 bp, Homo sapien
aactgtaacccacagacaaatccacctgccacc

SEQ ID NO: 97126 - DNA, 33 bp, Homo sapien
aactgtaacccacagagaaatccacctgccacc

SEQ ID NO: 97127 - DNA, 33 bp, Homo sapien
aatggaaagaaccacagaaggaccaggtggaga

SEQ ID NO: 97128 - DNA, 33 bp, Homo sapien
aatggaaagaaccacataaggaccaggtggaga

SEQ ID NO: 97129 - DNA, 33 bp, Homo sapien
aaacagttcaggtgagaaaaattagtaaccttt

SEQ ID NO: 97130 - DNA, 33 bp, Homo sapien
aaacagttcaggtgagcaaaattagtaaccttt

SEQ ID NO: 97131 - DNA, 33 bp, Homo sapien
aaagggtgccctgattcaagagtttggagttct

SEQ ID NO: 97132 - DNA, 33 bp, Homo sapien
aaagggtgccctgattgaagagtttggagttct

SEQ ID NO: 97133 - DNA, 33 bp, Homo sapien; identical to SEQ ID NO: 97131

SEQ ID NO: 97134 - DNA, 33 bp, Homo sapien; identical to SEQ ID NO: 97132

SEQ ID NO: 97135 - DNA, 33 bp, Homo sapien
ttgaaggacgctcatgcaacggttttatgggta

SEQ ID NO: 97136 - DNA, 33 bp, Homo sapien
ttgaaggacgctcatgtaacggttttatgggta

SEQ ID NO: 97137 - DNA, 33 bp, Homo sapien
gtgtcatctgagtgaaaatgtccagcaggctgt

SEQ ID NO: 97138 - DNA, 33 bp, Homo sapien
gtgtcatctgagtgaatatgtccagcaggctgt

SEQ ID NO: 97139 - DNA, 33 bp, Homo sapien
gggtccagagcaaagccagcttagttttaatga

SEQ ID NO: 97140 - DNA, 33 bp, Homo sapien
gggtccagagcaaagctagcttagttttaatga

SEQ ID NO: 97141 - DNA, 33 bp, Homo sapien
ttaaatgaaattgtccagactctctcagagggt

SEQ ID NO: 97142 - DNA, 33 bp, Homo sapien
ttaaatgaaattgtcccgactctctcagagggt

SEQ ID NO: 97143 - DNA, 33 bp, Homo sapien
ccttgtccctgctccactataatcttgagggtc

SEQ ID NO: 97144 - DNA, 33 bp, Homo sapien
ccttgtccctgctccagtataatcttgagggtc

SEQ ID NO: 97145 - DNA, 33 bp, Homo sapien
ttgtaatcaaccaaaaagcttatatacacacat

SEQ ID NO: 97146 - DNA, 33 bp, Homo sapien
ttgtaatcaaccaaaaggcttatatacacacat

SEQ ID NO: 97147 - DNA, 33 bp, Homo sapien
ggcagagctcacagagaaccgagggattagacc

SEQ ID NO: 97148 - DNA, 33 bp, Homo sapien
ggcagagctcacagaggaccgagggattagacc

SEQ ID NO: 97149 - DNA, 33 bp, Homo sapien
gtgcactgctatgacaaggaagtgcagtttgcc

SEQ ID NO: 97150 - DNA, 33 bp, Homo sapien
gtgcactgctatgacagggaagtgcagtttgcc

SEQ ID NO: 97151 - DNA, 33 bp, Homo sapien
aaaaccaacttggaaacataaagattactgtcc

SEQ ID NO: 97152 - DNA, 33 bp, Homo sapien
aaaaccaacttggaaagataaagattactgtcc

SEQ ID NO: 97153 - DNA, 33 bp, Homo sapien
ttgcctatcactgtgactatcaaagggcagtat

SEQ ID NO: 97154 - DNA, 33 bp, Homo sapien
ttgcctatcactgtgattatcaaagggcagtat

SEQ ID NO: 97155 - DNA, 33 bp, Homo sapien
ttttaagctgctgagaaatgttatcccctgcac

SEQ ID NO: 97156 - DNA, 33 bp, Homo sapien
ttttaagctgctgagagatgttatcccctgcac

SEQ ID NO: 97157 - DNA, 33 bp, Homo sapien
tctgctagtaattgcccgccatgttttactagc

SEQ ID NO: 97158 - DNA, 33 bp, Homo sapien
tctgctagtaattgcctgccatgttttactagc

SEQ ID NO: 97159 - DNA, 33 bp, Homo sapien
aataatgaagagatcaatagtgccacacagtaa

SEQ ID NO: 97160 - DNA, 33 bp, Homo sapien
aataatgaagagatcagtagtgccacacagtaa

SEQ ID NO: 97161 - DNA, 33 bp, Homo sapien
ggaagtaggagtagaccgtaggagaatgttatt

SEQ ID NO: 97162 - DNA, 33 bp, Homo sapien
ggaagtaggagtagactgtaggagaatgttatt

SEQ ID NO: 97163 - DNA, 33 bp, Homo sapien
agacctgtttaatgcaacattctgggatgatgg

SEQ ID NO: 97164 - DNA, 33 bp, Homo sapien
agacctgtttaatgcagcattctgggatgatgg

SEQ ID NO: 97165 - DNA, 33 bp, Homo sapien
gtgaaatcactgaacaaaagttattgatacagc

SEQ ID NO: 97166 - DNA, 33 bp, Homo sapien
gtgaaatcactgaacagaagttattgatacagc

SEQ ID NO: 97167 - DNA, 33 bp, Homo sapien
gaaaacaagatttctacgttaattgcgtatttg

SEQ ID NO: 97168 - DNA, 33 bp, Homo sapien
gaaaacaagatttctatgttaattgcgtatttg

SEQ ID NO: 97169 - DNA, 33 bp, Homo sapien
caactgttgcactcacgaaatatgttgtttaag

SEQ ID NO: 97170 - DNA, 33 bp, Homo sapien
caactgttgcactcactaaatatgttgtttaag

SEQ ID NO: 97171 - DNA, 33 bp, Homo sapien
gtgctcttcaatgtcaactttaatgcttttcag

SEQ ID NO: 97172 - DNA, 33 bp, Homo sapien
gtgctcttcaatgtcacctttaatgcttttcag

SEQ ID NO: 97173 - DNA, 33 bp, Homo sapien
ataagctttcaaaaataatgaggtagcattttg

SEQ ID NO: 97174 - DNA, 33 bp, Homo sapien
ataagctttcaaaaatgatgaggtagcattttg

SEQ ID NO: 97175 - DNA, 33 bp, Homo sapien
tatgtagaattgaaagcaatgtccccactttta

SEQ ID NO: 97176 - DNA, 33 bp, Homo sapien
tatgtagaattgaaagtaatgtccccactttta

SEQ ID NO: 97177 - DNA, 33 bp, Homo sapien
agagtaccatatacaaatacatgccacaaaatt

SEQ ID NO: 97178 - DNA, 33 bp, Homo sapien
agagtaccatatacaagtacatgccacaaaatt

SEQ ID NO: 97179 - DNA, 33 bp, Homo sapien
acaaaatattagcaaacttatttcagaagcata

SEQ ID NO: 97180 - DNA, 33 bp, Homo sapien
acaaaatattagcaaagttatttcagaagcata

SEQ ID NO: 97181 - DNA, 33 bp, Homo sapien
ggaaatgagagaaaaacggtatgttagcaggaa

SEQ ID NO: 97182 - DNA, 33 bp, Homo sapien
ggaaatgagagaaaaatggtatgttagcaggaa

SEQ ID NO: 97183 - DNA, 33 bp, Homo sapien
tttttaactcagtccaatgaggctctggctgtc

SEQ ID NO: 97184 - DNA, 33 bp, Homo sapien
tttttaactcagtccagtgaggctctggctgtc

SEQ ID NO: 97185 - DNA, 33 bp, Homo sapien
attagaaaattatctaagtgacaaaaagaaggc

SEQ ID NO: 97186 - DNA, 33 bp, Homo sapien
attagaaaattatctatgtgacaaaaagaaggc

SEQ ID NO: 97187 - DNA, 33 bp, Homo sapien
gattctaacccaaacccgatggcaaaggctatc

SEQ ID NO: 97188 - DNA, 33 bp, Homo sapien
gattctaacccaaacctgatggcaaaggctatc

SEQ ID NO: 97189 - DNA, 33 bp, Homo sapien
tgttctttctggttcaggtctttctgtaagtca

SEQ ID NO: 97190 - DNA, 33 bp, Homo sapien
tgttctttctggttcatgtctttctgtaagtca

SEQ ID NO: 97191 - DNA, 33 bp, Homo sapien
taattttgctttaccgaagatttctaaacttta

SEQ ID NO: 97192 - DNA, 33 bp, Homo sapien
taattttgctttaccgcagatttctaaacttta

SEQ ID NO: 97193 - DNA, 33 bp, Homo sapien
ggaatatagcaataaaacgcatagacacaccct

SEQ ID NO: 97194 - DNA, 33 bp, Homo sapien
ggaatatagcaataaaccgcatagacacaccct

SEQ ID NO: 97195 - DNA, 33 bp, Homo sapien
attacataaagtgttccataactatcagctgta

SEQ ID NO: 97196 - DNA, 33 bp, Homo sapien
attacataaagtgttctataactatcagctgta

SEQ ID NO: 97197 - DNA, 33 bp, Homo sapien
aattgtttagaagtagcagcttttcatgattta

SEQ ID NO: 97198 - DNA, 33 bp, Homo sapien
aattgtttagaagtagtagcttttcatgattta

SEQ ID NO: 97199 - DNA, 33 bp, Homo sapien
caacacctctggagataaattctgggcttcagt

SEQ ID NO: 97200 - DNA, 33 bp, Homo sapien
caacacctctggagatgaattctgggcttcagt

SEQ ID NO: 97201 - DNA, 33 bp, Homo sapien
gataaatgtgtctcaacgtaactttgatcaaat

SEQ ID NO: 97202 - DNA, 33 bp, Homo sapien
gataaatgtgtctcaatgtaactttgatcaaat

SEQ ID NO: 97203 - DNA, 33 bp, Homo sapien
gcatttgagcttgctagaataagactgactttt

SEQ ID NO: 97204 - DNA, 33 bp, Homo sapien
gcatttgagcttgctataataagactgactttt

SEQ ID NO: 97205 - DNA, 33 bp, Homo sapien
aggaaactggaggtgaagtatatttccatcacc

SEQ ID NO: 97206 - DNA, 33 bp, Homo sapien
aggaaactggaggtgatgtatatttccatcacc

SEQ ID NO: 97207 - DNA, 33 bp, Homo sapien
caggaatgaggggccaaagaaatgtattataaa

SEQ ID NO: 97208 - DNA, 33 bp, Homo sapien
caggaatgaggggccagagaaatgtattataaa

SEQ ID NO: 97209 - DNA, 33 bp, Homo sapien
gtgattagctctaaaacgagaactggtctgatc

SEQ ID NO: 97210 - DNA, 33 bp, Homo sapien
gtgattagctctaaaatgagaactggtctgatc

SEQ ID NO: 97211 - DNA, 33 bp, Homo sapien
atattacagaccttccaaaagtataatttctta

SEQ ID NO: 97212 - DNA, 33 bp, Homo sapien
atattacagaccttccgaaagtataatttctta

SEQ ID NO: 97213 - DNA, 33 bp, Homo sapien
actggagtatctagaacgcatctgggtcgaatt

SEQ ID NO: 97214 - DNA, 33 bp, Homo sapien
actggagtatctagaatgcatctgggtcgaatt

SEQ ID NO: 97215 - DNA, 33 bp, Homo sapien
aatttagaaatatatccagccttacatggccaa

SEQ ID NO: 97216 - DNA, 33 bp, Homo sapien
aatttagaaatatatcgagccttacatggccaa

SEQ ID NO: 97217 - DNA, 33 bp, Homo sapien
ctcccatgatgaaaaacaagacagaaaacaaac

SEQ ID NO: 97218 - DNA, 33 bp, Homo sapien
ctcccatgatgaaaaataagacagaaaacaaac

SEQ ID NO: 97219 - DNA, 33 bp, Homo sapien
gcccaagtcggatcacagagtcccgctttctgt

SEQ ID NO: 97220 - DNA, 33 bp, Homo sapien
gcccaagtcggatcaccgagtcccgctttctgt

SEQ ID NO: 97221 - DNA, 33 bp, Homo sapien
tgaatttcggtgaatacagtggtgacaatgctc

SEQ ID NO: 97222 - DNA, 33 bp, Homo sapien
tgaatttcggtgaatatagtggtgacaatgctc

SEQ ID NO: 97223 - DNA, 33 bp, Homo sapien
tttatcagtttgctaaggcctaatttttacaac

SEQ ID NO: 97224 - DNA, 33 bp, Homo sapien
tttatcagtttgctaatgcctaatttttacaac

SEQ ID NO: 97225 - DNA, 33 bp, Homo sapien
gtgtattatcctcagacgtaattctttgatttt

SEQ ID NO: 97226 - DNA, 33 bp, Homo sapien
gtgtattatcctcagatgtaattctttgatttt

SEQ ID NO: 97227 - DNA, 33 bp, Homo sapien
ctacgcccagcaactaaacttctaaacatcaat

SEQ ID NO: 97228 - DNA, 33 bp, Homo sapien
ctacgcccagcaactacacttctaaacatcaat

SEQ ID NO: 97229 - DNA, 33 bp, Homo sapien
agaagtcctagattccacatgagcttatgcact

SEQ ID NO: 97230 - DNA, 33 bp, Homo sapien
agaagtcctagattccgcatgagcttatgcact

SEQ ID NO: 97231 - DNA, 33 bp, Homo sapien
ataggagactacaaggcacaaactgaatcctca

SEQ ID NO: 97232 - DNA, 33 bp, Homo sapien
ataggagactacaaggtacaaactgaatcctca

SEQ ID NO: 97233 - DNA, 33 bp, Homo sapien
attcttatctcagttaccaggtcaagtaattta

SEQ ID NO: 97234 - DNA, 33 bp, Homo sapien
attcttatctcagttatcaggtcaagtaattta

SEQ ID NO: 97235 - DNA, 33 bp, Homo sapien
gatattggtgtttgtaaggaagactttaggttt

SEQ ID NO: 97236 - DNA, 33 bp, Homo sapien
gatattggtgtttgtagggaagactttaggttt

SEQ ID NO: 97237 - DNA, 33 bp, Homo sapien
aaaaacgatgatgtgtcaaacagttaataagag

SEQ ID NO: 97238 - DNA, 33 bp, Homo sapien
aaaaacgatgatgtgttaaacagttaataagag

SEQ ID NO: 97239 - DNA, 33 bp, Homo sapien
tatggtgtgactgtctaacatgcaggtaaacat

SEQ ID NO: 97240 - DNA, 33 bp, Homo sapien
tatggtgtgactgtctgacatgcaggtaaacat

SEQ ID NO: 97241 - DNA, 33 bp, Homo sapien
ataaaattaaacatacacttttatatgacatgg

SEQ ID NO: 97242 - DNA, 33 bp, Homo sapien
ataaaattaaacatacgcttttatatgacatgg

SEQ ID NO: 97243 - DNA, 33 bp, Homo sapien
tgtggagcaactgggactccaatgcattcctga

SEQ ID NO: 97244 - DNA, 33 bp, Homo sapien
tgtggagcaactgggattccaatgcattcctga

SEQ ID NO: 97245 - DNA, 33 bp, Homo sapien
ctagccttcattgaaaattaccacaaacattat

SEQ ID NO: 97246 - DNA, 33 bp, Homo sapien
ctagccttcattgaaagttaccacaaacattat

SEQ ID NO: 97247 - DNA, 33 bp, Homo sapien
gcagggatgaatgttaagttttcggcaattgag

SEQ ID NO: 97248 - DNA, 33 bp, Homo sapien
gcagggatgaatgttacgttttcggcaattgag

SEQ ID NO: 97249 - DNA, 33 bp, Homo sapien
gtgttctgccactttacagctaggtacccttga

SEQ ID NO: 97250 - DNA, 33 bp, Homo sapien
gtgttctgccactttatagctaggtacccttga

SEQ ID NO: 97251 - DNA, 33 bp, Homo sapien
tggaatggatttagccagataattagggcaaca

SEQ ID NO: 97252 - DNA, 33 bp, Homo sapien
tggaatggatttagccggataattagggcaaca

SEQ ID NO: 97253 - DNA, 33 bp, Homo sapien
ggaggggtaactacacaaggttagagatgtgtc

SEQ ID NO: 97254 - DNA, 33 bp, Homo sapien
ggaggggtaactacacgaggttagagatgtgtc

SEQ ID NO: 97255 - DNA, 33 bp, Homo sapien
ctcacagaacagagtacagaggtagttagcaga

SEQ ID NO: 97256 - DNA, 33 bp, Homo sapien
ctcacagaacagagtagagaggtagttagcaga

SEQ ID NO: 97257 - DNA, 33 bp, Homo sapien
agataacgtgaaattaactgggaaatccactag

SEQ ID NO: 97258 - DNA, 33 bp, Homo sapien
agataacgtgaaattagctgggaaatccactag

SEQ ID NO: 97259 - DNA, 33 bp, Homo sapien
cagttcttatgcatcacatatcctactctatag

SEQ ID NO: 97260 - DNA, 33 bp, Homo sapien
cagttcttatgcatcagatatcctactctatag

SEQ ID NO: 97261 - DNA, 33 bp, Homo sapien
taatacaatgggtaaaaaccatacactgttaag

SEQ ID NO: 97262 - DNA, 33 bp, Homo sapien
taatacaatgggtaaagaccatacactgttaag

SEQ ID NO: 97263 - DNA, 33 bp, Homo sapien
gtacattcacttaatgaaatactcttgactcat

SEQ ID NO: 97264 - DNA, 33 bp, Homo sapien
gtacattcacttaatggaatactcttgactcat

SEQ ID NO: 97265 - DNA, 33 bp, Homo sapien
ccaaaatttactaattcaagtcatcactgttat

SEQ ID NO: 97266 - DNA, 33 bp, Homo sapien
ccaaaatttactaattgaagtcatcactgttat

SEQ ID NO: 97267 - DNA, 33 bp, Homo sapien
aagagatgtctacaaccggaaggaaaacaatcc

SEQ ID NO: 97268 - DNA, 33 bp, Homo sapien
aagagatgtctacaactggaaggaaaacaatcc

SEQ ID NO: 97269 - DNA, 33 bp, Homo sapien
aggactcccctagtcaataaacaatgctgggat

SEQ ID NO: 97270 - DNA, 33 bp, Homo sapien
aggactcccctagtcagtaaacaatgctgggat

SEQ ID NO: 97271 - DNA, 33 bp, Homo sapien
ctctctcacctgaaccaaaggattttcatctgt

SEQ ID NO: 97272 - DNA, 33 bp, Homo sapien
ctctctcacctgaaccgaaggattttcatctgt

SEQ ID NO: 97273 - DNA, 33 bp, Homo sapien
attcagtcataaaatacagtttcagtgatatat

SEQ ID NO: 97274 - DNA, 33 bp, Homo sapien
attcagtcataaaatagagtttcagtgatatat

SEQ ID NO: 97275 - DNA, 33 bp, Homo sapien
tcatctaatgtcatctaaaatcagcatacagcc

SEQ ID NO: 97276 - DNA, 33 bp, Homo sapien
tcatctaatgtcatctcaaatcagcatacagcc

SEQ ID NO: 97277 - DNA, 33 bp, Homo sapien
ctttccttttcagccactgatcgtttccctgcc

SEQ ID NO: 97278 - DNA, 33 bp, Homo sapien
ctttccttttcagccattgatcgtttccctgcc

SEQ ID NO: 97279 - DNA, 33 bp, Homo sapien
cctctccactctgctgcagtattccagaagaaa

SEQ ID NO: 97280 - DNA, 33 bp, Homo sapien
cctctccactctgctgtagtattccagaagaaa

SEQ ID NO: 97281 - DNA, 33 bp, Homo sapien
cacagcatcaccctggaatctgcagcagatcat

SEQ ID NO: 97282 - DNA, 33 bp, Homo sapien
cacagcatcaccctggtatctgcagcagatcat

SEQ ID NO: 97283 - DNA, 33 bp, Homo sapien
atataacataacaataccttcctgatgtgggag

SEQ ID NO: 97284 - DNA, 33 bp, Homo sapien
atataacataacaatatcttcctgatgtgggag

SEQ ID NO: 97285 - DNA, 33 bp, Homo sapien
tttccatcagtacttcacaagagccacactttt

SEQ ID NO: 97286 - DNA, 33 bp, Homo sapien
tttccatcagtacttctcaagagccacactttt

SEQ ID NO: 97287 - DNA, 33 bp, Homo sapien
aatctttctttaagcaaatgtcaggattattat

SEQ ID NO: 97288 - DNA, 33 bp, Homo sapien
aatctttctttaagcatatgtcaggattattat

SEQ ID NO: 97289 - DNA, 33 bp, Homo sapien
gtgcagtgatgctctaaaacaggagtaggtctt

SEQ ID NO: 97290 - DNA, 33 bp, Homo sapien
gtgcagtgatgctctacaacaggagtaggtctt

SEQ ID NO: 97291 - DNA, 33 bp, Homo sapien
aatcacattttcaaagccttctcagagttgtga

SEQ ID NO: 97292 - DNA, 33 bp, Homo sapien
aatcacattttcaaaggcttctcagagttgtga

SEQ ID NO: 97293 - DNA, 33 bp, Homo sapien
ttatgtcagcactccactacaagtactaacttc

SEQ ID NO: 97294 - DNA, 33 bp, Homo sapien
ttatgtcagcactccattacaagtactaacttc

SEQ ID NO: 97295 - DNA, 33 bp, Homo sapien
ctacttaacctcactgcagaacaaggcaatttc

SEQ ID NO: 97296 - DNA, 33 bp, Homo sapien
ctacttaacctcactgtagaacaaggcaatttc

SEQ ID NO: 97297 - DNA, 33 bp, Homo sapien
cacacacagattagaacgtacctgttggaagag

SEQ ID NO: 97298 - DNA, 33 bp, Homo sapien
cacacacagattagaatgtacctgttggaagag

SEQ ID NO: 97299 - DNA, 33 bp, Homo sapien
agttggcagatgttcaatataattcctacagat

SEQ ID NO: 97300 - DNA, 33 bp, Homo sapien
agttggcagatgttcagtataattcctacagat

SEQ ID NO: 97301 - DNA, 33 bp, Homo sapien
tccacctactatgttacaagccagagcaaacaa

SEQ ID NO: 97302 - DNA, 33 bp, Homo sapien
tccacctactatgttataagccagagcaaacaa

SEQ ID NO: 97303 - DNA, 33 bp, Homo sapien
cttggtttagagactcaagctgcgaaatgattc

SEQ ID NO: 97304 - DNA, 33 bp, Homo sapien
cttggtttagagactcgagctgcgaaatgattc

SEQ ID NO: 97305 - DNA, 33 bp, Homo sapien
tgtgtaaattgttgaaatggttggatgaatgag

SEQ ID NO: 97306 - DNA, 33 bp, Homo sapien
tgtgtaaattgttgaattggttggatgaatgag

SEQ ID NO: 97307 - DNA, 33 bp, Homo sapien
catatagatatacctcaccaagaaagatgttct

SEQ ID NO: 97308 - DNA, 33 bp, Homo sapien
catatagatatacctctccaagaaagatgttct

SEQ ID NO: 97309 - DNA, 33 bp, Homo sapien
ttgttcaagataccaccattcccacttctggct

SEQ ID NO: 97310 - DNA, 33 bp, Homo sapien
ttgttcaagataccactattcccacttctggct

SEQ ID NO: 97311 - DNA, 33 bp, Homo sapien
ttcgaatctctgttgacacttacttggatcttc

SEQ ID NO: 97312 - DNA, 33 bp, Homo sapien
ttcgaatctctgttgagacttacttggatcttc

SEQ ID NO: 97313 - DNA, 33 bp, Homo sapien
tgtaaccatctaagaactgtaaatcagaagcaa

SEQ ID NO: 97314 - DNA, 33 bp, Homo sapien
tgtaaccatctaagaattgtaaatcagaagcaa

SEQ ID NO: 97315 - DNA, 33 bp, Homo sapien
atacatgatatatctgaaaggagagctatttag

SEQ ID NO: 97316 - DNA, 33 bp, Homo sapien
atacatgatatatctgtaaggagagctatttag

SEQ ID NO: 97317 - DNA, 33 bp, Homo sapien
ggcagctcagatcatacgaattgtaattaaaga

SEQ ID NO: 97318 - DNA, 33 bp, Homo sapien
ggcagctcagatcatatgaattgtaattaaaga

SEQ ID NO: 97319 - DNA, 33 bp, Homo sapien
ttactgtgtcagttaaaaagcagtttcatgtaa

SEQ ID NO: 97320 - DNA, 33 bp, Homo sapien
ttactgtgtcagttaataagcagtttcatgtaa

SEQ ID NO: 97321 - DNA, 33 bp, Homo sapien
agtgatttcagaatgcacttatgctttttttat

SEQ ID NO: 97322 - DNA, 33 bp, Homo sapien
agtgatttcagaatgcccttatgctttttttat

SEQ ID NO: 97323 - DNA, 33 bp, Homo sapien
caatggtggcaaataactgacatatccataata

SEQ ID NO: 97324 - DNA, 33 bp, Homo sapien
caatggtggcaaataagtgacatatccataata

SEQ ID NO: 97325 - DNA, 33 bp, Homo sapien
gatccaggtgttcacactgaagttattaaattt

SEQ ID NO: 97326 - DNA, 33 bp, Homo sapien
gatccaggtgttcacattgaagttattaaattt

SEQ ID NO: 97327 - DNA, 33 bp, Homo sapien
cttctacattctaccactagttctaacttcctt

SEQ ID NO: 97328 - DNA, 33 bp, Homo sapien
cttctacattctaccagtagttctaacttcctt

SEQ ID NO: 97329 - DNA, 33 bp, Homo sapien
ctagaacagaataatcaatggccaaaactattg

SEQ ID NO: 97330 - DNA, 33 bp, Homo sapien
ctagaacagaataatcgatggccaaaactattg

SEQ ID NO: 97331 - DNA, 33 bp, Homo sapien
ccaaaacaacaatacccgatgtcttttcctgtc

SEQ ID NO: 97332 - DNA, 33 bp, Homo sapien
ccaaaacaacaatacctgatgtcttttcctgtc

SEQ ID NO: 97333 - DNA, 33 bp, Homo sapien
atatattcatatgtcaacactcattaataagac

SEQ ID NO: 97334 - DNA, 33 bp, Homo sapien
atatattcatatgtcagcactcattaataagac

SEQ ID NO: 97335 - DNA, 33 bp, Homo sapien
catatatggcgcatcaagtctacattaggcacc

SEQ ID NO: 97336 - DNA, 33 bp, Homo sapien
catatatggcgcatcaggtctacattaggcacc

SEQ ID NO: 97337 - DNA, 33 bp, Homo sapien
catttcagcggaatcacgtcctcatgggagcct

SEQ ID NO: 97338 - DNA, 33 bp, Homo sapien
catttcagcggaatcatgtcctcatgggagcct

SEQ ID NO: 97339 - DNA, 33 bp, Homo sapien
tcctggaccactgacaatcactgatagctttat

SEQ ID NO: 97340 - DNA, 33 bp, Homo sapien
tcctggaccactgacagtcactgatagctttat

SEQ ID NO: 97341 - DNA, 33 bp, Homo sapien
ttgaaaaaaaagtaccaccatttatcatgtttc

SEQ ID NO: 97342 - DNA, 33 bp, Homo sapien
ttgaaaaaaaagtaccgccatttatcatgtttc

SEQ ID NO: 97343 - DNA, 33 bp, Homo sapien
attccatttggtttccaaaataatcctgtgtga

SEQ ID NO: 97344 - DNA, 33 bp, Homo sapien
attccatttggtttccgaaataatcctgtgtga

SEQ ID NO: 97345 - DNA, 33 bp, Homo sapien
gatgctgtaacactacaaaaaaaccaaagtcac

SEQ ID NO: 97346 - DNA, 33 bp, Homo sapien
gatgctgtaacactacgaaaaaaccaaagtcac

SEQ ID NO: 97347 - DNA, 33 bp, Homo sapien
tatcaaaaggtaagaacggtgacatctttgtca

SEQ ID NO: 97348 - DNA, 33 bp, Homo sapien
tatcaaaaggtaagaatggtgacatctttgtca

SEQ ID NO: 97349 - DNA, 33 bp, Homo sapien
aaaattgtgggcaagcacctttattgcagtttc

SEQ ID NO: 97350 - DNA, 33 bp, Homo sapien
aaaattgtgggcaagcgcctttattgcagtttc

SEQ ID NO: 97351 - DNA, 33 bp, Homo sapien
tgctgcatagcaaaagaaacagtgagcagagta

SEQ ID NO: 97352 - DNA, 33 bp, Homo sapien
tgctgcatagcaaaaggaacagtgagcagagta

SEQ ID NO: 97353 - DNA, 33 bp, Homo sapien
ttttgaacagataagcaaatgcttcaatgcaaa

SEQ ID NO: 97354 - DNA, 33 bp, Homo sapien
ttttgaacagataagcgaatgcttcaatgcaaa

SEQ ID NO: 97355 - DNA, 33 bp, Homo sapien
catgattgatgagatacgttgtgtgtttagtct

SEQ ID NO: 97356 - DNA, 33 bp, Homo sapien
catgattgatgagatatgttgtgtgtttagtct

SEQ ID NO: 97357 - DNA, 33 bp, Homo sapien
ataattcttcgtggaaagaacagcacctaaggt

SEQ ID NO: 97358 - DNA, 33 bp, Homo sapien
ataattcttcgtggaaggaacagcacctaaggt

SEQ ID NO: 97359 - DNA, 33 bp, Homo sapien
tgggtccctgagtaaactcaatagaaaagccgc

SEQ ID NO: 97360 - DNA, 33 bp, Homo sapien
tgggtccctgagtaaattcaatagaaaagccgc

SEQ ID NO: 97361 - DNA, 33 bp, Homo sapien
ctcagcctcatgatctcacctagtagcaaaagg

SEQ ID NO: 97362 - DNA, 33 bp, Homo sapien
ctcagcctcatgatcttacctagtagcaaaagg

SEQ ID NO: 97363 - DNA, 33 bp, Homo sapien
tctgtgagatttctccacaacatatcagacaca

SEQ ID NO: 97364 - DNA, 33 bp, Homo sapien
tctgtgagatttctccgcaacatatcagacaca

SEQ ID NO: 97365 - DNA, 33 bp, Homo sapien
ttctgaatcactgaagcactgaaaatgcttctt

SEQ ID NO: 97366 - DNA, 33 bp, Homo sapien
ttctgaatcactgaagtactgaaaatgcttctt

SEQ ID NO: 97367 - DNA, 33 bp, Homo sapien
atgcttcttgttgcataagaccatagtggtcct

SEQ ID NO: 97368 - DNA, 33 bp, Homo sapien
atgcttcttgttgcatgagaccatagtggtcct

SEQ ID NO: 97369 - DNA, 33 bp, Homo sapien
ttcgaattacctaccacgctagctggtcattta

SEQ ID NO: 97370 - DNA, 33 bp, Homo sapien
ttcgaattacctaccatgctagctggtcattta

SEQ ID NO: 97371 - DNA, 33 bp, Homo sapien
cttcttcataattggaagtagttatgtaagaca

SEQ ID NO: 97372 - DNA, 33 bp, Homo sapien
cttcttcataattggacgtagttatgtaagaca

SEQ ID NO: 97373 - DNA, 33 bp, Homo sapien
tatgcccataatacaaaagctaaaacctgtatg

SEQ ID NO: 97374 - DNA, 33 bp, Homo sapien
tatgcccataatacaatagctaaaacctgtatg

SEQ ID NO: 97375 - DNA, 33 bp, Homo sapien
tctttttatttgtggaagtactgcctaattgtc

SEQ ID NO: 97376 - DNA, 33 bp, Homo sapien
tctttttatttgtggacgtactgcctaattgtc

SEQ ID NO: 97377 - DNA, 33 bp, Homo sapien
cactatgaatctgtgaagtattgtcatttgact

SEQ ID NO: 97378 - DNA, 33 bp, Homo sapien
cactatgaatctgtgaggtattgtcatttgact

SEQ ID NO: 97379 - DNA, 33 bp, Homo sapien
gtttgtttttgttgtcgaaacatcactaaggta

SEQ ID NO: 97380 - DNA, 33 bp, Homo sapien
gtttgtttttgttgtctaaacatcactaaggta

SEQ ID NO: 97381 - DNA, 33 bp, Homo sapien
agaatggagcttttgcgattttgaaagaggcat

SEQ ID NO: 97382 - DNA, 33 bp, Homo sapien
agaatggagcttttgctattttgaaagaggcat

SEQ ID NO: 97383 - DNA, 33 bp, Homo sapien
gagaatcataaagatgaaagttgcttagcctct

SEQ ID NO: 97384 - DNA, 33 bp, Homo sapien
gagaatcataaagatgcaagttgcttagcctct

SEQ ID NO: 97385 - DNA, 33 bp, Homo sapien
cttgactttggtgacactcttccttcgtccctc

SEQ ID NO: 97386 - DNA, 33 bp, Homo sapien
cttgactttggtgacattcttccttcgtccctc

SEQ ID NO: 97387 - DNA, 33 bp, Homo sapien
taatgttcaggacaaagtgaagctgactgtcac

SEQ ID NO: 97388 - DNA, 33 bp, Homo sapien
taatgttcaggacaaattgaagctgactgtcac

SEQ ID NO: 97389 - DNA, 33 bp, Homo sapien
gcaagttaatgaaaaacctcccatgtagaaatt

SEQ ID NO: 97390 - DNA, 33 bp, Homo sapien
gcaagttaatgaaaaagctcccatgtagaaatt

SEQ ID NO: 97391 - DNA, 33 bp, Homo sapien
attaagtaagtacaaactagcattgttctctaa

SEQ ID NO: 97392 - DNA, 33 bp, Homo sapien
attaagtaagtacaaattagcattgttctctaa

SEQ ID NO: 97393 - DNA, 33 bp, Homo sapien
agtataaattgtgagtcacctattcattttcct

SEQ ID NO: 97394 - DNA, 33 bp, Homo sapien
agtataaattgtgagttacctattcattttcct

SEQ ID NO: 97395 - DNA, 33 bp, Homo sapien
tagacaaagcttcaggaatttgtccaaggtcat

SEQ ID NO: 97396 - DNA, 33 bp, Homo sapien
tagacaaagcttcaggcatttgtccaaggtcat

SEQ ID NO: 97397 - DNA, 33 bp, Homo sapien
tcttatatgaatccaaaaaaaaatgaagacagt

SEQ ID NO: 97398 - DNA, 33 bp, Homo sapien
tcttatatgaatccaacaaaaaatgaagacagt

SEQ ID NO: 97399 - DNA, 33 bp, Homo sapien
ggagacattaaactgacacagcaatcacaccct

SEQ ID NO: 97400 - DNA, 33 bp, Homo sapien
ggagacattaaactgagacagcaatcacaccct

SEQ ID NO: 97401 - DNA, 33 bp, Homo sapien
tgcaaataagaaggatcagaagcagagagcttt

SEQ ID NO: 97402 - DNA, 33 bp, Homo sapien
tgcaaataagaaggatgagaagcagagagcttt

SEQ ID NO: 97403 - DNA, 33 bp, Homo sapien
acaatcatatgaaaaaaaagctcaatcagtgat

SEQ ID NO: 97404 - DNA, 33 bp, Homo sapien
acaatcatatgaaaaagaagctcaatcagtgat

SEQ ID NO: 97405 - DNA, 33 bp, Homo sapien
ataaggccttgaaagaaaatgattaggagtttt

SEQ ID NO: 97406 - DNA, 33 bp, Homo sapien
ataaggccttgaaagacaatgattaggagtttt

SEQ ID NO: 97407 - DNA, 33 bp, Homo sapien
cacactttacaacaaccagattttgtgagaact

SEQ ID NO: 97408 - DNA, 33 bp, Homo sapien
cacactttacaacaacgagattttgtgagaact

SEQ ID NO: 97409 - DNA, 33 bp, Homo sapien
agatggttatatgaccccaattgcaaagatgat

SEQ ID NO: 97410 - DNA, 33 bp, Homo sapien
agatggttatatgacctcaattgcaaagatgat

SEQ ID NO: 97411 - DNA, 33 bp, Homo sapien
gaccctaaaaggcctaactaaggtgataaacca

SEQ ID NO: 97412 - DNA, 33 bp, Homo sapien
gaccctaaaaggcctagctaaggtgataaacca

SEQ ID NO: 97413 - DNA, 33 bp, Homo sapien
gccatgagcttgtcaactcttttctgtccccca

SEQ ID NO: 97414 - DNA, 33 bp, Homo sapien
gccatgagcttgtcaattcttttctgtccccca

SEQ ID NO: 97415 - DNA, 33 bp, Homo sapien
aagaccagtccaagaaccaaaatatcaaaacct

SEQ ID NO: 97416 - DNA, 33 bp, Homo sapien
aagaccagtccaagaagcaaaatatcaaaacct

SEQ ID NO: 97417 - DNA, 33 bp, Homo sapien
actattttcaaagtgaataactgcagctagtcg

SEQ ID NO: 97418 - DNA, 33 bp, Homo sapien
actattttcaaagtgattaactgcagctagtcg

SEQ ID NO: 97419 - DNA, 33 bp, Homo sapien
acaacataatttctgcactttaaaactgaagtt

SEQ ID NO: 97420 - DNA, 33 bp, Homo sapien
acaacataatttctgcgctttaaaactgaagtt

SEQ ID NO: 97421 - DNA, 33 bp, Homo sapien
tgcaatgaaattcaatcaaatgtgctcaagaat

SEQ ID NO: 97422 - DNA, 33 bp, Homo sapien
tgcaatgaaattcaatgaaatgtgctcaagaat

SEQ ID NO: 97423 - DNA, 33 bp, Homo sapien
tgctaaatcttttcaacctttggtgagctcata

SEQ ID NO: 97424 - DNA, 33 bp, Homo sapien
tgctaaatcttttcaatctttggtgagctcata

SEQ ID NO: 97425 - DNA, 33 bp, Homo sapien
ggctgcactgggacagaacctaaaaaagagagc

SEQ ID NO: 97426 - DNA, 33 bp, Homo sapien
ggctgcactgggacaggacctaaaaaagagagc

SEQ ID NO: 97427 - DNA, 33 bp, Homo sapien
gtaaaaatattgatgacaaggttggatctacaa

SEQ ID NO: 97428 - DNA, 33 bp, Homo sapien
gtaaaaatattgatgataaggttggatctacaa

SEQ ID NO: 97429 - DNA, 33 bp, Homo sapien
ttgttgctttgcaaccagaaattattggccagc

SEQ ID NO: 97430 - DNA, 33 bp, Homo sapien
ttgttgctttgcaaccggaaattattggccagc

SEQ ID NO: 97431 - DNA, 33 bp, Homo sapien
gtatttgcattgcctacgaaacctagtttcctc

SEQ ID NO: 97432 - DNA, 33 bp, Homo sapien
gtatttgcattgcctatgaaacctagtttcctc

SEQ ID NO: 97433 - DNA, 33 bp, Homo sapien
gttcactggaaccagaagtgaatcctgttgttt

SEQ ID NO: 97434 - DNA, 33 bp, Homo sapien
gttcactggaaccagaggtgaatcctgttgttt

SEQ ID NO: 97435 - DNA, 33 bp, Homo sapien
tgatactctgcagtctcagacactcttctcatg

SEQ ID NO: 97436 - DNA, 33 bp, Homo sapien
tgatactctgcagtctgagacactcttctcatg

SEQ ID NO: 97437 - DNA, 33 bp, Homo sapien
gagctgagaagagcaactgggctcctgtgccct

SEQ ID NO: 97438 - DNA, 33 bp, Homo sapien
gagctgagaagagcaattgggctcctgtgccct

SEQ ID NO: 97439 - DNA, 33 bp, Homo sapien
aaatttgaagagagtacaggaaagtagcctatg

SEQ ID NO: 97440 - DNA, 33 bp, Homo sapien
aaatttgaagagagtataggaaagtagcctatg

SEQ ID NO: 97441 - DNA, 33 bp, Homo sapien
gaggaagaagaagataccactatttgtcattac

SEQ ID NO: 97442 - DNA, 33 bp, Homo sapien
gaggaagaagaagatatcactatttgtcattac

SEQ ID NO: 97443 - DNA, 33 bp, Homo sapien
ttgaacccaaggaaataaattggctggattaac

SEQ ID NO: 97444 - DNA, 33 bp, Homo sapien
ttgaacccaaggaaatgaattggctggattaac

SEQ ID NO: 97445 - DNA, 33 bp, Homo sapien
tctttcttctctgtgacattcgggctttccctg

SEQ ID NO: 97446 - DNA, 33 bp, Homo sapien
tctttcttctctgtgatattcgggctttccctg

SEQ ID NO: 97447 - DNA, 33 bp, Homo sapien
cagtcttgggagtttggatgtacaccagccatc

SEQ ID NO: 97448 - DNA, 33 bp, Homo sapien
cagtcttgggagtttgtatgtacaccagccatc

SEQ ID NO: 97449 - DNA, 33 bp, Homo sapien
atgaggggaggcttcacgcaacctactgagagc

SEQ ID NO: 97450 - DNA, 33 bp, Homo sapien
atgaggggaggcttcatgcaacctactgagagc

SEQ ID NO: 97451 - DNA, 33 bp, Homo sapien
attcagtctgaggaataacttttttgtcagcat

SEQ ID NO: 97452 - DNA, 33 bp, Homo sapien
attcagtctgaggaatgacttttttgtcagcat

SEQ ID NO: 97453 - DNA, 33 bp, Homo sapien
aagtgagaacaggtggaatgtagttttttgttc

SEQ ID NO: 97454 - DNA, 33 bp, Homo sapien
aagtgagaacaggtggtatgtagttttttgttc

SEQ ID NO: 97455 - DNA, 33 bp, Homo sapien
cagtatcagtcaggaaactggtagaaagagaat

SEQ ID NO: 97456 - DNA, 33 bp, Homo sapien
cagtatcagtcaggaacctggtagaaagagaat

SEQ ID NO: 97457 - DNA, 33 bp, Homo sapien
ctcttagtttaatgaaagtatgagcaaggttga

SEQ ID NO: 97458 - DNA, 33 bp, Homo sapien
ctcttagtttaatgaaggtatgagcaaggttga

SEQ ID NO: 97459 - DNA, 33 bp, Homo sapien
ggttgaaagaacaacacattgaggctccagaaa

SEQ ID NO: 97460 - DNA, 33 bp, Homo sapien
ggttgaaagaacaacatattgaggctccagaaa

SEQ ID NO: 97461 - DNA, 33 bp, Homo sapien
attagaagctagttaaacaaggtctactccttg

SEQ ID NO: 97462 - DNA, 33 bp, Homo sapien
attagaagctagttaaccaaggtctactccttg

SEQ ID NO: 97463 - DNA, 33 bp, Homo sapien
ttaactagcttctaataagaactggcactgtgg

SEQ ID NO: 97464 - DNA, 33 bp, Homo sapien
ttaactagcttctaatgagaactggcactgtgg

SEQ ID NO: 97465 - DNA, 33 bp, Homo sapien
tgctgttcttggcctacggaagatagcaactgg

SEQ ID NO: 97466 - DNA, 33 bp, Homo sapien
tgctgttcttggcctatggaagatagcaactgg

SEQ ID NO: 97467 - DNA, 33 bp, Homo sapien
ctgttgtcttctgatacctattgtcctgagaga

SEQ ID NO: 97468 - DNA, 33 bp, Homo sapien
ctgttgtcttctgatatctattgtcctgagaga

SEQ ID NO: 97469 - DNA, 33 bp, Homo sapien
ctttattttaaaaatacggttgagacgagcaaa

SEQ ID NO: 97470 - DNA, 33 bp, Homo sapien
ctttattttaaaaatatggttgagacgagcaaa

SEQ ID NO: 97471 - DNA, 33 bp, Homo sapien
cccagtaccatattggacatcatttagaaccct

SEQ ID NO: 97472 - DNA, 33 bp, Homo sapien
cccagtaccatattggtcatcatttagaaccct

SEQ ID NO: 97473 - DNA, 33 bp, Homo sapien
caaatttgcaatgtacaccctattttatctgca

SEQ ID NO: 97474 - DNA, 33 bp, Homo sapien
caaatttgcaatgtacgccctattttatctgca

SEQ ID NO: 97475 - DNA, 33 bp, Homo sapien
gaggaataggaatagacgagtaaagtgaccagt

SEQ ID NO: 97476 - DNA, 33 bp, Homo sapien
gaggaataggaatagatgagtaaagtgaccagt

SEQ ID NO: 97477 - DNA, 33 bp, Homo sapien
ccatccacgatcccacaaaagatatgatcttgt

SEQ ID NO: 97478 - DNA, 33 bp, Homo sapien
ccatccacgatcccacgaaagatatgatcttgt

SEQ ID NO: 97479 - DNA, 33 bp, Homo sapien
aagccttgttctccagacctccaagtgtttctg

SEQ ID NO: 97480 - DNA, 33 bp, Homo sapien
aagccttgttctccaggcctccaagtgtttctg

SEQ ID NO: 97481 - DNA, 33 bp, Homo sapien
agcttctgagacagtaccgccccaaggctagcc

SEQ ID NO: 97482 - DNA, 33 bp, Homo sapien
agcttctgagacagtatcgccccaaggctagcc

SEQ ID NO: 97483 - DNA, 33 bp, Homo sapien
gaaactgccaacagggacagcgagggtgaccat

SEQ ID NO: 97484 - DNA, 33 bp, Homo sapien
gaaactgccaacagggccagcgagggtgaccat

SEQ ID NO: 97485 - DNA, 33 bp, Homo sapien
gcgagggtgaccatgaagcatcactggatccaa

SEQ ID NO: 97486 - DNA, 33 bp, Homo sapien
gcgagggtgaccatgaggcatcactggatccaa

SEQ ID NO: 97487 - DNA, 33 bp, Homo sapien
aaactcaaatcccagaatatctcttcccatttc

SEQ ID NO: 97488 - DNA, 33 bp, Homo sapien
aaactcaaatcccagactatctcttcccatttc

SEQ ID NO: 97489 - DNA, 33 bp, Homo sapien
aacttcaacacaagagaacatagaaactttaag

SEQ ID NO: 97490 - DNA, 33 bp, Homo sapien
aacttcaacacaagaggacatagaaactttaag

SEQ ID NO: 97491 - DNA, 33 bp, Homo sapien
gacatctctgagaggggataatttgagttaaga

SEQ ID NO: 97492 - DNA, 33 bp, Homo sapien
gacatctctgagagggtataatttgagttaaga

SEQ ID NO: 97493 - DNA, 33 bp, Homo sapien
tttccggtgacagatacactctatccaaatctt

SEQ ID NO: 97494 - DNA, 33 bp, Homo sapien
tttccggtgacagatatactctatccaaatctt

SEQ ID NO: 97495 - DNA, 33 bp, Homo sapien
ggtctgtatccttaaaagtaaagatgagttagc

SEQ ID NO: 97496 - DNA, 33 bp, Homo sapien
ggtctgtatccttaaaggtaaagatgagttagc

SEQ ID NO: 97497 - DNA, 33 bp, Homo sapien
tctgatgcctggaatgacatgatttgaaattga

SEQ ID NO: 97498 - DNA, 33 bp, Homo sapien
tctgatgcctggaatgtcatgatttgaaattga

SEQ ID NO: 97499 - DNA, 33 bp, Homo sapien
ctttggctctgttgaccatacggttttgcttca

SEQ ID NO: 97500 - DNA, 33 bp, Homo sapien
ctttggctctgttgactatacggttttgcttca

SEQ ID NO: 97501 - DNA, 33 bp, Homo sapien
cacttgttatgtgctacacaagattctaaatgc

SEQ ID NO: 97502 - DNA, 33 bp, Homo sapien
cacttgttatgtgctagacaagattctaaatgc

SEQ ID NO: 97503 - DNA, 33 bp, Homo sapien
aattatatttattccaaggaaggaagtgtttat

SEQ ID NO: 97504 - DNA, 33 bp, Homo sapien
aattatatttattccagggaaggaagtgtttat

SEQ ID NO: 97505 - DNA, 33 bp, Homo sapien
attgggctcagaaccacacctatcaccgcacgg

SEQ ID NO: 97506 - DNA, 33 bp, Homo sapien
attgggctcagaaccatacctatcaccgcacgg

SEQ ID NO: 97507 - DNA, 33 bp, Homo sapien
tcacacgtgcacactaagaagcaaaacggcaga

SEQ ID NO: 97508 - DNA, 33 bp, Homo sapien
tcacacgtgcacactaggaagcaaaacggcaga

SEQ ID NO: 97509 - DNA, 33 bp, Homo sapien
gtcgctagtcagatatcaacagggcaggagaag

SEQ ID NO: 97510 - DNA, 33 bp, Homo sapien
gtcgctagtcagatattaacagggcaggagaag

SEQ ID NO: 97511 - DNA, 33 bp, Homo sapien
gagtgacttggcggaaggtaattgaatcatggg

SEQ ID NO: 97512 - DNA, 33 bp, Homo sapien
gagtgacttggcggaatgtaattgaatcatggg

SEQ ID NO: 97513 - DNA, 33 bp, Homo sapien
gatgcttgggctaaaacattagtgccacgagtc

SEQ ID NO: 97514 - DNA, 33 bp, Homo sapien
gatgcttgggctaaaatattagtgccacgagtc

SEQ ID NO: 97515 - DNA, 33 bp, Homo sapien
tctacaaaaatctccccggagctgcatcagagt

SEQ ID NO: 97516 - DNA, 33 bp, Homo sapien
tctacaaaaatctccctggagctgcatcagagt

SEQ ID NO: 97517 - DNA, 33 bp, Homo sapien
atatcaaacatatacaatcacttcatagaaagc

SEQ ID NO: 97518 - DNA, 33 bp, Homo sapien
atatcaaacatatacagtcacttcatagaaagc

SEQ ID NO: 97519 - DNA, 33 bp, Homo sapien
aacctttgctaactccagaaccagactgaccac

SEQ ID NO: 97520 - DNA, 33 bp, Homo sapien
aacctttgctaactccggaaccagactgaccac

SEQ ID NO: 97521 - DNA, 33 bp, Homo sapien
acatccaaatcatatcactactcaaactaaaac

SEQ ID NO: 97522 - DNA, 33 bp, Homo sapien
acatccaaatcatatcgctactcaaactaaaac

SEQ ID NO: 97523 - DNA, 33 bp, Homo sapien
cattaccactatttccaaaatgtttttataact

SEQ ID NO: 97524 - DNA, 33 bp, Homo sapien
cattaccactatttccgaaatgtttttataact

SEQ ID NO: 97525 - DNA, 33 bp, Homo sapien
ccaacactggataaatcagtaccttcatacact

SEQ ID NO: 97526 - DNA, 33 bp, Homo sapien
ccaacactggataaattagtaccttcatacact

SEQ ID NO: 97527 - DNA, 33 bp, Homo sapien
caaatgctcctatatcaaagcactgagccaata

SEQ ID NO: 97528 - DNA, 33 bp, Homo sapien
caaatgctcctatatcgaagcactgagccaata

SEQ ID NO: 97529 - DNA, 33 bp, Homo sapien
ggttttaaattccttgccaaattttcgaagact

SEQ ID NO: 97530 - DNA, 33 bp, Homo sapien
ggttttaaattccttggcaaattttcgaagact

SEQ ID NO: 97531 - DNA, 33 bp, Homo sapien
gcactgagaattctaaaacaacacgtccttttg

SEQ ID NO: 97532 - DNA, 33 bp, Homo sapien
gcactgagaattctaagacaacacgtccttttg

SEQ ID NO: 97533 - DNA, 33 bp, Homo sapien
tgtatggttagtctgacgatgtgataagaaaac

SEQ ID NO: 97534 - DNA, 33 bp, Homo sapien
tgtatggttagtctgatgatgtgataagaaaac

SEQ ID NO: 97535 - DNA, 33 bp, Homo sapien
cagataccttcagcataagagcaacggaaaggc

SEQ ID NO: 97536 - DNA, 33 bp, Homo sapien
cagataccttcagcatgagagcaacggaaaggc

SEQ ID NO: 97537 - DNA, 33 bp, Homo sapien
tactcttgataacaccaattaaagtatcccttt

SEQ ID NO: 97538 - DNA, 33 bp, Homo sapien
tactcttgataacaccgattaaagtatcccttt

SEQ ID NO: 97539 - DNA, 33 bp, Homo sapien
ttttatcttgctcggacaaggtgaatttgaagg

SEQ ID NO: 97540 - DNA, 33 bp, Homo sapien
ttttatcttgctcggagaaggtgaatttgaagg

SEQ ID NO: 97541 - DNA, 33 bp, Homo sapien
attcctccataaggacaccatccacgggtacca

SEQ ID NO: 97542 - DNA, 33 bp, Homo sapien
attcctccataaggactccatccacgggtacca

SEQ ID NO: 97543 - DNA, 33 bp, Homo sapien
gtgatctcctggagctaaagaatagaatgactg

SEQ ID NO: 97544 - DNA, 33 bp, Homo sapien
gtgatctcctggagctgaagaatagaatgactg

SEQ ID NO: 97545 - DNA, 33 bp, Homo sapien
gcagccttttccaccacagataatgacttatgc

SEQ ID NO: 97546 - DNA, 33 bp, Homo sapien
gcagccttttccaccagagataatgacttatgc

SEQ ID NO: 97547 - DNA, 33 bp, Homo sapien
cttactcagtgttctcaaatggcaaccccagac

SEQ ID NO: 97548 - DNA, 33 bp, Homo sapien
cttactcagtgttctcgaatggcaaccccagac

SEQ ID NO: 97549 - DNA, 33 bp, Homo sapien
atttgaaatcttttccactgaacttagaacaat

SEQ ID NO: 97550 - DNA, 33 bp, Homo sapien
atttgaaatcttttcctctgaacttagaacaat

SEQ ID NO: 97551 - DNA, 33 bp, Homo sapien
tgaagagacacagtaaatgaaaggccacggttt

SEQ ID NO: 97552 - DNA, 33 bp, Homo sapien
tgaagagacacagtaagtgaaaggccacggttt

SEQ ID NO: 97553 - DNA, 33 bp, Homo sapien
gaggaactgggcacataagtgattgatataaac

SEQ ID NO: 97554 - DNA, 33 bp, Homo sapien
gaggaactgggcacatgagtgattgatataaac

SEQ ID NO: 97555 - DNA, 33 bp, Homo sapien
gtacccgaaagaaacaagacatgcatgccgtgg

SEQ ID NO: 97556 - DNA, 33 bp, Homo sapien
gtacccgaaagaaacatgacatgcatgccgtgg

SEQ ID NO: 97557 - DNA, 33 bp, Homo sapien
ttcttggaagttgtagaccaaagatactattca

SEQ ID NO: 97558 - DNA, 33 bp, Homo sapien
ttcttggaagttgtagtccaaagatactattca

SEQ ID NO: 97559 - DNA, 33 bp, Homo sapien
acaatgtcttttacaacgaacaagattgagagt

SEQ ID NO: 97560 - DNA, 33 bp, Homo sapien
acaatgtcttttacaatgaacaagattgagagt

SEQ ID NO: 97561 - DNA, 33 bp, Homo sapien
cattctgagaaaaatacgattggcttaaggagt

SEQ ID NO: 97562 - DNA, 33 bp, Homo sapien
cattctgagaaaaatatgattggcttaaggagt

SEQ ID NO: 97563 - DNA, 33 bp, Homo sapien
cactagtcaatgttcaatctcttcccagaatgc

SEQ ID NO: 97564 - DNA, 33 bp, Homo sapien
cactagtcaatgttcagtctcttcccagaatgc

SEQ ID NO: 97565 - DNA, 33 bp, Homo sapien
taagctattataaaaaagccccgaatagtggct

SEQ ID NO: 97566 - DNA, 33 bp, Homo sapien
taagctattataaaaaggccccgaatagtggct

SEQ ID NO: 97567 - DNA, 33 bp, Homo sapien
agacataggtacataaaagaaggccttgcattg

SEQ ID NO: 97568 - DNA, 33 bp, Homo sapien
agacataggtacataatagaaggccttgcattg

SEQ ID NO: 97569 - DNA, 33 bp, Homo sapien
atgttgcagtttcttacatggaatggttttgct

SEQ ID NO: 97570 - DNA, 33 bp, Homo sapien
atgttgcagtttcttatatggaatggttttgct

SEQ ID NO: 97571 - DNA, 33 bp, Homo sapien
ctgaaatttatgtgtaagatgcgattttttttt

SEQ ID NO: 97572 - DNA, 33 bp, Homo sapien
ctgaaatttatgtgtacgatgcgattttttttt

SEQ ID NO: 97573 - DNA, 33 bp, Homo sapien
tattagcaattttaaacgattgggtcatgacag

SEQ ID NO: 97574 - DNA, 33 bp, Homo sapien
tattagcaattttaaatgattgggtcatgacag

SEQ ID NO: 97575 - DNA, 33 bp, Homo sapien
ggaggaacacgcctatcactccacttctgacat

SEQ ID NO: 97576 - DNA, 33 bp, Homo sapien
ggaggaacacgcctattactccacttctgacat

SEQ ID NO: 97577 - DNA, 33 bp, Homo sapien
cccaaattttgacccactgctttgttggaaaga

SEQ ID NO: 97578 - DNA, 33 bp, Homo sapien
cccaaattttgacccattgctttgttggaaaga

SEQ ID NO: 97579 - DNA, 33 bp, Homo sapien
tcttcccacgaatggaataaattcagagaagca

SEQ ID NO: 97580 - DNA, 33 bp, Homo sapien
tcttcccacgaatggagtaaattcagagaagca

SEQ ID NO: 97581 - DNA, 33 bp, Homo sapien
agaaaattaacagcaacagcaaactttaaccac

SEQ ID NO: 97582 - DNA, 33 bp, Homo sapien
agaaaattaacagcaagagcaaactttaaccac

SEQ ID NO: 97583 - DNA, 33 bp, Homo sapien
acatgaaagcaccacccggctgttaggcttgag

SEQ ID NO: 97584 - DNA, 33 bp, Homo sapien
acatgaaagcaccacctggctgttaggcttgag

SEQ ID NO: 97585 - DNA, 33 bp, Homo sapien
ccaaaagtccatgatacgtgtcaatagctgagt

SEQ ID NO: 97586 - DNA, 33 bp, Homo sapien
ccaaaagtccatgatatgtgtcaatagctgagt

SEQ ID NO: 97587 - DNA, 33 bp, Homo sapien
gaacacaccatgaccaaagggcaagatttaata

SEQ ID NO: 97588 - DNA, 33 bp, Homo sapien
gaacacaccatgaccagagggcaagatttaata

SEQ ID NO: 97589 - DNA, 33 bp, Homo sapien
gctgcaataagttcgacggactttcctgcagga

SEQ ID NO: 97590 - DNA, 33 bp, Homo sapien
gctgcaataagttcgatggactttcctgcagga

SEQ ID NO: 97591 - DNA, 33 bp, Homo sapien
tatctttgaaaataagaccactatctgattatg

SEQ ID NO: 97592 - DNA, 33 bp, Homo sapien
tatctttgaaaataaggccactatctgattatg

SEQ ID NO: 97593 - DNA, 33 bp, Homo sapien
gaactgcagtaaaacaaggtaggttatgagtca

SEQ ID NO: 97594 - DNA, 33 bp, Homo sapien
gaactgcagtaaaacagggtaggttatgagtca

SEQ ID NO: 97595 - DNA, 33 bp, Homo sapien
ctctcagggtctctatcaccatgaattccaata

SEQ ID NO: 97596 - DNA, 33 bp, Homo sapien
ctctcagggtctctattaccatgaattccaata

SEQ ID NO: 97597 - DNA, 33 bp, Homo sapien
tacgccaaggaaattggcaaatgtcacaaatta

SEQ ID NO: 97598 - DNA, 33 bp, Homo sapien
tacgccaaggaaattgtcaaatgtcacaaatta

SEQ ID NO: 97599 - DNA, 33 bp, Homo sapien
gtgcctcccaccacgaccatttgccttagaatg

SEQ ID NO: 97600 - DNA, 33 bp, Homo sapien
gtgcctcccaccacgatcatttgccttagaatg

SEQ ID NO: 97601 - DNA, 33 bp, Homo sapien
atcaagttaattgccactgagatccaaccctgt

SEQ ID NO: 97602 - DNA, 33 bp, Homo sapien
atcaagttaattgccattgagatccaaccctgt

SEQ ID NO: 97603 - DNA, 33 bp, Homo sapien
ctaaattgaaaagataaaaagtgctgagatgag

SEQ ID NO: 97604 - DNA, 33 bp, Homo sapien
ctaaattgaaaagatacaaagtgctgagatgag

SEQ ID NO: 97605 - DNA, 33 bp, Homo sapien
aaaatcattctgcaaaaccattctctacttgct

SEQ ID NO: 97606 - DNA, 33 bp, Homo sapien
aaaatcattctgcaaagccattctctacttgct

SEQ ID NO: 97607 - DNA, 33 bp, Homo sapien
gaatggaagatcaaaaccattcttaactgagag

SEQ ID NO: 97608 - DNA, 33 bp, Homo sapien
gaatggaagatcaaaatcattcttaactgagag

SEQ ID NO: 97609 - DNA, 33 bp, Homo sapien
gcccaacttttggagaccaaagtgaattattga

SEQ ID NO: 97610 - DNA, 33 bp, Homo sapien
gcccaacttttggagatcaaagtgaattattga

SEQ ID NO: 97611 - DNA, 33 bp, Homo sapien
ttcaagatattactaaatgtcctagtctgagaa

SEQ ID NO: 97612 - DNA, 33 bp, Homo sapien
ttcaagatattactaattgtcctagtctgagaa

SEQ ID NO: 97613 - DNA, 33 bp, Homo sapien
cagacaaagggagaaacattacatgctcataga

SEQ ID NO: 97614 - DNA, 33 bp, Homo sapien
cagacaaagggagaaagattacatgctcataga

SEQ ID NO: 97615 - DNA, 33 bp, Homo sapien
taatacagattgctcacatagagaacaaatagg

SEQ ID NO: 97616 - DNA, 33 bp, Homo sapien
taatacagattgctcatatagagaacaaatagg

SEQ ID NO: 97617 - DNA, 33 bp, Homo sapien
gttacatccatctccaggagaacaatgcaataa

SEQ ID NO: 97618 - DNA, 33 bp, Homo sapien
gttacatccatctccatgagaacaatgcaataa

SEQ ID NO: 97619 - DNA, 33 bp, Homo sapien
atttcttctgcagtgaggaaaaatggaaagcta

SEQ ID NO: 97620 - DNA, 33 bp, Homo sapien
atttcttctgcagtgatgaaaaatggaaagcta

SEQ ID NO: 97621 - DNA, 33 bp, Homo sapien
cctggtgagtaagaaggctggataggggccgga

SEQ ID NO: 97622 - DNA, 33 bp, Homo sapien
cctggtgagtaagaagtctggataggggccgga

SEQ ID NO: 97623 - DNA, 33 bp, Homo sapien
cagatttaatttcaccccagttctgatgtcaaa

SEQ ID NO: 97624 - DNA, 33 bp, Homo sapien
cagatttaatttcaccgcagttctgatgtcaaa

SEQ ID NO: 97625 - DNA, 33 bp, Homo sapien
tttgattacaattggacctgctatttgatgatt

SEQ ID NO: 97626 - DNA, 33 bp, Homo sapien
tttgattacaattggatctgctatttgatgatt

SEQ ID NO: 97627 - DNA, 33 bp, Homo sapien
gtcatttgtaccaaaacgtggaattgcagcaat

SEQ ID NO: 97628 - DNA, 33 bp, Homo sapien
gtcatttgtaccaaaatgtggaattgcagcaat

SEQ ID NO: 97629 - DNA, 33 bp, Homo sapien
actgattggtggtagaaacattcagaaccatcc

SEQ ID NO: 97630 - DNA, 33 bp, Homo sapien
actgattggtggtagatacattcagaaccatcc

SEQ ID NO: 97631 - DNA, 33 bp, Homo sapien
tcgacgacccatgggaatatgtcatcatatgga

SEQ ID NO: 97632 - DNA, 33 bp, Homo sapien
tcgacgacccatgggattatgtcatcatatgga

SEQ ID NO: 97633 - DNA, 33 bp, Homo sapien
gattttagtgcattctaaagtttgagaaactag

SEQ ID NO: 97634 - DNA, 33 bp, Homo sapien
gattttagtgcattctgaagtttgagaaactag

SEQ ID NO: 97635 - DNA, 33 bp, Homo sapien
gaaatattgtctatcccagacgttcattaaaaa

SEQ ID NO: 97636 - DNA, 33 bp, Homo sapien
gaaatattgtctatccgagacgttcattaaaaa

SEQ ID NO: 97637 - DNA, 33 bp, Homo sapien
aacaccccaactctcaatcccaagcagtttcat

SEQ ID NO: 97638 - DNA, 33 bp, Homo sapien
aacaccccaactctcagtcccaagcagtttcat

SEQ ID NO: 97639 - DNA, 33 bp, Homo sapien
catttggaagatttcaatacacttggaggtcca

SEQ ID NO: 97640 - DNA, 33 bp, Homo sapien
catttggaagatttcagtacacttggaggtcca

SEQ ID NO: 97641 - DNA, 33 bp, Homo sapien
aaagaagaaagtgtaccgaaaatagtaaatcag

SEQ ID NO: 97642 - DNA, 33 bp, Homo sapien
aaagaagaaagtgtactgaaaatagtaaatcag

SEQ ID NO: 97643 - DNA, 33 bp, Homo sapien
cttactctgcattaaacagtgacagtgataggt

SEQ ID NO: 97644 - DNA, 33 bp, Homo sapien
cttactctgcattaaatagtgacagtgataggt

SEQ ID NO: 97645 - DNA, 33 bp, Homo sapien
acactattaggtagacacatcgataggccatta

SEQ ID NO: 97646 - DNA, 33 bp, Homo sapien
acactattaggtagacgcatcgataggccatta

SEQ ID NO: 97647 - DNA, 33 bp, Homo sapien
ttaaagaaggcatcaaatactcaaatgttcaag

SEQ ID NO: 97648 - DNA, 33 bp, Homo sapien
ttaaagaaggcatcaagtactcaaatgttcaag

SEQ ID NO: 97649 - DNA, 33 bp, Homo sapien
aaagagatagacgctacgtaggcaggtaggtag

SEQ ID NO: 97650 - DNA, 33 bp, Homo sapien
aaagagatagacgctatgtaggcaggtaggtag

SEQ ID NO: 97651 - DNA, 33 bp, Homo sapien
gcttgagctttgatcaacataggttattgagga

SEQ ID NO: 97652 - DNA, 33 bp, Homo sapien
gcttgagctttgatcagcataggttattgagga

SEQ ID NO: 97653 - DNA, 33 bp, Homo sapien
tctgttccagaattccacaaggagtgaggctgc

SEQ ID NO: 97654 - DNA, 33 bp, Homo sapien
tctgttccagaattccgcaaggagtgaggctgc

SEQ ID NO: 97655 - DNA, 33 bp, Homo sapien
ggggcttacagggaaaacatcttcctggcttta

SEQ ID NO: 97656 - DNA, 33 bp, Homo sapien
ggggcttacagggaaagcatcttcctggcttta

SEQ ID NO: 97657 - DNA, 33 bp, Homo sapien
gaaagcagagaggaaactagctaagtaggtaaa

SEQ ID NO: 97658 - DNA, 33 bp, Homo sapien
gaaagcagagaggaaattagctaagtaggtaaa

SEQ ID NO: 97659 - DNA, 33 bp, Homo sapien
tggtatgtgctagtaactgaggaagtggaaacc

SEQ ID NO: 97660 - DNA, 33 bp, Homo sapien
tggtatgtgctagtaattgaggaagtggaaacc

SEQ ID NO: 97661 - DNA, 33 bp, Homo sapien
caaattgactgttttacgggcaaactttgactc

SEQ ID NO: 97662 - DNA, 33 bp, Homo sapien
caaattgactgttttaggggcaaactttgactc

SEQ ID NO: 97663 - DNA, 33 bp, Homo sapien
agtgtcaaggtgccaaaataatcaggttcttgt

SEQ ID NO: 97664 - DNA, 33 bp, Homo sapien
agtgtcaaggtgccaacataatcaggttcttgt

SEQ ID NO: 97665 - DNA, 33 bp, Homo sapien
tatatacaggtggttacgaaatctccagcacca

SEQ ID NO: 97666 - DNA, 33 bp, Homo sapien
tatatacaggtggttatgaaatctccagcacca

SEQ ID NO: 97667 - DNA, 33 bp, Homo sapien
gcctccttgactttcaaaaacattccttttatt

SEQ ID NO: 97668 - DNA, 33 bp, Homo sapien
gcctccttgactttcagaaacattccttttatt

SEQ ID NO: 97669 - DNA, 33 bp, Homo sapien
tttattcacaatggacaaatatgaatctgaaag

SEQ ID NO: 97670 - DNA, 33 bp, Homo sapien
tttattcacaatggaccaatatgaatctgaaag

SEQ ID NO: 97671 - DNA, 33 bp, Homo sapien
tagatctctcatggaaagccttttaactaagct

SEQ ID NO: 97672 - DNA, 33 bp, Homo sapien
tagatctctcatggaatgccttttaactaagct

SEQ ID NO: 97673 - DNA, 33 bp, Homo sapien
agtaaaaaaaattgcactctacagcagttaagt

SEQ ID NO: 97674 - DNA, 33 bp, Homo sapien
agtaaaaaaaattgcagtctacagcagttaagt

SEQ ID NO: 97675 - DNA, 33 bp, Homo sapien
agattcaaggtcaataacctaaaattgctctgc

SEQ ID NO: 97676 - DNA, 33 bp, Homo sapien
agattcaaggtcaatatcctaaaattgctctgc

SEQ ID NO: 97677 - DNA, 33 bp, Homo sapien
agatatgggtggaagacatttaccttatattga

SEQ ID NO: 97678 - DNA, 33 bp, Homo sapien
agatatgggtggaagatatttaccttatattga

SEQ ID NO: 97679 - DNA, 33 bp, Homo sapien
acaaggaagaccactgacaaaaattttgatatt

SEQ ID NO: 97680 - DNA, 33 bp, Homo sapien
acaaggaagaccactgccaaaaattttgatatt

SEQ ID NO: 97681 - DNA, 33 bp, Homo sapien
aagcttctcaaacctcaaggtgcaaatgaatca

SEQ ID NO: 97682 - DNA, 33 bp, Homo sapien
aagcttctcaaacctcgaggtgcaaatgaatca

SEQ ID NO: 97683 - DNA, 33 bp, Homo sapien
tataacaaggaagttcgcaatgctcttattcac

SEQ ID NO: 97684 - DNA, 33 bp, Homo sapien
tataacaaggaagttctcaatgctcttattcac

SEQ ID NO: 97685 - DNA, 33 bp, Homo sapien
ctgggctaacagagcaccaagctgggctgagcc

SEQ ID NO: 97686 - DNA, 33 bp, Homo sapien
ctgggctaacagagcagcaagctgggctgagcc

SEQ ID NO: 97687 - DNA, 33 bp, Homo sapien
tctactaagagcaaaaaactgacagtattaaag

SEQ ID NO: 97688 - DNA, 33 bp, Homo sapien
tctactaagagcaaaagactgacagtattaaag

SEQ ID NO: 97689 - DNA, 33 bp, Homo sapien
attgaagtcttagctccaatgcctactggtgat

SEQ ID NO: 97690 - DNA, 33 bp, Homo sapien
attgaagtcttagctctaatgcctactggtgat

SEQ ID NO: 97691 - DNA, 33 bp, Homo sapien
ttaagagctgtgataaggcactggtgtatttga

SEQ ID NO: 97692 - DNA, 33 bp, Homo sapien
ttaagagctgtgataatgcactggtgtatttga

SEQ ID NO: 97693 - DNA, 33 bp, Homo sapien
aaatgaccaaataatacctggccatcataagca

SEQ ID NO: 97694 - DNA, 33 bp, Homo sapien
aaatgaccaaataatatctggccatcataagca

SEQ ID NO: 97695 - DNA, 33 bp, Homo sapien
aataatgtatgaaatcacacagttactaagtac

SEQ ID NO: 97696 - DNA, 33 bp, Homo sapien
aataatgtatgaaatcgcacagttactaagtac

SEQ ID NO: 97697 - DNA, 33 bp, Homo sapien
ccagccataggcaacaacttttagttccttgca

SEQ ID NO: 97698 - DNA, 33 bp, Homo sapien
ccagccataggcaacatcttttagttccttgca

SEQ ID NO: 97699 - DNA, 33 bp, Homo sapien
ctctgtggaaaaaccacctttcatgaaactggt

SEQ ID NO: 97700 - DNA, 33 bp, Homo sapien
ctctgtggaaaaaccatctttcatgaaactggt

SEQ ID NO: 97701 - DNA, 33 bp, Homo sapien
cttgaggacaaatagaacttcaaagggaatttg

SEQ ID NO: 97702 - DNA, 33 bp, Homo sapien
cttgaggacaaatagatcttcaaagggaatttg

SEQ ID NO: 97703 - DNA, 33 bp, Homo sapien
agtttctcagccactgcaagtattcaaatatgt

SEQ ID NO: 97704 - DNA, 33 bp, Homo sapien
agtttctcagccactggaagtattcaaatatgt

SEQ ID NO: 97705 - DNA, 33 bp, Homo sapien
ttaaattttgagtgatcaatttcatgccaaata

SEQ ID NO: 97706 - DNA, 33 bp, Homo sapien
ttaaattttgagtgattaatttcatgccaaata

SEQ ID NO: 97707 - DNA, 33 bp, Homo sapien
gaatttagctttttccaattttgcaaataattg

SEQ ID NO: 97708 - DNA, 33 bp, Homo sapien
gaatttagctttttcccattttgcaaataattg

SEQ ID NO: 97709 - DNA, 33 bp, Homo sapien
cagccaatatgaagtaagatttctcctagcgga

SEQ ID NO: 97710 - DNA, 33 bp, Homo sapien
cagccaatatgaagtaggatttctcctagcgga

SEQ ID NO: 97711 - DNA, 33 bp, Homo sapien
caagtggttgtgaatacgaaattcgtgaaagac

SEQ ID NO: 97712 - DNA, 33 bp, Homo sapien
caagtggttgtgaatatgaaattcgtgaaagac

SEQ ID NO: 97713 - DNA, 33 bp, Homo sapien
tgtctgggaagtagaaaagcatgtaaataactt

SEQ ID NO: 97714 - DNA, 33 bp, Homo sapien
tgtctgggaagtagaatagcatgtaaataactt

SEQ ID NO: 97715 - DNA, 33 bp, Homo sapien
aggcatattatttgccaacaaacaaacaaactt

SEQ ID NO: 97716 - DNA, 33 bp, Homo sapien
aggcatattatttgccgacaaacaaacaaactt

SEQ ID NO: 97717 - DNA, 33 bp, Homo sapien
actcctacagaaacaaaatgcactttaagaaac

SEQ ID NO: 97718 - DNA, 33 bp, Homo sapien
actcctacagaaacaatatgcactttaagaaac

SEQ ID NO: 97719 - DNA, 33 bp, Homo sapien
acttagagtcaaaataaggaacattaacataag

SEQ ID NO: 97720 - DNA, 33 bp, Homo sapien
acttagagtcaaaatacggaacattaacataag

SEQ ID NO: 97721 - DNA, 33 bp, Homo sapien
tttacattgtcttataaaataaaattcttgcag

SEQ ID NO: 97722 - DNA, 33 bp, Homo sapien
tttacattgtcttatacaataaaattcttgcag

SEQ ID NO: 97723 - DNA, 33 bp, Homo sapien
tggggttatgatgacaaatacgtcccctgctct

SEQ ID NO: 97724 - DNA, 33 bp, Homo sapien
tggggttatgatgacagatacgtcccctgctct

SEQ ID NO: 97725 - DNA, 33 bp, Homo sapien
ggtcatcgtgctgcgacgaattctttccatgga

SEQ ID NO: 97726 - DNA, 33 bp, Homo sapien
ggtcatcgtgctgcgaggaattctttccatgga

SEQ ID NO: 97727 - DNA, 33 bp, Homo sapien
ataagacactgcaaacggaaagaaaaactcacc

SEQ ID NO: 97728 - DNA, 33 bp, Homo sapien
ataagacactgcaaactgaaagaaaaactcacc

SEQ ID NO: 97729 - DNA, 33 bp, Homo sapien
cttccaatatgccctacgatttgaacacataag

SEQ ID NO: 97730 - DNA, 33 bp, Homo sapien
cttccaatatgccctatgatttgaacacataag

SEQ ID NO: 97731 - DNA, 33 bp, Homo sapien
tatttccattttgaagccagggaactgaatatc

SEQ ID NO: 97732 - DNA, 33 bp, Homo sapien
tatttccattttgaaggcagggaactgaatatc

SEQ ID NO: 97733 - DNA, 33 bp, Homo sapien
ctaggctaaaacaggtcaagttgtttgcacaga

SEQ ID NO: 97734 - DNA, 33 bp, Homo sapien
ctaggctaaaacaggtgaagttgtttgcacaga

SEQ ID NO: 97735 - DNA, 33 bp, Homo sapien
gaaagagtcagtactacaagacgaatgcttaaa

SEQ ID NO: 97736 - DNA, 33 bp, Homo sapien
gaaagagtcagtactataagacgaatgcttaaa

SEQ ID NO: 97737 - DNA, 33 bp, Homo sapien
aataatagcgaatacacggccactccattttgc

SEQ ID NO: 97738 - DNA, 33 bp, Homo sapien
aataatagcgaatacatggccactccattttgc

SEQ ID NO: 97739 - DNA, 33 bp, Homo sapien
agtcacataagaaacaaaaagtcatgatgataa

SEQ ID NO: 97740 - DNA, 33 bp, Homo sapien
agtcacataagaaacagaaagtcatgatgataa

SEQ ID NO: 97741 - DNA, 33 bp, Homo sapien
cacaattaatctgcatgaacccgtttcctttcc

SEQ ID NO: 97742 - DNA, 33 bp, Homo sapien
cacaattaatctgcattaacccgtttcctttcc

SEQ ID NO: 97743 - DNA, 33 bp, Homo sapien
attttatagctgagcaaggtaagtcagagagat

SEQ ID NO: 97744 - DNA, 33 bp, Homo sapien
attttatagctgagcagggtaagtcagagagat

SEQ ID NO: 97745 - DNA, 33 bp, Homo sapien
agattatgtaaaacaactcacaaatctatgtct

SEQ ID NO: 97746 - DNA, 33 bp, Homo sapien
agattatgtaaaacaattcacaaatctatgtct

SEQ ID NO: 97747 - DNA, 33 bp, Homo sapien
gatagacagcatcaagacctgtaaagaccctta

SEQ ID NO: 97748 - DNA, 33 bp, Homo sapien
gatagacagcatcaaggcctgtaaagaccctta

SEQ ID NO: 97749 - DNA, 33 bp, Homo sapien
gggttcttttttttcactagcttatgtgaggaa

SEQ ID NO: 97750 - DNA, 33 bp, Homo sapien
gggttcttttttttcattagcttatgtgaggaa

SEQ ID NO: 97751 - DNA, 33 bp, Homo sapien
tgcattgctcaatacccggcagatgagagttca

SEQ ID NO: 97752 - DNA, 33 bp, Homo sapien
tgcattgctcaatacctggcagatgagagttca

SEQ ID NO: 97753 - DNA, 33 bp, Homo sapien
atggatttttacattgccaagtttaactgaaag

SEQ ID NO: 97754 - DNA, 33 bp, Homo sapien
atggatttttacattgtcaagtttaactgaaag

SEQ ID NO: 97755 - DNA, 33 bp, Homo sapien
tttgaatgtattttgacaaattgctttccatca

SEQ ID NO: 97756 - DNA, 33 bp, Homo sapien
tttgaatgtattttgataaattgctttccatca

SEQ ID NO: 97757 - DNA, 33 bp, Homo sapien
agtactctttaatggaaatagcctgtatcgtat

SEQ ID NO: 97758 - DNA, 33 bp, Homo sapien
agtactctttaatggagatagcctgtatcgtat

SEQ ID NO: 97759 - DNA, 33 bp, Homo sapien
cattcatcatctcgcacagttatgtgtgtgtgt

SEQ ID NO: 97760 - DNA, 33 bp, Homo sapien
cattcatcatctcgcatagttatgtgtgtgtgt

SEQ ID NO: 97761 - DNA, 33 bp, Homo sapien
agcactttgagagaaactaggagggatgcttga

SEQ ID NO: 97762 - DNA, 33 bp, Homo sapien
agcactttgagagaaagtaggagggatgcttga

SEQ ID NO: 97763 - DNA, 33 bp, Homo sapien
aagctgcataatttaccggtgtcaaagaggttt

SEQ ID NO: 97764 - DNA, 33 bp, Homo sapien
aagctgcataatttactggtgtcaaagaggttt

SEQ ID NO: 97765 - DNA, 33 bp, Homo sapien
agtctctgaaaagctccagcaactgaaaaacca

SEQ ID NO: 97766 - DNA, 33 bp, Homo sapien
agtctctgaaaagctctagcaactgaaaaacca

SEQ ID NO: 97767 - DNA, 33 bp, Homo sapien
catttttcatagactccgaaggtgagaaaggga

SEQ ID NO: 97768 - DNA, 33 bp, Homo sapien
catttttcatagactctgaaggtgagaaaggga

SEQ ID NO: 97769 - DNA, 33 bp, Homo sapien
gtgccactaggtatccaaccagacatttccacg

SEQ ID NO: 97770 - DNA, 33 bp, Homo sapien
gtgccactaggtatcccaccagacatttccacg

SEQ ID NO: 97771 - DNA, 33 bp, Homo sapien
ttcagtagttctcaaaatttcttttttgtagat

SEQ ID NO: 97772 - DNA, 33 bp, Homo sapien
ttcagtagttctcaaagtttcttttttgtagat

SEQ ID NO: 97773 - DNA, 33 bp, Homo sapien
ctcgggtaagctttaccaccttcctaattctca

SEQ ID NO: 97774 - DNA, 33 bp, Homo sapien
ctcgggtaagctttactaccttcctaattctca

SEQ ID NO: 97775 - DNA, 33 bp, Homo sapien
agaactagaaattctacgttagtgcaattattc

SEQ ID NO: 97776 - DNA, 33 bp, Homo sapien
agaactagaaattctatgttagtgcaattattc

SEQ ID NO: 97777 - DNA, 33 bp, Homo sapien
ggtgcagtgggtgcaaatcaaagctgtttattt

SEQ ID NO: 97778 - DNA, 33 bp, Homo sapien
ggtgcagtgggtgcaattcaaagctgtttattt

SEQ ID NO: 97779 - DNA, 33 bp, Homo sapien
gcaattgcctcatcaaagaaacatctttttcct

SEQ ID NO: 97780 - DNA, 33 bp, Homo sapien
gcaattgcctcatcaaggaaacatctttttcct

SEQ ID NO: 97781 - DNA, 33 bp, Homo sapien
cctgaagaatttgggaacacattgcatcgtatt

SEQ ID NO: 97782 - DNA, 33 bp, Homo sapien
cctgaagaatttgggagcacattgcatcgtatt

SEQ ID NO: 97783 - DNA, 33 bp, Homo sapien
ggatcatataaatcaccagataattcgatgtaa

SEQ ID NO: 97784 - DNA, 33 bp, Homo sapien
ggatcatataaatcacgagataattcgatgtaa

SEQ ID NO: 97785 - DNA, 33 bp, Homo sapien
accattatctaattccaaaacaaattaatagag

SEQ ID NO: 97786 - DNA, 33 bp, Homo sapien
accattatctaattccgaaacaaattaatagag

SEQ ID NO: 97787 - DNA, 33 bp, Homo sapien
ttagaaagggaaaataagagtacaacatttcag

SEQ ID NO: 97788 - DNA, 33 bp, Homo sapien
ttagaaagggaaaataggagtacaacatttcag

SEQ ID NO: 97789 - DNA, 33 bp, Homo sapien
ttcaaaattgcttagacggtaaatgtcaaatgt

SEQ ID NO: 97790 - DNA, 33 bp, Homo sapien
ttcaaaattgcttagatggtaaatgtcaaatgt

SEQ ID NO: 97791 - DNA, 33 bp, Homo sapien
tgtcactgttaggatcacacatggcaaccaaat

SEQ ID NO: 97792 - DNA, 33 bp, Homo sapien
tgtcactgttaggatcgcacatggcaaccaaat

SEQ ID NO: 97793 - DNA, 33 bp, Homo sapien
acacctcatcagcctacggtgcagatgtccact

SEQ ID NO: 97794 - DNA, 33 bp, Homo sapien
acacctcatcagcctatggtgcagatgtccact

SEQ ID NO: 97795 - DNA, 33 bp, Homo sapien
tctctcacacttattcaatcacaagaatccttt

SEQ ID NO: 97796 - DNA, 33 bp, Homo sapien
tctctcacacttattcgatcacaagaatccttt

SEQ ID NO: 97797 - DNA, 33 bp, Homo sapien
gaaactcactgcacaactgaagattcatcaaga

SEQ ID NO: 97798 - DNA, 33 bp, Homo sapien
gaaactcactgcacaattgaagattcatcaaga

SEQ ID NO: 97799 - DNA, 33 bp, Homo sapien
aatcctgcccatacttcaaaacttggatcaagt

SEQ ID NO: 97800 - DNA, 33 bp, Homo sapien
aatcctgcccatactttaaaacttggatcaagt

SEQ ID NO: 97801 - DNA, 33 bp, Homo sapien
cattcatagtcttttacgccaggcaatggggtt

SEQ ID NO: 97802 - DNA, 33 bp, Homo sapien
cattcatagtcttttatgccaggcaatggggtt

SEQ ID NO: 97803 - DNA, 33 bp, Homo sapien
ggagtaagactgagagaccagaaaatctagtta

SEQ ID NO: 97804 - DNA, 33 bp, Homo sapien
ggagtaagactgagaggccagaaaatctagtta

SEQ ID NO: 97805 - DNA, 33 bp, Homo sapien
gtatttactaatgaagcagaagctacatgagct

SEQ ID NO: 97806 - DNA, 33 bp, Homo sapien
gtatttactaatgaagtagaagctacatgagct

SEQ ID NO: 97807 - DNA, 33 bp, Homo sapien
gtggacagtggtgccactgaataggaaatacag

SEQ ID NO: 97808 - DNA, 33 bp, Homo sapien
gtggacagtggtgccattgaataggaaatacag

SEQ ID NO: 97809 - DNA, 33 bp, Homo sapien
tgacctgacctgttccaccaaaccatctttgca

SEQ ID NO: 97810 - DNA, 33 bp, Homo sapien
tgacctgacctgttcctccaaaccatctttgca

SEQ ID NO: 97811 - DNA, 33 bp, Homo sapien
taatatccattttcctaagcagcgtgattctgt

SEQ ID NO: 97812 - DNA, 33 bp, Homo sapien
taatatccattttccttagcagcgtgattctgt

SEQ ID NO: 97813 - DNA, 33 bp, Homo sapien
acaagtcttgcagggcagaataaatcatgcgca

SEQ ID NO: 97814 - DNA, 33 bp, Homo sapien
acaagtcttgcagggcggaataaatcatgcgca

SEQ ID NO: 97815 - DNA, 33 bp, Homo sapien
ttgccttgaattggaaatctgttattaagttct

SEQ ID NO: 97816 - DNA, 33 bp, Homo sapien
ttgccttgaattggaagtctgttattaagttct

SEQ ID NO: 97817 - DNA, 33 bp, Homo sapien
gaagataatctttgtaacacacacagtcttcat

SEQ ID NO: 97818 - DNA, 33 bp, Homo sapien
gaagataatctttgtatcacacacagtcttcat

SEQ ID NO: 97819 - DNA, 33 bp, Homo sapien
tttccttcctttcgccgaagactgactactctg

SEQ ID NO: 97820 - DNA, 33 bp, Homo sapien
tttccttcctttcgcctaagactgactactctg

SEQ ID NO: 97821 - DNA, 33 bp, Homo sapien
tgcagttatgtacgacaaataagtctagagatt

SEQ ID NO: 97822 - DNA, 33 bp, Homo sapien
tgcagttatgtacgacgaataagtctagagatt

SEQ ID NO: 97823 - DNA, 33 bp, Homo sapien
agttggtaatggctcaatatatctggcaagagg

SEQ ID NO: 97824 - DNA, 33 bp, Homo sapien
agttggtaatggctcagtatatctggcaagagg

SEQ ID NO: 97825 - DNA, 33 bp, Homo sapien; identical to SEQ ID NO: 97823

SEQ ID NO: 97826 - DNA, 33 bp, Homo sapien; identical to SEQ ID NO: 97824

SEQ ID NO: 97827 - DNA, 33 bp, Homo sapien
tctagtaaggtcgctgaatgatattaaagaaaa

SEQ ID NO: 97828 - DNA, 33 bp, Homo sapien
tctagtaaggtcgctggatgatattaaagaaaa

SEQ ID NO: 97829 - DNA, 33 bp, Homo sapien
gaactcatggaaagaaaattggcagagttcctc

SEQ ID NO: 97830 - DNA, 33 bp, Homo sapien
gaactcatggaaagaacattggcagagttcctc

SEQ ID NO: 97831 - DNA, 33 bp, Homo sapien
tttcctgctacactaacactttattgttccttt

SEQ ID NO: 97832 - DNA, 33 bp, Homo sapien
tttcctgctacactaatactttattgttccttt

SEQ ID NO: 97833 - DNA, 33 bp, Homo sapien
gatgtctagaatgaccagaaggaaattgatgag

SEQ ID NO: 97834 - DNA, 33 bp, Homo sapien
gatgtctagaatgaccggaaggaaattgatgag

SEQ ID NO: 97835 - DNA, 33 bp, Homo sapien
ttaattaaatcacttgcaatttgggtggagggg

SEQ ID NO: 97836 - DNA, 33 bp, Homo sapien
ttaattaaatcacttggaatttgggtggagggg

SEQ ID NO: 97837 - DNA, 33 bp, Homo sapien
tgatgtttatctgggaatagagcattgcaatgg

SEQ ID NO: 97838 - DNA, 33 bp, Homo sapien
tgatgtttatctgggactagagcattgcaatgg

SEQ ID NO: 97839 - DNA, 33 bp, Homo sapien
agtgtcttttagtatgacaatgagttgattgat

SEQ ID NO: 97840 - DNA, 33 bp, Homo sapien
agtgtcttttagtatgccaatgagttgattgat

SEQ ID NO: 97841 - DNA, 33 bp, Homo sapien
cttcaggtttttacccagcacttgctgcccctc

SEQ ID NO: 97842 - DNA, 33 bp, Homo sapien
cttcaggtttttacccggcacttgctgcccctc

SEQ ID NO: 97843 - DNA, 33 bp, Homo sapien
cttctactcttttgggaaaaccaccaataaaca

SEQ ID NO: 97844 - DNA, 33 bp, Homo sapien
cttctactcttttggggaaaccaccaataaaca

SEQ ID NO: 97845 - DNA, 33 bp, Homo sapien
gtgtaaatcagatacgacctcctcagtctcctc

SEQ ID NO: 97846 - DNA, 33 bp, Homo sapien
gtgtaaatcagatacggcctcctcagtctcctc

SEQ ID NO: 97847 - DNA, 33 bp, Homo sapien
aagcagccttgactatgacctctctctggagaa

SEQ ID NO: 97848 - DNA, 33 bp, Homo sapien
aagcagccttgactattacctctctctggagaa

SEQ ID NO: 97849 - DNA, 33 bp, Homo sapien
aagctttgcttgtatacgtactacctatcacag

SEQ ID NO: 97850 - DNA, 33 bp, Homo sapien
aagctttgcttgtatatgtactacctatcacag

SEQ ID NO: 97851 - DNA, 33 bp, Homo sapien
ctgtgaagttcaagataaaaaaatcagcatatg

SEQ ID NO: 97852 - DNA, 33 bp, Homo sapien
ctgtgaagttcaagatcaaaaaatcagcatatg

SEQ ID NO: 97853 - DNA, 33 bp, Homo sapien
aatgaaagaatgtccccaacagcatttcagaga

SEQ ID NO: 97854 - DNA, 33 bp, Homo sapien
aatgaaagaatgtccctaacagcatttcagaga

SEQ ID NO: 97855 - DNA, 33 bp, Homo sapien
tgagggcaagctttccagagaggagcctcatac

SEQ ID NO: 97856 - DNA, 33 bp, Homo sapien
tgagggcaagctttccggagaggagcctcatac

SEQ ID NO: 97857 - DNA, 33 bp, Homo sapien
taatctagtatgagacacaagttttttaaccat

SEQ ID NO: 97858 - DNA, 33 bp, Homo sapien
taatctagtatgagacgcaagttttttaaccat

SEQ ID NO: 97859 - DNA, 33 bp, Homo sapien
gttgaaatattcagagacagaaaattagagtac

SEQ ID NO: 97860 - DNA, 33 bp, Homo sapien
gttgaaatattcagagtcagaaaattagagtac

SEQ ID NO: 97861 - DNA, 33 bp, Homo sapien
gaggctcaggttaggaaattgcttaagtccagg

SEQ ID NO: 97862 - DNA, 33 bp, Homo sapien
gaggctcaggttaggagattgcttaagtccagg

SEQ ID NO: 97863 - DNA, 33 bp, Homo sapien
tcctgcagattgttccagctgtgttactaaata

SEQ ID NO: 97864 - DNA, 33 bp, Homo sapien
tcctgcagattgttcccgctgtgttactaaata

SEQ ID NO: 97865 - DNA, 33 bp, Homo sapien
gaaacccagtacatataagtaccaacatcacaa

SEQ ID NO: 97866 - DNA, 33 bp, Homo sapien
gaaacccagtacatatgagtaccaacatcacaa

SEQ ID NO: 97867 - DNA, 33 bp, Homo sapien
tgacctaatcgggacaattgtgaaagtcttcaa

SEQ ID NO: 97868 - DNA, 33 bp, Homo sapien
tgacctaatcgggacagttgtgaaagtcttcaa

SEQ ID NO: 97869 - DNA, 33 bp, Homo sapien
aattgccatgttcatcccttttcaagtgctcca

SEQ ID NO: 97870 - DNA, 33 bp, Homo sapien
aattgccatgttcatctcttttcaagtgctcca

SEQ ID NO: 97871 - DNA, 33 bp, Homo sapien
aataaatttaaagagccatgtgaagcactggta

SEQ ID NO: 97872 - DNA, 33 bp, Homo sapien
aataaatttaaagagctatgtgaagcactggta

SEQ ID NO: 97873 - DNA, 33 bp, Homo sapien
cttggatggtaacccccagtcctcaccagctgg

SEQ ID NO: 97874 - DNA, 33 bp, Homo sapien
cttggatggtaacccctagtcctcaccagctgg

SEQ ID NO: 97875 - DNA, 33 bp, Homo sapien
gaaatagcctggactaatacgttttcactgcac

SEQ ID NO: 97876 - DNA, 33 bp, Homo sapien
gaaatagcctggactagtacgttttcactgcac

SEQ ID NO: 97877 - DNA, 33 bp, Homo sapien
ttctcctgttctttcacatacagtgcttttcct

SEQ ID NO: 97878 - DNA, 33 bp, Homo sapien
ttctcctgttctttcatatacagtgcttttcct

SEQ ID NO: 97879 - DNA, 33 bp, Homo sapien
gtggagtaagtctgacaaacttctgtgtgagtg

SEQ ID NO: 97880 - DNA, 33 bp, Homo sapien
gtggagtaagtctgacgaacttctgtgtgagtg

SEQ ID NO: 97881 - DNA, 33 bp, Homo sapien
aataatgccaactattcaactattttcatccaa

SEQ ID NO: 97882 - DNA, 33 bp, Homo sapien
aataatgccaactatttaactattttcatccaa

SEQ ID NO: 97883 - DNA, 33 bp, Homo sapien
tcagctgtggataccaacatcttttccaatgga

SEQ ID NO: 97884 - DNA, 33 bp, Homo sapien
tcagctgtggataccagcatcttttccaatgga

SEQ ID NO: 97885 - DNA, 33 bp, Homo sapien
ccaagtacaggaaatgacatatggtgacgctat

SEQ ID NO: 97886 - DNA, 33 bp, Homo sapien
ccaagtacaggaaatggcatatggtgacgctat

SEQ ID NO: 97887 - DNA, 33 bp, Homo sapien
aggcagaagtgtgaaacggaactgatataagac

SEQ ID NO: 97888 - DNA, 33 bp, Homo sapien
aggcagaagtgtgaaatggaactgatataagac

SEQ ID NO: 97889 - DNA, 33 bp, Homo sapien
gatgagtaatggttacaatatcaggagtctttc

SEQ ID NO: 97890 - DNA, 33 bp, Homo sapien
gatgagtaatggttacgatatcaggagtctttc

SEQ ID NO: 97891 - DNA, 33 bp, Homo sapien
agaacttactcttgtcaacataatagcatggaa

SEQ ID NO: 97892 - DNA, 33 bp, Homo sapien
agaacttactcttgtcgacataatagcatggaa

SEQ ID NO: 97893 - DNA, 33 bp, Homo sapien
tctacccctggaccccacaaggtcatgcccttc

SEQ ID NO: 97894 - DNA, 33 bp, Homo sapien
tctacccctggaccccgcaaggtcatgcccttc

SEQ ID NO: 97895 - DNA, 33 bp, Homo sapien
tattctttcaattctcaacatgaaatatcatcc

SEQ ID NO: 97896 - DNA, 33 bp, Homo sapien
tattctttcaattctcgacatgaaatatcatcc

SEQ ID NO: 97897 - DNA, 33 bp, Homo sapien
aagttgctttgcccacaagggtttttctcacta

SEQ ID NO: 97898 - DNA, 33 bp, Homo sapien
aagttgctttgcccacgagggtttttctcacta

SEQ ID NO: 97899 - DNA, 33 bp, Homo sapien
tattcaacatagccaacatatggaacccactta

SEQ ID NO: 97900 - DNA, 33 bp, Homo sapien
tattcaacatagccaagatatggaacccactta

SEQ ID NO: 97901 - DNA, 33 bp, Homo sapien
ttaagtgtccatcagcaaatgaatgaagaaaat

SEQ ID NO: 97902 - DNA, 33 bp, Homo sapien
ttaagtgtccatcagcgaatgaatgaagaaaat

SEQ ID NO: 97903 - DNA, 33 bp, Homo sapien
ggcttctcagccataacgaaagattctgtgaat

SEQ ID NO: 97904 - DNA, 33 bp, Homo sapien
ggcttctcagccataatgaaagattctgtgaat

SEQ ID NO: 97905 - DNA, 33 bp, Homo sapien
ataacatcaaaaataccctcactctgtctttac

SEQ ID NO: 97906 - DNA, 33 bp, Homo sapien
ataacatcaaaaatactctcactctgtctttac

SEQ ID NO: 97907 - DNA, 33 bp, Homo sapien
ttagtggttttaatcacgaattgaggataggtt

SEQ ID NO: 97908 - DNA, 33 bp, Homo sapien
ttagtggttttaatcatgaattgaggataggtt

SEQ ID NO: 97909 - DNA, 33 bp, Homo sapien
agatgctgcactacacaacatggcaggagaaag

SEQ ID NO: 97910 - DNA, 33 bp, Homo sapien
agatgctgcactacacgacatggcaggagaaag

SEQ ID NO: 97911 - DNA, 33 bp, Homo sapien
caagaagactgttggacgtatactttctgtatt

SEQ ID NO: 97912 - DNA, 33 bp, Homo sapien
caagaagactgttggaggtatactttctgtatt

SEQ ID NO: 97913 - DNA, 33 bp, Homo sapien
cgagattaagacaaccagacggctccatagcct

SEQ ID NO: 97914 - DNA, 33 bp, Homo sapien
cgagattaagacaacctgacggctccatagcct

SEQ ID NO: 97915 - DNA, 33 bp, Homo sapien
tgaggggttttccttcacacttaccatgttctc

SEQ ID NO: 97916 - DNA, 33 bp, Homo sapien
tgaggggttttccttcccacttaccatgttctc

SEQ ID NO: 97917 - DNA, 33 bp, Homo sapien
ataaacaagtgggatgacatcaaactaaaaagc

SEQ ID NO: 97918 - DNA, 33 bp, Homo sapien
ataaacaagtgggatggcatcaaactaaaaagc

SEQ ID NO: 97919 - DNA, 33 bp, Homo sapien
cataatatgtagatttaaaacttccacgagtgg

SEQ ID NO: 97920 - DNA, 33 bp, Homo sapien
cataatatgtagattttaaacttccacgagtgg

SEQ ID NO: 97921 - DNA, 33 bp, Homo sapien
atctaaaaaaatgactcagtacctcaatataca

SEQ ID NO: 97922 - DNA, 33 bp, Homo sapien
atctaaaaaaatgacttagtacctcaatataca

SEQ ID NO: 97923 - DNA, 33 bp, Homo sapien
tttgcaaactttcttaaaacatgagatttatgc

SEQ ID NO: 97924 - DNA, 33 bp, Homo sapien
tttgcaaactttcttacaacatgagatttatgc

SEQ ID NO: 97925 - DNA, 33 bp, Homo sapien
cttcatttagcaaacactgttaaagtatggacc

SEQ ID NO: 97926 - DNA, 33 bp, Homo sapien
cttcatttagcaaacattgttaaagtatggacc

SEQ ID NO: 97927 - DNA, 33 bp, Homo sapien
cacagcctaccacttacaaatatgtccatagaa

SEQ ID NO: 97928 - DNA, 33 bp, Homo sapien
cacagcctaccacttagaaatatgtccatagaa

SEQ ID NO: 97929 - DNA, 33 bp, Homo sapien
tttttccatacttcagaatttccatccatcaga

SEQ ID NO: 97930 - DNA, 33 bp, Homo sapien
tttttccatacttcagcatttccatccatcaga

SEQ ID NO: 97931 - DNA, 33 bp, Homo sapien
tacggctacattataacaaaagctaacatatac

SEQ ID NO: 97932 - DNA, 33 bp, Homo sapien
tacggctacattataagaaaagctaacatatac

SEQ ID NO: 97933 - DNA, 33 bp, Homo sapien
tagccattttctaaaaattcttaccattctgac

SEQ ID NO: 97934 - DNA, 33 bp, Homo sapien
tagccattttctaaaatttcttaccattctgac

SEQ ID NO: 97935 - DNA, 33 bp, Homo sapien
tttgtcttttccagggaccaaggagaagtgaaa

SEQ ID NO: 97936 - DNA, 33 bp, Homo sapien
tttgtcttttccaggggccaaggagaagtgaaa

SEQ ID NO: 97937 - DNA, 33 bp, Homo sapien
tataggaggaagcaaaaatgtgagagaaggaat

SEQ ID NO: 97938 - DNA, 33 bp, Homo sapien
tataggaggaagcaaagatgtgagagaaggaat

SEQ ID NO: 97939 - DNA, 33 bp, Homo sapien
aagtagggacatttgcacataaaaataatagtt

SEQ ID NO: 97940 - DNA, 33 bp, Homo sapien
aagtagggacatttgcccataaaaataatagtt

SEQ ID NO: 97941 - DNA, 33 bp, Homo sapien
ttaggtaggttcttaacgcaatgacaggtatcc

SEQ ID NO: 97942 - DNA, 33 bp, Homo sapien
ttaggtaggttcttaatgcaatgacaggtatcc

SEQ ID NO: 97943 - DNA, 33 bp, Homo sapien
actctctaagtgaacaaaactactctttttaac

SEQ ID NO: 97944 - DNA, 33 bp, Homo sapien
actctctaagtgaacagaactactctttttaac

SEQ ID NO: 97945 - DNA, 33 bp, Homo sapien
gcagagataacattgacctgaactttgtatcta

SEQ ID NO: 97946 - DNA, 33 bp, Homo sapien
gcagagataacattgatctgaactttgtatcta

SEQ ID NO: 97947 - DNA, 33 bp, Homo sapien
attctaagtgtaggaacgcttgaatcttataaa

SEQ ID NO: 97948 - DNA, 33 bp, Homo sapien
attctaagtgtaggaatgcttgaatcttataaa

SEQ ID NO: 97949 - DNA, 33 bp, Homo sapien
atatatgttgtaacaaaacgtcaaagattctcc

SEQ ID NO: 97950 - DNA, 33 bp, Homo sapien
atatatgttgtaacaatacgtcaaagattctcc

SEQ ID NO: 97951 - DNA, 33 bp, Homo sapien
agttatgaacaactggcattgatttctcatggc

SEQ ID NO: 97952 - DNA, 33 bp, Homo sapien
agttatgaacaactggtattgatttctcatggc

SEQ ID NO: 97953 - DNA, 33 bp, Homo sapien
ctcagactgctaaacaaagtaccacagactgag

SEQ ID NO: 97954 - DNA, 33 bp, Homo sapien
ctcagactgctaaacagagtaccacagactgag

SEQ ID NO: 97955 - DNA, 33 bp, Homo sapien
ctctccactattccaacggttaggaaaaggaac

SEQ ID NO: 97956 - DNA, 33 bp, Homo sapien
ctctccactattccaatggttaggaaaaggaac

SEQ ID NO: 97957 - DNA, 33 bp, Homo sapien
tccagaaatgtcacaactgggattaggagaaag

SEQ ID NO: 97958 - DNA, 33 bp, Homo sapien
tccagaaatgtcacaattgggattaggagaaag

SEQ ID NO: 97959 - DNA, 33 bp, Homo sapien
tccaatagctccccagacgattttgatccacat

SEQ ID NO: 97960 - DNA, 33 bp, Homo sapien
tccaatagctccccaggcgattttgatccacat

SEQ ID NO: 97961 - DNA, 33 bp, Homo sapien
aaatgtttactaattaagttggtagcctattat

SEQ ID NO: 97962 - DNA, 33 bp, Homo sapien
aaatgtttactaattaggttggtagcctattat

SEQ ID NO: 97963 - DNA, 33 bp, Homo sapien
acacaactcaccattaaagagaatcagtgggag

SEQ ID NO: 97964 - DNA, 33 bp, Homo sapien
acacaactcaccattacagagaatcagtgggag

SEQ ID NO: 97965 - DNA, 33 bp, Homo sapien
aaccacattcacatacatgccataagtccctga

SEQ ID NO: 97966 - DNA, 33 bp, Homo sapien
aaccacattcacatacgtgccataagtccctga

SEQ ID NO: 97967 - DNA, 33 bp, Homo sapien
caggcaactcacaaatgagtagtcacttttaca

SEQ ID NO: 97968 - DNA, 33 bp, Homo sapien
caggcaactcacaaattagtagtcacttttaca

SEQ ID NO: 97969 - DNA, 33 bp, Homo sapien
tccaaccaaaactgtcaaagtgattttacatat

SEQ ID NO: 97970 - DNA, 33 bp, Homo sapien
tccaaccaaaactgtcgaagtgattttacatat

SEQ ID NO: 97971 - DNA, 33 bp, Homo sapien
gaaggtcttacactgccaaatactcactcccaa

SEQ ID NO: 97972 - DNA, 33 bp, Homo sapien
gaaggtcttacactgctaaatactcactcccaa

SEQ ID NO: 97973 - DNA, 33 bp, Homo sapien
aaatgtgtacaaaatcccttgtctctgtctctt

SEQ ID NO: 97974 - DNA, 33 bp, Homo sapien
aaatgtgtacaaaatctcttgtctctgtctctt

SEQ ID NO: 97975 - DNA, 33 bp, Homo sapien
tataactgataaaatccaggctgaattggacag

SEQ ID NO: 97976 - DNA, 33 bp, Homo sapien
tataactgataaaatctaggctgaattggacag

SEQ ID NO: 97977 - DNA, 33 bp, Homo sapien
taagattgtgattagcagagccatgcctagttt

SEQ ID NO: 97978 - DNA, 33 bp, Homo sapien
taagattgtgattagcggagccatgcctagttt

SEQ ID NO: 97979 - DNA, 33 bp, Homo sapien
aggggagcctacctcacagtaaattctcaaaag

SEQ ID NO: 97980 - DNA, 33 bp, Homo sapien
aggggagcctacctcagagtaaattctcaaaag

SEQ ID NO: 97981 - DNA, 33 bp, Homo sapien
gggggtgaggattaggaaataaggccagaaagg

SEQ ID NO: 97982 - DNA, 33 bp, Homo sapien
gggggtgaggattagggaataaggccagaaagg

SEQ ID NO: 97983 - DNA, 33 bp, Homo sapien
cagcctagagtaaaaaatgttgattatcttgat

SEQ ID NO: 97984 - DNA, 33 bp, Homo sapien
cagcctagagtaaaaagtgttgattatcttgat

SEQ ID NO: 97985 - DNA, 33 bp, Homo sapien
tgaaatcacgctaaaaattaatcaaaatgaaaa

SEQ ID NO: 97986 - DNA, 33 bp, Homo sapien
tgaaatcacgctaaaagttaatcaaaatgaaaa

SEQ ID NO: 97987 - DNA, 33 bp, Homo sapien
aatcactttcttaacgaacagacttgctgccaa

SEQ ID NO: 97988 - DNA, 33 bp, Homo sapien
aatcactttcttaacgtacagacttgctgccaa

SEQ ID NO: 97989 - DNA, 33 bp, Homo sapien
ccagcaaacctgctaacattgttcattcaaacc

SEQ ID NO: 97990 - DNA, 33 bp, Homo sapien
ccagcaaacctgctaatattgttcattcaaacc

SEQ ID NO: 97991 - DNA, 33 bp, Homo sapien
cctgggtgctagcatacgattgtaccccatgat

SEQ ID NO: 97992 - DNA, 33 bp, Homo sapien
cctgggtgctagcatatgattgtaccccatgat

SEQ ID NO: 97993 - DNA, 33 bp, Homo sapien
accctagaagaatttaagatttgccccttgggg

SEQ ID NO: 97994 - DNA, 33 bp, Homo sapien
accctagaagaatttacgatttgccccttgggg

SEQ ID NO: 97995 - DNA, 33 bp, Homo sapien
aagacgcaaacacaaactgatttataataatcc

SEQ ID NO: 97996 - DNA, 33 bp, Homo sapien
aagacgcaaacacaaattgatttataataatcc

SEQ ID NO: 97997 - DNA, 33 bp, Homo sapien
aaggtgggatataactcaaagatccctgaaaaa

SEQ ID NO: 97998 - DNA, 33 bp, Homo sapien
aaggtgggatataactgaaagatccctgaaaaa

SEQ ID NO: 97999 - DNA, 33 bp, Homo sapien
ctaatttatccctgatcacatatgctgcttcta

SEQ ID NO: 98000 - DNA, 33 bp, Homo sapien
ctaatttatccctgatgacatatgctgcttcta

SEQ ID NO: 98001 - DNA, 33 bp, Homo sapien
acaaagaactacaacaaagaacgtcagctaaca

SEQ ID NO: 98002 - DNA, 33 bp, Homo sapien
acaaagaactacaacagagaacgtcagctaaca

SEQ ID NO: 98003 - DNA, 33 bp, Homo sapien
tcatcagcctggataactgaccttactgacaga

SEQ ID NO: 98004 - DNA, 33 bp, Homo sapien
tcatcagcctggataattgaccttactgacaga

SEQ ID NO: 98005 - DNA, 33 bp, Homo sapien
ttatttctctaagcataaccagatcagaaatta

SEQ ID NO: 98006 - DNA, 33 bp, Homo sapien
ttatttctctaagcatgaccagatcagaaatta

SEQ ID NO: 98007 - DNA, 33 bp, Homo sapien
cattacctctaccccaatatttcactgttgagt

SEQ ID NO: 98008 - DNA, 33 bp, Homo sapien
cattacctctaccccagtatttcactgttgagt

SEQ ID NO: 98009 - DNA, 33 bp, Homo sapien
gtttattcatgctgagaccaatgagtaatttcc

SEQ ID NO: 98010 - DNA, 33 bp, Homo sapien
gtttattcatgctgaggccaatgagtaatttcc

SEQ ID NO: 98011 - DNA, 33 bp, Homo sapien
tgacctacctagatcacgccagacatgagcaag

SEQ ID NO: 98012 - DNA, 33 bp, Homo sapien
tgacctacctagatcatgccagacatgagcaag

SEQ ID NO: 98013 - DNA, 33 bp, Homo sapien
ttttgagctggagatacgccttcttaggtggag

SEQ ID NO: 98014 - DNA, 33 bp, Homo sapien
ttttgagctggagatatgccttcttaggtggag

SEQ ID NO: 98015 - DNA, 33 bp, Homo sapien
attacaaacctagagagaaagtagcatgcatac

SEQ ID NO: 98016 - DNA, 33 bp, Homo sapien
attacaaacctagagataaagtagcatgcatac

SEQ ID NO: 98017 - DNA, 33 bp, Homo sapien
tgtgctgatccttctacctgaatgcccttcccc

SEQ ID NO: 98018 - DNA, 33 bp, Homo sapien
tgtgctgatccttctagctgaatgcccttcccc

SEQ ID NO: 98019 - DNA, 33 bp, Homo sapien
gtgagattacctaggaagtgacatgaagagaca

SEQ ID NO: 98020 - DNA, 33 bp, Homo sapien
gtgagattacctaggaggtgacatgaagagaca

SEQ ID NO: 98021 - DNA, 33 bp, Homo sapien
gttttaagttcctgctaacacatcgatgtagcc

SEQ ID NO: 98022 - DNA, 33 bp, Homo sapien
gttttaagttcctgctgacacatcgatgtagcc

SEQ ID NO: 98023 - DNA, 33 bp, Homo sapien
taagtgtttctcccaaactccagacttttccta

SEQ ID NO: 98024 - DNA, 33 bp, Homo sapien
taagtgtttctcccaagctccagacttttccta

SEQ ID NO: 98025 - DNA, 33 bp, Homo sapien
aaaaaaaggtgacacacgaaggcacaaaagcat

SEQ ID NO: 98026 - DNA, 33 bp, Homo sapien
aaaaaaaggtgacacatgaaggcacaaaagcat

SEQ ID NO: 98027 - DNA, 33 bp, Homo sapien
ggctgctatagagaacgaaagatcactgcagtt

SEQ ID NO: 98028 - DNA, 33 bp, Homo sapien
ggctgctatagagaactaaagatcactgcagtt

SEQ ID NO: 98029 - DNA, 33 bp, Homo sapien
agaagcagtcactataactgaagtcttcaaggg

SEQ ID NO: 98030 - DNA, 33 bp, Homo sapien
agaagcagtcactatagctgaagtcttcaaggg

SEQ ID NO: 98031 - DNA, 33 bp, Homo sapien
atgaactcactggaaaattgtttgctgtctggt

SEQ ID NO: 98032 - DNA, 33 bp, Homo sapien
atgaactcactggaaatttgtttgctgtctggt

SEQ ID NO: 98033 - DNA, 33 bp, Homo sapien
taacaccaataccctaaatgaggagtccctgag

SEQ ID NO: 98034 - DNA, 33 bp, Homo sapien
taacaccaataccctagatgaggagtccctgag

SEQ ID NO: 98035 - DNA, 33 bp, Homo sapien
aaaatttcaccttacaatgagcaacacacttga

SEQ ID NO: 98036 - DNA, 33 bp, Homo sapien
aaaatttcaccttacagtgagcaacacacttga

SEQ ID NO: 98037 - DNA, 33 bp, Homo sapien
gggattcaggcttcaaaatacgaatttcagggc

SEQ ID NO: 98038 - DNA, 33 bp, Homo sapien
gggattcaggcttcaacatacgaatttcagggc

SEQ ID NO: 98039 - DNA, 33 bp, Homo sapien
aaggcatcatggaacaaacttctcaatccacta

SEQ ID NO: 98040 - DNA, 33 bp, Homo sapien
aaggcatcatggaacagacttctcaatccacta

SEQ ID NO: 98041 - DNA, 33 bp, Homo sapien
ttaatcaagttgcagaaaccaaatgcctgctta

SEQ ID NO: 98042 - DNA, 33 bp, Homo sapien
ttaatcaagttgcagagaccaaatgcctgctta

SEQ ID NO: 98043 - DNA, 33 bp, Homo sapien
gatgcaatgtaccaacactagagctgtaggtag

SEQ ID NO: 98044 - DNA, 33 bp, Homo sapien
gatgcaatgtaccaacgctagagctgtaggtag

SEQ ID NO: 98045 - DNA, 33 bp, Homo sapien
tcattttcctatctcacgttaaaggagagttta

SEQ ID NO: 98046 - DNA, 33 bp, Homo sapien
tcattttcctatctcaggttaaaggagagttta

SEQ ID NO: 98047 - DNA, 33 bp, Homo sapien
tataatagggaaaatacggaaaacagccggagt

SEQ ID NO: 98048 - DNA, 33 bp, Homo sapien
tataatagggaaaatatggaaaacagccggagt

SEQ ID NO: 98049 - DNA, 33 bp, Homo sapien
attgaattttgggagaaagcattattcagacca

SEQ ID NO: 98050 - DNA, 33 bp, Homo sapien
attgaattttgggagagagcattattcagacca

SEQ ID NO: 98051 - DNA, 33 bp, Homo sapien
aagggggctctgggaagattaattgtaagaatg

SEQ ID NO: 98052 - DNA, 33 bp, Homo sapien
aagggggctctgggaatattaattgtaagaatg

SEQ ID NO: 98053 - DNA, 33 bp, Homo sapien
tatcttggctactttcaaagacgacttaagatt

SEQ ID NO: 98054 - DNA, 33 bp, Homo sapien
tatcttggctactttccaagacgacttaagatt

SEQ ID NO: 98055 - DNA, 33 bp, Homo sapien
atatcactttgctttcacccttattccatccat

SEQ ID NO: 98056 - DNA, 33 bp, Homo sapien
atatcactttgctttcgcccttattccatccat

SEQ ID NO: 98057 - DNA, 33 bp, Homo sapien
ttccaatgtgttgaaacggaatggtcatgccat

SEQ ID NO: 98058 - DNA, 33 bp, Homo sapien
ttccaatgtgttgaaatggaatggtcatgccat

SEQ ID NO: 98059 - DNA, 33 bp, Homo sapien
aaaaactgtcataaggcccctgcaagaactgaa

SEQ ID NO: 98060 - DNA, 33 bp, Homo sapien
aaaaactgtcataaggtccctgcaagaactgaa

SEQ ID NO: 98061 - DNA, 33 bp, Homo sapien
ctctttctcaaactaacagaatgcacgaatcta

SEQ ID NO: 98062 - DNA, 33 bp, Homo sapien
ctctttctcaaactaatagaatgcacgaatcta

SEQ ID NO: 98063 - DNA, 33 bp, Homo sapien
gaggagaacaaaataaacataaacaatttctac

SEQ ID NO: 98064 - DNA, 33 bp, Homo sapien
gaggagaacaaaataatcataaacaatttctac

SEQ ID NO: 98065 - DNA, 33 bp, Homo sapien
atttccagctagtacaccaaagaagtattagtt

SEQ ID NO: 98066 - DNA, 33 bp, Homo sapien
atttccagctagtacagcaaagaagtattagtt

SEQ ID NO: 98067 - DNA, 33 bp, Homo sapien
cactgtttcccaaactcagttctatgaaacaat

SEQ ID NO: 98068 - DNA, 33 bp, Homo sapien
cactgtttcccaaactgagttctatgaaacaat

SEQ ID NO: 98069 - DNA, 33 bp, Homo sapien
tatttatcttccactaaatggttactgattaga

SEQ ID NO: 98070 - DNA, 33 bp, Homo sapien
tatttatcttccactatatggttactgattaga

SEQ ID NO: 98071 - DNA, 33 bp, Homo sapien
ttccttagtatcttcagctgtaaactcgaaaca

SEQ ID NO: 98072 - DNA, 33 bp, Homo sapien
ttccttagtatcttcatctgtaaactcgaaaca

SEQ ID NO: 98073 - DNA, 33 bp, Homo sapien
gtttaaccatgggaaaagtgtgaatcagataaa

SEQ ID NO: 98074 - DNA, 33 bp, Homo sapien
gtttaaccatgggaaacgtgtgaatcagataaa

SEQ ID NO: 98075 - DNA, 33 bp, Homo sapien
taaaaaggggttaacaatacttatgagaatatt

SEQ ID NO: 98076 - DNA, 33 bp, Homo sapien
taaaaaggggttaacagtacttatgagaatatt

SEQ ID NO: 98077 - DNA, 33 bp, Homo sapien
tgcttctacagggataaattttaatgccttttt

SEQ ID NO: 98078 - DNA, 33 bp, Homo sapien
tgcttctacagggatacattttaatgccttttt

SEQ ID NO: 98079 - DNA, 33 bp, Homo sapien
tttcacagtttattgccctggatggtttgttgc

SEQ ID NO: 98080 - DNA, 33 bp, Homo sapien
tttcacagtttattgctctggatggtttgttgc

SEQ ID NO: 98081 - DNA, 33 bp, Homo sapien
tttatgcttactcaacggccaaaagggatgaag

SEQ ID NO: 98082 - DNA, 33 bp, Homo sapien
tttatgcttactcaactgccaaaagggatgaag

SEQ ID NO: 98083 - DNA, 33 bp, Homo sapien
gaagacatcagtaaaacataagtcaattgatct

SEQ ID NO: 98084 - DNA, 33 bp, Homo sapien
gaagacatcagtaaaatataagtcaattgatct

SEQ ID NO: 98085 - DNA, 33 bp, Homo sapien
ttaatgaaacagaagagaattgaaaataccaga

SEQ ID NO: 98086 - DNA, 33 bp, Homo sapien
ttaatgaaacagaagataattgaaaataccaga

SEQ ID NO: 98087 - DNA, 33 bp, Homo sapien
gtctaggactgtagccaaaatctctaaatccaa

SEQ ID NO: 98088 - DNA, 33 bp, Homo sapien
gtctaggactgtagccgaaatctctaaatccaa

SEQ ID NO: 98089 - DNA, 33 bp, Homo sapien
acatttaaactttaccacatgttcctcagtgaa

SEQ ID NO: 98090 - DNA, 33 bp, Homo sapien
acatttaaactttaccccatgttcctcagtgaa

SEQ ID NO: 98091 - DNA, 33 bp, Homo sapien
caaaaggaaaccagaaatgttctagattccata

SEQ ID NO: 98092 - DNA, 33 bp, Homo sapien
caaaaggaaaccagaagtgttctagattccata

SEQ ID NO: 98093 - DNA, 33 bp, Homo sapien
tcaatcttcaaataccacctagggctgtggtgc

SEQ ID NO: 98094 - DNA, 33 bp, Homo sapien
tcaatcttcaaataccgcctagggctgtggtgc

SEQ ID NO: 98095 - DNA, 33 bp, Homo sapien
aggaagttactctaaccgcaaaggaaggtactt

SEQ ID NO: 98096 - DNA, 33 bp, Homo sapien
aggaagttactctaactgcaaaggaaggtactt

SEQ ID NO: 98097 - DNA, 33 bp, Homo sapien
tacagggtaggagcaaaatgaatggagtgagga

SEQ ID NO: 98098 - DNA, 33 bp, Homo sapien
tacagggtaggagcaagatgaatggagtgagga

SEQ ID NO: 98099 - DNA, 33 bp, Homo sapien
aaagtttttcttttaacatggcgttcacctctt

SEQ ID NO: 98100 - DNA, 33 bp, Homo sapien
aaagtttttcttttaatatggcgttcacctctt

SEQ ID NO: 98101 - DNA, 33 bp, Homo sapien
gggcaacatgacgaaaacctgtatccaaaaaaa

SEQ ID NO: 98102 - DNA, 33 bp, Homo sapien
gggcaacatgacgaaaccctgtatccaaaaaaa

SEQ ID NO: 98103 - DNA, 33 bp, Homo sapien
aggactgtacagacaaatatcatacaagaaaag

SEQ ID NO: 98104 - DNA, 33 bp, Homo sapien
aggactgtacagacaagtatcatacaagaaaag

SEQ ID NO: 98105 - DNA, 33 bp, Homo sapien
tgggctgctttaatgaaataccatagactgggt

SEQ ID NO: 98106 - DNA, 33 bp, Homo sapien
tgggctgctttaatgatataccatagactgggt

SEQ ID NO: 98107 - DNA, 33 bp, Homo sapien
tctctctcatgtattcaccacactgtcaccatt

SEQ ID NO: 98108 - DNA, 33 bp, Homo sapien
tctctctcatgtattcgccacactgtcaccatt

SEQ ID NO: 98109 - DNA, 33 bp, Homo sapien
tgaatagaacagaaaggctgaatgtctcttgag

SEQ ID NO: 98110 - DNA, 33 bp, Homo sapien
tgaatagaacagaaagtctgaatgtctcttgag

SEQ ID NO: 98111 - DNA, 33 bp, Homo sapien
aacatttgaatcagtgaagtaaagcagattgct

SEQ ID NO: 98112 - DNA, 33 bp, Homo sapien
aacatttgaatcagtggagtaaagcagattgct

SEQ ID NO: 98113 - DNA, 33 bp, Homo sapien
agggttgttccatttaacgtgatcccttgggca

SEQ ID NO: 98114 - DNA, 33 bp, Homo sapien
agggttgttccatttagcgtgatcccttgggca

SEQ ID NO: 98115 - DNA, 33 bp, Homo sapien
gcctttgtctctccagactctcagatccaactc

SEQ ID NO: 98116 - DNA, 33 bp, Homo sapien
gcctttgtctctccagtctctcagatccaactc

SEQ ID NO: 98117 - DNA, 33 bp, Homo sapien
agaaaaagctacctgacgccaagaaagaaacac

SEQ ID NO: 98118 - DNA, 33 bp, Homo sapien
agaaaaagctacctgatgccaagaaagaaacac

SEQ ID NO: 98119 - DNA, 33 bp, Homo sapien
tgtgaattatgtcttgcagtccgactggtagga

SEQ ID NO: 98120 - DNA, 33 bp, Homo sapien
tgtgaattatgtcttgtagtccgactggtagga

SEQ ID NO: 98121 - DNA, 33 bp, Homo sapien
gaaagtattcagacagaaaggtagaaatgtagt

SEQ ID NO: 98122 - DNA, 33 bp, Homo sapien
gaaagtattcagacaggaaggtagaaatgtagt

SEQ ID NO: 98123 - DNA, 33 bp, Homo sapien
gaaacaatggtcgataagactaaatccccaatg

SEQ ID NO: 98124 - DNA, 33 bp, Homo sapien
gaaacaatggtcgataggactaaatccccaatg

SEQ ID NO: 98125 - DNA, 33 bp, Homo sapien
aaaataattaaattaacggcagcaacaacacat

SEQ ID NO: 98126 - DNA, 33 bp, Homo sapien
aaaataattaaattaatggcagcaacaacacat

SEQ ID NO: 98127 - DNA, 33 bp, Homo sapien
ctgacatttaagccaccagactggttatctggt

SEQ ID NO: 98128 - DNA, 33 bp, Homo sapien
ctgacatttaagccactagactggttatctggt

SEQ ID NO: 98129 - DNA, 33 bp, Homo sapien
ataaatctagaagccactgatttgaaaattatt

SEQ ID NO: 98130 - DNA, 33 bp, Homo sapien
ataaatctagaagccattgatttgaaaattatt

SEQ ID NO: 98131 - DNA, 33 bp, Homo sapien
cacagacacattaaacaacttgttccctaccat

SEQ ID NO: 98132 - DNA, 33 bp, Homo sapien
cacagacacattaaacgacttgttccctaccat

SEQ ID NO: 98133 - DNA, 33 bp, Homo sapien
attatacaccatgttcaagtgggatttacccaa

SEQ ID NO: 98134 - DNA, 33 bp, Homo sapien
attatacaccatgttccagtgggatttacccaa

SEQ ID NO: 98135 - DNA, 33 bp, Homo sapien
taggtgtggaagaaacaatggacacaattcaac

SEQ ID NO: 98136 - DNA, 33 bp, Homo sapien
taggtgtggaagaaactatggacacaattcaac

SEQ ID NO: 98137 - DNA, 33 bp, Homo sapien
aatctcaatgtttactaactgtacaattccatt

SEQ ID NO: 98138 - DNA, 33 bp, Homo sapien
aatctcaatgtttactgactgtacaattccatt

SEQ ID NO: 98139 - DNA, 33 bp, Homo sapien
atatgtgtgaaaacagcagctgagacattcttg

SEQ ID NO: 98140 - DNA, 33 bp, Homo sapien
atatgtgtgaaaacaggagctgagacattcttg

SEQ ID NO: 98141 - DNA, 33 bp, Homo sapien
gcattagaacttaacaatcttgcagagttggac

SEQ ID NO: 98142 - DNA, 33 bp, Homo sapien
gcattagaacttaacagtcttgcagagttggac

SEQ ID NO: 98143 - DNA, 33 bp, Homo sapien
tcattggtagagagaactggtatctttccacat

SEQ ID NO: 98144 - DNA, 33 bp, Homo sapien
tcattggtagagagaattggtatctttccacat

SEQ ID NO: 98145 - DNA, 33 bp, Homo sapien
tatctaactctgataactgggtttcttctgtta

SEQ ID NO: 98146 - DNA, 33 bp, Homo sapien
tatctaactctgataattgggtttcttctgtta

SEQ ID NO: 98147 - DNA, 33 bp, Homo sapien
agaagccaaaggataacgatggtctcattcttc

SEQ ID NO: 98148 - DNA, 33 bp, Homo sapien
agaagccaaaggataatgatggtctcattcttc

SEQ ID NO: 98149 - DNA, 33 bp, Homo sapien
ataataagccaccataaacgaatttgcagacag

SEQ ID NO: 98150 - DNA, 33 bp, Homo sapien
ataataagccaccatacacgaatttgcagacag

SEQ ID NO: 98151 - DNA, 33 bp, Homo sapien
ggacaagtaggaactgcacttttgcacaaatca

SEQ ID NO: 98152 - DNA, 33 bp, Homo sapien
ggacaagtaggaactgtacttttgcacaaatca

SEQ ID NO: 98153 - DNA, 33 bp, Homo sapien
aggggaactgagtacaaaagaggatggaaatgt

SEQ ID NO: 98154 - DNA, 33 bp, Homo sapien
aggggaactgagtacagaagaggatggaaatgt

SEQ ID NO: 98155 - DNA, 33 bp, Homo sapien
tggcttataagcaatcagagacttagactaaca

SEQ ID NO: 98156 - DNA, 33 bp, Homo sapien
tggcttataagcaatccgagacttagactaaca

SEQ ID NO: 98157 - DNA, 33 bp, Homo sapien
gtcacagtaaacggcacaatcagaaaaacacag

SEQ ID NO: 98158 - DNA, 33 bp, Homo sapien
gtcacagtaaacggcataatcagaaaaacacag

SEQ ID NO: 98159 - DNA, 33 bp, Homo sapien
tggcactggctactcacggtatttccaattaaa

SEQ ID NO: 98160 - DNA, 33 bp, Homo sapien
tggcactggctactcagggtatttccaattaaa

SEQ ID NO: 98161 - DNA, 33 bp, Homo sapien
gaaactctcagtgacacgtgtaaaagcaatttg

SEQ ID NO: 98162 - DNA, 33 bp, Homo sapien
gaaactctcagtgacatgtgtaaaagcaatttg

SEQ ID NO: 98163 - DNA, 33 bp, Homo sapien
ataattaagaatctgcaaactaaaatctagagg

SEQ ID NO: 98164 - DNA, 33 bp, Homo sapien
ataattaagaatctgcgaactaaaatctagagg

SEQ ID NO: 98165 - DNA, 33 bp, Homo sapien
ttaatttcaaaataacaactgtgaattcagaaa

SEQ ID NO: 98166 - DNA, 33 bp, Homo sapien
ttaatttcaaaataaccactgtgaattcagaaa

SEQ ID NO: 98167 - DNA, 33 bp, Homo sapien
tcaacaacagggaatcagagcaggccacaagtt

SEQ ID NO: 98168 - DNA, 33 bp, Homo sapien
tcaacaacagggaatcggagcaggccacaagtt

SEQ ID NO: 98169 - DNA, 33 bp, Homo sapien
gtagtttgagatgttacgcagattcttgtgacc

SEQ ID NO: 98170 - DNA, 33 bp, Homo sapien
gtagtttgagatgttatgcagattcttgtgacc

SEQ ID NO: 98171 - DNA, 33 bp, Homo sapien
atggcattccggtagacattatgtggcttactg

SEQ ID NO: 98172 - DNA, 33 bp, Homo sapien
atggcattccggtagatattatgtggcttactg

SEQ ID NO: 98173 - DNA, 33 bp, Homo sapien
aataacttagcttccaataacctttagactggg

SEQ ID NO: 98174 - DNA, 33 bp, Homo sapien
aataacttagcttccagtaacctttagactggg

SEQ ID NO: 98175 - DNA, 33 bp, Homo sapien
aggttagctttccccaatcttcaaatggcgcca

SEQ ID NO: 98176 - DNA, 33 bp, Homo sapien
aggttagctttccccagtcttcaaatggcgcca

SEQ ID NO: 98177 - DNA, 33 bp, Homo sapien
catttttcttccaaaaagccttatggccaacta

SEQ ID NO: 98178 - DNA, 33 bp, Homo sapien
catttttcttccaaaacgccttatggccaacta

SEQ ID NO: 98179 - DNA, 33 bp, Homo sapien
tctaaaaccagttaaacggtatgaccagttagc

SEQ ID NO: 98180 - DNA, 33 bp, Homo sapien
tctaaaaccagttaaatggtatgaccagttagc

SEQ ID NO: 98181 - DNA, 33 bp, Homo sapien
acatcctttgtttctccccttgtggctatatcc

SEQ ID NO: 98182 - DNA, 33 bp, Homo sapien
acatcctttgtttctctccttgtggctatatcc

SEQ ID NO: 98183 - DNA, 33 bp, Homo sapien
tctctaggctaaaaagcactctttaaatggtga

SEQ ID NO: 98184 - DNA, 33 bp, Homo sapien
tctctaggctaaaaaggactctttaaatggtga

SEQ ID NO: 98185 - DNA, 33 bp, Homo sapien
gatttatcagtgaaagaaaagttatccacagaa

SEQ ID NO: 98186 - DNA, 33 bp, Homo sapien
gatttatcagtgaaaggaaagttatccacagaa

SEQ ID NO: 98187 - DNA, 33 bp, Homo sapien
ggcactcagatattaccatggtttactgaatag

SEQ ID NO: 98188 - DNA, 33 bp, Homo sapien
ggcactcagatattactatggtttactgaatag

SEQ ID NO: 98189 - DNA, 33 bp, Homo sapien
ataatatgattttagacaacaagatgactagtt

SEQ ID NO: 98190 - DNA, 33 bp, Homo sapien
ataatatgattttagataacaagatgactagtt

SEQ ID NO: 98191 - DNA, 33 bp, Homo sapien
cagccatttgacaagaagctttatacaactcct

SEQ ID NO: 98192 - DNA, 33 bp, Homo sapien
cagccatttgacaagatgctttatacaactcct

SEQ ID NO: 98193 - DNA, 33 bp, Homo sapien
atgttaatgataattcaacccaagagaaatttt

SEQ ID NO: 98194 - DNA, 33 bp, Homo sapien
atgttaatgataattccacccaagagaaatttt

SEQ ID NO: 98195 - DNA, 33 bp, Homo sapien
tcggacttgttcactcaccaactacacagacac

SEQ ID NO: 98196 - DNA, 33 bp, Homo sapien
tcggacttgttcactcgccaactacacagacac

SEQ ID NO: 98197 - DNA, 33 bp, Homo sapien
attccaaactgggcaaaagagtgggactttatc

SEQ ID NO: 98198 - DNA, 33 bp, Homo sapien
attccaaactgggcaacagagtgggactttatc

SEQ ID NO: 98199 - DNA, 33 bp, Homo sapien
acattcatatgaaaaccgcaggggggaaatgtc

SEQ ID NO: 98200 - DNA, 33 bp, Homo sapien
acattcatatgaaaactgcaggggggaaatgtc

SEQ ID NO: 98201 - DNA, 33 bp, Homo sapien
caattacatacacaacagaatctcatttttcac

SEQ ID NO: 98202 - DNA, 33 bp, Homo sapien
caattacatacacaaccgaatctcatttttcac

SEQ ID NO: 98203 - DNA, 33 bp, Homo sapien
cacatccactttcaaaatctcatatgcatttct

SEQ ID NO: 98204 - DNA, 33 bp, Homo sapien
cacatccactttcaaactctcatatgcatttct

SEQ ID NO: 98205 - DNA, 33 bp, Homo sapien
atcagtttaaccttcaaagggttctgggtcagc

SEQ ID NO: 98206 - DNA, 33 bp, Homo sapien
atcagtttaaccttcacagggttctgggtcagc

SEQ ID NO: 98207 - DNA, 33 bp, Homo sapien
gactaattgacagtaacctttaaggtggagaca

SEQ ID NO: 98208 - DNA, 33 bp, Homo sapien
gactaattgacagtaagctttaaggtggagaca

SEQ ID NO: 98209 - DNA, 33 bp, Homo sapien
atcagtggtggtattcaaatatataaagtcctg

SEQ ID NO: 98210 - DNA, 33 bp, Homo sapien
atcagtggtggtattccaatatataaagtcctg

SEQ ID NO: 98211 - DNA, 33 bp, Homo sapien
cataaggccacatagacgcagctagggggagat

SEQ ID NO: 98212 - DNA, 33 bp, Homo sapien
cataaggccacatagatgcagctagggggagat

SEQ ID NO: 98213 - DNA, 33 bp, Homo sapien
atatgtgacaagcaacaattaagcaataacgaa

SEQ ID NO: 98214 - DNA, 33 bp, Homo sapien
atatgtgacaagcaaccattaagcaataacgaa

SEQ ID NO: 98215 - DNA, 33 bp, Homo sapien
caacatgcagcttaaaatatatgatgtcaacgt

SEQ ID NO: 98216 - DNA, 33 bp, Homo sapien
caacatgcagcttaaattatatgatgtcaacgt

SEQ ID NO: 98217 - DNA, 33 bp, Homo sapien
gaccaattaagaagtacaggcgaaattaaatgg

SEQ ID NO: 98218 - DNA, 33 bp, Homo sapien
gaccaattaagaagtagaggcgaaattaaatgg

SEQ ID NO: 98219 - DNA, 33 bp, Homo sapien
ctgttgttgataataaccaaaatgatcagaatg

SEQ ID NO: 98220 - DNA, 33 bp, Homo sapien
ctgttgttgataataagcaaaatgatcagaatg

SEQ ID NO: 98221 - DNA, 33 bp, Homo sapien
agcaaaactcataaggaacaggattctggatta

SEQ ID NO: 98222 - DNA, 33 bp, Homo sapien
agcaaaactcataagggacaggattctggatta

SEQ ID NO: 98223 - DNA, 33 bp, Homo sapien
gaaccttccggaagacagtcatcaaaacaaaaa

SEQ ID NO: 98224 - DNA, 33 bp, Homo sapien
gaaccttccggaagacggtcatcaaaacaaaaa

SEQ ID NO: 98225 - DNA, 33 bp, Homo sapien
cgcaatggcaaggatacggaaccagactcactg

SEQ ID NO: 98226 - DNA, 33 bp, Homo sapien
cgcaatggcaaggatatggaaccagactcactg

SEQ ID NO: 98227 - DNA, 33 bp, Homo sapien
agctcaaggttcatacaaaagcagtatttcttt

SEQ ID NO: 98228 - DNA, 33 bp, Homo sapien
agctcaaggttcatacgaaagcagtatttcttt

SEQ ID NO: 98229 - DNA, 33 bp, Homo sapien
atgcagtgagggtttacctgccttcacatctct

SEQ ID NO: 98230 - DNA, 33 bp, Homo sapien
atgcagtgagggtttagctgccttcacatctct

SEQ ID NO: 98231 - DNA, 33 bp, Homo sapien
atatccaggtattcaaagaacattctatttaaa

SEQ ID NO: 98232 - DNA, 33 bp, Homo sapien
atatccaggtattcaacgaacattctatttaaa

SEQ ID NO: 98233 - DNA, 33 bp, Homo sapien
ttcactgatatacccactggcgtcacaacagaa

SEQ ID NO: 98234 - DNA, 33 bp, Homo sapien
ttcactgatatacccattggcgtcacaacagaa

SEQ ID NO: 98235 - DNA, 33 bp, Homo sapien
cagtactgattttccacgattgactggagtaaa

SEQ ID NO: 98236 - DNA, 33 bp, Homo sapien
cagtactgattttccatgattgactggagtaaa

SEQ ID NO: 98237 - DNA, 33 bp, Homo sapien
aaagtatgacaaagacacaccataattctcaat

SEQ ID NO: 98238 - DNA, 33 bp, Homo sapien
aaagtatgacaaagacgcaccataattctcaat

SEQ ID NO: 98239 - DNA, 33 bp, Homo sapien
gctcaaagaaccacagcctacctggctagaaag

SEQ ID NO: 98240 - DNA, 33 bp, Homo sapien
gctcaaagaaccacagtctacctggctagaaag

SEQ ID NO: 98241 - DNA, 33 bp, Homo sapien
cataaagcctaggatcagaatccaatatgctag

SEQ ID NO: 98242 - DNA, 33 bp, Homo sapien
cataaagcctaggatcggaatccaatatgctag

SEQ ID NO: 98243 - DNA, 33 bp, Homo sapien
aattctaaggatgcaaggatacaaagcttaatt

SEQ ID NO: 98244 - DNA, 33 bp, Homo sapien
aattctaaggatgcaatgatacaaagcttaatt

SEQ ID NO: 98245 - DNA, 33 bp, Homo sapien
ggattatgtcataaaaattgcatttctttcttt

SEQ ID NO: 98246 - DNA, 33 bp, Homo sapien
ggattatgtcataaaagttgcatttctttcttt

SEQ ID NO: 98247 - DNA, 33 bp, Homo sapien
ctcccttgacttatgaacctccaataagctaaa

SEQ ID NO: 98248 - DNA, 33 bp, Homo sapien
ctcccttgacttatgaccctccaataagctaaa

SEQ ID NO: 98249 - DNA, 33 bp, Homo sapien
atgcactggaaattgaaacgtgaagctagtctt

SEQ ID NO: 98250 - DNA, 33 bp, Homo sapien
atgcactggaaattgagacgtgaagctagtctt

SEQ ID NO: 98251 - DNA, 33 bp, Homo sapien
aaattagagaggtgacaagaaatgcaaagtata

SEQ ID NO: 98252 - DNA, 33 bp, Homo sapien
aaattagagaggtgacgagaaatgcaaagtata

SEQ ID NO: 98253 - DNA, 33 bp, Homo sapien
cacacatgttgactcactcactcatcataactc

SEQ ID NO: 98254 - DNA, 33 bp, Homo sapien
cacacatgttgactcattcactcatcataactc

SEQ ID NO: 98255 - DNA, 33 bp, Homo sapien
acctcacaaagtgccgaaactataagcatgagc

SEQ ID NO: 98256 - DNA, 33 bp, Homo sapien
acctcacaaagtgccggaactataagcatgagc

SEQ ID NO: 98257 - DNA, 33 bp, Homo sapien
tacctgtaacaccatgaaattatatcgaatcat

SEQ ID NO: 98258 - DNA, 33 bp, Homo sapien
tacctgtaacaccatggaattatatcgaatcat

SEQ ID NO: 98259 - DNA, 33 bp, Homo sapien
aaatagcacagtgaaacctgcaatctaaatgtc

SEQ ID NO: 98260 - DNA, 33 bp, Homo sapien
aaatagcacagtgaaatctgcaatctaaatgtc

SEQ ID NO: 98261 - DNA, 33 bp, Homo sapien
tgggataagcatttcacgatgcaattctactct

SEQ ID NO: 98262 - DNA, 33 bp, Homo sapien
tgggataagcatttcatgatgcaattctactct

SEQ ID NO: 98263 - DNA, 33 bp, Homo sapien
tctggaatgaatcgtaaagtctcagcattctac

SEQ ID NO: 98264 - DNA, 33 bp, Homo sapien
tctggaatgaatcgtacagtctcagcattctac

SEQ ID NO: 98265 - DNA, 33 bp, Homo sapien
tctcatcaggttttgacaatgagatgtctctcc

SEQ ID NO: 98266 - DNA, 33 bp, Homo sapien
tctcatcaggttttgataatgagatgtctctcc

SEQ ID NO: 98267 - DNA, 33 bp, Homo sapien
cagttcttcctcaccacgcagaagttagccttg

SEQ ID NO: 98268 - DNA, 33 bp, Homo sapien
cagttcttcctcaccatgcagaagttagccttg

SEQ ID NO: 98269 - DNA, 33 bp, Homo sapien
cctctcaccaggttgaagttatagatactttct

SEQ ID NO: 98270 - DNA, 33 bp, Homo sapien
cctctcaccaggttgacgttatagatactttct

SEQ ID NO: 98271 - DNA, 33 bp, Homo sapien
gaattcacaactagccccaatgaagtcccttaa

SEQ ID NO: 98272 - DNA, 33 bp, Homo sapien
gaattcacaactagcctcaatgaagtcccttaa

SEQ ID NO: 98273 - DNA, 33 bp, Homo sapien
tgggggccgccaacaaaacaggatccgccatct

SEQ ID NO: 98274 - DNA, 33 bp, Homo sapien
tgggggccgccaacaagacaggatccgccatct

SEQ ID NO: 98275 - DNA, 33 bp, Homo sapien
tattttaagaaggagcaagttctataaatagtt

SEQ ID NO: 98276 - DNA, 33 bp, Homo sapien
tattttaagaaggagcgagttctataaatagtt

SEQ ID NO: 98277 - DNA, 33 bp, Homo sapien
atatagtctatctatcaaggaggatgttttaaa

SEQ ID NO: 98278 - DNA, 33 bp, Homo sapien
atatagtctatctatcgaggaggatgttttaaa

SEQ ID NO: 98279 - DNA, 33 bp, Homo sapien
aaaacaaaaagaacccaatgaagagcagagtcc

SEQ ID NO: 98280 - DNA, 33 bp, Homo sapien
aaaacaaaaagaaccccatgaagagcagagtcc

SEQ ID NO: 98281 - DNA, 33 bp, Homo sapien
ggatgtgtgatcaaaagggaactagtaactata

SEQ ID NO: 98282 - DNA, 33 bp, Homo sapien
ggatgtgtgatcaaaatggaactagtaactata

SEQ ID NO: 98283 - DNA, 33 bp, Homo sapien
gggatgctgaaaagaaacttttaccaggagagt

SEQ ID NO: 98284 - DNA, 33 bp, Homo sapien
gggatgctgaaaagaaccttttaccaggagagt

SEQ ID NO: 98285 - DNA, 33 bp, Homo sapien
aaagaacatgactgggaagagcgagaacccaga

SEQ ID NO: 98286 - DNA, 33 bp, Homo sapien
aaagaacatgactggggagagcgagaacccaga

SEQ ID NO: 98287 - DNA, 33 bp, Homo sapien
gtgctcctataagcaccggaatctggataaaaa

SEQ ID NO: 98288 - DNA, 33 bp, Homo sapien
gtgctcctataagcactggaatctggataaaaa

SEQ ID NO: 98289 - DNA, 33 bp, Homo sapien
agatcttagctttatacgtctgagttgttcact

SEQ ID NO: 98290 - DNA, 33 bp, Homo sapien
agatcttagctttatatgtctgagttgttcact

SEQ ID NO: 98291 - DNA, 33 bp, Homo sapien
gctccaagctgccacagcaagaacagaacagag

SEQ ID NO: 98292 - DNA, 33 bp, Homo sapien
gctccaagctgccacatcaagaacagaacagag

SEQ ID NO: 98293 - DNA, 33 bp, Homo sapien
ggcttatcctgtgctccaggatgtctggcaaca

SEQ ID NO: 98294 - DNA, 33 bp, Homo sapien
ggcttatcctgtgctctaggatgtctggcaaca

SEQ ID NO: 98295 - DNA, 33 bp, Homo sapien
ggggagtgttttttgacctccaatttatcttga

SEQ ID NO: 98296 - DNA, 33 bp, Homo sapien
ggggagtgttttttgatctccaatttatcttga

SEQ ID NO: 98297 - DNA, 33 bp, Homo sapien
gtatgtcttatgaagacatttttgctcgttctg

SEQ ID NO: 98298 - DNA, 33 bp, Homo sapien
gtatgtcttatgaagatatttttgctcgttctg

SEQ ID NO: 98299 - DNA, 33 bp, Homo sapien
ctaagtgcccgtcggcagatgaatggataaaaa

SEQ ID NO: 98300 - DNA, 33 bp, Homo sapien
ctaagtgcccgtcggcggatgaatggataaaaa

SEQ ID NO: 98301 - DNA, 33 bp, Homo sapien
gaaagtctgcatggcaataacattcatcacatt

SEQ ID NO: 98302 - DNA, 33 bp, Homo sapien
gaaagtctgcatggcagtaacattcatcacatt

SEQ ID NO: 98303 - DNA, 33 bp, Homo sapien
tagatttagcaccacaggagttttaaaaatata

SEQ ID NO: 98304 - DNA, 33 bp, Homo sapien
tagatttagcaccacatgagttttaaaaatata

SEQ ID NO: 98305 - DNA, 33 bp, Homo sapien
atccagtgaaatcaccaacactcaggaagagca

SEQ ID NO: 98306 - DNA, 33 bp, Homo sapien
atccagtgaaatcaccgacactcaggaagagca

SEQ ID NO: 98307 - DNA, 33 bp, Homo sapien
gctcccgcgtgagaataaaaagaaatgatccgg

SEQ ID NO: 98308 - DNA, 33 bp, Homo sapien
gctcccgcgtgagaatgaaaagaaatgatccgg

SEQ ID NO: 98309 - DNA, 33 bp, Homo sapien
taacaagcaatccagacgattctgatacacgct

SEQ ID NO: 98310 - DNA, 33 bp, Homo sapien
taacaagcaatccagatgattctgatacacgct

SEQ ID NO: 98311 - DNA, 33 bp, Homo sapien
taaaagcaaaatgataactatagtaggtatttc

SEQ ID NO: 98312 - DNA, 33 bp, Homo sapien
taaaagcaaaatgatagctatagtaggtatttc

SEQ ID NO: 98313 - DNA, 33 bp, Homo sapien
tcagcctctctctctcggaaaccttctctatta

SEQ ID NO: 98314 - DNA, 33 bp, Homo sapien
tcagcctctctctctctgaaaccttctctatta

SEQ ID NO: 98315 - DNA, 33 bp, Homo sapien
caggactggagcttcaaccttttctccaagttg

SEQ ID NO: 98316 - DNA, 33 bp, Homo sapien
caggactggagcttcatccttttctccaagttg

SEQ ID NO: 98317 - DNA, 33 bp, Homo sapien
tacagttcacctgtgaagatttatgttctgagt

SEQ ID NO: 98318 - DNA, 33 bp, Homo sapien
tacagttcacctgtgatgatttatgttctgagt

SEQ ID NO: 98319 - DNA, 33 bp, Homo sapien
gtaaagcatagagagacggttctggtggctgtg

SEQ ID NO: 98320 - DNA, 33 bp, Homo sapien
gtaaagcatagagagatggttctggtggctgtg

SEQ ID NO: 98321 - DNA, 33 bp, Homo sapien
tataggtactattaaaaatgagttcccaccaat

SEQ ID NO: 98322 - DNA, 33 bp, Homo sapien
tataggtactattaaagatgagttcccaccaat

SEQ ID NO: 98323 - DNA, 33 bp, Homo sapien
cttctacagagtcagagagtccaagcttcaggg

SEQ ID NO: 98324 - DNA, 33 bp, Homo sapien
cttctacagagtcagatagtccaagcttcaggg

SEQ ID NO: 98325 - DNA, 33 bp, Homo sapien
ggcagttaatgaaccacgcgaggcaggaaagat

SEQ ID NO: 98326 - DNA, 33 bp, Homo sapien
ggcagttaatgaaccatgcgaggcaggaaagat

SEQ ID NO: 98327 - DNA, 33 bp, Homo sapien
accttactcttgataactggtagaacaaataga

SEQ ID NO: 98328 - DNA, 33 bp, Homo sapien
accttactcttgataattggtagaacaaataga

SEQ ID NO: 98329 - DNA, 33 bp, Homo sapien
tcttcatagcagccgacgcagagttgtgtgtat

SEQ ID NO: 98330 - DNA, 33 bp, Homo sapien
tcttcatagcagccgatgcagagttgtgtgtat

SEQ ID NO: 98331 - DNA, 33 bp, Homo sapien
caaaaaaaaggaagaccaacaagagaacatcat

SEQ ID NO: 98332 - DNA, 33 bp, Homo sapien
caaaaaaaaggaagacgaacaagagaacatcat

SEQ ID NO: 98333 - DNA, 33 bp, Homo sapien
gtataagacagagaaacgaaagaacaagggcaa

SEQ ID NO: 98334 - DNA, 33 bp, Homo sapien
gtataagacagagaaaggaaagaacaagggcaa

SEQ ID NO: 98335 - DNA, 33 bp, Homo sapien
aggactaccttttacacggtcgatccctaattt

SEQ ID NO: 98336 - DNA, 33 bp, Homo sapien
aggactaccttttacatggtcgatccctaattt

SEQ ID NO: 98337 - DNA, 33 bp, Homo sapien
catctaattatattgcacatctgctaatattaa

SEQ ID NO: 98338 - DNA, 33 bp, Homo sapien
catctaattatattgcgcatctgctaatattaa

SEQ ID NO: 98339 - DNA, 33 bp, Homo sapien
tttcaaggagtaataaacttctcttctttcacc

SEQ ID NO: 98340 - DNA, 33 bp, Homo sapien
tttcaaggagtaataaccttctcttctttcacc

SEQ ID NO: 98341 - DNA, 33 bp, Homo sapien
taaataggaattgcataaaagctaaataggatt

SEQ ID NO: 98342 - DNA, 33 bp, Homo sapien
taaataggaattgcatgaaagctaaataggatt

SEQ ID NO: 98343 - DNA, 33 bp, Homo sapien
actagggttcattaagcctgaattccaagggat

SEQ ID NO: 98344 - DNA, 33 bp, Homo sapien
actagggttcattaagtctgaattccaagggat

SEQ ID NO: 98345 - DNA, 33 bp, Homo sapien
tgtgaacacaggcagaccgaaagtaaacacaac

SEQ ID NO: 98346 - DNA, 33 bp, Homo sapien
tgtgaacacaggcagagcgaaagtaaacacaac

SEQ ID NO: 98347 - DNA, 33 bp, Homo sapien
atgccccaacatagcacagcacagtgacaaact

SEQ ID NO: 98348 - DNA, 33 bp, Homo sapien
atgccccaacatagcatagcacagtgacaaact

SEQ ID NO: 98349 - DNA, 33 bp, Homo sapien
tggtagattagaaaatcattacctgcaggcctg

SEQ ID NO: 98350 - DNA, 33 bp, Homo sapien
tggtagattagaaaattattacctgcaggcctg

SEQ ID NO: 98351 - DNA, 33 bp, Homo sapien
acagagagctatcatacactgtcggtaagaggg

SEQ ID NO: 98352 - DNA, 33 bp, Homo sapien
acagagagctatcatatactgtcggtaagaggg

SEQ ID NO: 98353 - DNA, 33 bp, Homo sapien
taaagacaagaatatacgcacttctactaattt

SEQ ID NO: 98354 - DNA, 33 bp, Homo sapien
taaagacaagaatatatgcacttctactaattt

SEQ ID NO: 98355 - DNA, 33 bp, Homo sapien
tgaggaccaagaatagaacatttccagaaagga

SEQ ID NO: 98356 - DNA, 33 bp, Homo sapien
tgaggaccaagaatagtacatttccagaaagga

SEQ ID NO: 98357 - DNA, 33 bp, Homo sapien
ggaaaatgaggcacacagtgtataagtaacttg

SEQ ID NO: 98358 - DNA, 33 bp, Homo sapien
ggaaaatgaggcacacggtgtataagtaacttg

SEQ ID NO: 98359 - DNA, 33 bp, Homo sapien
acagccacagatgcgccgcctggaacgggaatg

SEQ ID NO: 98360 - DNA, 33 bp, Homo sapien
acagccacagatgcgctgcctggaacgggaatg

SEQ ID NO: 98361 - DNA, 33 bp, Homo sapien
aattctacatatgaaaaggtctgattgaattag

SEQ ID NO: 98362 - DNA, 33 bp, Homo sapien
aattctacatatgaaagggtctgattgaattag

SEQ ID NO: 98363 - DNA, 33 bp, Homo sapien
tactaaaaatcatttgacaaagtataagctgtg

SEQ ID NO: 98364 - DNA, 33 bp, Homo sapien
tactaaaaatcatttggcaaagtataagctgtg

SEQ ID NO: 98365 - DNA, 33 bp, Homo sapien
atccacacctagagataatacctggtcattgct

SEQ ID NO: 98366 - DNA, 33 bp, Homo sapien
atccacacctagagatgatacctggtcattgct

SEQ ID NO: 98367 - DNA, 33 bp, Homo sapien
tgattaggatgaaaaaattccatcatgaggttc

SEQ ID NO: 98368 - DNA, 33 bp, Homo sapien
tgattaggatgaaaaacttccatcatgaggttc

SEQ ID NO: 98369 - DNA, 33 bp, Homo sapien
gtggccactttgataacgcactattggctttct

SEQ ID NO: 98370 - DNA, 33 bp, Homo sapien
gtggccactttgataatgcactattggctttct

SEQ ID NO: 98371 - DNA, 33 bp, Homo sapien
gaactccctggctatggaactcaggggcagatc

SEQ ID NO: 98372 - DNA, 33 bp, Homo sapien
gaactccctggctatgtaactcaggggcagatc

SEQ ID NO: 98373 - DNA, 33 bp, Homo sapien
ataaatactgtagaaagcatacaggaacagaca

SEQ ID NO: 98374 - DNA, 33 bp, Homo sapien
ataaatactgtagaaatcatacaggaacagaca

SEQ ID NO: 98375 - DNA, 33 bp, Homo sapien
tgaggagttctctccactggaatatgagccaaa

SEQ ID NO: 98376 - DNA, 33 bp, Homo sapien
tgaggagttctctccattggaatatgagccaaa

SEQ ID NO: 98377 - DNA, 33 bp, Homo sapien
atcaacagttactctcacaccaagtaatattct

SEQ ID NO: 98378 - DNA, 33 bp, Homo sapien
atcaacagttactctcgcaccaagtaatattct

SEQ ID NO: 98379 - DNA, 33 bp, Homo sapien
atgtcattctaaaagcagagcaagttatgatca

SEQ ID NO: 98380 - DNA, 33 bp, Homo sapien
atgtcattctaaaagcggagcaagttatgatca

SEQ ID NO: 98381 - DNA, 33 bp, Homo sapien
ttaccatattcatcaagccatctacataaaaca

SEQ ID NO: 98382 - DNA, 33 bp, Homo sapien
ttaccatattcatcaatccatctacataaaaca

SEQ ID NO: 98383 - DNA, 33 bp, Homo sapien
aacaccagtatcatcacctcaaaggtaaattgt

SEQ ID NO: 98384 - DNA, 33 bp, Homo sapien
aacaccagtatcatcatctcaaaggtaaattgt

SEQ ID NO: 98385 - DNA, 33 bp, Homo sapien
gcactgaactgagagcaaacgtcccagtctgat

SEQ ID NO: 98386 - DNA, 33 bp, Homo sapien
gcactgaactgagagccaacgtcccagtctgat

SEQ ID NO: 98387 - DNA, 33 bp, Homo sapien
tgtagctgaggaactacgtggtcagcaaaaact

SEQ ID NO: 98388 - DNA, 33 bp, Homo sapien
tgtagctgaggaactatgtggtcagcaaaaact

SEQ ID NO: 98389 - DNA, 33 bp, Homo sapien
taagcatccaagctagaattaagttaggctaat

SEQ ID NO: 98390 - DNA, 33 bp, Homo sapien
taagcatccaagctagtattaagttaggctaat

SEQ ID NO: 98391 - DNA, 33 bp, Homo sapien
ccaagaagaatctgaacaggcttgctaagttcc

SEQ ID NO: 98392 - DNA, 33 bp, Homo sapien
ccaagaagaatctgaagaggcttgctaagttcc

SEQ ID NO: 98393 - DNA, 33 bp, Homo sapien
gagaagggagctgagaccttatttaaggatggc

SEQ ID NO: 98394 - DNA, 33 bp, Homo sapien
gagaagggagctgagatcttatttaaggatggc

SEQ ID NO: 98395 - DNA, 33 bp, Homo sapien
gggaactggagggaaccaagctagaaccggctg

SEQ ID NO: 98396 - DNA, 33 bp, Homo sapien
gggaactggagggaacgaagctagaaccggctg

SEQ ID NO: 98397 - DNA, 33 bp, Homo sapien
ttacatgggcaaagtcaatcaaaatgaaaggtt

SEQ ID NO: 98398 - DNA, 33 bp, Homo sapien
ttacatgggcaaagtcgatcaaaatgaaaggtt

SEQ ID NO: 98399 - DNA, 33 bp, Homo sapien
taaaagtggtttgacaatatgcaaccaacagtc

SEQ ID NO: 98400 - DNA, 33 bp, Homo sapien
taaaagtggtttgacactatgcaaccaacagtc

SEQ ID NO: 98401 - DNA, 33 bp, Homo sapien
tcttaatccaagtccactgaaattgttccttaa

SEQ ID NO: 98402 - DNA, 33 bp, Homo sapien
tcttaatccaagtccattgaaattgttccttaa

SEQ ID NO: 98403 - DNA, 33 bp, Homo sapien
gaataaaatatttgcccgaaatcacactgtaac

SEQ ID NO: 98404 - DNA, 33 bp, Homo sapien
gaataaaatatttgcctgaaatcacactgtaac

SEQ ID NO: 98405 - DNA, 33 bp, Homo sapien
acagaggtagtcactaagagtaaatctgcatgg

SEQ ID NO: 98406 - DNA, 33 bp, Homo sapien
acagaggtagtcactaggagtaaatctgcatgg

SEQ ID NO: 98407 - DNA, 33 bp, Homo sapien
tggttgcaaggacattcaatctcaaagagaagg

SEQ ID NO: 98408 - DNA, 33 bp, Homo sapien
tggttgcaaggacattgaatctcaaagagaagg

SEQ ID NO: 98409 - DNA, 33 bp, Homo sapien
ctcagtgtcatagttaccaaggggcaatgccaa

SEQ ID NO: 98410 - DNA, 33 bp, Homo sapien
ctcagtgtcatagttatcaaggggcaatgccaa

SEQ ID NO: 98411 - DNA, 33 bp, Homo sapien
taagagagctgtcatcaaagcttcaaaatgcct

SEQ ID NO: 98412 - DNA, 33 bp, Homo sapien
taagagagctgtcatcgaagcttcaaaatgcct

SEQ ID NO: 98413 - DNA, 33 bp, Homo sapien
aaaagattgagtgttacagactatctttttctc

SEQ ID NO: 98414 - DNA, 33 bp, Homo sapien
aaaagattgagtgttatagactatctttttctc

SEQ ID NO: 98415 - DNA, 33 bp, Homo sapien
aactgtgacagctatgaaattcgccctggtaaa

SEQ ID NO: 98416 - DNA, 33 bp, Homo sapien
aactgtgacagctatggaattcgccctggtaaa

SEQ ID NO: 98417 - DNA, 33 bp, Homo sapien
gctaaatttcaaaaagactattcacatctactt

SEQ ID NO: 98418 - DNA, 33 bp, Homo sapien
gctaaatttcaaaaaggctattcacatctactt

SEQ ID NO: 98419 - DNA, 33 bp, Homo sapien
aacaagactataatctcactctaaatgtctagg

SEQ ID NO: 98420 - DNA, 33 bp, Homo sapien
aacaagactataatctgactctaaatgtctagg

SEQ ID NO: 98421 - DNA, 33 bp, Homo sapien
cctaaattagagaacacggagaaaacaaagaga

SEQ ID NO: 98422 - DNA, 33 bp, Homo sapien
cctaaattagagaacatggagaaaacaaagaga

SEQ ID NO: 98423 - DNA, 33 bp, Homo sapien
aaaacagtctaggtgaaggaggacataaggtaa

SEQ ID NO: 98424 - DNA, 33 bp, Homo sapien
aaaacagtctaggtgacggaggacataaggtaa

SEQ ID NO: 98425 - DNA, 33 bp, Homo sapien
aaagtgcaataataaccgtaagacaaggtttca

SEQ ID NO: 98426 - DNA, 33 bp, Homo sapien
aaagtgcaataataactgtaagacaaggtttca

SEQ ID NO: 98427 - DNA, 33 bp, Homo sapien
caatgaactttctagacaaaacgttaaatcatc

SEQ ID NO: 98428 - DNA, 33 bp, Homo sapien
caatgaactttctagataaaacgttaaatcatc

SEQ ID NO: 98429 - DNA, 33 bp, Homo sapien
tgtgtgtgttttgttaagtttatacctgcttct

SEQ ID NO: 98430 - DNA, 33 bp, Homo sapien
tgtgtgtgttttgttaggtttatacctgcttct

SEQ ID NO: 98431 - DNA, 33 bp, Homo sapien
gtcttataaaagactaataatgtgccattgttt

SEQ ID NO: 98432 - DNA, 33 bp, Homo sapien
gtcttataaaagactagtaatgtgccattgttt

SEQ ID NO: 98433 - DNA, 33 bp, Homo sapien
aaaaattgtggtacaccgcactttatttaggaa

SEQ ID NO: 98434 - DNA, 33 bp, Homo sapien
aaaaattgtggtacactgcactttatttaggaa

SEQ ID NO: 98435 - DNA, 33 bp, Homo sapien
ttccacaagtcacaaaaatactcacaccctggg

SEQ ID NO: 98436 - DNA, 33 bp, Homo sapien
ttccacaagtcacaaagatactcacaccctggg

SEQ ID NO: 98437 - DNA, 33 bp, Homo sapien
tttaaggggagctacaaatacagtagggtttct

SEQ ID NO: 98438 - DNA, 33 bp, Homo sapien
tttaaggggagctacagatacagtagggtttct

SEQ ID NO: 98439 - DNA, 33 bp, Homo sapien
aattaaaattccactcacagaaacataatattt

SEQ ID NO: 98440 - DNA, 33 bp, Homo sapien
aattaaaattccactcgcagaaacataatattt

SEQ ID NO: 98441 - DNA, 33 bp, Homo sapien
aaataaagtccttaaggattgactagaaataag

SEQ ID NO: 98442 - DNA, 33 bp, Homo sapien
aaataaagtccttaagtattgactagaaataag

SEQ ID NO: 98443 - DNA, 33 bp, Homo sapien
ctgataccaagtcacaacttccaaaccactctt

SEQ ID NO: 98444 - DNA, 33 bp, Homo sapien
ctgataccaagtcacagcttccaaaccactctt

SEQ ID NO: 98445 - DNA, 33 bp, Homo sapien
gtattatttttcctccagctgtcttcaaagttt

SEQ ID NO: 98446 - DNA, 33 bp, Homo sapien
gtattatttttcctccggctgtcttcaaagttt

SEQ ID NO: 98447 - DNA, 33 bp, Homo sapien
aactcctcccaaaatgcatctcctacccaacac

SEQ ID NO: 98448 - DNA, 33 bp, Homo sapien
aactcctcccaaaatgtatctcctacccaacac

SEQ ID NO: 98449 - DNA, 33 bp, Homo sapien
catgcactaggggagacgaagctaatttaatgt

SEQ ID NO: 98450 - DNA, 33 bp, Homo sapien
catgcactaggggagaggaagctaatttaatgt

SEQ ID NO: 98451 - DNA, 33 bp, Homo sapien
tgccagttgactcacaataaagcttttcttttc

SEQ ID NO: 98452 - DNA, 33 bp, Homo sapien
tgccagttgactcacagtaaagcttttcttttc

SEQ ID NO: 98453 - DNA, 33 bp, Homo sapien
tcttctgaagaccctacgcttaaagcttcttct

SEQ ID NO: 98454 - DNA, 33 bp, Homo sapien
tcttctgaagaccctatgcttaaagcttcttct

SEQ ID NO: 98455 - DNA, 33 bp, Homo sapien
agttcctggcataaacgctgatgtagcacatac

SEQ ID NO: 98456 - DNA, 33 bp, Homo sapien
agttcctggcataaactctgatgtagcacatac

SEQ ID NO: 98457 - DNA, 33 bp, Homo sapien
atggcaatatcccagacaaacccccaagatgtg

SEQ ID NO: 98458 - DNA, 33 bp, Homo sapien
atggcaatatcccagataaacccccaagatgtg

SEQ ID NO: 98459 - DNA, 33 bp, Homo sapien
ttagactcatcaaagaagcaataattcctctat

SEQ ID NO: 98460 - DNA, 33 bp, Homo sapien
ttagactcatcaaagaggcaataattcctctat

SEQ ID NO: 98461 - DNA, 33 bp, Homo sapien; identical to SEQ ID NO: 98459

SEQ ID NO: 98462 - DNA, 33 bp, Homo sapien; identical to SEQ ID NO: 98460

SEQ ID NO: 98463 - DNA, 33 bp, Homo sapien
tctactgttgtatccaaaatagtttaaagttac

SEQ ID NO: 98464 - DNA, 33 bp, Homo sapien
tctactgttgtatccataatagtttaaagttac

SEQ ID NO: 98465 - DNA, 33 bp, Homo sapien
cccactgtcctcatgccgacagaggcttctatt

SEQ ID NO: 98466 - DNA, 33 bp, Homo sapien
cccactgtcctcatgctgacagaggcttctatt

SEQ ID NO: 98467 - DNA, 33 bp, Homo sapien
tagtgatgatagggagaaagaaagatgtttaga

SEQ ID NO: 98468 - DNA, 33 bp, Homo sapien
tagtgatgatagggaggaagaaagatgtttaga

SEQ ID NO: 98469 - DNA, 33 bp, Homo sapien
atttaatatatcttaacgtttggttctgatgtc

SEQ ID NO: 98470 - DNA, 33 bp, Homo sapien
atttaatatatcttaatgtttggttctgatgtc

SEQ ID NO: 98471 - DNA, 33 bp, Homo sapien
gaatgaggaaacaatacagtttagagttcattt

SEQ ID NO: 98472 - DNA, 33 bp, Homo sapien
gaatgaggaaacaatagagtttagagttcattt

SEQ ID NO: 98473 - DNA, 33 bp, Homo sapien
ggaggaattgtgttaacgtggcttactttcatc

SEQ ID NO: 98474 - DNA, 33 bp, Homo sapien
ggaggaattgtgttaatgtggcttactttcatc

SEQ ID NO: 98475 - DNA, 33 bp, Homo sapien
acaacataagagtagacgaaatggctcaggatg

SEQ ID NO: 98476 - DNA, 33 bp, Homo sapien
acaacataagagtagatgaaatggctcaggatg

SEQ ID NO: 98477 - DNA, 33 bp, Homo sapien
atacttcacaattccagtcgttaagtaggtaag

SEQ ID NO: 98478 - DNA, 33 bp, Homo sapien
atacttcacaattccattcgttaagtaggtaag

SEQ ID NO: 98479 - DNA, 33 bp, Homo sapien
aactgtagggtgtcaactcctggatacaattgg

SEQ ID NO: 98480 - DNA, 33 bp, Homo sapien
aactgtagggtgtcaattcctggatacaattgg

SEQ ID NO: 98481 - DNA, 33 bp, Homo sapien
ctccagaaatcaaacccgaactaaggcttttcc

SEQ ID NO: 98482 - DNA, 33 bp, Homo sapien
ctccagaaatcaaacctgaactaaggcttttcc

SEQ ID NO: 98483 - DNA, 33 bp, Homo sapien
agtgttaaggaatgtgaatcagacatttttata

SEQ ID NO: 98484 - DNA, 33 bp, Homo sapien
agtgttaaggaatgtgtatcagacatttttata

SEQ ID NO: 98485 - DNA, 33 bp, Homo sapien
cagtagtagttatttacagattttcagctgggg

SEQ ID NO: 98486 - DNA, 33 bp, Homo sapien
cagtagtagttatttatagattttcagctgggg

SEQ ID NO: 98487 - DNA, 33 bp, Homo sapien
aaattatcatgctactaagaaattgagtttatt

SEQ ID NO: 98488 - DNA, 33 bp, Homo sapien
aaattatcatgctactgagaaattgagtttatt

SEQ ID NO: 98489 - DNA, 33 bp, Homo sapien
atacaatgtgagaaaaagttatatttgtccata

SEQ ID NO: 98490 - DNA, 33 bp, Homo sapien
atacaatgtgagaaaaggttatatttgtccata

SEQ ID NO: 98491 - DNA, 33 bp, Homo sapien
aaattccaagtcacaaactatgccttgccaagt

SEQ ID NO: 98492 - DNA, 33 bp, Homo sapien
aaattccaagtcacaatctatgccttgccaagt

SEQ ID NO: 98493 - DNA, 33 bp, Homo sapien
tttaaagctattttaaacacaaatggacagttg

SEQ ID NO: 98494 - DNA, 33 bp, Homo sapien
tttaaagctattttaaccacaaatggacagttg

SEQ ID NO: 98495 - DNA, 33 bp, Homo sapien
cacgtttgaaacactcaatcctgtgcctccttc

SEQ ID NO: 98496 - DNA, 33 bp, Homo sapien
cacgtttgaaacactcgatcctgtgcctccttc

SEQ ID NO: 98497 - DNA, 33 bp, Homo sapien
aaacacaagtggttgtcaatttgtgggcatgaa

SEQ ID NO: 98498 - DNA, 33 bp, Homo sapien
aaacacaagtggttgtgaatttgtgggcatgaa

SEQ ID NO: 98499 - DNA, 33 bp, Homo sapien
ttgcagcagctatcttcaacctacatttctgat

SEQ ID NO: 98500 - DNA, 33 bp, Homo sapien
ttgcagcagctatctttaacctacatttctgat

SEQ ID NO: 98501 - DNA, 33 bp, Homo sapien
tgtaatggttgtagtagtaaaatcaaagtggat

SEQ ID NO: 98502 - DNA, 33 bp, Homo sapien
tgtaatggttgtagtattaaaatcaaagtggat

SEQ ID NO: 98503 - DNA, 33 bp, Homo sapien
atttcttattggaccccagaaagaatgcctgag

SEQ ID NO: 98504 - DNA, 33 bp, Homo sapien
atttcttattggacccgagaaagaatgcctgag

SEQ ID NO: 98505 - DNA, 33 bp, Homo sapien
ccaagttataggcatgccaactctgttaagcac

SEQ ID NO: 98506 - DNA, 33 bp, Homo sapien
ccaagttataggcatgtcaactctgttaagcac

SEQ ID NO: 98507 - DNA, 33 bp, Homo sapien
taagcactatctgaaagtgccctgtttttttcc

SEQ ID NO: 98508 - DNA, 33 bp, Homo sapien
taagcactatctgaaattgccctgtttttttcc

SEQ ID NO: 98509 - DNA, 33 bp, Homo sapien
atttaattcctttgtccatttttcaattggctt

SEQ ID NO: 98510 - DNA, 33 bp, Homo sapien
atttaattcctttgtcgatttttcaattggctt

SEQ ID NO: 98511 - DNA, 33 bp, Homo sapien
ataaaaacatgacatcgacatattaccctccca

SEQ ID NO: 98512 - DNA, 33 bp, Homo sapien
ataaaaacatgacatctacatattaccctccca

SEQ ID NO: 98513 - DNA, 33 bp, Homo sapien
ccaaaagaggactacagatataggttacaatta

SEQ ID NO: 98514 - DNA, 33 bp, Homo sapien
ccaaaagaggactacatatataggttacaatta

SEQ ID NO: 98515 - DNA, 33 bp, Homo sapien
ggggaacaactattacagtaagaacacaataat

SEQ ID NO: 98516 - DNA, 33 bp, Homo sapien
ggggaacaactattaccgtaagaacacaataat

SEQ ID NO: 98517 - DNA, 33 bp, Homo sapien
ttgttaaaattgttcacaaaataagtcgatatg

SEQ ID NO: 98518 - DNA, 33 bp, Homo sapien
ttgttaaaattgttcataaaataagtcgatatg

SEQ ID NO: 98519 - DNA, 33 bp, Homo sapien
cacatattcaagctacaaatgtttaaagtatta

SEQ ID NO: 98520 - DNA, 33 bp, Homo sapien
cacatattcaagctacgaatgtttaaagtatta

SEQ ID NO: 98521 - DNA, 33 bp, Homo sapien
atgaatacatttttccagaatttttctagccgt

SEQ ID NO: 98522 - DNA, 33 bp, Homo sapien
atgaatacatttttccggaatttttctagccgt

SEQ ID NO: 98523 - DNA, 33 bp, Homo sapien
tcttattgagattgatcaccagcaactatcccc

SEQ ID NO: 98524 - DNA, 33 bp, Homo sapien
tcttattgagattgattaccagcaactatcccc

SEQ ID NO: 98525 - DNA, 33 bp, Homo sapien
gggggtgctcaaattaaggtgtcaattttaaga

SEQ ID NO: 98526 - DNA, 33 bp, Homo sapien
gggggtgctcaaattatggtgtcaattttaaga

SEQ ID NO: 98527 - DNA, 33 bp, Homo sapien
ggtgctgggtgtggaactaccttttgaaaaacc

SEQ ID NO: 98528 - DNA, 33 bp, Homo sapien
ggtgctgggtgtggaattaccttttgaaaaacc

SEQ ID NO: 98529 - DNA, 33 bp, Homo sapien
aaaggctactgacatacgacaccaggatgggag

SEQ ID NO: 98530 - DNA, 33 bp, Homo sapien
aaaggctactgacatatgacaccaggatgggag

SEQ ID NO: 98531 - DNA, 33 bp, Homo sapien
cagggtcatatgttaaatagggcagttccactt

SEQ ID NO: 98532 - DNA, 33 bp, Homo sapien
cagggtcatatgttaagtagggcagttccactt

SEQ ID NO: 98533 - DNA, 33 bp, Homo sapien
ttgagaataaacaccactaggaaccaataaatg

SEQ ID NO: 98534 - DNA, 33 bp, Homo sapien
ttgagaataaacaccagtaggaaccaataaatg

SEQ ID NO: 98535 - DNA, 33 bp, Homo sapien
cttctgtaaaaggcaacccaattgagaccaatg

SEQ ID NO: 98536 - DNA, 33 bp, Homo sapien
cttctgtaaaaggcaatccaattgagaccaatg

SEQ ID NO: 98537 - DNA, 33 bp, Homo sapien
ctttacattcaaggacagcttccagacaagcca

SEQ ID NO: 98538 - DNA, 33 bp, Homo sapien
ctttacattcaaggacggcttccagacaagcca

SEQ ID NO: 98539 - DNA, 33 bp, Homo sapien
tggagtgaagaggatcagagtagccacctcctc

SEQ ID NO: 98540 - DNA, 33 bp, Homo sapien
tggagtgaagaggatcggagtagccacctcctc

SEQ ID NO: 98541 - DNA, 33 bp, Homo sapien
cttgtaagaaaataaacacagctcaacgatcta

SEQ ID NO: 98542 - DNA, 33 bp, Homo sapien
cttgtaagaaaataaatacagctcaacgatcta

SEQ ID NO: 98543 - DNA, 33 bp, Homo sapien
ttttaagtttaatgtacggttatatgcaatttt

SEQ ID NO: 98544 - DNA, 33 bp, Homo sapien
ttttaagtttaatgtatggttatatgcaatttt

SEQ ID NO: 98545 - DNA, 33 bp, Homo sapien
agtgtttcctttattgaaaattcagacatctta

SEQ ID NO: 98546 - DNA, 33 bp, Homo sapien
agtgtttcctttattggaaattcagacatctta

SEQ ID NO: 98547 - DNA, 33 bp, Homo sapien
tataaagatgctagcaaatgggcttccttctaa

SEQ ID NO: 98548 - DNA, 33 bp, Homo sapien
tataaagatgctagcagatgggcttccttctaa

SEQ ID NO: 98549 - DNA, 33 bp, Homo sapien
atttagttcataacaaaagggaatcgaaaaatt

SEQ ID NO: 98550 - DNA, 33 bp, Homo sapien
atttagttcataacaatagggaatcgaaaaatt

SEQ ID NO: 98551 - DNA, 33 bp, Homo sapien
aagtattaagtgaacaatggccaaatgctatgg

SEQ ID NO: 98552 - DNA, 33 bp, Homo sapien
aagtattaagtgaacagtggccaaatgctatgg

SEQ ID NO: 98553 - DNA, 33 bp, Homo sapien
ttaagcccagacagtaaaaagccaccgggaata

SEQ ID NO: 98554 - DNA, 33 bp, Homo sapien
ttaagcccagacagtacaaagccaccgggaata

SEQ ID NO: 98555 - DNA, 33 bp, Homo sapien
ctgtctgggcttaaacgactcattatcctcagc

SEQ ID NO: 98556 - DNA, 33 bp, Homo sapien
ctgtctgggcttaaactactcattatcctcagc

SEQ ID NO: 98557 - DNA, 33 bp, Homo sapien
gattactttattatgcgcactaatgtacttcac

SEQ ID NO: 98558 - DNA, 33 bp, Homo sapien
gattactttattatgctcactaatgtacttcac

SEQ ID NO: 98559 - DNA, 33 bp, Homo sapien
agattctgttctgcccaagagcacacgtgcccg

SEQ ID NO: 98560 - DNA, 33 bp, Homo sapien
agattctgttctgcccgagagcacacgtgcccg

SEQ ID NO: 98561 - DNA, 33 bp, Homo sapien
aacataacattgactacaacaaagacaacaata

SEQ ID NO: 98562 - DNA, 33 bp, Homo sapien
aacataacattgactataacaaagacaacaata

SEQ ID NO: 98563 - DNA, 33 bp, Homo sapien
atgtaagcagtatttcccagcccactcatttgt

SEQ ID NO: 98564 - DNA, 33 bp, Homo sapien
atgtaagcagtatttctcagcccactcatttgt

SEQ ID NO: 98565 - DNA, 33 bp, Homo sapien
gtgaacagggaggaaaattacaaagccactctg

SEQ ID NO: 98566 - DNA, 33 bp, Homo sapien
gtgaacagggaggaaagttacaaagccactctg

SEQ ID NO: 98567 - DNA, 33 bp, Homo sapien
tttgcacctagcaataatagcaattggccaata

SEQ ID NO: 98568 - DNA, 33 bp, Homo sapien
tttgcacctagcaatactagcaattggccaata

SEQ ID NO: 98569 - DNA, 33 bp, Homo sapien
caaaagtagataccaaaagtatgcaatggttga

SEQ ID NO: 98570 - DNA, 33 bp, Homo sapien
caaaagtagataccaagagtatgcaatggttga

SEQ ID NO: 98571 - DNA, 33 bp, Homo sapien
gaaggccaaatgataaatagttcatctagtaca

SEQ ID NO: 98572 - DNA, 33 bp, Homo sapien
gaaggccaaatgataagtagttcatctagtaca

SEQ ID NO: 98573 - DNA, 33 bp, Homo sapien
gtcatcactgacatacaaccatcatggcagagc

SEQ ID NO: 98574 - DNA, 33 bp, Homo sapien
gtcatcactgacatacgaccatcatggcagagc

SEQ ID NO: 98575 - DNA, 33 bp, Homo sapien
aagtcaccttaaatagaaaggaagtggtccctg

SEQ ID NO: 98576 - DNA, 33 bp, Homo sapien
aagtcaccttaaataggaaggaagtggtccctg

SEQ ID NO: 98577 - DNA, 33 bp, Homo sapien
ctatttctttctccagcaactaatttgcataag

SEQ ID NO: 98578 - DNA, 33 bp, Homo sapien
ctatttctttctccagtaactaatttgcataag

SEQ ID NO: 98579 - DNA, 33 bp, Homo sapien
gcagttatacaataaagccttgctcttttgcac

SEQ ID NO: 98580 - DNA, 33 bp, Homo sapien
gcagttatacaataaatccttgctcttttgcac

SEQ ID NO: 98581 - DNA, 33 bp, Homo sapien
aagactactctatgtacgcaggtcagagggccc

SEQ ID NO: 98582 - DNA, 33 bp, Homo sapien
aagactactctatgtatgcaggtcagagggccc

SEQ ID NO: 98583 - DNA, 33 bp, Homo sapien
tctcagacattggtgaagtaactgaaagactac

SEQ ID NO: 98584 - DNA, 33 bp, Homo sapien
tctcagacattggtgacgtaactgaaagactac

SEQ ID NO: 98585 - DNA, 33 bp, Homo sapien
gtgtgtatgtcagatacattcctatcaaaggca

SEQ ID NO: 98586 - DNA, 33 bp, Homo sapien
gtgtgtatgtcagatatattcctatcaaaggca

SEQ ID NO: 98587 - DNA, 33 bp, Homo sapien
catgtctgcaaatgacagtactcaatttactcc

SEQ ID NO: 98588 - DNA, 33 bp, Homo sapien
catgtctgcaaatgacggtactcaatttactcc

SEQ ID NO: 98589 - DNA, 33 bp, Homo sapien
tgctgaaacataaggcaatcggacctttgaatt

SEQ ID NO: 98590 - DNA, 33 bp, Homo sapien
tgctgaaacataaggcgatcggacctttgaatt

SEQ ID NO: 98591 - DNA, 33 bp, Homo sapien
ccacaggtcattctgacgggaaagcaggttcca

SEQ ID NO: 98592 - DNA, 33 bp, Homo sapien
ccacaggtcattctgatgggaaagcaggttcca

SEQ ID NO: 98593 - DNA, 33 bp, Homo sapien
tgcatactctaccttagggaagtcagacatgaa

SEQ ID NO: 98594 - DNA, 33 bp, Homo sapien
tgcatactctaccttatggaagtcagacatgaa

SEQ ID NO: 98595 - DNA, 33 bp, Homo sapien
caagctatggttagccaaaaggggtgggagatt

SEQ ID NO: 98596 - DNA, 33 bp, Homo sapien
caagctatggttagccgaaaggggtgggagatt

SEQ ID NO: 98597 - DNA, 33 bp, Homo sapien
tagaatcagtgaacaccaatgagagctgatgag

SEQ ID NO: 98598 - DNA, 33 bp, Homo sapien
tagaatcagtgaacactaatgagagctgatgag

SEQ ID NO: 98599 - DNA, 33 bp, Homo sapien
aagatgagttctcggtaaaacaaattctattat

SEQ ID NO: 98600 - DNA, 33 bp, Homo sapien
aagatgagttctcggtcaaacaaattctattat

SEQ ID NO: 98601 - DNA, 33 bp, Homo sapien
cggaacggaagataggcaagtgaatgtcctgct

SEQ ID NO: 98602 - DNA, 33 bp, Homo sapien
cggaacggaagataggtaagtgaatgtcctgct

SEQ ID NO: 98603 - DNA, 33 bp, Homo sapien
gcttgctggcctcaccaaaaaacactggcacat

SEQ ID NO: 98604 - DNA, 33 bp, Homo sapien
gcttgctggcctcaccgaaaaacactggcacat

SEQ ID NO: 98605 - DNA, 33 bp, Homo sapien
acaaacggtggctgaacacatttcttgtaacta

SEQ ID NO: 98606 - DNA, 33 bp, Homo sapien
acaaacggtggctgaatacatttcttgtaacta

SEQ ID NO: 98607 - DNA, 33 bp, Homo sapien
ttaagggatattacacgccacctagcgcctctg

SEQ ID NO: 98608 - DNA, 33 bp, Homo sapien
ttaagggatattacactccacctagcgcctctg

SEQ ID NO: 98609 - DNA, 33 bp, Homo sapien
cctcggaaatggtgtcaaccctgggcttgtcca

SEQ ID NO: 98610 - DNA, 33 bp, Homo sapien
cctcggaaatggtgtcgaccctgggcttgtcca

SEQ ID NO: 98611 - DNA, 33 bp, Homo sapien
aagagcctaattcctaacttgaaggttgttttg

SEQ ID NO: 98612 - DNA, 33 bp, Homo sapien
aagagcctaattcctaccttgaaggttgttttg

SEQ ID NO: 98613 - DNA, 33 bp, Homo sapien
acaacctattatttgaaccggtcattctcttct

SEQ ID NO: 98614 - DNA, 33 bp, Homo sapien
acaacctattatttgacccggtcattctcttct

SEQ ID NO: 98615 - DNA, 33 bp, Homo sapien
caagcccacagtagtacaggaaaaagttctgag

SEQ ID NO: 98616 - DNA, 33 bp, Homo sapien
caagcccacagtagtagaggaaaaagttctgag

SEQ ID NO: 98617 - DNA, 33 bp, Homo sapien
aaatcccagccaggtcacttactaagcatgtga

SEQ ID NO: 98618 - DNA, 33 bp, Homo sapien
aaatcccagccaggtcgcttactaagcatgtga

SEQ ID NO: 98619 - DNA, 33 bp, Homo sapien
agtatggtgggcattacgaagggacagtcattt

SEQ ID NO: 98620 - DNA, 33 bp, Homo sapien
agtatggtgggcattatgaagggacagtcattt

SEQ ID NO: 98621 - DNA, 33 bp, Homo sapien
atgaaagctattcttcacttgagatcacagctt

SEQ ID NO: 98622 - DNA, 33 bp, Homo sapien
atgaaagctattcttcgcttgagatcacagctt

SEQ ID NO: 98623 - DNA, 33 bp, Homo sapien
accactctgattaaagcagagcatggttaagta

SEQ ID NO: 98624 - DNA, 33 bp, Homo sapien
accactctgattaaagtagagcatggttaagta

SEQ ID NO: 98625 - DNA, 33 bp, Homo sapien
tgcaaaaatagttaaccaagagaaagttcaggt

SEQ ID NO: 98626 - DNA, 33 bp, Homo sapien
tgcaaaaatagttaacgaagagaaagttcaggt

SEQ ID NO: 98627 - DNA, 33 bp, Homo sapien
gacatctaagtgtcaacgtcaggtaggccgtgg

SEQ ID NO: 98628 - DNA, 33 bp, Homo sapien
gacatctaagtgtcaatgtcaggtaggccgtgg

SEQ ID NO: 98629 - DNA, 33 bp, Homo sapien
aaacaagatccctgaccgtaaggagttttccac

SEQ ID NO: 98630 - DNA, 33 bp, Homo sapien
aaacaagatccctgactgtaaggagttttccac

SEQ ID NO: 98631 - DNA, 33 bp, Homo sapien
tcatacgaaattattacgctccttttctcaaca

SEQ ID NO: 98632 - DNA, 33 bp, Homo sapien
tcatacgaaattattatgctccttttctcaaca

SEQ ID NO: 98633 - DNA, 33 bp, Homo sapien
ttggatttttttagcaaggagagttatgtaaac

SEQ ID NO: 98634 - DNA, 33 bp, Homo sapien
ttggatttttttagcatggagagttatgtaaac

SEQ ID NO: 98635 - DNA, 33 bp, Homo sapien
ttcctaacttgttgacaaaattagctaaatcag

SEQ ID NO: 98636 - DNA, 33 bp, Homo sapien
ttcctaacttgttgactaaattagctaaatcag

SEQ ID NO: 98637 - DNA, 33 bp, Homo sapien
agtgaaaatggccccaagatttgacacctaggt

SEQ ID NO: 98638 - DNA, 33 bp, Homo sapien
agtgaaaatggccccatgatttgacacctaggt

SEQ ID NO: 98639 - DNA, 33 bp, Homo sapien
gggactgttcaggaggaaggtgatgccagaatt

SEQ ID NO: 98640 - DNA, 33 bp, Homo sapien
gggactgttcaggaggcaggtgatgccagaatt

SEQ ID NO: 98641 - DNA, 33 bp, Homo sapien
aaattattctcctagtcaacagggatcaatttt

SEQ ID NO: 98642 - DNA, 33 bp, Homo sapien
aaattattctcctagtgaacagggatcaatttt

SEQ ID NO: 98643 - DNA, 33 bp, Homo sapien
gtctggcaaactgtagacaagggagttagtaat

SEQ ID NO: 98644 - DNA, 33 bp, Homo sapien
gtctggcaaactgtaggcaagggagttagtaat

SEQ ID NO: 98645 - DNA, 33 bp, Homo sapien
gcaaaggttcaggtcaactgggtcaggttaggc

SEQ ID NO: 98646 - DNA, 33 bp, Homo sapien
gcaaaggttcaggtcagctgggtcaggttaggc

SEQ ID NO: 98647 - DNA, 33 bp, Homo sapien
agaaatgttttaaaaactgagagccattgcact

SEQ ID NO: 98648 - DNA, 33 bp, Homo sapien
agaaatgttttaaaaagtgagagccattgcact

SEQ ID NO: 98649 - DNA, 33 bp, Homo sapien
acaaagtaagttgtcaagtcaggtgctaccaag

SEQ ID NO: 98650 - DNA, 33 bp, Homo sapien
acaaagtaagttgtcaggtcaggtgctaccaag

SEQ ID NO: 98651 - DNA, 33 bp, Homo sapien
tttcagagttaacacaaaattcactctgtttaa

SEQ ID NO: 98652 - DNA, 33 bp, Homo sapien
tttcagagttaacacacaattcactctgtttaa

SEQ ID NO: 98653 - DNA, 33 bp, Homo sapien
caatttggccaatgaagactagagaggatacac

SEQ ID NO: 98654 - DNA, 33 bp, Homo sapien
caatttggccaatgaatactagagaggatacac

SEQ ID NO: 98655 - DNA, 33 bp, Homo sapien
tgtattatttaactgaaccctgtaactgataca

SEQ ID NO: 98656 - DNA, 33 bp, Homo sapien
tgtattatttaactgagccctgtaactgataca

SEQ ID NO: 98657 - DNA, 33 bp, Homo sapien
gtcatgaaataactgaaaaactgcacacaaatt

SEQ ID NO: 98658 - DNA, 33 bp, Homo sapien
gtcatgaaataactgacaaactgcacacaaatt

SEQ ID NO: 98659 - DNA, 33 bp, Homo sapien
cactttctcggtgatcccattaggttcatacac

SEQ ID NO: 98660 - DNA, 33 bp, Homo sapien
cactttctcggtgatctcattaggttcatacac

SEQ ID NO: 98661 - DNA, 33 bp, Homo sapien
tttaaaaggagtttaacagtcccagtgtatact

SEQ ID NO: 98662 - DNA, 33 bp, Homo sapien
tttaaaaggagtttaagagtcccagtgtatact

SEQ ID NO: 98663 - DNA, 33 bp, Homo sapien
tatcttcacatgaataactaatagacatctcag

SEQ ID NO: 98664 - DNA, 33 bp, Homo sapien
tatcttcacatgaatacctaatagacatctcag

SEQ ID NO: 98665 - DNA, 33 bp, Homo sapien
ccacaatatttctgagacacaaaaaggcccaag

SEQ ID NO: 98666 - DNA, 33 bp, Homo sapien
ccacaatatttctgaggcacaaaaaggcccaag

SEQ ID NO: 98667 - DNA, 33 bp, Homo sapien
cctataatgtaatcaccaatgtatactccagca

SEQ ID NO: 98668 - DNA, 33 bp, Homo sapien
cctataatgtaatcacgaatgtatactccagca

SEQ ID NO: 98669 - DNA, 33 bp, Homo sapien
atttactcgtaggggaaagcatgaggttgtaga

SEQ ID NO: 98670 - DNA, 33 bp, Homo sapien
atttactcgtaggggagagcatgaggttgtaga

SEQ ID NO: 98671 - DNA, 33 bp, Homo sapien
cttactttagccaatacaatgcaggagaagtga

SEQ ID NO: 98672 - DNA, 33 bp, Homo sapien
cttactttagccaatagaatgcaggagaagtga

SEQ ID NO: 98673 - DNA, 33 bp, Homo sapien
tcttctggactcaaccacatgccagatagaagt

SEQ ID NO: 98674 - DNA, 33 bp, Homo sapien
tcttctggactcaaccgcatgccagatagaagt

SEQ ID NO: 98675 - DNA, 33 bp, Homo sapien
ttcgattgtttcacaaggtggtccatgctctgg

SEQ ID NO: 98676 - DNA, 33 bp, Homo sapien
ttcgattgtttcacaatgtggtccatgctctgg

SEQ ID NO: 98677 - DNA, 33 bp, Homo sapien
ataactgggaataacacagcgagtcataaatgc

SEQ ID NO: 98678 - DNA, 33 bp, Homo sapien
ataactgggaataacatagcgagtcataaatgc

SEQ ID NO: 98679 - DNA, 33 bp, Homo sapien
catttaagatacaccaagcgactggcatcagtt

SEQ ID NO: 98680 - DNA, 33 bp, Homo sapien
catttaagatacaccatgcgactggcatcagtt

SEQ ID NO: 98681 - DNA, 33 bp, Homo sapien
cagacagttacgaggacctctgaattttcagtc

SEQ ID NO: 98682 - DNA, 33 bp, Homo sapien
cagacagttacgaggatctctgaattttcagtc

SEQ ID NO: 98683 - DNA, 33 bp, Homo sapien
tattttgcctctgctacagtagaaacgccttcc

SEQ ID NO: 98684 - DNA, 33 bp, Homo sapien
tattttgcctctgctagagtagaaacgccttcc

SEQ ID NO: 98685 - DNA, 33 bp, Homo sapien
ctaccttccaaattccccatcaacttgggtcac

SEQ ID NO: 98686 - DNA, 33 bp, Homo sapien
ctaccttccaaattccgcatcaacttgggtcac

SEQ ID NO: 98687 - DNA, 33 bp, Homo sapien
atggagaaagctagaacgggcaagtagaagaag

SEQ ID NO: 98688 - DNA, 33 bp, Homo sapien
atggagaaagctagaatgggcaagtagaagaag

SEQ ID NO: 98689 - DNA, 33 bp, Homo sapien
ctgtgttctcgtgatacatgatattcctccatc

SEQ ID NO: 98690 - DNA, 33 bp, Homo sapien
ctgtgttctcgtgatatatgatattcctccatc

SEQ ID NO: 98691 - DNA, 33 bp, Homo sapien
taatttaaaatgggcacgaccgaataggcacat

SEQ ID NO: 98692 - DNA, 33 bp, Homo sapien
taatttaaaatgggcatgaccgaataggcacat

SEQ ID NO: 98693 - DNA, 33 bp, Homo sapien
tcagtgaaaacacaacagtgattctggctgatc

SEQ ID NO: 98694 - DNA, 33 bp, Homo sapien
tcagtgaaaacacaacggtgattctggctgatc

SEQ ID NO: 98695 - DNA, 33 bp, Homo sapien
aaatatttacccacagacctacacgagtaatgt

SEQ ID NO: 98696 - DNA, 33 bp, Homo sapien
aaatatttacccacaggcctacacgagtaatgt

SEQ ID NO: 98697 - DNA, 33 bp, Homo sapien
tttagtgaccattcctcagctattgctaagttt

SEQ ID NO: 98698 - DNA, 33 bp, Homo sapien
tttagtgaccattcctgagctattgctaagttt

SEQ ID NO: 98699 - DNA, 33 bp, Homo sapien
agcaaaactacagtgacggaaagcagattacta

SEQ ID NO: 98700 - DNA, 33 bp, Homo sapien
agcaaaactacagtgatggaaagcagattacta

SEQ ID NO: 98701 - DNA, 33 bp, Homo sapien
aaatagtggcattcgcagaaagctgattggagt

SEQ ID NO: 98702 - DNA, 33 bp, Homo sapien
aaatagtggcattcgcggaaagctgattggagt

SEQ ID NO: 98703 - DNA, 33 bp, Homo sapien
gaaaaaatgaagtaccaatttgtcttaatacat

SEQ ID NO: 98704 - DNA, 33 bp, Homo sapien
gaaaaaatgaagtacctatttgtcttaatacat

SEQ ID NO: 98705 - DNA, 33 bp, Homo sapien
acgagaactaaagccaccttagcttgagatgtc

SEQ ID NO: 98706 - DNA, 33 bp, Homo sapien
acgagaactaaagccagcttagcttgagatgtc

SEQ ID NO: 98707 - DNA, 33 bp, Homo sapien
catttctcttctctacgaccattgactttgatc

SEQ ID NO: 98708 - DNA, 33 bp, Homo sapien
catttctcttctctactaccattgactttgatc

SEQ ID NO: 98709 - DNA, 33 bp, Homo sapien
tgttacatcttttccaataattttcagtggagg

SEQ ID NO: 98710 - DNA, 33 bp, Homo sapien
tgttacatcttttccagtaattttcagtggagg

SEQ ID NO: 98711 - DNA, 33 bp, Homo sapien
gactcatgacttctagaaactaaaccacttgaa

SEQ ID NO: 98712 - DNA, 33 bp, Homo sapien
gactcatgacttctagcaactaaaccacttgaa

SEQ ID NO: 98713 - DNA, 33 bp, Homo sapien
attagccatattccaaacaaaagtcaaaaaagt

SEQ ID NO: 98714 - DNA, 33 bp, Homo sapien
attagccatattccaaccaaaagtcaaaaaagt

SEQ ID NO: 98715 - DNA, 33 bp, Homo sapien
tagtgccttaggaaaaccttgttatgcttttat

SEQ ID NO: 98716 - DNA, 33 bp, Homo sapien
tagtgccttaggaaaatcttgttatgcttttat

SEQ ID NO: 98717 - DNA, 33 bp, Homo sapien
tttttatggatatagacgatgtgtgtgtgtttg

SEQ ID NO: 98718 - DNA, 33 bp, Homo sapien
tttttatggatatagatgatgtgtgtgtgtttg

SEQ ID NO: 98719 - DNA, 33 bp, Homo sapien
caaacatatgagtaacaacactagctggccggg

SEQ ID NO: 98720 - DNA, 33 bp, Homo sapien
caaacatatgagtaacgacactagctggccggg

SEQ ID NO: 98721 - DNA, 33 bp, Homo sapien
atgcagcgctatgagaacacgtagtagggaagt

SEQ ID NO: 98722 - DNA, 33 bp, Homo sapien
atgcagcgctatgagatcacgtagtagggaagt

SEQ ID NO: 98723 - DNA, 33 bp, Homo sapien
ctgcttgactaataggacagattggcttcagga

SEQ ID NO: 98724 - DNA, 33 bp, Homo sapien
ctgcttgactaatagggcagattggcttcagga

SEQ ID NO: 98725 - DNA, 33 bp, Homo sapien
tgtttaaggcaaaataaagaggctgacagttcc

SEQ ID NO: 98726 - DNA, 33 bp, Homo sapien
tgtttaaggcaaaatagagaggctgacagttcc

SEQ ID NO: 98727 - DNA, 33 bp, Homo sapien
tgtgtttctcatgttacgtggaatgcagaataa

SEQ ID NO: 98728 - DNA, 33 bp, Homo sapien
tgtgtttctcatgttatgtggaatgcagaataa

SEQ ID NO: 98729 - DNA, 33 bp, Homo sapien
ttttgtgagatgtaaacgaagtggaattccctt

SEQ ID NO: 98730 - DNA, 33 bp, Homo sapien
ttttgtgagatgtaaatgaagtggaattccctt

SEQ ID NO: 98731 - DNA, 33 bp, Homo sapien
acaactttatctaccacgtttgctcaaactcag

SEQ ID NO: 98732 - DNA, 33 bp, Homo sapien
acaactttatctaccatgtttgctcaaactcag

SEQ ID NO: 98733 - DNA, 33 bp, Homo sapien
ggtgatcaaatggaaactggagtactgatgcag

SEQ ID NO: 98734 - DNA, 33 bp, Homo sapien
ggtgatcaaatggaaattggagtactgatgcag

SEQ ID NO: 98735 - DNA, 33 bp, Homo sapien
ggcaggttaaaggcacagtcctccagaatgtta

SEQ ID NO: 98736 - DNA, 33 bp, Homo sapien
ggcaggttaaaggcacggtcctccagaatgtta

SEQ ID NO: 98737 - DNA, 33 bp, Homo sapien
cagtcccagaactttccatttgtgggatgtttc

SEQ ID NO: 98738 - DNA, 33 bp, Homo sapien
cagtcccagaactttctatttgtgggatgtttc

SEQ ID NO: 98739 - DNA, 33 bp, Homo sapien
actcctacaacttaaaaaatccaacaacctata

SEQ ID NO: 98740 - DNA, 33 bp, Homo sapien
actcctacaacttaaacaatccaacaacctata

SEQ ID NO: 98741 - DNA, 33 bp, Homo sapien
catgttactggaaagaatcaagcccagacttcc

SEQ ID NO: 98742 - DNA, 33 bp, Homo sapien
catgttactggaaagactcaagcccagacttcc

SEQ ID NO: 98743 - DNA, 33 bp, Homo sapien
ctttttcacaccaagagacttacagaaaatgac

SEQ ID NO: 98744 - DNA, 33 bp, Homo sapien
ctttttcacaccaagatacttacagaaaatgac

SEQ ID NO: 98745 - DNA, 33 bp, Homo sapien
tccagactgtggatataagaggtaagataatca

SEQ ID NO: 98746 - DNA, 33 bp, Homo sapien
tccagactgtggatatgagaggtaagataatca

SEQ ID NO: 98747 - DNA, 33 bp, Homo sapien
tctgaaacggcctagaagcaatgattgacccag

SEQ ID NO: 98748 - DNA, 33 bp, Homo sapien
tctgaaacggcctagaggcaatgattgacccag

SEQ ID NO: 98749 - DNA, 33 bp, Homo sapien
aaggttaataattctgcagtgattgtacattta

SEQ ID NO: 98750 - DNA, 33 bp, Homo sapien
aaggttaataattctggagtgattgtacattta

SEQ ID NO: 98751 - DNA, 33 bp, Homo sapien
aaaaacaaataaaatccctttgatgttgttgtt

SEQ ID NO: 98752 - DNA, 33 bp, Homo sapien
aaaaacaaataaaatctctttgatgttgttgtt

SEQ ID NO: 98753 - DNA, 33 bp, Homo sapien
acaggtgtatattattcaaggtccaatcatata

SEQ ID NO: 98754 - DNA, 33 bp, Homo sapien
acaggtgtatattatttaaggtccaatcatata

SEQ ID NO: 98755 - DNA, 33 bp, Homo sapien
agtagtcaagaagatgaatttttagagcagagt

SEQ ID NO: 98756 - DNA, 33 bp, Homo sapien
agtagtcaagaagatgcatttttagagcagagt

SEQ ID NO: 98757 - DNA, 33 bp, Homo sapien
gttgtttgcatatccaatgccctgaagttttca

SEQ ID NO: 98758 - DNA, 33 bp, Homo sapien
gttgtttgcatatccagtgccctgaagttttca

SEQ ID NO: 98759 - DNA, 33 bp, Homo sapien
gcaaatgtcactttaaccatatattgcatcttt

SEQ ID NO: 98760 - DNA, 33 bp, Homo sapien
gcaaatgtcactttaagcatatattgcatcttt

SEQ ID NO: 98761 - DNA, 33 bp, Homo sapien
tctctgtcttttcctacacaattagcacctcat

SEQ ID NO: 98762 - DNA, 33 bp, Homo sapien
tctctgtcttttcctatacaattagcacctcat

SEQ ID NO: 98763 - DNA, 33 bp, Homo sapien
gtgccagacgctaagaatagcacattagataac

SEQ ID NO: 98764 - DNA, 33 bp, Homo sapien
gtgccagacgctaagactagcacattagataac

SEQ ID NO: 98765 - DNA, 33 bp, Homo sapien
gagacaaggaggtttacgctttagcagaagtgt

SEQ ID NO: 98766 - DNA, 33 bp, Homo sapien
gagacaaggaggtttatgctttagcagaagtgt

SEQ ID NO: 98767 - DNA, 33 bp, Homo sapien
agggaggacttctgaacgtagttagggtttggg

SEQ ID NO: 98768 - DNA, 33 bp, Homo sapien
agggaggacttctgaatgtagttagggtttggg

SEQ ID NO: 98769 - DNA, 33 bp, Homo sapien
cacaccctcacgcccacagcaggtcagcttcct

SEQ ID NO: 98770 - DNA, 33 bp, Homo sapien
cacaccctcacgcccatagcaggtcagcttcct

SEQ ID NO: 98771 - DNA, 33 bp, Homo sapien
ccttttgaactgattacgctgttattaaacttt

SEQ ID NO: 98772 - DNA, 33 bp, Homo sapien
ccttttgaactgattatgctgttattaaacttt

SEQ ID NO: 98773 - DNA, 33 bp, Homo sapien
cattaaactacagaacaatccttccattacctt

SEQ ID NO: 98774 - DNA, 33 bp, Homo sapien
cattaaactacagaaccatccttccattacctt

SEQ ID NO: 98775 - DNA, 33 bp, Homo sapien
tttcagataaatgcaactgtatgttttaaaaat

SEQ ID NO: 98776 - DNA, 33 bp, Homo sapien
tttcagataaatgcaattgtatgttttaaaaat

SEQ ID NO: 98777 - DNA, 33 bp, Homo sapien
gaaccagattgagctgaaagaaaaataagacaa

SEQ ID NO: 98778 - DNA, 33 bp, Homo sapien
gaaccagattgagctgtaagaaaaataagacaa

SEQ ID NO: 98779 - DNA, 33 bp, Homo sapien
tgcttgttcatgttaaccatattcccatacaat

SEQ ID NO: 98780 - DNA, 33 bp, Homo sapien
tgcttgttcatgttaatcatattcccatacaat

SEQ ID NO: 98781 - DNA, 33 bp, Homo sapien
ccaagacagtcctatccactctatgtcttaact

SEQ ID NO: 98782 - DNA, 33 bp, Homo sapien
ccaagacagtcctatctactctatgtcttaact

SEQ ID NO: 98783 - DNA, 33 bp, Homo sapien
aactgcattcgtctgaaaagccattgggaatat

SEQ ID NO: 98784 - DNA, 33 bp, Homo sapien
aactgcattcgtctgataagccattgggaatat

SEQ ID NO: 98785 - DNA, 33 bp, Homo sapien
taactaaggaatattcaaaaaagattgctgaat

SEQ ID NO: 98786 - DNA, 33 bp, Homo sapien
taactaaggaatattcgaaaaagattgctgaat

SEQ ID NO: 98787 - DNA, 33 bp, Homo sapien
ttcttggagtaaaggcagaattgcaattttatt

SEQ ID NO: 98788 - DNA, 33 bp, Homo sapien
ttcttggagtaaaggcggaattgcaattttatt

SEQ ID NO: 98789 - DNA, 33 bp, Homo sapien
gaatttaaactcagagacaagacaaacacacag

SEQ ID NO: 98790 - DNA, 33 bp, Homo sapien
gaatttaaactcagagtcaagacaaacacacag

SEQ ID NO: 98791 - DNA, 33 bp, Homo sapien
agcatggatcaaccacacttcttgctcagtcac

SEQ ID NO: 98792 - DNA, 33 bp, Homo sapien
agcatggatcaaccacgcttcttgctcagtcac

SEQ ID NO: 98793 - DNA, 33 bp, Homo sapien
aattgtgttgttttagaaccctgtatatgtata

SEQ ID NO: 98794 - DNA, 33 bp, Homo sapien
aattgtgttgttttagtaccctgtatatgtata

SEQ ID NO: 98795 - DNA, 33 bp, Homo sapien
caaagattagaattcaataaaatgcagtgcatt

SEQ ID NO: 98796 - DNA, 33 bp, Homo sapien
caaagattagaattcactaaaatgcagtgcatt

SEQ ID NO: 98797 - DNA, 33 bp, Homo sapien
attttaatgagacttgaataaatggagatgtcc

SEQ ID NO: 98798 - DNA, 33 bp, Homo sapien
attttaatgagacttgcataaatggagatgtcc

SEQ ID NO: 98799 - DNA, 33 bp, Homo sapien
gttgccagaaaagaaaattggccttgatgactt

SEQ ID NO: 98800 - DNA, 33 bp, Homo sapien
gttgccagaaaagaaagttggccttgatgactt

SEQ ID NO: 98801 - DNA, 33 bp, Homo sapien
aggggaagcttagggaagaaagtgaggcttgat

SEQ ID NO: 98802 - DNA, 33 bp, Homo sapien
aggggaagcttagggaggaaagtgaggcttgat

SEQ ID NO: 98803 - DNA, 33 bp, Homo sapien
gtttcttacaaaataaatgtcctgagactcaag

SEQ ID NO: 98804 - DNA, 33 bp, Homo sapien
gtttcttacaaaataagtgtcctgagactcaag

SEQ ID NO: 98805 - DNA, 33 bp, Homo sapien
aaaggaaatcaagaaacgagaaaagtcttggta

SEQ ID NO: 98806 - DNA, 33 bp, Homo sapien
aaaggaaatcaagaaatgagaaaagtcttggta

SEQ ID NO: 98807 - DNA, 33 bp, Homo sapien
cattcctctgaaaaaccgcactgtgacaggcca

SEQ ID NO: 98808 - DNA, 33 bp, Homo sapien
cattcctctgaaaaactgcactgtgacaggcca

SEQ ID NO: 98809 - DNA, 33 bp, Homo sapien
tgcacaggttcacccaagcagtaattactcctc

SEQ ID NO: 98810 - DNA, 33 bp, Homo sapien
tgcacaggttcacccacgcagtaattactcctc

SEQ ID NO: 98811 - DNA, 33 bp, Homo sapien
caacagctaaaatgaaagaactcaaactctctc

SEQ ID NO: 98812 - DNA, 33 bp, Homo sapien
caacagctaaaatgaatgaactcaaactctctc

SEQ ID NO: 98813 - DNA, 33 bp, Homo sapien
catacagtcatctgttaaaaaagtacaaaaaca

SEQ ID NO: 98814 - DNA, 33 bp, Homo sapien
catacagtcatctgtttaaaaagtacaaaaaca

SEQ ID NO: 98815 - DNA, 33 bp, Homo sapien
tgttggcagtgaggggccagttggaataggtcc

SEQ ID NO: 98816 - DNA, 33 bp, Homo sapien
tgttggcagtgagggggcagttggaataggtcc

SEQ ID NO: 98817 - DNA, 33 bp, Homo sapien
ctggtatttttgaaaacttcctgtaggcgggat

SEQ ID NO: 98818 - DNA, 33 bp, Homo sapien
ctggtatttttgaaaatttcctgtaggcgggat

SEQ ID NO: 98819 - DNA, 33 bp, Homo sapien
gtggttcccttgtgcaatctacacaaatggcta

SEQ ID NO: 98820 - DNA, 33 bp, Homo sapien
gtggttcccttgtgcagtctacacaaatggcta

SEQ ID NO: 98821 - DNA, 33 bp, Homo sapien
ttgtgaactgggtgtacgcctgattggagttgg

SEQ ID NO: 98822 - DNA, 33 bp, Homo sapien
ttgtgaactgggtgtatgcctgattggagttgg

SEQ ID NO: 98823 - DNA, 33 bp, Homo sapien
gtttccagtagcttcaaatttccagtaggacac

SEQ ID NO: 98824 - DNA, 33 bp, Homo sapien
gtttccagtagcttcacatttccagtaggacac

SEQ ID NO: 98825 - DNA, 33 bp, Homo sapien
ataatatctgatacagacagcctttgtggaaac

SEQ ID NO: 98826 - DNA, 33 bp, Homo sapien
ataatatctgatacagtcagcctttgtggaaac

SEQ ID NO: 98827 - DNA, 33 bp, Homo sapien
gtagggtcagccctaactccaaaatcactgctg

SEQ ID NO: 98828 - DNA, 33 bp, Homo sapien
gtagggtcagccctaattccaaaatcactgctg

SEQ ID NO: 98829 - DNA, 33 bp, Homo sapien
acgtaccatgagcctcagaaaacgaaggccacc

SEQ ID NO: 98830 - DNA, 33 bp, Homo sapien
acgtaccatgagcctcggaaaacgaaggccacc

SEQ ID NO: 98831 - DNA, 33 bp, Homo sapien
atagaagtcttcctcaaccaattaaggttataa

SEQ ID NO: 98832 - DNA, 33 bp, Homo sapien
atagaagtcttcctcatccaattaaggttataa

SEQ ID NO: 98833 - DNA, 33 bp, Homo sapien
gaactcttctgacctacgtatcacccagcttca

SEQ ID NO: 98834 - DNA, 33 bp, Homo sapien
gaactcttctgacctatgtatcacccagcttca

SEQ ID NO: 98835 - DNA, 33 bp, Homo sapien
gccggttcatggtagacgctcactagacgctca

SEQ ID NO: 98836 - DNA, 33 bp, Homo sapien
gccggttcatggtagatgctcactagacgctca

SEQ ID NO: 98837 - DNA, 33 bp, Homo sapien
aaaaactggtcaaaaacatggataccttgaagt

SEQ ID NO: 98838 - DNA, 33 bp, Homo sapien
aaaaactggtcaaaaatatggataccttgaagt

SEQ ID NO: 98839 - DNA, 33 bp, Homo sapien
ttccagttctaaatacacatcttgaaaagccct

SEQ ID NO: 98840 - DNA, 33 bp, Homo sapien
ttccagttctaaatacccatcttgaaaagccct

SEQ ID NO: 98841 - DNA, 33 bp, Homo sapien
ataggtttaagccacacactgttttgtaactgc

SEQ ID NO: 98842 - DNA, 33 bp, Homo sapien
ataggtttaagccacatactgttttgtaactgc

SEQ ID NO: 98843 - DNA, 33 bp, Homo sapien
tctgatagcaggaatgcagtgaggcctcaggag

SEQ ID NO: 98844 - DNA, 33 bp, Homo sapien
tctgatagcaggaatgtagtgaggcctcaggag

SEQ ID NO: 98845 - DNA, 33 bp, Homo sapien
atgatcgttcatcacacggctttactgttgggt

SEQ ID NO: 98846 - DNA, 33 bp, Homo sapien
atgatcgttcatcacatggctttactgttgggt

SEQ ID NO: 98847 - DNA, 33 bp, Homo sapien
cctgtgtccctgtcacaactccttatctgagat

SEQ ID NO: 98848 - DNA, 33 bp, Homo sapien
cctgtgtccctgtcaccactccttatctgagat

SEQ ID NO: 98849 - DNA, 33 bp, Homo sapien
ttttctgttcctcctaccccatgctcattcatg

SEQ ID NO: 98850 - DNA, 33 bp, Homo sapien
ttttctgttcctcctatcccatgctcattcatg

SEQ ID NO: 98851 - DNA, 33 bp, Homo sapien
tatatcttgggtccaaagcttcaaagggtaaaa

SEQ ID NO: 98852 - DNA, 33 bp, Homo sapien
tatatcttgggtccaaggcttcaaagggtaaaa

SEQ ID NO: 98853 - DNA, 33 bp, Homo sapien
taaaaaaatgaggtacaatactatctgcaacat

SEQ ID NO: 98854 - DNA, 33 bp, Homo sapien
taaaaaaatgaggtacgatactatctgcaacat

SEQ ID NO: 98855 - DNA, 33 bp, Homo sapien
tgttttacacaacaggaagcactaagatgaagg

SEQ ID NO: 98856 - DNA, 33 bp, Homo sapien
tgttttacacaacagggagcactaagatgaagg

SEQ ID NO: 98857 - DNA, 33 bp, Homo sapien
tgttcttaaatttatgcagatggactcacacag

SEQ ID NO: 98858 - DNA, 33 bp, Homo sapien
tgttcttaaatttatgtagatggactcacacag

SEQ ID NO: 98859 - DNA, 33 bp, Homo sapien
tttgtgctgtgtaaaacgtgcatattaacacct

SEQ ID NO: 98860 - DNA, 33 bp, Homo sapien
tttgtgctgtgtaaaatgtgcatattaacacct

SEQ ID NO: 98861 - DNA, 33 bp, Homo sapien
ggctatgtatattctacggaaataattcatcct

SEQ ID NO: 98862 - DNA, 33 bp, Homo sapien
ggctatgtatattctatggaaataattcatcct

SEQ ID NO: 98863 - DNA, 33 bp, Homo sapien
catcagatcttgtgagacccattcgctatcttg

SEQ ID NO: 98864 - DNA, 33 bp, Homo sapien
catcagatcttgtgaggcccattcgctatcttg

SEQ ID NO: 98865 - DNA, 33 bp, Homo sapien
aaatgggacataggagaaaatcagtcatgttcc

SEQ ID NO: 98866 - DNA, 33 bp, Homo sapien
aaatgggacataggaggaaatcagtcatgttcc

SEQ ID NO: 98867 - DNA, 33 bp, Homo sapien
tgacttcatcttggaaaagtaaaggaggctcac

SEQ ID NO: 98868 - DNA, 33 bp, Homo sapien
tgacttcatcttggaagagtaaaggaggctcac

SEQ ID NO: 98869 - DNA, 33 bp, Homo sapien
tgcacagcccactacacgcctagactttacggc

SEQ ID NO: 98870 - DNA, 33 bp, Homo sapien
tgcacagcccactacatgcctagactttacggc

SEQ ID NO: 98871 - DNA, 33 bp, Homo sapien
gaatcacaaacggataagacatttcacttaacc

SEQ ID NO: 98872 - DNA, 33 bp, Homo sapien
gaatcacaaacggatacgacatttcacttaacc

SEQ ID NO: 98873 - DNA, 33 bp, Homo sapien
atgaagaaacagttacagatctcttagtattat

SEQ ID NO: 98874 - DNA, 33 bp, Homo sapien
atgaagaaacagttactgatctcttagtattat

SEQ ID NO: 98875 - DNA, 33 bp, Homo sapien
agtttttcagaagctacgtgatatttatcatgg

SEQ ID NO: 98876 - DNA, 33 bp, Homo sapien
agtttttcagaagctatgtgatatttatcatgg

SEQ ID NO: 98877 - DNA, 33 bp, Homo sapien
tacaaatgaaaaagtaaagtcacatatccaagt

SEQ ID NO: 98878 - DNA, 33 bp, Homo sapien
tacaaatgaaaaagtagagtcacatatccaagt

SEQ ID NO: 98879 - DNA, 33 bp, Homo sapien
ctcctggtttaagcaaacacaaactagcagtgt

SEQ ID NO: 98880 - DNA, 33 bp, Homo sapien
ctcctggtttaagcaatcacaaactagcagtgt

SEQ ID NO: 98881 - DNA, 33 bp, Homo sapien
aaattgaatctcgaaaaaatcatttttgaaaac

SEQ ID NO: 98882 - DNA, 33 bp, Homo sapien
aaattgaatctcgaaagaatcatttttgaaaac

SEQ ID NO: 98883 - DNA, 33 bp, Homo sapien
tctcctctgcaccagacagttggagaatctcaa

SEQ ID NO: 98884 - DNA, 33 bp, Homo sapien
tctcctctgcaccagatagttggagaatctcaa

SEQ ID NO: 98885 - DNA, 33 bp, Homo sapien
tagcttgagtccgaacacagtcctctaggagaa

SEQ ID NO: 98886 - DNA, 33 bp, Homo sapien
tagcttgagtccgaacgcagtcctctaggagaa

SEQ ID NO: 98887 - DNA, 33 bp, Homo sapien
gagctaccatgctgacaaaagcccatgccatat

SEQ ID NO: 98888 - DNA, 33 bp, Homo sapien
gagctaccatgctgacgaaagcccatgccatat

SEQ ID NO: 98889 - DNA, 33 bp, Homo sapien
catggagtataaacaacaaataggctttatact

SEQ ID NO: 98890 - DNA, 33 bp, Homo sapien
catggagtataaacaagaaataggctttatact

SEQ ID NO: 98891 - DNA, 33 bp, Homo sapien
tggacacacttagttacgaaagaataaaattat

SEQ ID NO: 98892 - DNA, 33 bp, Homo sapien
tggacacacttagttatgaaagaataaaattat

SEQ ID NO: 98893 - DNA, 33 bp, Homo sapien
cttggcactgtggatacggtcaacttcatctga

SEQ ID NO: 98894 - DNA, 33 bp, Homo sapien
cttggcactgtggatatggtcaacttcatctga

SEQ ID NO: 98895 - DNA, 33 bp, Homo sapien
aataaatttgactgataactttgctcagccatt

SEQ ID NO: 98896 - DNA, 33 bp, Homo sapien
aataaatttgactgatgactttgctcagccatt

SEQ ID NO: 98897 - DNA, 33 bp, Homo sapien
taacatctcagattaactagcatgagaatttga

SEQ ID NO: 98898 - DNA, 33 bp, Homo sapien
taacatctcagattaagtagcatgagaatttga

SEQ ID NO: 98899 - DNA, 33 bp, Homo sapien
gactatagaactgatactacccaactggaatac

SEQ ID NO: 98900 - DNA, 33 bp, Homo sapien
gactatagaactgatattacccaactggaatac

SEQ ID NO: 98901 - DNA, 33 bp, Homo sapien
tggagtgtcagaaaagacctcagggcaagctga

SEQ ID NO: 98902 - DNA, 33 bp, Homo sapien
tggagtgtcagaaaagtcctcagggcaagctga

SEQ ID NO: 98903 - DNA, 33 bp, Homo sapien
agaacatggtaccccaaatcatgacaccttggc

SEQ ID NO: 98904 - DNA, 33 bp, Homo sapien
agaacatggtaccccagatcatgacaccttggc

SEQ ID NO: 98905 - DNA, 33 bp, Homo sapien
tcaaagaacttccgagaaagaaatgtttatgct

SEQ ID NO: 98906 - DNA, 33 bp, Homo sapien
tcaaagaacttccgaggaagaaatgtttatgct

SEQ ID NO: 98907 - DNA, 33 bp, Homo sapien
tttccatttaaaaacaaactaacatgattcaga

SEQ ID NO: 98908 - DNA, 33 bp, Homo sapien
tttccatttaaaaacagactaacatgattcaga

SEQ ID NO: 98909 - DNA, 33 bp, Homo sapien
taatctctgcctgataaatgtggcgagtgtgag

SEQ ID NO: 98910 - DNA, 33 bp, Homo sapien
taatctctgcctgatacatgtggcgagtgtgag

SEQ ID NO: 98911 - DNA, 33 bp, Homo sapien
ctagtcctttatacaccgagtggttcaatgccc

SEQ ID NO: 98912 - DNA, 33 bp, Homo sapien
ctagtcctttatacactgagtggttcaatgccc

SEQ ID NO: 98913 - DNA, 33 bp, Homo sapien
ccacagggaatgttagacaaccatcagttgatg

SEQ ID NO: 98914 - DNA, 33 bp, Homo sapien
ccacagggaatgttaggcaaccatcagttgatg

SEQ ID NO: 98915 - DNA, 33 bp, Homo sapien
acgccactgtactcaacgtgggcaacagaatta

SEQ ID NO: 98916 - DNA, 33 bp, Homo sapien
acgccactgtactcaatgtgggcaacagaatta

SEQ ID NO: 98917 - DNA, 33 bp, Homo sapien
gtcggagaattagaaaatgaaacctggccttcc

SEQ ID NO: 98918 - DNA, 33 bp, Homo sapien
gtcggagaattagaaactgaaacctggccttcc

SEQ ID NO: 98919 - DNA, 33 bp, Homo sapien
ttccgagttcaagctacgcttctgtttcagcct

SEQ ID NO: 98920 - DNA, 33 bp, Homo sapien
ttccgagttcaagctatgcttctgtttcagcct

SEQ ID NO: 98921 - DNA, 33 bp, Homo sapien
gggtaaaatgaaagtgaatgccatgaggtaaag

SEQ ID NO: 98922 - DNA, 33 bp, Homo sapien
gggtaaaatgaaagtgtatgccatgaggtaaag

SEQ ID NO: 98923 - DNA, 33 bp, Homo sapien
tgtatagcctcctctcacactgagtcaaagctg

SEQ ID NO: 98924 - DNA, 33 bp, Homo sapien
tgtatagcctcctctcgcactgagtcaaagctg

SEQ ID NO: 98925 - DNA, 33 bp, Homo sapien
acgattgaagagtataagttttcaggaagtgag

SEQ ID NO: 98926 - DNA, 33 bp, Homo sapien
acgattgaagagtatacgttttcaggaagtgag

SEQ ID NO: 98927 - DNA, 33 bp, Homo sapien
ctaaagcaagagtagacattaacaggttggggt

SEQ ID NO: 98928 - DNA, 33 bp, Homo sapien
ctaaagcaagagtagatattaacaggttggggt

SEQ ID NO: 98929 - DNA, 33 bp, Homo sapien
gttaacaaggccgtcaccaaataatatttacca

SEQ ID NO: 98930 - DNA, 33 bp, Homo sapien
gttaacaaggccgtcatcaaataatatttacca

SEQ ID NO: 98931 - DNA, 33 bp, Homo sapien
gaatcattgtcattgacctaatttacaacagga

SEQ ID NO: 98932 - DNA, 33 bp, Homo sapien
gaatcattgtcattgatctaatttacaacagga

SEQ ID NO: 98933 - DNA, 33 bp, Homo sapien
ttctacaaaaataataagcacaatcttaataat

SEQ ID NO: 98934 - DNA, 33 bp, Homo sapien
ttctacaaaaataataggcacaatcttaataat

SEQ ID NO: 98935 - DNA, 33 bp, Homo sapien
gaagaggctgtggcacaagacataatttaacga

SEQ ID NO: 98936 - DNA, 33 bp, Homo sapien
gaagaggctgtggcacgagacataatttaacga

SEQ ID NO: 98937 - DNA, 33 bp, Homo sapien
ggcaaggattgagttcactgtagacctgttgga

SEQ ID NO: 98938 - DNA, 33 bp, Homo sapien
ggcaaggattgagttcgctgtagacctgttgga

SEQ ID NO: 98939 - DNA, 33 bp, Homo sapien
ttcaaattggttgccgaaattcatggatctgaa

SEQ ID NO: 98940 - DNA, 33 bp, Homo sapien
ttcaaattggttgccggaattcatggatctgaa

SEQ ID NO: 98941 - DNA, 33 bp, Homo sapien
ctcttaacaacaaccccacgcattactgcatca

SEQ ID NO: 98942 - DNA, 33 bp, Homo sapien
ctcttaacaacaaccctacgcattactgcatca

SEQ ID NO: 98943 - DNA, 33 bp, Homo sapien
caggtccccagtaaaactttacttccaagctga

SEQ ID NO: 98944 - DNA, 33 bp, Homo sapien
caggtccccagtaaaagtttacttccaagctga

SEQ ID NO: 98945 - DNA, 33 bp, Homo sapien
cagacagaggccaacacaaacaggatgacaagc

SEQ ID NO: 98946 - DNA, 33 bp, Homo sapien
cagacagaggccaacagaaacaggatgacaagc

SEQ ID NO: 98947 - DNA, 33 bp, Homo sapien
acttgggactctctcaaatgggactatttattt

SEQ ID NO: 98948 - DNA, 33 bp, Homo sapien
acttgggactctctcagatgggactatttattt

SEQ ID NO: 98949 - DNA, 33 bp, Homo sapien
catacttttgattctccagggttagcaaagaga

SEQ ID NO: 98950 - DNA, 33 bp, Homo sapien
catacttttgattctctagggttagcaaagaga

SEQ ID NO: 98951 - DNA, 33 bp, Homo sapien
ctgcccaagtaaacacaagtccagggctgttca

SEQ ID NO: 98952 - DNA, 33 bp, Homo sapien
ctgcccaagtaaacacgagtccagggctgttca

SEQ ID NO: 98953 - DNA, 33 bp, Homo sapien
ctctatggttctctaacggcaacctcttgggct

SEQ ID NO: 98954 - DNA, 33 bp, Homo sapien
ctctatggttctctaatggcaacctcttgggct

SEQ ID NO: 98955 - DNA, 33 bp, Homo sapien
tctcttctgaacttctaaacttatctatacatg

SEQ ID NO: 98956 - DNA, 33 bp, Homo sapien
tctcttctgaacttctgaacttatctatacatg

SEQ ID NO: 98957 - DNA, 33 bp, Homo sapien
aggtgacaactgaatacgcctgagggatagaga

SEQ ID NO: 98958 - DNA, 33 bp, Homo sapien
aggtgacaactgaatatgcctgagggatagaga

SEQ ID NO: 98959 - DNA, 33 bp, Homo sapien
cagagaaacagggtcacggaataccgaatggaa

SEQ ID NO: 98960 - DNA, 33 bp, Homo sapien
cagagaaacagggtcatggaataccgaatggaa

SEQ ID NO: 98961 - DNA, 33 bp, Homo sapien
gctgactcagaccacaagaggatgtattatttc

SEQ ID NO: 98962 - DNA, 33 bp, Homo sapien
gctgactcagaccacaggaggatgtattatttc

SEQ ID NO: 98963 - DNA, 33 bp, Homo sapien
agccaatgagaatacaacagtggaaagatcttg

SEQ ID NO: 98964 - DNA, 33 bp, Homo sapien
agccaatgagaatacagcagtggaaagatcttg

SEQ ID NO: 98965 - DNA, 33 bp, Homo sapien
gccctcctaagcagacagataaatcttggtcat

SEQ ID NO: 98966 - DNA, 33 bp, Homo sapien
gccctcctaagcagacggataaatcttggtcat

SEQ ID NO: 98967 - DNA, 33 bp, Homo sapien
tggtagagagagaaagcaagaatacagtagtcc

SEQ ID NO: 98968 - DNA, 33 bp, Homo sapien
tggtagagagagaaaggaagaatacagtagtcc

SEQ ID NO: 98969 - DNA, 33 bp, Homo sapien
agaatacagtagtcccagcatatttagtttttg

SEQ ID NO: 98970 - DNA, 33 bp, Homo sapien
agaatacagtagtcccggcatatttagtttttg

SEQ ID NO: 98971 - DNA, 33 bp, Homo sapien
catttgctttgaactccattgatgagtatagga

SEQ ID NO: 98972 - DNA, 33 bp, Homo sapien
catttgctttgaactctattgatgagtatagga

SEQ ID NO: 98973 - DNA, 33 bp, Homo sapien; identical to SEQ ID NO: 98971

SEQ ID NO: 98974 - DNA, 33 bp, Homo sapien; identical to SEQ ID NO: 98972

SEQ ID NO: 98975 - DNA, 33 bp, Homo sapien
tttcatccttctaaacacagtactcattaaagt

SEQ ID NO: 98976 - DNA, 33 bp, Homo sapien
tttcatccttctaaacccagtactcattaaagt

SEQ ID NO: 98977 - DNA, 33 bp, Homo sapien
agcagcaagtaattgcaaaacctcaatggctta

SEQ ID NO: 98978 - DNA, 33 bp, Homo sapien
agcagcaagtaattgcgaaacctcaatggctta

SEQ ID NO: 98979 - DNA, 33 bp, Homo sapien
taaggattcaccaaaaaaatgaaaacttctaca

SEQ ID NO: 98980 - DNA, 33 bp, Homo sapien
taaggattcaccaaaagaatgaaaacttctaca

SEQ ID NO: 98981 - DNA, 33 bp, Homo sapien
acaatgagtacaacctcagaattctatgtgttc

SEQ ID NO: 98982 - DNA, 33 bp, Homo sapien
acaatgagtacaaccttagaattctatgtgttc

SEQ ID NO: 98983 - DNA, 33 bp, Homo sapien
gtggagactcctattgcaactgcatttcattcc

SEQ ID NO: 98984 - DNA, 33 bp, Homo sapien
gtggagactcctattgtaactgcatttcattcc

SEQ ID NO: 98985 - DNA, 33 bp, Homo sapien
tccatctcttgttacacggattcattccaacag

SEQ ID NO: 98986 - DNA, 33 bp, Homo sapien
tccatctcttgttacatggattcattccaacag

SEQ ID NO: 98987 - DNA, 33 bp, Homo sapien
cccagaagggtctaaagttatctccactggtca

SEQ ID NO: 98988 - DNA, 33 bp, Homo sapien
cccagaagggtctaaatttatctccactggtca

SEQ ID NO: 98989 - DNA, 33 bp, Homo sapien
agcaatggagctaacaaacttttctgccaggtt

SEQ ID NO: 98990 - DNA, 33 bp, Homo sapien
agcaatggagctaacagacttttctgccaggtt

SEQ ID NO: 98991 - DNA, 33 bp, Homo sapien
aaaacctatgatataaccaattaagcaaatcat

SEQ ID NO: 98992 - DNA, 33 bp, Homo sapien
aaaacctatgatataagcaattaagcaaatcat

SEQ ID NO: 98993 - DNA, 33 bp, Homo sapien
ctaatgtgatggacaccgtatctggagagtcct

SEQ ID NO: 98994 - DNA, 33 bp, Homo sapien
ctaatgtgatggacacggtatctggagagtcct

SEQ ID NO: 98995 - DNA, 33 bp, Homo sapien
catttcatcataaacacgcaataataaattaaa

SEQ ID NO: 98996 - DNA, 33 bp, Homo sapien
catttcatcataaacatgcaataataaattaaa

SEQ ID NO: 98997 - DNA, 33 bp, Homo sapien
acaaagactgcagaaccgtaagtaaacttactt

SEQ ID NO: 98998 - DNA, 33 bp, Homo sapien
acaaagactgcagaactgtaagtaaacttactt

SEQ ID NO: 98999 - DNA, 33 bp, Homo sapien
gactctcatctatcaaattacattagaattttc

SEQ ID NO: 99000 - DNA, 33 bp, Homo sapien
gactctcatctatcaagttacattagaattttc

SEQ ID NO: 99001 - DNA, 33 bp, Homo sapien
gctacacgaaagagaaaactcacaccaggagag

SEQ ID NO: 99002 - DNA, 33 bp, Homo sapien
gctacacgaaagagaagactcacaccaggagag

SEQ ID NO: 99003 - DNA, 33 bp, Homo sapien
gaaatgttgcttataaccttatctcctgttttc

SEQ ID NO: 99004 - DNA, 33 bp, Homo sapien
gaaatgttgcttataatcttatctcctgttttc

SEQ ID NO: 99005 - DNA, 33 bp, Homo sapien
gtcatttgtttgcagaagtcttactgtcagtat

SEQ ID NO: 99006 - DNA, 33 bp, Homo sapien
gtcatttgtttgcagaggtcttactgtcagtat

SEQ ID NO: 99007 - DNA, 33 bp, Homo sapien
aaatggttaaatcaaaagggtgataacagtagc

SEQ ID NO: 99008 - DNA, 33 bp, Homo sapien
aaatggttaaatcaaaggggtgataacagtagc

SEQ ID NO: 99009 - DNA, 33 bp, Homo sapien
ccacaggatgtctttacgatacatattagaata

SEQ ID NO: 99010 - DNA, 33 bp, Homo sapien
ccacaggatgtctttaggatacatattagaata

SEQ ID NO: 99011 - DNA, 33 bp, Homo sapien
ctgaacttcataattccatttccatttgttgct

SEQ ID NO: 99012 - DNA, 33 bp, Homo sapien
ctgaacttcataattctatttccatttgttgct

SEQ ID NO: 99013 - DNA, 33 bp, Homo sapien
attaccaatatttatacgaatggaacatggaat

SEQ ID NO: 99014 - DNA, 33 bp, Homo sapien
attaccaatatttataggaatggaacatggaat

SEQ ID NO: 99015 - DNA, 33 bp, Homo sapien
tcccacctcaataacccagacaaagaagagcaa

SEQ ID NO: 99016 - DNA, 33 bp, Homo sapien
tcccacctcaataacctagacaaagaagagcaa

SEQ ID NO: 99017 - DNA, 33 bp, Homo sapien
cttgcacttagaaacactagacagcatttcagc

SEQ ID NO: 99018 - DNA, 33 bp, Homo sapien
cttgcacttagaaacagtagacagcatttcagc

SEQ ID NO: 99019 - DNA, 33 bp, Homo sapien
gtgtccggattgttgacctccagccttattcag

SEQ ID NO: 99020 - DNA, 33 bp, Homo sapien
gtgtccggattgttgatctccagccttattcag

SEQ ID NO: 99021 - DNA, 33 bp, Homo sapien
tttctttccttccacaacttgagaggaaaatgt

SEQ ID NO: 99022 - DNA, 33 bp, Homo sapien
tttctttccttccacagcttgagaggaaaatgt

SEQ ID NO: 99023 - DNA, 33 bp, Homo sapien
tacctggttaaagcataatactacaaaaagaca

SEQ ID NO: 99024 - DNA, 33 bp, Homo sapien
tacctggttaaagcatcatactacaaaaagaca

SEQ ID NO: 99025 - DNA, 33 bp, Homo sapien
tgagggatagaggaagcctatgtgctggaggaa

SEQ ID NO: 99026 - DNA, 33 bp, Homo sapien
tgagggatagaggaaggctatgtgctggaggaa

SEQ ID NO: 99027 - DNA, 33 bp, Homo sapien
catactaaaggaaagaccagtggcctcaaggct

SEQ ID NO: 99028 - DNA, 33 bp, Homo sapien
catactaaaggaaagatcagtggcctcaaggct

SEQ ID NO: 99029 - DNA, 33 bp, Homo sapien
catgttgaaattcagtaaccaatgtgatagtat

SEQ ID NO: 99030 - DNA, 33 bp, Homo sapien
catgttgaaattcagtcaccaatgtgatagtat

SEQ ID NO: 99031 - DNA, 33 bp, Homo sapien
tgatttcgggcaagaacggatggtgggttaata

SEQ ID NO: 99032 - DNA, 33 bp, Homo sapien
tgatttcgggcaagaatggatggtgggttaata

SEQ ID NO: 99033 - DNA, 33 bp, Homo sapien
tgagggagaacagctagaacttgatgtctaaat

SEQ ID NO: 99034 - DNA, 33 bp, Homo sapien
tgagggagaacagctataacttgatgtctaaat

SEQ ID NO: 99035 - DNA, 33 bp, Homo sapien
ctgccttcagttggcacgaacactatcataatc

SEQ ID NO: 99036 - DNA, 33 bp, Homo sapien
ctgccttcagttggcatgaacactatcataatc

SEQ ID NO: 99037 - DNA, 33 bp, Homo sapien
caatgcttggctcaaaattaaagagaagcatgg

SEQ ID NO: 99038 - DNA, 33 bp, Homo sapien
caatgcttggctcaaagttaaagagaagcatgg

SEQ ID NO: 99039 - DNA, 33 bp, Homo sapien
gagttttaaataacacaggatcataggaaacat

SEQ ID NO: 99040 - DNA, 33 bp, Homo sapien
gagttttaaataacacgggatcataggaaacat

SEQ ID NO: 99041 - DNA, 33 bp, Homo sapien
atttaacatattaaaccgagtgctagagccaag

SEQ ID NO: 99042 - DNA, 33 bp, Homo sapien
atttaacatattaaactgagtgctagagccaag

SEQ ID NO: 99043 - DNA, 33 bp, Homo sapien
aaagaaacgtaactcaccatgccattatcacag

SEQ ID NO: 99044 - DNA, 33 bp, Homo sapien
aaagaaacgtaactcatcatgccattatcacag

SEQ ID NO: 99045 - DNA, 33 bp, Homo sapien
gcaaaggtttgtgcaaaagccattagtaatact

SEQ ID NO: 99046 - DNA, 33 bp, Homo sapien
gcaaaggtttgtgcaatagccattagtaatact

SEQ ID NO: 99047 - DNA, 33 bp, Homo sapien
agactattttacagtcacaggaacgtattgtcc

SEQ ID NO: 99048 - DNA, 33 bp, Homo sapien
agactattttacagtctcaggaacgtattgtcc

SEQ ID NO: 99049 - DNA, 33 bp, Homo sapien
ctcatttgtgaggatgaaagattacagaaacaa

SEQ ID NO: 99050 - DNA, 33 bp, Homo sapien
ctcatttgtgaggatggaagattacagaaacaa

SEQ ID NO: 99051 - DNA, 33 bp, Homo sapien
tattaaacttgttaaaatagacacagaatctca

SEQ ID NO: 99052 - DNA, 33 bp, Homo sapien
tattaaacttgttaaagtagacacagaatctca

SEQ ID NO: 99053 - DNA, 33 bp, Homo sapien
aactattttagcatcaaaatgtgacttcttatg

SEQ ID NO: 99054 - DNA, 33 bp, Homo sapien
aactattttagcatcagaatgtgacttcttatg

SEQ ID NO: 99055 - DNA, 33 bp, Homo sapien
agatcttagcatgacactggctttatattcaaa

SEQ ID NO: 99056 - DNA, 33 bp, Homo sapien
agatcttagcatgacattggctttatattcaaa

SEQ ID NO: 99057 - DNA, 33 bp, Homo sapien
agatgtgagagactaaagttttcctgggtcttt

SEQ ID NO: 99058 - DNA, 33 bp, Homo sapien
agatgtgagagactaaggttttcctgggtcttt

SEQ ID NO: 99059 - DNA, 33 bp, Homo sapien
gaaagtgatgaatggacgttaatgaaaaatagg

SEQ ID NO: 99060 - DNA, 33 bp, Homo sapien
gaaagtgatgaatggatgttaatgaaaaatagg

SEQ ID NO: 99061 - DNA, 33 bp, Homo sapien
tgttgatgtgactctaagattaggcagttgctg

SEQ ID NO: 99062 - DNA, 33 bp, Homo sapien
tgttgatgtgactctaggattaggcagttgctg

SEQ ID NO: 99063 - DNA, 33 bp, Homo sapien
tttaaaaaagctcaagaaaaatgcatctaattg

SEQ ID NO: 99064 - DNA, 33 bp, Homo sapien
tttaaaaaagctcaagcaaaatgcatctaattg

SEQ ID NO: 99065 - DNA, 33 bp, Homo sapien
tacactgcatactataacactgtttaaaagaat

SEQ ID NO: 99066 - DNA, 33 bp, Homo sapien
tacactgcatactatatcactgtttaaaagaat

SEQ ID NO: 99067 - DNA, 33 bp, Homo sapien
agtatttttcttctgcaatatgaaacttctaat

SEQ ID NO: 99068 - DNA, 33 bp, Homo sapien
agtatttttcttctgcgatatgaaacttctaat

SEQ ID NO: 99069 - DNA, 33 bp, Homo sapien
aaaacaaaaactttacagatccaagacaatcaa

SEQ ID NO: 99070 - DNA, 33 bp, Homo sapien
aaaacaaaaactttacggatccaagacaatcaa

SEQ ID NO: 99071 - DNA, 33 bp, Homo sapien
aaactgtaataaagagcctatctcaaaaggagc

SEQ ID NO: 99072 - DNA, 33 bp, Homo sapien
aaactgtaataaagaggctatctcaaaaggagc

SEQ ID NO: 99073 - DNA, 33 bp, Homo sapien
atatagcaccatatagcaaaaatgcctctgaca

SEQ ID NO: 99074 - DNA, 33 bp, Homo sapien
atatagcaccatatagtaaaaatgcctctgaca

SEQ ID NO: 99075 - DNA, 33 bp, Homo sapien
atgccgtctgaaaataaatagtgtggaaagaac

SEQ ID NO: 99076 - DNA, 33 bp, Homo sapien
atgccgtctgaaaatacatagtgtggaaagaac

SEQ ID NO: 99077 - DNA, 33 bp, Homo sapien
ccactgcagtattaaactagttaccttcccact

SEQ ID NO: 99078 - DNA, 33 bp, Homo sapien
ccactgcagtattaaagtagttaccttcccact

SEQ ID NO: 99079 - DNA, 33 bp, Homo sapien
tagatatgctgcacttcaaggttgttggcccca

SEQ ID NO: 99080 - DNA, 33 bp, Homo sapien
tagatatgctgcactttaaggttgttggcccca

SEQ ID NO: 99081 - DNA, 33 bp, Homo sapien
taaaaatctgattgtacgtttcttccctgttct

SEQ ID NO: 99082 - DNA, 33 bp, Homo sapien
taaaaatctgattgtaggtttcttccctgttct

SEQ ID NO: 99083 - DNA, 33 bp, Homo sapien
gaaccctcatattgacagcaagaatgtaagatg

SEQ ID NO: 99084 - DNA, 33 bp, Homo sapien
gaaccctcatattgacggcaagaatgtaagatg

SEQ ID NO: 99085 - DNA, 33 bp, Homo sapien
gaagtttgcttctctgcagtttgagggtggaag

SEQ ID NO: 99086 - DNA, 33 bp, Homo sapien
gaagtttgcttctctgtagtttgagggtggaag

SEQ ID NO: 99087 - DNA, 33 bp, Homo sapien
aaggctctatgaaaagaaaactcaactgctcct

SEQ ID NO: 99088 - DNA, 33 bp, Homo sapien
aaggctctatgaaaaggaaactcaactgctcct

SEQ ID NO: 99089 - DNA, 33 bp, Homo sapien
caacatactcctccccagctcttttccatactc

SEQ ID NO: 99090 - DNA, 33 bp, Homo sapien
caacatactcctcccccgctcttttccatactc

SEQ ID NO: 99091 - DNA, 33 bp, Homo sapien
gaaatggagaaataacgcagtatgatagttagc

SEQ ID NO: 99092 - DNA, 33 bp, Homo sapien
gaaatggagaaataactcagtatgatagttagc

SEQ ID NO: 99093 - DNA, 33 bp, Homo sapien
taatccattggaagtaaaaaaacaaaatctctg

SEQ ID NO: 99094 - DNA, 33 bp, Homo sapien
taatccattggaagtataaaaacaaaatctctg

SEQ ID NO: 99095 - DNA, 33 bp, Homo sapien
cattttaagttcacggaaacctagagatgacaa

SEQ ID NO: 99096 - DNA, 33 bp, Homo sapien
cattttaagttcacggtaacctagagatgacaa

SEQ ID NO: 99097 - DNA, 33 bp, Homo sapien
cttcagcaaggagataacatagttctcacattc

SEQ ID NO: 99098 - DNA, 33 bp, Homo sapien
cttcagcaaggagataccatagttctcacattc

SEQ ID NO: 99099 - DNA, 33 bp, Homo sapien
cactggccagcagaaaataatgaactaaaatta

SEQ ID NO: 99100 - DNA, 33 bp, Homo sapien
cactggccagcagaaagtaatgaactaaaatta

SEQ ID NO: 99101 - DNA, 33 bp, Homo sapien
caatgcatgatttaaaagttaagcataagaaat

SEQ ID NO: 99102 - DNA, 33 bp, Homo sapien
caatgcatgatttaaaggttaagcataagaaat

SEQ ID NO: 99103 - DNA, 33 bp, Homo sapien
ggatgacaagagtccaaatgtggtttagaaggg

SEQ ID NO: 99104 - DNA, 33 bp, Homo sapien
ggatgacaagagtccatatgtggtttagaaggg

SEQ ID NO: 99105 - DNA, 33 bp, Homo sapien
taggctgagccaactacaccagggtgctgaagg

SEQ ID NO: 99106 - DNA, 33 bp, Homo sapien
taggctgagccaactataccagggtgctgaagg

SEQ ID NO: 99107 - DNA, 33 bp, Homo sapien
taaacttttctcacagaccactcttggagcaaa

SEQ ID NO: 99108 - DNA, 33 bp, Homo sapien
taaacttttctcacagtccactcttggagcaaa

SEQ ID NO: 99109 - DNA, 33 bp, Homo sapien
cagaaaccatgacctacgtcttgaattatactt

SEQ ID NO: 99110 - DNA, 33 bp, Homo sapien
cagaaaccatgacctatgtcttgaattatactt

SEQ ID NO: 99111 - DNA, 33 bp, Homo sapien
ttttggtctagaattgcaacgctactattcttg

SEQ ID NO: 99112 - DNA, 33 bp, Homo sapien
ttttggtctagaattggaacgctactattcttg

SEQ ID NO: 99113 - DNA, 33 bp, Homo sapien
tcactcaaaaagggacaattctgtatggaaaga

SEQ ID NO: 99114 - DNA, 33 bp, Homo sapien
tcactcaaaaagggaccattctgtatggaaaga

SEQ ID NO: 99115 - DNA, 33 bp, Homo sapien
tagatcccatttctcaatacattcaggacatag

SEQ ID NO: 99116 - DNA, 33 bp, Homo sapien
tagatcccatttctcagtacattcaggacatag

SEQ ID NO: 99117 - DNA, 33 bp, Homo sapien
gagagcttttttttcagaagggtttgcagtctg

SEQ ID NO: 99118 - DNA, 33 bp, Homo sapien
gagagcttttttttcataagggtttgcagtctg

SEQ ID NO: 99119 - DNA, 33 bp, Homo sapien
ggagtcttacttggaccaatctctgcacttatg

SEQ ID NO: 99120 - DNA, 33 bp, Homo sapien
ggagtcttacttggacgaatctctgcacttatg

SEQ ID NO: 99121 - DNA, 33 bp, Homo sapien
ggtttaaatctaaattcaaaggcaatgataact

SEQ ID NO: 99122 - DNA, 33 bp, Homo sapien
ggtttaaatctaaattgaaaggcaatgataact

SEQ ID NO: 99123 - DNA, 33 bp, Homo sapien
tgttgctgcatttagacatggcttattcatatt

SEQ ID NO: 99124 - DNA, 33 bp, Homo sapien
tgttgctgcatttagatatggcttattcatatt

SEQ ID NO: 99125 - DNA, 33 bp, Homo sapien
gatatttgcctgggaaacaaaattgagttgcca

SEQ ID NO: 99126 - DNA, 33 bp, Homo sapien
gatatttgcctgggaaccaaaattgagttgcca

SEQ ID NO: 99127 - DNA, 33 bp, Homo sapien
gcatttaaaatcataactctagatgacagcaaa

SEQ ID NO: 99128 - DNA, 33 bp, Homo sapien
gcatttaaaatcataattctagatgacagcaaa

SEQ ID NO: 99129 - DNA, 33 bp, Homo sapien
tcatgtaagcacgtatgagattgttttagtttt

SEQ ID NO: 99130 - DNA, 33 bp, Homo sapien
tcatgtaagcacgtattagattgttttagtttt

SEQ ID NO: 99131 - DNA, 33 bp, Homo sapien
ccatgcctcaagtcaccgtaggatggcttcttc

SEQ ID NO: 99132 - DNA, 33 bp, Homo sapien
ccatgcctcaagtcactgtaggatggcttcttc

SEQ ID NO: 99133 - DNA, 33 bp, Homo sapien
acttgtttcattcttacaccatttcaaggccac

SEQ ID NO: 99134 - DNA, 33 bp, Homo sapien
acttgtttcattcttataccatttcaaggccac

SEQ ID NO: 99135 - DNA, 33 bp, Homo sapien
ctaatgtaatggtggcacaggtaggaagcaatg

SEQ ID NO: 99136 - DNA, 33 bp, Homo sapien
ctaatgtaatggtggcgcaggtaggaagcaatg

SEQ ID NO: 99137 - DNA, 33 bp, Homo sapien
gggatgcccctttagaactcaatgtctcttgat

SEQ ID NO: 99138 - DNA, 33 bp, Homo sapien
gggatgcccctttagagctcaatgtctcttgat

SEQ ID NO: 99139 - DNA, 33 bp, Homo sapien
tccagaatggaaataactagagtgtcatataat

SEQ ID NO: 99140 - DNA, 33 bp, Homo sapien
tccagaatggaaataattagagtgtcatataat

SEQ ID NO: 99141 - DNA, 33 bp, Homo sapien
taatatgaaaaagttacgaccaatttccaaaga

SEQ ID NO: 99142 - DNA, 33 bp, Homo sapien
taatatgaaaaagttatgaccaatttccaaaga

SEQ ID NO: 99143 - DNA, 33 bp, Homo sapien
gttgagtttgaagtcaatattagtcccttttgt

SEQ ID NO: 99144 - DNA, 33 bp, Homo sapien
gttgagtttgaagtcagtattagtcccttttgt

SEQ ID NO: 99145 - DNA, 33 bp, Homo sapien
cattacgcagtcacagcccctcattcaagctct

SEQ ID NO: 99146 - DNA, 33 bp, Homo sapien
cattacgcagtcacaggccctcattcaagctct

SEQ ID NO: 99147 - DNA, 33 bp, Homo sapien
tttatataatgaagataaaattcggtttgtatt

SEQ ID NO: 99148 - DNA, 33 bp, Homo sapien
tttatataatgaagatgaaattcggtttgtatt

SEQ ID NO: 99149 - DNA, 33 bp, Homo sapien
tgtatgatttctattacgctaagtgccttatat

SEQ ID NO: 99150 - DNA, 33 bp, Homo sapien
tgtatgatttctattatgctaagtgccttatat

SEQ ID NO: 99151 - DNA, 33 bp, Homo sapien
tgaatgcaatggccaacagctatgaatacgtat

SEQ ID NO: 99152 - DNA, 33 bp, Homo sapien
tgaatgcaatggccaagagctatgaatacgtat

SEQ ID NO: 99153 - DNA, 33 bp, Homo sapien
gagaaaggcactaaaaccctgcccccatgcaaa

SEQ ID NO: 99154 - DNA, 33 bp, Homo sapien
gagaaaggcactaaaatcctgcccccatgcaaa

SEQ ID NO: 99155 - DNA, 33 bp, Homo sapien
acttagggtacctgaaactgaatgcattgtctc

SEQ ID NO: 99156 - DNA, 33 bp, Homo sapien
acttagggtacctgaagctgaatgcattgtctc

SEQ ID NO: 99157 - DNA, 33 bp, Homo sapien
ttgtgatcctcacttacgtaaccaagtttttgt

SEQ ID NO: 99158 - DNA, 33 bp, Homo sapien
ttgtgatcctcacttatgtaaccaagtttttgt

SEQ ID NO: 99159 - DNA, 33 bp, Homo sapien
gaggctaggtattggggatataacggtacagaa

SEQ ID NO: 99160 - DNA, 33 bp, Homo sapien
gaggctaggtattgggtatataacggtacagaa

SEQ ID NO: 99161 - DNA, 33 bp, Homo sapien
aagcctgagggaaaaacgtgtcattctttagtg

SEQ ID NO: 99162 - DNA, 33 bp, Homo sapien
aagcctgagggaaaaatgtgtcattctttagtg

SEQ ID NO: 99163 - DNA, 33 bp, Homo sapien
cacaaacagagtgtctcaaacaacaacaaaaaa

SEQ ID NO: 99164 - DNA, 33 bp, Homo sapien
cacaaacagagtgtcttaaacaacaacaaaaaa

SEQ ID NO: 99165 - DNA, 33 bp, Homo sapien
aagtccttcttctaaacagatcaagagcctcca

SEQ ID NO: 99166 - DNA, 33 bp, Homo sapien
aagtccttcttctaaatagatcaagagcctcca

SEQ ID NO: 99167 - DNA, 33 bp, Homo sapien
tctagatggaggcctaagagaacaataacaaca

SEQ ID NO: 99168 - DNA, 33 bp, Homo sapien
tctagatggaggcctacgagaacaataacaaca

SEQ ID NO: 99169 - DNA, 33 bp, Homo sapien
cagcaatgaagaaaaaaaaagtgctggttgaaa

SEQ ID NO: 99170 - DNA, 33 bp, Homo sapien
cagcaatgaagaaaaacaaagtgctggttgaaa

SEQ ID NO: 99171 - DNA, 33 bp, Homo sapien
catatatacttcagacactggcaacggtgtgta

SEQ ID NO: 99172 - DNA, 33 bp, Homo sapien
catatatacttcagacgctggcaacggtgtgta

SEQ ID NO: 99173 - DNA, 33 bp, Homo sapien
tgacaccttaatatgcactcaatactggtccct

SEQ ID NO: 99174 - DNA, 33 bp, Homo sapien
tgacaccttaatatgcgctcaatactggtccct

SEQ ID NO: 99175 - DNA, 33 bp, Homo sapien
gggtctgccttaattgcacatgaagcacttagc

SEQ ID NO: 99176 - DNA, 33 bp, Homo sapien
gggtctgccttaattgtacatgaagcacttagc

SEQ ID NO: 99177 - DNA, 33 bp, Homo sapien
tgggaaatagctaacacatattgagaagctagc

SEQ ID NO: 99178 - DNA, 33 bp, Homo sapien
tgggaaatagctaacatatattgagaagctagc

SEQ ID NO: 99179 - DNA, 33 bp, Homo sapien
agtgaaaaggatgccactagtaaatatgccagg

SEQ ID NO: 99180 - DNA, 33 bp, Homo sapien
agtgaaaaggatgccattagtaaatatgccagg

SEQ ID NO: 99181 - DNA, 33 bp, Homo sapien
taatccttccttaatacggctccatttgaaagg

SEQ ID NO: 99182 - DNA, 33 bp, Homo sapien
taatccttccttaatatggctccatttgaaagg

SEQ ID NO: 99183 - DNA, 33 bp, Homo sapien
actcttacatcacaaaattagggttcaggttaa

SEQ ID NO: 99184 - DNA, 33 bp, Homo sapien
actcttacatcacaaagttagggttcaggttaa

SEQ ID NO: 99185 - DNA, 33 bp, Homo sapien
gcattcacggtgttataaaaccaaactatcaat

SEQ ID NO: 99186 - DNA, 33 bp, Homo sapien
gcattcacggtgttattaaaccaaactatcaat

SEQ ID NO: 99187 - DNA, 33 bp, Homo sapien
aaggatgccagataaaaggataaggaaatataa

SEQ ID NO: 99188 - DNA, 33 bp, Homo sapien
aaggatgccagataaagggataaggaaatataa

SEQ ID NO: 99189 - DNA, 33 bp, Homo sapien
cattaaaaataattggccatatgtggtggctta

SEQ ID NO: 99190 - DNA, 33 bp, Homo sapien
cattaaaaataattggtcatatgtggtggctta

SEQ ID NO: 99191 - DNA, 33 bp, Homo sapien
cttttccatgtctgcaactaggacacattataa

SEQ ID NO: 99192 - DNA, 33 bp, Homo sapien
cttttccatgtctgcagctaggacacattataa

SEQ ID NO: 99193 - DNA, 33 bp, Homo sapien
aaagaaagtgctcagaaagtatgttagatgaaa

SEQ ID NO: 99194 - DNA, 33 bp, Homo sapien
aaagaaagtgctcagagagtatgttagatgaaa

SEQ ID NO: 99195 - DNA, 33 bp, Homo sapien
gtttctttgttatggacctaaagcctgtggatt

SEQ ID NO: 99196 - DNA, 33 bp, Homo sapien
gtttctttgttatggatctaaagcctgtggatt

SEQ ID NO: 99197 - DNA, 33 bp, Homo sapien
ttccagtcattttggcactgttagctctgtgac

SEQ ID NO: 99198 - DNA, 33 bp, Homo sapien
ttccagtcattttggccctgttagctctgtgac

SEQ ID NO: 99199 - DNA, 33 bp, Homo sapien
tggaaaggcaagagacaatgaaccgtatcctca

SEQ ID NO: 99200 - DNA, 33 bp, Homo sapien
tggaaaggcaagagacgatgaaccgtatcctca

SEQ ID NO: 99201 - DNA, 33 bp, Homo sapien
ttcagtatcttctctcaattgatccctgtaaaa

SEQ ID NO: 99202 - DNA, 33 bp, Homo sapien
ttcagtatcttctctcgattgatccctgtaaaa

SEQ ID NO: 99203 - DNA, 33 bp, Homo sapien
tcaaatgaatgaaatacggcatcttactatacc

SEQ ID NO: 99204 - DNA, 33 bp, Homo sapien
tcaaatgaatgaaatatggcatcttactatacc

SEQ ID NO: 99205 - DNA, 33 bp, Homo sapien
atcaaatatagttgtaaaatttcatgacagtct

SEQ ID NO: 99206 - DNA, 33 bp, Homo sapien
atcaaatatagttgtagaatttcatgacagtct

SEQ ID NO: 99207 - DNA, 33 bp, Homo sapien
ataaagggtgagttacaaagagttcggtttagg

SEQ ID NO: 99208 - DNA, 33 bp, Homo sapien
ataaagggtgagttacgaagagttcggtttagg

SEQ ID NO: 99209 - DNA, 33 bp, Homo sapien
agccaaagaaaacgcagctagtgacacatgagt

SEQ ID NO: 99210 - DNA, 33 bp, Homo sapien
agccaaagaaaacgcatctagtgacacatgagt

SEQ ID NO: 99211 - DNA, 33 bp, Homo sapien
aaccctctgtcacgaaagttggcatcacaatat

SEQ ID NO: 99212 - DNA, 33 bp, Homo sapien
aaccctctgtcacgaacgttggcatcacaatat

SEQ ID NO: 99213 - DNA, 33 bp, Homo sapien
ctaaaatagctatcaccgtaatgcaaatcattc

SEQ ID NO: 99214 - DNA, 33 bp, Homo sapien
ctaaaatagctatcactgtaatgcaaatcattc

SEQ ID NO: 99215 - DNA, 33 bp, Homo sapien
aattgcatctttgaaccgagtgaaattgtgata

SEQ ID NO: 99216 - DNA, 33 bp, Homo sapien
aattgcatctttgaactgagtgaaattgtgata

SEQ ID NO: 99217 - DNA, 33 bp, Homo sapien
aattcaggcactataaaacataatctcttgctt

SEQ ID NO: 99218 - DNA, 33 bp, Homo sapien
aattcaggcactataatacataatctcttgctt

SEQ ID NO: 99219 - DNA, 33 bp, Homo sapien
attttaacagatacccacatagcaataattaac

SEQ ID NO: 99220 - DNA, 33 bp, Homo sapien
attttaacagatacccgcatagcaataattaac

SEQ ID NO: 99221 - DNA, 33 bp, Homo sapien
cccaatgtatggtttacgctttacagatgatga

SEQ ID NO: 99222 - DNA, 33 bp, Homo sapien
cccaatgtatggtttatgctttacagatgatga

SEQ ID NO: 99223 - DNA, 33 bp, Homo sapien
ctgtctctgattccacaatggccatcttgttgc

SEQ ID NO: 99224 - DNA, 33 bp, Homo sapien
ctgtctctgattccacgatggccatcttgttgc

SEQ ID NO: 99225 - DNA, 33 bp, Homo sapien
tttgttgaataactcaagcaaagcagcagtcca

SEQ ID NO: 99226 - DNA, 33 bp, Homo sapien
tttgttgaataactcaggcaaagcagcagtcca

SEQ ID NO: 99227 - DNA, 33 bp, Homo sapien
gaaactcaagttgtgacgaatgtcaaggaagat

SEQ ID NO: 99228 - DNA, 33 bp, Homo sapien
gaaactcaagttgtgatgaatgtcaaggaagat

SEQ ID NO: 99229 - DNA, 33 bp, Homo sapien
tcagccagattctccacatagactaataaaaat

SEQ ID NO: 99230 - DNA, 33 bp, Homo sapien
tcagccagattctccagatagactaataaaaat

SEQ ID NO: 99231 - DNA, 33 bp, Homo sapien
agttcaaagccagctcatagacagtatctgctt

SEQ ID NO: 99232 - DNA, 33 bp, Homo sapien
agttcaaagccagctcgtagacagtatctgctt

SEQ ID NO: 99233 - DNA, 33 bp, Homo sapien
ccattctggaatcttcacttggaggactgaccc

SEQ ID NO: 99234 - DNA, 33 bp, Homo sapien
ccattctggaatcttctcttggaggactgaccc

SEQ ID NO: 99235 - DNA, 33 bp, Homo sapien
gcagttaaaataaataagatagaccaggcactt

SEQ ID NO: 99236 - DNA, 33 bp, Homo sapien
gcagttaaaataaataggatagaccaggcactt

SEQ ID NO: 99237 - DNA, 33 bp, Homo sapien
caatcctacatgtttacatgcacctaataacag

SEQ ID NO: 99238 - DNA, 33 bp, Homo sapien
caatcctacatgtttatatgcacctaataacag

SEQ ID NO: 99239 - DNA, 33 bp, Homo sapien
ttatcaatgattaagtaacaactgctgaaattt

SEQ ID NO: 99240 - DNA, 33 bp, Homo sapien
ttatcaatgattaagtgacaactgctgaaattt

SEQ ID NO: 99241 - DNA, 33 bp, Homo sapien
atcatcaagtatgtaaaacttaaacaagacttc

SEQ ID NO: 99242 - DNA, 33 bp, Homo sapien
atcatcaagtatgtaagacttaaacaagacttc

SEQ ID NO: 99243 - DNA, 33 bp, Homo sapien
atgacagtagtcagaaagagtttgtaaaataga

SEQ ID NO: 99244 - DNA, 33 bp, Homo sapien
atgacagtagtcagaaggagtttgtaaaataga

SEQ ID NO: 99245 - DNA, 33 bp, Homo sapien
ggttcacgaatggtgacgtagattggattgaac

SEQ ID NO: 99246 - DNA, 33 bp, Homo sapien
ggttcacgaatggtgatgtagattggattgaac

SEQ ID NO: 99247 - DNA, 33 bp, Homo sapien
tgtctagtatcttgatgatatactgacacaatt

SEQ ID NO: 99248 - DNA, 33 bp, Homo sapien
tgtctagtatcttgattatatactgacacaatt

SEQ ID NO: 99249 - DNA, 33 bp, Homo sapien
aaaaggtggtaataatcagtgaacaatgaggaa

SEQ ID NO: 99250 - DNA, 33 bp, Homo sapien
aaaaggtggtaataatgagtgaacaatgaggaa

SEQ ID NO: 99251 - DNA, 33 bp, Homo sapien
aaagtagagttaacaaacaacttcagtggagca

SEQ ID NO: 99252 - DNA, 33 bp, Homo sapien
aaagtagagttaacaatcaacttcagtggagca

SEQ ID NO: 99253 - DNA, 33 bp, Homo sapien
cgaaaatcctaagcaacgtacaaaacaactact

SEQ ID NO: 99254 - DNA, 33 bp, Homo sapien
cgaaaatcctaagcaatgtacaaaacaactact

SEQ ID NO: 99255 - DNA, 33 bp, Homo sapien
cctacacatgacgtggaaacaactggatacaca

SEQ ID NO: 99256 - DNA, 33 bp, Homo sapien
cctacacatgacgtgggaacaactggatacaca

SEQ ID NO: 99257 - DNA, 33 bp, Homo sapien
tcacaggaaagaagtaaagagtctaatctggca

SEQ ID NO: 99258 - DNA, 33 bp, Homo sapien
tcacaggaaagaagtagagagtctaatctggca

SEQ ID NO: 99259 - DNA, 33 bp, Homo sapien
cagcacttcaatgtaacgattaccaaagaaatg

SEQ ID NO: 99260 - DNA, 33 bp, Homo sapien
cagcacttcaatgtaatgattaccaaagaaatg

SEQ ID NO: 99261 - DNA, 33 bp, Homo sapien
tcccagcatttattccacatgatgtctttgcct

SEQ ID NO: 99262 - DNA, 33 bp, Homo sapien
tcccagcatttattccgcatgatgtctttgcct

SEQ ID NO: 99263 - DNA, 33 bp, Homo sapien
tatcagtggtttaacacattatgcttgttcttt

SEQ ID NO: 99264 - DNA, 33 bp, Homo sapien
tatcagtggtttaacatattatgcttgttcttt

SEQ ID NO: 99265 - DNA, 33 bp, Homo sapien
tgggaccacagatgtacattaccacacctggta

SEQ ID NO: 99266 - DNA, 33 bp, Homo sapien
tgggaccacagatgtatattaccacacctggta

SEQ ID NO: 99267 - DNA, 33 bp, Homo sapien
attgaagcaggcaacactattgtccctctttta

SEQ ID NO: 99268 - DNA, 33 bp, Homo sapien
attgaagcaggcaacattattgtccctctttta

SEQ ID NO: 99269 - DNA, 33 bp, Homo sapien
aacttgtgtatttttaggctaaatttgatgaag

SEQ ID NO: 99270 - DNA, 33 bp, Homo sapien
aacttgtgtatttttatgctaaatttgatgaag

SEQ ID NO: 99271 - DNA, 33 bp, Homo sapien
ggttaacatctgattccaggattgtcccagaga

SEQ ID NO: 99272 - DNA, 33 bp, Homo sapien
ggttaacatctgattctaggattgtcccagaga

SEQ ID NO: 99273 - DNA, 33 bp, Homo sapien
tcactgtcattcagaacttccaacaaattatct

SEQ ID NO: 99274 - DNA, 33 bp, Homo sapien
tcactgtcattcagaatttccaacaaattatct

SEQ ID NO: 99275 - DNA, 33 bp, Homo sapien
cctcccataaacctaaactcttatcttctcagg

SEQ ID NO: 99276 - DNA, 33 bp, Homo sapien
cctcccataaacctaagctcttatcttctcagg

SEQ ID NO: 99277 - DNA, 33 bp, Homo sapien
atggtgttacagagtcagaaaagtaattttacc

SEQ ID NO: 99278 - DNA, 33 bp, Homo sapien
atggtgttacagagtcggaaaagtaattttacc

SEQ ID NO: 99279 - DNA, 33 bp, Homo sapien
ggtcaggaacacagcacagtcatgaccaggtta

SEQ ID NO: 99280 - DNA, 33 bp, Homo sapien
ggtcaggaacacagcatagtcatgaccaggtta

SEQ ID NO: 99281 - DNA, 33 bp, Homo sapien
acccaagtgtaatatgccaactaaaagaccatt

SEQ ID NO: 99282 - DNA, 33 bp, Homo sapien
acccaagtgtaatatgtcaactaaaagaccatt

SEQ ID NO: 99283 - DNA, 33 bp, Homo sapien
atttcagatcttgaaaccagtgaaaaacagcca

SEQ ID NO: 99284 - DNA, 33 bp, Homo sapien
atttcagatcttgaaagcagtgaaaaacagcca

SEQ ID NO: 99285 - DNA, 33 bp, Homo sapien
aatgtaagatacccggaaatagatacaggttga

SEQ ID NO: 99286 - DNA, 33 bp, Homo sapien
aatgtaagatacccgggaatagatacaggttga

SEQ ID NO: 99287 - DNA, 33 bp, Homo sapien
ttcccgtgggttgacaatcagcatgtttttatt

SEQ ID NO: 99288 - DNA, 33 bp, Homo sapien
ttcccgtgggttgacagtcagcatgtttttatt

SEQ ID NO: 99289 - DNA, 33 bp, Homo sapien
ttcatgtgtgaagatacaacttggccatatttc

SEQ ID NO: 99290 - DNA, 33 bp, Homo sapien
ttcatgtgtgaagatataacttggccatatttc

SEQ ID NO: 99291 - DNA, 33 bp, Homo sapien
aaaaaaattataaggaatatgtgctcccaaaca

SEQ ID NO: 99292 - DNA, 33 bp, Homo sapien
aaaaaaattataaggagtatgtgctcccaaaca

SEQ ID NO: 99293 - DNA, 33 bp, Homo sapien
tcggattagacttagccgaagagaggatttgtg

SEQ ID NO: 99294 - DNA, 33 bp, Homo sapien
tcggattagacttagctgaagagaggatttgtg

SEQ ID NO: 99295 - DNA, 33 bp, Homo sapien
gaatcctgcagactcaatattgtaaacaaagaa

SEQ ID NO: 99296 - DNA, 33 bp, Homo sapien
gaatcctgcagactcactattgtaaacaaagaa

SEQ ID NO: 99297 - DNA, 33 bp, Homo sapien
atgcacatttgtaaaactatgaaagaacataaa

SEQ ID NO: 99298 - DNA, 33 bp, Homo sapien
atgcacatttgtaaaagtatgaaagaacataaa

SEQ ID NO: 99299 - DNA, 33 bp, Homo sapien
gtgtccattgtaaagaaaggtttgatgttcctc

SEQ ID NO: 99300 - DNA, 33 bp, Homo sapien
gtgtccattgtaaagacaggtttgatgttcctc

SEQ ID NO: 99301 - DNA, 33 bp, Homo sapien
ctttataggtgtgtaccattcccagagtgagac

SEQ ID NO: 99302 - DNA, 33 bp, Homo sapien
ctttataggtgtgtactattcccagagtgagac

SEQ ID NO: 99303 - DNA, 33 bp, Homo sapien
ggtaaatgaagcacacaaatatattgcttatat

SEQ ID NO: 99304 - DNA, 33 bp, Homo sapien
ggtaaatgaagcacacgaatatattgcttatat

SEQ ID NO: 99305 - DNA, 33 bp, Homo sapien
ctcatgttcacctatgaagaattttttcatgat

SEQ ID NO: 99306 - DNA, 33 bp, Homo sapien
ctcatgttcacctatggagaattttttcatgat

SEQ ID NO: 99307 - DNA, 33 bp, Homo sapien
tcaataattttattcaagatgaggatatgagcc

SEQ ID NO: 99308 - DNA, 33 bp, Homo sapien
tcaataattttattcaggatgaggatatgagcc

SEQ ID NO: 99309 - DNA, 33 bp, Homo sapien
agtgtggcttttttggcatataagcagacatct

SEQ ID NO: 99310 - DNA, 33 bp, Homo sapien
agtgtggcttttttgggatataagcagacatct

SEQ ID NO: 99311 - DNA, 33 bp, Homo sapien
gaatccttttgtgaatcaatccagtaatggagg

SEQ ID NO: 99312 - DNA, 33 bp, Homo sapien
gaatccttttgtgaatgaatccagtaatggagg

SEQ ID NO: 99313 - DNA, 33 bp, Homo sapien
tcccttttgcaaacaaaccattttctgggtaca

SEQ ID NO: 99314 - DNA, 33 bp, Homo sapien
tcccttttgcaaacaagccattttctgggtaca

SEQ ID NO: 99315 - DNA, 33 bp, Homo sapien
ttctgaaaatttagaactggatctgagaggcac

SEQ ID NO: 99316 - DNA, 33 bp, Homo sapien
ttctgaaaatttagaattggatctgagaggcac

SEQ ID NO: 99317 - DNA, 33 bp, Homo sapien
aaagaaggtcttggaaaccactcaacactggtt

SEQ ID NO: 99318 - DNA, 33 bp, Homo sapien
aaagaaggtcttggaagccactcaacactggtt

SEQ ID NO: 99319 - DNA, 33 bp, Homo sapien
ttgagtcccatcttaactggttagcagatttgt

SEQ ID NO: 99320 - DNA, 33 bp, Homo sapien
ttgagtcccatcttaattggttagcagatttgt

SEQ ID NO: 99321 - DNA, 33 bp, Homo sapien
gatgcttggctgggacaatggcacctagaaaag

SEQ ID NO: 99322 - DNA, 33 bp, Homo sapien
gatgcttggctgggacgatggcacctagaaaag

SEQ ID NO: 99323 - DNA, 33 bp, Homo sapien
tgaaaggagtgacaaacaaagtgaaattcaaat

SEQ ID NO: 99324 - DNA, 33 bp, Homo sapien
tgaaaggagtgacaaataaagtgaaattcaaat

SEQ ID NO: 99325 - DNA, 33 bp, Homo sapien
cacttgagtcagcagaaagtttaagactttgag

SEQ ID NO: 99326 - DNA, 33 bp, Homo sapien
cacttgagtcagcagagagtttaagactttgag

SEQ ID NO: 99327 - DNA, 33 bp, Homo sapien
ctgctttttggagcataacaagttccatcctat

SEQ ID NO: 99328 - DNA, 33 bp, Homo sapien
ctgctttttggagcatcacaagttccatcctat

SEQ ID NO: 99329 - DNA, 33 bp, Homo sapien
aaaaatcatctagaagcctgttctacatcaggg

SEQ ID NO: 99330 - DNA, 33 bp, Homo sapien
aaaaatcatctagaaggctgttctacatcaggg

SEQ ID NO: 99331 - DNA, 33 bp, Homo sapien
caacatccttttgctacagagttgtttttttta

SEQ ID NO: 99332 - DNA, 33 bp, Homo sapien
caacatccttttgctatagagttgtttttttta

SEQ ID NO: 99333 - DNA, 33 bp, Homo sapien
tacaggtaatcagagaggttatctagaagggcc

SEQ ID NO: 99334 - DNA, 33 bp, Homo sapien
tacaggtaatcagagatgttatctagaagggcc

SEQ ID NO: 99335 - DNA, 33 bp, Homo sapien
tgtagcaattttaggaggataattatcttggaa

SEQ ID NO: 99336 - DNA, 33 bp, Homo sapien
tgtagcaattttaggatgataattatcttggaa

SEQ ID NO: 99337 - DNA, 33 bp, Homo sapien
agacaggatcaacaaaagcagcgcaaaaatgtt

SEQ ID NO: 99338 - DNA, 33 bp, Homo sapien
agacaggatcaacaaaggcagcgcaaaaatgtt

SEQ ID NO: 99339 - DNA, 33 bp, Homo sapien
atctctcacagaaaaacctttttactcacatcc

SEQ ID NO: 99340 - DNA, 33 bp, Homo sapien
atctctcacagaaaaatctttttactcacatcc

SEQ ID NO: 99341 - DNA, 33 bp, Homo sapien
agctagaagcaaatgacgtctatttcacctccc

SEQ ID NO: 99342 - DNA, 33 bp, Homo sapien
agctagaagcaaatgatgtctatttcacctccc

SEQ ID NO: 99343 - DNA, 33 bp, Homo sapien
gggccaagaatcaaaacgtttgcccagactttg

SEQ ID NO: 99344 - DNA, 33 bp, Homo sapien
gggccaagaatcaaaatgtttgcccagactttg

SEQ ID NO: 99345 - DNA, 33 bp, Homo sapien
aaccttccaaataaaacgcagtgtctttattgt

SEQ ID NO: 99346 - DNA, 33 bp, Homo sapien
aaccttccaaataaaatgcagtgtctttattgt

SEQ ID NO: 99347 - DNA, 33 bp, Homo sapien
atacctaagcattagcacttcatactttttaga

SEQ ID NO: 99348 - DNA, 33 bp, Homo sapien
atacctaagcattagcgcttcatactttttaga

SEQ ID NO: 99349 - DNA, 33 bp, Homo sapien
atgtttgttatctgcaatattagactggactta

SEQ ID NO: 99350 - DNA, 33 bp, Homo sapien
atgtttgttatctgcagtattagactggactta

SEQ ID NO: 99351 - DNA, 33 bp, Homo sapien
aggcttgagaaaacccaaacacagtcacccaag

SEQ ID NO: 99352 - DNA, 33 bp, Homo sapien
aggcttgagaaaacccgaacacagtcacccaag

SEQ ID NO: 99353 - DNA, 33 bp, Homo sapien
agcctatttgtagctcacactttagaagatgct

SEQ ID NO: 99354 - DNA, 33 bp, Homo sapien
agcctatttgtagctcgcactttagaagatgct

SEQ ID NO: 99355 - DNA, 33 bp, Homo sapien
tgaccatcaattaagcacctctagatgtcaggt

SEQ ID NO: 99356 - DNA, 33 bp, Homo sapien
tgaccatcaattaagcgcctctagatgtcaggt

SEQ ID NO: 99357 - DNA, 33 bp, Homo sapien
actggaattgttcctcaataattctagaacttc

SEQ ID NO: 99358 - DNA, 33 bp, Homo sapien
actggaattgttcctcgataattctagaacttc

SEQ ID NO: 99359 - DNA, 33 bp, Homo sapien
gcacatggaaattgataaacttatggcaaagag

SEQ ID NO: 99360 - DNA, 33 bp, Homo sapien
gcacatggaaattgatgaacttatggcaaagag

SEQ ID NO: 99361 - DNA, 33 bp, Homo sapien
ttggagtacctacagaccattcaggtggaacat

SEQ ID NO: 99362 - DNA, 33 bp, Homo sapien
ttggagtacctacagagcattcaggtggaacat

SEQ ID NO: 99363 - DNA, 33 bp, Homo sapien
cacaggctagaggttcaaagctggatataaggg

SEQ ID NO: 99364 - DNA, 33 bp, Homo sapien
cacaggctagaggttcgaagctggatataaggg

SEQ ID NO: 99365 - DNA, 33 bp, Homo sapien
cccaacatgttcagcaacagcactgatacaaac

SEQ ID NO: 99366 - DNA, 33 bp, Homo sapien
cccaacatgttcagcagcagcactgatacaaac

SEQ ID NO: 99367 - DNA, 33 bp, Homo sapien
atgtgtagtttcacatcatatgaccacatgagg

SEQ ID NO: 99368 - DNA, 33 bp, Homo sapien
atgtgtagtttcacattatatgaccacatgagg

SEQ ID NO: 99369 - DNA, 33 bp, Homo sapien
actaacaaacaatttcacagattccatagtata

SEQ ID NO: 99370 - DNA, 33 bp, Homo sapien
actaacaaacaatttcgcagattccatagtata

SEQ ID NO: 99371 - DNA, 33 bp, Homo sapien
aggagaggtaacagcaaggatgtaatgttttca

SEQ ID NO: 99372 - DNA, 33 bp, Homo sapien
aggagaggtaacagcagggatgtaatgttttca

SEQ ID NO: 99373 - DNA, 33 bp, Homo sapien
gaggaaaagagattgagaggtaatcccaggcca

SEQ ID NO: 99374 - DNA, 33 bp, Homo sapien
gaggaaaagagattgataggtaatcccaggcca

SEQ ID NO: 99375 - DNA, 33 bp, Homo sapien
ggatctcatttggacaataagttacatgatcac

SEQ ID NO: 99376 - DNA, 33 bp, Homo sapien
ggatctcatttggacagtaagttacatgatcac

SEQ ID NO: 99377 - DNA, 33 bp, Homo sapien
tagctatcaccctgtacgtaagtaatcattgac

SEQ ID NO: 99378 - DNA, 33 bp, Homo sapien
tagctatcaccctgtatgtaagtaatcattgac

SEQ ID NO: 99379 - DNA, 33 bp, Homo sapien
tcgcatttaaatagcaggagccacatttaagag

SEQ ID NO: 99380 - DNA, 33 bp, Homo sapien
tcgcatttaaatagcatgagccacatttaagag

SEQ ID NO: 99381 - DNA, 33 bp, Homo sapien
tagcagaggtagaaaacgggccaggagcagtgg

SEQ ID NO: 99382 - DNA, 33 bp, Homo sapien
tagcagaggtagaaaatgggccaggagcagtgg

SEQ ID NO: 99383 - DNA, 33 bp, Homo sapien
tgctcatgattaagcaacaaacgtggtaatggt

SEQ ID NO: 99384 - DNA, 33 bp, Homo sapien
tgctcatgattaagcagcaaacgtggtaatggt

SEQ ID NO: 99385 - DNA, 33 bp, Homo sapien
ttagttctcttattcactccaaaaacgtatgag

SEQ ID NO: 99386 - DNA, 33 bp, Homo sapien
ttagttctcttattcattccaaaaacgtatgag

SEQ ID NO: 99387 - DNA, 33 bp, Homo sapien
catctcacacacctacacaggagtgcatttgtg

SEQ ID NO: 99388 - DNA, 33 bp, Homo sapien
catctcacacacctacgcaggagtgcatttgtg

SEQ ID NO: 99389 - DNA, 33 bp, Homo sapien
tgtctgaaacaggatacgtgtgtcatgcatccc

SEQ ID NO: 99390 - DNA, 33 bp, Homo sapien
tgtctgaaacaggatatgtgtgtcatgcatccc

SEQ ID NO: 99391 - DNA, 33 bp, Homo sapien
tgtgcttcatttgtggccatatctgccttaaaa

SEQ ID NO: 99392 - DNA, 33 bp, Homo sapien
tgtgcttcatttgtggtcatatctgccttaaaa

SEQ ID NO: 99393 - DNA, 33 bp, Homo sapien
ttgcttaggagtttctaaaagcaggcacagttg

SEQ ID NO: 99394 - DNA, 33 bp, Homo sapien
ttgcttaggagtttcttaaagcaggcacagttg

SEQ ID NO: 99395 - DNA, 33 bp, Homo sapien
catgtctctggcttcccattgcctaaattaaga

SEQ ID NO: 99396 - DNA, 33 bp, Homo sapien
catgtctctggcttcctattgcctaaattaaga

SEQ ID NO: 99397 - DNA, 33 bp, Homo sapien
ggtagagaaggactgaaaggagtgatcccacag

SEQ ID NO: 99398 - DNA, 33 bp, Homo sapien
ggtagagaaggactgagaggagtgatcccacag

SEQ ID NO: 99399 - DNA, 33 bp, Homo sapien
aaaagatgcatttaaaaaagagctgccagggaa

SEQ ID NO: 99400 - DNA, 33 bp, Homo sapien
aaaagatgcatttaaagaagagctgccagggaa

SEQ ID NO: 99401 - DNA, 33 bp, Homo sapien
tgttggtggtaacaaacggcctgtcagatcatt

SEQ ID NO: 99402 - DNA, 33 bp, Homo sapien
tgttggtggtaacaaatggcctgtcagatcatt

SEQ ID NO: 99403 - DNA, 33 bp, Homo sapien
ccacaaacacctgccaagatagtattgtgatca

SEQ ID NO: 99404 - DNA, 33 bp, Homo sapien
ccacaaacacctgccaggatagtattgtgatca

SEQ ID NO: 99405 - DNA, 33 bp, Homo sapien
ttgtgaggttttttcaatatatatgaccatgaa

SEQ ID NO: 99406 - DNA, 33 bp, Homo sapien
ttgtgaggttttttcagtatatatgaccatgaa

SEQ ID NO: 99407 - DNA, 33 bp, Homo sapien
aaaaggcctgcgtgtgcacagtttcattattct

SEQ ID NO: 99408 - DNA, 33 bp, Homo sapien
aaaaggcctgcgtgtgtacagtttcattattct

SEQ ID NO: 99409 - DNA, 33 bp, Homo sapien
tcctgtaacagatagcaatgtgtttatgcagta

SEQ ID NO: 99410 - DNA, 33 bp, Homo sapien
tcctgtaacagatagcgatgtgtttatgcagta

SEQ ID NO: 99411 - DNA, 33 bp, Homo sapien
tcaggccagagttaaacagcaatttgaaaagag

SEQ ID NO: 99412 - DNA, 33 bp, Homo sapien
tcaggccagagttaaagagcaatttgaaaagag

SEQ ID NO: 99413 - DNA, 33 bp, Homo sapien
agtagaagtggcttaaagtttataaagaatatt

SEQ ID NO: 99414 - DNA, 33 bp, Homo sapien
agtagaagtggcttaacgtttataaagaatatt

SEQ ID NO: 99415 - DNA, 33 bp, Homo sapien
ccactaaggcttgaggacaggttaatggaactg

SEQ ID NO: 99416 - DNA, 33 bp, Homo sapien
ccactaaggcttgagggcaggttaatggaactg

SEQ ID NO: 99417 - DNA, 33 bp, Homo sapien
ggctaaatacagattacgtgcaaaaaaagaaat

SEQ ID NO: 99418 - DNA, 33 bp, Homo sapien
ggctaaatacagattatgtgcaaaaaaagaaat

SEQ ID NO: 99419 - DNA, 33 bp, Homo sapien
accaaaatgtcaggccagatgttctaaagtcac

SEQ ID NO: 99420 - DNA, 33 bp, Homo sapien
accaaaatgtcaggccggatgttctaaagtcac

SEQ ID NO: 99421 - DNA, 33 bp, Homo sapien
ttattgcactcaattaacttaggctatattttt

SEQ ID NO: 99422 - DNA, 33 bp, Homo sapien
ttattgcactcaattatcttaggctatattttt

SEQ ID NO: 99423 - DNA, 33 bp, Homo sapien
cccactctattgctaagctgtggaaggagcctt

SEQ ID NO: 99424 - DNA, 33 bp, Homo sapien
cccactctattgctaatctgtggaaggagcctt

SEQ ID NO: 99425 - DNA, 33 bp, Homo sapien
ttgacttcaaggagaaccctgatggacatttaa

SEQ ID NO: 99426 - DNA, 33 bp, Homo sapien
ttgacttcaaggagaatcctgatggacatttaa

SEQ ID NO: 99427 - DNA, 33 bp, Homo sapien
tttctacttattgctggaggtaatcacattcca

SEQ ID NO: 99428 - DNA, 33 bp, Homo sapien
tttctacttattgctgtaggtaatcacattcca

SEQ ID NO: 99429 - DNA, 33 bp, Homo sapien
ctttaactaatttccacggttgttgatggaggt

SEQ ID NO: 99430 - DNA, 33 bp, Homo sapien
ctttaactaatttccatggttgttgatggaggt

SEQ ID NO: 99431 - DNA, 33 bp, Homo sapien
tatgtattactgcacaccttttccatgcctcct

SEQ ID NO: 99432 - DNA, 33 bp, Homo sapien
tatgtattactgcacatcttttccatgcctcct

SEQ ID NO: 99433 - DNA, 33 bp, Homo sapien
aggaagcttccaaagacaagtgggtgcaagaca

SEQ ID NO: 99434 - DNA, 33 bp, Homo sapien
aggaagcttccaaagagaagtgggtgcaagaca

SEQ ID NO: 99435 - DNA, 33 bp, Homo sapien
cacagaatgatctcccacttcagaaagggaaac

SEQ ID NO: 99436 - DNA, 33 bp, Homo sapien
cacagaatgatctcccgcttcagaaagggaaac

SEQ ID NO: 99437 - DNA, 33 bp, Homo sapien
gagctttttaaagacaaccagtataattgatta

SEQ ID NO: 99438 - DNA, 33 bp, Homo sapien
gagctttttaaagacagccagtataattgatta

SEQ ID NO: 99439 - DNA, 33 bp, Homo sapien
gggaattatggaagcaagatgaaatgagaaaga

SEQ ID NO: 99440 - DNA, 33 bp, Homo sapien
gggaattatggaagcaggatgaaatgagaaaga

SEQ ID NO: 99441 - DNA, 33 bp, Homo sapien
tattataggatcaaccagccacttgtaattagt

SEQ ID NO: 99442 - DNA, 33 bp, Homo sapien
tattataggatcaaccggccacttgtaattagt

SEQ ID NO: 99443 - DNA, 33 bp, Homo sapien
atctttcatgaccaaacgcttatccaactcctg

SEQ ID NO: 99444 - DNA, 33 bp, Homo sapien
atctttcatgaccaaatgcttatccaactcctg

SEQ ID NO: 99445 - DNA, 33 bp, Homo sapien
atgattatttagaggcacagtcagaaataatgt

SEQ ID NO: 99446 - DNA, 33 bp, Homo sapien
atgattatttagaggctcagtcagaaataatgt

SEQ ID NO: 99447 - DNA, 33 bp, Homo sapien
ctttgaggaataaatgccactcccagataaact

SEQ ID NO: 99448 - DNA, 33 bp, Homo sapien
ctttgaggaataaatgtcactcccagataaact

SEQ ID NO: 99449 - DNA, 33 bp, Homo sapien
ctacatcaacttggaacagatttaaaagaagag

SEQ ID NO: 99450 - DNA, 33 bp, Homo sapien
ctacatcaacttggaatagatttaaaagaagag

SEQ ID NO: 99451 - DNA, 33 bp, Homo sapien
ttggaagtagagttacaatggtgagtgagcagg

SEQ ID NO: 99452 - DNA, 33 bp, Homo sapien
ttggaagtagagttacgatggtgagtgagcagg

SEQ ID NO: 99453 - DNA, 33 bp, Homo sapien
ccttagaatgtgtgcaaactcctcatcttgcac

SEQ ID NO: 99454 - DNA, 33 bp, Homo sapien
ccttagaatgtgtgcagactcctcatcttgcac

SEQ ID NO: 99455 - DNA, 33 bp, Homo sapien
gttcaaaatgtttacaaatcttaccagaaatgt

SEQ ID NO: 99456 - DNA, 33 bp, Homo sapien
gttcaaaatgtttacacatcttaccagaaatgt

SEQ ID NO: 99457 - DNA, 33 bp, Homo sapien
atataccttaacactcactaagccaacactcgg

SEQ ID NO: 99458 - DNA, 33 bp, Homo sapien
atataccttaacactcgctaagccaacactcgg

SEQ ID NO: 99459 - DNA, 33 bp, Homo sapien
tatgcgtcttgtaaacaaatttttggggtctaa

SEQ ID NO: 99460 - DNA, 33 bp, Homo sapien
tatgcgtcttgtaaacgaatttttggggtctaa

SEQ ID NO: 99461 - DNA, 33 bp, Homo sapien
ctgctgtgggtctaaaactgatgtagagggatg

SEQ ID NO: 99462 - DNA, 33 bp, Homo sapien
ctgctgtgggtctaaagctgatgtagagggatg

SEQ ID NO: 99463 - DNA, 33 bp, Homo sapien
catgcctttgtgatcactacatttcagtgtgtg

SEQ ID NO: 99464 - DNA, 33 bp, Homo sapien
catgcctttgtgatcattacatttcagtgtgtg

SEQ ID NO: 99465 - DNA, 33 bp, Homo sapien
gggccatctctaatgacaagttcttaaacctag

SEQ ID NO: 99466 - DNA, 33 bp, Homo sapien
gggccatctctaatgataagttcttaaacctag

SEQ ID NO: 99467 - DNA, 33 bp, Homo sapien
ttaaacctagaatccaatcatacagaatacaca

SEQ ID NO: 99468 - DNA, 33 bp, Homo sapien
ttaaacctagaatccagtcatacagaatacaca

SEQ ID NO: 99469 - DNA, 33 bp, Homo sapien
gtgccattcttgcaaccatgatcactctgggta

SEQ ID NO: 99470 - DNA, 33 bp, Homo sapien
gtgccattcttgcaactatgatcactctgggta

SEQ ID NO: 99471 - DNA, 33 bp, Homo sapien
cactggggagatatcactcagattttgcttttc

SEQ ID NO: 99472 - DNA, 33 bp, Homo sapien
cactggggagatatcattcagattttgcttttc

SEQ ID NO: 99473 - DNA, 33 bp, Homo sapien
cctggcttctatcttacctcccatccttacata

SEQ ID NO: 99474 - DNA, 33 bp, Homo sapien
cctggcttctatcttatctcccatccttacata

SEQ ID NO: 99475 - DNA, 33 bp, Homo sapien
aggtgtgcccgatggagctccctgtcttccttc

SEQ ID NO: 99476 - DNA, 33 bp, Homo sapien
aggtgtgcccgatggatctccctgtcttccttc

SEQ ID NO: 99477 - DNA, 33 bp, Homo sapien
attagtcaatgtctacagagaacttgaaacaac

SEQ ID NO: 99478 - DNA, 33 bp, Homo sapien
attagtcaatgtctacggagaacttgaaacaac

SEQ ID NO: 99479 - DNA, 33 bp, Homo sapien
tcccctcacttcctaaacatagctatttagctc

SEQ ID NO: 99480 - DNA, 33 bp, Homo sapien
tcccctcacttcctaatcatagctatttagctc

SEQ ID NO: 99481 - DNA, 33 bp, Homo sapien
ggcttccaaagaatcaccggacgtctctgataa

SEQ ID NO: 99482 - DNA, 33 bp, Homo sapien
ggcttccaaagaatcagcggacgtctctgataa

SEQ ID NO: 99483 - DNA, 33 bp, Homo sapien
ggctgttcccactaccacgtgaaaggatagagg

SEQ ID NO: 99484 - DNA, 33 bp, Homo sapien
ggctgttcccactaccgcgtgaaaggatagagg

SEQ ID NO: 99485 - DNA, 33 bp, Homo sapien
atttcttgaatccacaaagaaagccccagcctg

SEQ ID NO: 99486 - DNA, 33 bp, Homo sapien
atttcttgaatccacacagaaagccccagcctg

SEQ ID NO: 99487 - DNA, 33 bp, Homo sapien
atgtgactcacagcaaatgcaaatgcagtctcc

SEQ ID NO: 99488 - DNA, 33 bp, Homo sapien
atgtgactcacagcaagtgcaaatgcagtctcc

SEQ ID NO: 99489 - DNA, 33 bp, Homo sapien
attgcattgtttaagacgaggtttataccagct

SEQ ID NO: 99490 - DNA, 33 bp, Homo sapien
attgcattgtttaagatgaggtttataccagct

SEQ ID NO: 99491 - DNA, 33 bp, Homo sapien
ccctttgccatgaaaactctatctaaaatctgt

SEQ ID NO: 99492 - DNA, 33 bp, Homo sapien
ccctttgccatgaaaagtctatctaaaatctgt

SEQ ID NO: 99493 - DNA, 33 bp, Homo sapien
gaatatttgtgaacaacactagagacaatcaca

SEQ ID NO: 99494 - DNA, 33 bp, Homo sapien
gaatatttgtgaacaatactagagacaatcaca

SEQ ID NO: 99495 - DNA, 33 bp, Homo sapien
tatagagatgcagaacagattagtagatgccag

SEQ ID NO: 99496 - DNA, 33 bp, Homo sapien
tatagagatgcagaacggattagtagatgccag

SEQ ID NO: 99497 - DNA, 33 bp, Homo sapien
tgactttaccacttaccgctctaacttgtactt

SEQ ID NO: 99498 - DNA, 33 bp, Homo sapien
tgactttaccacttactgctctaacttgtactt

SEQ ID NO: 99499 - DNA, 33 bp, Homo sapien
attaactacaagggacaaggactaaactcaaga

SEQ ID NO: 99500 - DNA, 33 bp, Homo sapien
attaactacaagggacgaggactaaactcaaga

SEQ ID NO: 99501 - DNA, 33 bp, Homo sapien
cacttgctcttggggaaaaaaaaaagcatataa

SEQ ID NO: 99502 - DNA, 33 bp, Homo sapien
cacttgctcttggggataaaaaaaagcatataa

SEQ ID NO: 99503 - DNA, 33 bp, Homo sapien
aaatgagcttgaaaaagtagggtgtccgtcctg

SEQ ID NO: 99504 - DNA, 33 bp, Homo sapien
aaatgagcttgaaaaattagggtgtccgtcctg

SEQ ID NO: 99505 - DNA, 33 bp, Homo sapien
ggtttcctcacacttacgagtctttaaagcact

SEQ ID NO: 99506 - DNA, 33 bp, Homo sapien
ggtttcctcacacttatgagtctttaaagcact

SEQ ID NO: 99507 - DNA, 33 bp, Homo sapien
cgtctttacctcaaccaaagggaatgccatcac

SEQ ID NO: 99508 - DNA, 33 bp, Homo sapien
cgtctttacctcaaccgaagggaatgccatcac

SEQ ID NO: 99509 - DNA, 33 bp, Homo sapien
tatctgagctataagaacttttgctagatgatg

SEQ ID NO: 99510 - DNA, 33 bp, Homo sapien
tatctgagctataagagcttttgctagatgatg

SEQ ID NO: 99511 - DNA, 33 bp, Homo sapien
gaaacattgaggtgccagattctagcacgatat

SEQ ID NO: 99512 - DNA, 33 bp, Homo sapien
gaaacattgaggtgccggattctagcacgatat

SEQ ID NO: 99513 - DNA, 33 bp, Homo sapien
tggaaaacaggacttagatcaacacaagcaatc

SEQ ID NO: 99514 - DNA, 33 bp, Homo sapien
tggaaaacaggacttatatcaacacaagcaatc

SEQ ID NO: 99515 - DNA, 33 bp, Homo sapien
gaaatctagttgataaaataaatgaaaccatca

SEQ ID NO: 99516 - DNA, 33 bp, Homo sapien
gaaatctagttgataacataaatgaaaccatca

SEQ ID NO: 99517 - DNA, 33 bp, Homo sapien
atggactaaatattacagcaccatttgcctttt

SEQ ID NO: 99518 - DNA, 33 bp, Homo sapien
atggactaaatattacggcaccatttgcctttt

SEQ ID NO: 99519 - DNA, 33 bp, Homo sapien
catcaccctgctgtgccgactgcggagaaacat

SEQ ID NO: 99520 - DNA, 33 bp, Homo sapien
catcaccctgctgtgctgactgcggagaaacat

SEQ ID NO: 99521 - DNA, 33 bp, Homo sapien
cttctcgcattgaaccaaccgactctcattgta

SEQ ID NO: 99522 - DNA, 33 bp, Homo sapien
cttctcgcattgaaccgaccgactctcattgta

SEQ ID NO: 99523 - DNA, 33 bp, Homo sapien
agcacagggcttcacaagtcataaaatacagga

SEQ ID NO: 99524 - DNA, 33 bp, Homo sapien
agcacagggcttcacaggtcataaaatacagga

SEQ ID NO: 99525 - DNA, 33 bp, Homo sapien
atgacctgggcaccacagaattggcctcttggc

SEQ ID NO: 99526 - DNA, 33 bp, Homo sapien
atgacctgggcaccacggaattggcctcttggc

SEQ ID NO: 99527 - DNA, 33 bp, Homo sapien
tttttgcctacagcacagcgacaatacccaaag

SEQ ID NO: 99528 - DNA, 33 bp, Homo sapien
tttttgcctacagcacggcgacaatacccaaag

SEQ ID NO: 99529 - DNA, 33 bp, Homo sapien
caaaagttccagactcaagttcttttgaccaga

SEQ ID NO: 99530 - DNA, 33 bp, Homo sapien
caaaagttccagactccagttcttttgaccaga

SEQ ID NO: 99531 - DNA, 33 bp, Homo sapien
tcctggacaaggtcaaatacaggaagtgaggga

SEQ ID NO: 99532 - DNA, 33 bp, Homo sapien
tcctggacaaggtcaattacaggaagtgaggga

SEQ ID NO: 99533 - DNA, 33 bp, Homo sapien
ggtttaagtaaattacagcaactggaaacttat

SEQ ID NO: 99534 - DNA, 33 bp, Homo sapien
ggtttaagtaaattacggcaactggaaacttat

SEQ ID NO: 99535 - DNA, 33 bp, Homo sapien
ctaccttgagatgtaccactttactgcttttct

SEQ ID NO: 99536 - DNA, 33 bp, Homo sapien
ctaccttgagatgtacgactttactgcttttct

SEQ ID NO: 99537 - DNA, 33 bp, Homo sapien
gttataaaaggtaccacctagaaggccgtggaa

SEQ ID NO: 99538 - DNA, 33 bp, Homo sapien
gttataaaaggtaccatctagaaggccgtggaa

SEQ ID NO: 99539 - DNA, 33 bp, Homo sapien
aggagttgtgtgcagacgccctctttcttttca

SEQ ID NO: 99540 - DNA, 33 bp, Homo sapien
aggagttgtgtgcagatgccctctttcttttca

SEQ ID NO: 99541 - DNA, 33 bp, Homo sapien
ccagcatggatcatgacggttgctagaagagtg

SEQ ID NO: 99542 - DNA, 33 bp, Homo sapien
ccagcatggatcatgagggttgctagaagagtg

SEQ ID NO: 99543 - DNA, 33 bp, Homo sapien
tctgccagagaaagtccaaaatctgtaaaggaa

SEQ ID NO: 99544 - DNA, 33 bp, Homo sapien
tctgccagagaaagtcgaaaatctgtaaaggaa

SEQ ID NO: 99545 - DNA, 33 bp, Homo sapien
gctctatgaatgaatcacaatataacgtttctg

SEQ ID NO: 99546 - DNA, 33 bp, Homo sapien
gctctatgaatgaatcgcaatataacgtttctg

SEQ ID NO: 99547 - DNA, 33 bp, Homo sapien
ttgctcaacttcagtccctgtgtccaatcccac

SEQ ID NO: 99548 - DNA, 33 bp, Homo sapien
ttgctcaacttcagtctctgtgtccaatcccac

SEQ ID NO: 99549 - DNA, 33 bp, Homo sapien
ctgaataaagataaaacatttcaacacaggcca

SEQ ID NO: 99550 - DNA, 33 bp, Homo sapien
ctgaataaagataaaatatttcaacacaggcca

SEQ ID NO: 99551 - DNA, 33 bp, Homo sapien
ccagcccatctcttcacagttttaggcccaagt

SEQ ID NO: 99552 - DNA, 33 bp, Homo sapien
ccagcccatctcttcatagttttaggcccaagt

SEQ ID NO: 99553 - DNA, 33 bp, Homo sapien
atgctgtaaactgtgacgtctatgaatatctga

SEQ ID NO: 99554 - DNA, 33 bp, Homo sapien
atgctgtaaactgtgatgtctatgaatatctga

SEQ ID NO: 99555 - DNA, 33 bp, Homo sapien
tcagatgaaatgatgccacttcaggaccagagg

SEQ ID NO: 99556 - DNA, 33 bp, Homo sapien
tcagatgaaatgatgctacttcaggaccagagg

SEQ ID NO: 99557 - DNA, 33 bp, Homo sapien
gagaaaaagccagaacgacaaccctcatcccgc

SEQ ID NO: 99558 - DNA, 33 bp, Homo sapien
gagaaaaagccagaactacaaccctcatcccgc

SEQ ID NO: 99559 - DNA, 33 bp, Homo sapien
ttggattggtgtgtaacaaatatgcgtggcccg

SEQ ID NO: 99560 - DNA, 33 bp, Homo sapien
ttggattggtgtgtaagaaatatgcgtggcccg

SEQ ID NO: 99561 - DNA, 33 bp, Homo sapien
gcatgctaacgtgaaccctaatgaggatggaga

SEQ ID NO: 99562 - DNA, 33 bp, Homo sapien
gcatgctaacgtgaacgctaatgaggatggaga

SEQ ID NO: 99563 - DNA, 33 bp, Homo sapien
ctatggcctcattaaaacttcgcctcccagtgt

SEQ ID NO: 99564 - DNA, 33 bp, Homo sapien
ctatggcctcattaaagcttcgcctcccagtgt

SEQ ID NO: 99565 - DNA, 33 bp, Homo sapien
gctgtatttttcaaacaaccacactgggaggcg

SEQ ID NO: 99566 - DNA, 33 bp, Homo sapien
gctgtatttttcaaaccaccacactgggaggcg

SEQ ID NO: 99567 - DNA, 33 bp, Homo sapien
gttagaaactgtaacaataaaaactcacgatag

SEQ ID NO: 99568 - DNA, 33 bp, Homo sapien
gttagaaactgtaacagtaaaaactcacgatag

SEQ ID NO: 99569 - DNA, 33 bp, Homo sapien
cttcccctaagccccaagtggtcaactacaact

SEQ ID NO: 99570 - DNA, 33 bp, Homo sapien
cttcccctaagccccaggtggtcaactacaact

SEQ ID NO: 99571 - DNA, 33 bp, Homo sapien
tgccctgttacaagcaaagtcagaatttcagcc

SEQ ID NO: 99572 - DNA, 33 bp, Homo sapien
tgccctgttacaagcagagtcagaatttcagcc

SEQ ID NO: 99573 - DNA, 33 bp, Homo sapien
ctggctttgatgatgccaattgctatattgggg

SEQ ID NO: 99574 - DNA, 33 bp, Homo sapien
ctggctttgatgatgctaattgctatattgggg

SEQ ID NO: 99575 - DNA, 33 bp, Homo sapien
ttatttaaaattctggaacactcaaactggcgc

SEQ ID NO: 99576 - DNA, 33 bp, Homo sapien
ttatttaaaattctggtacactcaaactggcgc

SEQ ID NO: 99577 - DNA, 33 bp, Homo sapien
gcaaagactactccacaaatgttcatagtactt

SEQ ID NO: 99578 - DNA, 33 bp, Homo sapien
gcaaagactactccacgaatgttcatagtactt

SEQ ID NO: 99579 - DNA, 33 bp, Homo sapien
aaacagagttcccttacgatccaggcatgtcat

SEQ ID NO: 99580 - DNA, 33 bp, Homo sapien
aaacagagttcccttatgatccaggcatgtcat

SEQ ID NO: 99581 - DNA, 33 bp, Homo sapien
tattttgaggagctaccggattactttccaaag

SEQ ID NO: 99582 - DNA, 33 bp, Homo sapien
tattttgaggagctactggattactttccaaag

SEQ ID NO: 99583 - DNA, 33 bp, Homo sapien
tggcaaggctcaggacaatggtacaactggatg

SEQ ID NO: 99584 - DNA, 33 bp, Homo sapien
tggcaaggctcaggacgatggtacaactggatg

SEQ ID NO: 99585 - DNA, 33 bp, Homo sapien
ccttaacagtcatcaaatccagagattgtcaac

SEQ ID NO: 99586 - DNA, 33 bp, Homo sapien
ccttaacagtcatcaattccagagattgtcaac

SEQ ID NO: 99587 - DNA, 33 bp, Homo sapien
ctctttggctcctacaatatgaatttctggcaa

SEQ ID NO: 99588 - DNA, 33 bp, Homo sapien
ctctttggctcctacagtatgaatttctggcaa

SEQ ID NO: 99589 - DNA, 33 bp, Homo sapien
atagtcaatatttggcgaaatctttgtgacagg

SEQ ID NO: 99590 - DNA, 33 bp, Homo sapien
atagtcaatatttggctaaatctttgtgacagg

SEQ ID NO: 99591 - DNA, 33 bp, Homo sapien
ctttaggaagtggcaaatcagttttaaattttt

SEQ ID NO: 99592 - DNA, 33 bp, Homo sapien
ctttaggaagtggcaattcagttttaaattttt

SEQ ID NO: 99593 - DNA, 33 bp, Homo sapien
tgtctctcatttccccccagcttcttccatctc

SEQ ID NO: 99594 - DNA, 33 bp, Homo sapien
tgtctctcatttccccgcagcttcttccatctc

SEQ ID NO: 99595 - DNA, 33 bp, Homo sapien
acagatgtgtccttgcacaggagtttatctaaa

SEQ ID NO: 99596 - DNA, 33 bp, Homo sapien
acagatgtgtccttgcgcaggagtttatctaaa

SEQ ID NO: 99597 - DNA, 33 bp, Homo sapien
cttctttctctgaccagctcttagagtcctgtc

SEQ ID NO: 99598 - DNA, 33 bp, Homo sapien
cttctttctctgaccatctcttagagtcctgtc

SEQ ID NO: 99599 - DNA, 33 bp, Homo sapien
ttccacccatgaataacagccagaaaagctaga

SEQ ID NO: 99600 - DNA, 33 bp, Homo sapien
ttccacccatgaataatagccagaaaagctaga

SEQ ID NO: 99601 - DNA, 33 bp, Homo sapien
gcagttcctcaaaatacgaaacataggattacc

SEQ ID NO: 99602 - DNA, 33 bp, Homo sapien
gcagttcctcaaaatatgaaacataggattacc

SEQ ID NO: 99603 - DNA, 33 bp, Homo sapien
gcaataactttcttcacaatcgctgcaccatta

SEQ ID NO: 99604 - DNA, 33 bp, Homo sapien
gcaataactttcttcagaatcgctgcaccatta

SEQ ID NO: 99605 - DNA, 33 bp, Homo sapien
cagtttgtggctataacaaagttgctatgcaca

SEQ ID NO: 99606 - DNA, 33 bp, Homo sapien
cagtttgtggctataataaagttgctatgcaca

SEQ ID NO: 99607 - DNA, 33 bp, Homo sapien
aaaagttggcaaaaaacagatagactcaaaata

SEQ ID NO: 99608 - DNA, 33 bp, Homo sapien
aaaagttggcaaaaaagagatagactcaaaata

SEQ ID NO: 99609 - DNA, 33 bp, Homo sapien
tcctatgtaatctttacgcaatttccttcaaca

SEQ ID NO: 99610 - DNA, 33 bp, Homo sapien
tcctatgtaatctttatgcaatttccttcaaca

SEQ ID NO: 99611 - DNA, 33 bp, Homo sapien
tctggacatcatgtgtaaagggttcacttattt

SEQ ID NO: 99612 - DNA, 33 bp, Homo sapien
tctggacatcatgtgtgaagggttcacttattt

SEQ ID NO: 99613 - DNA, 33 bp, Homo sapien
aaattttttcctgaacaattcatggattttcca

SEQ ID NO: 99614 - DNA, 33 bp, Homo sapien
aaattttttcctgaacgattcatggattttcca

SEQ ID NO: 99615 - DNA, 33 bp, Homo sapien
tatacctagaattactcaatctcagagatgggg

SEQ ID NO: 99616 - DNA, 33 bp, Homo sapien
tatacctagaattactgaatctcagagatgggg

SEQ ID NO: 99617 - DNA, 33 bp, Homo sapien
aaatatacgaaaagccaacttgaccactacact

SEQ ID NO: 99618 - DNA, 33 bp, Homo sapien
aaatatacgaaaagccgacttgaccactacact

SEQ ID NO: 99619 - DNA, 33 bp, Homo sapien
gaagaaaggacctgacaggagttcaatctagga

SEQ ID NO: 99620 - DNA, 33 bp, Homo sapien
gaagaaaggacctgacgggagttcaatctagga

SEQ ID NO: 99621 - DNA, 33 bp, Homo sapien
tggctctggataaaaccaacaatggggcaagaa

SEQ ID NO: 99622 - DNA, 33 bp, Homo sapien
tggctctggataaaacgaacaatggggcaagaa

SEQ ID NO: 99623 - DNA, 33 bp, Homo sapien
taggctatcatgaaatccaaacctcgtcaggaa

SEQ ID NO: 99624 - DNA, 33 bp, Homo sapien
taggctatcatgaaattcaaacctcgtcaggaa

SEQ ID NO: 99625 - DNA, 33 bp, Homo sapien
ctgtagcacatcatcaactgtgtaatagtttgg

SEQ ID NO: 99626 - DNA, 33 bp, Homo sapien
ctgtagcacatcatcacctgtgtaatagtttgg

SEQ ID NO: 99627 - DNA, 33 bp, Homo sapien
ttgccttaggttctgaaaatagccatattttgc

SEQ ID NO: 99628 - DNA, 33 bp, Homo sapien
ttgccttaggttctgataatagccatattttgc

SEQ ID NO: 99629 - DNA, 33 bp, Homo sapien
taaagcacgtgtgggcaatgtccctgtgaaatc

SEQ ID NO: 99630 - DNA, 33 bp, Homo sapien
taaagcacgtgtgggcgatgtccctgtgaaatc

SEQ ID NO: 99631 - DNA, 33 bp, Homo sapien
gcttatcaagtatttaccaggcatgaagagaca

SEQ ID NO: 99632 - DNA, 33 bp, Homo sapien
gcttatcaagtatttatcaggcatgaagagaca

SEQ ID NO: 99633 - DNA, 33 bp, Homo sapien
ataagagggtcagcaaataaaaggagagagaga

SEQ ID NO: 99634 - DNA, 33 bp, Homo sapien
ataagagggtcagcaagtaaaaggagagagaga

SEQ ID NO: 99635 - DNA, 33 bp, Homo sapien
ttcttttttacattacccatactcgtgtatgtc

SEQ ID NO: 99636 - DNA, 33 bp, Homo sapien
ttcttttttacattactcatactcgtgtatgtc

SEQ ID NO: 99637 - DNA, 33 bp, Homo sapien
agcattttgtgaatgacatttttctggtgcatc

SEQ ID NO: 99638 - DNA, 33 bp, Homo sapien
agcattttgtgaatgatatttttctggtgcatc

SEQ ID NO: 99639 - DNA, 33 bp, Homo sapien
gcaatatcctcttttaactctctgaggatatta

SEQ ID NO: 99640 - DNA, 33 bp, Homo sapien
gcaatatcctcttttatctctctgaggatatta

SEQ ID NO: 99641 - DNA, 33 bp, Homo sapien
gaaaaacagcctcctcaatgaacgaaccctgcc

SEQ ID NO: 99642 - DNA, 33 bp, Homo sapien
gaaaaacagcctcctctatgaacgaaccctgcc

SEQ ID NO: 99643 - DNA, 33 bp, Homo sapien
atctctgctaaaaatacaagccgggcatggtgg

SEQ ID NO: 99644 - DNA, 33 bp, Homo sapien
atctctgctaaaaatataagccgggcatggtgg

SEQ ID NO: 99645 - DNA, 33 bp, Homo sapien
aactcctgagctcaggacaatcctccttccttg

SEQ ID NO: 99646 - DNA, 33 bp, Homo sapien
aactcctgagctcagggcaatcctccttccttg

SEQ ID NO: 99647 - DNA, 33 bp, Homo sapien
aacaaagtttgtattaagtatttatgtgtggaa

SEQ ID NO: 99648 - DNA, 33 bp, Homo sapien
aacaaagtttgtattacgtatttatgtgtggaa

SEQ ID NO: 99649 - DNA, 33 bp, Homo sapien
ttcattaatcttctcaatgaaccagtttttgca

SEQ ID NO: 99650 - DNA, 33 bp, Homo sapien
ttcattaatcttctcagtgaaccagtttttgca

SEQ ID NO: 99651 - DNA, 33 bp, Homo sapien
tggacactagggtaatcatccgggaaggaacat

SEQ ID NO: 99652 - DNA, 33 bp, Homo sapien
tggacactagggtaatgatccgggaaggaacat

SEQ ID NO: 99653 - DNA, 33 bp, Homo sapien
gcttgcacaagaggtacagtcgcaattcctcta

SEQ ID NO: 99654 - DNA, 33 bp, Homo sapien
gcttgcacaagaggtagagtcgcaattcctcta

SEQ ID NO: 99655 - DNA, 33 bp, Homo sapien
gagaaattggaaaaaaatgttattcagaaaaaa

SEQ ID NO: 99656 - DNA, 33 bp, Homo sapien
gagaaattggaaaaaactgttattcagaaaaaa

SEQ ID NO: 99657 - DNA, 33 bp, Homo sapien
ccggatgatggcataacaatccctctaaacctc

SEQ ID NO: 99658 - DNA, 33 bp, Homo sapien
ccggatgatggcataagaatccctctaaacctc

SEQ ID NO: 99659 - DNA, 33 bp, Homo sapien
caaggcggggatcctacgtgtctgagtcagtcc

SEQ ID NO: 99660 - DNA, 33 bp, Homo sapien
caaggcggggatcctatgtgtctgagtcagtcc

SEQ ID NO: 99661 - DNA, 33 bp, Homo sapien
tcctcatgatctccccaaccttgatagggaaaa

SEQ ID NO: 99662 - DNA, 33 bp, Homo sapien
tcctcatgatctcccccaccttgatagggaaaa

SEQ ID NO: 99663 - DNA, 33 bp, Homo sapien
caccaggccccgcctcgagcactgagaattaca

SEQ ID NO: 99664 - DNA, 33 bp, Homo sapien
caccaggccccgcctctagcactgagaattaca

SEQ ID NO: 99665 - DNA, 33 bp, Homo sapien
aaatgaaacatcatctaaagaaagagaaacacc

SEQ ID NO: 99666 - DNA, 33 bp, Homo sapien
aaatgaaacatcatctgaagaaagagaaacacc

SEQ ID NO: 99667 - DNA, 33 bp, Homo sapien
tctgttaactttgcaccgtatatcaaacacatt

SEQ ID NO: 99668 - DNA, 33 bp, Homo sapien
tctgttaactttgcactgtatatcaaacacatt

SEQ ID NO: 99669 - DNA, 33 bp, Homo sapien
attaggcaggaatgcaaactaacacattttaga

SEQ ID NO: 99670 - DNA, 33 bp, Homo sapien
attaggcaggaatgcagactaacacattttaga

SEQ ID NO: 99671 - DNA, 33 bp, Homo sapien
gcattagtccctaaaaagagtcagtctaggggg

SEQ ID NO: 99672 - DNA, 33 bp, Homo sapien
gcattagtccctaaaaggagtcagtctaggggg

SEQ ID NO: 99673 - DNA, 33 bp, Homo sapien
ataaaatgtgtgtatccattaaagtaagatttt

SEQ ID NO: 99674 - DNA, 33 bp, Homo sapien
ataaaatgtgtgtatctattaaagtaagatttt

SEQ ID NO: 99675 - DNA, 33 bp, Homo sapien
cacatctcacatcaaccagtgattggaaaacga

SEQ ID NO: 99676 - DNA, 33 bp, Homo sapien
cacatctcacatcaacgagtgattggaaaacga

SEQ ID NO: 99677 - DNA, 33 bp, Homo sapien
gactacagtaatgttaccaggagacaagcagtt

SEQ ID NO: 99678 - DNA, 33 bp, Homo sapien
gactacagtaatgttatcaggagacaagcagtt

SEQ ID NO: 99679 - DNA, 33 bp, Homo sapien
ttccttttccctaagcaaggccgttcatgcacc

SEQ ID NO: 99680 - DNA, 33 bp, Homo sapien
ttccttttccctaagccaggccgttcatgcacc

SEQ ID NO: 99681 - DNA, 33 bp, Homo sapien
gaatgccttcacttgcaataaaataagacaaag

SEQ ID NO: 99682 - DNA, 33 bp, Homo sapien
gaatgccttcacttgcgataaaataagacaaag

SEQ ID NO: 99683 - DNA, 33 bp, Homo sapien
tactgaaatttcatgacgcccttagcacctcag

SEQ ID NO: 99684 - DNA, 33 bp, Homo sapien
tactgaaatttcatgatgcccttagcacctcag

SEQ ID NO: 99685 - DNA, 33 bp, Homo sapien
ttagtttgagttattacaaataaagttgctatg

SEQ ID NO: 99686 - DNA, 33 bp, Homo sapien
ttagtttgagttattagaaataaagttgctatg

SEQ ID NO: 99687 - DNA, 33 bp, Homo sapien
gctcaggctacagtacagtaaggattatagctc

SEQ ID NO: 99688 - DNA, 33 bp, Homo sapien
gctcaggctacagtaccgtaaggattatagctc

SEQ ID NO: 99689 - DNA, 33 bp, Homo sapien
cacagacatcagaagtcacacagtgaggtgggc

SEQ ID NO: 99690 - DNA, 33 bp, Homo sapien
cacagacatcagaagttacacagtgaggtgggc

SEQ ID NO: 99691 - DNA, 33 bp, Homo sapien
gtttggttttgccaaaggattatcaactgagct

SEQ ID NO: 99692 - DNA, 33 bp, Homo sapien
gtttggttttgccaaatgattatcaactgagct

SEQ ID NO: 99693 - DNA, 33 bp, Homo sapien
aagtaacaaagaggtaacaaccaggaatctggt

SEQ ID NO: 99694 - DNA, 33 bp, Homo sapien
aagtaacaaagaggtatcaaccaggaatctggt

SEQ ID NO: 99695 - DNA, 33 bp, Homo sapien
aacttcagagcgaatcaaagctgctggtagaag

SEQ ID NO: 99696 - DNA, 33 bp, Homo sapien
aacttcagagcgaatcgaagctgctggtagaag

SEQ ID NO: 99697 - DNA, 33 bp, Homo sapien
ctatccctgattggtcaccttacgtcaatcttt

SEQ ID NO: 99698 - DNA, 33 bp, Homo sapien
ctatccctgattggtcgccttacgtcaatcttt

SEQ ID NO: 99699 - DNA, 33 bp, Homo sapien
gcagctcagttcctaacaggccacaggctggta

SEQ ID NO: 99700 - DNA, 33 bp, Homo sapien
gcagctcagttcctaagaggccacaggctggta

SEQ ID NO: 99701 - DNA, 33 bp, Homo sapien
gcttttccatagtgccaaacaaaactctttaca

SEQ ID NO: 99702 - DNA, 33 bp, Homo sapien
gcttttccatagtgccgaacaaaactctttaca

SEQ ID NO: 99703 - DNA, 33 bp, Homo sapien
gctaattgaatactaacgaggcctttgcttaag

SEQ ID NO: 99704 - DNA, 33 bp, Homo sapien
gctaattgaatactaatgaggcctttgcttaag

SEQ ID NO: 99705 - DNA, 33 bp, Homo sapien
gctgccttgttggctaagcaagacattgaattt

SEQ ID NO: 99706 - DNA, 33 bp, Homo sapien
gctgccttgttggctaggcaagacattgaattt

SEQ ID NO: 99707 - DNA, 33 bp, Homo sapien
tagtccaaaacagcacagctcaagggtgggaat

SEQ ID NO: 99708 - DNA, 33 bp, Homo sapien
tagtccaaaacagcacggctcaagggtgggaat

SEQ ID NO: 99709 - DNA, 33 bp, Homo sapien
tcgttctaacccaccaaaatattctgagttttt

SEQ ID NO: 99710 - DNA, 33 bp, Homo sapien
tcgttctaacccaccacaatattctgagttttt

SEQ ID NO: 99711 - DNA, 33 bp, Homo sapien
atatgatcttgctaaaagtacttaggagcagtc

SEQ ID NO: 99712 - DNA, 33 bp, Homo sapien
atatgatcttgctaaaggtacttaggagcagtc

SEQ ID NO: 99713 - DNA, 33 bp, Homo sapien
actgaagttagcaacacagtaagtgaataccaa

SEQ ID NO: 99714 - DNA, 33 bp, Homo sapien
actgaagttagcaacagagtaagtgaataccaa

SEQ ID NO: 99715 - DNA, 33 bp, Homo sapien
aaaaacagcaagctggaaactttaagcagaaac

SEQ ID NO: 99716 - DNA, 33 bp, Homo sapien
aaaaacagcaagctgggaactttaagcagaaac

SEQ ID NO: 99717 - DNA, 33 bp, Homo sapien
attatcttattaatcacgagaccatatctgcca

SEQ ID NO: 99718 - DNA, 33 bp, Homo sapien
attatcttattaatcatgagaccatatctgcca

SEQ ID NO: 99719 - DNA, 33 bp, Homo sapien
tttaaatttgtaaacccatgattcaatatattt

SEQ ID NO: 99720 - DNA, 33 bp, Homo sapien
tttaaatttgtaaacctatgattcaatatattt

SEQ ID NO: 99721 - DNA, 33 bp, Homo sapien
tatcttttaaaatctcaagacactgaaaaatca

SEQ ID NO: 99722 - DNA, 33 bp, Homo sapien
tatcttttaaaatctcgagacactgaaaaatca

SEQ ID NO: 99723 - DNA, 33 bp, Homo sapien
caagaactgtagttaacgagacaacgcaaaaat

SEQ ID NO: 99724 - DNA, 33 bp, Homo sapien
caagaactgtagttaatgagacaacgcaaaaat

SEQ ID NO: 99725 - DNA, 33 bp, Homo sapien
gacgtcctaatcagccaaattttgaagttttca

SEQ ID NO: 99726 - DNA, 33 bp, Homo sapien
gacgtcctaatcagcctaattttgaagttttca

SEQ ID NO: 99727 - DNA, 33 bp, Homo sapien
ctgtcacttggctttaaattttggcttgcacgg

SEQ ID NO: 99728 - DNA, 33 bp, Homo sapien
ctgtcacttggctttagattttggcttgcacgg

SEQ ID NO: 99729 - DNA, 33 bp, Homo sapien
cttcagtgacacctcacagctttcagaaaagtg

SEQ ID NO: 99730 - DNA, 33 bp, Homo sapien
cttcagtgacacctcatagctttcagaaaagtg

SEQ ID NO: 99731 - DNA, 33 bp, Homo sapien
ttcctatataacaatgcaaaaatggtctaatac

SEQ ID NO: 99732 - DNA, 33 bp, Homo sapien
ttcctatataacaatgtaaaaatggtctaatac

SEQ ID NO: 99733 - DNA, 33 bp, Homo sapien
taatgataaatgacaacggactttctgctctat

SEQ ID NO: 99734 - DNA, 33 bp, Homo sapien
taatgataaatgacaatggactttctgctctat

SEQ ID NO: 99735 - DNA, 33 bp, Homo sapien
catcttcaagccccctcaaaatctatttgctct

SEQ ID NO: 99736 - DNA, 33 bp, Homo sapien
catcttcaagccccctgaaaatctatttgctct

SEQ ID NO: 99737 - DNA, 33 bp, Homo sapien
ttttcagaaacccagacgccaccgaatggaaaa

SEQ ID NO: 99738 - DNA, 33 bp, Homo sapien
ttttcagaaacccagatgccaccgaatggaaaa

SEQ ID NO: 99739 - DNA, 33 bp, Homo sapien
ccttaaccaatctcaaatcagaaaatcttctaa

SEQ ID NO: 99740 - DNA, 33 bp, Homo sapien
ccttaaccaatctcaactcagaaaatcttctaa

SEQ ID NO: 99741 - DNA, 33 bp, Homo sapien
cagcacaagatttaccggacttttggtcttaaa

SEQ ID NO: 99742 - DNA, 33 bp, Homo sapien
cagcacaagatttacctgacttttggtcttaaa

SEQ ID NO: 99743 - DNA, 33 bp, Homo sapien
tgtaaccaggaaactaaccatgttatctctgga

SEQ ID NO: 99744 - DNA, 33 bp, Homo sapien
tgtaaccaggaaactagccatgttatctctgga

SEQ ID NO: 99745 - DNA, 33 bp, Homo sapien
ctctaaatggcctcaaatgaagtcaagatatag

SEQ ID NO: 99746 - DNA, 33 bp, Homo sapien
ctctaaatggcctcaagtgaagtcaagatatag

SEQ ID NO: 99747 - DNA, 33 bp, Homo sapien
attctacatggtgcaaacttttagggggaaata

SEQ ID NO: 99748 - DNA, 33 bp, Homo sapien
attctacatggtgcaaccttttagggggaaata

SEQ ID NO: 99749 - DNA, 33 bp, Homo sapien
gtattttgagagaaacagtctaggtccaatatg

SEQ ID NO: 99750 - DNA, 33 bp, Homo sapien
gtattttgagagaaacggtctaggtccaatatg

SEQ ID NO: 99751 - DNA, 33 bp, Homo sapien
cttctatagttggcaccatgacctaaatatctc

SEQ ID NO: 99752 - DNA, 33 bp, Homo sapien
cttctatagttggcacgatgacctaaatatctc

SEQ ID NO: 99753 - DNA, 33 bp, Homo sapien
cacatgtagagaccaacaaacgatttagacaat

SEQ ID NO: 99754 - DNA, 33 bp, Homo sapien
cacatgtagagaccaataaacgatttagacaat

SEQ ID NO: 99755 - DNA, 33 bp, Homo sapien
aaaggaaatgtttcccactctgttgacggaact

SEQ ID NO: 99756 - DNA, 33 bp, Homo sapien
aaaggaaatgtttcccgctctgttgacggaact

SEQ ID NO: 99757 - DNA, 33 bp, Homo sapien
gaatgggatggctgtacgtgaatcctttgtctt

SEQ ID NO: 99758 - DNA, 33 bp, Homo sapien
gaatgggatggctgtatgtgaatcctttgtctt

SEQ ID NO: 99759 - DNA, 33 bp, Homo sapien
tctcaggcagtttgtaccaccggtctggtgtat

SEQ ID NO: 99760 - DNA, 33 bp, Homo sapien
tctcaggcagtttgtatcaccggtctggtgtat

SEQ ID NO: 99761 - DNA, 33 bp, Homo sapien
gaatgatttaccgaaccaagctcttgcactctt

SEQ ID NO: 99762 - DNA, 33 bp, Homo sapien
gaatgatttaccgaacgaagctcttgcactctt

SEQ ID NO: 99763 - DNA, 33 bp, Homo sapien
ttgaatgtagggataacgcagagggagtactgg

SEQ ID NO: 99764 - DNA, 33 bp, Homo sapien
ttgaatgtagggataaggcagagggagtactgg

SEQ ID NO: 99765 - DNA, 33 bp, Homo sapien
aatggctaaactctcaagataaactattatgaa

SEQ ID NO: 99766 - DNA, 33 bp, Homo sapien
aatggctaaactctcaggataaactattatgaa

SEQ ID NO: 99767 - DNA, 33 bp, Homo sapien
ggtaattaacaaacaccgatcatttgaaggagt

SEQ ID NO: 99768 - DNA, 33 bp, Homo sapien
ggtaattaacaaacactgatcatttgaaggagt

SEQ ID NO: 99769 - DNA, 33 bp, Homo sapien
tcaagcaacgtgtgagactaagagtaagaactc

SEQ ID NO: 99770 - DNA, 33 bp, Homo sapien
tcaagcaacgtgtgagcctaagagtaagaactc

SEQ ID NO: 99771 - DNA, 33 bp, Homo sapien
ggatggttgctgtcaaactcaacagtggttttg

SEQ ID NO: 99772 - DNA, 33 bp, Homo sapien
ggatggttgctgtcaatctcaacagtggttttg

SEQ ID NO: 99773 - DNA, 33 bp, Homo sapien
cttgttgtggtttggaatcaaataaccttcatc

SEQ ID NO: 99774 - DNA, 33 bp, Homo sapien
cttgttgtggtttggagtcaaataaccttcatc

SEQ ID NO: 99775 - DNA, 33 bp, Homo sapien
gaagatgaaagagagtaaatgcaggaacaggtg

SEQ ID NO: 99776 - DNA, 33 bp, Homo sapien
gaagatgaaagagagtcaatgcaggaacaggtg

SEQ ID NO: 99777 - DNA, 33 bp, Homo sapien
agacctcaagaaaaagcactgtttgcattgaac

SEQ ID NO: 99778 - DNA, 33 bp, Homo sapien
agacctcaagaaaaagtactgtttgcattgaac

SEQ ID NO: 99779 - DNA, 33 bp, Homo sapien
cggtcgtcattccctaaaaaggattaaaggtat

SEQ ID NO: 99780 - DNA, 33 bp, Homo sapien
cggtcgtcattccctataaaggattaaaggtat

SEQ ID NO: 99781 - DNA, 33 bp, Homo sapien
tggttaatccatttcaatgaaaacaaccttgat

SEQ ID NO: 99782 - DNA, 33 bp, Homo sapien
tggttaatccatttcagtgaaaacaaccttgat

SEQ ID NO: 99783 - DNA, 33 bp, Homo sapien
gcatagactatgattcacacttagctgtaatta

SEQ ID NO: 99784 - DNA, 33 bp, Homo sapien
gcatagactatgattcgcacttagctgtaatta

SEQ ID NO: 99785 - DNA, 33 bp, Homo sapien
gttgtgataagtaccacgaagaaataaacactg

SEQ ID NO: 99786 - DNA, 33 bp, Homo sapien
gttgtgataagtaccatgaagaaataaacactg

SEQ ID NO: 99787 - DNA, 33 bp, Homo sapien
ctgaagtatttcatggaacagtcatctacccaa

SEQ ID NO: 99788 - DNA, 33 bp, Homo sapien
ctgaagtatttcatgggacagtcatctacccaa

SEQ ID NO: 99789 - DNA, 33 bp, Homo sapien
tgctgaacatcttacaatgaataagacagcccc

SEQ ID NO: 99790 - DNA, 33 bp, Homo sapien
tgctgaacatcttacagtgaataagacagcccc

SEQ ID NO: 99791 - DNA, 33 bp, Homo sapien
tttaacgaatgcctcaatatcatttgttatttg

SEQ ID NO: 99792 - DNA, 33 bp, Homo sapien
tttaacgaatgcctcagtatcatttgttatttg

SEQ ID NO: 99793 - DNA, 33 bp, Homo sapien
aaaataaattggattacgtgatctctaaaatcc

SEQ ID NO: 99794 - DNA, 33 bp, Homo sapien
aaaataaattggattatgtgatctctaaaatcc

SEQ ID NO: 99795 - DNA, 33 bp, Homo sapien
tgtttatatgtgtttcaattttatcaaatactg

SEQ ID NO: 99796 - DNA, 33 bp, Homo sapien
tgtttatatgtgtttccattttatcaaatactg

SEQ ID NO: 99797 - DNA, 33 bp, Homo sapien
ccagtgcaacggtgataagagatgggacctgta

SEQ ID NO: 99798 - DNA, 33 bp, Homo sapien
ccagtgcaacggtgatgagagatgggacctgta

SEQ ID NO: 99799 - DNA, 33 bp, Homo sapien
acaaatactattgttcacctatctctagagcca

SEQ ID NO: 99800 - DNA, 33 bp, Homo sapien
acaaatactattgttcgcctatctctagagcca

SEQ ID NO: 99801 - DNA, 33 bp, Homo sapien
gaatctgttgctctaaagttaggacctttgaaa

SEQ ID NO: 99802 - DNA, 33 bp, Homo sapien
gaatctgttgctctaatgttaggacctttgaaa

SEQ ID NO: 99803 - DNA, 33 bp, Homo sapien
tgcataaaacaaagaccgtactgacaagccaat

SEQ ID NO: 99804 - DNA, 33 bp, Homo sapien
tgcataaaacaaagactgtactgacaagccaat

SEQ ID NO: 99805 - DNA, 33 bp, Homo sapien
ttgcctcatccacttacaacaagagtcatcttt

SEQ ID NO: 99806 - DNA, 33 bp, Homo sapien
ttgcctcatccacttagaacaagagtcatcttt

SEQ ID NO: 99807 - DNA, 33 bp, Homo sapien
gtagatcatcatgaaaatctttttgatgatcca

SEQ ID NO: 99808 - DNA, 33 bp, Homo sapien
gtagatcatcatgaaattctttttgatgatcca

SEQ ID NO: 99809 - DNA, 33 bp, Homo sapien
ctctgatctttgacagcaaagggcccacaaagg

SEQ ID NO: 99810 - DNA, 33 bp, Homo sapien
ctctgatctttgacagtaaagggcccacaaagg

SEQ ID NO: 99811 - DNA, 33 bp, Homo sapien
atatttttggccatcccataatcagatcactgg

SEQ ID NO: 99812 - DNA, 33 bp, Homo sapien
atatttttggccatcctataatcagatcactgg

SEQ ID NO: 99813 - DNA, 33 bp, Homo sapien
tttaaagaggaatagaaggcagaaagacaaaac

SEQ ID NO: 99814 - DNA, 33 bp, Homo sapien
tttaaagaggaatagagggcagaaagacaaaac

SEQ ID NO: 99815 - DNA, 33 bp, Homo sapien
agagctaagaagtgcaatacattacattagtaa

SEQ ID NO: 99816 - DNA, 33 bp, Homo sapien
agagctaagaagtgcagtacattacattagtaa

SEQ ID NO: 99817 - DNA, 33 bp, Homo sapien
tggttctgaggccttcaaatttagactgaacca

SEQ ID NO: 99818 - DNA, 33 bp, Homo sapien
tggttctgaggccttcgaatttagactgaacca

SEQ ID NO: 99819 - DNA, 33 bp, Homo sapien
gttagagaaccacatacaacgagccacatataa

SEQ ID NO: 99820 - DNA, 33 bp, Homo sapien
gttagagaaccacatataacgagccacatataa

SEQ ID NO: 99821 - DNA, 33 bp, Homo sapien
agcagcatataaaggaggtaacttttgcaatta

SEQ ID NO: 99822 - DNA, 33 bp, Homo sapien
agcagcatataaaggatgtaacttttgcaatta

SEQ ID NO: 99823 - DNA, 33 bp, Homo sapien
ggggaaggtagctgaccatgaaactgaacctgg

SEQ ID NO: 99824 - DNA, 33 bp, Homo sapien
ggggaaggtagctgactatgaaactgaacctgg

SEQ ID NO: 99825 - DNA, 33 bp, Homo sapien
tctgttggcctatgtaaggtccccatccacact

SEQ ID NO: 99826 - DNA, 33 bp, Homo sapien
tctgttggcctatgtatggtccccatccacact

SEQ ID NO: 99827 - DNA, 33 bp, Homo sapien
tacaattcctaaaatacctcttctacttcatgg

SEQ ID NO: 99828 - DNA, 33 bp, Homo sapien
tacaattcctaaaatatctcttctacttcatgg

SEQ ID NO: 99829 - DNA, 33 bp, Homo sapien
aacaataaagtgcaaaacagtaaagagagcaca

SEQ ID NO: 99830 - DNA, 33 bp, Homo sapien
aacaataaagtgcaaatcagtaaagagagcaca

SEQ ID NO: 99831 - DNA, 33 bp, Homo sapien
cggaaatgacctaaaagtgcacaagggactcca

SEQ ID NO: 99832 - DNA, 33 bp, Homo sapien
cggaaatgacctaaaattgcacaagggactcca

SEQ ID NO: 99833 - DNA, 33 bp, Homo sapien
ggcttatgaagtgatgcgataacagctcctttt

SEQ ID NO: 99834 - DNA, 33 bp, Homo sapien
ggcttatgaagtgatgtgataacagctcctttt

SEQ ID NO: 99835 - DNA, 33 bp, Homo sapien
gttggctgttatagcaagtgtttttggttgcct

SEQ ID NO: 99836 - DNA, 33 bp, Homo sapien
gttggctgttatagcaggtgtttttggttgcct

SEQ ID NO: 99837 - DNA, 33 bp, Homo sapien
atttcctcaagggtaaacacatttctaacacca

SEQ ID NO: 99838 - DNA, 33 bp, Homo sapien
atttcctcaagggtaaccacatttctaacacca

SEQ ID NO: 99839 - DNA, 33 bp, Homo sapien
ataagagcaataagtaccaggaactctgtcaat

SEQ ID NO: 99840 - DNA, 33 bp, Homo sapien
ataagagcaataagtatcaggaactctgtcaat

SEQ ID NO: 99841 - DNA, 33 bp, Homo sapien
tagcactgactttccacgtctgctgataatccc

SEQ ID NO: 99842 - DNA, 33 bp, Homo sapien
tagcactgactttccatgtctgctgataatccc

SEQ ID NO: 99843 - DNA, 33 bp, Homo sapien
gacaagaccattgaggcaacggattagatgttc

SEQ ID NO: 99844 - DNA, 33 bp, Homo sapien
gacaagaccattgagggaacggattagatgttc

SEQ ID NO: 99845 - DNA, 33 bp, Homo sapien
tcatttatgatgcaaacgtactgttgatgctat

SEQ ID NO: 99846 - DNA, 33 bp, Homo sapien
tcatttatgatgcaaatgtactgttgatgctat

SEQ ID NO: 99847 - DNA, 33 bp, Homo sapien
ttctattgtctgtatgcatttgtgtcttagaca

SEQ ID NO: 99848 - DNA, 33 bp, Homo sapien
ttctattgtctgtatgtatttgtgtcttagaca

SEQ ID NO: 99849 - DNA, 33 bp, Homo sapien
agtttctatttcctgacgttgtagaatgccagg

SEQ ID NO: 99850 - DNA, 33 bp, Homo sapien
agtttctatttcctgatgttgtagaatgccagg

SEQ ID NO: 99851 - DNA, 33 bp, Homo sapien
aacactggaattgtagcatgcaatctactcata

SEQ ID NO: 99852 - DNA, 33 bp, Homo sapien
aacactggaattgtagtatgcaatctactcata

SEQ ID NO: 99853 - DNA, 33 bp, Homo sapien
ctctatgattataaaacctttcccagccaccag

SEQ ID NO: 99854 - DNA, 33 bp, Homo sapien
ctctatgattataaaatctttcccagccaccag

SEQ ID NO: 99855 - DNA, 33 bp, Homo sapien
ttccattttccaaataacacctgttgaagagaa

SEQ ID NO: 99856 - DNA, 33 bp, Homo sapien
ttccattttccaaataccacctgttgaagagaa

SEQ ID NO: 99857 - DNA, 33 bp, Homo sapien
ttttcctctaagctcaagtacaaggtgtgaaag

SEQ ID NO: 99858 - DNA, 33 bp, Homo sapien
ttttcctctaagctcaggtacaaggtgtgaaag

SEQ ID NO: 99859 - DNA, 33 bp, Homo sapien
ccattgccctgggagccatcgcaatgaggccag

SEQ ID NO: 99860 - DNA, 33 bp, Homo sapien
ccattgccctgggagctatcgcaatgaggccag

SEQ ID NO: 99861 - DNA, 33 bp, Homo sapien
taaccaatgggaaccgaatgataacgaatctgt

SEQ ID NO: 99862 - DNA, 33 bp, Homo sapien
taaccaatgggaaccgtatgataacgaatctgt

SEQ ID NO: 99863 - DNA, 33 bp, Homo sapien
gaccccaaattcctaaatctcttgtagtcttgt

SEQ ID NO: 99864 - DNA, 33 bp, Homo sapien
gaccccaaattcctaattctcttgtagtcttgt

SEQ ID NO: 99865 - DNA, 33 bp, Homo sapien
tctaagagatcagcacaacgtcttagctcctct

SEQ ID NO: 99866 - DNA, 33 bp, Homo sapien
tctaagagatcagcaccacgtcttagctcctct

SEQ ID NO: 99867 - DNA, 33 bp, Homo sapien
aaactgaatgtaactcaaaacgattctatggga

SEQ ID NO: 99868 - DNA, 33 bp, Homo sapien
aaactgaatgtaactccaaacgattctatggga

SEQ ID NO: 99869 - DNA, 33 bp, Homo sapien
gttccacaaatctatacggtatgtgaaaagaaa

SEQ ID NO: 99870 - DNA, 33 bp, Homo sapien
gttccacaaatctatatggtatgtgaaaagaaa

SEQ ID NO: 99871 - DNA, 33 bp, Homo sapien
aatataggagatgcaaagattaattaggaatcc

SEQ ID NO: 99872 - DNA, 33 bp, Homo sapien
aatataggagatgcaaggattaattaggaatcc

SEQ ID NO: 99873 - DNA, 33 bp, Homo sapien
ggattccatgagggcaaggatactgttctcacc

SEQ ID NO: 99874 - DNA, 33 bp, Homo sapien
ggattccatgagggcagggatactgttctcacc

SEQ ID NO: 99875 - DNA, 33 bp, Homo sapien
tttgaatttcatctcactgactggttggttttt

SEQ ID NO: 99876 - DNA, 33 bp, Homo sapien
tttgaatttcatctcagtgactggttggttttt

SEQ ID NO: 99877 - DNA, 33 bp, Homo sapien
ccatgtgtgtctaccacagtcatgtagcagtaa

SEQ ID NO: 99878 - DNA, 33 bp, Homo sapien
ccatgtgtgtctaccatagtcatgtagcagtaa

SEQ ID NO: 99879 - DNA, 33 bp, Homo sapien
gataggaaaaccaataacaatgtcaaacctagc

SEQ ID NO: 99880 - DNA, 33 bp, Homo sapien
gataggaaaaccaatagcaatgtcaaacctagc

SEQ ID NO: 99881 - DNA, 33 bp, Homo sapien
gacctgtgcttctgacaaaagactaatacccag

SEQ ID NO: 99882 - DNA, 33 bp, Homo sapien
gacctgtgcttctgacgaaagactaatacccag

SEQ ID NO: 99883 - DNA, 33 bp, Homo sapien
agaggactttgcatcactgaaactgtggtaagt

SEQ ID NO: 99884 - DNA, 33 bp, Homo sapien
agaggactttgcatcattgaaactgtggtaagt

SEQ ID NO: 99885 - DNA, 33 bp, Homo sapien
ttctctctgagctttgaagttactcttgacaga

SEQ ID NO: 99886 - DNA, 33 bp, Homo sapien
ttctctctgagctttggagttactcttgacaga

SEQ ID NO: 99887 - DNA, 33 bp, Homo sapien
cactatataacaccagacaatggatagaaccaa

SEQ ID NO: 99888 - DNA, 33 bp, Homo sapien
cactatataacaccagccaatggatagaaccaa

SEQ ID NO: 99889 - DNA, 33 bp, Homo sapien
attgtcacaacttgcaactagtgggcagaggcc

SEQ ID NO: 99890 - DNA, 33 bp, Homo sapien
attgtcacaacttgcacctagtgggcagaggcc

SEQ ID NO: 99891 - DNA, 33 bp, Homo sapien
agcagcttcaagtaaccagtaaaaatggtagac

SEQ ID NO: 99892 - DNA, 33 bp, Homo sapien
agcagcttcaagtaactagtaaaaatggtagac

SEQ ID NO: 99893 - DNA, 33 bp, Homo sapien
tataaattatgctgtacgaaaaaatgggctttc

SEQ ID NO: 99894 - DNA, 33 bp, Homo sapien
tataaattatgctgtatgaaaaaatgggctttc

SEQ ID NO: 99895 - DNA, 33 bp, Homo sapien
caggggctcagtcaacagtagttcttcatgaat

SEQ ID NO: 99896 - DNA, 33 bp, Homo sapien
caggggctcagtcaacggtagttcttcatgaat

SEQ ID NO: 99897 - DNA, 33 bp, Homo sapien
ctcactttcaatccacaaaatttacaaacgaga

SEQ ID NO: 99898 - DNA, 33 bp, Homo sapien
ctcactttcaatccacgaaatttacaaacgaga

SEQ ID NO: 99899 - DNA, 33 bp, Homo sapien
ttgtctcttggccaaagtctttctttcaagtaa

SEQ ID NO: 99900 - DNA, 33 bp, Homo sapien
ttgtctcttggccaaattctttctttcaagtaa

SEQ ID NO: 99901 - DNA, 33 bp, Homo sapien
aagcgatacttacttgaatatattacgcataca

SEQ ID NO: 99902 - DNA, 33 bp, Homo sapien
aagcgatacttacttgtatatattacgcataca

SEQ ID NO: 99903 - DNA, 33 bp, Homo sapien
gaacactcgatctacacattgagtgcaggaaaa

SEQ ID NO: 99904 - DNA, 33 bp, Homo sapien
gaacactcgatctacatattgagtgcaggaaaa

SEQ ID NO: 99905 - DNA, 33 bp, Homo sapien
aataaagatttggatgcagcataaaataccagg

SEQ ID NO: 99906 - DNA, 33 bp, Homo sapien
aataaagatttggatgtagcataaaataccagg

SEQ ID NO: 99907 - DNA, 33 bp, Homo sapien
agtgattaaggtgactaagtatccacatatagc

SEQ ID NO: 99908 - DNA, 33 bp, Homo sapien
agtgattaaggtgacttagtatccacatatagc

SEQ ID NO: 99909 - DNA, 33 bp, Homo sapien
ataagctaccaattcacactcatatggatggct

SEQ ID NO: 99910 - DNA, 33 bp, Homo sapien
ataagctaccaattcagactcatatggatggct

SEQ ID NO: 99911 - DNA, 33 bp, Homo sapien
attaagtagctggaacaataggtgtatgccacc

SEQ ID NO: 99912 - DNA, 33 bp, Homo sapien
attaagtagctggaacgataggtgtatgccacc

SEQ ID NO: 99913 - DNA, 33 bp, Homo sapien
ccagtatctactttaaatcatgcttacttatct

SEQ ID NO: 99914 - DNA, 33 bp, Homo sapien
ccagtatctactttaagtcatgcttacttatct

SEQ ID NO: 99915 - DNA, 33 bp, Homo sapien
tttatctagaaataaaacaactggaaagctcaa

SEQ ID NO: 99916 - DNA, 33 bp, Homo sapien
tttatctagaaataaaccaactggaaagctcaa

SEQ ID NO: 99917 - DNA, 33 bp, Homo sapien
gtctgtgtactagtcaataaatctttcaaggtc

SEQ ID NO: 99918 - DNA, 33 bp, Homo sapien
gtctgtgtactagtcagtaaatctttcaaggtc

SEQ ID NO: 99919 - DNA, 33 bp, Homo sapien
tgcatacaaacacaaggaagagttccagtttag

SEQ ID NO: 99920 - DNA, 33 bp, Homo sapien
tgcatacaaacacaagtaagagttccagtttag

SEQ ID NO: 99921 - DNA, 33 bp, Homo sapien
ggcaatgaaatatgaacaatgatttgtaaaaag

SEQ ID NO: 99922 - DNA, 33 bp, Homo sapien
ggcaatgaaatatgaagaatgatttgtaaaaag

SEQ ID NO: 99923 - DNA, 33 bp, Homo sapien
tctgcaggctgtacaaagagcttggtgccatca

SEQ ID NO: 99924 - DNA, 33 bp, Homo sapien
tctgcaggctgtacaaggagcttggtgccatca

SEQ ID NO: 99925 - DNA, 33 bp, Homo sapien
ctttcactaattggaacatacagtggacaatca

SEQ ID NO: 99926 - DNA, 33 bp, Homo sapien
ctttcactaattggaatatacagtggacaatca

SEQ ID NO: 99927 - DNA, 33 bp, Homo sapien
tgggattattgtttcaaggagtccaatttggga

SEQ ID NO: 99928 - DNA, 33 bp, Homo sapien
tgggattattgtttcatggagtccaatttggga

SEQ ID NO: 99929 - DNA, 33 bp, Homo sapien
cctaggacactttattaaaagagcatctcctgg

SEQ ID NO: 99930 - DNA, 33 bp, Homo sapien
cctaggacactttattcaaagagcatctcctgg

SEQ ID NO: 99931 - DNA, 33 bp, Homo sapien
caaaatgctaaactggcccaagatcaagtgaag

SEQ ID NO: 99932 - DNA, 33 bp, Homo sapien
caaaatgctaaactggtccaagatcaagtgaag

SEQ ID NO: 99933 - DNA, 33 bp, Homo sapien
aaagcaaacaggtgatgagttcaaaggaaatac

SEQ ID NO: 99934 - DNA, 33 bp, Homo sapien
aaagcaaacaggtgattagttcaaaggaaatac

SEQ ID NO: 99935 - DNA, 33 bp, Homo sapien
tttatttcttttgtcacatgtcacttctgcaga

SEQ ID NO: 99936 - DNA, 33 bp, Homo sapien
tttatttcttttgtcatatgtcacttctgcaga

SEQ ID NO: 99937 - DNA, 33 bp, Homo sapien
tgaagacaagggaccactcttgtgcacacaccc

SEQ ID NO: 99938 - DNA, 33 bp, Homo sapien
tgaagacaagggaccattcttgtgcacacaccc

SEQ ID NO: 99939 - DNA, 33 bp, Homo sapien
gatggtaacagaggaagatacgacagatgtgtg

SEQ ID NO: 99940 - DNA, 33 bp, Homo sapien
gatggtaacagaggaatatacgacagatgtgtg

SEQ ID NO: 99941 - DNA, 33 bp, Homo sapien
atactgaaaaacctacagactgtttggtgcttc

SEQ ID NO: 99942 - DNA, 33 bp, Homo sapien
atactgaaaaacctaccgactgtttggtgcttc

SEQ ID NO: 99943 - DNA, 33 bp, Homo sapien
ggaattagcaactcacggcctcttagtttgctc

SEQ ID NO: 99944 - DNA, 33 bp, Homo sapien
ggaattagcaactcactgcctcttagtttgctc

SEQ ID NO: 99945 - DNA, 33 bp, Homo sapien
gtgtggtgtgcagatggcaaggttatattaatc

SEQ ID NO: 99946 - DNA, 33 bp, Homo sapien
gtgtggtgtgcagatgtcaaggttatattaatc

SEQ ID NO: 99947 - DNA, 33 bp, Homo sapien
acatgcgaattgcttccacttttgagctattat

SEQ ID NO: 99948 - DNA, 33 bp, Homo sapien
acatgcgaattgcttctacttttgagctattat

SEQ ID NO: 99949 - DNA, 33 bp, Homo sapien
atgtgctaattctggaaaattcaagtaatggaa

SEQ ID NO: 99950 - DNA, 33 bp, Homo sapien
atgtgctaattctggacaattcaagtaatggaa

SEQ ID NO: 99951 - DNA, 33 bp, Homo sapien
tagtcctatgtctcccactgtgaagaagtcacc

SEQ ID NO: 99952 - DNA, 33 bp, Homo sapien
tagtcctatgtctccctctgtgaagaagtcacc

SEQ ID NO: 99953 - DNA, 33 bp, Homo sapien
taacaaaagtacctaacgcagctttacatttat

SEQ ID NO: 99954 - DNA, 33 bp, Homo sapien
taacaaaagtacctaatgcagctttacatttat

SEQ ID NO: 99955 - DNA, 33 bp, Homo sapien
aaataagtcccacgtacggaagcacatctcttg

SEQ ID NO: 99956 - DNA, 33 bp, Homo sapien
aaataagtcccacgtatggaagcacatctcttg

SEQ ID NO: 99957 - DNA, 33 bp, Homo sapien
tgctcaccaaagaaaaggagaaatcaatgacag

SEQ ID NO: 99958 - DNA, 33 bp, Homo sapien
tgctcaccaaagaaaatgagaaatcaatgacag

SEQ ID NO: 99959 - DNA, 33 bp, Homo sapien
tctattataatacttacggtgccttatagtttt

SEQ ID NO: 99960 - DNA, 33 bp, Homo sapien
tctattataatacttatggtgccttatagtttt

SEQ ID NO: 99961 - DNA, 33 bp, Homo sapien
gaagcagtttcaaaacagttttagccagtttcc

SEQ ID NO: 99962 - DNA, 33 bp, Homo sapien
gaagcagtttcaaaacggttttagccagtttcc

SEQ ID NO: 99963 - DNA, 33 bp, Homo sapien
cagctacatgttcaaaagatgctttattggtgt

SEQ ID NO: 99964 - DNA, 33 bp, Homo sapien
cagctacatgttcaaaggatgctttattggtgt

SEQ ID NO: 99965 - DNA, 33 bp, Homo sapien
gaaaattaacatgctccagatgaatgcttagag

SEQ ID NO: 99966 - DNA, 33 bp, Homo sapien
gaaaattaacatgctctagatgaatgcttagag

SEQ ID NO: 99967 - DNA, 33 bp, Homo sapien
ttgatctttcctgttaagtacaatttaaaatga

SEQ ID NO: 99968 - DNA, 33 bp, Homo sapien
ttgatctttcctgttatgtacaatttaaaatga

SEQ ID NO: 99969 - DNA, 33 bp, Homo sapien
agatggtgtcattttaagtattttctatctaca

SEQ ID NO: 99970 - DNA, 33 bp, Homo sapien
agatggtgtcattttaggtattttctatctaca

SEQ ID NO: 99971 - DNA, 33 bp, Homo sapien
ggatccaccaaccaggccaaaataaacagcagt

SEQ ID NO: 99972 - DNA, 33 bp, Homo sapien
ggatccaccaaccaggtcaaaataaacagcagt

SEQ ID NO: 99973 - DNA, 33 bp, Homo sapien
tgagattgtatttaaactgcctattcatttgta

SEQ ID NO: 99974 - DNA, 33 bp, Homo sapien
tgagattgtatttaaattgcctattcatttgta

SEQ ID NO: 99975 - DNA, 33 bp, Homo sapien
acattagggtctcttaaaaaatcaagactcgtg

SEQ ID NO: 99976 - DNA, 33 bp, Homo sapien
acattagggtctcttagaaaatcaagactcgtg

SEQ ID NO: 99977 - DNA, 33 bp, Homo sapien
gagcacactttgggaactaaggtgttacagtag

SEQ ID NO: 99978 - DNA, 33 bp, Homo sapien
gagcacactttgggaattaaggtgttacagtag

SEQ ID NO: 99979 - DNA, 33 bp, Homo sapien
attgtaccaggaaagacaagaacaaaggagaaa

SEQ ID NO: 99980 - DNA, 33 bp, Homo sapien
attgtaccaggaaagagaagaacaaaggagaaa

SEQ ID NO: 99981 - DNA, 33 bp, Homo sapien
cagaagaggtggtatacaaataagaactcccag

SEQ ID NO: 99982 - DNA, 33 bp, Homo sapien
cagaagaggtggtatataaataagaactcccag

SEQ ID NO: 99983 - DNA, 33 bp, Homo sapien
agtcatttctcagatgcattaattctctcaatg

SEQ ID NO: 99984 - DNA, 33 bp, Homo sapien
agtcatttctcagatgtattaattctctcaatg

SEQ ID NO: 99985 - DNA, 33 bp, Homo sapien
atctgagaaatgactcaaagaaagaaatgtaga

SEQ ID NO: 99986 - DNA, 33 bp, Homo sapien
atctgagaaatgactcgaagaaagaaatgtaga

SEQ ID NO: 99987 - DNA, 33 bp, Homo sapien
gtttacagtggttttcagaaaaagcaaggtatt

SEQ ID NO: 99988 - DNA, 33 bp, Homo sapien
gtttacagtggttttcggaaaaagcaaggtatt

SEQ ID NO: 99989 - DNA, 33 bp, Homo sapien
aaggaatctttgtgaactgggttggaagttcct

SEQ ID NO: 99990 - DNA, 33 bp, Homo sapien
aaggaatctttgtgaattgggttggaagttcct

SEQ ID NO: 99991 - DNA, 33 bp, Homo sapien
ttatgctatttctgataagcgatactagtctat

SEQ ID NO: 99992 - DNA, 33 bp, Homo sapien
ttatgctatttctgatgagcgatactagtctat

SEQ ID NO: 99993 - DNA, 33 bp, Homo sapien
tgcattatgtaagcaacgagtttagttctccat

SEQ ID NO: 99994 - DNA, 33 bp, Homo sapien
tgcattatgtaagcaatgagtttagttctccat

SEQ ID NO: 99995 - DNA, 33 bp, Homo sapien
aaaactggaaatcaatcaggaattctggagact

SEQ ID NO: 99996 - DNA, 33 bp, Homo sapien
aaaactggaaatcaatgaggaattctggagact

SEQ ID NO: 99997 - DNA, 33 bp, Homo sapien
ctttaagacaaggacacagtactggcaggatcc

SEQ ID NO: 99998 - DNA, 33 bp, Homo sapien
ctttaagacaaggacatagtactggcaggatcc

SEQ ID NO: 99999 - DNA, 33 bp, Homo sapien
caggcttggacacattcaagcagagcattcaga

SEQ ID NO: 100000 - DNA, 33 bp, Homo sapien
caggcttggacacattgaagcagagcattcaga

SEQ ID NO: 100001 - DNA, 33 bp, Homo sapien
aatgttttctgtacccacaacccataattagga

SEQ ID NO: 100002 - DNA, 33 bp, Homo sapien
aatgttttctgtacccgcaacccataattagga

SEQ ID NO: 100003 - DNA, 33 bp, Homo sapien
ctaaatggtactagacactgaataaatggtact

SEQ ID NO: 100004 - DNA, 33 bp, Homo sapien
ctaaatggtactagacgctgaataaatggtact

SEQ ID NO: 100005 - DNA, 33 bp, Homo sapien
tcatgtagaagagggggaaactgctctttctag

SEQ ID NO: 100006 - DNA, 33 bp, Homo sapien
tcatgtagaagaggggtaaactgctctttctag

SEQ ID NO: 100007 - DNA, 33 bp, Homo sapien
agagtagcctagattacccaggtggagccagca

SEQ ID NO: 100008 - DNA, 33 bp, Homo sapien
agagtagcctagattatccaggtggagccagca

SEQ ID NO: 100009 - DNA, 33 bp, Homo sapien
ataataaaccttagacaacaagctataaagcca

SEQ ID NO: 100010 - DNA, 33 bp, Homo sapien
ataataaaccttagacgacaagctataaagcca

SEQ ID NO: 100011 - DNA, 33 bp, Homo sapien
gtaagaggtggagataacattttttcttaggtt

SEQ ID NO: 100012 - DNA, 33 bp, Homo sapien
gtaagaggtggagataccattttttcttaggtt

SEQ ID NO: 100013 - DNA, 33 bp, Homo sapien
gtttcatagctacgtgaaagaccatcatcttgg

SEQ ID NO: 100014 - DNA, 33 bp, Homo sapien
gtttcatagctacgtgcaagaccatcatcttgg

SEQ ID NO: 100015 - DNA, 33 bp, Homo sapien
aaaaacagaaatagcagctctagagtacaacca

SEQ ID NO: 100016 - DNA, 33 bp, Homo sapien
aaaaacagaaatagcatctctagagtacaacca

SEQ ID NO: 100017 - DNA, 33 bp, Homo sapien
gactcagattcagaaacttaggtatcatctgat

SEQ ID NO: 100018 - DNA, 33 bp, Homo sapien
gactcagattcagaaatttaggtatcatctgat

SEQ ID NO: 100019 - DNA, 33 bp, Homo sapien
aatagatgatcttcatcactccttccagatgtg

SEQ ID NO: 100020 - DNA, 33 bp, Homo sapien
aatagatgatcttcattactccttccagatgtg

SEQ ID NO: 100021 - DNA, 33 bp, Homo sapien
agttgaacactaaaaagccaagaacagtgcact

SEQ ID NO: 100022 - DNA, 33 bp, Homo sapien
agttgaacactaaaaatccaagaacagtgcact

SEQ ID NO: 100023 - DNA, 33 bp, Homo sapien
actcttcatggccatcaagaaacctggaatctg

SEQ ID NO: 100024 - DNA, 33 bp, Homo sapien
actcttcatggccatcgagaaacctggaatctg

SEQ ID NO: 100025 - DNA, 33 bp, Homo sapien
gccacaagatgctgaacctccccaattgctcct

SEQ ID NO: 100026 - DNA, 33 bp, Homo sapien
gccacaagatgctgaatctccccaattgctcct

SEQ ID NO: 100027 - DNA, 33 bp, Homo sapien
tttagaagctagatggaatcaggttagatttct

SEQ ID NO: 100028 - DNA, 33 bp, Homo sapien
tttagaagctagatggcatcaggttagatttct

SEQ ID NO: 100029 - DNA, 33 bp, Homo sapien
gtgtcttgctaaatcacgtgccccccacgtcca

SEQ ID NO: 100030 - DNA, 33 bp, Homo sapien
gtgtcttgctaaatcatgtgccccccacgtcca

SEQ ID NO: 100031 - DNA, 33 bp, Homo sapien
tctctaccagtgtttcccaatgagtagtgatca

SEQ ID NO: 100032 - DNA, 33 bp, Homo sapien
tctctaccagtgtttctcaatgagtagtgatca

SEQ ID NO: 100033 - DNA, 33 bp, Homo sapien
actcttctcagaaggaaagaaaattgccattag

SEQ ID NO: 100034 - DNA, 33 bp, Homo sapien
actcttctcagaaggagagaaaattgccattag

SEQ ID NO: 100035 - DNA, 33 bp, Homo sapien
tggtcctgtccctgaaaaaggcaaagctgtaac

SEQ ID NO: 100036 - DNA, 33 bp, Homo sapien
tggtcctgtccctgaacaaggcaaagctgtaac

SEQ ID NO: 100037 - DNA, 33 bp, Homo sapien
agtaaactctagcagaaagaaaaaaagccagcg

SEQ ID NO: 100038 - DNA, 33 bp, Homo sapien
agtaaactctagcagacagaaaaaaagccagcg

SEQ ID NO: 100039 - DNA, 33 bp, Homo sapien
tagaatagtcagggaacgctttattgttgaatt

SEQ ID NO: 100040 - DNA, 33 bp, Homo sapien
tagaatagtcagggaatgctttattgttgaatt

SEQ ID NO: 100041 - DNA, 33 bp, Homo sapien
tggagggctgcagtagaacttgaatgtgaagct

SEQ ID NO: 100042 - DNA, 33 bp, Homo sapien
tggagggctgcagtagcacttgaatgtgaagct

SEQ ID NO: 100043 - DNA, 33 bp, Homo sapien
ggtaatgtggagtcagaagcctctgtattgatt

SEQ ID NO: 100044 - DNA, 33 bp, Homo sapien
ggtaatgtggagtcagtagcctctgtattgatt

SEQ ID NO: 100045 - DNA, 33 bp, Homo sapien
tttaggcagatagtgaagataaaagagtcctcg

SEQ ID NO: 100046 - DNA, 33 bp, Homo sapien
tttaggcagatagtgaggataaaagagtcctcg

SEQ ID NO: 100047 - DNA, 33 bp, Homo sapien
ctacagtaggaaaataccagaacagtgattgcc

SEQ ID NO: 100048 - DNA, 33 bp, Homo sapien
ctacagtaggaaaatatcagaacagtgattgcc

SEQ ID NO: 100049 - DNA, 33 bp, Homo sapien
gagattattattacagacataccacattttatt

SEQ ID NO: 100050 - DNA, 33 bp, Homo sapien
gagattattattacaggcataccacattttatt

SEQ ID NO: 100051 - DNA, 33 bp, Homo sapien
tgaaaaaataattgaacctgttatcactccatt

SEQ ID NO: 100052 - DNA, 33 bp, Homo sapien
tgaaaaaataattgaatctgttatcactccatt

SEQ ID NO: 100053 - DNA, 33 bp, Homo sapien
attttcttattttatacgtagccttcagcatag

SEQ ID NO: 100054 - DNA, 33 bp, Homo sapien
attttcttattttataggtagccttcagcatag

SEQ ID NO: 100055 - DNA, 33 bp, Homo sapien
tatgatttatagtaacaggaagagaacgtctgt

SEQ ID NO: 100056 - DNA, 33 bp, Homo sapien
tatgatttatagtaacgggaagagaacgtctgt

SEQ ID NO: 100057 - DNA, 33 bp, Homo sapien
aataaaatacacttcagaatctaaattcaaaaa

SEQ ID NO: 100058 - DNA, 33 bp, Homo sapien
aataaaatacacttcataatctaaattcaaaaa

SEQ ID NO: 100059 - DNA, 33 bp, Homo sapien
ggagggagatattttgaaagaaaaaaatgtatt

SEQ ID NO: 100060 - DNA, 33 bp, Homo sapien
ggagggagatattttggaagaaaaaaatgtatt

SEQ ID NO: 100061 - DNA, 33 bp, Homo sapien
ctgtctatcgtgatccacattttgttttaaaaa

SEQ ID NO: 100062 - DNA, 33 bp, Homo sapien
ctgtctatcgtgatcctcattttgttttaaaaa

SEQ ID NO: 100063 - DNA, 33 bp, Homo sapien
cagcagccctaactgacgttcctgaggaaaaat

SEQ ID NO: 100064 - DNA, 33 bp, Homo sapien
cagcagccctaactgatgttcctgaggaaaaat

SEQ ID NO: 100065 - DNA, 33 bp, Homo sapien
tgacctttatcacttacgagaatatgcttgcta

SEQ ID NO: 100066 - DNA, 33 bp, Homo sapien
tgacctttatcacttatgagaatatgcttgcta

SEQ ID NO: 100067 - DNA, 33 bp, Homo sapien
aatttctaatgtctagaagttacaatggcctat

SEQ ID NO: 100068 - DNA, 33 bp, Homo sapien
aatttctaatgtctaggagttacaatggcctat

SEQ ID NO: 100069 - DNA, 33 bp, Homo sapien
agaacataaaccactaaagaaaaatgaccctag

SEQ ID NO: 100070 - DNA, 33 bp, Homo sapien
agaacataaaccactagagaaaaatgaccctag

SEQ ID NO: 100071 - DNA, 33 bp, Homo sapien
ctccatctctaaaaaaagtatgagaatgttgac

SEQ ID NO: 100072 - DNA, 33 bp, Homo sapien
ctccatctctaaaaaatgtatgagaatgttgac

SEQ ID NO: 100073 - DNA, 33 bp, Homo sapien
ttcctagctcaatttcgatgtctaatataggac

SEQ ID NO: 100074 - DNA, 33 bp, Homo sapien
ttcctagctcaatttctatgtctaatataggac

SEQ ID NO: 100075 - DNA, 33 bp, Homo sapien
taccagtgatacagtcaaaccaagtgctcttga

SEQ ID NO: 100076 - DNA, 33 bp, Homo sapien
taccagtgatacagtcgaaccaagtgctcttga

SEQ ID NO: 100077 - DNA, 33 bp, Homo sapien
tcactaatggtcagtaacagttttctttgtcat

SEQ ID NO: 100078 - DNA, 33 bp, Homo sapien
tcactaatggtcagtagcagttttctttgtcat

SEQ ID NO: 100079 - DNA, 33 bp, Homo sapien
aatcactctgtcatatcactgagataatttaga

SEQ ID NO: 100080 - DNA, 33 bp, Homo sapien
aatcactctgtcatattactgagataatttaga

SEQ ID NO: 100081 - DNA, 33 bp, Homo sapien
atgaatgtggatcataccatatttttgtccaat

SEQ ID NO: 100082 - DNA, 33 bp, Homo sapien
atgaatgtggatcatagcatatttttgtccaat

SEQ ID NO: 100083 - DNA, 33 bp, Homo sapien
atttttaccttcaaagcatctaatgcagaattg

SEQ ID NO: 100084 - DNA, 33 bp, Homo sapien
atttttaccttcaaagtatctaatgcagaattg

SEQ ID NO: 100085 - DNA, 33 bp, Homo sapien
tccctaccaggcctagacaataggtagctacta

SEQ ID NO: 100086 - DNA, 33 bp, Homo sapien
tccctaccaggcctagccaataggtagctacta

SEQ ID NO: 100087 - DNA, 33 bp, Homo sapien
aatagacttttgattagcaccctgggtgtcacg

SEQ ID NO: 100088 - DNA, 33 bp, Homo sapien
aatagacttttgattatcaccctgggtgtcacg

SEQ ID NO: 100089 - DNA, 33 bp, Homo sapien
tatgttgatggtccaaatgttcctttaattatc

SEQ ID NO: 100090 - DNA, 33 bp, Homo sapien
tatgttgatggtccaagtgttcctttaattatc

SEQ ID NO: 100091 - DNA, 33 bp, Homo sapien
tttctccactgactcactagcttacaaatggag

SEQ ID NO: 100092 - DNA, 33 bp, Homo sapien
tttctccactgactcattagcttacaaatggag

SEQ ID NO: 100093 - DNA, 33 bp, Homo sapien
taaaacttgtaaaagcggatgtaatcttgctaa

SEQ ID NO: 100094 - DNA, 33 bp, Homo sapien
taaaacttgtaaaagctgatgtaatcttgctaa

SEQ ID NO: 100095 - DNA, 33 bp, Homo sapien
ccttgactttaggagacctggttgcagactcaa

SEQ ID NO: 100096 - DNA, 33 bp, Homo sapien
ccttgactttaggagatctggttgcagactcaa

SEQ ID NO: 100097 - DNA, 33 bp, Homo sapien
taaccttaaagttgcaaaacctgcagtttaaaa

SEQ ID NO: 100098 - DNA, 33 bp, Homo sapien
taaccttaaagttgcataacctgcagtttaaaa

SEQ ID NO: 100099 - DNA, 33 bp, Homo sapien
tgcacccagcctttaaactttcatctgcagctg

SEQ ID NO: 100100 - DNA, 33 bp, Homo sapien
tgcacccagcctttaacctttcatctgcagctg

SEQ ID NO: 100101 - DNA, 33 bp, Homo sapien
cccccaatccgaaacaaaaacactctgcacagt

SEQ ID NO: 100102 - DNA, 33 bp, Homo sapien
cccccaatccgaaacacaaacactctgcacagt

SEQ ID NO: 100103 - DNA, 33 bp, Homo sapien
gcaaaacacatcaaaagcatcacatccatatac

SEQ ID NO: 100104 - DNA, 33 bp, Homo sapien
gcaaaacacatcaaaatcatcacatccatatac

SEQ ID NO: 100105 - DNA, 33 bp, Homo sapien
aaatgtttatttcactaagacctcatatacata

SEQ ID NO: 100106 - DNA, 33 bp, Homo sapien
aaatgtttatttcactgagacctcatatacata

SEQ ID NO: 100107 - DNA, 33 bp, Homo sapien
tagggcttcgtttcacacactattctatatcta

SEQ ID NO: 100108 - DNA, 33 bp, Homo sapien
tagggcttcgtttcacgcactattctatatcta

SEQ ID NO: 100109 - DNA, 33 bp, Homo sapien
tctagagagcaactaactccatggaaacagaaa

SEQ ID NO: 100110 - DNA, 33 bp, Homo sapien
tctagagagcaactaattccatggaaacagaaa

SEQ ID NO: 100111 - DNA, 33 bp, Homo sapien
gaaagtttgagggctacggaaggagtgtttcca

SEQ ID NO: 100112 - DNA, 33 bp, Homo sapien
gaaagtttgagggctatggaaggagtgtttcca

SEQ ID NO: 100113 - DNA, 33 bp, Homo sapien
ctgtgtcatgttcataccaattttaatttctga

SEQ ID NO: 100114 - DNA, 33 bp, Homo sapien
ctgtgtcatgttcatatcaattttaatttctga

SEQ ID NO: 100115 - DNA, 33 bp, Homo sapien
acagggcaagttcagacggcatttcacagcact

SEQ ID NO: 100116 - DNA, 33 bp, Homo sapien
acagggcaagttcagatggcatttcacagcact

SEQ ID NO: 100117 - DNA, 33 bp, Homo sapien
ctacacgaggacaaggccatgaggttatgcaat

SEQ ID NO: 100118 - DNA, 33 bp, Homo sapien
ctacacgaggacaaggtcatgaggttatgcaat

SEQ ID NO: 100119 - DNA, 33 bp, Homo sapien
atttcccactccctgtcaatggcaccttcattt

SEQ ID NO: 100120 - DNA, 33 bp, Homo sapien
atttcccactccctgttaatggcaccttcattt

SEQ ID NO: 100121 - DNA, 33 bp, Homo sapien
tgaatatataggtgaacaaacagagaacccagt

SEQ ID NO: 100122 - DNA, 33 bp, Homo sapien
tgaatatataggtgaataaacagagaacccagt

SEQ ID NO: 100123 - DNA, 33 bp, Homo sapien
ttcagaaaggcaataaaattctcaggttttgat

SEQ ID NO: 100124 - DNA, 33 bp, Homo sapien
ttcagaaaggcaataacattctcaggttttgat

SEQ ID NO: 100125 - DNA, 33 bp, Homo sapien
aaaggctgttctgagacacactaatgaactaag

SEQ ID NO: 100126 - DNA, 33 bp, Homo sapien
aaaggctgttctgagagacactaatgaactaag

SEQ ID NO: 100127 - DNA, 33 bp, Homo sapien
tccctttttatgtgaaagttcaaatacagagaa

SEQ ID NO: 100128 - DNA, 33 bp, Homo sapien
tccctttttatgtgaatgttcaaatacagagaa

SEQ ID NO: 100129 - DNA, 33 bp, Homo sapien
gggtgaggcaaagtgaccaagaaattaaatcaa

SEQ ID NO: 100130 - DNA, 33 bp, Homo sapien
gggtgaggcaaagtgatcaagaaattaaatcaa

SEQ ID NO: 100131 - DNA, 33 bp, Homo sapien
agactctacttacataccggaatacctctgtgt

SEQ ID NO: 100132 - DNA, 33 bp, Homo sapien
agactctacttacatatcggaatacctctgtgt

SEQ ID NO: 100133 - DNA, 33 bp, Homo sapien
aggtaaggatttagaaggaacaacttcccaaca

SEQ ID NO: 100134 - DNA, 33 bp, Homo sapien
aggtaaggatttagaatgaacaacttcccaaca

SEQ ID NO: 100135 - DNA, 33 bp, Homo sapien
atgttcttgccctgtacgttgagatcacaataa

SEQ ID NO: 100136 - DNA, 33 bp, Homo sapien
atgttcttgccctgtatgttgagatcacaataa

SEQ ID NO: 100137 - DNA, 33 bp, Homo sapien
tcaaggaacagaaagcccttaagataaacaaag

SEQ ID NO: 100138 - DNA, 33 bp, Homo sapien
tcaaggaacagaaagcgcttaagataaacaaag

SEQ ID NO: 100139 - DNA, 33 bp, Homo sapien
gctcattacttatagacattagctgctatcaag

SEQ ID NO: 100140 - DNA, 33 bp, Homo sapien
gctcattacttatagatattagctgctatcaag

SEQ ID NO: 100141 - DNA, 33 bp, Homo sapien
cgtagcactccctgcacgagattaagggtgtgt

SEQ ID NO: 100142 - DNA, 33 bp, Homo sapien
cgtagcactccctgcatgagattaagggtgtgt

SEQ ID NO: 100143 - DNA, 33 bp, Homo sapien
tccttccatcccctgtaaaggttgatttgacct

SEQ ID NO: 100144 - DNA, 33 bp, Homo sapien
tccttccatcccctgttaaggttgatttgacct

SEQ ID NO: 100145 - DNA, 33 bp, Homo sapien
atgggaagaaaaagacaatactgcatgagaacc

SEQ ID NO: 100146 - DNA, 33 bp, Homo sapien
atgggaagaaaaagacgatactgcatgagaacc

SEQ ID NO: 100147 - DNA, 33 bp, Homo sapien
aggttagtttgaacacacagagggagtacccat

SEQ ID NO: 100148 - DNA, 33 bp, Homo sapien
aggttagtttgaacacgcagagggagtacccat

SEQ ID NO: 100149 - DNA, 33 bp, Homo sapien
tccctctcccgcaagcaattctgtttttctttc

SEQ ID NO: 100150 - DNA, 33 bp, Homo sapien
tccctctcccgcaagcgattctgtttttctttc

SEQ ID NO: 100151 - DNA, 33 bp, Homo sapien
gaggactcagacacacaagaagtgagtttaaga

SEQ ID NO: 100152 - DNA, 33 bp, Homo sapien
gaggactcagacacacgagaagtgagtttaaga

SEQ ID NO: 100153 - DNA, 33 bp, Homo sapien
aacggtgttttgaaggaaaggattttgaagctg

SEQ ID NO: 100154 - DNA, 33 bp, Homo sapien
aacggtgttttgaagggaaggattttgaagctg

SEQ ID NO: 100155 - DNA, 33 bp, Homo sapien
tactgaaccaaacttaagtctgcccacccaatg

SEQ ID NO: 100156 - DNA, 33 bp, Homo sapien
tactgaaccaaacttaggtctgcccacccaatg

SEQ ID NO: 100157 - DNA, 33 bp, Homo sapien
catgcaccatctctgaacttcacaccaaactgc

SEQ ID NO: 100158 - DNA, 33 bp, Homo sapien
catgcaccatctctgagcttcacaccaaactgc

SEQ ID NO: 100159 - DNA, 33 bp, Homo sapien
aagggtcagtaatccacaaatccaaatattcag

SEQ ID NO: 100160 - DNA, 33 bp, Homo sapien
aagggtcagtaatccataaatccaaatattcag

SEQ ID NO: 100161 - DNA, 33 bp, Homo sapien
gataaaaaggtaagacagaccacttcattctaa

SEQ ID NO: 100162 - DNA, 33 bp, Homo sapien
gataaaaaggtaagacggaccacttcattctaa

SEQ ID NO: 100163 - DNA, 33 bp, Homo sapien
aaaccatgctgtaactcaaccaccttagacaca

SEQ ID NO: 100164 - DNA, 33 bp, Homo sapien
aaaccatgctgtaacttaaccaccttagacaca

SEQ ID NO: 100165 - DNA, 33 bp, Homo sapien
atattgtattgaacaaagtcatttctggtcagc

SEQ ID NO: 100166 - DNA, 33 bp, Homo sapien
atattgtattgaacaatgtcatttctggtcagc

SEQ ID NO: 100167 - DNA, 33 bp, Homo sapien
aagtaaatataagaaactactgcacttggcacc

SEQ ID NO: 100168 - DNA, 33 bp, Homo sapien
aagtaaatataagaaattactgcacttggcacc

SEQ ID NO: 100169 - DNA, 33 bp, Homo sapien
gagatctgcctttgagaagacacacaaataaaa

SEQ ID NO: 100170 - DNA, 33 bp, Homo sapien
gagatctgcctttgaggagacacacaaataaaa

SEQ ID NO: 100171 - DNA, 33 bp, Homo sapien
atcagtgcttgatctgaagttgcttctcttcta

SEQ ID NO: 100172 - DNA, 33 bp, Homo sapien
atcagtgcttgatctgcagttgcttctcttcta

SEQ ID NO: 100173 - DNA, 33 bp, Homo sapien
agatgattcctatttcactcaatgtcacagata

SEQ ID NO: 100174 - DNA, 33 bp, Homo sapien
agatgattcctatttctctcaatgtcacagata

SEQ ID NO: 100175 - DNA, 33 bp, Homo sapien
gaaatataggcaatccagaagattttatttata

SEQ ID NO: 100176 - DNA, 33 bp, Homo sapien
gaaatataggcaatccggaagattttatttata

SEQ ID NO: 100177 - DNA, 33 bp, Homo sapien
attgacctcaaagagacgttgtaaggattaaac

SEQ ID NO: 100178 - DNA, 33 bp, Homo sapien
attgacctcaaagagatgttgtaaggattaaac

SEQ ID NO: 100179 - DNA, 33 bp, Homo sapien
ccaccaggaatttacacctttcagcatttggtc

SEQ ID NO: 100180 - DNA, 33 bp, Homo sapien
ccaccaggaatttacatctttcagcatttggtc

SEQ ID NO: 100181 - DNA, 33 bp, Homo sapien
ccagccatacttccaccggctggagcaaagagg

SEQ ID NO: 100182 - DNA, 33 bp, Homo sapien
ccagccatacttccactggctggagcaaagagg

SEQ ID NO: 100183 - DNA, 33 bp, Homo sapien
tggtccatgagtataaacttaacaatagacact

SEQ ID NO: 100184 - DNA, 33 bp, Homo sapien
tggtccatgagtataagcttaacaatagacact

SEQ ID NO: 100185 - DNA, 33 bp, Homo sapien
ttctgataagctttcaaattgatacacagacga

SEQ ID NO: 100186 - DNA, 33 bp, Homo sapien
ttctgataagctttcacattgatacacagacga

SEQ ID NO: 100187 - DNA, 33 bp, Homo sapien
gctattgtgtgagccacataattaaccgttcaa

SEQ ID NO: 100188 - DNA, 33 bp, Homo sapien
gctattgtgtgagccatataattaaccgttcaa

SEQ ID NO: 100189 - DNA, 33 bp, Homo sapien
acagaacattaaaacacaggaatgggtctagct

SEQ ID NO: 100190 - DNA, 33 bp, Homo sapien
acagaacattaaaacagaggaatgggtctagct

SEQ ID NO: 100191 - DNA, 33 bp, Homo sapien
tagaaatagacagcataaaataacaagtggaaa

SEQ ID NO: 100192 - DNA, 33 bp, Homo sapien
tagaaatagacagcatgaaataacaagtggaaa

SEQ ID NO: 100193 - DNA, 33 bp, Homo sapien
cttttggatatcaaggaatgtacaaaacattaa

SEQ ID NO: 100194 - DNA, 33 bp, Homo sapien
cttttggatatcaagggatgtacaaaacattaa

SEQ ID NO: 100195 - DNA, 33 bp, Homo sapien
aatgaattttataaagaaacacatctgatgcaa

SEQ ID NO: 100196 - DNA, 33 bp, Homo sapien
aatgaattttataaaggaacacatctgatgcaa

SEQ ID NO: 100197 - DNA, 33 bp, Homo sapien
tccttattaaaaagacactccacacagtgttgg

SEQ ID NO: 100198 - DNA, 33 bp, Homo sapien
tccttattaaaaagacgctccacacagtgttgg

SEQ ID NO: 100199 - DNA, 33 bp, Homo sapien
acagggcaggagtgagaaactgggctgctgagt

SEQ ID NO: 100200 - DNA, 33 bp, Homo sapien
acagggcaggagtgaggaactgggctgctgagt

SEQ ID NO: 100201 - DNA, 33 bp, Homo sapien
acattctattgaccacggaaggtggagtgaaac

SEQ ID NO: 100202 - DNA, 33 bp, Homo sapien
acattctattgaccactgaaggtggagtgaaac

SEQ ID NO: 100203 - DNA, 33 bp, Homo sapien
tcctgaagatgtctcaatatccttcagtcgtta

SEQ ID NO: 100204 - DNA, 33 bp, Homo sapien
tcctgaagatgtctcagtatccttcagtcgtta

SEQ ID NO: 100205 - DNA, 33 bp, Homo sapien
taataaacaaatcacaacttctctttgacctac

SEQ ID NO: 100206 - DNA, 33 bp, Homo sapien
taataaacaaatcacagcttctctttgacctac

SEQ ID NO: 100207 - DNA, 33 bp, Homo sapien
gaactgggacaggtaagtgaaaggcaagagctg

SEQ ID NO: 100208 - DNA, 33 bp, Homo sapien
gaactgggacaggtaattgaaaggcaagagctg

SEQ ID NO: 100209 - DNA, 33 bp, Homo sapien
tagttctagtccaaaacacttgttttacaatga

SEQ ID NO: 100210 - DNA, 33 bp, Homo sapien
tagttctagtccaaaatacttgttttacaatga

SEQ ID NO: 100211 - DNA, 33 bp, Homo sapien
gtatactctctacagccaaggtccagtactgga

SEQ ID NO: 100212 - DNA, 33 bp, Homo sapien
gtatactctctacagctaaggtccagtactgga

SEQ ID NO: 100213 - DNA, 33 bp, Homo sapien
caaagccacaggaacagtatagaggtttaggtt

SEQ ID NO: 100214 - DNA, 33 bp, Homo sapien
caaagccacaggaacattatagaggtttaggtt

SEQ ID NO: 100215 - DNA, 33 bp, Homo sapien
aacatattttaaataagcagctttctagttaat

SEQ ID NO: 100216 - DNA, 33 bp, Homo sapien
aacatattttaaataatcagctttctagttaat

SEQ ID NO: 100217 - DNA, 33 bp, Homo sapien
atctttgcctaaactcccctactctaagcaacc

SEQ ID NO: 100218 - DNA, 33 bp, Homo sapien
atctttgcctaaactctcctactctaagcaacc

SEQ ID NO: 100219 - DNA, 33 bp, Homo sapien
agaaaaccacaccatcaaaaggtgaaatttgtg

SEQ ID NO: 100220 - DNA, 33 bp, Homo sapien
agaaaaccacaccatcgaaaggtgaaatttgtg

SEQ ID NO: 100221 - DNA, 33 bp, Homo sapien
tatctgaacgtctccacgaagagcatgatgaac

SEQ ID NO: 100222 - DNA, 33 bp, Homo sapien
tatctgaacgtctccatgaagagcatgatgaac

SEQ ID NO: 100223 - DNA, 33 bp, Homo sapien
cgttcagatatattccaacaagttgggagcaga

SEQ ID NO: 100224 - DNA, 33 bp, Homo sapien
cgttcagatatattcccacaagttgggagcaga

SEQ ID NO: 100225 - DNA, 33 bp, Homo sapien
catcaagggactaaccaccactcatagaaaata

SEQ ID NO: 100226 - DNA, 33 bp, Homo sapien
catcaagggactaaccgccactcatagaaaata

SEQ ID NO: 100227 - DNA, 33 bp, Homo sapien
gccttagctgttttaactgtggattaaaccatc

SEQ ID NO: 100228 - DNA, 33 bp, Homo sapien
gccttagctgttttaattgtggattaaaccatc

SEQ ID NO: 100229 - DNA, 33 bp, Homo sapien
aacatcaatacttaacagaatagaaacaataga

SEQ ID NO: 100230 - DNA, 33 bp, Homo sapien
aacatcaatacttaactgaatagaaacaataga

SEQ ID NO: 100231 - DNA, 33 bp, Homo sapien
ggattccatcttttcccaattccaagacagata

SEQ ID NO: 100232 - DNA, 33 bp, Homo sapien
ggattccatcttttcctaattccaagacagata

SEQ ID NO: 100233 - DNA, 33 bp, Homo sapien
cataccattaggtttcacttctttatccatctt

SEQ ID NO: 100234 - DNA, 33 bp, Homo sapien
cataccattaggtttcgcttctttatccatctt

SEQ ID NO: 100235 - DNA, 33 bp, Homo sapien
acaacaggcattagtacatctgctgtatgacct

SEQ ID NO: 100236 - DNA, 33 bp, Homo sapien
acaacaggcattagtatatctgctgtatgacct

SEQ ID NO: 100237 - DNA, 33 bp, Homo sapien
tgtgaaagtgcacacaactgtgagtgattaagc

SEQ ID NO: 100238 - DNA, 33 bp, Homo sapien
tgtgaaagtgcacacatctgtgagtgattaagc

SEQ ID NO: 100239 - DNA, 33 bp, Homo sapien
atggatctgtttgttacgtgttatattctatat

SEQ ID NO: 100240 - DNA, 33 bp, Homo sapien
atggatctgtttgttatgtgttatattctatat

SEQ ID NO: 100241 - DNA, 33 bp, Homo sapien
ggttatcccagacctcacaatcaagagaagtac

SEQ ID NO: 100242 - DNA, 33 bp, Homo sapien
ggttatcccagacctcgcaatcaagagaagtac

SEQ ID NO: 100243 - DNA, 33 bp, Homo sapien
aaactgtttttacatacggtccaggttttctta

SEQ ID NO: 100244 - DNA, 33 bp, Homo sapien
aaactgtttttacatatggtccaggttttctta

SEQ ID NO: 100245 - DNA, 33 bp, Homo sapien
ggttttacctccagatcagtcaggttctcacag

SEQ ID NO: 100246 - DNA, 33 bp, Homo sapien
ggttttacctccagattagtcaggttctcacag

SEQ ID NO: 100247 - DNA, 33 bp, Homo sapien
tctacttcatccactacagcctttatcatatta

SEQ ID NO: 100248 - DNA, 33 bp, Homo sapien
tctacttcatccactagagcctttatcatatta

SEQ ID NO: 100249 - DNA, 33 bp, Homo sapien
tccttctcagaattcccatctctctacttacat

SEQ ID NO: 100250 - DNA, 33 bp, Homo sapien
tccttctcagaattcctatctctctacttacat

SEQ ID NO: 100251 - DNA, 33 bp, Homo sapien
agattgttttctccaccgagtccagtctactaa

SEQ ID NO: 100252 - DNA, 33 bp, Homo sapien
agattgttttctccactgagtccagtctactaa

SEQ ID NO: 100253 - DNA, 33 bp, Homo sapien
ttctcagagaatgccaaggaggataaatatttt

SEQ ID NO: 100254 - DNA, 33 bp, Homo sapien
ttctcagagaatgccagggaggataaatatttt

SEQ ID NO: 100255 - DNA, 33 bp, Homo sapien
gtccatctaccttttcacaagaacatctaagtg

SEQ ID NO: 100256 - DNA, 33 bp, Homo sapien
gtccatctaccttttcgcaagaacatctaagtg

SEQ ID NO: 100257 - DNA, 33 bp, Homo sapien
tacagattgggctgagaaggaaacaacaagaac

SEQ ID NO: 100258 - DNA, 33 bp, Homo sapien
tacagattgggctgaggaggaaacaacaagaac

SEQ ID NO: 100259 - DNA, 33 bp, Homo sapien
atttgccagaaaatacacttttacactttagct

SEQ ID NO: 100260 - DNA, 33 bp, Homo sapien
atttgccagaaaatacgcttttacactttagct

SEQ ID NO: 100261 - DNA, 33 bp, Homo sapien
ttcctatgattcttcacctcagtcaacggtgac

SEQ ID NO: 100262 - DNA, 33 bp, Homo sapien
ttcctatgattcttcatctcagtcaacggtgac

SEQ ID NO: 100263 - DNA, 33 bp, Homo sapien
gtgaaatatcaaataaccatttagatgcagaag

SEQ ID NO: 100264 - DNA, 33 bp, Homo sapien
gtgaaatatcaaataagcatttagatgcagaag

SEQ ID NO: 100265 - DNA, 33 bp, Homo sapien
catttttgtgaaggtacagatccaagctattaa

SEQ ID NO: 100266 - DNA, 33 bp, Homo sapien
catttttgtgaaggtagagatccaagctattaa

SEQ ID NO: 100267 - DNA, 33 bp, Homo sapien
catcttgaaatcaaatcatgttggcaagtcaga

SEQ ID NO: 100268 - DNA, 33 bp, Homo sapien
catcttgaaatcaaattatgttggcaagtcaga

SEQ ID NO: 100269 - DNA, 33 bp, Homo sapien
aatgtatgttaaatgacgtgaaaggaaaaaagt

SEQ ID NO: 100270 - DNA, 33 bp, Homo sapien
aatgtatgttaaatgatgtgaaaggaaaaaagt

SEQ ID NO: 100271 - DNA, 33 bp, Homo sapien
atgtctcacacatgataaccacttttttccttt

SEQ ID NO: 100272 - DNA, 33 bp, Homo sapien
atgtctcacacatgatgaccacttttttccttt

SEQ ID NO: 100273 - DNA, 33 bp, Homo sapien
actccgagtccatttccaggtagagggtgaaaa

SEQ ID NO: 100274 - DNA, 33 bp, Homo sapien
actccgagtccatttctaggtagagggtgaaaa

SEQ ID NO: 100275 - DNA, 33 bp, Homo sapien
gaagcttacacaattaggaaagcagaacaaatg

SEQ ID NO: 100276 - DNA, 33 bp, Homo sapien
gaagcttacacaattatgaaagcagaacaaatg

SEQ ID NO: 100277 - DNA, 33 bp, Homo sapien
cccagtcatggctgaacggctgaataaattatg

SEQ ID NO: 100278 - DNA, 33 bp, Homo sapien
cccagtcatggctgaatggctgaataaattatg

SEQ ID NO: 100279 - DNA, 33 bp, Homo sapien
tgctaccatgagcaaaactgaagtatgtcctta

SEQ ID NO: 100280 - DNA, 33 bp, Homo sapien
tgctaccatgagcaaagctgaagtatgtcctta

SEQ ID NO: 100281 - DNA, 33 bp, Homo sapien
catgctttctgagtcacggagttcctcttccag

SEQ ID NO: 100282 - DNA, 33 bp, Homo sapien
catgctttctgagtcagggagttcctcttccag

SEQ ID NO: 100283 - DNA, 33 bp, Homo sapien
aacaactctgtgcaccaaactcagtctaccctg

SEQ ID NO: 100284 - DNA, 33 bp, Homo sapien
aacaactctgtgcaccgaactcagtctaccctg

SEQ ID NO: 100285 - DNA, 33 bp, Homo sapien
ggcagacttgtacaaaggaagcaggaccttaac

SEQ ID NO: 100286 - DNA, 33 bp, Homo sapien
ggcagacttgtacaaatgaagcaggaccttaac

SEQ ID NO: 100287 - DNA, 33 bp, Homo sapien
ggttctccaccttttacaccatctattcttctc

SEQ ID NO: 100288 - DNA, 33 bp, Homo sapien
ggttctccaccttttagaccatctattcttctc

SEQ ID NO: 100289 - DNA, 33 bp, Homo sapien
tgctgtcttgtaactacgtaaatgtctggaatt

SEQ ID NO: 100290 - DNA, 33 bp, Homo sapien
tgctgtcttgtaactatgtaaatgtctggaatt

SEQ ID NO: 100291 - DNA, 33 bp, Homo sapien
tattgtccaatttgagaagaaattaagccaatc

SEQ ID NO: 100292 - DNA, 33 bp, Homo sapien
tattgtccaatttgaggagaaattaagccaatc

SEQ ID NO: 100293 - DNA, 33 bp, Homo sapien
attatgaacaatgctgcatctgttaaatggtga

SEQ ID NO: 100294 - DNA, 33 bp, Homo sapien
attatgaacaatgctgtatctgttaaatggtga

SEQ ID NO: 100295 - DNA, 33 bp, Homo sapien
ttggtgaattctacaaagcaacttaggaagaaa

SEQ ID NO: 100296 - DNA, 33 bp, Homo sapien
ttggtgaattctacaaggcaacttaggaagaaa

SEQ ID NO: 100297 - DNA, 33 bp, Homo sapien
gtgacccagtagcggcaactctgcattcacagc

SEQ ID NO: 100298 - DNA, 33 bp, Homo sapien
gtgacccagtagcggcgactctgcattcacagc

SEQ ID NO: 100299 - DNA, 33 bp, Homo sapien
ttgcgggcccatcaacccagataaaacaatcta

SEQ ID NO: 100300 - DNA, 33 bp, Homo sapien
ttgcgggcccatcaacgcagataaaacaatcta

SEQ ID NO: 100301 - DNA, 33 bp, Homo sapien
gagcctatgagaaacacgataactgcacttgga

SEQ ID NO: 100302 - DNA, 33 bp, Homo sapien
gagcctatgagaaacatgataactgcacttgga

SEQ ID NO: 100303 - DNA, 33 bp, Homo sapien
ctgggccacacctctcacactaaggaagggtcc

SEQ ID NO: 100304 - DNA, 33 bp, Homo sapien
ctgggccacacctctcgcactaaggaagggtcc

SEQ ID NO: 100305 - DNA, 33 bp, Homo sapien
tgaatacttgccatctcacatttttctttaaaa

SEQ ID NO: 100306 - DNA, 33 bp, Homo sapien
tgaatacttgccatcttacatttttctttaaaa

SEQ ID NO: 100307 - DNA, 33 bp, Homo sapien
tggactagaacaaaacaaactggcttttgagga

SEQ ID NO: 100308 - DNA, 33 bp, Homo sapien
tggactagaacaaaacgaactggcttttgagga

SEQ ID NO: 100309 - DNA, 33 bp, Homo sapien
tccttgggctgtcatcgcgcatggattacagtc

SEQ ID NO: 100310 - DNA, 33 bp, Homo sapien
tccttgggctgtcatctcgcatggattacagtc

SEQ ID NO: 100311 - DNA, 33 bp, Homo sapien
ccacagttagagccacggatggatcacaggtat

SEQ ID NO: 100312 - DNA, 33 bp, Homo sapien
ccacagttagagccactgatggatcacaggtat

SEQ ID NO: 100313 - DNA, 33 bp, Homo sapien
cctttgagcatgctccccccttaattgttcttt

SEQ ID NO: 100314 - DNA, 33 bp, Homo sapien
cctttgagcatgctcctcccttaattgttcttt

SEQ ID NO: 100315 - DNA, 33 bp, Homo sapien
ggctgaaaagcagtcacgggtcccacgaagaag

SEQ ID NO: 100316 - DNA, 33 bp, Homo sapien
ggctgaaaagcagtcatgggtcccacgaagaag

SEQ ID NO: 100317 - DNA, 33 bp, Homo sapien
gtgggaaacttatttccaactgattctctgggt

SEQ ID NO: 100318 - DNA, 33 bp, Homo sapien
gtgggaaacttatttctaactgattctctgggt

SEQ ID NO: 100319 - DNA, 33 bp, Homo sapien
tcaactaattttacaaaccagtaatctgactat

SEQ ID NO: 100320 - DNA, 33 bp, Homo sapien
tcaactaattttacaagccagtaatctgactat

SEQ ID NO: 100321 - DNA, 33 bp, Homo sapien
tcttaggacagtgagaagtaacagaaaagttcc

SEQ ID NO: 100322 - DNA, 33 bp, Homo sapien
tcttaggacagtgagacgtaacagaaaagttcc

SEQ ID NO: 100323 - DNA, 33 bp, Homo sapien
tttctgtaattttaaacggttttcatgaaagtc

SEQ ID NO: 100324 - DNA, 33 bp, Homo sapien
tttctgtaattttaaatggttttcatgaaagtc

SEQ ID NO: 100325 - DNA, 33 bp, Homo sapien
gggaggggcaaggaagcagtcatggtgaatgag

SEQ ID NO: 100326 - DNA, 33 bp, Homo sapien
gggaggggcaaggaagtagtcatggtgaatgag

SEQ ID NO: 100327 - DNA, 33 bp, Homo sapien
agaacactgtgctgctaacatcgtaactagaag

SEQ ID NO: 100328 - DNA, 33 bp, Homo sapien
agaacactgtgctgcttacatcgtaactagaag

SEQ ID NO: 100329 - DNA, 33 bp, Homo sapien
gctccttcatccgtctaaataaagaaattggta

SEQ ID NO: 100330 - DNA, 33 bp, Homo sapien
gctccttcatccgtctgaataaagaaattggta

SEQ ID NO: 100331 - DNA, 33 bp, Homo sapien
ttaatttggggaagagaagaaatcataatttat

SEQ ID NO: 100332 - DNA, 33 bp, Homo sapien
ttaatttggggaagaggagaaatcataatttat

SEQ ID NO: 100333 - DNA, 33 bp, Homo sapien
agaagttaattagataagccttgcgatggacta

SEQ ID NO: 100334 - DNA, 33 bp, Homo sapien
agaagttaattagataggccttgcgatggacta

SEQ ID NO: 100335 - DNA, 33 bp, Homo sapien
ttccacattatccgtacatcctgtttgtagggt

SEQ ID NO: 100336 - DNA, 33 bp, Homo sapien
ttccacattatccgtatatcctgtttgtagggt

SEQ ID NO: 100337 - DNA, 33 bp, Homo sapien
caagatcattttgctccccacaagggacatttg

SEQ ID NO: 100338 - DNA, 33 bp, Homo sapien
caagatcattttgctctccacaagggacatttg

SEQ ID NO: 100339 - DNA, 33 bp, Homo sapien
tgacaagcaaagaaaacgcagggctgttgggaa

SEQ ID NO: 100340 - DNA, 33 bp, Homo sapien
tgacaagcaaagaaaatgcagggctgttgggaa

SEQ ID NO: 100341 - DNA, 33 bp, Homo sapien
accgcagacctgtaccaatccaccaccaggggg

SEQ ID NO: 100342 - DNA, 33 bp, Homo sapien
accgcagacctgtaccgatccaccaccaggggg

SEQ ID NO: 100343 - DNA, 33 bp, Homo sapien
gagctcatttggaccactgatgctacgcccatg

SEQ ID NO: 100344 - DNA, 33 bp, Homo sapien
gagctcatttggaccattgatgctacgcccatg

SEQ ID NO: 100345 - DNA, 33 bp, Homo sapien
cagtcaatggcagagcaagattcgaagcctcag

SEQ ID NO: 100346 - DNA, 33 bp, Homo sapien
cagtcaatggcagagcgagattcgaagcctcag

SEQ ID NO: 100347 - DNA, 33 bp, Homo sapien
atcaggaaattagcacaagaataactaacgggg

SEQ ID NO: 100348 - DNA, 33 bp, Homo sapien
atcaggaaattagcacgagaataactaacgggg

SEQ ID NO: 100349 - DNA, 33 bp, Homo sapien
gaagatatttctggaaaagcttgtgccacaaag

SEQ ID NO: 100350 - DNA, 33 bp, Homo sapien
gaagatatttctggaagagcttgtgccacaaag

SEQ ID NO: 100351 - DNA, 33 bp, Homo sapien
tcaccgtaactaattcactccgctcttcacatg

SEQ ID NO: 100352 - DNA, 33 bp, Homo sapien
tcaccgtaactaattcgctccgctcttcacatg

SEQ ID NO: 100353 - DNA, 33 bp, Homo sapien
atagagttttccaaaacacctcaatacacttca

SEQ ID NO: 100354 - DNA, 33 bp, Homo sapien
atagagttttccaaaatacctcaatacacttca

SEQ ID NO: 100355 - DNA, 33 bp, Homo sapien
ttaggtagcaaacatcaagtctgtttatatttt

SEQ ID NO: 100356 - DNA, 33 bp, Homo sapien
ttaggtagcaaacatcgagtctgtttatatttt

SEQ ID NO: 100357 - DNA, 33 bp, Homo sapien
caggataattgatcacagtaccaaatgctgcag

SEQ ID NO: 100358 - DNA, 33 bp, Homo sapien
caggataattgatcacggtaccaaatgctgcag

SEQ ID NO: 100359 - DNA, 33 bp, Homo sapien
ctgccccaactaagtaaatgcaagccactcaaa

SEQ ID NO: 100360 - DNA, 33 bp, Homo sapien
ctgccccaactaagtacatgcaagccactcaaa

SEQ ID NO: 100361 - DNA, 33 bp, Homo sapien
agaccccggggtgtcaataactctgctgctgct

SEQ ID NO: 100362 - DNA, 33 bp, Homo sapien
agaccccggggtgtcagtaactctgctgctgct

SEQ ID NO: 100363 - DNA, 33 bp, Homo sapien
ctgttcctcacttaccagaatggtcagaagagt

SEQ ID NO: 100364 - DNA, 33 bp, Homo sapien
ctgttcctcacttaccggaatggtcagaagagt

SEQ ID NO: 100365 - DNA, 33 bp, Homo sapien
ttcccaggaagttgtcaagcctattttcctctc

SEQ ID NO: 100366 - DNA, 33 bp, Homo sapien
ttcccaggaagttgtcgagcctattttcctctc

SEQ ID NO: 100367 - DNA, 33 bp, Homo sapien
gcctctgatgaattcaagctttcttggtcactt

SEQ ID NO: 100368 - DNA, 33 bp, Homo sapien
gcctctgatgaattcaggctttcttggtcactt

SEQ ID NO: 100369 - DNA, 33 bp, Homo sapien
ctcacctgtgttctggcattaactctgcattag

SEQ ID NO: 100370 - DNA, 33 bp, Homo sapien
ctcacctgtgttctggtattaactctgcattag

SEQ ID NO: 100371 - DNA, 33 bp, Homo sapien
ggcctatggatttgagacagaaataagagcaca

SEQ ID NO: 100372 - DNA, 33 bp, Homo sapien
ggcctatggatttgaggcagaaataagagcaca

SEQ ID NO: 100373 - DNA, 33 bp, Homo sapien
gaaatttggacatcaactgattagaaaggaaag

SEQ ID NO: 100374 - DNA, 33 bp, Homo sapien
gaaatttggacatcaattgattagaaaggaaag

SEQ ID NO: 100375 - DNA, 33 bp, Homo sapien
atctgccttccgtgacgccaggccggactcata

SEQ ID NO: 100376 - DNA, 33 bp, Homo sapien
atctgccttccgtgactccaggccggactcata

SEQ ID NO: 100377 - DNA, 33 bp, Homo sapien
tttgtaagggaatttaaagctcgtttactctat

SEQ ID NO: 100378 - DNA, 33 bp, Homo sapien
tttgtaagggaatttagagctcgtttactctat

SEQ ID NO: 100379 - DNA, 33 bp, Homo sapien
tagaaccaatttatgcaaaaaataagacccctg

SEQ ID NO: 100380 - DNA, 33 bp, Homo sapien
tagaaccaatttatgcgaaaaataagacccctg

SEQ ID NO: 100381 - DNA, 33 bp, Homo sapien
cctgatacagaaaaaactgggtaggtgctcact

SEQ ID NO: 100382 - DNA, 33 bp, Homo sapien
cctgatacagaaaaaattgggtaggtgctcact

SEQ ID NO: 100383 - DNA, 33 bp, Homo sapien
tctgctattcataggaataatcatggaagtcat

SEQ ID NO: 100384 - DNA, 33 bp, Homo sapien
tctgctattcataggagtaatcatggaagtcat

SEQ ID NO: 100385 - DNA, 33 bp, Homo sapien
ggtcactttggatctcaatgggagatggataaa

SEQ ID NO: 100386 - DNA, 33 bp, Homo sapien
ggtcactttggatctcgatgggagatggataaa

SEQ ID NO: 100387 - DNA, 33 bp, Homo sapien
atgttatattgtagggcatttctacccgttgaa

SEQ ID NO: 100388 - DNA, 33 bp, Homo sapien
atgttatattgtagggtatttctacccgttgaa

SEQ ID NO: 100389 - DNA, 33 bp, Homo sapien
cagccattattccagaagtcctaagatttgcaa

SEQ ID NO: 100390 - DNA, 33 bp, Homo sapien
cagccattattccagaggtcctaagatttgcaa

SEQ ID NO: 100391 - DNA, 33 bp, Homo sapien
acttaatgtttcaagcacagtatgtttcgttaa

SEQ ID NO: 100392 - DNA, 33 bp, Homo sapien
acttaatgtttcaagcgcagtatgtttcgttaa

SEQ ID NO: 100393 - DNA, 33 bp, Homo sapien
gatagatggattagacactgtgactgtaaaaat

SEQ ID NO: 100394 - DNA, 33 bp, Homo sapien
gatagatggattagacgctgtgactgtaaaaat

SEQ ID NO: 100395 - DNA, 33 bp, Homo sapien
aaaacaaacaaacaaacaagagtcaggcaagag

SEQ ID NO: 100396 - DNA, 33 bp, Homo sapien
aaaacaaacaaacaaagaagagtcaggcaagag

SEQ ID NO: 100397 - DNA, 33 bp, Homo sapien
tcctcacaggactacaaggatgattgcaacact

SEQ ID NO: 100398 - DNA, 33 bp, Homo sapien
tcctcacaggactacagggatgattgcaacact

SEQ ID NO: 100399 - DNA, 33 bp, Homo sapien
aaaagatgtgttcctacaatgcacaagcttgga

SEQ ID NO: 100400 - DNA, 33 bp, Homo sapien
aaaagatgtgttcctataatgcacaagcttgga

SEQ ID NO: 100401 - DNA, 33 bp, Homo sapien
tttgagttgttggaacaaaaggagtatttatac

SEQ ID NO: 100402 - DNA, 33 bp, Homo sapien
tttgagttgttggaaccaaaggagtatttatac

SEQ ID NO: 100403 - DNA, 33 bp, Homo sapien
tagcaaaaatgtaaacaaatctgatcaaacata

SEQ ID NO: 100404 - DNA, 33 bp, Homo sapien
tagcaaaaatgtaaacgaatctgatcaaacata

SEQ ID NO: 100405 - DNA, 33 bp, Homo sapien
cgtctggaatagttgacagttgagttttgcttc

SEQ ID NO: 100406 - DNA, 33 bp, Homo sapien
cgtctggaatagttgatagttgagttttgcttc

SEQ ID NO: 100407 - DNA, 33 bp, Homo sapien
aatattctgcatgggaagaaagacggaaataca

SEQ ID NO: 100408 - DNA, 33 bp, Homo sapien
aatattctgcatgggaggaaagacggaaataca

SEQ ID NO: 100409 - DNA, 33 bp, Homo sapien
agctgaggcacaccagaagtaaaagctagcggg

SEQ ID NO: 100410 - DNA, 33 bp, Homo sapien
agctgaggcacaccagtagtaaaagctagcggg

SEQ ID NO: 100411 - DNA, 33 bp, Homo sapien
ataagacagagccatacgcaagaaagttaaaga

SEQ ID NO: 100412 - DNA, 33 bp, Homo sapien
ataagacagagccatatgcaagaaagttaaaga

SEQ ID NO: 100413 - DNA, 33 bp, Homo sapien
tatgtgtgcgtatatactactgagacatgatgt

SEQ ID NO: 100414 - DNA, 33 bp, Homo sapien
tatgtgtgcgtatatattactgagacatgatgt

SEQ ID NO: 100415 - DNA, 33 bp, Homo sapien
ccatttattcactgacaaggaagaagccctggg

SEQ ID NO: 100416 - DNA, 33 bp, Homo sapien
ccatttattcactgaccaggaagaagccctggg

SEQ ID NO: 100417 - DNA, 33 bp, Homo sapien
caaacccaatattattaaagtgaggactaagca

SEQ ID NO: 100418 - DNA, 33 bp, Homo sapien
caaacccaatattattcaagtgaggactaagca

SEQ ID NO: 100419 - DNA, 33 bp, Homo sapien
ttgccatattgaactaagtatagatccttgaac

SEQ ID NO: 100420 - DNA, 33 bp, Homo sapien
ttgccatattgaactacgtatagatccttgaac

SEQ ID NO: 100421 - DNA, 33 bp, Homo sapien
gattataggtgtgaagccttatttctcagtttc

SEQ ID NO: 100422 - DNA, 33 bp, Homo sapien
gattataggtgtgaaggcttatttctcagtttc

SEQ ID NO: 100423 - DNA, 33 bp, Homo sapien
gggtgaaagttgaaacaatgatgccaagtgcaa

SEQ ID NO: 100424 - DNA, 33 bp, Homo sapien
gggtgaaagttgaaaccatgatgccaagtgcaa

SEQ ID NO: 100425 - DNA, 33 bp, Homo sapien
tttttagtgacttcagcattcatggcttgagtg

SEQ ID NO: 100426 - DNA, 33 bp, Homo sapien
tttttagtgacttcagtattcatggcttgagtg

SEQ ID NO: 100427 - DNA, 33 bp, Homo sapien
tcatgtttgacatcaactagcacactcaagcca

SEQ ID NO: 100428 - DNA, 33 bp, Homo sapien
tcatgtttgacatcaattagcacactcaagcca

SEQ ID NO: 100429 - DNA, 33 bp, Homo sapien
gctgtgattcttaagcccgctgcagatgatgct

SEQ ID NO: 100430 - DNA, 33 bp, Homo sapien
gctgtgattcttaagctcgctgcagatgatgct

SEQ ID NO: 100431 - DNA, 33 bp, Homo sapien
ggctggatatcatcataagccaactgatttaag

SEQ ID NO: 100432 - DNA, 33 bp, Homo sapien
ggctggatatcatcatgagccaactgatttaag

SEQ ID NO: 100433 - DNA, 33 bp, Homo sapien
ttaggtttgctgcaaacggtgttgttaacatag

SEQ ID NO: 100434 - DNA, 33 bp, Homo sapien
ttaggtttgctgcaaagggtgttgttaacatag

SEQ ID NO: 100435 - DNA, 33 bp, Homo sapien
atctcttatatcagcaagaatggtacaaatgta

SEQ ID NO: 100436 - DNA, 33 bp, Homo sapien
atctcttatatcagcaggaatggtacaaatgta

SEQ ID NO: 100437 - DNA, 33 bp, Homo sapien
gagctcagatacttccgcactgtaatttgaatt

SEQ ID NO: 100438 - DNA, 33 bp, Homo sapien
gagctcagatacttcctcactgtaatttgaatt

SEQ ID NO: 100439 - DNA, 33 bp, Homo sapien
ccttgaattggcaagcacattttcagtgactaa

SEQ ID NO: 100440 - DNA, 33 bp, Homo sapien
ccttgaattggcaagcgcattttcagtgactaa

SEQ ID NO: 100441 - DNA, 33 bp, Homo sapien
ccaaagtttcaaactgaaagtgaccatttttac

SEQ ID NO: 100442 - DNA, 33 bp, Homo sapien
ccaaagtttcaaactggaagtgaccatttttac

SEQ ID NO: 100443 - DNA, 33 bp, Homo sapien
aagtcagaatgcaactcagaaagtaaattggag

SEQ ID NO: 100444 - DNA, 33 bp, Homo sapien
aagtcagaatgcaactgagaaagtaaattggag

SEQ ID NO: 100445 - DNA, 33 bp, Homo sapien
gataagagatactgcaaaaactgttaagattga

SEQ ID NO: 100446 - DNA, 33 bp, Homo sapien
gataagagatactgcacaaactgttaagattga

SEQ ID NO: 100447 - DNA, 33 bp, Homo sapien
agaaaagagccagagacacatttgacacagtaa

SEQ ID NO: 100448 - DNA, 33 bp, Homo sapien
agaaaagagccagagatacatttgacacagtaa

SEQ ID NO: 100449 - DNA, 33 bp, Homo sapien
agaaagatgttttttccccaagtcaaactgaat

SEQ ID NO: 100450 - DNA, 33 bp, Homo sapien
agaaagatgttttttctccaagtcaaactgaat

SEQ ID NO: 100451 - DNA, 33 bp, Homo sapien
ttatccatgtcataccccttaaatactcaagtg

SEQ ID NO: 100452 - DNA, 33 bp, Homo sapien
ttatccatgtcatacctcttaaatactcaagtg

SEQ ID NO: 100453 - DNA, 33 bp, Homo sapien
agctttttgtagcctacggtattggactgaact

SEQ ID NO: 100454 - DNA, 33 bp, Homo sapien
agctttttgtagcctatggtattggactgaact

SEQ ID NO: 100455 - DNA, 33 bp, Homo sapien
ctcccttggtctctcaagcagttgtatttagag

SEQ ID NO: 100456 - DNA, 33 bp, Homo sapien
ctcccttggtctctcaggcagttgtatttagag

SEQ ID NO: 100457 - DNA, 33 bp, Homo sapien
tgagtttatggttctccatgctcctcactgcta

SEQ ID NO: 100458 - DNA, 33 bp, Homo sapien
tgagtttatggttctctatgctcctcactgcta

SEQ ID NO: 100459 - DNA, 33 bp, Homo sapien
cactctcagcagatgaaccttcttctcacaagg

SEQ ID NO: 100460 - DNA, 33 bp, Homo sapien
cactctcagcagatgacccttcttctcacaagg

SEQ ID NO: 100461 - DNA, 33 bp, Homo sapien
gggtgaaactgagagacatttagaaggtagttt

SEQ ID NO: 100462 - DNA, 33 bp, Homo sapien
gggtgaaactgagagatatttagaaggtagttt

SEQ ID NO: 100463 - DNA, 33 bp, Homo sapien
tgttccagtcttgcacgattatctaaggtagga

SEQ ID NO: 100464 - DNA, 33 bp, Homo sapien
tgttccagtcttgcactattatctaaggtagga

SEQ ID NO: 100465 - DNA, 33 bp, Homo sapien
tcctcgtctgtacaacaaaaataattcctacct

SEQ ID NO: 100466 - DNA, 33 bp, Homo sapien
tcctcgtctgtacaacgaaaataattcctacct

SEQ ID NO: 100467 - DNA, 33 bp, Homo sapien
aggtgacctgttcactaaaagtccagactgcac

SEQ ID NO: 100468 - DNA, 33 bp, Homo sapien
aggtgacctgttcactgaaagtccagactgcac

SEQ ID NO: 100469 - DNA, 33 bp, Homo sapien
aggagtgaacggatacagggtttcttttatagg

SEQ ID NO: 100470 - DNA, 33 bp, Homo sapien
aggagtgaacggatacggggtttcttttatagg

SEQ ID NO: 100471 - DNA, 33 bp, Homo sapien
attatactctcttcccactcatcaactacggtg

SEQ ID NO: 100472 - DNA, 33 bp, Homo sapien
attatactctcttcccgctcatcaactacggtg

SEQ ID NO: 100473 - DNA, 33 bp, Homo sapien
gcagccaaaagcgtagcaaaaatacatcagcaa

SEQ ID NO: 100474 - DNA, 33 bp, Homo sapien
gcagccaaaagcgtaggaaaaatacatcagcaa

SEQ ID NO: 100475 - DNA, 33 bp, Homo sapien
tagcagtagtttttaaatgtcttgtcctgtatc

SEQ ID NO: 100476 - DNA, 33 bp, Homo sapien
tagcagtagtttttaattgtcttgtcctgtatc

SEQ ID NO: 100477 - DNA, 33 bp, Homo sapien
ctatagatatgatgaaacagactgaggaaatgg

SEQ ID NO: 100478 - DNA, 33 bp, Homo sapien
ctatagatatgatgaaccagactgaggaaatgg

SEQ ID NO: 100479 - DNA, 33 bp, Homo sapien
tggaggccactgggaggattcattctggcttca

SEQ ID NO: 100480 - DNA, 33 bp, Homo sapien
tggaggccactgggagtattcattctggcttca

SEQ ID NO: 100481 - DNA, 33 bp, Homo sapien
tgatttaggtctcagaaattttgtgtttagcat

SEQ ID NO: 100482 - DNA, 33 bp, Homo sapien
tgatttaggtctcagatattttgtgtttagcat

SEQ ID NO: 100483 - DNA, 33 bp, Homo sapien
tctgcagaaccatctacaggaactacactcttc

SEQ ID NO: 100484 - DNA, 33 bp, Homo sapien
tctgcagaaccatctataggaactacactcttc

SEQ ID NO: 100485 - DNA, 33 bp, Homo sapien
ttctccacctctgtaaccctagcacctaaaaca

SEQ ID NO: 100486 - DNA, 33 bp, Homo sapien
ttctccacctctgtaatcctagcacctaaaaca

SEQ ID NO: 100487 - DNA, 33 bp, Homo sapien
accaacagtgagtgcacgaagatatattggatt

SEQ ID NO: 100488 - DNA, 33 bp, Homo sapien
accaacagtgagtgcatgaagatatattggatt

SEQ ID NO: 100489 - DNA, 33 bp, Homo sapien
cattctactaggtctagctacctgtggctggac

SEQ ID NO: 100490 - DNA, 33 bp, Homo sapien
cattctactaggtctatctacctgtggctggac

SEQ ID NO: 100491 - DNA, 33 bp, Homo sapien
ctacaaggaaagctgacaaatgtagtgtctatc

SEQ ID NO: 100492 - DNA, 33 bp, Homo sapien
ctacaaggaaagctgagaaatgtagtgtctatc

SEQ ID NO: 100493 - DNA, 33 bp, Homo sapien
aaatttcattcttaaactaccaatactgaagtc

SEQ ID NO: 100494 - DNA, 33 bp, Homo sapien
aaatttcattcttaaagtaccaatactgaagtc

SEQ ID NO: 100495 - DNA, 33 bp, Homo sapien
atccacatgacttccaaaaggatttgtgatgag

SEQ ID NO: 100496 - DNA, 33 bp, Homo sapien
atccacatgacttccagaaggatttgtgatgag

SEQ ID NO: 100497 - DNA, 33 bp, Homo sapien
ttctgttatagtatcacataagagacagcagac

SEQ ID NO: 100498 - DNA, 33 bp, Homo sapien
ttctgttatagtatcatataagagacagcagac

SEQ ID NO: 100499 - DNA, 33 bp, Homo sapien
tagaaggaaagttatacagtaatcacctttatg

SEQ ID NO: 100500 - DNA, 33 bp, Homo sapien
tagaaggaaagttatatagtaatcacctttatg

SEQ ID NO: 100501 - DNA, 33 bp, Homo sapien
ctatgacagtggtcacccattatattcacggtg

SEQ ID NO: 100502 - DNA, 33 bp, Homo sapien
ctatgacagtggtcactcattatattcacggtg

SEQ ID NO: 100503 - DNA, 33 bp, Homo sapien
acacaatcaatgaaaaaacagaagatagaaaac

SEQ ID NO: 100504 - DNA, 33 bp, Homo sapien
acacaatcaatgaaaacacagaagatagaaaac

SEQ ID NO: 100505 - DNA, 33 bp, Homo sapien
tgactccaaatctcacacttcctaccacgtcta

SEQ ID NO: 100506 - DNA, 33 bp, Homo sapien
tgactccaaatctcacgcttcctaccacgtcta

SEQ ID NO: 100507 - DNA, 33 bp, Homo sapien
gtcagggacccgttacaggaggcggctctgcct

SEQ ID NO: 100508 - DNA, 33 bp, Homo sapien
gtcagggacccgttacgggaggcggctctgcct

SEQ ID NO: 100509 - DNA, 33 bp, Homo sapien
gaagttcatttgacaactgattttttggaaacc

SEQ ID NO: 100510 - DNA, 33 bp, Homo sapien
gaagttcatttgacaattgattttttggaaacc

SEQ ID NO: 100511 - DNA, 33 bp, Homo sapien
catttcaactgcgttacgtgctgcgaacagatc

SEQ ID NO: 100512 - DNA, 33 bp, Homo sapien
catttcaactgcgttatgtgctgcgaacagatc

SEQ ID NO: 100513 - DNA, 33 bp, Homo sapien
atggaactaaatgagaggatgttgagagttata

SEQ ID NO: 100514 - DNA, 33 bp, Homo sapien
atggaactaaatgagatgatgttgagagttata

SEQ ID NO: 100515 - DNA, 33 bp, Homo sapien
catgggatagaacagaatagaatactaccaaac

SEQ ID NO: 100516 - DNA, 33 bp, Homo sapien
catgggatagaacagagtagaatactaccaaac

SEQ ID NO: 100517 - DNA, 33 bp, Homo sapien
gtgggcagacaggatgaaagtctagcagaagga

SEQ ID NO: 100518 - DNA, 33 bp, Homo sapien
gtgggcagacaggatggaagtctagcagaagga

SEQ ID NO: 100519 - DNA, 33 bp, Homo sapien
ttgggacatgagaacaacacacagaggtcaggg

SEQ ID NO: 100520 - DNA, 33 bp, Homo sapien
ttgggacatgagaacagcacacagaggtcaggg

SEQ ID NO: 100521 - DNA, 33 bp, Homo sapien
tctttataacagtgtgaaaatgtactaatatac

SEQ ID NO: 100522 - DNA, 33 bp, Homo sapien
tctttataacagtgtggaaatgtactaatatac

SEQ ID NO: 100523 - DNA, 33 bp, Homo sapien
ctcaaaaatatgagtagcgcttattttataaac

SEQ ID NO: 100524 - DNA, 33 bp, Homo sapien
ctcaaaaatatgagtatcgcttattttataaac

SEQ ID NO: 100525 - DNA, 33 bp, Homo sapien; identical to SEQ ID NO: 100523

SEQ ID NO: 100526 - DNA, 33 bp, Homo sapien; identical to SEQ ID NO: 100524

SEQ ID NO: 100527 - DNA, 33 bp, Homo sapien
ctctcgcctcctcttgacaaaagcattgctggc

SEQ ID NO: 100528 - DNA, 33 bp, Homo sapien
ctctcgcctcctcttggcaaaagcattgctggc

SEQ ID NO: 100529 - DNA, 33 bp, Homo sapien
actcattaggacgtgacggtgaatgtgttttca

SEQ ID NO: 100530 - DNA, 33 bp, Homo sapien
actcattaggacgtgatggtgaatgtgttttca

SEQ ID NO: 100531 - DNA, 33 bp, Homo sapien
cattgccacgagctacaagtaatagaggacact

SEQ ID NO: 100532 - DNA, 33 bp, Homo sapien
cattgccacgagctacgagtaatagaggacact

SEQ ID NO: 100533 - DNA, 33 bp, Homo sapien
aaattacaggaatgagccaccttgtccagctga

SEQ ID NO: 100534 - DNA, 33 bp, Homo sapien
aaattacaggaatgaggcaccttgtccagctga

SEQ ID NO: 100535 - DNA, 33 bp, Homo sapien
agtgggagctccaattaaaaggttcaggaagga

SEQ ID NO: 100536 - DNA, 33 bp, Homo sapien
agtgggagctccaattgaaaggttcaggaagga

SEQ ID NO: 100537 - DNA, 33 bp, Homo sapien
gaggctgtcctaccaaagcagaaagtatactgt

SEQ ID NO: 100538 - DNA, 33 bp, Homo sapien
gaggctgtcctaccaacgcagaaagtatactgt

SEQ ID NO: 100539 - DNA, 33 bp, Homo sapien
gctgcccttagacaaaggaaaagagccagtaca

SEQ ID NO: 100540 - DNA, 33 bp, Homo sapien
gctgcccttagacaaatgaaaagagccagtaca

SEQ ID NO: 100541 - DNA, 33 bp, Homo sapien
ttttttgaggactaaactgcatttctgtatctc

SEQ ID NO: 100542 - DNA, 33 bp, Homo sapien
ttttttgaggactaaattgcatttctgtatctc

SEQ ID NO: 100543 - DNA, 33 bp, Homo sapien
ttgattgtgtacttcacaagagttttaatttga

SEQ ID NO: 100544 - DNA, 33 bp, Homo sapien
ttgattgtgtacttcagaagagttttaatttga

SEQ ID NO: 100545 - DNA, 33 bp, Homo sapien
tgtcctaatccctccaagttctggttataactt

SEQ ID NO: 100546 - DNA, 33 bp, Homo sapien
tgtcctaatccctccatgttctggttataactt

SEQ ID NO: 100547 - DNA, 33 bp, Homo sapien
tatatatcgcggcctgcaccttcgctgtctgca

SEQ ID NO: 100548 - DNA, 33 bp, Homo sapien
tatatatcgcggcctgtaccttcgctgtctgca

SEQ ID NO: 100549 - DNA, 33 bp, Homo sapien; identical to SEQ ID NO: 100547

SEQ ID NO: 100550 - DNA, 33 bp, Homo sapien; identical to SEQ ID NO: 100548

SEQ ID NO: 100551 - DNA, 33 bp, Homo sapien
accgcatcctggttcagagtaaacaatcaggtc

SEQ ID NO: 100552 - DNA, 33 bp, Homo sapien
accgcatcctggttcatagtaaacaatcaggtc

SEQ ID NO: 100553 - DNA, 33 bp, Homo sapien; identical to SEQ ID NO: 100551

SEQ ID NO: 100554 - DNA, 33 bp, Homo sapien; identical to SEQ ID NO: 100552

SEQ ID NO: 100555 - DNA, 33 bp, Homo sapien
catgttaagaaaacgccgacaaatagaaccagg

SEQ ID NO: 100556 - DNA, 33 bp, Homo sapien
catgttaagaaaacgctgacaaatagaaccagg

SEQ ID NO: 100557 - DNA, 33 bp, Homo sapien
tcctcaattgtttcagcacgattttggtagcat

SEQ ID NO: 100558 - DNA, 33 bp, Homo sapien
tcctcaattgtttcagtacgattttggtagcat

SEQ ID NO: 100559 - DNA, 33 bp, Homo sapien
tttttgattttgcttacggatattaagttgttc

SEQ ID NO: 100560 - DNA, 33 bp, Homo sapien
tttttgattttgcttatggatattaagttgttc

SEQ ID NO: 100561 - DNA, 33 bp, Homo sapien
aaaaaacaagaacagacaacgcagtattagaaa

SEQ ID NO: 100562 - DNA, 33 bp, Homo sapien
aaaaaacaagaacagataacgcagtattagaaa

SEQ ID NO: 100563 - DNA, 33 bp, Homo sapien
caaaaaactcctggaactaataagcagttatag

SEQ ID NO: 100564 - DNA, 33 bp, Homo sapien
caaaaaactcctggaagtaataagcagttatag

SEQ ID NO: 100565 - DNA, 33 bp, Homo sapien
attgaattaaatgacacgagttccccaacatgg

SEQ ID NO: 100566 - DNA, 33 bp, Homo sapien
attgaattaaatgacatgagttccccaacatgg

SEQ ID NO: 100567 - DNA, 33 bp, Homo sapien
acaagcaaatggcaaaagaattcacacaatgtg

SEQ ID NO: 100568 - DNA, 33 bp, Homo sapien
acaagcaaatggcaaaggaattcacacaatgtg

SEQ ID NO: 100569 - DNA, 33 bp, Homo sapien
agccaaatctcacttacaatgttaagcaaaaca

SEQ ID NO: 100570 - DNA, 33 bp, Homo sapien
agccaaatctcacttataatgttaagcaaaaca

SEQ ID NO: 100571 - DNA, 33 bp, Homo sapien
gatgctaatacatgtaactctagtttattcgtc

SEQ ID NO: 100572 - DNA, 33 bp, Homo sapien
gatgctaatacatgtagctctagtttattcgtc

SEQ ID NO: 100573 - DNA, 33 bp, Homo sapien
attatattttgaagacacttgtttgcagacatg

SEQ ID NO: 100574 - DNA, 33 bp, Homo sapien
attatattttgaagacgcttgtttgcagacatg

SEQ ID NO: 100575 - DNA, 33 bp, Homo sapien
gaagtcaaccatcttaagtctgagaaatcattc

SEQ ID NO: 100576 - DNA, 33 bp, Homo sapien
gaagtcaaccatcttaggtctgagaaatcattc

SEQ ID NO: 100577 - DNA, 33 bp, Homo sapien
tgtttgcaatatgacaaggatatttaatgcact

SEQ ID NO: 100578 - DNA, 33 bp, Homo sapien
tgtttgcaatatgacagggatatttaatgcact

SEQ ID NO: 100579 - DNA, 33 bp, Homo sapien
ctgtgtttttatgactaaagagtacgtttgata

SEQ ID NO: 100580 - DNA, 33 bp, Homo sapien
ctgtgtttttatgactgaagagtacgtttgata

SEQ ID NO: 100581 - DNA, 33 bp, Homo sapien
cactggagagatcagaagtgttgcggaggacat

SEQ ID NO: 100582 - DNA, 33 bp, Homo sapien
cactggagagatcagaggtgttgcggaggacat

SEQ ID NO: 100583 - DNA, 33 bp, Homo sapien
agtagataacttaccacgagcaaaaactaacag

SEQ ID NO: 100584 - DNA, 33 bp, Homo sapien
agtagataacttaccatgagcaaaaactaacag

SEQ ID NO: 100585 - DNA, 33 bp, Homo sapien
catatctaatgtgtgacgaaagaatgtatgtga

SEQ ID NO: 100586 - DNA, 33 bp, Homo sapien
catatctaatgtgtgatgaaagaatgtatgtga

SEQ ID NO: 100587 - DNA, 33 bp, Homo sapien
tctcagtcagctgcaacttataactgagaagat

SEQ ID NO: 100588 - DNA, 33 bp, Homo sapien
tctcagtcagctgcaatttataactgagaagat

SEQ ID NO: 100589 - DNA, 33 bp, Homo sapien
atgactgtgtttaaaagtcaaatacttggagat

SEQ ID NO: 100590 - DNA, 33 bp, Homo sapien
atgactgtgtttaaaattcaaatacttggagat

SEQ ID NO: 100591 - DNA, 33 bp, Homo sapien
acctttgaaactgctacaagacgtactcttgat

SEQ ID NO: 100592 - DNA, 33 bp, Homo sapien
acctttgaaactgctataagacgtactcttgat

SEQ ID NO: 100593 - DNA, 33 bp, Homo sapien
tttagctatacagtaacgttggaagtcttgagg

SEQ ID NO: 100594 - DNA, 33 bp, Homo sapien
tttagctatacagtaatgttggaagtcttgagg

SEQ ID NO: 100595 - DNA, 33 bp, Homo sapien
accatgttcgtttagacattgcttggccacatt

SEQ ID NO: 100596 - DNA, 33 bp, Homo sapien
accatgttcgtttagagattgcttggccacatt

SEQ ID NO: 100597 - DNA, 33 bp, Homo sapien
catttcccagtatgaaatatataacacttataa

SEQ ID NO: 100598 - DNA, 33 bp, Homo sapien
catttcccagtatgaagtatataacacttataa

SEQ ID NO: 100599 - DNA, 33 bp, Homo sapien
tttctagttccacagaagaagccagtatttgaa

SEQ ID NO: 100600 - DNA, 33 bp, Homo sapien
tttctagttccacagatgaagccagtatttgaa

SEQ ID NO: 100601 - DNA, 33 bp, Homo sapien
gcatcatgagtccacacaattcctccttgtcgt

SEQ ID NO: 100602 - DNA, 33 bp, Homo sapien
gcatcatgagtccacagaattcctccttgtcgt

SEQ ID NO: 100603 - DNA, 33 bp, Homo sapien
agctaaaacattacatcacagcagaataaaaaa

SEQ ID NO: 100604 - DNA, 33 bp, Homo sapien
agctaaaacattacattacagcagaataaaaaa

SEQ ID NO: 100605 - DNA, 33 bp, Homo sapien
agcctcaggataaggaaggggaacaaagtgcag

SEQ ID NO: 100606 - DNA, 33 bp, Homo sapien
agcctcaggataaggagggggaacaaagtgcag

SEQ ID NO: 100607 - DNA, 33 bp, Homo sapien
gagaggactctttgtaaccaaggcaatccttga

SEQ ID NO: 100608 - DNA, 33 bp, Homo sapien
gagaggactctttgtagccaaggcaatccttga

SEQ ID NO: 100609 - DNA, 33 bp, Homo sapien
tcttactgaatcacacacttttcggaccgcatt

SEQ ID NO: 100610 - DNA, 33 bp, Homo sapien
tcttactgaatcacacgcttttcggaccgcatt

SEQ ID NO: 100611 - DNA, 33 bp, Homo sapien
tgtctatactttcttcaatctcactttaaaaaa

SEQ ID NO: 100612 - DNA, 33 bp, Homo sapien
tgtctatactttcttccatctcactttaaaaaa

SEQ ID NO: 100613 - DNA, 33 bp, Homo sapien
attggaattggaaacaacaagacttactgtctg

SEQ ID NO: 100614 - DNA, 33 bp, Homo sapien
attggaattggaaacaccaagacttactgtctg

SEQ ID NO: 100615 - DNA, 33 bp, Homo sapien
catgcatcaccagtaacgggacagacaagacag

SEQ ID NO: 100616 - DNA, 33 bp, Homo sapien
catgcatcaccagtaatgggacagacaagacag

SEQ ID NO: 100617 - DNA, 33 bp, Homo sapien
gtgggaaaagaggttccgaaaagctgctggtgg

SEQ ID NO: 100618 - DNA, 33 bp, Homo sapien
gtgggaaaagaggttctgaaaagctgctggtgg

SEQ ID NO: 100619 - DNA, 33 bp, Homo sapien
aaagtggagctcggctaactgttttgtttgaag

SEQ ID NO: 100620 - DNA, 33 bp, Homo sapien
aaagtggagctcggctgactgttttgtttgaag

SEQ ID NO: 100621 - DNA, 33 bp, Homo sapien
catagtggacgctcagaaattgttagcttttat

SEQ ID NO: 100622 - DNA, 33 bp, Homo sapien
catagtggacgctcaggaattgttagcttttat

SEQ ID NO: 100623 - DNA, 33 bp, Homo sapien
gcactgtggtggtgtacgggaggagaagacatt

SEQ ID NO: 100624 - DNA, 33 bp, Homo sapien
gcactgtggtggtgtatgggaggagaagacatt

SEQ ID NO: 100625 - DNA, 33 bp, Homo sapien
ttctttctaaaagccaaatactaataaagtatc

SEQ ID NO: 100626 - DNA, 33 bp, Homo sapien
ttctttctaaaagccagatactaataaagtatc

SEQ ID NO: 100627 - DNA, 33 bp, Homo sapien
gttgatgctacctaacagaagtaatcaacaaaa

SEQ ID NO: 100628 - DNA, 33 bp, Homo sapien
gttgatgctacctaaccgaagtaatcaacaaaa

SEQ ID NO: 100629 - DNA, 33 bp, Homo sapien
tttaaaatagccataaagaacatcagttttgtg

SEQ ID NO: 100630 - DNA, 33 bp, Homo sapien
tttaaaatagccataatgaacatcagttttgtg

SEQ ID NO: 100631 - DNA, 33 bp, Homo sapien
gtcaaaagccaaacagcaatatgagtaaatatt

SEQ ID NO: 100632 - DNA, 33 bp, Homo sapien
gtcaaaagccaaacagtaatatgagtaaatatt

SEQ ID NO: 100633 - DNA, 33 bp, Homo sapien
aatggatttgattctaaaacaattctctggaaa

SEQ ID NO: 100634 - DNA, 33 bp, Homo sapien
aatggatttgattctataacaattctctggaaa

SEQ ID NO: 100635 - DNA, 33 bp, Homo sapien
gatgccttggttattgccaacactcctgcagat

SEQ ID NO: 100636 - DNA, 33 bp, Homo sapien
gatgccttggttattgtcaacactcctgcagat

SEQ ID NO: 100637 - DNA, 33 bp, Homo sapien
gtattgatattttacaggcctgaactgtgaggg

SEQ ID NO: 100638 - DNA, 33 bp, Homo sapien
gtattgatattttacatgcctgaactgtgaggg

SEQ ID NO: 100639 - DNA, 33 bp, Homo sapien
gggtcataaagaggaaaatgaactgggagacac

SEQ ID NO: 100640 - DNA, 33 bp, Homo sapien
gggtcataaagaggaagatgaactgggagacac

SEQ ID NO: 100641 - DNA, 33 bp, Homo sapien
caatggaccacatatacatcacaccacataata

SEQ ID NO: 100642 - DNA, 33 bp, Homo sapien
caatggaccacatatatatcacaccacataata

SEQ ID NO: 100643 - DNA, 33 bp, Homo sapien
aaaaaaaaaaatcacaatggattgaggcataca

SEQ ID NO: 100644 - DNA, 33 bp, Homo sapien
aaaaaaaaaaatcacagtggattgaggcataca

SEQ ID NO: 100645 - DNA, 33 bp, Homo sapien
ttaagtccctgaatccacaagttgtcacacata

SEQ ID NO: 100646 - DNA, 33 bp, Homo sapien
ttaagtccctgaatccgcaagttgtcacacata

SEQ ID NO: 100647 - DNA, 33 bp, Homo sapien
agaccgaaactacagagaagagattgttattat

SEQ ID NO: 100648 - DNA, 33 bp, Homo sapien
agaccgaaactacagataagagattgttattat

SEQ ID NO: 100649 - DNA, 33 bp, Homo sapien
tggtttcacagatgaaagcactaatgaaagctc

SEQ ID NO: 100650 - DNA, 33 bp, Homo sapien
tggtttcacagatgaaggcactaatgaaagctc

SEQ ID NO: 100651 - DNA, 33 bp, Homo sapien
aattctaaaaatgaacaaagtataattctaatg

SEQ ID NO: 100652 - DNA, 33 bp, Homo sapien
aattctaaaaatgaacgaagtataattctaatg

SEQ ID NO: 100653 - DNA, 33 bp, Homo sapien
taaactgtagaagatcagatcagtgtttcccag

SEQ ID NO: 100654 - DNA, 33 bp, Homo sapien
taaactgtagaagatcggatcagtgtttcccag

SEQ ID NO: 100655 - DNA, 33 bp, Homo sapien
gacagcagttcaagtacgtttttgactaagact

SEQ ID NO: 100656 - DNA, 33 bp, Homo sapien
gacagcagttcaagtatgtttttgactaagact

SEQ ID NO: 100657 - DNA, 33 bp, Homo sapien
tgccagggaaggtggaagagatgaagtcttagt

SEQ ID NO: 100658 - DNA, 33 bp, Homo sapien
tgccagggaaggtggaggagatgaagtcttagt

SEQ ID NO: 100659 - DNA, 33 bp, Homo sapien
ctgtcacatttgtctcactgtaaagagtatttc

SEQ ID NO: 100660 - DNA, 33 bp, Homo sapien
ctgtcacatttgtctcgctgtaaagagtatttc

SEQ ID NO: 100661 - DNA, 33 bp, Homo sapien
cactctgtcaacatcaactgctaaattctaagg

SEQ ID NO: 100662 - DNA, 33 bp, Homo sapien
cactctgtcaacatcagctgctaaattctaagg

SEQ ID NO: 100663 - DNA, 33 bp, Homo sapien
tccaagtgaaagtgcaagaaaaatctttgtatt

SEQ ID NO: 100664 - DNA, 33 bp, Homo sapien
tccaagtgaaagtgcaggaaaaatctttgtatt

SEQ ID NO: 100665 - DNA, 33 bp, Homo sapien
acttcaatactataccaagactttgctccaata

SEQ ID NO: 100666 - DNA, 33 bp, Homo sapien
acttcaatactatacccagactttgctccaata

SEQ ID NO: 100667 - DNA, 33 bp, Homo sapien
aagaaaattttatcatcaggagacttgttctca

SEQ ID NO: 100668 - DNA, 33 bp, Homo sapien
aagaaaattttatcattaggagacttgttctca

SEQ ID NO: 100669 - DNA, 33 bp, Homo sapien
tattctgctcacagccacaaaatgatagagcac

SEQ ID NO: 100670 - DNA, 33 bp, Homo sapien
tattctgctcacagccgcaaaatgatagagcac

SEQ ID NO: 100671 - DNA, 33 bp, Homo sapien
acatgattattcatgccaaagactacacaagag

SEQ ID NO: 100672 - DNA, 33 bp, Homo sapien
acatgattattcatgctaaagactacacaagag

SEQ ID NO: 100673 - DNA, 33 bp, Homo sapien
acagaaacacttttccaaaccaaaattatccag

SEQ ID NO: 100674 - DNA, 33 bp, Homo sapien
acagaaacacttttccgaaccaaaattatccag

SEQ ID NO: 100675 - DNA, 33 bp, Homo sapien
atccttaagtaatcaccagaaaagctgaacaga

SEQ ID NO: 100676 - DNA, 33 bp, Homo sapien
atccttaagtaatcactagaaaagctgaacaga

SEQ ID NO: 100677 - DNA, 33 bp, Homo sapien
ttatcaatttggaaataaaatctcagaaagatc

SEQ ID NO: 100678 - DNA, 33 bp, Homo sapien
ttatcaatttggaaatgaaatctcagaaagatc

SEQ ID NO: 100679 - DNA, 33 bp, Homo sapien
aaatttggctaaagtccattagaggcatagccc

SEQ ID NO: 100680 - DNA, 33 bp, Homo sapien
aaatttggctaaagtctattagaggcatagccc

SEQ ID NO: 100681 - DNA, 33 bp, Homo sapien; identical to SEQ ID NO: 100679

SEQ ID NO: 100682 - DNA, 33 bp, Homo sapien; identical to SEQ ID NO: 100680

SEQ ID NO: 100683 - DNA, 33 bp, Homo sapien
gaacatcaatacccaacctacctgctcagaaat

SEQ ID NO: 100684 - DNA, 33 bp, Homo sapien
gaacatcaatacccaagctacctgctcagaaat

SEQ ID NO: 100685 - DNA, 33 bp, Homo sapien
atgtgattcaaaacaaccttaaataactgtgac

SEQ ID NO: 100686 - DNA, 33 bp, Homo sapien
atgtgattcaaaacaatcttaaataactgtgac

SEQ ID NO: 100687 - DNA, 33 bp, Homo sapien
acgtggtacacaaaaccgtatgaaaaagctgag

SEQ ID NO: 100688 - DNA, 33 bp, Homo sapien
acgtggtacacaaaactgtatgaaaaagctgag

SEQ ID NO: 100689 - DNA, 33 bp, Homo sapien
ctcctgaacttaagcactatctgccgcctccct

SEQ ID NO: 100690 - DNA, 33 bp, Homo sapien
ctcctgaacttaagcagtatctgccgcctccct

SEQ ID NO: 100691 - DNA, 33 bp, Homo sapien
cgcggcctgcatcttcacagtctgcatgctggt

SEQ ID NO: 100692 - DNA, 33 bp, Homo sapien
cgcggcctgcatcttcgcagtctgcatgctggt

SEQ ID NO: 100693 - DNA, 33 bp, Homo sapien
tttggtgcatatgcaacagttcagtgtgggccc

SEQ ID NO: 100694 - DNA, 33 bp, Homo sapien
tttggtgcatatgcaatagttcagtgtgggccc

SEQ ID NO: 100695 - DNA, 33 bp, Homo sapien
gcaaccaatgaggacacccactgaaggccacca

SEQ ID NO: 100696 - DNA, 33 bp, Homo sapien
gcaaccaatgaggacatccactgaaggccacca

SEQ ID NO: 100697 - DNA, 33 bp, Homo sapien
atctttttgagaaaataagaccaaggatcacaa

SEQ ID NO: 100698 - DNA, 33 bp, Homo sapien
atctttttgagaaaatcagaccaaggatcacaa

SEQ ID NO: 100699 - DNA, 33 bp, Homo sapien
ttcccttcttcttggaaatgctgggaatctgca

SEQ ID NO: 100700 - DNA, 33 bp, Homo sapien
ttcccttcttcttggatatgctgggaatctgca

SEQ ID NO: 100701 - DNA, 33 bp, Homo sapien
ctggtcctgtatatcgcagcttgcgccttcgct

SEQ ID NO: 100702 - DNA, 33 bp, Homo sapien
ctggtcctgtatatcgtagcttgcgccttcgct

SEQ ID NO: 100703 - DNA, 33 bp, Homo sapien; identical to SEQ ID NO: 100701

SEQ ID NO: 100704 - DNA, 33 bp, Homo sapien; identical to SEQ ID NO: 100702

SEQ ID NO: 100705 - DNA, 33 bp, Homo sapien
tacacacttaccttaccgaagcctcataacaag

SEQ ID NO: 100706 - DNA, 33 bp, Homo sapien
tacacacttaccttacggaagcctcataacaag

SEQ ID NO: 100707 - DNA, 33 bp, Homo sapien
cattgctggcccaagaatcctgcagaggcatcc

SEQ ID NO: 100708 - DNA, 33 bp, Homo sapien
cattgctggcccaagattcctgcagaggcatcc

SEQ ID NO: 100709 - DNA, 33 bp, Homo sapien
gtgttcaataggtggacgaggaagattatcttt

SEQ ID NO: 100710 - DNA, 33 bp, Homo sapien
gtgttcaataggtggatgaggaagattatcttt

SEQ ID NO: 100711 - DNA, 33 bp, Homo sapien
ttctttagcagttaccagcataactcagataat

SEQ ID NO: 100712 - DNA, 33 bp, Homo sapien
ttctttagcagttaccggcataactcagataat

SEQ ID NO: 100713 - DNA, 33 bp, Homo sapien; identical to SEQ ID NO: 100711

SEQ ID NO: 100714 - DNA, 33 bp, Homo sapien; identical to SEQ ID NO: 100712

SEQ ID NO: 100715 - DNA, 33 bp, Homo sapien
gtcctgtaggctaagaagcaaagtaatacaagc

SEQ ID NO: 100716 - DNA, 33 bp, Homo sapien
gtcctgtaggctaagaggcaaagtaatacaagc

SEQ ID NO: 100717 - DNA, 33 bp, Homo sapien
tcacataggatcccacacttatatctcactttg

SEQ ID NO: 100718 - DNA, 33 bp, Homo sapien
tcacataggatcccacgcttatatctcactttg

SEQ ID NO: 100719 - DNA, 33 bp, Homo sapien
tccccagtttatacacaaagaaggtaaaacaca

SEQ ID NO: 100720 - DNA, 33 bp, Homo sapien
tccccagtttatacacgaagaaggtaaaacaca

SEQ ID NO: 100721 - DNA, 33 bp, Homo sapien
attgctattaaagaccaagtgcatggaacacag

SEQ ID NO: 100722 - DNA, 33 bp, Homo sapien
attgctattaaagaccgagtgcatggaacacag

SEQ ID NO: 100723 - DNA, 33 bp, Homo sapien
aagatcacaaaggaaaaaggtgacagagttcag

SEQ ID NO: 100724 - DNA, 33 bp, Homo sapien
aagatcacaaaggaaagaggtgacagagttcag

SEQ ID NO: 100725 - DNA, 33 bp, Homo sapien
cagttcaagtccctaacataacagggcatagtg

SEQ ID NO: 100726 - DNA, 33 bp, Homo sapien
cagttcaagtccctaatataacagggcatagtg

SEQ ID NO: 100727 - DNA, 33 bp, Homo sapien
ttctttatcctttgtagcattgagggcatttgg

SEQ ID NO: 100728 - DNA, 33 bp, Homo sapien
ttctttatcctttgtatcattgagggcatttgg

SEQ ID NO: 100729 - DNA, 33 bp, Homo sapien
agatccagtggcattacggtggtttgcattctt

SEQ ID NO: 100730 - DNA, 33 bp, Homo sapien
agatccagtggcattatggtggtttgcattctt

SEQ ID NO: 100731 - DNA, 33 bp, Homo sapien
caaaatgctttcgtagacatttcaccatccgag

SEQ ID NO: 100732 - DNA, 33 bp, Homo sapien
caaaatgctttcgtaggcatttcaccatccgag

SEQ ID NO: 100733 - DNA, 33 bp, Homo sapien
atttaattttataaaacagatgagccaggatgc

SEQ ID NO: 100734 - DNA, 33 bp, Homo sapien
atttaattttataaaagagatgagccaggatgc

SEQ ID NO: 100735 - DNA, 33 bp, Homo sapien
gataaacctttttataccggcttctcagggatt

SEQ ID NO: 100736 - DNA, 33 bp, Homo sapien
gataaacctttttatatcggcttctcagggatt

SEQ ID NO: 100737 - DNA, 33 bp, Homo sapien
gactttcccagatttacagcaaaatggaaagca

SEQ ID NO: 100738 - DNA, 33 bp, Homo sapien
gactttcccagatttatagcaaaatggaaagca

SEQ ID NO: 100739 - DNA, 33 bp, Homo sapien
caaatgaataaattgaaggttcgatggggagta

SEQ ID NO: 100740 - DNA, 33 bp, Homo sapien
caaatgaataaattgagggttcgatggggagta

SEQ ID NO: 100741 - DNA, 33 bp, Homo sapien
tgaaacccaattgagggacattcttatattacc

SEQ ID NO: 100742 - DNA, 33 bp, Homo sapien
tgaaacccaattgaggtacattcttatattacc

SEQ ID NO: 100743 - DNA, 33 bp, Homo sapien
gctcctaacattgtccccaaggcatcagaggtg

SEQ ID NO: 100744 - DNA, 33 bp, Homo sapien
gctcctaacattgtcctcaaggcatcagaggtg

SEQ ID NO: 100745 - DNA, 33 bp, Homo sapien
caaaattattctctctaaactgctctaagtttt

SEQ ID NO: 100746 - DNA, 33 bp, Homo sapien
caaaattattctctcttaactgctctaagtttt

SEQ ID NO: 100747 - DNA, 33 bp, Homo sapien
gaatccaaatacttccaaagaaatgaaagtgag

SEQ ID NO: 100748 - DNA, 33 bp, Homo sapien
gaatccaaatacttccgaagaaatgaaagtgag

SEQ ID NO: 100749 - DNA, 33 bp, Homo sapien
aatgctgtgcgcatcaatacatgctgagaaaaa

SEQ ID NO: 100750 - DNA, 33 bp, Homo sapien
aatgctgtgcgcatcagtacatgctgagaaaaa

SEQ ID NO: 100751 - DNA, 33 bp, Homo sapien
attttcacatcctttccaccagtttgcaccctc

SEQ ID NO: 100752 - DNA, 33 bp, Homo sapien
attttcacatcctttctaccagtttgcaccctc

SEQ ID NO: 100753 - DNA, 33 bp, Homo sapien
ctagatattcatgaaactgagaggccgtatcca

SEQ ID NO: 100754 - DNA, 33 bp, Homo sapien
ctagatattcatgaaattgagaggccgtatcca

SEQ ID NO: 100755 - DNA, 33 bp, Homo sapien
gttttgtttgcatgtcaaagcctcagaaagctt

SEQ ID NO: 100756 - DNA, 33 bp, Homo sapien
gttttgtttgcatgtctaagcctcagaaagctt

SEQ ID NO: 100757 - DNA, 33 bp, Homo sapien
gaacttggactgagagacaataggtaaatgggt

SEQ ID NO: 100758 - DNA, 33 bp, Homo sapien
gaacttggactgagaggcaataggtaaatgggt

SEQ ID NO: 100759 - DNA, 33 bp, Homo sapien
cccctaaaaatacccaatatactgaaatgttta

SEQ ID NO: 100760 - DNA, 33 bp, Homo sapien
cccctaaaaatacccagtatactgaaatgttta

SEQ ID NO: 100761 - DNA, 33 bp, Homo sapien
acatgtactacagatccctctgtgcaatccctt

SEQ ID NO: 100762 - DNA, 33 bp, Homo sapien
acatgtactacagatctctctgtgcaatccctt

SEQ ID NO: 100763 - DNA, 33 bp, Homo sapien
atctcttctcagtcacagcttctctcccactgt

SEQ ID NO: 100764 - DNA, 33 bp, Homo sapien
atctcttctcagtcactgcttctctcccactgt

SEQ ID NO: 100765 - DNA, 33 bp, Homo sapien
aacactgcattgatttaaaaaaactgcactaat

SEQ ID NO: 100766 - DNA, 33 bp, Homo sapien
aacactgcattgattttaaaaaactgcactaat

SEQ ID NO: 100767 - DNA, 33 bp, Homo sapien
ctgttaagtataaatacaacactgcagaagctg

SEQ ID NO: 100768 - DNA, 33 bp, Homo sapien
ctgttaagtataaatagaacactgcagaagctg

SEQ ID NO: 100769 - DNA, 33 bp, Homo sapien
taacaaagcttcctgacgagaatataaaatgtc

SEQ ID NO: 100770 - DNA, 33 bp, Homo sapien
taacaaagcttcctgaggagaatataaaatgtc

SEQ ID NO: 100771 - DNA, 33 bp, Homo sapien
tgactatacttgatgactcataaaatatagtgg

SEQ ID NO: 100772 - DNA, 33 bp, Homo sapien
tgactatacttgatgattcataaaatatagtgg

SEQ ID NO: 100773 - DNA, 33 bp, Homo sapien
ggctttaaattcacacaagactggatttaattc

SEQ ID NO: 100774 - DNA, 33 bp, Homo sapien
ggctttaaattcacacgagactggatttaattc

SEQ ID NO: 100775 - DNA, 33 bp, Homo sapien
acctttccaacttatccactgcatttacatttg

SEQ ID NO: 100776 - DNA, 33 bp, Homo sapien
acctttccaacttatctactgcatttacatttg

SEQ ID NO: 100777 - DNA, 33 bp, Homo sapien
ttttacagtatttgaaatgcgtttgtttcaaca

SEQ ID NO: 100778 - DNA, 33 bp, Homo sapien
ttttacagtatttgaagtgcgtttgtttcaaca

SEQ ID NO: 100779 - DNA, 33 bp, Homo sapien
ggcgactgggacgagccctgcgttcctgtcaaa

SEQ ID NO: 100780 - DNA, 33 bp, Homo sapien
ggcgactgggacgagctctgcgttcctgtcaaa

SEQ ID NO: 100781 - DNA, 33 bp, Homo sapien
cttgttcaggttactaagtggtttctctcctga

SEQ ID NO: 100782 - DNA, 33 bp, Homo sapien
cttgttcaggttactaggtggtttctctcctga

SEQ ID NO: 100783 - DNA, 33 bp, Homo sapien
catatgagtcctgaaacagaaaaggagatacgt

SEQ ID NO: 100784 - DNA, 33 bp, Homo sapien
catatgagtcctgaaatagaaaaggagatacgt

SEQ ID NO: 100785 - DNA, 33 bp, Homo sapien
attggcttcccagtcacgtcattagggtgtcag

SEQ ID NO: 100786 - DNA, 33 bp, Homo sapien
attggcttcccagtcatgtcattagggtgtcag

SEQ ID NO: 100787 - DNA, 33 bp, Homo sapien
acactgttacttgagccatgttttaaaggaact

SEQ ID NO: 100788 - DNA, 33 bp, Homo sapien
acactgttacttgagctatgttttaaaggaact

SEQ ID NO: 100789 - DNA, 33 bp, Homo sapien
cagtaaaacgaactgtaaaaatatttgcatcaa

SEQ ID NO: 100790 - DNA, 33 bp, Homo sapien
cagtaaaacgaactgtgaaaatatttgcatcaa

SEQ ID NO: 100791 - DNA, 33 bp, Homo sapien
agagtaactaactgcagggttacaaagtatgtt

SEQ ID NO: 100792 - DNA, 33 bp, Homo sapien
agagtaactaactgcatggttacaaagtatgtt

SEQ ID NO: 100793 - DNA, 33 bp, Homo sapien
attgagaagagctcaactctaaatccttttgtg

SEQ ID NO: 100794 - DNA, 33 bp, Homo sapien
attgagaagagctcaattctaaatccttttgtg

SEQ ID NO: 100795 - DNA, 33 bp, Homo sapien
catgttaattttcttcacaagtacttacaaatc

SEQ ID NO: 100796 - DNA, 33 bp, Homo sapien
catgttaattttcttctcaagtacttacaaatc

SEQ ID NO: 100797 - DNA, 33 bp, Homo sapien
tacgcctagtagcctaagagctagttatttggc

SEQ ID NO: 100798 - DNA, 33 bp, Homo sapien
tacgcctagtagcctatgagctagttatttggc

SEQ ID NO: 100799 - DNA, 33 bp, Homo sapien
ctgtacaaataactcaaaattgtcctgtgccca

SEQ ID NO: 100800 - DNA, 33 bp, Homo sapien
ctgtacaaataactcacaattgtcctgtgccca

SEQ ID NO: 100801 - DNA, 33 bp, Homo sapien
accaatagaaatccacgcatcttttgctatgaa

SEQ ID NO: 100802 - DNA, 33 bp, Homo sapien
accaatagaaatccactcatcttttgctatgaa

SEQ ID NO: 100803 - DNA, 33 bp, Homo sapien
ttttatgtcaaagaggaattttaggatgatatg

SEQ ID NO: 100804 - DNA, 33 bp, Homo sapien
ttttatgtcaaagaggcattttaggatgatatg

SEQ ID NO: 100805 - DNA, 33 bp, Homo sapien
tatgattccaaatatacgacactgtagaaaagg

SEQ ID NO: 100806 - DNA, 33 bp, Homo sapien
tatgattccaaatatatgacactgtagaaaagg

SEQ ID NO: 100807 - DNA, 33 bp, Homo sapien
ttgagaatgcttaaaaattatttgctacaggcc

SEQ ID NO: 100808 - DNA, 33 bp, Homo sapien
ttgagaatgcttaaaacttatttgctacaggcc

SEQ ID NO: 100809 - DNA, 33 bp, Homo sapien
taacatttgttagagagagtaaagaggtaatta

SEQ ID NO: 100810 - DNA, 33 bp, Homo sapien
taacatttgttagagatagtaaagaggtaatta

SEQ ID NO: 100811 - DNA, 33 bp, Homo sapien
ctgcagaaactggaaacgctgactgctttgcag

SEQ ID NO: 100812 - DNA, 33 bp, Homo sapien
ctgcagaaactggaaatgctgactgctttgcag

SEQ ID NO: 100813 - DNA, 33 bp, Homo sapien
cagctctcactaaaaacagaatgtgatttttgc

SEQ ID NO: 100814 - DNA, 33 bp, Homo sapien
cagctctcactaaaaagagaatgtgatttttgc

SEQ ID NO: 100815 - DNA, 33 bp, Homo sapien
ccagaagttttttggtaaactcatttggcagca

SEQ ID NO: 100816 - DNA, 33 bp, Homo sapien
ccagaagttttttggttaactcatttggcagca

SEQ ID NO: 100817 - DNA, 33 bp, Homo sapien
gttctcattttgaagactattttacatgagctt

SEQ ID NO: 100818 - DNA, 33 bp, Homo sapien
gttctcattttgaagattattttacatgagctt

SEQ ID NO: 100819 - DNA, 33 bp, Homo sapien
tgaatgtactgtgaaaagaatgctttaatcaca

SEQ ID NO: 100820 - DNA, 33 bp, Homo sapien
tgaatgtactgtgaaaggaatgctttaatcaca

SEQ ID NO: 100821 - DNA, 33 bp, Homo sapien
tgagaaacccaaatgccgaatttagtagcctta

SEQ ID NO: 100822 - DNA, 33 bp, Homo sapien
tgagaaacccaaatgctgaatttagtagcctta

SEQ ID NO: 100823 - DNA, 33 bp, Homo sapien
ccataacacaggcacgaagaaggaaatacaata

SEQ ID NO: 100824 - DNA, 33 bp, Homo sapien
ccataacacaggcacggagaaggaaatacaata

SEQ ID NO: 100825 - DNA, 33 bp, Homo sapien
agtgccagagcatttacgatgatgggatgtttc

SEQ ID NO: 100826 - DNA, 33 bp, Homo sapien
agtgccagagcatttaggatgatgggatgtttc

SEQ ID NO: 100827 - DNA, 33 bp, Homo sapien
tccagacatatataccaaagtgttcatgaaata

SEQ ID NO: 100828 - DNA, 33 bp, Homo sapien
tccagacatatataccgaagtgttcatgaaata

SEQ ID NO: 100829 - DNA, 33 bp, Homo sapien
catctgatctacaacaaagctgacaaaaacaaa

SEQ ID NO: 100830 - DNA, 33 bp, Homo sapien
catctgatctacaacagagctgacaaaaacaaa

SEQ ID NO: 100831 - DNA, 33 bp, Homo sapien
aatacttttggcccaacatctgtttcaggaaag

SEQ ID NO: 100832 - DNA, 33 bp, Homo sapien
aatacttttggcccaatatctgtttcaggaaag

SEQ ID NO: 100833 - DNA, 33 bp, Homo sapien
ttagagagcttcagggcagtagataaggtaaag

SEQ ID NO: 100834 - DNA, 33 bp, Homo sapien
ttagagagcttcagggtagtagataaggtaaag

SEQ ID NO: 100835 - DNA, 33 bp, Homo sapien
aaaaatagaattagtgcaatcacgatcattgtg

SEQ ID NO: 100836 - DNA, 33 bp, Homo sapien
aaaaatagaattagtggaatcacgatcattgtg

SEQ ID NO: 100837 - DNA, 33 bp, Homo sapien
tgaaatacgtgttagacagttctgtattatcat

SEQ ID NO: 100838 - DNA, 33 bp, Homo sapien
tgaaatacgtgttagatagttctgtattatcat

SEQ ID NO: 100839 - DNA, 33 bp, Homo sapien
gcttgtagaatgtggacgatagagcctgctttg

SEQ ID NO: 100840 - DNA, 33 bp, Homo sapien
gcttgtagaatgtggatgatagagcctgctttg

SEQ ID NO: 100841 - DNA, 33 bp, Homo sapien
catgttatttcttccacaccatactacaaatca

SEQ ID NO: 100842 - DNA, 33 bp, Homo sapien
catgttatttcttccataccatactacaaatca

SEQ ID NO: 100843 - DNA, 33 bp, Homo sapien; identical to SEQ ID NO: 100841

SEQ ID NO: 100844 - DNA, 33 bp, Homo sapien; identical to SEQ ID NO: 100842

SEQ ID NO: 100845 - DNA, 33 bp, Homo sapien
agccagtgtgataatacatcctcaagagctgag

SEQ ID NO: 100846 - DNA, 33 bp, Homo sapien
agccagtgtgataatatatcctcaagagctgag

SEQ ID NO: 100847 - DNA, 33 bp, Homo sapien
gttgttggaagtcctaaaataaagaatcctgga

SEQ ID NO: 100848 - DNA, 33 bp, Homo sapien
gttgttggaagtcctataataaagaatcctgga

SEQ ID NO: 100849 - DNA, 33 bp, Homo sapien
cacagaaattcaacaactggtcctatgttcctg

SEQ ID NO: 100850 - DNA, 33 bp, Homo sapien
cacagaaattcaacaattggtcctatgttcctg

SEQ ID NO: 100851 - DNA, 33 bp, Homo sapien
atcttatctagcttacaggaaagtcacagaaat

SEQ ID NO: 100852 - DNA, 33 bp, Homo sapien
atcttatctagcttacgggaaagtcacagaaat

SEQ ID NO: 100853 - DNA, 33 bp, Homo sapien
atacttgcagagctagaagtgaatcaggggaat

SEQ ID NO: 100854 - DNA, 33 bp, Homo sapien
atacttgcagagctaggagtgaatcaggggaat

SEQ ID NO: 100855 - DNA, 33 bp, Homo sapien
tctggcaaacttctacccattctgcatgctttc

SEQ ID NO: 100856 - DNA, 33 bp, Homo sapien
tctggcaaacttctactcattctgcatgctttc

SEQ ID NO: 100857 - DNA, 33 bp, Homo sapien; identical to SEQ ID NO: 100855

SEQ ID NO: 100858 - DNA, 33 bp, Homo sapien; identical to SEQ ID NO: 100856

SEQ ID NO: 100859 - DNA, 33 bp, Homo sapien
ttacagcgtgggataaaatgtgaccactgaatg

SEQ ID NO: 100860 - DNA, 33 bp, Homo sapien
ttacagcgtgggataatatgtgaccactgaatg

SEQ ID NO: 100861 - DNA, 33 bp, Homo sapien; identical to SEQ ID NO: 100859

SEQ ID NO: 100862 - DNA, 33 bp, Homo sapien; identical to SEQ ID NO: 100860

SEQ ID NO: 100863 - DNA, 33 bp, Homo sapien
ttttaagcagcgctcaaaaaagaaattgtgtgt

SEQ ID NO: 100864 - DNA, 33 bp, Homo sapien
ttttaagcagcgctcagaaaagaaattgtgtgt

SEQ ID NO: 100865 - DNA, 33 bp, Homo sapien; identical to SEQ ID NO: 100863

SEQ ID NO: 100866 - DNA, 33 bp, Homo sapien; identical to SEQ ID NO: 100864

SEQ ID NO: 100867 - DNA, 33 bp, Homo sapien
aatatatcgatgtgtcactatttctaaactctc

SEQ ID NO: 100868 - DNA, 33 bp, Homo sapien
aatatatcgatgtgtcgctatttctaaactctc

SEQ ID NO: 100869 - DNA, 33 bp, Homo sapien
acattctcactaaagtcaagaggcacacaccca

SEQ ID NO: 100870 - DNA, 33 bp, Homo sapien
acattctcactaaagttaagaggcacacaccca

SEQ ID NO: 100871 - DNA, 33 bp, Homo sapien
ggctttgtctctcaccacgtgtgctttctgcaa

SEQ ID NO: 100872 - DNA, 33 bp, Homo sapien
ggctttgtctctcacctcgtgtgctttctgcaa

SEQ ID NO: 100873 - DNA, 33 bp, Homo sapien
gacttgggaaatccaaaagaacaccgagaagca

SEQ ID NO: 100874 - DNA, 33 bp, Homo sapien
gacttgggaaatccaacagaacaccgagaagca

SEQ ID NO: 100875 - DNA, 33 bp, Homo sapien
taatttttttatatgccaagaatttacaatcta

SEQ ID NO: 100876 - DNA, 33 bp, Homo sapien
taatttttttatatgcgaagaatttacaatcta

SEQ ID NO: 100877 - DNA, 33 bp, Homo sapien
gcagtcatcttgtcataaagcacagagagccta

SEQ ID NO: 100878 - DNA, 33 bp, Homo sapien
gcagtcatcttgtcatcaagcacagagagccta

SEQ ID NO: 100879 - DNA, 33 bp, Homo sapien
aaatatactgagttcacaggttgatatggtttg

SEQ ID NO: 100880 - DNA, 33 bp, Homo sapien
aaatatactgagttcagaggttgatatggtttg

SEQ ID NO: 100881 - DNA, 33 bp, Homo sapien
ttaccatgaaaacagcaatactgaagcaacaaa

SEQ ID NO: 100882 - DNA, 33 bp, Homo sapien
ttaccatgaaaacagcgatactgaagcaacaaa

SEQ ID NO: 100883 - DNA, 33 bp, Homo sapien
gcagtttttaaaaagccgattatatctcaataa

SEQ ID NO: 100884 - DNA, 33 bp, Homo sapien
gcagtttttaaaaagctgattatatctcaataa

SEQ ID NO: 100885 - DNA, 33 bp, Homo sapien
tcacggttaagagacacggactttgaccttttg

SEQ ID NO: 100886 - DNA, 33 bp, Homo sapien
tcacggttaagagacatggactttgaccttttg

SEQ ID NO: 100887 - DNA, 33 bp, Homo sapien
tctgcacagaccaatgccactttatacagagac

SEQ ID NO: 100888 - DNA, 33 bp, Homo sapien
tctgcacagaccaatgtcactttatacagagac

SEQ ID NO: 100889 - DNA, 33 bp, Homo sapien
atgaagttctatgagacaaggcaaagcataacc

SEQ ID NO: 100890 - DNA, 33 bp, Homo sapien
atgaagttctatgagataaggcaaagcataacc

SEQ ID NO: 100891 - DNA, 33 bp, Homo sapien
aaatctagtactcaacaacatatattccataag

SEQ ID NO: 100892 - DNA, 33 bp, Homo sapien
aaatctagtactcaacgacatatattccataag

SEQ ID NO: 100893 - DNA, 33 bp, Homo sapien
aatactgcctgccatacctggattaataccaca

SEQ ID NO: 100894 - DNA, 33 bp, Homo sapien
aatactgcctgccatagctggattaataccaca

SEQ ID NO: 100895 - DNA, 33 bp, Homo sapien
ttgggtggggatacaaccaaactatatcaacca

SEQ ID NO: 100896 - DNA, 33 bp, Homo sapien
ttgggtggggatacaatcaaactatatcaacca

SEQ ID NO: 100897 - DNA, 33 bp, Homo sapien
atggcaggcaacctgaagaagtgttggatctgc

SEQ ID NO: 100898 - DNA, 33 bp, Homo sapien
atggcaggcaacctgacgaagtgttggatctgc

SEQ ID NO: 100899 - DNA, 33 bp, Homo sapien
tcaggagagggacagacaggctacgtcactaca

SEQ ID NO: 100900 - DNA, 33 bp, Homo sapien
tcaggagagggacagagaggctacgtcactaca

SEQ ID NO: 100901 - DNA, 33 bp, Homo sapien
caagtgggcagtgttaccaggcatgttaagttt

SEQ ID NO: 100902 - DNA, 33 bp, Homo sapien
caagtgggcagtgttatcaggcatgttaagttt

SEQ ID NO: 100903 - DNA, 33 bp, Homo sapien
aaccacccacaggatacgctctctaaagcgaaa

SEQ ID NO: 100904 - DNA, 33 bp, Homo sapien
aaccacccacaggatatgctctctaaagcgaaa

SEQ ID NO: 100905 - DNA, 33 bp, Homo sapien
ctgttccatcatttaacggtttcactggcctgt

SEQ ID NO: 100906 - DNA, 33 bp, Homo sapien
ctgttccatcatttaatggtttcactggcctgt

SEQ ID NO: 100907 - DNA, 33 bp, Homo sapien
cataggaataccatagccacccttgagataact

SEQ ID NO: 100908 - DNA, 33 bp, Homo sapien
cataggaataccatagtcacccttgagataact

SEQ ID NO: 100909 - DNA, 33 bp, Homo sapien
agtctccatgaacaaacggctgtattcccagaa

SEQ ID NO: 100910 - DNA, 33 bp, Homo sapien
agtctccatgaacaaatggctgtattcccagaa

SEQ ID NO: 100911 - DNA, 33 bp, Homo sapien
acacgtactcagaaaagaactgcacaaactcaa

SEQ ID NO: 100912 - DNA, 33 bp, Homo sapien
acacgtactcagaaaataactgcacaaactcaa

SEQ ID NO: 100913 - DNA, 33 bp, Homo sapien
atggctttaaaatttccagtatacagatcacct

SEQ ID NO: 100914 - DNA, 33 bp, Homo sapien
atggctttaaaatttctagtatacagatcacct

SEQ ID NO: 100915 - DNA, 33 bp, Homo sapien
aagactggcagagcaacacgtttgtttacacca

SEQ ID NO: 100916 - DNA, 33 bp, Homo sapien
aagactggcagagcaatacgtttgtttacacca

SEQ ID NO: 100917 - DNA, 33 bp, Homo sapien
tgctcaaacagtaggaaaaatggaatcgaaaaa

SEQ ID NO: 100918 - DNA, 33 bp, Homo sapien
tgctcaaacagtaggagaaatggaatcgaaaaa

SEQ ID NO: 100919 - DNA, 33 bp, Homo sapien
caattttcttaacaccaacggatgccagaaatt

SEQ ID NO: 100920 - DNA, 33 bp, Homo sapien
caattttcttaacaccgacggatgccagaaatt

SEQ ID NO: 100921 - DNA, 33 bp, Homo sapien; identical to SEQ ID NO: 100919

SEQ ID NO: 100922 - DNA, 33 bp, Homo sapien; identical to SEQ ID NO: 100920

SEQ ID NO: 100923 - DNA, 33 bp, Homo sapien
attgaaattgtcactacaaaagtgaggaaggaa

SEQ ID NO: 100924 - DNA, 33 bp, Homo sapien
attgaaattgtcactataaaagtgaggaaggaa

SEQ ID NO: 100925 - DNA, 33 bp, Homo sapien
tttgctgttaaggcaactcaattgattggatga

SEQ ID NO: 100926 - DNA, 33 bp, Homo sapien
tttgctgttaaggcaattcaattgattggatga

SEQ ID NO: 100927 - DNA, 33 bp, Homo sapien
acactatctctgaactaacaggacccaaaattt

SEQ ID NO: 100928 - DNA, 33 bp, Homo sapien
acactatctctgaactgacaggacccaaaattt

SEQ ID NO: 100929 - DNA, 33 bp, Homo sapien
tataggagaaaaagtaccatatgttggatactg

SEQ ID NO: 100930 - DNA, 33 bp, Homo sapien
tataggagaaaaagtatcatatgttggatactg

SEQ ID NO: 100931 - DNA, 33 bp, Homo sapien
aaataatcattcaaatcagctacaaaatgctac

SEQ ID NO: 100932 - DNA, 33 bp, Homo sapien
aaataatcattcaaatgagctacaaaatgctac

SEQ ID NO: 100933 - DNA, 33 bp, Homo sapien
aaatcagatttaaaaaatgatcccatggactac

SEQ ID NO: 100934 - DNA, 33 bp, Homo sapien
aaatcagatttaaaaagtgatcccatggactac

SEQ ID NO: 100935 - DNA, 33 bp, Homo sapien
gagagtttctttcagacagaattcagaggaaat

SEQ ID NO: 100936 - DNA, 33 bp, Homo sapien
gagagtttctttcagatagaattcagaggaaat

SEQ ID NO: 100937 - DNA, 33 bp, Homo sapien
agtttaataaggtcacccaactaaaattctgga

SEQ ID NO: 100938 - DNA, 33 bp, Homo sapien
agtttaataaggtcacgcaactaaaattctgga

SEQ ID NO: 100939 - DNA, 33 bp, Homo sapien
acttactaaacccacacaagcataagtaatctg

SEQ ID NO: 100940 - DNA, 33 bp, Homo sapien
acttactaaacccacagaagcataagtaatctg

SEQ ID NO: 100941 - DNA, 33 bp, Homo sapien
tgatcttcccaatgtaacacacagatgatctga

SEQ ID NO: 100942 - DNA, 33 bp, Homo sapien
tgatcttcccaatgtatcacacagatgatctga

SEQ ID NO: 100943 - DNA, 33 bp, Homo sapien
acagccctagacaatacgtaagtgcaggggtct

SEQ ID NO: 100944 - DNA, 33 bp, Homo sapien
acagccctagacaatatgtaagtgcaggggtct

SEQ ID NO: 100945 - DNA, 33 bp, Homo sapien
ggcctgcttagcagcaacctttagacgctatac

SEQ ID NO: 100946 - DNA, 33 bp, Homo sapien
ggcctgcttagcagcagcctttagacgctatac

SEQ ID NO: 100947 - DNA, 33 bp, Homo sapien
ttctcttgtcttccccacaaacgagtgagacga

SEQ ID NO: 100948 - DNA, 33 bp, Homo sapien
ttctcttgtcttccccgcaaacgagtgagacga

SEQ ID NO: 100949 - DNA, 33 bp, Homo sapien
tgtacaactactttgcaagatggtttaattcta

SEQ ID NO: 100950 - DNA, 33 bp, Homo sapien
tgtacaactactttgcgagatggtttaattcta

SEQ ID NO: 100951 - DNA, 33 bp, Homo sapien
tacactgacgggtagaaggaacagagggttctg

SEQ ID NO: 100952 - DNA, 33 bp, Homo sapien
tacactgacgggtagagggaacagagggttctg

SEQ ID NO: 100953 - DNA, 33 bp, Homo sapien
ccttgggttccatggagatgatttattctagta

SEQ ID NO: 100954 - DNA, 33 bp, Homo sapien
ccttgggttccatggatatgatttattctagta

SEQ ID NO: 100955 - DNA, 33 bp, Homo sapien
ggatgccatccctcaaaaaagtcccatgcctta

SEQ ID NO: 100956 - DNA, 33 bp, Homo sapien
ggatgccatccctcaagaaagtcccatgcctta

SEQ ID NO: 100957 - DNA, 33 bp, Homo sapien
atggaagggagcttcacggagagggtgagaagt

SEQ ID NO: 100958 - DNA, 33 bp, Homo sapien
atggaagggagcttcatggagagggtgagaagt

SEQ ID NO: 100959 - DNA, 33 bp, Homo sapien
aacattggatagggcaccattttttttttcaca

SEQ ID NO: 100960 - DNA, 33 bp, Homo sapien
aacattggatagggcatcattttttttttcaca

SEQ ID NO: 100961 - DNA, 33 bp, Homo sapien
aaaggagtgtgttaacggaaccaggagaaacag

SEQ ID NO: 100962 - DNA, 33 bp, Homo sapien
aaaggagtgtgttaactgaaccaggagaaacag

SEQ ID NO: 100963 - DNA, 33 bp, Homo sapien
tgatggatacctgaaacaccctaattcaattat

SEQ ID NO: 100964 - DNA, 33 bp, Homo sapien
tgatggatacctgaaataccctaattcaattat

SEQ ID NO: 100965 - DNA, 33 bp, Homo sapien
tgtttgcccgagtctacctactctgtcctgtga

SEQ ID NO: 100966 - DNA, 33 bp, Homo sapien
tgtttgcccgagtctatctactctgtcctgtga

SEQ ID NO: 100967 - DNA, 33 bp, Homo sapien
ttgggctatgtaatcaacactgtccttttacta

SEQ ID NO: 100968 - DNA, 33 bp, Homo sapien
ttgggctatgtaatcagcactgtccttttacta

SEQ ID NO: 100969 - DNA, 33 bp, Homo sapien
cttaagaggaaagtaacgtttcaatgtaaacca

SEQ ID NO: 100970 - DNA, 33 bp, Homo sapien
cttaagaggaaagtaatgtttcaatgtaaacca

SEQ ID NO: 100971 - DNA, 33 bp, Homo sapien
ccaaggatggtagaaagacaagagagagaagga

SEQ ID NO: 100972 - DNA, 33 bp, Homo sapien
ccaaggatggtagaaatacaagagagagaagga

SEQ ID NO: 100973 - DNA, 33 bp, Homo sapien
aaaaggcagttgctcacaatttgttgagaaaaa

SEQ ID NO: 100974 - DNA, 33 bp, Homo sapien
aaaaggcagttgctcagaatttgttgagaaaaa

SEQ ID NO: 100975 - DNA, 33 bp, Homo sapien
cccataattttcttcaaatcagtggttctcagc

SEQ ID NO: 100976 - DNA, 33 bp, Homo sapien
cccataattttcttcagatcagtggttctcagc

SEQ ID NO: 100977 - DNA, 33 bp, Homo sapien
tggcattttggttctaaattttggtagcctttc

SEQ ID NO: 100978 - DNA, 33 bp, Homo sapien
tggcattttggttctatattttggtagcctttc

SEQ ID NO: 100979 - DNA, 33 bp, Homo sapien
caccgtctgagatgagaactttattccttcctc

SEQ ID NO: 100980 - DNA, 33 bp, Homo sapien
caccgtctgagatgagtactttattccttcctc

SEQ ID NO: 100981 - DNA, 33 bp, Homo sapien
aactaacttgacgtacaagcacctctgtaaata

SEQ ID NO: 100982 - DNA, 33 bp, Homo sapien
aactaacttgacgtacgagcacctctgtaaata

SEQ ID NO: 100983 - DNA, 33 bp, Homo sapien
tcatttcaaaagagtccacaaacatgaaaacga

SEQ ID NO: 100984 - DNA, 33 bp, Homo sapien
tcatttcaaaagagtcgacaaacatgaaaacga

SEQ ID NO: 100985 - DNA, 33 bp, Homo sapien
actctcttctcccacacgtaggcgtatgcgtag

SEQ ID NO: 100986 - DNA, 33 bp, Homo sapien
actctcttctcccacaggtaggcgtatgcgtag

SEQ ID NO: 100987 - DNA, 33 bp, Homo sapien
gttactgacttatgaccccattccctcaactct

SEQ ID NO: 100988 - DNA, 33 bp, Homo sapien
gttactgacttatgactccattccctcaactct

SEQ ID NO: 100989 - DNA, 33 bp, Homo sapien
agtttttaattctatcaacagctcaggttgaat

SEQ ID NO: 100990 - DNA, 33 bp, Homo sapien
agtttttaattctatctacagctcaggttgaat

SEQ ID NO: 100991 - DNA, 33 bp, Homo sapien
tgccctttcttcagagaacaacgttttggagag

SEQ ID NO: 100992 - DNA, 33 bp, Homo sapien
tgccctttcttcagagcacaacgttttggagag

SEQ ID NO: 100993 - DNA, 33 bp, Homo sapien
catcttaatttttttgcagtgcttatgatttga

SEQ ID NO: 100994 - DNA, 33 bp, Homo sapien
catcttaatttttttgtagtgcttatgatttga

SEQ ID NO: 100995 - DNA, 33 bp, Homo sapien
aataattactttcgtggagttcactaatcctgg

SEQ ID NO: 100996 - DNA, 33 bp, Homo sapien
aataattactttcgtgtagttcactaatcctgg

SEQ ID NO: 100997 - DNA, 33 bp, Homo sapien
ttccactatgactgtacgtgtcctgaggcccgc

SEQ ID NO: 100998 - DNA, 33 bp, Homo sapien
ttccactatgactgtatgtgtcctgaggcccgc

SEQ ID NO: 100999 - DNA, 33 bp, Homo sapien
tatacttgatgagagtaaaagatttcgtagaga

SEQ ID NO: 101000 - DNA, 33 bp, Homo sapien
tatacttgatgagagttaaagatttcgtagaga

SEQ ID NO: 101001 - DNA, 33 bp, Homo sapien
tttgccttatactgaactggacttttataactt

SEQ ID NO: 101002 - DNA, 33 bp, Homo sapien
tttgccttatactgaattggacttttataactt

SEQ ID NO: 101003 - DNA, 33 bp, Homo sapien
gatttcttcacctacaaggtactgttgatagtt

SEQ ID NO: 101004 - DNA, 33 bp, Homo sapien
gatttcttcacctacagggtactgttgatagtt

SEQ ID NO: 101005 - DNA, 33 bp, Homo sapien
ttcagccacagtttggaagtttcccagtgcctg

SEQ ID NO: 101006 - DNA, 33 bp, Homo sapien
ttcagccacagtttgggagtttcccagtgcctg

SEQ ID NO: 101007 - DNA, 33 bp, Homo sapien
ctgcaccattgcagaaatattagtaagaacata

SEQ ID NO: 101008 - DNA, 33 bp, Homo sapien
ctgcaccattgcagaagtattagtaagaacata

SEQ ID NO: 101009 - DNA, 33 bp, Homo sapien
gggataattgcacttacggtctgcaaattggct

SEQ ID NO: 101010 - DNA, 33 bp, Homo sapien
gggataattgcacttagggtctgcaaattggct

SEQ ID NO: 101011 - DNA, 33 bp, Homo sapien
aacattggctctccccactctgcctttagtaag

SEQ ID NO: 101012 - DNA, 33 bp, Homo sapien
aacattggctctccccgctctgcctttagtaag

SEQ ID NO: 101013 - DNA, 33 bp, Homo sapien
agaaaagcaagaatatcaaaacattggctctcc

SEQ ID NO: 101014 - DNA, 33 bp, Homo sapien
agaaaagcaagaatatgaaaacattggctctcc

SEQ ID NO: 101015 - DNA, 33 bp, Homo sapien
ccaggcctcagtttcacgtagaggaacccatga

SEQ ID NO: 101016 - DNA, 33 bp, Homo sapien
ccaggcctcagtttcaggtagaggaacccatga

SEQ ID NO: 101017 - DNA, 33 bp, Homo sapien
ggaaattcagaggaagcctgacttgtgagaatt

SEQ ID NO: 101018 - DNA, 33 bp, Homo sapien
ggaaattcagaggaaggctgacttgtgagaatt

SEQ ID NO: 101019 - DNA, 33 bp, Homo sapien
aacctgaagtaagatacagcagcttttctagtg

SEQ ID NO: 101020 - DNA, 33 bp, Homo sapien
aacctgaagtaagatatagcagcttttctagtg

SEQ ID NO: 101021 - DNA, 33 bp, Homo sapien
accaattgccaccctacagctgggcagaggtgt

SEQ ID NO: 101022 - DNA, 33 bp, Homo sapien
accaattgccaccctatagctgggcagaggtgt

SEQ ID NO: 101023 - DNA, 33 bp, Homo sapien
tcttaaaaagagcaaacgtccctcttatatccc

SEQ ID NO: 101024 - DNA, 33 bp, Homo sapien
tcttaaaaagagcaaatgtccctcttatatccc

SEQ ID NO: 101025 - DNA, 33 bp, Homo sapien
gatttgaaaaacacaacgtttcaggtcaaagga

SEQ ID NO: 101026 - DNA, 33 bp, Homo sapien
gatttgaaaaacacaatgtttcaggtcaaagga

SEQ ID NO: 101027 - DNA, 33 bp, Homo sapien
tggtatctcaaatcagaatgaagttatagtcat

SEQ ID NO: 101028 - DNA, 33 bp, Homo sapien
tggtatctcaaatcaggatgaagttatagtcat

SEQ ID NO: 101029 - DNA, 33 bp, Homo sapien
gccgctagacttaggcagccattttcccttgga

SEQ ID NO: 101030 - DNA, 33 bp, Homo sapien
gccgctagacttaggcggccattttcccttgga

SEQ ID NO: 101031 - DNA, 33 bp, Homo sapien
caagagtaatgttaaacgaatcacccagtgctg

SEQ ID NO: 101032 - DNA, 33 bp, Homo sapien
caagagtaatgttaaaggaatcacccagtgctg

SEQ ID NO: 101033 - DNA, 33 bp, Homo sapien
atcacttttttaatgaacagttagcagataaaa

SEQ ID NO: 101034 - DNA, 33 bp, Homo sapien
atcacttttttaatgatcagttagcagataaaa

SEQ ID NO: 101035 - DNA, 33 bp, Homo sapien
tttggccacagtagaagaaaataatgctggagg

SEQ ID NO: 101036 - DNA, 33 bp, Homo sapien
tttggccacagtagaataaaataatgctggagg

SEQ ID NO: 101037 - DNA, 33 bp, Homo sapien
aggattaaaatactgacagtgataatggataga

SEQ ID NO: 101038 - DNA, 33 bp, Homo sapien
aggattaaaatactgatagtgataatggataga

SEQ ID NO: 101039 - DNA, 33 bp, Homo sapien
atggatagattcaagacagatgataactactga

SEQ ID NO: 101040 - DNA, 33 bp, Homo sapien
atggatagattcaagatagatgataactactga

SEQ ID NO: 101041 - DNA, 33 bp, Homo sapien
catcctgtagtgccgaggaatgttacaggcttg

SEQ ID NO: 101042 - DNA, 33 bp, Homo sapien
catcctgtagtgccgatgaatgttacaggcttg

SEQ ID NO: 101043 - DNA, 33 bp, Homo sapien
ccaagaaacacaatgaagcggtgttactgagcc

SEQ ID NO: 101044 - DNA, 33 bp, Homo sapien
ccaagaaacacaatgaggcggtgttactgagcc

SEQ ID NO: 101045 - DNA, 33 bp, Homo sapien
cctttaagcatctacacgatctggaaaaaaagt

SEQ ID NO: 101046 - DNA, 33 bp, Homo sapien
cctttaagcatctacatgatctggaaaaaaagt

SEQ ID NO: 101047 - DNA, 33 bp, Homo sapien
atggtaagaacaaaccacagtttatatatcctt

SEQ ID NO: 101048 - DNA, 33 bp, Homo sapien
atggtaagaacaaacctcagtttatatatcctt

SEQ ID NO: 101049 - DNA, 33 bp, Homo sapien
tgaagtccagggagggaaaagagactttattct

SEQ ID NO: 101050 - DNA, 33 bp, Homo sapien
tgaagtccagggaggggaaagagactttattct

SEQ ID NO: 101051 - DNA, 33 bp, Homo sapien
agaataaagaaccaaaatcactatgcaaggaaa

SEQ ID NO: 101052 - DNA, 33 bp, Homo sapien
agaataaagaaccaaactcactatgcaaggaaa

SEQ ID NO: 101053 - DNA, 33 bp, Homo sapien
ataggtagctgctgcactccagagccaggtaga

SEQ ID NO: 101054 - DNA, 33 bp, Homo sapien
ataggtagctgctgcattccagagccaggtaga

SEQ ID NO: 101055 - DNA, 33 bp, Homo sapien
tgaccaattctctgtacgtagcttcccattttc

SEQ ID NO: 101056 - DNA, 33 bp, Homo sapien
tgaccaattctctgtatgtagcttcccattttc

SEQ ID NO: 101057 - DNA, 33 bp, Homo sapien
aacaaaacacactagagagttgaaaatgggaag

SEQ ID NO: 101058 - DNA, 33 bp, Homo sapien
aacaaaacacactagatagttgaaaatgggaag

SEQ ID NO: 101059 - DNA, 33 bp, Homo sapien
ggccccgtatgagtcacagtacaatcaggaaaa

SEQ ID NO: 101060 - DNA, 33 bp, Homo sapien
ggccccgtatgagtcagagtacaatcaggaaaa

SEQ ID NO: 101061 - DNA, 33 bp, Homo sapien
ccacaacacagcctaaagtcttttctactctgg

SEQ ID NO: 101062 - DNA, 33 bp, Homo sapien
ccacaacacagcctaatgtcttttctactctgg

SEQ ID NO: 101063 - DNA, 33 bp, Homo sapien
cctcctccgctgcctcactgctttttttttttt

SEQ ID NO: 101064 - DNA, 33 bp, Homo sapien
cctcctccgctgcctcgctgctttttttttttt

SEQ ID NO: 101065 - DNA, 33 bp, Homo sapien
tttcactgatatatgaagtccatttaaaaaaat

SEQ ID NO: 101066 - DNA, 33 bp, Homo sapien
tttcactgatatatgacgtccatttaaaaaaat

SEQ ID NO: 101067 - DNA, 33 bp, Homo sapien
caccaatccagctttcaaagactgaggaaaagg

SEQ ID NO: 101068 - DNA, 33 bp, Homo sapien
caccaatccagctttcgaagactgaggaaaagg

SEQ ID NO: 101069 - DNA, 33 bp, Homo sapien
tcaaaaaatgaattgacgttagaagggcacgct

SEQ ID NO: 101070 - DNA, 33 bp, Homo sapien
tcaaaaaatgaattgatgttagaagggcacgct

SEQ ID NO: 101071 - DNA, 33 bp, Homo sapien
ttcttttttggtcttaaaacacgctcttttggc

SEQ ID NO: 101072 - DNA, 33 bp, Homo sapien
ttcttttttggtcttacaacacgctcttttggc

SEQ ID NO: 101073 - DNA, 33 bp, Homo sapien
ggaccgctagtaaaaaataaaaaatgatgcact

SEQ ID NO: 101074 - DNA, 33 bp, Homo sapien
ggaccgctagtaaaaactaaaaaatgatgcact

SEQ ID NO: 101075 - DNA, 33 bp, Homo sapien
aatttgaaaagcatggcaataatgtgagccaat

SEQ ID NO: 101076 - DNA, 33 bp, Homo sapien
aatttgaaaagcatggtaataatgtgagccaat

SEQ ID NO: 101077 - DNA, 33 bp, Homo sapien
ggctcttcacaagagcagcaaacggcagttttt

SEQ ID NO: 101078 - DNA, 33 bp, Homo sapien
ggctcttcacaagagcggcaaacggcagttttt

SEQ ID NO: 101079 - DNA, 33 bp, Homo sapien
ggatctgtatgccatcagaatttaataggtgtg

SEQ ID NO: 101080 - DNA, 33 bp, Homo sapien
ggatctgtatgccatcggaatttaataggtgtg

SEQ ID NO: 101081 - DNA, 33 bp, Homo sapien
ggtctctcctgtcataacttaggccttgatatg

SEQ ID NO: 101082 - DNA, 33 bp, Homo sapien
ggtctctcctgtcataccttaggccttgatatg

SEQ ID NO: 101083 - DNA, 33 bp, Homo sapien
ggactgttttagtaaagaaccatgctggaattc

SEQ ID NO: 101084 - DNA, 33 bp, Homo sapien
ggactgttttagtaaataaccatgctggaattc

SEQ ID NO: 101085 - DNA, 33 bp, Homo sapien
atgaaggatcctgaaactcagtagtgagcacag

SEQ ID NO: 101086 - DNA, 33 bp, Homo sapien
atgaaggatcctgaaattcagtagtgagcacag

SEQ ID NO: 101087 - DNA, 33 bp, Homo sapien
ccacatggaatcatcaaaaactaattattcaac

SEQ ID NO: 101088 - DNA, 33 bp, Homo sapien
ccacatggaatcatcagaaactaattattcaac

SEQ ID NO: 101089 - DNA, 33 bp, Homo sapien
tcattatgattagtcacgtgaataattaattaa

SEQ ID NO: 101090 - DNA, 33 bp, Homo sapien
tcattatgattagtcatgtgaataattaattaa

SEQ ID NO: 101091 - DNA, 33 bp, Homo sapien
taaaagacttaaattgcatcactgcttcattct

SEQ ID NO: 101092 - DNA, 33 bp, Homo sapien
taaaagacttaaattgtatcactgcttcattct

SEQ ID NO: 101093 - DNA, 33 bp, Homo sapien
atttaattggcttccacacgcgccttcccagtt

SEQ ID NO: 101094 - DNA, 33 bp, Homo sapien
atttaattggcttccatacgcgccttcccagtt

SEQ ID NO: 101095 - DNA, 33 bp, Homo sapien
gaggcagactttgtcaagttaagtctaagtaaa

SEQ ID NO: 101096 - DNA, 33 bp, Homo sapien
gaggcagactttgtcacgttaagtctaagtaaa

SEQ ID NO: 101097 - DNA, 33 bp, Homo sapien
agacttgttgcaaaaactgatggaaagttattt

SEQ ID NO: 101098 - DNA, 33 bp, Homo sapien
agacttgttgcaaaaattgatggaaagttattt

SEQ ID NO: 101099 - DNA, 33 bp, Homo sapien
agagcctgccattctcaattgacagatggaaaa

SEQ ID NO: 101100 - DNA, 33 bp, Homo sapien
agagcctgccattctcgattgacagatggaaaa

SEQ ID NO: 101101 - DNA, 33 bp, Homo sapien
ctgtgtcattggcctgcataagcttgtacgtgg

SEQ ID NO: 101102 - DNA, 33 bp, Homo sapien
ctgtgtcattggcctggataagcttgtacgtgg

SEQ ID NO: 101103 - DNA, 33 bp, Homo sapien
ggttgtttagaacagaatacctttctccaaaga

SEQ ID NO: 101104 - DNA, 33 bp, Homo sapien
ggttgtttagaacagagtacctttctccaaaga

SEQ ID NO: 101105 - DNA, 33 bp, Homo sapien
aggggatgagcaaattcaagaggaaaaggcaca

SEQ ID NO: 101106 - DNA, 33 bp, Homo sapien
aggggatgagcaaattgaagaggaaaaggcaca

SEQ ID NO: 101107 - DNA, 33 bp, Homo sapien
tgcattttgtacttcaagttgacatttagatct

SEQ ID NO: 101108 - DNA, 33 bp, Homo sapien
tgcattttgtacttcaggttgacatttagatct

SEQ ID NO: 101109 - DNA, 33 bp, Homo sapien
cctcaccttagagaaaacagaatgttacaggag

SEQ ID NO: 101110 - DNA, 33 bp, Homo sapien
cctcaccttagagaaagcagaatgttacaggag

SEQ ID NO: 101111 - DNA, 33 bp, Homo sapien
aactaaaaagacaaggaatctgtcagcctatat

SEQ ID NO: 101112 - DNA, 33 bp, Homo sapien
aactaaaaagacaaggtatctgtcagcctatat

SEQ ID NO: 101113 - DNA, 33 bp, Homo sapien
aaagggcttctgggaaaaaaagtgcagattaca

SEQ ID NO: 101114 - DNA, 33 bp, Homo sapien
aaagggcttctgggaataaaagtgcagattaca

SEQ ID NO: 101115 - DNA, 33 bp, Homo sapien
ggtgaatgagttctgacctttcttctataattt

SEQ ID NO: 101116 - DNA, 33 bp, Homo sapien
ggtgaatgagttctgatctttcttctataattt

SEQ ID NO: 101117 - DNA, 33 bp, Homo sapien
gaattatacactttaaaaagatgacctcggtca

SEQ ID NO: 101118 - DNA, 33 bp, Homo sapien
gaattatacactttaagaagatgacctcggtca

SEQ ID NO: 101119 - DNA, 33 bp, Homo sapien
attttacttattcaccaaccagttaatgggtat

SEQ ID NO: 101120 - DNA, 33 bp, Homo sapien
attttacttattcacccaccagttaatgggtat

SEQ ID NO: 101121 - DNA, 33 bp, Homo sapien
ccatcacaactgtttcaaattcaactttttttc

SEQ ID NO: 101122 - DNA, 33 bp, Homo sapien
ccatcacaactgtttccaattcaactttttttc

SEQ ID NO: 101123 - DNA, 33 bp, Homo sapien
ttgcactcaagagccactcttcctttcttttat

SEQ ID NO: 101124 - DNA, 33 bp, Homo sapien
ttgcactcaagagccattcttcctttcttttat

SEQ ID NO: 101125 - DNA, 33 bp, Homo sapien
cccaagtatcgtaacactcgccagaaaaattgc

SEQ ID NO: 101126 - DNA, 33 bp, Homo sapien
cccaagtatcgtaacattcgccagaaaaattgc

SEQ ID NO: 101127 - DNA, 33 bp, Homo sapien
aaatgaaaacacacaaattgaaaatgcacagaa

SEQ ID NO: 101128 - DNA, 33 bp, Homo sapien
aaatgaaaacacacaagttgaaaatgcacagaa

SEQ ID NO: 101129 - DNA, 33 bp, Homo sapien
ttctaggaaggagtgaacagcacaatgcatcta

SEQ ID NO: 101130 - DNA, 33 bp, Homo sapien
ttctaggaaggagtgatcagcacaatgcatcta

SEQ ID NO: 101131 - DNA, 33 bp, Homo sapien
atgtttgcagttgttccactcaatggagcctgt

SEQ ID NO: 101132 - DNA, 33 bp, Homo sapien
atgtttgcagttgttctactcaatggagcctgt

SEQ ID NO: 101133 - DNA, 33 bp, Homo sapien
ctcagaatccttaaaaaatatccttgaataatt

SEQ ID NO: 101134 - DNA, 33 bp, Homo sapien
ctcagaatccttaaaacatatccttgaataatt

SEQ ID NO: 101135 - DNA, 33 bp, Homo sapien
caaatcaatgcattcagaggacttgtcttggca

SEQ ID NO: 101136 - DNA, 33 bp, Homo sapien
caaatcaatgcattcataggacttgtcttggca

SEQ ID NO: 101137 - DNA, 33 bp, Homo sapien
aggttatcaccaatggaaagtgagaaatgatgc

SEQ ID NO: 101138 - DNA, 33 bp, Homo sapien
aggttatcaccaatgggaagtgagaaatgatgc

SEQ ID NO: 101139 - DNA, 33 bp, Homo sapien
acatctgagaattaaaagagagaatcactagga

SEQ ID NO: 101140 - DNA, 33 bp, Homo sapien
acatctgagaattaaatgagagaatcactagga

SEQ ID NO: 101141 - DNA, 33 bp, Homo sapien
tgcaagagcagcaaagaaggttggaaaattgct

SEQ ID NO: 101142 - DNA, 33 bp, Homo sapien
tgcaagagcagcaaaggaggttggaaaattgct

SEQ ID NO: 101143 - DNA, 33 bp, Homo sapien
gagcagaagtttttaacgctggtgaagtccaat

SEQ ID NO: 101144 - DNA, 33 bp, Homo sapien
gagcagaagtttttaatgctggtgaagtccaat

SEQ ID NO: 101145 - DNA, 33 bp, Homo sapien
gacattcaggcatttcccgatctggcccaacct

SEQ ID NO: 101146 - DNA, 33 bp, Homo sapien
gacattcaggcatttcgcgatctggcccaacct

SEQ ID NO: 101147 - DNA, 33 bp, Homo sapien
tctttggcatagtctaaactccagcctcctgga

SEQ ID NO: 101148 - DNA, 33 bp, Homo sapien
tctttggcatagtctacactccagcctcctgga

SEQ ID NO: 101149 - DNA, 33 bp, Homo sapien
agattaggagtcattaagaagcttatgggaccc

SEQ ID NO: 101150 - DNA, 33 bp, Homo sapien
agattaggagtcattaggaagcttatgggaccc

SEQ ID NO: 101151 - DNA, 33 bp, Homo sapien
aacattaggctcaaaaccctgcaggtccctctg

SEQ ID NO: 101152 - DNA, 33 bp, Homo sapien
aacattaggctcaaaatcctgcaggtccctctg

SEQ ID NO: 101153 - DNA, 33 bp, Homo sapien
actatgcgaggcaagacgtcatatgtttaaaat

SEQ ID NO: 101154 - DNA, 33 bp, Homo sapien
actatgcgaggcaagatgtcatatgtttaaaat

SEQ ID NO: 101155 - DNA, 33 bp, Homo sapien
tgtgcaatgagggaaccgaagatagcaaaaggc

SEQ ID NO: 101156 - DNA, 33 bp, Homo sapien
tgtgcaatgagggaactgaagatagcaaaaggc

SEQ ID NO: 101157 - DNA, 33 bp, Homo sapien
ttagcatagctccccagatatttgttttatcag

SEQ ID NO: 101158 - DNA, 33 bp, Homo sapien
ttagcatagctccccatatatttgttttatcag

SEQ ID NO: 101159 - DNA, 33 bp, Homo sapien
gttataattacttaaacacactgtaatcaaaat

SEQ ID NO: 101160 - DNA, 33 bp, Homo sapien
gttataattacttaaagacactgtaatcaaaat

SEQ ID NO: 101161 - DNA, 33 bp, Homo sapien
gccattctagtagctaggaaacttctttctaga

SEQ ID NO: 101162 - DNA, 33 bp, Homo sapien
gccattctagtagctatgaaacttctttctaga

SEQ ID NO: 101163 - DNA, 33 bp, Homo sapien
tcaaagttccctgtgaggtgcttccacagctcc

SEQ ID NO: 101164 - DNA, 33 bp, Homo sapien
tcaaagttccctgtgatgtgcttccacagctcc

SEQ ID NO: 101165 - DNA, 33 bp, Homo sapien
ttggagtttcatctacacttgtagcatcctttc

SEQ ID NO: 101166 - DNA, 33 bp, Homo sapien
ttggagtttcatctacgcttgtagcatcctttc

SEQ ID NO: 101167 - DNA, 33 bp, Homo sapien
agttcaataaagtggacacaagagcagcatttt

SEQ ID NO: 101168 - DNA, 33 bp, Homo sapien
agttcaataaagtggatacaagagcagcatttt

SEQ ID NO: 101169 - DNA, 33 bp, Homo sapien
tgatctagaatgaaaaatccaaaaaataagttt

SEQ ID NO: 101170 - DNA, 33 bp, Homo sapien
tgatctagaatgaaaactccaaaaaataagttt

SEQ ID NO: 101171 - DNA, 33 bp, Homo sapien
tccaaacaatgtgtaaaaatattagctgcagta

SEQ ID NO: 101172 - DNA, 33 bp, Homo sapien
tccaaacaatgtgtaagaatattagctgcagta

SEQ ID NO: 101173 - DNA, 33 bp, Homo sapien
ccaactgtgcttgccaatataacccttgttgaa

SEQ ID NO: 101174 - DNA, 33 bp, Homo sapien
ccaactgtgcttgccagtataacccttgttgaa

SEQ ID NO: 101175 - DNA, 33 bp, Homo sapien
tgcagtggtgtgatgaggtaataaaggtttact

SEQ ID NO: 101176 - DNA, 33 bp, Homo sapien
tgcagtggtgtgatgatgtaataaaggtttact

SEQ ID NO: 101177 - DNA, 33 bp, Homo sapien
tttatgtggtccctaaaatgaaaacagatcaaa

SEQ ID NO: 101178 - DNA, 33 bp, Homo sapien
tttatgtggtccctaagatgaaaacagatcaaa

SEQ ID NO: 101179 - DNA, 33 bp, Homo sapien
gagacaggactcattcaagtttgcatttagagt

SEQ ID NO: 101180 - DNA, 33 bp, Homo sapien
gagacaggactcattcgagtttgcatttagagt

SEQ ID NO: 101181 - DNA, 33 bp, Homo sapien
gtattattttcatctccgaaggatctatatggt

SEQ ID NO: 101182 - DNA, 33 bp, Homo sapien
gtattattttcatctctgaaggatctatatggt

SEQ ID NO: 101183 - DNA, 33 bp, Homo sapien
gattacttattactgacgatctcactagaataa

SEQ ID NO: 101184 - DNA, 33 bp, Homo sapien
gattacttattactgatgatctcactagaataa

SEQ ID NO: 101185 - DNA, 33 bp, Homo sapien
gctcccacggattccacgttatggtgagctgta

SEQ ID NO: 101186 - DNA, 33 bp, Homo sapien
gctcccacggattccatgttatggtgagctgta

SEQ ID NO: 101187 - DNA, 33 bp, Homo sapien
aaagtagtagatcttcacagtttctactgttgg

SEQ ID NO: 101188 - DNA, 33 bp, Homo sapien
aaagtagtagatcttcccagtttctactgttgg

SEQ ID NO: 101189 - DNA, 33 bp, Homo sapien
actaaaattaagagtacgttgaaatgctataaa

SEQ ID NO: 101190 - DNA, 33 bp, Homo sapien
actaaaattaagagtatgttgaaatgctataaa

SEQ ID NO: 101191 - DNA, 33 bp, Homo sapien
tatatgtgagcacctacagatctttgctttcag

SEQ ID NO: 101192 - DNA, 33 bp, Homo sapien
tatatgtgagcacctatagatctttgctttcag

SEQ ID NO: 101193 - DNA, 33 bp, Homo sapien
aacaaatagcacataacaagatggcagttagtg

SEQ ID NO: 101194 - DNA, 33 bp, Homo sapien
aacaaatagcacataataagatggcagttagtg

SEQ ID NO: 101195 - DNA, 33 bp, Homo sapien
ctgattaactaaagtcaaatttacatctgccat

SEQ ID NO: 101196 - DNA, 33 bp, Homo sapien
ctgattaactaaagtcgaatttacatctgccat

SEQ ID NO: 101197 - DNA, 33 bp, Homo sapien
gaattagatgaatcacaaaggtgggaccctcat

SEQ ID NO: 101198 - DNA, 33 bp, Homo sapien
gaattagatgaatcacgaaggtgggaccctcat

SEQ ID NO: 101199 - DNA, 33 bp, Homo sapien
tttataggactaaaaaactgatgggagtaaatt

SEQ ID NO: 101200 - DNA, 33 bp, Homo sapien
tttataggactaaaaacctgatgggagtaaatt

SEQ ID NO: 101201 - DNA, 33 bp, Homo sapien
tcattggcagaaaatgaaaaagagacttcagat

SEQ ID NO: 101202 - DNA, 33 bp, Homo sapien
tcattggcagaaaatggaaaagagacttcagat

SEQ ID NO: 101203 - DNA, 33 bp, Homo sapien
gaaggagccaatcagagaactaactgggaacta

SEQ ID NO: 101204 - DNA, 33 bp, Homo sapien
gaaggagccaatcagataactaactgggaacta

SEQ ID NO: 101205 - DNA, 33 bp, Homo sapien
ccaactgcctctgggacatcgcactgctgttct

SEQ ID NO: 101206 - DNA, 33 bp, Homo sapien
ccaactgcctctgggatatcgcactgctgttct

SEQ ID NO: 101207 - DNA, 33 bp, Homo sapien
tgcctgcattttactacgctaagtgcatctcac

SEQ ID NO: 101208 - DNA, 33 bp, Homo sapien
tgcctgcattttactatgctaagtgcatctcac

SEQ ID NO: 101209 - DNA, 33 bp, Homo sapien
ctgtcttaccatttggaacctatctctgtgtct

SEQ ID NO: 101210 - DNA, 33 bp, Homo sapien
ctgtcttaccatttgggacctatctctgtgtct

SEQ ID NO: 101211 - DNA, 33 bp, Homo sapien
ctgaaaatcagtagtaccaaagaaaagtgagag

SEQ ID NO: 101212 - DNA, 33 bp, Homo sapien
ctgaaaatcagtagtatcaaagaaaagtgagag

SEQ ID NO: 101213 - DNA, 33 bp, Homo sapien
tcttgccagaacccataatagtcatgaatatac

SEQ ID NO: 101214 - DNA, 33 bp, Homo sapien
tcttgccagaacccattatagtcatgaatatac

SEQ ID NO: 101215 - DNA, 33 bp, Homo sapien
tctgtagataggtccccagaagtatagagtata

SEQ ID NO: 101216 - DNA, 33 bp, Homo sapien
tctgtagataggtcccgagaagtatagagtata

SEQ ID NO: 101217 - DNA, 33 bp, Homo sapien
gtgctagtctttaaaacgaaatgtcacactctt

SEQ ID NO: 101218 - DNA, 33 bp, Homo sapien
gtgctagtctttaaaatgaaatgtcacactctt

SEQ ID NO: 101219 - DNA, 33 bp, Homo sapien
tttgcttataccaccactattgtttgatgttta

SEQ ID NO: 101220 - DNA, 33 bp, Homo sapien
tttgcttataccaccagtattgtttgatgttta

SEQ ID NO: 101221 - DNA, 33 bp, Homo sapien
tcatcttttgttgtccacagaatctactgtatg

SEQ ID NO: 101222 - DNA, 33 bp, Homo sapien
tcatcttttgttgtccgcagaatctactgtatg

SEQ ID NO: 101223 - DNA, 33 bp, Homo sapien
gactctgatcttaaagaaagtcaccggttaatt

SEQ ID NO: 101224 - DNA, 33 bp, Homo sapien
gactctgatcttaaaggaagtcaccggttaatt

SEQ ID NO: 101225 - DNA, 33 bp, Homo sapien
ctgacgcataagcacacgctacactacacactc

SEQ ID NO: 101226 - DNA, 33 bp, Homo sapien
ctgacgcataagcacatgctacactacacactc

SEQ ID NO: 101227 - DNA, 33 bp, Homo sapien
ggactgaaattttttaactgtatctctattgaa

SEQ ID NO: 101228 - DNA, 33 bp, Homo sapien
ggactgaaattttttagctgtatctctattgaa

SEQ ID NO: 101229 - DNA, 33 bp, Homo sapien
tgatcaatttttatcaaactctgaatccataag

SEQ ID NO: 101230 - DNA, 33 bp, Homo sapien
tgatcaatttttatcagactctgaatccataag

SEQ ID NO: 101231 - DNA, 33 bp, Homo sapien
ttaaggtgatgttgcacgagtgtcaaagatggg

SEQ ID NO: 101232 - DNA, 33 bp, Homo sapien
ttaaggtgatgttgcatgagtgtcaaagatggg

SEQ ID NO: 101233 - DNA, 33 bp, Homo sapien
agatggagactcaccaagttgcacaggctaacc

SEQ ID NO: 101234 - DNA, 33 bp, Homo sapien
agatggagactcaccaggttgcacaggctaacc

SEQ ID NO: 101235 - DNA, 33 bp, Homo sapien
ctttaaaaacgaattggaagtggtatcaggaaa

SEQ ID NO: 101236 - DNA, 33 bp, Homo sapien
ctttaaaaacgaattgtaagtggtatcaggaaa

SEQ ID NO: 101237 - DNA, 33 bp, Homo sapien
aacatcaccataaaaacggagagagagagaaga

SEQ ID NO: 101238 - DNA, 33 bp, Homo sapien
aacatcaccataaaaatggagagagagagaaga

SEQ ID NO: 101239 - DNA, 33 bp, Homo sapien
tactaaatccaaaaaccatacacccatccttgg

SEQ ID NO: 101240 - DNA, 33 bp, Homo sapien
tactaaatccaaaaacgatacacccatccttgg

SEQ ID NO: 101241 - DNA, 33 bp, Homo sapien
gtatttagaccaggaggacataaagaaatgctg

SEQ ID NO: 101242 - DNA, 33 bp, Homo sapien
gtatttagaccaggagtacataaagaaatgctg

SEQ ID NO: 101243 - DNA, 33 bp, Homo sapien
tacaatgacctcagagaaaataggagtgatcag

SEQ ID NO: 101244 - DNA, 33 bp, Homo sapien
tacaatgacctcagagcaaataggagtgatcag

SEQ ID NO: 101245 - DNA, 33 bp, Homo sapien
ctagttcattctcttaagacagcacatttatct

SEQ ID NO: 101246 - DNA, 33 bp, Homo sapien
ctagttcattctcttacgacagcacatttatct

SEQ ID NO: 101247 - DNA, 33 bp, Homo sapien
gttctcctgggattccccaagatgttgcttctc

SEQ ID NO: 101248 - DNA, 33 bp, Homo sapien
gttctcctgggattccgcaagatgttgcttctc

SEQ ID NO: 101249 - DNA, 33 bp, Homo sapien
tgctttgcattatctacacattccaaaagtgat

SEQ ID NO: 101250 - DNA, 33 bp, Homo sapien
tgctttgcattatctatacattccaaaagtgat

SEQ ID NO: 101251 - DNA, 33 bp, Homo sapien
ttatacatggtatgcaacatcagatttggccct

SEQ ID NO: 101252 - DNA, 33 bp, Homo sapien
ttatacatggtatgcaccatcagatttggccct

SEQ ID NO: 101253 - DNA, 33 bp, Homo sapien
ttaaaatgaatgagaacgaaacccatttgtgtt

SEQ ID NO: 101254 - DNA, 33 bp, Homo sapien
ttaaaatgaatgagaatgaaacccatttgtgtt

SEQ ID NO: 101255 - DNA, 33 bp, Homo sapien
ctcttctataggcttacctgagaatctagtcag

SEQ ID NO: 101256 - DNA, 33 bp, Homo sapien
ctcttctataggcttatctgagaatctagtcag

SEQ ID NO: 101257 - DNA, 33 bp, Homo sapien
atcacctcagttaaaacaggataatggaatgca

SEQ ID NO: 101258 - DNA, 33 bp, Homo sapien
atcacctcagttaaaataggataatggaatgca

SEQ ID NO: 101259 - DNA, 33 bp, Homo sapien
ataaataaattgccacggtctctggaaaattta

SEQ ID NO: 101260 - DNA, 33 bp, Homo sapien
ataaataaattgccactgtctctggaaaattta

SEQ ID NO: 101261 - DNA, 33 bp, Homo sapien
aaggatcagattagagcagaaaagttccttgat

SEQ ID NO: 101262 - DNA, 33 bp, Homo sapien
aaggatcagattagaggagaaaagttccttgat

SEQ ID NO: 101263 - DNA, 33 bp, Homo sapien
ggctggaattgaaggcaaagtaccagttgctcc

SEQ ID NO: 101264 - DNA, 33 bp, Homo sapien
ggctggaattgaaggcgaagtaccagttgctcc

SEQ ID NO: 101265 - DNA, 33 bp, Homo sapien
acctcaaagctaaacagcctcgatttctgaagt

SEQ ID NO: 101266 - DNA, 33 bp, Homo sapien
acctcaaagctaaacatcctcgatttctgaagt

SEQ ID NO: 101267 - DNA, 33 bp, Homo sapien
cctactcagaatcccaatgaaataaccaaataa

SEQ ID NO: 101268 - DNA, 33 bp, Homo sapien
cctactcagaatcccactgaaataaccaaataa

SEQ ID NO: 101269 - DNA, 33 bp, Homo sapien
catggctgcctttaaaatatttgaggctaaagt

SEQ ID NO: 101270 - DNA, 33 bp, Homo sapien
catggctgcctttaaactatttgaggctaaagt

SEQ ID NO: 101271 - DNA, 33 bp, Homo sapien
tgcccatgttttttcaggtttgatgtgatgaac

SEQ ID NO: 101272 - DNA, 33 bp, Homo sapien
tgcccatgttttttcatgtttgatgtgatgaac

SEQ ID NO: 101273 - DNA, 33 bp, Homo sapien
taccaacaaaccatccactagaatagtacaaat

SEQ ID NO: 101274 - DNA, 33 bp, Homo sapien
taccaacaaaccatccgctagaatagtacaaat

SEQ ID NO: 101275 - DNA, 33 bp, Homo sapien
gtatggaaaacccaacaggaatctacatactag

SEQ ID NO: 101276 - DNA, 33 bp, Homo sapien
gtatggaaaacccaacgggaatctacatactag

SEQ ID NO: 101277 - DNA, 33 bp, Homo sapien
aaaaggaggaaacttacggatatctactgaaat

SEQ ID NO: 101278 - DNA, 33 bp, Homo sapien
aaaaggaggaaacttatggatatctactgaaat

SEQ ID NO: 101279 - DNA, 33 bp, Homo sapien
tttagaagttccattcaccactgaatctgtcgg

SEQ ID NO: 101280 - DNA, 33 bp, Homo sapien
tttagaagttccattcgccactgaatctgtcgg

SEQ ID NO: 101281 - DNA, 33 bp, Homo sapien
ctctcacatgacgagacaacagtgatagaataa

SEQ ID NO: 101282 - DNA, 33 bp, Homo sapien
ctctcacatgacgagataacagtgatagaataa

SEQ ID NO: 101283 - DNA, 33 bp, Homo sapien
tgcagtggactaaaacccatcaaatatacaaaa

SEQ ID NO: 101284 - DNA, 33 bp, Homo sapien
tgcagtggactaaaactcatcaaatatacaaaa

SEQ ID NO: 101285 - DNA, 33 bp, Homo sapien
gatattgatagccctcacttgctaagcaaaaat

SEQ ID NO: 101286 - DNA, 33 bp, Homo sapien
gatattgatagccctcgcttgctaagcaaaaat

SEQ ID NO: 101287 - DNA, 33 bp, Homo sapien
tattctcatttggttgcaagcatctatagaatg

SEQ ID NO: 101288 - DNA, 33 bp, Homo sapien
tattctcatttggttgtaagcatctatagaatg

SEQ ID NO: 101289 - DNA, 33 bp, Homo sapien
acttggccaggagctacataaacctccgactca

SEQ ID NO: 101290 - DNA, 33 bp, Homo sapien
acttggccaggagctatataaacctccgactca

SEQ ID NO: 101291 - DNA, 33 bp, Homo sapien
gctgccaatggttctacaatttgctgtgggaaa

SEQ ID NO: 101292 - DNA, 33 bp, Homo sapien
gctgccaatggttctataatttgctgtgggaaa

SEQ ID NO: 101293 - DNA, 33 bp, Homo sapien
gccagatatccaaaaacagcacaatccagaaat

SEQ ID NO: 101294 - DNA, 33 bp, Homo sapien
gccagatatccaaaaatagcacaatccagaaat

SEQ ID NO: 101295 - DNA, 33 bp, Homo sapien
aattcacttagtagagcaatttggttaagacct

SEQ ID NO: 101296 - DNA, 33 bp, Homo sapien
aattcacttagtagaggaatttggttaagacct

SEQ ID NO: 101297 - DNA, 33 bp, Homo sapien
acgcgggagggcacagccgcactaaatattcac

SEQ ID NO: 101298 - DNA, 33 bp, Homo sapien
acgcgggagggcacagtcgcactaaatattcac

SEQ ID NO: 101299 - DNA, 33 bp, Homo sapien
tcacaaatatggctcccaatttctcatccttac

SEQ ID NO: 101300 - DNA, 33 bp, Homo sapien
tcacaaatatggctcctaatttctcatccttac

SEQ ID NO: 101301 - DNA, 33 bp, Homo sapien
taactaccaaaaaactcagatcttcgctatttt

SEQ ID NO: 101302 - DNA, 33 bp, Homo sapien
taactaccaaaaaactgagatcttcgctatttt

SEQ ID NO: 101303 - DNA, 33 bp, Homo sapien
tttagcttgatggcccagaatacaaatccagta

SEQ ID NO: 101304 - DNA, 33 bp, Homo sapien
tttagcttgatggcccggaatacaaatccagta

SEQ ID NO: 101305 - DNA, 33 bp, Homo sapien
tcacattttgacttccaaccttaaccactgatc

SEQ ID NO: 101306 - DNA, 33 bp, Homo sapien
tcacattttgacttccgaccttaaccactgatc

SEQ ID NO: 101307 - DNA, 33 bp, Homo sapien
agaattgatccttgtacgggaagtggggtaaag

SEQ ID NO: 101308 - DNA, 33 bp, Homo sapien
agaattgatccttgtatgggaagtggggtaaag

SEQ ID NO: 101309 - DNA, 33 bp, Homo sapien
aaattatggcctataaccatcctttccaaaaat

SEQ ID NO: 101310 - DNA, 33 bp, Homo sapien
aaattatggcctataatcatcctttccaaaaat

SEQ ID NO: 101311 - DNA, 33 bp, Homo sapien
atatctaagaatccatgatcaaatacaaggtca

SEQ ID NO: 101312 - DNA, 33 bp, Homo sapien
atatctaagaatccattatcaaatacaaggtca

SEQ ID NO: 101313 - DNA, 33 bp, Homo sapien
tctaaagtcttagaaaccattatggccaagaga

SEQ ID NO: 101314 - DNA, 33 bp, Homo sapien
tctaaagtcttagaaatcattatggccaagaga

SEQ ID NO: 101315 - DNA, 33 bp, Homo sapien
gatgctaataacaggggaaactaaggcaaggca

SEQ ID NO: 101316 - DNA, 33 bp, Homo sapien
gatgctaataacagggtaaactaaggcaaggca

SEQ ID NO: 101317 - DNA, 33 bp, Homo sapien
tagggacttggtggaccacatgaaaaaataaaa

SEQ ID NO: 101318 - DNA, 33 bp, Homo sapien
tagggacttggtggactacatgaaaaaataaaa

SEQ ID NO: 101319 - DNA, 33 bp, Homo sapien
ttggtgtattgaagtcagaatacctgtgcctgc

SEQ ID NO: 101320 - DNA, 33 bp, Homo sapien
ttggtgtattgaagtcggaatacctgtgcctgc

SEQ ID NO: 101321 - DNA, 33 bp, Homo sapien
cagaaagctaaataaacgcctatgtactgtggt

SEQ ID NO: 101322 - DNA, 33 bp, Homo sapien
cagaaagctaaataaatgcctatgtactgtggt

SEQ ID NO: 101323 - DNA, 33 bp, Homo sapien
ggtagtggccctttcactcagcgtatttagatg

SEQ ID NO: 101324 - DNA, 33 bp, Homo sapien
ggtagtggccctttcattcagcgtatttagatg

SEQ ID NO: 101325 - DNA, 33 bp, Homo sapien
aatgctccagaatccaaaattatcaacatgatg

SEQ ID NO: 101326 - DNA, 33 bp, Homo sapien
aatgctccagaatccacaattatcaacatgatg

SEQ ID NO: 101327 - DNA, 33 bp, Homo sapien
atccttcaggcactcccccctaaatattgcttc

SEQ ID NO: 101328 - DNA, 33 bp, Homo sapien
atccttcaggcactcctccctaaatattgcttc

SEQ ID NO: 101329 - DNA, 33 bp, Homo sapien
taaagatgaatactcaaccatcctcttgaccaa

SEQ ID NO: 101330 - DNA, 33 bp, Homo sapien
taaagatgaatactcacccatcctcttgaccaa

SEQ ID NO: 101331 - DNA, 33 bp, Homo sapien
gatgtaagtttaaggacggaattcctaccttca

SEQ ID NO: 101332 - DNA, 33 bp, Homo sapien
gatgtaagtttaaggatggaattcctaccttca

SEQ ID NO: 101333 - DNA, 33 bp, Homo sapien
taggaaaacagactaacacgtgaaagaagtaac

SEQ ID NO: 101334 - DNA, 33 bp, Homo sapien
taggaaaacagactaatacgtgaaagaagtaac

SEQ ID NO: 101335 - DNA, 33 bp, Homo sapien
ttattcttcttctccacggacattgttaatata

SEQ ID NO: 101336 - DNA, 33 bp, Homo sapien
ttattcttcttctccatggacattgttaatata

SEQ ID NO: 101337 - DNA, 33 bp, Homo sapien
aagttcatactgaaatcagagaatcgcagcggc

SEQ ID NO: 101338 - DNA, 33 bp, Homo sapien
aagttcatactgaaattagagaatcgcagcggc

SEQ ID NO: 101339 - DNA, 33 bp, Homo sapien
gagagaacactgaagaccagtctgcacacagcc

SEQ ID NO: 101340 - DNA, 33 bp, Homo sapien
gagagaacactgaagatcagtctgcacacagcc

SEQ ID NO: 101341 - DNA, 33 bp, Homo sapien
tcagtgaggcagaccaggaaggcaacttgattt

SEQ ID NO: 101342 - DNA, 33 bp, Homo sapien
tcagtgaggcagaccatgaaggcaacttgattt

SEQ ID NO: 101343 - DNA, 33 bp, Homo sapien
tttagtgaacatacgcagaagctagaactcctg

SEQ ID NO: 101344 - DNA, 33 bp, Homo sapien
tttagtgaacatacgcggaagctagaactcctg

SEQ ID NO: 101345 - DNA, 33 bp, Homo sapien
aaacctttccatcatccgacaactagaagggca

SEQ ID NO: 101346 - DNA, 33 bp, Homo sapien
aaacctttccatcatctgacaactagaagggca

SEQ ID NO: 101347 - DNA, 33 bp, Homo sapien
cccactctgacaatgcacggtgcttggagaagc

SEQ ID NO: 101348 - DNA, 33 bp, Homo sapien
cccactctgacaatgcgcggtgcttggagaagc

SEQ ID NO: 101349 - DNA, 33 bp, Homo sapien
aagagtagaaatcaaacgaaagagacagcggcg

SEQ ID NO: 101350 - DNA, 33 bp, Homo sapien
aagagtagaaatcaaaggaaagagacagcggcg

SEQ ID NO: 101351 - DNA, 33 bp, Homo sapien
gatgatttattctttcacctaagtcagccttga

SEQ ID NO: 101352 - DNA, 33 bp, Homo sapien
gatgatttattctttcccctaagtcagccttga

SEQ ID NO: 101353 - DNA, 33 bp, Homo sapien
ctacgctgtggacaggcaatttgaaaaatgtat

SEQ ID NO: 101354 - DNA, 33 bp, Homo sapien
ctacgctgtggacaggtaatttgaaaaatgtat

SEQ ID NO: 101355 - DNA, 33 bp, Homo sapien
tggactaataggaagaactggataaagacagaa

SEQ ID NO: 101356 - DNA, 33 bp, Homo sapien
tggactaataggaagagctggataaagacagaa

SEQ ID NO: 101357 - DNA, 33 bp, Homo sapien
agaaacctcgctggaacaataggagctagatta

SEQ ID NO: 101358 - DNA, 33 bp, Homo sapien
agaaacctcgctggaataataggagctagatta

SEQ ID NO: 101359 - DNA, 33 bp, Homo sapien
gtgtataaaatcaacacgttttgagcacttaaa

SEQ ID NO: 101360 - DNA, 33 bp, Homo sapien
gtgtataaaatcaacaggttttgagcacttaaa

SEQ ID NO: 101361 - DNA, 33 bp, Homo sapien
catgtatttgaaaggaactagggccaggcgcat

SEQ ID NO: 101362 - DNA, 33 bp, Homo sapien
catgtatttgaaaggagctagggccaggcgcat

SEQ ID NO: 101363 - DNA, 33 bp, Homo sapien
tgcaaactatatcactcacttctcttcctcatt

SEQ ID NO: 101364 - DNA, 33 bp, Homo sapien
tgcaaactatatcacttacttctcttcctcatt

SEQ ID NO: 101365 - DNA, 33 bp, Homo sapien
atggtcaagtggataaaaataggtaatgctctg

SEQ ID NO: 101366 - DNA, 33 bp, Homo sapien
atggtcaagtggataataataggtaatgctctg

SEQ ID NO: 101367 - DNA, 33 bp, Homo sapien
ccactcttatgccatacgtgcttttgttccctg

SEQ ID NO: 101368 - DNA, 33 bp, Homo sapien
ccactcttatgccatatgtgcttttgttccctg

SEQ ID NO: 101369 - DNA, 33 bp, Homo sapien
agctcaagtagcagaccgagttaagcaggttag

SEQ ID NO: 101370 - DNA, 33 bp, Homo sapien
agctcaagtagcagactgagttaagcaggttag

SEQ ID NO: 101371 - DNA, 33 bp, Homo sapien
aacaatacacaaggtaagatgagtacttctatt

SEQ ID NO: 101372 - DNA, 33 bp, Homo sapien
aacaatacacaaggtaggatgagtacttctatt

SEQ ID NO: 101373 - DNA, 33 bp, Homo sapien
tcaacagtctccatagaatctccaaaggggaag

SEQ ID NO: 101374 - DNA, 33 bp, Homo sapien
tcaacagtctccatagtatctccaaaggggaag

SEQ ID NO: 101375 - DNA, 33 bp, Homo sapien
gggcaagattagcatcaagaagacccctaagaa

SEQ ID NO: 101376 - DNA, 33 bp, Homo sapien
gggcaagattagcatcgagaagacccctaagaa

SEQ ID NO: 101377 - DNA, 33 bp, Homo sapien
aagataattgacataaagaacataaagcctttg

SEQ ID NO: 101378 - DNA, 33 bp, Homo sapien
aagataattgacataatgaacataaagcctttg

SEQ ID NO: 101379 - DNA, 33 bp, Homo sapien
agaattgggcaattaaaaaaaccttgctgggtc

SEQ ID NO: 101380 - DNA, 33 bp, Homo sapien
agaattgggcaattaagaaaaccttgctgggtc

SEQ ID NO: 101381 - DNA, 33 bp, Homo sapien
tacctaataaatgctcaaatgcataatattaat

SEQ ID NO: 101382 - DNA, 33 bp, Homo sapien
tacctaataaatgctcgaatgcataatattaat

SEQ ID NO: 101383 - DNA, 33 bp, Homo sapien
aatggaagagtggtcaagcatttaaaagaaatg

SEQ ID NO: 101384 - DNA, 33 bp, Homo sapien
aatggaagagtggtcaggcatttaaaagaaatg

SEQ ID NO: 101385 - DNA, 33 bp, Homo sapien
cctattgtcagcattaagttgaggaaacatctg

SEQ ID NO: 101386 - DNA, 33 bp, Homo sapien
cctattgtcagcattatgttgaggaaacatctg

SEQ ID NO: 101387 - DNA, 33 bp, Homo sapien
aattgtagcttctatccaaaatgataagtggta

SEQ ID NO: 101388 - DNA, 33 bp, Homo sapien
aattgtagcttctatcgaaaatgataagtggta

SEQ ID NO: 101389 - DNA, 33 bp, Homo sapien
tcatgtcctttgtacaacatgcatacagctgga

SEQ ID NO: 101390 - DNA, 33 bp, Homo sapien
tcatgtcctttgtacagcatgcatacagctgga

SEQ ID NO: 101391 - DNA, 33 bp, Homo sapien
ataaactaggagcaaacgatgaaggccctcgca

SEQ ID NO: 101392 - DNA, 33 bp, Homo sapien
ataaactaggagcaaatgatgaaggccctcgca

SEQ ID NO: 101393 - DNA, 33 bp, Homo sapien
atcgacacaccctgaaacatccttaagcaacct

SEQ ID NO: 101394 - DNA, 33 bp, Homo sapien
atcgacacaccctgaagcatccttaagcaacct

SEQ ID NO: 101395 - DNA, 33 bp, Homo sapien
aggggtctggttataactggaaggtgtcaaccc

SEQ ID NO: 101396 - DNA, 33 bp, Homo sapien
aggggtctggttataagtggaaggtgtcaaccc

SEQ ID NO: 101397 - DNA, 33 bp, Homo sapien
gagctgaaagcatcctaagagactgaaaaagaa

SEQ ID NO: 101398 - DNA, 33 bp, Homo sapien
gagctgaaagcatcctgagagactgaaaaagaa

SEQ ID NO: 101399 - DNA, 33 bp, Homo sapien
aagctgctcttgtaccagctattaagcaacatg

SEQ ID NO: 101400 - DNA, 33 bp, Homo sapien
aagctgctcttgtaccggctattaagcaacatg

SEQ ID NO: 101401 - DNA, 33 bp, Homo sapien
taaatcggataaataaatgaatcagtgaataaa

SEQ ID NO: 101402 - DNA, 33 bp, Homo sapien
taaatcggataaataagtgaatcagtgaataaa

SEQ ID NO: 101403 - DNA, 33 bp, Homo sapien
tagagttagcttccgcactggtctccctggctc

SEQ ID NO: 101404 - DNA, 33 bp, Homo sapien
tagagttagcttccgcgctggtctccctggctc

SEQ ID NO: 101405 - DNA, 33 bp, Homo sapien
actgccatggcagatcagatccaaactgcagaa

SEQ ID NO: 101406 - DNA, 33 bp, Homo sapien
actgccatggcagatcggatccaaactgcagaa

SEQ ID NO: 101407 - DNA, 33 bp, Homo sapien
gaatgtttgacccttccagtgaatttttcaatt

SEQ ID NO: 101408 - DNA, 33 bp, Homo sapien
gaatgtttgacccttctagtgaatttttcaatt

SEQ ID NO: 101409 - DNA, 33 bp, Homo sapien
gaatctcatcagcatgccaagtcaatgagacag

SEQ ID NO: 101410 - DNA, 33 bp, Homo sapien
gaatctcatcagcatgtcaagtcaatgagacag

SEQ ID NO: 101411 - DNA, 33 bp, Homo sapien
ctggcaaaagggccacagagtagaaagaaatta

SEQ ID NO: 101412 - DNA, 33 bp, Homo sapien
ctggcaaaagggccacggagtagaaagaaatta

SEQ ID NO: 101413 - DNA, 33 bp, Homo sapien
accatgtcgctggagaaagggattaacttatct

SEQ ID NO: 101414 - DNA, 33 bp, Homo sapien
accatgtcgctggagagagggattaacttatct

SEQ ID NO: 101415 - DNA, 33 bp, Homo sapien
gggtttgataaacacacgagcactggtttctgc

SEQ ID NO: 101416 - DNA, 33 bp, Homo sapien
gggtttgataaacacatgagcactggtttctgc

SEQ ID NO: 101417 - DNA, 33 bp, Homo sapien
atgattccactacttacgaaaatgtacagactt

SEQ ID NO: 101418 - DNA, 33 bp, Homo sapien
atgattccactacttatgaaaatgtacagactt

SEQ ID NO: 101419 - DNA, 33 bp, Homo sapien
tttttttttttaagacaaaatcttgctgtgtca

SEQ ID NO: 101420 - DNA, 33 bp, Homo sapien
tttttttttttaagacgaaatcttgctgtgtca

SEQ ID NO: 101421 - DNA, 33 bp, Homo sapien
tattaaaaagtcatgagggagctgggcgtggtt

SEQ ID NO: 101422 - DNA, 33 bp, Homo sapien
tattaaaaagtcatgatggagctgggcgtggtt

SEQ ID NO: 101423 - DNA, 33 bp, Homo sapien
ttccaaaagtgtggacaattaggtgcatcatgc

SEQ ID NO: 101424 - DNA, 33 bp, Homo sapien
ttccaaaagtgtggaccattaggtgcatcatgc

SEQ ID NO: 101425 - DNA, 33 bp, Homo sapien
aatccaacgtagcaacaaattactaggcaccca

SEQ ID NO: 101426 - DNA, 33 bp, Homo sapien
aatccaacgtagcaacgaattactaggcaccca

SEQ ID NO: 101427 - DNA, 33 bp, Homo sapien
gtagctctttggcttccaatggcttatcattgc

SEQ ID NO: 101428 - DNA, 33 bp, Homo sapien
gtagctctttggcttctaatggcttatcattgc

SEQ ID NO: 101429 - DNA, 33 bp, Homo sapien
ccaggatttggtcaagaatgaaagcttcctaga

SEQ ID NO: 101430 - DNA, 33 bp, Homo sapien
ccaggatttggtcaaggatgaaagcttcctaga

SEQ ID NO: 101431 - DNA, 33 bp, Homo sapien
cagatggccagtaataaatgtttaatctcatat

SEQ ID NO: 101432 - DNA, 33 bp, Homo sapien
cagatggccagtaatatatgtttaatctcatat

SEQ ID NO: 101433 - DNA, 33 bp, Homo sapien
atgtactgtaagtctaaagtcattttaaatgta

SEQ ID NO: 101434 - DNA, 33 bp, Homo sapien
atgtactgtaagtctagagtcattttaaatgta

SEQ ID NO: 101435 - DNA, 33 bp, Homo sapien
cgcccagccagtaagaagtggttaagtcttgag

SEQ ID NO: 101436 - DNA, 33 bp, Homo sapien
cgcccagccagtaagaggtggttaagtcttgag

SEQ ID NO: 101437 - DNA, 33 bp, Homo sapien
tccatgccaaacaaaactgttcattccttgctg

SEQ ID NO: 101438 - DNA, 33 bp, Homo sapien
tccatgccaaacaaaattgttcattccttgctg

SEQ ID NO: 101439 - DNA, 33 bp, Homo sapien; identical to SEQ ID NO: 101437

SEQ ID NO: 101440 - DNA, 33 bp, Homo sapien; identical to SEQ ID NO: 101438

SEQ ID NO: 101441 - DNA, 33 bp, Homo sapien
ctcagcactgcctcttgaagaactactgcctca

SEQ ID NO: 101442 - DNA, 33 bp, Homo sapien
ctcagcactgcctctttaagaactactgcctca

SEQ ID NO: 101443 - DNA, 33 bp, Homo sapien
tagtgacctaaaatgtaaatacgagagtaaaga

SEQ ID NO: 101444 - DNA, 33 bp, Homo sapien
tagtgacctaaaatgtcaatacgagagtaaaga

SEQ ID NO: 101445 - DNA, 33 bp, Homo sapien
tgaatggttggattaactcaggttgaagtttcg

SEQ ID NO: 101446 - DNA, 33 bp, Homo sapien
tgaatggttggattaattcaggttgaagtttcg

SEQ ID NO: 101447 - DNA, 33 bp, Homo sapien
tatagcaaatcttaaaccagattatttacactg

SEQ ID NO: 101448 - DNA, 33 bp, Homo sapien
tatagcaaatcttaaagcagattatttacactg

SEQ ID NO: 101449 - DNA, 33 bp, Homo sapien
cctgcagaaacgtatacgataaaaatagcaaaa

SEQ ID NO: 101450 - DNA, 33 bp, Homo sapien
cctgcagaaacgtatatgataaaaatagcaaaa

SEQ ID NO: 101451 - DNA, 33 bp, Homo sapien
agctgcttgccagatacagtattcattttctgc

SEQ ID NO: 101452 - DNA, 33 bp, Homo sapien
agctgcttgccagatagagtattcattttctgc

SEQ ID NO: 101453 - DNA, 33 bp, Homo sapien
ttttattgcccttaaaatgaagcacagacatta

SEQ ID NO: 101454 - DNA, 33 bp, Homo sapien
ttttattgcccttaaagtgaagcacagacatta

SEQ ID NO: 101455 - DNA, 33 bp, Homo sapien
agccacagctctagccaaactagattatagaag

SEQ ID NO: 101456 - DNA, 33 bp, Homo sapien
agccacagctctagccgaactagattatagaag

SEQ ID NO: 101457 - DNA, 33 bp, Homo sapien
taactctgctgtaatacgctaccttttttctct

SEQ ID NO: 101458 - DNA, 33 bp, Homo sapien
taactctgctgtaatatgctaccttttttctct

SEQ ID NO: 101459 - DNA, 33 bp, Homo sapien
ataaggacataaatgccataatattttgctcct

SEQ ID NO: 101460 - DNA, 33 bp, Homo sapien
ataaggacataaatgctataatattttgctcct

SEQ ID NO: 101461 - DNA, 33 bp, Homo sapien
gagagctggtaacaacggcggctgctcctttct

SEQ ID NO: 101462 - DNA, 33 bp, Homo sapien
gagagctggtaacaactgcggctgctcctttct

SEQ ID NO: 101463 - DNA, 33 bp, Homo sapien
actgtatatgaggatacgtaacaaatactaaga

SEQ ID NO: 101464 - DNA, 33 bp, Homo sapien
actgtatatgaggatatgtaacaaatactaaga

SEQ ID NO: 101465 - DNA, 33 bp, Homo sapien
acaacaagtagagaaactctgatacaccaaaaa

SEQ ID NO: 101466 - DNA, 33 bp, Homo sapien
acaacaagtagagaaagtctgatacaccaaaaa

SEQ ID NO: 101467 - DNA, 33 bp, Homo sapien
acattgtcctgattctaaatgaagttgagcatc

SEQ ID NO: 101468 - DNA, 33 bp, Homo sapien
acattgtcctgattctgaatgaagttgagcatc

SEQ ID NO: 101469 - DNA, 33 bp, Homo sapien
tgtattttagaaaacaacaacactatcgcttac

SEQ ID NO: 101470 - DNA, 33 bp, Homo sapien
tgtattttagaaaacaccaacactatcgcttac

SEQ ID NO: 101471 - DNA, 33 bp, Homo sapien
tgaaaaacaaaacataagtacacagaccagtag

SEQ ID NO: 101472 - DNA, 33 bp, Homo sapien
tgaaaaacaaaacataggtacacagaccagtag

SEQ ID NO: 101473 - DNA, 33 bp, Homo sapien
taaagtagcacatgaaagggtttttagagccaa

SEQ ID NO: 101474 - DNA, 33 bp, Homo sapien
taaagtagcacatgaaggggtttttagagccaa

SEQ ID NO: 101475 - DNA, 33 bp, Homo sapien
gtggaagcagtctagaccgcgcctaggacatag

SEQ ID NO: 101476 - DNA, 33 bp, Homo sapien
gtggaagcagtctagatcgcgcctaggacatag

SEQ ID NO: 101477 - DNA, 33 bp, Homo sapien
tgggccagggcaaataccaaaactgtgtcagac

SEQ ID NO: 101478 - DNA, 33 bp, Homo sapien
tgggccagggcaaatatcaaaactgtgtcagac

SEQ ID NO: 101479 - DNA, 33 bp, Homo sapien
ttggcaggtgttgcaggaaccccctgaccggaa

SEQ ID NO: 101480 - DNA, 33 bp, Homo sapien
ttggcaggtgttgcagtaaccccctgaccggaa

SEQ ID NO: 101481 - DNA, 33 bp, Homo sapien
tttttaaggcaaagtaacatcccattgtacatg

SEQ ID NO: 101482 - DNA, 33 bp, Homo sapien
tttttaaggcaaagtagcatcccattgtacatg

SEQ ID NO: 101483 - DNA, 33 bp, Homo sapien
tttgtcatttgaggcaacctcgaaagaactaga

SEQ ID NO: 101484 - DNA, 33 bp, Homo sapien
tttgtcatttgaggcagcctcgaaagaactaga

SEQ ID NO: 101485 - DNA, 33 bp, Homo sapien
cacaatggacaagtaacatatagaggttacaga

SEQ ID NO: 101486 - DNA, 33 bp, Homo sapien
cacaatggacaagtaatatatagaggttacaga

SEQ ID NO: 101487 - DNA, 33 bp, Homo sapien
ctttgggtagattcaactggccttgtgctactg

SEQ ID NO: 101488 - DNA, 33 bp, Homo sapien
ctttgggtagattcaattggccttgtgctactg

SEQ ID NO: 101489 - DNA, 33 bp, Homo sapien
caacttgaactttagcacttgcggcacaaccaa

SEQ ID NO: 101490 - DNA, 33 bp, Homo sapien
caacttgaactttagcgcttgcggcacaaccaa

SEQ ID NO: 101491 - DNA, 33 bp, Homo sapien
aggttacagacaaacaacctacagataatctca

SEQ ID NO: 101492 - DNA, 33 bp, Homo sapien
aggttacagacaaacagcctacagataatctca

SEQ ID NO: 101493 - DNA, 33 bp, Homo sapien
aatcaaaactgagaaccaagtatcaaaatgtat

SEQ ID NO: 101494 - DNA, 33 bp, Homo sapien
aatcaaaactgagaactaagtatcaaaatgtat

SEQ ID NO: 101495 - DNA, 33 bp, Homo sapien
ctgagcttctacaccaatggtggtatctatagg

SEQ ID NO: 101496 - DNA, 33 bp, Homo sapien
ctgagcttctacaccagtggtggtatctatagg

SEQ ID NO: 101497 - DNA, 33 bp, Homo sapien
cttcagtctgtttaaaatgggctgtcttcaaat

SEQ ID NO: 101498 - DNA, 33 bp, Homo sapien
cttcagtctgtttaaagtgggctgtcttcaaat

SEQ ID NO: 101499 - DNA, 33 bp, Homo sapien
tattcataatcatcaactcattttaaccaagaa

SEQ ID NO: 101500 - DNA, 33 bp, Homo sapien
tattcataatcatcaattcattttaaccaagaa

SEQ ID NO: 101501 - DNA, 33 bp, Homo sapien
ccatcctgaatttaaacgtatgctttatttgtg

SEQ ID NO: 101502 - DNA, 33 bp, Homo sapien
ccatcctgaatttaaaggtatgctttatttgtg

SEQ ID NO: 101503 - DNA, 33 bp, Homo sapien
cctgcctctttcattcaaggacacaccaagtta

SEQ ID NO: 101504 - DNA, 33 bp, Homo sapien
cctgcctctttcattcgaggacacaccaagtta

SEQ ID NO: 101505 - DNA, 33 bp, Homo sapien
ataaggattgtgaagtcaagaatgacctcccct

SEQ ID NO: 101506 - DNA, 33 bp, Homo sapien
ataaggattgtgaagttaagaatgacctcccct

SEQ ID NO: 101507 - DNA, 33 bp, Homo sapien
aactgccttctgggtcgcacgccgcaagtgcct

SEQ ID NO: 101508 - DNA, 33 bp, Homo sapien
aactgccttctgggtctcacgccgcaagtgcct

SEQ ID NO: 101509 - DNA, 33 bp, Homo sapien
aacatcatcatcagcaacaaaggtcatttcaag

SEQ ID NO: 101510 - DNA, 33 bp, Homo sapien
aacatcatcatcagcagcaaaggtcatttcaag

SEQ ID NO: 101511 - DNA, 33 bp, Homo sapien
tgatgatgatgttttaacgtcaactctccctat

SEQ ID NO: 101512 - DNA, 33 bp, Homo sapien
tgatgatgatgttttaccgtcaactctccctat

SEQ ID NO: 101513 - DNA, 33 bp, Homo sapien
gggattgcacaactacactccagcctgagtgac

SEQ ID NO: 101514 - DNA, 33 bp, Homo sapien
gggattgcacaactacgctccagcctgagtgac

SEQ ID NO: 101515 - DNA, 33 bp, Homo sapien
gggttgatctgggtccaactaacttaaaagtaa

SEQ ID NO: 101516 - DNA, 33 bp, Homo sapien
gggttgatctgggtccgactaacttaaaagtaa

SEQ ID NO: 101517 - DNA, 33 bp, Homo sapien
agccccttctgggaaaatgaaagcattgtgtgg

SEQ ID NO: 101518 - DNA, 33 bp, Homo sapien
agccccttctgggaaagtgaaagcattgtgtgg

SEQ ID NO: 101519 - DNA, 33 bp, Homo sapien
ttgcaggtcatttaaccccaagtccagctccct

SEQ ID NO: 101520 - DNA, 33 bp, Homo sapien
ttgcaggtcatttaactccaagtccagctccct

SEQ ID NO: 101521 - DNA, 33 bp, Homo sapien
tacaaacacatgacaacaaacagtagggctgca

SEQ ID NO: 101522 - DNA, 33 bp, Homo sapien
tacaaacacatgacaagaaacagtagggctgca

SEQ ID NO: 101523 - DNA, 33 bp, Homo sapien
cttgtgtggtaaattccagtttataggtgggca

SEQ ID NO: 101524 - DNA, 33 bp, Homo sapien
cttgtgtggtaaattctagtttataggtgggca

SEQ ID NO: 101525 - DNA, 33 bp, Homo sapien
ttttcactacagcactgacatttcttgagaacg

SEQ ID NO: 101526 - DNA, 33 bp, Homo sapien
ttttcactacagcacttacatttcttgagaacg

SEQ ID NO: 101527 - DNA, 33 bp, Homo sapien
tagtgaaaagctgctgccaaatgcacacctgtg

SEQ ID NO: 101528 - DNA, 33 bp, Homo sapien
tagtgaaaagctgctgtcaaatgcacacctgtg

SEQ ID NO: 101529 - DNA, 33 bp, Homo sapien
atactgggcatgaaaccatcatcacagggttaa

SEQ ID NO: 101530 - DNA, 33 bp, Homo sapien
atactgggcatgaaactatcatcacagggttaa

SEQ ID NO: 101531 - DNA, 33 bp, Homo sapien
ttctaattagagaaaaagagttgggctggtggg

SEQ ID NO: 101532 - DNA, 33 bp, Homo sapien
ttctaattagagaaaaggagttgggctggtggg

SEQ ID NO: 101533 - DNA, 33 bp, Homo sapien
ctttctggcatctccaatagtaatcatgtctct

SEQ ID NO: 101534 - DNA, 33 bp, Homo sapien
ctttctggcatctccagtagtaatcatgtctct

SEQ ID NO: 101535 - DNA, 33 bp, Homo sapien
aacagctgaggagttgaaatgatggcagaagaa

SEQ ID NO: 101536 - DNA, 33 bp, Homo sapien
aacagctgaggagttggaatgatggcagaagaa

SEQ ID NO: 101537 - DNA, 33 bp, Homo sapien
acaaagtctacttcaacgtatggcccatgacag

SEQ ID NO: 101538 - DNA, 33 bp, Homo sapien
acaaagtctacttcaatgtatggcccatgacag

SEQ ID NO: 101539 - DNA, 33 bp, Homo sapien
agaaatgaagtggctacgtgaagactctctggc

SEQ ID NO: 101540 - DNA, 33 bp, Homo sapien
agaaatgaagtggctatgtgaagactctctggc

SEQ ID NO: 101541 - DNA, 33 bp, Homo sapien
tgatgcttctgttccacgggaggtctattcagg

SEQ ID NO: 101542 - DNA, 33 bp, Homo sapien
tgatgcttctgttccatgggaggtctattcagg

SEQ ID NO: 101543 - DNA, 33 bp, Homo sapien
gcaccattagctgaggccccctctttccaggca

SEQ ID NO: 101544 - DNA, 33 bp, Homo sapien
gcaccattagctgaggtcccctctttccaggca

SEQ ID NO: 101545 - DNA, 33 bp, Homo sapien
aatgtacctgtatgtacgattactccagttagt

SEQ ID NO: 101546 - DNA, 33 bp, Homo sapien
aatgtacctgtatgtatgattactccagttagt

SEQ ID NO: 101547 - DNA, 33 bp, Homo sapien
ggctcgccaaccagggcaaaccatccattatgc

SEQ ID NO: 101548 - DNA, 33 bp, Homo sapien
ggctcgccaaccagggtaaaccatccattatgc

SEQ ID NO: 101549 - DNA, 33 bp, Homo sapien
cagagtgttccacctccaacacaaacaagggct

SEQ ID NO: 101550 - DNA, 33 bp, Homo sapien
cagagtgttccacctctaacacaaacaagggct

SEQ ID NO: 101551 - DNA, 33 bp, Homo sapien
caacccatagacaaacaggtgttggctcagaca

SEQ ID NO: 101552 - DNA, 33 bp, Homo sapien
caacccatagacaaacgggtgttggctcagaca

SEQ ID NO: 101553 - DNA, 33 bp, Homo sapien
acggaccccttcctaccctttcagcagttaagc

SEQ ID NO: 101554 - DNA, 33 bp, Homo sapien
acggaccccttcctactctttcagcagttaagc

SEQ ID NO: 101555 - DNA, 33 bp, Homo sapien
ttctccctataggtcacatcatgtacaagacac

SEQ ID NO: 101556 - DNA, 33 bp, Homo sapien
ttctccctataggtcatatcatgtacaagacac

SEQ ID NO: 101557 - DNA, 33 bp, Homo sapien
tgtgtgtgccagattacggtgtccacttattaa

SEQ ID NO: 101558 - DNA, 33 bp, Homo sapien
tgtgtgtgccagattatggtgtccacttattaa

SEQ ID NO: 101559 - DNA, 33 bp, Homo sapien
gagccgatcatgtgaccggaactgtgctggagg

SEQ ID NO: 101560 - DNA, 33 bp, Homo sapien
gagccgatcatgtgactggaactgtgctggagg

SEQ ID NO: 101561 - DNA, 33 bp, Homo sapien
tgaccagcaatggaaaaagggaaataatcagca

SEQ ID NO: 101562 - DNA, 33 bp, Homo sapien
tgaccagcaatggaaagagggaaataatcagca

SEQ ID NO: 101563 - DNA, 33 bp, Homo sapien
tgttattgacgttgttaaaataagttctcattc

SEQ ID NO: 101564 - DNA, 33 bp, Homo sapien
tgttattgacgttgttgaaataagttctcattc

SEQ ID NO: 101565 - DNA, 33 bp, Homo sapien
aggaaaccttaatggccgagacaggttctttgt

SEQ ID NO: 101566 - DNA, 33 bp, Homo sapien
aggaaaccttaatggctgagacaggttctttgt

SEQ ID NO: 101567 - DNA, 33 bp, Homo sapien
gttcctcaagcacccccaagttctctcagactc

SEQ ID NO: 101568 - DNA, 33 bp, Homo sapien
gttcctcaagcaccccgaagttctctcagactc

SEQ ID NO: 101569 - DNA, 33 bp, Homo sapien
tctaagtatctgggacactagttggtacaaaac

SEQ ID NO: 101570 - DNA, 33 bp, Homo sapien
tctaagtatctgggactctagttggtacaaaac

SEQ ID NO: 101571 - DNA, 33 bp, Homo sapien
ttgaccaagcaagttaactctgaacttcacagc

SEQ ID NO: 101572 - DNA, 33 bp, Homo sapien
ttgaccaagcaagttatctctgaacttcacagc

SEQ ID NO: 101573 - DNA, 33 bp, Homo sapien
tcttaccatccaaaaacatgatatgtgtgctca

SEQ ID NO: 101574 - DNA, 33 bp, Homo sapien
tcttaccatccaaaaatatgatatgtgtgctca

SEQ ID NO: 101575 - DNA, 33 bp, Homo sapien
ctcaacacagtttgaactccttcctcattgcaa

SEQ ID NO: 101576 - DNA, 33 bp, Homo sapien
ctcaacacagtttgaattccttcctcattgcaa

SEQ ID NO: 101577 - DNA, 33 bp, Homo sapien
gagaggagttagacgcagataattgaacacatg

SEQ ID NO: 101578 - DNA, 33 bp, Homo sapien
gagaggagttagacgcggataattgaacacatg

SEQ ID NO: 101579 - DNA, 33 bp, Homo sapien
gcttcctgaaaggagccgagagctgtaaaacac

SEQ ID NO: 101580 - DNA, 33 bp, Homo sapien
gcttcctgaaaggagctgagagctgtaaaacac

SEQ ID NO: 101581 - DNA, 33 bp, Homo sapien
atctgggatgtgaaaacgtttctggagaggcat

SEQ ID NO: 101582 - DNA, 33 bp, Homo sapien
atctgggatgtgaaaaggtttctggagaggcat

SEQ ID NO: 101583 - DNA, 33 bp, Homo sapien
gcagttcaaggatagaaaatttattctagagaa

SEQ ID NO: 101584 - DNA, 33 bp, Homo sapien
gcagttcaaggatagagaatttattctagagaa

SEQ ID NO: 101585 - DNA, 33 bp, Homo sapien
aggggccaaaaagatgaacttgaatcaaaaaca

SEQ ID NO: 101586 - DNA, 33 bp, Homo sapien
aggggccaaaaagatgcacttgaatcaaaaaca

SEQ ID NO: 101587 - DNA, 33 bp, Homo sapien
tcttctaagtatttctgaaatctgcccacttct

SEQ ID NO: 101588 - DNA, 33 bp, Homo sapien
tcttctaagtatttcttaaatctgcccacttct

SEQ ID NO: 101589 - DNA, 33 bp, Homo sapien
acagcaaggctgaaacgatcagaatgtgggaga

SEQ ID NO: 101590 - DNA, 33 bp, Homo sapien
acagcaaggctgaaactatcagaatgtgggaga

SEQ ID NO: 101591 - DNA, 33 bp, Homo sapien
acctaacgatgaacgaggacctcaacacaaata

SEQ ID NO: 101592 - DNA, 33 bp, Homo sapien
acctaacgatgaacgatgacctcaacacaaata

SEQ ID NO: 101593 - DNA, 33 bp, Homo sapien
cagaattggtgtgtaacgttagctacagatata

SEQ ID NO: 101594 - DNA, 33 bp, Homo sapien
cagaattggtgtgtaatgttagctacagatata

SEQ ID NO: 101595 - DNA, 33 bp, Homo sapien
aaccttgcaagttcaacgtatttcttggcggtc

SEQ ID NO: 101596 - DNA, 33 bp, Homo sapien
aaccttgcaagttcaatgtatttcttggcggtc

SEQ ID NO: 101597 - DNA, 33 bp, Homo sapien
gcaattccacagataggacataaaagggcacct

SEQ ID NO: 101598 - DNA, 33 bp, Homo sapien
gcaattccacagatagtacataaaagggcacct

SEQ ID NO: 101599 - DNA, 33 bp, Homo sapien
tttgtctaataatgaaagacagttccccaaaag

SEQ ID NO: 101600 - DNA, 33 bp, Homo sapien
tttgtctaataatgaacgacagttccccaaaag

SEQ ID NO: 101601 - DNA, 33 bp, Homo sapien
caaggctacatgatttgaaacttctgtgcagcc

SEQ ID NO: 101602 - DNA, 33 bp, Homo sapien
caaggctacatgattttaaacttctgtgcagcc

SEQ ID NO: 101603 - DNA, 33 bp, Homo sapien
gccaagacattctaacggtgctatcctgagact

SEQ ID NO: 101604 - DNA, 33 bp, Homo sapien
gccaagacattctaactgtgctatcctgagact

SEQ ID NO: 101605 - DNA, 33 bp, Homo sapien
cagaaaggctggccgaagaatgagtcaaactga

SEQ ID NO: 101606 - DNA, 33 bp, Homo sapien
cagaaaggctggccgaggaatgagtcaaactga

SEQ ID NO: 101607 - DNA, 33 bp, Homo sapien
agtctctcacttttctgaattcttctcactttt

SEQ ID NO: 101608 - DNA, 33 bp, Homo sapien
agtctctcacttttcttaattcttctcactttt

SEQ ID NO: 101609 - DNA, 33 bp, Homo sapien
gtgtaatgcccctaaccgtaggtcaacatactc

SEQ ID NO: 101610 - DNA, 33 bp, Homo sapien
gtgtaatgcccctaactgtaggtcaacatactc

SEQ ID NO: 101611 - DNA, 33 bp, Homo sapien
ccacaactgggcaaaactcttctgaagacagtc

SEQ ID NO: 101612 - DNA, 33 bp, Homo sapien
ccacaactgggcaaaattcttctgaagacagtc

SEQ ID NO: 101613 - DNA, 33 bp, Homo sapien
ttaacaatgctttgaccgactaacatactgatt

SEQ ID NO: 101614 - DNA, 33 bp, Homo sapien
ttaacaatgctttgactgactaacatactgatt

SEQ ID NO: 101615 - DNA, 33 bp, Homo sapien
ctgagcctttgggtcaagaaactaactcaaatg

SEQ ID NO: 101616 - DNA, 33 bp, Homo sapien
ctgagcctttgggtcaggaaactaactcaaatg

SEQ ID NO: 101617 - DNA, 33 bp, Homo sapien
gcttctgagagacctacgttgtaaatgttccat

SEQ ID NO: 101618 - DNA, 33 bp, Homo sapien
gcttctgagagacctatgttgtaaatgttccat

SEQ ID NO: 101619 - DNA, 33 bp, Homo sapien
gcttgacacagtacaacagaaaaacaacagcaa

SEQ ID NO: 101620 - DNA, 33 bp, Homo sapien
gcttgacacagtacaatagaaaaacaacagcaa

SEQ ID NO: 101621 - DNA, 33 bp, Homo sapien
agtgaatcaagttaataatctacagccttcctt

SEQ ID NO: 101622 - DNA, 33 bp, Homo sapien
agtgaatcaagttaatgatctacagccttcctt

SEQ ID NO: 101623 - DNA, 33 bp, Homo sapien
aacactggatggagacacatcaataacggtagg

SEQ ID NO: 101624 - DNA, 33 bp, Homo sapien
aacactggatggagactcatcaataacggtagg

SEQ ID NO: 101625 - DNA, 33 bp, Homo sapien
ggcctacttgagtcaaagtgttaagtgttagaa

SEQ ID NO: 101626 - DNA, 33 bp, Homo sapien
ggcctacttgagtcaaggtgttaagtgttagaa

SEQ ID NO: 101627 - DNA, 33 bp, Homo sapien
tacatatgacacccagcacggaatacataacaa

SEQ ID NO: 101628 - DNA, 33 bp, Homo sapien
tacatatgacacccaggacggaatacataacaa

SEQ ID NO: 101629 - DNA, 33 bp, Homo sapien
tggcctctgggtaggaaagagattctgtgaact

SEQ ID NO: 101630 - DNA, 33 bp, Homo sapien
tggcctctgggtaggagagagattctgtgaact

SEQ ID NO: 101631 - DNA, 33 bp, Homo sapien
cctgttctgttccaccactatttaaggacacag

SEQ ID NO: 101632 - DNA, 33 bp, Homo sapien
cctgttctgttccaccgctatttaaggacacag

SEQ ID NO: 101633 - DNA, 33 bp, Homo sapien
aatccctgtccctgtgaagttgtatgcagatga

SEQ ID NO: 101634 - DNA, 33 bp, Homo sapien
aatccctgtccctgtggagttgtatgcagatga

SEQ ID NO: 101635 - DNA, 33 bp, Homo sapien
gagagctgtaggttgaggagccattatatcaaa

SEQ ID NO: 101636 - DNA, 33 bp, Homo sapien
gagagctgtaggttgatgagccattatatcaaa

SEQ ID NO: 101637 - DNA, 33 bp, Homo sapien
aaaggcaagtgaattgaagagaatcatgagtca

SEQ ID NO: 101638 - DNA, 33 bp, Homo sapien
aaaggcaagtgaattggagagaatcatgagtca

SEQ ID NO: 101639 - DNA, 33 bp, Homo sapien
aggctaccataagaaaagactgcaaataggatg

SEQ ID NO: 101640 - DNA, 33 bp, Homo sapien
aggctaccataagaaatgactgcaaataggatg

SEQ ID NO: 101641 - DNA, 33 bp, Homo sapien
ggatggtggcttttgacgaactgtgctttaagg

SEQ ID NO: 101642 - DNA, 33 bp, Homo sapien
ggatggtggcttttgatgaactgtgctttaagg

SEQ ID NO: 101643 - DNA, 33 bp, Homo sapien
gcatatagatcttttacctgtttcgttagactt

SEQ ID NO: 101644 - DNA, 33 bp, Homo sapien
gcatatagatcttttatctgtttcgttagactt

SEQ ID NO: 101645 - DNA, 33 bp, Homo sapien
cgttacacaagttcacactggtctcttatggct

SEQ ID NO: 101646 - DNA, 33 bp, Homo sapien
cgttacacaagttcacgctggtctcttatggct

SEQ ID NO: 101647 - DNA, 33 bp, Homo sapien
taaaatgcaggctggaaatgtgagtcttcaaga

SEQ ID NO: 101648 - DNA, 33 bp, Homo sapien
taaaatgcaggctggagatgtgagtcttcaaga

SEQ ID NO: 101649 - DNA, 33 bp, Homo sapien
gagtcttgcaacaaaaccaacaagtctgccagg

SEQ ID NO: 101650 - DNA, 33 bp, Homo sapien
gagtcttgcaacaaaagcaacaagtctgccagg

SEQ ID NO: 101651 - DNA, 33 bp, Homo sapien
atggctcaagtgtacaaaagacaccatctaata

SEQ ID NO: 101652 - DNA, 33 bp, Homo sapien
atggctcaagtgtacagaagacaccatctaata

SEQ ID NO: 101653 - DNA, 33 bp, Homo sapien
gtgataaatcacaccccattgcggtcctggagt

SEQ ID NO: 101654 - DNA, 33 bp, Homo sapien
gtgataaatcacacccgattgcggtcctggagt

SEQ ID NO: 101655 - DNA, 33 bp, Homo sapien
ctcccagaatgctaaaagtgatgcctggcctct

SEQ ID NO: 101656 - DNA, 33 bp, Homo sapien
ctcccagaatgctaaaggtgatgcctggcctct

SEQ ID NO: 101657 - DNA, 33 bp, Homo sapien
acatgttctccattcaaaagaaatctacaatct

SEQ ID NO: 101658 - DNA, 33 bp, Homo sapien
acatgttctccattcagaagaaatctacaatct

SEQ ID NO: 101659 - DNA, 33 bp, Homo sapien
tcggattctaacttaccccatttccatctctga

SEQ ID NO: 101660 - DNA, 33 bp, Homo sapien
tcggattctaacttactccatttccatctctga

SEQ ID NO: 101661 - DNA, 33 bp, Homo sapien
atcactggggagacatcagcaactcaacgtacc

SEQ ID NO: 101662 - DNA, 33 bp, Homo sapien
atcactggggagacattagcaactcaacgtacc

SEQ ID NO: 101663 - DNA, 33 bp, Homo sapien
agaagcagcagttaacaatgatgttggacttgg

SEQ ID NO: 101664 - DNA, 33 bp, Homo sapien
agaagcagcagttaacgatgatgttggacttgg

SEQ ID NO: 101665 - DNA, 33 bp, Homo sapien
ccttttaacttctagcacccttgaatgttccca

SEQ ID NO: 101666 - DNA, 33 bp, Homo sapien
ccttttaacttctagcgcccttgaatgttccca

SEQ ID NO: 101667 - DNA, 33 bp, Homo sapien
atttcggggaaagtccaattgagaacatcccaa

SEQ ID NO: 101668 - DNA, 33 bp, Homo sapien
atttcggggaaagtccgattgagaacatcccaa

SEQ ID NO: 101669 - DNA, 33 bp, Homo sapien
gagcacatgaagggcaaatctccagtctaagaa

SEQ ID NO: 101670 - DNA, 33 bp, Homo sapien
gagcacatgaagggcagatctccagtctaagaa

SEQ ID NO: 101671 - DNA, 33 bp, Homo sapien
attccagggaagtggacgtgttcatggtttctc

SEQ ID NO: 101672 - DNA, 33 bp, Homo sapien
attccagggaagtggatgtgttcatggtttctc

SEQ ID NO: 101673 - DNA, 33 bp, Homo sapien
aatagaggaggtcctcactacagttctaattaa

SEQ ID NO: 101674 - DNA, 33 bp, Homo sapien
aatagaggaggtcctcgctacagttctaattaa

SEQ ID NO: 101675 - DNA, 33 bp, Homo sapien
ttttactccattttacagaggccgttgatctgt

SEQ ID NO: 101676 - DNA, 33 bp, Homo sapien
ttttactccattttacggaggccgttgatctgt

SEQ ID NO: 101677 - DNA, 33 bp, Homo sapien
catgaatagttcccaacacaattcaatttacca

SEQ ID NO: 101678 - DNA, 33 bp, Homo sapien
catgaatagttcccaagacaattcaatttacca

SEQ ID NO: 101679 - DNA, 33 bp, Homo sapien
tactgtgctctggcaaagtcaatagtttctgga

SEQ ID NO: 101680 - DNA, 33 bp, Homo sapien
tactgtgctctggcaaggtcaatagtttctgga

SEQ ID NO: 101681 - DNA, 33 bp, Homo sapien
tgatatttcatgaaacaaaggcatagattgagc

SEQ ID NO: 101682 - DNA, 33 bp, Homo sapien
tgatatttcatgaaactaaggcatagattgagc

SEQ ID NO: 101683 - DNA, 33 bp, Homo sapien
aacaagatgttgctacactttgaggatggacgt

SEQ ID NO: 101684 - DNA, 33 bp, Homo sapien
aacaagatgttgctaccctttgaggatggacgt

SEQ ID NO: 101685 - DNA, 33 bp, Homo sapien
gtaaaaaaatgtgtaaactgctatctctgtctt

SEQ ID NO: 101686 - DNA, 33 bp, Homo sapien
gtaaaaaaatgtgtaagctgctatctctgtctt

SEQ ID NO: 101687 - DNA, 33 bp, Homo sapien
tcctagcctttgtctcaatcagaaacaatttgg

SEQ ID NO: 101688 - DNA, 33 bp, Homo sapien
tcctagcctttgtctcgatcagaaacaatttgg

SEQ ID NO: 101689 - DNA, 33 bp, Homo sapien
aagtacctaagtaaaactccacttagccagaat

SEQ ID NO: 101690 - DNA, 33 bp, Homo sapien
aagtacctaagtaaaattccacttagccagaat

SEQ ID NO: 101691 - DNA, 33 bp, Homo sapien
actacttaatatttgcacatttcctattaaaac

SEQ ID NO: 101692 - DNA, 33 bp, Homo sapien
actacttaatatttgcgcatttcctattaaaac

SEQ ID NO: 101693 - DNA, 33 bp, Homo sapien
aattcttgggctcaaactctctgcctgcctcaa

SEQ ID NO: 101694 - DNA, 33 bp, Homo sapien
aattcttgggctcaaattctctgcctgcctcaa

SEQ ID NO: 101695 - DNA, 33 bp, Homo sapien
aatagaatgctattaacaaatttatcttgatga

SEQ ID NO: 101696 - DNA, 33 bp, Homo sapien
aatagaatgctattaagaaatttatcttgatga

SEQ ID NO: 101697 - DNA, 33 bp, Homo sapien
ctgtccccaaaatgcaacttatagttttgaaga

SEQ ID NO: 101698 - DNA, 33 bp, Homo sapien
ctgtccccaaaatgcatcttatagttttgaaga

SEQ ID NO: 101699 - DNA, 33 bp, Homo sapien
gaagcttacagcactaactcctttcccaattat

SEQ ID NO: 101700 - DNA, 33 bp, Homo sapien
gaagcttacagcactatctcctttcccaattat

SEQ ID NO: 101701 - DNA, 33 bp, Homo sapien
agtggttcttgctccaatgaattgtttttgcac

SEQ ID NO: 101702 - DNA, 33 bp, Homo sapien
agtggttcttgctccattgaattgtttttgcac

SEQ ID NO: 101703 - DNA, 33 bp, Homo sapien
cattagacttgtatatcaatttgggcagaattg

SEQ ID NO: 101704 - DNA, 33 bp, Homo sapien
cattagacttgtatatgaatttgggcagaattg

SEQ ID NO: 101705 - DNA, 33 bp, Homo sapien
agatgttttttatcaagttgaggaacttcccct

SEQ ID NO: 101706 - DNA, 33 bp, Homo sapien
agatgttttttatcaatttgaggaacttcccct

SEQ ID NO: 101707 - DNA, 33 bp, Homo sapien
gcttaaacagaagataataaaattggagaacaa

SEQ ID NO: 101708 - DNA, 33 bp, Homo sapien
gcttaaacagaagatattaaaattggagaacaa

SEQ ID NO: 101709 - DNA, 33 bp, Homo sapien
cttctagtcctgcaaaactcaatcttaggttct

SEQ ID NO: 101710 - DNA, 33 bp, Homo sapien
cttctagtcctgcaaatctcaatcttaggttct

SEQ ID NO: 101711 - DNA, 33 bp, Homo sapien
ttacaatctgtgaacacggatatttttctattt

SEQ ID NO: 101712 - DNA, 33 bp, Homo sapien
ttacaatctgtgaacatggatatttttctattt

SEQ ID NO: 101713 - DNA, 33 bp, Homo sapien
ataatagccattccaactgaggtgaagtgatat

SEQ ID NO: 101714 - DNA, 33 bp, Homo sapien
ataatagccattccaattgaggtgaagtgatat

SEQ ID NO: 101715 - DNA, 33 bp, Homo sapien
aagaatctcagatagggaatcctgaacctgtat

SEQ ID NO: 101716 - DNA, 33 bp, Homo sapien
aagaatctcagataggtaatcctgaacctgtat

SEQ ID NO: 101717 - DNA, 33 bp, Homo sapien
gaaaggtggataatagcaagtgtaaaaagaaaa

SEQ ID NO: 101718 - DNA, 33 bp, Homo sapien
gaaaggtggataataggaagtgtaaaaagaaaa

SEQ ID NO: 101719 - DNA, 33 bp, Homo sapien
aactcagttgtcattccattacttcatgcagca

SEQ ID NO: 101720 - DNA, 33 bp, Homo sapien
aactcagttgtcattctattacttcatgcagca

SEQ ID NO: 101721 - DNA, 33 bp, Homo sapien
ttttcgacagcaaaaagaattgagctgccacat

SEQ ID NO: 101722 - DNA, 33 bp, Homo sapien
ttttcgacagcaaaaataattgagctgccacat

SEQ ID NO: 101723 - DNA, 33 bp, Homo sapien
aggaccatatttggaactaaggcctcatagggt

SEQ ID NO: 101724 - DNA, 33 bp, Homo sapien
aggaccatatttggaattaaggcctcatagggt

SEQ ID NO: 101725 - DNA, 33 bp, Homo sapien
aatgaatacctacggcagaggaagtcatcccag

SEQ ID NO: 101726 - DNA, 33 bp, Homo sapien
aatgaatacctacggcggaggaagtcatcccag

SEQ ID NO: 101727 - DNA, 33 bp, Homo sapien
taggtattcattcagacgctttatgatgacaaa

SEQ ID NO: 101728 - DNA, 33 bp, Homo sapien
taggtattcattcagatgctttatgatgacaaa

SEQ ID NO: 101729 - DNA, 33 bp, Homo sapien
caatctaaaagataaccaagacttgatgtgtaa

SEQ ID NO: 101730 - DNA, 33 bp, Homo sapien
caatctaaaagataacgaagacttgatgtgtaa

SEQ ID NO: 101731 - DNA, 33 bp, Homo sapien
aacttgaatgaattaacagcagcgtgcacactc

SEQ ID NO: 101732 - DNA, 33 bp, Homo sapien
aacttgaatgaattaagagcagcgtgcacactc

SEQ ID NO: 101733 - DNA, 33 bp, Homo sapien
ccctccagtcctgcacagagatagcaataaggc

SEQ ID NO: 101734 - DNA, 33 bp, Homo sapien
ccctccagtcctgcacggagatagcaataaggc

SEQ ID NO: 101735 - DNA, 33 bp, Homo sapien
gatttgtaagcaaagacagcgttatctggctag

SEQ ID NO: 101736 - DNA, 33 bp, Homo sapien
gatttgtaagcaaagagagcgttatctggctag

SEQ ID NO: 101737 - DNA, 33 bp, Homo sapien
caaggctgcaatcctacattcttagcactttgg

SEQ ID NO: 101738 - DNA, 33 bp, Homo sapien
caaggctgcaatcctatattcttagcactttgg

SEQ ID NO: 101739 - DNA, 33 bp, Homo sapien
aagaatatcggcaaagactgtgctgtatgacat

SEQ ID NO: 101740 - DNA, 33 bp, Homo sapien
aagaatatcggcaaagtctgtgctgtatgacat

SEQ ID NO: 101741 - DNA, 33 bp, Homo sapien
tttggttatatgtgaaagtgagtgcatctcctg

SEQ ID NO: 101742 - DNA, 33 bp, Homo sapien
tttggttatatgtgaaggtgagtgcatctcctg

SEQ ID NO: 101743 - DNA, 33 bp, Homo sapien
gcctaagcctggtaaagtgaagcatctcaataa

SEQ ID NO: 101744 - DNA, 33 bp, Homo sapien
gcctaagcctggtaaattgaagcatctcaataa

SEQ ID NO: 101745 - DNA, 33 bp, Homo sapien
tccagaaaactgaaacatctgtactgtaaaggc

SEQ ID NO: 101746 - DNA, 33 bp, Homo sapien
tccagaaaactgaaacgtctgtactgtaaaggc

SEQ ID NO: 101747 - DNA, 33 bp, Homo sapien
gattgcttctattagacggtcaggctaaactgt

SEQ ID NO: 101748 - DNA, 33 bp, Homo sapien
gattgcttctattagatggtcaggctaaactgt

SEQ ID NO: 101749 - DNA, 33 bp, Homo sapien
aatcgaccattatgtcacaggataaacagccaa

SEQ ID NO: 101750 - DNA, 33 bp, Homo sapien
aatcgaccattatgtcgcaggataaacagccaa

SEQ ID NO: 101751 - DNA, 33 bp, Homo sapien
ctaaggtgtacttttacgagcagagatgtcttc

SEQ ID NO: 101752 - DNA, 33 bp, Homo sapien
ctaaggtgtacttttatgagcagagatgtcttc

SEQ ID NO: 101753 - DNA, 33 bp, Homo sapien
ctcactgactttattacctttgctccctgcttg

SEQ ID NO: 101754 - DNA, 33 bp, Homo sapien
ctcactgactttattatctttgctccctgcttg

SEQ ID NO: 101755 - DNA, 33 bp, Homo sapien
gaatttctttatggaaaggtgggagaagatttg

SEQ ID NO: 101756 - DNA, 33 bp, Homo sapien
gaatttctttatggaagggtgggagaagatttg

SEQ ID NO: 101757 - DNA, 33 bp, Homo sapien
atagaatctctcactccgaacttcttctgtttt

SEQ ID NO: 101758 - DNA, 33 bp, Homo sapien
atagaatctctcactctgaacttcttctgtttt

SEQ ID NO: 101759 - DNA, 33 bp, Homo sapien
aaggacagtggatacaaagaggagaggcagtag

SEQ ID NO: 101760 - DNA, 33 bp, Homo sapien
aaggacagtggatacagagaggagaggcagtag

SEQ ID NO: 101761 - DNA, 33 bp, Homo sapien
aagtgcatacctcccacaaggaatctacaacag

SEQ ID NO: 101762 - DNA, 33 bp, Homo sapien
aagtgcatacctcccataaggaatctacaacag

SEQ ID NO: 101763 - DNA, 33 bp, Homo sapien
tcccagaaccccgaaaatctcaccaaatcatgg

SEQ ID NO: 101764 - DNA, 33 bp, Homo sapien
tcccagaaccccgaaagtctcaccaaatcatgg

SEQ ID NO: 101765 - DNA, 33 bp, Homo sapien
tgtgattataggaaggcacattaaggtacaaac

SEQ ID NO: 101766 - DNA, 33 bp, Homo sapien
tgtgattataggaagggacattaaggtacaaac

SEQ ID NO: 101767 - DNA, 33 bp, Homo sapien
tgtgatcctgccccataaatcaagaagtctctg

SEQ ID NO: 101768 - DNA, 33 bp, Homo sapien
tgtgatcctgccccatcaatcaagaagtctctg

SEQ ID NO: 101769 - DNA, 33 bp, Homo sapien
attaagtgaaaattgacgtgttttgtgacagcg

SEQ ID NO: 101770 - DNA, 33 bp, Homo sapien
attaagtgaaaattgatgtgttttgtgacagcg

SEQ ID NO: 101771 - DNA, 33 bp, Homo sapien
tccaagttaatttgccaatcagtgaaaaggttg

SEQ ID NO: 101772 - DNA, 33 bp, Homo sapien
tccaagttaatttgccgatcagtgaaaaggttg

SEQ ID NO: 101773 - DNA, 33 bp, Homo sapien
tcatgagacaaaatgccgactccctacttggtt

SEQ ID NO: 101774 - DNA, 33 bp, Homo sapien
tcatgagacaaaatgctgactccctacttggtt

SEQ ID NO: 101775 - DNA, 33 bp, Homo sapien
agtaaactaagaattcacagtaatagccgggca

SEQ ID NO: 101776 - DNA, 33 bp, Homo sapien
agtaaactaagaattcgcagtaatagccgggca

SEQ ID NO: 101777 - DNA, 33 bp, Homo sapien
tttcggtcaatgtgcaaccaaagccaagcatct

SEQ ID NO: 101778 - DNA, 33 bp, Homo sapien
tttcggtcaatgtgcatccaaagccaagcatct

SEQ ID NO: 101779 - DNA, 33 bp, Homo sapien
gacaatcagaaagtgcaaataaataggcactag

SEQ ID NO: 101780 - DNA, 33 bp, Homo sapien
gacaatcagaaagtgcgaataaataggcactag

SEQ ID NO: 101781 - DNA, 33 bp, Homo sapien
atcttctgggtgcttcaaaaagttggcatattt

SEQ ID NO: 101782 - DNA, 33 bp, Homo sapien
atcttctgggtgcttcgaaaagttggcatattt

SEQ ID NO: 101783 - DNA, 33 bp, Homo sapien
cattggtacaatcctaccatccttactggacag

SEQ ID NO: 101784 - DNA, 33 bp, Homo sapien
cattggtacaatcctatcatccttactggacag

SEQ ID NO: 101785 - DNA, 33 bp, Homo sapien
ttaccagtaacgactaacccttcagagttgggg

SEQ ID NO: 101786 - DNA, 33 bp, Homo sapien
ttaccagtaacgactatcccttcagagttgggg

SEQ ID NO: 101787 - DNA, 33 bp, Homo sapien
ctgcgagggactgaacaaaagggactcaagtag

SEQ ID NO: 101788 - DNA, 33 bp, Homo sapien
ctgcgagggactgaaccaaagggactcaagtag

SEQ ID NO: 101789 - DNA, 33 bp, Homo sapien
tttgctatcattattcaaccccatggaggatag

SEQ ID NO: 101790 - DNA, 33 bp, Homo sapien
tttgctatcattattccaccccatggaggatag

SEQ ID NO: 101791 - DNA, 33 bp, Homo sapien
aagttcccccactgccacgatcaaggagagcca

SEQ ID NO: 101792 - DNA, 33 bp, Homo sapien
aagttcccccactgccgcgatcaaggagagcca

SEQ ID NO: 101793 - DNA, 33 bp, Homo sapien
aacgcagagggaaataccgctgatacaaagctt

SEQ ID NO: 101794 - DNA, 33 bp, Homo sapien
aacgcagagggaaatatcgctgatacaaagctt

SEQ ID NO: 101795 - DNA, 33 bp, Homo sapien
actgtgataggacaataagactctctggtccgc

SEQ ID NO: 101796 - DNA, 33 bp, Homo sapien
actgtgataggacaatgagactctctggtccgc

SEQ ID NO: 101797 - DNA, 33 bp, Homo sapien
tcactagcattgagtaactggaggttgccagca

SEQ ID NO: 101798 - DNA, 33 bp, Homo sapien
tcactagcattgagtagctggaggttgccagca

SEQ ID NO: 101799 - DNA, 33 bp, Homo sapien
ttatagaacctcagaaaaaaagtctcagtggaa

SEQ ID NO: 101800 - DNA, 33 bp, Homo sapien
ttatagaacctcagaagaaaagtctcagtggaa

SEQ ID NO: 101801 - DNA, 33 bp, Homo sapien
tctccttttcaacctacctctattttattcttt

SEQ ID NO: 101802 - DNA, 33 bp, Homo sapien
tctccttttcaacctatctctattttattcttt

SEQ ID NO: 101803 - DNA, 33 bp, Homo sapien
cctatctttcaagtccacaccttccgactttct

SEQ ID NO: 101804 - DNA, 33 bp, Homo sapien
cctatctttcaagtccgcaccttccgactttct

SEQ ID NO: 101805 - DNA, 33 bp, Homo sapien
ataaaacctggagatgacaactttaattattag

SEQ ID NO: 101806 - DNA, 33 bp, Homo sapien
ataaaacctggagatggcaactttaattattag

SEQ ID NO: 101807 - DNA, 33 bp, Homo sapien
ccccttctcctcccagaaacacgagatgtcaga

SEQ ID NO: 101808 - DNA, 33 bp, Homo sapien
ccccttctcctcccaggaacacgagatgtcaga

SEQ ID NO: 101809 - DNA, 33 bp, Homo sapien
actgatgttcttgccccgagcagtttagggtga

SEQ ID NO: 101810 - DNA, 33 bp, Homo sapien
actgatgttcttgccctgagcagtttagggtga

SEQ ID NO: 101811 - DNA, 33 bp, Homo sapien
ctcctcccattccttaactatgtatgtaggact

SEQ ID NO: 101812 - DNA, 33 bp, Homo sapien
ctcctcccattccttagctatgtatgtaggact

SEQ ID NO: 101813 - DNA, 33 bp, Homo sapien
gttccagtagctcattcaagtcctacatacata

SEQ ID NO: 101814 - DNA, 33 bp, Homo sapien
gttccagtagctcattgaagtcctacatacata

SEQ ID NO: 101815 - DNA, 33 bp, Homo sapien
gtattcaaaatcagccgatagtaagcaggtacc

SEQ ID NO: 101816 - DNA, 33 bp, Homo sapien
gtattcaaaatcagcctatagtaagcaggtacc

SEQ ID NO: 101817 - DNA, 33 bp, Homo sapien
tcagaaaaatagggaactaaatcaggatgacca

SEQ ID NO: 101818 - DNA, 33 bp, Homo sapien
tcagaaaaatagggaattaaatcaggatgacca

SEQ ID NO: 101819 - DNA, 33 bp, Homo sapien
caagggcctacctaaactcaaagggagggaaca

SEQ ID NO: 101820 - DNA, 33 bp, Homo sapien
caagggcctacctaaattcaaagggagggaaca

SEQ ID NO: 101821 - DNA, 33 bp, Homo sapien
cattcaaggacatttacggtttacccaaatagg

SEQ ID NO: 101822 - DNA, 33 bp, Homo sapien
cattcaaggacatttatggtttacccaaatagg

SEQ ID NO: 101823 - DNA, 33 bp, Homo sapien
ttccttggatttcccaactttctctggaagctc

SEQ ID NO: 101824 - DNA, 33 bp, Homo sapien
ttccttggatttcccagctttctctggaagctc

SEQ ID NO: 101825 - DNA, 33 bp, Homo sapien
atcatgagccaagacacattaacctgagcagac

SEQ ID NO: 101826 - DNA, 33 bp, Homo sapien
atcatgagccaagacatattaacctgagcagac

SEQ ID NO: 101827 - DNA, 33 bp, Homo sapien
tttgtgctttaagctaaatgttgtgacaaagaa

SEQ ID NO: 101828 - DNA, 33 bp, Homo sapien
tttgtgctttaagctagatgttgtgacaaagaa

SEQ ID NO: 101829 - DNA, 33 bp, Homo sapien
agattcacagaagcgagaagggttgcaggggtg

SEQ ID NO: 101830 - DNA, 33 bp, Homo sapien
agattcacagaagcgataagggttgcaggggtg

SEQ ID NO: 101831 - DNA, 33 bp, Homo sapien
taaatagctttatccacgttgggaacgcatttc

SEQ ID NO: 101832 - DNA, 33 bp, Homo sapien
taaatagctttatccatgttgggaacgcatttc

SEQ ID NO: 101833 - DNA, 33 bp, Homo sapien
aatggacactccagaaatagagtaagatgcaga

SEQ ID NO: 101834 - DNA, 33 bp, Homo sapien
aatggacactccagaagtagagtaagatgcaga

SEQ ID NO: 101835 - DNA, 33 bp, Homo sapien
cctcaaattggaaaacaaccaaataacttaaat

SEQ ID NO: 101836 - DNA, 33 bp, Homo sapien
cctcaaattggaaaacgaccaaataacttaaat

SEQ ID NO: 101837 - DNA, 33 bp, Homo sapien
aggttgacctacatacaacacaggtgaaggata

SEQ ID NO: 101838 - DNA, 33 bp, Homo sapien
aggttgacctacataccacacaggtgaaggata

SEQ ID NO: 101839 - DNA, 33 bp, Homo sapien
ttcaaataaggcaaccactgagctgtaagcaat

SEQ ID NO: 101840 - DNA, 33 bp, Homo sapien
ttcaaataaggcaaccgctgagctgtaagcaat

SEQ ID NO: 101841 - DNA, 33 bp, Homo sapien
cctctaagaaagactgaaaaagacaaatctcat

SEQ ID NO: 101842 - DNA, 33 bp, Homo sapien
cctctaagaaagactggaaaagacaaatctcat

SEQ ID NO: 101843 - DNA, 33 bp, Homo sapien
cctacagtattcagtaaaataacctgctgtaca

SEQ ID NO: 101844 - DNA, 33 bp, Homo sapien
cctacagtattcagtataataacctgctgtaca

SEQ ID NO: 101845 - DNA, 33 bp, Homo sapien
gggaaaccttctcaaacgcagaggaagtctact

SEQ ID NO: 101846 - DNA, 33 bp, Homo sapien
gggaaaccttctcaaatgcagaggaagtctact

SEQ ID NO: 101847 - DNA, 33 bp, Homo sapien
tataaaaagagaaataaacacgagatctcactc

SEQ ID NO: 101848 - DNA, 33 bp, Homo sapien
tataaaaagagaaatagacacgagatctcactc

SEQ ID NO: 101849 - DNA, 33 bp, Homo sapien
tcaggtgacctctccaactaatcgaaaagcccc

SEQ ID NO: 101850 - DNA, 33 bp, Homo sapien
tcaggtgacctctccatctaatcgaaaagcccc

SEQ ID NO: 101851 - DNA, 33 bp, Homo sapien
aacaccgatgcatttcgaacagtgaaaaactgc

SEQ ID NO: 101852 - DNA, 33 bp, Homo sapien
aacaccgatgcatttctaacagtgaaaaactgc

SEQ ID NO: 101853 - DNA, 33 bp, Homo sapien
aaagcaagagtgtcaaacactggacagggaaaa

SEQ ID NO: 101854 - DNA, 33 bp, Homo sapien
aaagcaagagtgtcaagcactggacagggaaaa

SEQ ID NO: 101855 - DNA, 33 bp, Homo sapien
agctccatttgccttaagtgcccaagattgtcc

SEQ ID NO: 101856 - DNA, 33 bp, Homo sapien
agctccatttgccttacgtgcccaagattgtcc

SEQ ID NO: 101857 - DNA, 33 bp, Homo sapien
ggttggaagtgtactacgttgagaccaggcatg

SEQ ID NO: 101858 - DNA, 33 bp, Homo sapien
ggttggaagtgtactatgttgagaccaggcatg

SEQ ID NO: 101859 - DNA, 33 bp, Homo sapien
gttaacaactatagataaggtaaaaactagtca

SEQ ID NO: 101860 - DNA, 33 bp, Homo sapien
gttaacaactatagatgaggtaaaaactagtca

SEQ ID NO: 101861 - DNA, 33 bp, Homo sapien
acgctgatggactacagattcaacctgccttct

SEQ ID NO: 101862 - DNA, 33 bp, Homo sapien
acgctgatggactacatattcaacctgccttct

SEQ ID NO: 101863 - DNA, 33 bp, Homo sapien
gaggcacagaaagtgaaaggaaagatgttataa

SEQ ID NO: 101864 - DNA, 33 bp, Homo sapien
gaggcacagaaagtgacaggaaagatgttataa

SEQ ID NO: 101865 - DNA, 33 bp, Homo sapien
aagctgaaagagcgaccggcagttcagaatttc

SEQ ID NO: 101866 - DNA, 33 bp, Homo sapien
aagctgaaagagcgactggcagttcagaatttc

SEQ ID NO: 101867 - DNA, 33 bp, Homo sapien
gttccctgttcattcaggtctcactcgtcaggg

SEQ ID NO: 101868 - DNA, 33 bp, Homo sapien
gttccctgttcattcatgtctcactcgtcaggg

SEQ ID NO: 101869 - DNA, 33 bp, Homo sapien
gagggtttgtgttaaggatctttgggaaccaac

SEQ ID NO: 101870 - DNA, 33 bp, Homo sapien
gagggtttgtgttaagtatctttgggaaccaac

SEQ ID NO: 101871 - DNA, 33 bp, Homo sapien
gatcttcaggcagaaccaagaggagttgcatgt

SEQ ID NO: 101872 - DNA, 33 bp, Homo sapien
gatcttcaggcagaacgaagaggagttgcatgt

SEQ ID NO: 101873 - DNA, 33 bp, Homo sapien
atgttccatgaactccaagcgccaagtagcagc

SEQ ID NO: 101874 - DNA, 33 bp, Homo sapien
atgttccatgaactccgagcgccaagtagcagc

SEQ ID NO: 101875 - DNA, 33 bp, Homo sapien
atggactttataccacacagagaatccatacca

SEQ ID NO: 101876 - DNA, 33 bp, Homo sapien
atggactttataccacgcagagaatccatacca

SEQ ID NO: 101877 - DNA, 33 bp, Homo sapien
ctcaattctgttcgcaacgagacacccagggga

SEQ ID NO: 101878 - DNA, 33 bp, Homo sapien
ctcaattctgttcgcagcgagacacccagggga

SEQ ID NO: 101879 - DNA, 33 bp, Homo sapien
cacagaagcttgtctagaaacaggaacattgac

SEQ ID NO: 101880 - DNA, 33 bp, Homo sapien
cacagaagcttgtctataaacaggaacattgac

SEQ ID NO: 101881 - DNA, 33 bp, Homo sapien
gtggccgtccctgcagaagcatggccctgagga

SEQ ID NO: 101882 - DNA, 33 bp, Homo sapien
gtggccgtccctgcagcagcatggccctgagga

SEQ ID NO: 101883 - DNA, 33 bp, Homo sapien
acttaacattttaaacaagcctattattaactc

SEQ ID NO: 101884 - DNA, 33 bp, Homo sapien
acttaacattttaaacgagcctattattaactc

SEQ ID NO: 101885 - DNA, 33 bp, Homo sapien
acattttgttcctgtcacattaccctcttcctt

SEQ ID NO: 101886 - DNA, 33 bp, Homo sapien
acattttgttcctgtcgcattaccctcttcctt

SEQ ID NO: 101887 - DNA, 33 bp, Homo sapien
tcacactctcaggcaagctgtgtaaatatgttg

SEQ ID NO: 101888 - DNA, 33 bp, Homo sapien
tcacactctcaggcaatctgtgtaaatatgttg

SEQ ID NO: 101889 - DNA, 33 bp, Homo sapien
aacaacacagataaagacaaagaaaatttgcac

SEQ ID NO: 101890 - DNA, 33 bp, Homo sapien
aacaacacagataaaggcaaagaaaatttgcac

SEQ ID NO: 101891 - DNA, 33 bp, Homo sapien
tatttgcaaagtaaagaagacagtaagattcac

SEQ ID NO: 101892 - DNA, 33 bp, Homo sapien
tatttgcaaagtaaaggagacagtaagattcac

SEQ ID NO: 101893 - DNA, 33 bp, Homo sapien
acatcgtccagataaagacattgcctttgagat

SEQ ID NO: 101894 - DNA, 33 bp, Homo sapien
acatcgtccagataaatacattgcctttgagat

SEQ ID NO: 101895 - DNA, 33 bp, Homo sapien
gacctaattgcagttccaaaagtagagaatata

SEQ ID NO: 101896 - DNA, 33 bp, Homo sapien
gacctaattgcagttctaaaagtagagaatata

SEQ ID NO: 101897 - DNA, 33 bp, Homo sapien
tttcctcccggtgcagactgacgattattttct

SEQ ID NO: 101898 - DNA, 33 bp, Homo sapien
tttcctcccggtgcagtctgacgattattttct

SEQ ID NO: 101899 - DNA, 33 bp, Homo sapien
ccttaggctggtttgaatattacaacttgtatt

SEQ ID NO: 101900 - DNA, 33 bp, Homo sapien
ccttaggctggtttgagtattacaacttgtatt

SEQ ID NO: 101901 - DNA, 33 bp, Homo sapien
tgaggttgcatgagaaaagtcaagactccaggg

SEQ ID NO: 101902 - DNA, 33 bp, Homo sapien
tgaggttgcatgagaacagtcaagactccaggg

SEQ ID NO: 101903 - DNA, 33 bp, Homo sapien
caactgtccacataacaggctcatatcagtgta

SEQ ID NO: 101904 - DNA, 33 bp, Homo sapien
caactgtccacataaccggctcatatcagtgta

SEQ ID NO: 101905 - DNA, 33 bp, Homo sapien
tgtcatgtgtttattggatctggggtttgcagt

SEQ ID NO: 101906 - DNA, 33 bp, Homo sapien
tgtcatgtgtttattgtatctggggtttgcagt

SEQ ID NO: 101907 - DNA, 33 bp, Homo sapien
tgattctaaggatctcaattccctctctgtcat

SEQ ID NO: 101908 - DNA, 33 bp, Homo sapien
tgattctaaggatctcgattccctctctgtcat

SEQ ID NO: 101909 - DNA, 33 bp, Homo sapien
ccattgacaggagcccacagttgtaagcctgct

SEQ ID NO: 101910 - DNA, 33 bp, Homo sapien
ccattgacaggagcccgcagttgtaagcctgct

SEQ ID NO: 101911 - DNA, 33 bp, Homo sapien
ttattctgggagtgcacggttggattaaatgat

SEQ ID NO: 101912 - DNA, 33 bp, Homo sapien
ttattctgggagtgcatggttggattaaatgat

SEQ ID NO: 101913 - DNA, 33 bp, Homo sapien
gccagctgctacccaccaaattcataattggaa

SEQ ID NO: 101914 - DNA, 33 bp, Homo sapien
gccagctgctacccacgaaattcataattggaa

SEQ ID NO: 101915 - DNA, 33 bp, Homo sapien
aaattcaaacacaaaacaggcaccaactatatc

SEQ ID NO: 101916 - DNA, 33 bp, Homo sapien
aaattcaaacacaaaagaggcaccaactatatc

SEQ ID NO: 101917 - DNA, 33 bp, Homo sapien
tcaccagtgagctgacaaagtctatgtttgatt

SEQ ID NO: 101918 - DNA, 33 bp, Homo sapien
tcaccagtgagctgaccaagtctatgtttgatt

SEQ ID NO: 101919 - DNA, 33 bp, Homo sapien
ggcgactttctggtgaagaaacccagcggactc

SEQ ID NO: 101920 - DNA, 33 bp, Homo sapien
ggcgactttctggtgaggaaacccagcggactc

SEQ ID NO: 101921 - DNA, 33 bp, Homo sapien
tgtcagagagagaagtgaaaaacaagcaaaaga

SEQ ID NO: 101922 - DNA, 33 bp, Homo sapien
tgtcagagagagaagttaaaaacaagcaaaaga

SEQ ID NO: 101923 - DNA, 33 bp, Homo sapien
gcagcatcgactatggcatcttccagatcaaca

SEQ ID NO: 101924 - DNA, 33 bp, Homo sapien
gcagcatcgactatggtatcttccagatcaaca

SEQ ID NO: 101925 - DNA, 33 bp, Homo sapien
agtcatctttggagaaatcagccacaggatcct

SEQ ID NO: 101926 - DNA, 33 bp, Homo sapien
agtcatctttggagaagtcagccacaggatcct

SEQ ID NO: 101927 - DNA, 33 bp, Homo sapien
gaaaagaaagaaacctaaagtgtattcatctca

SEQ ID NO: 101928 - DNA, 33 bp, Homo sapien
gaaaagaaagaaacctcaagtgtattcatctca

SEQ ID NO: 101929 - DNA, 33 bp, Homo sapien
agacagagtctggctacggagtcccgttatggg

SEQ ID NO: 101930 - DNA, 33 bp, Homo sapien
agacagagtctggctatggagtcccgttatggg

SEQ ID NO: 101931 - DNA, 33 bp, Homo sapien
ccagaaatacatatgaacacagcattgaggata

SEQ ID NO: 101932 - DNA, 33 bp, Homo sapien
ccagaaatacatatgagcacagcattgaggata

SEQ ID NO: 101933 - DNA, 33 bp, Homo sapien
caaagcagaatggtgcaagatttcatcacacta

SEQ ID NO: 101934 - DNA, 33 bp, Homo sapien
caaagcagaatggtgcgagatttcatcacacta

SEQ ID NO: 101935 - DNA, 33 bp, Homo sapien
aaacaagggactcgataagggagaaaggcaaga

SEQ ID NO: 101936 - DNA, 33 bp, Homo sapien
aaacaagggactcgatgagggagaaaggcaaga

SEQ ID NO: 101937 - DNA, 33 bp, Homo sapien
tgaactgagaaagccacaaaattagcaactcag

SEQ ID NO: 101938 - DNA, 33 bp, Homo sapien
tgaactgagaaagccataaaattagcaactcag

SEQ ID NO: 101939 - DNA, 33 bp, Homo sapien
caattttatctgtttgaacccattagaatttcc

SEQ ID NO: 101940 - DNA, 33 bp, Homo sapien
caattttatctgtttggacccattagaatttcc

SEQ ID NO: 101941 - DNA, 33 bp, Homo sapien
tgttttcaaccttagacgtgcagattttattcg

SEQ ID NO: 101942 - DNA, 33 bp, Homo sapien
tgttttcaaccttagatgtgcagattttattcg

SEQ ID NO: 101943 - DNA, 33 bp, Homo sapien
aaatttgaaaaatgtaaaatccattaagctgca

SEQ ID NO: 101944 - DNA, 33 bp, Homo sapien
aaatttgaaaaatgtagaatccattaagctgca

SEQ ID NO: 101945 - DNA, 33 bp, Homo sapien
cttcattaaaaccaacagcacctatttatgagc

SEQ ID NO: 101946 - DNA, 33 bp, Homo sapien
cttcattaaaaccaacggcacctatttatgagc

SEQ ID NO: 101947 - DNA, 33 bp, Homo sapien
cacagaaagtttacaaataagaccttgcatcta

SEQ ID NO: 101948 - DNA, 33 bp, Homo sapien
cacagaaagtttacaagtaagaccttgcatcta

SEQ ID NO: 101949 - DNA, 33 bp, Homo sapien
gcagtccagggaaagaagacctccatgaagaac

SEQ ID NO: 101950 - DNA, 33 bp, Homo sapien
gcagtccagggaaagatgacctccatgaagaac

SEQ ID NO: 101951 - DNA, 33 bp, Homo sapien
cctgcagacactttgaaaggataaactacattt

SEQ ID NO: 101952 - DNA, 33 bp, Homo sapien
cctgcagacactttgacaggataaactacattt

SEQ ID NO: 101953 - DNA, 33 bp, Homo sapien
caggagaagccatctaaagtggcactgaagctc

SEQ ID NO: 101954 - DNA, 33 bp, Homo sapien
caggagaagccatctagagtggcactgaagctc

SEQ ID NO: 101955 - DNA, 33 bp, Homo sapien
tggaaatgttctaatacagagaccagtagaatg

SEQ ID NO: 101956 - DNA, 33 bp, Homo sapien
tggaaatgttctaatatagagaccagtagaatg

SEQ ID NO: 101957 - DNA, 33 bp, Homo sapien
ggtctcatgttgctgacagacctacacaacttt

SEQ ID NO: 101958 - DNA, 33 bp, Homo sapien
ggtctcatgttgctgatagacctacacaacttt

SEQ ID NO: 101959 - DNA, 33 bp, Homo sapien
cgcagtgatagtcttacatacctctcccagagt

SEQ ID NO: 101960 - DNA, 33 bp, Homo sapien
cgcagtgatagtcttatatacctctcccagagt

SEQ ID NO: 101961 - DNA, 33 bp, Homo sapien
tctccctgttagtacccgcacattcaggagcac

SEQ ID NO: 101962 - DNA, 33 bp, Homo sapien
tctccctgttagtacctgcacattcaggagcac

SEQ ID NO: 101963 - DNA, 33 bp, Homo sapien
gatgagtagataagaaagaagcattgctatgag

SEQ ID NO: 101964 - DNA, 33 bp, Homo sapien
gatgagtagataagaaggaagcattgctatgag

SEQ ID NO: 101965 - DNA, 33 bp, Homo sapien
gaggaagtcacaactacgggccagagctaacat

SEQ ID NO: 101966 - DNA, 33 bp, Homo sapien
gaggaagtcacaactatgggccagagctaacat

SEQ ID NO: 101967 - DNA, 33 bp, Homo sapien
ctatctatcaaactagactagctcttgactact

SEQ ID NO: 101968 - DNA, 33 bp, Homo sapien
ctatctatcaaactaggctagctcttgactact

SEQ ID NO: 101969 - DNA, 33 bp, Homo sapien
gctaactggtccacacacggccgaaacatgagg

SEQ ID NO: 101970 - DNA, 33 bp, Homo sapien
gctaactggtccacacgcggccgaaacatgagg

SEQ ID NO: 101971 - DNA, 33 bp, Homo sapien
gaaactcatcaaacaaatgatataagtagagaa

SEQ ID NO: 101972 - DNA, 33 bp, Homo sapien
gaaactcatcaaacaagtgatataagtagagaa

SEQ ID NO: 101973 - DNA, 33 bp, Homo sapien
accagatatggcttcagaggagggaacagtgca

SEQ ID NO: 101974 - DNA, 33 bp, Homo sapien
accagatatggcttcataggagggaacagtgca

SEQ ID NO: 101975 - DNA, 33 bp, Homo sapien
actgcaaaatatgttaccttacatcagcaagaa

SEQ ID NO: 101976 - DNA, 33 bp, Homo sapien
actgcaaaatatgttatcttacatcagcaagaa

SEQ ID NO: 101977 - DNA, 33 bp, Homo sapien
aatgaaagcccagtgcagatgatggaaagaaca

SEQ ID NO: 101978 - DNA, 33 bp, Homo sapien
aatgaaagcccagtgcggatgatggaaagaaca

SEQ ID NO: 101979 - DNA, 33 bp, Homo sapien
ccttatcaggaaccaaatcggccaccactgtga

SEQ ID NO: 101980 - DNA, 33 bp, Homo sapien
ccttatcaggaaccaagtcggccaccactgtga

SEQ ID NO: 101981 - DNA, 33 bp, Homo sapien
aatcagggagacatcacactttgtctgtagttg

SEQ ID NO: 101982 - DNA, 33 bp, Homo sapien
aatcagggagacatcatactttgtctgtagttg

SEQ ID NO: 101983 - DNA, 33 bp, Homo sapien
cctctagtaactatcccgactctcctcttctca

SEQ ID NO: 101984 - DNA, 33 bp, Homo sapien
cctctagtaactatcctgactctcctcttctca

SEQ ID NO: 101985 - DNA, 33 bp, Homo sapien
accacaaagggttagcaactctttcatttaaaa

SEQ ID NO: 101986 - DNA, 33 bp, Homo sapien
accacaaagggttagcgactctttcatttaaaa

SEQ ID NO: 101987 - DNA, 33 bp, Homo sapien; identical to SEQ ID NO: 101985

SEQ ID NO: 101988 - DNA, 33 bp, Homo sapien; identical to SEQ ID NO: 101986

SEQ ID NO: 101989 - DNA, 33 bp, Homo sapien
caaggaccgcgggagaggcccatgcaacgctgc

SEQ ID NO: 101990 - DNA, 33 bp, Homo sapien
caaggaccgcgggagatgcccatgcaacgctgc

SEQ ID NO: 101991 - DNA, 33 bp, Homo sapien
cctttctaattgatgacgctttcctgggataat

SEQ ID NO: 101992 - DNA, 33 bp, Homo sapien
cctttctaattgatgatgctttcctgggataat

SEQ ID NO: 101993 - DNA, 33 bp, Homo sapien
gacacttaagaagatacggcaacctcttagatc

SEQ ID NO: 101994 - DNA, 33 bp, Homo sapien
gacacttaagaagatatggcaacctcttagatc

SEQ ID NO: 101995 - DNA, 33 bp, Homo sapien
aagggaaacaacgtacggaaattggaagtgagg

SEQ ID NO: 101996 - DNA, 33 bp, Homo sapien
aagggaaacaacgtactgaaattggaagtgagg

SEQ ID NO: 101997 - DNA, 33 bp, Homo sapien
tgttctataatggataagggtaacttaggatag

SEQ ID NO: 101998 - DNA, 33 bp, Homo sapien
tgttctataatggataggggtaacttaggatag

SEQ ID NO: 101999 - DNA, 33 bp, Homo sapien
aagcgctgtgctttaagcctgttaccttaaatt

SEQ ID NO: 102000 - DNA, 33 bp, Homo sapien
aagcgctgtgctttaatcctgttaccttaaatt

SEQ ID NO: 102001 - DNA, 33 bp, Homo sapien
aagctgttttatttcagcaaatgctcataacag

SEQ ID NO: 102002 - DNA, 33 bp, Homo sapien
aagctgttttatttcatcaaatgctcataacag

SEQ ID NO: 102003 - DNA, 33 bp, Homo sapien
attctgggagtgcgcgaccttggagcgcgcaca

SEQ ID NO: 102004 - DNA, 33 bp, Homo sapien
attctgggagtgcgcggccttggagcgcgcaca

SEQ ID NO: 102005 - DNA, 33 bp, Homo sapien
aaaagaaagatcacaaaattataaaattcctat

SEQ ID NO: 102006 - DNA, 33 bp, Homo sapien
aaaagaaagatcacaagattataaaattcctat

SEQ ID NO: 102007 - DNA, 33 bp, Homo sapien
ggcatttttgaagtcacgaatggttggttgtca

SEQ ID NO: 102008 - DNA, 33 bp, Homo sapien
ggcatttttgaagtcatgaatggttggttgtca

SEQ ID NO: 102009 - DNA, 33 bp, Homo sapien
gtcacaaaaagacaaacatacggttccacttat

SEQ ID NO: 102010 - DNA, 33 bp, Homo sapien
gtcacaaaaagacaaatatacggttccacttat

SEQ ID NO: 102011 - DNA, 33 bp, Homo sapien
tgggtcagcaactctactaagacttataaatag

SEQ ID NO: 102012 - DNA, 33 bp, Homo sapien
tgggtcagcaactctattaagacttataaatag

SEQ ID NO: 102013 - DNA, 33 bp, Homo sapien
agcatctccttccccaactataaccatagtgga

SEQ ID NO: 102014 - DNA, 33 bp, Homo sapien
agcatctccttccccatctataaccatagtgga

SEQ ID NO: 102015 - DNA, 33 bp, Homo sapien
tggacagtacagtgcaagatctgcgtgtggcac

SEQ ID NO: 102016 - DNA, 33 bp, Homo sapien
tggacagtacagtgcaggatctgcgtgtggcac

SEQ ID NO: 102017 - DNA, 33 bp, Homo sapien
tctgtggtgaaatggccctacaccaaagtggga

SEQ ID NO: 102018 - DNA, 33 bp, Homo sapien
tctgtggtgaaatggctctacaccaaagtggga

SEQ ID NO: 102019 - DNA, 33 bp, Homo sapien
ctgattccagtggaaactcactttatggcctta

SEQ ID NO: 102020 - DNA, 33 bp, Homo sapien
ctgattccagtggaaattcactttatggcctta

SEQ ID NO: 102021 - DNA, 33 bp, Homo sapien
gatttgtggaccctcaagtttaatgatcttcaa

SEQ ID NO: 102022 - DNA, 33 bp, Homo sapien
gatttgtggaccctcaggtttaatgatcttcaa

SEQ ID NO: 102023 - DNA, 33 bp, Homo sapien
aatgtcatgaacatacaaaaaggaaagttttgt

SEQ ID NO: 102024 - DNA, 33 bp, Homo sapien
aatgtcatgaacatacgaaaaggaaagttttgt

SEQ ID NO: 102025 - DNA, 33 bp, Homo sapien
tatgagattgttaaaacagtttgactaaatcaa

SEQ ID NO: 102026 - DNA, 33 bp, Homo sapien
tatgagattgttaaaatagtttgactaaatcaa

SEQ ID NO: 102027 - DNA, 33 bp, Homo sapien
cccggaagtgctgtacccgggaagtgcccggag

SEQ ID NO: 102028 - DNA, 33 bp, Homo sapien
cccggaagtgctgtactcgggaagtgcccggag

SEQ ID NO: 102029 - DNA, 33 bp, Homo sapien
gtttgccagaacagcacagtgttaaaaagctaa

SEQ ID NO: 102030 - DNA, 33 bp, Homo sapien
gtttgccagaacagcagagtgttaaaaagctaa

SEQ ID NO: 102031 - DNA, 33 bp, Homo sapien
gattggttcttggaaccgtggaaggctgggtga

SEQ ID NO: 102032 - DNA, 33 bp, Homo sapien
gattggttcttggaactgtggaaggctgggtga

SEQ ID NO: 102033 - DNA, 33 bp, Homo sapien
actctttggcaaaagaatagctggtagagaaaa

SEQ ID NO: 102034 - DNA, 33 bp, Homo sapien
actctttggcaaaagattagctggtagagaaaa

SEQ ID NO: 102035 - DNA, 33 bp, Homo sapien
ttcagaccctgtctcaatgacataaagcaggtg

SEQ ID NO: 102036 - DNA, 33 bp, Homo sapien
ttcagaccctgtctcagtgacataaagcaggtg

SEQ ID NO: 102037 - DNA, 33 bp, Homo sapien
aatgccgcagggaggaacttgcagcatttcttg

SEQ ID NO: 102038 - DNA, 33 bp, Homo sapien
aatgccgcagggaggatcttgcagcatttcttg

SEQ ID NO: 102039 - DNA, 33 bp, Homo sapien
ggccacttcatataccccaggcactcatggtcc

SEQ ID NO: 102040 - DNA, 33 bp, Homo sapien
ggccacttcatataccgcaggcactcatggtcc

SEQ ID NO: 102041 - DNA, 33 bp, Homo sapien
gtgatgcttttaaaaaacactattctttgggct

SEQ ID NO: 102042 - DNA, 33 bp, Homo sapien
gtgatgcttttaaaaatcactattctttgggct

SEQ ID NO: 102043 - DNA, 33 bp, Homo sapien
acacttcaaatcactggagtatctaatcctaga

SEQ ID NO: 102044 - DNA, 33 bp, Homo sapien
acacttcaaatcactgtagtatctaatcctaga

SEQ ID NO: 102045 - DNA, 33 bp, Homo sapien
gtgttcaggatctacacagctgaaaatggctga

SEQ ID NO: 102046 - DNA, 33 bp, Homo sapien
gtgttcaggatctacagagctgaaaatggctga

SEQ ID NO: 102047 - DNA, 33 bp, Homo sapien
accacgcccatgcacaagtcctaattctcgctt

SEQ ID NO: 102048 - DNA, 33 bp, Homo sapien
accacgcccatgcacacgtcctaattctcgctt

SEQ ID NO: 102049 - DNA, 33 bp, Homo sapien
tagcttccacttaacgcactgcctcctctgaaa

SEQ ID NO: 102050 - DNA, 33 bp, Homo sapien
tagcttccacttaacgtactgcctcctctgaaa

SEQ ID NO: 102051 - DNA, 33 bp, Homo sapien
tgtgaaatccttagataacattgccacttagat

SEQ ID NO: 102052 - DNA, 33 bp, Homo sapien
tgtgaaatccttagatgacattgccacttagat

SEQ ID NO: 102053 - DNA, 33 bp, Homo sapien
aaaacttttattgacaccatcaatcaaatatat

SEQ ID NO: 102054 - DNA, 33 bp, Homo sapien
aaaacttttattgacatcatcaatcaaatatat

SEQ ID NO: 102055 - DNA, 33 bp, Homo sapien
gcccggcaccggccagaacacggatggatttct

SEQ ID NO: 102056 - DNA, 33 bp, Homo sapien
gcccggcaccggccaggacacggatggatttct

SEQ ID NO: 102057 - DNA, 33 bp, Homo sapien
cataaatttttgaatacaggcatcaaatcagtt

SEQ ID NO: 102058 - DNA, 33 bp, Homo sapien
cataaatttttgaatataggcatcaaatcagtt

SEQ ID NO: 102059 - DNA, 33 bp, Homo sapien
atacttggtctaaagacggtaaagctgtctgtt

SEQ ID NO: 102060 - DNA, 33 bp, Homo sapien
atacttggtctaaagatggtaaagctgtctgtt

SEQ ID NO: 102061 - DNA, 33 bp, Homo sapien
tagactataccaagaacaggtgaaagataataa

SEQ ID NO: 102062 - DNA, 33 bp, Homo sapien
tagactataccaagaataggtgaaagataataa

SEQ ID NO: 102063 - DNA, 33 bp, Homo sapien
actcttccttgtgatgaaaccataatctaggta

SEQ ID NO: 102064 - DNA, 33 bp, Homo sapien
actcttccttgtgatggaaccataatctaggta

SEQ ID NO: 102065 - DNA, 33 bp, Homo sapien
agggattaaagtctcacggaaaagctatcatgg

SEQ ID NO: 102066 - DNA, 33 bp, Homo sapien
agggattaaagtctcatggaaaagctatcatgg

SEQ ID NO: 102067 - DNA, 33 bp, Homo sapien
tgaaactctctttgagccccattttcgtggaag

SEQ ID NO: 102068 - DNA, 33 bp, Homo sapien
tgaaactctctttgagtcccattttcgtggaag

SEQ ID NO: 102069 - DNA, 33 bp, Homo sapien
aatgtctccttccttacgtgcatggtagaggca

SEQ ID NO: 102070 - DNA, 33 bp, Homo sapien
aatgtctccttccttatgtgcatggtagaggca

SEQ ID NO: 102071 - DNA, 33 bp, Homo sapien
gggctttggggtttgccctacttgatatgttga

SEQ ID NO: 102072 - DNA, 33 bp, Homo sapien
gggctttggggtttgcgctacttgatatgttga

SEQ ID NO: 102073 - DNA, 33 bp, Homo sapien
gatggaaaatgtgtgacaaatttgacatttaaa

SEQ ID NO: 102074 - DNA, 33 bp, Homo sapien
gatggaaaatgtgtgataaatttgacatttaaa

SEQ ID NO: 102075 - DNA, 33 bp, Homo sapien
ctgctttgtaccttgcaattctttcggctttgg

SEQ ID NO: 102076 - DNA, 33 bp, Homo sapien
ctgctttgtaccttgcgattctttcggctttgg

SEQ ID NO: 102077 - DNA, 33 bp, Homo sapien
tttctagagaagaatcagaagtttcctcctctt

SEQ ID NO: 102078 - DNA, 33 bp, Homo sapien
tttctagagaagaatcggaagtttcctcctctt

SEQ ID NO: 102079 - DNA, 33 bp, Homo sapien
ctcagacttcttcaacagcccaggtaaataatc

SEQ ID NO: 102080 - DNA, 33 bp, Homo sapien
ctcagacttcttcaacggcccaggtaaataatc

SEQ ID NO: 102081 - DNA, 33 bp, Homo sapien
gcaccttgaatgagtacggttcttactctggag

SEQ ID NO: 102082 - DNA, 33 bp, Homo sapien
gcaccttgaatgagtatggttcttactctggag

SEQ ID NO: 102083 - DNA, 33 bp, Homo sapien
tataagaaatgatgtacaagacaaaaagaagca

SEQ ID NO: 102084 - DNA, 33 bp, Homo sapien
tataagaaatgatgtagaagacaaaaagaagca

SEQ ID NO: 102085 - DNA, 33 bp, Homo sapien
ttaaagtatgcgattacgttggttctggcaatt

SEQ ID NO: 102086 - DNA, 33 bp, Homo sapien
ttaaagtatgcgattatgttggttctggcaatt

SEQ ID NO: 102087 - DNA, 33 bp, Homo sapien
ggaagggaaagagggacgcttctgactggtgga

SEQ ID NO: 102088 - DNA, 33 bp, Homo sapien
ggaagggaaagagggatgcttctgactggtgga

SEQ ID NO: 102089 - DNA, 33 bp, Homo sapien
gtttacatcatttcaccggtaacactaggggga

SEQ ID NO: 102090 - DNA, 33 bp, Homo sapien
gtttacatcatttcactggtaacactaggggga

SEQ ID NO: 102091 - DNA, 33 bp, Homo sapien
ccatcctcagtttacacatccggaaattgttac

SEQ ID NO: 102092 - DNA, 33 bp, Homo sapien
ccatcctcagtttacagatccggaaattgttac

SEQ ID NO: 102093 - DNA, 33 bp, Homo sapien
tttgggtgatggtcacaataggcagtgggttta

SEQ ID NO: 102094 - DNA, 33 bp, Homo sapien
tttgggtgatggtcacgataggcagtgggttta

SEQ ID NO: 102095 - DNA, 33 bp, Homo sapien
taaacacgtgcaattacgccagtttttcacaca

SEQ ID NO: 102096 - DNA, 33 bp, Homo sapien
taaacacgtgcaattatgccagtttttcacaca

SEQ ID NO: 102097 - DNA, 33 bp, Homo sapien
tgattgtacagaaaaacggaacattcaagagaa

SEQ ID NO: 102098 - DNA, 33 bp, Homo sapien
tgattgtacagaaaaatggaacattcaagagaa

SEQ ID NO: 102099 - DNA, 33 bp, Homo sapien
gacgttttaaccgagcactgatggtggtgtatt

SEQ ID NO: 102100 - DNA, 33 bp, Homo sapien
gacgttttaaccgagcgctgatggtggtgtatt

SEQ ID NO: 102101 - DNA, 33 bp, Homo sapien
gatatcactggaacaaatgaatcaggccctggt

SEQ ID NO: 102102 - DNA, 33 bp, Homo sapien
gatatcactggaacaagtgaatcaggccctggt

SEQ ID NO: 102103 - DNA, 33 bp, Homo sapien
agaatcctgaaataaaatctccacagaaggaaa

SEQ ID NO: 102104 - DNA, 33 bp, Homo sapien
agaatcctgaaataaagtctccacagaaggaaa

SEQ ID NO: 102105 - DNA, 33 bp, Homo sapien; identical to SEQ ID NO: 102103

SEQ ID NO: 102106 - DNA, 33 bp, Homo sapien; identical to SEQ ID NO: 102104

SEQ ID NO: 102107 - DNA, 33 bp, Homo sapien
agtaaggattttctcacgaggattccatcacat

SEQ ID NO: 102108 - DNA, 33 bp, Homo sapien
agtaaggattttctcatgaggattccatcacat

SEQ ID NO: 102109 - DNA, 33 bp, Homo sapien; identical to SEQ ID NO: 102107

SEQ ID NO: 102110 - DNA, 33 bp, Homo sapien; identical to SEQ ID NO: 102108

SEQ ID NO: 102111 - DNA, 33 bp, Homo sapien
ttatgatgaaagtgtacgctgtgaacgatgcca

SEQ ID NO: 102112 - DNA, 33 bp, Homo sapien
ttatgatgaaagtgtatgctgtgaacgatgcca

SEQ ID NO: 102113 - DNA, 33 bp, Homo sapien; identical to SEQ ID NO: 102111

SEQ ID NO: 102114 - DNA, 33 bp, Homo sapien; identical to SEQ ID NO: 102112

SEQ ID NO: 102115 - DNA, 33 bp, Homo sapien
ccactcagaaggctgacaagtgaggattactta

SEQ ID NO: 102116 - DNA, 33 bp, Homo sapien
ccactcagaaggctgagaagtgaggattactta

SEQ ID NO: 102117 - DNA, 33 bp, Homo sapien
aaattctcctctgtgacgactcagtgtttccct

SEQ ID NO: 102118 - DNA, 33 bp, Homo sapien
aaattctcctctgtgatgactcagtgtttccct

SEQ ID NO: 102119 - DNA, 33 bp, Homo sapien
tgcaactttgatctcccgagctccagtgaccct

SEQ ID NO: 102120 - DNA, 33 bp, Homo sapien
tgcaactttgatctcctgagctccagtgaccct

SEQ ID NO: 102121 - DNA, 33 bp, Homo sapien
gacttaggtagaatttaaaacagaaatgagaaa

SEQ ID NO: 102122 - DNA, 33 bp, Homo sapien
gacttaggtagaatttgaaacagaaatgagaaa

SEQ ID NO: 102123 - DNA, 33 bp, Homo sapien
aaattttaaacatagcacagattagggccacag

SEQ ID NO: 102124 - DNA, 33 bp, Homo sapien
aaattttaaacatagcgcagattagggccacag

SEQ ID NO: 102125 - DNA, 33 bp, Homo sapien
acccaaaatgtctttacagtcatgcatgatgag

SEQ ID NO: 102126 - DNA, 33 bp, Homo sapien
acccaaaatgtctttagagtcatgcatgatgag

SEQ ID NO: 102127 - DNA, 33 bp, Homo sapien
cttcttaccatcctgacgactgaaactcgagac

SEQ ID NO: 102128 - DNA, 33 bp, Homo sapien
cttcttaccatcctgatgactgaaactcgagac

SEQ ID NO: 102129 - DNA, 33 bp, Homo sapien
ccctatcaatccatcaatgagtaagtaagtaaa

SEQ ID NO: 102130 - DNA, 33 bp, Homo sapien
ccctatcaatccatcagtgagtaagtaagtaaa

SEQ ID NO: 102131 - DNA, 33 bp, Homo sapien
agcaaagcttatcaaacgctgtcagcagtcact

SEQ ID NO: 102132 - DNA, 33 bp, Homo sapien
agcaaagcttatcaaaggctgtcagcagtcact

SEQ ID NO: 102133 - DNA, 33 bp, Homo sapien
gtggggttggcaattacctctgctgcaaagtcc

SEQ ID NO: 102134 - DNA, 33 bp, Homo sapien
gtggggttggcaattatctctgctgcaaagtcc

SEQ ID NO: 102135 - DNA, 33 bp, Homo sapien
ctcaggacctgctgaacggcggaagtgaaagga

SEQ ID NO: 102136 - DNA, 33 bp, Homo sapien
ctcaggacctgctgaatggcggaagtgaaagga

SEQ ID NO: 102137 - DNA, 33 bp, Homo sapien
ctggagctgctgttaacactatagccctcccac

SEQ ID NO: 102138 - DNA, 33 bp, Homo sapien
ctggagctgctgttaatactatagccctcccac

SEQ ID NO: 102139 - DNA, 33 bp, Homo sapien
ctgtgacatgctgtaacacctatttggggactc

SEQ ID NO: 102140 - DNA, 33 bp, Homo sapien
ctgtgacatgctgtaatacctatttggggactc

SEQ ID NO: 102141 - DNA, 33 bp, Homo sapien
tcctcatttcctgtaactcctgtgcagtgcatc

SEQ ID NO: 102142 - DNA, 33 bp, Homo sapien
tcctcatttcctgtaattcctgtgcagtgcatc

SEQ ID NO: 102143 - DNA, 33 bp, Homo sapien
aaggagcatctcagaaacgaagctgctacttac

SEQ ID NO: 102144 - DNA, 33 bp, Homo sapien
aaggagcatctcagaagcgaagctgctacttac

SEQ ID NO: 102145 - DNA, 33 bp, Homo sapien
tggctcgtttttctccagaaatattctgcctgc

SEQ ID NO: 102146 - DNA, 33 bp, Homo sapien
tggctcgtttttctccggaaatattctgcctgc

SEQ ID NO: 102147 - DNA, 33 bp, Homo sapien
ctaccctggggtggaaacacattctcttatgac

SEQ ID NO: 102148 - DNA, 33 bp, Homo sapien
ctaccctggggtggaagcacattctcttatgac

SEQ ID NO: 102149 - DNA, 33 bp, Homo sapien
gaggtcattcgagcaacggtcccagggaatagg

SEQ ID NO: 102150 - DNA, 33 bp, Homo sapien
gaggtcattcgagcaagggtcccagggaatagg

SEQ ID NO: 102151 - DNA, 33 bp, Homo sapien
aaccaggttttcaagcgacctcacaaaaccaca

SEQ ID NO: 102152 - DNA, 33 bp, Homo sapien
aaccaggttttcaagctacctcacaaaaccaca

SEQ ID NO: 102153 - DNA, 33 bp, Homo sapien
aatacattgttagcaactatagtcaccatgcta

SEQ ID NO: 102154 - DNA, 33 bp, Homo sapien
aatacattgttagcaattatagtcaccatgcta

SEQ ID NO: 102155 - DNA, 33 bp, Homo sapien
atattcagcacttccaataaaaaatgtatgaaa

SEQ ID NO: 102156 - DNA, 33 bp, Homo sapien
atattcagcacttccagtaaaaaatgtatgaaa

SEQ ID NO: 102157 - DNA, 33 bp, Homo sapien
tgagcatggaaagttggcaaataacttaggctt

SEQ ID NO: 102158 - DNA, 33 bp, Homo sapien
tgagcatggaaagttgtcaaataacttaggctt

SEQ ID NO: 102159 - DNA, 33 bp, Homo sapien
cctaaacacagttcacaaatcgtaggtgcatta

SEQ ID NO: 102160 - DNA, 33 bp, Homo sapien
cctaaacacagttcacgaatcgtaggtgcatta

SEQ ID NO: 102161 - DNA, 33 bp, Homo sapien
gtgtctcggacagggacgtaatggagctatttt

SEQ ID NO: 102162 - DNA, 33 bp, Homo sapien
gtgtctcggacagggatgtaatggagctatttt

SEQ ID NO: 102163 - DNA, 33 bp, Homo sapien
agggcaatgaacttgaccaatcactggaggtat

SEQ ID NO: 102164 - DNA, 33 bp, Homo sapien
agggcaatgaacttgatcaatcactggaggtat

SEQ ID NO: 102165 - DNA, 33 bp, Homo sapien
gcctggtgtccaggaacgcgatgttgctccagc

SEQ ID NO: 102166 - DNA, 33 bp, Homo sapien
gcctggtgtccaggaatgcgatgttgctccagc

SEQ ID NO: 102167 - DNA, 33 bp, Homo sapien
gtgttcacaaagacaccgcttactggcccgtat

SEQ ID NO: 102168 - DNA, 33 bp, Homo sapien
gtgttcacaaagacacggcttactggcccgtat

SEQ ID NO: 102169 - DNA, 33 bp, Homo sapien
agaggagaagcagggaatagcaatgccgtattc

SEQ ID NO: 102170 - DNA, 33 bp, Homo sapien
agaggagaagcagggagtagcaatgccgtattc

SEQ ID NO: 102171 - DNA, 33 bp, Homo sapien
tattcacggaattgtacgaccattagaaactca

SEQ ID NO: 102172 - DNA, 33 bp, Homo sapien
tattcacggaattgtaggaccattagaaactca

SEQ ID NO: 102173 - DNA, 33 bp, Homo sapien
ttatgaatatgtgctgacaaataccaaacttta

SEQ ID NO: 102174 - DNA, 33 bp, Homo sapien
ttatgaatatgtgctggcaaataccaaacttta

SEQ ID NO: 102175 - DNA, 33 bp, Homo sapien
ccacaaagggacaactaagaaaataagaaatgg

SEQ ID NO: 102176 - DNA, 33 bp, Homo sapien
ccacaaagggacaactgagaaaataagaaatgg

SEQ ID NO: 102177 - DNA, 33 bp, Homo sapien
ctgtcacatgtgtgagccaagttagaagcaatg

SEQ ID NO: 102178 - DNA, 33 bp, Homo sapien
ctgtcacatgtgtgaggcaagttagaagcaatg

SEQ ID NO: 102179 - DNA, 33 bp, Homo sapien
ctcaacaaagagatgcagaaagactgacaggga

SEQ ID NO: 102180 - DNA, 33 bp, Homo sapien
ctcaacaaagagatgcggaaagactgacaggga

SEQ ID NO: 102181 - DNA, 33 bp, Homo sapien
tccattggagccagccaaacccttgtggatttt

SEQ ID NO: 102182 - DNA, 33 bp, Homo sapien
tccattggagccagccgaacccttgtggatttt

SEQ ID NO: 102183 - DNA, 33 bp, Homo sapien
gacagaacgcctatgaaaacatgtgccagtctg

SEQ ID NO: 102184 - DNA, 33 bp, Homo sapien
gacagaacgcctatgagaacatgtgccagtctg

SEQ ID NO: 102185 - DNA, 33 bp, Homo sapien
gattgctgtaagttgactataataagcctgtgt

SEQ ID NO: 102186 - DNA, 33 bp, Homo sapien
gattgctgtaagttgattataataagcctgtgt

SEQ ID NO: 102187 - DNA, 33 bp, Homo sapien
cacattaaaaaaattacgcaaagatgttcaact

SEQ ID NO: 102188 - DNA, 33 bp, Homo sapien
cacattaaaaaaattatgcaaagatgttcaact

SEQ ID NO: 102189 - DNA, 33 bp, Homo sapien
ttctttttcctaacaactactcccaaatagcta

SEQ ID NO: 102190 - DNA, 33 bp, Homo sapien
ttctttttcctaacaattactcccaaatagcta

SEQ ID NO: 102191 - DNA, 33 bp, Homo sapien
agaaatgactttctcacgctttctctctctctc

SEQ ID NO: 102192 - DNA, 33 bp, Homo sapien
agaaatgactttctcatgctttctctctctctc

SEQ ID NO: 102193 - DNA, 33 bp, Homo sapien
ttgtatcctaagtaaaagtctccaaattgtatg

SEQ ID NO: 102194 - DNA, 33 bp, Homo sapien
ttgtatcctaagtaaatgtctccaaattgtatg

SEQ ID NO: 102195 - DNA, 33 bp, Homo sapien
acaggatactccaatacacttgaagcttttcct

SEQ ID NO: 102196 - DNA, 33 bp, Homo sapien
acaggatactccaatatacttgaagcttttcct

SEQ ID NO: 102197 - DNA, 33 bp, Homo sapien
ttttggaagccaaatacggaatagaattcagca

SEQ ID NO: 102198 - DNA, 33 bp, Homo sapien
ttttggaagccaaatatggaatagaattcagca

SEQ ID NO: 102199 - DNA, 33 bp, Homo sapien
gcactttgaaattacagaacgacatagatgaac

SEQ ID NO: 102200 - DNA, 33 bp, Homo sapien
gcactttgaaattacataacgacatagatgaac

SEQ ID NO: 102201 - DNA, 33 bp, Homo sapien
gggaccctggctactcaaagtagtctttccaga

SEQ ID NO: 102202 - DNA, 33 bp, Homo sapien
gggaccctggctactcgaagtagtctttccaga

SEQ ID NO: 102203 - DNA, 33 bp, Homo sapien
taggagagaactacacagagaagtccagagatt

SEQ ID NO: 102204 - DNA, 33 bp, Homo sapien
taggagagaactacacggagaagtccagagatt

SEQ ID NO: 102205 - DNA, 33 bp, Homo sapien
aataatggctgaaaaaatatgccaaacctaata

SEQ ID NO: 102206 - DNA, 33 bp, Homo sapien
aataatggctgaaaaattatgccaaacctaata

SEQ ID NO: 102207 - DNA, 33 bp, Homo sapien
ataaaactgtagctccaattatacaactagtta

SEQ ID NO: 102208 - DNA, 33 bp, Homo sapien
ataaaactgtagctccgattatacaactagtta

SEQ ID NO: 102209 - DNA, 33 bp, Homo sapien
actgaaagactgtaaaaatctgttattactgca

SEQ ID NO: 102210 - DNA, 33 bp, Homo sapien
actgaaagactgtaaacatctgttattactgca

SEQ ID NO: 102211 - DNA, 33 bp, Homo sapien
gggatctgaagcaacaacagtttccagtacaag

SEQ ID NO: 102212 - DNA, 33 bp, Homo sapien
gggatctgaagcaacagcagtttccagtacaag

SEQ ID NO: 102213 - DNA, 33 bp, Homo sapien
gcaggcctaggtagagacacaatacgaaatctt

SEQ ID NO: 102214 - DNA, 33 bp, Homo sapien
gcaggcctaggtagaggcacaatacgaaatctt

SEQ ID NO: 102215 - DNA, 33 bp, Homo sapien
tcagtaagaattttccacaacaaacaagtgaaa

SEQ ID NO: 102216 - DNA, 33 bp, Homo sapien
tcagtaagaattttccgcaacaaacaagtgaaa

SEQ ID NO: 102217 - DNA, 33 bp, Homo sapien
ttcatttctactttgagctttgcctctgagctt

SEQ ID NO: 102218 - DNA, 33 bp, Homo sapien
ttcatttctactttgatctttgcctctgagctt

SEQ ID NO: 102219 - DNA, 33 bp, Homo sapien
ttcttcagatggacaccaacaaacttctacccg

SEQ ID NO: 102220 - DNA, 33 bp, Homo sapien
ttcttcagatggacactaacaaacttctacccg

SEQ ID NO: 102221 - DNA, 33 bp, Homo sapien
gatttttgattgttaaaaggcatttgcatttgc

SEQ ID NO: 102222 - DNA, 33 bp, Homo sapien
gatttttgattgttaacaggcatttgcatttgc

SEQ ID NO: 102223 - DNA, 33 bp, Homo sapien
aaagtacaagagaaaccggtacacattacatct

SEQ ID NO: 102224 - DNA, 33 bp, Homo sapien
aaagtacaagagaaactggtacacattacatct

SEQ ID NO: 102225 - DNA, 33 bp, Homo sapien
gagcccagcagaaataagacatgactagggggc

SEQ ID NO: 102226 - DNA, 33 bp, Homo sapien
gagcccagcagaaataggacatgactagggggc

SEQ ID NO: 102227 - DNA, 33 bp, Homo sapien
tactcagaatttccacacatctcttttctggag

SEQ ID NO: 102228 - DNA, 33 bp, Homo sapien
tactcagaatttccacgcatctcttttctggag

SEQ ID NO: 102229 - DNA, 33 bp, Homo sapien
gtgttgaaataaaataggccaagatatgttact

SEQ ID NO: 102230 - DNA, 33 bp, Homo sapien
gtgttgaaataaaatatgccaagatatgttact

SEQ ID NO: 102231 - DNA, 33 bp, Homo sapien
acttcaatccacaaaacgttgctgaattccagt

SEQ ID NO: 102232 - DNA, 33 bp, Homo sapien
acttcaatccacaaaatgttgctgaattccagt

SEQ ID NO: 102233 - DNA, 33 bp, Homo sapien
tcaaatccttgtattacggtcagcttctggaga

SEQ ID NO: 102234 - DNA, 33 bp, Homo sapien
tcaaatccttgtattatggtcagcttctggaga

SEQ ID NO: 102235 - DNA, 33 bp, Homo sapien
aaatattgtgatattacgatagtgtgaaatttt

SEQ ID NO: 102236 - DNA, 33 bp, Homo sapien
aaatattgtgatattatgatagtgtgaaatttt

SEQ ID NO: 102237 - DNA, 33 bp, Homo sapien
gtaaaagtcatcaatgaagtaattaagtgctca

SEQ ID NO: 102238 - DNA, 33 bp, Homo sapien
gtaaaagtcatcaatgtagtaattaagtgctca

SEQ ID NO: 102239 - DNA, 33 bp, Homo sapien
gccctttagacaataactactttttgctccagt

SEQ ID NO: 102240 - DNA, 33 bp, Homo sapien
gccctttagacaataattactttttgctccagt

SEQ ID NO: 102241 - DNA, 33 bp, Homo sapien
gaaaatcaggactgtcgcttcagcccagaggtc

SEQ ID NO: 102242 - DNA, 33 bp, Homo sapien
gaaaatcaggactgtctcttcagcccagaggtc

SEQ ID NO: 102243 - DNA, 33 bp, Homo sapien
ggagctaggactataaatgtgtgcatcaccacc

SEQ ID NO: 102244 - DNA, 33 bp, Homo sapien
ggagctaggactataagtgtgtgcatcaccacc

SEQ ID NO: 102245 - DNA, 33 bp, Homo sapien
tacctgattgaatgaaatgtagaatcctaactt

SEQ ID NO: 102246 - DNA, 33 bp, Homo sapien
tacctgattgaatgaactgtagaatcctaactt

SEQ ID NO: 102247 - DNA, 33 bp, Homo sapien
taggggagagacaacacgggaagtgcctgctgg

SEQ ID NO: 102248 - DNA, 33 bp, Homo sapien
taggggagagacaacatgggaagtgcctgctgg

SEQ ID NO: 102249 - DNA, 33 bp, Homo sapien
aagcagtgaggccaacaaaactagagtccaggg

SEQ ID NO: 102250 - DNA, 33 bp, Homo sapien
aagcagtgaggccaaccaaactagagtccaggg

SEQ ID NO: 102251 - DNA, 33 bp, Homo sapien
tatgtcctcacataccaaaatggacagagggca

SEQ ID NO: 102252 - DNA, 33 bp, Homo sapien
tatgtcctcacataccgaaatggacagagggca

SEQ ID NO: 102253 - DNA, 33 bp, Homo sapien
cactgtagcctggaaactctaggctcaagcaat

SEQ ID NO: 102254 - DNA, 33 bp, Homo sapien
cactgtagcctggaaattctaggctcaagcaat

SEQ ID NO: 102255 - DNA, 33 bp, Homo sapien
gaaggcaggagagtgcaagggagaagtcaaact

SEQ ID NO: 102256 - DNA, 33 bp, Homo sapien
gaaggcaggagagtgcgagggagaagtcaaact

SEQ ID NO: 102257 - DNA, 33 bp, Homo sapien
agccactggagactgacgggtcgtgtgaaaccg

SEQ ID NO: 102258 - DNA, 33 bp, Homo sapien
agccactggagactgatgggtcgtgtgaaaccg

SEQ ID NO: 102259 - DNA, 33 bp, Homo sapien
ccagaagacagaaaacccaagcagaggaaatga

SEQ ID NO: 102260 - DNA, 33 bp, Homo sapien
ccagaagacagaaaacgcaagcagaggaaatga

SEQ ID NO: 102261 - DNA, 33 bp, Homo sapien
tgggctatgagttcaaatgacgtaagccagatg

SEQ ID NO: 102262 - DNA, 33 bp, Homo sapien
tgggctatgagttcaattgacgtaagccagatg

SEQ ID NO: 102263 - DNA, 33 bp, Homo sapien
tggagaatctttgatgccaataaagagagaata

SEQ ID NO: 102264 - DNA, 33 bp, Homo sapien
tggagaatctttgatgtcaataaagagagaata

SEQ ID NO: 102265 - DNA, 33 bp, Homo sapien
atgaatggagccaatacagaaggaaatcacata

SEQ ID NO: 102266 - DNA, 33 bp, Homo sapien
atgaatggagccaatagagaaggaaatcacata

SEQ ID NO: 102267 - DNA, 33 bp, Homo sapien
atctgagaaagagacaacctcatagatgacaca

SEQ ID NO: 102268 - DNA, 33 bp, Homo sapien
atctgagaaagagacagcctcatagatgacaca

SEQ ID NO: 102269 - DNA, 33 bp, Homo sapien
aacccttagatgaagacagaataaggatagcat

SEQ ID NO: 102270 - DNA, 33 bp, Homo sapien
aacccttagatgaagagagaataaggatagcat

SEQ ID NO: 102271 - DNA, 33 bp, Homo sapien
actattcatcgataaccctgtgtattagttcgt

SEQ ID NO: 102272 - DNA, 33 bp, Homo sapien
actattcatcgataactctgtgtattagttcgt

SEQ ID NO: 102273 - DNA, 33 bp, Homo sapien
tccttgagagcaattacagtagatgggaggtga

SEQ ID NO: 102274 - DNA, 33 bp, Homo sapien
tccttgagagcaattatagtagatgggaggtga

SEQ ID NO: 102275 - DNA, 33 bp, Homo sapien
aaaaatgacaccatgaaagtcgagttagaaccg

SEQ ID NO: 102276 - DNA, 33 bp, Homo sapien
aaaaatgacaccatgagagtcgagttagaaccg

SEQ ID NO: 102277 - DNA, 33 bp, Homo sapien
gtagacaccttaagtaaatatccattgtgaacc

SEQ ID NO: 102278 - DNA, 33 bp, Homo sapien
gtagacaccttaagtagatatccattgtgaacc

SEQ ID NO: 102279 - DNA, 33 bp, Homo sapien
ctgctcaaattggagacagactatcctataggc

SEQ ID NO: 102280 - DNA, 33 bp, Homo sapien
ctgctcaaattggagatagactatcctataggc

SEQ ID NO: 102281 - DNA, 33 bp, Homo sapien
tgttcaactcaaagtcactttctctgttggaca

SEQ ID NO: 102282 - DNA, 33 bp, Homo sapien
tgttcaactcaaagtctctttctctgttggaca

SEQ ID NO: 102283 - DNA, 33 bp, Homo sapien
gccatgaagtgcaagacgcaaacccttgaaatc

SEQ ID NO: 102284 - DNA, 33 bp, Homo sapien
gccatgaagtgcaagatgcaaacccttgaaatc

SEQ ID NO: 102285 - DNA, 33 bp, Homo sapien
acttattattcctgaccggattagtattcatga

SEQ ID NO: 102286 - DNA, 33 bp, Homo sapien
acttattattcctgactggattagtattcatga

SEQ ID NO: 102287 - DNA, 33 bp, Homo sapien
gttcataatcccacaaccaaaaatgaaccgcta

SEQ ID NO: 102288 - DNA, 33 bp, Homo sapien
gttcataatcccacaatcaaaaatgaaccgcta

SEQ ID NO: 102289 - DNA, 33 bp, Homo sapien
caggacaggaacaataaaagggctttgtgtaga

SEQ ID NO: 102290 - DNA, 33 bp, Homo sapien
caggacaggaacaatacaagggctttgtgtaga

SEQ ID NO: 102291 - DNA, 33 bp, Homo sapien
ttttatcttagaagcaataagtgggagaatggg

SEQ ID NO: 102292 - DNA, 33 bp, Homo sapien
ttttatcttagaagcagtaagtgggagaatggg

SEQ ID NO: 102293 - DNA, 33 bp, Homo sapien
ttgggaacattggttacgacttccatctcgatc

SEQ ID NO: 102294 - DNA, 33 bp, Homo sapien
ttgggaacattggttatgacttccatctcgatc

SEQ ID NO: 102295 - DNA, 33 bp, Homo sapien
cctttgcttgactcacaatttactactgatcag

SEQ ID NO: 102296 - DNA, 33 bp, Homo sapien
cctttgcttgactcaccatttactactgatcag

SEQ ID NO: 102297 - DNA, 33 bp, Homo sapien
tgtagtaattgctcagcactctataactatatt

SEQ ID NO: 102298 - DNA, 33 bp, Homo sapien
tgtagtaattgctcagtactctataactatatt

SEQ ID NO: 102299 - DNA, 33 bp, Homo sapien
tcaccatttctattcaatattatacaagaagtc

SEQ ID NO: 102300 - DNA, 33 bp, Homo sapien
tcaccatttctattcagtattatacaagaagtc

SEQ ID NO: 102301 - DNA, 33 bp, Homo sapien
taactgttgagtgtaacgttagctatggacttg

SEQ ID NO: 102302 - DNA, 33 bp, Homo sapien
taactgttgagtgtaatgttagctatggacttg

SEQ ID NO: 102303 - DNA, 33 bp, Homo sapien
gagaccagtttctctgaagagagctgttttagg

SEQ ID NO: 102304 - DNA, 33 bp, Homo sapien
gagaccagtttctctggagagagctgttttagg

SEQ ID NO: 102305 - DNA, 33 bp, Homo sapien
aagggcgaagtgcagaagttaacattttaacag

SEQ ID NO: 102306 - DNA, 33 bp, Homo sapien
aagggcgaagtgcagacgttaacattttaacag

SEQ ID NO: 102307 - DNA, 33 bp, Homo sapien
cattaggagttattcaccacattgggaaggaac

SEQ ID NO: 102308 - DNA, 33 bp, Homo sapien
cattaggagttattcatcacattgggaaggaac

SEQ ID NO: 102309 - DNA, 33 bp, Homo sapien
agccaaatgaggaataagtgggcataaaaagaa

SEQ ID NO: 102310 - DNA, 33 bp, Homo sapien
agccaaatgaggaataggtgggcataaaaagaa

SEQ ID NO: 102311 - DNA, 33 bp, Homo sapien
gcagcattattgaaaacagtcaaaaagtgcaaa

SEQ ID NO: 102312 - DNA, 33 bp, Homo sapien
gcagcattattgaaaatagtcaaaaagtgcaaa

SEQ ID NO: 102313 - DNA, 33 bp, Homo sapien
gaggatgtgaaaaaacaggaacattcatatatt

SEQ ID NO: 102314 - DNA, 33 bp, Homo sapien
gaggatgtgaaaaaacgggaacattcatatatt

SEQ ID NO: 102315 - DNA, 33 bp, Homo sapien
ttgcatgcctttttaccaatgagtctacctctt

SEQ ID NO: 102316 - DNA, 33 bp, Homo sapien
ttgcatgcctttttactaatgagtctacctctt

SEQ ID NO: 102317 - DNA, 33 bp, Homo sapien
attttagcagatcatgcataacatccaacacaa

SEQ ID NO: 102318 - DNA, 33 bp, Homo sapien
attttagcagatcatgtataacatccaacacaa

SEQ ID NO: 102319 - DNA, 33 bp, Homo sapien
aagtttgcacttttccaccaacatcttccattc

SEQ ID NO: 102320 - DNA, 33 bp, Homo sapien
aagtttgcacttttccgccaacatcttccattc

SEQ ID NO: 102321 - DNA, 33 bp, Homo sapien
cacccaatgtactataaaatgatggaaatgaat

SEQ ID NO: 102322 - DNA, 33 bp, Homo sapien
cacccaatgtactatacaatgatggaaatgaat

SEQ ID NO: 102323 - DNA, 33 bp, Homo sapien
aagcgtgtattaatggcactaatttttgtagtg

SEQ ID NO: 102324 - DNA, 33 bp, Homo sapien
aagcgtgtattaatggtactaatttttgtagtg

SEQ ID NO: 102325 - DNA, 33 bp, Homo sapien
ctatccaggagcctcaagtgtgtgcgtgtttca

SEQ ID NO: 102326 - DNA, 33 bp, Homo sapien
ctatccaggagcctcaggtgtgtgcgtgtttca

SEQ ID NO: 102327 - DNA, 33 bp, Homo sapien
gaggtcagtaggacaacgtctgttccacagtgg

SEQ ID NO: 102328 - DNA, 33 bp, Homo sapien
gaggtcagtaggacaatgtctgttccacagtgg

SEQ ID NO: 102329 - DNA, 33 bp, Homo sapien
gctcaccagttaagacagaaaatgttgtgccct

SEQ ID NO: 102330 - DNA, 33 bp, Homo sapien
gctcaccagttaagacggaaaatgttgtgccct

SEQ ID NO: 102331 - DNA, 33 bp, Homo sapien
actgaatcctttcatcaacaccccagtcccttc

SEQ ID NO: 102332 - DNA, 33 bp, Homo sapien
actgaatcctttcatcgacaccccagtcccttc

SEQ ID NO: 102333 - DNA, 33 bp, Homo sapien
gagcgctgacttttcgcattgtagatgaagatg

SEQ ID NO: 102334 - DNA, 33 bp, Homo sapien
gagcgctgacttttcgtattgtagatgaagatg

SEQ ID NO: 102335 - DNA, 33 bp, Homo sapien
ggaaaggaagcaggtaagttggaaatcctgtga

SEQ ID NO: 102336 - DNA, 33 bp, Homo sapien
ggaaaggaagcaggtacgttggaaatcctgtga

SEQ ID NO: 102337 - DNA, 33 bp, Homo sapien
catccactaaccaaaagtagtcctatggcctca

SEQ ID NO: 102338 - DNA, 33 bp, Homo sapien
catccactaaccaaaattagtcctatggcctca

SEQ ID NO: 102339 - DNA, 33 bp, Homo sapien
aatatcaacaggctcaataaatactttctgaaa

SEQ ID NO: 102340 - DNA, 33 bp, Homo sapien
aatatcaacaggctcagtaaatactttctgaaa

SEQ ID NO: 102341 - DNA, 33 bp, Homo sapien
gactggggtctagggacatctttccagctctta

SEQ ID NO: 102342 - DNA, 33 bp, Homo sapien
gactggggtctagggatatctttccagctctta

SEQ ID NO: 102343 - DNA, 33 bp, Homo sapien
atgcggatttctcaaacgtggaggaatgacttt

SEQ ID NO: 102344 - DNA, 33 bp, Homo sapien
atgcggatttctcaaatgtggaggaatgacttt

SEQ ID NO: 102345 - DNA, 33 bp, Homo sapien
cagtatccttccggagcattaacttcttccctt

SEQ ID NO: 102346 - DNA, 33 bp, Homo sapien
cagtatccttccggagtattaacttcttccctt

SEQ ID NO: 102347 - DNA, 33 bp, Homo sapien
atcctcagaaaggagcccatagaattttctgta

SEQ ID NO: 102348 - DNA, 33 bp, Homo sapien
atcctcagaaaggagcgcatagaattttctgta

SEQ ID NO: 102349 - DNA, 33 bp, Homo sapien
tgactctagggtattacgcttccctggcacctc

SEQ ID NO: 102350 - DNA, 33 bp, Homo sapien
tgactctagggtattatgcttccctggcacctc

SEQ ID NO: 102351 - DNA, 33 bp, Homo sapien
ccatacctagttttgaacaggagaggtgccagg

SEQ ID NO: 102352 - DNA, 33 bp, Homo sapien
ccatacctagttttgaccaggagaggtgccagg

SEQ ID NO: 102353 - DNA, 33 bp, Homo sapien
gagatggattggctaaaagaaagattaacacac

SEQ ID NO: 102354 - DNA, 33 bp, Homo sapien
gagatggattggctaagagaaagattaacacac

SEQ ID NO: 102355 - DNA, 33 bp, Homo sapien
tgcatagcctggcgatcaattagaaagcatttg

SEQ ID NO: 102356 - DNA, 33 bp, Homo sapien
tgcatagcctggcgatgaattagaaagcatttg

SEQ ID NO: 102357 - DNA, 33 bp, Homo sapien
ggatggaaactataacaattgcatagcctggcg

SEQ ID NO: 102358 - DNA, 33 bp, Homo sapien
ggatggaaactataacgattgcatagcctggcg

SEQ ID NO: 102359 - DNA, 33 bp, Homo sapien
cctttcatgaaggcaccgagacactcctagcca

SEQ ID NO: 102360 - DNA, 33 bp, Homo sapien
cctttcatgaaggcactgagacactcctagcca

SEQ ID NO: 102361 - DNA, 33 bp, Homo sapien
ccaaagaaagggatcactagaaatactggcatc

SEQ ID NO: 102362 - DNA, 33 bp, Homo sapien
ccaaagaaagggatcattagaaatactggcatc

SEQ ID NO: 102363 - DNA, 33 bp, Homo sapien
gagtggcccataggagacattttgttctgggaa

SEQ ID NO: 102364 - DNA, 33 bp, Homo sapien
gagtggcccataggaggcattttgttctgggaa

SEQ ID NO: 102365 - DNA, 33 bp, Homo sapien
ggacaccaaaatgctaacaatgattgtatttgg

SEQ ID NO: 102366 - DNA, 33 bp, Homo sapien
ggacaccaaaatgctagcaatgattgtatttgg

SEQ ID NO: 102367 - DNA, 33 bp, Homo sapien
aatagtcccatcttacacttttggtctccctca

SEQ ID NO: 102368 - DNA, 33 bp, Homo sapien
aatagtcccatcttacgcttttggtctccctca

SEQ ID NO: 102369 - DNA, 33 bp, Homo sapien
aatgtgggctgatgtaaaaaactgaagctgtgg

SEQ ID NO: 102370 - DNA, 33 bp, Homo sapien
aatgtgggctgatgtagaaaactgaagctgtgg

SEQ ID NO: 102371 - DNA, 33 bp, Homo sapien
gtattggccttgtgaccattatagtgcatttta

SEQ ID NO: 102372 - DNA, 33 bp, Homo sapien
gtattggccttgtgactattatagtgcatttta

SEQ ID NO: 102373 - DNA, 33 bp, Homo sapien
tgtgcttccatatccaataaaattctctcagag

SEQ ID NO: 102374 - DNA, 33 bp, Homo sapien
tgtgcttccatatccagtaaaattctctcagag

SEQ ID NO: 102375 - DNA, 33 bp, Homo sapien
tgtgtatgagtctcaacacctttgttcctagta

SEQ ID NO: 102376 - DNA, 33 bp, Homo sapien
tgtgtatgagtctcaatacctttgttcctagta

SEQ ID NO: 102377 - DNA, 33 bp, Homo sapien
acatgccaccctgaaactagccactctggcata

SEQ ID NO: 102378 - DNA, 33 bp, Homo sapien
acatgccaccctgaaattagccactctggcata

SEQ ID NO: 102379 - DNA, 33 bp, Homo sapien
ctcctaagaaaaagaaaattctcctacataatc

SEQ ID NO: 102380 - DNA, 33 bp, Homo sapien
ctcctaagaaaaagaacattctcctacataatc

SEQ ID NO: 102381 - DNA, 33 bp, Homo sapien
aatgagaaagaaagaaccccattactcatattg

SEQ ID NO: 102382 - DNA, 33 bp, Homo sapien
aatgagaaagaaagaatcccattactcatattg

SEQ ID NO: 102383 - DNA, 33 bp, Homo sapien
caggagagagtgatgactaacttcatatgaggt

SEQ ID NO: 102384 - DNA, 33 bp, Homo sapien
caggagagagtgatgattaacttcatatgaggt

SEQ ID NO: 102385 - DNA, 33 bp, Homo sapien
agtatgaagtcagagaatccaaatccattctac

SEQ ID NO: 102386 - DNA, 33 bp, Homo sapien
agtatgaagtcagagattccaaatccattctac

SEQ ID NO: 102387 - DNA, 33 bp, Homo sapien
agccacaggatagaacaagccaacggtcctaga

SEQ ID NO: 102388 - DNA, 33 bp, Homo sapien
agccacaggatagaacgagccaacggtcctaga

SEQ ID NO: 102389 - DNA, 33 bp, Homo sapien
aagagattctaacagcaaaaagctcactactct

SEQ ID NO: 102390 - DNA, 33 bp, Homo sapien
aagagattctaacagccaaaagctcactactct

SEQ ID NO: 102391 - DNA, 33 bp, Homo sapien
tgcatgaaaagactacgccagataagagcacat

SEQ ID NO: 102392 - DNA, 33 bp, Homo sapien
tgcatgaaaagactactccagataagagcacat

SEQ ID NO: 102393 - DNA, 33 bp, Homo sapien
aggcagcaaaaatccaccttgaggctgggcaca

SEQ ID NO: 102394 - DNA, 33 bp, Homo sapien
aggcagcaaaaatccatcttgaggctgggcaca

SEQ ID NO: 102395 - DNA, 33 bp, Homo sapien
gtgtccatagatttccagaaactgtgactttaa

SEQ ID NO: 102396 - DNA, 33 bp, Homo sapien
gtgtccatagatttccggaaactgtgactttaa

SEQ ID NO: 102397 - DNA, 33 bp, Homo sapien
tggctttcttctgttcacggatggcaacaaggc

SEQ ID NO: 102398 - DNA, 33 bp, Homo sapien
tggctttcttctgttcgcggatggcaacaaggc

SEQ ID NO: 102399 - DNA, 33 bp, Homo sapien
gtggctcagagatggacgttcagagccccgtgc

SEQ ID NO: 102400 - DNA, 33 bp, Homo sapien
gtggctcagagatggatgttcagagccccgtgc

SEQ ID NO: 102401 - DNA, 33 bp, Homo sapien
atgcaaatgaattgtccaggtatcttatgaaaa

SEQ ID NO: 102402 - DNA, 33 bp, Homo sapien
atgcaaatgaattgtctaggtatcttatgaaaa

SEQ ID NO: 102403 - DNA, 33 bp, Homo sapien
tatatgcattatgcagacactaaaaagataaga

SEQ ID NO: 102404 - DNA, 33 bp, Homo sapien
tatatgcattatgcaggcactaaaaagataaga

SEQ ID NO: 102405 - DNA, 33 bp, Homo sapien
aactgtgattgatgaaactccctgaaccagcct

SEQ ID NO: 102406 - DNA, 33 bp, Homo sapien
aactgtgattgatgaagctccctgaaccagcct

SEQ ID NO: 102407 - DNA, 33 bp, Homo sapien
taagaacagagaaccacggcaaactctacaggc

SEQ ID NO: 102408 - DNA, 33 bp, Homo sapien
taagaacagagaaccatggcaaactctacaggc

SEQ ID NO: 102409 - DNA, 33 bp, Homo sapien
tggtctggaggaacacaaacagcagtctttctg

SEQ ID NO: 102410 - DNA, 33 bp, Homo sapien
tggtctggaggaacaccaacagcagtctttctg

SEQ ID NO: 102411 - DNA, 33 bp, Homo sapien
agattatgtgcagacaagtcagtagattctctt

SEQ ID NO: 102412 - DNA, 33 bp, Homo sapien
agattatgtgcagacaggtcagtagattctctt

SEQ ID NO: 102413 - DNA, 33 bp, Homo sapien
taacctcatttaccctaacaattgccctgtgag

SEQ ID NO: 102414 - DNA, 33 bp, Homo sapien
taacctcatttaccctgacaattgccctgtgag

SEQ ID NO: 102415 - DNA, 33 bp, Homo sapien
cctttagaaaccaaaactacatcaaaagtgatt

SEQ ID NO: 102416 - DNA, 33 bp, Homo sapien
cctttagaaaccaaaattacatcaaaagtgatt

SEQ ID NO: 102417 - DNA, 33 bp, Homo sapien
agaaacaaaataacaagacaacaacttaagaat

SEQ ID NO: 102418 - DNA, 33 bp, Homo sapien
agaaacaaaataacaatacaacaacttaagaat

SEQ ID NO: 102419 - DNA, 33 bp, Homo sapien
atggaagccattgcaaagatgctggaaaagaaa

SEQ ID NO: 102420 - DNA, 33 bp, Homo sapien
atggaagccattgcaaggatgctggaaaagaaa

SEQ ID NO: 102421 - DNA, 33 bp, Homo sapien
aaaatgcacaacatgaagaagaggggaagacaa

SEQ ID NO: 102422 - DNA, 33 bp, Homo sapien
aaaatgcacaacatgaggaagaggggaagacaa

SEQ ID NO: 102423 - DNA, 33 bp, Homo sapien
actttttgaatgccataatgccacaagtggaaa

SEQ ID NO: 102424 - DNA, 33 bp, Homo sapien
actttttgaatgccatgatgccacaagtggaaa

SEQ ID NO: 102425 - DNA, 33 bp, Homo sapien
ttgagatgtactctatcagcaaattccaagtgt

SEQ ID NO: 102426 - DNA, 33 bp, Homo sapien
ttgagatgtactctattagcaaattccaagtgt

SEQ ID NO: 102427 - DNA, 33 bp, Homo sapien
ttttgggcctcacacaaatatctcttctcattc

SEQ ID NO: 102428 - DNA, 33 bp, Homo sapien
ttttgggcctcacacagatatctcttctcattc

SEQ ID NO: 102429 - DNA, 33 bp, Homo sapien
agggagccccaggaaactccgaaaatcaccagt

SEQ ID NO: 102430 - DNA, 33 bp, Homo sapien
agggagccccaggaaagtccgaaaatcaccagt

SEQ ID NO: 102431 - DNA, 33 bp, Homo sapien
catctctgagtagaaaaagtataagcaattttt

SEQ ID NO: 102432 - DNA, 33 bp, Homo sapien
catctctgagtagaaagagtataagcaattttt

SEQ ID NO: 102433 - DNA, 33 bp, Homo sapien
tacaggtcttataccacgtacaggtcgttaaca

SEQ ID NO: 102434 - DNA, 33 bp, Homo sapien
tacaggtcttataccatgtacaggtcgttaaca

SEQ ID NO: 102435 - DNA, 33 bp, Homo sapien
ctgtcaggaatgagaacggtgcttcataaaagc

SEQ ID NO: 102436 - DNA, 33 bp, Homo sapien
ctgtcaggaatgagaatggtgcttcataaaagc

SEQ ID NO: 102437 - DNA, 33 bp, Homo sapien
ctgatacccaggagcacgggatagatgtgtgga

SEQ ID NO: 102438 - DNA, 33 bp, Homo sapien
ctgatacccaggagcatgggatagatgtgtgga

SEQ ID NO: 102439 - DNA, 33 bp, Homo sapien
actgctcttctgtggacgttgtaaagggagcat

SEQ ID NO: 102440 - DNA, 33 bp, Homo sapien
actgctcttctgtggatgttgtaaagggagcat

SEQ ID NO: 102441 - DNA, 33 bp, Homo sapien
gctgctcatcacaggcaagaataggctagagaa

SEQ ID NO: 102442 - DNA, 33 bp, Homo sapien
gctgctcatcacaggcgagaataggctagagaa

SEQ ID NO: 102443 - DNA, 33 bp, Homo sapien
gtataggattgaaaaactgtttgtcactctctt

SEQ ID NO: 102444 - DNA, 33 bp, Homo sapien
gtataggattgaaaaattgtttgtcactctctt

SEQ ID NO: 102445 - DNA, 33 bp, Homo sapien
ttaatatgtggctttacgtgagaacaagctgac

SEQ ID NO: 102446 - DNA, 33 bp, Homo sapien
ttaatatgtggctttatgtgagaacaagctgac

SEQ ID NO: 102447 - DNA, 33 bp, Homo sapien
caaaatggccagaaaacgttagaaaatatctag

SEQ ID NO: 102448 - DNA, 33 bp, Homo sapien
caaaatggccagaaaatgttagaaaatatctag

SEQ ID NO: 102449 - DNA, 33 bp, Homo sapien
gtgcccctgttcaactcaagtccgggagctatc

SEQ ID NO: 102450 - DNA, 33 bp, Homo sapien
gtgcccctgttcaactgaagtccgggagctatc

SEQ ID NO: 102451 - DNA, 33 bp, Homo sapien
cctagtgaatttgtaccatggattagtttaaca

SEQ ID NO: 102452 - DNA, 33 bp, Homo sapien
cctagtgaatttgtacgatggattagtttaaca

SEQ ID NO: 102453 - DNA, 33 bp, Homo sapien
caaacaaacaaacaaaagttacagaagtccaat

SEQ ID NO: 102454 - DNA, 33 bp, Homo sapien
caaacaaacaaacaaaggttacagaagtccaat

SEQ ID NO: 102455 - DNA, 33 bp, Homo sapien
gatagcaagataaaggacctgattcaatttcag

SEQ ID NO: 102456 - DNA, 33 bp, Homo sapien
gatagcaagataaaggccctgattcaatttcag

SEQ ID NO: 102457 - DNA, 33 bp, Homo sapien
tagggagggactgagacgtgaccagcagctgga

SEQ ID NO: 102458 - DNA, 33 bp, Homo sapien
tagggagggactgagatgtgaccagcagctgga

SEQ ID NO: 102459 - DNA, 33 bp, Homo sapien
tttaacatttgacataaaacgtttgaagttcct

SEQ ID NO: 102460 - DNA, 33 bp, Homo sapien
tttaacatttgacatacaacgtttgaagttcct

SEQ ID NO: 102461 - DNA, 33 bp, Homo sapien
tttacacttatcaaaaccagtcgtgtcaattaa

SEQ ID NO: 102462 - DNA, 33 bp, Homo sapien
tttacacttatcaaaagcagtcgtgtcaattaa

SEQ ID NO: 102463 - DNA, 33 bp, Homo sapien
tttgcaaggcatttaaactcaaagaactacaac

SEQ ID NO: 102464 - DNA, 33 bp, Homo sapien
tttgcaaggcatttaagctcaaagaactacaac

SEQ ID NO: 102465 - DNA, 33 bp, Homo sapien
cttataagcccctcaccctgagtgtgtactgtg

SEQ ID NO: 102466 - DNA, 33 bp, Homo sapien
cttataagcccctcactctgagtgtgtactgtg

SEQ ID NO: 102467 - DNA, 33 bp, Homo sapien
caagtttttgtaagtacgttgcacagtgaacat

SEQ ID NO: 102468 - DNA, 33 bp, Homo sapien
caagtttttgtaagtatgttgcacagtgaacat

SEQ ID NO: 102469 - DNA, 33 bp, Homo sapien
caattccgctccgccaatcgtagtctccctgct

SEQ ID NO: 102470 - DNA, 33 bp, Homo sapien
caattccgctccgccagtcgtagtctccctgct

SEQ ID NO: 102471 - DNA, 33 bp, Homo sapien
gatcagctagttcataaaccagggggtccacac

SEQ ID NO: 102472 - DNA, 33 bp, Homo sapien
gatcagctagttcatacaccagggggtccacac

SEQ ID NO: 102473 - DNA, 33 bp, Homo sapien
gttagacagcaggacaagcggccaggaggcact

SEQ ID NO: 102474 - DNA, 33 bp, Homo sapien
gttagacagcaggacacgcggccaggaggcact

SEQ ID NO: 102475 - DNA, 33 bp, Homo sapien
ggcaagaaacagcttcaccatctgctatgccga

SEQ ID NO: 102476 - DNA, 33 bp, Homo sapien
ggcaagaaacagcttcgccatctgctatgccga

SEQ ID NO: 102477 - DNA, 33 bp, Homo sapien
cactcagaaaagaaacaaaccacataccacaca

SEQ ID NO: 102478 - DNA, 33 bp, Homo sapien
cactcagaaaagaaactaaccacataccacaca

SEQ ID NO: 102479 - DNA, 33 bp, Homo sapien
tattgataacctaatacgtctatggcaatgtac

SEQ ID NO: 102480 - DNA, 33 bp, Homo sapien
tattgataacctaatatgtctatggcaatgtac

SEQ ID NO: 102481 - DNA, 33 bp, Homo sapien
gttttgttcatgacaaactcatcagttctcaga

SEQ ID NO: 102482 - DNA, 33 bp, Homo sapien
gttttgttcatgacaagctcatcagttctcaga

SEQ ID NO: 102483 - DNA, 33 bp, Homo sapien
aatgagagttgccaagccaagcctgcttttctc

SEQ ID NO: 102484 - DNA, 33 bp, Homo sapien
aatgagagttgccaagtcaagcctgcttttctc

SEQ ID NO: 102485 - DNA, 33 bp, Homo sapien
cagacagactcaaatgaatcctaagatccagaa

SEQ ID NO: 102486 - DNA, 33 bp, Homo sapien
cagacagactcaaatgtatcctaagatccagaa

SEQ ID NO: 102487 - DNA, 33 bp, Homo sapien
ttgagaaaaggatctacgacaaaattactagtg

SEQ ID NO: 102488 - DNA, 33 bp, Homo sapien
ttgagaaaaggatctatgacaaaattactagtg

SEQ ID NO: 102489 - DNA, 33 bp, Homo sapien
agcatctgtcaaacacacatttaacattgaccc

SEQ ID NO: 102490 - DNA, 33 bp, Homo sapien
agcatctgtcaaacacgcatttaacattgaccc

SEQ ID NO: 102491 - DNA, 33 bp, Homo sapien
ggattgacagttctcaaagtgtgtttattaaac

SEQ ID NO: 102492 - DNA, 33 bp, Homo sapien
ggattgacagttctcacagtgtgtttattaaac

SEQ ID NO: 102493 - DNA, 33 bp, Homo sapien
tcaccagaaacgaaacactgctggagcctgatc

SEQ ID NO: 102494 - DNA, 33 bp, Homo sapien
tcaccagaaacgaaacgctgctggagcctgatc

SEQ ID NO: 102495 - DNA, 33 bp, Homo sapien
tgaggagtctaacctcagaaattcctctccttc

SEQ ID NO: 102496 - DNA, 33 bp, Homo sapien
tgaggagtctaacctctgaaattcctctccttc

SEQ ID NO: 102497 - DNA, 33 bp, Homo sapien
tggaaagcattgcaccacgccatacacctcttc

SEQ ID NO: 102498 - DNA, 33 bp, Homo sapien
tggaaagcattgcaccgcgccatacacctcttc

SEQ ID NO: 102499 - DNA, 33 bp, Homo sapien
agtattgtgagccctaaactctgtccccaccgt

SEQ ID NO: 102500 - DNA, 33 bp, Homo sapien
agtattgtgagccctagactctgtccccaccgt

SEQ ID NO: 102501 - DNA, 33 bp, Homo sapien
ataaggtgtttattaccaaatcgatctatcatc

SEQ ID NO: 102502 - DNA, 33 bp, Homo sapien
ataaggtgtttattacgaaatcgatctatcatc

SEQ ID NO: 102503 - DNA, 33 bp, Homo sapien
tcaagtctctcggcctaaattccccttctataa

SEQ ID NO: 102504 - DNA, 33 bp, Homo sapien
tcaagtctctcggccttaattccccttctataa

SEQ ID NO: 102505 - DNA, 33 bp, Homo sapien
tgacccactgccaatacgtatatgagcaagaaa

SEQ ID NO: 102506 - DNA, 33 bp, Homo sapien
tgacccactgccaatatgtatatgagcaagaaa

SEQ ID NO: 102507 - DNA, 33 bp, Homo sapien
atctattaaaagtcccaaaatacatagcatgtt

SEQ ID NO: 102508 - DNA, 33 bp, Homo sapien
atctattaaaagtcccgaaatacatagcatgtt

SEQ ID NO: 102509 - DNA, 33 bp, Homo sapien
acattctgtccttttacagttttgaattttgcc

SEQ ID NO: 102510 - DNA, 33 bp, Homo sapien
acattctgtccttttatagttttgaattttgcc

SEQ ID NO: 102511 - DNA, 33 bp, Homo sapien
cttgctgatttcccaacaaaaaaccgtcaccac

SEQ ID NO: 102512 - DNA, 33 bp, Homo sapien
cttgctgatttcccaataaaaaaccgtcaccac

SEQ ID NO: 102513 - DNA, 33 bp, Homo sapien
atatcactctctagaacgggcagcgctggctgg

SEQ ID NO: 102514 - DNA, 33 bp, Homo sapien
atatcactctctagaatgggcagcgctggctgg

SEQ ID NO: 102515 - DNA, 33 bp, Homo sapien
ctgagctcggttaacacggtacagtccacaatt

SEQ ID NO: 102516 - DNA, 33 bp, Homo sapien
ctgagctcggttaacatggtacagtccacaatt

SEQ ID NO: 102517 - DNA, 33 bp, Homo sapien
atccaaatagccgtaacaaagctaagctgcctc

SEQ ID NO: 102518 - DNA, 33 bp, Homo sapien
atccaaatagccgtaataaagctaagctgcctc

SEQ ID NO: 102519 - DNA, 33 bp, Homo sapien
cctcagctctgggttacgtgacagattgtgggt

SEQ ID NO: 102520 - DNA, 33 bp, Homo sapien
cctcagctctgggttatgtgacagattgtgggt

SEQ ID NO: 102521 - DNA, 33 bp, Homo sapien
agtcaagccaaaacccactaggagtgaagtcct

SEQ ID NO: 102522 - DNA, 33 bp, Homo sapien
agtcaagccaaaacccgctaggagtgaagtcct

SEQ ID NO: 102523 - DNA, 33 bp, Homo sapien
tcaagtctgggaagataagaaagagccaattcg

SEQ ID NO: 102524 - DNA, 33 bp, Homo sapien
tcaagtctgggaagattagaaagagccaattcg

SEQ ID NO: 102525 - DNA, 33 bp, Homo sapien
aataagatatccacaacaggcaatttcacagag

SEQ ID NO: 102526 - DNA, 33 bp, Homo sapien
aataagatatccacaataggcaatttcacagag

SEQ ID NO: 102527 - DNA, 33 bp, Homo sapien
actgctagtgcctagacgctaagtagggtgttg

SEQ ID NO: 102528 - DNA, 33 bp, Homo sapien
actgctagtgcctagatgctaagtagggtgttg

SEQ ID NO: 102529 - DNA, 33 bp, Homo sapien
atataaacttcccttacgcagcttttcagcaac

SEQ ID NO: 102530 - DNA, 33 bp, Homo sapien
atataaacttcccttatgcagcttttcagcaac

SEQ ID NO: 102531 - DNA, 33 bp, Homo sapien
tttgcggagtcaggcaaggctaagcattgctgg

SEQ ID NO: 102532 - DNA, 33 bp, Homo sapien
tttgcggagtcaggcagggctaagcattgctgg

SEQ ID NO: 102533 - DNA, 33 bp, Homo sapien
tcccacttttaccgaacgggcatttttgatcat

SEQ ID NO: 102534 - DNA, 33 bp, Homo sapien
tcccacttttaccgaatgggcatttttgatcat

SEQ ID NO: 102535 - DNA, 33 bp, Homo sapien
tgaactgtgaccaatccctatcttcaaaattcc

SEQ ID NO: 102536 - DNA, 33 bp, Homo sapien
tgaactgtgaccaatctctatcttcaaaattcc

SEQ ID NO: 102537 - DNA, 33 bp, Homo sapien
tcttcctctcccgaacaaaccaagtccaggagt

SEQ ID NO: 102538 - DNA, 33 bp, Homo sapien
tcttcctctcccgaaccaaccaagtccaggagt

SEQ ID NO: 102539 - DNA, 33 bp, Homo sapien
attttgatctgcctatgacaccttttcctgctt

SEQ ID NO: 102540 - DNA, 33 bp, Homo sapien
attttgatctgcctattacaccttttcctgctt

SEQ ID NO: 102541 - DNA, 33 bp, Homo sapien
aggagattcttaggacaattggagaaaatttga

SEQ ID NO: 102542 - DNA, 33 bp, Homo sapien
aggagattcttaggacgattggagaaaatttga

SEQ ID NO: 102543 - DNA, 33 bp, Homo sapien
aagtgggattttgacaaccttcctcccctggct

SEQ ID NO: 102544 - DNA, 33 bp, Homo sapien
aagtgggattttgacacccttcctcccctggct

SEQ ID NO: 102545 - DNA, 33 bp, Homo sapien
cccacttgaggggaccagatgaaaaagcggcca

SEQ ID NO: 102546 - DNA, 33 bp, Homo sapien
cccacttgaggggaccggatgaaaaagcggcca

SEQ ID NO: 102547 - DNA, 33 bp, Homo sapien
gctttgaagcgtggtcaagaaacatcagtgctg

SEQ ID NO: 102548 - DNA, 33 bp, Homo sapien
gctttgaagcgtggtcgagaaacatcagtgctg

SEQ ID NO: 102549 - DNA, 33 bp, Homo sapien
aacaagaatctccacaagataataataaatgag

SEQ ID NO: 102550 - DNA, 33 bp, Homo sapien
aacaagaatctccacaggataataataaatgag

SEQ ID NO: 102551 - DNA, 33 bp, Homo sapien
cgtatgaaaatcacttcaaaagctttggaaacc

SEQ ID NO: 102552 - DNA, 33 bp, Homo sapien
cgtatgaaaatcacttgaaaagctttggaaacc

SEQ ID NO: 102553 - DNA, 33 bp, Homo sapien
tacctgtatctagggccgacctcagattaatta

SEQ ID NO: 102554 - DNA, 33 bp, Homo sapien
tacctgtatctagggctgacctcagattaatta

SEQ ID NO: 102555 - DNA, 33 bp, Homo sapien
cgcgcgcgcggagagacattgagagagagcgag

SEQ ID NO: 102556 - DNA, 33 bp, Homo sapien
cgcgcgcgcggagagagattgagagagagcgag

SEQ ID NO: 102557 - DNA, 33 bp, Homo sapien
cagaacacagaacttaaggataccaaattggtt

SEQ ID NO: 102558 - DNA, 33 bp, Homo sapien
cagaacacagaacttagggataccaaattggtt

SEQ ID NO: 102559 - DNA, 33 bp, Homo sapien
ctaatcttgcagctaagtggttagtcgtacaaa

SEQ ID NO: 102560 - DNA, 33 bp, Homo sapien
ctaatcttgcagctaattggttagtcgtacaaa

SEQ ID NO: 102561 - DNA, 33 bp, Homo sapien
ttataactgagaaaatgatgacggtgaaagaga

SEQ ID NO: 102562 - DNA, 33 bp, Homo sapien
ttataactgagaaaattatgacggtgaaagaga

SEQ ID NO: 102563 - DNA, 33 bp, Homo sapien
tgtaattgagaatcctaagcaataacgttggag

SEQ ID NO: 102564 - DNA, 33 bp, Homo sapien
tgtaattgagaatcctgagcaataacgttggag

SEQ ID NO: 102565 - DNA, 33 bp, Homo sapien
ttatttctgttaaaaactcccagcaaactagca

SEQ ID NO: 102566 - DNA, 33 bp, Homo sapien
ttatttctgttaaaaattcccagcaaactagca

SEQ ID NO: 102567 - DNA, 33 bp, Homo sapien
tgggcccagaactataactacaggagtagaagg

SEQ ID NO: 102568 - DNA, 33 bp, Homo sapien
tgggcccagaactatagctacaggagtagaagg

SEQ ID NO: 102569 - DNA, 33 bp, Homo sapien
aaaactgtctctaaaacggaatgtatatcctga

SEQ ID NO: 102570 - DNA, 33 bp, Homo sapien
aaaactgtctctaaaatggaatgtatatcctga

SEQ ID NO: 102571 - DNA, 33 bp, Homo sapien
aatttttctccaaaagactgctagtagacctga

SEQ ID NO: 102572 - DNA, 33 bp, Homo sapien
aatttttctccaaaagtctgctagtagacctga

SEQ ID NO: 102573 - DNA, 33 bp, Homo sapien
tcctatagatgaaacacgagcaaaaacagggaa

SEQ ID NO: 102574 - DNA, 33 bp, Homo sapien
tcctatagatgaaacatgagcaaaaacagggaa

SEQ ID NO: 102575 - DNA, 33 bp, Homo sapien
aactattcacccaacaaaagactagtatccaga

SEQ ID NO: 102576 - DNA, 33 bp, Homo sapien
aactattcacccaacagaagactagtatccaga

SEQ ID NO: 102577 - DNA, 33 bp, Homo sapien
accccaaaagatgtgaaaggacttgttacgtaa

SEQ ID NO: 102578 - DNA, 33 bp, Homo sapien
accccaaaagatgtgacaggacttgttacgtaa

SEQ ID NO: 102579 - DNA, 33 bp, Homo sapien
caaagttttcgtgatgaatctttgtatccctcc

SEQ ID NO: 102580 - DNA, 33 bp, Homo sapien
caaagttttcgtgatgcatctttgtatccctcc

SEQ ID NO: 102581 - DNA, 33 bp, Homo sapien
tgcttcgtgatgtttcaaagattctaaatgtgt

SEQ ID NO: 102582 - DNA, 33 bp, Homo sapien
tgcttcgtgatgtttcgaagattctaaatgtgt

SEQ ID NO: 102583 - DNA, 33 bp, Homo sapien
atagattcagaaaatcaaggctagagcagtttt

SEQ ID NO: 102584 - DNA, 33 bp, Homo sapien
atagattcagaaaatcgaggctagagcagtttt

SEQ ID NO: 102585 - DNA, 33 bp, Homo sapien
aataaaagttacttacagctaggcgtggtggct

SEQ ID NO: 102586 - DNA, 33 bp, Homo sapien
aataaaagttacttacggctaggcgtggtggct

SEQ ID NO: 102587 - DNA, 33 bp, Homo sapien
gaagaggttaaaacaaccacgttagacatttta

SEQ ID NO: 102588 - DNA, 33 bp, Homo sapien
gaagaggttaaaacaatcacgttagacatttta

SEQ ID NO: 102589 - DNA, 33 bp, Homo sapien
aaactgcaggaggctacccagcttattaggtat

SEQ ID NO: 102590 - DNA, 33 bp, Homo sapien
aaactgcaggaggctatccagcttattaggtat

SEQ ID NO: 102591 - DNA, 33 bp, Homo sapien
atcagactattttggacacctcctcttcatcca

SEQ ID NO: 102592 - DNA, 33 bp, Homo sapien
atcagactattttggatacctcctcttcatcca

SEQ ID NO: 102593 - DNA, 33 bp, Homo sapien
cccgaataatacaccacgtactcttattgtctt

SEQ ID NO: 102594 - DNA, 33 bp, Homo sapien
cccgaataatacaccatgtactcttattgtctt

SEQ ID NO: 102595 - DNA, 33 bp, Homo sapien
agaagtaataccttacaacagaatagttctata

SEQ ID NO: 102596 - DNA, 33 bp, Homo sapien
agaagtaataccttacgacagaatagttctata

SEQ ID NO: 102597 - DNA, 33 bp, Homo sapien
tacaatggtgaaaaaaaaccaacctggcccttg

SEQ ID NO: 102598 - DNA, 33 bp, Homo sapien
tacaatggtgaaaaaataccaacctggcccttg

SEQ ID NO: 102599 - DNA, 33 bp, Homo sapien
agatgcgacttctacactgcttagactcaaaga

SEQ ID NO: 102600 - DNA, 33 bp, Homo sapien
agatgcgacttctacattgcttagactcaaaga

SEQ ID NO: 102601 - DNA, 33 bp, Homo sapien; identical to SEQ ID NO: 102599

SEQ ID NO: 102602 - DNA, 33 bp, Homo sapien; identical to SEQ ID NO: 102600

SEQ ID NO: 102603 - DNA, 33 bp, Homo sapien
tccagcagctccaagaagatgaactccttggtc

SEQ ID NO: 102604 - DNA, 33 bp, Homo sapien
tccagcagctccaagaggatgaactccttggtc

SEQ ID NO: 102605 - DNA, 33 bp, Homo sapien
atcccagcctactatgaaattcaggtaacaagc

SEQ ID NO: 102606 - DNA, 33 bp, Homo sapien
atcccagcctactatggaattcaggtaacaagc

SEQ ID NO: 102607 - DNA, 33 bp, Homo sapien
tgatcagaaagaacaccgggggggccataggca

SEQ ID NO: 102608 - DNA, 33 bp, Homo sapien
tgatcagaaagaacactgggggggccataggca

SEQ ID NO: 102609 - DNA, 33 bp, Homo sapien
cctgaaagtaggagaaaagcagttgatcaagtg

SEQ ID NO: 102610 - DNA, 33 bp, Homo sapien
cctgaaagtaggagaagagcagttgatcaagtg

SEQ ID NO: 102611 - DNA, 33 bp, Homo sapien; identical to SEQ ID NO: 102609

SEQ ID NO: 102612 - DNA, 33 bp, Homo sapien; identical to SEQ ID NO: 102610

SEQ ID NO: 102613 - DNA, 33 bp, Homo sapien
taggtgattatacaaccgggatataggatcaga

SEQ ID NO: 102614 - DNA, 33 bp, Homo sapien
taggtgattatacaactgggatataggatcaga

SEQ ID NO: 102615 - DNA, 33 bp, Homo sapien
aaagtctgctgcaagaagtattagaactccatt

SEQ ID NO: 102616 - DNA, 33 bp, Homo sapien
aaagtctgctgcaagacgtattagaactccatt

SEQ ID NO: 102617 - DNA, 33 bp, Homo sapien
tggaggccttcctttaacatttcttgtagcaca

SEQ ID NO: 102618 - DNA, 33 bp, Homo sapien
tggaggccttcctttagcatttcttgtagcaca

SEQ ID NO: 102619 - DNA, 33 bp, Homo sapien
ggggacagaggcagacactgtcttaaaaaagac

SEQ ID NO: 102620 - DNA, 33 bp, Homo sapien
ggggacagaggcagaccctgtcttaaaaaagac

SEQ ID NO: 102621 - DNA, 33 bp, Homo sapien
catccggctaatcttcacatttttggtaaagat

SEQ ID NO: 102622 - DNA, 33 bp, Homo sapien
catccggctaatcttcgcatttttggtaaagat

SEQ ID NO: 102623 - DNA, 33 bp, Homo sapien
atctttaattggatataacaaggatgatccaat

SEQ ID NO: 102624 - DNA, 33 bp, Homo sapien
atctttaattggatatgacaaggatgatccaat

SEQ ID NO: 102625 - DNA, 33 bp, Homo sapien
tggtgggattataagcagaaggcaccatgcctg

SEQ ID NO: 102626 - DNA, 33 bp, Homo sapien
tggtgggattataagcggaaggcaccatgcctg

SEQ ID NO: 102627 - DNA, 33 bp, Homo sapien
ttctaactttcctacagatatggcattgaaaat

SEQ ID NO: 102628 - DNA, 33 bp, Homo sapien
ttctaactttcctacatatatggcattgaaaat

SEQ ID NO: 102629 - DNA, 33 bp, Homo sapien
ttaggaccagtgattcccatttgccttataagt

SEQ ID NO: 102630 - DNA, 33 bp, Homo sapien
ttaggaccagtgattctcatttgccttataagt

SEQ ID NO: 102631 - DNA, 33 bp, Homo sapien
tgggaacgttgaggcacgtagaggttttgaagc

SEQ ID NO: 102632 - DNA, 33 bp, Homo sapien
tgggaacgttgaggcatgtagaggttttgaagc

SEQ ID NO: 102633 - DNA, 33 bp, Homo sapien
agttgagtgtttggaactcattttagattattt

SEQ ID NO: 102634 - DNA, 33 bp, Homo sapien
agttgagtgtttggaattcattttagattattt

SEQ ID NO: 102635 - DNA, 33 bp, Homo sapien
gtccccataaaaccacaaaagagttgagtgttt

SEQ ID NO: 102636 - DNA, 33 bp, Homo sapien
gtccccataaaaccaccaaagagttgagtgttt

SEQ ID NO: 102637 - DNA, 33 bp, Homo sapien
gagctccttgtcacaggagattttcaagaacat

SEQ ID NO: 102638 - DNA, 33 bp, Homo sapien
gagctccttgtcacagtagattttcaagaacat

SEQ ID NO: 102639 - DNA, 33 bp, Homo sapien
tgaatttctagtgtaacgtgcaagtcctgacca

SEQ ID NO: 102640 - DNA, 33 bp, Homo sapien
tgaatttctagtgtaatgtgcaagtcctgacca

SEQ ID NO: 102641 - DNA, 33 bp, Homo sapien
tgtagccgtgtccctaataagaagtcccatgca

SEQ ID NO: 102642 - DNA, 33 bp, Homo sapien
tgtagccgtgtccctagtaagaagtcccatgca

SEQ ID NO: 102643 - DNA, 33 bp, Homo sapien
agatatgaacatgctaccacatagcttttagtt

SEQ ID NO: 102644 - DNA, 33 bp, Homo sapien
agatatgaacatgctagcacatagcttttagtt

SEQ ID NO: 102645 - DNA, 33 bp, Homo sapien
ctgccctgtgtgaaaacggactgcccagttaca

SEQ ID NO: 102646 - DNA, 33 bp, Homo sapien
ctgccctgtgtgaaaatggactgcccagttaca

SEQ ID NO: 102647 - DNA, 33 bp, Homo sapien
tctgtgaagcaaaaaacgacccagaaaagcctt

SEQ ID NO: 102648 - DNA, 33 bp, Homo sapien
tctgtgaagcaaaaaatgacccagaaaagcctt

SEQ ID NO: 102649 - DNA, 33 bp, Homo sapien
ttataaacaccaaggcacagttttgcacttcac

SEQ ID NO: 102650 - DNA, 33 bp, Homo sapien
ttataaacaccaaggctcagttttgcacttcac

SEQ ID NO: 102651 - DNA, 33 bp, Homo sapien
cacatcaaacctctgacgtagttcatgaaagca

SEQ ID NO: 102652 - DNA, 33 bp, Homo sapien
cacatcaaacctctgatgtagttcatgaaagca

SEQ ID NO: 102653 - DNA, 33 bp, Homo sapien
tttacataagactactcacatactttacaatgt

SEQ ID NO: 102654 - DNA, 33 bp, Homo sapien
tttacataagactacttacatactttacaatgt

SEQ ID NO: 102655 - DNA, 33 bp, Homo sapien
tctacctcaatgtaccaggggatgcaaaccatt

SEQ ID NO: 102656 - DNA, 33 bp, Homo sapien
tctacctcaatgtaccgggggatgcaaaccatt

SEQ ID NO: 102657 - DNA, 33 bp, Homo sapien
ccaaaggtgataataactggctatctggctgcc

SEQ ID NO: 102658 - DNA, 33 bp, Homo sapien
ccaaaggtgataataattggctatctggctgcc

SEQ ID NO: 102659 - DNA, 33 bp, Homo sapien
tgactgtacaaggaggccaactggaaatacaaa

SEQ ID NO: 102660 - DNA, 33 bp, Homo sapien
tgactgtacaaggaggtcaactggaaatacaaa

SEQ ID NO: 102661 - DNA, 33 bp, Homo sapien
tgaagaggcgaatgaggaaggcacgagccaaat

SEQ ID NO: 102662 - DNA, 33 bp, Homo sapien
tgaagaggcgaatgagtaaggcacgagccaaat

SEQ ID NO: 102663 - DNA, 33 bp, Homo sapien
ctttctagagataacaatgtaagggaagcatga

SEQ ID NO: 102664 - DNA, 33 bp, Homo sapien
ctttctagagataacagtgtaagggaagcatga

SEQ ID NO: 102665 - DNA, 33 bp, Homo sapien
tcacaccagtatcataaatcacaaattgcattt

SEQ ID NO: 102666 - DNA, 33 bp, Homo sapien
tcacaccagtatcatacatcacaaattgcattt

SEQ ID NO: 102667 - DNA, 33 bp, Homo sapien
atgattttagtttatacagaggagagccacaga

SEQ ID NO: 102668 - DNA, 33 bp, Homo sapien
atgattttagtttatatagaggagagccacaga

SEQ ID NO: 102669 - DNA, 33 bp, Homo sapien
aacagcatggcaggaaatgtggttcctgagctc

SEQ ID NO: 102670 - DNA, 33 bp, Homo sapien
aacagcatggcaggaagtgtggttcctgagctc

SEQ ID NO: 102671 - DNA, 33 bp, Homo sapien
taatacagtagagacaccgaagcactagaaagg

SEQ ID NO: 102672 - DNA, 33 bp, Homo sapien
taatacagtagagacatcgaagcactagaaagg

SEQ ID NO: 102673 - DNA, 33 bp, Homo sapien
gcctgagtcaatcatacctaaagttcagctccc

SEQ ID NO: 102674 - DNA, 33 bp, Homo sapien
gcctgagtcaatcatatctaaagttcagctccc

SEQ ID NO: 102675 - DNA, 33 bp, Homo sapien
gacgactgcttatcacactctgagcctgaggtc

SEQ ID NO: 102676 - DNA, 33 bp, Homo sapien
gacgactgcttatcaccctctgagcctgaggtc

SEQ ID NO: 102677 - DNA, 33 bp, Homo sapien
atgaagagtgaaaatacgttggctgagccttgc

SEQ ID NO: 102678 - DNA, 33 bp, Homo sapien
atgaagagtgaaaatatgttggctgagccttgc

SEQ ID NO: 102679 - DNA, 33 bp, Homo sapien
tcactgtatgtttcataagccttgtcagtaact

SEQ ID NO: 102680 - DNA, 33 bp, Homo sapien
tcactgtatgtttcatgagccttgtcagtaact

SEQ ID NO: 102681 - DNA, 33 bp, Homo sapien
ttaaattgtctagccccactggaagcaagaaaa

SEQ ID NO: 102682 - DNA, 33 bp, Homo sapien
ttaaattgtctagccctactggaagcaagaaaa

SEQ ID NO: 102683 - DNA, 33 bp, Homo sapien
aacctttgccttatcactaaataacatagttat

SEQ ID NO: 102684 - DNA, 33 bp, Homo sapien
aacctttgccttatcagtaaataacatagttat

SEQ ID NO: 102685 - DNA, 33 bp, Homo sapien
gtttttttttctcacccgagcttagtaaacaat

SEQ ID NO: 102686 - DNA, 33 bp, Homo sapien
gtttttttttctcacctgagcttagtaaacaat

SEQ ID NO: 102687 - DNA, 33 bp, Homo sapien
tacaaaggataatgaaacttgtttatgtgtggc

SEQ ID NO: 102688 - DNA, 33 bp, Homo sapien
tacaaaggataatgaaccttgtttatgtgtggc

SEQ ID NO: 102689 - DNA, 33 bp, Homo sapien
tctctctatcaaaaaaaaagtgagcagtttttc

SEQ ID NO: 102690 - DNA, 33 bp, Homo sapien
tctctctatcaaaaaacaagtgagcagtttttc

SEQ ID NO: 102691 - DNA, 33 bp, Homo sapien
tgcaagctaccagtaacctcctacattcagtat

SEQ ID NO: 102692 - DNA, 33 bp, Homo sapien
tgcaagctaccagtaagctcctacattcagtat

SEQ ID NO: 102693 - DNA, 33 bp, Homo sapien
gctttatgctttccaacgaacagaaattgaaaa

SEQ ID NO: 102694 - DNA, 33 bp, Homo sapien
gctttatgctttccaatgaacagaaattgaaaa

SEQ ID NO: 102695 - DNA, 33 bp, Homo sapien; identical to SEQ ID NO: 102693

SEQ ID NO: 102696 - DNA, 33 bp, Homo sapien; identical to SEQ ID NO: 102694

SEQ ID NO: 102697 - DNA, 33 bp, Homo sapien
gtctgcataaggcagacactctcagggcagcca

SEQ ID NO: 102698 - DNA, 33 bp, Homo sapien
gtctgcataaggcagatactctcagggcagcca

SEQ ID NO: 102699 - DNA, 33 bp, Homo sapien
tacataagtttctgcacatctgatggctgtcag

SEQ ID NO: 102700 - DNA, 33 bp, Homo sapien
tacataagtttctgcatatctgatggctgtcag

SEQ ID NO: 102701 - DNA, 33 bp, Homo sapien
ttctgctttgttccacacgagcttcctacaacc

SEQ ID NO: 102702 - DNA, 33 bp, Homo sapien
ttctgctttgttccacgcgagcttcctacaacc

SEQ ID NO: 102703 - DNA, 33 bp, Homo sapien
attctgaaaagtgcaaagtcttatactgaggta

SEQ ID NO: 102704 - DNA, 33 bp, Homo sapien
attctgaaaagtgcaaggtcttatactgaggta

SEQ ID NO: 102705 - DNA, 33 bp, Homo sapien
gcatctgttgtgttagaacattctgcttttgga

SEQ ID NO: 102706 - DNA, 33 bp, Homo sapien
gcatctgttgtgttaggacattctgcttttgga

SEQ ID NO: 102707 - DNA, 33 bp, Homo sapien
taaatatcatccaagacaggtattgggacagtc

SEQ ID NO: 102708 - DNA, 33 bp, Homo sapien
taaatatcatccaagataggtattgggacagtc

SEQ ID NO: 102709 - DNA, 33 bp, Homo sapien
tttccggtcttacaaacccagaccatacataac

SEQ ID NO: 102710 - DNA, 33 bp, Homo sapien
tttccggtcttacaaatccagaccatacataac

SEQ ID NO: 102711 - DNA, 33 bp, Homo sapien
ccaaatatttcttaaactatcaagtgtcaaaga

SEQ ID NO: 102712 - DNA, 33 bp, Homo sapien
ccaaatatttcttaaattatcaagtgtcaaaga

SEQ ID NO: 102713 - DNA, 33 bp, Homo sapien
attccacaagagattgaatgaaaaagcagatat

SEQ ID NO: 102714 - DNA, 33 bp, Homo sapien
attccacaagagattggatgaaaaagcagatat

SEQ ID NO: 102715 - DNA, 33 bp, Homo sapien
tttctgagattcctagcagaagtttcagaaaga

SEQ ID NO: 102716 - DNA, 33 bp, Homo sapien
tttctgagattcctagtagaagtttcagaaaga

SEQ ID NO: 102717 - DNA, 33 bp, Homo sapien
gagaattttatttaagcctctaggaatgtggga

SEQ ID NO: 102718 - DNA, 33 bp, Homo sapien
gagaattttatttaaggctctaggaatgtggga

SEQ ID NO: 102719 - DNA, 33 bp, Homo sapien
tacaggcaaaaaaccactggctttgaagccaaa

SEQ ID NO: 102720 - DNA, 33 bp, Homo sapien
tacaggcaaaaaaccattggctttgaagccaaa

SEQ ID NO: 102721 - DNA, 33 bp, Homo sapien
cctaaagttgcctaaccagtattcaaaccctgg

SEQ ID NO: 102722 - DNA, 33 bp, Homo sapien
cctaaagttgcctaacgagtattcaaaccctgg

SEQ ID NO: 102723 - DNA, 33 bp, Homo sapien
gtgtgattctcttgcaaccatgtgggagcattg

SEQ ID NO: 102724 - DNA, 33 bp, Homo sapien
gtgtgattctcttgcagccatgtgggagcattg

SEQ ID NO: 102725 - DNA, 33 bp, Homo sapien
ttaaaagacacagcaaactgtgaagagaaatat

SEQ ID NO: 102726 - DNA, 33 bp, Homo sapien
ttaaaagacacagcaacctgtgaagagaaatat

SEQ ID NO: 102727 - DNA, 33 bp, Homo sapien
ctttgagatttcctgacaccacagtttccaatg

SEQ ID NO: 102728 - DNA, 33 bp, Homo sapien
ctttgagatttcctgataccacagtttccaatg

SEQ ID NO: 102729 - DNA, 33 bp, Homo sapien
ctatgtatccatcaccaagctcaaactattatt

SEQ ID NO: 102730 - DNA, 33 bp, Homo sapien
ctatgtatccatcacccagctcaaactattatt

SEQ ID NO: 102731 - DNA, 33 bp, Homo sapien
catgtgtcagcaaataacttgaatgtttatgta

SEQ ID NO: 102732 - DNA, 33 bp, Homo sapien
catgtgtcagcaaatatcttgaatgtttatgta

SEQ ID NO: 102733 - DNA, 33 bp, Homo sapien
tcctgttgagtcaatacaaacgttgggatcaaa

SEQ ID NO: 102734 - DNA, 33 bp, Homo sapien
tcctgttgagtcaatataaacgttgggatcaaa

SEQ ID NO: 102735 - DNA, 33 bp, Homo sapien
caactactaataaaaacgtggattggattaatt

SEQ ID NO: 102736 - DNA, 33 bp, Homo sapien
caactactaataaaaatgtggattggattaatt

SEQ ID NO: 102737 - DNA, 33 bp, Homo sapien; identical to SEQ ID NO: 102735

SEQ ID NO: 102738 - DNA, 33 bp, Homo sapien; identical to SEQ ID NO: 102736

SEQ ID NO: 102739 - DNA, 33 bp, Homo sapien; identical to SEQ ID NO: 102735

SEQ ID NO: 102740 - DNA, 33 bp, Homo sapien; identical to SEQ ID NO: 102736

SEQ ID NO: 102741 - DNA, 33 bp, Homo sapien
attgttctagtcaatgaattggtggaaaatgtt

SEQ ID NO: 102742 - DNA, 33 bp, Homo sapien
attgttctagtcaatggattggtggaaaatgtt

SEQ ID NO: 102743 - DNA, 33 bp, Homo sapien
tttccatttcctgaaccaactttctagccaatc

SEQ ID NO: 102744 - DNA, 33 bp, Homo sapien
tttccatttcctgaactaactttctagccaatc

SEQ ID NO: 102745 - DNA, 33 bp, Homo sapien
aaagtgagatttttaacgacagtcttgcaagac

SEQ ID NO: 102746 - DNA, 33 bp, Homo sapien
aaagtgagatttttaaggacagtcttgcaagac

SEQ ID NO: 102747 - DNA, 33 bp, Homo sapien
cttatgtataaatctaacaaaaacacgtacaag

SEQ ID NO: 102748 - DNA, 33 bp, Homo sapien
cttatgtataaatctagcaaaaacacgtacaag

SEQ ID NO: 102749 - DNA, 33 bp, Homo sapien
tactgttgaaagtcaacctgtcaataaaaacac

SEQ ID NO: 102750 - DNA, 33 bp, Homo sapien
tactgttgaaagtcaatctgtcaataaaaacac

SEQ ID NO: 102751 - DNA, 33 bp, Homo sapien
agtatgtgtcaatatgcaaagcctgaagcagat

SEQ ID NO: 102752 - DNA, 33 bp, Homo sapien
agtatgtgtcaatatgtaaagcctgaagcagat

SEQ ID NO: 102753 - DNA, 33 bp, Homo sapien
atctcccaagtgtccaatctcctaatatcatca

SEQ ID NO: 102754 - DNA, 33 bp, Homo sapien
atctcccaagtgtccagtctcctaatatcatca

SEQ ID NO: 102755 - DNA, 33 bp, Homo sapien
atgggcagcaaagaaagttaccaagacagttgt

SEQ ID NO: 102756 - DNA, 33 bp, Homo sapien
atgggcagcaaagaaatttaccaagacagttgt

SEQ ID NO: 102757 - DNA, 33 bp, Homo sapien
ttaactcacctattaaatgggaatcataatact

SEQ ID NO: 102758 - DNA, 33 bp, Homo sapien
ttaactcacctattaagtgggaatcataatact

SEQ ID NO: 102759 - DNA, 33 bp, Homo sapien
gtgtggccagagtccacgcactaaaacactgta

SEQ ID NO: 102760 - DNA, 33 bp, Homo sapien
gtgtggccagagtccatgcactaaaacactgta

SEQ ID NO: 102761 - DNA, 33 bp, Homo sapien
acagaggcctcttccccctggcgctccagataa

SEQ ID NO: 102762 - DNA, 33 bp, Homo sapien
acagaggcctcttccctctggcgctccagataa

SEQ ID NO: 102763 - DNA, 33 bp, Homo sapien
attctccattgctaaacacttaggttgattcca

SEQ ID NO: 102764 - DNA, 33 bp, Homo sapien
attctccattgctaaatacttaggttgattcca

SEQ ID NO: 102765 - DNA, 33 bp, Homo sapien
ggggaagggtgaactacaccttgattttttttt

SEQ ID NO: 102766 - DNA, 33 bp, Homo sapien
ggggaagggtgaactataccttgattttttttt

SEQ ID NO: 102767 - DNA, 33 bp, Homo sapien
tggcattgtgactgtgaactattaaaaacgtac

SEQ ID NO: 102768 - DNA, 33 bp, Homo sapien
tggcattgtgactgtggactattaaaaacgtac

SEQ ID NO: 102769 - DNA, 33 bp, Homo sapien
gagaaatctcattcaaagctacttaatttagaa

SEQ ID NO: 102770 - DNA, 33 bp, Homo sapien
gagaaatctcattcaatgctacttaatttagaa

SEQ ID NO: 102771 - DNA, 33 bp, Homo sapien
gacaatgttcctcaaccaaaggaaagtgtccta

SEQ ID NO: 102772 - DNA, 33 bp, Homo sapien
gacaatgttcctcaacgaaaggaaagtgtccta

SEQ ID NO: 102773 - DNA, 33 bp, Homo sapien
gctgacctgagcatggaagcaaagtgctgcact

SEQ ID NO: 102774 - DNA, 33 bp, Homo sapien
gctgacctgagcatgggagcaaagtgctgcact

SEQ ID NO: 102775 - DNA, 33 bp, Homo sapien
gccttcctttttttcccagatagctgtaatttc

SEQ ID NO: 102776 - DNA, 33 bp, Homo sapien
gccttcctttttttcctagatagctgtaatttc

SEQ ID NO: 102777 - DNA, 33 bp, Homo sapien
cagctcctgctgctacacgttaccctcactccc

SEQ ID NO: 102778 - DNA, 33 bp, Homo sapien
cagctcctgctgctactcgttaccctcactccc

SEQ ID NO: 102779 - DNA, 33 bp, Homo sapien
tgataaagtttcttgaggcgtattgataattac

SEQ ID NO: 102780 - DNA, 33 bp, Homo sapien
tgataaagtttcttgatgcgtattgataattac

SEQ ID NO: 102781 - DNA, 33 bp, Homo sapien
tacagatagagggaaggagccaatagcgaagga

SEQ ID NO: 102782 - DNA, 33 bp, Homo sapien
tacagatagagggaagtagccaatagcgaagga

SEQ ID NO: 102783 - DNA, 33 bp, Homo sapien
cttataaagacagcccaacgacaatggctgctt

SEQ ID NO: 102784 - DNA, 33 bp, Homo sapien
cttataaagacagcccgacgacaatggctgctt

SEQ ID NO: 102785 - DNA, 33 bp, Homo sapien
tcctcaaatgtgggtaacctgagctgtgttcta

SEQ ID NO: 102786 - DNA, 33 bp, Homo sapien
tcctcaaatgtgggtatcctgagctgtgttcta

SEQ ID NO: 102787 - DNA, 33 bp, Homo sapien
gttttgcaaaaagatacatgagtctaatggtag

SEQ ID NO: 102788 - DNA, 33 bp, Homo sapien
gttttgcaaaaagatatatgagtctaatggtag

SEQ ID NO: 102789 - DNA, 33 bp, Homo sapien
tggagtcagttttccaatcaggggtatccaatc

SEQ ID NO: 102790 - DNA, 33 bp, Homo sapien
tggagtcagttttccagtcaggggtatccaatc

SEQ ID NO: 102791 - DNA, 33 bp, Homo sapien
ggctcttcctctgaaacgtcaggtagtgcaaga

SEQ ID NO: 102792 - DNA, 33 bp, Homo sapien
ggctcttcctctgaaatgtcaggtagtgcaaga

SEQ ID NO: 102793 - DNA, 33 bp, Homo sapien
tgtcctacagaaatagacacaggccgggcgtgg

SEQ ID NO: 102794 - DNA, 33 bp, Homo sapien
tgtcctacagaaataggcacaggccgggcgtgg

SEQ ID NO: 102795 - DNA, 33 bp, Homo sapien
tgcccttgtcaacatcaagcattacccaattct

SEQ ID NO: 102796 - DNA, 33 bp, Homo sapien
tgcccttgtcaacatccagcattacccaattct

SEQ ID NO: 102797 - DNA, 33 bp, Homo sapien
aattaactatggtcacaatagcttaccttagac

SEQ ID NO: 102798 - DNA, 33 bp, Homo sapien
aattaactatggtcacgatagcttaccttagac

SEQ ID NO: 102799 - DNA, 33 bp, Homo sapien
gagagagagagaagaaaacttaagatccactat

SEQ ID NO: 102800 - DNA, 33 bp, Homo sapien
gagagagagagaagaacacttaagatccactat

SEQ ID NO: 102801 - DNA, 33 bp, Homo sapien
atatcagcttataaaagtctcttgccagcctgg

SEQ ID NO: 102802 - DNA, 33 bp, Homo sapien
atatcagcttataaaattctcttgccagcctgg

SEQ ID NO: 102803 - DNA, 33 bp, Homo sapien
aagcacttatgcacccaaaataaagggtctcta

SEQ ID NO: 102804 - DNA, 33 bp, Homo sapien
aagcacttatgcacccgaaataaagggtctcta

SEQ ID NO: 102805 - DNA, 33 bp, Homo sapien
atgtacagctactgagcaagtgcaccaagagga

SEQ ID NO: 102806 - DNA, 33 bp, Homo sapien
atgtacagctactgagtaagtgcaccaagagga

SEQ ID NO: 102807 - DNA, 33 bp, Homo sapien
atcgctgatgctgtacaattcatcattgaggtt

SEQ ID NO: 102808 - DNA, 33 bp, Homo sapien
atcgctgatgctgtaccattcatcattgaggtt

SEQ ID NO: 102809 - DNA, 33 bp, Homo sapien
agctcctgtgcatatcaatggaggcaaggagaa

SEQ ID NO: 102810 - DNA, 33 bp, Homo sapien
agctcctgtgcatatcgatggaggcaaggagaa

SEQ ID NO: 102811 - DNA, 33 bp, Homo sapien
tatcaggctgtatttacggatgttatttttaac

SEQ ID NO: 102812 - DNA, 33 bp, Homo sapien
tatcaggctgtatttatggatgttatttttaac

SEQ ID NO: 102813 - DNA, 33 bp, Homo sapien
tccttattttacgatcactttctgatacccaat

SEQ ID NO: 102814 - DNA, 33 bp, Homo sapien
tccttattttacgatcgctttctgatacccaat

SEQ ID NO: 102815 - DNA, 33 bp, Homo sapien
ctccctgatgttaaaacggcatcacccttgatg

SEQ ID NO: 102816 - DNA, 33 bp, Homo sapien
ctccctgatgttaaaatggcatcacccttgatg

SEQ ID NO: 102817 - DNA, 33 bp, Homo sapien
tataagaacatccatgcagatccaggtctctct

SEQ ID NO: 102818 - DNA, 33 bp, Homo sapien
tataagaacatccatgtagatccaggtctctct

SEQ ID NO: 102819 - DNA, 33 bp, Homo sapien
atttcctactgtttaaagccaagttagatggca

SEQ ID NO: 102820 - DNA, 33 bp, Homo sapien
atttcctactgtttaaggccaagttagatggca

SEQ ID NO: 102821 - DNA, 33 bp, Homo sapien
gtgacctgtaagccaccggtcaacctgcagatt

SEQ ID NO: 102822 - DNA, 33 bp, Homo sapien
gtgacctgtaagccactggtcaacctgcagatt

SEQ ID NO: 102823 - DNA, 33 bp, Homo sapien
ggtcacccaagtttcaaatcctttgcctcaaat

SEQ ID NO: 102824 - DNA, 33 bp, Homo sapien
ggtcacccaagtttcacatcctttgcctcaaat

SEQ ID NO: 102825 - DNA, 33 bp, Homo sapien
cacgcatgagtgtaaacgtgtctcgagtcattt

SEQ ID NO: 102826 - DNA, 33 bp, Homo sapien
cacgcatgagtgtaaatgtgtctcgagtcattt

SEQ ID NO: 102827 - DNA, 33 bp, Homo sapien
agatagcatttgtaccccaaggtcagtggccca

SEQ ID NO: 102828 - DNA, 33 bp, Homo sapien
agatagcatttgtacctcaaggtcagtggccca

SEQ ID NO: 102829 - DNA, 33 bp, Homo sapien
caaggtcagtggcccaacaagctgaatatttca

SEQ ID NO: 102830 - DNA, 33 bp, Homo sapien
caaggtcagtggcccagcaagctgaatatttca

SEQ ID NO: 102831 - DNA, 33 bp, Homo sapien
ttgtatatggaaagacaaagatttcagatgggc

SEQ ID NO: 102832 - DNA, 33 bp, Homo sapien
ttgtatatggaaagacgaagatttcagatgggc

SEQ ID NO: 102833 - DNA, 33 bp, Homo sapien
ggctccagcctacggaacacatgataaataact

SEQ ID NO: 102834 - DNA, 33 bp, Homo sapien
ggctccagcctacggagcacatgataaataact

SEQ ID NO: 102835 - DNA, 33 bp, Homo sapien
cctcaaatagcctgaaaaagagatgaagatcac

SEQ ID NO: 102836 - DNA, 33 bp, Homo sapien
cctcaaatagcctgaacaagagatgaagatcac

SEQ ID NO: 102837 - DNA, 33 bp, Homo sapien
ctgttcataaatgtacagaagagaaaacaggag

SEQ ID NO: 102838 - DNA, 33 bp, Homo sapien
ctgttcataaatgtacggaagagaaaacaggag

SEQ ID NO: 102839 - DNA, 33 bp, Homo sapien
ggtctgtaccgactacaagttttggaaggtcca

SEQ ID NO: 102840 - DNA, 33 bp, Homo sapien
ggtctgtaccgactacgagttttggaaggtcca

SEQ ID NO: 102841 - DNA, 33 bp, Homo sapien
tggcttccggtaggtacgtttttgttattcagt

SEQ ID NO: 102842 - DNA, 33 bp, Homo sapien
tggcttccggtaggtatgtttttgttattcagt

SEQ ID NO: 102843 - DNA, 33 bp, Homo sapien
gtctaatcggtcttgaccaaaacttcatttttt

SEQ ID NO: 102844 - DNA, 33 bp, Homo sapien
gtctaatcggtcttgatcaaaacttcatttttt

SEQ ID NO: 102845 - DNA, 33 bp, Homo sapien
acttccgggcagctcacggctctgctagacagc

SEQ ID NO: 102846 - DNA, 33 bp, Homo sapien
acttccgggcagctcatggctctgctagacagc

SEQ ID NO: 102847 - DNA, 33 bp, Homo sapien; identical to SEQ ID NO: 102845

SEQ ID NO: 102848 - DNA, 33 bp, Homo sapien; identical to SEQ ID NO: 102846

SEQ ID NO: 102849 - DNA, 33 bp, Homo sapien
taattataagatgccaagttttcagtgcaaaca

SEQ ID NO: 102850 - DNA, 33 bp, Homo sapien
taattataagatgccaggttttcagtgcaaaca

SEQ ID NO: 102851 - DNA, 33 bp, Homo sapien
ctcaactctgagagcaagagacctcaagataat

SEQ ID NO: 102852 - DNA, 33 bp, Homo sapien
ctcaactctgagagcaggagacctcaagataat

SEQ ID NO: 102853 - DNA, 33 bp, Homo sapien
aatttcagctggcaaaacacttatggaatggaa

SEQ ID NO: 102854 - DNA, 33 bp, Homo sapien
aatttcagctggcaaagcacttatggaatggaa

SEQ ID NO: 102855 - DNA, 33 bp, Homo sapien
gtggcagatgaacagcaattgtttaaacaaatt

SEQ ID NO: 102856 - DNA, 33 bp, Homo sapien
gtggcagatgaacagctattgtttaaacaaatt

SEQ ID NO: 102857 - DNA, 33 bp, Homo sapien
aatatgtgcaaactctaaaattgtgattatgag

SEQ ID NO: 102858 - DNA, 33 bp, Homo sapien
aatatgtgcaaactctgaaattgtgattatgag

SEQ ID NO: 102859 - DNA, 33 bp, Homo sapien
gtttagaatgttaggacgtaatattggttattt

SEQ ID NO: 102860 - DNA, 33 bp, Homo sapien
gtttagaatgttaggatgtaatattggttattt

SEQ ID NO: 102861 - DNA, 33 bp, Homo sapien
atttgagtgctaaaaacgtctaggtctttatag

SEQ ID NO: 102862 - DNA, 33 bp, Homo sapien
atttgagtgctaaaaatgtctaggtctttatag

SEQ ID NO: 102863 - DNA, 33 bp, Homo sapien
gtggatggtacgaaagcctgtttttagtgaaaa

SEQ ID NO: 102864 - DNA, 33 bp, Homo sapien
gtggatggtacgaaaggctgtttttagtgaaaa

SEQ ID NO: 102865 - DNA, 33 bp, Homo sapien
tgccgtgcctctgaccaaaagagcacgatggag

SEQ ID NO: 102866 - DNA, 33 bp, Homo sapien
tgccgtgcctctgaccgaaagagcacgatggag

SEQ ID NO: 102867 - DNA, 33 bp, Homo sapien
aatttcatgcggatggcatacgaaaaactacaa

SEQ ID NO: 102868 - DNA, 33 bp, Homo sapien
aatttcatgcggatggtatacgaaaaactacaa

SEQ ID NO: 102869 - DNA, 33 bp, Homo sapien
gtgactacaatagtgacctataatcaacctgag

SEQ ID NO: 102870 - DNA, 33 bp, Homo sapien
gtgactacaatagtgatctataatcaacctgag

SEQ ID NO: 102871 - DNA, 33 bp, Homo sapien
aggtctttcttgagctcagatccagaataaagc

SEQ ID NO: 102872 - DNA, 33 bp, Homo sapien
aggtctttcttgagcttagatccagaataaagc

SEQ ID NO: 102873 - DNA, 33 bp, Homo sapien
acaggtgcacccaccaagattgactaactttta

SEQ ID NO: 102874 - DNA, 33 bp, Homo sapien
acaggtgcacccaccatgattgactaactttta

SEQ ID NO: 102875 - DNA, 33 bp, Homo sapien
ttaaaatattgtgtgacaaaggaaaggcgagga

SEQ ID NO: 102876 - DNA, 33 bp, Homo sapien
ttaaaatattgtgtgataaaggaaaggcgagga

SEQ ID NO: 102877 - DNA, 33 bp, Homo sapien
ggacacatggactccccagccagaagaatcatc

SEQ ID NO: 102878 - DNA, 33 bp, Homo sapien
ggacacatggactccctagccagaagaatcatc

SEQ ID NO: 102879 - DNA, 33 bp, Homo sapien
ttccacagtgtatgaacgttacatatttggtca

SEQ ID NO: 102880 - DNA, 33 bp, Homo sapien
ttccacagtgtatgaatgttacatatttggtca

SEQ ID NO: 102881 - DNA, 33 bp, Homo sapien
cagcagacgtttgaaggcaccgggactggaaaa

SEQ ID NO: 102882 - DNA, 33 bp, Homo sapien
cagcagacgtttgaagtcaccgggactggaaaa

SEQ ID NO: 102883 - DNA, 33 bp, Homo sapien
ctatttataatagcaacgagctggaagcaaccc

SEQ ID NO: 102884 - DNA, 33 bp, Homo sapien
ctatttataatagcaatgagctggaagcaaccc

SEQ ID NO: 102885 - DNA, 33 bp, Homo sapien
cgcaggaactgagttaaatttttgaacactcag

SEQ ID NO: 102886 - DNA, 33 bp, Homo sapien
cgcaggaactgagttacatttttgaacactcag

SEQ ID NO: 102887 - DNA, 33 bp, Homo sapien
ctctcctccaagtgcccgagaatgactgagtgt

SEQ ID NO: 102888 - DNA, 33 bp, Homo sapien
ctctcctccaagtgcctgagaatgactgagtgt

SEQ ID NO: 102889 - DNA, 33 bp, Homo sapien
acggctctgtctcctgcagtgatgtcatgctct

SEQ ID NO: 102890 - DNA, 33 bp, Homo sapien
acggctctgtctcctgtagtgatgtcatgctct

SEQ ID NO: 102891 - DNA, 33 bp, Homo sapien
ggagtagggttagtggaatgatggccggaacac

SEQ ID NO: 102892 - DNA, 33 bp, Homo sapien
ggagtagggttagtgggatgatggccggaacac

SEQ ID NO: 102893 - DNA, 33 bp, Homo sapien
aagtcctgactccccaaatagtggttacagcaa

SEQ ID NO: 102894 - DNA, 33 bp, Homo sapien
aagtcctgactccccagatagtggttacagcaa

SEQ ID NO: 102895 - DNA, 33 bp, Homo sapien
gccgcaaaccattggccgagttgtgaacacatt

SEQ ID NO: 102896 - DNA, 33 bp, Homo sapien
gccgcaaaccattggctgagttgtgaacacatt

SEQ ID NO: 102897 - DNA, 33 bp, Homo sapien
cttcatccggcttgttcaaaaccagtagttgtg

SEQ ID NO: 102898 - DNA, 33 bp, Homo sapien
cttcatccggcttgttgaaaaccagtagttgtg

SEQ ID NO: 102899 - DNA, 33 bp, Homo sapien
acactcagggttcaaacgtgaagttacctcaat

SEQ ID NO: 102900 - DNA, 33 bp, Homo sapien
acactcagggttcaaatgtgaagttacctcaat

SEQ ID NO: 102901 - DNA, 33 bp, Homo sapien
tcaaaatgggatcaaacagttgaagctgaaaac

SEQ ID NO: 102902 - DNA, 33 bp, Homo sapien
tcaaaatgggatcaaagagttgaagctgaaaac

SEQ ID NO: 102903 - DNA, 33 bp, Homo sapien
ttttcctaaaatgaacaaatgccctgctataga

SEQ ID NO: 102904 - DNA, 33 bp, Homo sapien
ttttcctaaaatgaaccaatgccctgctataga

SEQ ID NO: 102905 - DNA, 33 bp, Homo sapien
tttccaaattgctatggaccaatcatggctaat

SEQ ID NO: 102906 - DNA, 33 bp, Homo sapien
tttccaaattgctatgtaccaatcatggctaat

SEQ ID NO: 102907 - DNA, 33 bp, Homo sapien
ggactcatgagaaagacgatgttgggatttctg

SEQ ID NO: 102908 - DNA, 33 bp, Homo sapien
ggactcatgagaaagatgatgttgggatttctg

SEQ ID NO: 102909 - DNA, 33 bp, Homo sapien
tcagtccagttcccaacttcacacaggcatcct

SEQ ID NO: 102910 - DNA, 33 bp, Homo sapien
tcagtccagttcccaatttcacacaggcatcct

SEQ ID NO: 102911 - DNA, 33 bp, Homo sapien
aaagcctcaccaatgcaaaaggatcctgaatat

SEQ ID NO: 102912 - DNA, 33 bp, Homo sapien
aaagcctcaccaatgcgaaaggatcctgaatat

SEQ ID NO: 102913 - DNA, 33 bp, Homo sapien
tctgtgggtcataaaacggttggtctgagtcct

SEQ ID NO: 102914 - DNA, 33 bp, Homo sapien
tctgtgggtcataaaatggttggtctgagtcct

SEQ ID NO: 102915 - DNA, 33 bp, Homo sapien
atagaggttgtatctgaacagacaaagttgctg

SEQ ID NO: 102916 - DNA, 33 bp, Homo sapien
atagaggttgtatctggacagacaaagttgctg

SEQ ID NO: 102917 - DNA, 33 bp, Homo sapien
tcagcctctgcagaaccggagaatgagaacgtg

SEQ ID NO: 102918 - DNA, 33 bp, Homo sapien
tcagcctctgcagaactggagaatgagaacgtg

SEQ ID NO: 102919 - DNA, 33 bp, Homo sapien
gctcgagggaccattcacttttgttttcttata

SEQ ID NO: 102920 - DNA, 33 bp, Homo sapien
gctcgagggaccattcgcttttgttttcttata

SEQ ID NO: 102921 - DNA, 33 bp, Homo sapien
cagcagctacgtacataaggtcctgggggctgg

SEQ ID NO: 102922 - DNA, 33 bp, Homo sapien
cagcagctacgtacatgaggtcctgggggctgg

SEQ ID NO: 102923 - DNA, 33 bp, Homo sapien
ttatcttctggttaacaagcactttctgagcac

SEQ ID NO: 102924 - DNA, 33 bp, Homo sapien
ttatcttctggttaacgagcactttctgagcac

SEQ ID NO: 102925 - DNA, 33 bp, Homo sapien
caggggtgtggttgcaccaagcattcagtccag

SEQ ID NO: 102926 - DNA, 33 bp, Homo sapien
caggggtgtggttgcatcaagcattcagtccag

SEQ ID NO: 102927 - DNA, 33 bp, Homo sapien
cacaaagagagggtgacggttgaactgcaacat

SEQ ID NO: 102928 - DNA, 33 bp, Homo sapien
cacaaagagagggtgatggttgaactgcaacat

SEQ ID NO: 102929 - DNA, 33 bp, Homo sapien
catttctgggcacagcagatgtgtcaatccagt

SEQ ID NO: 102930 - DNA, 33 bp, Homo sapien
catttctgggcacagcggatgtgtcaatccagt

SEQ ID NO: 102931 - DNA, 33 bp, Homo sapien
ttcaaacccagcccaaacccaaagagttggcaa

SEQ ID NO: 102932 - DNA, 33 bp, Homo sapien
ttcaaacccagcccaatcccaaagagttggcaa

SEQ ID NO: 102933 - DNA, 33 bp, Homo sapien
gacctcatgccaaaggaataactaatgctggaa

SEQ ID NO: 102934 - DNA, 33 bp, Homo sapien
gacctcatgccaaagggataactaatgctggaa

SEQ ID NO: 102935 - DNA, 33 bp, Homo sapien
caccacaattgagggactaggacagatgttccc

SEQ ID NO: 102936 - DNA, 33 bp, Homo sapien
caccacaattgagggattaggacagatgttccc

SEQ ID NO: 102937 - DNA, 33 bp, Homo sapien
tgaactcctgtacaaacccagtccatttgagga

SEQ ID NO: 102938 - DNA, 33 bp, Homo sapien
tgaactcctgtacaaatccagtccatttgagga

SEQ ID NO: 102939 - DNA, 33 bp, Homo sapien
tgatcactctattaccactttaaaaattcaaca

SEQ ID NO: 102940 - DNA, 33 bp, Homo sapien
tgatcactctattaccgctttaaaaattcaaca

SEQ ID NO: 102941 - DNA, 33 bp, Homo sapien
tgccacttactatccacaggactctgagaaatc

SEQ ID NO: 102942 - DNA, 33 bp, Homo sapien
tgccacttactatccataggactctgagaaatc

SEQ ID NO: 102943 - DNA, 33 bp, Homo sapien
aagagcctggcaagacagattggattagatgtt

SEQ ID NO: 102944 - DNA, 33 bp, Homo sapien
aagagcctggcaagacggattggattagatgtt

SEQ ID NO: 102945 - DNA, 33 bp, Homo sapien
aataatttgtagcacgcaaaagattttattcat

SEQ ID NO: 102946 - DNA, 33 bp, Homo sapien
aataatttgtagcacgtaaaagattttattcat

SEQ ID NO: 102947 - DNA, 33 bp, Homo sapien
aagtcctgctcctttactaaacttgataatata

SEQ ID NO: 102948 - DNA, 33 bp, Homo sapien
aagtcctgctcctttagtaaacttgataatata

SEQ ID NO: 102949 - DNA, 33 bp, Homo sapien
atatacttcattgtgcaatattttaaaaatcat

SEQ ID NO: 102950 - DNA, 33 bp, Homo sapien
atatacttcattgtgcgatattttaaaaatcat

SEQ ID NO: 102951 - DNA, 33 bp, Homo sapien
tagaagttattacatcagaaagttccaatttcc

SEQ ID NO: 102952 - DNA, 33 bp, Homo sapien
tagaagttattacatcggaaagttccaatttcc

SEQ ID NO: 102953 - DNA, 33 bp, Homo sapien
gaacagcatttacaccacttgttaagatcaaaa

SEQ ID NO: 102954 - DNA, 33 bp, Homo sapien
gaacagcatttacacctcttgttaagatcaaaa

SEQ ID NO: 102955 - DNA, 33 bp, Homo sapien
ggctcacaagaacctaaccttgaatatcgccta

SEQ ID NO: 102956 - DNA, 33 bp, Homo sapien
ggctcacaagaacctatccttgaatatcgccta

SEQ ID NO: 102957 - DNA, 33 bp, Homo sapien
tttgactgttacaggacgagaattactatctcc

SEQ ID NO: 102958 - DNA, 33 bp, Homo sapien
tttgactgttacaggatgagaattactatctcc

SEQ ID NO: 102959 - DNA, 33 bp, Homo sapien
ggcaaaaagtacctaaccttgaagttgtaaaat

SEQ ID NO: 102960 - DNA, 33 bp, Homo sapien
ggcaaaaagtacctaatcttgaagttgtaaaat

SEQ ID NO: 102961 - DNA, 33 bp, Homo sapien
ctttctccctctgtatcagccagagccaagcag

SEQ ID NO: 102962 - DNA, 33 bp, Homo sapien
ctttctccctctgtatgagccagagccaagcag

SEQ ID NO: 102963 - DNA, 33 bp, Homo sapien
tcaaaacactgattcaagagaaacatgaaaaca

SEQ ID NO: 102964 - DNA, 33 bp, Homo sapien
tcaaaacactgattcacgagaaacatgaaaaca

SEQ ID NO: 102965 - DNA, 33 bp, Homo sapien
gataatgttactaacccactttgattgggcagc

SEQ ID NO: 102966 - DNA, 33 bp, Homo sapien
gataatgttactaacctactttgattgggcagc

SEQ ID NO: 102967 - DNA, 33 bp, Homo sapien
ggcaggaacatgatcccgaaaattaagggtgag

SEQ ID NO: 102968 - DNA, 33 bp, Homo sapien
ggcaggaacatgatcctgaaaattaagggtgag

SEQ ID NO: 102969 - DNA, 33 bp, Homo sapien
gaaatgagaagagaaaccacaaataagggaaga

SEQ ID NO: 102970 - DNA, 33 bp, Homo sapien
gaaatgagaagagaaatcacaaataagggaaga

SEQ ID NO: 102971 - DNA, 33 bp, Homo sapien
ttgaaagatctaaaccactgacagagattgttc

SEQ ID NO: 102972 - DNA, 33 bp, Homo sapien
ttgaaagatctaaaccgctgacagagattgttc

SEQ ID NO: 102973 - DNA, 33 bp, Homo sapien
aagtggaatctaactaagcgttccccccctttt

SEQ ID NO: 102974 - DNA, 33 bp, Homo sapien
aagtggaatctaactaggcgttccccccctttt

SEQ ID NO: 102975 - DNA, 33 bp, Homo sapien
tctacaaaaactacacagctaacatcatactta

SEQ ID NO: 102976 - DNA, 33 bp, Homo sapien
tctacaaaaactacacggctaacatcatactta

SEQ ID NO: 102977 - DNA, 33 bp, Homo sapien
gaagtcagaacatttaagcaactctgtagagaa

SEQ ID NO: 102978 - DNA, 33 bp, Homo sapien
gaagtcagaacatttaggcaactctgtagagaa

SEQ ID NO: 102979 - DNA, 33 bp, Homo sapien
actagagtgaccataacacacgttgtctaaact

SEQ ID NO: 102980 - DNA, 33 bp, Homo sapien
actagagtgaccataatacacgttgtctaaact

SEQ ID NO: 102981 - DNA, 33 bp, Homo sapien
tagaagagagtattatcacttaacgtgccaaga

SEQ ID NO: 102982 - DNA, 33 bp, Homo sapien
tagaagagagtattattacttaacgtgccaaga

SEQ ID NO: 102983 - DNA, 33 bp, Homo sapien
acctatcttgtagttaataacatgtgctagcat

SEQ ID NO: 102984 - DNA, 33 bp, Homo sapien
acctatcttgtagttagtaacatgtgctagcat

SEQ ID NO: 102985 - DNA, 33 bp, Homo sapien
gaagctgcagatcttcacggtgattgttacagc

SEQ ID NO: 102986 - DNA, 33 bp, Homo sapien
gaagctgcagatcttcgcggtgattgttacagc

SEQ ID NO: 102987 - DNA, 33 bp, Homo sapien
tttataatgattatgtgaaaggtcatattcctc

SEQ ID NO: 102988 - DNA, 33 bp, Homo sapien
tttataatgattatgttaaaggtcatattcctc

SEQ ID NO: 102989 - DNA, 33 bp, Homo sapien
tacaacttaggtgacgccctactcttatgctct

SEQ ID NO: 102990 - DNA, 33 bp, Homo sapien
tacaacttaggtgacgtcctactcttatgctct

SEQ ID NO: 102991 - DNA, 33 bp, Homo sapien
cgtagataggtggctaccgatatttgtcactat

SEQ ID NO: 102992 - DNA, 33 bp, Homo sapien
cgtagataggtggctatcgatatttgtcactat

SEQ ID NO: 102993 - DNA, 33 bp, Homo sapien
gaagacttaaagactgcagaaatctgaaagtat

SEQ ID NO: 102994 - DNA, 33 bp, Homo sapien
gaagacttaaagactgtagaaatctgaaagtat

SEQ ID NO: 102995 - DNA, 33 bp, Homo sapien
aaaagctgaaataatccgaagtttactacgtgt

SEQ ID NO: 102996 - DNA, 33 bp, Homo sapien
aaaagctgaaataatctgaagtttactacgtgt

SEQ ID NO: 102997 - DNA, 33 bp, Homo sapien
aggaatgctgctgagaccccagaactataccac

SEQ ID NO: 102998 - DNA, 33 bp, Homo sapien
aggaatgctgctgagatcccagaactataccac

SEQ ID NO: 102999 - DNA, 33 bp, Homo sapien
aaaagtctgggtgaacagtgggctacaggaatg

SEQ ID NO: 103000 - DNA, 33 bp, Homo sapien
aaaagtctgggtgaacggtgggctacaggaatg

SEQ ID NO: 103001 - DNA, 33 bp, Homo sapien
ggctgcaatacagtgccgaatgcaaatcagagt

SEQ ID NO: 103002 - DNA, 33 bp, Homo sapien
ggctgcaatacagtgctgaatgcaaatcagagt

SEQ ID NO: 103003 - DNA, 33 bp, Homo sapien
ccccatgggagtcagacgtgttcacctgtatac

SEQ ID NO: 103004 - DNA, 33 bp, Homo sapien
ccccatgggagtcagatgtgttcacctgtatac

SEQ ID NO: 103005 - DNA, 33 bp, Homo sapien
attgcaagtcttgagacgtgtagggcaatcttg

SEQ ID NO: 103006 - DNA, 33 bp, Homo sapien
attgcaagtcttgagatgtgtagggcaatcttg

SEQ ID NO: 103007 - DNA, 33 bp, Homo sapien
atgctaagtgaaaggagcagacataaaaggcta

SEQ ID NO: 103008 - DNA, 33 bp, Homo sapien
atgctaagtgaaaggatcagacataaaaggcta

SEQ ID NO: 103009 - DNA, 33 bp, Homo sapien
atatgactaacaagccgcttttttaatacaaat

SEQ ID NO: 103010 - DNA, 33 bp, Homo sapien
atatgactaacaagcctcttttttaatacaaat

SEQ ID NO: 103011 - DNA, 33 bp, Homo sapien
aagtatctctgctctagcaagaaggcaagtccc

SEQ ID NO: 103012 - DNA, 33 bp, Homo sapien
aagtatctctgctctatcaagaaggcaagtccc

SEQ ID NO: 103013 - DNA, 33 bp, Homo sapien
taacttggaagagagtcaatttgtctacccagt

SEQ ID NO: 103014 - DNA, 33 bp, Homo sapien
taacttggaagagagttaatttgtctacccagt

SEQ ID NO: 103015 - DNA, 33 bp, Homo sapien
taatagctttgcaattgaagaaccaaataagaa

SEQ ID NO: 103016 - DNA, 33 bp, Homo sapien
taatagctttgcaatttaagaaccaaataagaa

SEQ ID NO: 103017 - DNA, 33 bp, Homo sapien
catcacttcaaaaggacagtcaaatatcagaat

SEQ ID NO: 103018 - DNA, 33 bp, Homo sapien
catcacttcaaaaggatagtcaaatatcagaat

SEQ ID NO: 103019 - DNA, 33 bp, Homo sapien
taggcccttgtctccaactcaaacccaagaata

SEQ ID NO: 103020 - DNA, 33 bp, Homo sapien
taggcccttgtctccagctcaaacccaagaata

SEQ ID NO: 103021 - DNA, 33 bp, Homo sapien
tcctttaggagacaagacattttgaatggcaat

SEQ ID NO: 103022 - DNA, 33 bp, Homo sapien
tcctttaggagacaagtcattttgaatggcaat

SEQ ID NO: 103023 - DNA, 33 bp, Homo sapien
tagctagtgtcttgaaagggcaacatgataacc

SEQ ID NO: 103024 - DNA, 33 bp, Homo sapien
tagctagtgtcttgaaggggcaacatgataacc

SEQ ID NO: 103025 - DNA, 33 bp, Homo sapien
atattcctttcctgtaacgcaacccagcatttg

SEQ ID NO: 103026 - DNA, 33 bp, Homo sapien
atattcctttcctgtagcgcaacccagcatttg

SEQ ID NO: 103027 - DNA, 33 bp, Homo sapien
tattgcatgatattgacgtttgggtttctaatg

SEQ ID NO: 103028 - DNA, 33 bp, Homo sapien
tattgcatgatattgatgtttgggtttctaatg

SEQ ID NO: 103029 - DNA, 33 bp, Homo sapien
ttctaacgtgtgactgcagattaaaagaaacat

SEQ ID NO: 103030 - DNA, 33 bp, Homo sapien
ttctaacgtgtgactgtagattaaaagaaacat

SEQ ID NO: 103031 - DNA, 33 bp, Homo sapien
gcctggcaatctaagagaattgttcatattatt

SEQ ID NO: 103032 - DNA, 33 bp, Homo sapien
gcctggcaatctaagataattgttcatattatt

SEQ ID NO: 103033 - DNA, 33 bp, Homo sapien
cacaagcatagtcaatcaaaactggatgaggac

SEQ ID NO: 103034 - DNA, 33 bp, Homo sapien
cacaagcatagtcaatgaaaactggatgaggac

SEQ ID NO: 103035 - DNA, 33 bp, Homo sapien
aagcctaaagtttggcggcaagaaaacaatata

SEQ ID NO: 103036 - DNA, 33 bp, Homo sapien
aagcctaaagtttggctgcaagaaaacaatata

SEQ ID NO: 103037 - DNA, 33 bp, Homo sapien
caggtataaatgcatccaccggtttaaacccgc

SEQ ID NO: 103038 - DNA, 33 bp, Homo sapien
caggtataaatgcatcgaccggtttaaacccgc

SEQ ID NO: 103039 - DNA, 33 bp, Homo sapien
gagctcaaattagtaccctgagtgtttctactt

SEQ ID NO: 103040 - DNA, 33 bp, Homo sapien
gagctcaaattagtacgctgagtgtttctactt

SEQ ID NO: 103041 - DNA, 33 bp, Homo sapien
ctgggtggtgaactaacaagggctcagagtatt

SEQ ID NO: 103042 - DNA, 33 bp, Homo sapien
ctgggtggtgaactaataagggctcagagtatt

SEQ ID NO: 103043 - DNA, 33 bp, Homo sapien
gcatttgagaagaagccgagctattggaactgg

SEQ ID NO: 103044 - DNA, 33 bp, Homo sapien
gcatttgagaagaagctgagctattggaactgg

SEQ ID NO: 103045 - DNA, 33 bp, Homo sapien
gtttctttaactctccaaggtatagtttcataa

SEQ ID NO: 103046 - DNA, 33 bp, Homo sapien
gtttctttaactctccgaggtatagtttcataa

SEQ ID NO: 103047 - DNA, 33 bp, Homo sapien
gacacgatataggtgactacaacataagcaaag

SEQ ID NO: 103048 - DNA, 33 bp, Homo sapien
gacacgatataggtgattacaacataagcaaag

SEQ ID NO: 103049 - DNA, 33 bp, Homo sapien
atccaaatgattgttaaagtgaggacttgagtt

SEQ ID NO: 103050 - DNA, 33 bp, Homo sapien
atccaaatgattgttagagtgaggacttgagtt

SEQ ID NO: 103051 - DNA, 33 bp, Homo sapien
atcatttggatagagaagactgcatctaaacaa

SEQ ID NO: 103052 - DNA, 33 bp, Homo sapien
atcatttggatagagacgactgcatctaaacaa

SEQ ID NO: 103053 - DNA, 33 bp, Homo sapien
aatggctggaacaccacgtgagctgatgggaag

SEQ ID NO: 103054 - DNA, 33 bp, Homo sapien
aatggctggaacaccatgtgagctgatgggaag

SEQ ID NO: 103055 - DNA, 33 bp, Homo sapien
ctcgcttaaggtcttcgaaggtgcggtatttat

SEQ ID NO: 103056 - DNA, 33 bp, Homo sapien
ctcgcttaaggtcttctaaggtgcggtatttat

SEQ ID NO: 103057 - DNA, 33 bp, Homo sapien
ggcaagatgttgtccactcgcaggatttacatt

SEQ ID NO: 103058 - DNA, 33 bp, Homo sapien
ggcaagatgttgtccattcgcaggatttacatt

SEQ ID NO: 103059 - DNA, 33 bp, Homo sapien
gacctaacacagctgaatacctggagcttttcc

SEQ ID NO: 103060 - DNA, 33 bp, Homo sapien
gacctaacacagctgagtacctggagcttttcc

SEQ ID NO: 103061 - DNA, 33 bp, Homo sapien
gggcatgaggtgcaaccgttatcatttatggct

SEQ ID NO: 103062 - DNA, 33 bp, Homo sapien
gggcatgaggtgcaactgttatcatttatggct

SEQ ID NO: 103063 - DNA, 33 bp, Homo sapien
agccctcaataagagcagaaactatgcaaagga

SEQ ID NO: 103064 - DNA, 33 bp, Homo sapien
agccctcaataagagcggaaactatgcaaagga

SEQ ID NO: 103065 - DNA, 33 bp, Homo sapien
actcaggtggcagagaaataaacccaaacatga

SEQ ID NO: 103066 - DNA, 33 bp, Homo sapien
actcaggtggcagagagataaacccaaacatga

SEQ ID NO: 103067 - DNA, 33 bp, Homo sapien
ttactaataaaataacacgaacagtgctggagt

SEQ ID NO: 103068 - DNA, 33 bp, Homo sapien
ttactaataaaataacgcgaacagtgctggagt

SEQ ID NO: 103069 - DNA, 33 bp, Homo sapien
tttaatgctgagtttaaaactggaattcagcaa

SEQ ID NO: 103070 - DNA, 33 bp, Homo sapien
tttaatgctgagtttagaactggaattcagcaa

SEQ ID NO: 103071 - DNA, 33 bp, Homo sapien
tctgtctgagatatggaaggaactcaacttcag

SEQ ID NO: 103072 - DNA, 33 bp, Homo sapien
tctgtctgagatatggtaggaactcaacttcag

SEQ ID NO: 103073 - DNA, 33 bp, Homo sapien
ccccatgaatctgagcaagaccttttgggctgt

SEQ ID NO: 103074 - DNA, 33 bp, Homo sapien
ccccatgaatctgagccagaccttttgggctgt

SEQ ID NO: 103075 - DNA, 33 bp, Homo sapien
gtggcctacctgggaccatgcgcaatgccatgt

SEQ ID NO: 103076 - DNA, 33 bp, Homo sapien
gtggcctacctgggactatgcgcaatgccatgt

SEQ ID NO: 103077 - DNA, 33 bp, Homo sapien
attttctcatcattttaaaaaagctacatcata

SEQ ID NO: 103078 - DNA, 33 bp, Homo sapien
attttctcatcatttttaaaaagctacatcata

SEQ ID NO: 103079 - DNA, 33 bp, Homo sapien
aattcagtattggaaaagggttgaatgaggtga

SEQ ID NO: 103080 - DNA, 33 bp, Homo sapien
aattcagtattggaaaggggttgaatgaggtga

SEQ ID NO: 103081 - DNA, 33 bp, Homo sapien
gctgtgaggcaactaacattgtaaccatttgta

SEQ ID NO: 103082 - DNA, 33 bp, Homo sapien
gctgtgaggcaactaatattgtaaccatttgta

SEQ ID NO: 103083 - DNA, 33 bp, Homo sapien
tccaacgtatttccccacgctagattcacttag

SEQ ID NO: 103084 - DNA, 33 bp, Homo sapien
tccaacgtatttccccgcgctagattcacttag

SEQ ID NO: 103085 - DNA, 33 bp, Homo sapien
gccttaagtctcaaccacaggctccaacgcagc

SEQ ID NO: 103086 - DNA, 33 bp, Homo sapien
gccttaagtctcaaccgcaggctccaacgcagc

SEQ ID NO: 103087 - DNA, 33 bp, Homo sapien
ttttgtcatgagaaaactcacaaatgtaggaaa

SEQ ID NO: 103088 - DNA, 33 bp, Homo sapien
ttttgtcatgagaaaattcacaaatgtaggaaa

SEQ ID NO: 103089 - DNA, 33 bp, Homo sapien
tgttaacatcatagacaagagtgtaaaatacaa

SEQ ID NO: 103090 - DNA, 33 bp, Homo sapien
tgttaacatcatagacgagagtgtaaaatacaa

SEQ ID NO: 103091 - DNA, 33 bp, Homo sapien
gagccacacgactacacaaaatgcacgttagtg

SEQ ID NO: 103092 - DNA, 33 bp, Homo sapien
gagccacacgactacataaaatgcacgttagtg

SEQ ID NO: 103093 - DNA, 33 bp, Homo sapien
ggccccctatgctcaacttacctgacctctgaa

SEQ ID NO: 103094 - DNA, 33 bp, Homo sapien
ggccccctatgctcaagttacctgacctctgaa

SEQ ID NO: 103095 - DNA, 33 bp, Homo sapien
gactgaattcataaacccctactgaaactaaca

SEQ ID NO: 103096 - DNA, 33 bp, Homo sapien
gactgaattcataaactcctactgaaactaaca

SEQ ID NO: 103097 - DNA, 33 bp, Homo sapien
ttcagctttcaccaaacacttgttatgtgggat

SEQ ID NO: 103098 - DNA, 33 bp, Homo sapien
ttcagctttcaccaaatacttgttatgtgggat

SEQ ID NO: 103099 - DNA, 33 bp, Homo sapien
aaccaatagacctgaaaacgtctgatgttaatt

SEQ ID NO: 103100 - DNA, 33 bp, Homo sapien
aaccaatagacctgaagacgtctgatgttaatt

SEQ ID NO: 103101 - DNA, 33 bp, Homo sapien
aatgtttgctataggacacaggcaaaaaaacaa

SEQ ID NO: 103102 - DNA, 33 bp, Homo sapien
aatgtttgctataggatacaggcaaaaaaacaa

SEQ ID NO: 103103 - DNA, 33 bp, Homo sapien
cagagagaaatgatgaactattcatgatgaaat

SEQ ID NO: 103104 - DNA, 33 bp, Homo sapien
cagagagaaatgatgagctattcatgatgaaat

SEQ ID NO: 103105 - DNA, 33 bp, Homo sapien
gcagaatcacctactccatttaaatgtgttcga

SEQ ID NO: 103106 - DNA, 33 bp, Homo sapien
gcagaatcacctactctatttaaatgtgttcga

SEQ ID NO: 103107 - DNA, 33 bp, Homo sapien
gtgaggggaggtcacactgaaacagaagttagg

SEQ ID NO: 103108 - DNA, 33 bp, Homo sapien
gtgaggggaggtcacattgaaacagaagttagg

SEQ ID NO: 103109 - DNA, 33 bp, Homo sapien
ttgcttctcctctcaccccagtctctaagctcc

SEQ ID NO: 103110 - DNA, 33 bp, Homo sapien
ttgcttctcctctcactccagtctctaagctcc

SEQ ID NO: 103111 - DNA, 33 bp, Homo sapien
tagtgtttctttacaccggcaacaaattatcca

SEQ ID NO: 103112 - DNA, 33 bp, Homo sapien
tagtgtttctttacactggcaacaaattatcca

SEQ ID NO: 103113 - DNA, 33 bp, Homo sapien
aataagtggacttgagaacagatcatttgaaat

SEQ ID NO: 103114 - DNA, 33 bp, Homo sapien
aataagtggacttgagcacagatcatttgaaat

SEQ ID NO: 103115 - DNA, 33 bp, Homo sapien
gagccagaaattctgacgctaaagaatacaatg

SEQ ID NO: 103116 - DNA, 33 bp, Homo sapien
gagccagaaattctgatgctaaagaatacaatg

SEQ ID NO: 103117 - DNA, 33 bp, Homo sapien
aaacacagatctctaaacaactcaactaaatca

SEQ ID NO: 103118 - DNA, 33 bp, Homo sapien
aaacacagatctctaagcaactcaactaaatca

SEQ ID NO: 103119 - DNA, 33 bp, Homo sapien
caccacatctaatggaccaggtatctgagtgta

SEQ ID NO: 103120 - DNA, 33 bp, Homo sapien
caccacatctaatggatcaggtatctgagtgta

SEQ ID NO: 103121 - DNA, 33 bp, Homo sapien
cagctctctctcctgaacagtctcattaaaggg

SEQ ID NO: 103122 - DNA, 33 bp, Homo sapien
cagctctctctcctgagcagtctcattaaaggg

SEQ ID NO: 103123 - DNA, 33 bp, Homo sapien
atagtcctgacatagacggattgtgtgctgact

SEQ ID NO: 103124 - DNA, 33 bp, Homo sapien
atagtcctgacatagatggattgtgtgctgact

SEQ ID NO: 103125 - DNA, 33 bp, Homo sapien
aatgttacatcaacacagcgtataaaagcaaca

SEQ ID NO: 103126 - DNA, 33 bp, Homo sapien
aatgttacatcaacacggcgtataaaagcaaca

SEQ ID NO: 103127 - DNA, 33 bp, Homo sapien
ggctcttcaacttggagagaatactaggatctg

SEQ ID NO: 103128 - DNA, 33 bp, Homo sapien
ggctcttcaacttggatagaatactaggatctg

SEQ ID NO: 103129 - DNA, 33 bp, Homo sapien
ctgattggatgagacccacctataataccaaat

SEQ ID NO: 103130 - DNA, 33 bp, Homo sapien
ctgattggatgagacctacctataataccaaat

SEQ ID NO: 103131 - DNA, 33 bp, Homo sapien
gcaagtccaaaattcacaggaccggctggcagg

SEQ ID NO: 103132 - DNA, 33 bp, Homo sapien
gcaagtccaaaattcataggaccggctggcagg

SEQ ID NO: 103133 - DNA, 33 bp, Homo sapien
tgaagtgagtgagaaaataatatctgtcacttg

SEQ ID NO: 103134 - DNA, 33 bp, Homo sapien
tgaagtgagtgagaaagtaatatctgtcacttg

SEQ ID NO: 103135 - DNA, 33 bp, Homo sapien
ccaccagggacactgacgatggtaattcaggta

SEQ ID NO: 103136 - DNA, 33 bp, Homo sapien
ccaccagggacactgatgatggtaattcaggta

SEQ ID NO: 103137 - DNA, 33 bp, Homo sapien
gtgcctgctgcttccaaccactttgacactcca

SEQ ID NO: 103138 - DNA, 33 bp, Homo sapien
gtgcctgctgcttccacccactttgacactcca

SEQ ID NO: 103139 - DNA, 33 bp, Homo sapien
tctgctctatgtacaagaattttttgtcatgcc

SEQ ID NO: 103140 - DNA, 33 bp, Homo sapien
tctgctctatgtacaataattttttgtcatgcc

SEQ ID NO: 103141 - DNA, 33 bp, Homo sapien
gtttcaagtgaggccccaaagaaatagctagaa

SEQ ID NO: 103142 - DNA, 33 bp, Homo sapien
gtttcaagtgaggcccgaaagaaatagctagaa

SEQ ID NO: 103143 - DNA, 33 bp, Homo sapien
gacaacatagtaaaatcatctggaagtggtaga

SEQ ID NO: 103144 - DNA, 33 bp, Homo sapien
gacaacatagtaaaatgatctggaagtggtaga

SEQ ID NO: 103145 - DNA, 33 bp, Homo sapien
agctgcaatgtattgacatttttacttactctc

SEQ ID NO: 103146 - DNA, 33 bp, Homo sapien
agctgcaatgtattgatatttttacttactctc

SEQ ID NO: 103147 - DNA, 33 bp, Homo sapien
catgataatccacttccacttcatgaatagtaa

SEQ ID NO: 103148 - DNA, 33 bp, Homo sapien
catgataatccacttcgacttcatgaatagtaa

SEQ ID NO: 103149 - DNA, 33 bp, Homo sapien
tgctatgtgcttttaaacaactagctcctgcgt

SEQ ID NO: 103150 - DNA, 33 bp, Homo sapien
tgctatgtgcttttaatcaactagctcctgcgt

SEQ ID NO: 103151 - DNA, 33 bp, Homo sapien
ttcatttgttgcccagacacattttatttttat

SEQ ID NO: 103152 - DNA, 33 bp, Homo sapien
ttcatttgttgcccagccacattttatttttat

SEQ ID NO: 103153 - DNA, 33 bp, Homo sapien
atgcaatactgtaaaccaggcttcttggaatta

SEQ ID NO: 103154 - DNA, 33 bp, Homo sapien
atgcaatactgtaaacgaggcttcttggaatta

SEQ ID NO: 103155 - DNA, 33 bp, Homo sapien
gtccacctcaaggaaaatcacagttgtgtttct

SEQ ID NO: 103156 - DNA, 33 bp, Homo sapien
gtccacctcaaggaaagtcacagttgtgtttct

SEQ ID NO: 103157 - DNA, 33 bp, Homo sapien
tgggattccagaaaaactcaagaccaaagctac

SEQ ID NO: 103158 - DNA, 33 bp, Homo sapien
tgggattccagaaaaattcaagaccaaagctac

SEQ ID NO: 103159 - DNA, 33 bp, Homo sapien
aaccacatgtccaacaatgaatgaatgaataag

SEQ ID NO: 103160 - DNA, 33 bp, Homo sapien
aaccacatgtccaacagtgaatgaatgaataag

SEQ ID NO: 103161 - DNA, 33 bp, Homo sapien
ctgaggaaagttaggaaaggaaagctggccaaa

SEQ ID NO: 103162 - DNA, 33 bp, Homo sapien
ctgaggaaagttaggagaggaaagctggccaaa

SEQ ID NO: 103163 - DNA, 33 bp, Homo sapien
atatggaagaggccccagcatgacaagtttcgg

SEQ ID NO: 103164 - DNA, 33 bp, Homo sapien
atatggaagaggccccggcatgacaagtttcgg

SEQ ID NO: 103165 - DNA, 33 bp, Homo sapien
tctcaggccccacacccgatctactgcatcaga

SEQ ID NO: 103166 - DNA, 33 bp, Homo sapien
tctcaggccccacacctgatctactgcatcaga

SEQ ID NO: 103167 - DNA, 33 bp, Homo sapien
ctatttatgtaagtagaataaagagagagagaa

SEQ ID NO: 103168 - DNA, 33 bp, Homo sapien
ctatttatgtaagtaggataaagagagagagaa

SEQ ID NO: 103169 - DNA, 33 bp, Homo sapien
cattccgctctactaacgaggctgctggcaagc

SEQ ID NO: 103170 - DNA, 33 bp, Homo sapien
cattccgctctactaaggaggctgctggcaagc

SEQ ID NO: 103171 - DNA, 33 bp, Homo sapien
aaattgcctggcaaaacgttaactctcaaatct

SEQ ID NO: 103172 - DNA, 33 bp, Homo sapien
aaattgcctggcaaaatgttaactctcaaatct

SEQ ID NO: 103173 - DNA, 33 bp, Homo sapien
cagaaagaaattattaagctttatctgctatat

SEQ ID NO: 103174 - DNA, 33 bp, Homo sapien
cagaaagaaattattatgctttatctgctatat

SEQ ID NO: 103175 - DNA, 33 bp, Homo sapien
ggtcattggaaagcaaccactgggtttggggat

SEQ ID NO: 103176 - DNA, 33 bp, Homo sapien
ggtcattggaaagcaatcactgggtttggggat

SEQ ID NO: 103177 - DNA, 33 bp, Homo sapien
catgtctattttaagaagcacttatgaaactga

SEQ ID NO: 103178 - DNA, 33 bp, Homo sapien
catgtctattttaagaggcacttatgaaactga

SEQ ID NO: 103179 - DNA, 33 bp, Homo sapien
ctaagtgcagataatacgacaaaaagagctaaa

SEQ ID NO: 103180 - DNA, 33 bp, Homo sapien
ctaagtgcagataatatgacaaaaagagctaaa

SEQ ID NO: 103181 - DNA, 33 bp, Homo sapien
gttaataaaatagctcgagctctcctaacttaa

SEQ ID NO: 103182 - DNA, 33 bp, Homo sapien
gttaataaaatagctctagctctcctaacttaa

SEQ ID NO: 103183 - DNA, 33 bp, Homo sapien
ctgtactttaaaccacagattggcatttaaaaa

SEQ ID NO: 103184 - DNA, 33 bp, Homo sapien
ctgtactttaaaccacggattggcatttaaaaa

SEQ ID NO: 103185 - DNA, 33 bp, Homo sapien
tcatgcaaatgaggtgcagaactaatgcttcta

SEQ ID NO: 103186 - DNA, 33 bp, Homo sapien
tcatgcaaatgaggtgtagaactaatgcttcta

SEQ ID NO: 103187 - DNA, 33 bp, Homo sapien
aaagaatggtgaagaaatcatcaaagatataat

SEQ ID NO: 103188 - DNA, 33 bp, Homo sapien
aaagaatggtgaagaagtcatcaaagatataat

SEQ ID NO: 103189 - DNA, 33 bp, Homo sapien
atccttgagaaagtcaatccttcttttctcttt

SEQ ID NO: 103190 - DNA, 33 bp, Homo sapien
atccttgagaaagtcagtccttcttttctcttt

SEQ ID NO: 103191 - DNA, 33 bp, Homo sapien
tgggcaaattagtctcacggttttctctatggt

SEQ ID NO: 103192 - DNA, 33 bp, Homo sapien
tgggcaaattagtctcccggttttctctatggt

SEQ ID NO: 103193 - DNA, 33 bp, Homo sapien
aatttgttgccaataaaatttgagctttcagat

SEQ ID NO: 103194 - DNA, 33 bp, Homo sapien
aatttgttgccaataacatttgagctttcagat

SEQ ID NO: 103195 - DNA, 33 bp, Homo sapien
ttataatcacttctcacgtacactctcaacttt

SEQ ID NO: 103196 - DNA, 33 bp, Homo sapien
ttataatcacttctcatgtacactctcaacttt

SEQ ID NO: 103197 - DNA, 33 bp, Homo sapien
gtattgattaaagccaaaggcgaaggccacatt

SEQ ID NO: 103198 - DNA, 33 bp, Homo sapien
gtattgattaaagccacaggcgaaggccacatt

SEQ ID NO: 103199 - DNA, 33 bp, Homo sapien
ttcattatgtgcaaagcctcctgactgaaaatc

SEQ ID NO: 103200 - DNA, 33 bp, Homo sapien
ttcattatgtgcaaaggctcctgactgaaaatc

SEQ ID NO: 103201 - DNA, 33 bp, Homo sapien
gacagacaaagaaaaacagagtacctaagtagc

SEQ ID NO: 103202 - DNA, 33 bp, Homo sapien
gacagacaaagaaaaatagagtacctaagtagc

SEQ ID NO: 103203 - DNA, 33 bp, Homo sapien
taaaatatatacaatcgctgtgttttggattta

SEQ ID NO: 103204 - DNA, 33 bp, Homo sapien
taaaatatatacaatctctgtgttttggattta

SEQ ID NO: 103205 - DNA, 33 bp, Homo sapien
agggattaaagatggccaactagctggatctgg

SEQ ID NO: 103206 - DNA, 33 bp, Homo sapien
agggattaaagatggcgaactagctggatctgg

SEQ ID NO: 103207 - DNA, 33 bp, Homo sapien
gtgcccagcttctgtaccacctgaaaaacccac

SEQ ID NO: 103208 - DNA, 33 bp, Homo sapien
gtgcccagcttctgtatcacctgaaaaacccac

SEQ ID NO: 103209 - DNA, 33 bp, Homo sapien
aatgcaagactccctgcagcagaaagcaaggct

SEQ ID NO: 103210 - DNA, 33 bp, Homo sapien
aatgcaagactccctggagcagaaagcaaggct

SEQ ID NO: 103211 - DNA, 33 bp, Homo sapien
aagatgtttctatatgaatgggcattgatactg

SEQ ID NO: 103212 - DNA, 33 bp, Homo sapien
aagatgtttctatatggatgggcattgatactg

SEQ ID NO: 103213 - DNA, 33 bp, Homo sapien
acagagccaaaagaaaataaatttgtgttgttt

SEQ ID NO: 103214 - DNA, 33 bp, Homo sapien
acagagccaaaagaaagtaaatttgtgttgttt

SEQ ID NO: 103215 - DNA, 33 bp, Homo sapien
attcttaccttgataccacacatctggtataat

SEQ ID NO: 103216 - DNA, 33 bp, Homo sapien
attcttaccttgatactacacatctggtataat

SEQ ID NO: 103217 - DNA, 33 bp, Homo sapien
agcaccgagctaaatggaatattttcctacaaa

SEQ ID NO: 103218 - DNA, 33 bp, Homo sapien
agcaccgagctaaatgtaatattttcctacaaa

SEQ ID NO: 103219 - DNA, 33 bp, Homo sapien
ccaatcacaagccctaggttgtattaccacccg

SEQ ID NO: 103220 - DNA, 33 bp, Homo sapien
ccaatcacaagccctatgttgtattaccacccg

SEQ ID NO: 103221 - DNA, 33 bp, Homo sapien
ctcaatcatgcctatgcagtgaagcgttgataa

SEQ ID NO: 103222 - DNA, 33 bp, Homo sapien
ctcaatcatgcctatgtagtgaagcgttgataa

SEQ ID NO: 103223 - DNA, 33 bp, Homo sapien
gtgtgacagactaaggaaggctcaatactggga

SEQ ID NO: 103224 - DNA, 33 bp, Homo sapien
gtgtgacagactaaggcaggctcaatactggga

SEQ ID NO: 103225 - DNA, 33 bp, Homo sapien
tcacttcctcagtagaacaaagtgccacagcag

SEQ ID NO: 103226 - DNA, 33 bp, Homo sapien
tcacttcctcagtagatcaaagtgccacagcag

SEQ ID NO: 103227 - DNA, 33 bp, Homo sapien
gttatagtaattcatcaaatggcactgttgatt

SEQ ID NO: 103228 - DNA, 33 bp, Homo sapien
gttatagtaattcatcgaatggcactgttgatt

SEQ ID NO: 103229 - DNA, 33 bp, Homo sapien
ctttgttcatctctcaaagcaagacaatcacaa

SEQ ID NO: 103230 - DNA, 33 bp, Homo sapien
ctttgttcatctctcacagcaagacaatcacaa

SEQ ID NO: 103231 - DNA, 33 bp, Homo sapien
ggagttgcatacaaaccatagaactgttactct

SEQ ID NO: 103232 - DNA, 33 bp, Homo sapien
ggagttgcatacaaactatagaactgttactct

SEQ ID NO: 103233 - DNA, 33 bp, Homo sapien
gctctggagcatcacagaatcagtctccccttg

SEQ ID NO: 103234 - DNA, 33 bp, Homo sapien
gctctggagcatcacataatcagtctccccttg

SEQ ID NO: 103235 - DNA, 33 bp, Homo sapien
gtgagtcctattgaaccctgcagacaaacccct

SEQ ID NO: 103236 - DNA, 33 bp, Homo sapien
gtgagtcctattgaacgctgcagacaaacccct

SEQ ID NO: 103237 - DNA, 33 bp, Homo sapien
aggtccccagctaataaatgttgcatcccagga

SEQ ID NO: 103238 - DNA, 33 bp, Homo sapien
aggtccccagctaatacatgttgcatcccagga

SEQ ID NO: 103239 - DNA, 33 bp, Homo sapien
agagggtgtaatgttacggaggccaagagaaga

SEQ ID NO: 103240 - DNA, 33 bp, Homo sapien
agagggtgtaatgttatggaggccaagagaaga

SEQ ID NO: 103241 - DNA, 33 bp, Homo sapien
aaaaatacttaagatacgaacctctcagatttt

SEQ ID NO: 103242 - DNA, 33 bp, Homo sapien
aaaaatacttaagatatgaacctctcagatttt

SEQ ID NO: 103243 - DNA, 33 bp, Homo sapien
tatcttaagtaaaacaagtcaaacacagaaaga

SEQ ID NO: 103244 - DNA, 33 bp, Homo sapien
tatcttaagtaaaacaggtcaaacacagaaaga

SEQ ID NO: 103245 - DNA, 33 bp, Homo sapien
ataatggataccattcgcaacaagtcaatccaa

SEQ ID NO: 103246 - DNA, 33 bp, Homo sapien
ataatggataccattctcaacaagtcaatccaa

SEQ ID NO: 103247 - DNA, 33 bp, Homo sapien
atgaggaattgactgcacttccactaagtccta

SEQ ID NO: 103248 - DNA, 33 bp, Homo sapien
atgaggaattgactgctcttccactaagtccta

SEQ ID NO: 103249 - DNA, 33 bp, Homo sapien
cttggccatgctaggagatgaataatgcctgtt

SEQ ID NO: 103250 - DNA, 33 bp, Homo sapien
cttggccatgctaggatatgaataatgcctgtt

SEQ ID NO: 103251 - DNA, 33 bp, Homo sapien
tctcagggtttcggtacggaaatattgaaatat

SEQ ID NO: 103252 - DNA, 33 bp, Homo sapien
tctcagggtttcggtatggaaatattgaaatat

SEQ ID NO: 103253 - DNA, 33 bp, Homo sapien
gtgacaggcttaaggagcatgaagattgtcagt

SEQ ID NO: 103254 - DNA, 33 bp, Homo sapien
gtgacaggcttaaggatcatgaagattgtcagt

SEQ ID NO: 103255 - DNA, 33 bp, Homo sapien
tcttctgaactccatgaatacatcttactgtcc

SEQ ID NO: 103256 - DNA, 33 bp, Homo sapien
tcttctgaactccatgcatacatcttactgtcc

SEQ ID NO: 103257 - DNA, 33 bp, Homo sapien
aggcagcaagtagtgcacatagagttatccgga

SEQ ID NO: 103258 - DNA, 33 bp, Homo sapien
aggcagcaagtagtgcgcatagagttatccgga

SEQ ID NO: 103259 - DNA, 33 bp, Homo sapien
caccactccgacaagaatatgactgtggggatg

SEQ ID NO: 103260 - DNA, 33 bp, Homo sapien
caccactccgacaagagtatgactgtggggatg

SEQ ID NO: 103261 - DNA, 33 bp, Homo sapien
gggtctgagttgaggccaatggcttatttgtta

SEQ ID NO: 103262 - DNA, 33 bp, Homo sapien
gggtctgagttgaggctaatggcttatttgtta

SEQ ID NO: 103263 - DNA, 33 bp, Homo sapien
cattccttgtcctgcgcattctaaccacagagg

SEQ ID NO: 103264 - DNA, 33 bp, Homo sapien
cattccttgtcctgcgtattctaaccacagagg

SEQ ID NO: 103265 - DNA, 33 bp, Homo sapien
catttacctccagggaaaaatgtcacttccatt

SEQ ID NO: 103266 - DNA, 33 bp, Homo sapien
catttacctccagggagaaatgtcacttccatt

SEQ ID NO: 103267 - DNA, 33 bp, Homo sapien
gatcatgataacattacaatagcaacctgatga

SEQ ID NO: 103268 - DNA, 33 bp, Homo sapien
gatcatgataacattataatagcaacctgatga

SEQ ID NO: 103269 - DNA, 33 bp, Homo sapien
agcaacctgatgataacgaatgcaacataggtc

SEQ ID NO: 103270 - DNA, 33 bp, Homo sapien
agcaacctgatgataatgaatgcaacataggtc

SEQ ID NO: 103271 - DNA, 33 bp, Homo sapien
gcaagtcttgccctgaatacgttccttaatgac

SEQ ID NO: 103272 - DNA, 33 bp, Homo sapien
gcaagtcttgccctgagtacgttccttaatgac

SEQ ID NO: 103273 - DNA, 33 bp, Homo sapien
aaccaaccaaacaaaacgccacctttatgttgg

SEQ ID NO: 103274 - DNA, 33 bp, Homo sapien
aaccaaccaaacaaaatgccacctttatgttgg

SEQ ID NO: 103275 - DNA, 33 bp, Homo sapien
tattaaaattaattaccaagcacacacaggcta

SEQ ID NO: 103276 - DNA, 33 bp, Homo sapien
tattaaaattaattactaagcacacacaggcta

SEQ ID NO: 103277 - DNA, 33 bp, Homo sapien
tattgtgtgcccaagaaggaggtgctgatgcta

SEQ ID NO: 103278 - DNA, 33 bp, Homo sapien
tattgtgtgcccaagatggaggtgctgatgcta

SEQ ID NO: 103279 - DNA, 33 bp, Homo sapien
aaaggagagctgtaggaacttaaaaactgtgtc

SEQ ID NO: 103280 - DNA, 33 bp, Homo sapien
aaaggagagctgtagggacttaaaaactgtgtc

SEQ ID NO: 103281 - DNA, 33 bp, Homo sapien
cagcctgacttggaagaagggttatcgattcca

SEQ ID NO: 103282 - DNA, 33 bp, Homo sapien
cagcctgacttggaaggagggttatcgattcca

SEQ ID NO: 103283 - DNA, 33 bp, Homo sapien
ggcctgtgggtatacaaaggcaagagttggggt

SEQ ID NO: 103284 - DNA, 33 bp, Homo sapien
ggcctgtgggtatacagaggcaagagttggggt

SEQ ID NO: 103285 - DNA, 33 bp, Homo sapien
gaattccaacctcaagacccaggactctgctgc

SEQ ID NO: 103286 - DNA, 33 bp, Homo sapien
gaattccaacctcaaggcccaggactctgctgc

SEQ ID NO: 103287 - DNA, 33 bp, Homo sapien
ctttctacatcattgaaagcaagtgggagctcc

SEQ ID NO: 103288 - DNA, 33 bp, Homo sapien
ctttctacatcattgatagcaagtgggagctcc

SEQ ID NO: 103289 - DNA, 33 bp, Homo sapien
gatgattaagatgagaagcctacagtgaaatca

SEQ ID NO: 103290 - DNA, 33 bp, Homo sapien
gatgattaagatgagacgcctacagtgaaatca

SEQ ID NO: 103291 - DNA, 33 bp, Homo sapien
agcatcacaccattcaaggtgaaagcactcgca

SEQ ID NO: 103292 - DNA, 33 bp, Homo sapien
agcatcacaccattcagggtgaaagcactcgca

SEQ ID NO: 103293 - DNA, 33 bp, Homo sapien
gacccagggaaatgccagataccctcagagtgt

SEQ ID NO: 103294 - DNA, 33 bp, Homo sapien
gacccagggaaatgccggataccctcagagtgt

SEQ ID NO: 103295 - DNA, 33 bp, Homo sapien
ttttcgataccctgataagcacatggatcacag

SEQ ID NO: 103296 - DNA, 33 bp, Homo sapien
ttttcgataccctgatgagcacatggatcacag

SEQ ID NO: 103297 - DNA, 33 bp, Homo sapien
agcacacagtctggaaacggaggcagatgcatc

SEQ ID NO: 103298 - DNA, 33 bp, Homo sapien
agcacacagtctggaagcggaggcagatgcatc

SEQ ID NO: 103299 - DNA, 33 bp, Homo sapien
gactaagacacttgtgaagaaactggtttaatg

SEQ ID NO: 103300 - DNA, 33 bp, Homo sapien
gactaagacacttgtggagaaactggtttaatg

SEQ ID NO: 103301 - DNA, 33 bp, Homo sapien
acattttccatcaacaccaaaatgtagcaggag

SEQ ID NO: 103302 - DNA, 33 bp, Homo sapien
acattttccatcaacagcaaaatgtagcaggag

SEQ ID NO: 103303 - DNA, 33 bp, Homo sapien
agcatgagttcagaaacagcgtataatagtccc

SEQ ID NO: 103304 - DNA, 33 bp, Homo sapien
agcatgagttcagaaatagcgtataatagtccc

SEQ ID NO: 103305 - DNA, 33 bp, Homo sapien
gcccaagtctgtcttaaaatgggtccaatagga

SEQ ID NO: 103306 - DNA, 33 bp, Homo sapien
gcccaagtctgtcttacaatgggtccaatagga

SEQ ID NO: 103307 - DNA, 33 bp, Homo sapien
atgtacactgcagctacgtttctaggcccagaa

SEQ ID NO: 103308 - DNA, 33 bp, Homo sapien
atgtacactgcagctatgtttctaggcccagaa

SEQ ID NO: 103309 - DNA, 33 bp, Homo sapien
gcatttgatgactgcactaatctttgtaattcc

SEQ ID NO: 103310 - DNA, 33 bp, Homo sapien
gcatttgatgactgcattaatctttgtaattcc

SEQ ID NO: 103311 - DNA, 33 bp, Homo sapien
gttaagagtgagtgacaaattgttacatcttat

SEQ ID NO: 103312 - DNA, 33 bp, Homo sapien
gttaagagtgagtgacgaattgttacatcttat

SEQ ID NO: 103313 - DNA, 33 bp, Homo sapien
gggaccaggctagtcacgtctggctgcgcccct

SEQ ID NO: 103314 - DNA, 33 bp, Homo sapien
gggaccaggctagtcatgtctggctgcgcccct

SEQ ID NO: 103315 - DNA, 33 bp, Homo sapien
tggaagctctccaagacagactattttttgtaa

SEQ ID NO: 103316 - DNA, 33 bp, Homo sapien
tggaagctctccaagatagactattttttgtaa

SEQ ID NO: 103317 - DNA, 33 bp, Homo sapien
tgtcaacaagtcttacaaggcctgacaggagcc

SEQ ID NO: 103318 - DNA, 33 bp, Homo sapien
tgtcaacaagtcttacgaggcctgacaggagcc

SEQ ID NO: 103319 - DNA, 33 bp, Homo sapien
cctattttatggatgacaagaaaagccccaagc

SEQ ID NO: 103320 - DNA, 33 bp, Homo sapien
cctattttatggatgagaagaaaagccccaagc

SEQ ID NO: 103321 - DNA, 33 bp, Homo sapien
taaccctgagaatgcaagcctcaaggtggggag

SEQ ID NO: 103322 - DNA, 33 bp, Homo sapien
taaccctgagaatgcaggcctcaaggtggggag

SEQ ID NO: 103323 - DNA, 33 bp, Homo sapien
ccattcctttacacaacagggataactaaaatg

SEQ ID NO: 103324 - DNA, 33 bp, Homo sapien
ccattcctttacacaagagggataactaaaatg

SEQ ID NO: 103325 - DNA, 33 bp, Homo sapien
aatgtagagatgggataaaaaagcaaagaacag

SEQ ID NO: 103326 - DNA, 33 bp, Homo sapien
aatgtagagatgggattaaaaagcaaagaacag

SEQ ID NO: 103327 - DNA, 33 bp, Homo sapien
acaaataatgaaaggccaagtgggaagagacag

SEQ ID NO: 103328 - DNA, 33 bp, Homo sapien
acaaataatgaaaggcgaagtgggaagagacag

SEQ ID NO: 103329 - DNA, 33 bp, Homo sapien
tttcaaaccaccttgacgtcactaacgtagaac

SEQ ID NO: 103330 - DNA, 33 bp, Homo sapien
tttcaaaccaccttgatgtcactaacgtagaac

SEQ ID NO: 103331 - DNA, 33 bp, Homo sapien
aataatgaggaaaacacaggcgaaaatttaatg

SEQ ID NO: 103332 - DNA, 33 bp, Homo sapien
aataatgaggaaaacataggcgaaaatttaatg

SEQ ID NO: 103333 - DNA, 33 bp, Homo sapien
tctggttccctaacaaacaggttgaattcaggt

SEQ ID NO: 103334 - DNA, 33 bp, Homo sapien
tctggttccctaacaagcaggttgaattcaggt

SEQ ID NO: 103335 - DNA, 33 bp, Homo sapien
gcaaatgttctgtttaggaagacctctacagca

SEQ ID NO: 103336 - DNA, 33 bp, Homo sapien
gcaaatgttctgtttatgaagacctctacagca

SEQ ID NO: 103337 - DNA, 33 bp, Homo sapien
acaagcaactaagatacccagtaaggatgctgt

SEQ ID NO: 103338 - DNA, 33 bp, Homo sapien
acaagcaactaagatatccagtaaggatgctgt

SEQ ID NO: 103339 - DNA, 33 bp, Homo sapien
tttgtacgttgaaatccaatctcaaatgtaatg

SEQ ID NO: 103340 - DNA, 33 bp, Homo sapien
tttgtacgttgaaatctaatctcaaatgtaatg

SEQ ID NO: 103341 - DNA, 33 bp, Homo sapien
ctaagcctttataccaatcagattttaactcgc

SEQ ID NO: 103342 - DNA, 33 bp, Homo sapien
ctaagcctttataccagtcagattttaactcgc

SEQ ID NO: 103343 - DNA, 33 bp, Homo sapien
aaagagttagaaaaatcaaacagtatctgtgaa

SEQ ID NO: 103344 - DNA, 33 bp, Homo sapien
aaagagttagaaaaatgaaacagtatctgtgaa

SEQ ID NO: 103345 - DNA, 33 bp, Homo sapien
cctttggcaattcccactctgaccgagatccgt

SEQ ID NO: 103346 - DNA, 33 bp, Homo sapien
cctttggcaattcccattctgaccgagatccgt

SEQ ID NO: 103347 - DNA, 33 bp, Homo sapien
atgccaattgacaatacgaaaactcagtgtaac

SEQ ID NO: 103348 - DNA, 33 bp, Homo sapien
atgccaattgacaatatgaaaactcagtgtaac

SEQ ID NO: 103349 - DNA, 33 bp, Homo sapien
atacatgtttgtgaaacggtcactgttggtctt

SEQ ID NO: 103350 - DNA, 33 bp, Homo sapien
atacatgtttgtgaaatggtcactgttggtctt

SEQ ID NO: 103351 - DNA, 33 bp, Homo sapien
aacaatcagaaggttaaattaacatacaggttg

SEQ ID NO: 103352 - DNA, 33 bp, Homo sapien
aacaatcagaaggttacattaacatacaggttg

SEQ ID NO: 103353 - DNA, 33 bp, Homo sapien
agttaaatatgaaaaccgatgctggattcattt

SEQ ID NO: 103354 - DNA, 33 bp, Homo sapien
agttaaatatgaaaactgatgctggattcattt

SEQ ID NO: 103355 - DNA, 33 bp, Homo sapien
atagtgaagggaataccgatttcgtatgtctgc

SEQ ID NO: 103356 - DNA, 33 bp, Homo sapien
atagtgaagggaatactgatttcgtatgtctgc

SEQ ID NO: 103357 - DNA, 33 bp, Homo sapien
tatgcttgaagttccaatcatcttagaaagcaa

SEQ ID NO: 103358 - DNA, 33 bp, Homo sapien
tatgcttgaagttccagtcatcttagaaagcaa

SEQ ID NO: 103359 - DNA, 33 bp, Homo sapien
ttttccatgtaaggttcaaatttcactttgtcc

SEQ ID NO: 103360 - DNA, 33 bp, Homo sapien
ttttccatgtaaggtttaaatttcactttgtcc

SEQ ID NO: 103361 - DNA, 33 bp, Homo sapien
acaaatcagttacttacggagatggtagtttct

SEQ ID NO: 103362 - DNA, 33 bp, Homo sapien
acaaatcagttacttatggagatggtagtttct

SEQ ID NO: 103363 - DNA, 33 bp, Homo sapien
aaggcgatatgggcaaatacacacacatctagg

SEQ ID NO: 103364 - DNA, 33 bp, Homo sapien
aaggcgatatgggcaagtacacacacatctagg

SEQ ID NO: 103365 - DNA, 33 bp, Homo sapien
atggaaaatagttgccaaagcatacaggaaata

SEQ ID NO: 103366 - DNA, 33 bp, Homo sapien
atggaaaatagttgccgaagcatacaggaaata

SEQ ID NO: 103367 - DNA, 33 bp, Homo sapien
aatttgtctgtcaaacccaagggagatggtttt

SEQ ID NO: 103368 - DNA, 33 bp, Homo sapien
aatttgtctgtcaaactcaagggagatggtttt

SEQ ID NO: 103369 - DNA, 33 bp, Homo sapien
aaagagatgagatctaagcaattcaggtttcct

SEQ ID NO: 103370 - DNA, 33 bp, Homo sapien
aaagagatgagatctaggcaattcaggtttcct

SEQ ID NO: 103371 - DNA, 33 bp, Homo sapien
cattgtgtcagtggcaacttgttttatgtgctg

SEQ ID NO: 103372 - DNA, 33 bp, Homo sapien
cattgtgtcagtggcatcttgttttatgtgctg

SEQ ID NO: 103373 - DNA, 33 bp, Homo sapien
gttctgttgatgactacgtctgatttggaagcc

SEQ ID NO: 103374 - DNA, 33 bp, Homo sapien
gttctgttgatgactatgtctgatttggaagcc

SEQ ID NO: 103375 - DNA, 33 bp, Homo sapien
tggtccagcaggtgcacaaggccatttcaaaac

SEQ ID NO: 103376 - DNA, 33 bp, Homo sapien
tggtccagcaggtgcataaggccatttcaaaac

SEQ ID NO: 103377 - DNA, 33 bp, Homo sapien
gtcctaattagggaaaaggaatcaagctggcag

SEQ ID NO: 103378 - DNA, 33 bp, Homo sapien
gtcctaattagggaaacggaatcaagctggcag

SEQ ID NO: 103379 - DNA, 33 bp, Homo sapien
atcaatctgcaacaaaaggagaaagaaacagac

SEQ ID NO: 103380 - DNA, 33 bp, Homo sapien
atcaatctgcaacaaagggagaaagaaacagac

SEQ ID NO: 103381 - DNA, 33 bp, Homo sapien
aggagtctgagcaggaacatctaccaagctagg

SEQ ID NO: 103382 - DNA, 33 bp, Homo sapien
aggagtctgagcaggagcatctaccaagctagg

SEQ ID NO: 103383 - DNA, 33 bp, Homo sapien
catcataccatgatgactcaatttttaaaacag

SEQ ID NO: 103384 - DNA, 33 bp, Homo sapien
catcataccatgatgattcaatttttaaaacag

SEQ ID NO: 103385 - DNA, 33 bp, Homo sapien
ggtgatttcagttccccgccatcaagtcacctt

SEQ ID NO: 103386 - DNA, 33 bp, Homo sapien
ggtgatttcagttcccggccatcaagtcacctt

SEQ ID NO: 103387 - DNA, 33 bp, Homo sapien
caaacacaagttttcactcagcaacagtttttt

SEQ ID NO: 103388 - DNA, 33 bp, Homo sapien
caaacacaagttttcattcagcaacagtttttt

SEQ ID NO: 103389 - DNA, 33 bp, Homo sapien
gcaaaatacaatctgaagcccaaaaagtcaaac

SEQ ID NO: 103390 - DNA, 33 bp, Homo sapien
gcaaaatacaatctgaggcccaaaaagtcaaac

SEQ ID NO: 103391 - DNA, 33 bp, Homo sapien
agcagttgcttttcccacttcacattctttgca

SEQ ID NO: 103392 - DNA, 33 bp, Homo sapien
agcagttgcttttcccgcttcacattctttgca

SEQ ID NO: 103393 - DNA, 33 bp, Homo sapien
tctcccttagtgatgacacaactgataatgctt

SEQ ID NO: 103394 - DNA, 33 bp, Homo sapien
tctcccttagtgatgagacaactgataatgctt

SEQ ID NO: 103395 - DNA, 33 bp, Homo sapien
tggctttcagtttcaccaatgatttcctctgct

SEQ ID NO: 103396 - DNA, 33 bp, Homo sapien
tggctttcagtttcactaatgatttcctctgct

SEQ ID NO: 103397 - DNA, 33 bp, Homo sapien
gctgaaagctggctaactgactgcatactcggg

SEQ ID NO: 103398 - DNA, 33 bp, Homo sapien
gctgaaagctggctaagtgactgcatactcggg

SEQ ID NO: 103399 - DNA, 33 bp, Homo sapien
ccctttctcttgtactcacaaagctcaactgta

SEQ ID NO: 103400 - DNA, 33 bp, Homo sapien
ccctttctcttgtactgacaaagctcaactgta

SEQ ID NO: 103401 - DNA, 33 bp, Homo sapien
ctagaaacctaaagcagcatcataggggccgca

SEQ ID NO: 103402 - DNA, 33 bp, Homo sapien
ctagaaacctaaagcatcatcataggggccgca

SEQ ID NO: 103403 - DNA, 33 bp, Homo sapien
catcataggggccgcacatggaggtatggttct

SEQ ID NO: 103404 - DNA, 33 bp, Homo sapien
catcataggggccgcagatggaggtatggttct

SEQ ID NO: 103405 - DNA, 33 bp, Homo sapien
accagcatgggatcccaagtagactgactgcac

SEQ ID NO: 103406 - DNA, 33 bp, Homo sapien
accagcatgggatccccagtagactgactgcac

SEQ ID NO: 103407 - DNA, 33 bp, Homo sapien
ccaccctggaattctgaagtctttaacaagtta

SEQ ID NO: 103408 - DNA, 33 bp, Homo sapien
ccaccctggaattctggagtctttaacaagtta

SEQ ID NO: 103409 - DNA, 33 bp, Homo sapien
atggagaagttggctaagagagatcgactgcag

SEQ ID NO: 103410 - DNA, 33 bp, Homo sapien
atggagaagttggctaggagagatcgactgcag

SEQ ID NO: 103411 - DNA, 33 bp, Homo sapien
gctgatatcatcataaagcactggcatcagcgg

SEQ ID NO: 103412 - DNA, 33 bp, Homo sapien
gctgatatcatcataaggcactggcatcagcgg

SEQ ID NO: 103413 - DNA, 33 bp, Homo sapien
gaactattatcctgaacgcagttccaaacagta

SEQ ID NO: 103414 - DNA, 33 bp, Homo sapien
gaactattatcctgaatgcagttccaaacagta

SEQ ID NO: 103415 - DNA, 33 bp, Homo sapien
atataatgagtacatacacattttccctccctc

SEQ ID NO: 103416 - DNA, 33 bp, Homo sapien
atataatgagtacatatacattttccctccctc

SEQ ID NO: 103417 - DNA, 33 bp, Homo sapien
ctgttactttgtgatacgatttatttcattttt

SEQ ID NO: 103418 - DNA, 33 bp, Homo sapien
ctgttactttgtgatatgatttatttcattttt

SEQ ID NO: 103419 - DNA, 33 bp, Homo sapien
atcgatgggtttcatcaaggtgtgattgggcag

SEQ ID NO: 103420 - DNA, 33 bp, Homo sapien
atcgatgggtttcatcgaggtgtgattgggcag

SEQ ID NO: 103421 - DNA, 33 bp, Homo sapien
tgaaagtgatttgtacccagcacatttgcagtt

SEQ ID NO: 103422 - DNA, 33 bp, Homo sapien
tgaaagtgatttgtactcagcacatttgcagtt

SEQ ID NO: 103423 - DNA, 33 bp, Homo sapien
ggagtagtttttgtaaaagaagagacaatcggc

SEQ ID NO: 103424 - DNA, 33 bp, Homo sapien
ggagtagtttttgtaatagaagagacaatcggc

SEQ ID NO: 103425 - DNA, 33 bp, Homo sapien
ttaccagacattctgaaccctttaaatttgtac

SEQ ID NO: 103426 - DNA, 33 bp, Homo sapien
ttaccagacattctgagccctttaaatttgtac

SEQ ID NO: 103427 - DNA, 33 bp, Homo sapien
agagacaagcactgtaaaaactatgcttcataa

SEQ ID NO: 103428 - DNA, 33 bp, Homo sapien
agagacaagcactgtacaaactatgcttcataa

SEQ ID NO: 103429 - DNA, 33 bp, Homo sapien
gatttcactgataagcaagagaatctccagaag

SEQ ID NO: 103430 - DNA, 33 bp, Homo sapien
gatttcactgataagcgagagaatctccagaag

SEQ ID NO: 103431 - DNA, 33 bp, Homo sapien
gcaaagatgtttacataaatccacttgagatct

SEQ ID NO: 103432 - DNA, 33 bp, Homo sapien
gcaaagatgtttacatcaatccacttgagatct

SEQ ID NO: 103433 - DNA, 33 bp, Homo sapien
ataaagtgaaagtagacgactcttggtgcactg

SEQ ID NO: 103434 - DNA, 33 bp, Homo sapien
ataaagtgaaagtagatgactcttggtgcactg

SEQ ID NO: 103435 - DNA, 33 bp, Homo sapien
ggacgttgaagctttcactgaaaactctagaaa

SEQ ID NO: 103436 - DNA, 33 bp, Homo sapien
ggacgttgaagctttcgctgaaaactctagaaa

SEQ ID NO: 103437 - DNA, 33 bp, Homo sapien
ctagtcattttccttaataagacccttgcacat

SEQ ID NO: 103438 - DNA, 33 bp, Homo sapien
ctagtcattttccttagtaagacccttgcacat

SEQ ID NO: 103439 - DNA, 33 bp, Homo sapien
aaagaatggaacagagaagacgagttctagcca

SEQ ID NO: 103440 - DNA, 33 bp, Homo sapien
aaagaatggaacagaggagacgagttctagcca

SEQ ID NO: 103441 - DNA, 33 bp, Homo sapien
cgtgtagcaagaataactgggattgatgtcagt

SEQ ID NO: 103442 - DNA, 33 bp, Homo sapien
cgtgtagcaagaataattgggattgatgtcagt

SEQ ID NO: 103443 - DNA, 33 bp, Homo sapien
atttcatcaagtttgacgctggtaagctatgta

SEQ ID NO: 103444 - DNA, 33 bp, Homo sapien
atttcatcaagtttgatgctggtaagctatgta

SEQ ID NO: 103445 - DNA, 33 bp, Homo sapien; identical to SEQ ID NO: 103443

SEQ ID NO: 103446 - DNA, 33 bp, Homo sapien; identical to SEQ ID NO: 103444

SEQ ID NO: 103447 - DNA, 33 bp, Homo sapien
aaagcgttttcatgtacatatctctttcaacat

SEQ ID NO: 103448 - DNA, 33 bp, Homo sapien
aaagcgttttcatgtatatatctctttcaacat

SEQ ID NO: 103449 - DNA, 33 bp, Homo sapien
tttgtgccaagaacccaacaaaccagtacagtg

SEQ ID NO: 103450 - DNA, 33 bp, Homo sapien
tttgtgccaagaacccgacaaaccagtacagtg

SEQ ID NO: 103451 - DNA, 33 bp, Homo sapien
ctgagcaaaaatagcaaggaatgtgcaaacaga

SEQ ID NO: 103452 - DNA, 33 bp, Homo sapien
ctgagcaaaaatagcagggaatgtgcaaacaga

SEQ ID NO: 103453 - DNA, 33 bp, Homo sapien
ctgtggaagaccgccaaaagcgaggcgcaattg

SEQ ID NO: 103454 - DNA, 33 bp, Homo sapien
ctgtggaagaccgccagaagcgaggcgcaattg

SEQ ID NO: 103455 - DNA, 33 bp, Homo sapien
ccatccactccaacaaacattttgaagcaaatc

SEQ ID NO: 103456 - DNA, 33 bp, Homo sapien
ccatccactccaacaatcattttgaagcaaatc

SEQ ID NO: 103457 - DNA, 33 bp, Homo sapien
caaacagaagtagaaacaatggtacaatgaact

SEQ ID NO: 103458 - DNA, 33 bp, Homo sapien
caaacagaagtagaaagaatggtacaatgaact

SEQ ID NO: 103459 - DNA, 33 bp, Homo sapien
tgaactgtccttctcaccaatactgtttatgtt

SEQ ID NO: 103460 - DNA, 33 bp, Homo sapien
tgaactgtccttctcagcaatactgtttatgtt

SEQ ID NO: 103461 - DNA, 33 bp, Homo sapien
gaggaatttggaagatcaataacgtacttagca

SEQ ID NO: 103462 - DNA, 33 bp, Homo sapien
gaggaatttggaagattaataacgtacttagca

SEQ ID NO: 103463 - DNA, 33 bp, Homo sapien
acgcccagctgtaaccaatctagctgtttctgc

SEQ ID NO: 103464 - DNA, 33 bp, Homo sapien
acgcccagctgtaaccgatctagctgtttctgc

SEQ ID NO: 103465 - DNA, 33 bp, Homo sapien
ctcacaacccctcaggaatctcaacaaaggctg

SEQ ID NO: 103466 - DNA, 33 bp, Homo sapien
ctcacaacccctcagggatctcaacaaaggctg

SEQ ID NO: 103467 - DNA, 33 bp, Homo sapien
aaagtagagtgtaacactaaatgcctttgatga

SEQ ID NO: 103468 - DNA, 33 bp, Homo sapien
aaagtagagtgtaacattaaatgcctttgatga

SEQ ID NO: 103469 - DNA, 33 bp, Homo sapien
agggacaaagtgaagaactgttatattggttat

SEQ ID NO: 103470 - DNA, 33 bp, Homo sapien
agggacaaagtgaagagctgttatattggttat

SEQ ID NO: 103471 - DNA, 33 bp, Homo sapien
ttttgtctcctttaacccagcctgttgctcaac

SEQ ID NO: 103472 - DNA, 33 bp, Homo sapien
ttttgtctcctttaactcagcctgttgctcaac

SEQ ID NO: 103473 - DNA, 33 bp, Homo sapien
agttaaagtcactccaaattcccaaggcaacct

SEQ ID NO: 103474 - DNA, 33 bp, Homo sapien
agttaaagtcactccagattcccaaggcaacct

SEQ ID NO: 103475 - DNA, 33 bp, Homo sapien
caattgatgcttattaagagaagagatacaaat

SEQ ID NO: 103476 - DNA, 33 bp, Homo sapien
caattgatgcttattacgagaagagatacaaat

SEQ ID NO: 103477 - DNA, 33 bp, Homo sapien
agtaattgtatgtagcactttttcgaagtcctg

SEQ ID NO: 103478 - DNA, 33 bp, Homo sapien
agtaattgtatgtagcgctttttcgaagtcctg

SEQ ID NO: 103479 - DNA, 33 bp, Homo sapien
ggggctaaaggaggggaatgcagcaatatctca

SEQ ID NO: 103480 - DNA, 33 bp, Homo sapien
ggggctaaaggagggggatgcagcaatatctca

SEQ ID NO: 103481 - DNA, 33 bp, Homo sapien
tctaaaaaacaacaacagctgagcgtggtggct

SEQ ID NO: 103482 - DNA, 33 bp, Homo sapien
tctaaaaaacaacaacggctgagcgtggtggct

SEQ ID NO: 103483 - DNA, 33 bp, Homo sapien
gggagaggctctatccaagaatgccagtttgct

SEQ ID NO: 103484 - DNA, 33 bp, Homo sapien
gggagaggctctatccgagaatgccagtttgct

SEQ ID NO: 103485 - DNA, 33 bp, Homo sapien
gggaaggaaatcaaatcaagatgcttcagactg

SEQ ID NO: 103486 - DNA, 33 bp, Homo sapien
gggaaggaaatcaaatgaagatgcttcagactg

SEQ ID NO: 103487 - DNA, 33 bp, Homo sapien
cagtaatcatttgactcagctgagggtcagcca

SEQ ID NO: 103488 - DNA, 33 bp, Homo sapien
cagtaatcatttgacttagctgagggtcagcca

SEQ ID NO: 103489 - DNA, 33 bp, Homo sapien
gctgcatgatatcctacggcagggcacaacttg

SEQ ID NO: 103490 - DNA, 33 bp, Homo sapien
gctgcatgatatcctatggcagggcacaacttg

SEQ ID NO: 103491 - DNA, 33 bp, Homo sapien
cttataaatccactgcaccaattaacaaagcta

SEQ ID NO: 103492 - DNA, 33 bp, Homo sapien
cttataaatccactgcgccaattaacaaagcta

SEQ ID NO: 103493 - DNA, 33 bp, Homo sapien
ccagccaactcttaacaaagtagtattcagcca

SEQ ID NO: 103494 - DNA, 33 bp, Homo sapien
ccagccaactcttaacgaagtagtattcagcca

SEQ ID NO: 103495 - DNA, 33 bp, Homo sapien
gattcccttttccttcaaagagactctctagcc

SEQ ID NO: 103496 - DNA, 33 bp, Homo sapien
gattcccttttccttcgaagagactctctagcc

SEQ ID NO: 103497 - DNA, 33 bp, Homo sapien
gtattcagaatcccaacagaaccagatggccgt

SEQ ID NO: 103498 - DNA, 33 bp, Homo sapien
gtattcagaatcccaagagaaccagatggccgt

SEQ ID NO: 103499 - DNA, 33 bp, Homo sapien
ctaattcaacttgagacgaagaacctggtgttc

SEQ ID NO: 103500 - DNA, 33 bp, Homo sapien
ctaattcaacttgagaggaagaacctggtgttc

SEQ ID NO: 103501 - DNA, 33 bp, Homo sapien
gtgtaggagggttccacattcaccatttcttgc

SEQ ID NO: 103502 - DNA, 33 bp, Homo sapien
gtgtaggagggttccatattcaccatttcttgc

SEQ ID NO: 103503 - DNA, 33 bp, Homo sapien
agtgtttggggttaaacagtggaaagatcacag

SEQ ID NO: 103504 - DNA, 33 bp, Homo sapien
agtgtttggggttaaatagtggaaagatcacag

SEQ ID NO: 103505 - DNA, 33 bp, Homo sapien
tctaccatatataaacaaagaatctttcactcc

SEQ ID NO: 103506 - DNA, 33 bp, Homo sapien
tctaccatatataaacgaagaatctttcactcc

SEQ ID NO: 103507 - DNA, 33 bp, Homo sapien
tgcaactggaaaccaccgatgtgagatgtgggt

SEQ ID NO: 103508 - DNA, 33 bp, Homo sapien
tgcaactggaaaccactgatgtgagatgtgggt

SEQ ID NO: 103509 - DNA, 33 bp, Homo sapien
ggaaaagaaattgcagccatttttatggttgta

SEQ ID NO: 103510 - DNA, 33 bp, Homo sapien
ggaaaagaaattgcagtcatttttatggttgta

SEQ ID NO: 103511 - DNA, 33 bp, Homo sapien
caagctggaagcttgactatgtaaatgccagca

SEQ ID NO: 103512 - DNA, 33 bp, Homo sapien
caagctggaagcttgagtatgtaaatgccagca

SEQ ID NO: 103513 - DNA, 33 bp, Homo sapien
aaacttggatataaacaaaggaataagtagcat

SEQ ID NO: 103514 - DNA, 33 bp, Homo sapien
aaacttggatataaacgaaggaataagtagcat

SEQ ID NO: 103515 - DNA, 33 bp, Homo sapien
taaaatgaaaattatgaaacattggtgacacag

SEQ ID NO: 103516 - DNA, 33 bp, Homo sapien
taaaatgaaaattatggaacattggtgacacag

SEQ ID NO: 103517 - DNA, 33 bp, Homo sapien
gggctgaaaggtctcccgatgggcaacatggtg

SEQ ID NO: 103518 - DNA, 33 bp, Homo sapien
gggctgaaaggtctcctgatgggcaacatggtg

SEQ ID NO: 103519 - DNA, 33 bp, Homo sapien
ttctgagtagttgaaacagactataaaatcagc

SEQ ID NO: 103520 - DNA, 33 bp, Homo sapien
ttctgagtagttgaaagagactataaaatcagc

SEQ ID NO: 103521 - DNA, 33 bp, Homo sapien
aagtatgaatttgatacgtaggcaataggtaag

SEQ ID NO: 103522 - DNA, 33 bp, Homo sapien
aagtatgaatttgatatgtaggcaataggtaag

SEQ ID NO: 103523 - DNA, 33 bp, Homo sapien
cagacgttataaacaaatgtgatagatattaga

SEQ ID NO: 103524 - DNA, 33 bp, Homo sapien
cagacgttataaacaagtgtgatagatattaga

SEQ ID NO: 103525 - DNA, 33 bp, Homo sapien
gttagtgaggaaaggccgatagatactgtaaga

SEQ ID NO: 103526 - DNA, 33 bp, Homo sapien
gttagtgaggaaaggctgatagatactgtaaga

SEQ ID NO: 103527 - DNA, 33 bp, Homo sapien
gaggttcttggttatcacagcatatcctagtcc

SEQ ID NO: 103528 - DNA, 33 bp, Homo sapien
gaggttcttggttatcgcagcatatcctagtcc

SEQ ID NO: 103529 - DNA, 33 bp, Homo sapien
atagataagtaatacacgttgatactgggagtc

SEQ ID NO: 103530 - DNA, 33 bp, Homo sapien
atagataagtaatacatgttgatactgggagtc

SEQ ID NO: 103531 - DNA, 33 bp, Homo sapien
gctgcttttctggaaaatctactgtatattaaa

SEQ ID NO: 103532 - DNA, 33 bp, Homo sapien
gctgcttttctggaaagtctactgtatattaaa

SEQ ID NO: 103533 - DNA, 33 bp, Homo sapien
taccacttttctaccactcatcagctcccggat

SEQ ID NO: 103534 - DNA, 33 bp, Homo sapien
taccacttttctaccattcatcagctcccggat

SEQ ID NO: 103535 - DNA, 33 bp, Homo sapien
tcaaactgaacaagtccatcccttctacatccc

SEQ ID NO: 103536 - DNA, 33 bp, Homo sapien
tcaaactgaacaagtctatcccttctacatccc

SEQ ID NO: 103537 - DNA, 33 bp, Homo sapien
ctcatgcagatcttcccacggctcattaccacc

SEQ ID NO: 103538 - DNA, 33 bp, Homo sapien
ctcatgcagatcttccgacggctcattaccacc

SEQ ID NO: 103539 - DNA, 33 bp, Homo sapien
ctactgcatccaattacatctttaaatccttta

SEQ ID NO: 103540 - DNA, 33 bp, Homo sapien
ctactgcatccaattatatctttaaatccttta

SEQ ID NO: 103541 - DNA, 33 bp, Homo sapien
tgtatccatccctctccagagctagttggtcgg

SEQ ID NO: 103542 - DNA, 33 bp, Homo sapien
tgtatccatccctctctagagctagttggtcgg

SEQ ID NO: 103543 - DNA, 33 bp, Homo sapien
gagtctaaaatcacccaccgtggcaaattcaca

SEQ ID NO: 103544 - DNA, 33 bp, Homo sapien
gagtctaaaatcaccctccgtggcaaattcaca

SEQ ID NO: 103545 - DNA, 33 bp, Homo sapien
aaatccacagcattgaagagacggataaaggaa

SEQ ID NO: 103546 - DNA, 33 bp, Homo sapien
aaatccacagcattgaggagacggataaaggaa

SEQ ID NO: 103547 - DNA, 33 bp, Homo sapien
aaggtgaataccctaacggcagagggaaactct

SEQ ID NO: 103548 - DNA, 33 bp, Homo sapien
aaggtgaataccctaatggcagagggaaactct

SEQ ID NO: 103549 - DNA, 33 bp, Homo sapien
aaaagaaattctcacacgaagccaaatacctga

SEQ ID NO: 103550 - DNA, 33 bp, Homo sapien
aaaagaaattctcacatgaagccaaatacctga

SEQ ID NO: 103551 - DNA, 33 bp, Homo sapien
aaggaggtatggtgtaaagaaggtgaatttttg

SEQ ID NO: 103552 - DNA, 33 bp, Homo sapien
aaggaggtatggtgtagagaaggtgaatttttg

SEQ ID NO: 103553 - DNA, 33 bp, Homo sapien
attttttggcccaagacgattctgcttcttcca

SEQ ID NO: 103554 - DNA, 33 bp, Homo sapien
attttttggcccaagaggattctgcttcttcca

SEQ ID NO: 103555 - DNA, 33 bp, Homo sapien
tgaaaagggctaattacaggacagctggaataa

SEQ ID NO: 103556 - DNA, 33 bp, Homo sapien
tgaaaagggctaattataggacagctggaataa

SEQ ID NO: 103557 - DNA, 33 bp, Homo sapien
gttttgataatgataaagtccagagaaggtaga

SEQ ID NO: 103558 - DNA, 33 bp, Homo sapien
gttttgataatgataaggtccagagaaggtaga

SEQ ID NO: 103559 - DNA, 33 bp, Homo sapien
agtgccccgattatgcagaatacctaagacagc

SEQ ID NO: 103560 - DNA, 33 bp, Homo sapien
agtgccccgattatgcggaatacctaagacagc

SEQ ID NO: 103561 - DNA, 33 bp, Homo sapien
tctcaaactagagacactgatgtttatgaactc

SEQ ID NO: 103562 - DNA, 33 bp, Homo sapien
tctcaaactagagacagtgatgtttatgaactc

SEQ ID NO: 103563 - DNA, 33 bp, Homo sapien
atttcctggatatcaaacttagcaccaccacct

SEQ ID NO: 103564 - DNA, 33 bp, Homo sapien
atttcctggatatcaatcttagcaccaccacct

SEQ ID NO: 103565 - DNA, 33 bp, Homo sapien
cccaggcactgttctaataatttacatatattc

SEQ ID NO: 103566 - DNA, 33 bp, Homo sapien
cccaggcactgttctagtaatttacatatattc

SEQ ID NO: 103567 - DNA, 33 bp, Homo sapien
gtgtgtttttgagtaaaacctgctctggattcc

SEQ ID NO: 103568 - DNA, 33 bp, Homo sapien
gtgtgtttttgagtaatacctgctctggattcc

SEQ ID NO: 103569 - DNA, 33 bp, Homo sapien
tataagcaatggtgcaagtcatcaaaatctgac

SEQ ID NO: 103570 - DNA, 33 bp, Homo sapien
tataagcaatggtgcaggtcatcaaaatctgac

SEQ ID NO: 103571 - DNA, 33 bp, Homo sapien
aaaaccctcagcctggccatgtcaagaataaaa

SEQ ID NO: 103572 - DNA, 33 bp, Homo sapien
aaaaccctcagcctggtcatgtcaagaataaaa

SEQ ID NO: 103573 - DNA, 33 bp, Homo sapien
ctatttatgaagacaacgagagaatgacctcac

SEQ ID NO: 103574 - DNA, 33 bp, Homo sapien
ctatttatgaagacaatgagagaatgacctcac

SEQ ID NO: 103575 - DNA, 33 bp, Homo sapien
cgtctcttagtctcccagagatgagaagatgaa

SEQ ID NO: 103576 - DNA, 33 bp, Homo sapien
cgtctcttagtctcccggagatgagaagatgaa

SEQ ID NO: 103577 - DNA, 33 bp, Homo sapien
taggttacaaccaaaacgttgacatagagtttg

SEQ ID NO: 103578 - DNA, 33 bp, Homo sapien
taggttacaaccaaaatgttgacatagagtttg

SEQ ID NO: 103579 - DNA, 33 bp, Homo sapien
gtatattacaaacagaaatgctgtcatctagaa

SEQ ID NO: 103580 - DNA, 33 bp, Homo sapien
gtatattacaaacagatatgctgtcatctagaa

SEQ ID NO: 103581 - DNA, 33 bp, Homo sapien
cacttacaactctcttcaagaaggaacctgcag

SEQ ID NO: 103582 - DNA, 33 bp, Homo sapien
cacttacaactctcttgaagaaggaacctgcag

SEQ ID NO: 103583 - DNA, 33 bp, Homo sapien
caggattgcaggaagagatgtacaaatctcctt

SEQ ID NO: 103584 - DNA, 33 bp, Homo sapien
caggattgcaggaagatatgtacaaatctcctt

SEQ ID NO: 103585 - DNA, 33 bp, Homo sapien
agagatatgagtttagcagtaaaaattcatatt

SEQ ID NO: 103586 - DNA, 33 bp, Homo sapien
agagatatgagtttaggagtaaaaattcatatt

SEQ ID NO: 103587 - DNA, 33 bp, Homo sapien
gaaggacataagttccagagtgagactacctga

SEQ ID NO: 103588 - DNA, 33 bp, Homo sapien
gaaggacataagttccggagtgagactacctga

SEQ ID NO: 103589 - DNA, 33 bp, Homo sapien
tgaaattcttagttaaagatacgtgttactgaa

SEQ ID NO: 103590 - DNA, 33 bp, Homo sapien
tgaaattcttagttaaggatacgtgttactgaa

SEQ ID NO: 103591 - DNA, 33 bp, Homo sapien
actaggtggggtagaaaggtatatagaacttag

SEQ ID NO: 103592 - DNA, 33 bp, Homo sapien
actaggtggggtagaatggtatatagaacttag

SEQ ID NO: 103593 - DNA, 33 bp, Homo sapien
tacattttgtatcatcacaacttttaacttttt

SEQ ID NO: 103594 - DNA, 33 bp, Homo sapien
tacattttgtatcatcgcaacttttaacttttt

SEQ ID NO: 103595 - DNA, 33 bp, Homo sapien
atttgtggactttcaactctattccattgctct

SEQ ID NO: 103596 - DNA, 33 bp, Homo sapien
atttgtggactttcaattctattccattgctct

SEQ ID NO: 103597 - DNA, 33 bp, Homo sapien
tcctttacgataaaaaccctcatcaaaataggt

SEQ ID NO: 103598 - DNA, 33 bp, Homo sapien
tcctttacgataaaaatcctcatcaaaataggt

SEQ ID NO: 103599 - DNA, 33 bp, Homo sapien
gtgcttacaggtcatagatggattcaaggtttt

SEQ ID NO: 103600 - DNA, 33 bp, Homo sapien
gtgcttacaggtcatatatggattcaaggtttt

SEQ ID NO: 103601 - DNA, 33 bp, Homo sapien
ttgtaatagtgctttacgtggtgtaagttgtat

SEQ ID NO: 103602 - DNA, 33 bp, Homo sapien
ttgtaatagtgctttatgtggtgtaagttgtat

SEQ ID NO: 103603 - DNA, 33 bp, Homo sapien
tatctgagacaattaaatctttagcttctagac

SEQ ID NO: 103604 - DNA, 33 bp, Homo sapien
tatctgagacaattaagtctttagcttctagac

SEQ ID NO: 103605 - DNA, 33 bp, Homo sapien
gacaacagtggagcaagctttttaatgaacttg

SEQ ID NO: 103606 - DNA, 33 bp, Homo sapien
gacaacagtggagcaatctttttaatgaacttg

SEQ ID NO: 103607 - DNA, 33 bp, Homo sapien
tgtacagtactctaaaaatctacaaaggtctag

SEQ ID NO: 103608 - DNA, 33 bp, Homo sapien
tgtacagtactctaaacatctacaaaggtctag

SEQ ID NO: 103609 - DNA, 33 bp, Homo sapien
ttctgataccacactccacagatattttctcac

SEQ ID NO: 103610 - DNA, 33 bp, Homo sapien
ttctgataccacactcgacagatattttctcac

SEQ ID NO: 103611 - DNA, 33 bp, Homo sapien
tccatcaacagacaaacgaataaagaaaatgta

SEQ ID NO: 103612 - DNA, 33 bp, Homo sapien
tccatcaacagacaaatgaataaagaaaatgta

SEQ ID NO: 103613 - DNA, 33 bp, Homo sapien
tgtccataaacaggcacagaaatgcaataaacc

SEQ ID NO: 103614 - DNA, 33 bp, Homo sapien
tgtccataaacaggcagagaaatgcaataaacc

SEQ ID NO: 103615 - DNA, 33 bp, Homo sapien
gtagggagttctgctccacagggttgttaaggt

SEQ ID NO: 103616 - DNA, 33 bp, Homo sapien
gtagggagttctgctctacagggttgttaaggt

SEQ ID NO: 103617 - DNA, 33 bp, Homo sapien
tacatttgttaattccccctgtagttaaatgta

SEQ ID NO: 103618 - DNA, 33 bp, Homo sapien
tacatttgttaattcctcctgtagttaaatgta

SEQ ID NO: 103619 - DNA, 33 bp, Homo sapien
taagaaaagctaacaacgcacatgatgtgaaac

SEQ ID NO: 103620 - DNA, 33 bp, Homo sapien
taagaaaagctaacaatgcacatgatgtgaaac

SEQ ID NO: 103621 - DNA, 33 bp, Homo sapien
gatggatttgaacaggcacccaagactatactg

SEQ ID NO: 103622 - DNA, 33 bp, Homo sapien
gatggatttgaacagggacccaagactatactg

SEQ ID NO: 103623 - DNA, 33 bp, Homo sapien
tatcacattttacacccggtgattcttcaaagc

SEQ ID NO: 103624 - DNA, 33 bp, Homo sapien
tatcacattttacacctggtgattcttcaaagc

SEQ ID NO: 103625 - DNA, 33 bp, Homo sapien
cattgtagatgagagcaaaaagctagctctttt

SEQ ID NO: 103626 - DNA, 33 bp, Homo sapien
cattgtagatgagagcgaaaagctagctctttt

SEQ ID NO: 103627 - DNA, 33 bp, Homo sapien
caacctctgcctgttacgcagctccaaagttgc

SEQ ID NO: 103628 - DNA, 33 bp, Homo sapien
caacctctgcctgttatgcagctccaaagttgc

SEQ ID NO: 103629 - DNA, 33 bp, Homo sapien
tccatatcaccatcagaattttcgtcacaatca

SEQ ID NO: 103630 - DNA, 33 bp, Homo sapien
tccatatcaccatcagcattttcgtcacaatca

SEQ ID NO: 103631 - DNA, 33 bp, Homo sapien
gccattctctggaaaaaatcacacataaggcac

SEQ ID NO: 103632 - DNA, 33 bp, Homo sapien
gccattctctggaaaagatcacacataaggcac

SEQ ID NO: 103633 - DNA, 33 bp, Homo sapien
aggatttaaggcaaataaccttaccagagattc

SEQ ID NO: 103634 - DNA, 33 bp, Homo sapien
aggatttaaggcaaatgaccttaccagagattc

SEQ ID NO: 103635 - DNA, 33 bp, Homo sapien
gttaatgtcctttgtcaacttttttatggtgtt

SEQ ID NO: 103636 - DNA, 33 bp, Homo sapien
gttaatgtcctttgtccacttttttatggtgtt

SEQ ID NO: 103637 - DNA, 33 bp, Homo sapien
agggattgcaaaagaaaaatccttagaggcagc

SEQ ID NO: 103638 - DNA, 33 bp, Homo sapien
agggattgcaaaagaagaatccttagaggcagc

SEQ ID NO: 103639 - DNA, 33 bp, Homo sapien
aacttcagccagatacaatataagataatcatt

SEQ ID NO: 103640 - DNA, 33 bp, Homo sapien
aacttcagccagatacgatataagataatcatt

SEQ ID NO: 103641 - DNA, 33 bp, Homo sapien
gtcagcaggtgatagaacttgccaggactgaat

SEQ ID NO: 103642 - DNA, 33 bp, Homo sapien
gtcagcaggtgatagatcttgccaggactgaat

SEQ ID NO: 103643 - DNA, 33 bp, Homo sapien
gtgtcatccaggaactaaggcctggaacggagg

SEQ ID NO: 103644 - DNA, 33 bp, Homo sapien
gtgtcatccaggaactgaggcctggaacggagg

SEQ ID NO: 103645 - DNA, 33 bp, Homo sapien
ttattagctacaggagacctcactatttggact

SEQ ID NO: 103646 - DNA, 33 bp, Homo sapien
ttattagctacaggagtcctcactatttggact

SEQ ID NO: 103647 - DNA, 33 bp, Homo sapien
gtgcccccatgactatgaaatgatgataagcat

SEQ ID NO: 103648 - DNA, 33 bp, Homo sapien
gtgcccccatgactattaaatgatgataagcat

SEQ ID NO: 103649 - DNA, 33 bp, Homo sapien
tgagctagataaccaacgagagtagcacaaatg

SEQ ID NO: 103650 - DNA, 33 bp, Homo sapien
tgagctagataaccaatgagagtagcacaaatg

SEQ ID NO: 103651 - DNA, 33 bp, Homo sapien
taaataaagtaagccaatcactaaaaacaaata

SEQ ID NO: 103652 - DNA, 33 bp, Homo sapien
taaataaagtaagccagtcactaaaaacaaata

SEQ ID NO: 103653 - DNA, 33 bp, Homo sapien
aaggactaaataacaccggtgaaacttctttgt

SEQ ID NO: 103654 - DNA, 33 bp, Homo sapien
aaggactaaataacacgggtgaaacttctttgt

SEQ ID NO: 103655 - DNA, 33 bp, Homo sapien
tattccaaaggactaccacaaggactaaataac

SEQ ID NO: 103656 - DNA, 33 bp, Homo sapien
tattccaaaggactactacaaggactaaataac

SEQ ID NO: 103657 - DNA, 33 bp, Homo sapien
attattcatttcttcacggttattgaaattggt

SEQ ID NO: 103658 - DNA, 33 bp, Homo sapien
attattcatttcttcatggttattgaaattggt

SEQ ID NO: 103659 - DNA, 33 bp, Homo sapien
tgatgacaaagatttcaaggatcctcagcagcc

SEQ ID NO: 103660 - DNA, 33 bp, Homo sapien
tgatgacaaagatttcgaggatcctcagcagcc

SEQ ID NO: 103661 - DNA, 33 bp, Homo sapien
tgtgtctcagtgtaaacttcttaagattcaacc

SEQ ID NO: 103662 - DNA, 33 bp, Homo sapien
tgtgtctcagtgtaaatttcttaagattcaacc

SEQ ID NO: 103663 - DNA, 33 bp, Homo sapien
tgtgaaatagtctcaaaacaagaaattccaacc

SEQ ID NO: 103664 - DNA, 33 bp, Homo sapien
tgtgaaatagtctcaagacaagaaattccaacc

SEQ ID NO: 103665 - DNA, 33 bp, Homo sapien
tcaaaatgcttaaaaaatgtacttctttcccat

SEQ ID NO: 103666 - DNA, 33 bp, Homo sapien
tcaaaatgcttaaaaagtgtacttctttcccat

SEQ ID NO: 103667 - DNA, 33 bp, Homo sapien
tctttgccaagtcctacatccagaatgatattc

SEQ ID NO: 103668 - DNA, 33 bp, Homo sapien
tctttgccaagtcctatatccagaatgatattc

SEQ ID NO: 103669 - DNA, 33 bp, Homo sapien
tagaaatgtttataaagtgagaaagcatcaaca

SEQ ID NO: 103670 - DNA, 33 bp, Homo sapien
tagaaatgtttataaattgagaaagcatcaaca

SEQ ID NO: 103671 - DNA, 33 bp, Homo sapien
gcatgtggaagactgtaaacttactaaaccaca

SEQ ID NO: 103672 - DNA, 33 bp, Homo sapien
gcatgtggaagactgttaacttactaaaccaca

SEQ ID NO: 103673 - DNA, 33 bp, Homo sapien
ttgttttgaaagctgaaacttctgggtaaacac

SEQ ID NO: 103674 - DNA, 33 bp, Homo sapien
ttgttttgaaagctgagacttctgggtaaacac

SEQ ID NO: 103675 - DNA, 33 bp, Homo sapien
tagcattctagaaaaccgcatggtgtctgctgg

SEQ ID NO: 103676 - DNA, 33 bp, Homo sapien
tagcattctagaaaactgcatggtgtctgctgg

SEQ ID NO: 103677 - DNA, 33 bp, Homo sapien
cattcagtagttggggaccataacaatggaggt

SEQ ID NO: 103678 - DNA, 33 bp, Homo sapien
cattcagtagttgggggccataacaatggaggt

SEQ ID NO: 103679 - DNA, 33 bp, Homo sapien
agtgattgtatatataagcttttcaggtctcag

SEQ ID NO: 103680 - DNA, 33 bp, Homo sapien
agtgattgtatatatacgcttttcaggtctcag

SEQ ID NO: 103681 - DNA, 33 bp, Homo sapien
gaagcgaatctcaaaccaagaaacttcaagcta

SEQ ID NO: 103682 - DNA, 33 bp, Homo sapien
gaagcgaatctcaaacgaagaaacttcaagcta

SEQ ID NO: 103683 - DNA, 33 bp, Homo sapien
tacagactcatgaaccaaagaacaaacttctcc

SEQ ID NO: 103684 - DNA, 33 bp, Homo sapien
tacagactcatgaaccgaagaacaaacttctcc

SEQ ID NO: 103685 - DNA, 33 bp, Homo sapien
ccacaatggactaaagacttaaatcttagacct

SEQ ID NO: 103686 - DNA, 33 bp, Homo sapien
ccacaatggactaaagtcttaaatcttagacct

SEQ ID NO: 103687 - DNA, 33 bp, Homo sapien
aatcacgttctctgccgatagaacttctaccaa

SEQ ID NO: 103688 - DNA, 33 bp, Homo sapien
aatcacgttctctgcctatagaacttctaccaa

SEQ ID NO: 103689 - DNA, 33 bp, Homo sapien
agcagtctagtacaaaaattgggaaaagataga

SEQ ID NO: 103690 - DNA, 33 bp, Homo sapien
agcagtctagtacaaatattgggaaaagataga

SEQ ID NO: 103691 - DNA, 33 bp, Homo sapien
gaaatagcaagagcgaaagaagagtttgcgtga

SEQ ID NO: 103692 - DNA, 33 bp, Homo sapien
gaaatagcaagagcgacagaagagtttgcgtga

SEQ ID NO: 103693 - DNA, 33 bp, Homo sapien
ttcttcggacaaagcaagattaatttcttctga

SEQ ID NO: 103694 - DNA, 33 bp, Homo sapien
ttcttcggacaaagcacgattaatttcttctga

SEQ ID NO: 103695 - DNA, 33 bp, Homo sapien
gattactaagagcacaagtttaaatacctatag

SEQ ID NO: 103696 - DNA, 33 bp, Homo sapien
gattactaagagcacaggtttaaatacctatag

SEQ ID NO: 103697 - DNA, 33 bp, Homo sapien
ggaggcagaggaaaaaaggcactatgctgcatc

SEQ ID NO: 103698 - DNA, 33 bp, Homo sapien
ggaggcagaggaaaaacggcactatgctgcatc

SEQ ID NO: 103699 - DNA, 33 bp, Homo sapien
gtcattgaagaaatgacggacatcactgacact

SEQ ID NO: 103700 - DNA, 33 bp, Homo sapien
gtcattgaagaaatgatggacatcactgacact

SEQ ID NO: 103701 - DNA, 33 bp, Homo sapien
actataattcaaataggcatcagtgataaaaaa

SEQ ID NO: 103702 - DNA, 33 bp, Homo sapien
actataattcaaatagtcatcagtgataaaaaa

SEQ ID NO: 103703 - DNA, 33 bp, Homo sapien
acttgaaaggtgttaacggaaaagatataataa

SEQ ID NO: 103704 - DNA, 33 bp, Homo sapien
acttgaaaggtgttaatggaaaagatataataa

SEQ ID NO: 103705 - DNA, 33 bp, Homo sapien
ccattgatagcaaatactagagttccacaaatt

SEQ ID NO: 103706 - DNA, 33 bp, Homo sapien
ccattgatagcaaatattagagttccacaaatt

SEQ ID NO: 103707 - DNA, 33 bp, Homo sapien
cataaacagaattaaaaacaacaatcacatgat

SEQ ID NO: 103708 - DNA, 33 bp, Homo sapien
cataaacagaattaaagacaacaatcacatgat

SEQ ID NO: 103709 - DNA, 33 bp, Homo sapien
tataattccttaaccactgactttaccatataa

SEQ ID NO: 103710 - DNA, 33 bp, Homo sapien
tataattccttaaccattgactttaccatataa

SEQ ID NO: 103711 - DNA, 33 bp, Homo sapien
ctctggtgtgatacaaaaagaggcagacagctt

SEQ ID NO: 103712 - DNA, 33 bp, Homo sapien
ctctggtgtgatacaagaagaggcagacagctt

SEQ ID NO: 103713 - DNA, 33 bp, Homo sapien
gtatggaagaacatcaatacaagtaggcaagaa

SEQ ID NO: 103714 - DNA, 33 bp, Homo sapien
gtatggaagaacatcagtacaagtaggcaagaa

SEQ ID NO: 103715 - DNA, 33 bp, Homo sapien
taggtaggttttccaactgtattggtcacagta

SEQ ID NO: 103716 - DNA, 33 bp, Homo sapien
taggtaggttttccaattgtattggtcacagta

SEQ ID NO: 103717 - DNA, 33 bp, Homo sapien
cttgttataagtagccaacaattataattacaa

SEQ ID NO: 103718 - DNA, 33 bp, Homo sapien
cttgttataagtagccgacaattataattacaa

SEQ ID NO: 103719 - DNA, 33 bp, Homo sapien
aaccattgtactgccaagttaggttttctattt

SEQ ID NO: 103720 - DNA, 33 bp, Homo sapien
aaccattgtactgccaggttaggttttctattt

SEQ ID NO: 103721 - DNA, 33 bp, Homo sapien
ttttactttaaagtcactagacactcctgtgaa

SEQ ID NO: 103722 - DNA, 33 bp, Homo sapien
ttttactttaaagtcattagacactcctgtgaa

SEQ ID NO: 103723 - DNA, 33 bp, Homo sapien
gatttagtgttagtgacaatgtgaactagtgca

SEQ ID NO: 103724 - DNA, 33 bp, Homo sapien
gatttagtgttagtgagaatgtgaactagtgca

SEQ ID NO: 103725 - DNA, 33 bp, Homo sapien
ccattccttttatggcaatatatggccactgtc

SEQ ID NO: 103726 - DNA, 33 bp, Homo sapien
ccattccttttatggctatatatggccactgtc

SEQ ID NO: 103727 - DNA, 33 bp, Homo sapien
gcattagatgggatcacatcttacaaccacttc

SEQ ID NO: 103728 - DNA, 33 bp, Homo sapien
gcattagatgggatcatatcttacaaccacttc

SEQ ID NO: 103729 - DNA, 33 bp, Homo sapien
taggaacattatctgcaaattctagcaatgtaa

SEQ ID NO: 103730 - DNA, 33 bp, Homo sapien
taggaacattatctgccaattctagcaatgtaa

SEQ ID NO: 103731 - DNA, 33 bp, Homo sapien; identical to SEQ ID NO: 103729

SEQ ID NO: 103732 - DNA, 33 bp, Homo sapien; identical to SEQ ID NO: 103730

SEQ ID NO: 103733 - DNA, 33 bp, Homo sapien
aatcgtctttcattgaataagacaggtccataa

SEQ ID NO: 103734 - DNA, 33 bp, Homo sapien
aatcgtctttcattgagtaagacaggtccataa

SEQ ID NO: 103735 - DNA, 33 bp, Homo sapien; identical to SEQ ID NO: 103733

SEQ ID NO: 103736 - DNA, 33 bp, Homo sapien; identical to SEQ ID NO: 103734

SEQ ID NO: 103737 - DNA, 33 bp, Homo sapien
ttagtggtgattgtctaaattgtatgatatgtt

SEQ ID NO: 103738 - DNA, 33 bp, Homo sapien
ttagtggtgattgtctgaattgtatgatatgtt

SEQ ID NO: 103739 - DNA, 33 bp, Homo sapien
ctgtcctttccttctacaaaccttgacaaggca

SEQ ID NO: 103740 - DNA, 33 bp, Homo sapien
ctgtcctttccttctataaaccttgacaaggca

SEQ ID NO: 103741 - DNA, 33 bp, Homo sapien
gaaccctagctaaaacaatgacctggtactgta

SEQ ID NO: 103742 - DNA, 33 bp, Homo sapien
gaaccctagctaaaacgatgacctggtactgta

SEQ ID NO: 103743 - DNA, 33 bp, Homo sapien
agagctgacagggacaaatgttgctggtcagcg

SEQ ID NO: 103744 - DNA, 33 bp, Homo sapien
agagctgacagggacagatgttgctggtcagcg

SEQ ID NO: 103745 - DNA, 33 bp, Homo sapien
tgcagttctaaataggcaattcttgtgatcata

SEQ ID NO: 103746 - DNA, 33 bp, Homo sapien
tgcagttctaaatagggaattcttgtgatcata

SEQ ID NO: 103747 - DNA, 33 bp, Homo sapien
agtcacaaaaaaagacgaatactttatgattcc

SEQ ID NO: 103748 - DNA, 33 bp, Homo sapien
agtcacaaaaaaagactaatactttatgattcc

SEQ ID NO: 103749 - DNA, 33 bp, Homo sapien
attgtggcccattggaaataccaaccaggtgct

SEQ ID NO: 103750 - DNA, 33 bp, Homo sapien
attgtggcccattggagataccaaccaggtgct

SEQ ID NO: 103751 - DNA, 33 bp, Homo sapien
caaatccatgatattccaagcacctggttggta

SEQ ID NO: 103752 - DNA, 33 bp, Homo sapien
caaatccatgatattcgaagcacctggttggta

SEQ ID NO: 103753 - DNA, 33 bp, Homo sapien
acaggatgactcatctaaaacaggcctacaatg

SEQ ID NO: 103754 - DNA, 33 bp, Homo sapien
acaggatgactcatctgaaacaggcctacaatg

SEQ ID NO: 103755 - DNA, 33 bp, Homo sapien
cccttccaaggttcataatcaggaaacagaaga

SEQ ID NO: 103756 - DNA, 33 bp, Homo sapien
cccttccaaggttcatgatcaggaaacagaaga

SEQ ID NO: 103757 - DNA, 33 bp, Homo sapien
aagaacagtaaagaaacgacatggaaggtagca

SEQ ID NO: 103758 - DNA, 33 bp, Homo sapien
aagaacagtaaagaaatgacatggaaggtagca

SEQ ID NO: 103759 - DNA, 33 bp, Homo sapien
tttcattgttttagaccacataacctgtcaatg

SEQ ID NO: 103760 - DNA, 33 bp, Homo sapien
tttcattgttttagacgacataacctgtcaatg

SEQ ID NO: 103761 - DNA, 33 bp, Homo sapien
aattgcatgaaagcatcaagtttatttaacaag

SEQ ID NO: 103762 - DNA, 33 bp, Homo sapien
aattgcatgaaagcattaagtttatttaacaag

SEQ ID NO: 103763 - DNA, 33 bp, Homo sapien
gtaaccttggaaattacggtgtgtcggcattat

SEQ ID NO: 103764 - DNA, 33 bp, Homo sapien
gtaaccttggaaattagggtgtgtcggcattat

SEQ ID NO: 103765 - DNA, 33 bp, Homo sapien
ttgtatacatattttgcatagcagtcctttatc

SEQ ID NO: 103766 - DNA, 33 bp, Homo sapien
ttgtatacatattttggatagcagtcctttatc

SEQ ID NO: 103767 - DNA, 33 bp, Homo sapien
atattgaattccaaaactgaagcagtaatacca

SEQ ID NO: 103768 - DNA, 33 bp, Homo sapien
atattgaattccaaaattgaagcagtaatacca

SEQ ID NO: 103769 - DNA, 33 bp, Homo sapien
ttttgttcagctctgccctgatttttgttcttt

SEQ ID NO: 103770 - DNA, 33 bp, Homo sapien
ttttgttcagctctgctctgatttttgttcttt

SEQ ID NO: 103771 - DNA, 33 bp, Homo sapien
cccaagtacctggaaaaaacccacacagacatg

SEQ ID NO: 103772 - DNA, 33 bp, Homo sapien
cccaagtacctggaaagaacccacacagacatg

SEQ ID NO: 103773 - DNA, 33 bp, Homo sapien
tttgtctaacatactccacagttagtattcttc

SEQ ID NO: 103774 - DNA, 33 bp, Homo sapien
tttgtctaacatactctacagttagtattcttc

SEQ ID NO: 103775 - DNA, 33 bp, Homo sapien
cattaatagcctcttgaagacttagacaagatg

SEQ ID NO: 103776 - DNA, 33 bp, Homo sapien
cattaatagcctcttggagacttagacaagatg

SEQ ID NO: 103777 - DNA, 33 bp, Homo sapien
gcctataggtaagaaccgagtgatgcccacctg

SEQ ID NO: 103778 - DNA, 33 bp, Homo sapien
gcctataggtaagaactgagtgatgcccacctg

SEQ ID NO: 103779 - DNA, 33 bp, Homo sapien
aatgcaggacagaaatcagctttcatgaacatt

SEQ ID NO: 103780 - DNA, 33 bp, Homo sapien
aatgcaggacagaaattagctttcatgaacatt

SEQ ID NO: 103781 - DNA, 33 bp, Homo sapien
atcccagatgggattaagcttgcaattgttgct

SEQ ID NO: 103782 - DNA, 33 bp, Homo sapien
atcccagatgggattaggcttgcaattgttgct

SEQ ID NO: 103783 - DNA, 33 bp, Homo sapien
ccatgttggtcatttcactatgttggtctcgaa

SEQ ID NO: 103784 - DNA, 33 bp, Homo sapien
ccatgttggtcatttcgctatgttggtctcgaa

SEQ ID NO: 103785 - DNA, 33 bp, Homo sapien
ccagatcaagctgatcaacagcaactttggtac

SEQ ID NO: 103786 - DNA, 33 bp, Homo sapien
ccagatcaagctgatcgacagcaactttggtac

SEQ ID NO: 103787 - DNA, 33 bp, Homo sapien
atgctgatgggcatcactgaagtcctatgtgac

SEQ ID NO: 103788 - DNA, 33 bp, Homo sapien
atgctgatgggcatcagtgaagtcctatgtgac

SEQ ID NO: 103789 - DNA, 33 bp, Homo sapien
tggtctgattggcagcaaattatctctctgatc

SEQ ID NO: 103790 - DNA, 33 bp, Homo sapien
tggtctgattggcagcgaattatctctctgatc

SEQ ID NO: 103791 - DNA, 33 bp, Homo sapien
aactgccactttatatcaaggctaatggaatga

SEQ ID NO: 103792 - DNA, 33 bp, Homo sapien
aactgccactttatatgaaggctaatggaatga

SEQ ID NO: 103793 - DNA, 33 bp, Homo sapien
tgagcactaatctgacaagaaatttaagttttg

SEQ ID NO: 103794 - DNA, 33 bp, Homo sapien
tgagcactaatctgaccagaaatttaagttttg

SEQ ID NO: 103795 - DNA, 33 bp, Homo sapien
tttctcatgggtagcaagatgttgaacaggact

SEQ ID NO: 103796 - DNA, 33 bp, Homo sapien
tttctcatgggtagcaggatgttgaacaggact

SEQ ID NO: 103797 - DNA, 33 bp, Homo sapien
acaaacagcagctagactatcaaaaagaggaga

SEQ ID NO: 103798 - DNA, 33 bp, Homo sapien
acaaacagcagctagagtatcaaaaagaggaga

SEQ ID NO: 103799 - DNA, 33 bp, Homo sapien
cagaggtacagttaagaaaaacaaggattgaga

SEQ ID NO: 103800 - DNA, 33 bp, Homo sapien
cagaggtacagttaaggaaaacaaggattgaga

SEQ ID NO: 103801 - DNA, 33 bp, Homo sapien
gacttggtggatttgaagtagagactaaggaag

SEQ ID NO: 103802 - DNA, 33 bp, Homo sapien
gacttggtggatttgatgtagagactaaggaag

SEQ ID NO: 103803 - DNA, 33 bp, Homo sapien
gatgaaaagggaaagcaaatacaatgttagtgg

SEQ ID NO: 103804 - DNA, 33 bp, Homo sapien
gatgaaaagggaaagcgaatacaatgttagtgg

SEQ ID NO: 103805 - DNA, 33 bp, Homo sapien
tcatcttgagagaaaacccaacatttcttttgt

SEQ ID NO: 103806 - DNA, 33 bp, Homo sapien
tcatcttgagagaaaatccaacatttcttttgt

SEQ ID NO: 103807 - DNA, 33 bp, Homo sapien
aggttcagggtgtgaacagtgtctctcccatta

SEQ ID NO: 103808 - DNA, 33 bp, Homo sapien
aggttcagggtgtgaagagtgtctctcccatta

SEQ ID NO: 103809 - DNA, 33 bp, Homo sapien
acttctctcctttctcacaatacaaagtcattt

SEQ ID NO: 103810 - DNA, 33 bp, Homo sapien
acttctctcctttctcgcaatacaaagtcattt

SEQ ID NO: 103811 - DNA, 33 bp, Homo sapien
agggctgagtaggtggaaggtagaatagagtga

SEQ ID NO: 103812 - DNA, 33 bp, Homo sapien
agggctgagtaggtgggaggtagaatagagtga

SEQ ID NO: 103813 - DNA, 33 bp, Homo sapien
tcggatgcatctacgcgccatcattttcttgaa

SEQ ID NO: 103814 - DNA, 33 bp, Homo sapien
tcggatgcatctacgctccatcattttcttgaa

SEQ ID NO: 103815 - DNA, 33 bp, Homo sapien
aagagaaatgagcctacggcagagtaatgtcag

SEQ ID NO: 103816 - DNA, 33 bp, Homo sapien
aagagaaatgagcctatggcagagtaatgtcag

SEQ ID NO: 103817 - DNA, 33 bp, Homo sapien
tttctggcttgagttaaatttaagtttctgggt

SEQ ID NO: 103818 - DNA, 33 bp, Homo sapien
tttctggcttgagttagatttaagtttctgggt

SEQ ID NO: 103819 - DNA, 33 bp, Homo sapien
tttgttacttggagataaacctgactacctcta

SEQ ID NO: 103820 - DNA, 33 bp, Homo sapien
tttgttacttggagatgaacctgactacctcta

SEQ ID NO: 103821 - DNA, 33 bp, Homo sapien
atagccaaaactagaaataatccaatgttcagc

SEQ ID NO: 103822 - DNA, 33 bp, Homo sapien
atagccaaaactagaactaatccaatgttcagc

SEQ ID NO: 103823 - DNA, 33 bp, Homo sapien
atcattgcattctttagaactgttagtacagtc

SEQ ID NO: 103824 - DNA, 33 bp, Homo sapien
atcattgcattctttataactgttagtacagtc

SEQ ID NO: 103825 - DNA, 33 bp, Homo sapien
ttctttctatgacttaggagcttttcagcactc

SEQ ID NO: 103826 - DNA, 33 bp, Homo sapien
ttctttctatgacttatgagcttttcagcactc

SEQ ID NO: 103827 - DNA, 33 bp, Homo sapien
agctggccctggtcacaatggagaaatattgaa

SEQ ID NO: 103828 - DNA, 33 bp, Homo sapien
agctggccctggtcacgatggagaaatattgaa

SEQ ID NO: 103829 - DNA, 33 bp, Homo sapien
gacagagataaagtagaatggaggtttttgcta

SEQ ID NO: 103830 - DNA, 33 bp, Homo sapien
gacagagataaagtaggatggaggtttttgcta

SEQ ID NO: 103831 - DNA, 33 bp, Homo sapien
aacctccaacctgccaaggtcattgtgcacagg

SEQ ID NO: 103832 - DNA, 33 bp, Homo sapien
aacctccaacctgccacggtcattgtgcacagg

SEQ ID NO: 103833 - DNA, 33 bp, Homo sapien
tgtccacaaaatagtccattgacaggtgatttt

SEQ ID NO: 103834 - DNA, 33 bp, Homo sapien
tgtccacaaaatagtctattgacaggtgatttt

SEQ ID NO: 103835 - DNA, 33 bp, Homo sapien
ttctagctggtagacaatagtaactaaggcttg

SEQ ID NO: 103836 - DNA, 33 bp, Homo sapien
ttctagctggtagacattagtaactaaggcttg

SEQ ID NO: 103837 - DNA, 33 bp, Homo sapien
tgaggattccaagagacagaatgtgagagaaga

SEQ ID NO: 103838 - DNA, 33 bp, Homo sapien
tgaggattccaagagatagaatgtgagagaaga

SEQ ID NO: 103839 - DNA, 33 bp, Homo sapien
tgaagttgagcttgaacagtgctagctatcagt

SEQ ID NO: 103840 - DNA, 33 bp, Homo sapien
tgaagttgagcttgaagagtgctagctatcagt

SEQ ID NO: 103841 - DNA, 33 bp, Homo sapien
ccatctccttccgatcaccctgtgtcaaggtcc

SEQ ID NO: 103842 - DNA, 33 bp, Homo sapien
ccatctccttccgatcgccctgtgtcaaggtcc

SEQ ID NO: 103843 - DNA, 33 bp, Homo sapien
atagagcaaactgtcaagcagtacttaactcac

SEQ ID NO: 103844 - DNA, 33 bp, Homo sapien
atagagcaaactgtcaggcagtacttaactcac

SEQ ID NO: 103845 - DNA, 33 bp, Homo sapien
gctgactagtcttggacatgggaagaattatgc

SEQ ID NO: 103846 - DNA, 33 bp, Homo sapien
gctgactagtcttggatatgggaagaattatgc

SEQ ID NO: 103847 - DNA, 33 bp, Homo sapien
cttactgccttgagaacttcaggagagacagtg

SEQ ID NO: 103848 - DNA, 33 bp, Homo sapien
cttactgccttgagaagttcaggagagacagtg

SEQ ID NO: 103849 - DNA, 33 bp, Homo sapien
aagcctgtaatgctacaaacagaggaattgtga

SEQ ID NO: 103850 - DNA, 33 bp, Homo sapien
aagcctgtaatgctacgaacagaggaattgtga

SEQ ID NO: 103851 - DNA, 33 bp, Homo sapien
ctttgctgaaactcgcccagtgttggaaaactc

SEQ ID NO: 103852 - DNA, 33 bp, Homo sapien
ctttgctgaaactcgctcagtgttggaaaactc

SEQ ID NO: 103853 - DNA, 33 bp, Homo sapien
taatcctgggaaacaaagttcgtccctatgatg

SEQ ID NO: 103854 - DNA, 33 bp, Homo sapien
taatcctgggaaacaacgttcgtccctatgatg

SEQ ID NO: 103855 - DNA, 33 bp, Homo sapien
tcctagggccatctagcaggagcggtgcaagag

SEQ ID NO: 103856 - DNA, 33 bp, Homo sapien
tcctagggccatctaggaggagcggtgcaagag

SEQ ID NO: 103857 - DNA, 33 bp, Homo sapien
ctccctcacttctccaataatctggatgctatg

SEQ ID NO: 103858 - DNA, 33 bp, Homo sapien
ctccctcacttctccagtaatctggatgctatg

SEQ ID NO: 103859 - DNA, 33 bp, Homo sapien
aaacttgcatatttcagggaatttttgtttata

SEQ ID NO: 103860 - DNA, 33 bp, Homo sapien
aaacttgcatatttcatggaatttttgtttata

SEQ ID NO: 103861 - DNA, 33 bp, Homo sapien
gaacatcagatttgaaacctgattgcaacttga

SEQ ID NO: 103862 - DNA, 33 bp, Homo sapien
gaacatcagatttgaagcctgattgcaacttga

SEQ ID NO: 103863 - DNA, 33 bp, Homo sapien
tttacattcctcttcacctgatttgccggagaa

SEQ ID NO: 103864 - DNA, 33 bp, Homo sapien
tttacattcctcttcatctgatttgccggagaa

SEQ ID NO: 103865 - DNA, 33 bp, Homo sapien
tgagctctccattgataagaatcttcccatctc

SEQ ID NO: 103866 - DNA, 33 bp, Homo sapien
tgagctctccattgatgagaatcttcccatctc

SEQ ID NO: 103867 - DNA, 33 bp, Homo sapien
tcctggccatttcgtaaccaatttagagggagc

SEQ ID NO: 103868 - DNA, 33 bp, Homo sapien
tcctggccatttcgtagccaatttagagggagc

SEQ ID NO: 103869 - DNA, 33 bp, Homo sapien
ttattgaagagtgctaaccaacttgttgaaaag

SEQ ID NO: 103870 - DNA, 33 bp, Homo sapien
ttattgaagagtgctacccaacttgttgaaaag

SEQ ID NO: 103871 - DNA, 33 bp, Homo sapien
aaaagaaaatggtttaagctaggctaagaaggt

SEQ ID NO: 103872 - DNA, 33 bp, Homo sapien
aaaagaaaatggtttaggctaggctaagaaggt

SEQ ID NO: 103873 - DNA, 33 bp, Homo sapien
tcggccaggtcattccaacatttgcctcgctgt

SEQ ID NO: 103874 - DNA, 33 bp, Homo sapien
tcggccaggtcattccgacatttgcctcgctgt

SEQ ID NO: 103875 - DNA, 33 bp, Homo sapien
ctctcctaaaatgataagatcagctcctaggac

SEQ ID NO: 103876 - DNA, 33 bp, Homo sapien
ctctcctaaaatgataggatcagctcctaggac

SEQ ID NO: 103877 - DNA, 33 bp, Homo sapien
aagcatggaagacaacaatgagaactgactttt

SEQ ID NO: 103878 - DNA, 33 bp, Homo sapien
aagcatggaagacaacgatgagaactgactttt

SEQ ID NO: 103879 - DNA, 33 bp, Homo sapien
tacctggtactagaaacgggatgaaaatgttaa

SEQ ID NO: 103880 - DNA, 33 bp, Homo sapien
tacctggtactagaaatgggatgaaaatgttaa

SEQ ID NO: 103881 - DNA, 33 bp, Homo sapien
attgcaggaatagaaccaatttgctgagaagga

SEQ ID NO: 103882 - DNA, 33 bp, Homo sapien
attgcaggaatagaacgaatttgctgagaagga

SEQ ID NO: 103883 - DNA, 33 bp, Homo sapien
ttatgtagatgaagtaaagtcaactgaacggtg

SEQ ID NO: 103884 - DNA, 33 bp, Homo sapien
ttatgtagatgaagtacagtcaactgaacggtg

SEQ ID NO: 103885 - DNA, 33 bp, Homo sapien
attacccacaaacagaacacttggagtccagat

SEQ ID NO: 103886 - DNA, 33 bp, Homo sapien
attacccacaaacagagcacttggagtccagat

SEQ ID NO: 103887 - DNA, 33 bp, Homo sapien
agatcagaaatcatgtcacatatccatagcatg

SEQ ID NO: 103888 - DNA, 33 bp, Homo sapien
agatcagaaatcatgttacatatccatagcatg

SEQ ID NO: 103889 - DNA, 33 bp, Homo sapien
attggagggaggccagaatacattagcgttctg

SEQ ID NO: 103890 - DNA, 33 bp, Homo sapien
attggagggaggccaggatacattagcgttctg

SEQ ID NO: 103891 - DNA, 33 bp, Homo sapien
aggcagccaaattttacgttggagctgtgtgta

SEQ ID NO: 103892 - DNA, 33 bp, Homo sapien
aggcagccaaattttatgttggagctgtgtgta

SEQ ID NO: 103893 - DNA, 33 bp, Homo sapien
tttgctaattctggcacaggttttgctgtcagg

SEQ ID NO: 103894 - DNA, 33 bp, Homo sapien
tttgctaattctggcataggttttgctgtcagg

SEQ ID NO: 103895 - DNA, 33 bp, Homo sapien
cctatttcattcaaagccttcagtttcaattga

SEQ ID NO: 103896 - DNA, 33 bp, Homo sapien
cctatttcattcaaaggcttcagtttcaattga

SEQ ID NO: 103897 - DNA, 33 bp, Homo sapien
tcttgggttgtttgcacgactctcctcggatta

SEQ ID NO: 103898 - DNA, 33 bp, Homo sapien
tcttgggttgtttgcatgactctcctcggatta

SEQ ID NO: 103899 - DNA, 33 bp, Homo sapien
tggcgcccttaaccacaccacgatgctgcctct

SEQ ID NO: 103900 - DNA, 33 bp, Homo sapien
tggcgcccttaaccactccacgatgctgcctct

SEQ ID NO: 103901 - DNA, 33 bp, Homo sapien
gactgtacttaatgcgacagaattgtacactta

SEQ ID NO: 103902 - DNA, 33 bp, Homo sapien
gactgtacttaatgcggcagaattgtacactta

SEQ ID NO: 103903 - DNA, 33 bp, Homo sapien
ttgttgatgaattcaacgctggcttaatgacaa

SEQ ID NO: 103904 - DNA, 33 bp, Homo sapien
ttgttgatgaattcaatgctggcttaatgacaa

SEQ ID NO: 103905 - DNA, 33 bp, Homo sapien
ccttgcaaggacatgacatggaaggcctgcatg

SEQ ID NO: 103906 - DNA, 33 bp, Homo sapien
ccttgcaaggacatgatatggaaggcctgcatg

SEQ ID NO: 103907 - DNA, 33 bp, Homo sapien
agaggctaacacgttacgatagtcacatggaca

SEQ ID NO: 103908 - DNA, 33 bp, Homo sapien
agaggctaacacgttatgatagtcacatggaca

SEQ ID NO: 103909 - DNA, 33 bp, Homo sapien
tttgtagaaacaaggccatttgaggtttgggtg

SEQ ID NO: 103910 - DNA, 33 bp, Homo sapien
tttgtagaaacaaggctatttgaggtttgggtg

SEQ ID NO: 103911 - DNA, 33 bp, Homo sapien
tagtcatgcaagaaaacaaatggacaggctggg

SEQ ID NO: 103912 - DNA, 33 bp, Homo sapien
tagtcatgcaagaaaataaatggacaggctggg

SEQ ID NO: 103913 - DNA, 33 bp, Homo sapien
tgagatttgaagtatacggttgcaagataacag

SEQ ID NO: 103914 - DNA, 33 bp, Homo sapien
tgagatttgaagtatatggttgcaagataacag

SEQ ID NO: 103915 - DNA, 33 bp, Homo sapien; identical to SEQ ID NO: 103913

SEQ ID NO: 103916 - DNA, 33 bp, Homo sapien; identical to SEQ ID NO: 103914

SEQ ID NO: 103917 - DNA, 33 bp, Homo sapien
attggtaatgtcataacgtggaaagcctcattt

SEQ ID NO: 103918 - DNA, 33 bp, Homo sapien
attggtaatgtcataatgtggaaagcctcattt

SEQ ID NO: 103919 - DNA, 33 bp, Homo sapien
gattacttgtatttcacagtgtatagaaacccc

SEQ ID NO: 103920 - DNA, 33 bp, Homo sapien
gattacttgtatttcagagtgtatagaaacccc

SEQ ID NO: 103921 - DNA, 33 bp, Homo sapien
caatcattcctgagaacagatgaagtgaacttc

SEQ ID NO: 103922 - DNA, 33 bp, Homo sapien
caatcattcctgagaagagatgaagtgaacttc

SEQ ID NO: 103923 - DNA, 33 bp, Homo sapien
gcagtcaaaatagaaacgccatgtgtggaggta

SEQ ID NO: 103924 - DNA, 33 bp, Homo sapien
gcagtcaaaatagaaatgccatgtgtggaggta

SEQ ID NO: 103925 - DNA, 33 bp, Homo sapien
gctgaaattcagctccaactatcaacttctgta

SEQ ID NO: 103926 - DNA, 33 bp, Homo sapien
gctgaaattcagctccgactatcaacttctgta

SEQ ID NO: 103927 - DNA, 33 bp, Homo sapien
actgatccagagcatacataggaccaggttatc

SEQ ID NO: 103928 - DNA, 33 bp, Homo sapien
actgatccagagcatagataggaccaggttatc

SEQ ID NO: 103929 - DNA, 33 bp, Homo sapien
attagttatgtttctccgaatagctggcatgag

SEQ ID NO: 103930 - DNA, 33 bp, Homo sapien
attagttatgtttctctgaatagctggcatgag

SEQ ID NO: 103931 - DNA, 33 bp, Homo sapien
aatgaaatgagtttgccagtgtcaaaatagttc

SEQ ID NO: 103932 - DNA, 33 bp, Homo sapien
aatgaaatgagtttgcgagtgtcaaaatagttc

SEQ ID NO: 103933 - DNA, 33 bp, Homo sapien
tgagtatcaataggaaaaactgtttggtgtgct

SEQ ID NO: 103934 - DNA, 33 bp, Homo sapien
tgagtatcaataggaagaactgtttggtgtgct

SEQ ID NO: 103935 - DNA, 33 bp, Homo sapien
gcagatgcaagaattaccatttacaaagatggg

SEQ ID NO: 103936 - DNA, 33 bp, Homo sapien
gcagatgcaagaattagcatttacaaagatggg

SEQ ID NO: 103937 - DNA, 33 bp, Homo sapien
accatttgattgtgcacaccaggaaaaaaagtg

SEQ ID NO: 103938 - DNA, 33 bp, Homo sapien
accatttgattgtgcataccaggaaaaaaagtg

SEQ ID NO: 103939 - DNA, 33 bp, Homo sapien
agcacacacacgagacagataagagtacttcat

SEQ ID NO: 103940 - DNA, 33 bp, Homo sapien
agcacacacacgagacggataagagtacttcat

SEQ ID NO: 103941 - DNA, 33 bp, Homo sapien
gttcctctgccaacaaaattgcttttagtcttt

SEQ ID NO: 103942 - DNA, 33 bp, Homo sapien
gttcctctgccaacaagattgcttttagtcttt

SEQ ID NO: 103943 - DNA, 33 bp, Homo sapien
ctgttcagtaccaccaagactttacaaattatg

SEQ ID NO: 103944 - DNA, 33 bp, Homo sapien
ctgttcagtaccaccaggactttacaaattatg

SEQ ID NO: 103945 - DNA, 33 bp, Homo sapien
gatttaattaaggtaccaaatcatgagtcaacc

SEQ ID NO: 103946 - DNA, 33 bp, Homo sapien
gatttaattaaggtacgaaatcatgagtcaacc

SEQ ID NO: 103947 - DNA, 33 bp, Homo sapien
gtggttgaacacatttcaaactaaacaagggga

SEQ ID NO: 103948 - DNA, 33 bp, Homo sapien
gtggttgaacacattttaaactaaacaagggga

SEQ ID NO: 103949 - DNA, 33 bp, Homo sapien
ggatcctaatgatcacaaaaaaatttctcatca

SEQ ID NO: 103950 - DNA, 33 bp, Homo sapien
ggatcctaatgatcacgaaaaaatttctcatca

SEQ ID NO: 103951 - DNA, 33 bp, Homo sapien
gctttaaaaatgaaaaccatgtggccaatacct

SEQ ID NO: 103952 - DNA, 33 bp, Homo sapien
gctttaaaaatgaaaatcatgtggccaatacct

SEQ ID NO: 103953 - DNA, 33 bp, Homo sapien
ggatttcgttacctaacgcctattagtgataat

SEQ ID NO: 103954 - DNA, 33 bp, Homo sapien
ggatttcgttacctaatgcctattagtgataat

SEQ ID NO: 103955 - DNA, 33 bp, Homo sapien
cttgatctctttcttccagccctgcgtgttctt

SEQ ID NO: 103956 - DNA, 33 bp, Homo sapien
cttgatctctttcttctagccctgcgtgttctt

SEQ ID NO: 103957 - DNA, 33 bp, Homo sapien
ctgcaggctgatttgacggtttttgtcagcgca

SEQ ID NO: 103958 - DNA, 33 bp, Homo sapien
ctgcaggctgatttgatggtttttgtcagcgca

SEQ ID NO: 103959 - DNA, 33 bp, Homo sapien
atttccttgagttttaccataataggcagccct

SEQ ID NO: 103960 - DNA, 33 bp, Homo sapien
atttccttgagttttagcataataggcagccct

SEQ ID NO: 103961 - DNA, 33 bp, Homo sapien
actttgaggtttaaaggcaggatttactaccct

SEQ ID NO: 103962 - DNA, 33 bp, Homo sapien
actttgaggtttaaagtcaggatttactaccct

SEQ ID NO: 103963 - DNA, 33 bp, Homo sapien
tctgtctggaaaaagacgatcacggtccactgt

SEQ ID NO: 103964 - DNA, 33 bp, Homo sapien
tctgtctggaaaaagatgatcacggtccactgt

SEQ ID NO: 103965 - DNA, 33 bp, Homo sapien
ccttcccaagactataactaggattcatgatcc

SEQ ID NO: 103966 - DNA, 33 bp, Homo sapien
ccttcccaagactatatctaggattcatgatcc

SEQ ID NO: 103967 - DNA, 33 bp, Homo sapien
ggcaaatgcaaggatcaaaactgtatgaatgag

SEQ ID NO: 103968 - DNA, 33 bp, Homo sapien
ggcaaatgcaaggatcgaaactgtatgaatgag

SEQ ID NO: 103969 - DNA, 33 bp, Homo sapien
actgccctagataccagatacaggccaatcaac

SEQ ID NO: 103970 - DNA, 33 bp, Homo sapien
actgccctagataccatatacaggccaatcaac

SEQ ID NO: 103971 - DNA, 33 bp, Homo sapien
ctgctgacatggctccacagaagcgcacacaca

SEQ ID NO: 103972 - DNA, 33 bp, Homo sapien
ctgctgacatggctccgcagaagcgcacacaca

SEQ ID NO: 103973 - DNA, 33 bp, Homo sapien
gggttgagtttgtagacgctctccggagagaga

SEQ ID NO: 103974 - DNA, 33 bp, Homo sapien
gggttgagtttgtagatgctctccggagagaga

SEQ ID NO: 103975 - DNA, 33 bp, Homo sapien
tgtcaggcaggggagacacaaaggaggcaactc

SEQ ID NO: 103976 - DNA, 33 bp, Homo sapien
tgtcaggcaggggagatacaaaggaggcaactc

SEQ ID NO: 103977 - DNA, 33 bp, Homo sapien
acagagctcacccaccaattagaacttcccatg

SEQ ID NO: 103978 - DNA, 33 bp, Homo sapien
acagagctcacccaccgattagaacttcccatg

SEQ ID NO: 103979 - DNA, 33 bp, Homo sapien
ttgttaatctcacaaccaggtgatttccattac

SEQ ID NO: 103980 - DNA, 33 bp, Homo sapien
ttgttaatctcacaacgaggtgatttccattac

SEQ ID NO: 103981 - DNA, 33 bp, Homo sapien
tgccaactgagaaggacaattaacaaaatgctg

SEQ ID NO: 103982 - DNA, 33 bp, Homo sapien
tgccaactgagaaggagaattaacaaaatgctg

SEQ ID NO: 103983 - DNA, 33 bp, Homo sapien
cagtcccataaaggaaacagaagctacatcaat

SEQ ID NO: 103984 - DNA, 33 bp, Homo sapien
cagtcccataaaggaagcagaagctacatcaat

SEQ ID NO: 103985 - DNA, 33 bp, Homo sapien
gtctccaaatgagtggccaataaataaataaat

SEQ ID NO: 103986 - DNA, 33 bp, Homo sapien
gtctccaaatgagtggtcaataaataaataaat

SEQ ID NO: 103987 - DNA, 33 bp, Homo sapien
ttatgaccttttcaaacgtctctattgactgtt

SEQ ID NO: 103988 - DNA, 33 bp, Homo sapien
ttatgaccttttcaaatgtctctattgactgtt

SEQ ID NO: 103989 - DNA, 33 bp, Homo sapien
gaggaatggagaaaaacaaaacttgttgactaa

SEQ ID NO: 103990 - DNA, 33 bp, Homo sapien
gaggaatggagaaaaataaaacttgttgactaa

SEQ ID NO: 103991 - DNA, 33 bp, Homo sapien
tcacctttctgcagtaactctccttgacctcta

SEQ ID NO: 103992 - DNA, 33 bp, Homo sapien
tcacctttctgcagtacctctccttgacctcta

SEQ ID NO: 103993 - DNA, 33 bp, Homo sapien
acttctggcacgtacagtattttaagaaacgtt

SEQ ID NO: 103994 - DNA, 33 bp, Homo sapien
acttctggcacgtacattattttaagaaacgtt

SEQ ID NO: 103995 - DNA, 33 bp, Homo sapien
ttgcctgtgttctggacaccatcacctcaagtc

SEQ ID NO: 103996 - DNA, 33 bp, Homo sapien
ttgcctgtgttctggataccatcacctcaagtc

SEQ ID NO: 103997 - DNA, 33 bp, Homo sapien
tctaccgggtaaagtacacaatgagaagatggc

SEQ ID NO: 103998 - DNA, 33 bp, Homo sapien
tctaccgggtaaagtatacaatgagaagatggc

SEQ ID NO: 103999 - DNA, 33 bp, Homo sapien
ccttccagtcttgcgacgacacaagaaaagtaa

SEQ ID NO: 104000 - DNA, 33 bp, Homo sapien
ccttccagtcttgcgatgacacaagaaaagtaa

SEQ ID NO: 104001 - DNA, 33 bp, Homo sapien
gagacccaggctctgccatgtgcagttccacct

SEQ ID NO: 104002 - DNA, 33 bp, Homo sapien
gagacccaggctctgctatgtgcagttccacct

SEQ ID NO: 104003 - DNA, 33 bp, Homo sapien
tgtcctctgtgctagacaatccaacatacagta

SEQ ID NO: 104004 - DNA, 33 bp, Homo sapien
tgtcctctgtgctagataatccaacatacagta

SEQ ID NO: 104005 - DNA, 33 bp, Homo sapien
actgtagagttaatcacgggagaaggaaggggg

SEQ ID NO: 104006 - DNA, 33 bp, Homo sapien
actgtagagttaatcaggggagaaggaaggggg

SEQ ID NO: 104007 - DNA, 33 bp, Homo sapien
gaacaagtaccaaagagcaagtgcttattgagt

SEQ ID NO: 104008 - DNA, 33 bp, Homo sapien
gaacaagtaccaaagatcaagtgcttattgagt

SEQ ID NO: 104009 - DNA, 33 bp, Homo sapien
aataagaggcaggaagaaaactaaagaatgagg

SEQ ID NO: 104010 - DNA, 33 bp, Homo sapien
aataagaggcaggaagcaaactaaagaatgagg

SEQ ID NO: 104011 - DNA, 33 bp, Homo sapien
agagagtgttccagccagagggttagcatgtgc

SEQ ID NO: 104012 - DNA, 33 bp, Homo sapien
agagagtgttccagcctgagggttagcatgtgc

SEQ ID NO: 104013 - DNA, 33 bp, Homo sapien
tcagatttgctttatccctgtgtgccatttcta

SEQ ID NO: 104014 - DNA, 33 bp, Homo sapien
tcagatttgctttatctctgtgtgccatttcta

SEQ ID NO: 104015 - DNA, 33 bp, Homo sapien
ggcaggcaatggccgcgagaaggtcagttttgt

SEQ ID NO: 104016 - DNA, 33 bp, Homo sapien
ggcaggcaatggccgctagaaggtcagttttgt

SEQ ID NO: 104017 - DNA, 33 bp, Homo sapien
cctcccaaagtgctggaaatccgggaatgaacc

SEQ ID NO: 104018 - DNA, 33 bp, Homo sapien
cctcccaaagtgctggtaatccgggaatgaacc

SEQ ID NO: 104019 - DNA, 33 bp, Homo sapien
agatcatatccaaggaaagattgaaaataaagt

SEQ ID NO: 104020 - DNA, 33 bp, Homo sapien
agatcatatccaaggagagattgaaaataaagt

SEQ ID NO: 104021 - DNA, 33 bp, Homo sapien
actgtaatagagaccacatttggtattcaacgg

SEQ ID NO: 104022 - DNA, 33 bp, Homo sapien
actgtaatagagaccagatttggtattcaacgg

SEQ ID NO: 104023 - DNA, 33 bp, Homo sapien
ccctttttctgcctcaaccaggtcactgccaag

SEQ ID NO: 104024 - DNA, 33 bp, Homo sapien
ccctttttctgcctcatccaggtcactgccaag

SEQ ID NO: 104025 - DNA, 33 bp, Homo sapien
gtgggaagcccaaagccctttgtacattttgaa

SEQ ID NO: 104026 - DNA, 33 bp, Homo sapien
gtgggaagcccaaagctctttgtacattttgaa

SEQ ID NO: 104027 - DNA, 33 bp, Homo sapien
aacctgctttatgtaacggcaaaaggacttgta

SEQ ID NO: 104028 - DNA, 33 bp, Homo sapien
aacctgctttatgtaatggcaaaaggacttgta

SEQ ID NO: 104029 - DNA, 33 bp, Homo sapien
ccaagagaggtcagaagaattcaatctgatgtg

SEQ ID NO: 104030 - DNA, 33 bp, Homo sapien
ccaagagaggtcagaataattcaatctgatgtg

SEQ ID NO: 104031 - DNA, 33 bp, Homo sapien
gtcttattaaatctccaatacatttttagatag

SEQ ID NO: 104032 - DNA, 33 bp, Homo sapien
gtcttattaaatctccgatacatttttagatag

SEQ ID NO: 104033 - DNA, 33 bp, Homo sapien
attaaataaaaaacacaattagcaaatctagga

SEQ ID NO: 104034 - DNA, 33 bp, Homo sapien
attaaataaaaaacacgattagcaaatctagga

SEQ ID NO: 104035 - DNA, 33 bp, Homo sapien
tagtaacctccctttccccctttgcactggttt

SEQ ID NO: 104036 - DNA, 33 bp, Homo sapien
tagtaacctccctttctccctttgcactggttt

SEQ ID NO: 104037 - DNA, 33 bp, Homo sapien
ataccaaattcagaaaccagcttgtgtcaaaag

SEQ ID NO: 104038 - DNA, 33 bp, Homo sapien
ataccaaattcagaaatcagcttgtgtcaaaag

SEQ ID NO: 104039 - DNA, 33 bp, Homo sapien
aactacaataggacacaagtaaggcttatgatg

SEQ ID NO: 104040 - DNA, 33 bp, Homo sapien
aactacaataggacacgagtaaggcttatgatg

SEQ ID NO: 104041 - DNA, 33 bp, Homo sapien
cttaaatcaccacgccaatcttgccagtgcgaa

SEQ ID NO: 104042 - DNA, 33 bp, Homo sapien
cttaaatcaccacgccgatcttgccagtgcgaa

SEQ ID NO: 104043 - DNA, 33 bp, Homo sapien
gaaagtgtatgacaaacgaaagctggaataaat

SEQ ID NO: 104044 - DNA, 33 bp, Homo sapien
gaaagtgtatgacaaaggaaagctggaataaat

SEQ ID NO: 104045 - DNA, 33 bp, Homo sapien
caggtacgaatccagccaaggagctacattatg

SEQ ID NO: 104046 - DNA, 33 bp, Homo sapien
caggtacgaatccagctaaggagctacattatg

SEQ ID NO: 104047 - DNA, 33 bp, Homo sapien
aatattgtctcttatcccaagaagagtaatgtg

SEQ ID NO: 104048 - DNA, 33 bp, Homo sapien
aatattgtctcttatctcaagaagagtaatgtg

SEQ ID NO: 104049 - DNA, 33 bp, Homo sapien
tgtctatccccagttagaggtattattccaaaa

SEQ ID NO: 104050 - DNA, 33 bp, Homo sapien
tgtctatccccagttataggtattattccaaaa

SEQ ID NO: 104051 - DNA, 33 bp, Homo sapien
attctaccaaaactcagactgggataccgatgg

SEQ ID NO: 104052 - DNA, 33 bp, Homo sapien
attctaccaaaactcatactgggataccgatgg

SEQ ID NO: 104053 - DNA, 33 bp, Homo sapien
ctgggtcctgaaaatcaaaacaagtcgaccaat

SEQ ID NO: 104054 - DNA, 33 bp, Homo sapien
ctgggtcctgaaaatccaaacaagtcgaccaat

SEQ ID NO: 104055 - DNA, 33 bp, Homo sapien
tgagtctgcttcataacgacaaacatgacaagc

SEQ ID NO: 104056 - DNA, 33 bp, Homo sapien
tgagtctgcttcataatgacaaacatgacaagc

SEQ ID NO: 104057 - DNA, 33 bp, Homo sapien
aggtattcattatttgaagtctaactggagaca

SEQ ID NO: 104058 - DNA, 33 bp, Homo sapien
aggtattcattatttgtagtctaactggagaca

SEQ ID NO: 104059 - DNA, 33 bp, Homo sapien
gtttgtccaggtcctaaacataacttgtctcca

SEQ ID NO: 104060 - DNA, 33 bp, Homo sapien
gtttgtccaggtcctacacataacttgtctcca

SEQ ID NO: 104061 - DNA, 33 bp, Homo sapien
ttcctaattataaaaacctcatgactgaactgg

SEQ ID NO: 104062 - DNA, 33 bp, Homo sapien
ttcctaattataaaaagctcatgactgaactgg

SEQ ID NO: 104063 - DNA, 33 bp, Homo sapien
tatgctattgctcaagcccttcaaagttttccc

SEQ ID NO: 104064 - DNA, 33 bp, Homo sapien
tatgctattgctcaaggccttcaaagttttccc

SEQ ID NO: 104065 - DNA, 33 bp, Homo sapien
actttcagtatttgcacgaattgaaggtcattt

SEQ ID NO: 104066 - DNA, 33 bp, Homo sapien
actttcagtatttgcatgaattgaaggtcattt

SEQ ID NO: 104067 - DNA, 33 bp, Homo sapien
ggtcatttgtggtgagaacaaggtcttctctcc

SEQ ID NO: 104068 - DNA, 33 bp, Homo sapien
ggtcatttgtggtgagtacaaggtcttctctcc

SEQ ID NO: 104069 - DNA, 33 bp, Homo sapien
ctacaacttctgggacactagcaaatcaccact

SEQ ID NO: 104070 - DNA, 33 bp, Homo sapien
ctacaacttctgggacgctagcaaatcaccact

SEQ ID NO: 104071 - DNA, 33 bp, Homo sapien
gccgtacgaagaggaacacttgatacaactggg

SEQ ID NO: 104072 - DNA, 33 bp, Homo sapien
gccgtacgaagaggaatacttgatacaactggg

SEQ ID NO: 104073 - DNA, 33 bp, Homo sapien
ctcttcatttttcactaaaccaggtcacccctt

SEQ ID NO: 104074 - DNA, 33 bp, Homo sapien
ctcttcatttttcactgaaccaggtcacccctt

SEQ ID NO: 104075 - DNA, 33 bp, Homo sapien
tgtatggaagagaggtcaactatccgagagaca

SEQ ID NO: 104076 - DNA, 33 bp, Homo sapien
tgtatggaagagaggttaactatccgagagaca

SEQ ID NO: 104077 - DNA, 33 bp, Homo sapien
gtgattacttattcagaagaaaggagctttgaa

SEQ ID NO: 104078 - DNA, 33 bp, Homo sapien
gtgattacttattcagtagaaaggagctttgaa

SEQ ID NO: 104079 - DNA, 33 bp, Homo sapien
gaaaatgactccttccacagcagaaatcatgtc

SEQ ID NO: 104080 - DNA, 33 bp, Homo sapien
gaaaatgactccttccgcagcagaaatcatgtc

SEQ ID NO: 104081 - DNA, 33 bp, Homo sapien
tcaataaattctgctacgatcagcctggtgtga

SEQ ID NO: 104082 - DNA, 33 bp, Homo sapien
tcaataaattctgctatgatcagcctggtgtga

SEQ ID NO: 104083 - DNA, 33 bp, Homo sapien
gatagtttattgaatcaaatttaccacttgtgc

SEQ ID NO: 104084 - DNA, 33 bp, Homo sapien
gatagtttattgaatcgaatttaccacttgtgc

SEQ ID NO: 104085 - DNA, 33 bp, Homo sapien
tgctcagggtttgcccaggctgcaaagtagtgc

SEQ ID NO: 104086 - DNA, 33 bp, Homo sapien
tgctcagggtttgcccgggctgcaaagtagtgc

SEQ ID NO: 104087 - DNA, 33 bp, Homo sapien
tatgtattcttaaacaccttagacatgaaatca

SEQ ID NO: 104088 - DNA, 33 bp, Homo sapien
tatgtattcttaaacatcttagacatgaaatca

SEQ ID NO: 104089 - DNA, 33 bp, Homo sapien
cagtgttgctgccacacagcttttgataatgaa

SEQ ID NO: 104090 - DNA, 33 bp, Homo sapien
cagtgttgctgccacatagcttttgataatgaa

SEQ ID NO: 104091 - DNA, 33 bp, Homo sapien
tggagtagctgagtataagtctctttggaattc

SEQ ID NO: 104092 - DNA, 33 bp, Homo sapien
tggagtagctgagtatcagtctctttggaattc

SEQ ID NO: 104093 - DNA, 33 bp, Homo sapien
attactagtttcattacgctcagaaaggatggt

SEQ ID NO: 104094 - DNA, 33 bp, Homo sapien
attactagtttcattatgctcagaaaggatggt

SEQ ID NO: 104095 - DNA, 33 bp, Homo sapien
aaaaagtagagacagaatattggtgtttaatga

SEQ ID NO: 104096 - DNA, 33 bp, Homo sapien
aaaaagtagagacagagtattggtgtttaatga

SEQ ID NO: 104097 - DNA, 33 bp, Homo sapien
tctgtctagaggcaatgaaagatgatatagttg

SEQ ID NO: 104098 - DNA, 33 bp, Homo sapien
tctgtctagaggcaattaaagatgatatagttg

SEQ ID NO: 104099 - DNA, 33 bp, Homo sapien
gctgtatcctcccatcaaatggaaattagttgg

SEQ ID NO: 104100 - DNA, 33 bp, Homo sapien
gctgtatcctcccatccaatggaaattagttgg

SEQ ID NO: 104101 - DNA, 33 bp, Homo sapien
tcatctcattcttacaacaaccatgtgaaattg

SEQ ID NO: 104102 - DNA, 33 bp, Homo sapien
tcatctcattcttacagcaaccatgtgaaattg

SEQ ID NO: 104103 - DNA, 33 bp, Homo sapien
atccttagacagactaacctcatctatatctgc

SEQ ID NO: 104104 - DNA, 33 bp, Homo sapien
atccttagacagactatcctcatctatatctgc

SEQ ID NO: 104105 - DNA, 33 bp, Homo sapien
tgcatggaggaagatgaatcctggagaacttct

SEQ ID NO: 104106 - DNA, 33 bp, Homo sapien
tgcatggaggaagatgtatcctggagaacttct

SEQ ID NO: 104107 - DNA, 33 bp, Homo sapien
aacatccaatataaaagttgtccaggccaggca

SEQ ID NO: 104108 - DNA, 33 bp, Homo sapien
aacatccaatataaaatttgtccaggccaggca

SEQ ID NO: 104109 - DNA, 33 bp, Homo sapien
gaacaaaatgtaaaaaattgatatgtctggcta

SEQ ID NO: 104110 - DNA, 33 bp, Homo sapien
gaacaaaatgtaaaaacttgatatgtctggcta

SEQ ID NO: 104111 - DNA, 33 bp, Homo sapien
gagtggagtcactaaaacccccactttctgggt

SEQ ID NO: 104112 - DNA, 33 bp, Homo sapien
gagtggagtcactaaagcccccactttctgggt

SEQ ID NO: 104113 - DNA, 33 bp, Homo sapien
ccatccaatcaactcggagtcaatgatgagata

SEQ ID NO: 104114 - DNA, 33 bp, Homo sapien
ccatccaatcaactcgtagtcaatgatgagata

SEQ ID NO: 104115 - DNA, 33 bp, Homo sapien
gacagattctctctagcaaacaatacagaagga

SEQ ID NO: 104116 - DNA, 33 bp, Homo sapien
gacagattctctctaggaaacaatacagaagga

SEQ ID NO: 104117 - DNA, 33 bp, Homo sapien
caataccttgtgtttacgatgtgagctaatttg

SEQ ID NO: 104118 - DNA, 33 bp, Homo sapien
caataccttgtgtttaggatgtgagctaatttg

SEQ ID NO: 104119 - DNA, 33 bp, Homo sapien
aaccctgaagattgaacaggtcacctaagttct

SEQ ID NO: 104120 - DNA, 33 bp, Homo sapien
aaccctgaagattgaataggtcacctaagttct

SEQ ID NO: 104121 - DNA, 33 bp, Homo sapien
attggtagtatctataactgtagtctcctgctc

SEQ ID NO: 104122 - DNA, 33 bp, Homo sapien
attggtagtatctatagctgtagtctcctgctc

SEQ ID NO: 104123 - DNA, 33 bp, Homo sapien
tggaatttactgagcaaaaaggaaagaaactca

SEQ ID NO: 104124 - DNA, 33 bp, Homo sapien
tggaatttactgagcataaaggaaagaaactca

SEQ ID NO: 104125 - DNA, 33 bp, Homo sapien
tgaactcacagggttaacaagaattaacagaaa

SEQ ID NO: 104126 - DNA, 33 bp, Homo sapien
tgaactcacagggttagcaagaattaacagaaa

SEQ ID NO: 104127 - DNA, 33 bp, Homo sapien
cggcttttgttaaagacagataggatctccagc

SEQ ID NO: 104128 - DNA, 33 bp, Homo sapien
cggcttttgttaaagatagataggatctccagc

SEQ ID NO: 104129 - DNA, 33 bp, Homo sapien
aagtcctgtcactgacacctggttatggttcct

SEQ ID NO: 104130 - DNA, 33 bp, Homo sapien
aagtcctgtcactgacgcctggttatggttcct

SEQ ID NO: 104131 - DNA, 33 bp, Homo sapien
taaacttccaccaagtaaactgcgggcagtagt

SEQ ID NO: 104132 - DNA, 33 bp, Homo sapien
taaacttccaccaagtgaactgcgggcagtagt

SEQ ID NO: 104133 - DNA, 33 bp, Homo sapien
gtgttctgtcttttgtaaaatagttgaatgggg

SEQ ID NO: 104134 - DNA, 33 bp, Homo sapien
gtgttctgtcttttgtgaaatagttgaatgggg

SEQ ID NO: 104135 - DNA, 33 bp, Homo sapien
aattcactcctcacaaaatacttgctgcagagg

SEQ ID NO: 104136 - DNA, 33 bp, Homo sapien
aattcactcctcacaagatacttgctgcagagg

SEQ ID NO: 104137 - DNA, 33 bp, Homo sapien
gcagaggtggaaacagaacgggaactacttgaa

SEQ ID NO: 104138 - DNA, 33 bp, Homo sapien
gcagaggtggaaacaggacgggaactacttgaa

SEQ ID NO: 104139 - DNA, 33 bp, Homo sapien
aaggagagatttaggacagaaggaagacttgag

SEQ ID NO: 104140 - DNA, 33 bp, Homo sapien
aaggagagatttaggagagaaggaagacttgag

SEQ ID NO: 104141 - DNA, 33 bp, Homo sapien
actatggcagcaagaaatataaccaaaatgtgg

SEQ ID NO: 104142 - DNA, 33 bp, Homo sapien
actatggcagcaagaagtataaccaaaatgtgg

SEQ ID NO: 104143 - DNA, 33 bp, Homo sapien
aaccaaaatgtggccacaagcatcatttttatg

SEQ ID NO: 104144 - DNA, 33 bp, Homo sapien
aaccaaaatgtggccataagcatcatttttatg

SEQ ID NO: 104145 - DNA, 33 bp, Homo sapien
gtattcctcactaggaagcatttacatagatct

SEQ ID NO: 104146 - DNA, 33 bp, Homo sapien
gtattcctcactaggaggcatttacatagatct

SEQ ID NO: 104147 - DNA, 33 bp, Homo sapien
catgcatctgtttttcacctttgaagaaagcaa

SEQ ID NO: 104148 - DNA, 33 bp, Homo sapien
catgcatctgtttttcgcctttgaagaaagcaa

SEQ ID NO: 104149 - DNA, 33 bp, Homo sapien
tggcacaaagcatgaaaatgttggtatcgtgta

SEQ ID NO: 104150 - DNA, 33 bp, Homo sapien
tggcacaaagcatgaagatgttggtatcgtgta

SEQ ID NO: 104151 - DNA, 33 bp, Homo sapien
gctcactaggtaccacacttcttttcctgcgtg

SEQ ID NO: 104152 - DNA, 33 bp, Homo sapien
gctcactaggtaccacgcttcttttcctgcgtg

SEQ ID NO: 104153 - DNA, 33 bp, Homo sapien
gtgggagagaaccctacgaagatcactggacaa

SEQ ID NO: 104154 - DNA, 33 bp, Homo sapien
gtgggagagaaccctatgaagatcactggacaa

SEQ ID NO: 104155 - DNA, 33 bp, Homo sapien
ggtttttggttgaggaagctagaatgttaagct

SEQ ID NO: 104156 - DNA, 33 bp, Homo sapien
ggtttttggttgaggaggctagaatgttaagct

SEQ ID NO: 104157 - DNA, 33 bp, Homo sapien
cataagatcttcaccactgggatttagcagcct

SEQ ID NO: 104158 - DNA, 33 bp, Homo sapien
cataagatcttcaccattgggatttagcagcct

SEQ ID NO: 104159 - DNA, 33 bp, Homo sapien
accattcttccatttacagaattgtagcagtgt

SEQ ID NO: 104160 - DNA, 33 bp, Homo sapien
accattcttccatttagagaattgtagcagtgt

SEQ ID NO: 104161 - DNA, 33 bp, Homo sapien
ctatttaggtctttaacgtctctcagcaatgtt

SEQ ID NO: 104162 - DNA, 33 bp, Homo sapien
ctatttaggtctttaatgtctctcagcaatgtt

SEQ ID NO: 104163 - DNA, 33 bp, Homo sapien
cacacacgccatcccaaagttcaataaatattc

SEQ ID NO: 104164 - DNA, 33 bp, Homo sapien
cacacacgccatcccacagttcaataaatattc

SEQ ID NO: 104165 - DNA, 33 bp, Homo sapien
aagggagagaattgcaataaagagttttataca

SEQ ID NO: 104166 - DNA, 33 bp, Homo sapien
aagggagagaattgcagtaaagagttttataca

SEQ ID NO: 104167 - DNA, 33 bp, Homo sapien
aattgcccactcgaagaagaggagaaatggaat

SEQ ID NO: 104168 - DNA, 33 bp, Homo sapien
aattgcccactcgaaggagaggagaaatggaat

SEQ ID NO: 104169 - DNA, 33 bp, Homo sapien
ttaatcctggcttgaaaagaagctccctggagc

SEQ ID NO: 104170 - DNA, 33 bp, Homo sapien
ttaatcctggcttgaatagaagctccctggagc

SEQ ID NO: 104171 - DNA, 33 bp, Homo sapien
tgcagtgcttgggttccactcatctgtacgtgg

SEQ ID NO: 104172 - DNA, 33 bp, Homo sapien
tgcagtgcttgggttctactcatctgtacgtgg

SEQ ID NO: 104173 - DNA, 33 bp, Homo sapien
gcctgttggtggctcagtcatgttcttggctag

SEQ ID NO: 104174 - DNA, 33 bp, Homo sapien
gcctgttggtggctcattcatgttcttggctag

SEQ ID NO: 104175 - DNA, 33 bp, Homo sapien
tagtcagaagaaggggaatttcctgactattca

SEQ ID NO: 104176 - DNA, 33 bp, Homo sapien
tagtcagaagaagggggatttcctgactattca

SEQ ID NO: 104177 - DNA, 33 bp, Homo sapien
tgctttaaacattctaagaaccagttatttgca

SEQ ID NO: 104178 - DNA, 33 bp, Homo sapien
tgctttaaacattctatgaaccagttatttgca

SEQ ID NO: 104179 - DNA, 33 bp, Homo sapien
cacatgaccttagtgacgtctggtaacaaaaga

SEQ ID NO: 104180 - DNA, 33 bp, Homo sapien
cacatgaccttagtgatgtctggtaacaaaaga

SEQ ID NO: 104181 - DNA, 33 bp, Homo sapien
ctcagcaggaacactcaagcacaagctttccac

SEQ ID NO: 104182 - DNA, 33 bp, Homo sapien
ctcagcaggaacactcgagcacaagctttccac

SEQ ID NO: 104183 - DNA, 33 bp, Homo sapien
ctatagctctgagtaccgatgaacagctgagct

SEQ ID NO: 104184 - DNA, 33 bp, Homo sapien
ctatagctctgagtactgatgaacagctgagct

SEQ ID NO: 104185 - DNA, 33 bp, Homo sapien
taaatttcaactaaccaatctatacatgaggat

SEQ ID NO: 104186 - DNA, 33 bp, Homo sapien
taaatttcaactaaccgatctatacatgaggat

SEQ ID NO: 104187 - DNA, 33 bp, Homo sapien
agactgtgaaaaggtgcatattctgcctggagt

SEQ ID NO: 104188 - DNA, 33 bp, Homo sapien
agactgtgaaaaggtggatattctgcctggagt

SEQ ID NO: 104189 - DNA, 33 bp, Homo sapien
ttttcttttgggaaaccgccatctcctttgctc

SEQ ID NO: 104190 - DNA, 33 bp, Homo sapien
ttttcttttgggaaactgccatctcctttgctc

SEQ ID NO: 104191 - DNA, 33 bp, Homo sapien
gatgccaaggtggctgacacagatccagctatc

SEQ ID NO: 104192 - DNA, 33 bp, Homo sapien
gatgccaaggtggctgccacagatccagctatc

SEQ ID NO: 104193 - DNA, 33 bp, Homo sapien
acactttagatgtgggaatgaaataaataggac

SEQ ID NO: 104194 - DNA, 33 bp, Homo sapien
acactttagatgtgggcatgaaataaataggac

SEQ ID NO: 104195 - DNA, 33 bp, Homo sapien
acttcatgtctatcacaaatgcatcatcaccca

SEQ ID NO: 104196 - DNA, 33 bp, Homo sapien
acttcatgtctatcacgaatgcatcatcaccca

SEQ ID NO: 104197 - DNA, 33 bp, Homo sapien
ggtggtgtcattgttacggccagcttgtgttaa

SEQ ID NO: 104198 - DNA, 33 bp, Homo sapien
ggtggtgtcattgttatggccagcttgtgttaa

SEQ ID NO: 104199 - DNA, 33 bp, Homo sapien
tccttttggtggtacaggcacctgcttccttat

SEQ ID NO: 104200 - DNA, 33 bp, Homo sapien
tccttttggtggtacatgcacctgcttccttat

SEQ ID NO: 104201 - DNA, 33 bp, Homo sapien
aaatcagatttgccaggaaagtcattcaagtcc

SEQ ID NO: 104202 - DNA, 33 bp, Homo sapien
aaatcagatttgccagtaaagtcattcaagtcc

SEQ ID NO: 104203 - DNA, 33 bp, Homo sapien
agccctgccctaccccactaaagcattcataat

SEQ ID NO: 104204 - DNA, 33 bp, Homo sapien
agccctgccctaccccgctaaagcattcataat

SEQ ID NO: 104205 - DNA, 33 bp, Homo sapien
cctacatctttctctcaaagtttgcctattgaa

SEQ ID NO: 104206 - DNA, 33 bp, Homo sapien
cctacatctttctctccaagtttgcctattgaa

SEQ ID NO: 104207 - DNA, 33 bp, Homo sapien
aggtaacattgacaacagacagaaaccatgcac

SEQ ID NO: 104208 - DNA, 33 bp, Homo sapien
aggtaacattgacaacggacagaaaccatgcac

SEQ ID NO: 104209 - DNA, 33 bp, Homo sapien
agtaatgagctaagtgaaaaaatgagggcagtc

SEQ ID NO: 104210 - DNA, 33 bp, Homo sapien
agtaatgagctaagtgcaaaaatgagggcagtc

SEQ ID NO: 104211 - DNA, 33 bp, Homo sapien
gactgaaacttttgagaaacctgttgcttgtcc

SEQ ID NO: 104212 - DNA, 33 bp, Homo sapien
gactgaaacttttgagtaacctgttgcttgtcc

SEQ ID NO: 104213 - DNA, 33 bp, Homo sapien
atagaagggtgtttgacggaaatatggaaggtg

SEQ ID NO: 104214 - DNA, 33 bp, Homo sapien
atagaagggtgtttgatggaaatatggaaggtg

SEQ ID NO: 104215 - DNA, 33 bp, Homo sapien
acctcccataactgcagaatggccagtcccctc

SEQ ID NO: 104216 - DNA, 33 bp, Homo sapien
acctcccataactgcataatggccagtcccctc

SEQ ID NO: 104217 - DNA, 33 bp, Homo sapien
tttctgcctaaccagtaaaagaagtagcagctg

SEQ ID NO: 104218 - DNA, 33 bp, Homo sapien
tttctgcctaaccagtgaaagaagtagcagctg

SEQ ID NO: 104219 - DNA, 33 bp, Homo sapien
tcctccagcttcattacagccagaaaaatctga

SEQ ID NO: 104220 - DNA, 33 bp, Homo sapien
tcctccagcttcattatagccagaaaaatctga

SEQ ID NO: 104221 - DNA, 33 bp, Homo sapien
acactgcttctgaggcactagaccttgttgcac

SEQ ID NO: 104222 - DNA, 33 bp, Homo sapien
acactgcttctgaggcgctagaccttgttgcac

SEQ ID NO: 104223 - DNA, 33 bp, Homo sapien
ttgaacccaggagaaactgggatatgagggtag

SEQ ID NO: 104224 - DNA, 33 bp, Homo sapien
ttgaacccaggagaaattgggatatgagggtag

SEQ ID NO: 104225 - DNA, 33 bp, Homo sapien
ataataaaatagacaaatgcagatgatctaaca

SEQ ID NO: 104226 - DNA, 33 bp, Homo sapien
ataataaaatagacaagtgcagatgatctaaca

SEQ ID NO: 104227 - DNA, 33 bp, Homo sapien
gtcctaatccccatacccatgtaagtgacctta

SEQ ID NO: 104228 - DNA, 33 bp, Homo sapien
gtcctaatccccatactcatgtaagtgacctta

SEQ ID NO: 104229 - DNA, 33 bp, Homo sapien
ctacagacttgcttgaggaggaattgccataaa

SEQ ID NO: 104230 - DNA, 33 bp, Homo sapien
ctacagacttgcttgatgaggaattgccataaa

SEQ ID NO: 104231 - DNA, 33 bp, Homo sapien
ctcttacccattatcactgaattgctatggacc

SEQ ID NO: 104232 - DNA, 33 bp, Homo sapien
ctcttacccattatcattgaattgctatggacc

SEQ ID NO: 104233 - DNA, 33 bp, Homo sapien
taatctttctgtaaaaactcccatagaatcctc

SEQ ID NO: 104234 - DNA, 33 bp, Homo sapien
taatctttctgtaaaacctcccatagaatcctc

SEQ ID NO: 104235 - DNA, 33 bp, Homo sapien
taaggctagtttgagaaaatcagggtttgcacc

SEQ ID NO: 104236 - DNA, 33 bp, Homo sapien
taaggctagtttgagacaatcagggtttgcacc

SEQ ID NO: 104237 - DNA, 33 bp, Homo sapien
gatattaagtatagcaatcttgatgggtaatag

SEQ ID NO: 104238 - DNA, 33 bp, Homo sapien
gatattaagtatagcagtcttgatgggtaatag

SEQ ID NO: 104239 - DNA, 33 bp, Homo sapien
aacacaatggaggagaataaattaagttcaaga

SEQ ID NO: 104240 - DNA, 33 bp, Homo sapien
aacacaatggaggagagtaaattaagttcaaga

SEQ ID NO: 104241 - DNA, 33 bp, Homo sapien
aaaagctaatgagtgcacagcatagaacatttg

SEQ ID NO: 104242 - DNA, 33 bp, Homo sapien
aaaagctaatgagtgcgcagcatagaacatttg

SEQ ID NO: 104243 - DNA, 33 bp, Homo sapien
aatagagccaatgacacaaaaccaaatgcagcc

SEQ ID NO: 104244 - DNA, 33 bp, Homo sapien
aatagagccaatgacataaaaccaaatgcagcc

SEQ ID NO: 104245 - DNA, 33 bp, Homo sapien
tgcactaattataccaagtttagatagaagact

SEQ ID NO: 104246 - DNA, 33 bp, Homo sapien
tgcactaattataccaggtttagatagaagact

SEQ ID NO: 104247 - DNA, 33 bp, Homo sapien
tgcatcagctcccagaacctgcaaatcttttga

SEQ ID NO: 104248 - DNA, 33 bp, Homo sapien
tgcatcagctcccagagcctgcaaatcttttga

SEQ ID NO: 104249 - DNA, 33 bp, Homo sapien
cgtgcatcttgaaccacgtcacaatgatgtcct

SEQ ID NO: 104250 - DNA, 33 bp, Homo sapien
cgtgcatcttgaaccatgtcacaatgatgtcct

SEQ ID NO: 104251 - DNA, 33 bp, Homo sapien
taagatgtttttcagaacaggaattccggtgaa

SEQ ID NO: 104252 - DNA, 33 bp, Homo sapien
taagatgtttttcagatcaggaattccggtgaa

SEQ ID NO: 104253 - DNA, 33 bp, Homo sapien
aacaagggatttcaaaccggagatggagctaga

SEQ ID NO: 104254 - DNA, 33 bp, Homo sapien
aacaagggatttcaaatcggagatggagctaga

SEQ ID NO: 104255 - DNA, 33 bp, Homo sapien
tattattggaagaaagaattttgctgtgaaaag

SEQ ID NO: 104256 - DNA, 33 bp, Homo sapien
tattattggaagaaaggattttgctgtgaaaag

SEQ ID NO: 104257 - DNA, 33 bp, Homo sapien
tgctctacacgatggcaaggaacttagatgggg

SEQ ID NO: 104258 - DNA, 33 bp, Homo sapien
tgctctacacgatggcgaggaacttagatgggg

SEQ ID NO: 104259 - DNA, 33 bp, Homo sapien
ctcatctctctctttccacaatccctagactgt

SEQ ID NO: 104260 - DNA, 33 bp, Homo sapien
ctcatctctctctttctacaatccctagactgt

SEQ ID NO: 104261 - DNA, 33 bp, Homo sapien
ctgggagacattgggcaacattcagattcttca

SEQ ID NO: 104262 - DNA, 33 bp, Homo sapien
ctgggagacattgggcgacattcagattcttca

SEQ ID NO: 104263 - DNA, 33 bp, Homo sapien
gtgccatggaaccaaacgcatggcttgagctca

SEQ ID NO: 104264 - DNA, 33 bp, Homo sapien
gtgccatggaaccaaatgcatggcttgagctca

SEQ ID NO: 104265 - DNA, 33 bp, Homo sapien
gctgtccagagttgccaatctgcattatttata

SEQ ID NO: 104266 - DNA, 33 bp, Homo sapien
gctgtccagagttgccgatctgcattatttata

SEQ ID NO: 104267 - DNA, 33 bp, Homo sapien
aaattcaaacaaggaaacattggtgaagagtcg

SEQ ID NO: 104268 - DNA, 33 bp, Homo sapien
aaattcaaacaaggaagcattggtgaagagtcg

SEQ ID NO: 104269 - DNA, 33 bp, Homo sapien
atatggctgaaatacacaatagtcatgtctgta

SEQ ID NO: 104270 - DNA, 33 bp, Homo sapien
atatggctgaaatacataatagtcatgtctgta

SEQ ID NO: 104271 - DNA, 33 bp, Homo sapien
ggggatcaggatattaagtcgtctttctatcgg

SEQ ID NO: 104272 - DNA, 33 bp, Homo sapien
ggggatcaggatattacgtcgtctttctatcgg

SEQ ID NO: 104273 - DNA, 33 bp, Homo sapien
ggtaaggccaagagagcaagaacattgactttg

SEQ ID NO: 104274 - DNA, 33 bp, Homo sapien
ggtaaggccaagagaggaagaacattgactttg

SEQ ID NO: 104275 - DNA, 33 bp, Homo sapien
cattgcacccataataacaggcaggtgaagagc

SEQ ID NO: 104276 - DNA, 33 bp, Homo sapien
cattgcacccataatagcaggcaggtgaagagc

SEQ ID NO: 104277 - DNA, 33 bp, Homo sapien
actcctattaccaggccatttttctctgataaa

SEQ ID NO: 104278 - DNA, 33 bp, Homo sapien
actcctattaccaggcgatttttctctgataaa

SEQ ID NO: 104279 - DNA, 33 bp, Homo sapien
tcctgcaaaggcactaaccctcttctcctaccc

SEQ ID NO: 104280 - DNA, 33 bp, Homo sapien
tcctgcaaaggcactacccctcttctcctaccc

SEQ ID NO: 104281 - DNA, 33 bp, Homo sapien
caggggccgggatgaaggcttctgggtgccagc

SEQ ID NO: 104282 - DNA, 33 bp, Homo sapien
caggggccgggatgaatgcttctgggtgccagc

SEQ ID NO: 104283 - DNA, 33 bp, Homo sapien
gacaaccctctgtatcccgagctcttgttcggt

SEQ ID NO: 104284 - DNA, 33 bp, Homo sapien
gacaaccctctgtatctcgagctcttgttcggt

SEQ ID NO: 104285 - DNA, 33 bp, Homo sapien
ctctctctgagattccaccatcaagccgtccct

SEQ ID NO: 104286 - DNA, 33 bp, Homo sapien
ctctctctgagattccgccatcaagccgtccct

SEQ ID NO: 104287 - DNA, 33 bp, Homo sapien
aatgaagagatgcataagacaaggtacaggaga

SEQ ID NO: 104288 - DNA, 33 bp, Homo sapien
aatgaagagatgcataggacaaggtacaggaga

SEQ ID NO: 104289 - DNA, 33 bp, Homo sapien
gcagaggacattgacaatatagaatcactttat

SEQ ID NO: 104290 - DNA, 33 bp, Homo sapien
gcagaggacattgacagtatagaatcactttat

SEQ ID NO: 104291 - DNA, 33 bp, Homo sapien
cctgaaaatcccatgaagacctccatgttatga

SEQ ID NO: 104292 - DNA, 33 bp, Homo sapien
cctgaaaatcccatgaggacctccatgttatga

SEQ ID NO: 104293 - DNA, 33 bp, Homo sapien
ttgatggatggaatataaaatgctccccttccc

SEQ ID NO: 104294 - DNA, 33 bp, Homo sapien
ttgatggatggaatatgaaatgctccccttccc

SEQ ID NO: 104295 - DNA, 33 bp, Homo sapien
aatgctttcactgaccaagtaaaccttagtaaa

SEQ ID NO: 104296 - DNA, 33 bp, Homo sapien
aatgctttcactgaccgagtaaaccttagtaaa

SEQ ID NO: 104297 - DNA, 33 bp, Homo sapien
ccacttcatcattcacagtccatgcatgtaaca

SEQ ID NO: 104298 - DNA, 33 bp, Homo sapien
ccacttcatcattcacggtccatgcatgtaaca

SEQ ID NO: 104299 - DNA, 33 bp, Homo sapien
cagaaaaacaaatatcacattcccttttacata

SEQ ID NO: 104300 - DNA, 33 bp, Homo sapien
cagaaaaacaaatatcgcattcccttttacata

SEQ ID NO: 104301 - DNA, 33 bp, Homo sapien
tggttcaaagaaaacactgctctgtaggggtgt

SEQ ID NO: 104302 - DNA, 33 bp, Homo sapien
tggttcaaagaaaacattgctctgtaggggtgt

SEQ ID NO: 104303 - DNA, 33 bp, Homo sapien
ataactgttatgaatacctcctaagtttttctc

SEQ ID NO: 104304 - DNA, 33 bp, Homo sapien
ataactgttatgaatatctcctaagtttttctc

SEQ ID NO: 104305 - DNA, 33 bp, Homo sapien
caatgttagaataataactccggggctcttctg

SEQ ID NO: 104306 - DNA, 33 bp, Homo sapien
caatgttagaataatagctccggggctcttctg

SEQ ID NO: 104307 - DNA, 33 bp, Homo sapien
ggcataattacatggaactctttttattttcaa

SEQ ID NO: 104308 - DNA, 33 bp, Homo sapien
ggcataattacatggagctctttttattttcaa

SEQ ID NO: 104309 - DNA, 33 bp, Homo sapien
gatgcaataaactagacccaaatactgagcatt

SEQ ID NO: 104310 - DNA, 33 bp, Homo sapien
gatgcaataaactagagccaaatactgagcatt

SEQ ID NO: 104311 - DNA, 33 bp, Homo sapien
tggcctgcataccaaaccatttttcatcttcaa

SEQ ID NO: 104312 - DNA, 33 bp, Homo sapien
tggcctgcataccaaatcatttttcatcttcaa

SEQ ID NO: 104313 - DNA, 33 bp, Homo sapien
agttctgatacagaaggccacatctagttgcat

SEQ ID NO: 104314 - DNA, 33 bp, Homo sapien
agttctgatacagaagtccacatctagttgcat

SEQ ID NO: 104315 - DNA, 33 bp, Homo sapien
gttttctccaactatccctgcttttaagtcttt

SEQ ID NO: 104316 - DNA, 33 bp, Homo sapien
gttttctccaactatctctgcttttaagtcttt

SEQ ID NO: 104317 - DNA, 33 bp, Homo sapien
aggaccattttctaccacaaaataaacatcagg

SEQ ID NO: 104318 - DNA, 33 bp, Homo sapien
aggaccattttctaccgcaaaataaacatcagg

SEQ ID NO: 104319 - DNA, 33 bp, Homo sapien
aggtggatggcaacaaattagtgaaattttagg

SEQ ID NO: 104320 - DNA, 33 bp, Homo sapien
aggtggatggcaacaatttagtgaaattttagg

SEQ ID NO: 104321 - DNA, 33 bp, Homo sapien
ggactactcgcaagccaaggaaagaagttccaa

SEQ ID NO: 104322 - DNA, 33 bp, Homo sapien
ggactactcgcaagccgaggaaagaagttccaa

SEQ ID NO: 104323 - DNA, 33 bp, Homo sapien
gatctaaacatatttgaaggaaagagggttgaa

SEQ ID NO: 104324 - DNA, 33 bp, Homo sapien
gatctaaacatatttgtaggaaagagggttgaa

SEQ ID NO: 104325 - DNA, 33 bp, Homo sapien
tcacagacttgatgaacgtatttctcaggctca

SEQ ID NO: 104326 - DNA, 33 bp, Homo sapien
tcacagacttgatgaatgtatttctcaggctca

SEQ ID NO: 104327 - DNA, 33 bp, Homo sapien
atgcagagaaagagtaagactggcctggactag

SEQ ID NO: 104328 - DNA, 33 bp, Homo sapien
atgcagagaaagagtacgactggcctggactag

SEQ ID NO: 104329 - DNA, 33 bp, Homo sapien
gctaggcctaccacgaaggaagatcacgcttgc

SEQ ID NO: 104330 - DNA, 33 bp, Homo sapien
gctaggcctaccacgagggaagatcacgcttgc

SEQ ID NO: 104331 - DNA, 33 bp, Homo sapien
aagtttgagtgcatgacggaagggtcagaaatg

SEQ ID NO: 104332 - DNA, 33 bp, Homo sapien
aagtttgagtgcatgatggaagggtcagaaatg

SEQ ID NO: 104333 - DNA, 33 bp, Homo sapien
cccctcctacctgtacgcagctgggctcagtaa

SEQ ID NO: 104334 - DNA, 33 bp, Homo sapien
cccctcctacctgtactcagctgggctcagtaa

SEQ ID NO: 104335 - DNA, 33 bp, Homo sapien
ctctcattcccccttcaagatcaatggttacag

SEQ ID NO: 104336 - DNA, 33 bp, Homo sapien
ctctcattcccccttcgagatcaatggttacag

SEQ ID NO: 104337 - DNA, 33 bp, Homo sapien
agtagacatgttaataaaacctgataaccttcc

SEQ ID NO: 104338 - DNA, 33 bp, Homo sapien
agtagacatgttaatataacctgataaccttcc

SEQ ID NO: 104339 - DNA, 33 bp, Homo sapien
aggaatagcttaaggagactaaagagacaattt

SEQ ID NO: 104340 - DNA, 33 bp, Homo sapien
aggaatagcttaaggatactaaagagacaattt

SEQ ID NO: 104341 - DNA, 33 bp, Homo sapien
aggagagctttgacgacgttctgggaagcctct

SEQ ID NO: 104342 - DNA, 33 bp, Homo sapien
aggagagctttgacgatgttctgggaagcctct

SEQ ID NO: 104343 - DNA, 33 bp, Homo sapien
tcactggagttaaacgccctctggttatgtgtg

SEQ ID NO: 104344 - DNA, 33 bp, Homo sapien
tcactggagttaaacgtcctctggttatgtgtg

SEQ ID NO: 104345 - DNA, 33 bp, Homo sapien
ctagacaagaacagaacggacatttgtgatgta

SEQ ID NO: 104346 - DNA, 33 bp, Homo sapien
ctagacaagaacagaatggacatttgtgatgta

SEQ ID NO: 104347 - DNA, 33 bp, Homo sapien
aactagtgatgggttacgcaactatgcagagaa

SEQ ID NO: 104348 - DNA, 33 bp, Homo sapien
aactagtgatgggttatgcaactatgcagagaa

SEQ ID NO: 104349 - DNA, 33 bp, Homo sapien
caagtatgtctagagaagtcccttgaagagatg

SEQ ID NO: 104350 - DNA, 33 bp, Homo sapien
caagtatgtctagagatgtcccttgaagagatg

SEQ ID NO: 104351 - DNA, 33 bp, Homo sapien
ttgacaaaatgccccaagatttctgtattatta

SEQ ID NO: 104352 - DNA, 33 bp, Homo sapien
ttgacaaaatgccccatgatttctgtattatta

SEQ ID NO: 104353 - DNA, 33 bp, Homo sapien
aaacaaactatggctacagtgacataagttatg

SEQ ID NO: 104354 - DNA, 33 bp, Homo sapien
aaacaaactatggctagagtgacataagttatg

SEQ ID NO: 104355 - DNA, 33 bp, Homo sapien
aacaatctcaattctcccaaaaaaggaatgtaa

SEQ ID NO: 104356 - DNA, 33 bp, Homo sapien
aacaatctcaattctctcaaaaaaggaatgtaa

SEQ ID NO: 104357 - DNA, 33 bp, Homo sapien
cctagagatttagccaaacaatgtctctcagtt

SEQ ID NO: 104358 - DNA, 33 bp, Homo sapien
cctagagatttagccagacaatgtctctcagtt

SEQ ID NO: 104359 - DNA, 33 bp, Homo sapien
tccagaggtcaagaccagaacacggaggcggga

SEQ ID NO: 104360 - DNA, 33 bp, Homo sapien
tccagaggtcaagaccggaacacggaggcggga

SEQ ID NO: 104361 - DNA, 33 bp, Homo sapien
aggggaattttggttccatttgtgctcttgtgt

SEQ ID NO: 104362 - DNA, 33 bp, Homo sapien
aggggaattttggttcgatttgtgctcttgtgt

SEQ ID NO: 104363 - DNA, 33 bp, Homo sapien
atctgacattgagagtcaaggaagtcaaggttc

SEQ ID NO: 104364 - DNA, 33 bp, Homo sapien
atctgacattgagagtgaaggaagtcaaggttc

SEQ ID NO: 104365 - DNA, 33 bp, Homo sapien
cttatagatgctcagcaagtgtttgttgaatga

SEQ ID NO: 104366 - DNA, 33 bp, Homo sapien
cttatagatgctcagcgagtgtttgttgaatga

SEQ ID NO: 104367 - DNA, 33 bp, Homo sapien
ggtcccaggtaagagaatatttgttgattaccc

SEQ ID NO: 104368 - DNA, 33 bp, Homo sapien
ggtcccaggtaagagagtatttgttgattaccc

SEQ ID NO: 104369 - DNA, 33 bp, Homo sapien
atcccgaatgcatctccctcatcttcaggaagc

SEQ ID NO: 104370 - DNA, 33 bp, Homo sapien
atcccgaatgcatctctctcatcttcaggaagc

SEQ ID NO: 104371 - DNA, 33 bp, Homo sapien
tcagccttgcttgtgagacaatttagtgcagag

SEQ ID NO: 104372 - DNA, 33 bp, Homo sapien
tcagccttgcttgtgatacaatttagtgcagag

SEQ ID NO: 104373 - DNA, 33 bp, Homo sapien
acaatactatgcagaacggaggagatgagaggg

SEQ ID NO: 104374 - DNA, 33 bp, Homo sapien
acaatactatgcagaatggaggagatgagaggg

SEQ ID NO: 104375 - DNA, 33 bp, Homo sapien
ctcacctgtcctttggaaaagatggtctccact

SEQ ID NO: 104376 - DNA, 33 bp, Homo sapien
ctcacctgtcctttgggaaagatggtctccact

SEQ ID NO: 104377 - DNA, 33 bp, Homo sapien
ttctctgtacatatgcaactcctaataaaaggc

SEQ ID NO: 104378 - DNA, 33 bp, Homo sapien
ttctctgtacatatgcgactcctaataaaaggc

SEQ ID NO: 104379 - DNA, 33 bp, Homo sapien
ggtatgctgagctttcacctccagctttttcca

SEQ ID NO: 104380 - DNA, 33 bp, Homo sapien
ggtatgctgagctttctcctccagctttttcca

SEQ ID NO: 104381 - DNA, 33 bp, Homo sapien
tctgactggcgatgccacgctcctaagtagttc

SEQ ID NO: 104382 - DNA, 33 bp, Homo sapien
tctgactggcgatgccgcgctcctaagtagttc

SEQ ID NO: 104383 - DNA, 33 bp, Homo sapien
cctccaccagagactaagatgtcatcccatagc

SEQ ID NO: 104384 - DNA, 33 bp, Homo sapien
cctccaccagagactacgatgtcatcccatagc

SEQ ID NO: 104385 - DNA, 33 bp, Homo sapien
gtaggaataattgctcactttagaacattacaa

SEQ ID NO: 104386 - DNA, 33 bp, Homo sapien
gtaggaataattgctcgctttagaacattacaa

SEQ ID NO: 104387 - DNA, 33 bp, Homo sapien
gtgatgctggacattacggtcattttctttact

SEQ ID NO: 104388 - DNA, 33 bp, Homo sapien
gtgatgctggacattatggtcattttctttact

SEQ ID NO: 104389 - DNA, 33 bp, Homo sapien
ctgctttagtgaatggcatagaccaaaagtgct

SEQ ID NO: 104390 - DNA, 33 bp, Homo sapien
ctgctttagtgaatggtatagaccaaaagtgct

SEQ ID NO: 104391 - DNA, 33 bp, Homo sapien
actactatgtgcttcccgaatgtggctaaggat

SEQ ID NO: 104392 - DNA, 33 bp, Homo sapien
actactatgtgcttcctgaatgtggctaaggat

SEQ ID NO: 104393 - DNA, 33 bp, Homo sapien
atatgagaaccattcaaagagcttgttaaaaaa

SEQ ID NO: 104394 - DNA, 33 bp, Homo sapien
atatgagaaccattcagagagcttgttaaaaaa

SEQ ID NO: 104395 - DNA, 33 bp, Homo sapien
acacaatgctgtcaacaatgacggaagcaggga

SEQ ID NO: 104396 - DNA, 33 bp, Homo sapien
acacaatgctgtcaacgatgacggaagcaggga

SEQ ID NO: 104397 - DNA, 33 bp, Homo sapien
atatgaatccaacctgcagcttataagtcaagc

SEQ ID NO: 104398 - DNA, 33 bp, Homo sapien
atatgaatccaacctgtagcttataagtcaagc

SEQ ID NO: 104399 - DNA, 33 bp, Homo sapien
ttatgggggctgtacactcttgttaaattcaag

SEQ ID NO: 104400 - DNA, 33 bp, Homo sapien
ttatgggggctgtacattcttgttaaattcaag

SEQ ID NO: 104401 - DNA, 33 bp, Homo sapien
tgaattgagtcttagaagctttaacctactatc

SEQ ID NO: 104402 - DNA, 33 bp, Homo sapien
tgaattgagtcttagaggctttaacctactatc

SEQ ID NO: 104403 - DNA, 33 bp, Homo sapien
tattccaaaacttcacaatgctgtcctttttga

SEQ ID NO: 104404 - DNA, 33 bp, Homo sapien
tattccaaaacttcactatgctgtcctttttga

SEQ ID NO: 104405 - DNA, 33 bp, Homo sapien
attttatacttccaaccgatgtccaagtactgg

SEQ ID NO: 104406 - DNA, 33 bp, Homo sapien
attttatacttccaactgatgtccaagtactgg

SEQ ID NO: 104407 - DNA, 33 bp, Homo sapien
gaaatgggttgttaggcaatatcatcatgtgaa

SEQ ID NO: 104408 - DNA, 33 bp, Homo sapien
gaaatgggttgttaggtaatatcatcatgtgaa

SEQ ID NO: 104409 - DNA, 33 bp, Homo sapien
ctattgctgggaccaccgtattcagaggcagga

SEQ ID NO: 104410 - DNA, 33 bp, Homo sapien
ctattgctgggaccactgtattcagaggcagga

SEQ ID NO: 104411 - DNA, 33 bp, Homo sapien
acctcaaggctacagaaaagtattaaattggat

SEQ ID NO: 104412 - DNA, 33 bp, Homo sapien
acctcaaggctacagataagtattaaattggat

SEQ ID NO: 104413 - DNA, 33 bp, Homo sapien
agaaaaaaggtaaccaagaaggctcatcccact

SEQ ID NO: 104414 - DNA, 33 bp, Homo sapien
agaaaaaaggtaaccatgaaggctcatcccact

SEQ ID NO: 104415 - DNA, 33 bp, Homo sapien
tacgtttgctgagatcaatgtacaactattctc

SEQ ID NO: 104416 - DNA, 33 bp, Homo sapien
tacgtttgctgagatccatgtacaactattctc

SEQ ID NO: 104417 - DNA, 33 bp, Homo sapien
tcccacttacccacaacgaccaactatatgctg

SEQ ID NO: 104418 - DNA, 33 bp, Homo sapien
tcccacttacccacaatgaccaactatatgctg

SEQ ID NO: 104419 - DNA, 33 bp, Homo sapien
gaaaaagcattactggaagactaattgtgtatg

SEQ ID NO: 104420 - DNA, 33 bp, Homo sapien
gaaaaagcattactggcagactaattgtgtatg

SEQ ID NO: 104421 - DNA, 33 bp, Homo sapien
tagcagtagaaaatggcaaaaggtaatatttag

SEQ ID NO: 104422 - DNA, 33 bp, Homo sapien
tagcagtagaaaatgggaaaaggtaatatttag

SEQ ID NO: 104423 - DNA, 33 bp, Homo sapien
cacccccaaggcaagaactgatatgatttcctc

SEQ ID NO: 104424 - DNA, 33 bp, Homo sapien
cacccccaaggcaagatctgatatgatttcctc

SEQ ID NO: 104425 - DNA, 33 bp, Homo sapien
tcactacagaaaagaaatgcttgtgttacacat

SEQ ID NO: 104426 - DNA, 33 bp, Homo sapien
tcactacagaaaagaactgcttgtgttacacat

SEQ ID NO: 104427 - DNA, 33 bp, Homo sapien
ataatttgcatttatacaataccccccggcttg

SEQ ID NO: 104428 - DNA, 33 bp, Homo sapien
ataatttgcatttatataataccccccggcttg

SEQ ID NO: 104429 - DNA, 33 bp, Homo sapien
tttttccaggtttgaaatgcaaataacagagat

SEQ ID NO: 104430 - DNA, 33 bp, Homo sapien
tttttccaggtttgaagtgcaaataacagagat

SEQ ID NO: 104431 - DNA, 33 bp, Homo sapien
ttttaaactgtaaaaccctgcaatataatgtgt

SEQ ID NO: 104432 - DNA, 33 bp, Homo sapien
ttttaaactgtaaaactctgcaatataatgtgt

SEQ ID NO: 104433 - DNA, 33 bp, Homo sapien
tctggtagaaagcaagaactctcactaaaagaa

SEQ ID NO: 104434 - DNA, 33 bp, Homo sapien
tctggtagaaagcaaggactctcactaaaagaa

SEQ ID NO: 104435 - DNA, 33 bp, Homo sapien
gcttagggcaattaccccttagtcctcacacca

SEQ ID NO: 104436 - DNA, 33 bp, Homo sapien
gcttagggcaattacctcttagtcctcacacca

SEQ ID NO: 104437 - DNA, 33 bp, Homo sapien
ttgcaacagcagaagacacactcaagtaataaa

SEQ ID NO: 104438 - DNA, 33 bp, Homo sapien
ttgcaacagcagaagatacactcaagtaataaa

SEQ ID NO: 104439 - DNA, 33 bp, Homo sapien
aatagaggttccacacagtacttgcaactttct

SEQ ID NO: 104440 - DNA, 33 bp, Homo sapien
aatagaggttccacacggtacttgcaactttct

SEQ ID NO: 104441 - DNA, 33 bp, Homo sapien
ttcaggtgagaatcagaaggaaatgagatcttt

SEQ ID NO: 104442 - DNA, 33 bp, Homo sapien
ttcaggtgagaatcagcaggaaatgagatcttt

SEQ ID NO: 104443 - DNA, 33 bp, Homo sapien
ttgttcctgctgtggccattgtagttggcggca

SEQ ID NO: 104444 - DNA, 33 bp, Homo sapien
ttgttcctgctgtggcgattgtagttggcggca

SEQ ID NO: 104445 - DNA, 33 bp, Homo sapien
tcagcaaatccagcacaggtaggaaataggaaa

SEQ ID NO: 104446 - DNA, 33 bp, Homo sapien
tcagcaaatccagcacgggtaggaaataggaaa

SEQ ID NO: 104447 - DNA, 33 bp, Homo sapien
ttccataccaacccaccatttcctatcacccac

SEQ ID NO: 104448 - DNA, 33 bp, Homo sapien
ttccataccaacccacgatttcctatcacccac

SEQ ID NO: 104449 - DNA, 33 bp, Homo sapien
tgttcggtaagtcccacagttggaagagaagca

SEQ ID NO: 104450 - DNA, 33 bp, Homo sapien
tgttcggtaagtcccatagttggaagagaagca

SEQ ID NO: 104451 - DNA, 33 bp, Homo sapien
atcattctagctgacaatactcagtagactgct

SEQ ID NO: 104452 - DNA, 33 bp, Homo sapien
atcattctagctgacagtactcagtagactgct

SEQ ID NO: 104453 - DNA, 33 bp, Homo sapien
ggtaaagatgactggaactggatatgacagaca

SEQ ID NO: 104454 - DNA, 33 bp, Homo sapien
ggtaaagatgactggacctggatatgacagaca

SEQ ID NO: 104455 - DNA, 33 bp, Homo sapien
catttgtattgtttaagtggaactagctattga

SEQ ID NO: 104456 - DNA, 33 bp, Homo sapien
catttgtattgtttaattggaactagctattga

SEQ ID NO: 104457 - DNA, 33 bp, Homo sapien
aaggtggggatcagcactgaagacacaggagag

SEQ ID NO: 104458 - DNA, 33 bp, Homo sapien
aaggtggggatcagcagtgaagacacaggagag

SEQ ID NO: 104459 - DNA, 33 bp, Homo sapien
aatctggaggccatcacgaaaatgtgtccacat

SEQ ID NO: 104460 - DNA, 33 bp, Homo sapien
aatctggaggccatcaggaaaatgtgtccacat

SEQ ID NO: 104461 - DNA, 33 bp, Homo sapien
tttaaagacaggtgcccggaattttggctttta

SEQ ID NO: 104462 - DNA, 33 bp, Homo sapien
tttaaagacaggtgcctggaattttggctttta

SEQ ID NO: 104463 - DNA, 33 bp, Homo sapien
agagcataatacagaaagagaaaaagagagaaa

SEQ ID NO: 104464 - DNA, 33 bp, Homo sapien
agagcataatacagaacgagaaaaagagagaaa

SEQ ID NO: 104465 - DNA, 33 bp, Homo sapien
gaaatgcattgaatacgcctcacctaccaaaca

SEQ ID NO: 104466 - DNA, 33 bp, Homo sapien
gaaatgcattgaatactcctcacctaccaaaca

SEQ ID NO: 104467 - DNA, 33 bp, Homo sapien
gaggatgttttgagaagaaataagtttggagaa

SEQ ID NO: 104468 - DNA, 33 bp, Homo sapien
gaggatgttttgagaataaataagtttggagaa

SEQ ID NO: 104469 - DNA, 33 bp, Homo sapien
caaacatacttgtaaacagaacacattctctgc

SEQ ID NO: 104470 - DNA, 33 bp, Homo sapien
caaacatacttgtaaatagaacacattctctgc

SEQ ID NO: 104471 - DNA, 33 bp, Homo sapien
ctaattcgttacctgaatataagcagtagaagc

SEQ ID NO: 104472 - DNA, 33 bp, Homo sapien
ctaattcgttacctgagtataagcagtagaagc

SEQ ID NO: 104473 - DNA, 33 bp, Homo sapien
cctggagcaactattaacacagtatttcttcag

SEQ ID NO: 104474 - DNA, 33 bp, Homo sapien
cctggagcaactattagcacagtatttcttcag

SEQ ID NO: 104475 - DNA, 33 bp, Homo sapien
atgggttttacaataacgcgttacaaatgagat

SEQ ID NO: 104476 - DNA, 33 bp, Homo sapien
atgggttttacaataatgcgttacaaatgagat

SEQ ID NO: 104477 - DNA, 33 bp, Homo sapien
tcctaaagatccttgacagataccagctgccca

SEQ ID NO: 104478 - DNA, 33 bp, Homo sapien
tcctaaagatccttgagagataccagctgccca

SEQ ID NO: 104479 - DNA, 33 bp, Homo sapien
actcactatatgacctaacaaatccttcaagcc

SEQ ID NO: 104480 - DNA, 33 bp, Homo sapien
actcactatatgacctgacaaatccttcaagcc

SEQ ID NO: 104481 - DNA, 33 bp, Homo sapien
gtgtcactgcatttagaaaggttggcaggatcc

SEQ ID NO: 104482 - DNA, 33 bp, Homo sapien
gtgtcactgcatttagtaaggttggcaggatcc

SEQ ID NO: 104483 - DNA, 33 bp, Homo sapien
gaaaggatccacagaaatagttgtgtgaaagac

SEQ ID NO: 104484 - DNA, 33 bp, Homo sapien
gaaaggatccacagaagtagttgtgtgaaagac

SEQ ID NO: 104485 - DNA, 33 bp, Homo sapien
cccccactatgtactcacatacatttccagact

SEQ ID NO: 104486 - DNA, 33 bp, Homo sapien
cccccactatgtactcgcatacatttccagact

SEQ ID NO: 104487 - DNA, 33 bp, Homo sapien
gttgtcctgctgaacacgaccttcctagagcta

SEQ ID NO: 104488 - DNA, 33 bp, Homo sapien
gttgtcctgctgaacatgaccttcctagagcta

SEQ ID NO: 104489 - DNA, 33 bp, Homo sapien
caagatagaggtacaacgtggcatgcagtaagg

SEQ ID NO: 104490 - DNA, 33 bp, Homo sapien
caagatagaggtacaaggtggcatgcagtaagg

SEQ ID NO: 104491 - DNA, 33 bp, Homo sapien
gtaggcagacatgaaacggcaattttaacacga

SEQ ID NO: 104492 - DNA, 33 bp, Homo sapien
gtaggcagacatgaaagggcaattttaacacga

SEQ ID NO: 104493 - DNA, 33 bp, Homo sapien
atctccacaggaagaacgtaagtgctgcagaag

SEQ ID NO: 104494 - DNA, 33 bp, Homo sapien
atctccacaggaagaatgtaagtgctgcagaag

SEQ ID NO: 104495 - DNA, 33 bp, Homo sapien
tcgacccaactgacaaaagcaatcaaccatgcc

SEQ ID NO: 104496 - DNA, 33 bp, Homo sapien
tcgacccaactgacaagagcaatcaaccatgcc

SEQ ID NO: 104497 - DNA, 33 bp, Homo sapien
cacttagcacagacaacagaagatgttggacat

SEQ ID NO: 104498 - DNA, 33 bp, Homo sapien
cacttagcacagacaatagaagatgttggacat

SEQ ID NO: 104499 - DNA, 33 bp, Homo sapien
tctgcagactctccaacgagcttgacttcttca

SEQ ID NO: 104500 - DNA, 33 bp, Homo sapien
tctgcagactctccaatgagcttgacttcttca

SEQ ID NO: 104501 - DNA, 33 bp, Homo sapien
attatgtacctgaatacgcactgtcgaaaactt

SEQ ID NO: 104502 - DNA, 33 bp, Homo sapien
attatgtacctgaatatgcactgtcgaaaactt

SEQ ID NO: 104503 - DNA, 33 bp, Homo sapien
ggtgaaaggctttgtacatagtttatcactttc

SEQ ID NO: 104504 - DNA, 33 bp, Homo sapien
ggtgaaaggctttgtagatagtttatcactttc

SEQ ID NO: 104505 - DNA, 33 bp, Homo sapien
atacacatcatagttccccttgactttaaattt

SEQ ID NO: 104506 - DNA, 33 bp, Homo sapien
atacacatcatagttctccttgactttaaattt

SEQ ID NO: 104507 - DNA, 33 bp, Homo sapien
cacctaagtctcatcactcactatgcttacttg

SEQ ID NO: 104508 - DNA, 33 bp, Homo sapien
cacctaagtctcatcattcactatgcttacttg

SEQ ID NO: 104509 - DNA, 33 bp, Homo sapien
gagcaaaagcctatcacggagttttccttgagc

SEQ ID NO: 104510 - DNA, 33 bp, Homo sapien
gagcaaaagcctatcatggagttttccttgagc

SEQ ID NO: 104511 - DNA, 33 bp, Homo sapien
ggtgctgattctcaacactaaaattacaattct

SEQ ID NO: 104512 - DNA, 33 bp, Homo sapien
ggtgctgattctcaacgctaaaattacaattct

SEQ ID NO: 104513 - DNA, 33 bp, Homo sapien
attcatgtaagtgtaaactgcaacttgtctctc

SEQ ID NO: 104514 - DNA, 33 bp, Homo sapien
attcatgtaagtgtaatctgcaacttgtctctc

SEQ ID NO: 104515 - DNA, 33 bp, Homo sapien
ctaaaaccaatgcgtacgttatagttctttatt

SEQ ID NO: 104516 - DNA, 33 bp, Homo sapien
ctaaaaccaatgcgtatgttatagttctttatt

SEQ ID NO: 104517 - DNA, 33 bp, Homo sapien
atcaagaactgagaaacatgactttgaagcttt

SEQ ID NO: 104518 - DNA, 33 bp, Homo sapien
atcaagaactgagaaatatgactttgaagcttt

SEQ ID NO: 104519 - DNA, 33 bp, Homo sapien
atgccatttgaaacatgatgttatagacttcct

SEQ ID NO: 104520 - DNA, 33 bp, Homo sapien
atgccatttgaaacattatgttatagacttcct

SEQ ID NO: 104521 - DNA, 33 bp, Homo sapien
tattagatgtttattaacacgctcctggctctc

SEQ ID NO: 104522 - DNA, 33 bp, Homo sapien
tattagatgtttattagcacgctcctggctctc

SEQ ID NO: 104523 - DNA, 33 bp, Homo sapien
gtcaaagtcactgaaacgttcacagatgcttta

SEQ ID NO: 104524 - DNA, 33 bp, Homo sapien
gtcaaagtcactgaaatgttcacagatgcttta

SEQ ID NO: 104525 - DNA, 33 bp, Homo sapien
ggtagggatgaaacacgccctagtctcctgcag

SEQ ID NO: 104526 - DNA, 33 bp, Homo sapien
ggtagggatgaaacactccctagtctcctgcag

SEQ ID NO: 104527 - DNA, 33 bp, Homo sapien
aagttgacttcctaataatagaatatgactatc

SEQ ID NO: 104528 - DNA, 33 bp, Homo sapien
aagttgacttcctaatgatagaatatgactatc

SEQ ID NO: 104529 - DNA, 33 bp, Homo sapien
gcatgaactagcatacagtaactaaaataacta

SEQ ID NO: 104530 - DNA, 33 bp, Homo sapien
gcatgaactagcatacggtaactaaaataacta

SEQ ID NO: 104531 - DNA, 33 bp, Homo sapien
gaatgcctcagaaagtaaaatctaggccatctg

SEQ ID NO: 104532 - DNA, 33 bp, Homo sapien
gaatgcctcagaaagtcaaatctaggccatctg

SEQ ID NO: 104533 - DNA, 33 bp, Homo sapien
atggttgctgtaaaaacgttttaagagaagaac

SEQ ID NO: 104534 - DNA, 33 bp, Homo sapien
atggttgctgtaaaaatgttttaagagaagaac

SEQ ID NO: 104535 - DNA, 33 bp, Homo sapien
tttgactagattcctcaagtagacttatttggt

SEQ ID NO: 104536 - DNA, 33 bp, Homo sapien
tttgactagattcctccagtagacttatttggt

SEQ ID NO: 104537 - DNA, 33 bp, Homo sapien
acagtccttatccccgacactgcatggaaagca

SEQ ID NO: 104538 - DNA, 33 bp, Homo sapien
acagtccttatccccggcactgcatggaaagca

SEQ ID NO: 104539 - DNA, 33 bp, Homo sapien
ttataattttcatgcaatcataaatccaagaag

SEQ ID NO: 104540 - DNA, 33 bp, Homo sapien
ttataattttcatgcagtcataaatccaagaag

SEQ ID NO: 104541 - DNA, 33 bp, Homo sapien
cctttctatttccatacggccaacagccccaga

SEQ ID NO: 104542 - DNA, 33 bp, Homo sapien
cctttctatttccatatggccaacagccccaga

SEQ ID NO: 104543 - DNA, 33 bp, Homo sapien
taagagctttagcaaacacttcaagtgaaaaat

SEQ ID NO: 104544 - DNA, 33 bp, Homo sapien
taagagctttagcaaagacttcaagtgaaaaat

SEQ ID NO: 104545 - DNA, 33 bp, Homo sapien
gtcagactccttgcgacagagatttgtggggcc

SEQ ID NO: 104546 - DNA, 33 bp, Homo sapien
gtcagactccttgcgagagagatttgtggggcc

SEQ ID NO: 104547 - DNA, 33 bp, Homo sapien
caaacattaccatacactgaatcaacataaaaa

SEQ ID NO: 104548 - DNA, 33 bp, Homo sapien
caaacattaccatacattgaatcaacataaaaa

SEQ ID NO: 104549 - DNA, 33 bp, Homo sapien
acgagtagcatagaatcaagcttgaaacccata

SEQ ID NO: 104550 - DNA, 33 bp, Homo sapien
acgagtagcatagaattaagcttgaaacccata

SEQ ID NO: 104551 - DNA, 33 bp, Homo sapien
aggacactgaggcataaaactgcatttaattct

SEQ ID NO: 104552 - DNA, 33 bp, Homo sapien
aggacactgaggcatacaactgcatttaattct

SEQ ID NO: 104553 - DNA, 33 bp, Homo sapien
tccagggaaagtcaatcatgatgggtgtcattg

SEQ ID NO: 104554 - DNA, 33 bp, Homo sapien
tccagggaaagtcaattatgatgggtgtcattg

SEQ ID NO: 104555 - DNA, 33 bp, Homo sapien
gagtgccactgttacactggtatccacccatga

SEQ ID NO: 104556 - DNA, 33 bp, Homo sapien
gagtgccactgttacattggtatccacccatga

SEQ ID NO: 104557 - DNA, 33 bp, Homo sapien
ctccaaactggaggaaatggcacgagttgtgat

SEQ ID NO: 104558 - DNA, 33 bp, Homo sapien
ctccaaactggaggaagtggcacgagttgtgat

SEQ ID NO: 104559 - DNA, 33 bp, Homo sapien
taaaaatcaatttgtaagctttctgatgactga

SEQ ID NO: 104560 - DNA, 33 bp, Homo sapien
taaaaatcaatttgtacgctttctgatgactga

SEQ ID NO: 104561 - DNA, 33 bp, Homo sapien
tccctgtaactgaatgcatcatcttttgttttt

SEQ ID NO: 104562 - DNA, 33 bp, Homo sapien
tccctgtaactgaatgtatcatcttttgttttt

SEQ ID NO: 104563 - DNA, 33 bp, Homo sapien
ctctgtcctaaccttacagagatgacaatttga

SEQ ID NO: 104564 - DNA, 33 bp, Homo sapien
ctctgtcctaaccttatagagatgacaatttga

SEQ ID NO: 104565 - DNA, 33 bp, Homo sapien
gactaattaaacaaaccactttatatccttttt

SEQ ID NO: 104566 - DNA, 33 bp, Homo sapien
gactaattaaacaaacgactttatatccttttt

SEQ ID NO: 104567 - DNA, 33 bp, Homo sapien
gagatcaaggttgaagaattgcttaaaggcggg

SEQ ID NO: 104568 - DNA, 33 bp, Homo sapien
gagatcaaggttgaaggattgcttaaaggcggg

SEQ ID NO: 104569 - DNA, 33 bp, Homo sapien
gtgtgatgttgaaaaccagatttcctttcattt

SEQ ID NO: 104570 - DNA, 33 bp, Homo sapien
gtgtgatgttgaaaactagatttcctttcattt

SEQ ID NO: 104571 - DNA, 33 bp, Homo sapien
ttcaggcagaaaaacaaaggagcagcttcgagc

SEQ ID NO: 104572 - DNA, 33 bp, Homo sapien
ttcaggcagaaaaacacaggagcagcttcgagc

SEQ ID NO: 104573 - DNA, 33 bp, Homo sapien
aataaaaataaataaagtcagtcagatgagggc

SEQ ID NO: 104574 - DNA, 33 bp, Homo sapien
aataaaaataaataaattcagtcagatgagggc

SEQ ID NO: 104575 - DNA, 33 bp, Homo sapien
agagagtgctctgaaaagttacagtgtaacagt

SEQ ID NO: 104576 - DNA, 33 bp, Homo sapien
agagagtgctctgaaacgttacagtgtaacagt

SEQ ID NO: 104577 - DNA, 33 bp, Homo sapien
gttctttgcccaatgacattattaacttgccta

SEQ ID NO: 104578 - DNA, 33 bp, Homo sapien
gttctttgcccaatgatattattaacttgccta

SEQ ID NO: 104579 - DNA, 33 bp, Homo sapien
agatcatggcaaagaaatgagtcgtttggagtt

SEQ ID NO: 104580 - DNA, 33 bp, Homo sapien
agatcatggcaaagaagtgagtcgtttggagtt

SEQ ID NO: 104581 - DNA, 33 bp, Homo sapien
tagaatgaatggatttaaaaaaagggatattct

SEQ ID NO: 104582 - DNA, 33 bp, Homo sapien
tagaatgaatggattttaaaaaagggatattct

SEQ ID NO: 104583 - DNA, 33 bp, Homo sapien
gcacagatgttgttgaactccaatttcaagcca

SEQ ID NO: 104584 - DNA, 33 bp, Homo sapien
gcacagatgttgttgagctccaatttcaagcca

SEQ ID NO: 104585 - DNA, 33 bp, Homo sapien
atagacccaaactgaactaatggtatgtatcaa

SEQ ID NO: 104586 - DNA, 33 bp, Homo sapien
atagacccaaactgaattaatggtatgtatcaa

SEQ ID NO: 104587 - DNA, 33 bp, Homo sapien
tccatgctcctttagaaagtgtagtgtgtaaat

SEQ ID NO: 104588 - DNA, 33 bp, Homo sapien
tccatgctcctttagagagtgtagtgtgtaaat

SEQ ID NO: 104589 - DNA, 33 bp, Homo sapien
tggggcctaactggaactgataatcttgcttac

SEQ ID NO: 104590 - DNA, 33 bp, Homo sapien
tggggcctaactggaattgataatcttgcttac

SEQ ID NO: 104591 - DNA, 33 bp, Homo sapien
gtgaagaaactgaaaacgactggctgaagtttg

SEQ ID NO: 104592 - DNA, 33 bp, Homo sapien
gtgaagaaactgaaaatgactggctgaagtttg

SEQ ID NO: 104593 - DNA, 33 bp, Homo sapien
tcaaagccacagaatcagaataaacagtccctg

SEQ ID NO: 104594 - DNA, 33 bp, Homo sapien
tcaaagccacagaatcggaataaacagtccctg

SEQ ID NO: 104595 - DNA, 33 bp, Homo sapien
tccatgagaactgtaaagtcttaacttgcttag

SEQ ID NO: 104596 - DNA, 33 bp, Homo sapien
tccatgagaactgtaaggtcttaacttgcttag

SEQ ID NO: 104597 - DNA, 33 bp, Homo sapien
atattaattttgatcaatctgtgtacatacata

SEQ ID NO: 104598 - DNA, 33 bp, Homo sapien
atattaattttgatcagtctgtgtacatacata

SEQ ID NO: 104599 - DNA, 33 bp, Homo sapien
ctgtaaacttgaggcaatgaggacgcacagtta

SEQ ID NO: 104600 - DNA, 33 bp, Homo sapien
ctgtaaacttgaggcagtgaggacgcacagtta

SEQ ID NO: 104601 - DNA, 33 bp, Homo sapien
gatttcaactgtgccaagttttaattaatgtac

SEQ ID NO: 104602 - DNA, 33 bp, Homo sapien
gatttcaactgtgccatgttttaattaatgtac

SEQ ID NO: 104603 - DNA, 33 bp, Homo sapien
tcttcatgatacagaacaaaaatgtctgagaat

SEQ ID NO: 104604 - DNA, 33 bp, Homo sapien
tcttcatgatacagaataaaaatgtctgagaat

SEQ ID NO: 104605 - DNA, 33 bp, Homo sapien
taattcagtattaccactagactctaggtggca

SEQ ID NO: 104606 - DNA, 33 bp, Homo sapien
taattcagtattaccattagactctaggtggca

SEQ ID NO: 104607 - DNA, 33 bp, Homo sapien
ccatgaagtacagaaacagagtaagcttttgag

SEQ ID NO: 104608 - DNA, 33 bp, Homo sapien
ccatgaagtacagaaatagagtaagcttttgag

SEQ ID NO: 104609 - DNA, 33 bp, Homo sapien
cccggcctttctgcaaacattttaaaattcgag

SEQ ID NO: 104610 - DNA, 33 bp, Homo sapien
cccggcctttctgcaatcattttaaaattcgag

SEQ ID NO: 104611 - DNA, 33 bp, Homo sapien
gcctcactgatttttacaatagcccaatgactg

SEQ ID NO: 104612 - DNA, 33 bp, Homo sapien
gcctcactgatttttataatagcccaatgactg

SEQ ID NO: 104613 - DNA, 33 bp, Homo sapien
ttggttaaattaaggcagaatatggcatagaaa

SEQ ID NO: 104614 - DNA, 33 bp, Homo sapien
ttggttaaattaaggcggaatatggcatagaaa

SEQ ID NO: 104615 - DNA, 33 bp, Homo sapien
ttctatatttaccatgcactctgacagcagctg

SEQ ID NO: 104616 - DNA, 33 bp, Homo sapien
ttctatatttaccatgtactctgacagcagctg

SEQ ID NO: 104617 - DNA, 33 bp, Homo sapien
gtgtttgttttgatgcaaagcctccagttttgt

SEQ ID NO: 104618 - DNA, 33 bp, Homo sapien
gtgtttgttttgatgcgaagcctccagttttgt

SEQ ID NO: 104619 - DNA, 33 bp, Homo sapien
ggctttctccatgcaactaaaatagccttgcaa

SEQ ID NO: 104620 - DNA, 33 bp, Homo sapien
ggctttctccatgcaattaaaatagccttgcaa

SEQ ID NO: 104621 - DNA, 33 bp, Homo sapien
ggcattcagtcactgcgaagtattcgttgccat

SEQ ID NO: 104622 - DNA, 33 bp, Homo sapien
ggcattcagtcactgctaagtattcgttgccat

SEQ ID NO: 104623 - DNA, 33 bp, Homo sapien
ttcgttgccattctgacaagccaggattttcac

SEQ ID NO: 104624 - DNA, 33 bp, Homo sapien
ttcgttgccattctgataagccaggattttcac

SEQ ID NO: 104625 - DNA, 33 bp, Homo sapien
attgtgggttggtttaagaatttcacaagagaa

SEQ ID NO: 104626 - DNA, 33 bp, Homo sapien
attgtgggttggtttaggaatttcacaagagaa

SEQ ID NO: 104627 - DNA, 33 bp, Homo sapien
tttagacaccaatccacgcagaagcgacagccc

SEQ ID NO: 104628 - DNA, 33 bp, Homo sapien
tttagacaccaatccatgcagaagcgacagccc

SEQ ID NO: 104629 - DNA, 33 bp, Homo sapien
aataacaataaatagcacaacaacttaatttta

SEQ ID NO: 104630 - DNA, 33 bp, Homo sapien
aataacaataaatagcgcaacaacttaatttta

SEQ ID NO: 104631 - DNA, 33 bp, Homo sapien
gttctttaaaagcaagaatcatattttacattt

SEQ ID NO: 104632 - DNA, 33 bp, Homo sapien
gttctttaaaagcaaggatcatattttacattt

SEQ ID NO: 104633 - DNA, 33 bp, Homo sapien
tttccccttctgtctcaatcaaccaattacaaa

SEQ ID NO: 104634 - DNA, 33 bp, Homo sapien
tttccccttctgtctcgatcaaccaattacaaa

SEQ ID NO: 104635 - DNA, 33 bp, Homo sapien
ttgagtctaaaatttgaaactaagattcatgca

SEQ ID NO: 104636 - DNA, 33 bp, Homo sapien
ttgagtctaaaatttgtaactaagattcatgca

SEQ ID NO: 104637 - DNA, 33 bp, Homo sapien
tagctgagaacacttacgaatctaaaaatactt

SEQ ID NO: 104638 - DNA, 33 bp, Homo sapien
tagctgagaacacttatgaatctaaaaatactt

SEQ ID NO: 104639 - DNA, 33 bp, Homo sapien
tggcataaaaagaaaacggaatttgtacaacac

SEQ ID NO: 104640 - DNA, 33 bp, Homo sapien
tggcataaaaagaaaatggaatttgtacaacac

SEQ ID NO: 104641 - DNA, 33 bp, Homo sapien
accagtgcctgggtcagcttcccaactagcatg

SEQ ID NO: 104642 - DNA, 33 bp, Homo sapien
accagtgcctgggtcatcttcccaactagcatg

SEQ ID NO: 104643 - DNA, 33 bp, Homo sapien
actgagaaagaaaaataacgtcggtcagcccga

SEQ ID NO: 104644 - DNA, 33 bp, Homo sapien
actgagaaagaaaaatgacgtcggtcagcccga

SEQ ID NO: 104645 - DNA, 33 bp, Homo sapien
agcactttgtatgttcccctgaaaatgtaggac

SEQ ID NO: 104646 - DNA, 33 bp, Homo sapien
agcactttgtatgttcgcctgaaaatgtaggac

SEQ ID NO: 104647 - DNA, 33 bp, Homo sapien
aaattaagtaaagtaactaggaacaactgtgta

SEQ ID NO: 104648 - DNA, 33 bp, Homo sapien
aaattaagtaaagtaagtaggaacaactgtgta

SEQ ID NO: 104649 - DNA, 33 bp, Homo sapien
ctgtttttctttactacagtagcacccattctc

SEQ ID NO: 104650 - DNA, 33 bp, Homo sapien
ctgtttttctttactatagtagcacccattctc

SEQ ID NO: 104651 - DNA, 33 bp, Homo sapien
tggtatcagctcactcgctcttaaatgttcatc

SEQ ID NO: 104652 - DNA, 33 bp, Homo sapien
tggtatcagctcactctctcttaaatgttcatc

SEQ ID NO: 104653 - DNA, 33 bp, Homo sapien
caaggtatataaagaagcactgtacaaacatgt

SEQ ID NO: 104654 - DNA, 33 bp, Homo sapien
caaggtatataaagaatcactgtacaaacatgt

SEQ ID NO: 104655 - DNA, 33 bp, Homo sapien
ggcaagattaaaatcacggcaggtccggaggga

SEQ ID NO: 104656 - DNA, 33 bp, Homo sapien
ggcaagattaaaatcatggcaggtccggaggga

SEQ ID NO: 104657 - DNA, 33 bp, Homo sapien
gtggtattaaaaggtaagactcccgaccaggca

SEQ ID NO: 104658 - DNA, 33 bp, Homo sapien
gtggtattaaaaggtaggactcccgaccaggca

SEQ ID NO: 104659 - DNA, 33 bp, Homo sapien
actttccactttcagcaaacggtgtttttgcaa

SEQ ID NO: 104660 - DNA, 33 bp, Homo sapien
actttccactttcagctaacggtgtttttgcaa

SEQ ID NO: 104661 - DNA, 33 bp, Homo sapien
ctactttattcactgaactcggcatttattttg

SEQ ID NO: 104662 - DNA, 33 bp, Homo sapien
ctactttattcactgagctcggcatttattttg

SEQ ID NO: 104663 - DNA, 33 bp, Homo sapien
caagattgttgaccctcaaatgttgccagagct

SEQ ID NO: 104664 - DNA, 33 bp, Homo sapien
caagattgttgacccttaaatgttgccagagct

SEQ ID NO: 104665 - DNA, 33 bp, Homo sapien
tgtacataaaatggtacccacatatcctgatgt

SEQ ID NO: 104666 - DNA, 33 bp, Homo sapien
tgtacataaaatggtatccacatatcctgatgt

SEQ ID NO: 104667 - DNA, 33 bp, Homo sapien
aactcagcacacaaaactagtaaacaaagaagg

SEQ ID NO: 104668 - DNA, 33 bp, Homo sapien
aactcagcacacaaaattagtaaacaaagaagg

SEQ ID NO: 104669 - DNA, 33 bp, Homo sapien
gttttattgctctgcacgtgtgtcacattttaa

SEQ ID NO: 104670 - DNA, 33 bp, Homo sapien
gttttattgctctgcatgtgtgtcacattttaa

SEQ ID NO: 104671 - DNA, 33 bp, Homo sapien
ggtagaaatagcaagagaaccagaatgagaatt

SEQ ID NO: 104672 - DNA, 33 bp, Homo sapien
ggtagaaatagcaagataaccagaatgagaatt

SEQ ID NO: 104673 - DNA, 33 bp, Homo sapien
ctctacaaaaaaatacaataattagctgggcct

SEQ ID NO: 104674 - DNA, 33 bp, Homo sapien
ctctacaaaaaaatacgataattagctgggcct

SEQ ID NO: 104675 - DNA, 33 bp, Homo sapien
tacctttagaccaaccagatacattgaattagc

SEQ ID NO: 104676 - DNA, 33 bp, Homo sapien
tacctttagaccaaccggatacattgaattagc

SEQ ID NO: 104677 - DNA, 33 bp, Homo sapien
gtttttaacaacatgaagagcaataacagttaa

SEQ ID NO: 104678 - DNA, 33 bp, Homo sapien
gtttttaacaacatgaggagcaataacagttaa

SEQ ID NO: 104679 - DNA, 33 bp, Homo sapien
tcaccctcctgcagccaatgcttcagggagaaa

SEQ ID NO: 104680 - DNA, 33 bp, Homo sapien
tcaccctcctgcagccgatgcttcagggagaaa

SEQ ID NO: 104681 - DNA, 33 bp, Homo sapien
ccccacgcttcatcccactctccagtttgcagg

SEQ ID NO: 104682 - DNA, 33 bp, Homo sapien
ccccacgcttcatcccgctctccagtttgcagg

SEQ ID NO: 104683 - DNA, 33 bp, Homo sapien
tgggcacgcatgactcaagggcaaggaatgaaa

SEQ ID NO: 104684 - DNA, 33 bp, Homo sapien
tgggcacgcatgactcgagggcaaggaatgaaa

SEQ ID NO: 104685 - DNA, 33 bp, Homo sapien
tgggatgagacatcacaggaaaagatccacagg

SEQ ID NO: 104686 - DNA, 33 bp, Homo sapien
tgggatgagacatcacgggaaaagatccacagg

SEQ ID NO: 104687 - DNA, 33 bp, Homo sapien
tccccaggactgcaacactcaggacaccaccag

SEQ ID NO: 104688 - DNA, 33 bp, Homo sapien
tccccaggactgcaaccctcaggacaccaccag

SEQ ID NO: 104689 - DNA, 33 bp, Homo sapien
tattgtaagccctacaaccttcatctcatccag

SEQ ID NO: 104690 - DNA, 33 bp, Homo sapien
tattgtaagccctacagccttcatctcatccag

SEQ ID NO: 104691 - DNA, 33 bp, Homo sapien
aaattggaaccgtacacgcatatgcacacaagt

SEQ ID NO: 104692 - DNA, 33 bp, Homo sapien
aaattggaaccgtacatgcatatgcacacaagt

SEQ ID NO: 104693 - DNA, 33 bp, Homo sapien
gacattaaattgtgaacgctagaaaaaagagta

SEQ ID NO: 104694 - DNA, 33 bp, Homo sapien
gacattaaattgtgaatgctagaaaaaagagta

SEQ ID NO: 104695 - DNA, 33 bp, Homo sapien
ccagaaccatctttccaccaagtgagaggctgg

SEQ ID NO: 104696 - DNA, 33 bp, Homo sapien
ccagaaccatctttccgccaagtgagaggctgg

SEQ ID NO: 104697 - DNA, 33 bp, Homo sapien
tcagccagatgtggggaaaattaaaagagagat

SEQ ID NO: 104698 - DNA, 33 bp, Homo sapien
tcagccagatgtggggcaaattaaaagagagat

SEQ ID NO: 104699 - DNA, 33 bp, Homo sapien
gccctttctcctctccaactcgtttttctggat

SEQ ID NO: 104700 - DNA, 33 bp, Homo sapien
gccctttctcctctccgactcgtttttctggat

SEQ ID NO: 104701 - DNA, 33 bp, Homo sapien
ccgggtgtagatccaggctcctgccttcacagc

SEQ ID NO: 104702 - DNA, 33 bp, Homo sapien
ccgggtgtagatccagtctcctgccttcacagc

SEQ ID NO: 104703 - DNA, 33 bp, Homo sapien
ttggaattcaggtacaacaaccagcattaacat

SEQ ID NO: 104704 - DNA, 33 bp, Homo sapien
ttggaattcaggtacagcaaccagcattaacat

SEQ ID NO: 104705 - DNA, 33 bp, Homo sapien
tcaaggactgctgcctaagatagaagtcagccc

SEQ ID NO: 104706 - DNA, 33 bp, Homo sapien
tcaaggactgctgcctgagatagaagtcagccc

SEQ ID NO: 104707 - DNA, 33 bp, Homo sapien
ggggaactattcaatacaattttatgcagtgtg

SEQ ID NO: 104708 - DNA, 33 bp, Homo sapien
ggggaactattcaatagaattttatgcagtgtg

SEQ ID NO: 104709 - DNA, 33 bp, Homo sapien
aggtgaggagagttgacgtgaatttcaggaaca

SEQ ID NO: 104710 - DNA, 33 bp, Homo sapien
aggtgaggagagttgatgtgaatttcaggaaca

SEQ ID NO: 104711 - DNA, 33 bp, Homo sapien
ggcaggaaattgacacaattggatttgcactct

SEQ ID NO: 104712 - DNA, 33 bp, Homo sapien
ggcaggaaattgacacgattggatttgcactct

SEQ ID NO: 104713 - DNA, 33 bp, Homo sapien
gggaatcaccaaattccaatgcactttaagtac

SEQ ID NO: 104714 - DNA, 33 bp, Homo sapien
gggaatcaccaaattctaatgcactttaagtac

SEQ ID NO: 104715 - DNA, 33 bp, Homo sapien
ccaggtatgaggagaaggacgtgagatgaaggg

SEQ ID NO: 104716 - DNA, 33 bp, Homo sapien
ccaggtatgaggagaatgacgtgagatgaaggg

SEQ ID NO: 104717 - DNA, 33 bp, Homo sapien
ctttctaagtacagaacgatggacagacactgc

SEQ ID NO: 104718 - DNA, 33 bp, Homo sapien
ctttctaagtacagaatgatggacagacactgc

SEQ ID NO: 104719 - DNA, 33 bp, Homo sapien
actcatgtctttcacaatctacatgtaattcat

SEQ ID NO: 104720 - DNA, 33 bp, Homo sapien
actcatgtctttcacactctacatgtaattcat

SEQ ID NO: 104721 - DNA, 33 bp, Homo sapien
tctgttgcagatgggccatagcgaaatgagtgg

SEQ ID NO: 104722 - DNA, 33 bp, Homo sapien
tctgttgcagatgggcgatagcgaaatgagtgg

SEQ ID NO: 104723 - DNA, 33 bp, Homo sapien
aaatccatggatgttacaagtatggcctctctg

SEQ ID NO: 104724 - DNA, 33 bp, Homo sapien
aaatccatggatgttataagtatggcctctctg

SEQ ID NO: 104725 - DNA, 33 bp, Homo sapien
tgaataattgtaaaagaattgccatctggaaga

SEQ ID NO: 104726 - DNA, 33 bp, Homo sapien
tgaataattgtaaaaggattgccatctggaaga

SEQ ID NO: 104727 - DNA, 33 bp, Homo sapien
gccattaaaatttggccgagttacttgctgata

SEQ ID NO: 104728 - DNA, 33 bp, Homo sapien
gccattaaaatttggctgagttacttgctgata

SEQ ID NO: 104729 - DNA, 33 bp, Homo sapien
ttaaactttaccaggaggaactcagacttaaac

SEQ ID NO: 104730 - DNA, 33 bp, Homo sapien
ttaaactttaccaggatgaactcagacttaaac

SEQ ID NO: 104731 - DNA, 33 bp, Homo sapien
cattggatatgtggagaaaattgatggttgaac

SEQ ID NO: 104732 - DNA, 33 bp, Homo sapien
cattggatatgtggaggaaattgatggttgaac

SEQ ID NO: 104733 - DNA, 33 bp, Homo sapien
gctatagatacctagaacgtaacagaaacaaag

SEQ ID NO: 104734 - DNA, 33 bp, Homo sapien
gctatagatacctagaccgtaacagaaacaaag

SEQ ID NO: 104735 - DNA, 33 bp, Homo sapien
aagtaaaactgtactcaattgcatggctctgtt

SEQ ID NO: 104736 - DNA, 33 bp, Homo sapien
aagtaaaactgtactcgattgcatggctctgtt

SEQ ID NO: 104737 - DNA, 33 bp, Homo sapien
gtctagtattcatacaagatgggcttgcctagt

SEQ ID NO: 104738 - DNA, 33 bp, Homo sapien
gtctagtattcatacacgatgggcttgcctagt

SEQ ID NO: 104739 - DNA, 33 bp, Homo sapien
atccaaatactcaaaaagcaattgaaaaggaat

SEQ ID NO: 104740 - DNA, 33 bp, Homo sapien
atccaaatactcaaaaggcaattgaaaaggaat

SEQ ID NO: 104741 - DNA, 33 bp, Homo sapien
tagtgggcttttcctcaaaatgagttctttttc

SEQ ID NO: 104742 - DNA, 33 bp, Homo sapien
tagtgggcttttcctccaaatgagttctttttc

SEQ ID NO: 104743 - DNA, 33 bp, Homo sapien
cctcccaagtagcagcaactataggcacaccat

SEQ ID NO: 104744 - DNA, 33 bp, Homo sapien
cctcccaagtagcagcgactataggcacaccat

SEQ ID NO: 104745 - DNA, 33 bp, Homo sapien
ccatctggtacttccagtatagttcatcctaag

SEQ ID NO: 104746 - DNA, 33 bp, Homo sapien
ccatctggtacttccattatagttcatcctaag

SEQ ID NO: 104747 - DNA, 33 bp, Homo sapien
gcataagatgtccctacgtaaaatgctagtgta

SEQ ID NO: 104748 - DNA, 33 bp, Homo sapien
gcataagatgtccctatgtaaaatgctagtgta

SEQ ID NO: 104749 - DNA, 33 bp, Homo sapien
atcctggtcaaatttgaaactgtaggcagcagg

SEQ ID NO: 104750 - DNA, 33 bp, Homo sapien
atcctggtcaaatttggaactgtaggcagcagg

SEQ ID NO: 104751 - DNA, 33 bp, Homo sapien
ctactctttccaacacactgcatgccagcctcc

SEQ ID NO: 104752 - DNA, 33 bp, Homo sapien
ctactctttccaacacgctgcatgccagcctcc

SEQ ID NO: 104753 - DNA, 33 bp, Homo sapien
agctggtaaaggtaagcagaggatcgtatacat

SEQ ID NO: 104754 - DNA, 33 bp, Homo sapien
agctggtaaaggtaagtagaggatcgtatacat

SEQ ID NO: 104755 - DNA, 33 bp, Homo sapien
ttcctacttcaatccccgatggcatgccagggc

SEQ ID NO: 104756 - DNA, 33 bp, Homo sapien
ttcctacttcaatccctgatggcatgccagggc

SEQ ID NO: 104757 - DNA, 33 bp, Homo sapien
atggtgatcattttggcaggtttctgtggctgg

SEQ ID NO: 104758 - DNA, 33 bp, Homo sapien
atggtgatcattttggtaggtttctgtggctgg

SEQ ID NO: 104759 - DNA, 33 bp, Homo sapien
tctatcagaagtcctaagtagcattagcatatg

SEQ ID NO: 104760 - DNA, 33 bp, Homo sapien
tctatcagaagtcctacgtagcattagcatatg

SEQ ID NO: 104761 - DNA, 33 bp, Homo sapien
ataaaaatgaaaatgaagctgacgtgcctgact

SEQ ID NO: 104762 - DNA, 33 bp, Homo sapien
ataaaaatgaaaatgaggctgacgtgcctgact

SEQ ID NO: 104763 - DNA, 33 bp, Homo sapien
atcaaactaattatcaactgaaaaatacacatt

SEQ ID NO: 104764 - DNA, 33 bp, Homo sapien
atcaaactaattatcagctgaaaaatacacatt

SEQ ID NO: 104765 - DNA, 33 bp, Homo sapien
aggcttcctcggggaaagtattcttatcaggca

SEQ ID NO: 104766 - DNA, 33 bp, Homo sapien
aggcttcctcggggaacgtattcttatcaggca

SEQ ID NO: 104767 - DNA, 33 bp, Homo sapien
tgtaacttgggagaaacggcttatgaaaactgt

SEQ ID NO: 104768 - DNA, 33 bp, Homo sapien
tgtaacttgggagaaatggcttatgaaaactgt

SEQ ID NO: 104769 - DNA, 33 bp, Homo sapien
tgtatcttttggacatcacccttacaacatagg

SEQ ID NO: 104770 - DNA, 33 bp, Homo sapien
tgtatcttttggacattacccttacaacatagg

SEQ ID NO: 104771 - DNA, 33 bp, Homo sapien
gtggttcaggatgctaactggcattacagaaac

SEQ ID NO: 104772 - DNA, 33 bp, Homo sapien
gtggttcaggatgctagctggcattacagaaac

SEQ ID NO: 104773 - DNA, 33 bp, Homo sapien
tgcttctgtcttcccccgatttttaaatgaaac

SEQ ID NO: 104774 - DNA, 33 bp, Homo sapien
tgcttctgtcttcccctgatttttaaatgaaac

SEQ ID NO: 104775 - DNA, 33 bp, Homo sapien
aagacacaaacaggcaaactcatgctatcctct

SEQ ID NO: 104776 - DNA, 33 bp, Homo sapien
aagacacaaacaggcacactcatgctatcctct

SEQ ID NO: 104777 - DNA, 33 bp, Homo sapien
aatctatttagcaaagaaaagccttgggaagta

SEQ ID NO: 104778 - DNA, 33 bp, Homo sapien
aatctatttagcaaaggaaagccttgggaagta

SEQ ID NO: 104779 - DNA, 33 bp, Homo sapien
tgaatcatgggacttacatttgggttaaagcac

SEQ ID NO: 104780 - DNA, 33 bp, Homo sapien
tgaatcatgggacttatatttgggttaaagcac

SEQ ID NO: 104781 - DNA, 33 bp, Homo sapien
aatgctgtatgtaagaacctacctctgcaaggc

SEQ ID NO: 104782 - DNA, 33 bp, Homo sapien
aatgctgtatgtaagagcctacctctgcaaggc

SEQ ID NO: 104783 - DNA, 33 bp, Homo sapien
aggacagtgtgggcacaagtgctgcccttttgt

SEQ ID NO: 104784 - DNA, 33 bp, Homo sapien
aggacagtgtgggcacgagtgctgcccttttgt

SEQ ID NO: 104785 - DNA, 33 bp, Homo sapien
ccactctgcacctccaccatctgtctttgcagc

SEQ ID NO: 104786 - DNA, 33 bp, Homo sapien
ccactctgcacctccatcatctgtctttgcagc

SEQ ID NO: 104787 - DNA, 33 bp, Homo sapien
atcctcatcctatcatcagggactgtcaagagc

SEQ ID NO: 104788 - DNA, 33 bp, Homo sapien
atcctcatcctatcattagggactgtcaagagc

SEQ ID NO: 104789 - DNA, 33 bp, Homo sapien
acatagaaataatgaccctggatttagtgacag

SEQ ID NO: 104790 - DNA, 33 bp, Homo sapien
acatagaaataatgactctggatttagtgacag

SEQ ID NO: 104791 - DNA, 33 bp, Homo sapien
acaactgccttataaaagctcgagtaaccgtca

SEQ ID NO: 104792 - DNA, 33 bp, Homo sapien
acaactgccttataaatgctcgagtaaccgtca

SEQ ID NO: 104793 - DNA, 33 bp, Homo sapien
ggtatgtacctgtttgaactttaatttagagtg

SEQ ID NO: 104794 - DNA, 33 bp, Homo sapien
ggtatgtacctgtttggactttaatttagagtg

SEQ ID NO: 104795 - DNA, 33 bp, Homo sapien
gctggagatgagagtcaagaagccagggttctg

SEQ ID NO: 104796 - DNA, 33 bp, Homo sapien
gctggagatgagagtcgagaagccagggttctg

SEQ ID NO: 104797 - DNA, 33 bp, Homo sapien
atgagcatagaacaaaatgaacaaagtgaatta

SEQ ID NO: 104798 - DNA, 33 bp, Homo sapien
atgagcatagaacaaagtgaacaaagtgaatta

SEQ ID NO: 104799 - DNA, 33 bp, Homo sapien
agagaactactgctagcatacttggtgttgttg

SEQ ID NO: 104800 - DNA, 33 bp, Homo sapien
agagaactactgctagtatacttggtgttgttg

SEQ ID NO: 104801 - DNA, 33 bp, Homo sapien
ctctgaaggatgcaaaaacttagttccataaag

SEQ ID NO: 104802 - DNA, 33 bp, Homo sapien
ctctgaaggatgcaaagacttagttccataaag

SEQ ID NO: 104803 - DNA, 33 bp, Homo sapien
tgggttcctgtccaaactaaaccctggctcctc

SEQ ID NO: 104804 - DNA, 33 bp, Homo sapien
tgggttcctgtccaaattaaaccctggctcctc

SEQ ID NO: 104805 - DNA, 33 bp, Homo sapien
aaacagcatcatctcaccagtttttgttttgag

SEQ ID NO: 104806 - DNA, 33 bp, Homo sapien
aaacagcatcatctcatcagtttttgttttgag

SEQ ID NO: 104807 - DNA, 33 bp, Homo sapien
attttagagacttgcactatttgacaaatggta

SEQ ID NO: 104808 - DNA, 33 bp, Homo sapien
attttagagacttgcattatttgacaaatggta

SEQ ID NO: 104809 - DNA, 33 bp, Homo sapien
gggacctggagcttccaactcctagccttaaaa

SEQ ID NO: 104810 - DNA, 33 bp, Homo sapien
gggacctggagcttccgactcctagccttaaaa

SEQ ID NO: 104811 - DNA, 33 bp, Homo sapien
gatgtacataaaggccccttgtaagggattaag

SEQ ID NO: 104812 - DNA, 33 bp, Homo sapien
gatgtacataaaggcctcttgtaagggattaag

SEQ ID NO: 104813 - DNA, 33 bp, Homo sapien
aaatagtctaatatacaaaagtgtgtaaacagg

SEQ ID NO: 104814 - DNA, 33 bp, Homo sapien
aaatagtctaatatacgaaagtgtgtaaacagg

SEQ ID NO: 104815 - DNA, 33 bp, Homo sapien
ttctactcaccaaatacatcatgctgtttcata

SEQ ID NO: 104816 - DNA, 33 bp, Homo sapien
ttctactcaccaaatatatcatgctgtttcata

SEQ ID NO: 104817 - DNA, 33 bp, Homo sapien
aggaggctttactagccataacgtggtaagcca

SEQ ID NO: 104818 - DNA, 33 bp, Homo sapien
aggaggctttactagcgataacgtggtaagcca

SEQ ID NO: 104819 - DNA, 33 bp, Homo sapien
ccagtggttatagggacataagaagtacacagg

SEQ ID NO: 104820 - DNA, 33 bp, Homo sapien
ccagtggttatagggatataagaagtacacagg

SEQ ID NO: 104821 - DNA, 33 bp, Homo sapien
gtgcggtgaagagataagggaaacaaggccaga

SEQ ID NO: 104822 - DNA, 33 bp, Homo sapien
gtgcggtgaagagatacgggaaacaaggccaga

SEQ ID NO: 104823 - DNA, 33 bp, Homo sapien
ttttaatgtccaagaaacttaacacatagtccc

SEQ ID NO: 104824 - DNA, 33 bp, Homo sapien
ttttaatgtccaagaaccttaacacatagtccc

SEQ ID NO: 104825 - DNA, 33 bp, Homo sapien
taacattaaatcagcactataccttgccaaaat

SEQ ID NO: 104826 - DNA, 33 bp, Homo sapien
taacattaaatcagcattataccttgccaaaat

SEQ ID NO: 104827 - DNA, 33 bp, Homo sapien
ccatcaaagcaccgagccctgtacgtaagacaa

SEQ ID NO: 104828 - DNA, 33 bp, Homo sapien
ccatcaaagcaccgaggcctgtacgtaagacaa

SEQ ID NO: 104829 - DNA, 33 bp, Homo sapien
agaatgtcctgggtcaaagtccactcttttcac

SEQ ID NO: 104830 - DNA, 33 bp, Homo sapien
agaatgtcctgggtcatagtccactcttttcac

SEQ ID NO: 104831 - DNA, 33 bp, Homo sapien
aaaagacaatgaccaacgatgtgcagaatgtga

SEQ ID NO: 104832 - DNA, 33 bp, Homo sapien
aaaagacaatgaccaaggatgtgcagaatgtga

SEQ ID NO: 104833 - DNA, 33 bp, Homo sapien
attgatcctgctaaaagctgtacccttttttgg

SEQ ID NO: 104834 - DNA, 33 bp, Homo sapien
attgatcctgctaaaatctgtacccttttttgg

SEQ ID NO: 104835 - DNA, 33 bp, Homo sapien
tgggccagagttgctacctgaaatccagttaca

SEQ ID NO: 104836 - DNA, 33 bp, Homo sapien
tgggccagagttgctatctgaaatccagttaca

SEQ ID NO: 104837 - DNA, 33 bp, Homo sapien
tgcaaggcattcacccaaacagccaggtctctg

SEQ ID NO: 104838 - DNA, 33 bp, Homo sapien
tgcaaggcattcacccgaacagccaggtctctg

SEQ ID NO: 104839 - DNA, 33 bp, Homo sapien
tgatttccttttatcgaatctttccaaagcgtc

SEQ ID NO: 104840 - DNA, 33 bp, Homo sapien
tgatttccttttatcggatctttccaaagcgtc

SEQ ID NO: 104841 - DNA, 33 bp, Homo sapien
atatagtttctgtaaaccagtttcacaaaacca

SEQ ID NO: 104842 - DNA, 33 bp, Homo sapien
atatagtttctgtaaatcagtttcacaaaacca

SEQ ID NO: 104843 - DNA, 33 bp, Homo sapien
gcttagaagaaacataaattgtgactgacttac

SEQ ID NO: 104844 - DNA, 33 bp, Homo sapien
gcttagaagaaacatagattgtgactgacttac

SEQ ID NO: 104845 - DNA, 33 bp, Homo sapien
cccattcttggcatcacgttagttttctgataa

SEQ ID NO: 104846 - DNA, 33 bp, Homo sapien
cccattcttggcatcatgttagttttctgataa

SEQ ID NO: 104847 - DNA, 33 bp, Homo sapien
tagacagtgtccagctcaatatttgttgaagga

SEQ ID NO: 104848 - DNA, 33 bp, Homo sapien
tagacagtgtccagctgaatatttgttgaagga

SEQ ID NO: 104849 - DNA, 33 bp, Homo sapien
aaattgagttttctaagttaccagcagcaatca

SEQ ID NO: 104850 - DNA, 33 bp, Homo sapien
aaattgagttttctaatttaccagcagcaatca

SEQ ID NO: 104851 - DNA, 33 bp, Homo sapien
gaaatctacaactttgaaatacacaatgcattt

SEQ ID NO: 104852 - DNA, 33 bp, Homo sapien
gaaatctacaactttggaatacacaatgcattt

SEQ ID NO: 104853 - DNA, 33 bp, Homo sapien
gtggaaccccagtatacacaggtcagaggcatg

SEQ ID NO: 104854 - DNA, 33 bp, Homo sapien
gtggaaccccagtatatacaggtcagaggcatg

SEQ ID NO: 104855 - DNA, 33 bp, Homo sapien
gaagtcaggggagacactgtatggagaaaagct

SEQ ID NO: 104856 - DNA, 33 bp, Homo sapien
gaagtcaggggagacattgtatggagaaaagct

SEQ ID NO: 104857 - DNA, 33 bp, Homo sapien
gaattcttgcccgaaaccatccttttctcctct

SEQ ID NO: 104858 - DNA, 33 bp, Homo sapien
gaattcttgcccgaaatcatccttttctcctct

SEQ ID NO: 104859 - DNA, 33 bp, Homo sapien
tgttgaattaccaagacgtttcctcacctgtaa

SEQ ID NO: 104860 - DNA, 33 bp, Homo sapien
tgttgaattaccaagatgtttcctcacctgtaa

SEQ ID NO: 104861 - DNA, 33 bp, Homo sapien
caaaacaacctttgtcactgagaaaagcaatag

SEQ ID NO: 104862 - DNA, 33 bp, Homo sapien
caaaacaacctttgtcgctgagaaaagcaatag

SEQ ID NO: 104863 - DNA, 33 bp, Homo sapien
tcttaagaccaatgtccaatctgttaaagtgtt

SEQ ID NO: 104864 - DNA, 33 bp, Homo sapien
tcttaagaccaatgtcgaatctgttaaagtgtt

SEQ ID NO: 104865 - DNA, 33 bp, Homo sapien
tgagagaacaatgtcaaacgcaagactccctta

SEQ ID NO: 104866 - DNA, 33 bp, Homo sapien
tgagagaacaatgtcacacgcaagactccctta

SEQ ID NO: 104867 - DNA, 33 bp, Homo sapien
gaaaaggaacagaacaacaaatgttaatcagaa

SEQ ID NO: 104868 - DNA, 33 bp, Homo sapien
gaaaaggaacagaacagcaaatgttaatcagaa

SEQ ID NO: 104869 - DNA, 33 bp, Homo sapien
tagcaaatttgtgcctcagaaatccaatgtccc

SEQ ID NO: 104870 - DNA, 33 bp, Homo sapien
tagcaaatttgtgcctgagaaatccaatgtccc

SEQ ID NO: 104871 - DNA, 33 bp, Homo sapien
gggcaggtggactctgccaataccctggatgtg

SEQ ID NO: 104872 - DNA, 33 bp, Homo sapien
gggcaggtggactctgtcaataccctggatgtg

SEQ ID NO: 104873 - DNA, 33 bp, Homo sapien
catggatagagctggaaaccgttaacctaagca

SEQ ID NO: 104874 - DNA, 33 bp, Homo sapien
catggatagagctggagaccgttaacctaagca

SEQ ID NO: 104875 - DNA, 33 bp, Homo sapien
agtgagaatggttaaacataagtgctttaacct

SEQ ID NO: 104876 - DNA, 33 bp, Homo sapien
agtgagaatggttaaatataagtgctttaacct

SEQ ID NO: 104877 - DNA, 33 bp, Homo sapien
aactttaacaatgtgccagcatgaggtaaggta

SEQ ID NO: 104878 - DNA, 33 bp, Homo sapien
aactttaacaatgtgctagcatgaggtaaggta

SEQ ID NO: 104879 - DNA, 33 bp, Homo sapien
tgagtccaagagttcaagcctgcagtaagctat

SEQ ID NO: 104880 - DNA, 33 bp, Homo sapien
tgagtccaagagttcacgcctgcagtaagctat

SEQ ID NO: 104881 - DNA, 33 bp, Homo sapien
ctaagcctacttgtcactcctgtctctgtagat

SEQ ID NO: 104882 - DNA, 33 bp, Homo sapien
ctaagcctacttgtcattcctgtctctgtagat

SEQ ID NO: 104883 - DNA, 33 bp, Homo sapien
tcggtgtgcctgtgaaacttggggatcttgtta

SEQ ID NO: 104884 - DNA, 33 bp, Homo sapien
tcggtgtgcctgtgaagcttggggatcttgtta

SEQ ID NO: 104885 - DNA, 33 bp, Homo sapien
tctgaagcgctccaaaattgcatcagtgcacac

SEQ ID NO: 104886 - DNA, 33 bp, Homo sapien
tctgaagcgctccaaagttgcatcagtgcacac

SEQ ID NO: 104887 - DNA, 33 bp, Homo sapien
catctggtggtagtacagggtcccagaaccagg

SEQ ID NO: 104888 - DNA, 33 bp, Homo sapien
catctggtggtagtacggggtcccagaaccagg

SEQ ID NO: 104889 - DNA, 33 bp, Homo sapien
caacttgctttgcttaagagtactttcccgctt

SEQ ID NO: 104890 - DNA, 33 bp, Homo sapien
caacttgctttgcttatgagtactttcccgctt

SEQ ID NO: 104891 - DNA, 33 bp, Homo sapien
aaactaatcatgggcaagaagaatgggatgacc

SEQ ID NO: 104892 - DNA, 33 bp, Homo sapien
aaactaatcatgggcaggaagaatgggatgacc

SEQ ID NO: 104893 - DNA, 33 bp, Homo sapien
atttgtggattcagaaagctagagaagaaaagg

SEQ ID NO: 104894 - DNA, 33 bp, Homo sapien
atttgtggattcagaaggctagagaagaaaagg

SEQ ID NO: 104895 - DNA, 33 bp, Homo sapien
aattaatatatggtgactatcttcccacattat

SEQ ID NO: 104896 - DNA, 33 bp, Homo sapien
aattaatatatggtgagtatcttcccacattat

SEQ ID NO: 104897 - DNA, 33 bp, Homo sapien
aatgtagtttggggataacaatatgtgagaaga

SEQ ID NO: 104898 - DNA, 33 bp, Homo sapien
aatgtagtttggggatgacaatatgtgagaaga

SEQ ID NO: 104899 - DNA, 33 bp, Homo sapien
aatgctttttttttcaatcggcagaaatgtaaa

SEQ ID NO: 104900 - DNA, 33 bp, Homo sapien
aatgctttttttttcagtcggcagaaatgtaaa

SEQ ID NO: 104901 - DNA, 33 bp, Homo sapien
gaactaaagtatagtccagctaagaggacagcc

SEQ ID NO: 104902 - DNA, 33 bp, Homo sapien
gaactaaagtatagtctagctaagaggacagcc

SEQ ID NO: 104903 - DNA, 33 bp, Homo sapien
aagagaaaagagggggaaaagctaggcaattgc

SEQ ID NO: 104904 - DNA, 33 bp, Homo sapien
aagagaaaagaggggggaaagctaggcaattgc

SEQ ID NO: 104905 - DNA, 33 bp, Homo sapien
aagactctgccttgaaaagagaagaaaaaaatg

SEQ ID NO: 104906 - DNA, 33 bp, Homo sapien
aagactctgccttgaagagagaagaaaaaaatg

SEQ ID NO: 104907 - DNA, 33 bp, Homo sapien
atgcacctttgagctacggccaggctctaccac

SEQ ID NO: 104908 - DNA, 33 bp, Homo sapien
atgcacctttgagctagggccaggctctaccac

SEQ ID NO: 104909 - DNA, 33 bp, Homo sapien
taaatggtgtgaagagaagtgagtaaagaccaa

SEQ ID NO: 104910 - DNA, 33 bp, Homo sapien
taaatggtgtgaagaggagtgagtaaagaccaa

SEQ ID NO: 104911 - DNA, 33 bp, Homo sapien
ggcaccaggtggatgacgaagacagatttttat

SEQ ID NO: 104912 - DNA, 33 bp, Homo sapien
ggcaccaggtggatgatgaagacagatttttat

SEQ ID NO: 104913 - DNA, 33 bp, Homo sapien
cagttgactgtagagcaaaatcataccctacct

SEQ ID NO: 104914 - DNA, 33 bp, Homo sapien
cagttgactgtagagcgaaatcataccctacct

SEQ ID NO: 104915 - DNA, 33 bp, Homo sapien
tgtgctgtgttctacaagtattggtttttttgt

SEQ ID NO: 104916 - DNA, 33 bp, Homo sapien
tgtgctgtgttctacaggtattggtttttttgt

SEQ ID NO: 104917 - DNA, 33 bp, Homo sapien
tcaacctctattttgcaaacctcacaaatgaga

SEQ ID NO: 104918 - DNA, 33 bp, Homo sapien
tcaacctctattttgcgaacctcacaaatgaga

SEQ ID NO: 104919 - DNA, 33 bp, Homo sapien
acataagaaatacaaacaatcaaacacgatatt

SEQ ID NO: 104920 - DNA, 33 bp, Homo sapien
acataagaaatacaaagaatcaaacacgatatt

SEQ ID NO: 104921 - DNA, 33 bp, Homo sapien
cccacctcaaccaaaccagcaacgatgaagatt

SEQ ID NO: 104922 - DNA, 33 bp, Homo sapien
cccacctcaaccaaacgagcaacgatgaagatt

SEQ ID NO: 104923 - DNA, 33 bp, Homo sapien
aggtgtaaggtttaggacaagatttataatttg

SEQ ID NO: 104924 - DNA, 33 bp, Homo sapien
aggtgtaaggtttaggtcaagatttataatttg

SEQ ID NO: 104925 - DNA, 33 bp, Homo sapien
attcttatgatggtgacatggtttttctatgtc

SEQ ID NO: 104926 - DNA, 33 bp, Homo sapien
attcttatgatggtgatatggtttttctatgtc

SEQ ID NO: 104927 - DNA, 33 bp, Homo sapien
acagatatgtgtccacaggatagatattgaggt

SEQ ID NO: 104928 - DNA, 33 bp, Homo sapien
acagatatgtgtccacgggatagatattgaggt

SEQ ID NO: 104929 - DNA, 33 bp, Homo sapien
catactttggaaaatcactccagattctctatc

SEQ ID NO: 104930 - DNA, 33 bp, Homo sapien
catactttggaaaatcgctccagattctctatc

SEQ ID NO: 104931 - DNA, 33 bp, Homo sapien
atgaaaaggaagatacacatctagtctgcattt

SEQ ID NO: 104932 - DNA, 33 bp, Homo sapien
atgaaaaggaagatacgcatctagtctgcattt

SEQ ID NO: 104933 - DNA, 33 bp, Homo sapien
gcctgggtggcatagacagactcaagaaataaa

SEQ ID NO: 104934 - DNA, 33 bp, Homo sapien
gcctgggtggcatagagagactcaagaaataaa

SEQ ID NO: 104935 - DNA, 33 bp, Homo sapien
agtcacctaaagtacaatacaaagaaacagagt

SEQ ID NO: 104936 - DNA, 33 bp, Homo sapien
agtcacctaaagtacagtacaaagaaacagagt

SEQ ID NO: 104937 - DNA, 33 bp, Homo sapien
tcagactccatactgcaaatgatggtgagtgtg

SEQ ID NO: 104938 - DNA, 33 bp, Homo sapien
tcagactccatactgcgaatgatggtgagtgtg

SEQ ID NO: 104939 - DNA, 33 bp, Homo sapien
atgctctactatgaacaaggacattctcaggac

SEQ ID NO: 104940 - DNA, 33 bp, Homo sapien
atgctctactatgaaccaggacattctcaggac

SEQ ID NO: 104941 - DNA, 33 bp, Homo sapien
ataataagtgctctacaattcgtctcccacagg

SEQ ID NO: 104942 - DNA, 33 bp, Homo sapien
ataataagtgctctacgattcgtctcccacagg

SEQ ID NO: 104943 - DNA, 33 bp, Homo sapien
tttgttttgcttgagaaacacaattgctgctat

SEQ ID NO: 104944 - DNA, 33 bp, Homo sapien
tttgttttgcttgagagacacaattgctgctat

SEQ ID NO: 104945 - DNA, 33 bp, Homo sapien
gactttatgctgagcaactgacttcgatgatct

SEQ ID NO: 104946 - DNA, 33 bp, Homo sapien
gactttatgctgagcacctgacttcgatgatct

SEQ ID NO: 104947 - DNA, 33 bp, Homo sapien
aaaaaattcttaagcacgatgcctagtagaata

SEQ ID NO: 104948 - DNA, 33 bp, Homo sapien
aaaaaattcttaagcatgatgcctagtagaata

SEQ ID NO: 104949 - DNA, 33 bp, Homo sapien
ggctacactgtaaaaactcacccgtctggaccc

SEQ ID NO: 104950 - DNA, 33 bp, Homo sapien
ggctacactgtaaaaattcacccgtctggaccc

SEQ ID NO: 104951 - DNA, 33 bp, Homo sapien
ctgacaacggctttcaataacaatatgaaatac

SEQ ID NO: 104952 - DNA, 33 bp, Homo sapien
ctgacaacggctttcagtaacaatatgaaatac

SEQ ID NO: 104953 - DNA, 33 bp, Homo sapien
aaaatgtcaagaaaaaacaaatctccctggact

SEQ ID NO: 104954 - DNA, 33 bp, Homo sapien
aaaatgtcaagaaaaaccaaatctccctggact

SEQ ID NO: 104955 - DNA, 33 bp, Homo sapien
tgagtgtctcttagcacgattcctttaacactg

SEQ ID NO: 104956 - DNA, 33 bp, Homo sapien
tgagtgtctcttagcatgattcctttaacactg

SEQ ID NO: 104957 - DNA, 33 bp, Homo sapien
ggcacacaagtcaaaaaaagtagaagtaagttt

SEQ ID NO: 104958 - DNA, 33 bp, Homo sapien
ggcacacaagtcaaaacaagtagaagtaagttt

SEQ ID NO: 104959 - DNA, 33 bp, Homo sapien
tctctttgctccctgtcaaatatcctgggtgag

SEQ ID NO: 104960 - DNA, 33 bp, Homo sapien
tctctttgctccctgttaaatatcctgggtgag

SEQ ID NO: 104961 - DNA, 33 bp, Homo sapien
ataataataaactgctcaatacctgcgtgatgg

SEQ ID NO: 104962 - DNA, 33 bp, Homo sapien
ataataataaactgcttaatacctgcgtgatgg

SEQ ID NO: 104963 - DNA, 33 bp, Homo sapien
agaccattagtagtcaagtttttgggcagtcaa

SEQ ID NO: 104964 - DNA, 33 bp, Homo sapien
agaccattagtagtcaggtttttgggcagtcaa

SEQ ID NO: 104965 - DNA, 33 bp, Homo sapien
ggagggcttattctaacgattgtccaggctcct

SEQ ID NO: 104966 - DNA, 33 bp, Homo sapien
ggagggcttattctaatgattgtccaggctcct

SEQ ID NO: 104967 - DNA, 33 bp, Homo sapien
ccttgcccaacactcaataacaattgttctgtt

SEQ ID NO: 104968 - DNA, 33 bp, Homo sapien
ccttgcccaacactcagtaacaattgttctgtt

SEQ ID NO: 104969 - DNA, 33 bp, Homo sapien
tgggtgacattgttaactggggaggctgtgcag

SEQ ID NO: 104970 - DNA, 33 bp, Homo sapien
tgggtgacattgttaattggggaggctgtgcag

SEQ ID NO: 104971 - DNA, 33 bp, Homo sapien
acacagaattttcagggcaatgaaagtactctg

SEQ ID NO: 104972 - DNA, 33 bp, Homo sapien
acacagaattttcaggtcaatgaaagtactctg

SEQ ID NO: 104973 - DNA, 33 bp, Homo sapien
cagtgcctgaccgaagcaaacatttttaaagag

SEQ ID NO: 104974 - DNA, 33 bp, Homo sapien
cagtgcctgaccgaagtaaacatttttaaagag

SEQ ID NO: 104975 - DNA, 33 bp, Homo sapien
tgggtcagtatttgtacgaatgaagaattcttc

SEQ ID NO: 104976 - DNA, 33 bp, Homo sapien
tgggtcagtatttgtatgaatgaagaattcttc

SEQ ID NO: 104977 - DNA, 33 bp, Homo sapien
ataaacatttgcacaacggctgatcaaggctct

SEQ ID NO: 104978 - DNA, 33 bp, Homo sapien
ataaacatttgcacaatggctgatcaaggctct

SEQ ID NO: 104979 - DNA, 33 bp, Homo sapien
ctgcatttgaatggcacgttagactgactagtc

SEQ ID NO: 104980 - DNA, 33 bp, Homo sapien
ctgcatttgaatggcatgttagactgactagtc

SEQ ID NO: 104981 - DNA, 33 bp, Homo sapien
actctataaaggttgacggtagtgtgcaaggtg

SEQ ID NO: 104982 - DNA, 33 bp, Homo sapien
actctataaaggttgatggtagtgtgcaaggtg

SEQ ID NO: 104983 - DNA, 33 bp, Homo sapien
gatcatagcactattcccttgtctacaatccag

SEQ ID NO: 104984 - DNA, 33 bp, Homo sapien
gatcatagcactattctcttgtctacaatccag

SEQ ID NO: 104985 - DNA, 33 bp, Homo sapien
tgtaacatctttatacaggcaagtcccagctag

SEQ ID NO: 104986 - DNA, 33 bp, Homo sapien
tgtaacatctttataccggcaagtcccagctag

SEQ ID NO: 104987 - DNA, 33 bp, Homo sapien
ataaagatcattattaggtaacaaccttgaaaa

SEQ ID NO: 104988 - DNA, 33 bp, Homo sapien
ataaagatcattattatgtaacaaccttgaaaa

SEQ ID NO: 104989 - DNA, 33 bp, Homo sapien
ataattgtgaatgttacaatacagacttgaatg

SEQ ID NO: 104990 - DNA, 33 bp, Homo sapien
ataattgtgaatgttataatacagacttgaatg

SEQ ID NO: 104991 - DNA, 33 bp, Homo sapien
taagtatttaataggcaagaaaactctgaaata

SEQ ID NO: 104992 - DNA, 33 bp, Homo sapien
taagtatttaataggcgagaaaactctgaaata

SEQ ID NO: 104993 - DNA, 33 bp, Homo sapien
tcaaaggttctttccaatctagattctgtgatc

SEQ ID NO: 104994 - DNA, 33 bp, Homo sapien
tcaaaggttctttccagtctagattctgtgatc

SEQ ID NO: 104995 - DNA, 33 bp, Homo sapien
gaatttgaatatggcacaatgatttgtcattta

SEQ ID NO: 104996 - DNA, 33 bp, Homo sapien
gaatttgaatatggcataatgatttgtcattta

SEQ ID NO: 104997 - DNA, 33 bp, Homo sapien
aatcagctatgaataaatacaatgaggccgtac

SEQ ID NO: 104998 - DNA, 33 bp, Homo sapien
aatcagctatgaataagtacaatgaggccgtac

SEQ ID NO: 104999 - DNA, 33 bp, Homo sapien
caggaagctcttcaacaatagagatcaagtcta

SEQ ID NO: 105000 - DNA, 33 bp, Homo sapien
caggaagctcttcaacgatagagatcaagtcta

SEQ ID NO: 105001 - DNA, 33 bp, Homo sapien
caccagtaaatgataacacccatacaaggcaga

SEQ ID NO: 105002 - DNA, 33 bp, Homo sapien
caccagtaaatgataatacccatacaaggcaga

SEQ ID NO: 105003 - DNA, 33 bp, Homo sapien
gcttgcattgtcttggcaagtcctagagagaca

SEQ ID NO: 105004 - DNA, 33 bp, Homo sapien
gcttgcattgtcttggtaagtcctagagagaca

SEQ ID NO: 105005 - DNA, 33 bp, Homo sapien
cttccctgctcagaaacgattccttctacagct

SEQ ID NO: 105006 - DNA, 33 bp, Homo sapien
cttccctgctcagaaatgattccttctacagct

SEQ ID NO: 105007 - DNA, 33 bp, Homo sapien
ataaatgcatataacaaaacatcacagtgtaca

SEQ ID NO: 105008 - DNA, 33 bp, Homo sapien
ataaatgcatataacagaacatcacagtgtaca

SEQ ID NO: 105009 - DNA, 33 bp, Homo sapien
agggagagaagacggaacctgtcatgacacaga

SEQ ID NO: 105010 - DNA, 33 bp, Homo sapien
agggagagaagacggagcctgtcatgacacaga

SEQ ID NO: 105011 - DNA, 33 bp, Homo sapien
gttaggtaatggatcccaaatggatttcatcat

SEQ ID NO: 105012 - DNA, 33 bp, Homo sapien
gttaggtaatggatccgaaatggatttcatcat

SEQ ID NO: 105013 - DNA, 33 bp, Homo sapien
atagcgaggtaaaagaagattccggaagcacat

SEQ ID NO: 105014 - DNA, 33 bp, Homo sapien
atagcgaggtaaaagaggattccggaagcacat

SEQ ID NO: 105015 - DNA, 33 bp, Homo sapien
tagcgggactcactgacgtttcctattctcatg

SEQ ID NO: 105016 - DNA, 33 bp, Homo sapien
tagcgggactcactgatgtttcctattctcatg

SEQ ID NO: 105017 - DNA, 33 bp, Homo sapien
ctgcctggccacaggaaggacttcagggaggga

SEQ ID NO: 105018 - DNA, 33 bp, Homo sapien
ctgcctggccacaggagggacttcagggaggga

SEQ ID NO: 105019 - DNA, 33 bp, Homo sapien
cacggagaaacttggccagagctgggttcagtg

SEQ ID NO: 105020 - DNA, 33 bp, Homo sapien
cacggagaaacttggctagagctgggttcagtg

SEQ ID NO: 105021 - DNA, 33 bp, Homo sapien
ttatcctaaagtgaaccatacaagtggagacac

SEQ ID NO: 105022 - DNA, 33 bp, Homo sapien
ttatcctaaagtgaacgatacaagtggagacac

SEQ ID NO: 105023 - DNA, 33 bp, Homo sapien
cagctgggataaggtaacatcaggaagaggaaa

SEQ ID NO: 105024 - DNA, 33 bp, Homo sapien
cagctgggataaggtagcatcaggaagaggaaa

SEQ ID NO: 105025 - DNA, 33 bp, Homo sapien
gctgcctggcttcctacagggtactcattctca

SEQ ID NO: 105026 - DNA, 33 bp, Homo sapien
gctgcctggcttcctatagggtactcattctca

SEQ ID NO: 105027 - DNA, 33 bp, Homo sapien
ccactctgccaactgacatagggccaaagggga

SEQ ID NO: 105028 - DNA, 33 bp, Homo sapien
ccactctgccaactgagatagggccaaagggga

SEQ ID NO: 105029 - DNA, 33 bp, Homo sapien
tgcagctaaccctggacagtgtgtgggtactgc

SEQ ID NO: 105030 - DNA, 33 bp, Homo sapien
tgcagctaaccctggagagtgtgtgggtactgc

SEQ ID NO: 105031 - DNA, 33 bp, Homo sapien
aaacccaatagattgaaattgtatctcatgacc

SEQ ID NO: 105032 - DNA, 33 bp, Homo sapien
aaacccaatagattgacattgtatctcatgacc

SEQ ID NO: 105033 - DNA, 33 bp, Homo sapien
ctaagtaacatttctcactttgattactaggaa

SEQ ID NO: 105034 - DNA, 33 bp, Homo sapien
ctaagtaacatttctcgctttgattactaggaa

SEQ ID NO: 105035 - DNA, 33 bp, Homo sapien
ctgagctgtgtttcttcaaaagctacagaatgt

SEQ ID NO: 105036 - DNA, 33 bp, Homo sapien
ctgagctgtgtttcttgaaaagctacagaatgt

SEQ ID NO: 105037 - DNA, 33 bp, Homo sapien
tttctctctttctcaccgcagggaacagcattg

SEQ ID NO: 105038 - DNA, 33 bp, Homo sapien
tttctctctttctcactgcagggaacagcattg

SEQ ID NO: 105039 - DNA, 33 bp, Homo sapien
gctcacagacactgccaatggaaattgcagaaa

SEQ ID NO: 105040 - DNA, 33 bp, Homo sapien
gctcacagacactgcctatggaaattgcagaaa

SEQ ID NO: 105041 - DNA, 33 bp, Homo sapien
gtctggaatcattctcaaaaacatccagtaaag

SEQ ID NO: 105042 - DNA, 33 bp, Homo sapien
gtctggaatcattctcgaaaacatccagtaaag

SEQ ID NO: 105043 - DNA, 33 bp, Homo sapien
tgggcatcactaaaggcataaggtattttcagt

SEQ ID NO: 105044 - DNA, 33 bp, Homo sapien
tgggcatcactaaaggtataaggtattttcagt

SEQ ID NO: 105045 - DNA, 33 bp, Homo sapien
tagaccaagcatgggccccatctaactaagcca

SEQ ID NO: 105046 - DNA, 33 bp, Homo sapien
tagaccaagcatgggctccatctaactaagcca

SEQ ID NO: 105047 - DNA, 33 bp, Homo sapien
aaaagctacactactacaacatcaataaaagcc

SEQ ID NO: 105048 - DNA, 33 bp, Homo sapien
aaaagctacactactagaacatcaataaaagcc

SEQ ID NO: 105049 - DNA, 33 bp, Homo sapien
tttggaaatccataaaaaccatttaatcctggg

SEQ ID NO: 105050 - DNA, 33 bp, Homo sapien
tttggaaatccataaacaccatttaatcctggg

SEQ ID NO: 105051 - DNA, 33 bp, Homo sapien
atgcatatatccaatccctccaaaagatcggaa

SEQ ID NO: 105052 - DNA, 33 bp, Homo sapien
atgcatatatccaatctctccaaaagatcggaa

SEQ ID NO: 105053 - DNA, 33 bp, Homo sapien
aattaaccaatgtccaccagaaaatagattcaa

SEQ ID NO: 105054 - DNA, 33 bp, Homo sapien
aattaaccaatgtccatcagaaaatagattcaa

SEQ ID NO: 105055 - DNA, 33 bp, Homo sapien
ggcaaagaagctgttgcacgttatggccaagaa

SEQ ID NO: 105056 - DNA, 33 bp, Homo sapien
ggcaaagaagctgttgtacgttatggccaagaa

SEQ ID NO: 105057 - DNA, 33 bp, Homo sapien
caacctgtggaaataacgtaagaccgggggaag

SEQ ID NO: 105058 - DNA, 33 bp, Homo sapien
caacctgtggaaataatgtaagaccgggggaag

SEQ ID NO: 105059 - DNA, 33 bp, Homo sapien
tgtgcaaccaagctgacaacaagagttcaagac

SEQ ID NO: 105060 - DNA, 33 bp, Homo sapien
tgtgcaaccaagctgagaacaagagttcaagac

SEQ ID NO: 105061 - DNA, 33 bp, Homo sapien
cactggtaaagtccacagtccaaaggcacaggc

SEQ ID NO: 105062 - DNA, 33 bp, Homo sapien
cactggtaaagtccacggtccaaaggcacaggc

SEQ ID NO: 105063 - DNA, 33 bp, Homo sapien
ttttaaatatccatacaatgcaatactactcag

SEQ ID NO: 105064 - DNA, 33 bp, Homo sapien
ttttaaatatccatacgatgcaatactactcag

SEQ ID NO: 105065 - DNA, 33 bp, Homo sapien
taagaaaagtttttagaagagtccctggcaata

SEQ ID NO: 105066 - DNA, 33 bp, Homo sapien
taagaaaagtttttaggagagtccctggcaata

SEQ ID NO: 105067 - DNA, 33 bp, Homo sapien
cgaccaagcttcaaaacgtaatctacatccatg

SEQ ID NO: 105068 - DNA, 33 bp, Homo sapien
cgaccaagcttcaaaatgtaatctacatccatg

SEQ ID NO: 105069 - DNA, 33 bp, Homo sapien
tctgcttaactgttctaaacacctttttcagaa

SEQ ID NO: 105070 - DNA, 33 bp, Homo sapien
tctgcttaactgttctgaacacctttttcagaa

SEQ ID NO: 105071 - DNA, 33 bp, Homo sapien
caaggagagatggtgacgaaacactgactttga

SEQ ID NO: 105072 - DNA, 33 bp, Homo sapien
caaggagagatggtgatgaaacactgactttga

SEQ ID NO: 105073 - DNA, 33 bp, Homo sapien
aaacactgactttgaactgggggatgggattga

SEQ ID NO: 105074 - DNA, 33 bp, Homo sapien
aaacactgactttgaattgggggatgggattga

SEQ ID NO: 105075 - DNA, 33 bp, Homo sapien
tttctgacaacttacccacccagatacaccctt

SEQ ID NO: 105076 - DNA, 33 bp, Homo sapien
tttctgacaacttacctacccagatacaccctt

SEQ ID NO: 105077 - DNA, 33 bp, Homo sapien
ccttgttgtaaccattaaaatgctgccaaataa

SEQ ID NO: 105078 - DNA, 33 bp, Homo sapien
ccttgttgtaaccattgaaatgctgccaaataa

SEQ ID NO: 105079 - DNA, 33 bp, Homo sapien
tttactagcaatgcacacatatcagttttgtct

SEQ ID NO: 105080 - DNA, 33 bp, Homo sapien
tttactagcaatgcacgcatatcagttttgtct

SEQ ID NO: 105081 - DNA, 33 bp, Homo sapien
atttgttggttaataaaaaatcaatactcatac

SEQ ID NO: 105082 - DNA, 33 bp, Homo sapien
atttgttggttaataagaaatcaatactcatac

SEQ ID NO: 105083 - DNA, 33 bp, Homo sapien
tttcttagcatatctaaaagtgtcagagacact

SEQ ID NO: 105084 - DNA, 33 bp, Homo sapien
tttcttagcatatctacaagtgtcagagacact

SEQ ID NO: 105085 - DNA, 33 bp, Homo sapien
aaatcataaatcataaactgtgatagctttcac

SEQ ID NO: 105086 - DNA, 33 bp, Homo sapien
aaatcataaatcataacctgtgatagctttcac

SEQ ID NO: 105087 - DNA, 33 bp, Homo sapien
actgagcccgggaataacattgtacaggagctt

SEQ ID NO: 105088 - DNA, 33 bp, Homo sapien
actgagcccgggaatagcattgtacaggagctt

SEQ ID NO: 105089 - DNA, 33 bp, Homo sapien
ccgtgttccatttgtaaggatgcttcctccccc

SEQ ID NO: 105090 - DNA, 33 bp, Homo sapien
ccgtgttccatttgtagggatgcttcctccccc

SEQ ID NO: 105091 - DNA, 33 bp, Homo sapien
tgggcatttgttacataactagcaaaatctttc

SEQ ID NO: 105092 - DNA, 33 bp, Homo sapien
tgggcatttgttacatgactagcaaaatctttc

SEQ ID NO: 105093 - DNA, 33 bp, Homo sapien
aaaccatggacttttgcattttttctgctttat

SEQ ID NO: 105094 - DNA, 33 bp, Homo sapien
aaaccatggacttttggattttttctgctttat

SEQ ID NO: 105095 - DNA, 33 bp, Homo sapien
tatcagtttaataaagacaccaagataacatta

SEQ ID NO: 105096 - DNA, 33 bp, Homo sapien
tatcagtttaataaaggcaccaagataacatta

SEQ ID NO: 105097 - DNA, 33 bp, Homo sapien
gcttagttgttctataaactcgtgaaagtgggg

SEQ ID NO: 105098 - DNA, 33 bp, Homo sapien
gcttagttgttctatacactcgtgaaagtgggg

SEQ ID NO: 105099 - DNA, 33 bp, Homo sapien
gtcccattgtccaaagccagagatgtcctacat

SEQ ID NO: 105100 - DNA, 33 bp, Homo sapien
gtcccattgtccaaagtcagagatgtcctacat

SEQ ID NO: 105101 - DNA, 33 bp, Homo sapien
gtcgtgcaggttgcacaggaaatctgcgattcc

SEQ ID NO: 105102 - DNA, 33 bp, Homo sapien
gtcgtgcaggttgcacgggaaatctgcgattcc

SEQ ID NO: 105103 - DNA, 33 bp, Homo sapien
tacttgtatatgatggagtaggtagatgaagag

SEQ ID NO: 105104 - DNA, 33 bp, Homo sapien
tacttgtatatgatggtgtaggtagatgaagag

SEQ ID NO: 105105 - DNA, 33 bp, Homo sapien
tgactagaaattcataaccattgaagagcaact

SEQ ID NO: 105106 - DNA, 33 bp, Homo sapien
tgactagaaattcatacccattgaagagcaact

SEQ ID NO: 105107 - DNA, 33 bp, Homo sapien
aaagatctgccagtaaccaatggtcaggcttct

SEQ ID NO: 105108 - DNA, 33 bp, Homo sapien
aaagatctgccagtaatcaatggtcaggcttct

SEQ ID NO: 105109 - DNA, 33 bp, Homo sapien
cacgttcctccccagacgttaagcttaaaaaaa

SEQ ID NO: 105110 - DNA, 33 bp, Homo sapien
cacgttcctccccagatgttaagcttaaaaaaa

SEQ ID NO: 105111 - DNA, 33 bp, Homo sapien
attatttttgcttccacgtggtcagaaacacaa

SEQ ID NO: 105112 - DNA, 33 bp, Homo sapien
attatttttgcttccatgtggtcagaaacacaa

SEQ ID NO: 105113 - DNA, 33 bp, Homo sapien
tgatgaagggacacctaaaggatcctgtggcat

SEQ ID NO: 105114 - DNA, 33 bp, Homo sapien
tgatgaagggacacctgaaggatcctgtggcat

SEQ ID NO: 105115 - DNA, 33 bp, Homo sapien
gaggagggaacaattcccagttctaaatttgct

SEQ ID NO: 105116 - DNA, 33 bp, Homo sapien
gaggagggaacaattctcagttctaaatttgct

SEQ ID NO: 105117 - DNA, 33 bp, Homo sapien
tactaactttaaagcaaaaatgttacgcctttg

SEQ ID NO: 105118 - DNA, 33 bp, Homo sapien
tactaactttaaagcagaaatgttacgcctttg

SEQ ID NO: 105119 - DNA, 33 bp, Homo sapien
acattccagaactgtagagcgattgcacattgg

SEQ ID NO: 105120 - DNA, 33 bp, Homo sapien
acattccagaactgtatagcgattgcacattgg

SEQ ID NO: 105121 - DNA, 33 bp, Homo sapien
aatactgacaatcacaaacctagagtactgctt

SEQ ID NO: 105122 - DNA, 33 bp, Homo sapien
aatactgacaatcacagacctagagtactgctt

SEQ ID NO: 105123 - DNA, 33 bp, Homo sapien
tgtggtataatatgcaaatacaacatgctacat

SEQ ID NO: 105124 - DNA, 33 bp, Homo sapien
tgtggtataatatgcacatacaacatgctacat

SEQ ID NO: 105125 - DNA, 33 bp, Homo sapien
cttttccttcacaatggcaagttaaatgagaat

SEQ ID NO: 105126 - DNA, 33 bp, Homo sapien
cttttccttcacaatgtcaagttaaatgagaat

SEQ ID NO: 105127 - DNA, 33 bp, Homo sapien
cacggtatgattccaaataaatggcaatctgga

SEQ ID NO: 105128 - DNA, 33 bp, Homo sapien
cacggtatgattccaactaaatggcaatctgga

SEQ ID NO: 105129 - DNA, 33 bp, Homo sapien
aaaactgtggatggtaacgatatctatctcata

SEQ ID NO: 105130 - DNA, 33 bp, Homo sapien
aaaactgtggatggtagcgatatctatctcata

SEQ ID NO: 105131 - DNA, 33 bp, Homo sapien
cgtctcaactgtattacggaaattgtttgtaaa

SEQ ID NO: 105132 - DNA, 33 bp, Homo sapien
cgtctcaactgtattatggaaattgtttgtaaa

SEQ ID NO: 105133 - DNA, 33 bp, Homo sapien
ggctcatttccaacaaactctgaaacacaggga

SEQ ID NO: 105134 - DNA, 33 bp, Homo sapien
ggctcatttccaacaagctctgaaacacaggga

SEQ ID NO: 105135 - DNA, 33 bp, Homo sapien
cttggatcaattatcccagtccaaagggcaggc

SEQ ID NO: 105136 - DNA, 33 bp, Homo sapien
cttggatcaattatcctagtccaaagggcaggc

SEQ ID NO: 105137 - DNA, 33 bp, Homo sapien
ctacattttctgctaactgaaatgacattcagc

SEQ ID NO: 105138 - DNA, 33 bp, Homo sapien
ctacattttctgctaagtgaaatgacattcagc

SEQ ID NO: 105139 - DNA, 33 bp, Homo sapien
tatatccaggacttgaacatttgcagattttca

SEQ ID NO: 105140 - DNA, 33 bp, Homo sapien
tatatccaggacttgagcatttgcagattttca

SEQ ID NO: 105141 - DNA, 33 bp, Homo sapien
gatgttaggggtgctacagtacctgaggatgga

SEQ ID NO: 105142 - DNA, 33 bp, Homo sapien
gatgttaggggtgctatagtacctgaggatgga

SEQ ID NO: 105143 - DNA, 33 bp, Homo sapien
ggacactgttttcctcagaaccaaattgtcaaa

SEQ ID NO: 105144 - DNA, 33 bp, Homo sapien
ggacactgttttcctccgaaccaaattgtcaaa

SEQ ID NO: 105145 - DNA, 33 bp, Homo sapien
acaagagtaacaaatgacataagtaggtatgta

SEQ ID NO: 105146 - DNA, 33 bp, Homo sapien
acaagagtaacaaatggcataagtaggtatgta

SEQ ID NO: 105147 - DNA, 33 bp, Homo sapien
aaagtcatgaattgaaagaagataattgcagtg

SEQ ID NO: 105148 - DNA, 33 bp, Homo sapien
aaagtcatgaattgaaggaagataattgcagtg

SEQ ID NO: 105149 - DNA, 33 bp, Homo sapien
tgaccagttgaacagaatagggatgtcaaaaac

SEQ ID NO: 105150 - DNA, 33 bp, Homo sapien
tgaccagttgaacagattagggatgtcaaaaac

SEQ ID NO: 105151 - DNA, 33 bp, Homo sapien
aagaactactataaaagtgggtctaccatttga

SEQ ID NO: 105152 - DNA, 33 bp, Homo sapien
aagaactactataaaattgggtctaccatttga

SEQ ID NO: 105153 - DNA, 33 bp, Homo sapien
acatgcatcaaattaaaagtcaccaatgattca

SEQ ID NO: 105154 - DNA, 33 bp, Homo sapien
acatgcatcaaattaagagtcaccaatgattca

SEQ ID NO: 105155 - DNA, 33 bp, Homo sapien
tttttcaaagaccgacaaatttcaaacaatatg

SEQ ID NO: 105156 - DNA, 33 bp, Homo sapien
tttttcaaagaccgaccaatttcaaacaatatg

SEQ ID NO: 105157 - DNA, 33 bp, Homo sapien
agtagtttctaagttacgctcatccattcaagc

SEQ ID NO: 105158 - DNA, 33 bp, Homo sapien
agtagtttctaagttatgctcatccattcaagc

SEQ ID NO: 105159 - DNA, 33 bp, Homo sapien
cacatcaaacaatcgccatttcaggtaggtttt

SEQ ID NO: 105160 - DNA, 33 bp, Homo sapien
cacatcaaacaatcgctatttcaggtaggtttt

SEQ ID NO: 105161 - DNA, 33 bp, Homo sapien
gaatactcttagagaaatgagtcaaatacagca

SEQ ID NO: 105162 - DNA, 33 bp, Homo sapien
gaatactcttagagaagtgagtcaaatacagca

SEQ ID NO: 105163 - DNA, 33 bp, Homo sapien
cagcagcttagattgaataaaatttggtcaaat

SEQ ID NO: 105164 - DNA, 33 bp, Homo sapien
cagcagcttagattgagtaaaatttggtcaaat

SEQ ID NO: 105165 - DNA, 33 bp, Homo sapien
aaatattctagattgaacaagtctctccagttc

SEQ ID NO: 105166 - DNA, 33 bp, Homo sapien
aaatattctagattgagcaagtctctccagttc

SEQ ID NO: 105167 - DNA, 33 bp, Homo sapien
tgtgatatttttataacgcagggttccaggaat

SEQ ID NO: 105168 - DNA, 33 bp, Homo sapien
tgtgatatttttataatgcagggttccaggaat

SEQ ID NO: 105169 - DNA, 33 bp, Homo sapien
atcgagctaggagttggagagtaacttggggat

SEQ ID NO: 105170 - DNA, 33 bp, Homo sapien
atcgagctaggagttgtagagtaacttggggat

SEQ ID NO: 105171 - DNA, 33 bp, Homo sapien
agccagtttgcaacccggaagaaccagccttag

SEQ ID NO: 105172 - DNA, 33 bp, Homo sapien
agccagtttgcaaccctgaagaaccagccttag

SEQ ID NO: 105173 - DNA, 33 bp, Homo sapien
tgggaaagaggataaaacacagagtacttcgat

SEQ ID NO: 105174 - DNA, 33 bp, Homo sapien
tgggaaagaggataaaccacagagtacttcgat

SEQ ID NO: 105175 - DNA, 33 bp, Homo sapien
agtctggttaatagccaagtggaggtacaatgg

SEQ ID NO: 105176 - DNA, 33 bp, Homo sapien
agtctggttaatagcccagtggaggtacaatgg

SEQ ID NO: 105177 - DNA, 33 bp, Homo sapien
cttgttctttctggaaacctaagccagtgtctg

SEQ ID NO: 105178 - DNA, 33 bp, Homo sapien
cttgttctttctggaagcctaagccagtgtctg

SEQ ID NO: 105179 - DNA, 33 bp, Homo sapien
ttcctcaccctgtcaccgtatttggctctgttg

SEQ ID NO: 105180 - DNA, 33 bp, Homo sapien
ttcctcaccctgtcactgtatttggctctgttg

SEQ ID NO: 105181 - DNA, 33 bp, Homo sapien
agaaggatttagaatacgctgtagttgaaaaaa

SEQ ID NO: 105182 - DNA, 33 bp, Homo sapien
agaaggatttagaatatgctgtagttgaaaaaa

SEQ ID NO: 105183 - DNA, 33 bp, Homo sapien
ggtattgctaacctgaagacaacactctgagta

SEQ ID NO: 105184 - DNA, 33 bp, Homo sapien
ggtattgctaacctgaggacaacactctgagta

SEQ ID NO: 105185 - DNA, 33 bp, Homo sapien
gaaaaggaacaaaagcccatcttattctgtgta

SEQ ID NO: 105186 - DNA, 33 bp, Homo sapien
gaaaaggaacaaaagctcatcttattctgtgta

SEQ ID NO: 105187 - DNA, 33 bp, Homo sapien
catatgcagccttttcaaattgcctactttctt

SEQ ID NO: 105188 - DNA, 33 bp, Homo sapien
catatgcagccttttcgaattgcctactttctt

SEQ ID NO: 105189 - DNA, 33 bp, Homo sapien
gccatgcctgcttaataaggcttccataaaacc

SEQ ID NO: 105190 - DNA, 33 bp, Homo sapien
gccatgcctgcttaatgaggcttccataaaacc

SEQ ID NO: 105191 - DNA, 33 bp, Homo sapien
acagaaaaccaaccacaggatgtgctcactcat

SEQ ID NO: 105192 - DNA, 33 bp, Homo sapien
acagaaaaccaaccaccggatgtgctcactcat

SEQ ID NO: 105193 - DNA, 33 bp, Homo sapien
aactggagaaatcaaaacaagatcaatggactg

SEQ ID NO: 105194 - DNA, 33 bp, Homo sapien
aactggagaaatcaaagcaagatcaatggactg

SEQ ID NO: 105195 - DNA, 33 bp, Homo sapien
tactccactgtgtacgcatattcagttctatgc

SEQ ID NO: 105196 - DNA, 33 bp, Homo sapien
tactccactgtgtacgtatattcagttctatgc

SEQ ID NO: 105197 - DNA, 33 bp, Homo sapien
aatctgcttatttgaaagatgtttaaaactgct

SEQ ID NO: 105198 - DNA, 33 bp, Homo sapien
aatctgcttatttgaacgatgtttaaaactgct

SEQ ID NO: 105199 - DNA, 33 bp, Homo sapien
tgttgactagcaggaacaacatgcatgatatat

SEQ ID NO: 105200 - DNA, 33 bp, Homo sapien
tgttgactagcaggaagaacatgcatgatatat

SEQ ID NO: 105201 - DNA, 33 bp, Homo sapien
tggtgttatttactgacactgagaacagcaagg

SEQ ID NO: 105202 - DNA, 33 bp, Homo sapien
tggtgttatttactgagactgagaacagcaagg

SEQ ID NO: 105203 - DNA, 33 bp, Homo sapien
tatgaacttcagcagccagagttggcctgatta

SEQ ID NO: 105204 - DNA, 33 bp, Homo sapien
tatgaacttcagcagctagagttggcctgatta

SEQ ID NO: 105205 - DNA, 33 bp, Homo sapien
ctgctgcttttgaaaactaactttacagaaaag

SEQ ID NO: 105206 - DNA, 33 bp, Homo sapien
ctgctgcttttgaaaattaactttacagaaaag

SEQ ID NO: 105207 - DNA, 33 bp, Homo sapien
cccatactaactcacaaatactaactcacaaat

SEQ ID NO: 105208 - DNA, 33 bp, Homo sapien
cccatactaactcacagatactaactcacaaat

SEQ ID NO: 105209 - DNA, 33 bp, Homo sapien
tggaataaacagactaaagttaaatcctgtatc

SEQ ID NO: 105210 - DNA, 33 bp, Homo sapien
tggaataaacagactagagttaaatcctgtatc

SEQ ID NO: 105211 - DNA, 33 bp, Homo sapien
aaatttttttatgcaacgatgtgaaatgactct

SEQ ID NO: 105212 - DNA, 33 bp, Homo sapien
aaatttttttatgcaatgatgtgaaatgactct

SEQ ID NO: 105213 - DNA, 33 bp, Homo sapien
tatttggttaggctaggatgcctttcattttat

SEQ ID NO: 105214 - DNA, 33 bp, Homo sapien
tatttggttaggctagtatgcctttcattttat

SEQ ID NO: 105215 - DNA, 33 bp, Homo sapien
tattttgttatagcacagatggactaagataga

SEQ ID NO: 105216 - DNA, 33 bp, Homo sapien
tattttgttatagcacggatggactaagataga

SEQ ID NO: 105217 - DNA, 33 bp, Homo sapien
gaactctcccacttataaatccccagctcgaat

SEQ ID NO: 105218 - DNA, 33 bp, Homo sapien
gaactctcccacttatcaatccccagctcgaat

SEQ ID NO: 105219 - DNA, 33 bp, Homo sapien
ggttgcccagttccacagagaaagcacagtttc

SEQ ID NO: 105220 - DNA, 33 bp, Homo sapien
ggttgcccagttccacggagaaagcacagtttc

SEQ ID NO: 105221 - DNA, 33 bp, Homo sapien
tgtgaatctttaagccgcaatgaccagaaggga

SEQ ID NO: 105222 - DNA, 33 bp, Homo sapien
tgtgaatctttaagcctcaatgaccagaaggga

SEQ ID NO: 105223 - DNA, 33 bp, Homo sapien
ggaaatagcgccactaaagacttttctttcgca

SEQ ID NO: 105224 - DNA, 33 bp, Homo sapien
ggaaatagcgccactatagacttttctttcgca

SEQ ID NO: 105225 - DNA, 33 bp, Homo sapien
tgtcccccaactaccacagagctgcccactctg

SEQ ID NO: 105226 - DNA, 33 bp, Homo sapien
tgtcccccaactaccatagagctgcccactctg

SEQ ID NO: 105227 - DNA, 33 bp, Homo sapien
tggacaaatgggatcaaatctagttaagaagct

SEQ ID NO: 105228 - DNA, 33 bp, Homo sapien
tggacaaatgggatcacatctagttaagaagct

SEQ ID NO: 105229 - DNA, 33 bp, Homo sapien
taagtatcaacaccaaatggtaaaacaagacct

SEQ ID NO: 105230 - DNA, 33 bp, Homo sapien
taagtatcaacaccaagtggtaaaacaagacct

SEQ ID NO: 105231 - DNA, 33 bp, Homo sapien
caatctgtcactcaaaatgtataatttattatt

SEQ ID NO: 105232 - DNA, 33 bp, Homo sapien
caatctgtcactcaaagtgtataatttattatt

SEQ ID NO: 105233 - DNA, 33 bp, Homo sapien
tcccaaagtgttgagaatatgagcgtgagccac

SEQ ID NO: 105234 - DNA, 33 bp, Homo sapien
tcccaaagtgttgagattatgagcgtgagccac

SEQ ID NO: 105235 - DNA, 33 bp, Homo sapien
ggatagtagaacaagacacattcaagttttgac

SEQ ID NO: 105236 - DNA, 33 bp, Homo sapien
ggatagtagaacaagagacattcaagttttgac

SEQ ID NO: 105237 - DNA, 33 bp, Homo sapien
acagatctttattgcaaacattcaaagagaggg

SEQ ID NO: 105238 - DNA, 33 bp, Homo sapien
acagatctttattgcagacattcaaagagaggg

SEQ ID NO: 105239 - DNA, 33 bp, Homo sapien
caaaagaatgatgttacggaattatttgtaagt

SEQ ID NO: 105240 - DNA, 33 bp, Homo sapien
caaaagaatgatgttatggaattatttgtaagt

SEQ ID NO: 105241 - DNA, 33 bp, Homo sapien
tgggcttatcattccaacaggctgagaaggggc

SEQ ID NO: 105242 - DNA, 33 bp, Homo sapien
tgggcttatcattccaccaggctgagaaggggc

SEQ ID NO: 105243 - DNA, 33 bp, Homo sapien
ctacataacaacataccgcaaggtttttatcca

SEQ ID NO: 105244 - DNA, 33 bp, Homo sapien
ctacataacaacatactgcaaggtttttatcca

SEQ ID NO: 105245 - DNA, 33 bp, Homo sapien
catctaggaagtaagacatgttagtcagaaaca

SEQ ID NO: 105246 - DNA, 33 bp, Homo sapien
catctaggaagtaagagatgttagtcagaaaca

SEQ ID NO: 105247 - DNA, 33 bp, Homo sapien
ttagcgtgtagatataagaagtcactctagtct

SEQ ID NO: 105248 - DNA, 33 bp, Homo sapien
ttagcgtgtagatataggaagtcactctagtct

SEQ ID NO: 105249 - DNA, 33 bp, Homo sapien
ctcataacattttcccactagaaataatgtgtg

SEQ ID NO: 105250 - DNA, 33 bp, Homo sapien
ctcataacattttcccgctagaaataatgtgtg

SEQ ID NO: 105251 - DNA, 33 bp, Homo sapien
aatttataaatatcataaggccaacaggtatca

SEQ ID NO: 105252 - DNA, 33 bp, Homo sapien
aatttataaatatcatgaggccaacaggtatca

SEQ ID NO: 105253 - DNA, 33 bp, Homo sapien
tagatctttccctgtaggtatatggagaacttc

SEQ ID NO: 105254 - DNA, 33 bp, Homo sapien
tagatctttccctgtatgtatatggagaacttc

SEQ ID NO: 105255 - DNA, 33 bp, Homo sapien
ccaaaataagtgcacaagtaaaataagataaaa

SEQ ID NO: 105256 - DNA, 33 bp, Homo sapien
ccaaaataagtgcacaggtaaaataagataaaa

SEQ ID NO: 105257 - DNA, 33 bp, Homo sapien
ttcacttctgtatctgaaaaagcatatagattc

SEQ ID NO: 105258 - DNA, 33 bp, Homo sapien
ttcacttctgtatctgcaaaagcatatagattc

SEQ ID NO: 105259 - DNA, 33 bp, Homo sapien
atagtagagaggctaaaaactataggaatggta

SEQ ID NO: 105260 - DNA, 33 bp, Homo sapien
atagtagagaggctaagaactataggaatggta

SEQ ID NO: 105261 - DNA, 33 bp, Homo sapien
gtgcattttctcttcaagtaagaaggcttactg

SEQ ID NO: 105262 - DNA, 33 bp, Homo sapien
gtgcattttctcttcatgtaagaaggcttactg

SEQ ID NO: 105263 - DNA, 33 bp, Homo sapien
gagctttttatgggcactgaaggaagccaaggg

SEQ ID NO: 105264 - DNA, 33 bp, Homo sapien
gagctttttatgggcagtgaaggaagccaaggg

SEQ ID NO: 105265 - DNA, 33 bp, Homo sapien
aaaatagaaaagcataggttgaagttatatttg

SEQ ID NO: 105266 - DNA, 33 bp, Homo sapien
aaaatagaaaagcatatgttgaagttatatttg

SEQ ID NO: 105267 - DNA, 33 bp, Homo sapien
aatacccatatataagcacaagcaataacacac

SEQ ID NO: 105268 - DNA, 33 bp, Homo sapien
aatacccatatataagtacaagcaataacacac

SEQ ID NO: 105269 - DNA, 33 bp, Homo sapien
tgtaacaaatgcttaaaggaggtgaaggggagc

SEQ ID NO: 105270 - DNA, 33 bp, Homo sapien
tgtaacaaatgcttaagggaggtgaaggggagc

SEQ ID NO: 105271 - DNA, 33 bp, Homo sapien
actcacccctaagcaaccaggtagtcacataaa

SEQ ID NO: 105272 - DNA, 33 bp, Homo sapien
actcacccctaagcaatcaggtagtcacataaa

SEQ ID NO: 105273 - DNA, 33 bp, Homo sapien
aaatatctataagcacaatagtatcagggctgt

SEQ ID NO: 105274 - DNA, 33 bp, Homo sapien
aaatatctataagcaccatagtatcagggctgt

SEQ ID NO: 105275 - DNA, 33 bp, Homo sapien
tgcataccatgaagacagagagtagaatggtga

SEQ ID NO: 105276 - DNA, 33 bp, Homo sapien
tgcataccatgaagacggagagtagaatggtga

SEQ ID NO: 105277 - DNA, 33 bp, Homo sapien
aactgaatttcaaaaggcttacttgcagaaagg

SEQ ID NO: 105278 - DNA, 33 bp, Homo sapien
aactgaatttcaaaagtcttacttgcagaaagg

SEQ ID NO: 105279 - DNA, 33 bp, Homo sapien
ggcaaaaagagccacacggagaaggagaagcaa

SEQ ID NO: 105280 - DNA, 33 bp, Homo sapien
ggcaaaaagagccacatggagaaggagaagcaa

SEQ ID NO: 105281 - DNA, 33 bp, Homo sapien
ttctctgcatcctcaccaagacctgtcagtttc

SEQ ID NO: 105282 - DNA, 33 bp, Homo sapien
ttctctgcatcctcacgaagacctgtcagtttc

SEQ ID NO: 105283 - DNA, 33 bp, Homo sapien
ggttttacaaatggcaaccttcctgacctcagg

SEQ ID NO: 105284 - DNA, 33 bp, Homo sapien
ggttttacaaatggcagccttcctgacctcagg

SEQ ID NO: 105285 - DNA, 33 bp, Homo sapien
attcttatatcctctcaatgaattagcctcttt

SEQ ID NO: 105286 - DNA, 33 bp, Homo sapien
attcttatatcctctcgatgaattagcctcttt

SEQ ID NO: 105287 - DNA, 33 bp, Homo sapien
agcttaggtaacatcaatctgatatcactgggt

SEQ ID NO: 105288 - DNA, 33 bp, Homo sapien
agcttaggtaacatcagtctgatatcactgggt

SEQ ID NO: 105289 - DNA, 33 bp, Homo sapien
tcatttgagacttctgcatgatctgtatgtaag

SEQ ID NO: 105290 - DNA, 33 bp, Homo sapien
tcatttgagacttctgtatgatctgtatgtaag

SEQ ID NO: 105291 - DNA, 33 bp, Homo sapien
tagtaacagctaccaaactcccagatttttatg

SEQ ID NO: 105292 - DNA, 33 bp, Homo sapien
tagtaacagctaccaacctcccagatttttatg

SEQ ID NO: 105293 - DNA, 33 bp, Homo sapien
tgtagtaaacaggccactgacagtgattggcca

SEQ ID NO: 105294 - DNA, 33 bp, Homo sapien
tgtagtaaacaggccattgacagtgattggcca

SEQ ID NO: 105295 - DNA, 33 bp, Homo sapien
tgtctggtttgtgttggacaaaaagagtgtccc

SEQ ID NO: 105296 - DNA, 33 bp, Homo sapien
tgtctggtttgtgttgtacaaaaagagtgtccc

SEQ ID NO: 105297 - DNA, 33 bp, Homo sapien
gtcttgaaaaagatagaccaacctgttaataat

SEQ ID NO: 105298 - DNA, 33 bp, Homo sapien
gtcttgaaaaagataggccaacctgttaataat

SEQ ID NO: 105299 - DNA, 33 bp, Homo sapien
ctaagcattcactaaaatacaagcagattgaac

SEQ ID NO: 105300 - DNA, 33 bp, Homo sapien
ctaagcattcactaaattacaagcagattgaac

SEQ ID NO: 105301 - DNA, 33 bp, Homo sapien
agtcctcaatcttgggacagttttattgaagct

SEQ ID NO: 105302 - DNA, 33 bp, Homo sapien
agtcctcaatcttgggtcagttttattgaagct

SEQ ID NO: 105303 - DNA, 33 bp, Homo sapien
aacaaaaactggaaaccactcagtcacgcatca

SEQ ID NO: 105304 - DNA, 33 bp, Homo sapien
aacaaaaactggaaacgactcagtcacgcatca

SEQ ID NO: 105305 - DNA, 33 bp, Homo sapien
atcttcatattttaaacgtggtgttgaaataaa

SEQ ID NO: 105306 - DNA, 33 bp, Homo sapien
atcttcatattttaaatgtggtgttgaaataaa

SEQ ID NO: 105307 - DNA, 33 bp, Homo sapien
atagtggtcacagaaaatttcataagcaattat

SEQ ID NO: 105308 - DNA, 33 bp, Homo sapien
atagtggtcacagaaattttcataagcaattat

SEQ ID NO: 105309 - DNA, 33 bp, Homo sapien
tgggttgactctatgtaaagatgcacatccaga

SEQ ID NO: 105310 - DNA, 33 bp, Homo sapien
tgggttgactctatgtgaagatgcacatccaga

SEQ ID NO: 105311 - DNA, 33 bp, Homo sapien
ccacattcaaaaagtaacatactatcttcttaa

SEQ ID NO: 105312 - DNA, 33 bp, Homo sapien
ccacattcaaaaagtagcatactatcttcttaa

SEQ ID NO: 105313 - DNA, 33 bp, Homo sapien
cctgccctgcaagggtaaccacatcgctcctca

SEQ ID NO: 105314 - DNA, 33 bp, Homo sapien
cctgccctgcaagggtgaccacatcgctcctca

SEQ ID NO: 105315 - DNA, 33 bp, Homo sapien
aattcttctgtctccaagcaattctcctgtctc

SEQ ID NO: 105316 - DNA, 33 bp, Homo sapien
aattcttctgtctccaggcaattctcctgtctc

SEQ ID NO: 105317 - DNA, 33 bp, Homo sapien
tcaaattatttttctgcatgtccatgtaagtag

SEQ ID NO: 105318 - DNA, 33 bp, Homo sapien
tcaaattatttttctgtatgtccatgtaagtag

SEQ ID NO: 105319 - DNA, 33 bp, Homo sapien
cagagaatgagatgaagtatagatcaaaaatag

SEQ ID NO: 105320 - DNA, 33 bp, Homo sapien
cagagaatgagatgaattatagatcaaaaatag

SEQ ID NO: 105321 - DNA, 33 bp, Homo sapien
taatttaatatcgcgaacaaatgttaactttgg

SEQ ID NO: 105322 - DNA, 33 bp, Homo sapien
taatttaatatcgcgagcaaatgttaactttgg

SEQ ID NO: 105323 - DNA, 33 bp, Homo sapien
cgcccggctctgccacgcttttaattctgaggg

SEQ ID NO: 105324 - DNA, 33 bp, Homo sapien
cgcccggctctgccactcttttaattctgaggg

SEQ ID NO: 105325 - DNA, 33 bp, Homo sapien
aacatgaatttaagaaatgaacagttgcctaca

SEQ ID NO: 105326 - DNA, 33 bp, Homo sapien
aacatgaatttaagaagtgaacagttgcctaca

SEQ ID NO: 105327 - DNA, 33 bp, Homo sapien
gcctaagtgaacttacaactaaaaccgtaaata

SEQ ID NO: 105328 - DNA, 33 bp, Homo sapien
gcctaagtgaacttacgactaaaaccgtaaata

SEQ ID NO: 105329 - DNA, 33 bp, Homo sapien
gcaagattctatccaaaaaacctgatttatatt

SEQ ID NO: 105330 - DNA, 33 bp, Homo sapien
gcaagattctatccaagaaacctgatttatatt

SEQ ID NO: 105331 - DNA, 33 bp, Homo sapien
tatatagccagtaaaaagattgtgggtcaaatg

SEQ ID NO: 105332 - DNA, 33 bp, Homo sapien
tatatagccagtaaaaggattgtgggtcaaatg

SEQ ID NO: 105333 - DNA, 33 bp, Homo sapien
gaaaagggagaggtaacatgaaactgaagaaag

SEQ ID NO: 105334 - DNA, 33 bp, Homo sapien
gaaaagggagaggtaatatgaaactgaagaaag

SEQ ID NO: 105335 - DNA, 33 bp, Homo sapien
tttttgaggactcacactggtttttgtttgttt

SEQ ID NO: 105336 - DNA, 33 bp, Homo sapien
tttttgaggactcacattggtttttgtttgttt

SEQ ID NO: 105337 - DNA, 33 bp, Homo sapien
ataatctactattatcaattttcagagaaaaca

SEQ ID NO: 105338 - DNA, 33 bp, Homo sapien
ataatctactattatcgattttcagagaaaaca

SEQ ID NO: 105339 - DNA, 33 bp, Homo sapien
aacaaattatctgcaggaaaactttctgaaagt

SEQ ID NO: 105340 - DNA, 33 bp, Homo sapien
aacaaattatctgcagtaaaactttctgaaagt

SEQ ID NO: 105341 - DNA, 33 bp, Homo sapien
attttgttctatggagcaattattaggtagaca

SEQ ID NO: 105342 - DNA, 33 bp, Homo sapien
attttgttctatggaggaattattaggtagaca

SEQ ID NO: 105343 - DNA, 33 bp, Homo sapien
tcatcagaaaactgtacagaattaggcttaaaa

SEQ ID NO: 105344 - DNA, 33 bp, Homo sapien
tcatcagaaaactgtatagaattaggcttaaaa

SEQ ID NO: 105345 - DNA, 33 bp, Homo sapien
tttcctgcctccatcaaactttattgttctgag

SEQ ID NO: 105346 - DNA, 33 bp, Homo sapien
tttcctgcctccatcagactttattgttctgag

SEQ ID NO: 105347 - DNA, 33 bp, Homo sapien
atttatagcttcatcaaatgggttcttcctttg

SEQ ID NO: 105348 - DNA, 33 bp, Homo sapien
atttatagcttcatcagatgggttcttcctttg

SEQ ID NO: 105349 - DNA, 33 bp, Homo sapien
gtgataattctgttgccagtctttagaaaccaa

SEQ ID NO: 105350 - DNA, 33 bp, Homo sapien
gtgataattctgttgctagtctttagaaaccaa

SEQ ID NO: 105351 - DNA, 33 bp, Homo sapien
cagtaagcacaggttagagttctagcaatcact

SEQ ID NO: 105352 - DNA, 33 bp, Homo sapien
cagtaagcacaggttatagttctagcaatcact

SEQ ID NO: 105353 - DNA, 33 bp, Homo sapien
gcaaaatattatctgaactttaggcttttgcct

SEQ ID NO: 105354 - DNA, 33 bp, Homo sapien
gcaaaatattatctgacctttaggcttttgcct

SEQ ID NO: 105355 - DNA, 33 bp, Homo sapien
tttttattccaatgcaaaaactatgctgcactg

SEQ ID NO: 105356 - DNA, 33 bp, Homo sapien
tttttattccaatgcagaaactatgctgcactg

SEQ ID NO: 105357 - DNA, 33 bp, Homo sapien
attaacattcaacaaaaggttatgagagatgaa

SEQ ID NO: 105358 - DNA, 33 bp, Homo sapien
attaacattcaacaaagggttatgagagatgaa

SEQ ID NO: 105359 - DNA, 33 bp, Homo sapien
ccaaatcagtgataaaacatagacttcccatgg

SEQ ID NO: 105360 - DNA, 33 bp, Homo sapien
ccaaatcagtgataaagcatagacttcccatgg

SEQ ID NO: 105361 - DNA, 33 bp, Homo sapien
ttttttctcatctacaataatcaaaatttatcc

SEQ ID NO: 105362 - DNA, 33 bp, Homo sapien
ttttttctcatctacagtaatcaaaatttatcc

SEQ ID NO: 105363 - DNA, 33 bp, Homo sapien
cagcgcctggccaaatcaatggctttctttaga

SEQ ID NO: 105364 - DNA, 33 bp, Homo sapien
cagcgcctggccaaattaatggctttctttaga

SEQ ID NO: 105365 - DNA, 33 bp, Homo sapien
tgaaaacagtcaatagccataagtaactttttc

SEQ ID NO: 105366 - DNA, 33 bp, Homo sapien
tgaaaacagtcaatagtcataagtaactttttc

SEQ ID NO: 105367 - DNA, 33 bp, Homo sapien
gcttgagagacagagcaacacaggaagactctg

SEQ ID NO: 105368 - DNA, 33 bp, Homo sapien
gcttgagagacagagcgacacaggaagactctg

SEQ ID NO: 105369 - DNA, 33 bp, Homo sapien
ctgacatcttccttaaatattgttctaaaacta

SEQ ID NO: 105370 - DNA, 33 bp, Homo sapien
ctgacatcttccttaagtattgttctaaaacta

SEQ ID NO: 105371 - DNA, 33 bp, Homo sapien
tggtaagccttaactaaatactttctgagcaaa

SEQ ID NO: 105372 - DNA, 33 bp, Homo sapien
tggtaagccttaactagatactttctgagcaaa

SEQ ID NO: 105373 - DNA, 33 bp, Homo sapien
tctttctaagtgatacaattttatgctggataa

SEQ ID NO: 105374 - DNA, 33 bp, Homo sapien
tctttctaagtgatacgattttatgctggataa

SEQ ID NO: 105375 - DNA, 33 bp, Homo sapien
gttcataacattcaggaactctccatgtcttac

SEQ ID NO: 105376 - DNA, 33 bp, Homo sapien
gttcataacattcagggactctccatgtcttac

SEQ ID NO: 105377 - DNA, 33 bp, Homo sapien
ttcctctgagtttctggaaaatacacacatctg

SEQ ID NO: 105378 - DNA, 33 bp, Homo sapien
ttcctctgagtttctgtaaaatacacacatctg

SEQ ID NO: 105379 - DNA, 33 bp, Homo sapien
ttcaaacattcaaaaaaaagcaatgcaaataaa

SEQ ID NO: 105380 - DNA, 33 bp, Homo sapien
ttcaaacattcaaaaagaagcaatgcaaataaa

SEQ ID NO: 105381 - DNA, 33 bp, Homo sapien
tacttctgaagcatgacgctagagtggaaagaa

SEQ ID NO: 105382 - DNA, 33 bp, Homo sapien
tacttctgaagcatgatgctagagtggaaagaa

SEQ ID NO: 105383 - DNA, 33 bp, Homo sapien
catccctaggcatttaactccaaactaaatttt

SEQ ID NO: 105384 - DNA, 33 bp, Homo sapien
catccctaggcatttacctccaaactaaatttt

SEQ ID NO: 105385 - DNA, 33 bp, Homo sapien
gaaaagaaagctattaactagccaaaagcacag

SEQ ID NO: 105386 - DNA, 33 bp, Homo sapien
gaaaagaaagctattagctagccaaaagcacag

SEQ ID NO: 105387 - DNA, 33 bp, Homo sapien
tcgatatgggcactggaacatcttttgcctatt

SEQ ID NO: 105388 - DNA, 33 bp, Homo sapien
tcgatatgggcactgggacatcttttgcctatt

SEQ ID NO: 105389 - DNA, 33 bp, Homo sapien
caatatgagcctgagacggaaaaataagacaga

SEQ ID NO: 105390 - DNA, 33 bp, Homo sapien
caatatgagcctgagagggaaaaataagacaga

SEQ ID NO: 105391 - DNA, 33 bp, Homo sapien
agatataaggatcaacactataggtcaacacct

SEQ ID NO: 105392 - DNA, 33 bp, Homo sapien
agatataaggatcaacgctataggtcaacacct

SEQ ID NO: 105393 - DNA, 33 bp, Homo sapien
tactatcacaaaacacaaggtctttaaaactca

SEQ ID NO: 105394 - DNA, 33 bp, Homo sapien
tactatcacaaaacacgaggtctttaaaactca

SEQ ID NO: 105395 - DNA, 33 bp, Homo sapien
ttgactgacgactccacgccggcaaagttggtg

SEQ ID NO: 105396 - DNA, 33 bp, Homo sapien
ttgactgacgactccatgccggcaaagttggtg

SEQ ID NO: 105397 - DNA, 33 bp, Homo sapien
aggtctgtgtaaaaccagctccattgctcacct

SEQ ID NO: 105398 - DNA, 33 bp, Homo sapien
aggtctgtgtaaaaccggctccattgctcacct

SEQ ID NO: 105399 - DNA, 33 bp, Homo sapien
taatccactatctcaactgtgccttcattcttt

SEQ ID NO: 105400 - DNA, 33 bp, Homo sapien
taatccactatctcaattgtgccttcattcttt

SEQ ID NO: 105401 - DNA, 33 bp, Homo sapien
taagccaataaataaactgtatgtgcgtgggaa

SEQ ID NO: 105402 - DNA, 33 bp, Homo sapien
taagccaataaataaattgtatgtgcgtgggaa

SEQ ID NO: 105403 - DNA, 33 bp, Homo sapien
caaataatggatgtatcacagtttgcttacacc

SEQ ID NO: 105404 - DNA, 33 bp, Homo sapien
caaataatggatgtatgacagtttgcttacacc

SEQ ID NO: 105405 - DNA, 33 bp, Homo sapien
gactagaagataaagaccaatgtaaggccgggc

SEQ ID NO: 105406 - DNA, 33 bp, Homo sapien
gactagaagataaagagcaatgtaaggccgggc

SEQ ID NO: 105407 - DNA, 33 bp, Homo sapien
agcagtgagtcagtgaaaatcagagtatacagc

SEQ ID NO: 105408 - DNA, 33 bp, Homo sapien
agcagtgagtcagtgacaatcagagtatacagc

SEQ ID NO: 105409 - DNA, 33 bp, Homo sapien
gtgaagactttgtggaagaagaaaacattattc

SEQ ID NO: 105410 - DNA, 33 bp, Homo sapien
gtgaagactttgtggatgaagaaaacattattc

SEQ ID NO: 105411 - DNA, 33 bp, Homo sapien
tttctaaggtgtctcaacgtacaacatggcatg

SEQ ID NO: 105412 - DNA, 33 bp, Homo sapien
tttctaaggtgtctcagcgtacaacatggcatg

SEQ ID NO: 105413 - DNA, 33 bp, Homo sapien
tataaagtgttagccacaggagaataaatgata

SEQ ID NO: 105414 - DNA, 33 bp, Homo sapien
tataaagtgttagccagaggagaataaatgata

SEQ ID NO: 105415 - DNA, 33 bp, Homo sapien
gcaaagtaaagtcacaatgtaatagcacaagac

SEQ ID NO: 105416 - DNA, 33 bp, Homo sapien
gcaaagtaaagtcacagtgtaatagcacaagac

SEQ ID NO: 105417 - DNA, 33 bp, Homo sapien
cagtggagtgtagctacgagggttggctttgtg

SEQ ID NO: 105418 - DNA, 33 bp, Homo sapien
cagtggagtgtagctatgagggttggctttgtg

SEQ ID NO: 105419 - DNA, 33 bp, Homo sapien
cgctcataactggtgaagtcacagtttctaaaa

SEQ ID NO: 105420 - DNA, 33 bp, Homo sapien
cgctcataactggtgatgtcacagtttctaaaa

SEQ ID NO: 105421 - DNA, 33 bp, Homo sapien; identical to SEQ ID NO: 105419

SEQ ID NO: 105422 - DNA, 33 bp, Homo sapien; identical to SEQ ID NO: 105420

SEQ ID NO: 105423 - DNA, 33 bp, Homo sapien
caaagcaaatagaaaactttctcagaaaaacca

SEQ ID NO: 105424 - DNA, 33 bp, Homo sapien
caaagcaaatagaaaagtttctcagaaaaacca

SEQ ID NO: 105425 - DNA, 33 bp, Homo sapien
acacagtaaagaagcaataaatgaaaaagaata

SEQ ID NO: 105426 - DNA, 33 bp, Homo sapien
acacagtaaagaagcagtaaatgaaaaagaata

SEQ ID NO: 105427 - DNA, 33 bp, Homo sapien
gacactttatccagcaactttcttagaataatg

SEQ ID NO: 105428 - DNA, 33 bp, Homo sapien
gacactttatccagcagctttcttagaataatg

SEQ ID NO: 105429 - DNA, 33 bp, Homo sapien
gtgcaggctcagcatacaacttccttaatttgt

SEQ ID NO: 105430 - DNA, 33 bp, Homo sapien
gtgcaggctcagcatataacttccttaatttgt

SEQ ID NO: 105431 - DNA, 33 bp, Homo sapien
atcttcaaagggcttgaaattctccctccttca

SEQ ID NO: 105432 - DNA, 33 bp, Homo sapien
atcttcaaagggcttggaattctccctccttca

SEQ ID NO: 105433 - DNA, 33 bp, Homo sapien
aaagacacagttcacaataagttagctatggag

SEQ ID NO: 105434 - DNA, 33 bp, Homo sapien
aaagacacagttcacagtaagttagctatggag

SEQ ID NO: 105435 - DNA, 33 bp, Homo sapien
ctatatgaggcctaagcccagaagtgaccttga

SEQ ID NO: 105436 - DNA, 33 bp, Homo sapien
ctatatgaggcctaagtccagaagtgaccttga

SEQ ID NO: 105437 - DNA, 33 bp, Homo sapien
cagccactagtgctagaattggtgactgaaggg

SEQ ID NO: 105438 - DNA, 33 bp, Homo sapien
cagccactagtgctaggattggtgactgaaggg

SEQ ID NO: 105439 - DNA, 33 bp, Homo sapien
gatatctactcaatgcactacctttcatccaca

SEQ ID NO: 105440 - DNA, 33 bp, Homo sapien
gatatctactcaatgccctacctttcatccaca

SEQ ID NO: 105441 - DNA, 33 bp, Homo sapien
atatgtttccaaatgcaaagccaaaacctacac

SEQ ID NO: 105442 - DNA, 33 bp, Homo sapien
atatgtttccaaatgcgaagccaaaacctacac

SEQ ID NO: 105443 - DNA, 33 bp, Homo sapien
agactcctagagattcccaagtatatatgggag

SEQ ID NO: 105444 - DNA, 33 bp, Homo sapien
agactcctagagattcgcaagtatatatgggag

SEQ ID NO: 105445 - DNA, 33 bp, Homo sapien
aagagaggatggcaaaaagtggacaaatacatg

SEQ ID NO: 105446 - DNA, 33 bp, Homo sapien
aagagaggatggcaaagagtggacaaatacatg

SEQ ID NO: 105447 - DNA, 33 bp, Homo sapien
tagattaatcctgctcacaatcacattggtatc

SEQ ID NO: 105448 - DNA, 33 bp, Homo sapien
tagattaatcctgctcgcaatcacattggtatc

SEQ ID NO: 105449 - DNA, 33 bp, Homo sapien
ggtaacaaaatagcaagcttcagacagtcactg

SEQ ID NO: 105450 - DNA, 33 bp, Homo sapien
ggtaacaaaatagcaatcttcagacagtcactg

SEQ ID NO: 105451 - DNA, 33 bp, Homo sapien
gtgagtttgtggtaaaagcattttggaaatatt

SEQ ID NO: 105452 - DNA, 33 bp, Homo sapien
gtgagtttgtggtaaatgcattttggaaatatt

SEQ ID NO: 105453 - DNA, 33 bp, Homo sapien
ccagtttctgaacttccactggatcttaggaag

SEQ ID NO: 105454 - DNA, 33 bp, Homo sapien
ccagtttctgaacttctactggatcttaggaag

SEQ ID NO: 105455 - DNA, 33 bp, Homo sapien
tatatgtcttttctgacctgaaattggaaaaca

SEQ ID NO: 105456 - DNA, 33 bp, Homo sapien
tatatgtcttttctgatctgaaattggaaaaca

SEQ ID NO: 105457 - DNA, 33 bp, Homo sapien
gtatgatgctgagtagacctggtgcaagacatt

SEQ ID NO: 105458 - DNA, 33 bp, Homo sapien
gtatgatgctgagtaggcctggtgcaagacatt

SEQ ID NO: 105459 - DNA, 33 bp, Homo sapien
tgagtgagaaggaccaccaaactcattgctttt

SEQ ID NO: 105460 - DNA, 33 bp, Homo sapien
tgagtgagaaggaccatcaaactcattgctttt

SEQ ID NO: 105461 - DNA, 33 bp, Homo sapien
atttagcagctcatgaagaaagttagaatgtaa

SEQ ID NO: 105462 - DNA, 33 bp, Homo sapien
atttagcagctcatgaggaaagttagaatgtaa

SEQ ID NO: 105463 - DNA, 33 bp, Homo sapien
catactgtatgagaaacgttttaagttgtactc

SEQ ID NO: 105464 - DNA, 33 bp, Homo sapien
catactgtatgagaaaggttttaagttgtactc

SEQ ID NO: 105465 - DNA, 33 bp, Homo sapien
caagggtgaaaaccaagaaaggaagagatgttg

SEQ ID NO: 105466 - DNA, 33 bp, Homo sapien
caagggtgaaaaccaataaaggaagagatgttg

SEQ ID NO: 105467 - DNA, 33 bp, Homo sapien
tattattccatctttcacacacaaaaactggta

SEQ ID NO: 105468 - DNA, 33 bp, Homo sapien
tattattccatctttcgcacacaaaaactggta

SEQ ID NO: 105469 - DNA, 33 bp, Homo sapien
tagctcccaatgctgacgggaccaattccagtt

SEQ ID NO: 105470 - DNA, 33 bp, Homo sapien
tagctcccaatgctgatgggaccaattccagtt

SEQ ID NO: 105471 - DNA, 33 bp, Homo sapien
ctctaggaaggaaaacggttcattctattaaat

SEQ ID NO: 105472 - DNA, 33 bp, Homo sapien
ctctaggaaggaaaactgttcattctattaaat

SEQ ID NO: 105473 - DNA, 33 bp, Homo sapien
atatccttgaatatctaaaaagaacctcaaact

SEQ ID NO: 105474 - DNA, 33 bp, Homo sapien
atatccttgaatatctcaaaagaacctcaaact

SEQ ID NO: 105475 - DNA, 33 bp, Homo sapien
atcaatatgttcttgaaaactgccacttgaagc

SEQ ID NO: 105476 - DNA, 33 bp, Homo sapien
atcaatatgttcttgataactgccacttgaagc

SEQ ID NO: 105477 - DNA, 33 bp, Homo sapien
gatctaaaaggagagcagacccaaaatcctgct

SEQ ID NO: 105478 - DNA, 33 bp, Homo sapien
gatctaaaaggagagcggacccaaaatcctgct

SEQ ID NO: 105479 - DNA, 33 bp, Homo sapien
cttacttgtattccaacttagacgtgtaccaag

SEQ ID NO: 105480 - DNA, 33 bp, Homo sapien
cttacttgtattccaatttagacgtgtaccaag

SEQ ID NO: 105481 - DNA, 33 bp, Homo sapien
aattagcctccttgaaaaaattcaaagcagagc

SEQ ID NO: 105482 - DNA, 33 bp, Homo sapien
aattagcctccttgaacaaattcaaagcagagc

SEQ ID NO: 105483 - DNA, 33 bp, Homo sapien
gagttcttgtctcaaacgggagcactcatctgg

SEQ ID NO: 105484 - DNA, 33 bp, Homo sapien
gagttcttgtctcaaatgggagcactcatctgg

SEQ ID NO: 105485 - DNA, 33 bp, Homo sapien; identical to SEQ ID NO: 105483

SEQ ID NO: 105486 - DNA, 33 bp, Homo sapien; identical to SEQ ID NO: 105484

SEQ ID NO: 105487 - DNA, 33 bp, Homo sapien
gagactatgttacaaacgtttatcctcaatgac

SEQ ID NO: 105488 - DNA, 33 bp, Homo sapien
gagactatgttacaaatgtttatcctcaatgac

SEQ ID NO: 105489 - DNA, 33 bp, Homo sapien
ctcaatgacatatgagaagaacatatctgatgg

SEQ ID NO: 105490 - DNA, 33 bp, Homo sapien
ctcaatgacatatgaggagaacatatctgatgg

SEQ ID NO: 105491 - DNA, 33 bp, Homo sapien
tgatggaaaattactgaaataagacagcgaggt

SEQ ID NO: 105492 - DNA, 33 bp, Homo sapien
tgatggaaaattactgcaataagacagcgaggt

SEQ ID NO: 105493 - DNA, 33 bp, Homo sapien
taatgcaagacctagccgcgaaataattgggga

SEQ ID NO: 105494 - DNA, 33 bp, Homo sapien
taatgcaagacctagctgcgaaataattgggga

SEQ ID NO: 105495 - DNA, 33 bp, Homo sapien
gcttcatgagccataaaaactctgcgctcccca

SEQ ID NO: 105496 - DNA, 33 bp, Homo sapien
gcttcatgagccataagaactctgcgctcccca

SEQ ID NO: 105497 - DNA, 33 bp, Homo sapien
tcccaagctgcaatcaagaaaaaggaggaaaaa

SEQ ID NO: 105498 - DNA, 33 bp, Homo sapien
tcccaagctgcaatcatgaaaaaggaggaaaaa

SEQ ID NO: 105499 - DNA, 33 bp, Homo sapien
tccaagttctctggaaaacactctgcttttctg

SEQ ID NO: 105500 - DNA, 33 bp, Homo sapien
tccaagttctctggaagacactctgcttttctg

SEQ ID NO: 105501 - DNA, 33 bp, Homo sapien
cggaggctcaaaaagaagtagatcaaaagcaat

SEQ ID NO: 105502 - DNA, 33 bp, Homo sapien
cggaggctcaaaaagatgtagatcaaaagcaat

SEQ ID NO: 105503 - DNA, 33 bp, Homo sapien
gatttttctaatatgagcagatggggccaaaac

SEQ ID NO: 105504 - DNA, 33 bp, Homo sapien
gatttttctaatatgatcagatggggccaaaac

SEQ ID NO: 105505 - DNA, 33 bp, Homo sapien
aacctatctcttccaagaagccttaccagagaa

SEQ ID NO: 105506 - DNA, 33 bp, Homo sapien
aacctatctcttccaataagccttaccagagaa

SEQ ID NO: 105507 - DNA, 33 bp, Homo sapien; identical to SEQ ID NO: 105505

SEQ ID NO: 105508 - DNA, 33 bp, Homo sapien; identical to SEQ ID NO: 105506

SEQ ID NO: 105509 - DNA, 33 bp, Homo sapien
atgtcctagcttttaacggtgatgtttccattt

SEQ ID NO: 105510 - DNA, 33 bp, Homo sapien
atgtcctagcttttaatggtgatgtttccattt

SEQ ID NO: 105511 - DNA, 33 bp, Homo sapien
acagatttaaattttcacaaaatactcttacat

SEQ ID NO: 105512 - DNA, 33 bp, Homo sapien
acagatttaaattttcgcaaaatactcttacat

SEQ ID NO: 105513 - DNA, 33 bp, Homo sapien
aactaatttatgcccccacgaacagtgtataag

SEQ ID NO: 105514 - DNA, 33 bp, Homo sapien
aactaatttatgcccctacgaacagtgtataag

SEQ ID NO: 105515 - DNA, 33 bp, Homo sapien
tctttgaggaactgccacacccttttacacaat

SEQ ID NO: 105516 - DNA, 33 bp, Homo sapien
tctttgaggaactgccgcacccttttacacaat

SEQ ID NO: 105517 - DNA, 33 bp, Homo sapien
ctgcagcacgcagaagcacataatctgtctccc

SEQ ID NO: 105518 - DNA, 33 bp, Homo sapien
ctgcagcacgcagaagtacataatctgtctccc

SEQ ID NO: 105519 - DNA, 33 bp, Homo sapien
agagtaagtgtagtgaagtccaattttatgtaa

SEQ ID NO: 105520 - DNA, 33 bp, Homo sapien
agagtaagtgtagtgaggtccaattttatgtaa

SEQ ID NO: 105521 - DNA, 33 bp, Homo sapien
ttatgttggattatacaaagtccagaggagtaa

SEQ ID NO: 105522 - DNA, 33 bp, Homo sapien
ttatgttggattatacgaagtccagaggagtaa

SEQ ID NO: 105523 - DNA, 33 bp, Homo sapien
gttacacaatatctgccacgacccagcttttct

SEQ ID NO: 105524 - DNA, 33 bp, Homo sapien
gttacacaatatctgcgacgacccagcttttct

SEQ ID NO: 105525 - DNA, 33 bp, Homo sapien
gaacctgacagtgctcaaaaacatcgcagacac

SEQ ID NO: 105526 - DNA, 33 bp, Homo sapien
gaacctgacagtgctcgaaaacatcgcagacac

SEQ ID NO: 105527 - DNA, 33 bp, Homo sapien; identical to SEQ ID NO: 105525

SEQ ID NO: 105528 - DNA, 33 bp, Homo sapien; identical to SEQ ID NO: 105526

SEQ ID NO: 105529 - DNA, 33 bp, Homo sapien
gaaatagccttacaacactgtgaattcaatcct

SEQ ID NO: 105530 - DNA, 33 bp, Homo sapien
gaaatagccttacaacgctgtgaattcaatcct

SEQ ID NO: 105531 - DNA, 33 bp, Homo sapien; identical to SEQ ID NO: 105529

SEQ ID NO: 105532 - DNA, 33 bp, Homo sapien; identical to SEQ ID NO: 105530

SEQ ID NO: 105533 - DNA, 33 bp, Homo sapien
ccagtctaagtgcaaaaggacaagagcttaagc

SEQ ID NO: 105534 - DNA, 33 bp, Homo sapien
ccagtctaagtgcaaagggacaagagcttaagc

SEQ ID NO: 105535 - DNA, 33 bp, Homo sapien
tgttgtagtcccatcacatttaatactcaaaac

SEQ ID NO: 105536 - DNA, 33 bp, Homo sapien
tgttgtagtcccatcatatttaatactcaaaac

SEQ ID NO: 105537 - DNA, 33 bp, Homo sapien
gtttaatgatcaacaacgatttttggatcatca

SEQ ID NO: 105538 - DNA, 33 bp, Homo sapien
gtttaatgatcaacaatgatttttggatcatca

SEQ ID NO: 105539 - DNA, 33 bp, Homo sapien
gtgcattccacagtcaaatttctagaatgaaat

SEQ ID NO: 105540 - DNA, 33 bp, Homo sapien
gtgcattccacagtcagatttctagaatgaaat

SEQ ID NO: 105541 - DNA, 33 bp, Homo sapien
tttgctggtggttgcacaggtaagaataatgac

SEQ ID NO: 105542 - DNA, 33 bp, Homo sapien
tttgctggtggttgcagaggtaagaataatgac

SEQ ID NO: 105543 - DNA, 33 bp, Homo sapien
aaaatgtaggtaacaacgatgtctatcgaacca

SEQ ID NO: 105544 - DNA, 33 bp, Homo sapien
aaaatgtaggtaacaatgatgtctatcgaacca

SEQ ID NO: 105545 - DNA, 33 bp, Homo sapien
cttttgatgctagcaaatgtagtggtttttatc

SEQ ID NO: 105546 - DNA, 33 bp, Homo sapien
cttttgatgctagcaattgtagtggtttttatc

SEQ ID NO: 105547 - DNA, 33 bp, Homo sapien; identical to SEQ ID NO: 105545

SEQ ID NO: 105548 - DNA, 33 bp, Homo sapien; identical to SEQ ID NO: 105546

SEQ ID NO: 105549 - DNA, 33 bp, Homo sapien
ttcaataagcagttataaaagttctactatagt

SEQ ID NO: 105550 - DNA, 33 bp, Homo sapien
ttcaataagcagttatgaaagttctactatagt

SEQ ID NO: 105551 - DNA, 33 bp, Homo sapien
ccagcaaccacatacagatatgctttgtaactt

SEQ ID NO: 105552 - DNA, 33 bp, Homo sapien
ccagcaaccacatacatatatgctttgtaactt

SEQ ID NO: 105553 - DNA, 33 bp, Homo sapien; identical to SEQ ID NO: 105551

SEQ ID NO: 105554 - DNA, 33 bp, Homo sapien; identical to SEQ ID NO: 105552

SEQ ID NO: 105555 - DNA, 33 bp, Homo sapien
ctagactcttgaggacacttccaggatgaatcg

SEQ ID NO: 105556 - DNA, 33 bp, Homo sapien
ctagactcttgaggacgcttccaggatgaatcg

SEQ ID NO: 105557 - DNA, 33 bp, Homo sapien
atgacagcattgataagattgataagagtgaga

SEQ ID NO: 105558 - DNA, 33 bp, Homo sapien
atgacagcattgataatattgataagagtgaga

SEQ ID NO: 105559 - DNA, 33 bp, Homo sapien; identical to SEQ ID NO: 105557

SEQ ID NO: 105560 - DNA, 33 bp, Homo sapien; identical to SEQ ID NO: 105558

SEQ ID NO: 105561 - DNA, 33 bp, Homo sapien
aatatgatcatgttaaaacaccaagcttctcaa

SEQ ID NO: 105562 - DNA, 33 bp, Homo sapien
aatatgatcatgttaagacaccaagcttctcaa

SEQ ID NO: 105563 - DNA, 33 bp, Homo sapien
catatccagcctctgcaagattctactagggtt

SEQ ID NO: 105564 - DNA, 33 bp, Homo sapien
catatccagcctctgccagattctactagggtt

SEQ ID NO: 105565 - DNA, 33 bp, Homo sapien
cttcccattttattgacgaagagactgagaccc

SEQ ID NO: 105566 - DNA, 33 bp, Homo sapien
cttcccattttattgatgaagagactgagaccc

SEQ ID NO: 105567 - DNA, 33 bp, Homo sapien; identical to SEQ ID NO: 105565

SEQ ID NO: 105568 - DNA, 33 bp, Homo sapien; identical to SEQ ID NO: 105566

SEQ ID NO: 105569 - DNA, 33 bp, Homo sapien
aactgattggcagtcaagaaattgggaatgatt

SEQ ID NO: 105570 - DNA, 33 bp, Homo sapien
aactgattggcagtcatgaaattgggaatgatt

SEQ ID NO: 105571 - DNA, 33 bp, Homo sapien
ttagttgacatctatacgttttcaccccagctc

SEQ ID NO: 105572 - DNA, 33 bp, Homo sapien
ttagttgacatctatatgttttcaccccagctc

SEQ ID NO: 105573 - DNA, 33 bp, Homo sapien
taggtcaatatcgtagaatagagaacccaaaat

SEQ ID NO: 105574 - DNA, 33 bp, Homo sapien
taggtcaatatcgtagcatagagaacccaaaat

SEQ ID NO: 105575 - DNA, 33 bp, Homo sapien
atagtaggtctgaatacgagatagaattatttc

SEQ ID NO: 105576 - DNA, 33 bp, Homo sapien
atagtaggtctgaatatgagatagaattatttc

SEQ ID NO: 105577 - DNA, 33 bp, Homo sapien
aatcagaaaagaaatgcattgtgtttgtgaata

SEQ ID NO: 105578 - DNA, 33 bp, Homo sapien
aatcagaaaagaaatgtattgtgtttgtgaata

SEQ ID NO: 105579 - DNA, 33 bp, Homo sapien
agggaacctgaagtgccaataaaccttacaaag

SEQ ID NO: 105580 - DNA, 33 bp, Homo sapien
agggaacctgaagtgctaataaaccttacaaag

SEQ ID NO: 105581 - DNA, 33 bp, Homo sapien
actttcattccgcaggcagcctaaatgggtttg

SEQ ID NO: 105582 - DNA, 33 bp, Homo sapien
actttcattccgcaggtagcctaaatgggtttg

SEQ ID NO: 105583 - DNA, 33 bp, Homo sapien
tatatttgcccatagcccgactcagtgtaattc

SEQ ID NO: 105584 - DNA, 33 bp, Homo sapien
tatatttgcccatagctcgactcagtgtaattc

SEQ ID NO: 105585 - DNA, 33 bp, Homo sapien
aaaatgcagaatcccaagtcggctgaatctcag

SEQ ID NO: 105586 - DNA, 33 bp, Homo sapien
aaaatgcagaatcccaggtcggctgaatctcag

SEQ ID NO: 105587 - DNA, 33 bp, Homo sapien
aagtcgaattgtttgcaaaggaggaaattgtgt

SEQ ID NO: 105588 - DNA, 33 bp, Homo sapien
aagtcgaattgtttgcgaaggaggaaattgtgt

SEQ ID NO: 105589 - DNA, 33 bp, Homo sapien
attgccattttatgaaacctcattagcaaataa

SEQ ID NO: 105590 - DNA, 33 bp, Homo sapien
attgccattttatgaagcctcattagcaaataa

SEQ ID NO: 105591 - DNA, 33 bp, Homo sapien
atagatttcattggcgcacagttctacaggttg

SEQ ID NO: 105592 - DNA, 33 bp, Homo sapien
atagatttcattggcgtacagttctacaggttg

SEQ ID NO: 105593 - DNA, 33 bp, Homo sapien
ctttcacaagaatgaactgtatccaagattttt

SEQ ID NO: 105594 - DNA, 33 bp, Homo sapien
ctttcacaagaatgaattgtatccaagattttt

SEQ ID NO: 105595 - DNA, 33 bp, Homo sapien; identical to SEQ ID NO: 105593

SEQ ID NO: 105596 - DNA, 33 bp, Homo sapien; identical to SEQ ID NO: 105594

SEQ ID NO: 105597 - DNA, 33 bp, Homo sapien
agatcactgtgaacaacgtacaggaaaaatgga

SEQ ID NO: 105598 - DNA, 33 bp, Homo sapien
agatcactgtgaacaatgtacaggaaaaatgga

SEQ ID NO: 105599 - DNA, 33 bp, Homo sapien; identical to SEQ ID NO: 105597

SEQ ID NO: 105600 - DNA, 33 bp, Homo sapien; identical to SEQ ID NO: 105598

SEQ ID NO: 105601 - DNA, 33 bp, Homo sapien
ttgtcattaattggtaaacacaaagacaaacct

SEQ ID NO: 105602 - DNA, 33 bp, Homo sapien
ttgtcattaattggtacacacaaagacaaacct

SEQ ID NO: 105603 - DNA, 33 bp, Homo sapien
gagaaaaatgttatcaagccaggtgatattgag

SEQ ID NO: 105604 - DNA, 33 bp, Homo sapien
gagaaaaatgttatcatgccaggtgatattgag

SEQ ID NO: 105605 - DNA, 33 bp, Homo sapien
gattatattgactaccactcactgatgttatga

SEQ ID NO: 105606 - DNA, 33 bp, Homo sapien
gattatattgactacctctcactgatgttatga

SEQ ID NO: 105607 - DNA, 33 bp, Homo sapien
gcattagagggcaagcacgcccgctcctgcagg

SEQ ID NO: 105608 - DNA, 33 bp, Homo sapien
gcattagagggcaagcccgcccgctcctgcagg

SEQ ID NO: 105609 - DNA, 33 bp, Homo sapien
ttatagactgtgagaacgcaccttgctagcact

SEQ ID NO: 105610 - DNA, 33 bp, Homo sapien
ttatagactgtgagaaggcaccttgctagcact

SEQ ID NO: 105611 - DNA, 33 bp, Homo sapien
aatgagttcaattaacaacttctaatgaggacc

SEQ ID NO: 105612 - DNA, 33 bp, Homo sapien
aatgagttcaattaacgacttctaatgaggacc

SEQ ID NO: 105613 - DNA, 33 bp, Homo sapien
gaggaggaaagaaagacgacaaagctaagtact

SEQ ID NO: 105614 - DNA, 33 bp, Homo sapien
gaggaggaaagaaagatgacaaagctaagtact

SEQ ID NO: 105615 - DNA, 33 bp, Homo sapien
agatgcatagggaggaggtactttactcaccct

SEQ ID NO: 105616 - DNA, 33 bp, Homo sapien
agatgcatagggaggatgtactttactcaccct

SEQ ID NO: 105617 - DNA, 33 bp, Homo sapien
tcaggcaccacaggcaacagtgaatgaatgaag

SEQ ID NO: 105618 - DNA, 33 bp, Homo sapien
tcaggcaccacaggcagcagtgaatgaatgaag

SEQ ID NO: 105619 - DNA, 33 bp, Homo sapien
cccagtcctggagaagacagcaggccgtaatca

SEQ ID NO: 105620 - DNA, 33 bp, Homo sapien
cccagtcctggagaagccagcaggccgtaatca

SEQ ID NO: 105621 - DNA, 33 bp, Homo sapien
atctgtaattgactgaacaatcagttgagataa

SEQ ID NO: 105622 - DNA, 33 bp, Homo sapien
atctgtaattgactgagcaatcagttgagataa

SEQ ID NO: 105623 - DNA, 33 bp, Homo sapien
caagctgtacttctgaagacacatgtgggataa

SEQ ID NO: 105624 - DNA, 33 bp, Homo sapien
caagctgtacttctgatgacacatgtgggataa

SEQ ID NO: 105625 - DNA, 33 bp, Homo sapien
ggtttccatcctctgcactagctgaaaggccac

SEQ ID NO: 105626 - DNA, 33 bp, Homo sapien
ggtttccatcctctgcgctagctgaaaggccac

SEQ ID NO: 105627 - DNA, 33 bp, Homo sapien
gcacaatatgctacgacgcaccttgaagttccc

SEQ ID NO: 105628 - DNA, 33 bp, Homo sapien
gcacaatatgctacgatgcaccttgaagttccc

SEQ ID NO: 105629 - DNA, 33 bp, Homo sapien
atccttaagattgaccaaaggcagcaggtcaca

SEQ ID NO: 105630 - DNA, 33 bp, Homo sapien
atccttaagattgaccgaaggcagcaggtcaca

SEQ ID NO: 105631 - DNA, 33 bp, Homo sapien
atttgttaatatttccactaggctagcccctgt

SEQ ID NO: 105632 - DNA, 33 bp, Homo sapien
atttgttaatatttcccctaggctagcccctgt

SEQ ID NO: 105633 - DNA, 33 bp, Homo sapien
agaccagacctggacaataaatgtcaagagtca

SEQ ID NO: 105634 - DNA, 33 bp, Homo sapien
agaccagacctggacagtaaatgtcaagagtca

SEQ ID NO: 105635 - DNA, 33 bp, Homo sapien
ttgaagggtaaagccacagtaaagccctggaaa

SEQ ID NO: 105636 - DNA, 33 bp, Homo sapien
ttgaagggtaaagccatagtaaagccctggaaa

SEQ ID NO: 105637 - DNA, 33 bp, Homo sapien
tctcataattctggaaagacagaaataagcttg

SEQ ID NO: 105638 - DNA, 33 bp, Homo sapien
tctcataattctggaaggacagaaataagcttg

SEQ ID NO: 105639 - DNA, 33 bp, Homo sapien
acagagcacaggctcaataattttgggattgtt

SEQ ID NO: 105640 - DNA, 33 bp, Homo sapien
acagagcacaggctcagtaattttgggattgtt

SEQ ID NO: 105641 - DNA, 33 bp, Homo sapien
catttgtgaccccaaaaatgggtgaagttggcc

SEQ ID NO: 105642 - DNA, 33 bp, Homo sapien
catttgtgaccccaaacatgggtgaagttggcc

SEQ ID NO: 105643 - DNA, 33 bp, Homo sapien
attctgtgaaaatgtgcaaccttccaactctca

SEQ ID NO: 105644 - DNA, 33 bp, Homo sapien
attctgtgaaaatgtgtaaccttccaactctca

SEQ ID NO: 105645 - DNA, 33 bp, Homo sapien
atataaatgtatcccacggtctagaaagaaaaa

SEQ ID NO: 105646 - DNA, 33 bp, Homo sapien
atataaatgtatcccatggtctagaaagaaaaa

SEQ ID NO: 105647 - DNA, 33 bp, Homo sapien
ttcactcaacatagtcacctccagttgcaccca

SEQ ID NO: 105648 - DNA, 33 bp, Homo sapien
ttcactcaacatagtcgcctccagttgcaccca

SEQ ID NO: 105649 - DNA, 33 bp, Homo sapien
ccatttaacagattggcaaacagggcagcaagg

SEQ ID NO: 105650 - DNA, 33 bp, Homo sapien
ccatttaacagattggtaaacagggcagcaagg

SEQ ID NO: 105651 - DNA, 33 bp, Homo sapien; identical to SEQ ID NO: 105649

SEQ ID NO: 105652 - DNA, 33 bp, Homo sapien; identical to SEQ ID NO: 105650

SEQ ID NO: 105653 - DNA, 33 bp, Homo sapien
tctcttagtttgcaaaaagcattcaccctcctg

SEQ ID NO: 105654 - DNA, 33 bp, Homo sapien
tctcttagtttgcaaagagcattcaccctcctg

SEQ ID NO: 105655 - DNA, 33 bp, Homo sapien; identical to SEQ ID NO: 105653

SEQ ID NO: 105656 - DNA, 33 bp, Homo sapien; identical to SEQ ID NO: 105654

SEQ ID NO: 105657 - DNA, 33 bp, Homo sapien
tacaaacgttgataataacaggagacaggtaga

SEQ ID NO: 105658 - DNA, 33 bp, Homo sapien
tacaaacgttgataatgacaggagacaggtaga

SEQ ID NO: 105659 - DNA, 33 bp, Homo sapien
actgataaaagagaaactggaaatgaatgggag

SEQ ID NO: 105660 - DNA, 33 bp, Homo sapien
actgataaaagagaaattggaaatgaatgggag

SEQ ID NO: 105661 - DNA, 33 bp, Homo sapien
tcaatcctttccatagacctgtgtgatagagcc

SEQ ID NO: 105662 - DNA, 33 bp, Homo sapien
tcaatcctttccatagccctgtgtgatagagcc

SEQ ID NO: 105663 - DNA, 33 bp, Homo sapien; identical to SEQ ID NO: 105661

SEQ ID NO: 105664 - DNA, 33 bp, Homo sapien; identical to SEQ ID NO: 105662

SEQ ID NO: 105665 - DNA, 33 bp, Homo sapien
acttcagttatctctacagtccctggtaggtat

SEQ ID NO: 105666 - DNA, 33 bp, Homo sapien
acttcagttatctctagagtccctggtaggtat

SEQ ID NO: 105667 - DNA, 33 bp, Homo sapien; identical to SEQ ID NO: 105665

SEQ ID NO: 105668 - DNA, 33 bp, Homo sapien; identical to SEQ ID NO: 105666

SEQ ID NO: 105669 - DNA, 33 bp, Homo sapien
tagatagatcaaacaacgcaaggagaactcaag

SEQ ID NO: 105670 - DNA, 33 bp, Homo sapien
tagatagatcaaacaaggcaaggagaactcaag

SEQ ID NO: 105671 - DNA, 33 bp, Homo sapien
tcaccttcatgccctacgttactctcctgaaaa

SEQ ID NO: 105672 - DNA, 33 bp, Homo sapien
tcaccttcatgccctatgttactctcctgaaaa

SEQ ID NO: 105673 - DNA, 33 bp, Homo sapien
ctagggtgatagaatcaaagtatgatgttgaga

SEQ ID NO: 105674 - DNA, 33 bp, Homo sapien
ctagggtgatagaatccaagtatgatgttgaga

SEQ ID NO: 105675 - DNA, 33 bp, Homo sapien
caaaaggatgctaaaacgtattggcagctactg

SEQ ID NO: 105676 - DNA, 33 bp, Homo sapien
caaaaggatgctaaaatgtattggcagctactg

SEQ ID NO: 105677 - DNA, 33 bp, Homo sapien
aaccctggcaatcaccaactcttttactgcttc

SEQ ID NO: 105678 - DNA, 33 bp, Homo sapien
aaccctggcaatcaccgactcttttactgcttc

SEQ ID NO: 105679 - DNA, 33 bp, Homo sapien
tcttctattaattgataaaaatttgcgaggctc

SEQ ID NO: 105680 - DNA, 33 bp, Homo sapien
tcttctattaattgatgaaaatttgcgaggctc

SEQ ID NO: 105681 - DNA, 33 bp, Homo sapien
cttagcatttgaaaaaccctttggctgcaatta

SEQ ID NO: 105682 - DNA, 33 bp, Homo sapien
cttagcatttgaaaaatcctttggctgcaatta

SEQ ID NO: 105683 - DNA, 33 bp, Homo sapien
acctcagttatacacaaatggcaatgatacagc

SEQ ID NO: 105684 - DNA, 33 bp, Homo sapien
acctcagttatacacagatggcaatgatacagc

SEQ ID NO: 105685 - DNA, 33 bp, Homo sapien
aaatggtatggtaaaactgtgctttaaagtccc

SEQ ID NO: 105686 - DNA, 33 bp, Homo sapien
aaatggtatggtaaaattgtgctttaaagtccc

SEQ ID NO: 105687 - DNA, 33 bp, Homo sapien
aataatagattccagaagcaagcaggatttttc

SEQ ID NO: 105688 - DNA, 33 bp, Homo sapien
aataatagattccagaggcaagcaggatttttc

SEQ ID NO: 105689 - DNA, 33 bp, Homo sapien
gaggctgttaagaacaatggattgcgagtgata

SEQ ID NO: 105690 - DNA, 33 bp, Homo sapien
gaggctgttaagaacagtggattgcgagtgata

SEQ ID NO: 105691 - DNA, 33 bp, Homo sapien
agttcatcaatgttcccgaaaccatcctaggct

SEQ ID NO: 105692 - DNA, 33 bp, Homo sapien
agttcatcaatgttcctgaaaccatcctaggct

SEQ ID NO: 105693 - DNA, 33 bp, Homo sapien
cttacctgattctctccgacataaggtgaagca

SEQ ID NO: 105694 - DNA, 33 bp, Homo sapien
cttacctgattctctctgacataaggtgaagca

SEQ ID NO: 105695 - DNA, 33 bp, Homo sapien
ggaaaattgccaacaacgtattctgtgtatata

SEQ ID NO: 105696 - DNA, 33 bp, Homo sapien
ggaaaattgccaacaatgtattctgtgtatata

SEQ ID NO: 105697 - DNA, 33 bp, Homo sapien; identical to SEQ ID NO: 105695

SEQ ID NO: 105698 - DNA, 33 bp, Homo sapien; identical to SEQ ID NO: 105696

SEQ ID NO: 105699 - DNA, 33 bp, Homo sapien
atggaaaatttttgtaaccttcctaagcattca

SEQ ID NO: 105700 - DNA, 33 bp, Homo sapien
atggaaaatttttgtagccttcctaagcattca

SEQ ID NO: 105701 - DNA, 33 bp, Homo sapien
gcaggaatgtatgacacggcctactttagccat

SEQ ID NO: 105702 - DNA, 33 bp, Homo sapien
gcaggaatgtatgacatggcctactttagccat

SEQ ID NO: 105703 - DNA, 33 bp, Homo sapien
atcaaaaaccatccaaagtctgatctcccacct

SEQ ID NO: 105704 - DNA, 33 bp, Homo sapien
atcaaaaaccatccaaggtctgatctcccacct

SEQ ID NO: 105705 - DNA, 33 bp, Homo sapien
ctcctagacatatgcaccatctcattaacctcc

SEQ ID NO: 105706 - DNA, 33 bp, Homo sapien
ctcctagacatatgcatcatctcattaacctcc

SEQ ID NO: 105707 - DNA, 33 bp, Homo sapien
tagtcctattttcaaaacttgggagtagtggta

SEQ ID NO: 105708 - DNA, 33 bp, Homo sapien
tagtcctattttcaaagcttgggagtagtggta

SEQ ID NO: 105709 - DNA, 33 bp, Homo sapien
aggttcttgagatcccaataaatataacaaatc

SEQ ID NO: 105710 - DNA, 33 bp, Homo sapien
aggttcttgagatcccgataaatataacaaatc

SEQ ID NO: 105711 - DNA, 33 bp, Homo sapien
gaaacaaccactgatgaagtatttctggttgac

SEQ ID NO: 105712 - DNA, 33 bp, Homo sapien
gaaacaaccactgatggagtatttctggttgac

SEQ ID NO: 105713 - DNA, 33 bp, Homo sapien; identical to SEQ ID NO: 105711

SEQ ID NO: 105714 - DNA, 33 bp, Homo sapien; identical to SEQ ID NO: 105712

SEQ ID NO: 105715 - DNA, 33 bp, Homo sapien
ataggaggtcagcatacgatacaggtcttaaag

SEQ ID NO: 105716 - DNA, 33 bp, Homo sapien
ataggaggtcagcatatgatacaggtcttaaag

SEQ ID NO: 105717 - DNA, 33 bp, Homo sapien
aaaccaagatgatggcaaaagtaatctctggtc

SEQ ID NO: 105718 - DNA, 33 bp, Homo sapien
aaaccaagatgatggcgaaagtaatctctggtc

SEQ ID NO: 105719 - DNA, 33 bp, Homo sapien
ttctaaatcagaaaccagatcatcccagtctcc

SEQ ID NO: 105720 - DNA, 33 bp, Homo sapien
ttctaaatcagaaaccggatcatcccagtctcc

SEQ ID NO: 105721 - DNA, 33 bp, Homo sapien
caaagtcaccaacaagaaacttagatgttcatg

SEQ ID NO: 105722 - DNA, 33 bp, Homo sapien
caaagtcaccaacaagcaacttagatgttcatg

SEQ ID NO: 105723 - DNA, 33 bp, Homo sapien
gcaattcaattggcaaatagtctgcagtaagat

SEQ ID NO: 105724 - DNA, 33 bp, Homo sapien
gcaattcaattggcaagtagtctgcagtaagat

SEQ ID NO: 105725 - DNA, 33 bp, Homo sapien
cgtatgttctagaatcaatgagttggactaact

SEQ ID NO: 105726 - DNA, 33 bp, Homo sapien
cgtatgttctagaatcgatgagttggactaact

SEQ ID NO: 105727 - DNA, 33 bp, Homo sapien
ttgtctcaagaaactcccactcaccagatcttg

SEQ ID NO: 105728 - DNA, 33 bp, Homo sapien
ttgtctcaagaaactctcactcaccagatcttg

SEQ ID NO: 105729 - DNA, 33 bp, Homo sapien
ccaatatgctgggaagcaggatacctgtgtgct

SEQ ID NO: 105730 - DNA, 33 bp, Homo sapien
ccaatatgctgggaagtaggatacctgtgtgct

SEQ ID NO: 105731 - DNA, 33 bp, Homo sapien
aataatttttatgaccaactctgagaaaatagg

SEQ ID NO: 105732 - DNA, 33 bp, Homo sapien
aataatttttatgaccgactctgagaaaatagg

SEQ ID NO: 105733 - DNA, 33 bp, Homo sapien
agtgttctcaacttccaaactgcttcactcaag

SEQ ID NO: 105734 - DNA, 33 bp, Homo sapien
agtgttctcaacttccgaactgcttcactcaag

SEQ ID NO: 105735 - DNA, 33 bp, Homo sapien
aagagctgatgttgcagcttgagtctggaggca

SEQ ID NO: 105736 - DNA, 33 bp, Homo sapien
aagagctgatgttgcatcttgagtctggaggca

SEQ ID NO: 105737 - DNA, 33 bp, Homo sapien
agacttagacttgctaaccttttgcactgagtc

SEQ ID NO: 105738 - DNA, 33 bp, Homo sapien
agacttagacttgctacccttttgcactgagtc

SEQ ID NO: 105739 - DNA, 33 bp, Homo sapien
tactctctaaccaacaccatatgcaagttctat

SEQ ID NO: 105740 - DNA, 33 bp, Homo sapien
tactctctaaccaacagcatatgcaagttctat

SEQ ID NO: 105741 - DNA, 33 bp, Homo sapien
tgtgttctcttccactgactattgcctctttcc

SEQ ID NO: 105742 - DNA, 33 bp, Homo sapien
tgtgttctcttccacttactattgcctctttcc

SEQ ID NO: 105743 - DNA, 33 bp, Homo sapien
agaaaatgttaacatgaaaatagcagaccttaa

SEQ ID NO: 105744 - DNA, 33 bp, Homo sapien
agaaaatgttaacatggaaatagcagaccttaa

SEQ ID NO: 105745 - DNA, 33 bp, Homo sapien
ctaaataaatattttaactctgcaatgagaatg

SEQ ID NO: 105746 - DNA, 33 bp, Homo sapien
ctaaataaatattttacctctgcaatgagaatg

SEQ ID NO: 105747 - DNA, 33 bp, Homo sapien
ttcattttgttatgtacccagcagtcattcagg

SEQ ID NO: 105748 - DNA, 33 bp, Homo sapien
ttcattttgttatgtatccagcagtcattcagg

SEQ ID NO: 105749 - DNA, 33 bp, Homo sapien
aattatgtagccaatcaagcttatagccatgcc

SEQ ID NO: 105750 - DNA, 33 bp, Homo sapien
aattatgtagccaatccagcttatagccatgcc

SEQ ID NO: 105751 - DNA, 33 bp, Homo sapien
gaatgtttgtttccccaccagcactggctttcc

SEQ ID NO: 105752 - DNA, 33 bp, Homo sapien
gaatgtttgtttcccctccagcactggctttcc

SEQ ID NO: 105753 - DNA, 33 bp, Homo sapien
ggtacacaaggtgcaacactaagtcccctttac

SEQ ID NO: 105754 - DNA, 33 bp, Homo sapien
ggtacacaaggtgcaagactaagtcccctttac

SEQ ID NO: 105755 - DNA, 33 bp, Homo sapien
agcatatgagtacaaaccatagaccaccctttc

SEQ ID NO: 105756 - DNA, 33 bp, Homo sapien
agcatatgagtacaaatcatagaccaccctttc

SEQ ID NO: 105757 - DNA, 33 bp, Homo sapien
tcttttccttgtaaacaacccacactcaagtat

SEQ ID NO: 105758 - DNA, 33 bp, Homo sapien
tcttttccttgtaaaccacccacactcaagtat

SEQ ID NO: 105759 - DNA, 33 bp, Homo sapien
ttacttggtgacctaaaattcatgtgttgtaat

SEQ ID NO: 105760 - DNA, 33 bp, Homo sapien
ttacttggtgacctaatattcatgtgttgtaat

SEQ ID NO: 105761 - DNA, 33 bp, Homo sapien
ttttttttccagttggccatttttcttctgaat

SEQ ID NO: 105762 - DNA, 33 bp, Homo sapien
ttttttttccagttggtcatttttcttctgaat

SEQ ID NO: 105763 - DNA, 33 bp, Homo sapien
tccataaaagatcaagaagaaaaacgcccatta

SEQ ID NO: 105764 - DNA, 33 bp, Homo sapien
tccataaaagatcaaggagaaaaacgcccatta

SEQ ID NO: 105765 - DNA, 33 bp, Homo sapien
actactgtctgaatccaaaacaagataccccaa

SEQ ID NO: 105766 - DNA, 33 bp, Homo sapien
actactgtctgaatcctaaacaagataccccaa

SEQ ID NO: 105767 - DNA, 33 bp, Homo sapien
ggaaagaaaagacagacggaatacaaaatgaaa

SEQ ID NO: 105768 - DNA, 33 bp, Homo sapien
ggaaagaaaagacagatggaatacaaaatgaaa

SEQ ID NO: 105769 - DNA, 33 bp, Homo sapien
agaaagagttgaaagaatatttgaagaaataat

SEQ ID NO: 105770 - DNA, 33 bp, Homo sapien
agaaagagttgaaagactatttgaagaaataat

SEQ ID NO: 105771 - DNA, 33 bp, Homo sapien
agcagtctttgaactactacaattttattgttt

SEQ ID NO: 105772 - DNA, 33 bp, Homo sapien
agcagtctttgaactattacaattttattgttt

SEQ ID NO: 105773 - DNA, 33 bp, Homo sapien
ataagaagacaactgaaaatattgtagatataa

SEQ ID NO: 105774 - DNA, 33 bp, Homo sapien
ataagaagacaactgataatattgtagatataa

SEQ ID NO: 105775 - DNA, 33 bp, Homo sapien
atagttaaggataggtcacaatgttgtatggca

SEQ ID NO: 105776 - DNA, 33 bp, Homo sapien
atagttaaggataggttacaatgttgtatggca

SEQ ID NO: 105777 - DNA, 33 bp, Homo sapien
actataccctattgagccataatccagccactg

SEQ ID NO: 105778 - DNA, 33 bp, Homo sapien
actataccctattgagtcataatccagccactg

SEQ ID NO: 105779 - DNA, 33 bp, Homo sapien
ctaggaagtgctgctcacccgcagttaaatgtg

SEQ ID NO: 105780 - DNA, 33 bp, Homo sapien
ctaggaagtgctgctcgcccgcagttaaatgtg

SEQ ID NO: 105781 - DNA, 33 bp, Homo sapien
caagggcaagtgcaaacgcaaggtgggaggtgg

SEQ ID NO: 105782 - DNA, 33 bp, Homo sapien
caagggcaagtgcaaatgcaaggtgggaggtgg

SEQ ID NO: 105783 - DNA, 33 bp, Homo sapien
catgcccaggttggcactgagtttccatcagct

SEQ ID NO: 105784 - DNA, 33 bp, Homo sapien
catgcccaggttggcattgagtttccatcagct

SEQ ID NO: 105785 - DNA, 33 bp, Homo sapien
ggctgatcactctgtaagcaacaagtcaacatt

SEQ ID NO: 105786 - DNA, 33 bp, Homo sapien
ggctgatcactctgtaggcaacaagtcaacatt

SEQ ID NO: 105787 - DNA, 33 bp, Homo sapien
ttaaagtacatgctacgagtggagtcaggtaac

SEQ ID NO: 105788 - DNA, 33 bp, Homo sapien
ttaaagtacatgctactagtggagtcaggtaac

SEQ ID NO: 105789 - DNA, 33 bp, Homo sapien
ctcatgaactttagcacaaggattgttgacaaa

SEQ ID NO: 105790 - DNA, 33 bp, Homo sapien
ctcatgaactttagcataaggattgttgacaaa

SEQ ID NO: 105791 - DNA, 33 bp, Homo sapien
taagagctctttgtacaggaacgacagtggtcc

SEQ ID NO: 105792 - DNA, 33 bp, Homo sapien
taagagctctttgtacgggaacgacagtggtcc

SEQ ID NO: 105793 - DNA, 33 bp, Homo sapien
gcttttccaccctccactcagcatcttatggtt

SEQ ID NO: 105794 - DNA, 33 bp, Homo sapien
gcttttccaccctccattcagcatcttatggtt

SEQ ID NO: 105795 - DNA, 33 bp, Homo sapien
actatggttaaattaactgcaaaataacaacct

SEQ ID NO: 105796 - DNA, 33 bp, Homo sapien
actatggttaaattaattgcaaaataacaacct

SEQ ID NO: 105797 - DNA, 33 bp, Homo sapien
gccctagaggatgtgccgacctcccacgcttaa

SEQ ID NO: 105798 - DNA, 33 bp, Homo sapien
gccctagaggatgtgcggacctcccacgcttaa

SEQ ID NO: 105799 - DNA, 33 bp, Homo sapien
ttattgccccacttaacaggattgaattaccag

SEQ ID NO: 105800 - DNA, 33 bp, Homo sapien
ttattgccccacttaataggattgaattaccag

SEQ ID NO: 105801 - DNA, 33 bp, Homo sapien
tgggggcagtctgagccatctgagagttttctg

SEQ ID NO: 105802 - DNA, 33 bp, Homo sapien
tgggggcagtctgagctatctgagagttttctg

SEQ ID NO: 105803 - DNA, 33 bp, Homo sapien
aagccctaaccccctcaatgcctcagaatgtga

SEQ ID NO: 105804 - DNA, 33 bp, Homo sapien
aagccctaaccccctcgatgcctcagaatgtga

SEQ ID NO: 105805 - DNA, 33 bp, Homo sapien
ctgtaattattagtaacgtgcagacttatctct

SEQ ID NO: 105806 - DNA, 33 bp, Homo sapien
ctgtaattattagtaatgtgcagacttatctct

SEQ ID NO: 105807 - DNA, 33 bp, Homo sapien
taacagatctaaaatacggaaaagtcaacatat

SEQ ID NO: 105808 - DNA, 33 bp, Homo sapien
taacagatctaaaatagggaaaagtcaacatat

SEQ ID NO: 105809 - DNA, 33 bp, Homo sapien
acatctctagagggcccatatcacaatggacat

SEQ ID NO: 105810 - DNA, 33 bp, Homo sapien
acatctctagagggcctatatcacaatggacat

SEQ ID NO: 105811 - DNA, 33 bp, Homo sapien
ggaggggaacagggagaaaatcagaaaggaagc

SEQ ID NO: 105812 - DNA, 33 bp, Homo sapien
ggaggggaacagggaggaaatcagaaaggaagc

SEQ ID NO: 105813 - DNA, 33 bp, Homo sapien
attgcgattctggagacgcattgggctggaagc

SEQ ID NO: 105814 - DNA, 33 bp, Homo sapien
attgcgattctggagatgcattgggctggaagc

SEQ ID NO: 105815 - DNA, 33 bp, Homo sapien
gttatcaagaaagtggaaagagaagtgacaatt

SEQ ID NO: 105816 - DNA, 33 bp, Homo sapien
gttatcaagaaagtgggaagagaagtgacaatt

SEQ ID NO: 105817 - DNA, 33 bp, Homo sapien
aaagtctctttgggagaaatattaagggactag

SEQ ID NO: 105818 - DNA, 33 bp, Homo sapien
aaagtctctttgggaggaatattaagggactag

SEQ ID NO: 105819 - DNA, 33 bp, Homo sapien
tcctcaccgggttccactgatgtgccatccatg

SEQ ID NO: 105820 - DNA, 33 bp, Homo sapien
tcctcaccgggttccattgatgtgccatccatg

SEQ ID NO: 105821 - DNA, 33 bp, Homo sapien
ataacttgatcttaacagtggggtaagtgtcca

SEQ ID NO: 105822 - DNA, 33 bp, Homo sapien
ataacttgatcttaacggtggggtaagtgtcca

SEQ ID NO: 105823 - DNA, 33 bp, Homo sapien
ttttgctccagaatcccagaggactgtgctgtt

SEQ ID NO: 105824 - DNA, 33 bp, Homo sapien
ttttgctccagaatcctagaggactgtgctgtt

SEQ ID NO: 105825 - DNA, 33 bp, Homo sapien
tttggtgtgagtctgaaagtaaccccacatcat

SEQ ID NO: 105826 - DNA, 33 bp, Homo sapien
tttggtgtgagtctgacagtaaccccacatcat

SEQ ID NO: 105827 - DNA, 33 bp, Homo sapien
caatccaaatgtctacaaactgataatagataa

SEQ ID NO: 105828 - DNA, 33 bp, Homo sapien
caatccaaatgtctacgaactgataatagataa

SEQ ID NO: 105829 - DNA, 33 bp, Homo sapien
ataaaactcaacatcaaggaaactataaagtag

SEQ ID NO: 105830 - DNA, 33 bp, Homo sapien
ataaaactcaacatcagggaaactataaagtag

SEQ ID NO: 105831 - DNA, 33 bp, Homo sapien
catgagtaacaagaaacgaacagatcccaggcg

SEQ ID NO: 105832 - DNA, 33 bp, Homo sapien
catgagtaacaagaaatgaacagatcccaggcg

SEQ ID NO: 105833 - DNA, 33 bp, Homo sapien
ctgcagctgctggttacatgatcttgggtaagt

SEQ ID NO: 105834 - DNA, 33 bp, Homo sapien
ctgcagctgctggttatatgatcttgggtaagt

SEQ ID NO: 105835 - DNA, 33 bp, Homo sapien
ttatcaaatcattgacaaagtttccaagtccat

SEQ ID NO: 105836 - DNA, 33 bp, Homo sapien
ttatcaaatcattgacgaagtttccaagtccat

SEQ ID NO: 105837 - DNA, 33 bp, Homo sapien
aaataaacagaaaaaaatcctgcttggtcatga

SEQ ID NO: 105838 - DNA, 33 bp, Homo sapien
aaataaacagaaaaaattcctgcttggtcatga

SEQ ID NO: 105839 - DNA, 33 bp, Homo sapien
atgtttaaaaagctaaaagataatgtggacaaa

SEQ ID NO: 105840 - DNA, 33 bp, Homo sapien
atgtttaaaaagctaagagataatgtggacaaa

SEQ ID NO: 105841 - DNA, 33 bp, Homo sapien
actgtgacaagtagaaaagcccctctgtggttt

SEQ ID NO: 105842 - DNA, 33 bp, Homo sapien
actgtgacaagtagaacagcccctctgtggttt

SEQ ID NO: 105843 - DNA, 33 bp, Homo sapien; identical to SEQ ID NO: 105841

SEQ ID NO: 105844 - DNA, 33 bp, Homo sapien; identical to SEQ ID NO: 105842

SEQ ID NO: 105845 - DNA, 33 bp, Homo sapien
caacattccttatccaatcccttactgtgacaa

SEQ ID NO: 105846 - DNA, 33 bp, Homo sapien
caacattccttatccagtcccttactgtgacaa

SEQ ID NO: 105847 - DNA, 33 bp, Homo sapien; identical to SEQ ID NO: 105845

SEQ ID NO: 105848 - DNA, 33 bp, Homo sapien; identical to SEQ ID NO: 105846

SEQ ID NO: 105849 - DNA, 33 bp, Homo sapien
agtggaaaagaaaagccgaaccacatgaaacta

SEQ ID NO: 105850 - DNA, 33 bp, Homo sapien
agtggaaaagaaaagctgaaccacatgaaacta

SEQ ID NO: 105851 - DNA, 33 bp, Homo sapien; identical to SEQ ID NO: 105849

SEQ ID NO: 105852 - DNA, 33 bp, Homo sapien; identical to SEQ ID NO: 105850

SEQ ID NO: 105853 - DNA, 33 bp, Homo sapien
tctgtttcatctagaaataactcctaagcaact

SEQ ID NO: 105854 - DNA, 33 bp, Homo sapien
tctgtttcatctagaagtaactcctaagcaact

SEQ ID NO: 105855 - DNA, 33 bp, Homo sapien
tcccagaaatgagaaacactatcctgttgatat

SEQ ID NO: 105856 - DNA, 33 bp, Homo sapien
tcccagaaatgagaaagactatcctgttgatat

SEQ ID NO: 105857 - DNA, 33 bp, Homo sapien
atagtttacctttttacaggaacaatggaaact

SEQ ID NO: 105858 - DNA, 33 bp, Homo sapien
atagtttacctttttagaggaacaatggaaact

SEQ ID NO: 105859 - DNA, 33 bp, Homo sapien
agccagttgtccctgcactgtttgattaattca

SEQ ID NO: 105860 - DNA, 33 bp, Homo sapien
agccagttgtccctgcgctgtttgattaattca

SEQ ID NO: 105861 - DNA, 33 bp, Homo sapien
cggtatgtaatgaaagccccttttgatatcctt

SEQ ID NO: 105862 - DNA, 33 bp, Homo sapien
cggtatgtaatgaaaggcccttttgatatcctt

SEQ ID NO: 105863 - DNA, 33 bp, Homo sapien
tcagaactagatgatacagaaaagatttaagag

SEQ ID NO: 105864 - DNA, 33 bp, Homo sapien
tcagaactagatgatatagaaaagatttaagag

SEQ ID NO: 105865 - DNA, 33 bp, Homo sapien
tatgactatgggtctacaagaaacaatacatca

SEQ ID NO: 105866 - DNA, 33 bp, Homo sapien
tatgactatgggtctataagaaacaatacatca

SEQ ID NO: 105867 - DNA, 33 bp, Homo sapien
tcacattacaagtgagaaatttaaactgtacca

SEQ ID NO: 105868 - DNA, 33 bp, Homo sapien
tcacattacaagtgagcaatttaaactgtacca

SEQ ID NO: 105869 - DNA, 33 bp, Homo sapien
ctcctccctaaattaaccggcaacctactaatc

SEQ ID NO: 105870 - DNA, 33 bp, Homo sapien
ctcctccctaaattaatcggcaacctactaatc

SEQ ID NO: 105871 - DNA, 33 bp, Homo sapien
gaactcagagatctaacaggtgtaactgcagta

SEQ ID NO: 105872 - DNA, 33 bp, Homo sapien
gaactcagagatctaataggtgtaactgcagta

SEQ ID NO: 105873 - DNA, 33 bp, Homo sapien
aactgcatgaacagagaaagggagtgtgaatat

SEQ ID NO: 105874 - DNA, 33 bp, Homo sapien
aactgcatgaacagaggaagggagtgtgaatat

SEQ ID NO: 105875 - DNA, 33 bp, Homo sapien
atgtaatcatggtcaactaaccagtaaaaagtc

SEQ ID NO: 105876 - DNA, 33 bp, Homo sapien
atgtaatcatggtcaattaaccagtaaaaagtc

SEQ ID NO: 105877 - DNA, 33 bp, Homo sapien
cgcaacctcgtcctaccgcaaacctccgcctcc

SEQ ID NO: 105878 - DNA, 33 bp, Homo sapien
cgcaacctcgtcctactgcaaacctccgcctcc

SEQ ID NO: 105879 - DNA, 33 bp, Homo sapien
ctgtctggtggtggccaaaagagtaacacacag

SEQ ID NO: 105880 - DNA, 33 bp, Homo sapien
ctgtctggtggtggccgaaagagtaacacacag

SEQ ID NO: 105881 - DNA, 33 bp, Homo sapien
tgatatctgaaatgctaaaaaacccagaacttt

SEQ ID NO: 105882 - DNA, 33 bp, Homo sapien
tgatatctgaaatgctcaaaaacccagaacttt

SEQ ID NO: 105883 - DNA, 33 bp, Homo sapien
ggagtgcagaactacactgggcccaggatcctt

SEQ ID NO: 105884 - DNA, 33 bp, Homo sapien
ggagtgcagaactacattgggcccaggatcctt

SEQ ID NO: 105885 - DNA, 33 bp, Homo sapien
tgaaaatctgctgtaaaagacaactacaaagta

SEQ ID NO: 105886 - DNA, 33 bp, Homo sapien
tgaaaatctgctgtaagagacaactacaaagta

SEQ ID NO: 105887 - DNA, 33 bp, Homo sapien
agtgtccatgaactgaaaaataaacaaactgac

SEQ ID NO: 105888 - DNA, 33 bp, Homo sapien
agtgtccatgaactgataaataaacaaactgac

SEQ ID NO: 105889 - DNA, 33 bp, Homo sapien
cacagctacagcaaacagtaaatgcagcccaac

SEQ ID NO: 105890 - DNA, 33 bp, Homo sapien
cacagctacagcaaacggtaaatgcagcccaac

SEQ ID NO: 105891 - DNA, 33 bp, Homo sapien
cctttcgagcagtggcaagtgccctttctccct

SEQ ID NO: 105892 - DNA, 33 bp, Homo sapien
cctttcgagcagtggcgagtgccctttctccct

SEQ ID NO: 105893 - DNA, 33 bp, Homo sapien
tcatggcttgagactacggccaagaaactctca

SEQ ID NO: 105894 - DNA, 33 bp, Homo sapien
tcatggcttgagactatggccaagaaactctca

SEQ ID NO: 105895 - DNA, 33 bp, Homo sapien
caaacctccatcaagacggcattctcgcggcaa

SEQ ID NO: 105896 - DNA, 33 bp, Homo sapien
caaacctccatcaagatggcattctcgcggcaa

SEQ ID NO: 105897 - DNA, 33 bp, Homo sapien
ttttctcccaaatcaacggccagttttccctgt

SEQ ID NO: 105898 - DNA, 33 bp, Homo sapien
ttttctcccaaatcaatggccagttttccctgt

SEQ ID NO: 105899 - DNA, 33 bp, Homo sapien
aattttcaaatgtcagccaagttttgcattagg

SEQ ID NO: 105900 - DNA, 33 bp, Homo sapien
aattttcaaatgtcagtcaagttttgcattagg

SEQ ID NO: 105901 - DNA, 33 bp, Homo sapien
taagtctgcagatgctcagaatgcaagcatgaa

SEQ ID NO: 105902 - DNA, 33 bp, Homo sapien
taagtctgcagatgctgagaatgcaagcatgaa

SEQ ID NO: 105903 - DNA, 33 bp, Homo sapien
atatgacaccaaaagcacaaacaaaagaaaaat

SEQ ID NO: 105904 - DNA, 33 bp, Homo sapien
atatgacaccaaaagcgcaaacaaaagaaaaat

SEQ ID NO: 105905 - DNA, 33 bp, Homo sapien
aaccaagaaaaaataaacattctcgactcactt

SEQ ID NO: 105906 - DNA, 33 bp, Homo sapien
aaccaagaaaaaataaccattctcgactcactt

SEQ ID NO: 105907 - DNA, 33 bp, Homo sapien
ctctcattggctgataactgagcttaggcattt

SEQ ID NO: 105908 - DNA, 33 bp, Homo sapien
ctctcattggctgatagctgagcttaggcattt

SEQ ID NO: 105909 - DNA, 33 bp, Homo sapien
tggaaacagaacactacctggttgagactgggt

SEQ ID NO: 105910 - DNA, 33 bp, Homo sapien
tggaaacagaacactatctggttgagactgggt

SEQ ID NO: 105911 - DNA, 33 bp, Homo sapien
ggcttgaagacagaaagccaccgtgaggtgctc

SEQ ID NO: 105912 - DNA, 33 bp, Homo sapien
ggcttgaagacagaaatccaccgtgaggtgctc

SEQ ID NO: 105913 - DNA, 33 bp, Homo sapien
gtgaatgatgaagagacgtaaacacaaacatgt

SEQ ID NO: 105914 - DNA, 33 bp, Homo sapien
gtgaatgatgaagagaggtaaacacaaacatgt

SEQ ID NO: 105915 - DNA, 33 bp, Homo sapien
agagatggattttcaccatgttatccaggatga

SEQ ID NO: 105916 - DNA, 33 bp, Homo sapien
agagatggattttcacgatgttatccaggatga

SEQ ID NO: 105917 - DNA, 33 bp, Homo sapien
ctgttagtagtacatacgcttagaattgttatg

SEQ ID NO: 105918 - DNA, 33 bp, Homo sapien
ctgttagtagtacataggcttagaattgttatg

SEQ ID NO: 105919 - DNA, 33 bp, Homo sapien
aaggacagaaaaaatactaagttgaacctctgt

SEQ ID NO: 105920 - DNA, 33 bp, Homo sapien
aaggacagaaaaaatagtaagttgaacctctgt

SEQ ID NO: 105921 - DNA, 33 bp, Homo sapien
cgctactgattgctgacgtattgctctattgtt

SEQ ID NO: 105922 - DNA, 33 bp, Homo sapien
cgctactgattgctgatgtattgctctattgtt

SEQ ID NO: 105923 - DNA, 33 bp, Homo sapien
tccatgaatgttcagcaaagtactaatcggctc

SEQ ID NO: 105924 - DNA, 33 bp, Homo sapien
tccatgaatgttcagcgaagtactaatcggctc

SEQ ID NO: 105925 - DNA, 33 bp, Homo sapien
ctgtaccaaaaatgcaacagcaaaaaaattagc

SEQ ID NO: 105926 - DNA, 33 bp, Homo sapien
ctgtaccaaaaatgcagcagcaaaaaaattagc

SEQ ID NO: 105927 - DNA, 33 bp, Homo sapien
ttcttcttatccaacaaaagttaaacttcatac

SEQ ID NO: 105928 - DNA, 33 bp, Homo sapien
ttcttcttatccaacacaagttaaacttcatac

SEQ ID NO: 105929 - DNA, 33 bp, Homo sapien
gtttcactgattttctaaactgtttttctggtt

SEQ ID NO: 105930 - DNA, 33 bp, Homo sapien
gtttcactgattttctcaactgtttttctggtt

SEQ ID NO: 105931 - DNA, 33 bp, Homo sapien
atgtgactgcacaggtcacctagctatgaagtt

SEQ ID NO: 105932 - DNA, 33 bp, Homo sapien
atgtgactgcacaggttacctagctatgaagtt

SEQ ID NO: 105933 - DNA, 33 bp, Homo sapien
acattcaggatgtcatcagggctttctccacag

SEQ ID NO: 105934 - DNA, 33 bp, Homo sapien
acattcaggatgtcatgagggctttctccacag

SEQ ID NO: 105935 - DNA, 33 bp, Homo sapien
atcctgatacagtacaaatctcagattcctttt

SEQ ID NO: 105936 - DNA, 33 bp, Homo sapien
atcctgatacagtacagatctcagattcctttt

SEQ ID NO: 105937 - DNA, 33 bp, Homo sapien
gtggttattaatacaaaaagggaactacttgag

SEQ ID NO: 105938 - DNA, 33 bp, Homo sapien
gtggttattaatacaacaagggaactacttgag

SEQ ID NO: 105939 - DNA, 33 bp, Homo sapien
aattgtttcaggacatcacaaacatctgggatg

SEQ ID NO: 105940 - DNA, 33 bp, Homo sapien
aattgtttcaggacatgacaaacatctgggatg

SEQ ID NO: 105941 - DNA, 33 bp, Homo sapien
cttttattttctgaaacagatggtagagacttg

SEQ ID NO: 105942 - DNA, 33 bp, Homo sapien
cttttattttctgaaagagatggtagagacttg

SEQ ID NO: 105943 - DNA, 33 bp, Homo sapien
gcaattcaattgttcactaatgatgatttacat

SEQ ID NO: 105944 - DNA, 33 bp, Homo sapien
gcaattcaattgttcattaatgatgatttacat

SEQ ID NO: 105945 - DNA, 33 bp, Homo sapien
gccacgctcaggcacactggcaaggggttttgc

SEQ ID NO: 105946 - DNA, 33 bp, Homo sapien
gccacgctcaggcacattggcaaggggttttgc

SEQ ID NO: 105947 - DNA, 33 bp, Homo sapien
tagtctggacaatgcacaaaccagaactgaacc

SEQ ID NO: 105948 - DNA, 33 bp, Homo sapien
tagtctggacaatgcataaaccagaactgaacc

SEQ ID NO: 105949 - DNA, 33 bp, Homo sapien
ctttgctgaatcctaaagagccaaagcattttt

SEQ ID NO: 105950 - DNA, 33 bp, Homo sapien
ctttgctgaatcctaaggagccaaagcattttt

SEQ ID NO: 105951 - DNA, 33 bp, Homo sapien
tcatctgagatcgtgtaaagtgtgaattctgat

SEQ ID NO: 105952 - DNA, 33 bp, Homo sapien
tcatctgagatcgtgtgaagtgtgaattctgat

SEQ ID NO: 105953 - DNA, 33 bp, Homo sapien
tgcaacatatactctaagtgacccttttactca

SEQ ID NO: 105954 - DNA, 33 bp, Homo sapien
tgcaacatatactctatgtgacccttttactca

SEQ ID NO: 105955 - DNA, 33 bp, Homo sapien
ctaaattccaggattaaatatgtgttgtggcac

SEQ ID NO: 105956 - DNA, 33 bp, Homo sapien
ctaaattccaggattatatatgtgttgtggcac

SEQ ID NO: 105957 - DNA, 33 bp, Homo sapien
gggaaagtggtcaccacacaaattgtatacaat

SEQ ID NO: 105958 - DNA, 33 bp, Homo sapien
gggaaagtggtcaccatacaaattgtatacaat

SEQ ID NO: 105959 - DNA, 33 bp, Homo sapien
ttaataatcaattgaaatggccgggtgcggtgg

SEQ ID NO: 105960 - DNA, 33 bp, Homo sapien
ttaataatcaattgaagtggccgggtgcggtgg

SEQ ID NO: 105961 - DNA, 33 bp, Homo sapien
gctgccttcaggttccagaggcttcccactgga

SEQ ID NO: 105962 - DNA, 33 bp, Homo sapien
gctgccttcaggttccggaggcttcccactgga

SEQ ID NO: 105963 - DNA, 33 bp, Homo sapien
agaaaccaggctataccattatccacaatattt

SEQ ID NO: 105964 - DNA, 33 bp, Homo sapien
agaaaccaggctatactattatccacaatattt

SEQ ID NO: 105965 - DNA, 33 bp, Homo sapien
gttagggaattcagaaagccaagcacataccta

SEQ ID NO: 105966 - DNA, 33 bp, Homo sapien
gttagggaattcagaacgccaagcacataccta

SEQ ID NO: 105967 - DNA, 33 bp, Homo sapien
gcccgtttatgtctgacgttgcacaaatttttt

SEQ ID NO: 105968 - DNA, 33 bp, Homo sapien
gcccgtttatgtctgaggttgcacaaatttttt

SEQ ID NO: 105969 - DNA, 33 bp, Homo sapien
ataatgtacacagtgcgcttgattgccctcatt

SEQ ID NO: 105970 - DNA, 33 bp, Homo sapien
ataatgtacacagtgctcttgattgccctcatt

SEQ ID NO: 105971 - DNA, 33 bp, Homo sapien
agtttagttcattgtcaagactgctattttcta

SEQ ID NO: 105972 - DNA, 33 bp, Homo sapien
agtttagttcattgtccagactgctattttcta

SEQ ID NO: 105973 - DNA, 33 bp, Homo sapien
attttttttagtccataactcgcctttccattt

SEQ ID NO: 105974 - DNA, 33 bp, Homo sapien
attttttttagtccattactcgcctttccattt

SEQ ID NO: 105975 - DNA, 33 bp, Homo sapien
agaaaattggtgaaagaatggtgtggaaagttc

SEQ ID NO: 105976 - DNA, 33 bp, Homo sapien
agaaaattggtgaaagtatggtgtggaaagttc

SEQ ID NO: 105977 - DNA, 33 bp, Homo sapien
tatgtgagagtcctaacgattggtttattgaga

SEQ ID NO: 105978 - DNA, 33 bp, Homo sapien
tatgtgagagtcctaatgattggtttattgaga

SEQ ID NO: 105979 - DNA, 33 bp, Homo sapien
tataattgtgcagatacagatggatttttggta

SEQ ID NO: 105980 - DNA, 33 bp, Homo sapien
tataattgtgcagatagagatggatttttggta

SEQ ID NO: 105981 - DNA, 33 bp, Homo sapien
tgtcttgacttcattcccctaaggatcagtttt

SEQ ID NO: 105982 - DNA, 33 bp, Homo sapien
tgtcttgacttcattctcctaaggatcagtttt

SEQ ID NO: 105983 - DNA, 33 bp, Homo sapien
tccccataggatgtgacgaaaaggccacctcac

SEQ ID NO: 105984 - DNA, 33 bp, Homo sapien
tccccataggatgtgatgaaaaggccacctcac

SEQ ID NO: 105985 - DNA, 33 bp, Homo sapien
ggccacactctgcggacagtgaactgcatgtcc

SEQ ID NO: 105986 - DNA, 33 bp, Homo sapien
ggccacactctgcggatagtgaactgcatgtcc

SEQ ID NO: 105987 - DNA, 33 bp, Homo sapien
catcataccaactgcacagctatcagattaatt

SEQ ID NO: 105988 - DNA, 33 bp, Homo sapien
catcataccaactgcagagctatcagattaatt

SEQ ID NO: 105989 - DNA, 33 bp, Homo sapien
gaaagctcagttgctaacttatcccactgccag

SEQ ID NO: 105990 - DNA, 33 bp, Homo sapien
gaaagctcagttgctagcttatcccactgccag

SEQ ID NO: 105991 - DNA, 33 bp, Homo sapien
tttttctgtgaatacacacaggagttctccttc

SEQ ID NO: 105992 - DNA, 33 bp, Homo sapien
tttttctgtgaatacatacaggagttctccttc

SEQ ID NO: 105993 - DNA, 33 bp, Homo sapien
aatctgcagagctgccaaaagtaccttgatgtt

SEQ ID NO: 105994 - DNA, 33 bp, Homo sapien
aatctgcagagctgccgaaagtaccttgatgtt

SEQ ID NO: 105995 - DNA, 33 bp, Homo sapien
aagcgaagtaggacaaatgactggaatagcaaa

SEQ ID NO: 105996 - DNA, 33 bp, Homo sapien
aagcgaagtaggacaagtgactggaatagcaaa

SEQ ID NO: 105997 - DNA, 33 bp, Homo sapien
ttcatcatgaaacctgcagttgtttgctattcc

SEQ ID NO: 105998 - DNA, 33 bp, Homo sapien
ttcatcatgaaacctggagttgtttgctattcc

SEQ ID NO: 105999 - DNA, 33 bp, Homo sapien
ctgtcttccatagtcacatgaaatctctaagtc

SEQ ID NO: 106000 - DNA, 33 bp, Homo sapien
ctgtcttccatagtcagatgaaatctctaagtc

SEQ ID NO: 106001 - DNA, 33 bp, Homo sapien; identical to SEQ ID NO: 105999

SEQ ID NO: 106002 - DNA, 33 bp, Homo sapien; identical to SEQ ID NO: 106000

SEQ ID NO: 106003 - DNA, 33 bp, Homo sapien
atcaaggaatattgtcaaacatggactgtattg

SEQ ID NO: 106004 - DNA, 33 bp, Homo sapien
atcaaggaatattgtcgaacatggactgtattg

SEQ ID NO: 106005 - DNA, 33 bp, Homo sapien
ccagcaatgtttctcaaactgcctgaggggaac

SEQ ID NO: 106006 - DNA, 33 bp, Homo sapien
ccagcaatgtttctcagactgcctgaggggaac

SEQ ID NO: 106007 - DNA, 33 bp, Homo sapien
atctaaataaaaaaaccacctgcataggaacta

SEQ ID NO: 106008 - DNA, 33 bp, Homo sapien
atctaaataaaaaaactacctgcataggaacta

SEQ ID NO: 106009 - DNA, 33 bp, Homo sapien
aataaatctgaaagtccatctaggccacaagga

SEQ ID NO: 106010 - DNA, 33 bp, Homo sapien
aataaatctgaaagtctatctaggccacaagga

SEQ ID NO: 106011 - DNA, 33 bp, Homo sapien
tacagggattactatgaaagtggtaagattact

SEQ ID NO: 106012 - DNA, 33 bp, Homo sapien
tacagggattactatgcaagtggtaagattact

SEQ ID NO: 106013 - DNA, 33 bp, Homo sapien
agttaacttgaattgacgtgtttcttcttttga

SEQ ID NO: 106014 - DNA, 33 bp, Homo sapien
agttaacttgaattgaggtgtttcttcttttga

SEQ ID NO: 106015 - DNA, 33 bp, Homo sapien
ttgggcaatatagcgaagcaccatctgttaaaa

SEQ ID NO: 106016 - DNA, 33 bp, Homo sapien
ttgggcaatatagcgaggcaccatctgttaaaa

SEQ ID NO: 106017 - DNA, 33 bp, Homo sapien
cctttcgaatgcatccggaaacactgggactcc

SEQ ID NO: 106018 - DNA, 33 bp, Homo sapien
cctttcgaatgcatcctgaaacactgggactcc

SEQ ID NO: 106019 - DNA, 33 bp, Homo sapien
gtagggtcaaaggctgaacatggaggctggcta

SEQ ID NO: 106020 - DNA, 33 bp, Homo sapien
gtagggtcaaaggctggacatggaggctggcta

SEQ ID NO: 106021 - DNA, 33 bp, Homo sapien; identical to SEQ ID NO: 106019

SEQ ID NO: 106022 - DNA, 33 bp, Homo sapien; identical to SEQ ID NO: 106020

SEQ ID NO: 106023 - DNA, 33 bp, Homo sapien
ccaagaatgctctaacaaccaaagctttcagaa

SEQ ID NO: 106024 - DNA, 33 bp, Homo sapien
ccaagaatgctctaaccaccaaagctttcagaa

SEQ ID NO: 106025 - DNA, 33 bp, Homo sapien; identical to SEQ ID NO: 106023

SEQ ID NO: 106026 - DNA, 33 bp, Homo sapien; identical to SEQ ID NO: 106024

SEQ ID NO: 106027 - DNA, 33 bp, Homo sapien
aactgaaaatgactgacgtaggatagctctgtg

SEQ ID NO: 106028 - DNA, 33 bp, Homo sapien
aactgaaaatgactgatgtaggatagctctgtg

SEQ ID NO: 106029 - DNA, 33 bp, Homo sapien
atgaccttcgaaggcacagaggctcaaaaggga

SEQ ID NO: 106030 - DNA, 33 bp, Homo sapien
atgaccttcgaaggcatagaggctcaaaaggga

SEQ ID NO: 106031 - DNA, 33 bp, Homo sapien; identical to SEQ ID NO: 106029

SEQ ID NO: 106032 - DNA, 33 bp, Homo sapien; identical to SEQ ID NO: 106030

SEQ ID NO: 106033 - DNA, 33 bp, Homo sapien
attctactacctaggccaaacgtgttccaggat

SEQ ID NO: 106034 - DNA, 33 bp, Homo sapien
attctactacctaggctaaacgtgttccaggat

SEQ ID NO: 106035 - DNA, 33 bp, Homo sapien
ccttttgtagtaagaacggaataccaagatctg

SEQ ID NO: 106036 - DNA, 33 bp, Homo sapien
ccttttgtagtaagaatggaataccaagatctg

SEQ ID NO: 106037 - DNA, 33 bp, Homo sapien
tttaattttttgatgcactctgctgcattctgg

SEQ ID NO: 106038 - DNA, 33 bp, Homo sapien
tttaattttttgatgctctctgctgcattctgg

SEQ ID NO: 106039 - DNA, 33 bp, Homo sapien
agaaataaacatttgcaagtcaggcttctcctt

SEQ ID NO: 106040 - DNA, 33 bp, Homo sapien
agaaataaacatttgcgagtcaggcttctcctt

SEQ ID NO: 106041 - DNA, 33 bp, Homo sapien
tggcttatgggcctctaaataagtggcagcgat

SEQ ID NO: 106042 - DNA, 33 bp, Homo sapien
tggcttatgggcctctcaataagtggcagcgat

SEQ ID NO: 106043 - DNA, 33 bp, Homo sapien; identical to SEQ ID NO: 106041

SEQ ID NO: 106044 - DNA, 33 bp, Homo sapien; identical to SEQ ID NO: 106042

SEQ ID NO: 106045 - DNA, 33 bp, Homo sapien
aattattttcattaccaaaaactgttatttgtt

SEQ ID NO: 106046 - DNA, 33 bp, Homo sapien
aattattttcattaccgaaaactgttatttgtt

SEQ ID NO: 106047 - DNA, 33 bp, Homo sapien
ttgactatcattgccaacattgggcgtgtgagt

SEQ ID NO: 106048 - DNA, 33 bp, Homo sapien
ttgactatcattgccagcattgggcgtgtgagt

SEQ ID NO: 106049 - DNA, 33 bp, Homo sapien
aaaacacagtgttacaactgttgcagtcttatg

SEQ ID NO: 106050 - DNA, 33 bp, Homo sapien
aaaacacagtgttacatctgttgcagtcttatg

SEQ ID NO: 106051 - DNA, 33 bp, Homo sapien
tggaggccaaatgatcaccttaatgacaaaggc

SEQ ID NO: 106052 - DNA, 33 bp, Homo sapien
tggaggccaaatgatcgccttaatgacaaaggc

SEQ ID NO: 106053 - DNA, 33 bp, Homo sapien
aaaatgcttctacatacactggctaaaaggagc

SEQ ID NO: 106054 - DNA, 33 bp, Homo sapien
aaaatgcttctacatatactggctaaaaggagc

SEQ ID NO: 106055 - DNA, 33 bp, Homo sapien
aagtgtagtctccagaacttgagtgctgcctct

SEQ ID NO: 106056 - DNA, 33 bp, Homo sapien
aagtgtagtctccagaccttgagtgctgcctct

SEQ ID NO: 106057 - DNA, 33 bp, Homo sapien
tagtttgggggtataaagaagccaatcaggaga

SEQ ID NO: 106058 - DNA, 33 bp, Homo sapien
tagtttgggggtataaggaagccaatcaggaga

SEQ ID NO: 106059 - DNA, 33 bp, Homo sapien; identical to SEQ ID NO: 106057

SEQ ID NO: 106060 - DNA, 33 bp, Homo sapien; identical to SEQ ID NO: 106058

SEQ ID NO: 106061 - DNA, 33 bp, Homo sapien
gctttagcatgagctacggcaagaaagagagct

SEQ ID NO: 106062 - DNA, 33 bp, Homo sapien
gctttagcatgagctatggcaagaaagagagct

SEQ ID NO: 106063 - DNA, 33 bp, Homo sapien; identical to SEQ ID NO: 106061

SEQ ID NO: 106064 - DNA, 33 bp, Homo sapien; identical to SEQ ID NO: 106062

SEQ ID NO: 106065 - DNA, 33 bp, Homo sapien
agatgtagaacgttgcagacatctcagaaagcc

SEQ ID NO: 106066 - DNA, 33 bp, Homo sapien
agatgtagaacgttgcggacatctcagaaagcc

SEQ ID NO: 106067 - DNA, 33 bp, Homo sapien
ctgatcactggcaatacggagcgatctaccgta

SEQ ID NO: 106068 - DNA, 33 bp, Homo sapien
ctgatcactggcaatatggagcgatctaccgta

SEQ ID NO: 106069 - DNA, 33 bp, Homo sapien
agtggtgcataaacccaaacatggagaaaaggg

SEQ ID NO: 106070 - DNA, 33 bp, Homo sapien
agtggtgcataaacccgaacatggagaaaaggg

SEQ ID NO: 106071 - DNA, 33 bp, Homo sapien
aagtctagaggtagaaacacgcattacagtgca

SEQ ID NO: 106072 - DNA, 33 bp, Homo sapien
aagtctagaggtagaagcacgcattacagtgca

SEQ ID NO: 106073 - DNA, 33 bp, Homo sapien
aagccttttgcctacaaatttggacacccatga

SEQ ID NO: 106074 - DNA, 33 bp, Homo sapien
aagccttttgcctacagatttggacacccatga

SEQ ID NO: 106075 - DNA, 33 bp, Homo sapien
ttatgttttacttcaacggagcttcttggatca

SEQ ID NO: 106076 - DNA, 33 bp, Homo sapien
ttatgttttacttcaatggagcttcttggatca

SEQ ID NO: 106077 - DNA, 33 bp, Homo sapien
aatccagcgtttccaacgtatataattctctga

SEQ ID NO: 106078 - DNA, 33 bp, Homo sapien
aatccagcgtttccaatgtatataattctctga

SEQ ID NO: 106079 - DNA, 33 bp, Homo sapien
attcaggtgttaaaaccaaatggccagccgcgc

SEQ ID NO: 106080 - DNA, 33 bp, Homo sapien
attcaggtgttaaaactaaatggccagccgcgc

SEQ ID NO: 106081 - DNA, 33 bp, Homo sapien
accatgaggaacaaaagataacaaaacatcagc

SEQ ID NO: 106082 - DNA, 33 bp, Homo sapien
accatgaggaacaaaatataacaaaacatcagc

SEQ ID NO: 106083 - DNA, 33 bp, Homo sapien
ataataaaattggttacaagctgacaaatttta

SEQ ID NO: 106084 - DNA, 33 bp, Homo sapien
ataataaaattggttataagctgacaaatttta

SEQ ID NO: 106085 - DNA, 33 bp, Homo sapien
cagcatcagaggtaaacccaaagctgttctctg

SEQ ID NO: 106086 - DNA, 33 bp, Homo sapien
cagcatcagaggtaaatccaaagctgttctctg

SEQ ID NO: 106087 - DNA, 33 bp, Homo sapien
atacaattttgagaaagaatcatgaaccaggat

SEQ ID NO: 106088 - DNA, 33 bp, Homo sapien
atacaattttgagaaataatcatgaaccaggat

SEQ ID NO: 106089 - DNA, 33 bp, Homo sapien
taggctcttttcaagcacacaccaggcaacatg

SEQ ID NO: 106090 - DNA, 33 bp, Homo sapien
taggctcttttcaagcgcacaccaggcaacatg

SEQ ID NO: 106091 - DNA, 33 bp, Homo sapien
ttgattcgtatatgctcaactgtcaatgggagg

SEQ ID NO: 106092 - DNA, 33 bp, Homo sapien
ttgattcgtatatgctgaactgtcaatgggagg

SEQ ID NO: 106093 - DNA, 33 bp, Homo sapien
tcaagatagcatcatccctcaaggacaccaagt

SEQ ID NO: 106094 - DNA, 33 bp, Homo sapien
tcaagatagcatcatcgctcaaggacaccaagt

SEQ ID NO: 106095 - DNA, 33 bp, Homo sapien
aacacatgaagagacaatagccttaaaatgctt

SEQ ID NO: 106096 - DNA, 33 bp, Homo sapien
aacacatgaagagacagtagccttaaaatgctt

SEQ ID NO: 106097 - DNA, 33 bp, Homo sapien; identical to SEQ ID NO: 106095

SEQ ID NO: 106098 - DNA, 33 bp, Homo sapien; identical to SEQ ID NO: 106096

SEQ ID NO: 106099 - DNA, 33 bp, Homo sapien
gaaaatggccatacagacaaagataatttatag

SEQ ID NO: 106100 - DNA, 33 bp, Homo sapien
gaaaatggccatacaggcaaagataatttatag

SEQ ID NO: 106101 - DNA, 33 bp, Homo sapien
gatgggatttatgatccctagaatgtaatattt

SEQ ID NO: 106102 - DNA, 33 bp, Homo sapien
gatgggatttatgatctctagaatgtaatattt

SEQ ID NO: 106103 - DNA, 33 bp, Homo sapien
aaaattgtctcaataactgtcaactggctttct

SEQ ID NO: 106104 - DNA, 33 bp, Homo sapien
aaaattgtctcaataattgtcaactggctttct

SEQ ID NO: 106105 - DNA, 33 bp, Homo sapien
gttgtgacacaacactaaagctttcaccagaac

SEQ ID NO: 106106 - DNA, 33 bp, Homo sapien
gttgtgacacaacactgaagctttcaccagaac

SEQ ID NO: 106107 - DNA, 33 bp, Homo sapien; identical to SEQ ID NO: 106105

SEQ ID NO: 106108 - DNA, 33 bp, Homo sapien; identical to SEQ ID NO: 106106

SEQ ID NO: 106109 - DNA, 33 bp, Homo sapien
tcaagaactcctatgcagcactctccctaataa

SEQ ID NO: 106110 - DNA, 33 bp, Homo sapien
tcaagaactcctatgctgcactctccctaataa

SEQ ID NO: 106111 - DNA, 33 bp, Homo sapien
tctcttgtctaattacccttgataggacttcac

SEQ ID NO: 106112 - DNA, 33 bp, Homo sapien
tctcttgtctaattactcttgataggacttcac

SEQ ID NO: 106113 - DNA, 33 bp, Homo sapien
ggaaactcgaatcttccagtatcggcaaaggga

SEQ ID NO: 106114 - DNA, 33 bp, Homo sapien
ggaaactcgaatcttctagtatcggcaaaggga

SEQ ID NO: 106115 - DNA, 33 bp, Homo sapien
ggatattcattttttcaccactggcctcaaaga

SEQ ID NO: 106116 - DNA, 33 bp, Homo sapien
ggatattcattttttcgccactggcctcaaaga

SEQ ID NO: 106117 - DNA, 33 bp, Homo sapien
caaaagccaaaattgacgaagcggatctaatta

SEQ ID NO: 106118 - DNA, 33 bp, Homo sapien
caaaagccaaaattgatgaagcggatctaatta

SEQ ID NO: 106119 - DNA, 33 bp, Homo sapien
tttatctgtgacttaagataagtttttcagcta

SEQ ID NO: 106120 - DNA, 33 bp, Homo sapien
tttatctgtgacttaatataagtttttcagcta

SEQ ID NO: 106121 - DNA, 33 bp, Homo sapien
actacatacgccctacaaaaaatgctgagaaga

SEQ ID NO: 106122 - DNA, 33 bp, Homo sapien
actacatacgccctacgaaaaatgctgagaaga

SEQ ID NO: 106123 - DNA, 33 bp, Homo sapien
aaaataatgttgtccacaccttaaaattcaatt

SEQ ID NO: 106124 - DNA, 33 bp, Homo sapien
aaaataatgttgtccagaccttaaaattcaatt

SEQ ID NO: 106125 - DNA, 33 bp, Homo sapien
ggcactaagtacccacaaatggcaagcagctgc

SEQ ID NO: 106126 - DNA, 33 bp, Homo sapien
ggcactaagtacccaccaatggcaagcagctgc

SEQ ID NO: 106127 - DNA, 33 bp, Homo sapien
agtcactcatgctaaacgcaacataattgaact

SEQ ID NO: 106128 - DNA, 33 bp, Homo sapien
agtcactcatgctaaatgcaacataattgaact

SEQ ID NO: 106129 - DNA, 33 bp, Homo sapien
gtatcttcatttcttcaagtggatcatgaaaca

SEQ ID NO: 106130 - DNA, 33 bp, Homo sapien
gtatcttcatttcttcgagtggatcatgaaaca

SEQ ID NO: 106131 - DNA, 33 bp, Homo sapien
aaaatagtcattgcccaagattgccctccattt

SEQ ID NO: 106132 - DNA, 33 bp, Homo sapien
aaaatagtcattgcccgagattgccctccattt

SEQ ID NO: 106133 - DNA, 33 bp, Homo sapien
cttcctacttttaccacggaagctacagttact

SEQ ID NO: 106134 - DNA, 33 bp, Homo sapien
cttcctacttttaccatggaagctacagttact

SEQ ID NO: 106135 - DNA, 33 bp, Homo sapien
cctaaagccactaggaacagtcccagcattgtc

SEQ ID NO: 106136 - DNA, 33 bp, Homo sapien
cctaaagccactaggagcagtcccagcattgtc

SEQ ID NO: 106137 - DNA, 33 bp, Homo sapien
taaacactgttagtaacgctgttattataatta

SEQ ID NO: 106138 - DNA, 33 bp, Homo sapien
taaacactgttagtaatgctgttattataatta

SEQ ID NO: 106139 - DNA, 33 bp, Homo sapien
aaactgggttaataacgcgattatctcacgtgc

SEQ ID NO: 106140 - DNA, 33 bp, Homo sapien
aaactgggttaataactcgattatctcacgtgc

SEQ ID NO: 106141 - DNA, 33 bp, Homo sapien
tggatgtttgtatttacaagggttttctccatt

SEQ ID NO: 106142 - DNA, 33 bp, Homo sapien
tggatgtttgtatttataagggttttctccatt

SEQ ID NO: 106143 - DNA, 33 bp, Homo sapien
ccttgtggcctagacaaactttcaggtttatta

SEQ ID NO: 106144 - DNA, 33 bp, Homo sapien
ccttgtggcctagacagactttcaggtttatta

SEQ ID NO: 106145 - DNA, 33 bp, Homo sapien
gtggccttggaaataaatatttggccagtgaca

SEQ ID NO: 106146 - DNA, 33 bp, Homo sapien
gtggccttggaaataattatttggccagtgaca

SEQ ID NO: 106147 - DNA, 33 bp, Homo sapien
cctttcttctttcagcaaaaagaggttttggag

SEQ ID NO: 106148 - DNA, 33 bp, Homo sapien
cctttcttctttcagcgaaaagaggttttggag

SEQ ID NO: 106149 - DNA, 33 bp, Homo sapien
ggcaatggcaataaacaaaacacattttcactc

SEQ ID NO: 106150 - DNA, 33 bp, Homo sapien
ggcaatggcaataaaccaaacacattttcactc

SEQ ID NO: 106151 - DNA, 33 bp, Homo sapien
agtgacataaaacagccgaggatttctatttct

SEQ ID NO: 106152 - DNA, 33 bp, Homo sapien
agtgacataaaacagctgaggatttctatttct

SEQ ID NO: 106153 - DNA, 33 bp, Homo sapien
aatcactaagttatcaaagccaatttgtagctt

SEQ ID NO: 106154 - DNA, 33 bp, Homo sapien
aatcactaagttatcatagccaatttgtagctt

SEQ ID NO: 106155 - DNA, 33 bp, Homo sapien
tgagtatgattccatcagaagaagcaaatactg

SEQ ID NO: 106156 - DNA, 33 bp, Homo sapien
tgagtatgattccatcggaagaagcaaatactg

SEQ ID NO: 106157 - DNA, 33 bp, Homo sapien
atgtcatcagggcagacaatagctacaacctgg

SEQ ID NO: 106158 - DNA, 33 bp, Homo sapien
atgtcatcagggcagagaatagctacaacctgg

SEQ ID NO: 106159 - DNA, 33 bp, Homo sapien
ccaggtgctagaattacaggccatctaaacctt

SEQ ID NO: 106160 - DNA, 33 bp, Homo sapien
ccaggtgctagaattataggccatctaaacctt

SEQ ID NO: 106161 - DNA, 33 bp, Homo sapien
ctacttaacattaacaagaatgtcctcaagcag

SEQ ID NO: 106162 - DNA, 33 bp, Homo sapien
ctacttaacattaacaggaatgtcctcaagcag

SEQ ID NO: 106163 - DNA, 33 bp, Homo sapien; identical to SEQ ID NO: 106161

SEQ ID NO: 106164 - DNA, 33 bp, Homo sapien; identical to SEQ ID NO: 106162

SEQ ID NO: 106165 - DNA, 33 bp, Homo sapien
aggactggatttagtccatgtctttcaatatat

SEQ ID NO: 106166 - DNA, 33 bp, Homo sapien
aggactggatttagtctatgtctttcaatatat

SEQ ID NO: 106167 - DNA, 33 bp, Homo sapien
tgcatacccagagcccagagagatttactagtg

SEQ ID NO: 106168 - DNA, 33 bp, Homo sapien
tgcatacccagagcccggagagatttactagtg

SEQ ID NO: 106169 - DNA, 33 bp, Homo sapien
ttctcgtcctatcagaatcagggtatagatgct

SEQ ID NO: 106170 - DNA, 33 bp, Homo sapien
ttctcgtcctatcagactcagggtatagatgct

SEQ ID NO: 106171 - DNA, 33 bp, Homo sapien
ttattatcaaggccaaagaagtctactgagaag

SEQ ID NO: 106172 - DNA, 33 bp, Homo sapien
ttattatcaaggccaaggaagtctactgagaag

SEQ ID NO: 106173 - DNA, 33 bp, Homo sapien
atcacttggaaacttacaaccagcacactgagg

SEQ ID NO: 106174 - DNA, 33 bp, Homo sapien
atcacttggaaacttataaccagcacactgagg

SEQ ID NO: 106175 - DNA, 33 bp, Homo sapien
tagcccataaggagggcaattattgttgacact

SEQ ID NO: 106176 - DNA, 33 bp, Homo sapien
tagcccataaggagggtaattattgttgacact

SEQ ID NO: 106177 - DNA, 33 bp, Homo sapien
tggttccatataataagaactcttgctgtactt

SEQ ID NO: 106178 - DNA, 33 bp, Homo sapien
tggttccatataataataactcttgctgtactt

SEQ ID NO: 106179 - DNA, 33 bp, Homo sapien
cactgatgacaagcacgcaaattgtatttctct

SEQ ID NO: 106180 - DNA, 33 bp, Homo sapien
cactgatgacaagcactcaaattgtatttctct

SEQ ID NO: 106181 - DNA, 33 bp, Homo sapien
catcagactgagcagaactgtgattttccaggg

SEQ ID NO: 106182 - DNA, 33 bp, Homo sapien
catcagactgagcagagctgtgattttccaggg

SEQ ID NO: 106183 - DNA, 33 bp, Homo sapien
ggtaattccaaaattccatcccaaactaaagca

SEQ ID NO: 106184 - DNA, 33 bp, Homo sapien
ggtaattccaaaattctatcccaaactaaagca

SEQ ID NO: 106185 - DNA, 33 bp, Homo sapien
cttacttcagcatttacacgattagaattgagt

SEQ ID NO: 106186 - DNA, 33 bp, Homo sapien
cttacttcagcatttatacgattagaattgagt

SEQ ID NO: 106187 - DNA, 33 bp, Homo sapien
ttgtggcaatgagataccaattataaacaagac

SEQ ID NO: 106188 - DNA, 33 bp, Homo sapien
ttgtggcaatgagatatcaattataaacaagac

SEQ ID NO: 106189 - DNA, 33 bp, Homo sapien
cactgagacattaagaaaaatgaagcactatat

SEQ ID NO: 106190 - DNA, 33 bp, Homo sapien
cactgagacattaagagaaatgaagcactatat

SEQ ID NO: 106191 - DNA, 33 bp, Homo sapien
atcaaaacaggttcctaaataatgtgtgtgaat

SEQ ID NO: 106192 - DNA, 33 bp, Homo sapien
atcaaaacaggttcctgaataatgtgtgtgaat

SEQ ID NO: 106193 - DNA, 33 bp, Homo sapien; identical to SEQ ID NO: 106191

SEQ ID NO: 106194 - DNA, 33 bp, Homo sapien; identical to SEQ ID NO: 106192

SEQ ID NO: 106195 - DNA, 33 bp, Homo sapien
acttagccttctgttacgattctaagtttcctg

SEQ ID NO: 106196 - DNA, 33 bp, Homo sapien
acttagccttctgttatgattctaagtttcctg

SEQ ID NO: 106197 - DNA, 33 bp, Homo sapien
gatctcagaggcagcccatccaaacacaggatc

SEQ ID NO: 106198 - DNA, 33 bp, Homo sapien
gatctcagaggcagcctatccaaacacaggatc

SEQ ID NO: 106199 - DNA, 33 bp, Homo sapien
acatattcaaaactcaacagtgcaatcattaaa

SEQ ID NO: 106200 - DNA, 33 bp, Homo sapien
acatattcaaaactcagcagtgcaatcattaaa

SEQ ID NO: 106201 - DNA, 33 bp, Homo sapien
caggagcttgacaaaccgtaggtggtcttctta

SEQ ID NO: 106202 - DNA, 33 bp, Homo sapien
caggagcttgacaaactgtaggtggtcttctta

SEQ ID NO: 106203 - DNA, 33 bp, Homo sapien
tgtcaatgtaagaccacgcttctttcttataca

SEQ ID NO: 106204 - DNA, 33 bp, Homo sapien
tgtcaatgtaagaccatgcttctttcttataca

SEQ ID NO: 106205 - DNA, 33 bp, Homo sapien
ctcctccagtctttgacagagtgtggaacatcc

SEQ ID NO: 106206 - DNA, 33 bp, Homo sapien
ctcctccagtctttgatagagtgtggaacatcc

SEQ ID NO: 106207 - DNA, 33 bp, Homo sapien
tcctggcctccgctcaagactcattgggctagc

SEQ ID NO: 106208 - DNA, 33 bp, Homo sapien
tcctggcctccgctcaggactcattgggctagc

SEQ ID NO: 106209 - DNA, 33 bp, Homo sapien
ctcactcatgatgcaactgtcccctcttctcct

SEQ ID NO: 106210 - DNA, 33 bp, Homo sapien
ctcactcatgatgcaattgtcccctcttctcct

SEQ ID NO: 106211 - DNA, 33 bp, Homo sapien
gtatcctagactccagactgccgatttctttgg

SEQ ID NO: 106212 - DNA, 33 bp, Homo sapien
gtatcctagactccaggctgccgatttctttgg

SEQ ID NO: 106213 - DNA, 33 bp, Homo sapien
ggacacacacccatcgaccagctctggctttag

SEQ ID NO: 106214 - DNA, 33 bp, Homo sapien
ggacacacacccatcggccagctctggctttag

SEQ ID NO: 106215 - DNA, 33 bp, Homo sapien
agtgtcagaagatgaacatcctgctttgttcag

SEQ ID NO: 106216 - DNA, 33 bp, Homo sapien
agtgtcagaagatgaatatcctgctttgttcag

SEQ ID NO: 106217 - DNA, 33 bp, Homo sapien
agcccaagtcaagtcacgcagggatacagccaa

SEQ ID NO: 106218 - DNA, 33 bp, Homo sapien
agcccaagtcaagtcatgcagggatacagccaa

SEQ ID NO: 106219 - DNA, 33 bp, Homo sapien
cacacaggagagaaacactttcaatgtaatcaa

SEQ ID NO: 106220 - DNA, 33 bp, Homo sapien
cacacaggagagaaacgctttcaatgtaatcaa

SEQ ID NO: 106221 - DNA, 33 bp, Homo sapien
tgaagacatactcaaacttatggaacacagata

SEQ ID NO: 106222 - DNA, 33 bp, Homo sapien
tgaagacatactcaaatttatggaacacagata

SEQ ID NO: 106223 - DNA, 33 bp, Homo sapien
actgacttaaaatccaaagacacaaataaatta

SEQ ID NO: 106224 - DNA, 33 bp, Homo sapien
actgacttaaaatccagagacacaaataaatta

SEQ ID NO: 106225 - DNA, 33 bp, Homo sapien
gaacatacagtctataacagcataatcaatgtt

SEQ ID NO: 106226 - DNA, 33 bp, Homo sapien
gaacatacagtctatagcagcataatcaatgtt

SEQ ID NO: 106227 - DNA, 33 bp, Homo sapien
agtctgaagtaacatcaaataagttaagtccat

SEQ ID NO: 106228 - DNA, 33 bp, Homo sapien
agtctgaagtaacatccaataagttaagtccat

SEQ ID NO: 106229 - DNA, 33 bp, Homo sapien
gtacaaaaaccgaagaagaaatgagaggaaaaa

SEQ ID NO: 106230 - DNA, 33 bp, Homo sapien
gtacaaaaaccgaagaggaaatgagaggaaaaa

SEQ ID NO: 106231 - DNA, 33 bp, Homo sapien
gaagctttgtgaggctgaccggctctacacacc

SEQ ID NO: 106232 - DNA, 33 bp, Homo sapien
gaagctttgtgaggcttaccggctctacacacc

SEQ ID NO: 106233 - DNA, 33 bp, Homo sapien
tgacaatgtggaagaactggaacccacacacat

SEQ ID NO: 106234 - DNA, 33 bp, Homo sapien
tgacaatgtggaagaattggaacccacacacat

SEQ ID NO: 106235 - DNA, 33 bp, Homo sapien
gtggctcaggcctgtgcataattccagcacttt

SEQ ID NO: 106236 - DNA, 33 bp, Homo sapien
gtggctcaggcctgtgtataattccagcacttt

SEQ ID NO: 106237 - DNA, 33 bp, Homo sapien
caaaaacacttatctcccatctggatgttgcca

SEQ ID NO: 106238 - DNA, 33 bp, Homo sapien
caaaaacacttatctcgcatctggatgttgcca

SEQ ID NO: 106239 - DNA, 33 bp, Homo sapien
atgaggagttctcagaaagcgggatgtttgtga

SEQ ID NO: 106240 - DNA, 33 bp, Homo sapien
atgaggagttctcagagagcgggatgtttgtga

SEQ ID NO: 106241 - DNA, 33 bp, Homo sapien
tatttcactaaccagaagtatgatagtcccagg

SEQ ID NO: 106242 - DNA, 33 bp, Homo sapien
tatttcactaaccagatgtatgatagtcccagg

SEQ ID NO: 106243 - DNA, 33 bp, Homo sapien
aaatgtttaaaaccacagtcatcaactttaatt

SEQ ID NO: 106244 - DNA, 33 bp, Homo sapien
aaatgtttaaaaccacggtcatcaactttaatt

SEQ ID NO: 106245 - DNA, 33 bp, Homo sapien
gtgtctagggtcacaaaggacagtatccatgta

SEQ ID NO: 106246 - DNA, 33 bp, Homo sapien
gtgtctagggtcacaagggacagtatccatgta

SEQ ID NO: 106247 - DNA, 33 bp, Homo sapien
gtactctcagtagaccagatgggcccagggatc

SEQ ID NO: 106248 - DNA, 33 bp, Homo sapien
gtactctcagtagaccggatgggcccagggatc

SEQ ID NO: 106249 - DNA, 33 bp, Homo sapien
tttagaggtccacataactcagatttagaaact

SEQ ID NO: 106250 - DNA, 33 bp, Homo sapien
tttagaggtccacatagctcagatttagaaact

SEQ ID NO: 106251 - DNA, 33 bp, Homo sapien; identical to SEQ ID NO: 106249

SEQ ID NO: 106252 - DNA, 33 bp, Homo sapien; identical to SEQ ID NO: 106250

SEQ ID NO: 106253 - DNA, 33 bp, Homo sapien
gcatagctgagacctgaaaagctttatgtttca

SEQ ID NO: 106254 - DNA, 33 bp, Homo sapien
gcatagctgagacctgcaaagctttatgtttca

SEQ ID NO: 106255 - DNA, 33 bp, Homo sapien
actttggatagtccgaactattaactgtggttt

SEQ ID NO: 106256 - DNA, 33 bp, Homo sapien
actttggatagtccgagctattaactgtggttt

SEQ ID NO: 106257 - DNA, 33 bp, Homo sapien
tcgaggaaattcagtcacagagaagctgagtaa

SEQ ID NO: 106258 - DNA, 33 bp, Homo sapien
tcgaggaaattcagtctcagagaagctgagtaa

SEQ ID NO: 106259 - DNA, 33 bp, Homo sapien
gaatatgaatgacagacgtgtgatattaagagc

SEQ ID NO: 106260 - DNA, 33 bp, Homo sapien
gaatatgaatgacagatgtgtgatattaagagc

SEQ ID NO: 106261 - DNA, 33 bp, Homo sapien
tactcttgggatacaaatcagctgttttcagat

SEQ ID NO: 106262 - DNA, 33 bp, Homo sapien
tactcttgggatacaagtcagctgttttcagat

SEQ ID NO: 106263 - DNA, 33 bp, Homo sapien
atgaaattgtaaaggcagatacctttatgcatt

SEQ ID NO: 106264 - DNA, 33 bp, Homo sapien
atgaaattgtaaaggcggatacctttatgcatt

SEQ ID NO: 106265 - DNA, 33 bp, Homo sapien
ttcctggatgcgggacaagaactcaggacttgc

SEQ ID NO: 106266 - DNA, 33 bp, Homo sapien
ttcctggatgcgggacgagaactcaggacttgc

SEQ ID NO: 106267 - DNA, 33 bp, Homo sapien
cccagaagcttgaagactccaggaaccacaagg

SEQ ID NO: 106268 - DNA, 33 bp, Homo sapien
cccagaagcttgaagattccaggaaccacaagg

SEQ ID NO: 106269 - DNA, 33 bp, Homo sapien
ttcgtgttgagaaaaagaatgacagggcaaggg

SEQ ID NO: 106270 - DNA, 33 bp, Homo sapien
ttcgtgttgagaaaaataatgacagggcaaggg

SEQ ID NO: 106271 - DNA, 33 bp, Homo sapien
atcacgtaactaaccacggaaatccttggaatg

SEQ ID NO: 106272 - DNA, 33 bp, Homo sapien
atcacgtaactaaccagggaaatccttggaatg

SEQ ID NO: 106273 - DNA, 33 bp, Homo sapien
ctgctttgctaagagaatagaagtggtaaaagt

SEQ ID NO: 106274 - DNA, 33 bp, Homo sapien
ctgctttgctaagagagtagaagtggtaaaagt

SEQ ID NO: 106275 - DNA, 33 bp, Homo sapien
tcagctaatctagaaacggcaatatagtcaatg

SEQ ID NO: 106276 - DNA, 33 bp, Homo sapien
tcagctaatctagaaatggcaatatagtcaatg

SEQ ID NO: 106277 - DNA, 33 bp, Homo sapien; identical to SEQ ID NO: 106275

SEQ ID NO: 106278 - DNA, 33 bp, Homo sapien; identical to SEQ ID NO: 106276

SEQ ID NO: 106279 - DNA, 33 bp, Homo sapien
aaatggtaagctgcagaaagaacatatacaggt

SEQ ID NO: 106280 - DNA, 33 bp, Homo sapien
aaatggtaagctgcaggaagaacatatacaggt

SEQ ID NO: 106281 - DNA, 33 bp, Homo sapien
gagaaagaccatatctcaaagagagagagagag

SEQ ID NO: 106282 - DNA, 33 bp, Homo sapien
gagaaagaccatatcttaaagagagagagagag

SEQ ID NO: 106283 - DNA, 33 bp, Homo sapien
gaatgaatagaaaagccccacgctgataccagc

SEQ ID NO: 106284 - DNA, 33 bp, Homo sapien
gaatgaatagaaaagctccacgctgataccagc

SEQ ID NO: 106285 - DNA, 33 bp, Homo sapien; identical to SEQ ID NO: 106283

SEQ ID NO: 106286 - DNA, 33 bp, Homo sapien; identical to SEQ ID NO: 106284

SEQ ID NO: 106287 - DNA, 33 bp, Homo sapien
gccatttcagaaataaatgtttgagcaaagagg

SEQ ID NO: 106288 - DNA, 33 bp, Homo sapien
gccatttcagaaataagtgtttgagcaaagagg

SEQ ID NO: 106289 - DNA, 33 bp, Homo sapien
cagctacagaaaccagaattgcaattgtcatga

SEQ ID NO: 106290 - DNA, 33 bp, Homo sapien
cagctacagaaaccaggattgcaattgtcatga

SEQ ID NO: 106291 - DNA, 33 bp, Homo sapien
agttttatctgacccacgaagcatgaggtgggc

SEQ ID NO: 106292 - DNA, 33 bp, Homo sapien
agttttatctgacccatgaagcatgaggtgggc

SEQ ID NO: 106293 - DNA, 33 bp, Homo sapien
atcatgctactgcacaacagtctgagcatcaga

SEQ ID NO: 106294 - DNA, 33 bp, Homo sapien
atcatgctactgcacaccagtctgagcatcaga

SEQ ID NO: 106295 - DNA, 33 bp, Homo sapien
tccctttctttcaaccactacactgcacaaaag

SEQ ID NO: 106296 - DNA, 33 bp, Homo sapien
tccctttctttcaacctctacactgcacaaaag

SEQ ID NO: 106297 - DNA, 33 bp, Homo sapien
aaatatacctaacataaaatgcacagttgtacc

SEQ ID NO: 106298 - DNA, 33 bp, Homo sapien
aaatatacctaacatagaatgcacagttgtacc

SEQ ID NO: 106299 - DNA, 33 bp, Homo sapien
atttgttttaatttaacaggacttggctcatcc

SEQ ID NO: 106300 - DNA, 33 bp, Homo sapien
atttgttttaatttaagaggacttggctcatcc

SEQ ID NO: 106301 - DNA, 33 bp, Homo sapien
cctgcatacagtgctcacctgcatggggtgctc

SEQ ID NO: 106302 - DNA, 33 bp, Homo sapien
cctgcatacagtgctcgcctgcatggggtgctc

SEQ ID NO: 106303 - DNA, 33 bp, Homo sapien
ggcatagctaaataacaagaaggatcgaattgg

SEQ ID NO: 106304 - DNA, 33 bp, Homo sapien
ggcatagctaaataacgagaaggatcgaattgg

SEQ ID NO: 106305 - DNA, 33 bp, Homo sapien
tgttcagggtcataaggccctcattttgagccc

SEQ ID NO: 106306 - DNA, 33 bp, Homo sapien
tgttcagggtcataagtccctcattttgagccc

SEQ ID NO: 106307 - DNA, 33 bp, Homo sapien
gtagatagtagttaaacttggtgttcctgcagt

SEQ ID NO: 106308 - DNA, 33 bp, Homo sapien
gtagatagtagttaaatttggtgttcctgcagt

SEQ ID NO: 106309 - DNA, 33 bp, Homo sapien
tacttaaacgaatggcaagagtgatatatgaaa

SEQ ID NO: 106310 - DNA, 33 bp, Homo sapien
tacttaaacgaatggcgagagtgatatatgaaa

SEQ ID NO: 106311 - DNA, 33 bp, Homo sapien
agtggtttgtactagcacaggctccgccagccg

SEQ ID NO: 106312 - DNA, 33 bp, Homo sapien
agtggtttgtactagcgcaggctccgccagccg

SEQ ID NO: 106313 - DNA, 33 bp, Homo sapien
gattggcttcaatgtaacaggtcccacacttta

SEQ ID NO: 106314 - DNA, 33 bp, Homo sapien
gattggcttcaatgtagcaggtcccacacttta

SEQ ID NO: 106315 - DNA, 33 bp, Homo sapien
ccttctttttaccttacgtgagacactaatggg

SEQ ID NO: 106316 - DNA, 33 bp, Homo sapien
ccttctttttaccttatgtgagacactaatggg

SEQ ID NO: 106317 - DNA, 33 bp, Homo sapien
tttaacaccctcaaaaaatcacgctaacttacc

SEQ ID NO: 106318 - DNA, 33 bp, Homo sapien
tttaacaccctcaaaagatcacgctaacttacc

SEQ ID NO: 106319 - DNA, 33 bp, Homo sapien
ctgtcacaacaactcaaccctgctgttacagcg

SEQ ID NO: 106320 - DNA, 33 bp, Homo sapien
ctgtcacaacaactcatccctgctgttacagcg

SEQ ID NO: 106321 - DNA, 33 bp, Homo sapien
caagactcaatactatcaatgtgagtgaaaaac

SEQ ID NO: 106322 - DNA, 33 bp, Homo sapien
caagactcaatactattaatgtgagtgaaaaac

SEQ ID NO: 106323 - DNA, 33 bp, Homo sapien
gataagtctgctatagacaaattgcattctttc

SEQ ID NO: 106324 - DNA, 33 bp, Homo sapien
gataagtctgctatagccaaattgcattctttc

SEQ ID NO: 106325 - DNA, 33 bp, Homo sapien
tcgaatagatatcaccaaagaagatatgcagat

SEQ ID NO: 106326 - DNA, 33 bp, Homo sapien
tcgaatagatatcaccgaagaagatatgcagat

SEQ ID NO: 106327 - DNA, 33 bp, Homo sapien
aattgttgcttttatacgtgaaaagctgtgggt

SEQ ID NO: 106328 - DNA, 33 bp, Homo sapien
aattgttgcttttatatgtgaaaagctgtgggt

SEQ ID NO: 106329 - DNA, 33 bp, Homo sapien
aaatctattccagtccgcaaattcacatcatta

SEQ ID NO: 106330 - DNA, 33 bp, Homo sapien
aaatctattccagtcctcaaattcacatcatta

SEQ ID NO: 106331 - DNA, 33 bp, Homo sapien
ccagtgcttaaagcagcacttggcatacagtag

SEQ ID NO: 106332 - DNA, 33 bp, Homo sapien
ccagtgcttaaagcagtacttggcatacagtag

SEQ ID NO: 106333 - DNA, 33 bp, Homo sapien
tgttccctataataaacgcccaagagaaaatgt

SEQ ID NO: 106334 - DNA, 33 bp, Homo sapien
tgttccctataataaatgcccaagagaaaatgt

SEQ ID NO: 106335 - DNA, 33 bp, Homo sapien
tctggtgttggtgctacaggagaatgcataagt

SEQ ID NO: 106336 - DNA, 33 bp, Homo sapien
tctggtgttggtgctataggagaatgcataagt

SEQ ID NO: 106337 - DNA, 33 bp, Homo sapien
accatttattccttcaccatttgagtgcctcct

SEQ ID NO: 106338 - DNA, 33 bp, Homo sapien
accatttattccttcagcatttgagtgcctcct

SEQ ID NO: 106339 - DNA, 33 bp, Homo sapien
ttgagcacctgttgtgaacactaggcctgttta

SEQ ID NO: 106340 - DNA, 33 bp, Homo sapien
ttgagcacctgttgtgtacactaggcctgttta

SEQ ID NO: 106341 - DNA, 33 bp, Homo sapien
ttgtccctcctgagaaaaaacagcctgggccct

SEQ ID NO: 106342 - DNA, 33 bp, Homo sapien
ttgtccctcctgagaagaaacagcctgggccct

SEQ ID NO: 106343 - DNA, 33 bp, Homo sapien
actcaggtaacaggggaaagagttggaaggaag

SEQ ID NO: 106344 - DNA, 33 bp, Homo sapien
actcaggtaacaggggcaagagttggaaggaag

SEQ ID NO: 106345 - DNA, 33 bp, Homo sapien
tcatacttttgcggaacattaggtgggcatatt

SEQ ID NO: 106346 - DNA, 33 bp, Homo sapien
tcatacttttgcggaatattaggtgggcatatt

SEQ ID NO: 106347 - DNA, 33 bp, Homo sapien
tttcttaacttcataaagagcatctgtaaaaac

SEQ ID NO: 106348 - DNA, 33 bp, Homo sapien
tttcttaacttcataatgagcatctgtaaaaac

SEQ ID NO: 106349 - DNA, 33 bp, Homo sapien
gattctatcagttgacacaggaaaagcatttga

SEQ ID NO: 106350 - DNA, 33 bp, Homo sapien
gattctatcagttgacgcaggaaaagcatttga

SEQ ID NO: 106351 - DNA, 33 bp, Homo sapien
atcaaggagaggaagacggattccccacgccga

SEQ ID NO: 106352 - DNA, 33 bp, Homo sapien
atcaaggagaggaagatggattccccacgccga

SEQ ID NO: 106353 - DNA, 33 bp, Homo sapien
aggcttggctcctctcacgtctgaacccataag

SEQ ID NO: 106354 - DNA, 33 bp, Homo sapien
aggcttggctcctctcgcgtctgaacccataag

SEQ ID NO: 106355 - DNA, 33 bp, Homo sapien
gtgggggagcacgggagcaatgttctggagggt

SEQ ID NO: 106356 - DNA, 33 bp, Homo sapien
gtgggggagcacgggatcaatgttctggagggt

SEQ ID NO: 106357 - DNA, 33 bp, Homo sapien
ttgacaacctttgatccgactcagtaaaataga

SEQ ID NO: 106358 - DNA, 33 bp, Homo sapien
ttgacaacctttgatctgactcagtaaaataga

SEQ ID NO: 106359 - DNA, 33 bp, Homo sapien
cagccaatggctgagcactttccttctcagata

SEQ ID NO: 106360 - DNA, 33 bp, Homo sapien
cagccaatggctgagcgctttccttctcagata

SEQ ID NO: 106361 - DNA, 33 bp, Homo sapien
tcgctgcccctgcaacagatacgtcttcgggag

SEQ ID NO: 106362 - DNA, 33 bp, Homo sapien
tcgctgcccctgcaacggatacgtcttcgggag

SEQ ID NO: 106363 - DNA, 33 bp, Homo sapien
aggcaattacatccccaagaaatgtggccagtc

SEQ ID NO: 106364 - DNA, 33 bp, Homo sapien
aggcaattacatccccgagaaatgtggccagtc

SEQ ID NO: 106365 - DNA, 33 bp, Homo sapien
ggccccttgcaattccgcattgatcttgctcac

SEQ ID NO: 106366 - DNA, 33 bp, Homo sapien
ggccccttgcaattcctcattgatcttgctcac

SEQ ID NO: 106367 - DNA, 33 bp, Homo sapien
tagttaaggttttcccaagaaacagaagtgata

SEQ ID NO: 106368 - DNA, 33 bp, Homo sapien
tagttaaggttttcccgagaaacagaagtgata

SEQ ID NO: 106369 - DNA, 33 bp, Homo sapien
gaagggaataatgagcaagggtaagccaagaaa

SEQ ID NO: 106370 - DNA, 33 bp, Homo sapien
gaagggaataatgagcgagggtaagccaagaaa

SEQ ID NO: 106371 - DNA, 33 bp, Homo sapien
ccagtctttcatagagaccttgcaattcaatgc

SEQ ID NO: 106372 - DNA, 33 bp, Homo sapien
ccagtctttcatagagcccttgcaattcaatgc

SEQ ID NO: 106373 - DNA, 33 bp, Homo sapien
gctgctgtagaaaacaatatagcaattcccccc

SEQ ID NO: 106374 - DNA, 33 bp, Homo sapien
gctgctgtagaaaacagtatagcaattcccccc

SEQ ID NO: 106375 - DNA, 33 bp, Homo sapien
agagctgtgcaagagcaagaagagaggcccttg

SEQ ID NO: 106376 - DNA, 33 bp, Homo sapien
agagctgtgcaagagcgagaagagaggcccttg

SEQ ID NO: 106377 - DNA, 33 bp, Homo sapien
ccaacaactgtatgggaacattttacagatgtt

SEQ ID NO: 106378 - DNA, 33 bp, Homo sapien
ccaacaactgtatggggacattttacagatgtt

SEQ ID NO: 106379 - DNA, 33 bp, Homo sapien
gagaagcagccggttgaattgttccagggaact

SEQ ID NO: 106380 - DNA, 33 bp, Homo sapien
gagaagcagccggttggattgttccagggaact

SEQ ID NO: 106381 - DNA, 33 bp, Homo sapien
cagagacgttgcagtgaagaaaaccaagtccct

SEQ ID NO: 106382 - DNA, 33 bp, Homo sapien
cagagacgttgcagtggagaaaaccaagtccct

SEQ ID NO: 106383 - DNA, 33 bp, Homo sapien
cttaatttttcattgaccttacctccagctaat

SEQ ID NO: 106384 - DNA, 33 bp, Homo sapien
cttaatttttcattgagcttacctccagctaat

SEQ ID NO: 106385 - DNA, 33 bp, Homo sapien
agagaggaccacagaacctgctgagtggtgtgg

SEQ ID NO: 106386 - DNA, 33 bp, Homo sapien
agagaggaccacagaagctgctgagtggtgtgg

SEQ ID NO: 106387 - DNA, 33 bp, Homo sapien
tctctcaaatggggaccgaaacagtgtccttcc

SEQ ID NO: 106388 - DNA, 33 bp, Homo sapien
tctctcaaatggggactgaaacagtgtccttcc

SEQ ID NO: 106389 - DNA, 33 bp, Homo sapien
gtatctgtgttgagcaatgaaatgccagaaacc

SEQ ID NO: 106390 - DNA, 33 bp, Homo sapien
gtatctgtgttgagcagtgaaatgccagaaacc

SEQ ID NO: 106391 - DNA, 33 bp, Homo sapien
tgcttgatccctggcacaaagagcaggtgtgaa

SEQ ID NO: 106392 - DNA, 33 bp, Homo sapien
tgcttgatccctggcataaagagcaggtgtgaa

SEQ ID NO: 106393 - DNA, 33 bp, Homo sapien
tgagcctggagcaaggaacatatatttgtatct

SEQ ID NO: 106394 - DNA, 33 bp, Homo sapien
tgagcctggagcaagggacatatatttgtatct

SEQ ID NO: 106395 - DNA, 33 bp, Homo sapien
agggcatgaacttaggaagaagaagaaggttgg

SEQ ID NO: 106396 - DNA, 33 bp, Homo sapien
agggcatgaacttagggagaagaagaaggttgg

SEQ ID NO: 106397 - DNA, 33 bp, Homo sapien
tgtgaagaaactgaacccttgcgcactgctgga

SEQ ID NO: 106398 - DNA, 33 bp, Homo sapien
tgtgaagaaactgaacgcttgcgcactgctgga

SEQ ID NO: 106399 - DNA, 33 bp, Homo sapien
tttcctgagctgaaaaagagtggttttgtcctc

SEQ ID NO: 106400 - DNA, 33 bp, Homo sapien
tttcctgagctgaaaaggagtggttttgtcctc

SEQ ID NO: 106401 - DNA, 33 bp, Homo sapien
cgcttgtctgagaaaccaagaggattcccacat

SEQ ID NO: 106402 - DNA, 33 bp, Homo sapien
cgcttgtctgagaaactaagaggattcccacat

SEQ ID NO: 106403 - DNA, 33 bp, Homo sapien
tcttcataattctagaacaaggggcccacaaat

SEQ ID NO: 106404 - DNA, 33 bp, Homo sapien
tcttcataattctagatcaaggggcccacaaat

SEQ ID NO: 106405 - DNA, 33 bp, Homo sapien
tgtacattgtcggtgaaaatggaaaataatata

SEQ ID NO: 106406 - DNA, 33 bp, Homo sapien
tgtacattgtcggtgagaatggaaaataatata

SEQ ID NO: 106407 - DNA, 33 bp, Homo sapien
tctggacggatgttagccaatggatcagactgg

SEQ ID NO: 106408 - DNA, 33 bp, Homo sapien
tctggacggatgttaggcaatggatcagactgg

SEQ ID NO: 106409 - DNA, 33 bp, Homo sapien
atgcagatttacccagcattgctcttgcatttt

SEQ ID NO: 106410 - DNA, 33 bp, Homo sapien
atgcagatttacccagtattgctcttgcatttt

SEQ ID NO: 106411 - DNA, 33 bp, Homo sapien
catgttctcgcatgccactctcccttgcagagc

SEQ ID NO: 106412 - DNA, 33 bp, Homo sapien
catgttctcgcatgccgctctcccttgcagagc

SEQ ID NO: 106413 - DNA, 33 bp, Homo sapien
ggtgcatgtgcccatcaagagccaaacttgtgg

SEQ ID NO: 106414 - DNA, 33 bp, Homo sapien
ggtgcatgtgcccatcgagagccaaacttgtgg

SEQ ID NO: 106415 - DNA, 33 bp, Homo sapien
ggctcctcttcacgtacgaatcctcttcataaa

SEQ ID NO: 106416 - DNA, 33 bp, Homo sapien
ggctcctcttcacgtaggaatcctcttcataaa

SEQ ID NO: 106417 - DNA, 33 bp, Homo sapien
acctttggcaatcacacgtctgtcctgcaccgt

SEQ ID NO: 106418 - DNA, 33 bp, Homo sapien
acctttggcaatcacatgtctgtcctgcaccgt

SEQ ID NO: 106419 - DNA, 33 bp, Homo sapien
gaatcctacaagcttcccttccctccaagggag

SEQ ID NO: 106420 - DNA, 33 bp, Homo sapien
gaatcctacaagcttctcttccctccaagggag

SEQ ID NO: 106421 - DNA, 33 bp, Homo sapien
tgaacgtcacattggccgagccgtgttcagttc

SEQ ID NO: 106422 - DNA, 33 bp, Homo sapien
tgaacgtcacattggctgagccgtgttcagttc

SEQ ID NO: 106423 - DNA, 33 bp, Homo sapien
ggacatgaaagcgagacggaaggagaacctcat

SEQ ID NO: 106424 - DNA, 33 bp, Homo sapien
ggacatgaaagcgagatggaaggagaacctcat

SEQ ID NO: 106425 - DNA, 33 bp, Homo sapien
ctgcctaaaagacttacagtacaggtatgatgg

SEQ ID NO: 106426 - DNA, 33 bp, Homo sapien
ctgcctaaaagacttatagtacaggtatgatgg

SEQ ID NO: 106427 - DNA, 33 bp, Homo sapien
tggccatgatgatttgaagtcaaaaagtctaca

SEQ ID NO: 106428 - DNA, 33 bp, Homo sapien
tggccatgatgatttggagtcaaaaagtctaca

SEQ ID NO: 106429 - DNA, 33 bp, Homo sapien
gcttttgtcttataacgctccttggattctgat

SEQ ID NO: 106430 - DNA, 33 bp, Homo sapien
gcttttgtcttataactctccttggattctgat

SEQ ID NO: 106431 - DNA, 33 bp, Homo sapien
tacagccagacccactcaatcagatgctagggc

SEQ ID NO: 106432 - DNA, 33 bp, Homo sapien
tacagccagacccactgaatcagatgctagggc

SEQ ID NO: 106433 - DNA, 33 bp, Homo sapien
tcgctcatgtctggagcagttagagaagatgtt

SEQ ID NO: 106434 - DNA, 33 bp, Homo sapien
tcgctcatgtctggagtagttagagaagatgtt

SEQ ID NO: 106435 - DNA, 33 bp, Homo sapien
attgggcatttggtgaatatctctccctgatga

SEQ ID NO: 106436 - DNA, 33 bp, Homo sapien
attgggcatttggtgactatctctccctgatga

SEQ ID NO: 106437 - DNA, 33 bp, Homo sapien
gagtctcttagaagaacgaaggagctttgtttt

SEQ ID NO: 106438 - DNA, 33 bp, Homo sapien
gagtctcttagaagaatgaaggagctttgtttt

SEQ ID NO: 106439 - DNA, 33 bp, Homo sapien
ggatgtagtgctggaaataagtgaaatgcaatc

SEQ ID NO: 106440 - DNA, 33 bp, Homo sapien
ggatgtagtgctggaagtaagtgaaatgcaatc

SEQ ID NO: 106441 - DNA, 33 bp, Homo sapien
aagttccatcatctaactcctggggcaagatca

SEQ ID NO: 106442 - DNA, 33 bp, Homo sapien
aagttccatcatctaattcctggggcaagatca

SEQ ID NO: 106443 - DNA, 33 bp, Homo sapien
tagccatcatgatacaccgatggccagggtgct

SEQ ID NO: 106444 - DNA, 33 bp, Homo sapien
tagccatcatgatacagcgatggccagggtgct

SEQ ID NO: 106445 - DNA, 33 bp, Homo sapien
gtggaaagggacctgagatcaaatggaaatgag

SEQ ID NO: 106446 - DNA, 33 bp, Homo sapien
gtggaaagggacctgatatcaaatggaaatgag

SEQ ID NO: 106447 - DNA, 33 bp, Homo sapien
tctctttaaacttacaatgatcataacctttga

SEQ ID NO: 106448 - DNA, 33 bp, Homo sapien
tctctttaaacttacagtgatcataacctttga

SEQ ID NO: 106449 - DNA, 33 bp, Homo sapien
ttggaagttctaaaaaagtggattctgaccttt

SEQ ID NO: 106450 - DNA, 33 bp, Homo sapien
ttggaagttctaaaaatgtggattctgaccttt

SEQ ID NO: 106451 - DNA, 33 bp, Homo sapien
tctgtgaccacaataaaataacagaagtcaacg

SEQ ID NO: 106452 - DNA, 33 bp, Homo sapien
tctgtgaccacaataagataacagaagtcaacg

SEQ ID NO: 106453 - DNA, 33 bp, Homo sapien
tatagaggcagctttcacctgagatcctgaatg

SEQ ID NO: 106454 - DNA, 33 bp, Homo sapien
tatagaggcagctttcgcctgagatcctgaatg

SEQ ID NO: 106455 - DNA, 33 bp, Homo sapien
ggacaaaagctgtcccaattcctcattccagag

SEQ ID NO: 106456 - DNA, 33 bp, Homo sapien
ggacaaaagctgtcccgattcctcattccagag

SEQ ID NO: 106457 - DNA, 33 bp, Homo sapien
ttgtttttcaactaaacggatcataactgatca

SEQ ID NO: 106458 - DNA, 33 bp, Homo sapien
ttgtttttcaactaaatggatcataactgatca

SEQ ID NO: 106459 - DNA, 33 bp, Homo sapien
aggcccctagagaagccgcaagagggtttccag

SEQ ID NO: 106460 - DNA, 33 bp, Homo sapien
aggcccctagagaagctgcaagagggtttccag

SEQ ID NO: 106461 - DNA, 33 bp, Homo sapien
gtgtatagaatatgaccgatttttgcatattca

SEQ ID NO: 106462 - DNA, 33 bp, Homo sapien
gtgtatagaatatgactgatttttgcatattca

SEQ ID NO: 106463 - DNA, 33 bp, Homo sapien
ggtcgtcctatatgcaataatatggattacatt

SEQ ID NO: 106464 - DNA, 33 bp, Homo sapien
ggtcgtcctatatgcattaatatggattacatt

SEQ ID NO: 106465 - DNA, 33 bp, Homo sapien
gagggacctaaaaggcaagtggacagccagcca

SEQ ID NO: 106466 - DNA, 33 bp, Homo sapien
gagggacctaaaaggcgagtggacagccagcca

SEQ ID NO: 106467 - DNA, 33 bp, Homo sapien
gacagggaacttgagtcaaaagcaagagttcaa

SEQ ID NO: 106468 - DNA, 33 bp, Homo sapien
gacagggaacttgagttaaaagcaagagttcaa

SEQ ID NO: 106469 - DNA, 33 bp, Homo sapien
gaaatgatttggaataaattcaagagtgatggg

SEQ ID NO: 106470 - DNA, 33 bp, Homo sapien
gaaatgatttggaatagattcaagagtgatggg

SEQ ID NO: 106471 - DNA, 33 bp, Homo sapien
gacaacagttatcagcgcaacagaaacagtata

SEQ ID NO: 106472 - DNA, 33 bp, Homo sapien
gacaacagttatcagctcaacagaaacagtata

SEQ ID NO: 106473 - DNA, 33 bp, Homo sapien
acaatccagttttcagacacttccatcagcccc

SEQ ID NO: 106474 - DNA, 33 bp, Homo sapien
acaatccagttttcaggcacttccatcagcccc

SEQ ID NO: 106475 - DNA, 33 bp, Homo sapien
acttgttgattgtagaaattagaaaaaacaaag

SEQ ID NO: 106476 - DNA, 33 bp, Homo sapien
acttgttgattgtagatattagaaaaaacaaag

SEQ ID NO: 106477 - DNA, 33 bp, Homo sapien
gatgcggcctggccaaactcgaggttggaaaag

SEQ ID NO: 106478 - DNA, 33 bp, Homo sapien
gatgcggcctggccaagctcgaggttggaaaag

SEQ ID NO: 106479 - DNA, 33 bp, Homo sapien
caaggaaccagcaaagaatcatcctgaagacct

SEQ ID NO: 106480 - DNA, 33 bp, Homo sapien
caaggaaccagcaaaggatcatcctgaagacct

SEQ ID NO: 106481 - DNA, 33 bp, Homo sapien
aaggtcaaggacatcacggtacctgttatttcc

SEQ ID NO: 106482 - DNA, 33 bp, Homo sapien
aaggtcaaggacatcatggtacctgttatttcc

SEQ ID NO: 106483 - DNA, 33 bp, Homo sapien
aaaacttggcccaacaacagaaagagaagataa

SEQ ID NO: 106484 - DNA, 33 bp, Homo sapien
aaaacttggcccaacaccagaaagagaagataa

SEQ ID NO: 106485 - DNA, 33 bp, Homo sapien
acataaagttggataaagtagagtttattttta

SEQ ID NO: 106486 - DNA, 33 bp, Homo sapien
acataaagttggataaggtagagtttattttta

SEQ ID NO: 106487 - DNA, 33 bp, Homo sapien
aagctcagggaatgcaaaattatcccctcttaa

SEQ ID NO: 106488 - DNA, 33 bp, Homo sapien
aagctcagggaatgcagaattatcccctcttaa

SEQ ID NO: 106489 - DNA, 33 bp, Homo sapien
ctacaaactactgacactcatggtcacattcta

SEQ ID NO: 106490 - DNA, 33 bp, Homo sapien
ctacaaactactgacattcatggtcacattcta

SEQ ID NO: 106491 - DNA, 33 bp, Homo sapien
ccagtggttcattccaataaatgtctctccact

SEQ ID NO: 106492 - DNA, 33 bp, Homo sapien
ccagtggttcattccagtaaatgtctctccact

SEQ ID NO: 106493 - DNA, 33 bp, Homo sapien
tgtgacaggccatattaaaaagtcaaaactttg

SEQ ID NO: 106494 - DNA, 33 bp, Homo sapien
tgtgacaggccatattgaaaagtcaaaactttg

SEQ ID NO: 106495 - DNA, 33 bp, Homo sapien
gtttctcatcataagcgcaaatagttgcaaacg

SEQ ID NO: 106496 - DNA, 33 bp, Homo sapien
gtttctcatcataagctcaaatagttgcaaacg

SEQ ID NO: 106497 - DNA, 33 bp, Homo sapien
ccataaccaatcaaacaattcttgtccattctg

SEQ ID NO: 106498 - DNA, 33 bp, Homo sapien
ccataaccaatcaaacgattcttgtccattctg

SEQ ID NO: 106499 - DNA, 33 bp, Homo sapien
agtggctctgcagtaactgagcagagtttaaac

SEQ ID NO: 106500 - DNA, 33 bp, Homo sapien
agtggctctgcagtaattgagcagagtttaaac

SEQ ID NO: 106501 - DNA, 33 bp, Homo sapien
agatagcatttttgcacagaatggttttaaata

SEQ ID NO: 106502 - DNA, 33 bp, Homo sapien
agatagcatttttgcatagaatggttttaaata

SEQ ID NO: 106503 - DNA, 33 bp, Homo sapien
attttaccaaatgtaaagcgtatagtttaggag

SEQ ID NO: 106504 - DNA, 33 bp, Homo sapien
attttaccaaatgtaaggcgtatagtttaggag

SEQ ID NO: 106505 - DNA, 33 bp, Homo sapien
acaatttaggagcaaaatcataactccatagac

SEQ ID NO: 106506 - DNA, 33 bp, Homo sapien
acaatttaggagcaaagtcataactccatagac

SEQ ID NO: 106507 - DNA, 33 bp, Homo sapien
ttgtgactatgttatagaccctgctgtctaggt

SEQ ID NO: 106508 - DNA, 33 bp, Homo sapien
ttgtgactatgttatataccctgctgtctaggt

SEQ ID NO: 106509 - DNA, 33 bp, Homo sapien
ttaggctgtatactttcaaagcccttgcattcc

SEQ ID NO: 106510 - DNA, 33 bp, Homo sapien
ttaggctgtatactttgaaagcccttgcattcc

SEQ ID NO: 106511 - DNA, 33 bp, Homo sapien
taactgtagggaatcaagcttgggcccaagtcc

SEQ ID NO: 106512 - DNA, 33 bp, Homo sapien
taactgtagggaatcaggcttgggcccaagtcc

SEQ ID NO: 106513 - DNA, 33 bp, Homo sapien
acacgaattacagggaacagtaacatactgcat

SEQ ID NO: 106514 - DNA, 33 bp, Homo sapien
acacgaattacagggatcagtaacatactgcat

SEQ ID NO: 106515 - DNA, 33 bp, Homo sapien
ggacggcaggaagttcaataatcaggccaaagt

SEQ ID NO: 106516 - DNA, 33 bp, Homo sapien
ggacggcaggaagttctataatcaggccaaagt

SEQ ID NO: 106517 - DNA, 33 bp, Homo sapien
aatgctgaaaaagatagagtggacacctgggat

SEQ ID NO: 106518 - DNA, 33 bp, Homo sapien
aatgctgaaaaagatatagtggacacctgggat

SEQ ID NO: 106519 - DNA, 33 bp, Homo sapien
tttctatattggtcataaaaattaaccagacaa

SEQ ID NO: 106520 - DNA, 33 bp, Homo sapien
tttctatattggtcatgaaaattaaccagacaa

SEQ ID NO: 106521 - DNA, 33 bp, Homo sapien
tttgtattcctgtgaaccttcttgagctttatt

SEQ ID NO: 106522 - DNA, 33 bp, Homo sapien
tttgtattcctgtgaatcttcttgagctttatt

SEQ ID NO: 106523 - DNA, 33 bp, Homo sapien
tgacttgtgtatgtcaatatataccagtgtctt

SEQ ID NO: 106524 - DNA, 33 bp, Homo sapien
tgacttgtgtatgtcagtatataccagtgtctt

SEQ ID NO: 106525 - DNA, 33 bp, Homo sapien
ttatcacctttagagacgaggaaatagagatgt

SEQ ID NO: 106526 - DNA, 33 bp, Homo sapien
ttatcacctttagagatgaggaaatagagatgt

SEQ ID NO: 106527 - DNA, 33 bp, Homo sapien
tgactatggacagaaacggtgtattaggaaaaa

SEQ ID NO: 106528 - DNA, 33 bp, Homo sapien
tgactatggacagaaatggtgtattaggaaaaa

SEQ ID NO: 106529 - DNA, 33 bp, Homo sapien
taaaagtacatcagagaatacatactggcgaga

SEQ ID NO: 106530 - DNA, 33 bp, Homo sapien
taaaagtacatcagaggatacatactggcgaga

SEQ ID NO: 106531 - DNA, 33 bp, Homo sapien
tgtaggatgaacaccactagagttttgttgttg

SEQ ID NO: 106532 - DNA, 33 bp, Homo sapien
tgtaggatgaacaccattagagttttgttgttg

SEQ ID NO: 106533 - DNA, 33 bp, Homo sapien
cagggggtgggtgcacaatcacaaataacatct

SEQ ID NO: 106534 - DNA, 33 bp, Homo sapien
cagggggtgggtgcacgatcacaaataacatct

SEQ ID NO: 106535 - DNA, 33 bp, Homo sapien
gctgatgaaaaaatagaaggagcatttggtacc

SEQ ID NO: 106536 - DNA, 33 bp, Homo sapien
gctgatgaaaaaatagcaggagcatttggtacc

SEQ ID NO: 106537 - DNA, 33 bp, Homo sapien
gggcaatttgtggccaccatgagttatgagaga

SEQ ID NO: 106538 - DNA, 33 bp, Homo sapien
gggcaatttgtggccatcatgagttatgagaga

SEQ ID NO: 106539 - DNA, 33 bp, Homo sapien
agcagcaactgttggtcacatactggggtctct

SEQ ID NO: 106540 - DNA, 33 bp, Homo sapien
agcagcaactgttggttacatactggggtctct

SEQ ID NO: 106541 - DNA, 33 bp, Homo sapien
cctaaaaatgtagtgacagtatcattttttggc

SEQ ID NO: 106542 - DNA, 33 bp, Homo sapien
cctaaaaatgtagtgagagtatcattttttggc

SEQ ID NO: 106543 - DNA, 33 bp, Homo sapien
catgtagtgctccttaccttgtttgcccttttc

SEQ ID NO: 106544 - DNA, 33 bp, Homo sapien
catgtagtgctccttatcttgtttgcccttttc

SEQ ID NO: 106545 - DNA, 33 bp, Homo sapien
tactcacaacccaggccatacaatcaacaaaga

SEQ ID NO: 106546 - DNA, 33 bp, Homo sapien
tactcacaacccaggctatacaatcaacaaaga

SEQ ID NO: 106547 - DNA, 33 bp, Homo sapien
tgtgagtactcttttacatttattcacacagaa

SEQ ID NO: 106548 - DNA, 33 bp, Homo sapien
tgtgagtactcttttatatttattcacacagaa

SEQ ID NO: 106549 - DNA, 33 bp, Homo sapien
agttgtcattaatgaacctgtcatagccatcaa

SEQ ID NO: 106550 - DNA, 33 bp, Homo sapien
agttgtcattaatgaagctgtcatagccatcaa

SEQ ID NO: 106551 - DNA, 33 bp, Homo sapien
aatgacaactgtggtaaaagaaaatgaagatac

SEQ ID NO: 106552 - DNA, 33 bp, Homo sapien
aatgacaactgtggtagaagaaaatgaagatac

SEQ ID NO: 106553 - DNA, 33 bp, Homo sapien
tactaaacatcaaagaactcaggagagaaactt

SEQ ID NO: 106554 - DNA, 33 bp, Homo sapien
tactaaacatcaaagagctcaggagagaaactt

SEQ ID NO: 106555 - DNA, 33 bp, Homo sapien; identical to SEQ ID NO: 106553

SEQ ID NO: 106556 - DNA, 33 bp, Homo sapien; identical to SEQ ID NO: 106554

SEQ ID NO: 106557 - DNA, 33 bp, Homo sapien
aaatgttcagtttgcaacttacaatacaagcgc

SEQ ID NO: 106558 - DNA, 33 bp, Homo sapien
aaatgttcagtttgcagcttacaatacaagcgc

SEQ ID NO: 106559 - DNA, 33 bp, Homo sapien
ttttcgtttgtttcaaccttggtgaatctgaca

SEQ ID NO: 106560 - DNA, 33 bp, Homo sapien
ttttcgtttgtttcaatcttggtgaatctgaca

SEQ ID NO: 106561 - DNA, 33 bp, Homo sapien
ccattctggtgaggccgaaacagaaatgaggac

SEQ ID NO: 106562 - DNA, 33 bp, Homo sapien
ccattctggtgaggcctaaacagaaatgaggac

SEQ ID NO: 106563 - DNA, 33 bp, Homo sapien
gcatgaacaaaaagaaaatcagccttcccacaa

SEQ ID NO: 106564 - DNA, 33 bp, Homo sapien
gcatgaacaaaaagaacatcagccttcccacaa

SEQ ID NO: 106565 - DNA, 33 bp, Homo sapien
atcattatggggcacaatgaaagtatgtaagat

SEQ ID NO: 106566 - DNA, 33 bp, Homo sapien
atcattatggggcacagtgaaagtatgtaagat

SEQ ID NO: 106567 - DNA, 33 bp, Homo sapien
ataaatgagttcatcaagatcacagaatacaag

SEQ ID NO: 106568 - DNA, 33 bp, Homo sapien
ataaatgagttcatcaggatcacagaatacaag

SEQ ID NO: 106569 - DNA, 33 bp, Homo sapien
ttcccgaattcccataatacagaggtctttccc

SEQ ID NO: 106570 - DNA, 33 bp, Homo sapien
ttcccgaattcccatagtacagaggtctttccc

SEQ ID NO: 106571 - DNA, 33 bp, Homo sapien
ataaaaagtcataaaggctgtctcataaatttg

SEQ ID NO: 106572 - DNA, 33 bp, Homo sapien
ataaaaagtcataaagtctgtctcataaatttg

SEQ ID NO: 106573 - DNA, 33 bp, Homo sapien
aaaatcactctagaaaggcttttcaactaggct

SEQ ID NO: 106574 - DNA, 33 bp, Homo sapien
aaaatcactctagaaatgcttttcaactaggct

SEQ ID NO: 106575 - DNA, 33 bp, Homo sapien
ttgggaaaagaccaaacgggtagctctgtgtca

SEQ ID NO: 106576 - DNA, 33 bp, Homo sapien
ttgggaaaagaccaaatgggtagctctgtgtca

SEQ ID NO: 106577 - DNA, 33 bp, Homo sapien
agagaacctgaggaaaatgtgacaaccagtcat

SEQ ID NO: 106578 - DNA, 33 bp, Homo sapien
agagaacctgaggaaagtgtgacaaccagtcat

SEQ ID NO: 106579 - DNA, 33 bp, Homo sapien
ctctccatccttcctacctgaactaaaatatca

SEQ ID NO: 106580 - DNA, 33 bp, Homo sapien
ctctccatccttcctatctgaactaaaatatca

SEQ ID NO: 106581 - DNA, 33 bp, Homo sapien
gctcaccaagcttcacaccacctagggagctgg

SEQ ID NO: 106582 - DNA, 33 bp, Homo sapien
gctcaccaagcttcacgccacctagggagctgg

SEQ ID NO: 106583 - DNA, 33 bp, Homo sapien
gagataggtgccaacaaatcggaaagcttatta

SEQ ID NO: 106584 - DNA, 33 bp, Homo sapien
gagataggtgccaacagatcggaaagcttatta

SEQ ID NO: 106585 - DNA, 33 bp, Homo sapien
caatataggtcgagtaacccttgtctgaaatgc

SEQ ID NO: 106586 - DNA, 33 bp, Homo sapien
caatataggtcgagtatcccttgtctgaaatgc

SEQ ID NO: 106587 - DNA, 33 bp, Homo sapien
tagcaagattataggacccaaggccacatacaa

SEQ ID NO: 106588 - DNA, 33 bp, Homo sapien
tagcaagattataggatccaaggccacatacaa

SEQ ID NO: 106589 - DNA, 33 bp, Homo sapien
gagggctcaagcctataagactgcctacaacct

SEQ ID NO: 106590 - DNA, 33 bp, Homo sapien
gagggctcaagcctatgagactgcctacaacct

SEQ ID NO: 106591 - DNA, 33 bp, Homo sapien
ccataaacatcaacacacaatttactccactgt

SEQ ID NO: 106592 - DNA, 33 bp, Homo sapien
ccataaacatcaacacgcaatttactccactgt

SEQ ID NO: 106593 - DNA, 33 bp, Homo sapien
gctccttaggtttgaaagtgtggattaaacatt

SEQ ID NO: 106594 - DNA, 33 bp, Homo sapien
gctccttaggtttgaacgtgtggattaaacatt

SEQ ID NO: 106595 - DNA, 33 bp, Homo sapien
tggcatgtaattgggaccttccattttggttcc

SEQ ID NO: 106596 - DNA, 33 bp, Homo sapien
tggcatgtaattgggatcttccattttggttcc

SEQ ID NO: 106597 - DNA, 33 bp, Homo sapien
cacacaaatgatctgcccttcttgcttcttgcc

SEQ ID NO: 106598 - DNA, 33 bp, Homo sapien
cacacaaatgatctgctcttcttgcttcttgcc

SEQ ID NO: 106599 - DNA, 33 bp, Homo sapien
tactgttttaggataacaactctaggatcaaaa

SEQ ID NO: 106600 - DNA, 33 bp, Homo sapien
tactgttttaggataataactctaggatcaaaa

SEQ ID NO: 106601 - DNA, 33 bp, Homo sapien
tactttcactgatacaacttctttggtggtaat

SEQ ID NO: 106602 - DNA, 33 bp, Homo sapien
tactttcactgatacagcttctttggtggtaat

SEQ ID NO: 106603 - DNA, 33 bp, Homo sapien
gaggatacagcaagaacgtgtttgtctacaagc

SEQ ID NO: 106604 - DNA, 33 bp, Homo sapien
gaggatacagcaagaaggtgtttgtctacaagc

SEQ ID NO: 106605 - DNA, 33 bp, Homo sapien
ccacaagtactattccaaaagagtctgaaccaa

SEQ ID NO: 106606 - DNA, 33 bp, Homo sapien
ccacaagtactattccgaaagagtctgaaccaa

SEQ ID NO: 106607 - DNA, 33 bp, Homo sapien
aacaagaactggttgcacatgaaacacccatcc

SEQ ID NO: 106608 - DNA, 33 bp, Homo sapien
aacaagaactggttgcgcatgaaacacccatcc

SEQ ID NO: 106609 - DNA, 33 bp, Homo sapien
ggagtgttcttagaaaaagaaatggtccacagt

SEQ ID NO: 106610 - DNA, 33 bp, Homo sapien
ggagtgttcttagaaatagaaatggtccacagt

SEQ ID NO: 106611 - DNA, 33 bp, Homo sapien
ctcttaaaaaaaaacccctgcttgcttgaagca

SEQ ID NO: 106612 - DNA, 33 bp, Homo sapien
ctcttaaaaaaaaaccgctgcttgcttgaagca

SEQ ID NO: 106613 - DNA, 33 bp, Homo sapien
gaccagtgaatggacccatttccagtaaacttt

SEQ ID NO: 106614 - DNA, 33 bp, Homo sapien
gaccagtgaatggacctatttccagtaaacttt

SEQ ID NO: 106615 - DNA, 33 bp, Homo sapien
tcaagatggagaaggaaaaattatccctggatg

SEQ ID NO: 106616 - DNA, 33 bp, Homo sapien
tcaagatggagaaggagaaattatccctggatg

SEQ ID NO: 106617 - DNA, 33 bp, Homo sapien
tctgcaatctggctgcaacttctcaaactccac

SEQ ID NO: 106618 - DNA, 33 bp, Homo sapien
tctgcaatctggctgcgacttctcaaactccac

SEQ ID NO: 106619 - DNA, 33 bp, Homo sapien
agttgacttgagtttaaatggcaagccgtagtt

SEQ ID NO: 106620 - DNA, 33 bp, Homo sapien
agttgacttgagtttacatggcaagccgtagtt

SEQ ID NO: 106621 - DNA, 33 bp, Homo sapien
agcgttttcatgataacgagagaaaagacatga

SEQ ID NO: 106622 - DNA, 33 bp, Homo sapien
agcgttttcatgataatgagagaaaagacatga

SEQ ID NO: 106623 - DNA, 33 bp, Homo sapien
aacagattctcagtaaaaatagacaaatgagtc

SEQ ID NO: 106624 - DNA, 33 bp, Homo sapien
aacagattctcagtaagaatagacaaatgagtc

SEQ ID NO: 106625 - DNA, 33 bp, Homo sapien
ttaaaatacacatcaaagtacagaaaacagcca

SEQ ID NO: 106626 - DNA, 33 bp, Homo sapien
ttaaaatacacatcaaggtacagaaaacagcca

SEQ ID NO: 106627 - DNA, 33 bp, Homo sapien
agatgttcattggttccattggtccgtgctcca

SEQ ID NO: 106628 - DNA, 33 bp, Homo sapien
agatgttcattggttcgattggtccgtgctcca

SEQ ID NO: 106629 - DNA, 33 bp, Homo sapien
tttgtgaactgaccttcccattcctgagttcct

SEQ ID NO: 106630 - DNA, 33 bp, Homo sapien
tttgtgaactgacctttccattcctgagttcct

SEQ ID NO: 106631 - DNA, 33 bp, Homo sapien
taaaggctgccattcactcaatgatactgcact

SEQ ID NO: 106632 - DNA, 33 bp, Homo sapien
taaaggctgccattcattcaatgatactgcact

SEQ ID NO: 106633 - DNA, 33 bp, Homo sapien
ccactaacaaggtcccaagaataccgagagtga

SEQ ID NO: 106634 - DNA, 33 bp, Homo sapien
ccactaacaaggtcccgagaataccgagagtga

SEQ ID NO: 106635 - DNA, 33 bp, Homo sapien
ttgatcagtgttgtaacttaaagaaaattgaat

SEQ ID NO: 106636 - DNA, 33 bp, Homo sapien
ttgatcagtgttgtaagttaaagaaaattgaat

SEQ ID NO: 106637 - DNA, 33 bp, Homo sapien
atcccaaggaacctgcaagaccctcctagaaac

SEQ ID NO: 106638 - DNA, 33 bp, Homo sapien
atcccaaggaacctgcgagaccctcctagaaac

SEQ ID NO: 106639 - DNA, 33 bp, Homo sapien
agctcgaccgtacacaactttcacgtgcaaagc

SEQ ID NO: 106640 - DNA, 33 bp, Homo sapien
agctcgaccgtacacacctttcacgtgcaaagc

SEQ ID NO: 106641 - DNA, 33 bp, Homo sapien
cggtcgagctgtttccaatctttaggaactggc

SEQ ID NO: 106642 - DNA, 33 bp, Homo sapien
cggtcgagctgtttccgatctttaggaactggc

SEQ ID NO: 106643 - DNA, 33 bp, Homo sapien
tctgtgagcgcagaaccatgcctgccttattca

SEQ ID NO: 106644 - DNA, 33 bp, Homo sapien
tctgtgagcgcagaacgatgcctgccttattca

SEQ ID NO: 106645 - DNA, 33 bp, Homo sapien
gagacagtgattttaaacagggtagtcggggta

SEQ ID NO: 106646 - DNA, 33 bp, Homo sapien
gagacagtgattttaatcagggtagtcggggta

SEQ ID NO: 106647 - DNA, 33 bp, Homo sapien
tcaaaacagtattaacaggaaacctgtctctca

SEQ ID NO: 106648 - DNA, 33 bp, Homo sapien
tcaaaacagtattaaccggaaacctgtctctca

SEQ ID NO: 106649 - DNA, 33 bp, Homo sapien
agagaatttgttggacaaggaagttgagctaag

SEQ ID NO: 106650 - DNA, 33 bp, Homo sapien
agagaatttgttggaccaggaagttgagctaag

SEQ ID NO: 106651 - DNA, 33 bp, Homo sapien
cacccggccggctggtaaatttcttagctcaac

SEQ ID NO: 106652 - DNA, 33 bp, Homo sapien
cacccggccggctggtgaatttcttagctcaac

SEQ ID NO: 106653 - DNA, 33 bp, Homo sapien
tttagagcaaactaaaagggtaaccaccacaga

SEQ ID NO: 106654 - DNA, 33 bp, Homo sapien
tttagagcaaactaaaggggtaaccaccacaga

SEQ ID NO: 106655 - DNA, 33 bp, Homo sapien
gggaaaacatccactagaccttttcagaattta

SEQ ID NO: 106656 - DNA, 33 bp, Homo sapien
gggaaaacatccactataccttttcagaattta

SEQ ID NO: 106657 - DNA, 33 bp, Homo sapien
ggatagaggatgcagcaatgctaaaggcagcca

SEQ ID NO: 106658 - DNA, 33 bp, Homo sapien
ggatagaggatgcagcgatgctaaaggcagcca

SEQ ID NO: 106659 - DNA, 33 bp, Homo sapien
tttagattctacagtcactggctttgtttagga

SEQ ID NO: 106660 - DNA, 33 bp, Homo sapien
tttagattctacagtcgctggctttgtttagga

SEQ ID NO: 106661 - DNA, 33 bp, Homo sapien
ataaattaagtccggcactcttgctcatcccaa

SEQ ID NO: 106662 - DNA, 33 bp, Homo sapien
ataaattaagtccggcgctcttgctcatcccaa

SEQ ID NO: 106663 - DNA, 33 bp, Homo sapien
cagatctaacaaaagcaaaaggaagcaactcat

SEQ ID NO: 106664 - DNA, 33 bp, Homo sapien
cagatctaacaaaagcgaaaggaagcaactcat

SEQ ID NO: 106665 - DNA, 33 bp, Homo sapien
aactcacctggaaaacagaatgcctaggaattt

SEQ ID NO: 106666 - DNA, 33 bp, Homo sapien
aactcacctggaaaacggaatgcctaggaattt

SEQ ID NO: 106667 - DNA, 33 bp, Homo sapien
ggaccgaaatacttcacagcttttccacggaca

SEQ ID NO: 106668 - DNA, 33 bp, Homo sapien
ggaccgaaatacttcagagcttttccacggaca

SEQ ID NO: 106669 - DNA, 33 bp, Homo sapien
caacttcactttaacactgactttttattttaa

SEQ ID NO: 106670 - DNA, 33 bp, Homo sapien
caacttcactttaacattgactttttattttaa

SEQ ID NO: 106671 - DNA, 33 bp, Homo sapien
aaattaatcctttgtaagatactcgtgaccttt

SEQ ID NO: 106672 - DNA, 33 bp, Homo sapien
aaattaatcctttgtaggatactcgtgaccttt

SEQ ID NO: 106673 - DNA, 33 bp, Homo sapien
gagaaactaaacaagcagaattttatatttatt

SEQ ID NO: 106674 - DNA, 33 bp, Homo sapien
gagaaactaaacaagctgaattttatatttatt

SEQ ID NO: 106675 - DNA, 33 bp, Homo sapien
actcttctgcactgagaatgacttttgtttcta

SEQ ID NO: 106676 - DNA, 33 bp, Homo sapien
actcttctgcactgagcatgacttttgtttcta

SEQ ID NO: 106677 - DNA, 33 bp, Homo sapien
agctctcggcattctcagaactcacaaaggata

SEQ ID NO: 106678 - DNA, 33 bp, Homo sapien
agctctcggcattctcggaactcacaaaggata

SEQ ID NO: 106679 - DNA, 33 bp, Homo sapien
tcctggacctgtccacacttacttttgaaacaa

SEQ ID NO: 106680 - DNA, 33 bp, Homo sapien
tcctggacctgtccacgcttacttttgaaacaa

SEQ ID NO: 106681 - DNA, 33 bp, Homo sapien
attctgaaatataaaaatcttaatatggaccct

SEQ ID NO: 106682 - DNA, 33 bp, Homo sapien
attctgaaatataaaagtcttaatatggaccct

SEQ ID NO: 106683 - DNA, 33 bp, Homo sapien
gccaccagccgcatgaagttttctgtaaaatcc

SEQ ID NO: 106684 - DNA, 33 bp, Homo sapien
gccaccagccgcatgacgttttctgtaaaatcc

SEQ ID NO: 106685 - DNA, 33 bp, Homo sapien
cagggacagacgggggaaaaattgtgtctacta

SEQ ID NO: 106686 - DNA, 33 bp, Homo sapien
cagggacagacggggggaaaattgtgtctacta

SEQ ID NO: 106687 - DNA, 33 bp, Homo sapien
gaaaagtagattaacaatagcatttggaacaaa

SEQ ID NO: 106688 - DNA, 33 bp, Homo sapien
gaaaagtagattaacagtagcatttggaacaaa

SEQ ID NO: 106689 - DNA, 33 bp, Homo sapien
ccttgagctcctctcgaccttgcttgggccttg

SEQ ID NO: 106690 - DNA, 33 bp, Homo sapien
ccttgagctcctctcggccttgcttgggccttg

SEQ ID NO: 106691 - DNA, 33 bp, Homo sapien
agctcactgctggacaataaagtggtatgtttc

SEQ ID NO: 106692 - DNA, 33 bp, Homo sapien
agctcactgctggacactaaagtggtatgtttc

SEQ ID NO: 106693 - DNA, 33 bp, Homo sapien
atcccccaacgtttcactcatatctccatttag

SEQ ID NO: 106694 - DNA, 33 bp, Homo sapien
atcccccaacgtttcattcatatctccatttag

SEQ ID NO: 106695 - DNA, 33 bp, Homo sapien
gcttcttgaaggttggaatcggaggctcatcca

SEQ ID NO: 106696 - DNA, 33 bp, Homo sapien
gcttcttgaaggttgggatcggaggctcatcca

SEQ ID NO: 106697 - DNA, 33 bp, Homo sapien
agccaaaagcaactcaaaatttgaactgaactt

SEQ ID NO: 106698 - DNA, 33 bp, Homo sapien
agccaaaagcaactcagaatttgaactgaactt

SEQ ID NO: 106699 - DNA, 33 bp, Homo sapien
ccactgcccgtctggacaggaagtacctggagg

SEQ ID NO: 106700 - DNA, 33 bp, Homo sapien
ccactgcccgtctggataggaagtacctggagg

SEQ ID NO: 106701 - DNA, 33 bp, Homo sapien
agacctagagaggttacgtgatcctaaacaact

SEQ ID NO: 106702 - DNA, 33 bp, Homo sapien
agacctagagaggttatgtgatcctaaacaact

SEQ ID NO: 106703 - DNA, 33 bp, Homo sapien
ccttcatagcaccaaccgggattcttttaaatt

SEQ ID NO: 106704 - DNA, 33 bp, Homo sapien
ccttcatagcaccaactgggattcttttaaatt

SEQ ID NO: 106705 - DNA, 33 bp, Homo sapien
agaccatgccttttgtaaatgtggcatcccctt

SEQ ID NO: 106706 - DNA, 33 bp, Homo sapien
agaccatgccttttgttaatgtggcatcccctt

SEQ ID NO: 106707 - DNA, 33 bp, Homo sapien
caagcatcgaggatagacacaggctactggaga

SEQ ID NO: 106708 - DNA, 33 bp, Homo sapien
caagcatcgaggataggcacaggctactggaga

SEQ ID NO: 106709 - DNA, 33 bp, Homo sapien
ggcttttctggaatatcaggttcggtcctcaga

SEQ ID NO: 106710 - DNA, 33 bp, Homo sapien
ggcttttctggaatatgaggttcggtcctcaga

SEQ ID NO: 106711 - DNA, 33 bp, Homo sapien
ctcagttctagtccaaaatgaaaagcatatcct

SEQ ID NO: 106712 - DNA, 33 bp, Homo sapien
ctcagttctagtccaagatgaaaagcatatcct

SEQ ID NO: 106713 - DNA, 33 bp, Homo sapien
gacttatatatgttagcaaaaataaacactttg

SEQ ID NO: 106714 - DNA, 33 bp, Homo sapien
gacttatatatgttaggaaaaataaacactttg

SEQ ID NO: 106715 - DNA, 33 bp, Homo sapien
aatgtgtagaccttcaagtgctttttaattatg

SEQ ID NO: 106716 - DNA, 33 bp, Homo sapien
aatgtgtagaccttcatgtgctttttaattatg

SEQ ID NO: 106717 - DNA, 33 bp, Homo sapien
tgtctccacattgtgacattctgctggaacctg

SEQ ID NO: 106718 - DNA, 33 bp, Homo sapien
tgtctccacattgtgatattctgctggaacctg

SEQ ID NO: 106719 - DNA, 33 bp, Homo sapien
cataataaaaacagaacctgaatctggagccct

SEQ ID NO: 106720 - DNA, 33 bp, Homo sapien
cataataaaaacagaatctgaatctggagccct

SEQ ID NO: 106721 - DNA, 33 bp, Homo sapien
cctaacaggaggagcacgggaacaaggtgtgac

SEQ ID NO: 106722 - DNA, 33 bp, Homo sapien
cctaacaggaggagcatgggaacaaggtgtgac

SEQ ID NO: 106723 - DNA, 33 bp, Homo sapien
tgaggctactttcagccctgggatttcaaactc

SEQ ID NO: 106724 - DNA, 33 bp, Homo sapien
tgaggctactttcagctctgggatttcaaactc

SEQ ID NO: 106725 - DNA, 33 bp, Homo sapien
ataactcactgtgtaaagctgttttgtgcttgc

SEQ ID NO: 106726 - DNA, 33 bp, Homo sapien
ataactcactgtgtaaggctgttttgtgcttgc

SEQ ID NO: 106727 - DNA, 33 bp, Homo sapien
tgaggccctctgggaaactgaaccagacccaca

SEQ ID NO: 106728 - DNA, 33 bp, Homo sapien
tgaggccctctgggaagctgaaccagacccaca

SEQ ID NO: 106729 - DNA, 33 bp, Homo sapien
gatttaggtctgaatcaccatttagtgctgggg

SEQ ID NO: 106730 - DNA, 33 bp, Homo sapien
gatttaggtctgaatcgccatttagtgctgggg

SEQ ID NO: 106731 - DNA, 33 bp, Homo sapien
ggtctcaaggaaaacacgaaaggcaaggatggt

SEQ ID NO: 106732 - DNA, 33 bp, Homo sapien
ggtctcaaggaaaacatgaaaggcaaggatggt

SEQ ID NO: 106733 - DNA, 33 bp, Homo sapien
catttcctgtgggagacagagttgcaggcattc

SEQ ID NO: 106734 - DNA, 33 bp, Homo sapien
catttcctgtgggagagagagttgcaggcattc

SEQ ID NO: 106735 - DNA, 33 bp, Homo sapien
ttgttgttattctttacatgttttttctcatta

SEQ ID NO: 106736 - DNA, 33 bp, Homo sapien
ttgttgttattctttatatgttttttctcatta

SEQ ID NO: 106737 - DNA, 33 bp, Homo sapien
tcatattcctgaatataaaaatgactgttgtga

SEQ ID NO: 106738 - DNA, 33 bp, Homo sapien
tcatattcctgaatatgaaaatgactgttgtga

SEQ ID NO: 106739 - DNA, 33 bp, Homo sapien
tgaaaacaccattctccctcttctgcttgtaca

SEQ ID NO: 106740 - DNA, 33 bp, Homo sapien
tgaaaacaccattctctctcttctgcttgtaca

SEQ ID NO: 106741 - DNA, 33 bp, Homo sapien
tctaacatagctcgtcccttgaattgtcactga

SEQ ID NO: 106742 - DNA, 33 bp, Homo sapien
tctaacatagctcgtctcttgaattgtcactga

SEQ ID NO: 106743 - DNA, 33 bp, Homo sapien
atataggatgaaatacaccaagatttgtccaaa

SEQ ID NO: 106744 - DNA, 33 bp, Homo sapien
atataggatgaaatactccaagatttgtccaaa

SEQ ID NO: 106745 - DNA, 33 bp, Homo sapien
caagagtgaagggctagagcagaaatgagagga

SEQ ID NO: 106746 - DNA, 33 bp, Homo sapien
caagagtgaagggctatagcagaaatgagagga

SEQ ID NO: 106747 - DNA, 33 bp, Homo sapien
tccggcagtttatagacagcagatccctaaaag

SEQ ID NO: 106748 - DNA, 33 bp, Homo sapien
tccggcagtttatagagagcagatccctaaaag

SEQ ID NO: 106749 - DNA, 33 bp, Homo sapien
tcaacagacttatctcaagcagtcttgtcttcc

SEQ ID NO: 106750 - DNA, 33 bp, Homo sapien
tcaacagacttatctcgagcagtcttgtcttcc

SEQ ID NO: 106751 - DNA, 33 bp, Homo sapien
gtgagagcctgcttccacattcatagacagcac

SEQ ID NO: 106752 - DNA, 33 bp, Homo sapien
gtgagagcctgcttccgcattcatagacagcac

SEQ ID NO: 106753 - DNA, 33 bp, Homo sapien
tcatcagacagatgccactccgtctgcaggaca

SEQ ID NO: 106754 - DNA, 33 bp, Homo sapien
tcatcagacagatgccgctccgtctgcaggaca

SEQ ID NO: 106755 - DNA, 33 bp, Homo sapien
tattgtggagcctcacaatgccacagaccctga

SEQ ID NO: 106756 - DNA, 33 bp, Homo sapien
tattgtggagcctcacgatgccacagaccctga

SEQ ID NO: 106757 - DNA, 33 bp, Homo sapien
actggagccacaatcccggagtgcacatcacag

SEQ ID NO: 106758 - DNA, 33 bp, Homo sapien
actggagccacaatcctggagtgcacatcacag

SEQ ID NO: 106759 - DNA, 33 bp, Homo sapien
agtctagcgttatcgacgcacagagacctctga

SEQ ID NO: 106760 - DNA, 33 bp, Homo sapien
agtctagcgttatcgatgcacagagacctctga

SEQ ID NO: 106761 - DNA, 33 bp, Homo sapien
tgctggactctgaagcaaaactgtgccaatgat

SEQ ID NO: 106762 - DNA, 33 bp, Homo sapien
tgctggactctgaagcgaaactgtgccaatgat

SEQ ID NO: 106763 - DNA, 33 bp, Homo sapien
cgctgatggttcagcaagattaacaaggtattg

SEQ ID NO: 106764 - DNA, 33 bp, Homo sapien
cgctgatggttcagcatgattaacaaggtattg

SEQ ID NO: 106765 - DNA, 33 bp, Homo sapien
cttatgaaaaacctgcagagtcaaagttattca

SEQ ID NO: 106766 - DNA, 33 bp, Homo sapien
cttatgaaaaacctgcggagtcaaagttattca

SEQ ID NO: 106767 - DNA, 33 bp, Homo sapien
agaaagagaaagtagacagtgtgagattagagg

SEQ ID NO: 106768 - DNA, 33 bp, Homo sapien
agaaagagaaagtagagagtgtgagattagagg

SEQ ID NO: 106769 - DNA, 33 bp, Homo sapien
caggttgcttattccaatgctttgtggaccatc

SEQ ID NO: 106770 - DNA, 33 bp, Homo sapien
caggttgcttattccagtgctttgtggaccatc

SEQ ID NO: 106771 - DNA, 33 bp, Homo sapien
acagtgccatggacacacagatgaaagagcagt

SEQ ID NO: 106772 - DNA, 33 bp, Homo sapien
acagtgccatggacacgcagatgaaagagcagt

SEQ ID NO: 106773 - DNA, 33 bp, Homo sapien
acatgtagagcttcccacataactgccactaac

SEQ ID NO: 106774 - DNA, 33 bp, Homo sapien
acatgtagagcttcccgcataactgccactaac

SEQ ID NO: 106775 - DNA, 33 bp, Homo sapien
aaaggctctgtgacaaccatgtgctaacaagag

SEQ ID NO: 106776 - DNA, 33 bp, Homo sapien
aaaggctctgtgacaatcatgtgctaacaagag

SEQ ID NO: 106777 - DNA, 33 bp, Homo sapien
tgccctccagtcttaaaggaccaagcatggatt

SEQ ID NO: 106778 - DNA, 33 bp, Homo sapien
tgccctccagtcttaagggaccaagcatggatt

SEQ ID NO: 106779 - DNA, 33 bp, Homo sapien
cccccaggcctgtgcacgaggacaaagagcaac

SEQ ID NO: 106780 - DNA, 33 bp, Homo sapien
cccccaggcctgtgcatgaggacaaagagcaac

SEQ ID NO: 106781 - DNA, 33 bp, Homo sapien
catctagacaaggagagtcaaaaagagtcccca

SEQ ID NO: 106782 - DNA, 33 bp, Homo sapien
catctagacaaggagattcaaaaagagtcccca

SEQ ID NO: 106783 - DNA, 33 bp, Homo sapien
tcatctctgcactcccacctgctgtctccaaac

SEQ ID NO: 106784 - DNA, 33 bp, Homo sapien
tcatctctgcactcccgcctgctgtctccaaac

SEQ ID NO: 106785 - DNA, 33 bp, Homo sapien
tttggaagctcgtagacggcaggctttgtagga

SEQ ID NO: 106786 - DNA, 33 bp, Homo sapien
tttggaagctcgtagatggcaggctttgtagga

SEQ ID NO: 106787 - DNA, 33 bp, Homo sapien
ttttaactttcccatccaataaatttaccaatt

SEQ ID NO: 106788 - DNA, 33 bp, Homo sapien
ttttaactttcccatctaataaatttaccaatt

SEQ ID NO: 106789 - DNA, 33 bp, Homo sapien
ctggggtgaatcccaccagaaaccaattggcac

SEQ ID NO: 106790 - DNA, 33 bp, Homo sapien
ctggggtgaatcccacgagaaaccaattggcac

SEQ ID NO: 106791 - DNA, 33 bp, Homo sapien
acgtttggttatttgccctgaggaaggaagccg

SEQ ID NO: 106792 - DNA, 33 bp, Homo sapien
acgtttggttatttgctctgaggaaggaagccg

SEQ ID NO: 106793 - DNA, 33 bp, Homo sapien
agtgcacaggccttgcagagagtcacgggcagc

SEQ ID NO: 106794 - DNA, 33 bp, Homo sapien
agtgcacaggccttgcggagagtcacgggcagc

SEQ ID NO: 106795 - DNA, 33 bp, Homo sapien
ttgcgtcactatatagaaatgcttgaggctggg

SEQ ID NO: 106796 - DNA, 33 bp, Homo sapien
ttgcgtcactatataggaatgcttgaggctggg

SEQ ID NO: 106797 - DNA, 33 bp, Homo sapien
gcttcccgtctcctcacgtggtgccttcctcca

SEQ ID NO: 106798 - DNA, 33 bp, Homo sapien
gcttcccgtctcctcatgtggtgccttcctcca

SEQ ID NO: 106799 - DNA, 33 bp, Homo sapien
ccctctctaaaacctgaaagtccaaatccttcc

SEQ ID NO: 106800 - DNA, 33 bp, Homo sapien
ccctctctaaaacctggaagtccaaatccttcc

SEQ ID NO: 106801 - DNA, 33 bp, Homo sapien
cttaagtacattaacactgtggggcaaccatca

SEQ ID NO: 106802 - DNA, 33 bp, Homo sapien
cttaagtacattaacattgtggggcaaccatca

SEQ ID NO: 106803 - DNA, 33 bp, Homo sapien
aggccttctggtcaaccgtggagcctgaaacca

SEQ ID NO: 106804 - DNA, 33 bp, Homo sapien
aggccttctggtcaactgtggagcctgaaacca

SEQ ID NO: 106805 - DNA, 33 bp, Homo sapien
tactccaggatataacactgcagcaccaatgat

SEQ ID NO: 106806 - DNA, 33 bp, Homo sapien
tactccaggatataacgctgcagcaccaatgat

SEQ ID NO: 106807 - DNA, 33 bp, Homo sapien
acgctacacaggaaaacgagcaggaagttacac

SEQ ID NO: 106808 - DNA, 33 bp, Homo sapien
acgctacacaggaaaatgagcaggaagttacac

SEQ ID NO: 106809 - DNA, 33 bp, Homo sapien
agctgagagtcaacccaaacttgttaatttaat

SEQ ID NO: 106810 - DNA, 33 bp, Homo sapien
agctgagagtcaaccctaacttgttaatttaat

SEQ ID NO: 106811 - DNA, 33 bp, Homo sapien
caaaattttgatgaaaaacaactggaagtatgc

SEQ ID NO: 106812 - DNA, 33 bp, Homo sapien
caaaattttgatgaaacacaactggaagtatgc

SEQ ID NO: 106813 - DNA, 33 bp, Homo sapien
ctttttgtaatactcaaggtcaaggtataactt

SEQ ID NO: 106814 - DNA, 33 bp, Homo sapien
ctttttgtaatactcagggtcaaggtataactt

SEQ ID NO: 106815 - DNA, 33 bp, Homo sapien
taattcccttggctagcataatacagtgatgta

SEQ ID NO: 106816 - DNA, 33 bp, Homo sapien
taattcccttggctaggataatacagtgatgta

SEQ ID NO: 106817 - DNA, 33 bp, Homo sapien
agagcttgtattacacaaaaattataaggcata

SEQ ID NO: 106818 - DNA, 33 bp, Homo sapien
agagcttgtattacacgaaaattataaggcata

SEQ ID NO: 106819 - DNA, 33 bp, Homo sapien
ctccacagtcaggggaaggtcccttcattggca

SEQ ID NO: 106820 - DNA, 33 bp, Homo sapien
ctccacagtcaggggagggtcccttcattggca

SEQ ID NO: 106821 - DNA, 33 bp, Homo sapien
gctgccaatttaccccaaacagcggacttccag

SEQ ID NO: 106822 - DNA, 33 bp, Homo sapien
gctgccaatttaccccgaacagcggacttccag

SEQ ID NO: 106823 - DNA, 33 bp, Homo sapien
ttttaatgttcaaaaacagttctaagcttcacg

SEQ ID NO: 106824 - DNA, 33 bp, Homo sapien
ttttaatgttcaaaaatagttctaagcttcacg

SEQ ID NO: 106825 - DNA, 33 bp, Homo sapien
agaaaaatagcagtcacgtggtaaaagtgttaa

SEQ ID NO: 106826 - DNA, 33 bp, Homo sapien
agaaaaatagcagtcatgtggtaaaagtgttaa

SEQ ID NO: 106827 - DNA, 33 bp, Homo sapien
taaaacttttggcaaagatttgtcatctatcct

SEQ ID NO: 106828 - DNA, 33 bp, Homo sapien
taaaacttttggcaaatatttgtcatctatcct

SEQ ID NO: 106829 - DNA, 33 bp, Homo sapien
acatttttctcagaccacctcctctatcatcca

SEQ ID NO: 106830 - DNA, 33 bp, Homo sapien
acatttttctcagacctcctcctctatcatcca

SEQ ID NO: 106831 - DNA, 33 bp, Homo sapien
ggctgtgaaaagcaaacggattagcacacatat

SEQ ID NO: 106832 - DNA, 33 bp, Homo sapien
ggctgtgaaaagcaaatggattagcacacatat

SEQ ID NO: 106833 - DNA, 33 bp, Homo sapien
ctattttttgaatctcacatagcctttcaatta

SEQ ID NO: 106834 - DNA, 33 bp, Homo sapien
ctattttttgaatctctcatagcctttcaatta

SEQ ID NO: 106835 - DNA, 33 bp, Homo sapien
aagcaacttttcaaaccctccctccatggaaag

SEQ ID NO: 106836 - DNA, 33 bp, Homo sapien
aagcaacttttcaaactctccctccatggaaag

SEQ ID NO: 106837 - DNA, 33 bp, Homo sapien
taggccagtgcttctccgacttcactgtgatgc

SEQ ID NO: 106838 - DNA, 33 bp, Homo sapien
taggccagtgcttctctgacttcactgtgatgc

SEQ ID NO: 106839 - DNA, 33 bp, Homo sapien
tggactctgagttaaacattcgtgttctgaaca

SEQ ID NO: 106840 - DNA, 33 bp, Homo sapien
tggactctgagttaaatattcgtgttctgaaca

SEQ ID NO: 106841 - DNA, 33 bp, Homo sapien
ataaaagatctgtaaaatatagtctttgagagg

SEQ ID NO: 106842 - DNA, 33 bp, Homo sapien
ataaaagatctgtaaagtatagtctttgagagg

SEQ ID NO: 106843 - DNA, 33 bp, Homo sapien
actttaccattctgcaaatatttagtgagcggc

SEQ ID NO: 106844 - DNA, 33 bp, Homo sapien
actttaccattctgcacatatttagtgagcggc

SEQ ID NO: 106845 - DNA, 33 bp, Homo sapien
ctctccctttcaatcaaaagctagaaatgacta

SEQ ID NO: 106846 - DNA, 33 bp, Homo sapien
ctctccctttcaatcacaagctagaaatgacta

SEQ ID NO: 106847 - DNA, 33 bp, Homo sapien
gtttgtagcaatcccacgtcagacaagtctatg

SEQ ID NO: 106848 - DNA, 33 bp, Homo sapien
gtttgtagcaatcccatgtcagacaagtctatg

SEQ ID NO: 106849 - DNA, 33 bp, Homo sapien
tggctcaaacgggttcacaagaccaaattgtga

SEQ ID NO: 106850 - DNA, 33 bp, Homo sapien
tggctcaaacgggttcgcaagaccaaattgtga

SEQ ID NO: 106851 - DNA, 33 bp, Homo sapien
ccgtttgagccagttccaagataccactggctg

SEQ ID NO: 106852 - DNA, 33 bp, Homo sapien
ccgtttgagccagttctaagataccactggctg

SEQ ID NO: 106853 - DNA, 33 bp, Homo sapien
tgagctcactgaatgaagtcctaaatggtcaat

SEQ ID NO: 106854 - DNA, 33 bp, Homo sapien
tgagctcactgaatgaggtcctaaatggtcaat

SEQ ID NO: 106855 - DNA, 33 bp, Homo sapien
cctcaatcaaactcacaaatcaaaacatgctga

SEQ ID NO: 106856 - DNA, 33 bp, Homo sapien
cctcaatcaaactcaccaatcaaaacatgctga

SEQ ID NO: 106857 - DNA, 33 bp, Homo sapien
attctcatctgctaggaatcctaatttatgatt

SEQ ID NO: 106858 - DNA, 33 bp, Homo sapien
attctcatctgctagggatcctaatttatgatt

SEQ ID NO: 106859 - DNA, 33 bp, Homo sapien
gcatggagatggaaagccctcagtgtgtttgcc

SEQ ID NO: 106860 - DNA, 33 bp, Homo sapien
gcatggagatggaaagtcctcagtgtgtttgcc

SEQ ID NO: 106861 - DNA, 33 bp, Homo sapien
ttcttcacctagaggaacatttagccaaggaaa

SEQ ID NO: 106862 - DNA, 33 bp, Homo sapien
ttcttcacctagaggagcatttagccaaggaaa

SEQ ID NO: 106863 - DNA, 33 bp, Homo sapien
ttgccttagtgtgaaaatgacaggctgttatga

SEQ ID NO: 106864 - DNA, 33 bp, Homo sapien
ttgccttagtgtgaaactgacaggctgttatga

SEQ ID NO: 106865 - DNA, 33 bp, Homo sapien
agagtgataaatagtcacagagcaatgatagga

SEQ ID NO: 106866 - DNA, 33 bp, Homo sapien
agagtgataaatagtcgcagagcaatgatagga

SEQ ID NO: 106867 - DNA, 33 bp, Homo sapien
gctgaatcactgctcacgcttgctgtttccttc

SEQ ID NO: 106868 - DNA, 33 bp, Homo sapien
gctgaatcactgctcatgcttgctgtttccttc

SEQ ID NO: 106869 - DNA, 33 bp, Homo sapien
gaatatggagtccagaacctgaatgtgggccag

SEQ ID NO: 106870 - DNA, 33 bp, Homo sapien
gaatatggagtccagagcctgaatgtgggccag

SEQ ID NO: 106871 - DNA, 33 bp, Homo sapien
tccatatttatgcatacagctgatggttccaag

SEQ ID NO: 106872 - DNA, 33 bp, Homo sapien
tccatatttatgcatatagctgatggttccaag

SEQ ID NO: 106873 - DNA, 33 bp, Homo sapien
gttctagtgcccacataagcatcctctggcaat

SEQ ID NO: 106874 - DNA, 33 bp, Homo sapien
gttctagtgcccacatgagcatcctctggcaat

SEQ ID NO: 106875 - DNA, 33 bp, Homo sapien
cttttccacattaaaaccctcttgtaactgaca

SEQ ID NO: 106876 - DNA, 33 bp, Homo sapien
cttttccacattaaaagcctcttgtaactgaca

SEQ ID NO: 106877 - DNA, 33 bp, Homo sapien
agtgggttggaagactcagcatattcctctaga

SEQ ID NO: 106878 - DNA, 33 bp, Homo sapien
agtgggttggaagacttagcatattcctctaga

SEQ ID NO: 106879 - DNA, 33 bp, Homo sapien
ataattcatcttccaaaccaaggatgtggcaat

SEQ ID NO: 106880 - DNA, 33 bp, Homo sapien
ataattcatcttccaagccaaggatgtggcaat

SEQ ID NO: 106881 - DNA, 33 bp, Homo sapien
catgcaatgctgaccacgtgcagttattgcagc

SEQ ID NO: 106882 - DNA, 33 bp, Homo sapien
catgcaatgctgaccatgtgcagttattgcagc

SEQ ID NO: 106883 - DNA, 33 bp, Homo sapien
gatacaccacagtcaaacttctaaaaactaaag

SEQ ID NO: 106884 - DNA, 33 bp, Homo sapien
gatacaccacagtcaagcttctaaaaactaaag

SEQ ID NO: 106885 - DNA, 33 bp, Homo sapien
caatctgaacaacaacaaggaaacagactgaaa

SEQ ID NO: 106886 - DNA, 33 bp, Homo sapien
caatctgaacaacaacgaggaaacagactgaaa

SEQ ID NO: 106887 - DNA, 33 bp, Homo sapien
cagtgaacacttgtaaaccattttccaattcaa

SEQ ID NO: 106888 - DNA, 33 bp, Homo sapien
cagtgaacacttgtaagccattttccaattcaa

SEQ ID NO: 106889 - DNA, 33 bp, Homo sapien
tggaatctaaatttcaatcacaggtccttacca

SEQ ID NO: 106890 - DNA, 33 bp, Homo sapien
tggaatctaaatttcactcacaggtccttacca

SEQ ID NO: 106891 - DNA, 33 bp, Homo sapien
cccaagcagagagaacagcccgggccaagaggc

SEQ ID NO: 106892 - DNA, 33 bp, Homo sapien
cccaagcagagagaacggcccgggccaagaggc

SEQ ID NO: 106893 - DNA, 33 bp, Homo sapien
atttgttgagataaggaatattttctgacaaac

SEQ ID NO: 106894 - DNA, 33 bp, Homo sapien
atttgttgagataaggtatattttctgacaaac

SEQ ID NO: 106895 - DNA, 33 bp, Homo sapien
ttttaagtatgttgtaaagaaaatcagtaatta

SEQ ID NO: 106896 - DNA, 33 bp, Homo sapien
ttttaagtatgttgtagagaaaatcagtaatta

SEQ ID NO: 106897 - DNA, 33 bp, Homo sapien
tggttggcaaagctgacccaatcataatgggca

SEQ ID NO: 106898 - DNA, 33 bp, Homo sapien
tggttggcaaagctgatccaatcataatgggca

SEQ ID NO: 106899 - DNA, 33 bp, Homo sapien
ggagtttctggtaacactaagagaaatgtcctt

SEQ ID NO: 106900 - DNA, 33 bp, Homo sapien
ggagtttctggtaacattaagagaaatgtcctt

SEQ ID NO: 106901 - DNA, 33 bp, Homo sapien
gcttcctgcacatccaacttagttattcattgt

SEQ ID NO: 106902 - DNA, 33 bp, Homo sapien
gcttcctgcacatccagcttagttattcattgt

SEQ ID NO: 106903 - DNA, 33 bp, Homo sapien
atatatgggaacctcaagactggatgataatag

SEQ ID NO: 106904 - DNA, 33 bp, Homo sapien
atatatgggaacctcacgactggatgataatag

SEQ ID NO: 106905 - DNA, 33 bp, Homo sapien
atcacattataatcaaagtaatgcatgtacata

SEQ ID NO: 106906 - DNA, 33 bp, Homo sapien
atcacattataatcaaggtaatgcatgtacata

SEQ ID NO: 106907 - DNA, 33 bp, Homo sapien
cttagaaaagaattcacatcgaggaaatcccct

SEQ ID NO: 106908 - DNA, 33 bp, Homo sapien
cttagaaaagaattcatatcgaggaaatcccct

SEQ ID NO: 106909 - DNA, 33 bp, Homo sapien
gattatgcccaaacaccgaccaaacatgggaga

SEQ ID NO: 106910 - DNA, 33 bp, Homo sapien
gattatgcccaaacactgaccaaacatgggaga

SEQ ID NO: 106911 - DNA, 33 bp, Homo sapien
caccacaggcagcccaatggagaagctgtgagg

SEQ ID NO: 106912 - DNA, 33 bp, Homo sapien
caccacaggcagcccagtggagaagctgtgagg

SEQ ID NO: 106913 - DNA, 33 bp, Homo sapien
agataaaggtgttaaacgccatttgatgttaaa

SEQ ID NO: 106914 - DNA, 33 bp, Homo sapien
agataaaggtgttaaatgccatttgatgttaaa

SEQ ID NO: 106915 - DNA, 33 bp, Homo sapien
aaagaaaggctcagaccctgaggcgcatcaact

SEQ ID NO: 106916 - DNA, 33 bp, Homo sapien
aaagaaaggctcagactctgaggcgcatcaact

SEQ ID NO: 106917 - DNA, 33 bp, Homo sapien
atattggtgaaaaaccaaaaacaagttctattg

SEQ ID NO: 106918 - DNA, 33 bp, Homo sapien
atattggtgaaaaaccgaaaacaagttctattg

SEQ ID NO: 106919 - DNA, 33 bp, Homo sapien
gcctaaagtgacatcacgacgcagtccagagag

SEQ ID NO: 106920 - DNA, 33 bp, Homo sapien
gcctaaagtgacatcatgacgcagtccagagag

SEQ ID NO: 106921 - DNA, 33 bp, Homo sapien
tctgcttcccattatgccacattacctagcaaa

SEQ ID NO: 106922 - DNA, 33 bp, Homo sapien
tctgcttcccattatgtcacattacctagcaaa

SEQ ID NO: 106923 - DNA, 33 bp, Homo sapien
aaaagacctccctatacagcagatgaatagttt

SEQ ID NO: 106924 - DNA, 33 bp, Homo sapien
aaaagacctccctatagagcagatgaatagttt

SEQ ID NO: 106925 - DNA, 33 bp, Homo sapien
caggaagctttacataagagtcccaactttcac

SEQ ID NO: 106926 - DNA, 33 bp, Homo sapien
caggaagctttacataggagtcccaactttcac

SEQ ID NO: 106927 - DNA, 33 bp, Homo sapien
tgtggatctaattcagaactaatgaccttactg

SEQ ID NO: 106928 - DNA, 33 bp, Homo sapien
tgtggatctaattcaggactaatgaccttactg

SEQ ID NO: 106929 - DNA, 33 bp, Homo sapien
cagtgtaagtgaggcacgggaaaaaatgaagcc

SEQ ID NO: 106930 - DNA, 33 bp, Homo sapien
cagtgtaagtgaggcatgggaaaaaatgaagcc

SEQ ID NO: 106931 - DNA, 33 bp, Homo sapien
agactagccttagcaaactagtaagactctgtc

SEQ ID NO: 106932 - DNA, 33 bp, Homo sapien
agactagccttagcaacctagtaagactctgtc

SEQ ID NO: 106933 - DNA, 33 bp, Homo sapien
agtggacttgtgtttcacttccacacagataac

SEQ ID NO: 106934 - DNA, 33 bp, Homo sapien
agtggacttgtgtttcgcttccacacagataac

SEQ ID NO: 106935 - DNA, 33 bp, Homo sapien
aatctttgaacttaagactcaaatgaaattcca

SEQ ID NO: 106936 - DNA, 33 bp, Homo sapien
aatctttgaacttaaggctcaaatgaaattcca

SEQ ID NO: 106937 - DNA, 33 bp, Homo sapien
tcctctctcagcttgacggtaggctgacttgac

SEQ ID NO: 106938 - DNA, 33 bp, Homo sapien
tcctctctcagcttgatggtaggctgacttgac

SEQ ID NO: 106939 - DNA, 33 bp, Homo sapien
aagtgctgaccacagcagatgtggactaaagat

SEQ ID NO: 106940 - DNA, 33 bp, Homo sapien
aagtgctgaccacagcggatgtggactaaagat

SEQ ID NO: 106941 - DNA, 33 bp, Homo sapien
ttaccaaaatgcagaccaatgctgaataaaaca

SEQ ID NO: 106942 - DNA, 33 bp, Homo sapien
ttaccaaaatgcagactaatgctgaataaaaca

SEQ ID NO: 106943 - DNA, 33 bp, Homo sapien
aaaacaaacccaatgacgaattgccacatttta

SEQ ID NO: 106944 - DNA, 33 bp, Homo sapien
aaaacaaacccaatgatgaattgccacatttta

SEQ ID NO: 106945 - DNA, 33 bp, Homo sapien
attcagcaataacaacagtgttcactgaaagac

SEQ ID NO: 106946 - DNA, 33 bp, Homo sapien
attcagcaataacaacggtgttcactgaaagac

SEQ ID NO: 106947 - DNA, 33 bp, Homo sapien
aaacagggccacgggaaaagatacaatatgaga

SEQ ID NO: 106948 - DNA, 33 bp, Homo sapien
aaacagggccacgggagaagatacaatatgaga

SEQ ID NO: 106949 - DNA, 33 bp, Homo sapien
tagtacctagtaaataactgcccaacaaaagtg

SEQ ID NO: 106950 - DNA, 33 bp, Homo sapien
tagtacctagtaaatatctgcccaacaaaagtg

SEQ ID NO: 106951 - DNA, 33 bp, Homo sapien
agaaaagcaatccacaaaattcttatacataaa

SEQ ID NO: 106952 - DNA, 33 bp, Homo sapien
agaaaagcaatccacacaattcttatacataaa

SEQ ID NO: 106953 - DNA, 33 bp, Homo sapien
ttgagggtctctccataacagaacctggaagga

SEQ ID NO: 106954 - DNA, 33 bp, Homo sapien
ttgagggtctctccatgacagaacctggaagga

SEQ ID NO: 106955 - DNA, 33 bp, Homo sapien
tccctcacttccacaggagtcaaggagagtgtc

SEQ ID NO: 106956 - DNA, 33 bp, Homo sapien
tccctcacttccacagtagtcaaggagagtgtc

SEQ ID NO: 106957 - DNA, 33 bp, Homo sapien
taatgggtttctggaacggttaccgccagattt

SEQ ID NO: 106958 - DNA, 33 bp, Homo sapien
taatgggtttctggaatggttaccgccagattt

SEQ ID NO: 106959 - DNA, 33 bp, Homo sapien
tctgctccaaaaccatcaagttattctgccttc

SEQ ID NO: 106960 - DNA, 33 bp, Homo sapien
tctgctccaaaaccattaagttattctgccttc

SEQ ID NO: 106961 - DNA, 33 bp, Homo sapien
gaggaaaatcactaaaaagcatttgtgactatg

SEQ ID NO: 106962 - DNA, 33 bp, Homo sapien
gaggaaaatcactaaagagcatttgtgactatg

SEQ ID NO: 106963 - DNA, 33 bp, Homo sapien
tccaagcacatagcaaatcccatcacaatgtgt

SEQ ID NO: 106964 - DNA, 33 bp, Homo sapien
tccaagcacatagcaagtcccatcacaatgtgt

SEQ ID NO: 106965 - DNA, 33 bp, Homo sapien
ggatgtgtgtctcaacaaaagtcctcctccatt

SEQ ID NO: 106966 - DNA, 33 bp, Homo sapien
ggatgtgtgtctcaaccaaagtcctcctccatt

SEQ ID NO: 106967 - DNA, 33 bp, Homo sapien
tatggaatggacagacaagatgcctttctctta

SEQ ID NO: 106968 - DNA, 33 bp, Homo sapien
tatggaatggacagaccagatgcctttctctta

SEQ ID NO: 106969 - DNA, 33 bp, Homo sapien
gaatgatagagacaaaagaaggaggtcactgca

SEQ ID NO: 106970 - DNA, 33 bp, Homo sapien
gaatgatagagacaaaggaaggaggtcactgca

SEQ ID NO: 106971 - DNA, 33 bp, Homo sapien
gccaccaaaggaagacacaaaggtgcgtgtggg

SEQ ID NO: 106972 - DNA, 33 bp, Homo sapien
gccaccaaaggaagacgcaaaggtgcgtgtggg

SEQ ID NO: 106973 - DNA, 33 bp, Homo sapien
gtatctgaggctcaggaacttcacaccattgag

SEQ ID NO: 106974 - DNA, 33 bp, Homo sapien
gtatctgaggctcagggacttcacaccattgag

SEQ ID NO: 106975 - DNA, 33 bp, Homo sapien
gacccttcataggccccctgtgtgtaagtcctg

SEQ ID NO: 106976 - DNA, 33 bp, Homo sapien
gacccttcataggccctctgtgtgtaagtcctg

SEQ ID NO: 106977 - DNA, 33 bp, Homo sapien
taagagagggcagggaaaaacgtgtacgggcac

SEQ ID NO: 106978 - DNA, 33 bp, Homo sapien
taagagagggcagggagaaacgtgtacgggcac

SEQ ID NO: 106979 - DNA, 33 bp, Homo sapien
gatatgaacagacaaacgcttctcaaaagaaga

SEQ ID NO: 106980 - DNA, 33 bp, Homo sapien
gatatgaacagacaaatgcttctcaaaagaaga

SEQ ID NO: 106981 - DNA, 33 bp, Homo sapien
ttccaccgcaccatgccgagtctcaagaatgta

SEQ ID NO: 106982 - DNA, 33 bp, Homo sapien
ttccaccgcaccatgctgagtctcaagaatgta

SEQ ID NO: 106983 - DNA, 33 bp, Homo sapien
accttgccttagaaataaaaactgcttagtccc

SEQ ID NO: 106984 - DNA, 33 bp, Homo sapien
accttgccttagaaatgaaaactgcttagtccc

SEQ ID NO: 106985 - DNA, 33 bp, Homo sapien
tcttggaggctaaaggaacccagtgacaaggta

SEQ ID NO: 106986 - DNA, 33 bp, Homo sapien
tcttggaggctaaagggacccagtgacaaggta

SEQ ID NO: 106987 - DNA, 33 bp, Homo sapien
ggagtggagtcttctcagaagggttcagactgg

SEQ ID NO: 106988 - DNA, 33 bp, Homo sapien
ggagtggagtcttctcggaagggttcagactgg

SEQ ID NO: 106989 - DNA, 33 bp, Homo sapien
tgcttagatgcttccacgatgcttcactccatg

SEQ ID NO: 106990 - DNA, 33 bp, Homo sapien
tgcttagatgcttccaggatgcttcactccatg

SEQ ID NO: 106991 - DNA, 33 bp, Homo sapien
cgtgtggttatgctcacatttgttagggttcaa

SEQ ID NO: 106992 - DNA, 33 bp, Homo sapien
cgtgtggttatgctcatatttgttagggttcaa

SEQ ID NO: 106993 - DNA, 33 bp, Homo sapien
tgctgcatgtggaaaaagttgaatgaggaggct

SEQ ID NO: 106994 - DNA, 33 bp, Homo sapien
tgctgcatgtggaaaacgttgaatgaggaggct

SEQ ID NO: 106995 - DNA, 33 bp, Homo sapien
tcttgtgacataaagcaaaagcctctctgaggt

SEQ ID NO: 106996 - DNA, 33 bp, Homo sapien
tcttgtgacataaagccaaagcctctctgaggt

SEQ ID NO: 106997 - DNA, 33 bp, Homo sapien
atagatatgaggaaaacgaagacagacccctga

SEQ ID NO: 106998 - DNA, 33 bp, Homo sapien
atagatatgaggaaaatgaagacagacccctga

SEQ ID NO: 106999 - DNA, 33 bp, Homo sapien
ttggtgatgccatacccgatgatctcatacaag

SEQ ID NO: 107000 - DNA, 33 bp, Homo sapien
ttggtgatgccatacctgatgatctcatacaag

SEQ ID NO: 107001 - DNA, 33 bp, Homo sapien
aaaattccctgtactacgtttaccagaaggttg

SEQ ID NO: 107002 - DNA, 33 bp, Homo sapien
aaaattccctgtactatgtttaccagaaggttg

SEQ ID NO: 107003 - DNA, 33 bp, Homo sapien
tctttgctggaaagatcacttgtctcctgacct

SEQ ID NO: 107004 - DNA, 33 bp, Homo sapien
tctttgctggaaagattacttgtctcctgacct

SEQ ID NO: 107005 - DNA, 33 bp, Homo sapien
ttatgcagaaatactcacttgtagcaaatatca

SEQ ID NO: 107006 - DNA, 33 bp, Homo sapien
ttatgcagaaatactcgcttgtagcaaatatca

SEQ ID NO: 107007 - DNA, 33 bp, Homo sapien
ttattgtctctcttgcactcccaagactgagct

SEQ ID NO: 107008 - DNA, 33 bp, Homo sapien
ttattgtctctcttgcgctcccaagactgagct

SEQ ID NO: 107009 - DNA, 33 bp, Homo sapien
ttaattctcacactccaaagtgcatttaattta

SEQ ID NO: 107010 - DNA, 33 bp, Homo sapien
ttaattctcacactccgaagtgcatttaattta

SEQ ID NO: 107011 - DNA, 33 bp, Homo sapien
gtttctggcctgactcactcaatcctaccaccc

SEQ ID NO: 107012 - DNA, 33 bp, Homo sapien
gtttctggcctgactcgctcaatcctaccaccc

SEQ ID NO: 107013 - DNA, 33 bp, Homo sapien
gttctattggacaacacagcattggttaagcaa

SEQ ID NO: 107014 - DNA, 33 bp, Homo sapien
gttctattggacaacatagcattggttaagcaa

SEQ ID NO: 107015 - DNA, 33 bp, Homo sapien
ggagccgaggtcaggaagacagtgaaaccccag

SEQ ID NO: 107016 - DNA, 33 bp, Homo sapien
ggagccgaggtcaggaggacagtgaaaccccag

SEQ ID NO: 107017 - DNA, 33 bp, Homo sapien
ggagtcaaacagaaatcaatctttgcctggatt

SEQ ID NO: 107018 - DNA, 33 bp, Homo sapien
ggagtcaaacagaaatgaatctttgcctggatt

SEQ ID NO: 107019 - DNA, 33 bp, Homo sapien
cttgaagttcttgagaaggaagcacagcataga

SEQ ID NO: 107020 - DNA, 33 bp, Homo sapien
cttgaagttcttgagagggaagcacagcataga

SEQ ID NO: 107021 - DNA, 33 bp, Homo sapien
ccactatcattaggaaataaatgagtgtatcct

SEQ ID NO: 107022 - DNA, 33 bp, Homo sapien
ccactatcattaggaagtaaatgagtgtatcct

SEQ ID NO: 107023 - DNA, 33 bp, Homo sapien
ttgtaaaagtttctaacggctcctgtgcaggga

SEQ ID NO: 107024 - DNA, 33 bp, Homo sapien
ttgtaaaagtttctaatggctcctgtgcaggga

SEQ ID NO: 107025 - DNA, 33 bp, Homo sapien
gagttggtggacctcactcatgtctccaggaga

SEQ ID NO: 107026 - DNA, 33 bp, Homo sapien
gagttggtggacctcattcatgtctccaggaga

SEQ ID NO: 107027 - DNA, 33 bp, Homo sapien
taagttatctgaaatcaagtattattaagttat

SEQ ID NO: 107028 - DNA, 33 bp, Homo sapien
taagttatctgaaatcgagtattattaagttat

SEQ ID NO: 107029 - DNA, 33 bp, Homo sapien
cccagtgatgcaaagacggggcaatgcaaataa

SEQ ID NO: 107030 - DNA, 33 bp, Homo sapien
cccagtgatgcaaagatggggcaatgcaaataa

SEQ ID NO: 107031 - DNA, 33 bp, Homo sapien
aaaaaaaagagatagcaattcccacaagaaaaa

SEQ ID NO: 107032 - DNA, 33 bp, Homo sapien
aaaaaaaagagatagctattcccacaagaaaaa

SEQ ID NO: 107033 - DNA, 33 bp, Homo sapien
ttaaaggctcttgctacagttccccccacactt

SEQ ID NO: 107034 - DNA, 33 bp, Homo sapien
ttaaaggctcttgctagagttccccccacactt

SEQ ID NO: 107035 - DNA, 33 bp, Homo sapien
cagaatcttctgtttcaatctctgctgtccttt

SEQ ID NO: 107036 - DNA, 33 bp, Homo sapien
cagaatcttctgtttctatctctgctgtccttt

SEQ ID NO: 107037 - DNA, 33 bp, Homo sapien
gcacttggccactgcacaaaaagggaatatgcc

SEQ ID NO: 107038 - DNA, 33 bp, Homo sapien
gcacttggccactgcagaaaaagggaatatgcc

SEQ ID NO: 107039 - DNA, 33 bp, Homo sapien
acccagaagctacacaaaggaggcgactttgga

SEQ ID NO: 107040 - DNA, 33 bp, Homo sapien
acccagaagctacacagaggaggcgactttgga

SEQ ID NO: 107041 - DNA, 33 bp, Homo sapien
aacaggactttgggcaagaaaatggatgcctag

SEQ ID NO: 107042 - DNA, 33 bp, Homo sapien
aacaggactttgggcaggaaaatggatgcctag

SEQ ID NO: 107043 - DNA, 33 bp, Homo sapien
catggagaaattgatcacattcactttttttgc

SEQ ID NO: 107044 - DNA, 33 bp, Homo sapien
catggagaaattgatcccattcactttttttgc

SEQ ID NO: 107045 - DNA, 33 bp, Homo sapien
tgtaagtgacatttatcaagttgcatgattgac

SEQ ID NO: 107046 - DNA, 33 bp, Homo sapien
tgtaagtgacatttattaagttgcatgattgac

SEQ ID NO: 107047 - DNA, 33 bp, Homo sapien
aacaattccatttacaacatcatcaaaaagaat

SEQ ID NO: 107048 - DNA, 33 bp, Homo sapien
aacaattccatttacatcatcatcaaaaagaat

SEQ ID NO: 107049 - DNA, 33 bp, Homo sapien
catcatctgagtgaaaatgaaagctagcatgac

SEQ ID NO: 107050 - DNA, 33 bp, Homo sapien
catcatctgagtgaaactgaaagctagcatgac

SEQ ID NO: 107051 - DNA, 33 bp, Homo sapien
tacggcttcgtaaatccattctttgcctaatgc

SEQ ID NO: 107052 - DNA, 33 bp, Homo sapien
tacggcttcgtaaatctattctttgcctaatgc

SEQ ID NO: 107053 - DNA, 33 bp, Homo sapien
cttcagaactatgaaccagataaacttttatta

SEQ ID NO: 107054 - DNA, 33 bp, Homo sapien
cttcagaactatgaactagataaacttttatta

SEQ ID NO: 107055 - DNA, 33 bp, Homo sapien
aataagggatactcaacttatatcaatatctgt

SEQ ID NO: 107056 - DNA, 33 bp, Homo sapien
aataagggatactcaagttatatcaatatctgt

SEQ ID NO: 107057 - DNA, 33 bp, Homo sapien
atgaaattgaacttcacaacagtaagccttacc

SEQ ID NO: 107058 - DNA, 33 bp, Homo sapien
atgaaattgaacttcagaacagtaagccttacc

SEQ ID NO: 107059 - DNA, 33 bp, Homo sapien
ctggatttttacatggcatgagcatttaaaaaa

SEQ ID NO: 107060 - DNA, 33 bp, Homo sapien
ctggatttttacatggtatgagcatttaaaaaa

SEQ ID NO: 107061 - DNA, 33 bp, Homo sapien
tcttatgaaagaagcccagggagcttaaacaca

SEQ ID NO: 107062 - DNA, 33 bp, Homo sapien
tcttatgaaagaagcctagggagcttaaacaca

SEQ ID NO: 107063 - DNA, 33 bp, Homo sapien
ctaacagaaagcttaactgctggggtccagtga

SEQ ID NO: 107064 - DNA, 33 bp, Homo sapien
ctaacagaaagcttaattgctggggtccagtga

SEQ ID NO: 107065 - DNA, 33 bp, Homo sapien
aatgtgatgatggtcacggatatttaaggagta

SEQ ID NO: 107066 - DNA, 33 bp, Homo sapien
aatgtgatgatggtcatggatatttaaggagta

SEQ ID NO: 107067 - DNA, 33 bp, Homo sapien
gagcaggtggttggtacggacctgactgtaaaa

SEQ ID NO: 107068 - DNA, 33 bp, Homo sapien
gagcaggtggttggtatggacctgactgtaaaa

SEQ ID NO: 107069 - DNA, 33 bp, Homo sapien
caggagcgctactacacggcccacggtaaggtt

SEQ ID NO: 107070 - DNA, 33 bp, Homo sapien
caggagcgctactacagggcccacggtaaggtt

SEQ ID NO: 107071 - DNA, 33 bp, Homo sapien
tgaatcctcacttggaaaaagcctcttcctgaa

SEQ ID NO: 107072 - DNA, 33 bp, Homo sapien
tgaatcctcacttggagaaagcctcttcctgaa

SEQ ID NO: 107073 - DNA, 33 bp, Homo sapien
gtagtatttagaataacgataatgagaatcatc

SEQ ID NO: 107074 - DNA, 33 bp, Homo sapien
gtagtatttagaataatgataatgagaatcatc

SEQ ID NO: 107075 - DNA, 33 bp, Homo sapien
aatgcaaacatcatggaaaaatatcatctgaaa

SEQ ID NO: 107076 - DNA, 33 bp, Homo sapien
aatgcaaacatcatgggaaaatatcatctgaaa

SEQ ID NO: 107077 - DNA, 33 bp, Homo sapien
tccatcagcagaaaccaggagtaacctggctgc

SEQ ID NO: 107078 - DNA, 33 bp, Homo sapien
tccatcagcagaaaccgggagtaacctggctgc

SEQ ID NO: 107079 - DNA, 33 bp, Homo sapien
gaggcgtgtaggcttacctgcttcagcactggg

SEQ ID NO: 107080 - DNA, 33 bp, Homo sapien
gaggcgtgtaggcttatctgcttcagcactggg

SEQ ID NO: 107081 - DNA, 33 bp, Homo sapien
agagcaaagggagtggaaagaaatcagagagaa

SEQ ID NO: 107082 - DNA, 33 bp, Homo sapien
agagcaaagggagtgggaagaaatcagagagaa

SEQ ID NO: 107083 - DNA, 33 bp, Homo sapien
cctctcgtcagctggaaaatggaacctctactc

SEQ ID NO: 107084 - DNA, 33 bp, Homo sapien
cctctcgtcagctggacaatggaacctctactc

SEQ ID NO: 107085 - DNA, 33 bp, Homo sapien
gctgggcaccgagatcacccacagagctttaaa

SEQ ID NO: 107086 - DNA, 33 bp, Homo sapien
gctgggcaccgagatcgcccacagagctttaaa

SEQ ID NO: 107087 - DNA, 33 bp, Homo sapien
cactgaaagtaggttacggtgatagtctccttt

SEQ ID NO: 107088 - DNA, 33 bp, Homo sapien
cactgaaagtaggttagggtgatagtctccttt

SEQ ID NO: 107089 - DNA, 33 bp, Homo sapien
taacaaacaaataatacgccttagccagtttaa

SEQ ID NO: 107090 - DNA, 33 bp, Homo sapien
taacaaacaaataatatgccttagccagtttaa

SEQ ID NO: 107091 - DNA, 33 bp, Homo sapien
ttgaggaatggatggaacttaaagccctggatg

SEQ ID NO: 107092 - DNA, 33 bp, Homo sapien
ttgaggaatggatggagcttaaagccctggatg

SEQ ID NO: 107093 - DNA, 33 bp, Homo sapien
ctggtgtacccaagaccgaggccagaccctaga

SEQ ID NO: 107094 - DNA, 33 bp, Homo sapien
ctggtgtacccaagactgaggccagaccctaga

SEQ ID NO: 107095 - DNA, 33 bp, Homo sapien
tttaacacaggcagccaaagagatgtcaccaag

SEQ ID NO: 107096 - DNA, 33 bp, Homo sapien
tttaacacaggcagccgaagagatgtcaccaag

SEQ ID NO: 107097 - DNA, 33 bp, Homo sapien
atacatggcttaggaaagtgctaaccttgccca

SEQ ID NO: 107098 - DNA, 33 bp, Homo sapien
atacatggcttaggaatgtgctaaccttgccca

SEQ ID NO: 107099 - DNA, 33 bp, Homo sapien
gcaaaggcttttctgacaaggccatggtgagca

SEQ ID NO: 107100 - DNA, 33 bp, Homo sapien
gcaaaggcttttctgataaggccatggtgagca

SEQ ID NO: 107101 - DNA, 33 bp, Homo sapien
tcctcttggaggtaaaatgaggatttctgctat

SEQ ID NO: 107102 - DNA, 33 bp, Homo sapien
tcctcttggaggtaaagtgaggatttctgctat

SEQ ID NO: 107103 - DNA, 33 bp, Homo sapien
acaattcctctactaacaatcagctccttcctg

SEQ ID NO: 107104 - DNA, 33 bp, Homo sapien
acaattcctctactaataatcagctccttcctg

SEQ ID NO: 107105 - DNA, 33 bp, Homo sapien
aacaaaacaaaaacccacaagtgcttgcctttg

SEQ ID NO: 107106 - DNA, 33 bp, Homo sapien
aacaaaacaaaaacccgcaagtgcttgcctttg

SEQ ID NO: 107107 - DNA, 33 bp, Homo sapien
cccggtcaggctcttcactcttccacggcgacc

SEQ ID NO: 107108 - DNA, 33 bp, Homo sapien
cccggtcaggctcttcgctcttccacggcgacc

SEQ ID NO: 107109 - DNA, 33 bp, Homo sapien
aagacctttgtttcccactgctatctcttttac

SEQ ID NO: 107110 - DNA, 33 bp, Homo sapien
aagacctttgtttcccgctgctatctcttttac

SEQ ID NO: 107111 - DNA, 33 bp, Homo sapien
tgcgacccaaagagctaagaactcccccacccc

SEQ ID NO: 107112 - DNA, 33 bp, Homo sapien
tgcgacccaaagagctgagaactcccccacccc

SEQ ID NO: 107113 - DNA, 33 bp, Homo sapien
atatttcacaatagcacagttggtatttcctgg

SEQ ID NO: 107114 - DNA, 33 bp, Homo sapien
atatttcacaatagcatagttggtatttcctgg

SEQ ID NO: 107115 - DNA, 33 bp, Homo sapien
gaaccaagtagtgaacccttcctgtgctcagtc

SEQ ID NO: 107116 - DNA, 33 bp, Homo sapien
gaaccaagtagtgaacgcttcctgtgctcagtc

SEQ ID NO: 107117 - DNA, 33 bp, Homo sapien
tcatcattcacccaccaaaacacccagttatcc

SEQ ID NO: 107118 - DNA, 33 bp, Homo sapien
tcatcattcacccaccgaaacacccagttatcc

SEQ ID NO: 107119 - DNA, 33 bp, Homo sapien
taggctctgcctgagagcttggaggagtttaat

SEQ ID NO: 107120 - DNA, 33 bp, Homo sapien
taggctctgcctgagatcttggaggagtttaat

SEQ ID NO: 107121 - DNA, 33 bp, Homo sapien
tggctctcacaggctccgaccagacagcccaga

SEQ ID NO: 107122 - DNA, 33 bp, Homo sapien
tggctctcacaggctctgaccagacagcccaga

SEQ ID NO: 107123 - DNA, 33 bp, Homo sapien
cattttggtgtaaaaacgacattcttgcttctt

SEQ ID NO: 107124 - DNA, 33 bp, Homo sapien
cattttggtgtaaaaaggacattcttgcttctt

SEQ ID NO: 107125 - DNA, 33 bp, Homo sapien
agagaaaaacagtggaatagaagaaatagttgc

SEQ ID NO: 107126 - DNA, 33 bp, Homo sapien
agagaaaaacagtggagtagaagaaatagttgc

SEQ ID NO: 107127 - DNA, 33 bp, Homo sapien
ctaaatggaaatgtgacgagaaacataaaacga

SEQ ID NO: 107128 - DNA, 33 bp, Homo sapien
ctaaatggaaatgtgatgagaaacataaaacga

SEQ ID NO: 107129 - DNA, 33 bp, Homo sapien
tgattaatacctgagaagttctaatgtgaaagg

SEQ ID NO: 107130 - DNA, 33 bp, Homo sapien
tgattaatacctgagaggttctaatgtgaaagg

SEQ ID NO: 107131 - DNA, 33 bp, Homo sapien
gcagagccttgcaaacccatttacataagtctt

SEQ ID NO: 107132 - DNA, 33 bp, Homo sapien
gcagagccttgcaaactcatttacataagtctt

SEQ ID NO: 107133 - DNA, 33 bp, Homo sapien
agtcctaatctccccaaactgtaccttaaataa

SEQ ID NO: 107134 - DNA, 33 bp, Homo sapien
agtcctaatctccccacactgtaccttaaataa

SEQ ID NO: 107135 - DNA, 33 bp, Homo sapien
ttggagaaagggcccgaaaccaggtcacacagg

SEQ ID NO: 107136 - DNA, 33 bp, Homo sapien
ttggagaaagggcccggaaccaggtcacacagg

SEQ ID NO: 107137 - DNA, 33 bp, Homo sapien
gagccagtggagaaagaacccaatatccaactg

SEQ ID NO: 107138 - DNA, 33 bp, Homo sapien
gagccagtggagaaaggacccaatatccaactg

SEQ ID NO: 107139 - DNA, 33 bp, Homo sapien
taatcaaatactttggccatattgcaggcttaa

SEQ ID NO: 107140 - DNA, 33 bp, Homo sapien
taatcaaatactttggtcatattgcaggcttaa

SEQ ID NO: 107141 - DNA, 33 bp, Homo sapien
gcttaagttgtcatggaaagcatctgtgaatgg

SEQ ID NO: 107142 - DNA, 33 bp, Homo sapien
gcttaagttgtcatggcaagcatctgtgaatgg

SEQ ID NO: 107143 - DNA, 33 bp, Homo sapien
tctgtatctcacctgaaggtcactgaaacacca

SEQ ID NO: 107144 - DNA, 33 bp, Homo sapien
tctgtatctcacctgagggtcactgaaacacca

SEQ ID NO: 107145 - DNA, 33 bp, Homo sapien
caccctagcatgcaaactgtttgatgggacgca

SEQ ID NO: 107146 - DNA, 33 bp, Homo sapien
caccctagcatgcaaagtgtttgatgggacgca

SEQ ID NO: 107147 - DNA, 33 bp, Homo sapien
aatgctgagtatgaacacaagcccttgaagatc

SEQ ID NO: 107148 - DNA, 33 bp, Homo sapien
aatgctgagtatgaacgcaagcccttgaagatc

SEQ ID NO: 107149 - DNA, 33 bp, Homo sapien
aacaagttgggactcaaaaaggtattgctggca

SEQ ID NO: 107150 - DNA, 33 bp, Homo sapien
aacaagttgggactcacaaaggtattgctggca

SEQ ID NO: 107151 - DNA, 33 bp, Homo sapien
tgcaacccccaatgcaacccactctgctccatt

SEQ ID NO: 107152 - DNA, 33 bp, Homo sapien
tgcaacccccaatgcaccccactctgctccatt

SEQ ID NO: 107153 - DNA, 33 bp, Homo sapien
gtgaataaactttgcacattaaagttgaggtca

SEQ ID NO: 107154 - DNA, 33 bp, Homo sapien
gtgaataaactttgcagattaaagttgaggtca

SEQ ID NO: 107155 - DNA, 33 bp, Homo sapien
ggccaagcagccggacacttttaggtgacacag

SEQ ID NO: 107156 - DNA, 33 bp, Homo sapien
ggccaagcagccggactcttttaggtgacacag

SEQ ID NO: 107157 - DNA, 33 bp, Homo sapien
agcagtaattggtagacaaagcctcactctgtt

SEQ ID NO: 107158 - DNA, 33 bp, Homo sapien
agcagtaattggtagataaagcctcactctgtt

SEQ ID NO: 107159 - DNA, 33 bp, Homo sapien
gatttatatgtgaaaaactacaaaactctgaat

SEQ ID NO: 107160 - DNA, 33 bp, Homo sapien
gatttatatgtgaaaagctacaaaactctgaat

SEQ ID NO: 107161 - DNA, 33 bp, Homo sapien
agcgcacaaacactcaacaacggggtgtatcaa

SEQ ID NO: 107162 - DNA, 33 bp, Homo sapien
agcgcacaaacactcagcaacggggtgtatcaa

SEQ ID NO: 107163 - DNA, 33 bp, Homo sapien
gagttgcaggatttgaaggaaaaaccactgagg

SEQ ID NO: 107164 - DNA, 33 bp, Homo sapien
gagttgcaggatttgagggaaaaaccactgagg

SEQ ID NO: 107165 - DNA, 33 bp, Homo sapien
agctaataataatcaacagtggcttcttggttg

SEQ ID NO: 107166 - DNA, 33 bp, Homo sapien
agctaataataatcaatagtggcttcttggttg

SEQ ID NO: 107167 - DNA, 33 bp, Homo sapien
catatgaacactaggaaaaactgagtgtcgggt

SEQ ID NO: 107168 - DNA, 33 bp, Homo sapien
catatgaacactaggagaaactgagtgtcgggt

SEQ ID NO: 107169 - DNA, 33 bp, Homo sapien
agaagtgttcagtgaccagtgttcagtgcccag

SEQ ID NO: 107170 - DNA, 33 bp, Homo sapien
agaagtgttcagtgactagtgttcagtgcccag

SEQ ID NO: 107171 - DNA, 33 bp, Homo sapien
gatccccattttcaagcaaggataggaggccta

SEQ ID NO: 107172 - DNA, 33 bp, Homo sapien
gatccccattttcaaggaaggataggaggccta

SEQ ID NO: 107173 - DNA, 33 bp, Homo sapien
aggataggaggcctacagagtctaaaactcccc

SEQ ID NO: 107174 - DNA, 33 bp, Homo sapien
aggataggaggcctacggagtctaaaactcccc

SEQ ID NO: 107175 - DNA, 33 bp, Homo sapien
gtgcagagtacacagcaaacgaagatggatagt

SEQ ID NO: 107176 - DNA, 33 bp, Homo sapien
gtgcagagtacacagcgaacgaagatggatagt

SEQ ID NO: 107177 - DNA, 33 bp, Homo sapien
tcccacacaaatcctcacctttacagcccccag

SEQ ID NO: 107178 - DNA, 33 bp, Homo sapien
tcccacacaaatcctctcctttacagcccccag

SEQ ID NO: 107179 - DNA, 33 bp, Homo sapien
gcagcacagacgtggcaaaaaggaggtgatgag

SEQ ID NO: 107180 - DNA, 33 bp, Homo sapien
gcagcacagacgtggcgaaaaggaggtgatgag

SEQ ID NO: 107181 - DNA, 33 bp, Homo sapien
tgcagacatttctatcacagaaaaataaacaaa

SEQ ID NO: 107182 - DNA, 33 bp, Homo sapien
tgcagacatttctatcgcagaaaaataaacaaa

SEQ ID NO: 107183 - DNA, 33 bp, Homo sapien
gttgattagaaaaaaaaattgttgagcatttgc

SEQ ID NO: 107184 - DNA, 33 bp, Homo sapien
gttgattagaaaaaaatattgttgagcatttgc

SEQ ID NO: 107185 - DNA, 33 bp, Homo sapien
ctccaaccagactgaacgaggaacaagaggccc

SEQ ID NO: 107186 - DNA, 33 bp, Homo sapien
ctccaaccagactgaatgaggaacaagaggccc

SEQ ID NO: 107187 - DNA, 33 bp, Homo sapien
ggtgaccagagttacagaaggcttcagaagcat

SEQ ID NO: 107188 - DNA, 33 bp, Homo sapien
ggtgaccagagttacataaggcttcagaagcat

SEQ ID NO: 107189 - DNA, 33 bp, Homo sapien
tcagacaaagggaacaactcgtgcaaaagtcct

SEQ ID NO: 107190 - DNA, 33 bp, Homo sapien
tcagacaaagggaacagctcgtgcaaaagtcct

SEQ ID NO: 107191 - DNA, 33 bp, Homo sapien
gcaaccgtggttcccaatgagcacataactatt

SEQ ID NO: 107192 - DNA, 33 bp, Homo sapien
gcaaccgtggttcccagtgagcacataactatt

SEQ ID NO: 107193 - DNA, 33 bp, Homo sapien
gtctttgtgcctgacaaacagtagactcttaat

SEQ ID NO: 107194 - DNA, 33 bp, Homo sapien
gtctttgtgcctgacacacagtagactcttaat

SEQ ID NO: 107195 - DNA, 33 bp, Homo sapien
cattgcatcataaaaaaaaacaaccagtgtata

SEQ ID NO: 107196 - DNA, 33 bp, Homo sapien
cattgcatcataaaaagaaacaaccagtgtata

SEQ ID NO: 107197 - DNA, 33 bp, Homo sapien
ggtttccttgaaaaatcagaacatcttacaaaa

SEQ ID NO: 107198 - DNA, 33 bp, Homo sapien
ggtttccttgaaaaatgagaacatcttacaaaa

SEQ ID NO: 107199 - DNA, 33 bp, Homo sapien
aacatcttacaaaaccaggcacacccttcagtg

SEQ ID NO: 107200 - DNA, 33 bp, Homo sapien
aacatcttacaaaaccgggcacacccttcagtg

SEQ ID NO: 107201 - DNA, 33 bp, Homo sapien
acagtggcccagctgcgcagtaaatgagaaatc

SEQ ID NO: 107202 - DNA, 33 bp, Homo sapien
acagtggcccagctgctcagtaaatgagaaatc

SEQ ID NO: 107203 - DNA, 33 bp, Homo sapien
ccttgaggctctagacactttctgccctaactc

SEQ ID NO: 107204 - DNA, 33 bp, Homo sapien
ccttgaggctctagacgctttctgccctaactc

SEQ ID NO: 107205 - DNA, 33 bp, Homo sapien
gagacagaaagattatcaactgccagggattgg

SEQ ID NO: 107206 - DNA, 33 bp, Homo sapien
gagacagaaagattattaactgccagggattgg

SEQ ID NO: 107207 - DNA, 33 bp, Homo sapien
tgtggaaggagtaacacgcagggcgagaccagc

SEQ ID NO: 107208 - DNA, 33 bp, Homo sapien
tgtggaaggagtaacatgcagggcgagaccagc

SEQ ID NO: 107209 - DNA, 33 bp, Homo sapien
ctggggttggtgtccccggaaaacatttgccct

SEQ ID NO: 107210 - DNA, 33 bp, Homo sapien
ctggggttggtgtccctggaaaacatttgccct

SEQ ID NO: 107211 - DNA, 33 bp, Homo sapien
ctcaggatgagtcaaccaggagctgccatgtgg

SEQ ID NO: 107212 - DNA, 33 bp, Homo sapien
ctcaggatgagtcaacgaggagctgccatgtgg

SEQ ID NO: 107213 - DNA, 33 bp, Homo sapien
tcctcaattgattaccaagcaggtcatcttttc

SEQ ID NO: 107214 - DNA, 33 bp, Homo sapien
tcctcaattgattaccgagcaggtcatcttttc

SEQ ID NO: 107215 - DNA, 33 bp, Homo sapien
tcactttatctgcatacgtcatttgaaatttaa

SEQ ID NO: 107216 - DNA, 33 bp, Homo sapien
tcactttatctgcatatgtcatttgaaatttaa

SEQ ID NO: 107217 - DNA, 33 bp, Homo sapien
ttctacacaattttatcacacttgtaggtttgt

SEQ ID NO: 107218 - DNA, 33 bp, Homo sapien
ttctacacaattttattacacttgtaggtttgt

SEQ ID NO: 107219 - DNA, 33 bp, Homo sapien
gggtggggatgacacaatgatttctgacctcga

SEQ ID NO: 107220 - DNA, 33 bp, Homo sapien
gggtggggatgacacagtgatttctgacctcga

SEQ ID NO: 107221 - DNA, 33 bp, Homo sapien
cttagaggttgagccacggggcagctatgatag

SEQ ID NO: 107222 - DNA, 33 bp, Homo sapien
cttagaggttgagccatggggcagctatgatag

SEQ ID NO: 107223 - DNA, 33 bp, Homo sapien
agggagctagagagacacattctgtttgcttgt

SEQ ID NO: 107224 - DNA, 33 bp, Homo sapien
agggagctagagagacgcattctgtttgcttgt

SEQ ID NO: 107225 - DNA, 33 bp, Homo sapien
gtcgagaagaagtcaaagaggcaatgaggagaa

SEQ ID NO: 107226 - DNA, 33 bp, Homo sapien
gtcgagaagaagtcaaggaggcaatgaggagaa

SEQ ID NO: 107227 - DNA, 33 bp, Homo sapien
tacaggaagctcggcacctggtcgaagcaggtt

SEQ ID NO: 107228 - DNA, 33 bp, Homo sapien
tacaggaagctcggcatctggtcgaagcaggtt

SEQ ID NO: 107229 - DNA, 33 bp, Homo sapien
gaagcctaccacatagcatggttaagtgagtta

SEQ ID NO: 107230 - DNA, 33 bp, Homo sapien
gaagcctaccacataggatggttaagtgagtta

SEQ ID NO: 107231 - DNA, 33 bp, Homo sapien
tagggaggttgcatcacagaaatagaatttgga

SEQ ID NO: 107232 - DNA, 33 bp, Homo sapien
tagggaggttgcatcatagaaatagaatttgga

SEQ ID NO: 107233 - DNA, 33 bp, Homo sapien
ctaaatgctgtgtgacaaagtcttgttctcaga

SEQ ID NO: 107234 - DNA, 33 bp, Homo sapien
ctaaatgctgtgtgacgaagtcttgttctcaga

SEQ ID NO: 107235 - DNA, 33 bp, Homo sapien
ctgagctttgaatggccagaggtcttacataga

SEQ ID NO: 107236 - DNA, 33 bp, Homo sapien
ctgagctttgaatggctagaggtcttacataga

SEQ ID NO: 107237 - DNA, 33 bp, Homo sapien
tgaaaggatcctgagaaaaatggaaatcagaaa

SEQ ID NO: 107238 - DNA, 33 bp, Homo sapien
tgaaaggatcctgagagaaatggaaatcagaaa

SEQ ID NO: 107239 - DNA, 33 bp, Homo sapien
tccaagttatggggaccgaccaagccgaatttc

SEQ ID NO: 107240 - DNA, 33 bp, Homo sapien
tccaagttatggggactgaccaagccgaatttc

SEQ ID NO: 107241 - DNA, 33 bp, Homo sapien
catgatttgagctatcacctcctctgtcctgaa

SEQ ID NO: 107242 - DNA, 33 bp, Homo sapien
catgatttgagctatcgcctcctctgtcctgaa

SEQ ID NO: 107243 - DNA, 33 bp, Homo sapien
tacggatccactggaacgttatctaagagagtg

SEQ ID NO: 107244 - DNA, 33 bp, Homo sapien
tacggatccactggaatgttatctaagagagtg

SEQ ID NO: 107245 - DNA, 33 bp, Homo sapien
ggtgttatgtcatcaacgtgcaaggcagtgcat

SEQ ID NO: 107246 - DNA, 33 bp, Homo sapien
ggtgttatgtcatcaatgtgcaaggcagtgcat

SEQ ID NO: 107247 - DNA, 33 bp, Homo sapien
tggagatattgttagacgatgcaagttcttgga

SEQ ID NO: 107248 - DNA, 33 bp, Homo sapien
tggagatattgttagaggatgcaagttcttgga

SEQ ID NO: 107249 - DNA, 33 bp, Homo sapien
tggcctccggcagccactccttcaaagtccaca

SEQ ID NO: 107250 - DNA, 33 bp, Homo sapien
tggcctccggcagccattccttcaaagtccaca

SEQ ID NO: 107251 - DNA, 33 bp, Homo sapien
gatggctcagagatcaagaatattcctttttat

SEQ ID NO: 107252 - DNA, 33 bp, Homo sapien
gatggctcagagatcaggaatattcctttttat

SEQ ID NO: 107253 - DNA, 33 bp, Homo sapien
cttgtttaacaagggaacaattacctaaatagg

SEQ ID NO: 107254 - DNA, 33 bp, Homo sapien
cttgtttaacaagggatcaattacctaaatagg

SEQ ID NO: 107255 - DNA, 33 bp, Homo sapien
gggtcaggcacttcacagagactgaaggtgggg

SEQ ID NO: 107256 - DNA, 33 bp, Homo sapien
gggtcaggcacttcacggagactgaaggtgggg

SEQ ID NO: 107257 - DNA, 33 bp, Homo sapien
attccggattttgccactcagtgcaaattaggt

SEQ ID NO: 107258 - DNA, 33 bp, Homo sapien
attccggattttgccattcagtgcaaattaggt

SEQ ID NO: 107259 - DNA, 33 bp, Homo sapien
ttgcaatggaagggaaatagaaatggagaccaa

SEQ ID NO: 107260 - DNA, 33 bp, Homo sapien
ttgcaatggaagggaagtagaaatggagaccaa

SEQ ID NO: 107261 - DNA, 33 bp, Homo sapien
cacctccactgagctccagggtacactgaggaa

SEQ ID NO: 107262 - DNA, 33 bp, Homo sapien
cacctccactgagctctagggtacactgaggaa

SEQ ID NO: 107263 - DNA, 33 bp, Homo sapien
gtccttggtaaattgaagttagagacagaaacc

SEQ ID NO: 107264 - DNA, 33 bp, Homo sapien
gtccttggtaaattgaggttagagacagaaacc

SEQ ID NO: 107265 - DNA, 33 bp, Homo sapien
tggaccttcttgtggaagatgttttatctagga

SEQ ID NO: 107266 - DNA, 33 bp, Homo sapien
tggaccttcttgtggaggatgttttatctagga

SEQ ID NO: 107267 - DNA, 33 bp, Homo sapien
agcacaaggcaccagggattcaaaagagcaaag

SEQ ID NO: 107268 - DNA, 33 bp, Homo sapien
agcacaaggcaccaggtattcaaaagagcaaag

SEQ ID NO: 107269 - DNA, 33 bp, Homo sapien
aatagctttaaaaaagcagtttcaagctctcag

SEQ ID NO: 107270 - DNA, 33 bp, Homo sapien
aatagctttaaaaaaggagtttcaagctctcag

SEQ ID NO: 107271 - DNA, 33 bp, Homo sapien
aaatgcatagctcctgacagaagtagaaataga

SEQ ID NO: 107272 - DNA, 33 bp, Homo sapien
aaatgcatagctcctggcagaagtagaaataga

SEQ ID NO: 107273 - DNA, 33 bp, Homo sapien
aaactcaccagatgcagaggcaactcacctctg

SEQ ID NO: 107274 - DNA, 33 bp, Homo sapien
aaactcaccagatgcataggcaactcacctctg

SEQ ID NO: 107275 - DNA, 33 bp, Homo sapien
accatttagtcagaaaaaaatctggtggcaggc

SEQ ID NO: 107276 - DNA, 33 bp, Homo sapien
accatttagtcagaaacaaatctggtggcaggc

SEQ ID NO: 107277 - DNA, 33 bp, Homo sapien
ctgtatctcccacttaccttgtggatctcagct

SEQ ID NO: 107278 - DNA, 33 bp, Homo sapien
ctgtatctcccacttatcttgtggatctcagct

SEQ ID NO: 107279 - DNA, 33 bp, Homo sapien
tgtgagaatgaactaacacataaaccaggaatc

SEQ ID NO: 107280 - DNA, 33 bp, Homo sapien
tgtgagaatgaactaatacataaaccaggaatc

SEQ ID NO: 107281 - DNA, 33 bp, Homo sapien
actggtgttttaaaaacgagtggtgatggtctg

SEQ ID NO: 107282 - DNA, 33 bp, Homo sapien
actggtgttttaaaaatgagtggtgatggtctg

SEQ ID NO: 107283 - DNA, 33 bp, Homo sapien
ggtgaatttgcagtgccgagtctccattccctt

SEQ ID NO: 107284 - DNA, 33 bp, Homo sapien
ggtgaatttgcagtgctgagtctccattccctt

SEQ ID NO: 107285 - DNA, 33 bp, Homo sapien
tttggccttatttgagaaaacgcaatacacagg

SEQ ID NO: 107286 - DNA, 33 bp, Homo sapien
tttggccttatttgaggaaacgcaatacacagg

SEQ ID NO: 107287 - DNA, 33 bp, Homo sapien
cctctttgaatcagagcaagttcccttaggatt

SEQ ID NO: 107288 - DNA, 33 bp, Homo sapien
cctctttgaatcagagtaagttcccttaggatt

SEQ ID NO: 107289 - DNA, 33 bp, Homo sapien
gatacttgttaaagcacggtaaggccgactgca

SEQ ID NO: 107290 - DNA, 33 bp, Homo sapien
gatacttgttaaagcatggtaaggccgactgca

SEQ ID NO: 107291 - DNA, 33 bp, Homo sapien
ttatggttgaaacataaaatagactacctaagc

SEQ ID NO: 107292 - DNA, 33 bp, Homo sapien
ttatggttgaaacatacaatagactacctaagc

SEQ ID NO: 107293 - DNA, 33 bp, Homo sapien
tttgaggtaatgcttcactggatagtatgttta

SEQ ID NO: 107294 - DNA, 33 bp, Homo sapien
tttgaggtaatgcttcgctggatagtatgttta

SEQ ID NO: 107295 - DNA, 33 bp, Homo sapien
tgtgcatctgaggttccaaaatattgctacaga

SEQ ID NO: 107296 - DNA, 33 bp, Homo sapien
tgtgcatctgaggttctaaaatattgctacaga

SEQ ID NO: 107297 - DNA, 33 bp, Homo sapien
ctgttttgtctctgccactccttatgcctggca

SEQ ID NO: 107298 - DNA, 33 bp, Homo sapien
ctgttttgtctctgccgctccttatgcctggca

SEQ ID NO: 107299 - DNA, 33 bp, Homo sapien
gcttaaacttccactacactaaacttccagaga

SEQ ID NO: 107300 - DNA, 33 bp, Homo sapien
gcttaaacttccactatactaaacttccagaga

SEQ ID NO: 107301 - DNA, 33 bp, Homo sapien
caaaattcctgttcaaattctatgatcaaaaaa

SEQ ID NO: 107302 - DNA, 33 bp, Homo sapien
caaaattcctgttcaagttctatgatcaaaaaa

SEQ ID NO: 107303 - DNA, 33 bp, Homo sapien
ctctgagatcatgatacgcaggatcacctatgt

SEQ ID NO: 107304 - DNA, 33 bp, Homo sapien
ctctgagatcatgatatgcaggatcacctatgt

SEQ ID NO: 107305 - DNA, 33 bp, Homo sapien
gaataactttaaaaaacgacaatgtgccagacc

SEQ ID NO: 107306 - DNA, 33 bp, Homo sapien
gaataactttaaaaaatgacaatgtgccagacc

SEQ ID NO: 107307 - DNA, 33 bp, Homo sapien
tggatcttcagcataaactatttttattcatta

SEQ ID NO: 107308 - DNA, 33 bp, Homo sapien
tggatcttcagcataagctatttttattcatta

SEQ ID NO: 107309 - DNA, 33 bp, Homo sapien
tctcttttacaggctgcactaggaaatcctcag

SEQ ID NO: 107310 - DNA, 33 bp, Homo sapien
tctcttttacaggctggactaggaaatcctcag

SEQ ID NO: 107311 - DNA, 33 bp, Homo sapien
tcacatacactgtgacaaccaattaaaccacag

SEQ ID NO: 107312 - DNA, 33 bp, Homo sapien
tcacatacactgtgaccaccaattaaaccacag

SEQ ID NO: 107313 - DNA, 33 bp, Homo sapien
tgggcatggccttccaaccagtgaagagaactc

SEQ ID NO: 107314 - DNA, 33 bp, Homo sapien
tgggcatggccttccagccagtgaagagaactc

SEQ ID NO: 107315 - DNA, 33 bp, Homo sapien
tacagtatggcccagcaaaaccagcccagctcc

SEQ ID NO: 107316 - DNA, 33 bp, Homo sapien
tacagtatggcccagcgaaaccagcccagctcc

SEQ ID NO: 107317 - DNA, 33 bp, Homo sapien
cagaaacagctctttaccaggtgtgtgtcgagc

SEQ ID NO: 107318 - DNA, 33 bp, Homo sapien
cagaaacagctctttagcaggtgtgtgtcgagc

SEQ ID NO: 107319 - DNA, 33 bp, Homo sapien
aggcaatccaaaatggcccatttctaaggagca

SEQ ID NO: 107320 - DNA, 33 bp, Homo sapien
aggcaatccaaaatggtccatttctaaggagca

SEQ ID NO: 107321 - DNA, 33 bp, Homo sapien
ttatccagggagaaaactaataaagaaacaatg

SEQ ID NO: 107322 - DNA, 33 bp, Homo sapien
ttatccagggagaaaattaataaagaaacaatg

SEQ ID NO: 107323 - DNA, 33 bp, Homo sapien
atacatcagtgtactcactcaattcaaccccct

SEQ ID NO: 107324 - DNA, 33 bp, Homo sapien
atacatcagtgtactcgctcaattcaaccccct

SEQ ID NO: 107325 - DNA, 33 bp, Homo sapien
ccagatccacgtgcccagagacctgacagatgt

SEQ ID NO: 107326 - DNA, 33 bp, Homo sapien
ccagatccacgtgcccggagacctgacagatgt

SEQ ID NO: 107327 - DNA, 33 bp, Homo sapien
attccaactgtgttaaatatccagaggacaaag

SEQ ID NO: 107328 - DNA, 33 bp, Homo sapien
attccaactgtgttaactatccagaggacaaag

SEQ ID NO: 107329 - DNA, 33 bp, Homo sapien
gatctcccagattcaactggacataggcaatta

SEQ ID NO: 107330 - DNA, 33 bp, Homo sapien
gatctcccagattcaattggacataggcaatta

SEQ ID NO: 107331 - DNA, 33 bp, Homo sapien
agatgaaggacaaagggactgccagttcaaaat

SEQ ID NO: 107332 - DNA, 33 bp, Homo sapien
agatgaaggacaaaggtactgccagttcaaaat

SEQ ID NO: 107333 - DNA, 33 bp, Homo sapien
tctccacctgaacaataaaggagttacctagat

SEQ ID NO: 107334 - DNA, 33 bp, Homo sapien
tctccacctgaacaatgaaggagttacctagat

SEQ ID NO: 107335 - DNA, 33 bp, Homo sapien
tgtttatcctggcgtccaggggctgccatgttc

SEQ ID NO: 107336 - DNA, 33 bp, Homo sapien
tgtttatcctggcgtcgaggggctgccatgttc

SEQ ID NO: 107337 - DNA, 33 bp, Homo sapien
ggccaacacagatccacatccaattttctggga

SEQ ID NO: 107338 - DNA, 33 bp, Homo sapien
ggccaacacagatccatatccaattttctggga

SEQ ID NO: 107339 - DNA, 33 bp, Homo sapien
accaaaccacaagcaacagtgctgtgcaccatt

SEQ ID NO: 107340 - DNA, 33 bp, Homo sapien
accaaaccacaagcaagagtgctgtgcaccatt

SEQ ID NO: 107341 - DNA, 33 bp, Homo sapien
cctgtattagctccccaacataaaacctgagct

SEQ ID NO: 107342 - DNA, 33 bp, Homo sapien
cctgtattagctcccccacataaaacctgagct

SEQ ID NO: 107343 - DNA, 33 bp, Homo sapien
acctgcactcttatctcacaagcactggagcct

SEQ ID NO: 107344 - DNA, 33 bp, Homo sapien
acctgcactcttatcttacaagcactggagcct

SEQ ID NO: 107345 - DNA, 33 bp, Homo sapien
aaaaagacagacaatacgctgtgttgataagga

SEQ ID NO: 107346 - DNA, 33 bp, Homo sapien
aaaaagacagacaatatgctgtgttgataagga

SEQ ID NO: 107347 - DNA, 33 bp, Homo sapien
aatcttggagaagaacaaagaagaaggactcac

SEQ ID NO: 107348 - DNA, 33 bp, Homo sapien
aatcttggagaagaacgaagaagaaggactcac

SEQ ID NO: 107349 - DNA, 33 bp, Homo sapien
aaagctcaacaaactaagaattgaagagaatct

SEQ ID NO: 107350 - DNA, 33 bp, Homo sapien
aaagctcaacaaactaggaattgaagagaatct

SEQ ID NO: 107351 - DNA, 33 bp, Homo sapien
gacaattaaaatttacaatgaagaaggcatttt

SEQ ID NO: 107352 - DNA, 33 bp, Homo sapien
gacaattaaaatttaccatgaagaaggcatttt

SEQ ID NO: 107353 - DNA, 33 bp, Homo sapien
tggatatgtcatctaacataaatggaatcataa

SEQ ID NO: 107354 - DNA, 33 bp, Homo sapien
tggatatgtcatctaatataaatggaatcataa

SEQ ID NO: 107355 - DNA, 33 bp, Homo sapien
cttttgtctgctgtaacctttactatcgcccct

SEQ ID NO: 107356 - DNA, 33 bp, Homo sapien
cttttgtctgctgtaatctttactatcgcccct

SEQ ID NO: 107357 - DNA, 33 bp, Homo sapien
tctaagtagtaaatcacgtgcttacatgtccat

SEQ ID NO: 107358 - DNA, 33 bp, Homo sapien
tctaagtagtaaatcatgtgcttacatgtccat

SEQ ID NO: 107359 - DNA, 33 bp, Homo sapien
ctgtatagagttcttcaaaaatatccagcttaa

SEQ ID NO: 107360 - DNA, 33 bp, Homo sapien
ctgtatagagttcttccaaaatatccagcttaa

SEQ ID NO: 107361 - DNA, 33 bp, Homo sapien
tgttacaaagccatgaaaaaagcctttcttgtc

SEQ ID NO: 107362 - DNA, 33 bp, Homo sapien
tgttacaaagccatgagaaaagcctttcttgtc

SEQ ID NO: 107363 - DNA, 33 bp, Homo sapien
agcacagatgccccaaaccctagatgttgctcc

SEQ ID NO: 107364 - DNA, 33 bp, Homo sapien
agcacagatgccccaatccctagatgttgctcc

SEQ ID NO: 107365 - DNA, 33 bp, Homo sapien
accagagtcactgagccatgtagacttccacaa

SEQ ID NO: 107366 - DNA, 33 bp, Homo sapien
accagagtcactgagctatgtagacttccacaa

SEQ ID NO: 107367 - DNA, 33 bp, Homo sapien
aaagtcttctccatctaaatcttactcttctta

SEQ ID NO: 107368 - DNA, 33 bp, Homo sapien
aaagtcttctccatctgaatcttactcttctta

SEQ ID NO: 107369 - DNA, 33 bp, Homo sapien
gagcataggctgaggaaaaggaaccagccccac

SEQ ID NO: 107370 - DNA, 33 bp, Homo sapien
gagcataggctgaggagaaggaaccagccccac

SEQ ID NO: 107371 - DNA, 33 bp, Homo sapien
aaccgcagctccataccgagaggactgaagaca

SEQ ID NO: 107372 - DNA, 33 bp, Homo sapien
aaccgcagctccatactgagaggactgaagaca

SEQ ID NO: 107373 - DNA, 33 bp, Homo sapien
gcccctagactacaagccttccttcacagaaca

SEQ ID NO: 107374 - DNA, 33 bp, Homo sapien
gcccctagactacaaggcttccttcacagaaca

SEQ ID NO: 107375 - DNA, 33 bp, Homo sapien
gccaggtgggaaatacaatttcggaattatcta

SEQ ID NO: 107376 - DNA, 33 bp, Homo sapien
gccaggtgggaaatacgatttcggaattatcta

SEQ ID NO: 107377 - DNA, 33 bp, Homo sapien
gggcaaggcgacagacagaataatggccccacc

SEQ ID NO: 107378 - DNA, 33 bp, Homo sapien
gggcaaggcgacagacggaataatggccccacc

SEQ ID NO: 107379 - DNA, 33 bp, Homo sapien
gaacactgtctaggaaccgaagatgagaccatc

SEQ ID NO: 107380 - DNA, 33 bp, Homo sapien
gaacactgtctaggaatcgaagatgagaccatc

SEQ ID NO: 107381 - DNA, 33 bp, Homo sapien
caaagtaaggatgtagccaaaagtaaatacttg

SEQ ID NO: 107382 - DNA, 33 bp, Homo sapien
caaagtaaggatgtagtcaaaagtaaatacttg

SEQ ID NO: 107383 - DNA, 33 bp, Homo sapien
aggattattagagaccaaaacctcagcatcaca

SEQ ID NO: 107384 - DNA, 33 bp, Homo sapien
aggattattagagaccgaaacctcagcatcaca

SEQ ID NO: 107385 - DNA, 33 bp, Homo sapien
acaacatttcagatcaagaggagtccaggtgga

SEQ ID NO: 107386 - DNA, 33 bp, Homo sapien
acaacatttcagatcaggaggagtccaggtgga

SEQ ID NO: 107387 - DNA, 33 bp, Homo sapien
tggatcactgggtgacaatgatgcatttactaa

SEQ ID NO: 107388 - DNA, 33 bp, Homo sapien
tggatcactgggtgacgatgatgcatttactaa

SEQ ID NO: 107389 - DNA, 33 bp, Homo sapien
gttatctgtggccataaagctgggaattctggg

SEQ ID NO: 107390 - DNA, 33 bp, Homo sapien
gttatctgtggccatacagctgggaattctggg

SEQ ID NO: 107391 - DNA, 33 bp, Homo sapien
agtggggagtcaacacagacatggcttccctgg

SEQ ID NO: 107392 - DNA, 33 bp, Homo sapien
agtggggagtcaacacggacatggcttccctgg

SEQ ID NO: 107393 - DNA, 33 bp, Homo sapien
gggtggaaggcccccaaatccgaagaatttttt

SEQ ID NO: 107394 - DNA, 33 bp, Homo sapien
gggtggaaggcccccagatccgaagaatttttt

SEQ ID NO: 107395 - DNA, 33 bp, Homo sapien
tatggagcaggcaaaacgcaattcaaggccagc

SEQ ID NO: 107396 - DNA, 33 bp, Homo sapien
tatggagcaggcaaaatgcaattcaaggccagc

SEQ ID NO: 107397 - DNA, 33 bp, Homo sapien
gcaatcaggaagcataatagatcatccaagtta

SEQ ID NO: 107398 - DNA, 33 bp, Homo sapien
gcaatcaggaagcatactagatcatccaagtta

SEQ ID NO: 107399 - DNA, 33 bp, Homo sapien
tttcggtttgtttatacgctaagttgcagtttg

SEQ ID NO: 107400 - DNA, 33 bp, Homo sapien
tttcggtttgtttatatgctaagttgcagtttg

SEQ ID NO: 107401 - DNA, 33 bp, Homo sapien
aggggaagaaacaggcactttagttttagatct

SEQ ID NO: 107402 - DNA, 33 bp, Homo sapien
aggggaagaaacaggcgctttagttttagatct

SEQ ID NO: 107403 - DNA, 33 bp, Homo sapien
tttgcaaatgctaaacactcctgtggtggagag

SEQ ID NO: 107404 - DNA, 33 bp, Homo sapien
tttgcaaatgctaaacgctcctgtggtggagag

SEQ ID NO: 107405 - DNA, 33 bp, Homo sapien
tggcattttttttgtcactcagcttgttaaaac

SEQ ID NO: 107406 - DNA, 33 bp, Homo sapien
tggcattttttttgtcgctcagcttgttaaaac

SEQ ID NO: 107407 - DNA, 33 bp, Homo sapien
gagtctgaggatgccacgatgatgaagacagat

SEQ ID NO: 107408 - DNA, 33 bp, Homo sapien
gagtctgaggatgccatgatgatgaagacagat

SEQ ID NO: 107409 - DNA, 33 bp, Homo sapien
cattgacgaccaggcaaccattagacccaaatg

SEQ ID NO: 107410 - DNA, 33 bp, Homo sapien
cattgacgaccaggcagccattagacccaaatg

SEQ ID NO: 107411 - DNA, 33 bp, Homo sapien
cacagaatagctccgacggtttaaccaatagca

SEQ ID NO: 107412 - DNA, 33 bp, Homo sapien
cacagaatagctccgatggtttaaccaatagca

SEQ ID NO: 107413 - DNA, 33 bp, Homo sapien
aggataccatcaaacaacaagagctcattgaca

SEQ ID NO: 107414 - DNA, 33 bp, Homo sapien
aggataccatcaaacagcaagagctcattgaca

SEQ ID NO: 107415 - DNA, 33 bp, Homo sapien
tgctcatgagccgcagaacacaggaagaggagc

SEQ ID NO: 107416 - DNA, 33 bp, Homo sapien
tgctcatgagccgcagcacacaggaagaggagc

SEQ ID NO: 107417 - DNA, 33 bp, Homo sapien
gaatagaatgttgtggaaagtctgactagagca

SEQ ID NO: 107418 - DNA, 33 bp, Homo sapien
gaatagaatgttgtgggaagtctgactagagca

SEQ ID NO: 107419 - DNA, 33 bp, Homo sapien
catgcagatttcatagaagtccacatctgggtc

SEQ ID NO: 107420 - DNA, 33 bp, Homo sapien
catgcagatttcataggagtccacatctgggtc

SEQ ID NO: 107421 - DNA, 33 bp, Homo sapien
cagcaccagctctgggaaggaagagataagctg

SEQ ID NO: 107422 - DNA, 33 bp, Homo sapien
cagcaccagctctggggaggaagagataagctg

SEQ ID NO: 107423 - DNA, 33 bp, Homo sapien
agagtggcctattcaaataagcccagattaatg

SEQ ID NO: 107424 - DNA, 33 bp, Homo sapien
agagtggcctattcaagtaagcccagattaatg

SEQ ID NO: 107425 - DNA, 33 bp, Homo sapien
ttatttgagcaatgcactaggcactgactgggg

SEQ ID NO: 107426 - DNA, 33 bp, Homo sapien
ttatttgagcaatgcagtaggcactgactgggg

SEQ ID NO: 107427 - DNA, 33 bp, Homo sapien
ggacttaagatggtaactgggggccgaaaaatt

SEQ ID NO: 107428 - DNA, 33 bp, Homo sapien
ggacttaagatggtaagtgggggccgaaaaatt

SEQ ID NO: 107429 - DNA, 33 bp, Homo sapien
atttggagtgatttccagaacgacaccatcccc

SEQ ID NO: 107430 - DNA, 33 bp, Homo sapien
atttggagtgatttccggaacgacaccatcccc

SEQ ID NO: 107431 - DNA, 33 bp, Homo sapien
gggcattgagaccacaagggaacgtgagcatct

SEQ ID NO: 107432 - DNA, 33 bp, Homo sapien
gggcattgagaccacacgggaacgtgagcatct

SEQ ID NO: 107433 - DNA, 33 bp, Homo sapien
gcatcagtgagggagactaaatggcagtggagt

SEQ ID NO: 107434 - DNA, 33 bp, Homo sapien
gcatcagtgagggagattaaatggcagtggagt

SEQ ID NO: 107435 - DNA, 33 bp, Homo sapien
gtgatctcgattcagaaggtggactctacttga

SEQ ID NO: 107436 - DNA, 33 bp, Homo sapien
gtgatctcgattcagagggtggactctacttga

SEQ ID NO: 107437 - DNA, 33 bp, Homo sapien
tgggctccaggtcgtcactacctcctgcagcag

SEQ ID NO: 107438 - DNA, 33 bp, Homo sapien
tgggctccaggtcgtcgctacctcctgcagcag

SEQ ID NO: 107439 - DNA, 33 bp, Homo sapien
ctcagatcaacagacacggaaacctatttaggg

SEQ ID NO: 107440 - DNA, 33 bp, Homo sapien
ctcagatcaacagacatggaaacctatttaggg

SEQ ID NO: 107441 - DNA, 33 bp, Homo sapien
gaagatttcaacaaaaaagaggcttaggagaat

SEQ ID NO: 107442 - DNA, 33 bp, Homo sapien
gaagatttcaacaaaagagaggcttaggagaat

SEQ ID NO: 107443 - DNA, 33 bp, Homo sapien
tgaggacacacgtacactgaagcacatagtcaa

SEQ ID NO: 107444 - DNA, 33 bp, Homo sapien
tgaggacacacgtacagtgaagcacatagtcaa

SEQ ID NO: 107445 - DNA, 33 bp, Homo sapien
tccttttctgttacaactggctccacaagtaaa

SEQ ID NO: 107446 - DNA, 33 bp, Homo sapien
tccttttctgttacaattggctccacaagtaaa

SEQ ID NO: 107447 - DNA, 33 bp, Homo sapien
ctgtgtcctgggacaaccactgtatctaccctc

SEQ ID NO: 107448 - DNA, 33 bp, Homo sapien
ctgtgtcctgggacaatcactgtatctaccctc

SEQ ID NO: 107449 - DNA, 33 bp, Homo sapien
ttccaacaaaaggagccgataactcatgctaca

SEQ ID NO: 107450 - DNA, 33 bp, Homo sapien
ttccaacaaaaggagctgataactcatgctaca

SEQ ID NO: 107451 - DNA, 33 bp, Homo sapien
tccccattttccagaagaagatgcagaccaaag

SEQ ID NO: 107452 - DNA, 33 bp, Homo sapien
tccccattttccagaataagatgcagaccaaag

SEQ ID NO: 107453 - DNA, 33 bp, Homo sapien
ccctgctgtgccactgaacagtaaagccacctg

SEQ ID NO: 107454 - DNA, 33 bp, Homo sapien
ccctgctgtgccactggacagtaaagccacctg

SEQ ID NO: 107455 - DNA, 33 bp, Homo sapien
cagggaagatgaataaagatgaaggtagagtgg

SEQ ID NO: 107456 - DNA, 33 bp, Homo sapien
cagggaagatgaataacgatgaaggtagagtgg

SEQ ID NO: 107457 - DNA, 33 bp, Homo sapien
ccaggttgaaacaacacggactcgcaccgagtc

SEQ ID NO: 107458 - DNA, 33 bp, Homo sapien
ccaggttgaaacaacatggactcgcaccgagtc

SEQ ID NO: 107459 - DNA, 33 bp, Homo sapien
gttgggggaaggagtcacctctttgcattgatc

SEQ ID NO: 107460 - DNA, 33 bp, Homo sapien
gttgggggaaggagtcgcctctttgcattgatc

SEQ ID NO: 107461 - DNA, 33 bp, Homo sapien
gagtgctggtttgcataaaaaaaatggcaacag

SEQ ID NO: 107462 - DNA, 33 bp, Homo sapien
gagtgctggtttgcattaaaaaaatggcaacag

SEQ ID NO: 107463 - DNA, 33 bp, Homo sapien
aggccttccaggaaaaactcacttgtgcaaaag

SEQ ID NO: 107464 - DNA, 33 bp, Homo sapien
aggccttccaggaaaagctcacttgtgcaaaag

SEQ ID NO: 107465 - DNA, 33 bp, Homo sapien
tccttctgagcaagcgaaagaagaggaaagctg

SEQ ID NO: 107466 - DNA, 33 bp, Homo sapien
tccttctgagcaagcggaagaagaggaaagctg

SEQ ID NO: 107467 - DNA, 33 bp, Homo sapien
tcaacctggaatcttgaaaaggccatgtggtaa

SEQ ID NO: 107468 - DNA, 33 bp, Homo sapien
tcaacctggaatcttggaaaggccatgtggtaa

SEQ ID NO: 107469 - DNA, 33 bp, Homo sapien
gatgatgcaaactgaaagcagtgaatgccaggg

SEQ ID NO: 107470 - DNA, 33 bp, Homo sapien
gatgatgcaaactgaacgcagtgaatgccaggg

SEQ ID NO: 107471 - DNA, 33 bp, Homo sapien
catctttcccctgtcaactgtggaaggggaatg

SEQ ID NO: 107472 - DNA, 33 bp, Homo sapien
catctttcccctgtcatctgtggaaggggaatg

SEQ ID NO: 107473 - DNA, 33 bp, Homo sapien
tgctgactggggcttcaaggacagaactactct

SEQ ID NO: 107474 - DNA, 33 bp, Homo sapien
tgctgactggggcttcgaggacagaactactct

SEQ ID NO: 107475 - DNA, 33 bp, Homo sapien
ctggtttgcttcttgcaatctggtcatccagct

SEQ ID NO: 107476 - DNA, 33 bp, Homo sapien
ctggtttgcttcttgcgatctggtcatccagct

SEQ ID NO: 107477 - DNA, 33 bp, Homo sapien
gttttgttatccaatacagtaaccaccaccttt

SEQ ID NO: 107478 - DNA, 33 bp, Homo sapien
gttttgttatccaatagagtaaccaccaccttt

SEQ ID NO: 107479 - DNA, 33 bp, Homo sapien
taaaaaaataaacggaacctcattggaacactc

SEQ ID NO: 107480 - DNA, 33 bp, Homo sapien
taaaaaaataaacggagcctcattggaacactc

SEQ ID NO: 107481 - DNA, 33 bp, Homo sapien
ctctttcataaaaacactggctcatgagtgttt

SEQ ID NO: 107482 - DNA, 33 bp, Homo sapien
ctctttcataaaaacattggctcatgagtgttt

SEQ ID NO: 107483 - DNA, 33 bp, Homo sapien
aaacagtgtgatcagaacagggagaaggagagg

SEQ ID NO: 107484 - DNA, 33 bp, Homo sapien
aaacagtgtgatcagagcagggagaaggagagg

SEQ ID NO: 107485 - DNA, 33 bp, Homo sapien
taccagaaaagcaaaaattatcttcaccatccc

SEQ ID NO: 107486 - DNA, 33 bp, Homo sapien
taccagaaaagcaaaagttatcttcaccatccc

SEQ ID NO: 107487 - DNA, 33 bp, Homo sapien
gtcgaatccagcaccacgttggtttcagttggt

SEQ ID NO: 107488 - DNA, 33 bp, Homo sapien
gtcgaatccagcaccatgttggtttcagttggt

SEQ ID NO: 107489 - DNA, 33 bp, Homo sapien
ggaatttcatgaggaagttcccaaatcttgaaa

SEQ ID NO: 107490 - DNA, 33 bp, Homo sapien
ggaatttcatgaggaatttcccaaatcttgaaa

SEQ ID NO: 107491 - DNA, 33 bp, Homo sapien
caaaaatagcctgctccgaaggctgtcttagga

SEQ ID NO: 107492 - DNA, 33 bp, Homo sapien
caaaaatagcctgctcggaaggctgtcttagga

SEQ ID NO: 107493 - DNA, 33 bp, Homo sapien
cctggggctcatcctgacaagaggcctggaggt

SEQ ID NO: 107494 - DNA, 33 bp, Homo sapien
cctggggctcatcctgccaagaggcctggaggt

SEQ ID NO: 107495 - DNA, 33 bp, Homo sapien
tgtgccaaacaggctcactgggcttcccgaagg

SEQ ID NO: 107496 - DNA, 33 bp, Homo sapien
tgtgccaaacaggctcgctgggcttcccgaagg

SEQ ID NO: 107497 - DNA, 33 bp, Homo sapien
gtgttgtctcctaaaacaggactgtcttgccag

SEQ ID NO: 107498 - DNA, 33 bp, Homo sapien
gtgttgtctcctaaaataggactgtcttgccag

SEQ ID NO: 107499 - DNA, 33 bp, Homo sapien
ttttgctactggaatgcaatttacttttaattt

SEQ ID NO: 107500 - DNA, 33 bp, Homo sapien
ttttgctactggaatgtaatttacttttaattt

SEQ ID NO: 107501 - DNA, 33 bp, Homo sapien
aattgctttttacttcacacttacttgagaaaa

SEQ ID NO: 107502 - DNA, 33 bp, Homo sapien
aattgctttttacttcgcacttacttgagaaaa

SEQ ID NO: 107503 - DNA, 33 bp, Homo sapien
cgtgcatattatttaacccagtcaagtcaacaa

SEQ ID NO: 107504 - DNA, 33 bp, Homo sapien
cgtgcatattatttaatccagtcaagtcaacaa

SEQ ID NO: 107505 - DNA, 33 bp, Homo sapien
tcttaacagcttctacaactgggaagatatcaa

SEQ ID NO: 107506 - DNA, 33 bp, Homo sapien
tcttaacagcttctactactgggaagatatcaa

SEQ ID NO: 107507 - DNA, 33 bp, Homo sapien
ttattaccagtaatccccagctccaacagtgtg

SEQ ID NO: 107508 - DNA, 33 bp, Homo sapien
ttattaccagtaatcctcagctccaacagtgtg

SEQ ID NO: 107509 - DNA, 33 bp, Homo sapien
aaaacatgatacgtcaatccaaaactactcagc

SEQ ID NO: 107510 - DNA, 33 bp, Homo sapien
aaaacatgatacgtcagtccaaaactactcagc

SEQ ID NO: 107511 - DNA, 33 bp, Homo sapien
tattataatttcccacaggcatgttagtttcat

SEQ ID NO: 107512 - DNA, 33 bp, Homo sapien
tattataatttcccacgggcatgttagtttcat

SEQ ID NO: 107513 - DNA, 33 bp, Homo sapien
tgagctgttttacatacaagaacaaggcagggt

SEQ ID NO: 107514 - DNA, 33 bp, Homo sapien
tgagctgttttacatagaagaacaaggcagggt

SEQ ID NO: 107515 - DNA, 33 bp, Homo sapien
ggcaagccaggaacaaagataagtggattttac

SEQ ID NO: 107516 - DNA, 33 bp, Homo sapien
ggcaagccaggaacaacgataagtggattttac

SEQ ID NO: 107517 - DNA, 33 bp, Homo sapien
aggccaatgagtataaagaagatggccacaaat

SEQ ID NO: 107518 - DNA, 33 bp, Homo sapien
aggccaatgagtataaggaagatggccacaaat

SEQ ID NO: 107519 - DNA, 33 bp, Homo sapien
accaacttccagaatgcaaatagggttgtttgg

SEQ ID NO: 107520 - DNA, 33 bp, Homo sapien
accaacttccagaatgtaaatagggttgtttgg

SEQ ID NO: 107521 - DNA, 33 bp, Homo sapien
ctagaaagcccagaaacgaactcactcatgcac

SEQ ID NO: 107522 - DNA, 33 bp, Homo sapien
ctagaaagcccagaaatgaactcactcatgcac

SEQ ID NO: 107523 - DNA, 33 bp, Homo sapien
taactgggagatccacacataaacaactaaaat

SEQ ID NO: 107524 - DNA, 33 bp, Homo sapien
taactgggagatccacgcataaacaactaaaat

SEQ ID NO: 107525 - DNA, 33 bp, Homo sapien
agtaagctcatatcagactgagatttcaccttt

SEQ ID NO: 107526 - DNA, 33 bp, Homo sapien
agtaagctcatatcaggctgagatttcaccttt

SEQ ID NO: 107527 - DNA, 33 bp, Homo sapien
gagtcttatctccccactccgaatacaagctcc

SEQ ID NO: 107528 - DNA, 33 bp, Homo sapien
gagtcttatctccccattccgaatacaagctcc

SEQ ID NO: 107529 - DNA, 33 bp, Homo sapien
ccatatcagtatctgaaggtcacagaacaaggg

SEQ ID NO: 107530 - DNA, 33 bp, Homo sapien
ccatatcagtatctgatggtcacagaacaaggg

SEQ ID NO: 107531 - DNA, 33 bp, Homo sapien
tttactggaaaagaaaattccttggactcaaag

SEQ ID NO: 107532 - DNA, 33 bp, Homo sapien
tttactggaaaagaaagttccttggactcaaag

SEQ ID NO: 107533 - DNA, 33 bp, Homo sapien
taaataaatgaatgaacggctacacaagagact

SEQ ID NO: 107534 - DNA, 33 bp, Homo sapien
taaataaatgaatgaatggctacacaagagact

SEQ ID NO: 107535 - DNA, 33 bp, Homo sapien
taacatttgcctgataacagtttttcctgatta

SEQ ID NO: 107536 - DNA, 33 bp, Homo sapien
taacatttgcctgatagcagtttttcctgatta

SEQ ID NO: 107537 - DNA, 33 bp, Homo sapien
gggacttatttgcataacgtgaactgacagaca

SEQ ID NO: 107538 - DNA, 33 bp, Homo sapien
gggacttatttgcatagcgtgaactgacagaca

SEQ ID NO: 107539 - DNA, 33 bp, Homo sapien; identical to SEQ ID NO: 107537

SEQ ID NO: 107540 - DNA, 33 bp, Homo sapien; identical to SEQ ID NO: 107538

SEQ ID NO: 107541 - DNA, 33 bp, Homo sapien
aaaagtacaaactataaattggcagtagaagga

SEQ ID NO: 107542 - DNA, 33 bp, Homo sapien
aaaagtacaaactatacattggcagtagaagga

SEQ ID NO: 107543 - DNA, 33 bp, Homo sapien; identical to SEQ ID NO: 107541

SEQ ID NO: 107544 - DNA, 33 bp, Homo sapien; identical to SEQ ID NO: 107542

SEQ ID NO: 107545 - DNA, 33 bp, Homo sapien
ttgtgatcagaaccagcacaaaggtgagtgtaa

SEQ ID NO: 107546 - DNA, 33 bp, Homo sapien
ttgtgatcagaaccagtacaaaggtgagtgtaa

SEQ ID NO: 107547 - DNA, 33 bp, Homo sapien; identical to SEQ ID NO: 107545

SEQ ID NO: 107548 - DNA, 33 bp, Homo sapien; identical to SEQ ID NO: 107546

SEQ ID NO: 107549 - DNA, 33 bp, Homo sapien
ttataaataacaaaggcaatgctactttcagtt

SEQ ID NO: 107550 - DNA, 33 bp, Homo sapien
ttataaataacaaaggtaatgctactttcagtt

SEQ ID NO: 107551 - DNA, 33 bp, Homo sapien; identical to SEQ ID NO: 107549

SEQ ID NO: 107552 - DNA, 33 bp, Homo sapien; identical to SEQ ID NO: 107550

SEQ ID NO: 107553 - DNA, 33 bp, Homo sapien
tttcttctcctctgagcatataaaaattagtta

SEQ ID NO: 107554 - DNA, 33 bp, Homo sapien
tttcttctcctctgaggatataaaaattagtta

SEQ ID NO: 107555 - DNA, 33 bp, Homo sapien; identical to SEQ ID NO: 107553

SEQ ID NO: 107556 - DNA, 33 bp, Homo sapien; identical to SEQ ID NO: 107554

SEQ ID NO: 107557 - DNA, 33 bp, Homo sapien
ccttttcttacccttcactggatgtcacttcct

SEQ ID NO: 107558 - DNA, 33 bp, Homo sapien
ccttttcttacccttcgctggatgtcacttcct

SEQ ID NO: 107559 - DNA, 33 bp, Homo sapien
aaaaatgcccaggaaactccaaaacactgggaa

SEQ ID NO: 107560 - DNA, 33 bp, Homo sapien
aaaaatgcccaggaaattccaaaacactgggaa

SEQ ID NO: 107561 - DNA, 33 bp, Homo sapien
ttagcataaaagactacgatagaatcagcgtaa

SEQ ID NO: 107562 - DNA, 33 bp, Homo sapien
ttagcataaaagactatgatagaatcagcgtaa

SEQ ID NO: 107563 - DNA, 33 bp, Homo sapien
tgaagaaaaatctgcaaatatgtgtctggcaca

SEQ ID NO: 107564 - DNA, 33 bp, Homo sapien
tgaagaaaaatctgcacatatgtgtctggcaca

SEQ ID NO: 107565 - DNA, 33 bp, Homo sapien
tgagttgcacctaaaacctggtctttgaagact

SEQ ID NO: 107566 - DNA, 33 bp, Homo sapien
tgagttgcacctaaaagctggtctttgaagact

SEQ ID NO: 107567 - DNA, 33 bp, Homo sapien
taaagcacaccacaaaacaggcataattgcacc

SEQ ID NO: 107568 - DNA, 33 bp, Homo sapien
taaagcacaccacaaagcaggcataattgcacc

SEQ ID NO: 107569 - DNA, 33 bp, Homo sapien; identical to SEQ ID NO: 107567

SEQ ID NO: 107570 - DNA, 33 bp, Homo sapien; identical to SEQ ID NO: 107568

SEQ ID NO: 107571 - DNA, 33 bp, Homo sapien
aaagttatctgactgggactttaaaattactat

SEQ ID NO: 107572 - DNA, 33 bp, Homo sapien
aaagttatctgactggtactttaaaattactat

SEQ ID NO: 107573 - DNA, 33 bp, Homo sapien
cgtaagaggcagaggaatacagggagcatatga

SEQ ID NO: 107574 - DNA, 33 bp, Homo sapien
cgtaagaggcagaggagtacagggagcatatga

SEQ ID NO: 107575 - DNA, 33 bp, Homo sapien
gattcactattagaaactgatggaacaagaaca

SEQ ID NO: 107576 - DNA, 33 bp, Homo sapien
gattcactattagaaattgatggaacaagaaca

SEQ ID NO: 107577 - DNA, 33 bp, Homo sapien
tatctttataacaaaacgccactcctggtacca

SEQ ID NO: 107578 - DNA, 33 bp, Homo sapien
tatctttataacaaaatgccactcctggtacca

SEQ ID NO: 107579 - DNA, 33 bp, Homo sapien
ctatccaaacaacacgaactgcgagtgggcact

SEQ ID NO: 107580 - DNA, 33 bp, Homo sapien
ctatccaaacaacacgcactgcgagtgggcact

SEQ ID NO: 107581 - DNA, 33 bp, Homo sapien
gtgctttcgatggtgcagagatctttgcttacc

SEQ ID NO: 107582 - DNA, 33 bp, Homo sapien
gtgctttcgatggtgcggagatctttgcttacc

SEQ ID NO: 107583 - DNA, 33 bp, Homo sapien
tttagctacctgtgtaactgattaattcatgtt

SEQ ID NO: 107584 - DNA, 33 bp, Homo sapien
tttagctacctgtgtacctgattaattcatgtt

SEQ ID NO: 107585 - DNA, 33 bp, Homo sapien
ggaggaatggggccaccgagagcagcgggcatc

SEQ ID NO: 107586 - DNA, 33 bp, Homo sapien
ggaggaatggggccactgagagcagcgggcatc

SEQ ID NO: 107587 - DNA, 33 bp, Homo sapien
acccttcctactcaataaactgtggagcatggg

SEQ ID NO: 107588 - DNA, 33 bp, Homo sapien
acccttcctactcaatgaactgtggagcatggg

SEQ ID NO: 107589 - DNA, 33 bp, Homo sapien
ttttgcaaaagctagtgaaaagatgcgactgtc

SEQ ID NO: 107590 - DNA, 33 bp, Homo sapien
ttttgcaaaagctagttaaaagatgcgactgtc

SEQ ID NO: 107591 - DNA, 33 bp, Homo sapien
gcaacagggatctgccagagcattttagtcaga

SEQ ID NO: 107592 - DNA, 33 bp, Homo sapien
gcaacagggatctgccggagcattttagtcaga

SEQ ID NO: 107593 - DNA, 33 bp, Homo sapien
ggaaacatatatacacagctgtcaggatatcaa

SEQ ID NO: 107594 - DNA, 33 bp, Homo sapien
ggaaacatatatacactgctgtcaggatatcaa

SEQ ID NO: 107595 - DNA, 33 bp, Homo sapien
aaaacatataactgtccctagatgaagttgcaa

SEQ ID NO: 107596 - DNA, 33 bp, Homo sapien
aaaacatataactgtctctagatgaagttgcaa

SEQ ID NO: 107597 - DNA, 33 bp, Homo sapien
gatgttttaatggaagaacttatgctacaactg

SEQ ID NO: 107598 - DNA, 33 bp, Homo sapien
gatgttttaatggaagcacttatgctacaactg

SEQ ID NO: 107599 - DNA, 33 bp, Homo sapien
tatggtgtaaagaaagcattgagttccagcttt

SEQ ID NO: 107600 - DNA, 33 bp, Homo sapien
tatggtgtaaagaaaggattgagttccagcttt

SEQ ID NO: 107601 - DNA, 33 bp, Homo sapien; identical to SEQ ID NO: 107599

SEQ ID NO: 107602 - DNA, 33 bp, Homo sapien; identical to SEQ ID NO: 107600

SEQ ID NO: 107603 - DNA, 33 bp, Homo sapien
agttgctctggttcaaatgcttctaacaaactc

SEQ ID NO: 107604 - DNA, 33 bp, Homo sapien
agttgctctggttcaagtgcttctaacaaactc

SEQ ID NO: 107605 - DNA, 33 bp, Homo sapien
tggatgggagtatgaaggagaatgtaaagcaat

SEQ ID NO: 107606 - DNA, 33 bp, Homo sapien
tggatgggagtatgaatgagaatgtaaagcaat

SEQ ID NO: 107607 - DNA, 33 bp, Homo sapien
agctatttctgctttgaacacaacaatgggctg

SEQ ID NO: 107608 - DNA, 33 bp, Homo sapien
agctatttctgctttggacacaacaatgggctg

SEQ ID NO: 107609 - DNA, 33 bp, Homo sapien
ggtttcaatccctgtccagggtggctctcctcc

SEQ ID NO: 107610 - DNA, 33 bp, Homo sapien
ggtttcaatccctgtcgagggtggctctcctcc

SEQ ID NO: 107611 - DNA, 33 bp, Homo sapien
tcacaagttggctctcaaatgtgacatggagca

SEQ ID NO: 107612 - DNA, 33 bp, Homo sapien
tcacaagttggctctcgaatgtgacatggagca

SEQ ID NO: 107613 - DNA, 33 bp, Homo sapien
tgtagggctcaaaggacaagataagccaagacc

SEQ ID NO: 107614 - DNA, 33 bp, Homo sapien
tgtagggctcaaaggataagataagccaagacc

SEQ ID NO: 107615 - DNA, 33 bp, Homo sapien
gctgactaaatatcgacgggtttactattaaaa

SEQ ID NO: 107616 - DNA, 33 bp, Homo sapien
gctgactaaatatcgatgggtttactattaaaa

SEQ ID NO: 107617 - DNA, 33 bp, Homo sapien
atactgagagtaagcactccatttaaatataga

SEQ ID NO: 107618 - DNA, 33 bp, Homo sapien
atactgagagtaagcattccatttaaatataga

SEQ ID NO: 107619 - DNA, 33 bp, Homo sapien
gatttctttttaaacaaatgagaatttacaaga

SEQ ID NO: 107620 - DNA, 33 bp, Homo sapien
gatttctttttaaacacatgagaatttacaaga

SEQ ID NO: 107621 - DNA, 33 bp, Homo sapien
ttcagcagcatccttacaaagttacagagacat

SEQ ID NO: 107622 - DNA, 33 bp, Homo sapien
ttcagcagcatccttataaagttacagagacat

SEQ ID NO: 107623 - DNA, 33 bp, Homo sapien
aatattgatgaatcctcaaaaaatgctagcaaa

SEQ ID NO: 107624 - DNA, 33 bp, Homo sapien
aatattgatgaatcctgaaaaaatgctagcaaa

SEQ ID NO: 107625 - DNA, 33 bp, Homo sapien
ttcaaaacttactataacactgcggtaatcaag

SEQ ID NO: 107626 - DNA, 33 bp, Homo sapien
ttcaaaacttactatagcactgcggtaatcaag

SEQ ID NO: 107627 - DNA, 33 bp, Homo sapien
tgtaagtcatgtatccgattagagacttctatc

SEQ ID NO: 107628 - DNA, 33 bp, Homo sapien
tgtaagtcatgtatcctattagagacttctatc

SEQ ID NO: 107629 - DNA, 33 bp, Homo sapien
ccgcccaggagcgcgcaaaaccttctccacacc

SEQ ID NO: 107630 - DNA, 33 bp, Homo sapien
ccgcccaggagcgcgcgaaaccttctccacacc

SEQ ID NO: 107631 - DNA, 33 bp, Homo sapien
ctttgtgcgagcgcagacatccccattccatgc

SEQ ID NO: 107632 - DNA, 33 bp, Homo sapien
ctttgtgcgagcgcaggcatccccattccatgc

SEQ ID NO: 107633 - DNA, 33 bp, Homo sapien
acatcacgctgaagacaccccacggggactaca

SEQ ID NO: 107634 - DNA, 33 bp, Homo sapien
acatcacgctgaagacgccccacggggactaca

SEQ ID NO: 107635 - DNA, 33 bp, Homo sapien
taaactgagagcaagccgaagggttatgactcg

SEQ ID NO: 107636 - DNA, 33 bp, Homo sapien
taaactgagagcaagctgaagggttatgactcg

SEQ ID NO: 107637 - DNA, 33 bp, Homo sapien
aatccaccacatggcaaaacaaccaatcccttg

SEQ ID NO: 107638 - DNA, 33 bp, Homo sapien
aatccaccacatggcacaacaaccaatcccttg

SEQ ID NO: 107639 - DNA, 33 bp, Homo sapien
gtattcttataagcaaagtgaaaacccttgtat

SEQ ID NO: 107640 - DNA, 33 bp, Homo sapien
gtattcttataagcaatgtgaaaacccttgtat

SEQ ID NO: 107641 - DNA, 33 bp, Homo sapien
cttctgatttccccgagtcctaatgaagttgaa

SEQ ID NO: 107642 - DNA, 33 bp, Homo sapien
cttctgatttccccgattcctaatgaagttgaa

SEQ ID NO: 107643 - DNA, 33 bp, Homo sapien
gatggtcattaccgggaatggaaggagggttga

SEQ ID NO: 107644 - DNA, 33 bp, Homo sapien
gatggtcattaccggggatggaaggagggttga

SEQ ID NO: 107645 - DNA, 33 bp, Homo sapien
ggctggatccaagtgaagaaggtaccagaagga

SEQ ID NO: 107646 - DNA, 33 bp, Homo sapien
ggctggatccaagtgaggaaggtaccagaagga

SEQ ID NO: 107647 - DNA, 33 bp, Homo sapien
acattatgttcccagactcgagcatcatggaga

SEQ ID NO: 107648 - DNA, 33 bp, Homo sapien
acattatgttcccagattcgagcatcatggaga

SEQ ID NO: 107649 - DNA, 33 bp, Homo sapien
taattattgatactgacagtgaaaatattgaca

SEQ ID NO: 107650 - DNA, 33 bp, Homo sapien
taattattgatactgatagtgaaaatattgaca

SEQ ID NO: 107651 - DNA, 33 bp, Homo sapien
cctctttcttcttagtaaactgacactcgggtc

SEQ ID NO: 107652 - DNA, 33 bp, Homo sapien
cctctttcttcttagtgaactgacactcgggtc

SEQ ID NO: 107653 - DNA, 33 bp, Homo sapien
aatgaagtatacccacagctaaaatcctaaaaa

SEQ ID NO: 107654 - DNA, 33 bp, Homo sapien
aatgaagtatacccactgctaaaatcctaaaaa

SEQ ID NO: 107655 - DNA, 33 bp, Homo sapien
tttccctgataacatagaatgtgcagctttttt

SEQ ID NO: 107656 - DNA, 33 bp, Homo sapien
tttccctgataacatataatgtgcagctttttt

SEQ ID NO: 107657 - DNA, 33 bp, Homo sapien
ttttttgtcaacactgaaaaagaacagtttctg

SEQ ID NO: 107658 - DNA, 33 bp, Homo sapien
ttttttgtcaacactgtaaaagaacagtttctg

SEQ ID NO: 107659 - DNA, 33 bp, Homo sapien
ttctttctgttcataaaacagactcatgacttt

SEQ ID NO: 107660 - DNA, 33 bp, Homo sapien
ttctttctgttcataagacagactcatgacttt

SEQ ID NO: 107661 - DNA, 33 bp, Homo sapien
gtctaaggctatggaaaaccactactaatctct

SEQ ID NO: 107662 - DNA, 33 bp, Homo sapien
gtctaaggctatggaacaccactactaatctct

SEQ ID NO: 107663 - DNA, 33 bp, Homo sapien
tcctgaaacaaaatgaaagacatctagggatgc

SEQ ID NO: 107664 - DNA, 33 bp, Homo sapien
tcctgaaacaaaatgagagacatctagggatgc

SEQ ID NO: 107665 - DNA, 33 bp, Homo sapien
tcatcctcagaaataaaagaagagagcaataag

SEQ ID NO: 107666 - DNA, 33 bp, Homo sapien
tcatcctcagaaataacagaagagagcaataag

SEQ ID NO: 107667 - DNA, 33 bp, Homo sapien
caaagccagccactaaaagacttggatgtagca

SEQ ID NO: 107668 - DNA, 33 bp, Homo sapien
caaagccagccactaagagacttggatgtagca

SEQ ID NO: 107669 - DNA, 33 bp, Homo sapien
gcaagccacagaaaagccacagaatggcctctt

SEQ ID NO: 107670 - DNA, 33 bp, Homo sapien
gcaagccacagaaaagtcacagaatggcctctt

SEQ ID NO: 107671 - DNA, 33 bp, Homo sapien
gtgttcatttttgccactcttgagacttgtaca

SEQ ID NO: 107672 - DNA, 33 bp, Homo sapien
gtgttcatttttgccattcttgagacttgtaca

SEQ ID NO: 107673 - DNA, 33 bp, Homo sapien
gtgtggctaagagtgcacaaaaaaatcctcaga

SEQ ID NO: 107674 - DNA, 33 bp, Homo sapien
gtgtggctaagagtgctcaaaaaaatcctcaga

SEQ ID NO: 107675 - DNA, 33 bp, Homo sapien
ggtgagtagcacaacaagaagtcaaaacatgga

SEQ ID NO: 107676 - DNA, 33 bp, Homo sapien
ggtgagtagcacaacaggaagtcaaaacatgga

SEQ ID NO: 107677 - DNA, 33 bp, Homo sapien
ttaataacttggttaaatgctagtggattcaca

SEQ ID NO: 107678 - DNA, 33 bp, Homo sapien
ttaataacttggttaagtgctagtggattcaca

SEQ ID NO: 107679 - DNA, 33 bp, Homo sapien
cttattgatgagtggcacattaagagcaaagtc

SEQ ID NO: 107680 - DNA, 33 bp, Homo sapien
cttattgatgagtggcgcattaagagcaaagtc

SEQ ID NO: 107681 - DNA, 33 bp, Homo sapien
atgcctacaggcaaataatcttcttcaaagtca

SEQ ID NO: 107682 - DNA, 33 bp, Homo sapien
atgcctacaggcaaatgatcttcttcaaagtca

SEQ ID NO: 107683 - DNA, 33 bp, Homo sapien
tatatggtgagagatacgggtccagtgtcattc

SEQ ID NO: 107684 - DNA, 33 bp, Homo sapien
tatatggtgagagatatgggtccagtgtcattc

SEQ ID NO: 107685 - DNA, 33 bp, Homo sapien
cccgcttagtcagggacaattatggtctagttg

SEQ ID NO: 107686 - DNA, 33 bp, Homo sapien
cccgcttagtcagggataattatggtctagttg

SEQ ID NO: 107687 - DNA, 33 bp, Homo sapien
tgttctgtttctcagaagtgaaatgctaaaaga

SEQ ID NO: 107688 - DNA, 33 bp, Homo sapien
tgttctgtttctcagacgtgaaatgctaaaaga

SEQ ID NO: 107689 - DNA, 33 bp, Homo sapien
tctagcaatccataccgcttgaagatctcacgt

SEQ ID NO: 107690 - DNA, 33 bp, Homo sapien
tctagcaatccatacctcttgaagatctcacgt

SEQ ID NO: 107691 - DNA, 33 bp, Homo sapien
agactgtaggaattgccaaaaaatatgcaacac

SEQ ID NO: 107692 - DNA, 33 bp, Homo sapien
agactgtaggaattgctaaaaaatatgcaacac

SEQ ID NO: 107693 - DNA, 33 bp, Homo sapien
gtagcagtaacattacacttgaatacttcctga

SEQ ID NO: 107694 - DNA, 33 bp, Homo sapien
gtagcagtaacattacgcttgaatacttcctga

SEQ ID NO: 107695 - DNA, 33 bp, Homo sapien
ataatcatatcgcggcaaatagggtatacatcc

SEQ ID NO: 107696 - DNA, 33 bp, Homo sapien
ataatcatatcgcggcgaatagggtatacatcc

SEQ ID NO: 107697 - DNA, 33 bp, Homo sapien
ctgattagtattgtgcactaggaccaccggtgg

SEQ ID NO: 107698 - DNA, 33 bp, Homo sapien
ctgattagtattgtgcgctaggaccaccggtgg

SEQ ID NO: 107699 - DNA, 33 bp, Homo sapien
aggttttatagctccaatattaaggttcatgat

SEQ ID NO: 107700 - DNA, 33 bp, Homo sapien
aggttttatagctccactattaaggttcatgat

SEQ ID NO: 107701 - DNA, 33 bp, Homo sapien
gtgattatagcagaaacggaactactacataag

SEQ ID NO: 107702 - DNA, 33 bp, Homo sapien
gtgattatagcagaaatggaactactacataag

SEQ ID NO: 107703 - DNA, 33 bp, Homo sapien
ctctctggtcctaaaacaaggtataagataggg

SEQ ID NO: 107704 - DNA, 33 bp, Homo sapien
ctctctggtcctaaaataaggtataagataggg

SEQ ID NO: 107705 - DNA, 33 bp, Homo sapien
agatctgatggttttacacatgtttgacagttg

SEQ ID NO: 107706 - DNA, 33 bp, Homo sapien
agatctgatggttttatacatgtttgacagttg

SEQ ID NO: 107707 - DNA, 33 bp, Homo sapien
ttacgtttcctgggataaaaatactctcttttt

SEQ ID NO: 107708 - DNA, 33 bp, Homo sapien
ttacgtttcctgggatgaaaatactctcttttt

SEQ ID NO: 107709 - DNA, 33 bp, Homo sapien
tgtggtaggatttccgaccttattgtaatttta

SEQ ID NO: 107710 - DNA, 33 bp, Homo sapien
tgtggtaggatttccggccttattgtaatttta

SEQ ID NO: 107711 - DNA, 33 bp, Homo sapien
gtcaaagcctcctaaaataacagaattgaggga

SEQ ID NO: 107712 - DNA, 33 bp, Homo sapien
gtcaaagcctcctaaagtaacagaattgaggga

SEQ ID NO: 107713 - DNA, 33 bp, Homo sapien
aaaaatggctttctgacgcattcgaccagtttt

SEQ ID NO: 107714 - DNA, 33 bp, Homo sapien
aaaaatggctttctgaggcattcgaccagtttt

SEQ ID NO: 107715 - DNA, 33 bp, Homo sapien
aattcctggattcatacgttttcaatactaacc

SEQ ID NO: 107716 - DNA, 33 bp, Homo sapien
aattcctggattcatatgttttcaatactaacc

SEQ ID NO: 107717 - DNA, 33 bp, Homo sapien; identical to SEQ ID NO: 107715

SEQ ID NO: 107718 - DNA, 33 bp, Homo sapien; identical to SEQ ID NO: 107716

SEQ ID NO: 107719 - DNA, 33 bp, Homo sapien
ttaaatgtgagatggacatcaagcaaagaattt

SEQ ID NO: 107720 - DNA, 33 bp, Homo sapien
ttaaatgtgagatggatatcaagcaaagaattt

SEQ ID NO: 107721 - DNA, 33 bp, Homo sapien
gtgctggtttgcgcaacaggtagtagggactca

SEQ ID NO: 107722 - DNA, 33 bp, Homo sapien
gtgctggtttgcgcaataggtagtagggactca

SEQ ID NO: 107723 - DNA, 33 bp, Homo sapien
catgcataaaacaaccaaaggaatatctattaa

SEQ ID NO: 107724 - DNA, 33 bp, Homo sapien
catgcataaaacaaccgaaggaatatctattaa

SEQ ID NO: 107725 - DNA, 33 bp, Homo sapien
tgaatgagacaaggcaggaagctagaacaccac

SEQ ID NO: 107726 - DNA, 33 bp, Homo sapien
tgaatgagacaaggcatgaagctagaacaccac

SEQ ID NO: 107727 - DNA, 33 bp, Homo sapien
ttgcagagcggtgctgaaatccaacacctgtgt

SEQ ID NO: 107728 - DNA, 33 bp, Homo sapien
ttgcagagcggtgctggaatccaacacctgtgt

SEQ ID NO: 107729 - DNA, 33 bp, Homo sapien
atgacagtagactgaacgaatctctgtagttcc

SEQ ID NO: 107730 - DNA, 33 bp, Homo sapien
atgacagtagactgaatgaatctctgtagttcc

SEQ ID NO: 107731 - DNA, 33 bp, Homo sapien
agtctgtcttatttcacggcaatctgctcttgt

SEQ ID NO: 107732 - DNA, 33 bp, Homo sapien
agtctgtcttatttcatggcaatctgctcttgt

SEQ ID NO: 107733 - DNA, 33 bp, Homo sapien
gttgaagtcctgacctcagaaactcatctttat

SEQ ID NO: 107734 - DNA, 33 bp, Homo sapien
gttgaagtcctgaccttagaaactcatctttat

SEQ ID NO: 107735 - DNA, 33 bp, Homo sapien
agatcagatgcacagcaagtgacattcatgaca

SEQ ID NO: 107736 - DNA, 33 bp, Homo sapien
agatcagatgcacagcgagtgacattcatgaca

SEQ ID NO: 107737 - DNA, 33 bp, Homo sapien
accagagctcagtaaaatctatttgtcggctgt

SEQ ID NO: 107738 - DNA, 33 bp, Homo sapien
accagagctcagtaaactctatttgtcggctgt

SEQ ID NO: 107739 - DNA, 33 bp, Homo sapien
ctgttctgatgataaaaaagttggagtgctgta

SEQ ID NO: 107740 - DNA, 33 bp, Homo sapien
ctgttctgatgataaagaagttggagtgctgta

SEQ ID NO: 107741 - DNA, 33 bp, Homo sapien
ctctggagttcctggcagataaggtggtctgta

SEQ ID NO: 107742 - DNA, 33 bp, Homo sapien
ctctggagttcctggcggataaggtggtctgta

SEQ ID NO: 107743 - DNA, 33 bp, Homo sapien
cgtgcataacagaccaagatgaagcccagtggg

SEQ ID NO: 107744 - DNA, 33 bp, Homo sapien
cgtgcataacagaccaggatgaagcccagtggg

SEQ ID NO: 107745 - DNA, 33 bp, Homo sapien
acaggggcagatgctccgactcctccagggggg

SEQ ID NO: 107746 - DNA, 33 bp, Homo sapien
acaggggcagatgctctgactcctccagggggg

SEQ ID NO: 107747 - DNA, 33 bp, Homo sapien
gagtgatttattgaggaaacttttaagcaggcg

SEQ ID NO: 107748 - DNA, 33 bp, Homo sapien
gagtgatttattgagggaacttttaagcaggcg

SEQ ID NO: 107749 - DNA, 33 bp, Homo sapien
cataggctttggaagacaactgattgggtttca

SEQ ID NO: 107750 - DNA, 33 bp, Homo sapien
cataggctttggaagataactgattgggtttca

SEQ ID NO: 107751 - DNA, 33 bp, Homo sapien
ataacatggaacagtacgacatgaaaagagaga

SEQ ID NO: 107752 - DNA, 33 bp, Homo sapien
ataacatggaacagtatgacatgaaaagagaga

SEQ ID NO: 107753 - DNA, 33 bp, Homo sapien
gagcagagactcatcaccttcaagtttagtggg

SEQ ID NO: 107754 - DNA, 33 bp, Homo sapien
gagcagagactcatcagcttcaagtttagtggg

SEQ ID NO: 107755 - DNA, 33 bp, Homo sapien
cacactggaacagaagcccaggaggtgagactg

SEQ ID NO: 107756 - DNA, 33 bp, Homo sapien
cacactggaacagaagtccaggaggtgagactg

SEQ ID NO: 107757 - DNA, 33 bp, Homo sapien
ttggaataatactgtaagttgtctttcatattg

SEQ ID NO: 107758 - DNA, 33 bp, Homo sapien
ttggaataatactgtatgttgtctttcatattg

SEQ ID NO: 107759 - DNA, 33 bp, Homo sapien
cattgctcccatcgacaggcatatggtactaga

SEQ ID NO: 107760 - DNA, 33 bp, Homo sapien
cattgctcccatcgacgggcatatggtactaga

SEQ ID NO: 107761 - DNA, 33 bp, Homo sapien
ctacatgatacagcacacagaaaggcattttgt

SEQ ID NO: 107762 - DNA, 33 bp, Homo sapien
ctacatgatacagcactcagaaaggcattttgt

SEQ ID NO: 107763 - DNA, 33 bp, Homo sapien
catcatgctggcttccagactctgctcccaagt

SEQ ID NO: 107764 - DNA, 33 bp, Homo sapien
catcatgctggcttccggactctgctcccaagt

SEQ ID NO: 107765 - DNA, 33 bp, Homo sapien
tttgaattgtcagagccagagggtcggtttagc

SEQ ID NO: 107766 - DNA, 33 bp, Homo sapien
tttgaattgtcagagctagagggtcggtttagc

SEQ ID NO: 107767 - DNA, 33 bp, Homo sapien
ccatgatcattcaacactgtaccaaaagtccta

SEQ ID NO: 107768 - DNA, 33 bp, Homo sapien
ccatgatcattcaacattgtaccaaaagtccta

SEQ ID NO: 107769 - DNA, 33 bp, Homo sapien
tgacaatgataacaaacgactgttagcagttta

SEQ ID NO: 107770 - DNA, 33 bp, Homo sapien
tgacaatgataacaaatgactgttagcagttta

SEQ ID NO: 107771 - DNA, 33 bp, Homo sapien
tatcagttcaactacaacaaaggtttctgaaga

SEQ ID NO: 107772 - DNA, 33 bp, Homo sapien
tatcagttcaactacaccaaaggtttctgaaga

SEQ ID NO: 107773 - DNA, 33 bp, Homo sapien
ctagtgaactgttatacagtaattgcgcatcac

SEQ ID NO: 107774 - DNA, 33 bp, Homo sapien
ctagtgaactgttatatagtaattgcgcatcac

SEQ ID NO: 107775 - DNA, 33 bp, Homo sapien
aacagcaacaatagcaatatttctgtaccactc

SEQ ID NO: 107776 - DNA, 33 bp, Homo sapien
aacagcaacaatagcactatttctgtaccactc

SEQ ID NO: 107777 - DNA, 33 bp, Homo sapien
ttctctaggaatacgcaaaaatatatgtacttt

SEQ ID NO: 107778 - DNA, 33 bp, Homo sapien
ttctctaggaatacgccaaaatatatgtacttt

SEQ ID NO: 107779 - DNA, 33 bp, Homo sapien
aagcaacgatgatagaactatggcaaggctaca

SEQ ID NO: 107780 - DNA, 33 bp, Homo sapien
aagcaacgatgatagagctatggcaaggctaca

SEQ ID NO: 107781 - DNA, 33 bp, Homo sapien; identical to SEQ ID NO: 107779

SEQ ID NO: 107782 - DNA, 33 bp, Homo sapien; identical to SEQ ID NO: 107780

SEQ ID NO: 107783 - DNA, 33 bp, Homo sapien
atgctgtttttagaatcagcctgactgtatatt

SEQ ID NO: 107784 - DNA, 33 bp, Homo sapien
atgctgtttttagaatgagcctgactgtatatt

SEQ ID NO: 107785 - DNA, 33 bp, Homo sapien
aggcaatggctcagaactgaaagcaagtctgca

SEQ ID NO: 107786 - DNA, 33 bp, Homo sapien
aggcaatggctcagaagtgaaagcaagtctgca

SEQ ID NO: 107787 - DNA, 33 bp, Homo sapien; identical to SEQ ID NO: 107785

SEQ ID NO: 107788 - DNA, 33 bp, Homo sapien; identical to SEQ ID NO: 107786

SEQ ID NO: 107789 - DNA, 33 bp, Homo sapien
gctgggatccaagagacgcacactgatacaact

SEQ ID NO: 107790 - DNA, 33 bp, Homo sapien
gctgggatccaagagaggcacactgatacaact

SEQ ID NO: 107791 - DNA, 33 bp, Homo sapien
ctgccttgctgtgttacagtctgattgtgtatt

SEQ ID NO: 107792 - DNA, 33 bp, Homo sapien
ctgccttgctgtgttatagtctgattgtgtatt

SEQ ID NO: 107793 - DNA, 33 bp, Homo sapien
ctttgattgtgttataaaacctgcagtcattat

SEQ ID NO: 107794 - DNA, 33 bp, Homo sapien
ctttgattgtgttatacaacctgcagtcattat

SEQ ID NO: 107795 - DNA, 33 bp, Homo sapien; identical to SEQ ID NO: 107793

SEQ ID NO: 107796 - DNA, 33 bp, Homo sapien; identical to SEQ ID NO: 107794

SEQ ID NO: 107797 - DNA, 33 bp, Homo sapien
ttatttggtagaaaaactaggttggagagtatg

SEQ ID NO: 107798 - DNA, 33 bp, Homo sapien
ttatttggtagaaaaagtaggttggagagtatg

SEQ ID NO: 107799 - DNA, 33 bp, Homo sapien
ccctcaagagtgggagaaagggaaggttacaat

SEQ ID NO: 107800 - DNA, 33 bp, Homo sapien
ccctcaagagtgggaggaagggaaggttacaat

SEQ ID NO: 107801 - DNA, 33 bp, Homo sapien
ccacacactgggtgacaaaaaaacagacatttt

SEQ ID NO: 107802 - DNA, 33 bp, Homo sapien
ccacacactgggtgaccaaaaaacagacatttt

SEQ ID NO: 107803 - DNA, 33 bp, Homo sapien
caggagcaggagtgaaagaagcaggtgacaggg

SEQ ID NO: 107804 - DNA, 33 bp, Homo sapien
caggagcaggagtgaaggaagcaggtgacaggg

SEQ ID NO: 107805 - DNA, 33 bp, Homo sapien
atggtgtaagtccaaaagctatgacctgaaagt

SEQ ID NO: 107806 - DNA, 33 bp, Homo sapien
atggtgtaagtccaaatgctatgacctgaaagt

SEQ ID NO: 107807 - DNA, 33 bp, Homo sapien
tgtgtgggttgtggacacgtcatggtctccttg

SEQ ID NO: 107808 - DNA, 33 bp, Homo sapien
tgtgtgggttgtggacccgtcatggtctccttg

SEQ ID NO: 107809 - DNA, 33 bp, Homo sapien
tctcagttcccctgacacacttggaatagtatg

SEQ ID NO: 107810 - DNA, 33 bp, Homo sapien
tctcagttcccctgactcacttggaatagtatg

SEQ ID NO: 107811 - DNA, 33 bp, Homo sapien
ggaggggttccttcagactctagtgatgacctg

SEQ ID NO: 107812 - DNA, 33 bp, Homo sapien
ggaggggttccttcaggctctagtgatgacctg

SEQ ID NO: 107813 - DNA, 33 bp, Homo sapien
tctagcacagagtagaagcttaggatgtatcaa

SEQ ID NO: 107814 - DNA, 33 bp, Homo sapien
tctagcacagagtagaggcttaggatgtatcaa

SEQ ID NO: 107815 - DNA, 33 bp, Homo sapien
tcctgcaaacggatagccatttattttcccatt

SEQ ID NO: 107816 - DNA, 33 bp, Homo sapien
tcctgcaaacggataggcatttattttcccatt

SEQ ID NO: 107817 - DNA, 33 bp, Homo sapien
aaattgatgaagccagacctcccattgcaggaa

SEQ ID NO: 107818 - DNA, 33 bp, Homo sapien
aaattgatgaagccaggcctcccattgcaggaa

SEQ ID NO: 107819 - DNA, 33 bp, Homo sapien
gcaatgagtgtctttcggaaaatgtgaattctc

SEQ ID NO: 107820 - DNA, 33 bp, Homo sapien
gcaatgagtgtctttctgaaaatgtgaattctc

SEQ ID NO: 107821 - DNA, 33 bp, Homo sapien
cagggagcagtggcaacatcctggagggaggcc

SEQ ID NO: 107822 - DNA, 33 bp, Homo sapien
cagggagcagtggcaatatcctggagggaggcc

SEQ ID NO: 107823 - DNA, 33 bp, Homo sapien
acctagctcaagtgtcaaatgtctcccctgcct

SEQ ID NO: 107824 - DNA, 33 bp, Homo sapien
acctagctcaagtgtcgaatgtctcccctgcct

SEQ ID NO: 107825 - DNA, 33 bp, Homo sapien
gggacaggcacatctacaaggacatggcatttc

SEQ ID NO: 107826 - DNA, 33 bp, Homo sapien
gggacaggcacatctagaaggacatggcatttc

SEQ ID NO: 107827 - DNA, 33 bp, Homo sapien
cacttctccacagttaggcccaaaacagattcc

SEQ ID NO: 107828 - DNA, 33 bp, Homo sapien
cacttctccacagttatgcccaaaacagattcc

SEQ ID NO: 107829 - DNA, 33 bp, Homo sapien
gaagaaatcatagagacactacattacttcata

SEQ ID NO: 107830 - DNA, 33 bp, Homo sapien
gaagaaatcatagagagactacattacttcata

SEQ ID NO: 107831 - DNA, 33 bp, Homo sapien
tataaaagctcagtaagacacaagaggacataa

SEQ ID NO: 107832 - DNA, 33 bp, Homo sapien
tataaaagctcagtaatacacaagaggacataa

SEQ ID NO: 107833 - DNA, 33 bp, Homo sapien
ttatttcttgtgcagtcaatctgtccaggttgg

SEQ ID NO: 107834 - DNA, 33 bp, Homo sapien
ttatttcttgtgcagtgaatctgtccaggttgg

SEQ ID NO: 107835 - DNA, 33 bp, Homo sapien; identical to SEQ ID NO: 107833

SEQ ID NO: 107836 - DNA, 33 bp, Homo sapien; identical to SEQ ID NO: 107834

SEQ ID NO: 107837 - DNA, 33 bp, Homo sapien
tgaaatcatccttggcaaaaacgtcgataccac

SEQ ID NO: 107838 - DNA, 33 bp, Homo sapien
tgaaatcatccttggcgaaaacgtcgataccac

SEQ ID NO: 107839 - DNA, 33 bp, Homo sapien
tatctgtgaacaatgacattggtttggttccat

SEQ ID NO: 107840 - DNA, 33 bp, Homo sapien
tatctgtgaacaatgatattggtttggttccat

SEQ ID NO: 107841 - DNA, 33 bp, Homo sapien
actcacatcaataacacagccaaataaatacaa

SEQ ID NO: 107842 - DNA, 33 bp, Homo sapien
actcacatcaataacatagccaaataaatacaa

SEQ ID NO: 107843 - DNA, 33 bp, Homo sapien
gtctatcttgagtccactattaagttcaatttt

SEQ ID NO: 107844 - DNA, 33 bp, Homo sapien
gtctatcttgagtccattattaagttcaatttt

SEQ ID NO: 107845 - DNA, 33 bp, Homo sapien
aaagcaagaaaagacaggtgtgagaagttctca

SEQ ID NO: 107846 - DNA, 33 bp, Homo sapien
aaagcaagaaaagacatgtgtgagaagttctca

SEQ ID NO: 107847 - DNA, 33 bp, Homo sapien; identical to SEQ ID NO: 107845

SEQ ID NO: 107848 - DNA, 33 bp, Homo sapien; identical to SEQ ID NO: 107846

SEQ ID NO: 107849 - DNA, 33 bp, Homo sapien
agacactcacattcacacccatgtgggccacac

SEQ ID NO: 107850 - DNA, 33 bp, Homo sapien
agacactcacattcacgcccatgtgggccacac

SEQ ID NO: 107851 - DNA, 33 bp, Homo sapien
acacactagacaccacacaccaggtacccttcc

SEQ ID NO: 107852 - DNA, 33 bp, Homo sapien
acacactagacaccacgcaccaggtacccttcc

SEQ ID NO: 107853 - DNA, 33 bp, Homo sapien
aaatgctgataaatacaaactgaactcacttct

SEQ ID NO: 107854 - DNA, 33 bp, Homo sapien
aaatgctgataaatacgaactgaactcacttct

SEQ ID NO: 107855 - DNA, 33 bp, Homo sapien
ttctcccaatacaggaacttttggaggtcactt

SEQ ID NO: 107856 - DNA, 33 bp, Homo sapien
ttctcccaatacaggagcttttggaggtcactt

SEQ ID NO: 107857 - DNA, 33 bp, Homo sapien
ctcttgtggcccctccaaaggtcctgtgcctcc

SEQ ID NO: 107858 - DNA, 33 bp, Homo sapien
ctcttgtggcccctccgaaggtcctgtgcctcc

SEQ ID NO: 107859 - DNA, 33 bp, Homo sapien
tcctcagaacctgtgaacataataaaatgggcc

SEQ ID NO: 107860 - DNA, 33 bp, Homo sapien
tcctcagaacctgtgagcataataaaatgggcc

SEQ ID NO: 107861 - DNA, 33 bp, Homo sapien
agtgcccaatccttcaagtcatgttgggctgct

SEQ ID NO: 107862 - DNA, 33 bp, Homo sapien
agtgcccaatccttcatgtcatgttgggctgct

SEQ ID NO: 107863 - DNA, 33 bp, Homo sapien
tgtatttcacctctaacggaagaaattcttaag

SEQ ID NO: 107864 - DNA, 33 bp, Homo sapien
tgtatttcacctctaatggaagaaattcttaag

SEQ ID NO: 107865 - DNA, 33 bp, Homo sapien
catacagaccatgttccctgattataatgcgat

SEQ ID NO: 107866 - DNA, 33 bp, Homo sapien
catacagaccatgttctctgattataatgcgat

SEQ ID NO: 107867 - DNA, 33 bp, Homo sapien
agtggagttcaagaaacgacggtgagcaaagaa

SEQ ID NO: 107868 - DNA, 33 bp, Homo sapien
agtggagttcaagaaatgacggtgagcaaagaa

SEQ ID NO: 107869 - DNA, 33 bp, Homo sapien
gttttttcacgcaaataacttctattttactgg

SEQ ID NO: 107870 - DNA, 33 bp, Homo sapien
gttttttcacgcaaatgacttctattttactgg

SEQ ID NO: 107871 - DNA, 33 bp, Homo sapien
gcttcctgtgctgcacactttccagcatcgcag

SEQ ID NO: 107872 - DNA, 33 bp, Homo sapien
gcttcctgtgctgcactctttccagcatcgcag

SEQ ID NO: 107873 - DNA, 33 bp, Homo sapien
agttgtatctccttgacgctttcattggcattt

SEQ ID NO: 107874 - DNA, 33 bp, Homo sapien
agttgtatctccttgaggctttcattggcattt

SEQ ID NO: 107875 - DNA, 33 bp, Homo sapien
tttgctacttcctgtaccagggtaaagatagag

SEQ ID NO: 107876 - DNA, 33 bp, Homo sapien
tttgctacttcctgtatcagggtaaagatagag

SEQ ID NO: 107877 - DNA, 33 bp, Homo sapien
aatgaacacaaacacacctctatccaccactgg

SEQ ID NO: 107878 - DNA, 33 bp, Homo sapien
aatgaacacaaacacatctctatccaccactgg

SEQ ID NO: 107879 - DNA, 33 bp, Homo sapien
tttctgcagtgtcacaccttcaaggcgggctgt

SEQ ID NO: 107880 - DNA, 33 bp, Homo sapien
tttctgcagtgtcacatcttcaaggcgggctgt

SEQ ID NO: 107881 - DNA, 33 bp, Homo sapien
ccagatgaagatttgacctagtggacacataga

SEQ ID NO: 107882 - DNA, 33 bp, Homo sapien
ccagatgaagatttgatctagtggacacataga

SEQ ID NO: 107883 - DNA, 33 bp, Homo sapien
ttgaatcctcaaagcaaccttacagaaagtctt

SEQ ID NO: 107884 - DNA, 33 bp, Homo sapien
ttgaatcctcaaagcagccttacagaaagtctt

SEQ ID NO: 107885 - DNA, 33 bp, Homo sapien
gtccctggagtgttggccaccactgaacacgcc

SEQ ID NO: 107886 - DNA, 33 bp, Homo sapien
gtccctggagtgttggtcaccactgaacacgcc

SEQ ID NO: 107887 - DNA, 33 bp, Homo sapien
agtcctggtgggcaccaagctgggaaggacacc

SEQ ID NO: 107888 - DNA, 33 bp, Homo sapien
agtcctggtgggcaccgagctgggaaggacacc

SEQ ID NO: 107889 - DNA, 33 bp, Homo sapien
aaagagaaaatcttaaaaatttggtcctcccta

SEQ ID NO: 107890 - DNA, 33 bp, Homo sapien
aaagagaaaatcttaacaatttggtcctcccta

SEQ ID NO: 107891 - DNA, 33 bp, Homo sapien
tggagcaagtcgctgaaattgtctcattcccaa

SEQ ID NO: 107892 - DNA, 33 bp, Homo sapien
tggagcaagtcgctgagattgtctcattcccaa

SEQ ID NO: 107893 - DNA, 33 bp, Homo sapien
atatgcttaaacttggaaggctttaatgcatta

SEQ ID NO: 107894 - DNA, 33 bp, Homo sapien
atatgcttaaacttggtaggctttaatgcatta

SEQ ID NO: 107895 - DNA, 33 bp, Homo sapien
aggccctggcatctccaaatgaagccagctgtg

SEQ ID NO: 107896 - DNA, 33 bp, Homo sapien
aggccctggcatctccgaatgaagccagctgtg

SEQ ID NO: 107897 - DNA, 33 bp, Homo sapien
atccaatagaaatacaaccaactggtcgggccc

SEQ ID NO: 107898 - DNA, 33 bp, Homo sapien
atccaatagaaatacagccaactggtcgggccc

SEQ ID NO: 107899 - DNA, 33 bp, Homo sapien
ggcctcatgggaaactcaaaggctcaggaggat

SEQ ID NO: 107900 - DNA, 33 bp, Homo sapien
ggcctcatgggaaactgaaaggctcaggaggat

SEQ ID NO: 107901 - DNA, 33 bp, Homo sapien
ttcaacagggctggccacggaagaaacaaaggg

SEQ ID NO: 107902 - DNA, 33 bp, Homo sapien
ttcaacagggctggccgcggaagaaacaaaggg

SEQ ID NO: 107903 - DNA, 33 bp, Homo sapien
agcagttaggaaagtagcatctctgaagtcaca

SEQ ID NO: 107904 - DNA, 33 bp, Homo sapien
agcagttaggaaagtatcatctctgaagtcaca

SEQ ID NO: 107905 - DNA, 33 bp, Homo sapien
ccctgtcagcttctgcacggtctctgattttct

SEQ ID NO: 107906 - DNA, 33 bp, Homo sapien
ccctgtcagcttctgcgcggtctctgattttct

SEQ ID NO: 107907 - DNA, 33 bp, Homo sapien
gttcttggcatgaccacgagagaagcgtgctcg

SEQ ID NO: 107908 - DNA, 33 bp, Homo sapien
gttcttggcatgaccatgagagaagcgtgctcg

SEQ ID NO: 107909 - DNA, 33 bp, Homo sapien
tggatttctacagccactcagttgcaagcagca

SEQ ID NO: 107910 - DNA, 33 bp, Homo sapien
tggatttctacagccagtcagttgcaagcagca

SEQ ID NO: 107911 - DNA, 33 bp, Homo sapien
tgcagtccttatcggcgatcactggctctgcct

SEQ ID NO: 107912 - DNA, 33 bp, Homo sapien
tgcagtccttatcggctatcactggctctgcct

SEQ ID NO: 107913 - DNA, 33 bp, Homo sapien
cttgctggcaggttccaattctgcaaggagcag

SEQ ID NO: 107914 - DNA, 33 bp, Homo sapien
cttgctggcaggttccgattctgcaaggagcag

SEQ ID NO: 107915 - DNA, 33 bp, Homo sapien
caagtgctccatgggtaaattaagtccaaagga

SEQ ID NO: 107916 - DNA, 33 bp, Homo sapien
caagtgctccatgggtcaattaagtccaaagga

SEQ ID NO: 107917 - DNA, 33 bp, Homo sapien
agctttgcaaatgttacgtataccttgacctag

SEQ ID NO: 107918 - DNA, 33 bp, Homo sapien
agctttgcaaatgttatgtataccttgacctag

SEQ ID NO: 107919 - DNA, 33 bp, Homo sapien
ccctccatgaaggaacactgaggtcaatgtcac

SEQ ID NO: 107920 - DNA, 33 bp, Homo sapien
ccctccatgaaggaacgctgaggtcaatgtcac

SEQ ID NO: 107921 - DNA, 33 bp, Homo sapien
atgtgacaaacataaacagtaccattgagagct

SEQ ID NO: 107922 - DNA, 33 bp, Homo sapien
atgtgacaaacataaatagtaccattgagagct

SEQ ID NO: 107923 - DNA, 33 bp, Homo sapien
ggcaactcctggaggcaaagccattgaaactgg

SEQ ID NO: 107924 - DNA, 33 bp, Homo sapien
ggcaactcctggaggcgaagccattgaaactgg

SEQ ID NO: 107925 - DNA, 33 bp, Homo sapien
tccattcctctaggtggatgcctattctgtggc

SEQ ID NO: 107926 - DNA, 33 bp, Homo sapien
tccattcctctaggtgtatgcctattctgtggc

SEQ ID NO: 107927 - DNA, 33 bp, Homo sapien
tgtgacaggctggacactgacatttcctagggg

SEQ ID NO: 107928 - DNA, 33 bp, Homo sapien
tgtgacaggctggacattgacatttcctagggg

SEQ ID NO: 107929 - DNA, 33 bp, Homo sapien
agtatgtgaacaatcccagttgaattatgcctt

SEQ ID NO: 107930 - DNA, 33 bp, Homo sapien
agtatgtgaacaatcctagttgaattatgcctt

SEQ ID NO: 107931 - DNA, 33 bp, Homo sapien
agccacatggaggtagaacttatacccttttgc

SEQ ID NO: 107932 - DNA, 33 bp, Homo sapien
agccacatggaggtaggacttatacccttttgc

SEQ ID NO: 107933 - DNA, 33 bp, Homo sapien
cgagcccaagccataacagagaagcattgaaga

SEQ ID NO: 107934 - DNA, 33 bp, Homo sapien
cgagcccaagccataagagagaagcattgaaga

SEQ ID NO: 107935 - DNA, 33 bp, Homo sapien
tttcacttctaatagacaatttgcttttgagac

SEQ ID NO: 107936 - DNA, 33 bp, Homo sapien
tttcacttctaatagagaatttgcttttgagac

SEQ ID NO: 107937 - DNA, 33 bp, Homo sapien
cattgctggacatacaaagactaccccatacac

SEQ ID NO: 107938 - DNA, 33 bp, Homo sapien
cattgctggacatacacagactaccccatacac

SEQ ID NO: 107939 - DNA, 33 bp, Homo sapien
agaacactgttcactcaaatcagcaagttcaag

SEQ ID NO: 107940 - DNA, 33 bp, Homo sapien
agaacactgttcactccaatcagcaagttcaag

SEQ ID NO: 107941 - DNA, 33 bp, Homo sapien
cggctcagattactgaccgagacaatgttctgt

SEQ ID NO: 107942 - DNA, 33 bp, Homo sapien
cggctcagattactgatcgagacaatgttctgt

SEQ ID NO: 107943 - DNA, 33 bp, Homo sapien
tcactcaaagtgttcacgtatagaaactggctc

SEQ ID NO: 107944 - DNA, 33 bp, Homo sapien
tcactcaaagtgttcatgtatagaaactggctc

SEQ ID NO: 107945 - DNA, 33 bp, Homo sapien
ccacctctttatcctcccctctgctgcctcagt

SEQ ID NO: 107946 - DNA, 33 bp, Homo sapien
ccacctctttatcctctcctctgctgcctcagt

SEQ ID NO: 107947 - DNA, 33 bp, Homo sapien
aaaccctaactaggcacataaaagctgcctgcc

SEQ ID NO: 107948 - DNA, 33 bp, Homo sapien
aaaccctaactaggcatataaaagctgcctgcc

SEQ ID NO: 107949 - DNA, 33 bp, Homo sapien
ggagactgaggagacacggggctacagctgctc

SEQ ID NO: 107950 - DNA, 33 bp, Homo sapien
ggagactgaggagacatggggctacagctgctc

SEQ ID NO: 107951 - DNA, 33 bp, Homo sapien
aagggaatgcataaaccggcagtctcaacacta

SEQ ID NO: 107952 - DNA, 33 bp, Homo sapien
aagggaatgcataaactggcagtctcaacacta

SEQ ID NO: 107953 - DNA, 33 bp, Homo sapien
gtgtctgaagcagggcagagtccagtgagaatt

SEQ ID NO: 107954 - DNA, 33 bp, Homo sapien
gtgtctgaagcagggcggagtccagtgagaatt

SEQ ID NO: 107955 - DNA, 33 bp, Homo sapien
atagctgacttatttacagcagccccaaagtgt

SEQ ID NO: 107956 - DNA, 33 bp, Homo sapien
atagctgacttatttatagcagccccaaagtgt

SEQ ID NO: 107957 - DNA, 33 bp, Homo sapien
tactgtaacttcatcacacctatgtggttcaac

SEQ ID NO: 107958 - DNA, 33 bp, Homo sapien
tactgtaacttcatcagacctatgtggttcaac

SEQ ID NO: 107959 - DNA, 33 bp, Homo sapien
agcacctagatgacgcaatgaactaaggaaaac

SEQ ID NO: 107960 - DNA, 33 bp, Homo sapien
agcacctagatgacgcgatgaactaaggaaaac

SEQ ID NO: 107961 - DNA, 33 bp, Homo sapien
tgcaggtgaacatgaactgtcctgccttctgac

SEQ ID NO: 107962 - DNA, 33 bp, Homo sapien
tgcaggtgaacatgaagtgtcctgccttctgac

SEQ ID NO: 107963 - DNA, 33 bp, Homo sapien
catgggatcaaagccgccatgattgggcagtga

SEQ ID NO: 107964 - DNA, 33 bp, Homo sapien
catgggatcaaagccgtcatgattgggcagtga

SEQ ID NO: 107965 - DNA, 33 bp, Homo sapien
ctttttgaggtactgacgaactgttctccaaaa

SEQ ID NO: 107966 - DNA, 33 bp, Homo sapien
ctttttgaggtactgatgaactgttctccaaaa

SEQ ID NO: 107967 - DNA, 33 bp, Homo sapien
ttgtctgccccaatgacccagcaacgaggcagt

SEQ ID NO: 107968 - DNA, 33 bp, Homo sapien
ttgtctgccccaatgatccagcaacgaggcagt

SEQ ID NO: 107969 - DNA, 33 bp, Homo sapien
tggaggatgctccttggattgagttcagccata

SEQ ID NO: 107970 - DNA, 33 bp, Homo sapien
tggaggatgctccttgtattgagttcagccata

SEQ ID NO: 107971 - DNA, 33 bp, Homo sapien
aatgcgttagcattccagattaacagaggagaa

SEQ ID NO: 107972 - DNA, 33 bp, Homo sapien
aatgcgttagcattccggattaacagaggagaa

SEQ ID NO: 107973 - DNA, 33 bp, Homo sapien
cttgaagaatactccaactttcactctcagaag

SEQ ID NO: 107974 - DNA, 33 bp, Homo sapien
cttgaagaatactccagctttcactctcagaag

SEQ ID NO: 107975 - DNA, 33 bp, Homo sapien
agcttctcagtttgtcaacaatggaggagtttt

SEQ ID NO: 107976 - DNA, 33 bp, Homo sapien
agcttctcagtttgtccacaatggaggagtttt

SEQ ID NO: 107977 - DNA, 33 bp, Homo sapien
gtgacctcccgacaaaacttcacaggatctcac

SEQ ID NO: 107978 - DNA, 33 bp, Homo sapien
gtgacctcccgacaaagcttcacaggatctcac

SEQ ID NO: 107979 - DNA, 33 bp, Homo sapien
aatccttgccccagagccatatatttgggcaat

SEQ ID NO: 107980 - DNA, 33 bp, Homo sapien
aatccttgccccagagtcatatatttgggcaat

SEQ ID NO: 107981 - DNA, 33 bp, Homo sapien
atttgccagcgagtaaacaagaggttagtgaga

SEQ ID NO: 107982 - DNA, 33 bp, Homo sapien
atttgccagcgagtaagcaagaggttagtgaga

SEQ ID NO: 107983 - DNA, 33 bp, Homo sapien
gatcaagctctgtttcaaccctgatataagagg

SEQ ID NO: 107984 - DNA, 33 bp, Homo sapien
gatcaagctctgtttcgaccctgatataagagg

SEQ ID NO: 107985 - DNA, 33 bp, Homo sapien
ggctccacagtgagttgaacaaggagaagtaaa

SEQ ID NO: 107986 - DNA, 33 bp, Homo sapien
ggctccacagtgagtttaacaaggagaagtaaa

SEQ ID NO: 107987 - DNA, 33 bp, Homo sapien
tctccatcaccacaaggctgtcttccctctgtg

SEQ ID NO: 107988 - DNA, 33 bp, Homo sapien
tctccatcaccacaagtctgtcttccctctgtg

SEQ ID NO: 107989 - DNA, 33 bp, Homo sapien
aggtacatttgagccacaattggtgaggaagca

SEQ ID NO: 107990 - DNA, 33 bp, Homo sapien
aggtacatttgagccataattggtgaggaagca

SEQ ID NO: 107991 - DNA, 33 bp, Homo sapien
gctgggcttccctatgccaagcgatggaaggca

SEQ ID NO: 107992 - DNA, 33 bp, Homo sapien
gctgggcttccctatgtcaagcgatggaaggca

SEQ ID NO: 107993 - DNA, 33 bp, Homo sapien
ctagcccaatgatgaccgaaggtgccaagaaag

SEQ ID NO: 107994 - DNA, 33 bp, Homo sapien
ctagcccaatgatgactgaaggtgccaagaaag

SEQ ID NO: 107995 - DNA, 33 bp, Homo sapien
ggtgtggtgacgtagaacaagttatttgacctc

SEQ ID NO: 107996 - DNA, 33 bp, Homo sapien
ggtgtggtgacgtagagcaagttatttgacctc

SEQ ID NO: 107997 - DNA, 33 bp, Homo sapien
gagctggaggatggacaaggttactgaacatct

SEQ ID NO: 107998 - DNA, 33 bp, Homo sapien
gagctggaggatggacgaggttactgaacatct

SEQ ID NO: 107999 - DNA, 33 bp, Homo sapien
tttgagccttcaatgaatcattatctttttgct

SEQ ID NO: 108000 - DNA, 33 bp, Homo sapien
tttgagccttcaatgagtcattatctttttgct

SEQ ID NO: 108001 - DNA, 33 bp, Homo sapien
caatttcttaagataacacatcagtgaagtttt

SEQ ID NO: 108002 - DNA, 33 bp, Homo sapien
caatttcttaagataagacatcagtgaagtttt

SEQ ID NO: 108003 - DNA, 33 bp, Homo sapien
ggttgaaatatcagcactatccgtttatatgaa

SEQ ID NO: 108004 - DNA, 33 bp, Homo sapien
ggttgaaatatcagcagtatccgtttatatgaa

SEQ ID NO: 108005 - DNA, 33 bp, Homo sapien
ttctccctgtcttgataaccactctgtatgtca

SEQ ID NO: 108006 - DNA, 33 bp, Homo sapien
ttctccctgtcttgatcaccactctgtatgtca

SEQ ID NO: 108007 - DNA, 33 bp, Homo sapien
tatgtcttgctccttagaagaactctgattgca

SEQ ID NO: 108008 - DNA, 33 bp, Homo sapien
tatgtcttgctccttataagaactctgattgca

SEQ ID NO: 108009 - DNA, 33 bp, Homo sapien
tctagttcctgatcccactttgctccctaaacc

SEQ ID NO: 108010 - DNA, 33 bp, Homo sapien
tctagttcctgatcccgctttgctccctaaacc

SEQ ID NO: 108011 - DNA, 33 bp, Homo sapien
taaaacctgccacaaaatgaatagcagataaat

SEQ ID NO: 108012 - DNA, 33 bp, Homo sapien
taaaacctgccacaaagtgaatagcagataaat

SEQ ID NO: 108013 - DNA, 33 bp, Homo sapien
ggctcctgcctctctacagacaccagcatggca

SEQ ID NO: 108014 - DNA, 33 bp, Homo sapien
ggctcctgcctctctatagacaccagcatggca

SEQ ID NO: 108015 - DNA, 33 bp, Homo sapien
atttcattcttggcaccattaggacgacaaagt

SEQ ID NO: 108016 - DNA, 33 bp, Homo sapien
atttcattcttggcactattaggacgacaaagt

SEQ ID NO: 108017 - DNA, 33 bp, Homo sapien
accttctgggacaatcaagtaagaagggaaagg

SEQ ID NO: 108018 - DNA, 33 bp, Homo sapien
accttctgggacaatcgagtaagaagggaaagg

SEQ ID NO: 108019 - DNA, 33 bp, Homo sapien
ggacaagccacaagaaaaggaaagaacacagaa

SEQ ID NO: 108020 - DNA, 33 bp, Homo sapien
ggacaagccacaagaagaggaaagaacacagaa

SEQ ID NO: 108021 - DNA, 33 bp, Homo sapien
ttaagtaaattataaacggctggacattggcac

SEQ ID NO: 108022 - DNA, 33 bp, Homo sapien
ttaagtaaattataaatggctggacattggcac

SEQ ID NO: 108023 - DNA, 33 bp, Homo sapien
cagagcctttggttcaatcacaaggatatgggg

SEQ ID NO: 108024 - DNA, 33 bp, Homo sapien
cagagcctttggttcagtcacaaggatatgggg

SEQ ID NO: 108025 - DNA, 33 bp, Homo sapien
gctgttatttacttctaaaaaccctgtcaccac

SEQ ID NO: 108026 - DNA, 33 bp, Homo sapien
gctgttatttacttctcaaaaccctgtcaccac

SEQ ID NO: 108027 - DNA, 33 bp, Homo sapien
caaagaaacaccttaagcatctgtgctgatgcc

SEQ ID NO: 108028 - DNA, 33 bp, Homo sapien
caaagaaacaccttaatcatctgtgctgatgcc

SEQ ID NO: 108029 - DNA, 33 bp, Homo sapien
aatccactattgctccaaagttgtcccaaaggg

SEQ ID NO: 108030 - DNA, 33 bp, Homo sapien
aatccactattgctcccaagttgtcccaaaggg

SEQ ID NO: 108031 - DNA, 33 bp, Homo sapien
attatcagctacaataaatgtcaagtccttcct

SEQ ID NO: 108032 - DNA, 33 bp, Homo sapien
attatcagctacaatagatgtcaagtccttcct

SEQ ID NO: 108033 - DNA, 33 bp, Homo sapien
ccattagagtctctagaacaatctaatcttgca

SEQ ID NO: 108034 - DNA, 33 bp, Homo sapien
ccattagagtctctaggacaatctaatcttgca

SEQ ID NO: 108035 - DNA, 33 bp, Homo sapien
ccactgccttgtggggaaggaaatggaaacttt

SEQ ID NO: 108036 - DNA, 33 bp, Homo sapien
ccactgccttgtgggggaggaaatggaaacttt

SEQ ID NO: 108037 - DNA, 33 bp, Homo sapien
cctccaaaactctgggaaacatgagcagaatgc

SEQ ID NO: 108038 - DNA, 33 bp, Homo sapien
cctccaaaactctgggcaacatgagcagaatgc

SEQ ID NO: 108039 - DNA, 33 bp, Homo sapien
aagaacctcaggtctcagacgggagcagtgaag

SEQ ID NO: 108040 - DNA, 33 bp, Homo sapien
aagaacctcaggtctcggacgggagcagtgaag

SEQ ID NO: 108041 - DNA, 33 bp, Homo sapien
tccactctaccaggccaatgcttatggtgaggg

SEQ ID NO: 108042 - DNA, 33 bp, Homo sapien
tccactctaccaggcccatgcttatggtgaggg

SEQ ID NO: 108043 - DNA, 33 bp, Homo sapien
tttctgatttcactgcaaaagtgcctgtgtgcc

SEQ ID NO: 108044 - DNA, 33 bp, Homo sapien
tttctgatttcactgcgaaagtgcctgtgtgcc

SEQ ID NO: 108045 - DNA, 33 bp, Homo sapien
caggtccttgagatgacgtaagtacagccaagt

SEQ ID NO: 108046 - DNA, 33 bp, Homo sapien
caggtccttgagatgatgtaagtacagccaagt

SEQ ID NO: 108047 - DNA, 33 bp, Homo sapien
aggccctggcaaccaccattagccttcctgtct
